United States Patent Application Publication US 2014/0004565 A1 - sequence listing, part 85

SEQ ID NO: 2093220 - RNA, 19 nt, Artificial Sequence
  Description of Artificial Sequence: Synthetic oligonucleotide
agccagagauagcaaaucc

SEQ ID NO: 2093221 - RNA, 19 nt, Artificial Sequence
  Description of Artificial Sequence: Synthetic oligonucleotide
acuagaaaugaauccagca

SEQ ID NO: 2093222 - RNA, 19 nt, Artificial Sequence
  Description of Artificial Sequence: Synthetic oligonucleotide
uugcauaaaauaugacucc

SEQ ID NO: 2093223 - RNA, 19 nt, Artificial Sequence
  Description of Artificial Sequence: Synthetic oligonucleotide
uguaguuguugaaagaauu

SEQ ID NO: 2093224 - RNA, 19 nt, Artificial Sequence
  Description of Artificial Sequence: Synthetic oligonucleotide
uccaguguaauaaguaagu

SEQ ID NO: 2093225 - RNA, 19 nt, Artificial Sequence
  Description of Artificial Sequence: Synthetic oligonucleotide
ugaaugaccccaauggaaa

SEQ ID NO: 2093226 - RNA, 19 nt, Artificial Sequence
  Description of Artificial Sequence: Synthetic oligonucleotide
gacuccaccauaguggacg

SEQ ID NO: 2093227 - RNA, 19 nt, Artificial Sequence
  Description of Artificial Sequence: Synthetic oligonucleotide
cauugcaccaacaaugauc

SEQ ID NO: 2093228 - RNA, 19 nt, Artificial Sequence
  Description of Artificial Sequence: Synthetic oligonucleotide
ugguuaacauugaagccag

SEQ ID NO: 2093229 - RNA, 19 nt, Artificial Sequence
  Description of Artificial Sequence: Synthetic oligonucleotide
accucuaaaucacaaacca

SEQ ID NO: 2093230 - RNA, 19 nt, Artificial Sequence
  Description of Artificial Sequence: Synthetic oligonucleotide
augaucaaguagcuuuggc

SEQ ID NO: 2093231 - RNA, 19 nt, Artificial Sequence
  Description of Artificial Sequence: Synthetic oligonucleotide
auaucuacuuauuucuaca

SEQ ID NO: 2093232 - RNA, 19 nt, Artificial Sequence
  Description of Artificial Sequence: Synthetic oligonucleotide
ugcccauuaagauacuggc

SEQ ID NO: 2093233 - RNA, 19 nt, Artificial Sequence
  Description of Artificial Sequence: Synthetic oligonucleotide
gauaggaacaaugauuguc

SEQ ID NO: 2093234 - RNA, 19 nt, Artificial Sequence
  Description of Artificial Sequence: Synthetic oligonucleotide
ugaaaugcccauuaagaua

SEQ ID NO: 2093235 - RNA, 19 nt, Artificial Sequence
  Description of Artificial Sequence: Synthetic oligonucleotide
aauccagcaacuagcuucg

SEQ ID NO: 2093236 - RNA, 19 nt, Artificial Sequence
  Description of Artificial Sequence: Synthetic oligonucleotide
ucuagugugagaguagcca

SEQ ID NO: 2093237 - RNA, 19 nt, Artificial Sequence
  Description of Artificial Sequence: Synthetic oligonucleotide
auaugacuccaccauagug

SEQ ID NO: 2093238 - RNA, 19 nt, Artificial Sequence
  Description of Artificial Sequence: Synthetic oligonucleotide
gugagaguagccaacaacc

SEQ ID NO: 2093239 - RNA, 19 nt, Artificial Sequence
  Description of Artificial Sequence: Synthetic oligonucleotide
uugaaaugcccauuaagau

SEQ ID NO: 2093240 - RNA, 19 nt, Artificial Sequence
  Description of Artificial Sequence: Synthetic oligonucleotide
auuucuacaguaaaccucu

SEQ ID NO: 2093241 - RNA, 19 nt, Artificial Sequence
  Description of Artificial Sequence: Synthetic oligonucleotide
guuaacauugaagccagag

SEQ ID NO: 2093242 - RNA, 19 nt, Artificial Sequence
  Description of Artificial Sequence: Synthetic oligonucleotide
ugauugucaugacaaggug

SEQ ID NO: 2093243 - RNA, 19 nt, Artificial Sequence
  Description of Artificial Sequence: Synthetic oligonucleotide
ggaacaaugauugucauga

SEQ ID NO: 2093244 - RNA, 19 nt, Artificial Sequence
  Description of Artificial Sequence: Synthetic oligonucleotide
aagguuguuucucuccuga

SEQ ID NO: 2093245 - RNA, 19 nt, Artificial Sequence
  Description of Artificial Sequence: Synthetic oligonucleotide
ugugccaacuauuuuaguu

SEQ ID NO: 2093246 - RNA, 19 nt, Artificial Sequence
  Description of Artificial Sequence: Synthetic oligonucleotide
uuuaguugugcucucuaau

SEQ ID NO: 2093247 - RNA, 19 nt, Artificial Sequence
  Description of Artificial Sequence: Synthetic oligonucleotide
aaauccacugaauccuacu

SEQ ID NO: 2093248 - RNA, 19 nt, Artificial Sequence
  Description of Artificial Sequence: Synthetic oligonucleotide
ccaacaaccaauagcaggg

SEQ ID NO: 2093249 - RNA, 19 nt, Artificial Sequence
  Description of Artificial Sequence: Synthetic oligonucleotide
cucuaaaucacaaaccaaa

SEQ ID NO: 2093250 - RNA, 19 nt, Artificial Sequence
  Description of Artificial Sequence: Synthetic oligonucleotide
ugacauacaugacaacuuc

SEQ ID NO: 2093251 - RNA, 19 nt, Artificial Sequence
  Description of Artificial Sequence: Synthetic oligonucleotide
uuucucccagccauuaggc

SEQ ID NO: 2093252 - RNA, 19 nt, Artificial Sequence
  Description of Artificial Sequence: Synthetic oligonucleotide
uacuuauuucuacaguaaa

SEQ ID NO: 2093253 - RNA, 19 nt, Artificial Sequence
  Description of Artificial Sequence: Synthetic oligonucleotide
acaaccaauagcagggugg

SEQ ID NO: 2093254 - RNA, 19 nt, Artificial Sequence
  Description of Artificial Sequence: Synthetic oligonucleotide
acaacuuccacagauugca

SEQ ID NO: 2093255 - RNA, 19 nt, Artificial Sequence
  Description of Artificial Sequence: Synthetic oligonucleotide
aauaugacuccaccauagu

SEQ ID NO: 2093256 - RNA, 19 nt, Artificial Sequence
  Description of Artificial Sequence: Synthetic oligonucleotide
ggaaaugacauacaugaca

SEQ ID NO: 2093257 - RNA, 19 nt, Artificial Sequence
  Description of Artificial Sequence: Synthetic oligonucleotide
uaucuuggagcaauaucca

SEQ ID NO: 2093258 - RNA, 19 nt, Artificial Sequence
  Description of Artificial Sequence: Synthetic oligonucleotide
uuacaguccaguguaauaa

SEQ ID NO: 2093259 - RNA, 19 nt, Artificial Sequence
  Description of Artificial Sequence: Synthetic oligonucleotide
uuugcuugcuucuuagaaa

SEQ ID NO: 2093260 - RNA, 19 nt, Artificial Sequence
  Description of Artificial Sequence: Synthetic oligonucleotide
ugugccaacgccauuugaa

SEQ ID NO: 2093261 - RNA, 19 nt, Artificial Sequence
  Description of Artificial Sequence: Synthetic oligonucleotide
gugccaacuauuuuaguug

SEQ ID NO: 2093262 - RNA, 19 nt, Artificial Sequence
  Description of Artificial Sequence: Synthetic oligonucleotide
uaguugugcucucuaaugu

SEQ ID NO: 2093263 - RNA, 19 nt, Artificial Sequence
  Description of Artificial Sequence: Synthetic oligonucleotide
caguaaaccucuaaaucac

SEQ ID NO: 2093264 - RNA, 19 nt, Artificial Sequence
  Description of Artificial Sequence: Synthetic oligonucleotide
uaccauaauuuauauaauu

SEQ ID NO: 2093265 - RNA, 19 nt, Artificial Sequence
  Description of Artificial Sequence: Synthetic oligonucleotide
gauacuggcauaucuugga

SEQ ID NO: 2093266 - RNA, 19 nt, Artificial Sequence
  Description of Artificial Sequence: Synthetic oligonucleotide
uaugaauaaucaucuuggu

SEQ ID NO: 2093267 - RNA, 19 nt, Artificial Sequence
  Description of Artificial Sequence: Synthetic oligonucleotide
ugagaguagccaacaacca

SEQ ID NO: 2093268 - RNA, 19 nt, Artificial Sequence
  Description of Artificial Sequence: Synthetic oligonucleotide
aagugcaguuugcaugauc

SEQ ID NO: 2093269 - RNA, 19 nt, Artificial Sequence
  Description of Artificial Sequence: Synthetic oligonucleotide
uccuacugcaagcaccaag

SEQ ID NO: 2093270 - RNA, 19 nt, Artificial Sequence
  Description of Artificial Sequence: Synthetic oligonucleotide
aaugaucgggcagaccauc

SEQ ID NO: 2093271 - RNA, 19 nt, Artificial Sequence
  Description of Artificial Sequence: Synthetic oligonucleotide
ugcauaaaauaugacucca

SEQ ID NO: 2093272 - RNA, 19 nt, Artificial Sequence
  Description of Artificial Sequence: Synthetic oligonucleotide
auaggaacaaugauuguca

SEQ ID NO: 2093273 - RNA, 19 nt, Artificial Sequence
  Description of Artificial Sequence: Synthetic oligonucleotide
auugucaugacaaggugug

SEQ ID NO: 2093274 - RNA, 19 nt, Artificial Sequence
  Description of Artificial Sequence: Synthetic oligonucleotide
aaccucugauccugcauag

SEQ ID NO: 2093275 - RNA, 19 nt, Artificial Sequence
  Description of Artificial Sequence: Synthetic oligonucleotide
auaaguaaguaagugcagu

SEQ ID NO: 2093276 - RNA, 19 nt, Artificial Sequence
  Description of Artificial Sequence: Synthetic oligonucleotide
ugcaguuugcaugaucaag

SEQ ID NO: 2093277 - RNA, 19 nt, Artificial Sequence
  Description of Artificial Sequence: Synthetic oligonucleotide
aauauccaagugguuaaca

SEQ ID NO: 2093278 - RNA, 19 nt, Artificial Sequence
  Description of Artificial Sequence: Synthetic oligonucleotide
agcgaugaggaagacguac

SEQ ID NO: 2093279 - RNA, 19 nt, Artificial Sequence
  Description of Artificial Sequence: Synthetic oligonucleotide
agcaaauccacugaauccu

SEQ ID NO: 2093280 - RNA, 19 nt, Artificial Sequence
  Description of Artificial Sequence: Synthetic oligonucleotide
gacgagugcagcgaugagg

SEQ ID NO: 2093281 - RNA, 19 nt, Artificial Sequence
  Description of Artificial Sequence: Synthetic oligonucleotide
aagccagagauagcaaauc

SEQ ID NO: 2093282 - RNA, 19 nt, Artificial Sequence
  Description of Artificial Sequence: Synthetic oligonucleotide
uccaacaaauaucuacuua

SEQ ID NO: 2093283 - RNA, 19 nt, Artificial Sequence
  Description of Artificial Sequence: Synthetic oligonucleotide
agugcaguuugcaugauca

SEQ ID NO: 2093284 - RNA, 19 nt, Artificial Sequence
  Description of Artificial Sequence: Synthetic oligonucleotide
auauccaagugguuaacau

SEQ ID NO: 2093285 - RNA, 19 nt, Artificial Sequence
  Description of Artificial Sequence: Synthetic oligonucleotide
aaguaagugcaguuugcau

SEQ ID NO: 2093286 - RNA, 19 nt, Artificial Sequence
  Description of Artificial Sequence: Synthetic oligonucleotide
accaacaaugaucgggcag

SEQ ID NO: 2093287 - RNA, 19 nt, Artificial Sequence
  Description of Artificial Sequence: Synthetic oligonucleotide
uacaguccaguguaauaag

SEQ ID NO: 2093288 - RNA, 19 nt, Artificial Sequence
  Description of Artificial Sequence: Synthetic oligonucleotide
cacugaauccuacugcaag

SEQ ID NO: 2093289 - RNA, 19 nt, Artificial Sequence
  Description of Artificial Sequence: Synthetic oligonucleotide
cuguaggaugacaugugcc

SEQ ID NO: 2093290 - RNA, 19 nt, Artificial Sequence
  Description of Artificial Sequence: Synthetic oligonucleotide
acuagcuucguuaugaaua

SEQ ID NO: 2093291 - RNA, 19 nt, Artificial Sequence
  Description of Artificial Sequence: Synthetic oligonucleotide
aaugaccccaauggaaaug

SEQ ID NO: 2093292 - RNA, 19 nt, Artificial Sequence
  Description of Artificial Sequence: Synthetic oligonucleotide
uaaguaaguaagugcaguu

SEQ ID NO: 2093293 - RNA, 19 nt, Artificial Sequence
  Description of Artificial Sequence: Synthetic oligonucleotide
aggaugaaugaccccaaug

SEQ ID NO: 2093294 - RNA, 19 nt, Artificial Sequence
  Description of Artificial Sequence: Synthetic oligonucleotide
aauggccaccccucuagug

SEQ ID NO: 2093295 - RNA, 19 nt, Artificial Sequence
  Description of Artificial Sequence: Synthetic oligonucleotide
gauggguccaacaaauauc

SEQ ID NO: 2093296 - RNA, 19 nt, Artificial Sequence
  Description of Artificial Sequence: Synthetic oligonucleotide
uaaguaagugcaguuugca

SEQ ID NO: 2093297 - RNA, 19 nt, Artificial Sequence
  Description of Artificial Sequence: Synthetic oligonucleotide
ucuucacgggacuuguucu

SEQ ID NO: 2093298 - RNA, 19 nt, Artificial Sequence
  Description of Artificial Sequence: Synthetic oligonucleotide
uuuuaguugugcucucuaa

SEQ ID NO: 2093299 - RNA, 19 nt, Artificial Sequence
  Description of Artificial Sequence: Synthetic oligonucleotide
ccgauaggaacaaugauug

SEQ ID NO: 2093300 - RNA, 19 nt, Artificial Sequence
  Description of Artificial Sequence: Synthetic oligonucleotide
ucucuccugaggcaaauau

SEQ ID NO: 2093301 - RNA, 19 nt, Artificial Sequence
  Description of Artificial Sequence: Synthetic oligonucleotide
uugucauugcaccaacaau

SEQ ID NO: 2093302 - RNA, 19 nt, Artificial Sequence
  Description of Artificial Sequence: Synthetic oligonucleotide
gugguuaacauugaagcca

SEQ ID NO: 2093303 - RNA, 19 nt, Artificial Sequence
  Description of Artificial Sequence: Synthetic oligonucleotide
augacaaggugugggaccg

SEQ ID NO: 2093304 - RNA, 19 nt, Artificial Sequence
  Description of Artificial Sequence: Synthetic oligonucleotide
cacuagaaaugaauccagc

SEQ ID NO: 2093305 - RNA, 19 nt, Artificial Sequence
  Description of Artificial Sequence: Synthetic oligonucleotide
gaggaagacguacugccac

SEQ ID NO: 2093306 - RNA, 19 nt, Artificial Sequence
  Description of Artificial Sequence: Synthetic oligonucleotide
ugccaacuauuuuaguugu

SEQ ID NO: 2093307 - RNA, 19 nt, Artificial Sequence
  Description of Artificial Sequence: Synthetic oligonucleotide
auauugcauaaaauaugac

SEQ ID NO: 2093308 - RNA, 19 nt, Artificial Sequence
  Description of Artificial Sequence: Synthetic oligonucleotide
gagauagcaaauccacuga

SEQ ID NO: 2093309 - RNA, 19 nt, Artificial Sequence
  Description of Artificial Sequence: Synthetic oligonucleotide
cauaagacuuggugguacc

SEQ ID NO: 2093310 - RNA, 19 nt, Artificial Sequence
  Description of Artificial Sequence: Synthetic oligonucleotide
ugcaucuugugcuccuucc

SEQ ID NO: 2093311 - RNA, 19 nt, Artificial Sequence
  Description of Artificial Sequence: Synthetic oligonucleotide
augauugucaugacaaggu

SEQ ID NO: 2093312 - RNA, 19 nt, Artificial Sequence
  Description of Artificial Sequence: Synthetic oligonucleotide
ugacaugugccaacuauuu

SEQ ID NO: 2093313 - RNA, 19 nt, Artificial Sequence
  Description of Artificial Sequence: Synthetic oligonucleotide
cacuugaugggaaucugug

SEQ ID NO: 2093314 - RNA, 19 nt, Artificial Sequence
  Description of Artificial Sequence: Synthetic oligonucleotide
auuaagauacuggcauauc

SEQ ID NO: 2093315 - RNA, 19 nt, Artificial Sequence
  Description of Artificial Sequence: Synthetic oligonucleotide
auugcacuugaugggaauc

SEQ ID NO: 2093316 - RNA, 19 nt, Artificial Sequence
  Description of Artificial Sequence: Synthetic oligonucleotide
agcaauauccaagugguua

SEQ ID NO: 2093317 - RNA, 19 nt, Artificial Sequence
  Description of Artificial Sequence: Synthetic oligonucleotide
caaugauugucaugacaag

SEQ ID NO: 2093318 - RNA, 19 nt, Artificial Sequence
  Description of Artificial Sequence: Synthetic oligonucleotide
aacuucuguaggaugacau

SEQ ID NO: 2093319 - RNA, 19 nt, Artificial Sequence
  Description of Artificial Sequence: Synthetic oligonucleotide
ugaaagaauuugcuugcuu

SEQ ID NO: 2093320 - RNA, 19 nt, Artificial Sequence
  Description of Artificial Sequence: Synthetic oligonucleotide
ggguccaacaaauaucuac

SEQ ID NO: 2093321 - RNA, 19 nt, Artificial Sequence
  Description of Artificial Sequence: Synthetic oligonucleotide
uggcuuccaugccaaaacc

SEQ ID NO: 2093322 - RNA, 19 nt, Artificial Sequence
  Description of Artificial Sequence: Synthetic oligonucleotide
ugaggaagacguacugcca

SEQ ID NO: 2093323 - RNA, 19 nt, Artificial Sequence
  Description of Artificial Sequence: Synthetic oligonucleotide
cagaccauccccgacagug

SEQ ID NO: 2093324 - RNA, 19 nt, Artificial Sequence
  Description of Artificial Sequence: Synthetic oligonucleotide
caucuucaugaaugaagcc

SEQ ID NO: 2093325 - RNA, 19 nt, Artificial Sequence
  Description of Artificial Sequence: Synthetic oligonucleotide
agcaugccaaccucugauc

SEQ ID NO: 2093326 - RNA, 19 nt, Artificial Sequence
  Description of Artificial Sequence: Synthetic oligonucleotide
guccaguguaauaaguaag

SEQ ID NO: 2093327 - RNA, 19 nt, Artificial Sequence
  Description of Artificial Sequence: Synthetic oligonucleotide
aaguaaguaagugcaguuu

SEQ ID NO: 2093328 - RNA, 19 nt, Artificial Sequence
  Description of Artificial Sequence: Synthetic oligonucleotide
gaucgggcagaccaucccc

SEQ ID NO: 2093329 - RNA, 19 nt, Artificial Sequence
  Description of Artificial Sequence: Synthetic oligonucleotide
agauagcaaauccacugaa

SEQ ID NO: 2093330 - RNA, 19 nt, Artificial Sequence
  Description of Artificial Sequence: Synthetic oligonucleotide
aagacuuggugguaccaua

SEQ ID NO: 2093331 - RNA, 19 nt, Artificial Sequence
  Description of Artificial Sequence: Synthetic oligonucleotide
guaaguaagugcaguuugc

SEQ ID NO: 2093332 - RNA, 19 nt, Artificial Sequence
  Description of Artificial Sequence: Synthetic oligonucleotide
aagacguacugccacucuu

SEQ ID NO: 2093333 - RNA, 19 nt, Artificial Sequence
  Description of Artificial Sequence: Synthetic oligonucleotide
acacuagaaaugaauccag

SEQ ID NO: 2093334 - RNA, 19 nt, Artificial Sequence
  Description of Artificial Sequence: Synthetic oligonucleotide
uuggugguaccauaauuua

SEQ ID NO: 2093335 - RNA, 19 nt, Artificial Sequence
  Description of Artificial Sequence: Synthetic oligonucleotide
uccaccauaguggacgagu

SEQ ID NO: 2093336 - RNA, 19 nt, Artificial Sequence
  Description of Artificial Sequence: Synthetic oligonucleotide
ugaucgggcagaccauccc

SEQ ID NO: 2093337 - RNA, 19 nt, Artificial Sequence
  Description of Artificial Sequence: Synthetic oligonucleotide
ugugcucucuaauguggug

SEQ ID NO: 2093338 - RNA, 19 nt, Artificial Sequence
  Description of Artificial Sequence: Synthetic oligonucleotide
uguaugcaucuugugcucc

SEQ ID NO: 2093339 - RNA, 19 nt, Artificial Sequence
  Description of Artificial Sequence: Synthetic oligonucleotide
gguccuuauagguguaugc

SEQ ID NO: 2093340 - RNA, 19 nt, Artificial Sequence
  Description of Artificial Sequence: Synthetic oligonucleotide
ugggaccgcagacagcaug

SEQ ID NO: 2093341 - RNA, 19 nt, Artificial Sequence
  Description of Artificial Sequence: Synthetic oligonucleotide
uguuucucuccugaggcaa

SEQ ID NO: 2093342 - RNA, 19 nt, Artificial Sequence
  Description of Artificial Sequence: Synthetic oligonucleotide
uggugguaccauaauuuau

SEQ ID NO: 2093343 - RNA, 19 nt, Artificial Sequence
  Description of Artificial Sequence: Synthetic oligonucleotide
uugugcucucuaauguggu

SEQ ID NO: 2093344 - RNA, 19 nt, Artificial Sequence
  Description of Artificial Sequence: Synthetic oligonucleotide
ugauccugcauaggcacca

SEQ ID NO: 2093345 - RNA, 19 nt, Artificial Sequence
  Description of Artificial Sequence: Synthetic oligonucleotide
ugcagcgaugaggaagacg

SEQ ID NO: 2093346 - RNA, 19 nt, Artificial Sequence
  Description of Artificial Sequence: Synthetic oligonucleotide
uauuuuaguugugcucucu

SEQ ID NO: 2093347 - RNA, 19 nt, Artificial Sequence
  Description of Artificial Sequence: Synthetic oligonucleotide
gaaucugugccuguuugga

SEQ ID NO: 2093348 - RNA, 19 nt, Artificial Sequence
  Description of Artificial Sequence: Synthetic oligonucleotide
caaccaauagcaggguggc

SEQ ID NO: 2093349 - RNA, 19 nt, Artificial Sequence
  Description of Artificial Sequence: Synthetic oligonucleotide
cucuucacgggacuuguuc

SEQ ID NO: 2093350 - RNA, 19 nt, Artificial Sequence
  Description of Artificial Sequence: Synthetic oligonucleotide
uggugauggguccaacaaa

SEQ ID NO: 2093351 - RNA, 19 nt, Artificial Sequence
  Description of Artificial Sequence: Synthetic oligonucleotide
auuuuaguugugcucucua

SEQ ID NO: 2093352 - RNA, 19 nt, Artificial Sequence
  Description of Artificial Sequence: Synthetic oligonucleotide
cccaauggaaaugacauac

SEQ ID NO: 2093353 - RNA, 19 nt, Artificial Sequence
  Description of Artificial Sequence: Synthetic oligonucleotide
cuccugaggcaaauauugc

SEQ ID NO: 2093354 - RNA, 19 nt, Artificial Sequence
  Description of Artificial Sequence: Synthetic oligonucleotide
caccccucuagugugagag

SEQ ID NO: 2093355 - RNA, 19 nt, Artificial Sequence
  Description of Artificial Sequence: Synthetic oligonucleotide
cauaguggacgagugcagc

SEQ ID NO: 2093356 - RNA, 19 nt, Artificial Sequence
  Description of Artificial Sequence: Synthetic oligonucleotide
caucuugugcuccuuccug

SEQ ID NO: 2093357 - RNA, 19 nt, Artificial Sequence
  Description of Artificial Sequence: Synthetic oligonucleotide
cucuagugugagaguagcc

SEQ ID NO: 2093358 - RNA, 19 nt, Artificial Sequence
  Description of Artificial Sequence: Synthetic oligonucleotide
cuagcuucguuaugaauaa

SEQ ID NO: 2093359 - RNA, 19 nt, Artificial Sequence
  Description of Artificial Sequence: Synthetic oligonucleotide
ccaacuauuuuaguugugc

SEQ ID NO: 2093360 - RNA, 19 nt, Artificial Sequence
  Description of Artificial Sequence: Synthetic oligonucleotide
agccauuaggccagccucc

SEQ ID NO: 2093361 - RNA, 19 nt, Artificial Sequence
  Description of Artificial Sequence: Synthetic oligonucleotide
uucaugaaugaagccacau

SEQ ID NO: 2093362 - RNA, 19 nt, Artificial Sequence
  Description of Artificial Sequence: Synthetic oligonucleotide
acgagugcagcgaugagga

SEQ ID NO: 2093363 - RNA, 19 nt, Artificial Sequence
  Description of Artificial Sequence: Synthetic oligonucleotide
uucucccagccauuaggcc

SEQ ID NO: 2093364 - RNA, 19 nt, Artificial Sequence
  Description of Artificial Sequence: Synthetic oligonucleotide
agugcagcgaugaggaaga

SEQ ID NO: 2093365 - RNA, 19 nt, Artificial Sequence
  Description of Artificial Sequence: Synthetic oligonucleotide
augaucgggcagaccaucc

SEQ ID NO: 2093366 - RNA, 19 nt, Artificial Sequence
  Description of Artificial Sequence: Synthetic oligonucleotide
uguuuccucagggucugcc

SEQ ID NO: 2093367 - RNA, 19 nt, Artificial Sequence
  Description of Artificial Sequence: Synthetic oligonucleotide
caugaucaaguagcuuugg

SEQ ID NO: 2093368 - RNA, 19 nt, Artificial Sequence
  Description of Artificial Sequence: Synthetic oligonucleotide
ucuccugugugguggcacc

SEQ ID NO: 2093369 - RNA, 19 nt, Artificial Sequence
  Description of Artificial Sequence: Synthetic oligonucleotide
guuuccucagggucugccc

SEQ ID NO: 2093370 - RNA, 19 nt, Artificial Sequence
  Description of Artificial Sequence: Synthetic oligonucleotide
uugucaugacaaggugugg

SEQ ID NO: 2093371 - RNA, 19 nt, Artificial Sequence
  Description of Artificial Sequence: Synthetic oligonucleotide
cauugaagccagagauagc

SEQ ID NO: 2093372 - RNA, 19 nt, Artificial Sequence
  Description of Artificial Sequence: Synthetic oligonucleotide
acgggacuuguucuuuguc

SEQ ID NO: 2093373 - RNA, 19 nt, Artificial Sequence
  Description of Artificial Sequence: Synthetic oligonucleotide
agugugagaguagccaaca

SEQ ID NO: 2093374 - RNA, 19 nt, Artificial Sequence
  Description of Artificial Sequence: Synthetic oligonucleotide
gauugucaugacaaggugu

SEQ ID NO: 2093375 - RNA, 19 nt, Artificial Sequence
  Description of Artificial Sequence: Synthetic oligonucleotide
cagccauuaggccagccuc

SEQ ID NO: 2093376 - RNA, 19 nt, Artificial Sequence
  Description of Artificial Sequence: Synthetic oligonucleotide
acguacugccacucuucac

SEQ ID NO: 2093377 - RNA, 19 nt, Artificial Sequence
  Description of Artificial Sequence: Synthetic oligonucleotide
gccaacgccauuugaaaug

SEQ ID NO: 2093378 - RNA, 19 nt, Artificial Sequence
  Description of Artificial Sequence: Synthetic oligonucleotide
uugaaagaauuugcuugcu

SEQ ID NO: 2093379 - RNA, 19 nt, Artificial Sequence
  Description of Artificial Sequence: Synthetic oligonucleotide
cuuggagcaauauccaagu

SEQ ID NO: 2093380 - RNA, 19 nt, Artificial Sequence
  Description of Artificial Sequence: Synthetic oligonucleotide
ccuuauagguguaugcauc

SEQ ID NO: 2093381 - RNA, 19 nt, Artificial Sequence
  Description of Artificial Sequence: Synthetic oligonucleotide
agacguacugccacucuuc

SEQ ID NO: 2093382 - RNA, 19 nt, Artificial Sequence
  Description of Artificial Sequence: Synthetic oligonucleotide
auaaucaucuugguccuua

SEQ ID NO: 2093383 - RNA, 19 nt, Artificial Sequence
  Description of Artificial Sequence: Synthetic oligonucleotide
cuauuuuaguugugcucuc

SEQ ID NO: 2093384 - RNA, 19 nt, Artificial Sequence
  Description of Artificial Sequence: Synthetic oligonucleotide
ugccaacgccauuugaaau

SEQ ID NO: 2093385 - RNA, 19 nt, Artificial Sequence
  Description of Artificial Sequence: Synthetic oligonucleotide
augaauccagcaacuagcu

SEQ ID NO: 2093386 - RNA, 19 nt, Artificial Sequence
  Description of Artificial Sequence: Synthetic oligonucleotide
cuuggugguaccauaauuu

SEQ ID NO: 2093387 - RNA, 19 nt, Artificial Sequence
  Description of Artificial Sequence: Synthetic oligonucleotide
accaauagcaggguggcuu

SEQ ID NO: 2093388 - RNA, 19 nt, Artificial Sequence
  Description of Artificial Sequence: Synthetic oligonucleotide
guuacaguccaguguaaua

SEQ ID NO: 2093389 - RNA, 19 nt, Artificial Sequence
  Description of Artificial Sequence: Synthetic oligonucleotide
uggcauaucuuggagcaau

SEQ ID NO: 2093390 - RNA, 19 nt, Artificial Sequence
  Description of Artificial Sequence: Synthetic oligonucleotide
uaagacuuggugguaccau

SEQ ID NO: 2093391 - RNA, 19 nt, Artificial Sequence
  Description of Artificial Sequence: Synthetic oligonucleotide
ggcuuccuaacuucuguag

SEQ ID NO: 2093392 - RNA, 19 nt, Artificial Sequence
  Description of Artificial Sequence: Synthetic oligonucleotide
agcaacuagcuucguuaug

SEQ ID NO: 2093393 - RNA, 19 nt, Artificial Sequence
  Description of Artificial Sequence: Synthetic oligonucleotide
cuagugugagaguagccaa

SEQ ID NO: 2093394 - RNA, 19 nt, Artificial Sequence
  Description of Artificial Sequence: Synthetic oligonucleotide
ucacgggacuuguucuuug

SEQ ID NO: 2093395 - RNA, 19 nt, Artificial Sequence
  Description of Artificial Sequence: Synthetic oligonucleotide
aggaagacguacugccacu

SEQ ID NO: 2093396 - RNA, 19 nt, Artificial Sequence
  Description of Artificial Sequence: Synthetic oligonucleotide
ugguaccauaauuuauaua

SEQ ID NO: 2093397 - RNA, 19 nt, Artificial Sequence
  Description of Artificial Sequence: Synthetic oligonucleotide
gucauugcaccaacaauga

SEQ ID NO: 2093398 - RNA, 19 nt, Artificial Sequence
  Description of Artificial Sequence: Synthetic oligonucleotide
ugguccuuauagguguaug

SEQ ID NO: 2093399 - RNA, 19 nt, Artificial Sequence
  Description of Artificial Sequence: Synthetic oligonucleotide
ccacaauucaugaucuuuc

SEQ ID NO: 2093400 - RNA, 19 nt, Artificial Sequence
  Description of Artificial Sequence: Synthetic oligonucleotide
accacaauucaugaucuuu

SEQ ID NO: 2093401 - RNA, 19 nt, Artificial Sequence
  Description of Artificial Sequence: Synthetic oligonucleotide
aaaggaugaaugaccccaa

SEQ ID NO: 2093402 - RNA, 19 nt, Artificial Sequence
  Description of Artificial Sequence: Synthetic oligonucleotide
gcaacuagcuucguuauga

SEQ ID NO: 2093403 - RNA, 19 nt, Artificial Sequence
  Description of Artificial Sequence: Synthetic oligonucleotide
gcaugccaaccucugaucc

SEQ ID NO: 2093404 - RNA, 19 nt, Artificial Sequence
  Description of Artificial Sequence: Synthetic oligonucleotide
cuaacuucuguaggaugac

SEQ ID NO: 2093405 - RNA, 19 nt, Artificial Sequence
  Description of Artificial Sequence: Synthetic oligonucleotide
gacagcaugccaaccucug

SEQ ID NO: 2093406 - RNA, 19 nt, Artificial Sequence
  Description of Artificial Sequence: Synthetic oligonucleotide
cugauccugcauaggcacc

SEQ ID NO: 2093407 - RNA, 19 nt, Artificial Sequence
  Description of Artificial Sequence: Synthetic oligonucleotide
uacugccacucuucacggg

SEQ ID NO: 2093408 - RNA, 19 nt, Artificial Sequence
  Description of Artificial Sequence: Synthetic oligonucleotide
ugcucucuaauguggugau

SEQ ID NO: 2093409 - RNA, 19 nt, Artificial Sequence
  Description of Artificial Sequence: Synthetic oligonucleotide
uaaucaucuugguccuuau

SEQ ID NO: 2093410 - RNA, 19 nt, Artificial Sequence
  Description of Artificial Sequence: Synthetic oligonucleotide
auaagacuuggugguacca

SEQ ID NO: 2093411 - RNA, 19 nt, Artificial Sequence
  Description of Artificial Sequence: Synthetic oligonucleotide
gacguacugccacucuuca

SEQ ID NO: 2093412 - RNA, 19 nt, Artificial Sequence
  Description of Artificial Sequence: Synthetic oligonucleotide
aauguggugauggguccaa

SEQ ID NO: 2093413 - RNA, 19 nt, Artificial Sequence
  Description of Artificial Sequence: Synthetic oligonucleotide
gaaaugaauccagcaacua

SEQ ID NO: 2093414 - RNA, 19 nt, Artificial Sequence
  Description of Artificial Sequence: Synthetic oligonucleotide
caccauaguggacgagugc

SEQ ID NO: 2093415 - RNA, 19 nt, Artificial Sequence
  Description of Artificial Sequence: Synthetic oligonucleotide
gcuucguuaugaauaauca

SEQ ID NO: 2093416 - RNA, 19 nt, Artificial Sequence
  Description of Artificial Sequence: Synthetic oligonucleotide
cucugauccugcauaggca

SEQ ID NO: 2093417 - RNA, 19 nt, Artificial Sequence
  Description of Artificial Sequence: Synthetic oligonucleotide
uggccaccccucuagugug

SEQ ID NO: 2093418 - RNA, 19 nt, Artificial Sequence
  Description of Artificial Sequence: Synthetic oligonucleotide
ugauguccccuguuucuuc

SEQ ID NO: 2093419 - RNA, 19 nt, Artificial Sequence
  Description of Artificial Sequence: Synthetic oligonucleotide
uccagcaacuagcuucguu

SEQ ID NO: 2093420 - RNA, 19 nt, Artificial Sequence
  Description of Artificial Sequence: Synthetic oligonucleotide
ccuacugcaagcaccaaga

SEQ ID NO: 2093421 - RNA, 19 nt, Artificial Sequence
  Description of Artificial Sequence: Synthetic oligonucleotide
ugccuguuuggaauucaua

SEQ ID NO: 2093422 - RNA, 19 nt, Artificial Sequence
  Description of Artificial Sequence: Synthetic oligonucleotide
caccauaagacuugguggu

SEQ ID NO: 2093423 - RNA, 19 nt, Artificial Sequence
  Description of Artificial Sequence: Synthetic oligonucleotide
gcaccaacaaugaucgggc

SEQ ID NO: 2093424 - RNA, 19 nt, Artificial Sequence
  Description of Artificial Sequence: Synthetic oligonucleotide
guguaugcaucuugugcuc

SEQ ID NO: 2093425 - RNA, 19 nt, Artificial Sequence
  Description of Artificial Sequence: Synthetic oligonucleotide
aucgggcagaccauccccg

SEQ ID NO: 2093426 - RNA, 19 nt, Artificial Sequence
  Description of Artificial Sequence: Synthetic oligonucleotide
cacuguaguuguugaaaga

SEQ ID NO: 2093427 - RNA, 19 nt, Artificial Sequence
  Description of Artificial Sequence: Synthetic oligonucleotide
gugcucucuaaugugguga

SEQ ID NO: 2093428 - RNA, 19 nt, Artificial Sequence
  Description of Artificial Sequence: Synthetic oligonucleotide
aguggacgagugcagcgau

SEQ ID NO: 2093429 - RNA, 19 nt, Artificial Sequence
  Description of Artificial Sequence: Synthetic oligonucleotide
cugaauccuacugcaagca

SEQ ID NO: 2093430 - RNA, 19 nt, Artificial Sequence
  Description of Artificial Sequence: Synthetic oligonucleotide
caauggaaaugacauacau

SEQ ID NO: 2093431 - RNA, 19 nt, Artificial Sequence
  Description of Artificial Sequence: Synthetic oligonucleotide
augaaugaagccacauuuu

SEQ ID NO: 2093432 - RNA, 19 nt, Artificial Sequence
  Description of Artificial Sequence: Synthetic oligonucleotide
guggcaccauaagacuugg

SEQ ID NO: 2093433 - RNA, 19 nt, Artificial Sequence
  Description of Artificial Sequence: Synthetic oligonucleotide
accauccccgacagugugc

SEQ ID NO: 2093434 - RNA, 19 nt, Artificial Sequence
  Description of Artificial Sequence: Synthetic oligonucleotide
caacuauuuuaguugugcu

SEQ ID NO: 2093435 - RNA, 19 nt, Artificial Sequence
  Description of Artificial Sequence: Synthetic oligonucleotide
uugcaccaacaaugaucgg

SEQ ID NO: 2093436 - RNA, 19 nt, Artificial Sequence
  Description of Artificial Sequence: Synthetic oligonucleotide
augacaugugccaacuauu

SEQ ID NO: 2093437 - RNA, 19 nt, Artificial Sequence
  Description of Artificial Sequence: Synthetic oligonucleotide
accgcagacagcaugccaa

SEQ ID NO: 2093438 - RNA, 19 nt, Artificial Sequence
  Description of Artificial Sequence: Synthetic oligonucleotide
acuccaccauaguggacga

SEQ ID NO: 2093439 - RNA, 19 nt, Artificial Sequence
  Description of Artificial Sequence: Synthetic oligonucleotide
gugccaacgccauuugaaa

SEQ ID NO: 2093440 - RNA, 19 nt, Artificial Sequence
  Description of Artificial Sequence: Synthetic oligonucleotide
cuucguuaugaauaaucau

SEQ ID NO: 2093441 - RNA, 19 nt, Artificial Sequence
  Description of Artificial Sequence: Synthetic oligonucleotide
gauagcaaauccacugaau

SEQ ID NO: 2093442 - RNA, 19 nt, Artificial Sequence
  Description of Artificial Sequence: Synthetic oligonucleotide
uuucuacaguaaaccucua

SEQ ID NO: 2093443 - RNA, 19 nt, Artificial Sequence
  Description of Artificial Sequence: Synthetic oligonucleotide
cuuagaaaaucugcaauuu

SEQ ID NO: 2093444 - RNA, 19 nt, Artificial Sequence
  Description of Artificial Sequence: Synthetic oligonucleotide
gcauaaaauaugacuccac

SEQ ID NO: 2093445 - RNA, 19 nt, Artificial Sequence
  Description of Artificial Sequence: Synthetic oligonucleotide
ugccaaccucugauccugc

SEQ ID NO: 2093446 - RNA, 19 nt, Artificial Sequence
  Description of Artificial Sequence: Synthetic oligonucleotide
gcaugaucaaguagcuuug

SEQ ID NO: 2093447 - RNA, 19 nt, Artificial Sequence
  Description of Artificial Sequence: Synthetic oligonucleotide
ugcaagcaccaagaaggaa

SEQ ID NO: 2093448 - RNA, 19 nt, Artificial Sequence
  Description of Artificial Sequence: Synthetic oligonucleotide
gaagccagagauagcaaau

SEQ ID NO: 2093449 - RNA, 19 nt, Artificial Sequence
  Description of Artificial Sequence: Synthetic oligonucleotide
augccaaaaccaccacaau

SEQ ID NO: 2093450 - RNA, 19 nt, Artificial Sequence
  Description of Artificial Sequence: Synthetic oligonucleotide
gguccaacaaauaucuacu

SEQ ID NO: 2093451 - RNA, 19 nt, Artificial Sequence
  Description of Artificial Sequence: Synthetic oligonucleotide
agacuuggugguaccauaa

SEQ ID NO: 2093452 - RNA, 19 nt, Artificial Sequence
  Description of Artificial Sequence: Synthetic oligonucleotide
ccgacagugugccaacgcc

SEQ ID NO: 2093453 - RNA, 19 nt, Artificial Sequence
  Description of Artificial Sequence: Synthetic oligonucleotide
gaccgcagacagcaugcca

SEQ ID NO: 2093454 - RNA, 19 nt, Artificial Sequence
  Description of Artificial Sequence: Synthetic oligonucleotide
ccaaaggaugaaugacccc

SEQ ID NO: 2093455 - RNA, 19 nt, Artificial Sequence
  Description of Artificial Sequence: Synthetic oligonucleotide
cauuaagauacuggcauau

SEQ ID NO: 2093456 - RNA, 19 nt, Artificial Sequence
  Description of Artificial Sequence: Synthetic oligonucleotide
gaaugaccccaauggaaau

SEQ ID NO: 2093457 - RNA, 19 nt, Artificial Sequence
  Description of Artificial Sequence: Synthetic oligonucleotide
caacaaugaucgggcagac

SEQ ID NO: 2093458 - RNA, 19 nt, Artificial Sequence
  Description of Artificial Sequence: Synthetic oligonucleotide
ccagcaacuagcuucguua

SEQ ID NO: 2093459 - RNA, 19 nt, Artificial Sequence
  Description of Artificial Sequence: Synthetic oligonucleotide
guaggaugacaugugccaa

SEQ ID NO: 2093460 - RNA, 19 nt, Artificial Sequence
  Description of Artificial Sequence: Synthetic oligonucleotide
cugcaagcaccaagaagga

SEQ ID NO: 2093461 - RNA, 19 nt, Artificial Sequence
  Description of Artificial Sequence: Synthetic oligonucleotide
gugguaccauaauuuauau

SEQ ID NO: 2093462 - RNA, 19 nt, Artificial Sequence
  Description of Artificial Sequence: Synthetic oligonucleotide
gaagacguacugccacucu

SEQ ID NO: 2093463 - RNA, 19 nt, Artificial Sequence
  Description of Artificial Sequence: Synthetic oligonucleotide
ucgggcagaccauccccga

SEQ ID NO: 2093464 - RNA, 19 nt, Artificial Sequence
  Description of Artificial Sequence: Synthetic oligonucleotide
caauagcaggguggcuucc

SEQ ID NO: 2093465 - RNA, 19 nt, Artificial Sequence
  Description of Artificial Sequence: Synthetic oligonucleotide
ccauaguggacgagugcag

SEQ ID NO: 2093466 - RNA, 19 nt, Artificial Sequence
  Description of Artificial Sequence: Synthetic oligonucleotide
uucacgggacuuguucuuu

SEQ ID NO: 2093467 - RNA, 19 nt, Artificial Sequence
  Description of Artificial Sequence: Synthetic oligonucleotide
gcaguuugcaugaucaagu

SEQ ID NO: 2093468 - RNA, 19 nt, Artificial Sequence
  Description of Artificial Sequence: Synthetic oligonucleotide
auccccgacagugugccaa

SEQ ID NO: 2093469 - RNA, 19 nt, Artificial Sequence
  Description of Artificial Sequence: Synthetic oligonucleotide
ccauaagacuuggugguac

SEQ ID NO: 2093470 - RNA, 19 nt, Artificial Sequence
  Description of Artificial Sequence: Synthetic oligonucleotide
gccagagauagcaaaucca

SEQ ID NO: 2093471 - RNA, 19 nt, Artificial Sequence
  Description of Artificial Sequence: Synthetic oligonucleotide
cuguaguuguugaaagaau

SEQ ID NO: 2093472 - RNA, 19 nt, Artificial Sequence
  Description of Artificial Sequence: Synthetic oligonucleotide
cccauuaagauacuggcau

SEQ ID NO: 2093473 - RNA, 19 nt, Artificial Sequence
  Description of Artificial Sequence: Synthetic oligonucleotide
gacaugugccaacuauuuu

SEQ ID NO: 2093474 - RNA, 19 nt, Artificial Sequence
  Description of Artificial Sequence: Synthetic oligonucleotide
uccccgacagugugccaac

SEQ ID NO: 2093475 - RNA, 19 nt, Artificial Sequence
  Description of Artificial Sequence: Synthetic oligonucleotide
uugcaugaucaaguagcuu

SEQ ID NO: 2093476 - RNA, 19 nt, Artificial Sequence
  Description of Artificial Sequence: Synthetic oligonucleotide
caacuagcuucguuaugaa

SEQ ID NO: 2093477 - RNA, 19 nt, Artificial Sequence
  Description of Artificial Sequence: Synthetic oligonucleotide
ccaauagcaggguggcuuc

SEQ ID NO: 2093478 - RNA, 19 nt, Artificial Sequence
  Description of Artificial Sequence: Synthetic oligonucleotide
uugguccuuauagguguau

SEQ ID NO: 2093479 - RNA, 19 nt, Artificial Sequence
  Description of Artificial Sequence: Synthetic oligonucleotide
ggugauggguccaacaaau

SEQ ID NO: 2093480 - RNA, 19 nt, Artificial Sequence
  Description of Artificial Sequence: Synthetic oligonucleotide
caaaaccaccacaauucau

SEQ ID NO: 2093481 - RNA, 19 nt, Artificial Sequence
  Description of Artificial Sequence: Synthetic oligonucleotide
guaccauaauuuauauaau

SEQ ID NO: 2093482 - RNA, 19 nt, Artificial Sequence
  Description of Artificial Sequence: Synthetic oligonucleotide
ccaauggaaaugacauaca

SEQ ID NO: 2093483 - RNA, 19 nt, Artificial Sequence
  Description of Artificial Sequence: Synthetic oligonucleotide
gugugagaguagccaacaa

SEQ ID NO: 2093484 - RNA, 19 nt, Artificial Sequence
  Description of Artificial Sequence: Synthetic oligonucleotide
accauaagacuugguggua

SEQ ID NO: 2093485 - RNA, 19 nt, Artificial Sequence
  Description of Artificial Sequence: Synthetic oligonucleotide
cccucuagugugagaguag

SEQ ID NO: 2093486 - RNA, 19 nt, Artificial Sequence
  Description of Artificial Sequence: Synthetic oligonucleotide
caugccaaccucugauccu

SEQ ID NO: 2093487 - RNA, 19 nt, Artificial Sequence
  Description of Artificial Sequence: Synthetic oligonucleotide
caccaacaaugaucgggca

SEQ ID NO: 2093488 - RNA, 19 nt, Artificial Sequence
  Description of Artificial Sequence: Synthetic oligonucleotide
gggcagaccauccccgaca

SEQ ID NO: 2093489 - RNA, 19 nt, Artificial Sequence
  Description of Artificial Sequence: Synthetic oligonucleotide
cucuaauguggugaugggu

SEQ ID NO: 2093490 - RNA, 19 nt, Artificial Sequence
  Description of Artificial Sequence: Synthetic oligonucleotide
gacuuggugguaccauaau

SEQ ID NO: 2093491 - RNA, 19 nt, Artificial Sequence
  Description of Artificial Sequence: Synthetic oligonucleotide
ccauccccgacagugugcc

SEQ ID NO: 2093492 - RNA, 19 nt, Artificial Sequence
  Description of Artificial Sequence: Synthetic oligonucleotide
ggaagacguacugccacuc

SEQ ID NO: 2093493 - RNA, 19 nt, Artificial Sequence
  Description of Artificial Sequence: Synthetic oligonucleotide
ccucuaaaucacaaaccaa

SEQ ID NO: 2093494 - RNA, 19 nt, Artificial Sequence
  Description of Artificial Sequence: Synthetic oligonucleotide
uagcuucguuaugaauaau

SEQ ID NO: 2093495 - RNA, 19 nt, Artificial Sequence
  Description of Artificial Sequence: Synthetic oligonucleotide
cuugguccuuauaggugua

SEQ ID NO: 2093496 - RNA, 19 nt, Artificial Sequence
  Description of Artificial Sequence: Synthetic oligonucleotide
acagugugccaacgccauu

SEQ ID NO: 2093497 - RNA, 19 nt, Artificial Sequence
  Description of Artificial Sequence: Synthetic oligonucleotide
cagcaugccaaccucugau

SEQ ID NO: 2093498 - RNA, 19 nt, Artificial Sequence
  Description of Artificial Sequence: Synthetic oligonucleotide
cugugccuguuuggaauuc

SEQ ID NO: 2093499 - RNA, 19 nt, Artificial Sequence
  Description of Artificial Sequence: Synthetic oligonucleotide
guggacgagugcagcgaug

SEQ ID NO: 2093500 - RNA, 19 nt, Artificial Sequence
  Description of Artificial Sequence: Synthetic oligonucleotide
uuguuuccucagggucugc

SEQ ID NO: 2093501 - RNA, 19 nt, Artificial Sequence
  Description of Artificial Sequence: Synthetic oligonucleotide
cccgauaggaacaaugauu

SEQ ID NO: 2093502 - RNA, 19 nt, Artificial Sequence
  Description of Artificial Sequence: Synthetic oligonucleotide
cccgacagugugccaacgc

SEQ ID NO: 2093503 - RNA, 19 nt, Artificial Sequence
  Description of Artificial Sequence: Synthetic oligonucleotide
guuucucuccugaggcaaa

SEQ ID NO: 2093504 - RNA, 19 nt, Artificial Sequence
  Description of Artificial Sequence: Synthetic oligonucleotide
gccaacuauuuuaguugug

SEQ ID NO: 2093505 - RNA, 19 nt, Artificial Sequence
  Description of Artificial Sequence: Synthetic oligonucleotide
cagcaacuagcuucguuau

SEQ ID NO: 2093506 - RNA, 19 nt, Artificial Sequence
  Description of Artificial Sequence: Synthetic oligonucleotide
ccauuaagauacuggcaua

SEQ ID NO: 2093507 - RNA, 19 nt, Artificial Sequence
  Description of Artificial Sequence: Synthetic oligonucleotide
gugauggguccaacaaaua

SEQ ID NO: 2093508 - RNA, 19 nt, Artificial Sequence
  Description of Artificial Sequence: Synthetic oligonucleotide
cuccaccauaguggacgag

SEQ ID NO: 2093509 - RNA, 19 nt, Artificial Sequence
  Description of Artificial Sequence: Synthetic oligonucleotide
caaugaucgggcagaccau

SEQ ID NO: 2093510 - RNA, 19 nt, Artificial Sequence
  Description of Artificial Sequence: Synthetic oligonucleotide
cuucacgggacuuguucuu

SEQ ID NO: 2093511 - RNA, 19 nt, Artificial Sequence
  Description of Artificial Sequence: Synthetic oligonucleotide
gugugggaccgcagacagc

SEQ ID NO: 2093512 - RNA, 19 nt, Artificial Sequence
  Description of Artificial Sequence: Synthetic oligonucleotide
cacgggacuuguucuuugu

SEQ ID NO: 2093513 - RNA, 19 nt, Artificial Sequence
  Description of Artificial Sequence: Synthetic oligonucleotide
gcaucuugugcuccuuccu

SEQ ID NO: 2093514 - RNA, 19 nt, Artificial Sequence
  Description of Artificial Sequence: Synthetic oligonucleotide
ccgcagacagcaugccaac

SEQ ID NO: 2093515 - RNA, 19 nt, Artificial Sequence
  Description of Artificial Sequence: Synthetic oligonucleotide
cagugugccaacgccauuu

SEQ ID NO: 2093516 - RNA, 19 nt, Artificial Sequence
  Description of Artificial Sequence: Synthetic oligonucleotide
ggaugacaugugccaacua

SEQ ID NO: 2093517 - RNA, 19 nt, Artificial Sequence
  Description of Artificial Sequence: Synthetic oligonucleotide
cuccugugugguggcacca

SEQ ID NO: 2093518 - RNA, 19 nt, Artificial Sequence
  Description of Artificial Sequence: Synthetic oligonucleotide
gugauguccccuguuucuu

SEQ ID NO: 2093519 - RNA, 19 nt, Artificial Sequence
  Description of Artificial Sequence: Synthetic oligonucleotide
gccaccccucuagugugag

SEQ ID NO: 2093520 - RNA, 19 nt, Artificial Sequence
  Description of Artificial Sequence: Synthetic oligonucleotide
gcacuugaugggaaucugu

SEQ ID NO: 2093521 - RNA, 19 nt, Artificial Sequence
  Description of Artificial Sequence: Synthetic oligonucleotide
ggcauaucuuggagcaaua

SEQ ID NO: 2093522 - RNA, 19 nt, Artificial Sequence
  Description of Artificial Sequence: Synthetic oligonucleotide
gguuaacauugaagccaga

SEQ ID NO: 2093523 - RNA, 19 nt, Artificial Sequence
  Description of Artificial Sequence: Synthetic oligonucleotide
cugagugauguccccuguu

SEQ ID NO: 2093524 - RNA, 19 nt, Artificial Sequence
  Description of Artificial Sequence: Synthetic oligonucleotide
ccacugaauccuacugcaa

SEQ ID NO: 2093525 - RNA, 19 nt, Artificial Sequence
  Description of Artificial Sequence: Synthetic oligonucleotide
gagcaauauccaagugguu

SEQ ID NO: 2093526 - RNA, 19 nt, Artificial Sequence
  Description of Artificial Sequence: Synthetic oligonucleotide
gugcagcgaugaggaagac

SEQ ID NO: 2093527 - RNA, 19 nt, Artificial Sequence
  Description of Artificial Sequence: Synthetic oligonucleotide
cauccccgacagugugcca

SEQ ID NO: 2093528 - RNA, 19 nt, Artificial Sequence
  Description of Artificial Sequence: Synthetic oligonucleotide
ccagccauuaggccagccu

SEQ ID NO: 2093529 - RNA, 19 nt, Artificial Sequence
  Description of Artificial Sequence: Synthetic oligonucleotide
cgcagacagcaugccaacc

SEQ ID NO: 2093530 - RNA, 19 nt, Artificial Sequence
  Description of Artificial Sequence: Synthetic oligonucleotide
ccccucuagugugagagua

SEQ ID NO: 2093531 - RNA, 19 nt, Artificial Sequence
  Description of Artificial Sequence: Synthetic oligonucleotide
ccccgacagugugccaacg

SEQ ID NO: 2093532 - RNA, 19 nt, Artificial Sequence
  Description of Artificial Sequence: Synthetic oligonucleotide
gcuccuuccugaacaaauu

SEQ ID NO: 2093533 - RNA, 19 nt, Artificial Sequence
  Description of Artificial Sequence: Synthetic oligonucleotide
cccagccauuaggccagcc

SEQ ID NO: 2093534 - RNA, 19 nt, Artificial Sequence
  Description of Artificial Sequence: Synthetic oligonucleotide
ccccgauaggaacaaugau

SEQ ID NO: 2093535 - RNA, 19 nt, Artificial Sequence
  Description of Artificial Sequence: Synthetic oligonucleotide
cgauaggaacaaugauugu

SEQ ID NO: 2093536 - RNA, 19 nt, Artificial Sequence
  Description of Artificial Sequence: Synthetic oligonucleotide
cgccauuugaaaugcccau

SEQ ID NO: 2093537 - RNA, 19 nt, Artificial Sequence
  Description of Artificial Sequence: Synthetic oligonucleotide
ggccaccccucuaguguga

SEQ ID NO: 2093538 - RNA, 19 nt, Artificial Sequence
  Description of Artificial Sequence: Synthetic oligonucleotide
ccaccccucuagugugaga

SEQ ID NO: 2093539 - RNA, 19 nt, Artificial Sequence
  Description of Artificial Sequence: Synthetic oligonucleotide
gugggaccgcagacagcau

SEQ ID NO: 2093540 - RNA, 19 nt, Artificial Sequence
  Description of Artificial Sequence: Synthetic oligonucleotide
gggucugcccaagguuguu

SEQ ID NO: 2093541 - RNA, 19 nt, Artificial Sequence
  Description of Artificial Sequence: Synthetic oligonucleotide
uacuuugugguucacauag

SEQ ID NO: 2093542 - RNA, 19 nt, Artificial Sequence
  Description of Artificial Sequence: Synthetic oligonucleotide
agaaaagauauaauggucc

SEQ ID NO: 2093543 - RNA, 19 nt, Artificial Sequence
  Description of Artificial Sequence: Synthetic oligonucleotide
uguguuauuauaaaccaga

SEQ ID NO: 2093544 - RNA, 19 nt, Artificial Sequence
  Description of Artificial Sequence: Synthetic oligonucleotide
acagaaaagauauaauggu

SEQ ID NO: 2093545 - RNA, 19 nt, Artificial Sequence
  Description of Artificial Sequence: Synthetic oligonucleotide
uggaucagcaagaaugggg

SEQ ID NO: 2093546 - RNA, 19 nt, Artificial Sequence
  Description of Artificial Sequence: Synthetic oligonucleotide
aacugggcgaaucguaccc

SEQ ID NO: 2093547 - RNA, 19 nt, Artificial Sequence
  Description of Artificial Sequence: Synthetic oligonucleotide
ugagcaauaaggaugucgu

SEQ ID NO: 2093548 - RNA, 19 nt, Artificial Sequence
  Description of Artificial Sequence: Synthetic oligonucleotide
gaaaagauauaaugguccc

SEQ ID NO: 2093549 - RNA, 19 nt, Artificial Sequence
  Description of Artificial Sequence: Synthetic oligonucleotide
auuacaccuggugagaagc

SEQ ID NO: 2093550 - RNA, 19 nt, Artificial Sequence
  Description of Artificial Sequence: Synthetic oligonucleotide
aaagauauaauggucccga

SEQ ID NO: 2093551 - RNA, 19 nt, Artificial Sequence
  Description of Artificial Sequence: Synthetic oligonucleotide
ugcauaaccaagucaaucu

SEQ ID NO: 2093552 - RNA, 19 nt, Artificial Sequence
  Description of Artificial Sequence: Synthetic oligonucleotide
aacccgaguaguuaccggg

SEQ ID NO: 2093553 - RNA, 19 nt, Artificial Sequence
  Description of Artificial Sequence: Synthetic oligonucleotide
ucaauucccaccaugucga

SEQ ID NO: 2093554 - RNA, 19 nt, Artificial Sequence
  Description of Artificial Sequence: Synthetic oligonucleotide
guucacauagaguucauug

SEQ ID NO: 2093555 - RNA, 19 nt, Artificial Sequence
  Description of Artificial Sequence: Synthetic oligonucleotide
aaaagauauaauggucccg

SEQ ID NO: 2093556 - RNA, 19 nt, Artificial Sequence
  Description of Artificial Sequence: Synthetic oligonucleotide
agauauaauggucccgaac

SEQ ID NO: 2093557 - RNA, 19 nt, Artificial Sequence
  Description of Artificial Sequence: Synthetic oligonucleotide
aaccaagucaaucuccuga

SEQ ID NO: 2093558 - RNA, 19 nt, Artificial Sequence
  Description of Artificial Sequence: Synthetic oligonucleotide
cucaauuacaccuggugag

SEQ ID NO: 2093559 - RNA, 19 nt, Artificial Sequence
  Description of Artificial Sequence: Synthetic oligonucleotide
ucauaugccugguauauac

SEQ ID NO: 2093560 - RNA, 19 nt, Artificial Sequence
  Description of Artificial Sequence: Synthetic oligonucleotide
acagacguggaucagcaag

SEQ ID NO: 2093561 - RNA, 19 nt, Artificial Sequence
  Description of Artificial Sequence: Synthetic oligonucleotide
auucaaacagacguggauc

SEQ ID NO: 2093562 - RNA, 19 nt, Artificial Sequence
  Description of Artificial Sequence: Synthetic oligonucleotide
cuuuugaccuuguacuucc

SEQ ID NO: 2093563 - RNA, 19 nt, Artificial Sequence
  Description of Artificial Sequence: Synthetic oligonucleotide
uucaaacagacguggauca

SEQ ID NO: 2093564 - RNA, 19 nt, Artificial Sequence
  Description of Artificial Sequence: Synthetic oligonucleotide
gguuccuauauucaaacag

SEQ ID NO: 2093565 - RNA, 19 nt, Artificial Sequence
  Description of Artificial Sequence: Synthetic oligonucleotide
uauaauggucccgaacacg

SEQ ID NO: 2093566 - RNA, 19 nt, Artificial Sequence
  Description of Artificial Sequence: Synthetic oligonucleotide
uauccaaccgagcauuggc

SEQ ID NO: 2093567 - RNA, 19 nt, Artificial Sequence
  Description of Artificial Sequence: Synthetic oligonucleotide
cauaaccaagucaaucucc

SEQ ID NO: 2093568 - RNA, 19 nt, Artificial Sequence
  Description of Artificial Sequence: Synthetic oligonucleotide
auagaguucauugggauca

SEQ ID NO: 2093569 - RNA, 19 nt, Artificial Sequence
  Description of Artificial Sequence: Synthetic oligonucleotide
aauuacaccuggugagaag

SEQ ID NO: 2093570 - RNA, 19 nt, Artificial Sequence
  Description of Artificial Sequence: Synthetic oligonucleotide
aaucguacccuccgggaag

SEQ ID NO: 2093571 - RNA, 19 nt, Artificial Sequence
  Description of Artificial Sequence: Synthetic oligonucleotide
aagcugagcaauaaggaug

SEQ ID NO: 2093572 - RNA, 19 nt, Artificial Sequence
  Description of Artificial Sequence: Synthetic oligonucleotide
uuauaaaccagaaccuuuu

SEQ ID NO: 2093573 - RNA, 19 nt, Artificial Sequence
  Description of Artificial Sequence: Synthetic oligonucleotide
cuugacgcagugcauaacc

SEQ ID NO: 2093574 - RNA, 19 nt, Artificial Sequence
  Description of Artificial Sequence: Synthetic oligonucleotide
uuccuauauucaaacagac

SEQ ID NO: 2093575 - RNA, 19 nt, Artificial Sequence
  Description of Artificial Sequence: Synthetic oligonucleotide
uucucauuccggaagauuu

SEQ ID NO: 2093576 - RNA, 19 nt, Artificial Sequence
  Description of Artificial Sequence: Synthetic oligonucleotide
ugcugaagguauccaaccg

SEQ ID NO: 2093577 - RNA, 19 nt, Artificial Sequence
  Description of Artificial Sequence: Synthetic oligonucleotide
acagaauucuccggaaagc

SEQ ID NO: 2093578 - RNA, 19 nt, Artificial Sequence
  Description of Artificial Sequence: Synthetic oligonucleotide
cuauauucaaacagacgug

SEQ ID NO: 2093579 - RNA, 19 nt, Artificial Sequence
  Description of Artificial Sequence: Synthetic oligonucleotide
acguggaucagcaagaaug

SEQ ID NO: 2093580 - RNA, 19 nt, Artificial Sequence
  Description of Artificial Sequence: Synthetic oligonucleotide
guaguuaccggggaagucg

SEQ ID NO: 2093581 - RNA, 19 nt, Artificial Sequence
  Description of Artificial Sequence: Synthetic oligonucleotide
aauggauguguuauuauaa

SEQ ID NO: 2093582 - RNA, 19 nt, Artificial Sequence
  Description of Artificial Sequence: Synthetic oligonucleotide
ugucgucaugaacugggcg

SEQ ID NO: 2093583 - RNA, 19 nt, Artificial Sequence
  Description of Artificial Sequence: Synthetic oligonucleotide
aaaaccgccggcacuuccc

SEQ ID NO: 2093584 - RNA, 19 nt, Artificial Sequence
  Description of Artificial Sequence: Synthetic oligonucleotide
uccauaugaacaacaucca

SEQ ID NO: 2093585 - RNA, 19 nt, Artificial Sequence
  Description of Artificial Sequence: Synthetic oligonucleotide
aguccaucugaacugcauc

SEQ ID NO: 2093586 - RNA, 19 nt, Artificial Sequence
  Description of Artificial Sequence: Synthetic oligonucleotide
acggaaauucuucucgaag

SEQ ID NO: 2093587 - RNA, 19 nt, Artificial Sequence
  Description of Artificial Sequence: Synthetic oligonucleotide
ccugguauauacuuugugg

SEQ ID NO: 2093588 - RNA, 19 nt, Artificial Sequence
  Description of Artificial Sequence: Synthetic oligonucleotide
uaugaacaacauccacacg

SEQ ID NO: 2093589 - RNA, 19 nt, Artificial Sequence
  Description of Artificial Sequence: Synthetic oligonucleotide
aaaccgccggcacuucccc

SEQ ID NO: 2093590 - RNA, 19 nt, Artificial Sequence
  Description of Artificial Sequence: Synthetic oligonucleotide
agcaauaaggaugucguca

SEQ ID NO: 2093591 - RNA, 19 nt, Artificial Sequence
  Description of Artificial Sequence: Synthetic oligonucleotide
cagcuaacagaauucuccg

SEQ ID NO: 2093592 - RNA, 19 nt, Artificial Sequence
  Description of Artificial Sequence: Synthetic oligonucleotide
uuaccggggaagucggugg

SEQ ID NO: 2093593 - RNA, 19 nt, Artificial Sequence
  Description of Artificial Sequence: Synthetic oligonucleotide
ugaacugggcgaaucguac

SEQ ID NO: 2093594 - RNA, 19 nt, Artificial Sequence
  Description of Artificial Sequence: Synthetic oligonucleotide
uccuuagcagcauuggggu

SEQ ID NO: 2093595 - RNA, 19 nt, Artificial Sequence
  Description of Artificial Sequence: Synthetic oligonucleotide
acccaugucauaugccugg

SEQ ID NO: 2093596 - RNA, 19 nt, Artificial Sequence
  Description of Artificial Sequence: Synthetic oligonucleotide
agcaagaauggggaugagc

SEQ ID NO: 2093597 - RNA, 19 nt, Artificial Sequence
  Description of Artificial Sequence: Synthetic oligonucleotide
accucaauuacaccuggug

SEQ ID NO: 2093598 - RNA, 19 nt, Artificial Sequence
  Description of Artificial Sequence: Synthetic oligonucleotide
uaguuaccggggaagucgg

SEQ ID NO: 2093599 - RNA, 19 nt, Artificial Sequence
  Description of Artificial Sequence: Synthetic oligonucleotide
uaaggaugucgucaugaac

SEQ ID NO: 2093600 - RNA, 19 nt, Artificial Sequence
  Description of Artificial Sequence: Synthetic oligonucleotide
ucuugguacaccugaccug

SEQ ID NO: 2093601 - RNA, 19 nt, Artificial Sequence
  Description of Artificial Sequence: Synthetic oligonucleotide
aacuuuugaccuuguacuu

SEQ ID NO: 2093602 - RNA, 19 nt, Artificial Sequence
  Description of Artificial Sequence: Synthetic oligonucleotide
acccuggccaacuuuugac

SEQ ID NO: 2093603 - RNA, 19 nt, Artificial Sequence
  Description of Artificial Sequence: Synthetic oligonucleotide
uguagccgaaacugcagug

SEQ ID NO: 2093604 - RNA, 19 nt, Artificial Sequence
  Description of Artificial Sequence: Synthetic oligonucleotide
ucgacagaaaagauauaau

SEQ ID NO: 2093605 - RNA, 19 nt, Artificial Sequence
  Description of Artificial Sequence: Synthetic oligonucleotide
uauaaaccagaaccuuuuc

SEQ ID NO: 2093606 - RNA, 19 nt, Artificial Sequence
  Description of Artificial Sequence: Synthetic oligonucleotide
agcauuagcaauggcagca

SEQ ID NO: 2093607 - RNA, 19 nt, Artificial Sequence
  Description of Artificial Sequence: Synthetic oligonucleotide
aaacagacguggaucagca

SEQ ID NO: 2093608 - RNA, 19 nt, Artificial Sequence
  Description of Artificial Sequence: Synthetic oligonucleotide
uuguuggcaccucagcuaa

SEQ ID NO: 2093609 - RNA, 19 nt, Artificial Sequence
  Description of Artificial Sequence: Synthetic oligonucleotide
gucccgaacacgugcaagg

SEQ ID NO: 2093610 - RNA, 19 nt, Artificial Sequence
  Description of Artificial Sequence: Synthetic oligonucleotide
aauucuucucgaagcgguc

SEQ ID NO: 2093611 - RNA, 19 nt, Artificial Sequence
  Description of Artificial Sequence: Synthetic oligonucleotide
ugaagguauccaaccgagc

SEQ ID NO: 2093612 - RNA, 19 nt, Artificial Sequence
  Description of Artificial Sequence: Synthetic oligonucleotide
ucaauuacaccuggugaga

SEQ ID NO: 2093613 - RNA, 19 nt, Artificial Sequence
  Description of Artificial Sequence: Synthetic oligonucleotide
cuuccugcaccucaauuac

SEQ ID NO: 2093614 - RNA, 19 nt, Artificial Sequence
  Description of Artificial Sequence: Synthetic oligonucleotide
augcccuugacgcagugca

SEQ ID NO: 2093615 - RNA, 19 nt, Artificial Sequence
  Description of Artificial Sequence: Synthetic oligonucleotide
uccaguguauuuucaucca

SEQ ID NO: 2093616 - RNA, 19 nt, Artificial Sequence
  Description of Artificial Sequence: Synthetic oligonucleotide
ugguacaccugaccuguag

SEQ ID NO: 2093617 - RNA, 19 nt, Artificial Sequence
  Description of Artificial Sequence: Synthetic oligonucleotide
uugacgcagugcauaacca

SEQ ID NO: 2093618 - RNA, 19 nt, Artificial Sequence
  Description of Artificial Sequence: Synthetic oligonucleotide
gacgcagugcauaaccaag

SEQ ID NO: 2093619 - RNA, 19 nt, Artificial Sequence
  Description of Artificial Sequence: Synthetic oligonucleotide
uaacccgaguaguuaccgg

SEQ ID NO: 2093620 - RNA, 19 nt, Artificial Sequence
  Description of Artificial Sequence: Synthetic oligonucleotide
auuguuggcaccucagcua

SEQ ID NO: 2093621 - RNA, 19 nt, Artificial Sequence
  Description of Artificial Sequence: Synthetic oligonucleotide
agcagagugaugucuggca

SEQ ID NO: 2093622 - RNA, 19 nt, Artificial Sequence
  Description of Artificial Sequence: Synthetic oligonucleotide
ucguaacccgaguaguuac

SEQ ID NO: 2093623 - RNA, 19 nt, Artificial Sequence
  Description of Artificial Sequence: Synthetic oligonucleotide
gucgucaugaacugggcga

SEQ ID NO: 2093624 - RNA, 19 nt, Artificial Sequence
  Description of Artificial Sequence: Synthetic oligonucleotide
uagccgaaacugcagugug

SEQ ID NO: 2093625 - RNA, 19 nt, Artificial Sequence
  Description of Artificial Sequence: Synthetic oligonucleotide
agauuucucugcugaaggu

SEQ ID NO: 2093626 - RNA, 19 nt, Artificial Sequence
  Description of Artificial Sequence: Synthetic oligonucleotide
guaacccgaguaguuaccg

SEQ ID NO: 2093627 - RNA, 19 nt, Artificial Sequence
  Description of Artificial Sequence: Synthetic oligonucleotide
gucgucguaacccgaguag

SEQ ID NO: 2093628 - RNA, 19 nt, Artificial Sequence
  Description of Artificial Sequence: Synthetic oligonucleotide
cuuagcagcauugggguuc

SEQ ID NO: 2093629 - RNA, 19 nt, Artificial Sequence
  Description of Artificial Sequence: Synthetic oligonucleotide
acaccuggugagaagcacc

SEQ ID NO: 2093630 - RNA, 19 nt, Artificial Sequence
  Description of Artificial Sequence: Synthetic oligonucleotide
cgacagaaaagauauaaug

SEQ ID NO: 2093631 - RNA, 19 nt, Artificial Sequence
  Description of Artificial Sequence: Synthetic oligonucleotide
gacucgacagaaaagauau

SEQ ID NO: 2093632 - RNA, 19 nt, Artificial Sequence
  Description of Artificial Sequence: Synthetic oligonucleotide
aggaugucgucaugaacug

SEQ ID NO: 2093633 - RNA, 19 nt, Artificial Sequence
  Description of Artificial Sequence: Synthetic oligonucleotide
uaugccugguauauacuuu

SEQ ID NO: 2093634 - RNA, 19 nt, Artificial Sequence
  Description of Artificial Sequence: Synthetic oligonucleotide
gacguugcgaaccccgaac

SEQ ID NO: 2093635 - RNA, 19 nt, Artificial Sequence
  Description of Artificial Sequence: Synthetic oligonucleotide
ccaacuuuugaccuuguac

SEQ ID NO: 2093636 - RNA, 19 nt, Artificial Sequence
  Description of Artificial Sequence: Synthetic oligonucleotide
gaacugggcgaaucguacc

SEQ ID NO: 2093637 - RNA, 19 nt, Artificial Sequence
  Description of Artificial Sequence: Synthetic oligonucleotide
ugguauauacuuugugguu

SEQ ID NO: 2093638 - RNA, 19 nt, Artificial Sequence
  Description of Artificial Sequence: Synthetic oligonucleotide
auguguuauuauaaaccag

SEQ ID NO: 2093639 - RNA, 19 nt, Artificial Sequence
  Description of Artificial Sequence: Synthetic oligonucleotide
aaccgagcauuggcaaccc

SEQ ID NO: 2093640 - RNA, 19 nt, Artificial Sequence
  Description of Artificial Sequence: Synthetic oligonucleotide
agaggaauccuuagcagca

SEQ ID NO: 2093641 - RNA, 19 nt, Artificial Sequence
  Description of Artificial Sequence: Synthetic oligonucleotide
auccacacggaaauucuuc

SEQ ID NO: 2093642 - RNA, 19 nt, Artificial Sequence
  Description of Artificial Sequence: Synthetic oligonucleotide
uuacaccuggugagaagca

SEQ ID NO: 2093643 - RNA, 19 nt, Artificial Sequence
  Description of Artificial Sequence: Synthetic oligonucleotide
aguaguuaccggggaaguc

SEQ ID NO: 2093644 - RNA, 19 nt, Artificial Sequence
  Description of Artificial Sequence: Synthetic oligonucleotide
agcgguccuggucccaggc

SEQ ID NO: 2093645 - RNA, 19 nt, Artificial Sequence
  Description of Artificial Sequence: Synthetic oligonucleotide
cugguauauacuuuguggu

SEQ ID NO: 2093646 - RNA, 19 nt, Artificial Sequence
  Description of Artificial Sequence: Synthetic oligonucleotide
caaccgagcauuggcaacc

SEQ ID NO: 2093647 - RNA, 19 nt, Artificial Sequence
  Description of Artificial Sequence: Synthetic oligonucleotide
acaccugaccuguagccga

SEQ ID NO: 2093648 - RNA, 19 nt, Artificial Sequence
  Description of Artificial Sequence: Synthetic oligonucleotide
ugacgcagugcauaaccaa

SEQ ID NO: 2093649 - RNA, 19 nt, Artificial Sequence
  Description of Artificial Sequence: Synthetic oligonucleotide
uggacucgacagaaaagau

SEQ ID NO: 2093650 - RNA, 19 nt, Artificial Sequence
  Description of Artificial Sequence: Synthetic oligonucleotide
gacaauggauguguuauua

SEQ ID NO: 2093651 - RNA, 19 nt, Artificial Sequence
  Description of Artificial Sequence: Synthetic oligonucleotide
aacacgugcaaggcgcaca

SEQ ID NO: 2093652 - RNA, 19 nt, Artificial Sequence
  Description of Artificial Sequence: Synthetic oligonucleotide
caauggauguguuauuaua

SEQ ID NO: 2093653 - RNA, 19 nt, Artificial Sequence
  Description of Artificial Sequence: Synthetic oligonucleotide
caggcgucgucguaacccg

SEQ ID NO: 2093654 - RNA, 19 nt, Artificial Sequence
  Description of Artificial Sequence: Synthetic oligonucleotide
agcaaggaucucauccugg

SEQ ID NO: 2093655 - RNA, 19 nt, Artificial Sequence
  Description of Artificial Sequence: Synthetic oligonucleotide
ucaauuccucagcugccuc

SEQ ID NO: 2093656 - RNA, 19 nt, Artificial Sequence
  Description of Artificial Sequence: Synthetic oligonucleotide
aauucuccggaaagcauua

SEQ ID NO: 2093657 - RNA, 19 nt, Artificial Sequence
  Description of Artificial Sequence: Synthetic oligonucleotide
caccaacacaucugguggc

SEQ ID NO: 2093658 - RNA, 19 nt, Artificial Sequence
  Description of Artificial Sequence: Synthetic oligonucleotide
gaaucguacccuccgggaa

SEQ ID NO: 2093659 - RNA, 19 nt, Artificial Sequence
  Description of Artificial Sequence: Synthetic oligonucleotide
caacacuccaguggacucg

SEQ ID NO: 2093660 - RNA, 19 nt, Artificial Sequence
  Description of Artificial Sequence: Synthetic oligonucleotide
uccccaucaguauuuugau

SEQ ID NO: 2093661 - RNA, 19 nt, Artificial Sequence
  Description of Artificial Sequence: Synthetic oligonucleotide
auuggcaacccuggccaac

SEQ ID NO: 2093662 - RNA, 19 nt, Artificial Sequence
  Description of Artificial Sequence: Synthetic oligonucleotide
aaccuuuuccacugccauu

SEQ ID NO: 2093663 - RNA, 19 nt, Artificial Sequence
  Description of Artificial Sequence: Synthetic oligonucleotide
gugugucuaucuccguucc

SEQ ID NO: 2093664 - RNA, 19 nt, Artificial Sequence
  Description of Artificial Sequence: Synthetic oligonucleotide
gguucaagcagagugaugu

SEQ ID NO: 2093665 - RNA, 19 nt, Artificial Sequence
  Description of Artificial Sequence: Synthetic oligonucleotide
ugggcgaaucguacccucc

SEQ ID NO: 2093666 - RNA, 19 nt, Artificial Sequence
  Description of Artificial Sequence: Synthetic oligonucleotide
gugguucacauagaguuca

SEQ ID NO: 2093667 - RNA, 19 nt, Artificial Sequence
  Description of Artificial Sequence: Synthetic oligonucleotide
aaacugcagugugucuauc

SEQ ID NO: 2093668 - RNA, 19 nt, Artificial Sequence
  Description of Artificial Sequence: Synthetic oligonucleotide
guggacguugcgaaccccg

SEQ ID NO: 2093669 - RNA, 19 nt, Artificial Sequence
  Description of Artificial Sequence: Synthetic oligonucleotide
uugcgaaccccgaacucuc

SEQ ID NO: 2093670 - RNA, 19 nt, Artificial Sequence
  Description of Artificial Sequence: Synthetic oligonucleotide
acguugcgaaccccgaacu

SEQ ID NO: 2093671 - RNA, 19 nt, Artificial Sequence
  Description of Artificial Sequence: Synthetic oligonucleotide
caucaauucccaccauguc

SEQ ID NO: 2093672 - RNA, 19 nt, Artificial Sequence
  Description of Artificial Sequence: Synthetic oligonucleotide
gugcauaaccaagucaauc

SEQ ID NO: 2093673 - RNA, 19 nt, Artificial Sequence
  Description of Artificial Sequence: Synthetic oligonucleotide
ugugucuaucuccguuccu

SEQ ID NO: 2093674 - RNA, 19 nt, Artificial Sequence
  Description of Artificial Sequence: Synthetic oligonucleotide
augucgucaugaacugggc

SEQ ID NO: 2093675 - RNA, 19 nt, Artificial Sequence
  Description of Artificial Sequence: Synthetic oligonucleotide
cuaacagaauucuccggaa

SEQ ID NO: 2093676 - RNA, 19 nt, Artificial Sequence
  Description of Artificial Sequence: Synthetic oligonucleotide
ucggugguguggacguugc

SEQ ID NO: 2093677 - RNA, 19 nt, Artificial Sequence
  Description of Artificial Sequence: Synthetic oligonucleotide
cuaucuccguuccuucuuc

SEQ ID NO: 2093678 - RNA, 19 nt, Artificial Sequence
  Description of Artificial Sequence: Synthetic oligonucleotide
ccggaaagcauuagcaaug

SEQ ID NO: 2093679 - RNA, 19 nt, Artificial Sequence
  Description of Artificial Sequence: Synthetic oligonucleotide
ucgucguaacccgaguagu

SEQ ID NO: 2093680 - RNA, 19 nt, Artificial Sequence
  Description of Artificial Sequence: Synthetic oligonucleotide
guuaccggggaagucggug

SEQ ID NO: 2093681 - RNA, 19 nt, Artificial Sequence
  Description of Artificial Sequence: Synthetic oligonucleotide
agacaucagccugguuucc

SEQ ID NO: 2093682 - RNA, 19 nt, Artificial Sequence
  Description of Artificial Sequence: Synthetic oligonucleotide
uggacguugcgaaccccga

SEQ ID NO: 2093683 - RNA, 19 nt, Artificial Sequence
  Description of Artificial Sequence: Synthetic oligonucleotide
uacaccuggugagaagcac

SEQ ID NO: 2093684 - RNA, 19 nt, Artificial Sequence
  Description of Artificial Sequence: Synthetic oligonucleotide
gguguggacguugcgaacc

SEQ ID NO: 2093685 - RNA, 19 nt, Artificial Sequence
  Description of Artificial Sequence: Synthetic oligonucleotide
guggaucagcaagaauggg

SEQ ID NO: 2093686 - RNA, 19 nt, Artificial Sequence
  Description of Artificial Sequence: Synthetic oligonucleotide
gugagaagcaccugcucaa

SEQ ID NO: 2093687 - RNA, 19 nt, Artificial Sequence
  Description of Artificial Sequence: Synthetic oligonucleotide
uggugagaagcaccugcuc

SEQ ID NO: 2093688 - RNA, 19 nt, Artificial Sequence
  Description of Artificial Sequence: Synthetic oligonucleotide
gaccuguagccgaaacugc

SEQ ID NO: 2093689 - RNA, 19 nt, Artificial Sequence
  Description of Artificial Sequence: Synthetic oligonucleotide
guguuauuauaaaccagaa

SEQ ID NO: 2093690 - RNA, 19 nt, Artificial Sequence
  Description of Artificial Sequence: Synthetic oligonucleotide
uugggguucuugguacacc

SEQ ID NO: 2093691 - RNA, 19 nt, Artificial Sequence
  Description of Artificial Sequence: Synthetic oligonucleotide
ggcaugaucuuugccaaug

SEQ ID NO: 2093692 - RNA, 19 nt, Artificial Sequence
  Description of Artificial Sequence: Synthetic oligonucleotide
cauuccggaagauuucucu

SEQ ID NO: 2093693 - RNA, 19 nt, Artificial Sequence
  Description of Artificial Sequence: Synthetic oligonucleotide
uuagcagcauugggguucu

SEQ ID NO: 2093694 - RNA, 19 nt, Artificial Sequence
  Description of Artificial Sequence: Synthetic oligonucleotide
cuucacucaccaacacauc

SEQ ID NO: 2093695 - RNA, 19 nt, Artificial Sequence
  Description of Artificial Sequence: Synthetic oligonucleotide
uuggcaacccuggccaacu

SEQ ID NO: 2093696 - RNA, 19 nt, Artificial Sequence
  Description of Artificial Sequence: Synthetic oligonucleotide
gcauaaccaagucaaucuc

SEQ ID NO: 2093697 - RNA, 19 nt, Artificial Sequence
  Description of Artificial Sequence: Synthetic oligonucleotide
auacuuugugguucacaua

SEQ ID NO: 2093698 - RNA, 19 nt, Artificial Sequence
  Description of Artificial Sequence: Synthetic oligonucleotide
gcgaaucguacccuccggg

SEQ ID NO: 2093699 - RNA, 19 nt, Artificial Sequence
  Description of Artificial Sequence: Synthetic oligonucleotide
ccauaugaacaacauccac

SEQ ID NO: 2093700 - RNA, 19 nt, Artificial Sequence
  Description of Artificial Sequence: Synthetic oligonucleotide
agaaccacgcgcguccgca

SEQ ID NO: 2093701 - RNA, 19 nt, Artificial Sequence
  Description of Artificial Sequence: Synthetic oligonucleotide
ucgucaugaacugggcgaa

SEQ ID NO: 2093702 - RNA, 19 nt, Artificial Sequence
  Description of Artificial Sequence: Synthetic oligonucleotide
caguggacucgacagaaaa

SEQ ID NO: 2093703 - RNA, 19 nt, Artificial Sequence
  Description of Artificial Sequence: Synthetic oligonucleotide
gcaccucaauuacaccugg

SEQ ID NO: 2093704 - RNA, 19 nt, Artificial Sequence
  Description of Artificial Sequence: Synthetic oligonucleotide
agaauucuccggaaagcau

SEQ ID NO: 2093705 - RNA, 19 nt, Artificial Sequence
  Description of Artificial Sequence: Synthetic oligonucleotide
guuggcaccucagcuaaca

SEQ ID NO: 2093706 - RNA, 19 nt, Artificial Sequence
  Description of Artificial Sequence: Synthetic oligonucleotide
ugccaaugcccuugacgca

SEQ ID NO: 2093707 - RNA, 19 nt, Artificial Sequence
  Description of Artificial Sequence: Synthetic oligonucleotide
cagccugguuucccaaggg

SEQ ID NO: 2093708 - RNA, 19 nt, Artificial Sequence
  Description of Artificial Sequence: Synthetic oligonucleotide
guguggacguugcgaaccc

SEQ ID NO: 2093709 - RNA, 19 nt, Artificial Sequence
  Description of Artificial Sequence: Synthetic oligonucleotide
ggcaccucagcuaacagaa

SEQ ID NO: 2093710 - RNA, 19 nt, Artificial Sequence
  Description of Artificial Sequence: Synthetic oligonucleotide
acccgaguaguuaccgggg

SEQ ID NO: 2093711 - RNA, 19 nt, Artificial Sequence
  Description of Artificial Sequence: Synthetic oligonucleotide
cgagcauuggcaacccugg

SEQ ID NO: 2093712 - RNA, 19 nt, Artificial Sequence
  Description of Artificial Sequence: Synthetic oligonucleotide
ugucgaacuccaguguauu

SEQ ID NO: 2093713 - RNA, 19 nt, Artificial Sequence
  Description of Artificial Sequence: Synthetic oligonucleotide
gggcgaaucguacccuccg

SEQ ID NO: 2093714 - RNA, 19 nt, Artificial Sequence
  Description of Artificial Sequence: Synthetic oligonucleotide
gucaugaacugggcgaauc

SEQ ID NO: 2093715 - RNA, 19 nt, Artificial Sequence
  Description of Artificial Sequence: Synthetic oligonucleotide
cuccggaaagcauuagcaa

SEQ ID NO: 2093716 - RNA, 19 nt, Artificial Sequence
  Description of Artificial Sequence: Synthetic oligonucleotide
uaccggggaagucgguggu

SEQ ID NO: 2093717 - RNA, 19 nt, Artificial Sequence
  Description of Artificial Sequence: Synthetic oligonucleotide
accaacacaucugguggca

SEQ ID NO: 2093718 - RNA, 19 nt, Artificial Sequence
  Description of Artificial Sequence: Synthetic oligonucleotide
ccucaauuacaccugguga

SEQ ID NO: 2093719 - RNA, 19 nt, Artificial Sequence
  Description of Artificial Sequence: Synthetic oligonucleotide
accccgaacucucccagaa

SEQ ID NO: 2093720 - RNA, 19 nt, Artificial Sequence
  Description of Artificial Sequence: Synthetic oligonucleotide
ucgaagcgguccugguccc

SEQ ID NO: 2093721 - RNA, 19 nt, Artificial Sequence
  Description of Artificial Sequence: Synthetic oligonucleotide
gcagugcauaaccaaguca

SEQ ID NO: 2093722 - RNA, 19 nt, Artificial Sequence
  Description of Artificial Sequence: Synthetic oligonucleotide
auccaaccgagcauuggca

SEQ ID NO: 2093723 - RNA, 19 nt, Artificial Sequence
  Description of Artificial Sequence: Synthetic oligonucleotide
gccugguauauacuuugug

SEQ ID NO: 2093724 - RNA, 19 nt, Artificial Sequence
  Description of Artificial Sequence: Synthetic oligonucleotide
ggcgaaucguacccuccgg

SEQ ID NO: 2093725 - RNA, 19 nt, Artificial Sequence
  Description of Artificial Sequence: Synthetic oligonucleotide
ugguguggacguugcgaac

SEQ ID NO: 2093726 - RNA, 19 nt, Artificial Sequence
  Description of Artificial Sequence: Synthetic oligonucleotide
auucuccggaaagcauuag

SEQ ID NO: 2093727 - RNA, 19 nt, Artificial Sequence
  Description of Artificial Sequence: Synthetic oligonucleotide
ugagaagcaccugcucaau

SEQ ID NO: 2093728 - RNA, 19 nt, Artificial Sequence
  Description of Artificial Sequence: Synthetic oligonucleotide
aggggacccaugucauaug

SEQ ID NO: 2093729 - RNA, 19 nt, Artificial Sequence
  Description of Artificial Sequence: Synthetic oligonucleotide
guugcgaaccccgaacucu

SEQ ID NO: 2093730 - RNA, 19 nt, Artificial Sequence
  Description of Artificial Sequence: Synthetic oligonucleotide
uguggacguugcgaacccc

SEQ ID NO: 2093731 - RNA, 19 nt, Artificial Sequence
  Description of Artificial Sequence: Synthetic oligonucleotide
ccgagcauuggcaacccug

SEQ ID NO: 2093732 - RNA, 19 nt, Artificial Sequence
  Description of Artificial Sequence: Synthetic oligonucleotide
ugguucacauagaguucau

SEQ ID NO: 2093733 - RNA, 19 nt, Artificial Sequence
  Description of Artificial Sequence: Synthetic oligonucleotide
ggacccaugucauaugccu

SEQ ID NO: 2093734 - RNA, 19 nt, Artificial Sequence
  Description of Artificial Sequence: Synthetic oligonucleotide
acgcagugcauaaccaagu

SEQ ID NO: 2093735 - RNA, 19 nt, Artificial Sequence
  Description of Artificial Sequence: Synthetic oligonucleotide
cccagaaccacgcgcgucc

SEQ ID NO: 2093736 - RNA, 19 nt, Artificial Sequence
  Description of Artificial Sequence: Synthetic oligonucleotide
ccaggcgucgucguaaccc

SEQ ID NO: 2093737 - RNA, 19 nt, Artificial Sequence
  Description of Artificial Sequence: Synthetic oligonucleotide
uguuggcaccucagcuaac

SEQ ID NO: 2093738 - RNA, 19 nt, Artificial Sequence
  Description of Artificial Sequence: Synthetic oligonucleotide
cugggcgaaucguacccuc

SEQ ID NO: 2093739 - RNA, 19 nt, Artificial Sequence
  Description of Artificial Sequence: Synthetic oligonucleotide
ggggaagucgguggugugg

SEQ ID NO: 2093740 - RNA, 19 nt, Artificial Sequence
  Description of Artificial Sequence: Synthetic oligonucleotide
cacuccaguggacucgaca

SEQ ID NO: 2093741 - RNA, 19 nt, Artificial Sequence
  Description of Artificial Sequence: Synthetic oligonucleotide
augaacugggcgaaucgua

SEQ ID NO: 2093742 - RNA, 19 nt, Artificial Sequence
  Description of Artificial Sequence: Synthetic oligonucleotide
ggugguguggacguugcga

SEQ ID NO: 2093743 - RNA, 19 nt, Artificial Sequence
  Description of Artificial Sequence: Synthetic oligonucleotide
cacgggugagaacuuggca

SEQ ID NO: 2093744 - RNA, 19 nt, Artificial Sequence
  Description of Artificial Sequence: Synthetic oligonucleotide
agugcauaaccaagucaau

SEQ ID NO: 2093745 - RNA, 19 nt, Artificial Sequence
  Description of Artificial Sequence: Synthetic oligonucleotide
caauuacaccuggugagaa

SEQ ID NO: 2093746 - RNA, 19 nt, Artificial Sequence
  Description of Artificial Sequence: Synthetic oligonucleotide
cgaagcugagcaauaagga

SEQ ID NO: 2093747 - RNA, 19 nt, Artificial Sequence
  Description of Artificial Sequence: Synthetic oligonucleotide
cacggaaauucuucucgaa

SEQ ID NO: 2093748 - RNA, 19 nt, Artificial Sequence
  Description of Artificial Sequence: Synthetic oligonucleotide
uccccuggguuccuauauu

SEQ ID NO: 2093749 - RNA, 19 nt, Artificial Sequence
  Description of Artificial Sequence: Synthetic oligonucleotide
aaccgccggcacuucccca

SEQ ID NO: 2093750 - RNA, 19 nt, Artificial Sequence
  Description of Artificial Sequence: Synthetic oligonucleotide
aucguacccuccgggaaga

SEQ ID NO: 2093751 - RNA, 19 nt, Artificial Sequence
  Description of Artificial Sequence: Synthetic oligonucleotide
cauaugccugguauauacu

SEQ ID NO: 2093752 - RNA, 19 nt, Artificial Sequence
  Description of Artificial Sequence: Synthetic oligonucleotide
accgccggcacuuccccau

SEQ ID NO: 2093753 - RNA, 19 nt, Artificial Sequence
  Description of Artificial Sequence: Synthetic oligonucleotide
gaccaggccgaagcugagc

SEQ ID NO: 2093754 - RNA, 19 nt, Artificial Sequence
  Description of Artificial Sequence: Synthetic oligonucleotide
gaacacgugcaaggcgcac

SEQ ID NO: 2093755 - RNA, 19 nt, Artificial Sequence
  Description of Artificial Sequence: Synthetic oligonucleotide
guagccgaaacugcagugu

SEQ ID NO: 2093756 - RNA, 19 nt, Artificial Sequence
  Description of Artificial Sequence: Synthetic oligonucleotide
ggguuccuauauucaaaca

SEQ ID NO: 2093757 - RNA, 19 nt, Artificial Sequence
  Description of Artificial Sequence: Synthetic oligonucleotide
acugggcgaaucguacccu

SEQ ID NO: 2093758 - RNA, 19 nt, Artificial Sequence
  Description of Artificial Sequence: Synthetic oligonucleotide
ucccaggcgucgucguaac

SEQ ID NO: 2093759 - RNA, 19 nt, Artificial Sequence
  Description of Artificial Sequence: Synthetic oligonucleotide
uggcaugaucuuugccaau

SEQ ID NO: 2093760 - RNA, 19 nt, Artificial Sequence
  Description of Artificial Sequence: Synthetic oligonucleotide
agaguucauugggaucaga

SEQ ID NO: 2093761 - RNA, 19 nt, Artificial Sequence
  Description of Artificial Sequence: Synthetic oligonucleotide
cugccucaccuuccacagg

SEQ ID NO: 2093762 - RNA, 19 nt, Artificial Sequence
  Description of Artificial Sequence: Synthetic oligonucleotide
gucguaacccgaguaguua

SEQ ID NO: 2093763 - RNA, 19 nt, Artificial Sequence
  Description of Artificial Sequence: Synthetic oligonucleotide
gaguaguuaccggggaagu

SEQ ID NO: 2093764 - RNA, 19 nt, Artificial Sequence
  Description of Artificial Sequence: Synthetic oligonucleotide
guacccuccgggaagacau

SEQ ID NO: 2093765 - RNA, 19 nt, Artificial Sequence
  Description of Artificial Sequence: Synthetic oligonucleotide
gcucaauuccucagcugcc

SEQ ID NO: 2093766 - RNA, 19 nt, Artificial Sequence
  Description of Artificial Sequence: Synthetic oligonucleotide
ggucccgaacacgugcaag

SEQ ID NO: 2093767 - RNA, 19 nt, Artificial Sequence
  Description of Artificial Sequence: Synthetic oligonucleotide
gguucuugguacaccugac

SEQ ID NO: 2093768 - RNA, 19 nt, Artificial Sequence
  Description of Artificial Sequence: Synthetic oligonucleotide
gccacgggugagaacuugg

SEQ ID NO: 2093769 - RNA, 19 nt, Artificial Sequence
  Description of Artificial Sequence: Synthetic oligonucleotide
ccacgggugagaacuuggc

SEQ ID NO: 2093770 - RNA, 19 nt, Artificial Sequence
  Description of Artificial Sequence: Synthetic oligonucleotide
gccgaaacugcaguguguc

SEQ ID NO: 2093771 - RNA, 19 nt, Artificial Sequence
  Description of Artificial Sequence: Synthetic oligonucleotide
cguaacccgaguaguuacc

SEQ ID NO: 2093772 - RNA, 19 nt, Artificial Sequence
  Description of Artificial Sequence: Synthetic oligonucleotide
gguauccaaccgagcauug

SEQ ID NO: 2093773 - RNA, 19 nt, Artificial Sequence
  Description of Artificial Sequence: Synthetic oligonucleotide
uggucccaggcgucgucgu

SEQ ID NO: 2093774 - RNA, 19 nt, Artificial Sequence
  Description of Artificial Sequence: Synthetic oligonucleotide
gucuaucuccguuccuucu

SEQ ID NO: 2093775 - RNA, 19 nt, Artificial Sequence
  Description of Artificial Sequence: Synthetic oligonucleotide
gcaucaauucccaccaugu

SEQ ID NO: 2093776 - RNA, 19 nt, Artificial Sequence
  Description of Artificial Sequence: Synthetic oligonucleotide
caccaugucgaacuccagu

SEQ ID NO: 2093777 - RNA, 19 nt, Artificial Sequence
  Description of Artificial Sequence: Synthetic oligonucleotide
cggaaagcauuagcaaugg

SEQ ID NO: 2093778 - RNA, 19 nt, Artificial Sequence
  Description of Artificial Sequence: Synthetic oligonucleotide
agccgaaacugcagugugu

SEQ ID NO: 2093779 - RNA, 19 nt, Artificial Sequence
  Description of Artificial Sequence: Synthetic oligonucleotide
ggacucgacagaaaagaua

SEQ ID NO: 2093780 - RNA, 19 nt, Artificial Sequence
  Description of Artificial Sequence: Synthetic oligonucleotide
cagaaccacgcgcguccgc

SEQ ID NO: 2093781 - RNA, 19 nt, Artificial Sequence
  Description of Artificial Sequence: Synthetic oligonucleotide
acucaccaacacaucuggu

SEQ ID NO: 2093782 - RNA, 19 nt, Artificial Sequence
  Description of Artificial Sequence: Synthetic oligonucleotide
cuguagccgaaacugcagu

SEQ ID NO: 2093783 - RNA, 19 nt, Artificial Sequence
  Description of Artificial Sequence: Synthetic oligonucleotide
uacccuccgggaagacauc

SEQ ID NO: 2093784 - RNA, 19 nt, Artificial Sequence
  Description of Artificial Sequence: Synthetic oligonucleotide
accgagcauuggcaacccu

SEQ ID NO: 2093785 - RNA, 19 nt, Artificial Sequence
  Description of Artificial Sequence: Synthetic oligonucleotide
ccccuggguuccuauauuc

SEQ ID NO: 2093786 - RNA, 19 nt, Artificial Sequence
  Description of Artificial Sequence: Synthetic oligonucleotide
gggacccaugucauaugcc

SEQ ID NO: 2093787 - RNA, 19 nt, Artificial Sequence
  Description of Artificial Sequence: Synthetic oligonucleotide
gacguggaucagcaagaau

SEQ ID NO: 2093788 - RNA, 19 nt, Artificial Sequence
  Description of Artificial Sequence: Synthetic oligonucleotide
cucaauuccucagcugccu

SEQ ID NO: 2093789 - RNA, 19 nt, Artificial Sequence
  Description of Artificial Sequence: Synthetic oligonucleotide
gggaagucgguggugugga

SEQ ID NO: 2093790 - RNA, 19 nt, Artificial Sequence
  Description of Artificial Sequence: Synthetic oligonucleotide
gcggugagcaaggaucuca

SEQ ID NO: 2093791 - RNA, 19 nt, Artificial Sequence
  Description of Artificial Sequence: Synthetic oligonucleotide
gucauaugccugguauaua

SEQ ID NO: 2093792 - RNA, 19 nt, Artificial Sequence
  Description of Artificial Sequence: Synthetic oligonucleotide
ggcacuuccccaucaguau

SEQ ID NO: 2093793 - RNA, 19 nt, Artificial Sequence
  Description of Artificial Sequence: Synthetic oligonucleotide
cauuggcaacccuggccaa

SEQ ID NO: 2093794 - RNA, 19 nt, Artificial Sequence
  Description of Artificial Sequence: Synthetic oligonucleotide
uggcaacccuggccaacuu

SEQ ID NO: 2093795 - RNA, 19 nt, Artificial Sequence
  Description of Artificial Sequence: Synthetic oligonucleotide
gucccaggcgucgucguaa

SEQ ID NO: 2093796 - RNA, 19 nt, Artificial Sequence
  Description of Artificial Sequence: Synthetic oligonucleotide
ccgguagcuggcuguugcc

SEQ ID NO: 2093797 - RNA, 19 nt, Artificial Sequence
  Description of Artificial Sequence: Synthetic oligonucleotide
aguuaccggggaagucggu

SEQ ID NO: 2093798 - RNA, 19 nt, Artificial Sequence
  Description of Artificial Sequence: Synthetic oligonucleotide
cagugugucuaucuccguu

SEQ ID NO: 2093799 - RNA, 19 nt, Artificial Sequence
  Description of Artificial Sequence: Synthetic oligonucleotide
acucgacagaaaagauaua

SEQ ID NO: 2093800 - RNA, 19 nt, Artificial Sequence
  Description of Artificial Sequence: Synthetic oligonucleotide
cagcaagaauggggaugag

SEQ ID NO: 2093801 - RNA, 19 nt, Artificial Sequence
  Description of Artificial Sequence: Synthetic oligonucleotide
ggagccgguagcuggcugu

SEQ ID NO: 2093802 - RNA, 19 nt, Artificial Sequence
  Description of Artificial Sequence: Synthetic oligonucleotide
cgaaucguacccuccggga

SEQ ID NO: 2093803 - RNA, 19 nt, Artificial Sequence
  Description of Artificial Sequence: Synthetic oligonucleotide
gggguucuugguacaccug

SEQ ID NO: 2093804 - RNA, 19 nt, Artificial Sequence
  Description of Artificial Sequence: Synthetic oligonucleotide
ggacguugcgaaccccgaa

SEQ ID NO: 2093805 - RNA, 19 nt, Artificial Sequence
  Description of Artificial Sequence: Synthetic oligonucleotide
acgcgcguccgcaucuccu

SEQ ID NO: 2093806 - RNA, 19 nt, Artificial Sequence
  Description of Artificial Sequence: Synthetic oligonucleotide
ucguacccuccgggaagac

SEQ ID NO: 2093807 - RNA, 19 nt, Artificial Sequence
  Description of Artificial Sequence: Synthetic oligonucleotide
cuccccuggguuccuauau

SEQ ID NO: 2093808 - RNA, 19 nt, Artificial Sequence
  Description of Artificial Sequence: Synthetic oligonucleotide
caccucaauuacaccuggu

SEQ ID NO: 2093809 - RNA, 19 nt, Artificial Sequence
  Description of Artificial Sequence: Synthetic oligonucleotide
agccgguagcuggcuguug

SEQ ID NO: 2093810 - RNA, 19 nt, Artificial Sequence
  Description of Artificial Sequence: Synthetic oligonucleotide
ccagaaccacgcgcguccg

SEQ ID NO: 2093811 - RNA, 19 nt, Artificial Sequence
  Description of Artificial Sequence: Synthetic oligonucleotide
cgaaacugcagugugucua

SEQ ID NO: 2093812 - RNA, 19 nt, Artificial Sequence
  Description of Artificial Sequence: Synthetic oligonucleotide
gcgcguccgcaucuccucc

SEQ ID NO: 2093813 - RNA, 19 nt, Artificial Sequence
  Description of Artificial Sequence: Synthetic oligonucleotide
gaaccacgcgcguccgcau

SEQ ID NO: 2093814 - RNA, 19 nt, Artificial Sequence
  Description of Artificial Sequence: Synthetic oligonucleotide
cguugcgaaccccgaacuc

SEQ ID NO: 2093815 - RNA, 19 nt, Artificial Sequence
  Description of Artificial Sequence: Synthetic oligonucleotide
ccuugacgcagugcauaac

SEQ ID NO: 2093816 - RNA, 19 nt, Artificial Sequence
  Description of Artificial Sequence: Synthetic oligonucleotide
cccuugacgcagugcauaa

SEQ ID NO: 2093817 - RNA, 19 nt, Artificial Sequence
  Description of Artificial Sequence: Synthetic oligonucleotide
gcaacccuggccaacuuuu

SEQ ID NO: 2093818 - RNA, 19 nt, Artificial Sequence
  Description of Artificial Sequence: Synthetic oligonucleotide
aggcgucgucguaacccga

SEQ ID NO: 2093819 - RNA, 19 nt, Artificial Sequence
  Description of Artificial Sequence: Synthetic oligonucleotide
ccccgaacucucccagaac

SEQ ID NO: 2093820 - RNA, 19 nt, Artificial Sequence
  Description of Artificial Sequence: Synthetic oligonucleotide
cgaaccccgaacucuccca

SEQ ID NO: 2093821 - RNA, 19 nt, Artificial Sequence
  Description of Artificial Sequence: Synthetic oligonucleotide
gcccuugacgcagugcaua

SEQ ID NO: 2093822 - RNA, 19 nt, Artificial Sequence
  Description of Artificial Sequence: Synthetic oligonucleotide
ccaugucgaacuccagugu

SEQ ID NO: 2093823 - RNA, 19 nt, Artificial Sequence
  Description of Artificial Sequence: Synthetic oligonucleotide
cccaggcgucgucguaacc

SEQ ID NO: 2093824 - RNA, 19 nt, Artificial Sequence
  Description of Artificial Sequence: Synthetic oligonucleotide
ccaguggacucgacagaaa

SEQ ID NO: 2093825 - RNA, 19 nt, Artificial Sequence
  Description of Artificial Sequence: Synthetic oligonucleotide
ggcaacccuggccaacuuu

SEQ ID NO: 2093826 - RNA, 19 nt, Artificial Sequence
  Description of Artificial Sequence: Synthetic oligonucleotide
gcauuagcaauggcagcau

SEQ ID NO: 2093827 - RNA, 19 nt, Artificial Sequence
  Description of Artificial Sequence: Synthetic oligonucleotide
cucccagaaccacgcgcgu

SEQ ID NO: 2093828 - RNA, 19 nt, Artificial Sequence
  Description of Artificial Sequence: Synthetic oligonucleotide
cgcgcguccgcaucuccuc

SEQ ID NO: 2093829 - RNA, 19 nt, Artificial Sequence
  Description of Artificial Sequence: Synthetic oligonucleotide
cgucgucguaacccgagua

SEQ ID NO: 2093830 - RNA, 19 nt, Artificial Sequence
  Description of Artificial Sequence: Synthetic oligonucleotide
gagccgguagcuggcuguu

SEQ ID NO: 2093831 - RNA, 19 nt, Artificial Sequence
  Description of Artificial Sequence: Synthetic oligonucleotide
gcgucgucguaacccgagu

SEQ ID NO: 2093832 - RNA, 19 nt, Artificial Sequence
  Description of Artificial Sequence: Synthetic oligonucleotide
ccaggccgaagcugagcaa

SEQ ID NO: 2093833 - RNA, 19 nt, Artificial Sequence
  Description of Artificial Sequence: Synthetic oligonucleotide
gcaaggcgcacagccuucu

SEQ ID NO: 2093834 - RNA, 19 nt, Artificial Sequence
  Description of Artificial Sequence: Synthetic oligonucleotide
ccgaaacugcagugugucu

SEQ ID NO: 2093835 - RNA, 19 nt, Artificial Sequence
  Description of Artificial Sequence: Synthetic oligonucleotide
cagcaucaauucccaccau

SEQ ID NO: 2093836 - RNA, 19 nt, Artificial Sequence
  Description of Artificial Sequence: Synthetic oligonucleotide
cguacccuccgggaagaca

SEQ ID NO: 2093837 - RNA, 19 nt, Artificial Sequence
  Description of Artificial Sequence: Synthetic oligonucleotide
cgguagcuggcuguugcca

SEQ ID NO: 2093838 - RNA, 19 nt, Artificial Sequence
  Description of Artificial Sequence: Synthetic oligonucleotide
caaggcgcacagccuucuu

SEQ ID NO: 2093839 - RNA, 19 nt, Artificial Sequence
  Description of Artificial Sequence: Synthetic oligonucleotide
caggagccgguagcuggcu

SEQ ID NO: 2093840 - RNA, 19 nt, Artificial Sequence
  Description of Artificial Sequence: Synthetic oligonucleotide
ccuuagcagcauugggguu

SEQ ID NO: 2093841 - RNA, 19 nt, Artificial Sequence
  Description of Artificial Sequence: Synthetic oligonucleotide
cgucguaacccgaguaguu

SEQ ID NO: 2093842 - RNA, 19 nt, Artificial Sequence
  Description of Artificial Sequence: Synthetic oligonucleotide
ccggggaagucgguggugu

SEQ ID NO: 2093843 - RNA, 19 nt, Artificial Sequence
  Description of Artificial Sequence: Synthetic oligonucleotide
ggccaacuuuugaccuugu

SEQ ID NO: 2093844 - RNA, 19 nt, Artificial Sequence
  Description of Artificial Sequence: Synthetic oligonucleotide
ccacgcgcguccgcaucuc

SEQ ID NO: 2093845 - RNA, 19 nt, Artificial Sequence
  Description of Artificial Sequence: Synthetic oligonucleotide
cgccgccaucguccaccac

SEQ ID NO: 2093846 - RNA, 19 nt, Artificial Sequence
  Description of Artificial Sequence: Synthetic oligonucleotide
cgucaugaacugggcgaau

SEQ ID NO: 2093847 - RNA, 19 nt, Artificial Sequence
  Description of Artificial Sequence: Synthetic oligonucleotide
aauuucucgaaccagacgc

SEQ ID NO: 2093848 - RNA, 19 nt, Artificial Sequence
  Description of Artificial Sequence: Synthetic oligonucleotide
acaaacaccauuuaguugc

SEQ ID NO: 2093849 - RNA, 19 nt, Artificial Sequence
  Description of Artificial Sequence: Synthetic oligonucleotide
uguaggacaacucaguuag

SEQ ID NO: 2093850 - RNA, 19 nt, Artificial Sequence
  Description of Artificial Sequence: Synthetic oligonucleotide
ugaaagauggcugacaccg

SEQ ID NO: 2093851 - RNA, 19 nt, Artificial Sequence
  Description of Artificial Sequence: Synthetic oligonucleotide
aagaaauuuacuuauuuua

SEQ ID NO: 2093852 - RNA, 19 nt, Artificial Sequence
  Description of Artificial Sequence: Synthetic oligonucleotide
aaauuuacuuauuuuaaaa

SEQ ID NO: 2093853 - RNA, 19 nt, Artificial Sequence
  Description of Artificial Sequence: Synthetic oligonucleotide
uguuuugaaguccugagca

SEQ ID NO: 2093854 - RNA, 19 nt, Artificial Sequence
  Description of Artificial Sequence: Synthetic oligonucleotide
uguacuugcauguaggaca

SEQ ID NO: 2093855 - RNA, 19 nt, Artificial Sequence
  Description of Artificial Sequence: Synthetic oligonucleotide
auugaaagauggcugacac

SEQ ID NO: 2093856 - RNA, 19 nt, Artificial Sequence
  Description of Artificial Sequence: Synthetic oligonucleotide
uucaguggauuucugauag

SEQ ID NO: 2093857 - RNA, 19 nt, Artificial Sequence
  Description of Artificial Sequence: Synthetic oligonucleotide
uccagaaaauuuuaacagg

SEQ ID NO: 2093858 - RNA, 19 nt, Artificial Sequence
  Description of Artificial Sequence: Synthetic oligonucleotide
uguccagaaaauuuuaaca

SEQ ID NO: 2093859 - RNA, 19 nt, Artificial Sequence
  Description of Artificial Sequence: Synthetic oligonucleotide
ucugauuucacggagugcc

SEQ ID NO: 2093860 - RNA, 19 nt, Artificial Sequence
  Description of Artificial Sequence: Synthetic oligonucleotide
auagcgucugauuucacgg

SEQ ID NO: 2093861 - RNA, 19 nt, Artificial Sequence
  Description of Artificial Sequence: Synthetic oligonucleotide
ucaauaagaaauuuacuua

SEQ ID NO: 2093862 - RNA, 19 nt, Artificial Sequence
  Description of Artificial Sequence: Synthetic oligonucleotide
guccagaaaauuuuaacag

SEQ ID NO: 2093863 - RNA, 19 nt, Artificial Sequence
  Description of Artificial Sequence: Synthetic oligonucleotide
aacacaauugaaagauggc

SEQ ID NO: 2093864 - RNA, 19 nt, Artificial Sequence
  Description of Artificial Sequence: Synthetic oligonucleotide
gauagcgucugauuucacg

SEQ ID NO: 2093865 - RNA, 19 nt, Artificial Sequence
  Description of Artificial Sequence: Synthetic oligonucleotide
aaagauggcugacaccgag

SEQ ID NO: 2093866 - RNA, 19 nt, Artificial Sequence
  Description of Artificial Sequence: Synthetic oligonucleotide
agcaccuccuuacuuaccc

SEQ ID NO: 2093867 - RNA, 19 nt, Artificial Sequence
  Description of Artificial Sequence: Synthetic oligonucleotide
ucuguuuugaaguccugag

SEQ ID NO: 2093868 - RNA, 19 nt, Artificial Sequence
  Description of Artificial Sequence: Synthetic oligonucleotide
agaaaauuuuaacagguuu

SEQ ID NO: 2093869 - RNA, 19 nt, Artificial Sequence
  Description of Artificial Sequence: Synthetic oligonucleotide
cacaauugaaagauggcug

SEQ ID NO: 2093870 - RNA, 19 nt, Artificial Sequence
  Description of Artificial Sequence: Synthetic oligonucleotide
ugcauguaggacaacucag

SEQ ID NO: 2093871 - RNA, 19 nt, Artificial Sequence
  Description of Artificial Sequence: Synthetic oligonucleotide
aaaggccaaccagauaggc

SEQ ID NO: 2093872 - RNA, 19 nt, Artificial Sequence
  Description of Artificial Sequence: Synthetic oligonucleotide
ugagcaauuucucgaacca

SEQ ID NO: 2093873 - RNA, 19 nt, Artificial Sequence
  Description of Artificial Sequence: Synthetic oligonucleotide
aacaccauuuaguugccgu

SEQ ID NO: 2093874 - RNA, 19 nt, Artificial Sequence
  Description of Artificial Sequence: Synthetic oligonucleotide
auaagaaauuuacuuauuu

SEQ ID NO: 2093875 - RNA, 19 nt, Artificial Sequence
  Description of Artificial Sequence: Synthetic oligonucleotide
gaaucagaaguucagugga

SEQ ID NO: 2093876 - RNA, 19 nt, Artificial Sequence
  Description of Artificial Sequence: Synthetic oligonucleotide
agugccacaguaccaggcc

SEQ ID NO: 2093877 - RNA, 19 nt, Artificial Sequence
  Description of Artificial Sequence: Synthetic oligonucleotide
acaauugaaagauggcuga

SEQ ID NO: 2093878 - RNA, 19 nt, Artificial Sequence
  Description of Artificial Sequence: Synthetic oligonucleotide
auuuuaacagguuuauuua

SEQ ID NO: 2093879 - RNA, 19 nt, Artificial Sequence
  Description of Artificial Sequence: Synthetic oligonucleotide
agcucggcaagcgagaggc

SEQ ID NO: 2093880 - RNA, 19 nt, Artificial Sequence
  Description of Artificial Sequence: Synthetic oligonucleotide
uaagaaauuuacuuauuuu

SEQ ID NO: 2093881 - RNA, 19 nt, Artificial Sequence
  Description of Artificial Sequence: Synthetic oligonucleotide
uuuaacagguuuauuuaua

SEQ ID NO: 2093882 - RNA, 19 nt, Artificial Sequence
  Description of Artificial Sequence: Synthetic oligonucleotide
uuuuaacagguuuauuuau

SEQ ID NO: 2093883 - RNA, 19 nt, Artificial Sequence
  Description of Artificial Sequence: Synthetic oligonucleotide
gaaauuuacuuauuuuaaa

SEQ ID NO: 2093884 - RNA, 19 nt, Artificial Sequence
  Description of Artificial Sequence: Synthetic oligonucleotide
uugcauguaggacaacuca

SEQ ID NO: 2093885 - RNA, 19 nt, Artificial Sequence
  Description of Artificial Sequence: Synthetic oligonucleotide
aguccugagcaauuucucg

SEQ ID NO: 2093886 - RNA, 19 nt, Artificial Sequence
  Description of Artificial Sequence: Synthetic oligonucleotide
aauccaaaugcuggcauug

SEQ ID NO: 2093887 - RNA, 19 nt, Artificial Sequence
  Description of Artificial Sequence: Synthetic oligonucleotide
cugcgaacacaauugaaag

SEQ ID NO: 2093888 - RNA, 19 nt, Artificial Sequence
  Description of Artificial Sequence: Synthetic oligonucleotide
uuguccagaaaauuuuaac

SEQ ID NO: 2093889 - RNA, 19 nt, Artificial Sequence
  Description of Artificial Sequence: Synthetic oligonucleotide
cugagcaauuucucgaacc

SEQ ID NO: 2093890 - RNA, 19 nt, Artificial Sequence
  Description of Artificial Sequence: Synthetic oligonucleotide
uuuguacgagccaugguaa

SEQ ID NO: 2093891 - RNA, 19 nt, Artificial Sequence
  Description of Artificial Sequence: Synthetic oligonucleotide
uacaaacaccauuuaguug

SEQ ID NO: 2093892 - RNA, 19 nt, Artificial Sequence
  Description of Artificial Sequence: Synthetic oligonucleotide
aggccaaccagauaggccu

SEQ ID NO: 2093893 - RNA, 19 nt, Artificial Sequence
  Description of Artificial Sequence: Synthetic oligonucleotide
ucaccccuccaguagaggg

SEQ ID NO: 2093894 - RNA, 19 nt, Artificial Sequence
  Description of Artificial Sequence: Synthetic oligonucleotide
aaggccaaccagauaggcc

SEQ ID NO: 2093895 - RNA, 19 nt, Artificial Sequence
  Description of Artificial Sequence: Synthetic oligonucleotide
aaguucaguggauuucuga

SEQ ID NO: 2093896 - RNA, 19 nt, Artificial Sequence
  Description of Artificial Sequence: Synthetic oligonucleotide
aauugaaagauggcugaca

SEQ ID NO: 2093897 - RNA, 19 nt, Artificial Sequence
  Description of Artificial Sequence: Synthetic oligonucleotide
uuuccugggugcuuuacca

SEQ ID NO: 2093898 - RNA, 19 nt, Artificial Sequence
  Description of Artificial Sequence: Synthetic oligonucleotide
uggauuugcgggcagucug

SEQ ID NO: 2093899 - RNA, 19 nt, Artificial Sequence
  Description of Artificial Sequence: Synthetic oligonucleotide
aaugcuggcauuguccaga

SEQ ID NO: 2093900 - RNA, 19 nt, Artificial Sequence
  Description of Artificial Sequence: Synthetic oligonucleotide
uucugauagcgucugauuu

SEQ ID NO: 2093901 - RNA, 19 nt, Artificial Sequence
  Description of Artificial Sequence: Synthetic oligonucleotide
uugcgaaucagaaguucag

SEQ ID NO: 2093902 - RNA, 19 nt, Artificial Sequence
  Description of Artificial Sequence: Synthetic oligonucleotide
gucaauaagaaauuuacuu

SEQ ID NO: 2093903 - RNA, 19 nt, Artificial Sequence
  Description of Artificial Sequence: Synthetic oligonucleotide
ucgaaccagacgcuggaag

SEQ ID NO: 2093904 - RNA, 19 nt, Artificial Sequence
  Description of Artificial Sequence: Synthetic oligonucleotide
uuuucaccccuccaguaga

SEQ ID NO: 2093905 - RNA, 19 nt, Artificial Sequence
  Description of Artificial Sequence: Synthetic oligonucleotide
agagcaccuccuuacuuac

SEQ ID NO: 2093906 - RNA, 19 nt, Artificial Sequence
  Description of Artificial Sequence: Synthetic oligonucleotide
acacaauugaaagauggcu

SEQ ID NO: 2093907 - RNA, 19 nt, Artificial Sequence
  Description of Artificial Sequence: Synthetic oligonucleotide
uucucgaaccagacgcugg

SEQ ID NO: 2093908 - RNA, 19 nt, Artificial Sequence
  Description of Artificial Sequence: Synthetic oligonucleotide
uucuccuucggcuggagcu

SEQ ID NO: 2093909 - RNA, 19 nt, Artificial Sequence
  Description of Artificial Sequence: Synthetic oligonucleotide
aguucaguggauuucugau

SEQ ID NO: 2093910 - RNA, 19 nt, Artificial Sequence
  Description of Artificial Sequence: Synthetic oligonucleotide
acaguaccaggccuguaac

SEQ ID NO: 2093911 - RNA, 19 nt, Artificial Sequence
  Description of Artificial Sequence: Synthetic oligonucleotide
caguggauuucugauagcg

SEQ ID NO: 2093912 - RNA, 19 nt, Artificial Sequence
  Description of Artificial Sequence: Synthetic oligonucleotide
guagccaguuguuuccugg

SEQ ID NO: 2093913 - RNA, 19 nt, Artificial Sequence
  Description of Artificial Sequence: Synthetic oligonucleotide
agaaauuuacuuauuuuaa

SEQ ID NO: 2093914 - RNA, 19 nt, Artificial Sequence
  Description of Artificial Sequence: Synthetic oligonucleotide
uugcgagcggcuuuuguag

SEQ ID NO: 2093915 - RNA, 19 nt, Artificial Sequence
  Description of Artificial Sequence: Synthetic oligonucleotide
aagagcaccuccuuacuua

SEQ ID NO: 2093916 - RNA, 19 nt, Artificial Sequence
  Description of Artificial Sequence: Synthetic oligonucleotide
acaccauuuaguugccguc

SEQ ID NO: 2093917 - RNA, 19 nt, Artificial Sequence
  Description of Artificial Sequence: Synthetic oligonucleotide
guggauuucugauagcguc

SEQ ID NO: 2093918 - RNA, 19 nt, Artificial Sequence
  Description of Artificial Sequence: Synthetic oligonucleotide
ggugcuuuaccaccggugg

SEQ ID NO: 2093919 - RNA, 19 nt, Artificial Sequence
  Description of Artificial Sequence: Synthetic oligonucleotide
ugcgaacacaauugaaaga

SEQ ID NO: 2093920 - RNA, 19 nt, Artificial Sequence
  Description of Artificial Sequence: Synthetic oligonucleotide
gagcuugcgaaucagaagu

SEQ ID NO: 2093921 - RNA, 19 nt, Artificial Sequence
  Description of Artificial Sequence: Synthetic oligonucleotide
uggauuucugauagcgucu

SEQ ID NO: 2093922 - RNA, 19 nt, Artificial Sequence
  Description of Artificial Sequence: Synthetic oligonucleotide
ugcuuuguacgagccaugg

SEQ ID NO: 2093923 - RNA, 19 nt, Artificial Sequence
  Description of Artificial Sequence: Synthetic oligonucleotide
caauuucucgaaccagacg

SEQ ID NO: 2093924 - RNA, 19 nt, Artificial Sequence
  Description of Artificial Sequence: Synthetic oligonucleotide
aaaugcuggcauuguccag

SEQ ID NO: 2093925 - RNA, 19 nt, Artificial Sequence
  Description of Artificial Sequence: Synthetic oligonucleotide
aaauccaaaugcuggcauu

SEQ ID NO: 2093926 - RNA, 19 nt, Artificial Sequence
  Description of Artificial Sequence: Synthetic oligonucleotide
aaaaggccaaccagauagg

SEQ ID NO: 2093927 - RNA, 19 nt, Artificial Sequence
  Description of Artificial Sequence: Synthetic oligonucleotide
cuguuuugaaguccugagc

SEQ ID NO: 2093928 - RNA, 19 nt, Artificial Sequence
  Description of Artificial Sequence: Synthetic oligonucleotide
uugaaagauggcugacacc

SEQ ID NO: 2093929 - RNA, 19 nt, Artificial Sequence
  Description of Artificial Sequence: Synthetic oligonucleotide
gaaccagacgcuggaaggg

SEQ ID NO: 2093930 - RNA, 19 nt, Artificial Sequence
  Description of Artificial Sequence: Synthetic oligonucleotide
cuuuguacgagccauggua

SEQ ID NO: 2093931 - RNA, 19 nt, Artificial Sequence
  Description of Artificial Sequence: Synthetic oligonucleotide
aaguccugagcaauuucuc

SEQ ID NO: 2093932 - RNA, 19 nt, Artificial Sequence
  Description of Artificial Sequence: Synthetic oligonucleotide
ucugcuuuguacgagccau

SEQ ID NO: 2093933 - RNA, 19 nt, Artificial Sequence
  Description of Artificial Sequence: Synthetic oligonucleotide
uucacggagugccacagua

SEQ ID NO: 2093934 - RNA, 19 nt, Artificial Sequence
  Description of Artificial Sequence: Synthetic oligonucleotide
aauaagaaauuuacuuauu

SEQ ID NO: 2093935 - RNA, 19 nt, Artificial Sequence
  Description of Artificial Sequence: Synthetic oligonucleotide
uuuaccaccgguggauuug

SEQ ID NO: 2093936 - RNA, 19 nt, Artificial Sequence
  Description of Artificial Sequence: Synthetic oligonucleotide
gguaagagcaccuccuuac

SEQ ID NO: 2093937 - RNA, 19 nt, Artificial Sequence
  Description of Artificial Sequence: Synthetic oligonucleotide
uggaaggggagcuugcgaa

SEQ ID NO: 2093938 - RNA, 19 nt, Artificial Sequence
  Description of Artificial Sequence: Synthetic oligonucleotide
agaaguucaguggauuucu

SEQ ID NO: 2093939 - RNA, 19 nt, Artificial Sequence
  Description of Artificial Sequence: Synthetic oligonucleotide
ccgucaauaagaaauuuac

SEQ ID NO: 2093940 - RNA, 19 nt, Artificial Sequence
  Description of Artificial Sequence: Synthetic oligonucleotide
uagccaguuguuuccuggg

SEQ ID NO: 2093941 - RNA, 19 nt, Artificial Sequence
  Description of Artificial Sequence: Synthetic oligonucleotide
caauaagaaauuuacuuau

SEQ ID NO: 2093942 - RNA, 19 nt, Artificial Sequence
  Description of Artificial Sequence: Synthetic oligonucleotide
uuuugaaguccugagcaau

SEQ ID NO: 2093943 - RNA, 19 nt, Artificial Sequence
  Description of Artificial Sequence: Synthetic oligonucleotide
cacggagugccacaguacc

SEQ ID NO: 2093944 - RNA, 19 nt, Artificial Sequence
  Description of Artificial Sequence: Synthetic oligonucleotide
cuugcauguaggacaacuc

SEQ ID NO: 2093945 - RNA, 19 nt, Artificial Sequence
  Description of Artificial Sequence: Synthetic oligonucleotide
agcgucugauuucacggag

SEQ ID NO: 2093946 - RNA, 19 nt, Artificial Sequence
  Description of Artificial Sequence: Synthetic oligonucleotide
cuugcgaaucagaaguuca

SEQ ID NO: 2093947 - RNA, 19 nt, Artificial Sequence
  Description of Artificial Sequence: Synthetic oligonucleotide
acuugcauguaggacaacu

SEQ ID NO: 2093948 - RNA, 19 nt, Artificial Sequence
  Description of Artificial Sequence: Synthetic oligonucleotide
aaccagacgcuggaagggg

SEQ ID NO: 2093949 - RNA, 19 nt, Artificial Sequence
  Description of Artificial Sequence: Synthetic oligonucleotide
uccugggugcuuuaccacc

SEQ ID NO: 2093950 - RNA, 19 nt, Artificial Sequence
  Description of Artificial Sequence: Synthetic oligonucleotide
aguaccaggccuguaacga

SEQ ID NO: 2093951 - RNA, 19 nt, Artificial Sequence
  Description of Artificial Sequence: Synthetic oligonucleotide
ccaaaugcuggcauugucc

SEQ ID NO: 2093952 - RNA, 19 nt, Artificial Sequence
  Description of Artificial Sequence: Synthetic oligonucleotide
uaggacaacucaguuagaa

SEQ ID NO: 2093953 - RNA, 19 nt, Artificial Sequence
  Description of Artificial Sequence: Synthetic oligonucleotide
ucucgaaccagacgcugga

SEQ ID NO: 2093954 - RNA, 19 nt, Artificial Sequence
  Description of Artificial Sequence: Synthetic oligonucleotide
ucagaaguucaguggauuu

SEQ ID NO: 2093955 - RNA, 19 nt, Artificial Sequence
  Description of Artificial Sequence: Synthetic oligonucleotide
aagauggcugacaccgagg

SEQ ID NO: 2093956 - RNA, 19 nt, Artificial Sequence
  Description of Artificial Sequence: Synthetic oligonucleotide
ugaaguccugagcaauuuc

SEQ ID NO: 2093957 - RNA, 19 nt, Artificial Sequence
  Description of Artificial Sequence: Synthetic oligonucleotide
accaccgguggauuugcgg

SEQ ID NO: 2093958 - RNA, 19 nt, Artificial Sequence
  Description of Artificial Sequence: Synthetic oligonucleotide
guacgagccaugguaagag

SEQ ID NO: 2093959 - RNA, 19 nt, Artificial Sequence
  Description of Artificial Sequence: Synthetic oligonucleotide
uuguacgagccaugguaag

SEQ ID NO: 2093960 - RNA, 19 nt, Artificial Sequence
  Description of Artificial Sequence: Synthetic oligonucleotide
caaaugcuggcauugucca

SEQ ID NO: 2093961 - RNA, 19 nt, Artificial Sequence
  Description of Artificial Sequence: Synthetic oligonucleotide
aaacaccauuuaguugccg

SEQ ID NO: 2093962 - RNA, 19 nt, Artificial Sequence
  Description of Artificial Sequence: Synthetic oligonucleotide
gaagcgcagaucuguuuug

SEQ ID NO: 2093963 - RNA, 19 nt, Artificial Sequence
  Description of Artificial Sequence: Synthetic oligonucleotide
uguacgagccaugguaaga

SEQ ID NO: 2093964 - RNA, 19 nt, Artificial Sequence
  Description of Artificial Sequence: Synthetic oligonucleotide
cuggagcucggcaagcgag

SEQ ID NO: 2093965 - RNA, 19 nt, Artificial Sequence
  Description of Artificial Sequence: Synthetic oligonucleotide
uccaaaugcuggcauuguc

SEQ ID NO: 2093966 - RNA, 19 nt, Artificial Sequence
  Description of Artificial Sequence: Synthetic oligonucleotide
agcaauuucucgaaccaga

SEQ ID NO: 2093967 - RNA, 19 nt, Artificial Sequence
  Description of Artificial Sequence: Synthetic oligonucleotide
aaggggagcuugcgaauca

SEQ ID NO: 2093968 - RNA, 19 nt, Artificial Sequence
  Description of Artificial Sequence: Synthetic oligonucleotide
uuucugauagcgucugauu

SEQ ID NO: 2093969 - RNA, 19 nt, Artificial Sequence
  Description of Artificial Sequence: Synthetic oligonucleotide
gagggcgcacucuugcgag

SEQ ID NO: 2093970 - RNA, 19 nt, Artificial Sequence
  Description of Artificial Sequence: Synthetic oligonucleotide
cgaaucagaaguucagugg

SEQ ID NO: 2093971 - RNA, 19 nt, Artificial Sequence
  Description of Artificial Sequence: Synthetic oligonucleotide
uagagggcgcacucuugcg

SEQ ID NO: 2093972 - RNA, 19 nt, Artificial Sequence
  Description of Artificial Sequence: Synthetic oligonucleotide
guuuccugggugcuuuacc

SEQ ID NO: 2093973 - RNA, 19 nt, Artificial Sequence
  Description of Artificial Sequence: Synthetic oligonucleotide
cagucugcuuuguacgagc

SEQ ID NO: 2093974 - RNA, 19 nt, Artificial Sequence
  Description of Artificial Sequence: Synthetic oligonucleotide
caguaccaggccuguaacg

SEQ ID NO: 2093975 - RNA, 19 nt, Artificial Sequence
  Description of Artificial Sequence: Synthetic oligonucleotide
caaacaccauuuaguugcc

SEQ ID NO: 2093976 - RNA, 19 nt, Artificial Sequence
  Description of Artificial Sequence: Synthetic oligonucleotide
ugccacaguaccaggccug

SEQ ID NO: 2093977 - RNA, 19 nt, Artificial Sequence
  Description of Artificial Sequence: Synthetic oligonucleotide
gcgaaucagaaguucagug

SEQ ID NO: 2093978 - RNA, 19 nt, Artificial Sequence
  Description of Artificial Sequence: Synthetic oligonucleotide
uaagagcaccuccuuacuu

SEQ ID NO: 2093979 - RNA, 19 nt, Artificial Sequence
  Description of Artificial Sequence: Synthetic oligonucleotide
ucggcuggagcucggcaag

SEQ ID NO: 2093980 - RNA, 19 nt, Artificial Sequence
  Description of Artificial Sequence: Synthetic oligonucleotide
gcuggcauuguccagaaaa

SEQ ID NO: 2093981 - RNA, 19 nt, Artificial Sequence
  Description of Artificial Sequence: Synthetic oligonucleotide
auuucacggagugccacag

SEQ ID NO: 2093982 - RNA, 19 nt, Artificial Sequence
  Description of Artificial Sequence: Synthetic oligonucleotide
uggcguuagagagcggcgg

SEQ ID NO: 2093983 - RNA, 19 nt, Artificial Sequence
  Description of Artificial Sequence: Synthetic oligonucleotide
cagguugguaucuucaaaa

SEQ ID NO: 2093984 - RNA, 19 nt, Artificial Sequence
  Description of Artificial Sequence: Synthetic oligonucleotide
auguaggacaacucaguua

SEQ ID NO: 2093985 - RNA, 19 nt, Artificial Sequence
  Description of Artificial Sequence: Synthetic oligonucleotide
cagaucuguuuugaagucc

SEQ ID NO: 2093986 - RNA, 19 nt, Artificial Sequence
  Description of Artificial Sequence: Synthetic oligonucleotide
gagcaauuucucgaaccag

SEQ ID NO: 2093987 - RNA, 19 nt, Artificial Sequence
  Description of Artificial Sequence: Synthetic oligonucleotide
gauuucacggagugccaca

SEQ ID NO: 2093988 - RNA, 19 nt, Artificial Sequence
  Description of Artificial Sequence: Synthetic oligonucleotide
uccugagcaauuucucgaa

SEQ ID NO: 2093989 - RNA, 19 nt, Artificial Sequence
  Description of Artificial Sequence: Synthetic oligonucleotide
acggcugcgaacacaauug

SEQ ID NO: 2093990 - RNA, 19 nt, Artificial Sequence
  Description of Artificial Sequence: Synthetic oligonucleotide
caggccuguaacgaugagg

SEQ ID NO: 2093991 - RNA, 19 nt, Artificial Sequence
  Description of Artificial Sequence: Synthetic oligonucleotide
gggcagucugcuuuguacg

SEQ ID NO: 2093992 - RNA, 19 nt, Artificial Sequence
  Description of Artificial Sequence: Synthetic oligonucleotide
ggagcuugcgaaucagaag

SEQ ID NO: 2093993 - RNA, 19 nt, Artificial Sequence
  Description of Artificial Sequence: Synthetic oligonucleotide
aucuguuuugaaguccuga

SEQ ID NO: 2093994 - RNA, 19 nt, Artificial Sequence
  Description of Artificial Sequence: Synthetic oligonucleotide
uccaguagagggcgcacuc

SEQ ID NO: 2093995 - RNA, 19 nt, Artificial Sequence
  Description of Artificial Sequence: Synthetic oligonucleotide
ugcgaaucagaaguucagu

SEQ ID NO: 2093996 - RNA, 19 nt, Artificial Sequence
  Description of Artificial Sequence: Synthetic oligonucleotide
ugauuucacggagugccac

SEQ ID NO: 2093997 - RNA, 19 nt, Artificial Sequence
  Description of Artificial Sequence: Synthetic oligonucleotide
guccugagcaauuucucga

SEQ ID NO: 2093998 - RNA, 19 nt, Artificial Sequence
  Description of Artificial Sequence: Synthetic oligonucleotide
uugccgucaauaagaaauu

SEQ ID NO: 2093999 - RNA, 19 nt, Artificial Sequence
  Description of Artificial Sequence: Synthetic oligonucleotide
cuggcguuagagagcggcg

SEQ ID NO: 2094000 - RNA, 19 nt, Artificial Sequence
  Description of Artificial Sequence: Synthetic oligonucleotide
ucggcaagcgagaggcggc

SEQ ID NO: 2094001 - RNA, 19 nt, Artificial Sequence
  Description of Artificial Sequence: Synthetic oligonucleotide
ucacggagugccacaguac

SEQ ID NO: 2094002 - RNA, 19 nt, Artificial Sequence
  Description of Artificial Sequence: Synthetic oligonucleotide
acagguugguaucuucaaa

SEQ ID NO: 2094003 - RNA, 19 nt, Artificial Sequence
  Description of Artificial Sequence: Synthetic oligonucleotide
ucaguggauuucugauagc

SEQ ID NO: 2094004 - RNA, 19 nt, Artificial Sequence
  Description of Artificial Sequence: Synthetic oligonucleotide
cucggcaagcgagaggcgg

SEQ ID NO: 2094005 - RNA, 19 nt, Artificial Sequence
  Description of Artificial Sequence: Synthetic oligonucleotide
ugguaagagcaccuccuua

SEQ ID NO: 2094006 - RNA, 19 nt, Artificial Sequence
  Description of Artificial Sequence: Synthetic oligonucleotide
uguagccaguuguuuccug

SEQ ID NO: 2094007 - RNA, 19 nt, Artificial Sequence
  Description of Artificial Sequence: Synthetic oligonucleotide
ugcuuuaccaccgguggau

SEQ ID NO: 2094008 - RNA, 19 nt, Artificial Sequence
  Description of Artificial Sequence: Synthetic oligonucleotide
uucggcuggagcucggcaa

SEQ ID NO: 2094009 - RNA, 19 nt, Artificial Sequence
  Description of Artificial Sequence: Synthetic oligonucleotide
uagcgucugauuucacgga

SEQ ID NO: 2094010 - RNA, 19 nt, Artificial Sequence
  Description of Artificial Sequence: Synthetic oligonucleotide
uacgagccaugguaagagc

SEQ ID NO: 2094011 - RNA, 19 nt, Artificial Sequence
  Description of Artificial Sequence: Synthetic oligonucleotide
uagcacacagguugguauc

SEQ ID NO: 2094012 - RNA, 19 nt, Artificial Sequence
  Description of Artificial Sequence: Synthetic oligonucleotide
aaucagaaguucaguggau

SEQ ID NO: 2094013 - RNA, 19 nt, Artificial Sequence
  Description of Artificial Sequence: Synthetic oligonucleotide
ucuugcgagcggcuuuugu

SEQ ID NO: 2094014 - RNA, 19 nt, Artificial Sequence
  Description of Artificial Sequence: Synthetic oligonucleotide
gaaguccugagcaauuucu

SEQ ID NO: 2094015 - RNA, 19 nt, Artificial Sequence
  Description of Artificial Sequence: Synthetic oligonucleotide
agcugcacucuggaagcgc

SEQ ID NO: 2094016 - RNA, 19 nt, Artificial Sequence
  Description of Artificial Sequence: Synthetic oligonucleotide
uggagcucggcaagcgaga

SEQ ID NO: 2094017 - RNA, 19 nt, Artificial Sequence
  Description of Artificial Sequence: Synthetic oligonucleotide
gagccaugguaagagcacc

SEQ ID NO: 2094018 - RNA, 19 nt, Artificial Sequence
  Description of Artificial Sequence: Synthetic oligonucleotide
agagggcgcacucuugcga

SEQ ID NO: 2094019 - RNA, 19 nt, Artificial Sequence
  Description of Artificial Sequence: Synthetic oligonucleotide
ugcgagcggcuuuuguagc

SEQ ID NO: 2094020 - RNA, 19 nt, Artificial Sequence
  Description of Artificial Sequence: Synthetic oligonucleotide
cuacaaacaccauuuaguu

SEQ ID NO: 2094021 - RNA, 19 nt, Artificial Sequence
  Description of Artificial Sequence: Synthetic oligonucleotide
caauugaaagauggcugac

SEQ ID NO: 2094022 - RNA, 19 nt, Artificial Sequence
  Description of Artificial Sequence: Synthetic oligonucleotide
guuuugaaguccugagcaa

SEQ ID NO: 2094023 - RNA, 19 nt, Artificial Sequence
  Description of Artificial Sequence: Synthetic oligonucleotide
ccaguuguuuccugggugc

SEQ ID NO: 2094024 - RNA, 19 nt, Artificial Sequence
  Description of Artificial Sequence: Synthetic oligonucleotide
cagaaguucaguggauuuc

SEQ ID NO: 2094025 - RNA, 19 nt, Artificial Sequence
  Description of Artificial Sequence: Synthetic oligonucleotide
aagcgagaggcggcgcugg

SEQ ID NO: 2094026 - RNA, 19 nt, Artificial Sequence
  Description of Artificial Sequence: Synthetic oligonucleotide
aagcgcagaucuguuuuga

SEQ ID NO: 2094027 - RNA, 19 nt, Artificial Sequence
  Description of Artificial Sequence: Synthetic oligonucleotide
ccaccgguggauuugcggg

SEQ ID NO: 2094028 - RNA, 19 nt, Artificial Sequence
  Description of Artificial Sequence: Synthetic oligonucleotide
uuaccaccgguggauuugc

SEQ ID NO: 2094029 - RNA, 19 nt, Artificial Sequence
  Description of Artificial Sequence: Synthetic oligonucleotide
accccuccaguagagggcg

SEQ ID NO: 2094030 - RNA, 19 nt, Artificial Sequence
  Description of Artificial Sequence: Synthetic oligonucleotide
gaaguucaguggauuucug

SEQ ID NO: 2094031 - RNA, 19 nt, Artificial Sequence
  Description of Artificial Sequence: Synthetic oligonucleotide
gcgcagaucuguuuugaag

SEQ ID NO: 2094032 - RNA, 19 nt, Artificial Sequence
  Description of Artificial Sequence: Synthetic oligonucleotide
uuccugggugcuuuaccac

SEQ ID NO: 2094033 - RNA, 19 nt, Artificial Sequence
  Description of Artificial Sequence: Synthetic oligonucleotide
caccccuccaguagagggc

SEQ ID NO: 2094034 - RNA, 19 nt, Artificial Sequence
  Description of Artificial Sequence: Synthetic oligonucleotide
uucaccccuccaguagagg

SEQ ID NO: 2094035 - RNA, 19 nt, Artificial Sequence
  Description of Artificial Sequence: Synthetic oligonucleotide
cauuguccagaaaauuuua

SEQ ID NO: 2094036 - RNA, 19 nt, Artificial Sequence
  Description of Artificial Sequence: Synthetic oligonucleotide
caugguaagagcaccuccu

SEQ ID NO: 2094037 - RNA, 19 nt, Artificial Sequence
  Description of Artificial Sequence: Synthetic oligonucleotide
cacacagguugguaucuuc

SEQ ID NO: 2094038 - RNA, 19 nt, Artificial Sequence
  Description of Artificial Sequence: Synthetic oligonucleotide
acgagccaugguaagagca

SEQ ID NO: 2094039 - RNA, 19 nt, Artificial Sequence
  Description of Artificial Sequence: Synthetic oligonucleotide
gcuacaaacaccauuuagu

SEQ ID NO: 2094040 - RNA, 19 nt, Artificial Sequence
  Description of Artificial Sequence: Synthetic oligonucleotide
accauuuaguugccgucaa

SEQ ID NO: 2094041 - RNA, 19 nt, Artificial Sequence
  Description of Artificial Sequence: Synthetic oligonucleotide
agggcgcacucuugcgagc

SEQ ID NO: 2094042 - RNA, 19 nt, Artificial Sequence
  Description of Artificial Sequence: Synthetic oligonucleotide
cugauagcgucugauuuca

SEQ ID NO: 2094043 - RNA, 19 nt, Artificial Sequence
  Description of Artificial Sequence: Synthetic oligonucleotide
guuagagagcggcggcggc

SEQ ID NO: 2094044 - RNA, 19 nt, Artificial Sequence
  Description of Artificial Sequence: Synthetic oligonucleotide
gaaggggagcuugcgaauc

SEQ ID NO: 2094045 - RNA, 19 nt, Artificial Sequence
  Description of Artificial Sequence: Synthetic oligonucleotide
acacagguugguaucuuca

SEQ ID NO: 2094046 - RNA, 19 nt, Artificial Sequence
  Description of Artificial Sequence: Synthetic oligonucleotide
gagcucggcaagcgagagg

SEQ ID NO: 2094047 - RNA, 19 nt, Artificial Sequence
  Description of Artificial Sequence: Synthetic oligonucleotide
guucaguggauuucugaua

SEQ ID NO: 2094048 - RNA, 19 nt, Artificial Sequence
  Description of Artificial Sequence: Synthetic oligonucleotide
uugaaguccugagcaauuu

SEQ ID NO: 2094049 - RNA, 19 nt, Artificial Sequence
  Description of Artificial Sequence: Synthetic oligonucleotide
cgaaccagacgcuggaagg

SEQ ID NO: 2094050 - RNA, 19 nt, Artificial Sequence
  Description of Artificial Sequence: Synthetic oligonucleotide
aucagaaguucaguggauu

SEQ ID NO: 2094051 - RNA, 19 nt, Artificial Sequence
  Description of Artificial Sequence: Synthetic oligonucleotide
cuugcgagcggcuuuugua

SEQ ID NO: 2094052 - RNA, 19 nt, Artificial Sequence
  Description of Artificial Sequence: Synthetic oligonucleotide
ugcacucuggaagcgcaga

SEQ ID NO: 2094053 - RNA, 19 nt, Artificial Sequence
  Description of Artificial Sequence: Synthetic oligonucleotide
gauuucugauagcgucuga

SEQ ID NO: 2094054 - RNA, 19 nt, Artificial Sequence
  Description of Artificial Sequence: Synthetic oligonucleotide
cacaguaccaggccuguaa

SEQ ID NO: 2094055 - RNA, 19 nt, Artificial Sequence
  Description of Artificial Sequence: Synthetic oligonucleotide
gagcggcuuuuguagccag

SEQ ID NO: 2094056 - RNA, 19 nt, Artificial Sequence
  Description of Artificial Sequence: Synthetic oligonucleotide
ccagaaaauuuuaacaggu

SEQ ID NO: 2094057 - RNA, 19 nt, Artificial Sequence
  Description of Artificial Sequence: Synthetic oligonucleotide
uaccaccgguggauuugcg

SEQ ID NO: 2094058 - RNA, 19 nt, Artificial Sequence
  Description of Artificial Sequence: Synthetic oligonucleotide
ugggugcuuuaccaccggu

SEQ ID NO: 2094059 - RNA, 19 nt, Artificial Sequence
  Description of Artificial Sequence: Synthetic oligonucleotide
caccgguggauuugcgggc

SEQ ID NO: 2094060 - RNA, 19 nt, Artificial Sequence
  Description of Artificial Sequence: Synthetic oligonucleotide
agccaguuguuuccugggu

SEQ ID NO: 2094061 - RNA, 19 nt, Artificial Sequence
  Description of Artificial Sequence: Synthetic oligonucleotide
auuucucgaaccagacgcu

SEQ ID NO: 2094062 - RNA, 19 nt, Artificial Sequence
  Description of Artificial Sequence: Synthetic oligonucleotide
augguaagagcaccuccuu

SEQ ID NO: 2094063 - RNA, 19 nt, Artificial Sequence
  Description of Artificial Sequence: Synthetic oligonucleotide
ccaugguaagagcaccucc

SEQ ID NO: 2094064 - RNA, 19 nt, Artificial Sequence
  Description of Artificial Sequence: Synthetic oligonucleotide
gccaguuguuuccugggug

SEQ ID NO: 2094065 - RNA, 19 nt, Artificial Sequence
  Description of Artificial Sequence: Synthetic oligonucleotide
ggcuuuuguagccaguugu

SEQ ID NO: 2094066 - RNA, 19 nt, Artificial Sequence
  Description of Artificial Sequence: Synthetic oligonucleotide
ggauuucugauagcgucug

SEQ ID NO: 2094067 - RNA, 19 nt, Artificial Sequence
  Description of Artificial Sequence: Synthetic oligonucleotide
uggcauuguccagaaaauu

SEQ ID NO: 2094068 - RNA, 19 nt, Artificial Sequence
  Description of Artificial Sequence: Synthetic oligonucleotide
uguuuccugggugcuuuac

SEQ ID NO: 2094069 - RNA, 19 nt, Artificial Sequence
  Description of Artificial Sequence: Synthetic oligonucleotide
ccugggugcuuuaccaccg

SEQ ID NO: 2094070 - RNA, 19 nt, Artificial Sequence
  Description of Artificial Sequence: Synthetic oligonucleotide
ugauagcgucugauuucac

SEQ ID NO: 2094071 - RNA, 19 nt, Artificial Sequence
  Description of Artificial Sequence: Synthetic oligonucleotide
gcugcgaacacaauugaaa

SEQ ID NO: 2094072 - RNA, 19 nt, Artificial Sequence
  Description of Artificial Sequence: Synthetic oligonucleotide
gcuggcguuagagagcggc

SEQ ID NO: 2094073 - RNA, 19 nt, Artificial Sequence
  Description of Artificial Sequence: Synthetic oligonucleotide
uggaagcgcagaucuguuu

SEQ ID NO: 2094074 - RNA, 19 nt, Artificial Sequence
  Description of Artificial Sequence: Synthetic oligonucleotide
uugcgggcagucugcuuug

SEQ ID NO: 2094075 - RNA, 19 nt, Artificial Sequence
  Description of Artificial Sequence: Synthetic oligonucleotide
gcagaucuguuuugaaguc

SEQ ID NO: 2094076 - RNA, 19 nt, Artificial Sequence
  Description of Artificial Sequence: Synthetic oligonucleotide
guacuugcauguaggacaa

SEQ ID NO: 2094077 - RNA, 19 nt, Artificial Sequence
  Description of Artificial Sequence: Synthetic oligonucleotide
ggagugccacaguaccagg

SEQ ID NO: 2094078 - RNA, 19 nt, Artificial Sequence
  Description of Artificial Sequence: Synthetic oligonucleotide
cugcuuuguacgagccaug

SEQ ID NO: 2094079 - RNA, 19 nt, Artificial Sequence
  Description of Artificial Sequence: Synthetic oligonucleotide
cugggugcuuuaccaccgg

SEQ ID NO: 2094080 - RNA, 19 nt, Artificial Sequence
  Description of Artificial Sequence: Synthetic oligonucleotide
gcaauuucucgaaccagac

SEQ ID NO: 2094081 - RNA, 19 nt, Artificial Sequence
  Description of Artificial Sequence: Synthetic oligonucleotide
ucuccuucggcuggagcuc

SEQ ID NO: 2094082 - RNA, 19 nt, Artificial Sequence
  Description of Artificial Sequence: Synthetic oligonucleotide
gucugauuucacggagugc

SEQ ID NO: 2094083 - RNA, 19 nt, Artificial Sequence
  Description of Artificial Sequence: Synthetic oligonucleotide
caccauuuaguugccguca

SEQ ID NO: 2094084 - RNA, 19 nt, Artificial Sequence
  Description of Artificial Sequence: Synthetic oligonucleotide
aguagagggcgcacucuug

SEQ ID NO: 2094085 - RNA, 19 nt, Artificial Sequence
  Description of Artificial Sequence: Synthetic oligonucleotide
agacgcuggaaggggagcu

SEQ ID NO: 2094086 - RNA, 19 nt, Artificial Sequence
  Description of Artificial Sequence: Synthetic oligonucleotide
cucuggaagcgcagaucug

SEQ ID NO: 2094087 - RNA, 19 nt, Artificial Sequence
  Description of Artificial Sequence: Synthetic oligonucleotide
agcgcagaucuguuuugaa

SEQ ID NO: 2094088 - RNA, 19 nt, Artificial Sequence
  Description of Artificial Sequence: Synthetic oligonucleotide
uccuucggcuggagcucgg

SEQ ID NO: 2094089 - RNA, 19 nt, Artificial Sequence
  Description of Artificial Sequence: Synthetic oligonucleotide
gacggcugcgaacacaauu

SEQ ID NO: 2094090 - RNA, 19 nt, Artificial Sequence
  Description of Artificial Sequence: Synthetic oligonucleotide
gcgaacacaauugaaagau

SEQ ID NO: 2094091 - RNA, 19 nt, Artificial Sequence
  Description of Artificial Sequence: Synthetic oligonucleotide
cugauuucacggagugcca

SEQ ID NO: 2094092 - RNA, 19 nt, Artificial Sequence
  Description of Artificial Sequence: Synthetic oligonucleotide
cacagguugguaucuucaa

SEQ ID NO: 2094093 - RNA, 19 nt, Artificial Sequence
  Description of Artificial Sequence: Synthetic oligonucleotide
gaaagauggcugacaccga

SEQ ID NO: 2094094 - RNA, 19 nt, Artificial Sequence
  Description of Artificial Sequence: Synthetic oligonucleotide
cugcacucuggaagcgcag

SEQ ID NO: 2094095 - RNA, 19 nt, Artificial Sequence
  Description of Artificial Sequence: Synthetic oligonucleotide
auccaaaugcuggcauugu

SEQ ID NO: 2094096 - RNA, 19 nt, Artificial Sequence
  Description of Artificial Sequence: Synthetic oligonucleotide
guaagagcaccuccuuacu

SEQ ID NO: 2094097 - RNA, 19 nt, Artificial Sequence
  Description of Artificial Sequence: Synthetic oligonucleotide
ggcguuagagagcggcggc

SEQ ID NO: 2094098 - RNA, 19 nt, Artificial Sequence
  Description of Artificial Sequence: Synthetic oligonucleotide
ggauuugcgggcagucugc

SEQ ID NO: 2094099 - RNA, 19 nt, Artificial Sequence
  Description of Artificial Sequence: Synthetic oligonucleotide
aggggagcuugcgaaucag

SEQ ID NO: 2094100 - RNA, 19 nt, Artificial Sequence
  Description of Artificial Sequence: Synthetic oligonucleotide
gucugcuuuguacgagcca

SEQ ID NO: 2094101 - RNA, 19 nt, Artificial Sequence
  Description of Artificial Sequence: Synthetic oligonucleotide
gcgcuggcguuagagagcg

SEQ ID NO: 2094102 - RNA, 19 nt, Artificial Sequence
  Description of Artificial Sequence: Synthetic oligonucleotide
gugcuuuaccaccggugga

SEQ ID NO: 2094103 - RNA, 19 nt, Artificial Sequence
  Description of Artificial Sequence: Synthetic oligonucleotide
cuccuucggcuggagcucg

SEQ ID NO: 2094104 - RNA, 19 nt, Artificial Sequence
  Description of Artificial Sequence: Synthetic oligonucleotide
cacucuggaagcgcagauc

SEQ ID NO: 2094105 - RNA, 19 nt, Artificial Sequence
  Description of Artificial Sequence: Synthetic oligonucleotide
cagaaaauuuuaacagguu

SEQ ID NO: 2094106 - RNA, 19 nt, Artificial Sequence
  Description of Artificial Sequence: Synthetic oligonucleotide
cuggaaggggagcuugcga

SEQ ID NO: 2094107 - RNA, 19 nt, Artificial Sequence
  Description of Artificial Sequence: Synthetic oligonucleotide
augcuggcauuguccagaa

SEQ ID NO: 2094108 - RNA, 19 nt, Artificial Sequence
  Description of Artificial Sequence: Synthetic oligonucleotide
agccaugguaagagcaccu

SEQ ID NO: 2094109 - RNA, 19 nt, Artificial Sequence
  Description of Artificial Sequence: Synthetic oligonucleotide
cagacgcuggaaggggagc

SEQ ID NO: 2094110 - RNA, 19 nt, Artificial Sequence
  Description of Artificial Sequence: Synthetic oligonucleotide
accaggccuguaacgauga

SEQ ID NO: 2094111 - RNA, 19 nt, Artificial Sequence
  Description of Artificial Sequence: Synthetic oligonucleotide
gcuggaaggggagcuugcg

SEQ ID NO: 2094112 - RNA, 19 nt, Artificial Sequence
  Description of Artificial Sequence: Synthetic oligonucleotide
ggcagucugcuuuguacga

SEQ ID NO: 2094113 - RNA, 19 nt, Artificial Sequence
  Description of Artificial Sequence: Synthetic oligonucleotide
cuggcauuguccagaaaau

SEQ ID NO: 2094114 - RNA, 19 nt, Artificial Sequence
  Description of Artificial Sequence: Synthetic oligonucleotide
gggugcuuuaccaccggug

SEQ ID NO: 2094115 - RNA, 19 nt, Artificial Sequence
  Description of Artificial Sequence: Synthetic oligonucleotide
cauguaggacaacucaguu

SEQ ID NO: 2094116 - RNA, 19 nt, Artificial Sequence
  Description of Artificial Sequence: Synthetic oligonucleotide
gagcaccuccuuacuuacc

SEQ ID NO: 2094117 - RNA, 19 nt, Artificial Sequence
  Description of Artificial Sequence: Synthetic oligonucleotide
gcgagcggcuuuuguagcc

SEQ ID NO: 2094118 - RNA, 19 nt, Artificial Sequence
  Description of Artificial Sequence: Synthetic oligonucleotide
cgaacacaauugaaagaug

SEQ ID NO: 2094119 - RNA, 19 nt, Artificial Sequence
  Description of Artificial Sequence: Synthetic oligonucleotide
caagcgagaggcggcgcug

SEQ ID NO: 2094120 - RNA, 19 nt, Artificial Sequence
  Description of Artificial Sequence: Synthetic oligonucleotide
cgucugauuucacggagug

SEQ ID NO: 2094121 - RNA, 19 nt, Artificial Sequence
  Description of Artificial Sequence: Synthetic oligonucleotide
gcagucugcuuuguacgag

SEQ ID NO: 2094122 - RNA, 19 nt, Artificial Sequence
  Description of Artificial Sequence: Synthetic oligonucleotide
ccagacgcuggaaggggag

SEQ ID NO: 2094123 - RNA, 19 nt, Artificial Sequence
  Description of Artificial Sequence: Synthetic oligonucleotide
gauggcugacaccgaggcu

SEQ ID NO: 2094124 - RNA, 19 nt, Artificial Sequence
  Description of Artificial Sequence: Synthetic oligonucleotide
ggcauuguccagaaaauuu

SEQ ID NO: 2094125 - RNA, 19 nt, Artificial Sequence
  Description of Artificial Sequence: Synthetic oligonucleotide
auuugcgggcagucugcuu

SEQ ID NO: 2094126 - RNA, 19 nt, Artificial Sequence
  Description of Artificial Sequence: Synthetic oligonucleotide
gcguuagagagcggcggcg

SEQ ID NO: 2094127 - RNA, 19 nt, Artificial Sequence
  Description of Artificial Sequence: Synthetic oligonucleotide
ggaagcgcagaucuguuuu

SEQ ID NO: 2094128 - RNA, 19 nt, Artificial Sequence
  Description of Artificial Sequence: Synthetic oligonucleotide
uuguuuccugggugcuuua

SEQ ID NO: 2094129 - RNA, 19 nt, Artificial Sequence
  Description of Artificial Sequence: Synthetic oligonucleotide
ggagcucggcaagcgagag

SEQ ID NO: 2094130 - RNA, 19 nt, Artificial Sequence
  Description of Artificial Sequence: Synthetic oligonucleotide
gcuugcgaaucagaaguuc

SEQ ID NO: 2094131 - RNA, 19 nt, Artificial Sequence
  Description of Artificial Sequence: Synthetic oligonucleotide
acggagugccacaguacca

SEQ ID NO: 2094132 - RNA, 19 nt, Artificial Sequence
  Description of Artificial Sequence: Synthetic oligonucleotide
cgagccaugguaagagcac

SEQ ID NO: 2094133 - RNA, 19 nt, Artificial Sequence
  Description of Artificial Sequence: Synthetic oligonucleotide
gggcgcacucuugcgagcg

SEQ ID NO: 2094134 - RNA, 19 nt, Artificial Sequence
  Description of Artificial Sequence: Synthetic oligonucleotide
gggagcuugcgaaucagaa

SEQ ID NO: 2094135 - RNA, 19 nt, Artificial Sequence
  Description of Artificial Sequence: Synthetic oligonucleotide
ccugagcaauuucucgaac

SEQ ID NO: 2094136 - RNA, 19 nt, Artificial Sequence
  Description of Artificial Sequence: Synthetic oligonucleotide
gcaccuccuuacuuacccc

SEQ ID NO: 2094137 - RNA, 19 nt, Artificial Sequence
  Description of Artificial Sequence: Synthetic oligonucleotide
aguuguuuccugggugcuu

SEQ ID NO: 2094138 - RNA, 19 nt, Artificial Sequence
  Description of Artificial Sequence: Synthetic oligonucleotide
acucuugcgagcggcuuuu

SEQ ID NO: 2094139 - RNA, 19 nt, Artificial Sequence
  Description of Artificial Sequence: Synthetic oligonucleotide
accagacgcuggaagggga

SEQ ID NO: 2094140 - RNA, 19 nt, Artificial Sequence
  Description of Artificial Sequence: Synthetic oligonucleotide
gaggcggcgcuggcguuag

SEQ ID NO: 2094141 - RNA, 19 nt, Artificial Sequence
  Description of Artificial Sequence: Synthetic oligonucleotide
gguggauuugcgggcaguc

SEQ ID NO: 2094142 - RNA, 19 nt, Artificial Sequence
  Description of Artificial Sequence: Synthetic oligonucleotide
cuucggcuggagcucggca

SEQ ID NO: 2094143 - RNA, 19 nt, Artificial Sequence
  Description of Artificial Sequence: Synthetic oligonucleotide
ggcggcgcuggcguuagag

SEQ ID NO: 2094144 - RNA, 19 nt, Artificial Sequence
  Description of Artificial Sequence: Synthetic oligonucleotide
ugcuggcauuguccagaaa

SEQ ID NO: 2094145 - RNA, 19 nt, Artificial Sequence
  Description of Artificial Sequence: Synthetic oligonucleotide
gccgucaauaagaaauuua

SEQ ID NO: 2094146 - RNA, 19 nt, Artificial Sequence
  Description of Artificial Sequence: Synthetic oligonucleotide
cggcgcuggcguuagagag

SEQ ID NO: 2094147 - RNA, 19 nt, Artificial Sequence
  Description of Artificial Sequence: Synthetic oligonucleotide
gauuugcgggcagucugcu

SEQ ID NO: 2094148 - RNA, 19 nt, Artificial Sequence
  Description of Artificial Sequence: Synthetic oligonucleotide
gugccacaguaccaggccu

SEQ ID NO: 2094149 - RNA, 19 nt, Artificial Sequence
  Description of Artificial Sequence: Synthetic oligonucleotide
ggcgcuggcguuagagagc

SEQ ID NO: 2094150 - RNA, 19 nt, Artificial Sequence
  Description of Artificial Sequence: Synthetic oligonucleotide
gccuguaacgaugagguuu

SEQ ID NO: 2094151 - RNA, 19 nt, Artificial Sequence
  Description of Artificial Sequence: Synthetic oligonucleotide
agcuugcgaaucagaaguu

SEQ ID NO: 2094152 - RNA, 19 nt, Artificial Sequence
  Description of Artificial Sequence: Synthetic oligonucleotide
cuuuuguagccaguuguuu

SEQ ID NO: 2094153 - RNA, 19 nt, Artificial Sequence
  Description of Artificial Sequence: Synthetic oligonucleotide
uacuugcauguaggacaac

SEQ ID NO: 2094154 - RNA, 19 nt, Artificial Sequence
  Description of Artificial Sequence: Synthetic oligonucleotide
cguuagagagcggcggcgg

SEQ ID NO: 2094155 - RNA, 19 nt, Artificial Sequence
  Description of Artificial Sequence: Synthetic oligonucleotide
cggagugccacaguaccag

SEQ ID NO: 2094156 - RNA, 19 nt, Artificial Sequence
  Description of Artificial Sequence: Synthetic oligonucleotide
gcugcacucuggaagcgca

SEQ ID NO: 2094157 - RNA, 19 nt, Artificial Sequence
  Description of Artificial Sequence: Synthetic oligonucleotide
guaccaggccuguaacgau

SEQ ID NO: 2094158 - RNA, 19 nt, Artificial Sequence
  Description of Artificial Sequence: Synthetic oligonucleotide
gcauguaggacaacucagu

SEQ ID NO: 2094159 - RNA, 19 nt, Artificial Sequence
  Description of Artificial Sequence: Synthetic oligonucleotide
guaggacaacucaguuaga

SEQ ID NO: 2094160 - RNA, 19 nt, Artificial Sequence
  Description of Artificial Sequence: Synthetic oligonucleotide
gcggcgacggcugcgaaca

SEQ ID NO: 2094161 - RNA, 19 nt, Artificial Sequence
  Description of Artificial Sequence: Synthetic oligonucleotide
ggcgcacucuugcgagcgg

SEQ ID NO: 2094162 - RNA, 19 nt, Artificial Sequence
  Description of Artificial Sequence: Synthetic oligonucleotide
cuuuaccaccgguggauuu

SEQ ID NO: 2094163 - RNA, 19 nt, Artificial Sequence
  Description of Artificial Sequence: Synthetic oligonucleotide
agcggcuuuuguagccagu

SEQ ID NO: 2094164 - RNA, 19 nt, Artificial Sequence
  Description of Artificial Sequence: Synthetic oligonucleotide
ccccuucuccuucggcugg

SEQ ID NO: 2094165 - RNA, 19 nt, Artificial Sequence
  Description of Artificial Sequence: Synthetic oligonucleotide
cgucaauaagaaauuuacu

SEQ ID NO: 2094166 - RNA, 19 nt, Artificial Sequence
  Description of Artificial Sequence: Synthetic oligonucleotide
agcggcggcggcggcggcg

SEQ ID NO: 2094167 - RNA, 19 nt, Artificial Sequence
  Description of Artificial Sequence: Synthetic oligonucleotide
gcgagaggcggcgcuggcg

SEQ ID NO: 2094168 - RNA, 19 nt, Artificial Sequence
  Description of Artificial Sequence: Synthetic oligonucleotide
guggauuugcgggcagucu

SEQ ID NO: 2094169 - RNA, 19 nt, Artificial Sequence
  Description of Artificial Sequence: Synthetic oligonucleotide
gccaugguaagagcaccuc

SEQ ID NO: 2094170 - RNA, 19 nt, Artificial Sequence
  Description of Artificial Sequence: Synthetic oligonucleotide
ugcgggcagucugcuuugu

SEQ ID NO: 2094171 - RNA, 19 nt, Artificial Sequence
  Description of Artificial Sequence: Synthetic oligonucleotide
agaggcggcgcuggcguua

SEQ ID NO: 2094172 - RNA, 19 nt, Artificial Sequence
  Description of Artificial Sequence: Synthetic oligonucleotide
ccuguaacgaugagguuuu

SEQ ID NO: 2094173 - RNA, 19 nt, Artificial Sequence
  Description of Artificial Sequence: Synthetic oligonucleotide
gcgacggcugcgaacacaa

SEQ ID NO: 2094174 - RNA, 19 nt, Artificial Sequence
  Description of Artificial Sequence: Synthetic oligonucleotide
ggcggcgacggcugcgaac

SEQ ID NO: 2094175 - RNA, 19 nt, Artificial Sequence
  Description of Artificial Sequence: Synthetic oligonucleotide
ggcugcgaacacaauugaa

SEQ ID NO: 2094176 - RNA, 19 nt, Artificial Sequence
  Description of Artificial Sequence: Synthetic oligonucleotide
gcgcacucuugcgagcggc

SEQ ID NO: 2094177 - RNA, 19 nt, Artificial Sequence
  Description of Artificial Sequence: Synthetic oligonucleotide
caguagagggcgcacucuu

SEQ ID NO: 2094178 - RNA, 19 nt, Artificial Sequence
  Description of Artificial Sequence: Synthetic oligonucleotide
cucuugcgagcggcuuuug

SEQ ID NO: 2094179 - RNA, 19 nt, Artificial Sequence
  Description of Artificial Sequence: Synthetic oligonucleotide
ggaaggggagcuugcgaau

SEQ ID NO: 2094180 - RNA, 19 nt, Artificial Sequence
  Description of Artificial Sequence: Synthetic oligonucleotide
cucgaaccagacgcuggaa

SEQ ID NO: 2094181 - RNA, 19 nt, Artificial Sequence
  Description of Artificial Sequence: Synthetic oligonucleotide
gcuuuguacgagccauggu

SEQ ID NO: 2094182 - RNA, 19 nt, Artificial Sequence
  Description of Artificial Sequence: Synthetic oligonucleotide
gcggcgcuggcguuagaga

SEQ ID NO: 2094183 - RNA, 19 nt, Artificial Sequence
  Description of Artificial Sequence: Synthetic oligonucleotide
cuggaagcgcagaucuguu

SEQ ID NO: 2094184 - RNA, 19 nt, Artificial Sequence
  Description of Artificial Sequence: Synthetic oligonucleotide
gcaagcgagaggcggcgcu

SEQ ID NO: 2094185 - RNA, 19 nt, Artificial Sequence
  Description of Artificial Sequence: Synthetic oligonucleotide
cgcuggaaggggagcuugc

SEQ ID NO: 2094186 - RNA, 19 nt, Artificial Sequence
  Description of Artificial Sequence: Synthetic oligonucleotide
ccaaccagauaggccucac

SEQ ID NO: 2094187 - RNA, 19 nt, Artificial Sequence
  Description of Artificial Sequence: Synthetic oligonucleotide
gcuuuuguagccaguuguu

SEQ ID NO: 2094188 - RNA, 19 nt, Artificial Sequence
  Description of Artificial Sequence: Synthetic oligonucleotide
cggcuuuuguagccaguug

SEQ ID NO: 2094189 - RNA, 19 nt, Artificial Sequence
  Description of Artificial Sequence: Synthetic oligonucleotide
ggcgacggcugcgaacaca

SEQ ID NO: 2094190 - RNA, 19 nt, Artificial Sequence
  Description of Artificial Sequence: Synthetic oligonucleotide
ggcaagcgagaggcggcgc

SEQ ID NO: 2094191 - RNA, 19 nt, Artificial Sequence
  Description of Artificial Sequence: Synthetic oligonucleotide
ccaggccuguaacgaugag

SEQ ID NO: 2094192 - RNA, 19 nt, Artificial Sequence
  Description of Artificial Sequence: Synthetic oligonucleotide
gcucggcaagcgagaggcg

SEQ ID NO: 2094193 - RNA, 19 nt, Artificial Sequence
  Description of Artificial Sequence: Synthetic oligonucleotide
cacucuugcgagcggcuuu

SEQ ID NO: 2094194 - RNA, 19 nt, Artificial Sequence
  Description of Artificial Sequence: Synthetic oligonucleotide
gccaaccagauaggccuca

SEQ ID NO: 2094195 - RNA, 19 nt, Artificial Sequence
  Description of Artificial Sequence: Synthetic oligonucleotide
cuccaguagagggcgcacu

SEQ ID NO: 2094196 - RNA, 19 nt, Artificial Sequence
  Description of Artificial Sequence: Synthetic oligonucleotide
ccuucggcuggagcucggc

SEQ ID NO: 2094197 - RNA, 19 nt, Artificial Sequence
  Description of Artificial Sequence: Synthetic oligonucleotide
ggccaaccagauaggccuc

SEQ ID NO: 2094198 - RNA, 19 nt, Artificial Sequence
  Description of Artificial Sequence: Synthetic oligonucleotide
gcacucuggaagcgcagau

SEQ ID NO: 2094199 - RNA, 19 nt, Artificial Sequence
  Description of Artificial Sequence: Synthetic oligonucleotide
ccgguggauuugcgggcag

SEQ ID NO: 2094200 - RNA, 19 nt, Artificial Sequence
  Description of Artificial Sequence: Synthetic oligonucleotide
gacgcuggaaggggagcuu

SEQ ID NO: 2094201 - RNA, 19 nt, Artificial Sequence
  Description of Artificial Sequence: Synthetic oligonucleotide
cggcaagcgagaggcggcg

SEQ ID NO: 2094202 - RNA, 19 nt, Artificial Sequence
  Description of Artificial Sequence: Synthetic oligonucleotide
gcgucugauuucacggagu

SEQ ID NO: 2094203 - RNA, 19 nt, Artificial Sequence
  Description of Artificial Sequence: Synthetic oligonucleotide
gagcggcggcggcggcggc

SEQ ID NO: 2094204 - RNA, 19 nt, Artificial Sequence
  Description of Artificial Sequence: Synthetic oligonucleotide
gcggcuuuuguagccaguu

SEQ ID NO: 2094205 - RNA, 19 nt, Artificial Sequence
  Description of Artificial Sequence: Synthetic oligonucleotide
ccccuccaguagagggcgc

SEQ ID NO: 2094206 - RNA, 19 nt, Artificial Sequence
  Description of Artificial Sequence: Synthetic oligonucleotide
cggcugcgaacacaauuga

SEQ ID NO: 2094207 - RNA, 19 nt, Artificial Sequence
  Description of Artificial Sequence: Synthetic oligonucleotide
gagaggcggcgcuggcguu

SEQ ID NO: 2094208 - RNA, 19 nt, Artificial Sequence
  Description of Artificial Sequence: Synthetic oligonucleotide
gcgggcagucugcuuugua

SEQ ID NO: 2094209 - RNA, 19 nt, Artificial Sequence
  Description of Artificial Sequence: Synthetic oligonucleotide
cgagcggcuuuuguagcca

SEQ ID NO: 2094210 - RNA, 19 nt, Artificial Sequence
  Description of Artificial Sequence: Synthetic oligonucleotide
cgagaggcggcgcuggcgu

SEQ ID NO: 2094211 - RNA, 19 nt, Artificial Sequence
  Description of Artificial Sequence: Synthetic oligonucleotide
ccauuuaguugccgucaau

SEQ ID NO: 2094212 - RNA, 19 nt, Artificial Sequence
  Description of Artificial Sequence: Synthetic oligonucleotide
gcuuuaccaccgguggauu

SEQ ID NO: 2094213 - RNA, 19 nt, Artificial Sequence
  Description of Artificial Sequence: Synthetic oligonucleotide
aggcggcgcuggcguuaga

SEQ ID NO: 2094214 - RNA, 19 nt, Artificial Sequence
  Description of Artificial Sequence: Synthetic oligonucleotide
ccaguagagggcgcacucu

SEQ ID NO: 2094215 - RNA, 19 nt, Artificial Sequence
  Description of Artificial Sequence: Synthetic oligonucleotide
ggccuguaacgaugagguu

SEQ ID NO: 2094216 - RNA, 19 nt, Artificial Sequence
  Description of Artificial Sequence: Synthetic oligonucleotide
cggcuggagcucggcaagc

SEQ ID NO: 2094217 - RNA, 19 nt, Artificial Sequence
  Description of Artificial Sequence: Synthetic oligonucleotide
gcacucuugcgagcggcuu

SEQ ID NO: 2094218 - RNA, 19 nt, Artificial Sequence
  Description of Artificial Sequence: Synthetic oligonucleotide
gcacacagguugguaucuu

SEQ ID NO: 2094219 - RNA, 19 nt, Artificial Sequence
  Description of Artificial Sequence: Synthetic oligonucleotide
cgcuggcguuagagagcgg

SEQ ID NO: 2094220 - RNA, 19 nt, Artificial Sequence
  Description of Artificial Sequence: Synthetic oligonucleotide
gcggcggcggcggcggcga

SEQ ID NO: 2094221 - RNA, 19 nt, Artificial Sequence
  Description of Artificial Sequence: Synthetic oligonucleotide
cgcacucuugcgagcggcu

SEQ ID NO: 2094222 - RNA, 19 nt, Artificial Sequence
  Description of Artificial Sequence: Synthetic oligonucleotide
ccacaguaccaggccugua

SEQ ID NO: 2094223 - RNA, 19 nt, Artificial Sequence
  Description of Artificial Sequence: Synthetic oligonucleotide
cggcgacggcugcgaacac

SEQ ID NO: 2094224 - RNA, 19 nt, Artificial Sequence
  Description of Artificial Sequence: Synthetic oligonucleotide
cgguggauuugcgggcagu

SEQ ID NO: 2094225 - RNA, 19 nt, Artificial Sequence
  Description of Artificial Sequence: Synthetic oligonucleotide
cgacggcugcgaacacaau

SEQ ID NO: 2094226 - RNA, 19 nt, Artificial Sequence
  Description of Artificial Sequence: Synthetic oligonucleotide
cggcggcggcggcggcgac

SEQ ID NO: 2094227 - RNA, 19 nt, Artificial Sequence
  Description of Artificial Sequence: Synthetic oligonucleotide
auaaaugauauccaguucc

SEQ ID NO: 2094228 - RNA, 19 nt, Artificial Sequence
  Description of Artificial Sequence: Synthetic oligonucleotide
aauaauacccgggagaucc

SEQ ID NO: 2094229 - RNA, 19 nt, Artificial Sequence
  Description of Artificial Sequence: Synthetic oligonucleotide
acuaguuucagauaguccc

SEQ ID NO: 2094230 - RNA, 19 nt, Artificial Sequence
  Description of Artificial Sequence: Synthetic oligonucleotide
uuauucaagacauagauac

SEQ ID NO: 2094231 - RNA, 19 nt, Artificial Sequence
  Description of Artificial Sequence: Synthetic oligonucleotide
uuuuaggacauccagaaca

SEQ ID NO: 2094232 - RNA, 19 nt, Artificial Sequence
  Description of Artificial Sequence: Synthetic oligonucleotide
aaaguagugaauucguaag

SEQ ID NO: 2094233 - RNA, 19 nt, Artificial Sequence
  Description of Artificial Sequence: Synthetic oligonucleotide
agcaagacgagccuuaagc

SEQ ID NO: 2094234 - RNA, 19 nt, Artificial Sequence
  Description of Artificial Sequence: Synthetic oligonucleotide
aagaucaaauuacauguuc

SEQ ID NO: 2094235 - RNA, 19 nt, Artificial Sequence
  Description of Artificial Sequence: Synthetic oligonucleotide
caauguauggucuuuaccc

SEQ ID NO: 2094236 - RNA, 19 nt, Artificial Sequence
  Description of Artificial Sequence: Synthetic oligonucleotide
aaguagugaauucguaagc

SEQ ID NO: 2094237 - RNA, 19 nt, Artificial Sequence
  Description of Artificial Sequence: Synthetic oligonucleotide
uuggucauaaggaacauug

SEQ ID NO: 2094238 - RNA, 19 nt, Artificial Sequence
  Description of Artificial Sequence: Synthetic oligonucleotide
ucaaauuacauguucgggc

SEQ ID NO: 2094239 - RNA, 19 nt, Artificial Sequence
  Description of Artificial Sequence: Synthetic oligonucleotide
aaucuuauucaagacauag

SEQ ID NO: 2094240 - RNA, 19 nt, Artificial Sequence
  Description of Artificial Sequence: Synthetic oligonucleotide
aaugauauccaguuccuca

SEQ ID NO: 2094241 - RNA, 19 nt, Artificial Sequence
  Description of Artificial Sequence: Synthetic oligonucleotide
ucaagacauagauacaggg

SEQ ID NO: 2094242 - RNA, 19 nt, Artificial Sequence
  Description of Artificial Sequence: Synthetic oligonucleotide
aaggugaugugcuguagcc

SEQ ID NO: 2094243 - RNA, 19 nt, Artificial Sequence
  Description of Artificial Sequence: Synthetic oligonucleotide
ucuucuuaugucccaaugg

SEQ ID NO: 2094244 - RNA, 19 nt, Artificial Sequence
  Description of Artificial Sequence: Synthetic oligonucleotide
ugaucaaucuuauucaaga

SEQ ID NO: 2094245 - RNA, 19 nt, Artificial Sequence
  Description of Artificial Sequence: Synthetic oligonucleotide
ucaaucuuauucaagacau

SEQ ID NO: 2094246 - RNA, 19 nt, Artificial Sequence
  Description of Artificial Sequence: Synthetic oligonucleotide
ucuaccacaucaaugaggu

SEQ ID NO: 2094247 - RNA, 19 nt, Artificial Sequence
  Description of Artificial Sequence: Synthetic oligonucleotide
ucugaugacaccaggcacg

SEQ ID NO: 2094248 - RNA, 19 nt, Artificial Sequence
  Description of Artificial Sequence: Synthetic oligonucleotide
aucaagaucaaauuacaug

SEQ ID NO: 2094249 - RNA, 19 nt, Artificial Sequence
  Description of Artificial Sequence: Synthetic oligonucleotide
agcaucaccugucuuagcc

SEQ ID NO: 2094250 - RNA, 19 nt, Artificial Sequence
  Description of Artificial Sequence: Synthetic oligonucleotide
gaucaaauuacauguucgg

SEQ ID NO: 2094251 - RNA, 19 nt, Artificial Sequence
  Description of Artificial Sequence: Synthetic oligonucleotide
ugaggauuauguuucacag

SEQ ID NO: 2094252 - RNA, 19 nt, Artificial Sequence
  Description of Artificial Sequence: Synthetic oligonucleotide
acugcaaugacuugacgac

SEQ ID NO: 2094253 - RNA, 19 nt, Artificial Sequence
  Description of Artificial Sequence: Synthetic oligonucleotide
aaaauuccaucggugaugg

SEQ ID NO: 2094254 - RNA, 19 nt, Artificial Sequence
  Description of Artificial Sequence: Synthetic oligonucleotide
uucaauaauacccgggaga

SEQ ID NO: 2094255 - RNA, 19 nt, Artificial Sequence
  Description of Artificial Sequence: Synthetic oligonucleotide
uuuauaucugaugacacca

SEQ ID NO: 2094256 - RNA, 19 nt, Artificial Sequence
  Description of Artificial Sequence: Synthetic oligonucleotide
aagcuuagcaagacgagcc

SEQ ID NO: 2094257 - RNA, 19 nt, Artificial Sequence
  Description of Artificial Sequence: Synthetic oligonucleotide
aaugacgucuucgucuucc

SEQ ID NO: 2094258 - RNA, 19 nt, Artificial Sequence
  Description of Artificial Sequence: Synthetic oligonucleotide
uuugugaaucuucaugcag

SEQ ID NO: 2094259 - RNA, 19 nt, Artificial Sequence
  Description of Artificial Sequence: Synthetic oligonucleotide
acgggaaacccacaaaccc

SEQ ID NO: 2094260 - RNA, 19 nt, Artificial Sequence
  Description of Artificial Sequence: Synthetic oligonucleotide
agagguguaaucugguaac

SEQ ID NO: 2094261 - RNA, 19 nt, Artificial Sequence
  Description of Artificial Sequence: Synthetic oligonucleotide
caaauuacauguucgggcc

SEQ ID NO: 2094262 - RNA, 19 nt, Artificial Sequence
  Description of Artificial Sequence: Synthetic oligonucleotide
auccagaacaaucaagauc

SEQ ID NO: 2094263 - RNA, 19 nt, Artificial Sequence
  Description of Artificial Sequence: Synthetic oligonucleotide
aagacgagccuuaagcagc

SEQ ID NO: 2094264 - RNA, 19 nt, Artificial Sequence
  Description of Artificial Sequence: Synthetic oligonucleotide
agacgggaaacccacaaac

SEQ ID NO: 2094265 - RNA, 19 nt, Artificial Sequence
  Description of Artificial Sequence: Synthetic oligonucleotide
uagugaauucguaagcugc

SEQ ID NO: 2094266 - RNA, 19 nt, Artificial Sequence
  Description of Artificial Sequence: Synthetic oligonucleotide
ugaggcaccuuauaaauga

SEQ ID NO: 2094267 - RNA, 19 nt, Artificial Sequence
  Description of Artificial Sequence: Synthetic oligonucleotide
caacaggucaucaaaauuc

SEQ ID NO: 2094268 - RNA, 19 nt, Artificial Sequence
  Description of Artificial Sequence: Synthetic oligonucleotide
uuaaauucuuugauaagau

SEQ ID NO: 2094269 - RNA, 19 nt, Artificial Sequence
  Description of Artificial Sequence: Synthetic oligonucleotide
auucaagacauagauacag

SEQ ID NO: 2094270 - RNA, 19 nt, Artificial Sequence
  Description of Artificial Sequence: Synthetic oligonucleotide
uucaagacauagauacagg

SEQ ID NO: 2094271 - RNA, 19 nt, Artificial Sequence
  Description of Artificial Sequence: Synthetic oligonucleotide
ucgaagcuuagcaagacga

SEQ ID NO: 2094272 - RNA, 19 nt, Artificial Sequence
  Description of Artificial Sequence: Synthetic oligonucleotide
auggucuuuacccacuuuc

SEQ ID NO: 2094273 - RNA, 19 nt, Artificial Sequence
  Description of Artificial Sequence: Synthetic oligonucleotide
uguaaucugguaacugucc

SEQ ID NO: 2094274 - RNA, 19 nt, Artificial Sequence
  Description of Artificial Sequence: Synthetic oligonucleotide
uuuacccacuuucugagga

SEQ ID NO: 2094275 - RNA, 19 nt, Artificial Sequence
  Description of Artificial Sequence: Synthetic oligonucleotide
auacaggggauguaaacuc

SEQ ID NO: 2094276 - RNA, 19 nt, Artificial Sequence
  Description of Artificial Sequence: Synthetic oligonucleotide
uguaaauucucacuaguuu

SEQ ID NO: 2094277 - RNA, 19 nt, Artificial Sequence
  Description of Artificial Sequence: Synthetic oligonucleotide
uacuuggucauaaggaaca

SEQ ID NO: 2094278 - RNA, 19 nt, Artificial Sequence
  Description of Artificial Sequence: Synthetic oligonucleotide
ucuuuacccacuuucugag

SEQ ID NO: 2094279 - RNA, 19 nt, Artificial Sequence
  Description of Artificial Sequence: Synthetic oligonucleotide
gaugacaccaggcacggug

SEQ ID NO: 2094280 - RNA, 19 nt, Artificial Sequence
  Description of Artificial Sequence: Synthetic oligonucleotide
agauacaggggauguaaac

SEQ ID NO: 2094281 - RNA, 19 nt, Artificial Sequence
  Description of Artificial Sequence: Synthetic oligonucleotide
aauuacauguucgggccac

SEQ ID NO: 2094282 - RNA, 19 nt, Artificial Sequence
  Description of Artificial Sequence: Synthetic oligonucleotide
uugcuguucaaucgaaucc

SEQ ID NO: 2094283 - RNA, 19 nt, Artificial Sequence
  Description of Artificial Sequence: Synthetic oligonucleotide
uugugaaucuucaugcaga

SEQ ID NO: 2094284 - RNA, 19 nt, Artificial Sequence
  Description of Artificial Sequence: Synthetic oligonucleotide
ugcuagguuacucagcaga

SEQ ID NO: 2094285 - RNA, 19 nt, Artificial Sequence
  Description of Artificial Sequence: Synthetic oligonucleotide
agcguauuuaaauucuuug

SEQ ID NO: 2094286 - RNA, 19 nt, Artificial Sequence
  Description of Artificial Sequence: Synthetic oligonucleotide
agccuuguucuuuugaguc

SEQ ID NO: 2094287 - RNA, 19 nt, Artificial Sequence
  Description of Artificial Sequence: Synthetic oligonucleotide
agaucaaauuacauguucg

SEQ ID NO: 2094288 - RNA, 19 nt, Artificial Sequence
  Description of Artificial Sequence: Synthetic oligonucleotide
ucuuaugucccaaugguuu

SEQ ID NO: 2094289 - RNA, 19 nt, Artificial Sequence
  Description of Artificial Sequence: Synthetic oligonucleotide
uuuggcaccuucaauaaua

SEQ ID NO: 2094290 - RNA, 19 nt, Artificial Sequence
  Description of Artificial Sequence: Synthetic oligonucleotide
uucaaucgaaucccaaagc

SEQ ID NO: 2094291 - RNA, 19 nt, Artificial Sequence
  Description of Artificial Sequence: Synthetic oligonucleotide
uaucugaugacaccaggca

SEQ ID NO: 2094292 - RNA, 19 nt, Artificial Sequence
  Description of Artificial Sequence: Synthetic oligonucleotide
auagucccagaucuuuucc

SEQ ID NO: 2094293 - RNA, 19 nt, Artificial Sequence
  Description of Artificial Sequence: Synthetic oligonucleotide
aguugacuuccccacagac

SEQ ID NO: 2094294 - RNA, 19 nt, Artificial Sequence
  Description of Artificial Sequence: Synthetic oligonucleotide
aggucaucaaaauuccauc

SEQ ID NO: 2094295 - RNA, 19 nt, Artificial Sequence
  Description of Artificial Sequence: Synthetic oligonucleotide
uguccuuuggguuuagugu

SEQ ID NO: 2094296 - RNA, 19 nt, Artificial Sequence
  Description of Artificial Sequence: Synthetic oligonucleotide
acuacgcagagucacauca

SEQ ID NO: 2094297 - RNA, 19 nt, Artificial Sequence
  Description of Artificial Sequence: Synthetic oligonucleotide
aacauugcuauggcuggcc

SEQ ID NO: 2094298 - RNA, 19 nt, Artificial Sequence
  Description of Artificial Sequence: Synthetic oligonucleotide
uggguuugcuguucaaucg

SEQ ID NO: 2094299 - RNA, 19 nt, Artificial Sequence
  Description of Artificial Sequence: Synthetic oligonucleotide
ugucccaaugguuuuagga

SEQ ID NO: 2094300 - RNA, 19 nt, Artificial Sequence
  Description of Artificial Sequence: Synthetic oligonucleotide
cagaauacacuccugcuag

SEQ ID NO: 2094301 - RNA, 19 nt, Artificial Sequence
  Description of Artificial Sequence: Synthetic oligonucleotide
gucaucaaaauuccaucgg

SEQ ID NO: 2094302 - RNA, 19 nt, Artificial Sequence
  Description of Artificial Sequence: Synthetic oligonucleotide
uuauaucugaugacaccag

SEQ ID NO: 2094303 - RNA, 19 nt, Artificial Sequence
  Description of Artificial Sequence: Synthetic oligonucleotide
gagaccccagaccaaagcg

SEQ ID NO: 2094304 - RNA, 19 nt, Artificial Sequence
  Description of Artificial Sequence: Synthetic oligonucleotide
uuugcuguucaaucgaauc

SEQ ID NO: 2094305 - RNA, 19 nt, Artificial Sequence
  Description of Artificial Sequence: Synthetic oligonucleotide
ucgaucuccgcgaucuucg

SEQ ID NO: 2094306 - RNA, 19 nt, Artificial Sequence
  Description of Artificial Sequence: Synthetic oligonucleotide
uucgaagcuuagcaagacg

SEQ ID NO: 2094307 - RNA, 19 nt, Artificial Sequence
  Description of Artificial Sequence: Synthetic oligonucleotide
augcagaaaucuuccaccg

SEQ ID NO: 2094308 - RNA, 19 nt, Artificial Sequence
  Description of Artificial Sequence: Synthetic oligonucleotide
aguguaaauucucacuagu

SEQ ID NO: 2094309 - RNA, 19 nt, Artificial Sequence
  Description of Artificial Sequence: Synthetic oligonucleotide
uccuuuauaucugaugaca

SEQ ID NO: 2094310 - RNA, 19 nt, Artificial Sequence
  Description of Artificial Sequence: Synthetic oligonucleotide
aucaaauuacauguucggg

SEQ ID NO: 2094311 - RNA, 19 nt, Artificial Sequence
  Description of Artificial Sequence: Synthetic oligonucleotide
uugaguccgggccaucucg

SEQ ID NO: 2094312 - RNA, 19 nt, Artificial Sequence
  Description of Artificial Sequence: Synthetic oligonucleotide
uaaggaacauugcuauggc

SEQ ID NO: 2094313 - RNA, 19 nt, Artificial Sequence
  Description of Artificial Sequence: Synthetic oligonucleotide
ggucaucaaaauuccaucg

SEQ ID NO: 2094314 - RNA, 19 nt, Artificial Sequence
  Description of Artificial Sequence: Synthetic oligonucleotide
uucgcuaaggucccgcuca

SEQ ID NO: 2094315 - RNA, 19 nt, Artificial Sequence
  Description of Artificial Sequence: Synthetic oligonucleotide
agugaauucguaagcugcc

SEQ ID NO: 2094316 - RNA, 19 nt, Artificial Sequence
  Description of Artificial Sequence: Synthetic oligonucleotide
uucguaagcugccacuuca

SEQ ID NO: 2094317 - RNA, 19 nt, Artificial Sequence
  Description of Artificial Sequence: Synthetic oligonucleotide
ggcaccuucaauaauaccc

SEQ ID NO: 2094318 - RNA, 19 nt, Artificial Sequence
  Description of Artificial Sequence: Synthetic oligonucleotide
acccgggagauccaggagc

SEQ ID NO: 2094319 - RNA, 19 nt, Artificial Sequence
  Description of Artificial Sequence: Synthetic oligonucleotide
auguauggucuuuacccac

SEQ ID NO: 2094320 - RNA, 19 nt, Artificial Sequence
  Description of Artificial Sequence: Synthetic oligonucleotide
uaguguaaauucucacuag

SEQ ID NO: 2094321 - RNA, 19 nt, Artificial Sequence
  Description of Artificial Sequence: Synthetic oligonucleotide
ugacuugacgaccucugcc

SEQ ID NO: 2094322 - RNA, 19 nt, Artificial Sequence
  Description of Artificial Sequence: Synthetic oligonucleotide
agugaggcaccuuauaaau

SEQ ID NO: 2094323 - RNA, 19 nt, Artificial Sequence
  Description of Artificial Sequence: Synthetic oligonucleotide
uguucuuuugaguccgggc

SEQ ID NO: 2094324 - RNA, 19 nt, Artificial Sequence
  Description of Artificial Sequence: Synthetic oligonucleotide
ucuucgaagcuuagcaaga

SEQ ID NO: 2094325 - RNA, 19 nt, Artificial Sequence
  Description of Artificial Sequence: Synthetic oligonucleotide
ucagaauacacuccugcua

SEQ ID NO: 2094326 - RNA, 19 nt, Artificial Sequence
  Description of Artificial Sequence: Synthetic oligonucleotide
ugaggaggcuacuugguca

SEQ ID NO: 2094327 - RNA, 19 nt, Artificial Sequence
  Description of Artificial Sequence: Synthetic oligonucleotide
uguucaaucgaaucccaaa

SEQ ID NO: 2094328 - RNA, 19 nt, Artificial Sequence
  Description of Artificial Sequence: Synthetic oligonucleotide
ugcaaugacuugacgaccu

SEQ ID NO: 2094329 - RNA, 19 nt, Artificial Sequence
  Description of Artificial Sequence: Synthetic oligonucleotide
aaaugauauccaguuccuc

SEQ ID NO: 2094330 - RNA, 19 nt, Artificial Sequence
  Description of Artificial Sequence: Synthetic oligonucleotide
ucaauaauacccgggagau

SEQ ID NO: 2094331 - RNA, 19 nt, Artificial Sequence
  Description of Artificial Sequence: Synthetic oligonucleotide
uuuugugaaucuucaugca

SEQ ID NO: 2094332 - RNA, 19 nt, Artificial Sequence
  Description of Artificial Sequence: Synthetic oligonucleotide
uauucaagacauagauaca

SEQ ID NO: 2094333 - RNA, 19 nt, Artificial Sequence
  Description of Artificial Sequence: Synthetic oligonucleotide
caagacgagccuuaagcag

SEQ ID NO: 2094334 - RNA, 19 nt, Artificial Sequence
  Description of Artificial Sequence: Synthetic oligonucleotide
uaagcugccacuucagaau

SEQ ID NO: 2094335 - RNA, 19 nt, Artificial Sequence
  Description of Artificial Sequence: Synthetic oligonucleotide
guuuaguguaaauucucac

SEQ ID NO: 2094336 - RNA, 19 nt, Artificial Sequence
  Description of Artificial Sequence: Synthetic oligonucleotide
uauguuucacagagagacc

SEQ ID NO: 2094337 - RNA, 19 nt, Artificial Sequence
  Description of Artificial Sequence: Synthetic oligonucleotide
aauucuuugauaagauuuu

SEQ ID NO: 2094338 - RNA, 19 nt, Artificial Sequence
  Description of Artificial Sequence: Synthetic oligonucleotide
uagguuacucagcagaguu

SEQ ID NO: 2094339 - RNA, 19 nt, Artificial Sequence
  Description of Artificial Sequence: Synthetic oligonucleotide
aaugacuugacgaccucug

SEQ ID NO: 2094340 - RNA, 19 nt, Artificial Sequence
  Description of Artificial Sequence: Synthetic oligonucleotide
aaauuacauguucgggcca

SEQ ID NO: 2094341 - RNA, 19 nt, Artificial Sequence
  Description of Artificial Sequence: Synthetic oligonucleotide
aggcuacuuggucauaagg

SEQ ID NO: 2094342 - RNA, 19 nt, Artificial Sequence
  Description of Artificial Sequence: Synthetic oligonucleotide
ugaauucguaagcugccac

SEQ ID NO: 2094343 - RNA, 19 nt, Artificial Sequence
  Description of Artificial Sequence: Synthetic oligonucleotide
gaagcuuagcaagacgagc

SEQ ID NO: 2094344 - RNA, 19 nt, Artificial Sequence
  Description of Artificial Sequence: Synthetic oligonucleotide
ucggugaugggcagaaaug

SEQ ID NO: 2094345 - RNA, 19 nt, Artificial Sequence
  Description of Artificial Sequence: Synthetic oligonucleotide
aguagugaauucguaagcu

SEQ ID NO: 2094346 - RNA, 19 nt, Artificial Sequence
  Description of Artificial Sequence: Synthetic oligonucleotide
uacgcagagucacaucagc

SEQ ID NO: 2094347 - RNA, 19 nt, Artificial Sequence
  Description of Artificial Sequence: Synthetic oligonucleotide
guagugaauucguaagcug

SEQ ID NO: 2094348 - RNA, 19 nt, Artificial Sequence
  Description of Artificial Sequence: Synthetic oligonucleotide
aauccgagcaucaccuguc

SEQ ID NO: 2094349 - RNA, 19 nt, Artificial Sequence
  Description of Artificial Sequence: Synthetic oligonucleotide
uucuuuugaguccgggcca

SEQ ID NO: 2094350 - RNA, 19 nt, Artificial Sequence
  Description of Artificial Sequence: Synthetic oligonucleotide
uuuaggggugaugaguucu

SEQ ID NO: 2094351 - RNA, 19 nt, Artificial Sequence
  Description of Artificial Sequence: Synthetic oligonucleotide
gucccaaugguuuuaggac

SEQ ID NO: 2094352 - RNA, 19 nt, Artificial Sequence
  Description of Artificial Sequence: Synthetic oligonucleotide
uguauggucuuuacccacu

SEQ ID NO: 2094353 - RNA, 19 nt, Artificial Sequence
  Description of Artificial Sequence: Synthetic oligonucleotide
cuucaauaauacccgggag

SEQ ID NO: 2094354 - RNA, 19 nt, Artificial Sequence
  Description of Artificial Sequence: Synthetic oligonucleotide
uuuccuucuaccacaucaa

SEQ ID NO: 2094355 - RNA, 19 nt, Artificial Sequence
  Description of Artificial Sequence: Synthetic oligonucleotide
uuggguuugcuguucaauc

SEQ ID NO: 2094356 - RNA, 19 nt, Artificial Sequence
  Description of Artificial Sequence: Synthetic oligonucleotide
aaucgaaucccaaagccuu

SEQ ID NO: 2094357 - RNA, 19 nt, Artificial Sequence
  Description of Artificial Sequence: Synthetic oligonucleotide
ggucaaaguagugaauucg

SEQ ID NO: 2094358 - RNA, 19 nt, Artificial Sequence
  Description of Artificial Sequence: Synthetic oligonucleotide
ugugaaucuucaugcagaa

SEQ ID NO: 2094359 - RNA, 19 nt, Artificial Sequence
  Description of Artificial Sequence: Synthetic oligonucleotide
agcuguggcaucacuacgc

SEQ ID NO: 2094360 - RNA, 19 nt, Artificial Sequence
  Description of Artificial Sequence: Synthetic oligonucleotide
gcuaaggucccgcucaugg

SEQ ID NO: 2094361 - RNA, 19 nt, Artificial Sequence
  Description of Artificial Sequence: Synthetic oligonucleotide
uggucauaaggaacauugc

SEQ ID NO: 2094362 - RNA, 19 nt, Artificial Sequence
  Description of Artificial Sequence: Synthetic oligonucleotide
uucacagagagaccccaga

SEQ ID NO: 2094363 - RNA, 19 nt, Artificial Sequence
  Description of Artificial Sequence: Synthetic oligonucleotide
acauguucgggccacugca

SEQ ID NO: 2094364 - RNA, 19 nt, Artificial Sequence
  Description of Artificial Sequence: Synthetic oligonucleotide
ccuuauaaaugauauccag

SEQ ID NO: 2094365 - RNA, 19 nt, Artificial Sequence
  Description of Artificial Sequence: Synthetic oligonucleotide
aaugguuuuaggacaucca

SEQ ID NO: 2094366 - RNA, 19 nt, Artificial Sequence
  Description of Artificial Sequence: Synthetic oligonucleotide
accaaagcguauuuaaauu

SEQ ID NO: 2094367 - RNA, 19 nt, Artificial Sequence
  Description of Artificial Sequence: Synthetic oligonucleotide
ucaaaguagugaauucgua

SEQ ID NO: 2094368 - RNA, 19 nt, Artificial Sequence
  Description of Artificial Sequence: Synthetic oligonucleotide
caaaguagugaauucguaa

SEQ ID NO: 2094369 - RNA, 19 nt, Artificial Sequence
  Description of Artificial Sequence: Synthetic oligonucleotide
cacuaguuucagauagucc

SEQ ID NO: 2094370 - RNA, 19 nt, Artificial Sequence
  Description of Artificial Sequence: Synthetic oligonucleotide
aaucugguaacuguccuuu

SEQ ID NO: 2094371 - RNA, 19 nt, Artificial Sequence
  Description of Artificial Sequence: Synthetic oligonucleotide
uacucagcagaguugacuu

SEQ ID NO: 2094372 - RNA, 19 nt, Artificial Sequence
  Description of Artificial Sequence: Synthetic oligonucleotide
agaauacacuccugcuagg

SEQ ID NO: 2094373 - RNA, 19 nt, Artificial Sequence
  Description of Artificial Sequence: Synthetic oligonucleotide
acagugaggcaccuuauaa

SEQ ID NO: 2094374 - RNA, 19 nt, Artificial Sequence
  Description of Artificial Sequence: Synthetic oligonucleotide
aauacacuccugcuagguu

SEQ ID NO: 2094375 - RNA, 19 nt, Artificial Sequence
  Description of Artificial Sequence: Synthetic oligonucleotide
auacacuccugcuagguua

SEQ ID NO: 2094376 - RNA, 19 nt, Artificial Sequence
  Description of Artificial Sequence: Synthetic oligonucleotide
ggcaucacuacgcagaguc

SEQ ID NO: 2094377 - RNA, 19 nt, Artificial Sequence
  Description of Artificial Sequence: Synthetic oligonucleotide
cuuauaaaugauauccagu

SEQ ID NO: 2094378 - RNA, 19 nt, Artificial Sequence
  Description of Artificial Sequence: Synthetic oligonucleotide
uacauguucgggccacugc

SEQ ID NO: 2094379 - RNA, 19 nt, Artificial Sequence
  Description of Artificial Sequence: Synthetic oligonucleotide
acgucuucgucuuccaaug

SEQ ID NO: 2094380 - RNA, 19 nt, Artificial Sequence
  Description of Artificial Sequence: Synthetic oligonucleotide
uuggcaccuucaauaauac

SEQ ID NO: 2094381 - RNA, 19 nt, Artificial Sequence
  Description of Artificial Sequence: Synthetic oligonucleotide
uccgcgaucuucgcuaagg

SEQ ID NO: 2094382 - RNA, 19 nt, Artificial Sequence
  Description of Artificial Sequence: Synthetic oligonucleotide
ugccuuucccaucuuuggc

SEQ ID NO: 2094383 - RNA, 19 nt, Artificial Sequence
  Description of Artificial Sequence: Synthetic oligonucleotide
gcuccuuuauaucugauga

SEQ ID NO: 2094384 - RNA, 19 nt, Artificial Sequence
  Description of Artificial Sequence: Synthetic oligonucleotide
caaggugaugugcuguagc

SEQ ID NO: 2094385 - RNA, 19 nt, Artificial Sequence
  Description of Artificial Sequence: Synthetic oligonucleotide
aggacauccagaacaauca

SEQ ID NO: 2094386 - RNA, 19 nt, Artificial Sequence
  Description of Artificial Sequence: Synthetic oligonucleotide
ugaaugacgucuucgucuu

SEQ ID NO: 2094387 - RNA, 19 nt, Artificial Sequence
  Description of Artificial Sequence: Synthetic oligonucleotide
ugaguccgggccaucucgg

SEQ ID NO: 2094388 - RNA, 19 nt, Artificial Sequence
  Description of Artificial Sequence: Synthetic oligonucleotide
auucguaagcugccacuuc

SEQ ID NO: 2094389 - RNA, 19 nt, Artificial Sequence
  Description of Artificial Sequence: Synthetic oligonucleotide
ucacuaguuucagauaguc

SEQ ID NO: 2094390 - RNA, 19 nt, Artificial Sequence
  Description of Artificial Sequence: Synthetic oligonucleotide
aauucguaagcugccacuu

SEQ ID NO: 2094391 - RNA, 19 nt, Artificial Sequence
  Description of Artificial Sequence: Synthetic oligonucleotide
aucggugaugggcagaaau

SEQ ID NO: 2094392 - RNA, 19 nt, Artificial Sequence
  Description of Artificial Sequence: Synthetic oligonucleotide
ucggcuucgaucuccgcga

SEQ ID NO: 2094393 - RNA, 19 nt, Artificial Sequence
  Description of Artificial Sequence: Synthetic oligonucleotide
gcgaucuucgcuaaggucc

SEQ ID NO: 2094394 - RNA, 19 nt, Artificial Sequence
  Description of Artificial Sequence: Synthetic oligonucleotide
acuccugcuagguuacuca

SEQ ID NO: 2094395 - RNA, 19 nt, Artificial Sequence
  Description of Artificial Sequence: Synthetic oligonucleotide
uuaagcagcccaaggugau

SEQ ID NO: 2094396 - RNA, 19 nt, Artificial Sequence
  Description of Artificial Sequence: Synthetic oligonucleotide
augaguucucuucgaagcu

SEQ ID NO: 2094397 - RNA, 19 nt, Artificial Sequence
  Description of Artificial Sequence: Synthetic oligonucleotide
aauacccgggagauccagg

SEQ ID NO: 2094398 - RNA, 19 nt, Artificial Sequence
  Description of Artificial Sequence: Synthetic oligonucleotide
ucguaagcugccacuucag

SEQ ID NO: 2094399 - RNA, 19 nt, Artificial Sequence
  Description of Artificial Sequence: Synthetic oligonucleotide
aacccaauccgagcaucac

SEQ ID NO: 2094400 - RNA, 19 nt, Artificial Sequence
  Description of Artificial Sequence: Synthetic oligonucleotide
uagucccagaucuuuucca

SEQ ID NO: 2094401 - RNA, 19 nt, Artificial Sequence
  Description of Artificial Sequence: Synthetic oligonucleotide
ucucuucgaagcuuagcaa

SEQ ID NO: 2094402 - RNA, 19 nt, Artificial Sequence
  Description of Artificial Sequence: Synthetic oligonucleotide
uaguuucagauagucccag

SEQ ID NO: 2094403 - RNA, 19 nt, Artificial Sequence
  Description of Artificial Sequence: Synthetic oligonucleotide
cacaaacccaauccgagca

SEQ ID NO: 2094404 - RNA, 19 nt, Artificial Sequence
  Description of Artificial Sequence: Synthetic oligonucleotide
guaagcugccacuucagaa

SEQ ID NO: 2094405 - RNA, 19 nt, Artificial Sequence
  Description of Artificial Sequence: Synthetic oligonucleotide
gacgggaaacccacaaacc

SEQ ID NO: 2094406 - RNA, 19 nt, Artificial Sequence
  Description of Artificial Sequence: Synthetic oligonucleotide
accuucaauaauacccggg

SEQ ID NO: 2094407 - RNA, 19 nt, Artificial Sequence
  Description of Artificial Sequence: Synthetic oligonucleotide
caucacuacgcagagucac

SEQ ID NO: 2094408 - RNA, 19 nt, Artificial Sequence
  Description of Artificial Sequence: Synthetic oligonucleotide
uguucgggccacugcaaug

SEQ ID NO: 2094409 - RNA, 19 nt, Artificial Sequence
  Description of Artificial Sequence: Synthetic oligonucleotide
cuccuuuauaucugaugac

SEQ ID NO: 2094410 - RNA, 19 nt, Artificial Sequence
  Description of Artificial Sequence: Synthetic oligonucleotide
uuggcuccuuuauaucuga

SEQ ID NO: 2094411 - RNA, 19 nt, Artificial Sequence
  Description of Artificial Sequence: Synthetic oligonucleotide
cuuauucaagacauagaua

SEQ ID NO: 2094412 - RNA, 19 nt, Artificial Sequence
  Description of Artificial Sequence: Synthetic oligonucleotide
auacccgggagauccagga

SEQ ID NO: 2094413 - RNA, 19 nt, Artificial Sequence
  Description of Artificial Sequence: Synthetic oligonucleotide
aaaccuucuccuggcccac

SEQ ID NO: 2094414 - RNA, 19 nt, Artificial Sequence
  Description of Artificial Sequence: Synthetic oligonucleotide
gggugaugaguucucuucg

SEQ ID NO: 2094415 - RNA, 19 nt, Artificial Sequence
  Description of Artificial Sequence: Synthetic oligonucleotide
uccugcuagguuacucagc

SEQ ID NO: 2094416 - RNA, 19 nt, Artificial Sequence
  Description of Artificial Sequence: Synthetic oligonucleotide
caccuucaauaauacccgg

SEQ ID NO: 2094417 - RNA, 19 nt, Artificial Sequence
  Description of Artificial Sequence: Synthetic oligonucleotide
gcaccuucaauaauacccg

SEQ ID NO: 2094418 - RNA, 19 nt, Artificial Sequence
  Description of Artificial Sequence: Synthetic oligonucleotide
cauugcuauggcuggccag

SEQ ID NO: 2094419 - RNA, 19 nt, Artificial Sequence
  Description of Artificial Sequence: Synthetic oligonucleotide
ccuuuauaucugaugacac

SEQ ID NO: 2094420 - RNA, 19 nt, Artificial Sequence
  Description of Artificial Sequence: Synthetic oligonucleotide
agacgagccuuaagcagcc

SEQ ID NO: 2094421 - RNA, 19 nt, Artificial Sequence
  Description of Artificial Sequence: Synthetic oligonucleotide
cugaaugacgucuucgucu

SEQ ID NO: 2094422 - RNA, 19 nt, Artificial Sequence
  Description of Artificial Sequence: Synthetic oligonucleotide
gaggcuacuuggucauaag

SEQ ID NO: 2094423 - RNA, 19 nt, Artificial Sequence
  Description of Artificial Sequence: Synthetic oligonucleotide
uuuugaguccgggccaucu

SEQ ID NO: 2094424 - RNA, 19 nt, Artificial Sequence
  Description of Artificial Sequence: Synthetic oligonucleotide
gcguauuuaaauucuuuga

SEQ ID NO: 2094425 - RNA, 19 nt, Artificial Sequence
  Description of Artificial Sequence: Synthetic oligonucleotide
gagucacaucagcauuggg

SEQ ID NO: 2094426 - RNA, 19 nt, Artificial Sequence
  Description of Artificial Sequence: Synthetic oligonucleotide
gucauaaggaacauugcua

SEQ ID NO: 2094427 - RNA, 19 nt, Artificial Sequence
  Description of Artificial Sequence: Synthetic oligonucleotide
aaacccaauccgagcauca

SEQ ID NO: 2094428 - RNA, 19 nt, Artificial Sequence
  Description of Artificial Sequence: Synthetic oligonucleotide
ggcacgguggucaaaguag

SEQ ID NO: 2094429 - RNA, 19 nt, Artificial Sequence
  Description of Artificial Sequence: Synthetic oligonucleotide
cuucuuaugucccaauggu

SEQ ID NO: 2094430 - RNA, 19 nt, Artificial Sequence
  Description of Artificial Sequence: Synthetic oligonucleotide
gaauucguaagcugccacu

SEQ ID NO: 2094431 - RNA, 19 nt, Artificial Sequence
  Description of Artificial Sequence: Synthetic oligonucleotide
aucuccgcgaucuucgcua

SEQ ID NO: 2094432 - RNA, 19 nt, Artificial Sequence
  Description of Artificial Sequence: Synthetic oligonucleotide
cagaagagguuuucacuuc

SEQ ID NO: 2094433 - RNA, 19 nt, Artificial Sequence
  Description of Artificial Sequence: Synthetic oligonucleotide
gacuugacgaccucugccu

SEQ ID NO: 2094434 - RNA, 19 nt, Artificial Sequence
  Description of Artificial Sequence: Synthetic oligonucleotide
agcuuagcaagacgagccu

SEQ ID NO: 2094435 - RNA, 19 nt, Artificial Sequence
  Description of Artificial Sequence: Synthetic oligonucleotide
cuacgcagagucacaucag

SEQ ID NO: 2094436 - RNA, 19 nt, Artificial Sequence
  Description of Artificial Sequence: Synthetic oligonucleotide
aucccaaagccuuccaauu

SEQ ID NO: 2094437 - RNA, 19 nt, Artificial Sequence
  Description of Artificial Sequence: Synthetic oligonucleotide
aagcguauuuaaauucuuu

SEQ ID NO: 2094438 - RNA, 19 nt, Artificial Sequence
  Description of Artificial Sequence: Synthetic oligonucleotide
uuugaguccgggccaucuc

SEQ ID NO: 2094439 - RNA, 19 nt, Artificial Sequence
  Description of Artificial Sequence: Synthetic oligonucleotide
acgagccuuaagcagccca

SEQ ID NO: 2094440 - RNA, 19 nt, Artificial Sequence
  Description of Artificial Sequence: Synthetic oligonucleotide
agguguaaucugguaacug

SEQ ID NO: 2094441 - RNA, 19 nt, Artificial Sequence
  Description of Artificial Sequence: Synthetic oligonucleotide
agcauuggguuugcuguuc

SEQ ID NO: 2094442 - RNA, 19 nt, Artificial Sequence
  Description of Artificial Sequence: Synthetic oligonucleotide
uccuuuggguuuaguguaa

SEQ ID NO: 2094443 - RNA, 19 nt, Artificial Sequence
  Description of Artificial Sequence: Synthetic oligonucleotide
guccuuuggguuuagugua

SEQ ID NO: 2094444 - RNA, 19 nt, Artificial Sequence
  Description of Artificial Sequence: Synthetic oligonucleotide
augucccaaugguuuuagg

SEQ ID NO: 2094445 - RNA, 19 nt, Artificial Sequence
  Description of Artificial Sequence: Synthetic oligonucleotide
uggcaccuucaauaauacc

SEQ ID NO: 2094446 - RNA, 19 nt, Artificial Sequence
  Description of Artificial Sequence: Synthetic oligonucleotide
cugcaaugacuugacgacc

SEQ ID NO: 2094447 - RNA, 19 nt, Artificial Sequence
  Description of Artificial Sequence: Synthetic oligonucleotide
acauugcuauggcuggcca

SEQ ID NO: 2094448 - RNA, 19 nt, Artificial Sequence
  Description of Artificial Sequence: Synthetic oligonucleotide
gaaucccaaagccuuccaa

SEQ ID NO: 2094449 - RNA, 19 nt, Artificial Sequence
  Description of Artificial Sequence: Synthetic oligonucleotide
ggucuuuacccacuuucug

SEQ ID NO: 2094450 - RNA, 19 nt, Artificial Sequence
  Description of Artificial Sequence: Synthetic oligonucleotide
ucuucgcuaaggucccgcu

SEQ ID NO: 2094451 - RNA, 19 nt, Artificial Sequence
  Description of Artificial Sequence: Synthetic oligonucleotide
gcuacuuggucauaaggaa

SEQ ID NO: 2094452 - RNA, 19 nt, Artificial Sequence
  Description of Artificial Sequence: Synthetic oligonucleotide
aaggucccgcucaugguug

SEQ ID NO: 2094453 - RNA, 19 nt, Artificial Sequence
  Description of Artificial Sequence: Synthetic oligonucleotide
aggucccgcucaugguugc

SEQ ID NO: 2094454 - RNA, 19 nt, Artificial Sequence
  Description of Artificial Sequence: Synthetic oligonucleotide
cuucgaagcuuagcaagac

SEQ ID NO: 2094455 - RNA, 19 nt, Artificial Sequence
  Description of Artificial Sequence: Synthetic oligonucleotide
uacccgggagauccaggag

SEQ ID NO: 2094456 - RNA, 19 nt, Artificial Sequence
  Description of Artificial Sequence: Synthetic oligonucleotide
guuucagauagucccagau

SEQ ID NO: 2094457 - RNA, 19 nt, Artificial Sequence
  Description of Artificial Sequence: Synthetic oligonucleotide
gguguaaucugguaacugu

SEQ ID NO: 2094458 - RNA, 19 nt, Artificial Sequence
  Description of Artificial Sequence: Synthetic oligonucleotide
acaaacccaauccgagcau

SEQ ID NO: 2094459 - RNA, 19 nt, Artificial Sequence
  Description of Artificial Sequence: Synthetic oligonucleotide
cuuuaggggugaugaguuc

SEQ ID NO: 2094460 - RNA, 19 nt, Artificial Sequence
  Description of Artificial Sequence: Synthetic oligonucleotide
ggcuacuuggucauaagga

SEQ ID NO: 2094461 - RNA, 19 nt, Artificial Sequence
  Description of Artificial Sequence: Synthetic oligonucleotide
guaacuguccuuuggguuu

SEQ ID NO: 2094462 - RNA, 19 nt, Artificial Sequence
  Description of Artificial Sequence: Synthetic oligonucleotide
ugaguucucuucgaagcuu

SEQ ID NO: 2094463 - RNA, 19 nt, Artificial Sequence
  Description of Artificial Sequence: Synthetic oligonucleotide
gcaagacgagccuuaagca

SEQ ID NO: 2094464 - RNA, 19 nt, Artificial Sequence
  Description of Artificial Sequence: Synthetic oligonucleotide
ccuggaguagggcagcacc

SEQ ID NO: 2094465 - RNA, 19 nt, Artificial Sequence
  Description of Artificial Sequence: Synthetic oligonucleotide
uucgaucuccgcgaucuuc

SEQ ID NO: 2094466 - RNA, 19 nt, Artificial Sequence
  Description of Artificial Sequence: Synthetic oligonucleotide
aaccuucuccuggcccacc

SEQ ID NO: 2094467 - RNA, 19 nt, Artificial Sequence
  Description of Artificial Sequence: Synthetic oligonucleotide
uuagcaagacgagccuuaa

SEQ ID NO: 2094468 - RNA, 19 nt, Artificial Sequence
  Description of Artificial Sequence: Synthetic oligonucleotide
guucucuucgaagcuuagc

SEQ ID NO: 2094469 - RNA, 19 nt, Artificial Sequence
  Description of Artificial Sequence: Synthetic oligonucleotide
caucucggcuucgaucucc

SEQ ID NO: 2094470 - RNA, 19 nt, Artificial Sequence
  Description of Artificial Sequence: Synthetic oligonucleotide
ucacuacgcagagucacau

SEQ ID NO: 2094471 - RNA, 19 nt, Artificial Sequence
  Description of Artificial Sequence: Synthetic oligonucleotide
gcuagguuacucagcagag

SEQ ID NO: 2094472 - RNA, 19 nt, Artificial Sequence
  Description of Artificial Sequence: Synthetic oligonucleotide
gacgucuucgucuuccaau

SEQ ID NO: 2094473 - RNA, 19 nt, Artificial Sequence
  Description of Artificial Sequence: Synthetic oligonucleotide
uuccaucggugaugggcag

SEQ ID NO: 2094474 - RNA, 19 nt, Artificial Sequence
  Description of Artificial Sequence: Synthetic oligonucleotide
uuaugucccaaugguuuua

SEQ ID NO: 2094475 - RNA, 19 nt, Artificial Sequence
  Description of Artificial Sequence: Synthetic oligonucleotide
ccuucaauaauacccggga

SEQ ID NO: 2094476 - RNA, 19 nt, Artificial Sequence
  Description of Artificial Sequence: Synthetic oligonucleotide
agaucugaucaaucuuauu

SEQ ID NO: 2094477 - RNA, 19 nt, Artificial Sequence
  Description of Artificial Sequence: Synthetic oligonucleotide
caaacccaauccgagcauc

SEQ ID NO: 2094478 - RNA, 19 nt, Artificial Sequence
  Description of Artificial Sequence: Synthetic oligonucleotide
gagccuuaagcagcccaag

SEQ ID NO: 2094479 - RNA, 19 nt, Artificial Sequence
  Description of Artificial Sequence: Synthetic oligonucleotide
uugacgaccucugccuuuc

SEQ ID NO: 2094480 - RNA, 19 nt, Artificial Sequence
  Description of Artificial Sequence: Synthetic oligonucleotide
gucaaaguagugaauucgu

SEQ ID NO: 2094481 - RNA, 19 nt, Artificial Sequence
  Description of Artificial Sequence: Synthetic oligonucleotide
aguccgggccaucucggcu

SEQ ID NO: 2094482 - RNA, 19 nt, Artificial Sequence
  Description of Artificial Sequence: Synthetic oligonucleotide
caccuuuaggggugaugag

SEQ ID NO: 2094483 - RNA, 19 nt, Artificial Sequence
  Description of Artificial Sequence: Synthetic oligonucleotide
agaccaaagcguauuuaaa

SEQ ID NO: 2094484 - RNA, 19 nt, Artificial Sequence
  Description of Artificial Sequence: Synthetic oligonucleotide
ugacgucuucgucuuccaa

SEQ ID NO: 2094485 - RNA, 19 nt, Artificial Sequence
  Description of Artificial Sequence: Synthetic oligonucleotide
ucuuuugaguccgggccau

SEQ ID NO: 2094486 - RNA, 19 nt, Artificial Sequence
  Description of Artificial Sequence: Synthetic oligonucleotide
gugaugaguucucuucgaa

SEQ ID NO: 2094487 - RNA, 19 nt, Artificial Sequence
  Description of Artificial Sequence: Synthetic oligonucleotide
cacgguggucaaaguagug

SEQ ID NO: 2094488 - RNA, 19 nt, Artificial Sequence
  Description of Artificial Sequence: Synthetic oligonucleotide
gagagaccccagaccaaag

SEQ ID NO: 2094489 - RNA, 19 nt, Artificial Sequence
  Description of Artificial Sequence: Synthetic oligonucleotide
augacgucuucgucuucca

SEQ ID NO: 2094490 - RNA, 19 nt, Artificial Sequence
  Description of Artificial Sequence: Synthetic oligonucleotide
agaccccagaccaaagcgu

SEQ ID NO: 2094491 - RNA, 19 nt, Artificial Sequence
  Description of Artificial Sequence: Synthetic oligonucleotide
auguucgggccacugcaau

SEQ ID NO: 2094492 - RNA, 19 nt, Artificial Sequence
  Description of Artificial Sequence: Synthetic oligonucleotide
aggcacgguggucaaagua

SEQ ID NO: 2094493 - RNA, 19 nt, Artificial Sequence
  Description of Artificial Sequence: Synthetic oligonucleotide
gcuauggcuggccagcaga

SEQ ID NO: 2094494 - RNA, 19 nt, Artificial Sequence
  Description of Artificial Sequence: Synthetic oligonucleotide
cuucgcuaaggucccgcuc

SEQ ID NO: 2094495 - RNA, 19 nt, Artificial Sequence
  Description of Artificial Sequence: Synthetic oligonucleotide
cugcuagguuacucagcag

SEQ ID NO: 2094496 - RNA, 19 nt, Artificial Sequence
  Description of Artificial Sequence: Synthetic oligonucleotide
ggguuugcuguucaaucga

SEQ ID NO: 2094497 - RNA, 19 nt, Artificial Sequence
  Description of Artificial Sequence: Synthetic oligonucleotide
gugaauucguaagcugcca

SEQ ID NO: 2094498 - RNA, 19 nt, Artificial Sequence
  Description of Artificial Sequence: Synthetic oligonucleotide
gaguccgggccaucucggc

SEQ ID NO: 2094499 - RNA, 19 nt, Artificial Sequence
  Description of Artificial Sequence: Synthetic oligonucleotide
aguucucuucgaagcuuag

SEQ ID NO: 2094500 - RNA, 19 nt, Artificial Sequence
  Description of Artificial Sequence: Synthetic oligonucleotide
acuugacgaccucugccuu

SEQ ID NO: 2094501 - RNA, 19 nt, Artificial Sequence
  Description of Artificial Sequence: Synthetic oligonucleotide
gaucuucgcuaaggucccg

SEQ ID NO: 2094502 - RNA, 19 nt, Artificial Sequence
  Description of Artificial Sequence: Synthetic oligonucleotide
gagcaucaccugucuuagc

SEQ ID NO: 2094503 - RNA, 19 nt, Artificial Sequence
  Description of Artificial Sequence: Synthetic oligonucleotide
aucacuacgcagagucaca

SEQ ID NO: 2094504 - RNA, 19 nt, Artificial Sequence
  Description of Artificial Sequence: Synthetic oligonucleotide
uucgggccacugcaaugac

SEQ ID NO: 2094505 - RNA, 19 nt, Artificial Sequence
  Description of Artificial Sequence: Synthetic oligonucleotide
uaacuguccuuuggguuua

SEQ ID NO: 2094506 - RNA, 19 nt, Artificial Sequence
  Description of Artificial Sequence: Synthetic oligonucleotide
caauaauacccgggagauc

SEQ ID NO: 2094507 - RNA, 19 nt, Artificial Sequence
  Description of Artificial Sequence: Synthetic oligonucleotide
aggggugaugaguucucuu

SEQ ID NO: 2094508 - RNA, 19 nt, Artificial Sequence
  Description of Artificial Sequence: Synthetic oligonucleotide
ucuccgcgaucuucgcuaa

SEQ ID NO: 2094509 - RNA, 19 nt, Artificial Sequence
  Description of Artificial Sequence: Synthetic oligonucleotide
guggucaaaguagugaauu

SEQ ID NO: 2094510 - RNA, 19 nt, Artificial Sequence
  Description of Artificial Sequence: Synthetic oligonucleotide
cacuacgcagagucacauc

SEQ ID NO: 2094511 - RNA, 19 nt, Artificial Sequence
  Description of Artificial Sequence: Synthetic oligonucleotide
ccucaauggagaucugauc

SEQ ID NO: 2094512 - RNA, 19 nt, Artificial Sequence
  Description of Artificial Sequence: Synthetic oligonucleotide
cccagaucuuuuccaacag

SEQ ID NO: 2094513 - RNA, 19 nt, Artificial Sequence
  Description of Artificial Sequence: Synthetic oligonucleotide
cuguucaaucgaaucccaa

SEQ ID NO: 2094514 - RNA, 19 nt, Artificial Sequence
  Description of Artificial Sequence: Synthetic oligonucleotide
uacccacuuucugaggauu

SEQ ID NO: 2094515 - RNA, 19 nt, Artificial Sequence
  Description of Artificial Sequence: Synthetic oligonucleotide
auuacauguucgggccacu

SEQ ID NO: 2094516 - RNA, 19 nt, Artificial Sequence
  Description of Artificial Sequence: Synthetic oligonucleotide
acuuggucauaaggaacau

SEQ ID NO: 2094517 - RNA, 19 nt, Artificial Sequence
  Description of Artificial Sequence: Synthetic oligonucleotide
uccaucggugaugggcaga

SEQ ID NO: 2094518 - RNA, 19 nt, Artificial Sequence
  Description of Artificial Sequence: Synthetic oligonucleotide
gaggaggcuacuuggucau

SEQ ID NO: 2094519 - RNA, 19 nt, Artificial Sequence
  Description of Artificial Sequence: Synthetic oligonucleotide
agauagucccagaucuuuu

SEQ ID NO: 2094520 - RNA, 19 nt, Artificial Sequence
  Description of Artificial Sequence: Synthetic oligonucleotide
cgaagcuuagcaagacgag

SEQ ID NO: 2094521 - RNA, 19 nt, Artificial Sequence
  Description of Artificial Sequence: Synthetic oligonucleotide
ugacgaccucugccuuucc

SEQ ID NO: 2094522 - RNA, 19 nt, Artificial Sequence
  Description of Artificial Sequence: Synthetic oligonucleotide
guagggcagcaccacugga

SEQ ID NO: 2094523 - RNA, 19 nt, Artificial Sequence
  Description of Artificial Sequence: Synthetic oligonucleotide
caauccgagcaucaccugu

SEQ ID NO: 2094524 - RNA, 19 nt, Artificial Sequence
  Description of Artificial Sequence: Synthetic oligonucleotide
gguaacuguccuuuggguu

SEQ ID NO: 2094525 - RNA, 19 nt, Artificial Sequence
  Description of Artificial Sequence: Synthetic oligonucleotide
ccaccuuuaggggugauga

SEQ ID NO: 2094526 - RNA, 19 nt, Artificial Sequence
  Description of Artificial Sequence: Synthetic oligonucleotide
ucgcuaaggucccgcucau

SEQ ID NO: 2094527 - RNA, 19 nt, Artificial Sequence
  Description of Artificial Sequence: Synthetic oligonucleotide
caagaucaaauuacauguu

SEQ ID NO: 2094528 - RNA, 19 nt, Artificial Sequence
  Description of Artificial Sequence: Synthetic oligonucleotide
auaauacccgggagaucca

SEQ ID NO: 2094529 - RNA, 19 nt, Artificial Sequence
  Description of Artificial Sequence: Synthetic oligonucleotide
cgaucuucgcuaagguccc

SEQ ID NO: 2094530 - RNA, 19 nt, Artificial Sequence
  Description of Artificial Sequence: Synthetic oligonucleotide
cauguucgggccacugcaa

SEQ ID NO: 2094531 - RNA, 19 nt, Artificial Sequence
  Description of Artificial Sequence: Synthetic oligonucleotide
guguaaauucucacuaguu

SEQ ID NO: 2094532 - RNA, 19 nt, Artificial Sequence
  Description of Artificial Sequence: Synthetic oligonucleotide
gagguguaaucugguaacu

SEQ ID NO: 2094533 - RNA, 19 nt, Artificial Sequence
  Description of Artificial Sequence: Synthetic oligonucleotide
gcuucgaucuccgcgaucu

SEQ ID NO: 2094534 - RNA, 19 nt, Artificial Sequence
  Description of Artificial Sequence: Synthetic oligonucleotide
gaucuccgcgaucuucgcu

SEQ ID NO: 2094535 - RNA, 19 nt, Artificial Sequence
  Description of Artificial Sequence: Synthetic oligonucleotide
ggaucuuggcuccuuuaua

SEQ ID NO: 2094536 - RNA, 19 nt, Artificial Sequence
  Description of Artificial Sequence: Synthetic oligonucleotide
gggaaacccacaaacccaa

SEQ ID NO: 2094537 - RNA, 19 nt, Artificial Sequence
  Description of Artificial Sequence: Synthetic oligonucleotide
gcuguggcaucacuacgca

SEQ ID NO: 2094538 - RNA, 19 nt, Artificial Sequence
  Description of Artificial Sequence: Synthetic oligonucleotide
guugaggaggcuacuuggu

SEQ ID NO: 2094539 - RNA, 19 nt, Artificial Sequence
  Description of Artificial Sequence: Synthetic oligonucleotide
cacagugaggcaccuuaua

SEQ ID NO: 2094540 - RNA, 19 nt, Artificial Sequence
  Description of Artificial Sequence: Synthetic oligonucleotide
cagcccaaggugaugugcu

SEQ ID NO: 2094541 - RNA, 19 nt, Artificial Sequence
  Description of Artificial Sequence: Synthetic oligonucleotide
cauuggguuugcuguucaa

SEQ ID NO: 2094542 - RNA, 19 nt, Artificial Sequence
  Description of Artificial Sequence: Synthetic oligonucleotide
ggauuauguuucacagaga

SEQ ID NO: 2094543 - RNA, 19 nt, Artificial Sequence
  Description of Artificial Sequence: Synthetic oligonucleotide
aucaccugucuuagccaca

SEQ ID NO: 2094544 - RNA, 19 nt, Artificial Sequence
  Description of Artificial Sequence: Synthetic oligonucleotide
cccaauccgagcaucaccu

SEQ ID NO: 2094545 - RNA, 19 nt, Artificial Sequence
  Description of Artificial Sequence: Synthetic oligonucleotide
cgagcaucaccugucuuag

SEQ ID NO: 2094546 - RNA, 19 nt, Artificial Sequence
  Description of Artificial Sequence: Synthetic oligonucleotide
gacgagccuuaagcagccc

SEQ ID NO: 2094547 - RNA, 19 nt, Artificial Sequence
  Description of Artificial Sequence: Synthetic oligonucleotide
gcagaaauggguacacagu

SEQ ID NO: 2094548 - RNA, 19 nt, Artificial Sequence
  Description of Artificial Sequence: Synthetic oligonucleotide
caggggauguaaacucugu

SEQ ID NO: 2094549 - RNA, 19 nt, Artificial Sequence
  Description of Artificial Sequence: Synthetic oligonucleotide
acuguccuuuggguuuagu

SEQ ID NO: 2094550 - RNA, 19 nt, Artificial Sequence
  Description of Artificial Sequence: Synthetic oligonucleotide
cacagacgggaaacccaca

SEQ ID NO: 2094551 - RNA, 19 nt, Artificial Sequence
  Description of Artificial Sequence: Synthetic oligonucleotide
gguuugcuguucaaucgaa

SEQ ID NO: 2094552 - RNA, 19 nt, Artificial Sequence
  Description of Artificial Sequence: Synthetic oligonucleotide
cccaccaccaccaccaccu

SEQ ID NO: 2094553 - RNA, 19 nt, Artificial Sequence
  Description of Artificial Sequence: Synthetic oligonucleotide
gcaaugacuugacgaccuc

SEQ ID NO: 2094554 - RNA, 19 nt, Artificial Sequence
  Description of Artificial Sequence: Synthetic oligonucleotide
caucuuuggcaccuucaau

SEQ ID NO: 2094555 - RNA, 19 nt, Artificial Sequence
  Description of Artificial Sequence: Synthetic oligonucleotide
acccacuuucugaggauua

SEQ ID NO: 2094556 - RNA, 19 nt, Artificial Sequence
  Description of Artificial Sequence: Synthetic oligonucleotide
gcuguucaaucgaauccca

SEQ ID NO: 2094557 - RNA, 19 nt, Artificial Sequence
  Description of Artificial Sequence: Synthetic oligonucleotide
guauggucuuuacccacuu

SEQ ID NO: 2094558 - RNA, 19 nt, Artificial Sequence
  Description of Artificial Sequence: Synthetic oligonucleotide
caauggagaucugaucaau

SEQ ID NO: 2094559 - RNA, 19 nt, Artificial Sequence
  Description of Artificial Sequence: Synthetic oligonucleotide
ccgagcaucaccugucuua

SEQ ID NO: 2094560 - RNA, 19 nt, Artificial Sequence
  Description of Artificial Sequence: Synthetic oligonucleotide
guuugcuguucaaucgaau

SEQ ID NO: 2094561 - RNA, 19 nt, Artificial Sequence
  Description of Artificial Sequence: Synthetic oligonucleotide
cuuuugaguccgggccauc

SEQ ID NO: 2094562 - RNA, 19 nt, Artificial Sequence
  Description of Artificial Sequence: Synthetic oligonucleotide
cuccgcgaucuucgcuaag

SEQ ID NO: 2094563 - RNA, 19 nt, Artificial Sequence
  Description of Artificial Sequence: Synthetic oligonucleotide
cagauagucccagaucuuu

SEQ ID NO: 2094564 - RNA, 19 nt, Artificial Sequence
  Description of Artificial Sequence: Synthetic oligonucleotide
ccgugguccuggaguaggg

SEQ ID NO: 2094565 - RNA, 19 nt, Artificial Sequence
  Description of Artificial Sequence: Synthetic oligonucleotide
gaagagguuuucacuucuu

SEQ ID NO: 2094566 - RNA, 19 nt, Artificial Sequence
  Description of Artificial Sequence: Synthetic oligonucleotide
gaggcaccuuauaaaugau

SEQ ID NO: 2094567 - RNA, 19 nt, Artificial Sequence
  Description of Artificial Sequence: Synthetic oligonucleotide
ggucaucagcuguggcauc

SEQ ID NO: 2094568 - RNA, 19 nt, Artificial Sequence
  Description of Artificial Sequence: Synthetic oligonucleotide
cgcgaucuucgcuaagguc

SEQ ID NO: 2094569 - RNA, 19 nt, Artificial Sequence
  Description of Artificial Sequence: Synthetic oligonucleotide
cuugacgaccucugccuuu

SEQ ID NO: 2094570 - RNA, 19 nt, Artificial Sequence
  Description of Artificial Sequence: Synthetic oligonucleotide
cgguggucaaaguagugaa

SEQ ID NO: 2094571 - RNA, 19 nt, Artificial Sequence
  Description of Artificial Sequence: Synthetic oligonucleotide
cuuccaccgugguccugga

SEQ ID NO: 2094572 - RNA, 19 nt, Artificial Sequence
  Description of Artificial Sequence: Synthetic oligonucleotide
gcccaccaccaccaccacc

SEQ ID NO: 2094573 - RNA, 19 nt, Artificial Sequence
  Description of Artificial Sequence: Synthetic oligonucleotide
cuuggucauaaggaacauu

SEQ ID NO: 2094574 - RNA, 19 nt, Artificial Sequence
  Description of Artificial Sequence: Synthetic oligonucleotide
accccagaccaaagcguau

SEQ ID NO: 2094575 - RNA, 19 nt, Artificial Sequence
  Description of Artificial Sequence: Synthetic oligonucleotide
gcuguagccuuguucuuuu

SEQ ID NO: 2094576 - RNA, 19 nt, Artificial Sequence
  Description of Artificial Sequence: Synthetic oligonucleotide
caccacuggagagguguaa

SEQ ID NO: 2094577 - RNA, 19 nt, Artificial Sequence
  Description of Artificial Sequence: Synthetic oligonucleotide
cguaagcugccacuucaga

SEQ ID NO: 2094578 - RNA, 19 nt, Artificial Sequence
  Description of Artificial Sequence: Synthetic oligonucleotide
cgaucuccgcgaucuucgc

SEQ ID NO: 2094579 - RNA, 19 nt, Artificial Sequence
  Description of Artificial Sequence: Synthetic oligonucleotide
cgagccuuaagcagcccaa

SEQ ID NO: 2094580 - RNA, 19 nt, Artificial Sequence
  Description of Artificial Sequence: Synthetic oligonucleotide
gguggucaaaguagugaau

SEQ ID NO: 2094581 - RNA, 19 nt, Artificial Sequence
  Description of Artificial Sequence: Synthetic oligonucleotide
cagcauuggguuugcuguu

SEQ ID NO: 2094582 - RNA, 19 nt, Artificial Sequence
  Description of Artificial Sequence: Synthetic oligonucleotide
gguacacagugaggcaccu

SEQ ID NO: 2094583 - RNA, 19 nt, Artificial Sequence
  Description of Artificial Sequence: Synthetic oligonucleotide
gcacgguggucaaaguagu

SEQ ID NO: 2094584 - RNA, 19 nt, Artificial Sequence
  Description of Artificial Sequence: Synthetic oligonucleotide
caccaggcacgguggucaa

SEQ ID NO: 2094585 - RNA, 19 nt, Artificial Sequence
  Description of Artificial Sequence: Synthetic oligonucleotide
accaggcacgguggucaaa

SEQ ID NO: 2094586 - RNA, 19 nt, Artificial Sequence
  Description of Artificial Sequence: Synthetic oligonucleotide
aggaggcuacuuggucaua

SEQ ID NO: 2094587 - RNA, 19 nt, Artificial Sequence
  Description of Artificial Sequence: Synthetic oligonucleotide
ccagaccaaagcguauuua

SEQ ID NO: 2094588 - RNA, 19 nt, Artificial Sequence
  Description of Artificial Sequence: Synthetic oligonucleotide
cccgggagauccaggagcu

SEQ ID NO: 2094589 - RNA, 19 nt, Artificial Sequence
  Description of Artificial Sequence: Synthetic oligonucleotide
ccuuuggguuuaguguaaa

SEQ ID NO: 2094590 - RNA, 19 nt, Artificial Sequence
  Description of Artificial Sequence: Synthetic oligonucleotide
guacacagugaggcaccuu

SEQ ID NO: 2094591 - RNA, 19 nt, Artificial Sequence
  Description of Artificial Sequence: Synthetic oligonucleotide
cuucgaucuccgcgaucuu

SEQ ID NO: 2094592 - RNA, 19 nt, Artificial Sequence
  Description of Artificial Sequence: Synthetic oligonucleotide
ccgcgaucuucgcuaaggu

SEQ ID NO: 2094593 - RNA, 19 nt, Artificial Sequence
  Description of Artificial Sequence: Synthetic oligonucleotide
gcaccacuggagaggugua

SEQ ID NO: 2094594 - RNA, 19 nt, Artificial Sequence
  Description of Artificial Sequence: Synthetic oligonucleotide
cccagaccaaagcguauuu

SEQ ID NO: 2094595 - RNA, 19 nt, Artificial Sequence
  Description of Artificial Sequence: Synthetic oligonucleotide
ccccagaccaaagcguauu

SEQ ID NO: 2094596 - RNA, 19 nt, Artificial Sequence
  Description of Artificial Sequence: Synthetic oligonucleotide
caccaccuuuaggggugau

SEQ ID NO: 2094597 - RNA, 19 nt, Artificial Sequence
  Description of Artificial Sequence: Synthetic oligonucleotide
ccaccaccaccaccaccuu

SEQ ID NO: 2094598 - RNA, 19 nt, Artificial Sequence
  Description of Artificial Sequence: Synthetic oligonucleotide
aaagacgaugauuacauuc

SEQ ID NO: 2094599 - RNA, 19 nt, Artificial Sequence
  Description of Artificial Sequence: Synthetic oligonucleotide
aacugugcagcuuuuaccc

SEQ ID NO: 2094600 - RNA, 19 nt, Artificial Sequence
  Description of Artificial Sequence: Synthetic oligonucleotide
aaagggguaacucuguguc

SEQ ID NO: 2094601 - RNA, 19 nt, Artificial Sequence
  Description of Artificial Sequence: Synthetic oligonucleotide
aagugaucuguuuucuggc

SEQ ID NO: 2094602 - RNA, 19 nt, Artificial Sequence
  Description of Artificial Sequence: Synthetic oligonucleotide
acauucacaaguuugcauc

SEQ ID NO: 2094603 - RNA, 19 nt, Artificial Sequence
  Description of Artificial Sequence: Synthetic oligonucleotide
aagaggaccguguuggagg

SEQ ID NO: 2094604 - RNA, 19 nt, Artificial Sequence
  Description of Artificial Sequence: Synthetic oligonucleotide
aaagaugaugucugucugg

SEQ ID NO: 2094605 - RNA, 19 nt, Artificial Sequence
  Description of Artificial Sequence: Synthetic oligonucleotide
uguuggaggaaccuggugc

SEQ ID NO: 2094606 - RNA, 19 nt, Artificial Sequence
  Description of Artificial Sequence: Synthetic oligonucleotide
uuuuacccuggaaauaggg

SEQ ID NO: 2094607 - RNA, 19 nt, Artificial Sequence
  Description of Artificial Sequence: Synthetic oligonucleotide
gaugauuacauucacaagu

SEQ ID NO: 2094608 - RNA, 19 nt, Artificial Sequence
  Description of Artificial Sequence: Synthetic oligonucleotide
ugacaugaaagaaaggggu

SEQ ID NO: 2094609 - RNA, 19 nt, Artificial Sequence
  Description of Artificial Sequence: Synthetic oligonucleotide
agacaacuaccacauagcc

SEQ ID NO: 2094610 - RNA, 19 nt, Artificial Sequence
  Description of Artificial Sequence: Synthetic oligonucleotide
ucucccaccucaaagauga

SEQ ID NO: 2094611 - RNA, 19 nt, Artificial Sequence
  Description of Artificial Sequence: Synthetic oligonucleotide
uuacccuggaaauagggcc

SEQ ID NO: 2094612 - RNA, 19 nt, Artificial Sequence
  Description of Artificial Sequence: Synthetic oligonucleotide
aaagacccagcuccgaguc

SEQ ID NO: 2094613 - RNA, 19 nt, Artificial Sequence
  Description of Artificial Sequence: Synthetic oligonucleotide
uuacacugcagccaguagc

SEQ ID NO: 2094614 - RNA, 19 nt, Artificial Sequence
  Description of Artificial Sequence: Synthetic oligonucleotide
uggaacaugccucuuggag

SEQ ID NO: 2094615 - RNA, 19 nt, Artificial Sequence
  Description of Artificial Sequence: Synthetic oligonucleotide
aaagguauagagguuguca

SEQ ID NO: 2094616 - RNA, 19 nt, Artificial Sequence
  Description of Artificial Sequence: Synthetic oligonucleotide
gaaauagggccauggaacc

SEQ ID NO: 2094617 - RNA, 19 nt, Artificial Sequence
  Description of Artificial Sequence: Synthetic oligonucleotide
aaagaaagggguaacucug

SEQ ID NO: 2094618 - RNA, 19 nt, Artificial Sequence
  Description of Artificial Sequence: Synthetic oligonucleotide
acgaugauuacauucacaa

SEQ ID NO: 2094619 - RNA, 19 nt, Artificial Sequence
  Description of Artificial Sequence: Synthetic oligonucleotide
aagggguaacucugugucc

SEQ ID NO: 2094620 - RNA, 19 nt, Artificial Sequence
  Description of Artificial Sequence: Synthetic oligonucleotide
ggagacaacuaccacauag

SEQ ID NO: 2094621 - RNA, 19 nt, Artificial Sequence
  Description of Artificial Sequence: Synthetic oligonucleotide
ugaucuguuuucuggcagg

SEQ ID NO: 2094622 - RNA, 19 nt, Artificial Sequence
  Description of Artificial Sequence: Synthetic oligonucleotide
aagacgaugauuacauuca

SEQ ID NO: 2094623 - RNA, 19 nt, Artificial Sequence
  Description of Artificial Sequence: Synthetic oligonucleotide
cacaccgugggcaucaggg

SEQ ID NO: 2094624 - RNA, 19 nt, Artificial Sequence
  Description of Artificial Sequence: Synthetic oligonucleotide
ugguggagcaaccaggaac

SEQ ID NO: 2094625 - RNA, 19 nt, Artificial Sequence
  Description of Artificial Sequence: Synthetic oligonucleotide
gucgauggcacgaaggugg

SEQ ID NO: 2094626 - RNA, 19 nt, Artificial Sequence
  Description of Artificial Sequence: Synthetic oligonucleotide
uggaaauagggccauggaa

SEQ ID NO: 2094627 - RNA, 19 nt, Artificial Sequence
  Description of Artificial Sequence: Synthetic oligonucleotide
uguucggucucccaccuca

SEQ ID NO: 2094628 - RNA, 19 nt, Artificial Sequence
  Description of Artificial Sequence: Synthetic oligonucleotide
gaaggcuuacacugcagcc

SEQ ID NO: 2094629 - RNA, 19 nt, Artificial Sequence
  Description of Artificial Sequence: Synthetic oligonucleotide
agaggaguccaucccauag

SEQ ID NO: 2094630 - RNA, 19 nt, Artificial Sequence
  Description of Artificial Sequence: Synthetic oligonucleotide
ugugcuuguucugagcucc

SEQ ID NO: 2094631 - RNA, 19 nt, Artificial Sequence
  Description of Artificial Sequence: Synthetic oligonucleotide
acuuucagcacaaagguau

SEQ ID NO: 2094632 - RNA, 19 nt, Artificial Sequence
  Description of Artificial Sequence: Synthetic oligonucleotide
uggagcuugggcuuugagc

SEQ ID NO: 2094633 - RNA, 19 nt, Artificial Sequence
  Description of Artificial Sequence: Synthetic oligonucleotide
aucccauagucugaguccc

SEQ ID NO: 2094634 - RNA, 19 nt, Artificial Sequence
  Description of Artificial Sequence: Synthetic oligonucleotide
agacgaugauuacauucac

SEQ ID NO: 2094635 - RNA, 19 nt, Artificial Sequence
  Description of Artificial Sequence: Synthetic oligonucleotide
aagugguggagcaaccagg

SEQ ID NO: 2094636 - RNA, 19 nt, Artificial Sequence
  Description of Artificial Sequence: Synthetic oligonucleotide
cacauagccagagagccgg

SEQ ID NO: 2094637 - RNA, 19 nt, Artificial Sequence
  Description of Artificial Sequence: Synthetic oligonucleotide
uccaacacugucccgggug

SEQ ID NO: 2094638 - RNA, 19 nt, Artificial Sequence
  Description of Artificial Sequence: Synthetic oligonucleotide
gagacaacuaccacauagc

SEQ ID NO: 2094639 - RNA, 19 nt, Artificial Sequence
  Description of Artificial Sequence: Synthetic oligonucleotide
cacaaagguauagagguug

SEQ ID NO: 2094640 - RNA, 19 nt, Artificial Sequence
  Description of Artificial Sequence: Synthetic oligonucleotide
aagacccagcuccgagucc

SEQ ID NO: 2094641 - RNA, 19 nt, Artificial Sequence
  Description of Artificial Sequence: Synthetic oligonucleotide
uggaaccagggguagcagg

SEQ ID NO: 2094642 - RNA, 19 nt, Artificial Sequence
  Description of Artificial Sequence: Synthetic oligonucleotide
ggaaauagggccauggaac

SEQ ID NO: 2094643 - RNA, 19 nt, Artificial Sequence
  Description of Artificial Sequence: Synthetic oligonucleotide
cauagucugagucccgggc

SEQ ID NO: 2094644 - RNA, 19 nt, Artificial Sequence
  Description of Artificial Sequence: Synthetic oligonucleotide
uucacaaguuugcaucccu

SEQ ID NO: 2094645 - RNA, 19 nt, Artificial Sequence
  Description of Artificial Sequence: Synthetic oligonucleotide
cacaaguuugcaucccugc

SEQ ID NO: 2094646 - RNA, 19 nt, Artificial Sequence
  Description of Artificial Sequence: Synthetic oligonucleotide
ugucaggcaucuccaggcg

SEQ ID NO: 2094647 - RNA, 19 nt, Artificial Sequence
  Description of Artificial Sequence: Synthetic oligonucleotide
guguacugguugucgaugg

SEQ ID NO: 2094648 - RNA, 19 nt, Artificial Sequence
  Description of Artificial Sequence: Synthetic oligonucleotide
ucuggagggaaagacgaug

SEQ ID NO: 2094649 - RNA, 19 nt, Artificial Sequence
  Description of Artificial Sequence: Synthetic oligonucleotide
aaggcuuacacugcagcca

SEQ ID NO: 2094650 - RNA, 19 nt, Artificial Sequence
  Description of Artificial Sequence: Synthetic oligonucleotide
guugucgauggcacgaagg

SEQ ID NO: 2094651 - RNA, 19 nt, Artificial Sequence
  Description of Artificial Sequence: Synthetic oligonucleotide
ggaacaugccucuuggagc

SEQ ID NO: 2094652 - RNA, 19 nt, Artificial Sequence
  Description of Artificial Sequence: Synthetic oligonucleotide
cuguuuucuggcaggcugg

SEQ ID NO: 2094653 - RNA, 19 nt, Artificial Sequence
  Description of Artificial Sequence: Synthetic oligonucleotide
aacuaccacauagccagag

SEQ ID NO: 2094654 - RNA, 19 nt, Artificial Sequence
  Description of Artificial Sequence: Synthetic oligonucleotide
auucacaaguuugcauccc

SEQ ID NO: 2094655 - RNA, 19 nt, Artificial Sequence
  Description of Artificial Sequence: Synthetic oligonucleotide
ugggaaagacccagcuccg

SEQ ID NO: 2094656 - RNA, 19 nt, Artificial Sequence
  Description of Artificial Sequence: Synthetic oligonucleotide
gguauagagguugucaggc

SEQ ID NO: 2094657 - RNA, 19 nt, Artificial Sequence
  Description of Artificial Sequence: Synthetic oligonucleotide
agggaaagacgaugauuac

SEQ ID NO: 2094658 - RNA, 19 nt, Artificial Sequence
  Description of Artificial Sequence: Synthetic oligonucleotide
guaacucuguguccaugcg

SEQ ID NO: 2094659 - RNA, 19 nt, Artificial Sequence
  Description of Artificial Sequence: Synthetic oligonucleotide
aguugaggugggaaagacc

SEQ ID NO: 2094660 - RNA, 19 nt, Artificial Sequence
  Description of Artificial Sequence: Synthetic oligonucleotide
ggcuuugagcucuugggcg

SEQ ID NO: 2094661 - RNA, 19 nt, Artificial Sequence
  Description of Artificial Sequence: Synthetic oligonucleotide
uuucagcacaaagguauag

SEQ ID NO: 2094662 - RNA, 19 nt, Artificial Sequence
  Description of Artificial Sequence: Synthetic oligonucleotide
acaaguuugcaucccugca

SEQ ID NO: 2094663 - RNA, 19 nt, Artificial Sequence
  Description of Artificial Sequence: Synthetic oligonucleotide
uccacacucaagugggaug

SEQ ID NO: 2094664 - RNA, 19 nt, Artificial Sequence
  Description of Artificial Sequence: Synthetic oligonucleotide
agcuccgagucccagggag

SEQ ID NO: 2094665 - RNA, 19 nt, Artificial Sequence
  Description of Artificial Sequence: Synthetic oligonucleotide
cagccaugaguucagcugc

SEQ ID NO: 2094666 - RNA, 19 nt, Artificial Sequence
  Description of Artificial Sequence: Synthetic oligonucleotide
gugaucuguuuucuggcag

SEQ ID NO: 2094667 - RNA, 19 nt, Artificial Sequence
  Description of Artificial Sequence: Synthetic oligonucleotide
gugucacucggccagggag

SEQ ID NO: 2094668 - RNA, 19 nt, Artificial Sequence
  Description of Artificial Sequence: Synthetic oligonucleotide
agugaucuguuuucuggca

SEQ ID NO: 2094669 - RNA, 19 nt, Artificial Sequence
  Description of Artificial Sequence: Synthetic oligonucleotide
ugucacucggccagggaga

SEQ ID NO: 2094670 - RNA, 19 nt, Artificial Sequence
  Description of Artificial Sequence: Synthetic oligonucleotide
  modified_base (2)..(2): a, c, u, g, unknown or other
ancgcuggaagugguggag

SEQ ID NO: 2094671 - RNA, 19 nt, Artificial Sequence
  Description of Artificial Sequence: Synthetic oligonucleotide
auagucugagucccgggca

SEQ ID NO: 2094672 - RNA, 19 nt, Artificial Sequence
  Description of Artificial Sequence: Synthetic oligonucleotide
gguaacucuguguccaugc

SEQ ID NO: 2094673 - RNA, 19 nt, Artificial Sequence
  Description of Artificial Sequence: Synthetic oligonucleotide
ugcuggaacaugccucuug

SEQ ID NO: 2094674 - RNA, 19 nt, Artificial Sequence
  Description of Artificial Sequence: Synthetic oligonucleotide
ggagcaaccaggaacacac

SEQ ID NO: 2094675 - RNA, 19 nt, Artificial Sequence
  Description of Artificial Sequence: Synthetic oligonucleotide
gcuuuuacccuggaaauag

SEQ ID NO: 2094676 - RNA, 19 nt, Artificial Sequence
  Description of Artificial Sequence: Synthetic oligonucleotide
acugguugucgauggcacg

SEQ ID NO: 2094677 - RNA, 19 nt, Artificial Sequence
  Description of Artificial Sequence: Synthetic oligonucleotide
cuggguccaacacuguccc

SEQ ID NO: 2094678 - RNA, 19 nt, Artificial Sequence
  Description of Artificial Sequence: Synthetic oligonucleotide
gaagguggcuccgugaaga

SEQ ID NO: 2094679 - RNA, 19 nt, Artificial Sequence
  Description of Artificial Sequence: Synthetic oligonucleotide
agggagagccucugcgccc

SEQ ID NO: 2094680 - RNA, 19 nt, Artificial Sequence
  Description of Artificial Sequence: Synthetic oligonucleotide
gaagaggaccguguuggag

SEQ ID NO: 2094681 - RNA, 19 nt, Artificial Sequence
  Description of Artificial Sequence: Synthetic oligonucleotide
uagcaggacaggaagugau

SEQ ID NO: 2094682 - RNA, 19 nt, Artificial Sequence
  Description of Artificial Sequence: Synthetic oligonucleotide
ugcaucccugcacagcugu

SEQ ID NO: 2094683 - RNA, 19 nt, Artificial Sequence
  Description of Artificial Sequence: Synthetic oligonucleotide
ggaaccuggugcuugggag

SEQ ID NO: 2094684 - RNA, 19 nt, Artificial Sequence
  Description of Artificial Sequence: Synthetic oligonucleotide
ugccucuuggagcuugggc

SEQ ID NO: 2094685 - RNA, 19 nt, Artificial Sequence
  Description of Artificial Sequence: Synthetic oligonucleotide
aggaccguguuggaggaac

SEQ ID NO: 2094686 - RNA, 19 nt, Artificial Sequence
  Description of Artificial Sequence: Synthetic oligonucleotide
gaacaugccucuuggagcu

SEQ ID NO: 2094687 - RNA, 19 nt, Artificial Sequence
  Description of Artificial Sequence: Synthetic oligonucleotide
cugcacagcugugagagag

SEQ ID NO: 2094688 - RNA, 19 nt, Artificial Sequence
  Description of Artificial Sequence: Synthetic oligonucleotide
ugcauggccggaccucccg

SEQ ID NO: 2094689 - RNA, 19 nt, Artificial Sequence
  Description of Artificial Sequence: Synthetic oligonucleotide
ugcuguucggucucccacc

SEQ ID NO: 2094690 - RNA, 19 nt, Artificial Sequence
  Description of Artificial Sequence: Synthetic oligonucleotide
acaugaaagaaagggguaa

SEQ ID NO: 2094691 - RNA, 19 nt, Artificial Sequence
  Description of Artificial Sequence: Synthetic oligonucleotide
auagccagagagccggaca

SEQ ID NO: 2094692 - RNA, 19 nt, Artificial Sequence
  Description of Artificial Sequence: Synthetic oligonucleotide
cugcacuuucagcacaaag

SEQ ID NO: 2094693 - RNA, 19 nt, Artificial Sequence
  Description of Artificial Sequence: Synthetic oligonucleotide
ucccgggugaagcaccuug

SEQ ID NO: 2094694 - RNA, 19 nt, Artificial Sequence
  Description of Artificial Sequence: Synthetic oligonucleotide
augcgcuccagcccuuggc

SEQ ID NO: 2094695 - RNA, 19 nt, Artificial Sequence
  Description of Artificial Sequence: Synthetic oligonucleotide
caugaaagaaagggguaac

SEQ ID NO: 2094696 - RNA, 19 nt, Artificial Sequence
  Description of Artificial Sequence: Synthetic oligonucleotide
ucugagcuccuccagccau

SEQ ID NO: 2094697 - RNA, 19 nt, Artificial Sequence
  Description of Artificial Sequence: Synthetic oligonucleotide
ugugagagagggguguacu

SEQ ID NO: 2094698 - RNA, 19 nt, Artificial Sequence
  Description of Artificial Sequence: Synthetic oligonucleotide
caccaaguggaagauuugc

SEQ ID NO: 2094699 - RNA, 19 nt, Artificial Sequence
  Description of Artificial Sequence: Synthetic oligonucleotide
auagagguugucaggcauc

SEQ ID NO: 2094700 - RNA, 19 nt, Artificial Sequence
  Description of Artificial Sequence: Synthetic oligonucleotide
gacaacuaccacauagcca

SEQ ID NO: 2094701 - RNA, 19 nt, Artificial Sequence
  Description of Artificial Sequence: Synthetic oligonucleotide
ggucaagagcugcaguagg

SEQ ID NO: 2094702 - RNA, 19 nt, Artificial Sequence
  Description of Artificial Sequence: Synthetic oligonucleotide
gaucuguuuucuggcaggc

SEQ ID NO: 2094703 - RNA, 19 nt, Artificial Sequence
  Description of Artificial Sequence: Synthetic oligonucleotide
aacacugucccgggugaag

SEQ ID NO: 2094704 - RNA, 19 nt, Artificial Sequence
  Description of Artificial Sequence: Synthetic oligonucleotide
uggaagugguggagcaacc

SEQ ID NO: 2094705 - RNA, 19 nt, Artificial Sequence
  Description of Artificial Sequence: Synthetic oligonucleotide
gagucugugcuuccccuug

SEQ ID NO: 2094706 - RNA, 19 nt, Artificial Sequence
  Description of Artificial Sequence: Synthetic oligonucleotide
acaucugagcuggggaagg

SEQ ID NO: 2094707 - RNA, 19 nt, Artificial Sequence
  Description of Artificial Sequence: Synthetic oligonucleotide
cugugcagcuuuuacccug

SEQ ID NO: 2094708 - RNA, 19 nt, Artificial Sequence
  Description of Artificial Sequence: Synthetic oligonucleotide
aagaaagggguaacucugu

SEQ ID NO: 2094709 - RNA, 19 nt, Artificial Sequence
  Description of Artificial Sequence: Synthetic oligonucleotide
ggagcuugggcuuugagcu

SEQ ID NO: 2094710 - RNA, 19 nt, Artificial Sequence
  Description of Artificial Sequence: Synthetic oligonucleotide
  modified_base (4)..(4): a, c, u, g, unknown or other
ggancgcuggaaguggugg

SEQ ID NO: 2094711 - RNA, 19 nt, Artificial Sequence
  Description of Artificial Sequence: Synthetic oligonucleotide
ucguccgccaggcuauagc

SEQ ID NO: 2094712 - RNA, 19 nt, Artificial Sequence
  Description of Artificial Sequence: Synthetic oligonucleotide
ccaggcucugacaugaaag

SEQ ID NO: 2094713 - RNA, 19 nt, Artificial Sequence
  Description of Artificial Sequence: Synthetic oligonucleotide
ucugagcuggggaaggcuu

SEQ ID NO: 2094714 - RNA, 19 nt, Artificial Sequence
  Description of Artificial Sequence: Synthetic oligonucleotide
guggaagauuugcucuggg

SEQ ID NO: 2094715 - RNA, 19 nt, Artificial Sequence
  Description of Artificial Sequence: Synthetic oligonucleotide
gacaucacaggcugcucca

SEQ ID NO: 2094716 - RNA, 19 nt, Artificial Sequence
  Description of Artificial Sequence: Synthetic oligonucleotide
cuuacacugcagccaguag

SEQ ID NO: 2094717 - RNA, 19 nt, Artificial Sequence
  Description of Artificial Sequence: Synthetic oligonucleotide
ugcgccgcuguccauggcu

SEQ ID NO: 2094718 - RNA, 19 nt, Artificial Sequence
  Description of Artificial Sequence: Synthetic oligonucleotide
aucccugcacagcugugag

SEQ ID NO: 2094719 - RNA, 19 nt, Artificial Sequence
  Description of Artificial Sequence: Synthetic oligonucleotide
agagggguguacugguugu

SEQ ID NO: 2094720 - RNA, 19 nt, Artificial Sequence
  Description of Artificial Sequence: Synthetic oligonucleotide
uagagguugucaggcaucu

SEQ ID NO: 2094721 - RNA, 19 nt, Artificial Sequence
  Description of Artificial Sequence: Synthetic oligonucleotide
uuggagcuugggcuuugag

SEQ ID NO: 2094722 - RNA, 19 nt, Artificial Sequence
  Description of Artificial Sequence: Synthetic oligonucleotide
ggagaaggcaccaagugga

SEQ ID NO: 2094723 - RNA, 19 nt, Artificial Sequence
  Description of Artificial Sequence: Synthetic oligonucleotide
cagggagagccucugcgcc

SEQ ID NO: 2094724 - RNA, 19 nt, Artificial Sequence
  Description of Artificial Sequence: Synthetic oligonucleotide
cuggagggaaagacgauga

SEQ ID NO: 2094725 - RNA, 19 nt, Artificial Sequence
  Description of Artificial Sequence: Synthetic oligonucleotide
agggguaacucugugucca

SEQ ID NO: 2094726 - RNA, 19 nt, Artificial Sequence
  Description of Artificial Sequence: Synthetic oligonucleotide
caaguggaagauuugcucu

SEQ ID NO: 2094727 - RNA, 19 nt, Artificial Sequence
  Description of Artificial Sequence: Synthetic oligonucleotide
agggguguacugguugucg

SEQ ID NO: 2094728 - RNA, 19 nt, Artificial Sequence
  Description of Artificial Sequence: Synthetic oligonucleotide
cuggaagugguggagcaac

SEQ ID NO: 2094729 - RNA, 19 nt, Artificial Sequence
  Description of Artificial Sequence: Synthetic oligonucleotide
caguuccucaggagaaggc

SEQ ID NO: 2094730 - RNA, 19 nt, Artificial Sequence
  Description of Artificial Sequence: Synthetic oligonucleotide
gaaagggguaacucugugu

SEQ ID NO: 2094731 - RNA, 19 nt, Artificial Sequence
  Description of Artificial Sequence: Synthetic oligonucleotide
acugcagccaguagcucuc

SEQ ID NO: 2094732 - RNA, 19 nt, Artificial Sequence
  Description of Artificial Sequence: Synthetic oligonucleotide
acugucccgggugaagcac

SEQ ID NO: 2094733 - RNA, 19 nt, Artificial Sequence
  Description of Artificial Sequence: Synthetic oligonucleotide
agaggaccguguuggagga

SEQ ID NO: 2094734 - RNA, 19 nt, Artificial Sequence
  Description of Artificial Sequence: Synthetic oligonucleotide
ucccauagucugagucccg

SEQ ID NO: 2094735 - RNA, 19 nt, Artificial Sequence
  Description of Artificial Sequence: Synthetic oligonucleotide
accgugggcaucagggccc

SEQ ID NO: 2094736 - RNA, 19 nt, Artificial Sequence
  Description of Artificial Sequence: Synthetic oligonucleotide
gugagagagggguguacug

SEQ ID NO: 2094737 - RNA, 19 nt, Artificial Sequence
  Description of Artificial Sequence: Synthetic oligonucleotide
ucgauggcacgaagguggc

SEQ ID NO: 2094738 - RNA, 19 nt, Artificial Sequence
  Description of Artificial Sequence: Synthetic oligonucleotide
acgaagguggcuccgugaa

SEQ ID NO: 2094739 - RNA, 19 nt, Artificial Sequence
  Description of Artificial Sequence: Synthetic oligonucleotide
gacgaugauuacauucaca

SEQ ID NO: 2094740 - RNA, 19 nt, Artificial Sequence
  Description of Artificial Sequence: Synthetic oligonucleotide
ugucugucugguccugcac

SEQ ID NO: 2094741 - RNA, 19 nt, Artificial Sequence
  Description of Artificial Sequence: Synthetic oligonucleotide
ccaaguggaagauuugcuc

SEQ ID NO: 2094742 - RNA, 19 nt, Artificial Sequence
  Description of Artificial Sequence: Synthetic oligonucleotide
ccgggcauugcucacaggc

SEQ ID NO: 2094743 - RNA, 19 nt, Artificial Sequence
  Description of Artificial Sequence: Synthetic oligonucleotide
caggcucugacaugaaaga

SEQ ID NO: 2094744 - RNA, 19 nt, Artificial Sequence
  Description of Artificial Sequence: Synthetic oligonucleotide
ggguccaacacugucccgg

SEQ ID NO: 2094745 - RNA, 19 nt, Artificial Sequence
  Description of Artificial Sequence: Synthetic oligonucleotide
guuugcaucccugcacagc

SEQ ID NO: 2094746 - RNA, 19 nt, Artificial Sequence
  Description of Artificial Sequence: Synthetic oligonucleotide
acugugcagcuuuuacccu

SEQ ID NO: 2094747 - RNA, 19 nt, Artificial Sequence
  Description of Artificial Sequence: Synthetic oligonucleotide
gaaggggaagaggaccgug

SEQ ID NO: 2094748 - RNA, 19 nt, Artificial Sequence
  Description of Artificial Sequence: Synthetic oligonucleotide
gacaugaaagaaaggggua

SEQ ID NO: 2094749 - RNA, 19 nt, Artificial Sequence
  Description of Artificial Sequence: Synthetic oligonucleotide
agugguggagcaaccagga

SEQ ID NO: 2094750 - RNA, 19 nt, Artificial Sequence
  Description of Artificial Sequence: Synthetic oligonucleotide
ccagccaugaguucagcug

SEQ ID NO: 2094751 - RNA, 19 nt, Artificial Sequence
  Description of Artificial Sequence: Synthetic oligonucleotide
accaaguggaagauuugcu

SEQ ID NO: 2094752 - RNA, 19 nt, Artificial Sequence
  Description of Artificial Sequence: Synthetic oligonucleotide
guauagagguugucaggca

SEQ ID NO: 2094753 - RNA, 19 nt, Artificial Sequence
  Description of Artificial Sequence: Synthetic oligonucleotide
  modified_base (3)..(3): a, c, u, g, unknown or other
gancgcuggaaguggugga

SEQ ID NO: 2094754 - RNA, 19 nt, Artificial Sequence
  Description of Artificial Sequence: Synthetic oligonucleotide
agccaguagcucucuggag

SEQ ID NO: 2094755 - RNA, 19 nt, Artificial Sequence
  Description of Artificial Sequence: Synthetic oligonucleotide
uggagcaaccaggaacaca

SEQ ID NO: 2094756 - RNA, 19 nt, Artificial Sequence
  Description of Artificial Sequence: Synthetic oligonucleotide
cugguccugcacuuucagc

SEQ ID NO: 2094757 - RNA, 19 nt, Artificial Sequence
  Description of Artificial Sequence: Synthetic oligonucleotide
gguggagcaaccaggaaca

SEQ ID NO: 2094758 - RNA, 19 nt, Artificial Sequence
  Description of Artificial Sequence: Synthetic oligonucleotide
gcaguaggcggccauggcc

SEQ ID NO: 2094759 - RNA, 19 nt, Artificial Sequence
  Description of Artificial Sequence: Synthetic oligonucleotide
ugccgcagacuguuggcca

SEQ ID NO: 2094760 - RNA, 19 nt, Artificial Sequence
  Description of Artificial Sequence: Synthetic oligonucleotide
caugccucuuggagcuugg

SEQ ID NO: 2094761 - RNA, 19 nt, Artificial Sequence
  Description of Artificial Sequence: Synthetic oligonucleotide
gaacacaccgugggcauca

SEQ ID NO: 2094762 - RNA, 19 nt, Artificial Sequence
  Description of Artificial Sequence: Synthetic oligonucleotide
agcaggacaggaagugauc

SEQ ID NO: 2094763 - RNA, 19 nt, Artificial Sequence
  Description of Artificial Sequence: Synthetic oligonucleotide
agcucuugggcggucaaga

SEQ ID NO: 2094764 - RNA, 19 nt, Artificial Sequence
  Description of Artificial Sequence: Synthetic oligonucleotide
gaaagacccagcuccgagu

SEQ ID NO: 2094765 - RNA, 19 nt, Artificial Sequence
  Description of Artificial Sequence: Synthetic oligonucleotide
gccagggagagccucugcg

SEQ ID NO: 2094766 - RNA, 19 nt, Artificial Sequence
  Description of Artificial Sequence: Synthetic oligonucleotide
cugcuguucggucucccac

SEQ ID NO: 2094767 - RNA, 19 nt, Artificial Sequence
  Description of Artificial Sequence: Synthetic oligonucleotide
cacaucugagcuggggaag

SEQ ID NO: 2094768 - RNA, 19 nt, Artificial Sequence
  Description of Artificial Sequence: Synthetic oligonucleotide
cacaggcugcuccacacuc

SEQ ID NO: 2094769 - RNA, 19 nt, Artificial Sequence
  Description of Artificial Sequence: Synthetic oligonucleotide
ccacacucaagugggaugg

SEQ ID NO: 2094770 - RNA, 19 nt, Artificial Sequence
  Description of Artificial Sequence: Synthetic oligonucleotide
uccaggcgugugcauggcc

SEQ ID NO: 2094771 - RNA, 19 nt, Artificial Sequence
  Description of Artificial Sequence: Synthetic oligonucleotide
gagucccgggcauugcuca

SEQ ID NO: 2094772 - RNA, 19 nt, Artificial Sequence
  Description of Artificial Sequence: Synthetic oligonucleotide
ccguguuggaggaaccugg

SEQ ID NO: 2094773 - RNA, 19 nt, Artificial Sequence
  Description of Artificial Sequence: Synthetic oligonucleotide
ccaggcgugugcauggccg

SEQ ID NO: 2094774 - RNA, 19 nt, Artificial Sequence
  Description of Artificial Sequence: Synthetic oligonucleotide
uggagggaaagacgaugau

SEQ ID NO: 2094775 - RNA, 19 nt, Artificial Sequence
  Description of Artificial Sequence: Synthetic oligonucleotide
ugccucguccgccaggcua

SEQ ID NO: 2094776 - RNA, 19 nt, Artificial Sequence
  Description of Artificial Sequence: Synthetic oligonucleotide
cugucccgggugaagcacc

SEQ ID NO: 2094777 - RNA, 19 nt, Artificial Sequence
  Description of Artificial Sequence: Synthetic oligonucleotide
gguggcuccgugaagagga

SEQ ID NO: 2094778 - RNA, 19 nt, Artificial Sequence
  Description of Artificial Sequence: Synthetic oligonucleotide
acucuguguccaugcgcuc

SEQ ID NO: 2094779 - RNA, 19 nt, Artificial Sequence
  Description of Artificial Sequence: Synthetic oligonucleotide
uccgugaagaggaguccau

SEQ ID NO: 2094780 - RNA, 19 nt, Artificial Sequence
  Description of Artificial Sequence: Synthetic oligonucleotide
caggcgugugcauggccgg

SEQ ID NO: 2094781 - RNA, 19 nt, Artificial Sequence
  Description of Artificial Sequence: Synthetic oligonucleotide
agcugugagagaggggugu

SEQ ID NO: 2094782 - RNA, 19 nt, Artificial Sequence
  Description of Artificial Sequence: Synthetic oligonucleotide
cagagagccggacaucaca

SEQ ID NO: 2094783 - RNA, 19 nt, Artificial Sequence
  Description of Artificial Sequence: Synthetic oligonucleotide
ugcuuccccuuggagagcu

SEQ ID NO: 2094784 - RNA, 19 nt, Artificial Sequence
  Description of Artificial Sequence: Synthetic oligonucleotide
ugucccgggugaagcaccu

SEQ ID NO: 2094785 - RNA, 19 nt, Artificial Sequence
  Description of Artificial Sequence: Synthetic oligonucleotide
gguccaacacugucccggg

SEQ ID NO: 2094786 - RNA, 19 nt, Artificial Sequence
  Description of Artificial Sequence: Synthetic oligonucleotide
cauggccugggcccggggc

SEQ ID NO: 2094787 - RNA, 19 nt, Artificial Sequence
  Description of Artificial Sequence: Synthetic oligonucleotide
caggcgaccccgcugccag

SEQ ID NO: 2094788 - RNA, 19 nt, Artificial Sequence
  Description of Artificial Sequence: Synthetic oligonucleotide
accguguuggaggaaccug

SEQ ID NO: 2094789 - RNA, 19 nt, Artificial Sequence
  Description of Artificial Sequence: Synthetic oligonucleotide
uggguccaacacugucccg

SEQ ID NO: 2094790 - RNA, 19 nt, Artificial Sequence
  Description of Artificial Sequence: Synthetic oligonucleotide
ugagcucuugggcggucaa

SEQ ID NO: 2094791 - RNA, 19 nt, Artificial Sequence
  Description of Artificial Sequence: Synthetic oligonucleotide
acaugccucuuggagcuug

SEQ ID NO: 2094792 - RNA, 19 nt, Artificial Sequence
  Description of Artificial Sequence: Synthetic oligonucleotide
cccggaugcuggaacaugc

SEQ ID NO: 2094793 - RNA, 19 nt, Artificial Sequence
  Description of Artificial Sequence: Synthetic oligonucleotide
uucggucucccaccucaaa

SEQ ID NO: 2094794 - RNA, 19 nt, Artificial Sequence
  Description of Artificial Sequence: Synthetic oligonucleotide
caugcgcuccagcccuugg

SEQ ID NO: 2094795 - RNA, 19 nt, Artificial Sequence
  Description of Artificial Sequence: Synthetic oligonucleotide
uggccggaccucccggaug

SEQ ID NO: 2094796 - RNA, 19 nt, Artificial Sequence
  Description of Artificial Sequence: Synthetic oligonucleotide
gaggaaccuggugcuuggg

SEQ ID NO: 2094797 - RNA, 19 nt, Artificial Sequence
  Description of Artificial Sequence: Synthetic oligonucleotide
cucugcgcccagacugggg

SEQ ID NO: 2094798 - RNA, 19 nt, Artificial Sequence
  Description of Artificial Sequence: Synthetic oligonucleotide
uugagcucuugggcgguca

SEQ ID NO: 2094799 - RNA, 19 nt, Artificial Sequence
  Description of Artificial Sequence: Synthetic oligonucleotide
ucccggaugcuggaacaug

SEQ ID NO: 2094800 - RNA, 19 nt, Artificial Sequence
  Description of Artificial Sequence: Synthetic oligonucleotide
agcuuuuacccuggaaaua

SEQ ID NO: 2094801 - RNA, 19 nt, Artificial Sequence
  Description of Artificial Sequence: Synthetic oligonucleotide
ggugggaaagacccagcuc

SEQ ID NO: 2094802 - RNA, 19 nt, Artificial Sequence
  Description of Artificial Sequence: Synthetic oligonucleotide
gguugucgauggcacgaag

SEQ ID NO: 2094803 - RNA, 19 nt, Artificial Sequence
  Description of Artificial Sequence: Synthetic oligonucleotide
ggugccgcagacuguuggc

SEQ ID NO: 2094804 - RNA, 19 nt, Artificial Sequence
  Description of Artificial Sequence: Synthetic oligonucleotide
aucugagcuggggaaggcu

SEQ ID NO: 2094805 - RNA, 19 nt, Artificial Sequence
  Description of Artificial Sequence: Synthetic oligonucleotide
cgaugauuacauucacaag

SEQ ID NO: 2094806 - RNA, 19 nt, Artificial Sequence
  Description of Artificial Sequence: Synthetic oligonucleotide
agacuguuggccaguuccu

SEQ ID NO: 2094807 - RNA, 19 nt, Artificial Sequence
  Description of Artificial Sequence: Synthetic oligonucleotide
ggggaagaggaccguguug

SEQ ID NO: 2094808 - RNA, 19 nt, Artificial Sequence
  Description of Artificial Sequence: Synthetic oligonucleotide
caucugagcuggggaaggc

SEQ ID NO: 2094809 - RNA, 19 nt, Artificial Sequence
  Description of Artificial Sequence: Synthetic oligonucleotide
gggacagccagcagaguug

SEQ ID NO: 2094810 - RNA, 19 nt, Artificial Sequence
  Description of Artificial Sequence: Synthetic oligonucleotide
ggaaccagggguagcagga

SEQ ID NO: 2094811 - RNA, 19 nt, Artificial Sequence
  Description of Artificial Sequence: Synthetic oligonucleotide
gcagaguugaggugggaaa

SEQ ID NO: 2094812 - RNA, 19 nt, Artificial Sequence
  Description of Artificial Sequence: Synthetic oligonucleotide
uggcacgaagguggcuccg

SEQ ID NO: 2094813 - RNA, 19 nt, Artificial Sequence
  Description of Artificial Sequence: Synthetic oligonucleotide
cguccgccaggcuauagcg

SEQ ID NO: 2094814 - RNA, 19 nt, Artificial Sequence
  Description of Artificial Sequence: Synthetic oligonucleotide
aguccaucccauagucuga

SEQ ID NO: 2094815 - RNA, 19 nt, Artificial Sequence
  Description of Artificial Sequence: Synthetic oligonucleotide
accaggcgaccccgcugcc

SEQ ID NO: 2094816 - RNA, 19 nt, Artificial Sequence
  Description of Artificial Sequence: Synthetic oligonucleotide
ggccggaccucccggaugc

SEQ ID NO: 2094817 - RNA, 19 nt, Artificial Sequence
  Description of Artificial Sequence: Synthetic oligonucleotide
ccagggagagccucugcgc

SEQ ID NO: 2094818 - RNA, 19 nt, Artificial Sequence
  Description of Artificial Sequence: Synthetic oligonucleotide
caguaggcggccauggccu

SEQ ID NO: 2094819 - RNA, 19 nt, Artificial Sequence
  Description of Artificial Sequence: Synthetic oligonucleotide
cagcuuuuacccuggaaau

SEQ ID NO: 2094820 - RNA, 19 nt, Artificial Sequence
  Description of Artificial Sequence: Synthetic oligonucleotide
gugccgcagacuguuggcc

SEQ ID NO: 2094821 - RNA, 19 nt, Artificial Sequence
  Description of Artificial Sequence: Synthetic oligonucleotide
cacgaagguggcuccguga

SEQ ID NO: 2094822 - RNA, 19 nt, Artificial Sequence
  Description of Artificial Sequence: Synthetic oligonucleotide
cugugagagagggguguac

SEQ ID NO: 2094823 - RNA, 19 nt, Artificial Sequence
  Description of Artificial Sequence: Synthetic oligonucleotide
cacacucaagugggauggg

SEQ ID NO: 2094824 - RNA, 19 nt, Artificial Sequence
  Description of Artificial Sequence: Synthetic oligonucleotide
agccagagagccggacauc

SEQ ID NO: 2094825 - RNA, 19 nt, Artificial Sequence
  Description of Artificial Sequence: Synthetic oligonucleotide
guccaugcgcuccagcccu

SEQ ID NO: 2094826 - RNA, 19 nt, Artificial Sequence
  Description of Artificial Sequence: Synthetic oligonucleotide
gaaagacgaugauuacauu

SEQ ID NO: 2094827 - RNA, 19 nt, Artificial Sequence
  Description of Artificial Sequence: Synthetic oligonucleotide
ugguugucgauggcacgaa

SEQ ID NO: 2094828 - RNA, 19 nt, Artificial Sequence
  Description of Artificial Sequence: Synthetic oligonucleotide
cuggaacaugccucuugga

SEQ ID NO: 2094829 - RNA, 19 nt, Artificial Sequence
  Description of Artificial Sequence: Synthetic oligonucleotide
gaagaggaguccaucccau

SEQ ID NO: 2094830 - RNA, 19 nt, Artificial Sequence
  Description of Artificial Sequence: Synthetic oligonucleotide
augccucuuggagcuuggg

SEQ ID NO: 2094831 - RNA, 19 nt, Artificial Sequence
  Description of Artificial Sequence: Synthetic oligonucleotide
guaggcggccauggccugg

SEQ ID NO: 2094832 - RNA, 19 nt, Artificial Sequence
  Description of Artificial Sequence: Synthetic oligonucleotide
cccgggugaagcaccuugg

SEQ ID NO: 2094833 - RNA, 19 nt, Artificial Sequence
  Description of Artificial Sequence: Synthetic oligonucleotide
gagaaggcaccaaguggaa

SEQ ID NO: 2094834 - RNA, 19 nt, Artificial Sequence
  Description of Artificial Sequence: Synthetic oligonucleotide
ugcuuguucugagcuccuc

SEQ ID NO: 2094835 - RNA, 19 nt, Artificial Sequence
  Description of Artificial Sequence: Synthetic oligonucleotide
acaggcugcuccacacuca

SEQ ID NO: 2094836 - RNA, 19 nt, Artificial Sequence
  Description of Artificial Sequence: Synthetic oligonucleotide
gccgcagacuguuggccag

SEQ ID NO: 2094837 - RNA, 19 nt, Artificial Sequence
  Description of Artificial Sequence: Synthetic oligonucleotide
gcauggccggaccucccgg

SEQ ID NO: 2094838 - RNA, 19 nt, Artificial Sequence
  Description of Artificial Sequence: Synthetic oligonucleotide
ggcaggcuggguccaacac

SEQ ID NO: 2094839 - RNA, 19 nt, Artificial Sequence
  Description of Artificial Sequence: Synthetic oligonucleotide
ggaagugguggagcaacca

SEQ ID NO: 2094840 - RNA, 19 nt, Artificial Sequence
  Description of Artificial Sequence: Synthetic oligonucleotide
gggguguacugguugucga

SEQ ID NO: 2094841 - RNA, 19 nt, Artificial Sequence
  Description of Artificial Sequence: Synthetic oligonucleotide
guccgccaggcuauagcgc

SEQ ID NO: 2094842 - RNA, 19 nt, Artificial Sequence
  Description of Artificial Sequence: Synthetic oligonucleotide
ggccugugcuuguucugag

SEQ ID NO: 2094843 - RNA, 19 nt, Artificial Sequence
  Description of Artificial Sequence: Synthetic oligonucleotide
gagggguguacugguuguc

SEQ ID NO: 2094844 - RNA, 19 nt, Artificial Sequence
  Description of Artificial Sequence: Synthetic oligonucleotide
uggcuccgugaagaggagu

SEQ ID NO: 2094845 - RNA, 19 nt, Artificial Sequence
  Description of Artificial Sequence: Synthetic oligonucleotide
cacugucccgggugaagca

SEQ ID NO: 2094846 - RNA, 19 nt, Artificial Sequence
  Description of Artificial Sequence: Synthetic oligonucleotide
gccugugcuuguucugagc

SEQ ID NO: 2094847 - RNA, 19 nt, Artificial Sequence
  Description of Artificial Sequence: Synthetic oligonucleotide
cauggccggaccucccgga

SEQ ID NO: 2094848 - RNA, 19 nt, Artificial Sequence
  Description of Artificial Sequence: Synthetic oligonucleotide
caggcugcuccacacucaa

SEQ ID NO: 2094849 - RNA, 19 nt, Artificial Sequence
  Description of Artificial Sequence: Synthetic oligonucleotide
ggcaccaaguggaagauuu

SEQ ID NO: 2094850 - RNA, 19 nt, Artificial Sequence
  Description of Artificial Sequence: Synthetic oligonucleotide
auggccggaccucccggau

SEQ ID NO: 2094851 - RNA, 19 nt, Artificial Sequence
  Description of Artificial Sequence: Synthetic oligonucleotide
cugagcuggggaaggcuua

SEQ ID NO: 2094852 - RNA, 19 nt, Artificial Sequence
  Description of Artificial Sequence: Synthetic oligonucleotide
ggagagcuggcugggccag

SEQ ID NO: 2094853 - RNA, 19 nt, Artificial Sequence
  Description of Artificial Sequence: Synthetic oligonucleotide
gcugccucguccgccaggc

SEQ ID NO: 2094854 - RNA, 19 nt, Artificial Sequence
  Description of Artificial Sequence: Synthetic oligonucleotide
gcuccgagucccagggagg

SEQ ID NO: 2094855 - RNA, 19 nt, Artificial Sequence
  Description of Artificial Sequence: Synthetic oligonucleotide
cuccgagucccagggagga

SEQ ID NO: 2094856 - RNA, 19 nt, Artificial Sequence
  Description of Artificial Sequence: Synthetic oligonucleotide
gccauggaaccagggguag

SEQ ID NO: 2094857 - RNA, 19 nt, Artificial Sequence
  Description of Artificial Sequence: Synthetic oligonucleotide
gucaggcaucuccaggcgu

SEQ ID NO: 2094858 - RNA, 19 nt, Artificial Sequence
  Description of Artificial Sequence: Synthetic oligonucleotide
ggacagccagcagaguuga

SEQ ID NO: 2094859 - RNA, 19 nt, Artificial Sequence
  Description of Artificial Sequence: Synthetic oligonucleotide
uuggaggaaccuggugcuu

SEQ ID NO: 2094860 - RNA, 19 nt, Artificial Sequence
  Description of Artificial Sequence: Synthetic oligonucleotide
gugaagcaccuugguccag

SEQ ID NO: 2094861 - RNA, 19 nt, Artificial Sequence
  Description of Artificial Sequence: Synthetic oligonucleotide
ggaagaggaccguguugga

SEQ ID NO: 2094862 - RNA, 19 nt, Artificial Sequence
  Description of Artificial Sequence: Synthetic oligonucleotide
gcacgaagguggcuccgug

SEQ ID NO: 2094863 - RNA, 19 nt, Artificial Sequence
  Description of Artificial Sequence: Synthetic oligonucleotide
guagcucucuggagggaaa

SEQ ID NO: 2094864 - RNA, 19 nt, Artificial Sequence
  Description of Artificial Sequence: Synthetic oligonucleotide
gagccggacaucacaggcu

SEQ ID NO: 2094865 - RNA, 19 nt, Artificial Sequence
  Description of Artificial Sequence: Synthetic oligonucleotide
gcaggacaggaagugaucu

SEQ ID NO: 2094866 - RNA, 19 nt, Artificial Sequence
  Description of Artificial Sequence: Synthetic oligonucleotide
ccugugcuuguucugagcu

SEQ ID NO: 2094867 - RNA, 19 nt, Artificial Sequence
  Description of Artificial Sequence: Synthetic oligonucleotide
  modified_base (5)..(5): a, c, u, g, unknown or other
gggancgcuggaaguggug

SEQ ID NO: 2094868 - RNA, 19 nt, Artificial Sequence
  Description of Artificial Sequence: Synthetic oligonucleotide
gcaccaaguggaagauuug

SEQ ID NO: 2094869 - RNA, 19 nt, Artificial Sequence
  Description of Artificial Sequence: Synthetic oligonucleotide
accuugguccagggagucu

SEQ ID NO: 2094870 - RNA, 19 nt, Artificial Sequence
  Description of Artificial Sequence: Synthetic oligonucleotide
gugguggagcaaccaggaa

SEQ ID NO: 2094871 - RNA, 19 nt, Artificial Sequence
  Description of Artificial Sequence: Synthetic oligonucleotide
ggaccguguuggaggaacc

SEQ ID NO: 2094872 - RNA, 19 nt, Artificial Sequence
  Description of Artificial Sequence: Synthetic oligonucleotide
gaccguguuggaggaaccu

SEQ ID NO: 2094873 - RNA, 19 nt, Artificial Sequence
  Description of Artificial Sequence: Synthetic oligonucleotide
gccucugcgcccagacugg

SEQ ID NO: 2094874 - RNA, 19 nt, Artificial Sequence
  Description of Artificial Sequence: Synthetic oligonucleotide
cucguccgccaggcuauag

SEQ ID NO: 2094875 - RNA, 19 nt, Artificial Sequence
  Description of Artificial Sequence: Synthetic oligonucleotide
guggagcaaccaggaacac

SEQ ID NO: 2094876 - RNA, 19 nt, Artificial Sequence
  Description of Artificial Sequence: Synthetic oligonucleotide
aacaugccucuuggagcuu

SEQ ID NO: 2094877 - RNA, 19 nt, Artificial Sequence
  Description of Artificial Sequence: Synthetic oligonucleotide
ccaacacugucccggguga

SEQ ID NO: 2094878 - RNA, 19 nt, Artificial Sequence
  Description of Artificial Sequence: Synthetic oligonucleotide
ggugucacucggccaggga

SEQ ID NO: 2094879 - RNA, 19 nt, Artificial Sequence
  Description of Artificial Sequence: Synthetic oligonucleotide
accccgcugccagcgugcg

SEQ ID NO: 2094880 - RNA, 19 nt, Artificial Sequence
  Description of Artificial Sequence: Synthetic oligonucleotide
gcugcuguucggucuccca

SEQ ID NO: 2094881 - RNA, 19 nt, Artificial Sequence
  Description of Artificial Sequence: Synthetic oligonucleotide
gggugucacucggccaggg

SEQ ID NO: 2094882 - RNA, 19 nt, Artificial Sequence
  Description of Artificial Sequence: Synthetic oligonucleotide
cuguucggucucccaccuc

SEQ ID NO: 2094883 - RNA, 19 nt, Artificial Sequence
  Description of Artificial Sequence: Synthetic oligonucleotide
ggagggaaagacgaugauu

SEQ ID NO: 2094884 - RNA, 19 nt, Artificial Sequence
  Description of Artificial Sequence: Synthetic oligonucleotide
cggucaagagcugcaguag

SEQ ID NO: 2094885 - RNA, 19 nt, Artificial Sequence
  Description of Artificial Sequence: Synthetic oligonucleotide
agucugagucccgggcauu

SEQ ID NO: 2094886 - RNA, 19 nt, Artificial Sequence
  Description of Artificial Sequence: Synthetic oligonucleotide
cuuggagcuugggcuuuga

SEQ ID NO: 2094887 - RNA, 19 nt, Artificial Sequence
  Description of Artificial Sequence: Synthetic oligonucleotide
gggagucugugcuuccccu

SEQ ID NO: 2094888 - RNA, 19 nt, Artificial Sequence
  Description of Artificial Sequence: Synthetic oligonucleotide
gccaugaguucagcugcug

SEQ ID NO: 2094889 - RNA, 19 nt, Artificial Sequence
  Description of Artificial Sequence: Synthetic oligonucleotide
gugcuuccccuuggagagc

SEQ ID NO: 2094890 - RNA, 19 nt, Artificial Sequence
  Description of Artificial Sequence: Synthetic oligonucleotide
ggggcccgcagcaccaggc

SEQ ID NO: 2094891 - RNA, 19 nt, Artificial Sequence
  Description of Artificial Sequence: Synthetic oligonucleotide
gccaggcucugacaugaaa

SEQ ID NO: 2094892 - RNA, 19 nt, Artificial Sequence
  Description of Artificial Sequence: Synthetic oligonucleotide
cuugguccagggagucugu

SEQ ID NO: 2094893 - RNA, 19 nt, Artificial Sequence
  Description of Artificial Sequence: Synthetic oligonucleotide
aggcgugugcauggccgga

SEQ ID NO: 2094894 - RNA, 19 nt, Artificial Sequence
  Description of Artificial Sequence: Synthetic oligonucleotide
cgggugaagcaccuugguc

SEQ ID NO: 2094895 - RNA, 19 nt, Artificial Sequence
  Description of Artificial Sequence: Synthetic oligonucleotide
gcagacuguuggccaguuc

SEQ ID NO: 2094896 - RNA, 19 nt, Artificial Sequence
  Description of Artificial Sequence: Synthetic oligonucleotide
ggggugucacucggccagg

SEQ ID NO: 2094897 - RNA, 19 nt, Artificial Sequence
  Description of Artificial Sequence: Synthetic oligonucleotide
gccgcuguccauggcugcc

SEQ ID NO: 2094898 - RNA, 19 nt, Artificial Sequence
  Description of Artificial Sequence: Synthetic oligonucleotide
ggaacacaccgugggcauc

SEQ ID NO: 2094899 - RNA, 19 nt, Artificial Sequence
  Description of Artificial Sequence: Synthetic oligonucleotide
aggcaccaaguggaagauu

SEQ ID NO: 2094900 - RNA, 19 nt, Artificial Sequence
  Description of Artificial Sequence: Synthetic oligonucleotide
gcuguucggucucccaccu

SEQ ID NO: 2094901 - RNA, 19 nt, Artificial Sequence
  Description of Artificial Sequence: Synthetic oligonucleotide
ccgugaagaggaguccauc

SEQ ID NO: 2094902 - RNA, 19 nt, Artificial Sequence
  Description of Artificial Sequence: Synthetic oligonucleotide
cugccagcgugcgccgcug

SEQ ID NO: 2094903 - RNA, 19 nt, Artificial Sequence
  Description of Artificial Sequence: Synthetic oligonucleotide
ggcgugugcauggccggac

SEQ ID NO: 2094904 - RNA, 19 nt, Artificial Sequence
  Description of Artificial Sequence: Synthetic oligonucleotide
cuccacacucaagugggau

SEQ ID NO: 2094905 - RNA, 19 nt, Artificial Sequence
  Description of Artificial Sequence: Synthetic oligonucleotide
guucggucucccaccucaa

SEQ ID NO: 2094906 - RNA, 19 nt, Artificial Sequence
  Description of Artificial Sequence: Synthetic oligonucleotide
gcgugcgccgcuguccaug

SEQ ID NO: 2094907 - RNA, 19 nt, Artificial Sequence
  Description of Artificial Sequence: Synthetic oligonucleotide
gcccgcagcaccaggcgac

SEQ ID NO: 2094908 - RNA, 19 nt, Artificial Sequence
  Description of Artificial Sequence: Synthetic oligonucleotide
ggcggucaagagcugcagu

SEQ ID NO: 2094909 - RNA, 19 nt, Artificial Sequence
  Description of Artificial Sequence: Synthetic oligonucleotide
ggaguccaucccauagucu

SEQ ID NO: 2094910 - RNA, 19 nt, Artificial Sequence
  Description of Artificial Sequence: Synthetic oligonucleotide
ccauggcugccucguccgc

SEQ ID NO: 2094911 - RNA, 19 nt, Artificial Sequence
  Description of Artificial Sequence: Synthetic oligonucleotide
gugcgccgcuguccauggc

SEQ ID NO: 2094912 - RNA, 19 nt, Artificial Sequence
  Description of Artificial Sequence: Synthetic oligonucleotide
caacacugucccgggugaa

SEQ ID NO: 2094913 - RNA, 19 nt, Artificial Sequence
  Description of Artificial Sequence: Synthetic oligonucleotide
gaccucccggaugcuggaa

SEQ ID NO: 2094914 - RNA, 19 nt, Artificial Sequence
  Description of Artificial Sequence: Synthetic oligonucleotide
cagggcccugcagcugaac

SEQ ID NO: 2094915 - RNA, 19 nt, Artificial Sequence
  Description of Artificial Sequence: Synthetic oligonucleotide
gaggaccguguuggaggaa

SEQ ID NO: 2094916 - RNA, 19 nt, Artificial Sequence
  Description of Artificial Sequence: Synthetic oligonucleotide
ccucaaagaugaugucugu

SEQ ID NO: 2094917 - RNA, 19 nt, Artificial Sequence
  Description of Artificial Sequence: Synthetic oligonucleotide
gcaucccugcacagcugug

SEQ ID NO: 2094918 - RNA, 19 nt, Artificial Sequence
  Description of Artificial Sequence: Synthetic oligonucleotide
agcgugcgccgcuguccau

SEQ ID NO: 2094919 - RNA, 19 nt, Artificial Sequence
  Description of Artificial Sequence: Synthetic oligonucleotide
ggagagccucugcgcccag

SEQ ID NO: 2094920 - RNA, 19 nt, Artificial Sequence
  Description of Artificial Sequence: Synthetic oligonucleotide
gagcugcaguaggcggcca

SEQ ID NO: 2094921 - RNA, 19 nt, Artificial Sequence
  Description of Artificial Sequence: Synthetic oligonucleotide
ggagucugugcuuccccuu

SEQ ID NO: 2094922 - RNA, 19 nt, Artificial Sequence
  Description of Artificial Sequence: Synthetic oligonucleotide
cagcuccgagucccaggga

SEQ ID NO: 2094923 - RNA, 19 nt, Artificial Sequence
  Description of Artificial Sequence: Synthetic oligonucleotide
gccggacaucacaggcugc

SEQ ID NO: 2094924 - RNA, 19 nt, Artificial Sequence
  Description of Artificial Sequence: Synthetic oligonucleotide
cccgggcauugcucacagg

SEQ ID NO: 2094925 - RNA, 19 nt, Artificial Sequence
  Description of Artificial Sequence: Synthetic oligonucleotide
gggagacaacuaccacaua

SEQ ID NO: 2094926 - RNA, 19 nt, Artificial Sequence
  Description of Artificial Sequence: Synthetic oligonucleotide
cccagggaggaagggagaa

SEQ ID NO: 2094927 - RNA, 19 nt, Artificial Sequence
  Description of Artificial Sequence: Synthetic oligonucleotide
ccugcacagcugugagaga

SEQ ID NO: 2094928 - RNA, 19 nt, Artificial Sequence
  Description of Artificial Sequence: Synthetic oligonucleotide
  modified_base (6)..(6): a, c, u, g, unknown or other
ggggancgcuggaaguggu

SEQ ID NO: 2094929 - RNA, 19 nt, Artificial Sequence
  Description of Artificial Sequence: Synthetic oligonucleotide
gugcuuguucugagcuccu

SEQ ID NO: 2094930 - RNA, 19 nt, Artificial Sequence
  Description of Artificial Sequence: Synthetic oligonucleotide
ccucuuggagcuugggcuu

SEQ ID NO: 2094931 - RNA, 19 nt, Artificial Sequence
  Description of Artificial Sequence: Synthetic oligonucleotide
ccggaccucccggaugcug

SEQ ID NO: 2094932 - RNA, 19 nt, Artificial Sequence
  Description of Artificial Sequence: Synthetic oligonucleotide
gggguaacucuguguccau

SEQ ID NO: 2094933 - RNA, 19 nt, Artificial Sequence
  Description of Artificial Sequence: Synthetic oligonucleotide
ccggacaucacaggcugcu

SEQ ID NO: 2094934 - RNA, 19 nt, Artificial Sequence
  Description of Artificial Sequence: Synthetic oligonucleotide
cgaccccgcugccagcgug

SEQ ID NO: 2094935 - RNA, 19 nt, Artificial Sequence
  Description of Artificial Sequence: Synthetic oligonucleotide
ccaugcgcuccagcccuug

SEQ ID NO: 2094936 - RNA, 19 nt, Artificial Sequence
  Description of Artificial Sequence: Synthetic oligonucleotide
ggcacgaagguggcuccgu

SEQ ID NO: 2094937 - RNA, 19 nt, Artificial Sequence
  Description of Artificial Sequence: Synthetic oligonucleotide
cguguuggaggaaccuggu

SEQ ID NO: 2094938 - RNA, 19 nt, Artificial Sequence
  Description of Artificial Sequence: Synthetic oligonucleotide
cucccggaugcuggaacau

SEQ ID NO: 2094939 - RNA, 19 nt, Artificial Sequence
  Description of Artificial Sequence: Synthetic oligonucleotide
cccuggaaauagggccaug

SEQ ID NO: 2094940 - RNA, 19 nt, Artificial Sequence
  Description of Artificial Sequence: Synthetic oligonucleotide
ccgcagcaccaggcgaccc

SEQ ID NO: 2094941 - RNA, 19 nt, Artificial Sequence
  Description of Artificial Sequence: Synthetic oligonucleotide
cccggggcccgcagcacca

SEQ ID NO: 2094942 - RNA, 19 nt, Artificial Sequence
  Description of Artificial Sequence: Synthetic oligonucleotide
gcccugcagcugaaccaac

SEQ ID NO: 2094943 - RNA, 19 nt, Artificial Sequence
  Description of Artificial Sequence: Synthetic oligonucleotide
gccucguccgccaggcuau

SEQ ID NO: 2094944 - RNA, 19 nt, Artificial Sequence
  Description of Artificial Sequence: Synthetic oligonucleotide
ccaggugccgcagacuguu

SEQ ID NO: 2094945 - RNA, 19 nt, Artificial Sequence
  Description of Artificial Sequence: Synthetic oligonucleotide
ccgggugaagcaccuuggu

SEQ ID NO: 2094946 - RNA, 19 nt, Artificial Sequence
  Description of Artificial Sequence: Synthetic oligonucleotide
cggggcccgcagcaccagg

SEQ ID NO: 2094947 - RNA, 19 nt, Artificial Sequence
  Description of Artificial Sequence: Synthetic oligonucleotide
cugcagccaguagcucucu

SEQ ID NO: 2094948 - RNA, 19 nt, Artificial Sequence
  Description of Artificial Sequence: Synthetic oligonucleotide
ccaggcgaccccgcugcca

SEQ ID NO: 2094949 - RNA, 19 nt, Artificial Sequence
  Description of Artificial Sequence: Synthetic oligonucleotide
ccugcacuuucagcacaaa

SEQ ID NO: 2094950 - RNA, 19 nt, Artificial Sequence
  Description of Artificial Sequence: Synthetic oligonucleotide
cgugugcauggccggaccu

SEQ ID NO: 2094951 - RNA, 19 nt, Artificial Sequence
  Description of Artificial Sequence: Synthetic oligonucleotide
ggcuuacacugcagccagu

SEQ ID NO: 2094952 - RNA, 19 nt, Artificial Sequence
  Description of Artificial Sequence: Synthetic oligonucleotide
ggcccggggcccgcagcac

SEQ ID NO: 2094953 - RNA, 19 nt, Artificial Sequence
  Description of Artificial Sequence: Synthetic oligonucleotide
cugccucguccgccaggcu

SEQ ID NO: 2094954 - RNA, 19 nt, Artificial Sequence
  Description of Artificial Sequence: Synthetic oligonucleotide
ccggggcccgcagcaccag

SEQ ID NO: 2094955 - RNA, 19 nt, Artificial Sequence
  Description of Artificial Sequence: Synthetic oligonucleotide
gucccgggugaagcaccuu

SEQ ID NO: 2094956 - RNA, 19 nt, Artificial Sequence
  Description of Artificial Sequence: Synthetic oligonucleotide
gcgaccccgcugccagcgu

SEQ ID NO: 2094957 - RNA, 19 nt, Artificial Sequence
  Description of Artificial Sequence: Synthetic oligonucleotide
ccgcuguccauggcugccu

SEQ ID NO: 2094958 - RNA, 19 nt, Artificial Sequence
  Description of Artificial Sequence: Synthetic oligonucleotide
ccgcagacuguuggccagu

SEQ ID NO: 2094959 - RNA, 19 nt, Artificial Sequence
  Description of Artificial Sequence: Synthetic oligonucleotide
ccucguccgccaggcuaua

SEQ ID NO: 2094960 - RNA, 19 nt, Artificial Sequence
  Description of Artificial Sequence: Synthetic oligonucleotide
gccggaccucccggaugcu

SEQ ID NO: 2094961 - RNA, 19 nt, Artificial Sequence
  Description of Artificial Sequence: Synthetic oligonucleotide
acacacaccauuuaaaggc

SEQ ID NO: 2094962 - RNA, 19 nt, Artificial Sequence
  Description of Artificial Sequence: Synthetic oligonucleotide
aggauuaugaaaccuaaac

SEQ ID NO: 2094963 - RNA, 19 nt, Artificial Sequence
  Description of Artificial Sequence: Synthetic oligonucleotide
uaagacaccaccaccaggg

SEQ ID NO: 2094964 - RNA, 19 nt, Artificial Sequence
  Description of Artificial Sequence: Synthetic oligonucleotide
aaacuaagaagaaaaugcc

SEQ ID NO: 2094965 - RNA, 19 nt, Artificial Sequence
  Description of Artificial Sequence: Synthetic oligonucleotide
aacaucauagauuauuccu

SEQ ID NO: 2094966 - RNA, 19 nt, Artificial Sequence
  Description of Artificial Sequence: Synthetic oligonucleotide
aguccuagcugucauaugc

SEQ ID NO: 2094967 - RNA, 19 nt, Artificial Sequence
  Description of Artificial Sequence: Synthetic oligonucleotide
cauucgagcacuaagaaug

SEQ ID NO: 2094968 - RNA, 19 nt, Artificial Sequence
  Description of Artificial Sequence: Synthetic oligonucleotide
ugccacuuaacauaguugg

SEQ ID NO: 2094969 - RNA, 19 nt, Artificial Sequence
  Description of Artificial Sequence: Synthetic oligonucleotide
cauuuaaaggcaaagcacc

SEQ ID NO: 2094970 - RNA, 19 nt, Artificial Sequence
  Description of Artificial Sequence: Synthetic oligonucleotide
caaaguuuuagaaauggag

SEQ ID NO: 2094971 - RNA, 19 nt, Artificial Sequence
  Description of Artificial Sequence: Synthetic oligonucleotide
aaaucagaaauaucauguc

SEQ ID NO: 2094972 - RNA, 19 nt, Artificial Sequence
  Description of Artificial Sequence: Synthetic oligonucleotide
uauuuggugcauuggaucg

SEQ ID NO: 2094973 - RNA, 19 nt, Artificial Sequence
  Description of Artificial Sequence: Synthetic oligonucleotide
agaaauggaguauauuuuc

SEQ ID NO: 2094974 - RNA, 19 nt, Artificial Sequence
  Description of Artificial Sequence: Synthetic oligonucleotide
auagcaugaauuccagucc

SEQ ID NO: 2094975 - RNA, 19 nt, Artificial Sequence
  Description of Artificial Sequence: Synthetic oligonucleotide
ucuaaagcuucucuaacag

SEQ ID NO: 2094976 - RNA, 19 nt, Artificial Sequence
  Description of Artificial Sequence: Synthetic oligonucleotide
uauuccuccgguaaugagg

SEQ ID NO: 2094977 - RNA, 19 nt, Artificial Sequence
  Description of Artificial Sequence: Synthetic oligonucleotide
gauagcaugaauuccaguc

SEQ ID NO: 2094978 - RNA, 19 nt, Artificial Sequence
  Description of Artificial Sequence: Synthetic oligonucleotide
uuaugaaaccuaaaccucc

SEQ ID NO: 2094979 - RNA, 19 nt, Artificial Sequence
  Description of Artificial Sequence: Synthetic oligonucleotide
gauuaugaaaccuaaaccu

SEQ ID NO: 2094980 - RNA, 19 nt, Artificial Sequence
  Description of Artificial Sequence: Synthetic oligonucleotide
uucaauaccaaaguuuuag

SEQ ID NO: 2094981 - RNA, 19 nt, Artificial Sequence
  Description of Artificial Sequence: Synthetic oligonucleotide
aaugauaagggguuguaaa

SEQ ID NO: 2094982 - RNA, 19 nt, Artificial Sequence
  Description of Artificial Sequence: Synthetic oligonucleotide
aauacucuagccaugaaga

SEQ ID NO: 2094983 - RNA, 19 nt, Artificial Sequence
  Description of Artificial Sequence: Synthetic oligonucleotide
augaacgugucucugauag

SEQ ID NO: 2094984 - RNA, 19 nt, Artificial Sequence
  Description of Artificial Sequence: Synthetic oligonucleotide
ucauagauuauuccuccgg

SEQ ID NO: 2094985 - RNA, 19 nt, Artificial Sequence
  Description of Artificial Sequence: Synthetic oligonucleotide
ucugaaauggcagaguacc

SEQ ID NO: 2094986 - RNA, 19 nt, Artificial Sequence
  Description of Artificial Sequence: Synthetic oligonucleotide
agcuacuggucucugaugc

SEQ ID NO: 2094987 - RNA, 19 nt, Artificial Sequence
  Description of Artificial Sequence: Synthetic oligonucleotide
ucuaacaggagccaaucca

SEQ ID NO: 2094988 - RNA, 19 nt, Artificial Sequence
  Description of Artificial Sequence: Synthetic oligonucleotide
uuauucaauaccaaaguuu

SEQ ID NO: 2094989 - RNA, 19 nt, Artificial Sequence
  Description of Artificial Sequence: Synthetic oligonucleotide
aauaacaucauagauuauu

SEQ ID NO: 2094990 - RNA, 19 nt, Artificial Sequence
  Description of Artificial Sequence: Synthetic oligonucleotide
gaauacucuagccaugaag

SEQ ID NO: 2094991 - RNA, 19 nt, Artificial Sequence
  Description of Artificial Sequence: Synthetic oligonucleotide
aaccuauugaguuugggaa

SEQ ID NO: 2094992 - RNA, 19 nt, Artificial Sequence
  Description of Artificial Sequence: Synthetic oligonucleotide
auauuuggugcauuggauc

SEQ ID NO: 2094993 - RNA, 19 nt, Artificial Sequence
  Description of Artificial Sequence: Synthetic oligonucleotide
aaauaaucacuuuauucaa

SEQ ID NO: 2094994 - RNA, 19 nt, Artificial Sequence
  Description of Artificial Sequence: Synthetic oligonucleotide
acuguaaugaacgugucuc

SEQ ID NO: 2094995 - RNA, 19 nt, Artificial Sequence
  Description of Artificial Sequence: Synthetic oligonucleotide
aaaccuauugaguuuggga

SEQ ID NO: 2094996 - RNA, 19 nt, Artificial Sequence
  Description of Artificial Sequence: Synthetic oligonucleotide
aaguuuuagaaauggagua

SEQ ID NO: 2094997 - RNA, 19 nt, Artificial Sequence
  Description of Artificial Sequence: Synthetic oligonucleotide
aagccaagaaagcuacugg

SEQ ID NO: 2094998 - RNA, 19 nt, Artificial Sequence
  Description of Artificial Sequence: Synthetic oligonucleotide
accauuuaaaggcaaagca

SEQ ID NO: 2094999 - RNA, 19 nt, Artificial Sequence
  Description of Artificial Sequence: Synthetic oligonucleotide
aacgcuuggagguucaaca

SEQ ID NO: 2095000 - RNA, 19 nt, Artificial Sequence
  Description of Artificial Sequence: Synthetic oligonucleotide
agaagaagaaaccuauuga

SEQ ID NO: 2095001 - RNA, 19 nt, Artificial Sequence
  Description of Artificial Sequence: Synthetic oligonucleotide
uguaagccaagaaagcuac

SEQ ID NO: 2095002 - RNA, 19 nt, Artificial Sequence
  Description of Artificial Sequence: Synthetic oligonucleotide
ucucacgauauacuucucg

SEQ ID NO: 2095003 - RNA, 19 nt, Artificial Sequence
  Description of Artificial Sequence: Synthetic oligonucleotide
ucccauuguaaacaggaag

SEQ ID NO: 2095004 - RNA, 19 nt, Artificial Sequence
  Description of Artificial Sequence: Synthetic oligonucleotide
uaguugguacaucagaaga

SEQ ID NO: 2095005 - RNA, 19 nt, Artificial Sequence
  Description of Artificial Sequence: Synthetic oligonucleotide
uugucuaggaaacagucuc

SEQ ID NO: 2095006 - RNA, 19 nt, Artificial Sequence
  Description of Artificial Sequence: Synthetic oligonucleotide
uaacauaguugguacauca

SEQ ID NO: 2095007 - RNA, 19 nt, Artificial Sequence
  Description of Artificial Sequence: Synthetic oligonucleotide
agaagaaaccuauugaguu

SEQ ID NO: 2095008 - RNA, 19 nt, Artificial Sequence
  Description of Artificial Sequence: Synthetic oligonucleotide
aacaauaacaucauagauu

SEQ ID NO: 2095009 - RNA, 19 nt, Artificial Sequence
  Description of Artificial Sequence: Synthetic oligonucleotide
uuaaaggcaaagcaccacu

SEQ ID NO: 2095010 - RNA, 19 nt, Artificial Sequence
  Description of Artificial Sequence: Synthetic oligonucleotide
augaauuccaguccuagcu

SEQ ID NO: 2095011 - RNA, 19 nt, Artificial Sequence
  Description of Artificial Sequence: Synthetic oligonucleotide
uauugucuaggaaacaguc

SEQ ID NO: 2095012 - RNA, 19 nt, Artificial Sequence
  Description of Artificial Sequence: Synthetic oligonucleotide
ugucucacgauauacuucu

SEQ ID NO: 2095013 - RNA, 19 nt, Artificial Sequence
  Description of Artificial Sequence: Synthetic oligonucleotide
gaggaaguaagacaccacc

SEQ ID NO: 2095014 - RNA, 19 nt, Artificial Sequence
  Description of Artificial Sequence: Synthetic oligonucleotide
ucauaugcuugcuagggug

SEQ ID NO: 2095015 - RNA, 19 nt, Artificial Sequence
  Description of Artificial Sequence: Synthetic oligonucleotide
aaugccacuuaacauaguu

SEQ ID NO: 2095016 - RNA, 19 nt, Artificial Sequence
  Description of Artificial Sequence: Synthetic oligonucleotide
agcacuaagaaugggacuc

SEQ ID NO: 2095017 - RNA, 19 nt, Artificial Sequence
  Description of Artificial Sequence: Synthetic oligonucleotide
ugucauaugcuugcuaggg

SEQ ID NO: 2095018 - RNA, 19 nt, Artificial Sequence
  Description of Artificial Sequence: Synthetic oligonucleotide
aagaaugggacucgguaca

SEQ ID NO: 2095019 - RNA, 19 nt, Artificial Sequence
  Description of Artificial Sequence: Synthetic oligonucleotide
auuaugaaaccuaaaccuc

SEQ ID NO: 2095020 - RNA, 19 nt, Artificial Sequence
  Description of Artificial Sequence: Synthetic oligonucleotide
accaaaguuuuagaaaugg

SEQ ID NO: 2095021 - RNA, 19 nt, Artificial Sequence
  Description of Artificial Sequence: Synthetic oligonucleotide
uucucaugaauacucuagc

SEQ ID NO: 2095022 - RNA, 19 nt, Artificial Sequence
  Description of Artificial Sequence: Synthetic oligonucleotide
uuugggaauauuuggugca

SEQ ID NO: 2095023 - RNA, 19 nt, Artificial Sequence
  Description of Artificial Sequence: Synthetic oligonucleotide
uccucaaaaggcacuagcc

SEQ ID NO: 2095024 - RNA, 19 nt, Artificial Sequence
  Description of Artificial Sequence: Synthetic oligonucleotide
auggcagaguaccacacac

SEQ ID NO: 2095025 - RNA, 19 nt, Artificial Sequence
  Description of Artificial Sequence: Synthetic oligonucleotide
gaaguaagacaccaccacc

SEQ ID NO: 2095026 - RNA, 19 nt, Artificial Sequence
  Description of Artificial Sequence: Synthetic oligonucleotide
ucaugaauacucuagccau

SEQ ID NO: 2095027 - RNA, 19 nt, Artificial Sequence
  Description of Artificial Sequence: Synthetic oligonucleotide
aagaaaccuauugaguuug

SEQ ID NO: 2095028 - RNA, 19 nt, Artificial Sequence
  Description of Artificial Sequence: Synthetic oligonucleotide
aauggaguauauuuucuuu

SEQ ID NO: 2095029 - RNA, 19 nt, Artificial Sequence
  Description of Artificial Sequence: Synthetic oligonucleotide
aaagcuacuggucucugau

SEQ ID NO: 2095030 - RNA, 19 nt, Artificial Sequence
  Description of Artificial Sequence: Synthetic oligonucleotide
gaauauuuggugcauugga

SEQ ID NO: 2095031 - RNA, 19 nt, Artificial Sequence
  Description of Artificial Sequence: Synthetic oligonucleotide
uucuccucaccgcacaggg

SEQ ID NO: 2095032 - RNA, 19 nt, Artificial Sequence
  Description of Artificial Sequence: Synthetic oligonucleotide
ucccauaugugucugaaau

SEQ ID NO: 2095033 - RNA, 19 nt, Artificial Sequence
  Description of Artificial Sequence: Synthetic oligonucleotide
uagauuauuccuccgguaa

SEQ ID NO: 2095034 - RNA, 19 nt, Artificial Sequence
  Description of Artificial Sequence: Synthetic oligonucleotide
agaaaaugccacuuaacau

SEQ ID NO: 2095035 - RNA, 19 nt, Artificial Sequence
  Description of Artificial Sequence: Synthetic oligonucleotide
uaacaucauagauuauucc

SEQ ID NO: 2095036 - RNA, 19 nt, Artificial Sequence
  Description of Artificial Sequence: Synthetic oligonucleotide
ucucaugaauacucuagcc

SEQ ID NO: 2095037 - RNA, 19 nt, Artificial Sequence
  Description of Artificial Sequence: Synthetic oligonucleotide
ugagccaacgcuuggaggu

SEQ ID NO: 2095038 - RNA, 19 nt, Artificial Sequence
  Description of Artificial Sequence: Synthetic oligonucleotide
cauauugucuaggaaacag

SEQ ID NO: 2095039 - RNA, 19 nt, Artificial Sequence
  Description of Artificial Sequence: Synthetic oligonucleotide
aaaggcacuagcccaucag

SEQ ID NO: 2095040 - RNA, 19 nt, Artificial Sequence
  Description of Artificial Sequence: Synthetic oligonucleotide
auggaguauauuuucuuug

SEQ ID NO: 2095041 - RNA, 19 nt, Artificial Sequence
  Description of Artificial Sequence: Synthetic oligonucleotide
auaguugguacaucagaag

SEQ ID NO: 2095042 - RNA, 19 nt, Artificial Sequence
  Description of Artificial Sequence: Synthetic oligonucleotide
acucuguaagccaagaaag

SEQ ID NO: 2095043 - RNA, 19 nt, Artificial Sequence
  Description of Artificial Sequence: Synthetic oligonucleotide
ugcucaucagucauugagc

SEQ ID NO: 2095044 - RNA, 19 nt, Artificial Sequence
  Description of Artificial Sequence: Synthetic oligonucleotide
agagucuccaugucggcgg

SEQ ID NO: 2095045 - RNA, 19 nt, Artificial Sequence
  Description of Artificial Sequence: Synthetic oligonucleotide
ucagucauugagccaacgc

SEQ ID NO: 2095046 - RNA, 19 nt, Artificial Sequence
  Description of Artificial Sequence: Synthetic oligonucleotide
uagggugucgcucaacgug

SEQ ID NO: 2095047 - RNA, 19 nt, Artificial Sequence
  Description of Artificial Sequence: Synthetic oligonucleotide
ucgagcacuaagaauggga

SEQ ID NO: 2095048 - RNA, 19 nt, Artificial Sequence
  Description of Artificial Sequence: Synthetic oligonucleotide
ucucugauagcaugaauuc

SEQ ID NO: 2095049 - RNA, 19 nt, Artificial Sequence
  Description of Artificial Sequence: Synthetic oligonucleotide
ugggacucgguacagaguc

SEQ ID NO: 2095050 - RNA, 19 nt, Artificial Sequence
  Description of Artificial Sequence: Synthetic oligonucleotide
aaaccucccauuguaaaca

SEQ ID NO: 2095051 - RNA, 19 nt, Artificial Sequence
  Description of Artificial Sequence: Synthetic oligonucleotide
ucagguuggggcauucgag

SEQ ID NO: 2095052 - RNA, 19 nt, Artificial Sequence
  Description of Artificial Sequence: Synthetic oligonucleotide
aaguaagacaccaccacca

SEQ ID NO: 2095053 - RNA, 19 nt, Artificial Sequence
  Description of Artificial Sequence: Synthetic oligonucleotide
cacuuaacauaguugguac

SEQ ID NO: 2095054 - RNA, 19 nt, Artificial Sequence
  Description of Artificial Sequence: Synthetic oligonucleotide
ggcaugugcacccagggcg

SEQ ID NO: 2095055 - RNA, 19 nt, Artificial Sequence
  Description of Artificial Sequence: Synthetic oligonucleotide
aauauacuguccauuuacu

SEQ ID NO: 2095056 - RNA, 19 nt, Artificial Sequence
  Description of Artificial Sequence: Synthetic oligonucleotide
aacaggagccaauccagga

SEQ ID NO: 2095057 - RNA, 19 nt, Artificial Sequence
  Description of Artificial Sequence: Synthetic oligonucleotide
ugcaaguccuuccauaaua

SEQ ID NO: 2095058 - RNA, 19 nt, Artificial Sequence
  Description of Artificial Sequence: Synthetic oligonucleotide
agggcguacaccgucaugg

SEQ ID NO: 2095059 - RNA, 19 nt, Artificial Sequence
  Description of Artificial Sequence: Synthetic oligonucleotide
aauauuuggugcauuggau

SEQ ID NO: 2095060 - RNA, 19 nt, Artificial Sequence
  Description of Artificial Sequence: Synthetic oligonucleotide
auucucaugaauacucuag

SEQ ID NO: 2095061 - RNA, 19 nt, Artificial Sequence
  Description of Artificial Sequence: Synthetic oligonucleotide
gacaaagccaaugaagaga

SEQ ID NO: 2095062 - RNA, 19 nt, Artificial Sequence
  Description of Artificial Sequence: Synthetic oligonucleotide
ugugucugaaauggcagag

SEQ ID NO: 2095063 - RNA, 19 nt, Artificial Sequence
  Description of Artificial Sequence: Synthetic oligonucleotide
aaagcaccacuggaggaac

SEQ ID NO: 2095064 - RNA, 19 nt, Artificial Sequence
  Description of Artificial Sequence: Synthetic oligonucleotide
ugaaaccuaaaccucccau

SEQ ID NO: 2095065 - RNA, 19 nt, Artificial Sequence
  Description of Artificial Sequence: Synthetic oligonucleotide
cucaacguggcguuuacuc

SEQ ID NO: 2095066 - RNA, 19 nt, Artificial Sequence
  Description of Artificial Sequence: Synthetic oligonucleotide
auugagccaacgcuuggag

SEQ ID NO: 2095067 - RNA, 19 nt, Artificial Sequence
  Description of Artificial Sequence: Synthetic oligonucleotide
ggaagcuagaugcaagucc

SEQ ID NO: 2095068 - RNA, 19 nt, Artificial Sequence
  Description of Artificial Sequence: Synthetic oligonucleotide
aguaagacaccaccaccag

SEQ ID NO: 2095069 - RNA, 19 nt, Artificial Sequence
  Description of Artificial Sequence: Synthetic oligonucleotide
cccauuguaaacaggaagc

SEQ ID NO: 2095070 - RNA, 19 nt, Artificial Sequence
  Description of Artificial Sequence: Synthetic oligonucleotide
gauauacuucucgauuugc

SEQ ID NO: 2095071 - RNA, 19 nt, Artificial Sequence
  Description of Artificial Sequence: Synthetic oligonucleotide
ucauugagccaacgcuugg

SEQ ID NO: 2095072 - RNA, 19 nt, Artificial Sequence
  Description of Artificial Sequence: Synthetic oligonucleotide
aauggcagaguaccacaca

SEQ ID NO: 2095073 - RNA, 19 nt, Artificial Sequence
  Description of Artificial Sequence: Synthetic oligonucleotide
uucucgauuugcauuaauu

SEQ ID NO: 2095074 - RNA, 19 nt, Artificial Sequence
  Description of Artificial Sequence: Synthetic oligonucleotide
uaaugaacgugucucugau

SEQ ID NO: 2095075 - RNA, 19 nt, Artificial Sequence
  Description of Artificial Sequence: Synthetic oligonucleotide
uguaaugaacgugucucug

SEQ ID NO: 2095076 - RNA, 19 nt, Artificial Sequence
  Description of Artificial Sequence: Synthetic oligonucleotide
uggugcauuggaucggucc

SEQ ID NO: 2095077 - RNA, 19 nt, Artificial Sequence
  Description of Artificial Sequence: Synthetic oligonucleotide
gcugucauaugcuugcuag

SEQ ID NO: 2095078 - RNA, 19 nt, Artificial Sequence
  Description of Artificial Sequence: Synthetic oligonucleotide
uugagccaacgcuuggagg

SEQ ID NO: 2095079 - RNA, 19 nt, Artificial Sequence
  Description of Artificial Sequence: Synthetic oligonucleotide
aaccucccauuguaaacag

SEQ ID NO: 2095080 - RNA, 19 nt, Artificial Sequence
  Description of Artificial Sequence: Synthetic oligonucleotide
uaccaaaguuuuagaaaug

SEQ ID NO: 2095081 - RNA, 19 nt, Artificial Sequence
  Description of Artificial Sequence: Synthetic oligonucleotide
augauaagggguuguaaaa

SEQ ID NO: 2095082 - RNA, 19 nt, Artificial Sequence
  Description of Artificial Sequence: Synthetic oligonucleotide
ccauaugugucugaaaugg

SEQ ID NO: 2095083 - RNA, 19 nt, Artificial Sequence
  Description of Artificial Sequence: Synthetic oligonucleotide
aguugguacaucagaagag

SEQ ID NO: 2095084 - RNA, 19 nt, Artificial Sequence
  Description of Artificial Sequence: Synthetic oligonucleotide
cucaugaauacucuagcca

SEQ ID NO: 2095085 - RNA, 19 nt, Artificial Sequence
  Description of Artificial Sequence: Synthetic oligonucleotide
aauaaucacuuuauucaau

SEQ ID NO: 2095086 - RNA, 19 nt, Artificial Sequence
  Description of Artificial Sequence: Synthetic oligonucleotide
uuauuccuccgguaaugag

SEQ ID NO: 2095087 - RNA, 19 nt, Artificial Sequence
  Description of Artificial Sequence: Synthetic oligonucleotide
ugaccgguuguccaagugu

SEQ ID NO: 2095088 - RNA, 19 nt, Artificial Sequence
  Description of Artificial Sequence: Synthetic oligonucleotide
ucaaaaggcacuagcccau

SEQ ID NO: 2095089 - RNA, 19 nt, Artificial Sequence
  Description of Artificial Sequence: Synthetic oligonucleotide
guaagacaccaccaccagg

SEQ ID NO: 2095090 - RNA, 19 nt, Artificial Sequence
  Description of Artificial Sequence: Synthetic oligonucleotide
acgauauacuucucgauuu

SEQ ID NO: 2095091 - RNA, 19 nt, Artificial Sequence
  Description of Artificial Sequence: Synthetic oligonucleotide
cauaugugucugaaauggc

SEQ ID NO: 2095092 - RNA, 19 nt, Artificial Sequence
  Description of Artificial Sequence: Synthetic oligonucleotide
uuuaaaggcaaagcaccac

SEQ ID NO: 2095093 - RNA, 19 nt, Artificial Sequence
  Description of Artificial Sequence: Synthetic oligonucleotide
uugguacaucagaagaggu

SEQ ID NO: 2095094 - RNA, 19 nt, Artificial Sequence
  Description of Artificial Sequence: Synthetic oligonucleotide
uagcccggcaauuucauuc

SEQ ID NO: 2095095 - RNA, 19 nt, Artificial Sequence
  Description of Artificial Sequence: Synthetic oligonucleotide
agugucucacgauauacuu

SEQ ID NO: 2095096 - RNA, 19 nt, Artificial Sequence
  Description of Artificial Sequence: Synthetic oligonucleotide
cauaguugguacaucagaa

SEQ ID NO: 2095097 - RNA, 19 nt, Artificial Sequence
  Description of Artificial Sequence: Synthetic oligonucleotide
ggaguauauuuucuuuggg

SEQ ID NO: 2095098 - RNA, 19 nt, Artificial Sequence
  Description of Artificial Sequence: Synthetic oligonucleotide
aaaugauaagggguuguaa

SEQ ID NO: 2095099 - RNA, 19 nt, Artificial Sequence
  Description of Artificial Sequence: Synthetic oligonucleotide
aaccuaaaccucccauugu

SEQ ID NO: 2095100 - RNA, 19 nt, Artificial Sequence
  Description of Artificial Sequence: Synthetic oligonucleotide
uuuacucuguaagccaaga

SEQ ID NO: 2095101 - RNA, 19 nt, Artificial Sequence
  Description of Artificial Sequence: Synthetic oligonucleotide
auaugugucugaaauggca

SEQ ID NO: 2095102 - RNA, 19 nt, Artificial Sequence
  Description of Artificial Sequence: Synthetic oligonucleotide
uccuccgguaaugaggaag

SEQ ID NO: 2095103 - RNA, 19 nt, Artificial Sequence
  Description of Artificial Sequence: Synthetic oligonucleotide
gguaaugaggaaguaagac

SEQ ID NO: 2095104 - RNA, 19 nt, Artificial Sequence
  Description of Artificial Sequence: Synthetic oligonucleotide
uuggagguucaacaauaac

SEQ ID NO: 2095105 - RNA, 19 nt, Artificial Sequence
  Description of Artificial Sequence: Synthetic oligonucleotide
aggauucacugauuuccuc

SEQ ID NO: 2095106 - RNA, 19 nt, Artificial Sequence
  Description of Artificial Sequence: Synthetic oligonucleotide
caugaauacucuagccaug

SEQ ID NO: 2095107 - RNA, 19 nt, Artificial Sequence
  Description of Artificial Sequence: Synthetic oligonucleotide
aaaaugauaagggguugua

SEQ ID NO: 2095108 - RNA, 19 nt, Artificial Sequence
  Description of Artificial Sequence: Synthetic oligonucleotide
uccaagugucucacgauau

SEQ ID NO: 2095109 - RNA, 19 nt, Artificial Sequence
  Description of Artificial Sequence: Synthetic oligonucleotide
aguccuuccauaauauacu

SEQ ID NO: 2095110 - RNA, 19 nt, Artificial Sequence
  Description of Artificial Sequence: Synthetic oligonucleotide
ccgguaaugaggaaguaag

SEQ ID NO: 2095111 - RNA, 19 nt, Artificial Sequence
  Description of Artificial Sequence: Synthetic oligonucleotide
uuacucuguaagccaagaa

SEQ ID NO: 2095112 - RNA, 19 nt, Artificial Sequence
  Description of Artificial Sequence: Synthetic oligonucleotide
gaucgguccaggauuauga

SEQ ID NO: 2095113 - RNA, 19 nt, Artificial Sequence
  Description of Artificial Sequence: Synthetic oligonucleotide
caagugucucacgauauac

SEQ ID NO: 2095114 - RNA, 19 nt, Artificial Sequence
  Description of Artificial Sequence: Synthetic oligonucleotide
aagcuacuggucucugaug

SEQ ID NO: 2095115 - RNA, 19 nt, Artificial Sequence
  Description of Artificial Sequence: Synthetic oligonucleotide
gguacaucagaagagguca

SEQ ID NO: 2095116 - RNA, 19 nt, Artificial Sequence
  Description of Artificial Sequence: Synthetic oligonucleotide
uaugcuugcuagggugucg

SEQ ID NO: 2095117 - RNA, 19 nt, Artificial Sequence
  Description of Artificial Sequence: Synthetic oligonucleotide
ggaaguaagacaccaccac

SEQ ID NO: 2095118 - RNA, 19 nt, Artificial Sequence
  Description of Artificial Sequence: Synthetic oligonucleotide
gaagagaagaagaaaccua

SEQ ID NO: 2095119 - RNA, 19 nt, Artificial Sequence
  Description of Artificial Sequence: Synthetic oligonucleotide
caagaaagcuacuggucuc

SEQ ID NO: 2095120 - RNA, 19 nt, Artificial Sequence
  Description of Artificial Sequence: Synthetic oligonucleotide
guaaugaacgugucucuga

SEQ ID NO: 2095121 - RNA, 19 nt, Artificial Sequence
  Description of Artificial Sequence: Synthetic oligonucleotide
aggaacugaccgguugucc

SEQ ID NO: 2095122 - RNA, 19 nt, Artificial Sequence
  Description of Artificial Sequence: Synthetic oligonucleotide
cucuaaagcuucucuaaca

SEQ ID NO: 2095123 - RNA, 19 nt, Artificial Sequence
  Description of Artificial Sequence: Synthetic oligonucleotide
uucucuaacaggagccaau

SEQ ID NO: 2095124 - RNA, 19 nt, Artificial Sequence
  Description of Artificial Sequence: Synthetic oligonucleotide
acggcaugugcacccaggg

SEQ ID NO: 2095125 - RNA, 19 nt, Artificial Sequence
  Description of Artificial Sequence: Synthetic oligonucleotide
cucacgauauacuucucga

SEQ ID NO: 2095126 - RNA, 19 nt, Artificial Sequence
  Description of Artificial Sequence: Synthetic oligonucleotide
cucugauagcaugaauucc

SEQ ID NO: 2095127 - RNA, 19 nt, Artificial Sequence
  Description of Artificial Sequence: Synthetic oligonucleotide
ccaggauucacugauuucc

SEQ ID NO: 2095128 - RNA, 19 nt, Artificial Sequence
  Description of Artificial Sequence: Synthetic oligonucleotide
gauucacugauuuccucaa

SEQ ID NO: 2095129 - RNA, 19 nt, Artificial Sequence
  Description of Artificial Sequence: Synthetic oligonucleotide
augaauacucuagccauga

SEQ ID NO: 2095130 - RNA, 19 nt, Artificial Sequence
  Description of Artificial Sequence: Synthetic oligonucleotide
cuaagaaugggacucggua

SEQ ID NO: 2095131 - RNA, 19 nt, Artificial Sequence
  Description of Artificial Sequence: Synthetic oligonucleotide
gcuagggugucgcucaacg

SEQ ID NO: 2095132 - RNA, 19 nt, Artificial Sequence
  Description of Artificial Sequence: Synthetic oligonucleotide
aagugucucacgauauacu

SEQ ID NO: 2095133 - RNA, 19 nt, Artificial Sequence
  Description of Artificial Sequence: Synthetic oligonucleotide
aucauuuauuucugcuccu

SEQ ID NO: 2095134 - RNA, 19 nt, Artificial Sequence
  Description of Artificial Sequence: Synthetic oligonucleotide
auagauuauuccuccggua

SEQ ID NO: 2095135 - RNA, 19 nt, Artificial Sequence
  Description of Artificial Sequence: Synthetic oligonucleotide
augcuugcuagggugucgc

SEQ ID NO: 2095136 - RNA, 19 nt, Artificial Sequence
  Description of Artificial Sequence: Synthetic oligonucleotide
gggaauauuuggugcauug

SEQ ID NO: 2095137 - RNA, 19 nt, Artificial Sequence
  Description of Artificial Sequence: Synthetic oligonucleotide
agauuauuccuccgguaau

SEQ ID NO: 2095138 - RNA, 19 nt, Artificial Sequence
  Description of Artificial Sequence: Synthetic oligonucleotide
auuuggugcauuggaucgg

SEQ ID NO: 2095139 - RNA, 19 nt, Artificial Sequence
  Description of Artificial Sequence: Synthetic oligonucleotide
ucacgauauacuucucgau

SEQ ID NO: 2095140 - RNA, 19 nt, Artificial Sequence
  Description of Artificial Sequence: Synthetic oligonucleotide
uuaacauaguugguacauc

SEQ ID NO: 2095141 - RNA, 19 nt, Artificial Sequence
  Description of Artificial Sequence: Synthetic oligonucleotide
auucgagcacuaagaaugg

SEQ ID NO: 2095142 - RNA, 19 nt, Artificial Sequence
  Description of Artificial Sequence: Synthetic oligonucleotide
accuaaaccucccauugua

SEQ ID NO: 2095143 - RNA, 19 nt, Artificial Sequence
  Description of Artificial Sequence: Synthetic oligonucleotide
accuauugaguuugggaau

SEQ ID NO: 2095144 - RNA, 19 nt, Artificial Sequence
  Description of Artificial Sequence: Synthetic oligonucleotide
auauacuucucgauuugca

SEQ ID NO: 2095145 - RNA, 19 nt, Artificial Sequence
  Description of Artificial Sequence: Synthetic oligonucleotide
cuugcuagggugucgcuca

SEQ ID NO: 2095146 - RNA, 19 nt, Artificial Sequence
  Description of Artificial Sequence: Synthetic oligonucleotide
ugauagcaugaauuccagu

SEQ ID NO: 2095147 - RNA, 19 nt, Artificial Sequence
  Description of Artificial Sequence: Synthetic oligonucleotide
gaagcuagaugcaaguccu

SEQ ID NO: 2095148 - RNA, 19 nt, Artificial Sequence
  Description of Artificial Sequence: Synthetic oligonucleotide
auuccuccgguaaugagga

SEQ ID NO: 2095149 - RNA, 19 nt, Artificial Sequence
  Description of Artificial Sequence: Synthetic oligonucleotide
uaggaaacagucucccaua

SEQ ID NO: 2095150 - RNA, 19 nt, Artificial Sequence
  Description of Artificial Sequence: Synthetic oligonucleotide
ggcagaguaccacacacac

SEQ ID NO: 2095151 - RNA, 19 nt, Artificial Sequence
  Description of Artificial Sequence: Synthetic oligonucleotide
cucuaacaggagccaaucc

SEQ ID NO: 2095152 - RNA, 19 nt, Artificial Sequence
  Description of Artificial Sequence: Synthetic oligonucleotide
aaugaacgugucucugaua

SEQ ID NO: 2095153 - RNA, 19 nt, Artificial Sequence
  Description of Artificial Sequence: Synthetic oligonucleotide
auuauuccuccgguaauga

SEQ ID NO: 2095154 - RNA, 19 nt, Artificial Sequence
  Description of Artificial Sequence: Synthetic oligonucleotide
cuagaugcaaguccuucca

SEQ ID NO: 2095155 - RNA, 19 nt, Artificial Sequence
  Description of Artificial Sequence: Synthetic oligonucleotide
ggauucacugauuuccuca

SEQ ID NO: 2095156 - RNA, 19 nt, Artificial Sequence
  Description of Artificial Sequence: Synthetic oligonucleotide
ugcauuggaucgguccagg

SEQ ID NO: 2095157 - RNA, 19 nt, Artificial Sequence
  Description of Artificial Sequence: Synthetic oligonucleotide
ucucuaacaggagccaauc

SEQ ID NO: 2095158 - RNA, 19 nt, Artificial Sequence
  Description of Artificial Sequence: Synthetic oligonucleotide
uucgagcacuaagaauggg

SEQ ID NO: 2095159 - RNA, 19 nt, Artificial Sequence
  Description of Artificial Sequence: Synthetic oligonucleotide
ugaacgugucucugauagc

SEQ ID NO: 2095160 - RNA, 19 nt, Artificial Sequence
  Description of Artificial Sequence: Synthetic oligonucleotide
gcacuagcccaucagguag

SEQ ID NO: 2095161 - RNA, 19 nt, Artificial Sequence
  Description of Artificial Sequence: Synthetic oligonucleotide
cauuuacucuguaagccaa

SEQ ID NO: 2095162 - RNA, 19 nt, Artificial Sequence
  Description of Artificial Sequence: Synthetic oligonucleotide
gagguucaacaauaacauc

SEQ ID NO: 2095163 - RNA, 19 nt, Artificial Sequence
  Description of Artificial Sequence: Synthetic oligonucleotide
uggcagaguaccacacaca

SEQ ID NO: 2095164 - RNA, 19 nt, Artificial Sequence
  Description of Artificial Sequence: Synthetic oligonucleotide
acuagcccaucagguagcc

SEQ ID NO: 2095165 - RNA, 19 nt, Artificial Sequence
  Description of Artificial Sequence: Synthetic oligonucleotide
agggugucgcucaacgugg

SEQ ID NO: 2095166 - RNA, 19 nt, Artificial Sequence
  Description of Artificial Sequence: Synthetic oligonucleotide
auacucuagccaugaagaa

SEQ ID NO: 2095167 - RNA, 19 nt, Artificial Sequence
  Description of Artificial Sequence: Synthetic oligonucleotide
auccaggauucacugauuu

SEQ ID NO: 2095168 - RNA, 19 nt, Artificial Sequence
  Description of Artificial Sequence: Synthetic oligonucleotide
uccgguaaugaggaaguaa

SEQ ID NO: 2095169 - RNA, 19 nt, Artificial Sequence
  Description of Artificial Sequence: Synthetic oligonucleotide
uuuggugcauuggaucggu

SEQ ID NO: 2095170 - RNA, 19 nt, Artificial Sequence
  Description of Artificial Sequence: Synthetic oligonucleotide
aggaaguaagacaccacca

SEQ ID NO: 2095171 - RNA, 19 nt, Artificial Sequence
  Description of Artificial Sequence: Synthetic oligonucleotide
guuguccaagugucucacg

SEQ ID NO: 2095172 - RNA, 19 nt, Artificial Sequence
  Description of Artificial Sequence: Synthetic oligonucleotide
uuggaucgguccaggauua

SEQ ID NO: 2095173 - RNA, 19 nt, Artificial Sequence
  Description of Artificial Sequence: Synthetic oligonucleotide
gccaaugaagagaagaaga

SEQ ID NO: 2095174 - RNA, 19 nt, Artificial Sequence
  Description of Artificial Sequence: Synthetic oligonucleotide
auaugcuugcuaggguguc

SEQ ID NO: 2095175 - RNA, 19 nt, Artificial Sequence
  Description of Artificial Sequence: Synthetic oligonucleotide
gaaagcuacuggucucuga

SEQ ID NO: 2095176 - RNA, 19 nt, Artificial Sequence
  Description of Artificial Sequence: Synthetic oligonucleotide
accgucauggccgacggca

SEQ ID NO: 2095177 - RNA, 19 nt, Artificial Sequence
  Description of Artificial Sequence: Synthetic oligonucleotide
agguuggggcauucgagca

SEQ ID NO: 2095178 - RNA, 19 nt, Artificial Sequence
  Description of Artificial Sequence: Synthetic oligonucleotide
augaaaccuaaaccuccca

SEQ ID NO: 2095179 - RNA, 19 nt, Artificial Sequence
  Description of Artificial Sequence: Synthetic oligonucleotide
ccacuggaggaacugaccg

SEQ ID NO: 2095180 - RNA, 19 nt, Artificial Sequence
  Description of Artificial Sequence: Synthetic oligonucleotide
ugaauacucuagccaugaa

SEQ ID NO: 2095181 - RNA, 19 nt, Artificial Sequence
  Description of Artificial Sequence: Synthetic oligonucleotide
uccaggauucacugauuuc

SEQ ID NO: 2095182 - RNA, 19 nt, Artificial Sequence
  Description of Artificial Sequence: Synthetic oligonucleotide
auacuguaaugaacguguc

SEQ ID NO: 2095183 - RNA, 19 nt, Artificial Sequence
  Description of Artificial Sequence: Synthetic oligonucleotide
cacuagcccaucagguagc

SEQ ID NO: 2095184 - RNA, 19 nt, Artificial Sequence
  Description of Artificial Sequence: Synthetic oligonucleotide
auuuacucuguaagccaag

SEQ ID NO: 2095185 - RNA, 19 nt, Artificial Sequence
  Description of Artificial Sequence: Synthetic oligonucleotide
uacucugcucuucacucuu

SEQ ID NO: 2095186 - RNA, 19 nt, Artificial Sequence
  Description of Artificial Sequence: Synthetic oligonucleotide
ggggcauucgagcacuaag

SEQ ID NO: 2095187 - RNA, 19 nt, Artificial Sequence
  Description of Artificial Sequence: Synthetic oligonucleotide
aguaccacacacaccauuu

SEQ ID NO: 2095188 - RNA, 19 nt, Artificial Sequence
  Description of Artificial Sequence: Synthetic oligonucleotide
cgguccaggauuaugaaac

SEQ ID NO: 2095189 - RNA, 19 nt, Artificial Sequence
  Description of Artificial Sequence: Synthetic oligonucleotide
gacggcaugugcacccagg

SEQ ID NO: 2095190 - RNA, 19 nt, Artificial Sequence
  Description of Artificial Sequence: Synthetic oligonucleotide
cuguaagccaagaaagcua

SEQ ID NO: 2095191 - RNA, 19 nt, Artificial Sequence
  Description of Artificial Sequence: Synthetic oligonucleotide
uagaugcaaguccuuccau

SEQ ID NO: 2095192 - RNA, 19 nt, Artificial Sequence
  Description of Artificial Sequence: Synthetic oligonucleotide
ucucccauaugugucugaa

SEQ ID NO: 2095193 - RNA, 19 nt, Artificial Sequence
  Description of Artificial Sequence: Synthetic oligonucleotide
augccacuuaacauaguug

SEQ ID NO: 2095194 - RNA, 19 nt, Artificial Sequence
  Description of Artificial Sequence: Synthetic oligonucleotide
caacaauaacaucauagau

SEQ ID NO: 2095195 - RNA, 19 nt, Artificial Sequence
  Description of Artificial Sequence: Synthetic oligonucleotide
ugcccaugcucaucaguca

SEQ ID NO: 2095196 - RNA, 19 nt, Artificial Sequence
  Description of Artificial Sequence: Synthetic oligonucleotide
agucauugagccaacgcuu

SEQ ID NO: 2095197 - RNA, 19 nt, Artificial Sequence
  Description of Artificial Sequence: Synthetic oligonucleotide
cacuaagaaugggacucgg

SEQ ID NO: 2095198 - RNA, 19 nt, Artificial Sequence
  Description of Artificial Sequence: Synthetic oligonucleotide
agcccggcaauuucauucu

SEQ ID NO: 2095199 - RNA, 19 nt, Artificial Sequence
  Description of Artificial Sequence: Synthetic oligonucleotide
aucagucauugagccaacg

SEQ ID NO: 2095200 - RNA, 19 nt, Artificial Sequence
  Description of Artificial Sequence: Synthetic oligonucleotide
agaaugggacucgguacag

SEQ ID NO: 2095201 - RNA, 19 nt, Artificial Sequence
  Description of Artificial Sequence: Synthetic oligonucleotide
cauagauuauuccuccggu

SEQ ID NO: 2095202 - RNA, 19 nt, Artificial Sequence
  Description of Artificial Sequence: Synthetic oligonucleotide
agccucuaaagcuucucua

SEQ ID NO: 2095203 - RNA, 19 nt, Artificial Sequence
  Description of Artificial Sequence: Synthetic oligonucleotide
gaccgguuguccaaguguc

SEQ ID NO: 2095204 - RNA, 19 nt, Artificial Sequence
  Description of Artificial Sequence: Synthetic oligonucleotide
uccucaccgcacaggggag

SEQ ID NO: 2095205 - RNA, 19 nt, Artificial Sequence
  Description of Artificial Sequence: Synthetic oligonucleotide
ggaacugaccgguugucca

SEQ ID NO: 2095206 - RNA, 19 nt, Artificial Sequence
  Description of Artificial Sequence: Synthetic oligonucleotide
ggugcauuggaucggucca

SEQ ID NO: 2095207 - RNA, 19 nt, Artificial Sequence
  Description of Artificial Sequence: Synthetic oligonucleotide
uacaucagaagaggucauc

SEQ ID NO: 2095208 - RNA, 19 nt, Artificial Sequence
  Description of Artificial Sequence: Synthetic oligonucleotide
uccuagcugucauaugcuu

SEQ ID NO: 2095209 - RNA, 19 nt, Artificial Sequence
  Description of Artificial Sequence: Synthetic oligonucleotide
cagucauugagccaacgcu

SEQ ID NO: 2095210 - RNA, 19 nt, Artificial Sequence
  Description of Artificial Sequence: Synthetic oligonucleotide
gagccaauccaggauucac

SEQ ID NO: 2095211 - RNA, 19 nt, Artificial Sequence
  Description of Artificial Sequence: Synthetic oligonucleotide
ccucccauuguaaacagga

SEQ ID NO: 2095212 - RNA, 19 nt, Artificial Sequence
  Description of Artificial Sequence: Synthetic oligonucleotide
aggagccaauccaggauuc

SEQ ID NO: 2095213 - RNA, 19 nt, Artificial Sequence
  Description of Artificial Sequence: Synthetic oligonucleotide
cuuggagguucaacaauaa

SEQ ID NO: 2095214 - RNA, 19 nt, Artificial Sequence
  Description of Artificial Sequence: Synthetic oligonucleotide
cugaaauggcagaguacca

SEQ ID NO: 2095215 - RNA, 19 nt, Artificial Sequence
  Description of Artificial Sequence: Synthetic oligonucleotide
gacaccaccaccagggcgu

SEQ ID NO: 2095216 - RNA, 19 nt, Artificial Sequence
  Description of Artificial Sequence: Synthetic oligonucleotide
uugggaauauuuggugcau

SEQ ID NO: 2095217 - RNA, 19 nt, Artificial Sequence
  Description of Artificial Sequence: Synthetic oligonucleotide
cacucuucuccucaccgca

SEQ ID NO: 2095218 - RNA, 19 nt, Artificial Sequence
  Description of Artificial Sequence: Synthetic oligonucleotide
aucgguccaggauuaugaa

SEQ ID NO: 2095219 - RNA, 19 nt, Artificial Sequence
  Description of Artificial Sequence: Synthetic oligonucleotide
cgagcacuaagaaugggac

SEQ ID NO: 2095220 - RNA, 19 nt, Artificial Sequence
  Description of Artificial Sequence: Synthetic oligonucleotide
ccuagcugucauaugcuug

SEQ ID NO: 2095221 - RNA, 19 nt, Artificial Sequence
  Description of Artificial Sequence: Synthetic oligonucleotide
acuaagaaugggacucggu

SEQ ID NO: 2095222 - RNA, 19 nt, Artificial Sequence
  Description of Artificial Sequence: Synthetic oligonucleotide
acgcuuggagguucaacaa

SEQ ID NO: 2095223 - RNA, 19 nt, Artificial Sequence
  Description of Artificial Sequence: Synthetic oligonucleotide
guccaagugucucacgaua

SEQ ID NO: 2095224 - RNA, 19 nt, Artificial Sequence
  Description of Artificial Sequence: Synthetic oligonucleotide
gucucugauagcaugaauu

SEQ ID NO: 2095225 - RNA, 19 nt, Artificial Sequence
  Description of Artificial Sequence: Synthetic oligonucleotide
ugucgcucaacguggcguu

SEQ ID NO: 2095226 - RNA, 19 nt, Artificial Sequence
  Description of Artificial Sequence: Synthetic oligonucleotide
ggagguucaacaauaacau

SEQ ID NO: 2095227 - RNA, 19 nt, Artificial Sequence
  Description of Artificial Sequence: Synthetic oligonucleotide
uccaugucggcggcagcag

SEQ ID NO: 2095228 - RNA, 19 nt, Artificial Sequence
  Description of Artificial Sequence: Synthetic oligonucleotide
ggaaacagucucccauaug

SEQ ID NO: 2095229 - RNA, 19 nt, Artificial Sequence
  Description of Artificial Sequence: Synthetic oligonucleotide
gucggcggcagcagggacg

SEQ ID NO: 2095230 - RNA, 19 nt, Artificial Sequence
  Description of Artificial Sequence: Synthetic oligonucleotide
ucagccucuaaagcuucuc

SEQ ID NO: 2095231 - RNA, 19 nt, Artificial Sequence
  Description of Artificial Sequence: Synthetic oligonucleotide
ucagguagcccggcaauuu

SEQ ID NO: 2095232 - RNA, 19 nt, Artificial Sequence
  Description of Artificial Sequence: Synthetic oligonucleotide
cugaccgguuguccaagug

SEQ ID NO: 2095233 - RNA, 19 nt, Artificial Sequence
  Description of Artificial Sequence: Synthetic oligonucleotide
agggacggcgcuccggccu

SEQ ID NO: 2095234 - RNA, 19 nt, Artificial Sequence
  Description of Artificial Sequence: Synthetic oligonucleotide
ugcuccuuucauacauauu

SEQ ID NO: 2095235 - RNA, 19 nt, Artificial Sequence
  Description of Artificial Sequence: Synthetic oligonucleotide
auggccgacggcaugugca

SEQ ID NO: 2095236 - RNA, 19 nt, Artificial Sequence
  Description of Artificial Sequence: Synthetic oligonucleotide
gagcacuaagaaugggacu

SEQ ID NO: 2095237 - RNA, 19 nt, Artificial Sequence
  Description of Artificial Sequence: Synthetic oligonucleotide
aggcacuagcccaucaggu

SEQ ID NO: 2095238 - RNA, 19 nt, Artificial Sequence
  Description of Artificial Sequence: Synthetic oligonucleotide
cucaucagucauugagcca

SEQ ID NO: 2095239 - RNA, 19 nt, Artificial Sequence
  Description of Artificial Sequence: Synthetic oligonucleotide
uggccgacggcaugugcac

SEQ ID NO: 2095240 - RNA, 19 nt, Artificial Sequence
  Description of Artificial Sequence: Synthetic oligonucleotide
ccucuaaagcuucucuaac

SEQ ID NO: 2095241 - RNA, 19 nt, Artificial Sequence
  Description of Artificial Sequence: Synthetic oligonucleotide
cauaugcuugcuagggugu

SEQ ID NO: 2095242 - RNA, 19 nt, Artificial Sequence
  Description of Artificial Sequence: Synthetic oligonucleotide
aaaugccacuuaacauagu

SEQ ID NO: 2095243 - RNA, 19 nt, Artificial Sequence
  Description of Artificial Sequence: Synthetic oligonucleotide
ccauuuacucuguaagcca

SEQ ID NO: 2095244 - RNA, 19 nt, Artificial Sequence
  Description of Artificial Sequence: Synthetic oligonucleotide
acugaccgguuguccaagu

SEQ ID NO: 2095245 - RNA, 19 nt, Artificial Sequence
  Description of Artificial Sequence: Synthetic oligonucleotide
cauggccgacggcaugugc

SEQ ID NO: 2095246 - RNA, 19 nt, Artificial Sequence
  Description of Artificial Sequence: Synthetic oligonucleotide
caucagucauugagccaac

SEQ ID NO: 2095247 - RNA, 19 nt, Artificial Sequence
  Description of Artificial Sequence: Synthetic oligonucleotide
aacgugucucugauagcau

SEQ ID NO: 2095248 - RNA, 19 nt, Artificial Sequence
  Description of Artificial Sequence: Synthetic oligonucleotide
caggauuaugaaaccuaaa

SEQ ID NO: 2095249 - RNA, 19 nt, Artificial Sequence
  Description of Artificial Sequence: Synthetic oligonucleotide
ggcauucgagcacuaagaa

SEQ ID NO: 2095250 - RNA, 19 nt, Artificial Sequence
  Description of Artificial Sequence: Synthetic oligonucleotide
agccaacgcuuggagguuc

SEQ ID NO: 2095251 - RNA, 19 nt, Artificial Sequence
  Description of Artificial Sequence: Synthetic oligonucleotide
caccgcacaggggaguggc

SEQ ID NO: 2095252 - RNA, 19 nt, Artificial Sequence
  Description of Artificial Sequence: Synthetic oligonucleotide
gcacuaagaaugggacucg

SEQ ID NO: 2095253 - RNA, 19 nt, Artificial Sequence
  Description of Artificial Sequence: Synthetic oligonucleotide
cacgauauacuucucgauu

SEQ ID NO: 2095254 - RNA, 19 nt, Artificial Sequence
  Description of Artificial Sequence: Synthetic oligonucleotide
caacgcuuggagguucaac

SEQ ID NO: 2095255 - RNA, 19 nt, Artificial Sequence
  Description of Artificial Sequence: Synthetic oligonucleotide
ugucggcggcagcagggac

SEQ ID NO: 2095256 - RNA, 19 nt, Artificial Sequence
  Description of Artificial Sequence: Synthetic oligonucleotide
gccucuaaagcuucucuaa

SEQ ID NO: 2095257 - RNA, 19 nt, Artificial Sequence
  Description of Artificial Sequence: Synthetic oligonucleotide
cauugagccaacgcuugga

SEQ ID NO: 2095258 - RNA, 19 nt, Artificial Sequence
  Description of Artificial Sequence: Synthetic oligonucleotide
ggcguacaccgucauggcc

SEQ ID NO: 2095259 - RNA, 19 nt, Artificial Sequence
  Description of Artificial Sequence: Synthetic oligonucleotide
gcuacuggucucugaugcc

SEQ ID NO: 2095260 - RNA, 19 nt, Artificial Sequence
  Description of Artificial Sequence: Synthetic oligonucleotide
gucauaugcuugcuagggu

SEQ ID NO: 2095261 - RNA, 19 nt, Artificial Sequence
  Description of Artificial Sequence: Synthetic oligonucleotide
cuguaaugaacgugucucu

SEQ ID NO: 2095262 - RNA, 19 nt, Artificial Sequence
  Description of Artificial Sequence: Synthetic oligonucleotide
gaaugggacucgguacaga

SEQ ID NO: 2095263 - RNA, 19 nt, Artificial Sequence
  Description of Artificial Sequence: Synthetic oligonucleotide
agguagcccggcaauuuca

SEQ ID NO: 2095264 - RNA, 19 nt, Artificial Sequence
  Description of Artificial Sequence: Synthetic oligonucleotide
gcaugugcacccagggcgg

SEQ ID NO: 2095265 - RNA, 19 nt, Artificial Sequence
  Description of Artificial Sequence: Synthetic oligonucleotide
caguccuagcugucauaug

SEQ ID NO: 2095266 - RNA, 19 nt, Artificial Sequence
  Description of Artificial Sequence: Synthetic oligonucleotide
gggcauucgagcacuaaga

SEQ ID NO: 2095267 - RNA, 19 nt, Artificial Sequence
  Description of Artificial Sequence: Synthetic oligonucleotide
gguuggggcauucgagcac

SEQ ID NO: 2095268 - RNA, 19 nt, Artificial Sequence
  Description of Artificial Sequence: Synthetic oligonucleotide
caaguccuuccauaauaua

SEQ ID NO: 2095269 - RNA, 19 nt, Artificial Sequence
  Description of Artificial Sequence: Synthetic oligonucleotide
uuggugcauuggaucgguc

SEQ ID NO: 2095270 - RNA, 19 nt, Artificial Sequence
  Description of Artificial Sequence: Synthetic oligonucleotide
cucccauuguaaacaggaa

SEQ ID NO: 2095271 - RNA, 19 nt, Artificial Sequence
  Description of Artificial Sequence: Synthetic oligonucleotide
gaguaccacacacaccauu

SEQ ID NO: 2095272 - RNA, 19 nt, Artificial Sequence
  Description of Artificial Sequence: Synthetic oligonucleotide
ccaagaaagcuacuggucu

SEQ ID NO: 2095273 - RNA, 19 nt, Artificial Sequence
  Description of Artificial Sequence: Synthetic oligonucleotide
agcagggacggcgcuccgg

SEQ ID NO: 2095274 - RNA, 19 nt, Artificial Sequence
  Description of Artificial Sequence: Synthetic oligonucleotide
caccagggcguacaccguc

SEQ ID NO: 2095275 - RNA, 19 nt, Artificial Sequence
  Description of Artificial Sequence: Synthetic oligonucleotide
cucaccgcacaggggagug

SEQ ID NO: 2095276 - RNA, 19 nt, Artificial Sequence
  Description of Artificial Sequence: Synthetic oligonucleotide
guaccacacacaccauuua

SEQ ID NO: 2095277 - RNA, 19 nt, Artificial Sequence
  Description of Artificial Sequence: Synthetic oligonucleotide
caaaaggcacuagcccauc

SEQ ID NO: 2095278 - RNA, 19 nt, Artificial Sequence
  Description of Artificial Sequence: Synthetic oligonucleotide
ugcuugcuagggugucgcu

SEQ ID NO: 2095279 - RNA, 19 nt, Artificial Sequence
  Description of Artificial Sequence: Synthetic oligonucleotide
cgauauacuucucgauuug

SEQ ID NO: 2095280 - RNA, 19 nt, Artificial Sequence
  Description of Artificial Sequence: Synthetic oligonucleotide
ggaucgguccaggauuaug

SEQ ID NO: 2095281 - RNA, 19 nt, Artificial Sequence
  Description of Artificial Sequence: Synthetic oligonucleotide
cauuggaucgguccaggau

SEQ ID NO: 2095282 - RNA, 19 nt, Artificial Sequence
  Description of Artificial Sequence: Synthetic oligonucleotide
ucauggccgacggcaugug

SEQ ID NO: 2095283 - RNA, 19 nt, Artificial Sequence
  Description of Artificial Sequence: Synthetic oligonucleotide
gcuuggagguucaacaaua

SEQ ID NO: 2095284 - RNA, 19 nt, Artificial Sequence
  Description of Artificial Sequence: Synthetic oligonucleotide
cuagcccaucagguagccc

SEQ ID NO: 2095285 - RNA, 19 nt, Artificial Sequence
  Description of Artificial Sequence: Synthetic oligonucleotide
uugcuagggugucgcucaa

SEQ ID NO: 2095286 - RNA, 19 nt, Artificial Sequence
  Description of Artificial Sequence: Synthetic oligonucleotide
gcguuuacucugcucuuca

SEQ ID NO: 2095287 - RNA, 19 nt, Artificial Sequence
  Description of Artificial Sequence: Synthetic oligonucleotide
augggacucgguacagagu

SEQ ID NO: 2095288 - RNA, 19 nt, Artificial Sequence
  Description of Artificial Sequence: Synthetic oligonucleotide
guuggggcauucgagcacu

SEQ ID NO: 2095289 - RNA, 19 nt, Artificial Sequence
  Description of Artificial Sequence: Synthetic oligonucleotide
aucagguagcccggcaauu

SEQ ID NO: 2095290 - RNA, 19 nt, Artificial Sequence
  Description of Artificial Sequence: Synthetic oligonucleotide
ggcacuagcccaucaggua

SEQ ID NO: 2095291 - RNA, 19 nt, Artificial Sequence
  Description of Artificial Sequence: Synthetic oligonucleotide
ucgcucaacguggcguuua

SEQ ID NO: 2095292 - RNA, 19 nt, Artificial Sequence
  Description of Artificial Sequence: Synthetic oligonucleotide
uggggcauucgagcacuaa

SEQ ID NO: 2095293 - RNA, 19 nt, Artificial Sequence
  Description of Artificial Sequence: Synthetic oligonucleotide
cucccauaugugucugaaa

SEQ ID NO: 2095294 - RNA, 19 nt, Artificial Sequence
  Description of Artificial Sequence: Synthetic oligonucleotide
acuucucgauuugcauuaa

SEQ ID NO: 2095295 - RNA, 19 nt, Artificial Sequence
  Description of Artificial Sequence: Synthetic oligonucleotide
cugcuccuuucauacauau

SEQ ID NO: 2095296 - RNA, 19 nt, Artificial Sequence
  Description of Artificial Sequence: Synthetic oligonucleotide
ccuaaaccucccauuguaa

SEQ ID NO: 2095297 - RNA, 19 nt, Artificial Sequence
  Description of Artificial Sequence: Synthetic oligonucleotide
ccacuuaacauaguuggua

SEQ ID NO: 2095298 - RNA, 19 nt, Artificial Sequence
  Description of Artificial Sequence: Synthetic oligonucleotide
augucggcggcagcaggga

SEQ ID NO: 2095299 - RNA, 19 nt, Artificial Sequence
  Description of Artificial Sequence: Synthetic oligonucleotide
gugucgcucaacguggcgu

SEQ ID NO: 2095300 - RNA, 19 nt, Artificial Sequence
  Description of Artificial Sequence: Synthetic oligonucleotide
accgguuguccaagugucu

SEQ ID NO: 2095301 - RNA, 19 nt, Artificial Sequence
  Description of Artificial Sequence: Synthetic oligonucleotide
ggcgcuccggccuccggcc

SEQ ID NO: 2095302 - RNA, 19 nt, Artificial Sequence
  Description of Artificial Sequence: Synthetic oligonucleotide
agcaugaauuccaguccua

SEQ ID NO: 2095303 - RNA, 19 nt, Artificial Sequence
  Description of Artificial Sequence: Synthetic oligonucleotide
cuagggugucgcucaacgu

SEQ ID NO: 2095304 - RNA, 19 nt, Artificial Sequence
  Description of Artificial Sequence: Synthetic oligonucleotide
cagccucuaaagcuucucu

SEQ ID NO: 2095305 - RNA, 19 nt, Artificial Sequence
  Description of Artificial Sequence: Synthetic oligonucleotide
cagggacggcgcuccggcc

SEQ ID NO: 2095306 - RNA, 19 nt, Artificial Sequence
  Description of Artificial Sequence: Synthetic oligonucleotide
gcauucgagcacuaagaau

SEQ ID NO: 2095307 - RNA, 19 nt, Artificial Sequence
  Description of Artificial Sequence: Synthetic oligonucleotide
uuggggcauucgagcacua

SEQ ID NO: 2095308 - RNA, 19 nt, Artificial Sequence
  Description of Artificial Sequence: Synthetic oligonucleotide
gcuugcuagggugucgcuc

SEQ ID NO: 2095309 - RNA, 19 nt, Artificial Sequence
  Description of Artificial Sequence: Synthetic oligonucleotide
uuccuccgguaaugaggaa

SEQ ID NO: 2095310 - RNA, 19 nt, Artificial Sequence
  Description of Artificial Sequence: Synthetic oligonucleotide
gcauuggaucgguccagga

SEQ ID NO: 2095311 - RNA, 19 nt, Artificial Sequence
  Description of Artificial Sequence: Synthetic oligonucleotide
ccuauugaguuugggaaua

SEQ ID NO: 2095312 - RNA, 19 nt, Artificial Sequence
  Description of Artificial Sequence: Synthetic oligonucleotide
guccuagcugucauaugcu

SEQ ID NO: 2095313 - RNA, 19 nt, Artificial Sequence
  Description of Artificial Sequence: Synthetic oligonucleotide
cccggcaauuucauucuca

SEQ ID NO: 2095314 - RNA, 19 nt, Artificial Sequence
  Description of Artificial Sequence: Synthetic oligonucleotide
agaguaccacacacaccau

SEQ ID NO: 2095315 - RNA, 19 nt, Artificial Sequence
  Description of Artificial Sequence: Synthetic oligonucleotide
acggcgcuccggccuccgg

SEQ ID NO: 2095316 - RNA, 19 nt, Artificial Sequence
  Description of Artificial Sequence: Synthetic oligonucleotide
cguuuacucugcucuucac

SEQ ID NO: 2095317 - RNA, 19 nt, Artificial Sequence
  Description of Artificial Sequence: Synthetic oligonucleotide
caccgucauggccgacggc

SEQ ID NO: 2095318 - RNA, 19 nt, Artificial Sequence
  Description of Artificial Sequence: Synthetic oligonucleotide
ccgguuguccaagugucuc

SEQ ID NO: 2095319 - RNA, 19 nt, Artificial Sequence
  Description of Artificial Sequence: Synthetic oligonucleotide
uggaucgguccaggauuau

SEQ ID NO: 2095320 - RNA, 19 nt, Artificial Sequence
  Description of Artificial Sequence: Synthetic oligonucleotide
gucucacgauauacuucuc

SEQ ID NO: 2095321 - RNA, 19 nt, Artificial Sequence
  Description of Artificial Sequence: Synthetic oligonucleotide
ggagccaauccaggauuca

SEQ ID NO: 2095322 - RNA, 19 nt, Artificial Sequence
  Description of Artificial Sequence: Synthetic oligonucleotide
ccuccgguaaugaggaagu

SEQ ID NO: 2095323 - RNA, 19 nt, Artificial Sequence
  Description of Artificial Sequence: Synthetic oligonucleotide
guacaucagaagaggucau

SEQ ID NO: 2095324 - RNA, 19 nt, Artificial Sequence
  Description of Artificial Sequence: Synthetic oligonucleotide
gggcggcuucuucagcuuc

SEQ ID NO: 2095325 - RNA, 19 nt, Artificial Sequence
  Description of Artificial Sequence: Synthetic oligonucleotide
cggcaauuucauucucaug

SEQ ID NO: 2095326 - RNA, 19 nt, Artificial Sequence
  Description of Artificial Sequence: Synthetic oligonucleotide
cuauugaguuugggaauau

SEQ ID NO: 2095327 - RNA, 19 nt, Artificial Sequence
  Description of Artificial Sequence: Synthetic oligonucleotide
cagcagggacggcgcuccg

SEQ ID NO: 2095328 - RNA, 19 nt, Artificial Sequence
  Description of Artificial Sequence: Synthetic oligonucleotide
gggugucgcucaacguggc

SEQ ID NO: 2095329 - RNA, 19 nt, Artificial Sequence
  Description of Artificial Sequence: Synthetic oligonucleotide
caggggaguggcucagccu

SEQ ID NO: 2095330 - RNA, 19 nt, Artificial Sequence
  Description of Artificial Sequence: Synthetic oligonucleotide
ccaagugucucacgauaua

SEQ ID NO: 2095331 - RNA, 19 nt, Artificial Sequence
  Description of Artificial Sequence: Synthetic oligonucleotide
accgcacaggggaguggcu

SEQ ID NO: 2095332 - RNA, 19 nt, Artificial Sequence
  Description of Artificial Sequence: Synthetic oligonucleotide
gugcacccagggcggcuuc

SEQ ID NO: 2095333 - RNA, 19 nt, Artificial Sequence
  Description of Artificial Sequence: Synthetic oligonucleotide
ccggcaauuucauucucau

SEQ ID NO: 2095334 - RNA, 19 nt, Artificial Sequence
  Description of Artificial Sequence: Synthetic oligonucleotide
gggacggcgcuccggccuc

SEQ ID NO: 2095335 - RNA, 19 nt, Artificial Sequence
  Description of Artificial Sequence: Synthetic oligonucleotide
ggaguggcucagccucuaa

SEQ ID NO: 2095336 - RNA, 19 nt, Artificial Sequence
  Description of Artificial Sequence: Synthetic oligonucleotide
cgguuguccaagugucuca

SEQ ID NO: 2095337 - RNA, 19 nt, Artificial Sequence
  Description of Artificial Sequence: Synthetic oligonucleotide
ggccgacggcaugugcacc

SEQ ID NO: 2095338 - RNA, 19 nt, Artificial Sequence
  Description of Artificial Sequence: Synthetic oligonucleotide
gcccggcaauuucauucuc

SEQ ID NO: 2095339 - RNA, 19 nt, Artificial Sequence
  Description of Artificial Sequence: Synthetic oligonucleotide
cuccgguaaugaggaagua

SEQ ID NO: 2095340 - RNA, 19 nt, Artificial Sequence
  Description of Artificial Sequence: Synthetic oligonucleotide
ccaguccuagcugucauau

SEQ ID NO: 2095341 - RNA, 19 nt, Artificial Sequence
  Description of Artificial Sequence: Synthetic oligonucleotide
gguagcccggcaauuucau

SEQ ID NO: 2095342 - RNA, 19 nt, Artificial Sequence
  Description of Artificial Sequence: Synthetic oligonucleotide
cgcucaacguggcguuuac

SEQ ID NO: 2095343 - RNA, 19 nt, Artificial Sequence
  Description of Artificial Sequence: Synthetic oligonucleotide
gagccaacgcuuggagguu

SEQ ID NO: 2095344 - RNA, 19 nt, Artificial Sequence
  Description of Artificial Sequence: Synthetic oligonucleotide
gccaacgcuuggagguuca

SEQ ID NO: 2095345 - RNA, 19 nt, Artificial Sequence
  Description of Artificial Sequence: Synthetic oligonucleotide
cccaucagguagcccggca

SEQ ID NO: 2095346 - RNA, 19 nt, Artificial Sequence
  Description of Artificial Sequence: Synthetic oligonucleotide
cgacggcaugugcacccag

SEQ ID NO: 2095347 - RNA, 19 nt, Artificial Sequence
  Description of Artificial Sequence: Synthetic oligonucleotide
gcucaacguggcguuuacu

SEQ ID NO: 2095348 - RNA, 19 nt, Artificial Sequence
  Description of Artificial Sequence: Synthetic oligonucleotide
cgcuuggagguucaacaau

SEQ ID NO: 2095349 - RNA, 19 nt, Artificial Sequence
  Description of Artificial Sequence: Synthetic oligonucleotide
ggacggcgcuccggccucc

SEQ ID NO: 2095350 - RNA, 19 nt, Artificial Sequence
  Description of Artificial Sequence: Synthetic oligonucleotide
gucgcucaacguggcguuu

SEQ ID NO: 2095351 - RNA, 19 nt, Artificial Sequence
  Description of Artificial Sequence: Synthetic oligonucleotide
ccgacggcaugugcaccca

SEQ ID NO: 2095352 - RNA, 19 nt, Artificial Sequence
  Description of Artificial Sequence: Synthetic oligonucleotide
ccaacgcuuggagguucaa

SEQ ID NO: 2095353 - RNA, 19 nt, Artificial Sequence
  Description of Artificial Sequence: Synthetic oligonucleotide
ccgucauggccgacggcau

SEQ ID NO: 2095354 - RNA, 19 nt, Artificial Sequence
  Description of Artificial Sequence: Synthetic oligonucleotide
ccaccagggcguacaccgu

SEQ ID NO: 2095355 - RNA, 19 nt, Artificial Sequence
  Description of Artificial Sequence: Synthetic oligonucleotide
ccucaccgcacaggggagu

SEQ ID NO: 2095356 - RNA, 19 nt, Artificial Sequence
  Description of Artificial Sequence: Synthetic oligonucleotide
gcgcuccggccuccggccu

SEQ ID NO: 2095357 - RNA, 19 nt, Artificial Sequence
  Description of Artificial Sequence: Synthetic oligonucleotide
aaugauucuguagacaccc

SEQ ID NO: 2095358 - RNA, 19 nt, Artificial Sequence
  Description of Artificial Sequence: Synthetic oligonucleotide
uauaaaauacauuuucugc

SEQ ID NO: 2095359 - RNA, 19 nt, Artificial Sequence
  Description of Artificial Sequence: Synthetic oligonucleotide
auaaaauacauuuucugcu

SEQ ID NO: 2095360 - RNA, 19 nt, Artificial Sequence
  Description of Artificial Sequence: Synthetic oligonucleotide
acugguauaaaauacauuu

SEQ ID NO: 2095361 - RNA, 19 nt, Artificial Sequence
  Description of Artificial Sequence: Synthetic oligonucleotide
uucaugauguagcugaucc

SEQ ID NO: 2095362 - RNA, 19 nt, Artificial Sequence
  Description of Artificial Sequence: Synthetic oligonucleotide
cagauauccacauagacac

SEQ ID NO: 2095363 - RNA, 19 nt, Artificial Sequence
  Description of Artificial Sequence: Synthetic oligonucleotide
uucgauagaagccuaugcg

SEQ ID NO: 2095364 - RNA, 19 nt, Artificial Sequence
  Description of Artificial Sequence: Synthetic oligonucleotide
aaaguuuccgcuuccgauc

SEQ ID NO: 2095365 - RNA, 19 nt, Artificial Sequence
  Description of Artificial Sequence: Synthetic oligonucleotide
ugacaaauguuuaggaucc

SEQ ID NO: 2095366 - RNA, 19 nt, Artificial Sequence
  Description of Artificial Sequence: Synthetic oligonucleotide
uuaggauccaguuggaaag

SEQ ID NO: 2095367 - RNA, 19 nt, Artificial Sequence
  Description of Artificial Sequence: Synthetic oligonucleotide
ucuaaagugcuuuucaccu

SEQ ID NO: 2095368 - RNA, 19 nt, Artificial Sequence
  Description of Artificial Sequence: Synthetic oligonucleotide
aauguuuaggauccaguug

SEQ ID NO: 2095369 - RNA, 19 nt, Artificial Sequence
  Description of Artificial Sequence: Synthetic oligonucleotide
ucaugcaugugcuucacgg

SEQ ID NO: 2095370 - RNA, 19 nt, Artificial Sequence
  Description of Artificial Sequence: Synthetic oligonucleotide
auucgauagaagccuaugc

SEQ ID NO: 2095371 - RNA, 19 nt, Artificial Sequence
  Description of Artificial Sequence: Synthetic oligonucleotide
aaauacauuuucugcuuuc

SEQ ID NO: 2095372 - RNA, 19 nt, Artificial Sequence
  Description of Artificial Sequence: Synthetic oligonucleotide
cucgaaauggcauuguacc

SEQ ID NO: 2095373 - RNA, 19 nt, Artificial Sequence
  Description of Artificial Sequence: Synthetic oligonucleotide
ugguauaaaauacauuuuc

SEQ ID NO: 2095374 - RNA, 19 nt, Artificial Sequence
  Description of Artificial Sequence: Synthetic oligonucleotide
uaugggaccccucucaucc

SEQ ID NO: 2095375 - RNA, 19 nt, Artificial Sequence
  Description of Artificial Sequence: Synthetic oligonucleotide
uucaucucggaaaaguuca

SEQ ID NO: 2095376 - RNA, 19 nt, Artificial Sequence
  Description of Artificial Sequence: Synthetic oligonucleotide
aagccuaugcguuucccac

SEQ ID NO: 2095377 - RNA, 19 nt, Artificial Sequence
  Description of Artificial Sequence: Synthetic oligonucleotide
auaugcucaucuguaaucc

SEQ ID NO: 2095378 - RNA, 19 nt, Artificial Sequence
  Description of Artificial Sequence: Synthetic oligonucleotide
ugcuaauuuucccaaagac

SEQ ID NO: 2095379 - RNA, 19 nt, Artificial Sequence
  Description of Artificial Sequence: Synthetic oligonucleotide
uuacuuacggugcugaauc

SEQ ID NO: 2095380 - RNA, 19 nt, Artificial Sequence
  Description of Artificial Sequence: Synthetic oligonucleotide
ugcuuuccgguucagagag

SEQ ID NO: 2095381 - RNA, 19 nt, Artificial Sequence
  Description of Artificial Sequence: Synthetic oligonucleotide
ugugcuacugguauaaaau

SEQ ID NO: 2095382 - RNA, 19 nt, Artificial Sequence
  Description of Artificial Sequence: Synthetic oligonucleotide
caauguaguguucaucucg

SEQ ID NO: 2095383 - RNA, 19 nt, Artificial Sequence
  Description of Artificial Sequence: Synthetic oligonucleotide
uguagggauuggcugaagg

SEQ ID NO: 2095384 - RNA, 19 nt, Artificial Sequence
  Description of Artificial Sequence: Synthetic oligonucleotide
agguguucagcauuucacc

SEQ ID NO: 2095385 - RNA, 19 nt, Artificial Sequence
  Description of Artificial Sequence: Synthetic oligonucleotide
cacgacuucguaaaggcgg

SEQ ID NO: 2095386 - RNA, 19 nt, Artificial Sequence
  Description of Artificial Sequence: Synthetic oligonucleotide
aauguaguguucaucucgg

SEQ ID NO: 2095387 - RNA, 19 nt, Artificial Sequence
  Description of Artificial Sequence: Synthetic oligonucleotide
uaaaggcggaugauguugg

SEQ ID NO: 2095388 - RNA, 19 nt, Artificial Sequence
  Description of Artificial Sequence: Synthetic oligonucleotide
cucuccucgaauucgauag

SEQ ID NO: 2095389 - RNA, 19 nt, Artificial Sequence
  Description of Artificial Sequence: Synthetic oligonucleotide
uaaagugcuuuucaccuca

SEQ ID NO: 2095390 - RNA, 19 nt, Artificial Sequence
  Description of Artificial Sequence: Synthetic oligonucleotide
uguagcugaucccauaccu

SEQ ID NO: 2095391 - RNA, 19 nt, Artificial Sequence
  Description of Artificial Sequence: Synthetic oligonucleotide
aaaugauucuguagacacc

SEQ ID NO: 2095392 - RNA, 19 nt, Artificial Sequence
  Description of Artificial Sequence: Synthetic oligonucleotide
cucgaauucgauagaagcc

SEQ ID NO: 2095393 - RNA, 19 nt, Artificial Sequence
  Description of Artificial Sequence: Synthetic oligonucleotide
uuuaggauccaguuggaaa

SEQ ID NO: 2095394 - RNA, 19 nt, Artificial Sequence
  Description of Artificial Sequence: Synthetic oligonucleotide
gaaaaguucaggugcagca

SEQ ID NO: 2095395 - RNA, 19 nt, Artificial Sequence
  Description of Artificial Sequence: Synthetic oligonucleotide
agugcuaauuuucccaaag

SEQ ID NO: 2095396 - RNA, 19 nt, Artificial Sequence
  Description of Artificial Sequence: Synthetic oligonucleotide
uggaaaucucucuggauag

SEQ ID NO: 2095397 - RNA, 19 nt, Artificial Sequence
  Description of Artificial Sequence: Synthetic oligonucleotide
cuaauuuucccaaagacgu

SEQ ID NO: 2095398 - RNA, 19 nt, Artificial Sequence
  Description of Artificial Sequence: Synthetic oligonucleotide
aaucuuaauggccaccuuu

SEQ ID NO: 2095399 - RNA, 19 nt, Artificial Sequence
  Description of Artificial Sequence: Synthetic oligonucleotide
ugcuacugguauaaaauac

SEQ ID NO: 2095400 - RNA, 19 nt, Artificial Sequence
  Description of Artificial Sequence: Synthetic oligonucleotide
uuucgguauaugcucaucu

SEQ ID NO: 2095401 - RNA, 19 nt, Artificial Sequence
  Description of Artificial Sequence: Synthetic oligonucleotide
acucgauguaaaaugauuc

SEQ ID NO: 2095402 - RNA, 19 nt, Artificial Sequence
  Description of Artificial Sequence: Synthetic oligonucleotide
uuauuucgguauaugcuca

SEQ ID NO: 2095403 - RNA, 19 nt, Artificial Sequence
  Description of Artificial Sequence: Synthetic oligonucleotide
uuaauggccaccuuugguu

SEQ ID NO: 2095404 - RNA, 19 nt, Artificial Sequence
  Description of Artificial Sequence: Synthetic oligonucleotide
uauaugcucaucuguaauc

SEQ ID NO: 2095405 - RNA, 19 nt, Artificial Sequence
  Description of Artificial Sequence: Synthetic oligonucleotide
uuugguuagggagugaauc

SEQ ID NO: 2095406 - RNA, 19 nt, Artificial Sequence
  Description of Artificial Sequence: Synthetic oligonucleotide
ucgauagaagccuaugcgu

SEQ ID NO: 2095407 - RNA, 19 nt, Artificial Sequence
  Description of Artificial Sequence: Synthetic oligonucleotide
ugggguaugcuguagguac

SEQ ID NO: 2095408 - RNA, 19 nt, Artificial Sequence
  Description of Artificial Sequence: Synthetic oligonucleotide
auagacaccaauguagugu

SEQ ID NO: 2095409 - RNA, 19 nt, Artificial Sequence
  Description of Artificial Sequence: Synthetic oligonucleotide
ucuguagacacccgugaug

SEQ ID NO: 2095410 - RNA, 19 nt, Artificial Sequence
  Description of Artificial Sequence: Synthetic oligonucleotide
ucguaaaggcggaugaugu

SEQ ID NO: 2095411 - RNA, 19 nt, Artificial Sequence
  Description of Artificial Sequence: Synthetic oligonucleotide
gauccaguuggaaagguug

SEQ ID NO: 2095412 - RNA, 19 nt, Artificial Sequence
  Description of Artificial Sequence: Synthetic oligonucleotide
aauacauuuucugcuuuca

SEQ ID NO: 2095413 - RNA, 19 nt, Artificial Sequence
  Description of Artificial Sequence: Synthetic oligonucleotide
ucgaauucgauagaagccu

SEQ ID NO: 2095414 - RNA, 19 nt, Artificial Sequence
  Description of Artificial Sequence: Synthetic oligonucleotide
uugaccugggaaaaguuuc

SEQ ID NO: 2095415 - RNA, 19 nt, Artificial Sequence
  Description of Artificial Sequence: Synthetic oligonucleotide
uucacggcggacacgaucu

SEQ ID NO: 2095416 - RNA, 19 nt, Artificial Sequence
  Description of Artificial Sequence: Synthetic oligonucleotide
aauuugguuuucaugcaug

SEQ ID NO: 2095417 - RNA, 19 nt, Artificial Sequence
  Description of Artificial Sequence: Synthetic oligonucleotide
gcuaauuuucccaaagacg

SEQ ID NO: 2095418 - RNA, 19 nt, Artificial Sequence
  Description of Artificial Sequence: Synthetic oligonucleotide
ugguguagcuuuuccaugc

SEQ ID NO: 2095419 - RNA, 19 nt, Artificial Sequence
  Description of Artificial Sequence: Synthetic oligonucleotide
cuucugacaaauguuuagg

SEQ ID NO: 2095420 - RNA, 19 nt, Artificial Sequence
  Description of Artificial Sequence: Synthetic oligonucleotide
aaggacuccucggaugagc

SEQ ID NO: 2095421 - RNA, 19 nt, Artificial Sequence
  Description of Artificial Sequence: Synthetic oligonucleotide
ugaauccaaaaucucccac

SEQ ID NO: 2095422 - RNA, 19 nt, Artificial Sequence
  Description of Artificial Sequence: Synthetic oligonucleotide
ucgauguaaaaugauucug

SEQ ID NO: 2095423 - RNA, 19 nt, Artificial Sequence
  Description of Artificial Sequence: Synthetic oligonucleotide
ucucuguagggauuggcug

SEQ ID NO: 2095424 - RNA, 19 nt, Artificial Sequence
  Description of Artificial Sequence: Synthetic oligonucleotide
uccugcauacuccaucacc

SEQ ID NO: 2095425 - RNA, 19 nt, Artificial Sequence
  Description of Artificial Sequence: Synthetic oligonucleotide
aauucgauagaagccuaug

SEQ ID NO: 2095426 - RNA, 19 nt, Artificial Sequence
  Description of Artificial Sequence: Synthetic oligonucleotide
uguagguacccucaaggau

SEQ ID NO: 2095427 - RNA, 19 nt, Artificial Sequence
  Description of Artificial Sequence: Synthetic oligonucleotide
auaauuugguuuucaugca

SEQ ID NO: 2095428 - RNA, 19 nt, Artificial Sequence
  Description of Artificial Sequence: Synthetic oligonucleotide
ucgguauaugcucaucugu

SEQ ID NO: 2095429 - RNA, 19 nt, Artificial Sequence
  Description of Artificial Sequence: Synthetic oligonucleotide
aucucggaaaaguucaggu

SEQ ID NO: 2095430 - RNA, 19 nt, Artificial Sequence
  Description of Artificial Sequence: Synthetic oligonucleotide
ugaauaauuugguuuucau

SEQ ID NO: 2095431 - RNA, 19 nt, Artificial Sequence
  Description of Artificial Sequence: Synthetic oligonucleotide
accugggaaaaguuuccgc

SEQ ID NO: 2095432 - RNA, 19 nt, Artificial Sequence
  Description of Artificial Sequence: Synthetic oligonucleotide
ucucggaaaaguucaggug

SEQ ID NO: 2095433 - RNA, 19 nt, Artificial Sequence
  Description of Artificial Sequence: Synthetic oligonucleotide
ugguuuucaugcaugugcu

SEQ ID NO: 2095434 - RNA, 19 nt, Artificial Sequence
  Description of Artificial Sequence: Synthetic oligonucleotide
guagguacccucaaggaug

SEQ ID NO: 2095435 - RNA, 19 nt, Artificial Sequence
  Description of Artificial Sequence: Synthetic oligonucleotide
auguagcugaucccauacc

SEQ ID NO: 2095436 - RNA, 19 nt, Artificial Sequence
  Description of Artificial Sequence: Synthetic oligonucleotide
acuucguaaaggcggauga

SEQ ID NO: 2095437 - RNA, 19 nt, Artificial Sequence
  Description of Artificial Sequence: Synthetic oligonucleotide
acacccgugauggagcugc

SEQ ID NO: 2095438 - RNA, 19 nt, Artificial Sequence
  Description of Artificial Sequence: Synthetic oligonucleotide
auuugguuuucaugcaugu

SEQ ID NO: 2095439 - RNA, 19 nt, Artificial Sequence
  Description of Artificial Sequence: Synthetic oligonucleotide
ugauucuguagacacccgu

SEQ ID NO: 2095440 - RNA, 19 nt, Artificial Sequence
  Description of Artificial Sequence: Synthetic oligonucleotide
ugcaugugcuucacggcgg

SEQ ID NO: 2095441 - RNA, 19 nt, Artificial Sequence
  Description of Artificial Sequence: Synthetic oligonucleotide
uaauuugguuuucaugcau

SEQ ID NO: 2095442 - RNA, 19 nt, Artificial Sequence
  Description of Artificial Sequence: Synthetic oligonucleotide
uaugcguuucccacgcgug

SEQ ID NO: 2095443 - RNA, 19 nt, Artificial Sequence
  Description of Artificial Sequence: Synthetic oligonucleotide
ucucauccacucauuauuc

SEQ ID NO: 2095444 - RNA, 19 nt, Artificial Sequence
  Description of Artificial Sequence: Synthetic oligonucleotide
aaggaugcucuucuuuagu

SEQ ID NO: 2095445 - RNA, 19 nt, Artificial Sequence
  Description of Artificial Sequence: Synthetic oligonucleotide
uccccaaguguucuaaagu

SEQ ID NO: 2095446 - RNA, 19 nt, Artificial Sequence
  Description of Artificial Sequence: Synthetic oligonucleotide
uucguaaaggcggaugaug

SEQ ID NO: 2095447 - RNA, 19 nt, Artificial Sequence
  Description of Artificial Sequence: Synthetic oligonucleotide
ucuggauagcagccuuugg

SEQ ID NO: 2095448 - RNA, 19 nt, Artificial Sequence
  Description of Artificial Sequence: Synthetic oligonucleotide
uucgguauaugcucaucug

SEQ ID NO: 2095449 - RNA, 19 nt, Artificial Sequence
  Description of Artificial Sequence: Synthetic oligonucleotide
guaaaggcggaugauguug

SEQ ID NO: 2095450 - RNA, 19 nt, Artificial Sequence
  Description of Artificial Sequence: Synthetic oligonucleotide
ucgaaauggcauuguacca

SEQ ID NO: 2095451 - RNA, 19 nt, Artificial Sequence
  Description of Artificial Sequence: Synthetic oligonucleotide
gauguaaaaugauucugua

SEQ ID NO: 2095452 - RNA, 19 nt, Artificial Sequence
  Description of Artificial Sequence: Synthetic oligonucleotide
agaugagcuugcuuuccgg

SEQ ID NO: 2095453 - RNA, 19 nt, Artificial Sequence
  Description of Artificial Sequence: Synthetic oligonucleotide
agcuuuuccaugcuggaaa

SEQ ID NO: 2095454 - RNA, 19 nt, Artificial Sequence
  Description of Artificial Sequence: Synthetic oligonucleotide
uagggagugaauccccagc

SEQ ID NO: 2095455 - RNA, 19 nt, Artificial Sequence
  Description of Artificial Sequence: Synthetic oligonucleotide
uagacacccgugauggagc

SEQ ID NO: 2095456 - RNA, 19 nt, Artificial Sequence
  Description of Artificial Sequence: Synthetic oligonucleotide
uccucgaauucgauagaag

SEQ ID NO: 2095457 - RNA, 19 nt, Artificial Sequence
  Description of Artificial Sequence: Synthetic oligonucleotide
gacuccucggaugagccgg

SEQ ID NO: 2095458 - RNA, 19 nt, Artificial Sequence
  Description of Artificial Sequence: Synthetic oligonucleotide
ccucgaauucgauagaagc

SEQ ID NO: 2095459 - RNA, 19 nt, Artificial Sequence
  Description of Artificial Sequence: Synthetic oligonucleotide
ucggaaaaguucaggugca

SEQ ID NO: 2095460 - RNA, 19 nt, Artificial Sequence
  Description of Artificial Sequence: Synthetic oligonucleotide
agaaucuuaauggccaccu

SEQ ID NO: 2095461 - RNA, 19 nt, Artificial Sequence
  Description of Artificial Sequence: Synthetic oligonucleotide
uuugcacucgauguaaaau

SEQ ID NO: 2095462 - RNA, 19 nt, Artificial Sequence
  Description of Artificial Sequence: Synthetic oligonucleotide
gauucuguagacacccgug

SEQ ID NO: 2095463 - RNA, 19 nt, Artificial Sequence
  Description of Artificial Sequence: Synthetic oligonucleotide
ugcugggguaugcuguagg

SEQ ID NO: 2095464 - RNA, 19 nt, Artificial Sequence
  Description of Artificial Sequence: Synthetic oligonucleotide
auucuguagacacccguga

SEQ ID NO: 2095465 - RNA, 19 nt, Artificial Sequence
  Description of Artificial Sequence: Synthetic oligonucleotide
acacaugugcuacugguau

SEQ ID NO: 2095466 - RNA, 19 nt, Artificial Sequence
  Description of Artificial Sequence: Synthetic oligonucleotide
ggaaagguuggcaaagggg

SEQ ID NO: 2095467 - RNA, 19 nt, Artificial Sequence
  Description of Artificial Sequence: Synthetic oligonucleotide
acaaauguuuaggauccag

SEQ ID NO: 2095468 - RNA, 19 nt, Artificial Sequence
  Description of Artificial Sequence: Synthetic oligonucleotide
gaaagguuggcaaaggggu

SEQ ID NO: 2095469 - RNA, 19 nt, Artificial Sequence
  Description of Artificial Sequence: Synthetic oligonucleotide
ucugaaacaugcuggggua

SEQ ID NO: 2095470 - RNA, 19 nt, Artificial Sequence
  Description of Artificial Sequence: Synthetic oligonucleotide
uaugcucaucuguaauccc

SEQ ID NO: 2095471 - RNA, 19 nt, Artificial Sequence
  Description of Artificial Sequence: Synthetic oligonucleotide
uagggauuggcugaaggac

SEQ ID NO: 2095472 - RNA, 19 nt, Artificial Sequence
  Description of Artificial Sequence: Synthetic oligonucleotide
auccccaaguguucuaaag

SEQ ID NO: 2095473 - RNA, 19 nt, Artificial Sequence
  Description of Artificial Sequence: Synthetic oligonucleotide
auagaagccuaugcguuuc

SEQ ID NO: 2095474 - RNA, 19 nt, Artificial Sequence
  Description of Artificial Sequence: Synthetic oligonucleotide
uguaauccccaaguguucu

SEQ ID NO: 2095475 - RNA, 19 nt, Artificial Sequence
  Description of Artificial Sequence: Synthetic oligonucleotide
ugcuuucagaucucuguga

SEQ ID NO: 2095476 - RNA, 19 nt, Artificial Sequence
  Description of Artificial Sequence: Synthetic oligonucleotide
auacuccaucaccaagugg

SEQ ID NO: 2095477 - RNA, 19 nt, Artificial Sequence
  Description of Artificial Sequence: Synthetic oligonucleotide
uuagggagugaauccccag

SEQ ID NO: 2095478 - RNA, 19 nt, Artificial Sequence
  Description of Artificial Sequence: Synthetic oligonucleotide
cagcauaggguggagaccc

SEQ ID NO: 2095479 - RNA, 19 nt, Artificial Sequence
  Description of Artificial Sequence: Synthetic oligonucleotide
aaaaguucaggugcagcau

SEQ ID NO: 2095480 - RNA, 19 nt, Artificial Sequence
  Description of Artificial Sequence: Synthetic oligonucleotide
gucuaacuuggucuugucc

SEQ ID NO: 2095481 - RNA, 19 nt, Artificial Sequence
  Description of Artificial Sequence: Synthetic oligonucleotide
uuuacuuacggugcugaau

SEQ ID NO: 2095482 - RNA, 19 nt, Artificial Sequence
  Description of Artificial Sequence: Synthetic oligonucleotide
gccaccuuugguuagggag

SEQ ID NO: 2095483 - RNA, 19 nt, Artificial Sequence
  Description of Artificial Sequence: Synthetic oligonucleotide
guagacacccgugauggag

SEQ ID NO: 2095484 - RNA, 19 nt, Artificial Sequence
  Description of Artificial Sequence: Synthetic oligonucleotide
aacuuggucuuguccagaa

SEQ ID NO: 2095485 - RNA, 19 nt, Artificial Sequence
  Description of Artificial Sequence: Synthetic oligonucleotide
caugcaugugcuucacggc

SEQ ID NO: 2095486 - RNA, 19 nt, Artificial Sequence
  Description of Artificial Sequence: Synthetic oligonucleotide
aaguucaggugcagcauag

SEQ ID NO: 2095487 - RNA, 19 nt, Artificial Sequence
  Description of Artificial Sequence: Synthetic oligonucleotide
cucagugcuaauuuuccca

SEQ ID NO: 2095488 - RNA, 19 nt, Artificial Sequence
  Description of Artificial Sequence: Synthetic oligonucleotide
gaaaucucucuggauagca

SEQ ID NO: 2095489 - RNA, 19 nt, Artificial Sequence
  Description of Artificial Sequence: Synthetic oligonucleotide
ugguuagggagugaauccc

SEQ ID NO: 2095490 - RNA, 19 nt, Artificial Sequence
  Description of Artificial Sequence: Synthetic oligonucleotide
cccaccuucacacaugugc

SEQ ID NO: 2095491 - RNA, 19 nt, Artificial Sequence
  Description of Artificial Sequence: Synthetic oligonucleotide
ucugcucgaaauggcauug

SEQ ID NO: 2095492 - RNA, 19 nt, Artificial Sequence
  Description of Artificial Sequence: Synthetic oligonucleotide
caugauguagcugauccca

SEQ ID NO: 2095493 - RNA, 19 nt, Artificial Sequence
  Description of Artificial Sequence: Synthetic oligonucleotide
uguuuaggauccaguugga

SEQ ID NO: 2095494 - RNA, 19 nt, Artificial Sequence
  Description of Artificial Sequence: Synthetic oligonucleotide
ggagugaauccccagcuug

SEQ ID NO: 2095495 - RNA, 19 nt, Artificial Sequence
  Description of Artificial Sequence: Synthetic oligonucleotide
auaugggaccccucucauc

SEQ ID NO: 2095496 - RNA, 19 nt, Artificial Sequence
  Description of Artificial Sequence: Synthetic oligonucleotide
uacugguauaaaauacauu

SEQ ID NO: 2095497 - RNA, 19 nt, Artificial Sequence
  Description of Artificial Sequence: Synthetic oligonucleotide
aucccauaccucucuguag

SEQ ID NO: 2095498 - RNA, 19 nt, Artificial Sequence
  Description of Artificial Sequence: Synthetic oligonucleotide
cucccugggguuauuucgg

SEQ ID NO: 2095499 - RNA, 19 nt, Artificial Sequence
  Description of Artificial Sequence: Synthetic oligonucleotide
uggcugaaggacuccucgg

SEQ ID NO: 2095500 - RNA, 19 nt, Artificial Sequence
  Description of Artificial Sequence: Synthetic oligonucleotide
uccucggaugagccggugg

SEQ ID NO: 2095501 - RNA, 19 nt, Artificial Sequence
  Description of Artificial Sequence: Synthetic oligonucleotide
aguuggaaagguuggcaaa

SEQ ID NO: 2095502 - RNA, 19 nt, Artificial Sequence
  Description of Artificial Sequence: Synthetic oligonucleotide
guagggauuggcugaagga

SEQ ID NO: 2095503 - RNA, 19 nt, Artificial Sequence
  Description of Artificial Sequence: Synthetic oligonucleotide
acagaagguguucagcauu

SEQ ID NO: 2095504 - RNA, 19 nt, Artificial Sequence
  Description of Artificial Sequence: Synthetic oligonucleotide
ugcuucacggcggacacga

SEQ ID NO: 2095505 - RNA, 19 nt, Artificial Sequence
  Description of Artificial Sequence: Synthetic oligonucleotide
accagucaccaugaaguac

SEQ ID NO: 2095506 - RNA, 19 nt, Artificial Sequence
  Description of Artificial Sequence: Synthetic oligonucleotide
aggacuccucggaugagcc

SEQ ID NO: 2095507 - RNA, 19 nt, Artificial Sequence
  Description of Artificial Sequence: Synthetic oligonucleotide
gaagccuaugcguuuccca

SEQ ID NO: 2095508 - RNA, 19 nt, Artificial Sequence
  Description of Artificial Sequence: Synthetic oligonucleotide
agccuaugcguuucccacg

SEQ ID NO: 2095509 - RNA, 19 nt, Artificial Sequence
  Description of Artificial Sequence: Synthetic oligonucleotide
cugaaggacuccucggaug

SEQ ID NO: 2095510 - RNA, 19 nt, Artificial Sequence
  Description of Artificial Sequence: Synthetic oligonucleotide
auccacauagacaccaaug

SEQ ID NO: 2095511 - RNA, 19 nt, Artificial Sequence
  Description of Artificial Sequence: Synthetic oligonucleotide
agcugcgagcgucucuccc

SEQ ID NO: 2095512 - RNA, 19 nt, Artificial Sequence
  Description of Artificial Sequence: Synthetic oligonucleotide
augugcuacugguauaaaa

SEQ ID NO: 2095513 - RNA, 19 nt, Artificial Sequence
  Description of Artificial Sequence: Synthetic oligonucleotide
uucuuugcacucgauguaa

SEQ ID NO: 2095514 - RNA, 19 nt, Artificial Sequence
  Description of Artificial Sequence: Synthetic oligonucleotide
uucagaucucugugaauaa

SEQ ID NO: 2095515 - RNA, 19 nt, Artificial Sequence
  Description of Artificial Sequence: Synthetic oligonucleotide
cuggaaaucucucuggaua

SEQ ID NO: 2095516 - RNA, 19 nt, Artificial Sequence
  Description of Artificial Sequence: Synthetic oligonucleotide
cucaucuguaauccccaag

SEQ ID NO: 2095517 - RNA, 19 nt, Artificial Sequence
  Description of Artificial Sequence: Synthetic oligonucleotide
uaauggccaccuuugguua

SEQ ID NO: 2095518 - RNA, 19 nt, Artificial Sequence
  Description of Artificial Sequence: Synthetic oligonucleotide
caucuguaauccccaagug

SEQ ID NO: 2095519 - RNA, 19 nt, Artificial Sequence
  Description of Artificial Sequence: Synthetic oligonucleotide
cugcuuucagaucucugug

SEQ ID NO: 2095520 - RNA, 19 nt, Artificial Sequence
  Description of Artificial Sequence: Synthetic oligonucleotide
uacuuacggugcugaaucc

SEQ ID NO: 2095521 - RNA, 19 nt, Artificial Sequence
  Description of Artificial Sequence: Synthetic oligonucleotide
uucuguagacacccgugau

SEQ ID NO: 2095522 - RNA, 19 nt, Artificial Sequence
  Description of Artificial Sequence: Synthetic oligonucleotide
ggcucugaaacaugcuggg

SEQ ID NO: 2095523 - RNA, 19 nt, Artificial Sequence
  Description of Artificial Sequence: Synthetic oligonucleotide
uccgguucagagagcuucc

SEQ ID NO: 2095524 - RNA, 19 nt, Artificial Sequence
  Description of Artificial Sequence: Synthetic oligonucleotide
ccacucauuauucaugaug

SEQ ID NO: 2095525 - RNA, 19 nt, Artificial Sequence
  Description of Artificial Sequence: Synthetic oligonucleotide
caucucggaaaaguucagg

SEQ ID NO: 2095526 - RNA, 19 nt, Artificial Sequence
  Description of Artificial Sequence: Synthetic oligonucleotide
gaccugggaaaaguuuccg

SEQ ID NO: 2095527 - RNA, 19 nt, Artificial Sequence
  Description of Artificial Sequence: Synthetic oligonucleotide
uuuuacuuacggugcugaa

SEQ ID NO: 2095528 - RNA, 19 nt, Artificial Sequence
  Description of Artificial Sequence: Synthetic oligonucleotide
auuucgguauaugcucauc

SEQ ID NO: 2095529 - RNA, 19 nt, Artificial Sequence
  Description of Artificial Sequence: Synthetic oligonucleotide
uccgaucucuccucgaauu

SEQ ID NO: 2095530 - RNA, 19 nt, Artificial Sequence
  Description of Artificial Sequence: Synthetic oligonucleotide
gacuucguaaaggcggaug

SEQ ID NO: 2095531 - RNA, 19 nt, Artificial Sequence
  Description of Artificial Sequence: Synthetic oligonucleotide
ucuccacgacuucguaaag

SEQ ID NO: 2095532 - RNA, 19 nt, Artificial Sequence
  Description of Artificial Sequence: Synthetic oligonucleotide
ugaucccauaccucucugu

SEQ ID NO: 2095533 - RNA, 19 nt, Artificial Sequence
  Description of Artificial Sequence: Synthetic oligonucleotide
ucuuugcacucgauguaaa

SEQ ID NO: 2095534 - RNA, 19 nt, Artificial Sequence
  Description of Artificial Sequence: Synthetic oligonucleotide
uuccccucagugcuaauuu

SEQ ID NO: 2095535 - RNA, 19 nt, Artificial Sequence
  Description of Artificial Sequence: Synthetic oligonucleotide
gugauccucccucaccacc

SEQ ID NO: 2095536 - RNA, 19 nt, Artificial Sequence
  Description of Artificial Sequence: Synthetic oligonucleotide
uagaagccuaugcguuucc

SEQ ID NO: 2095537 - RNA, 19 nt, Artificial Sequence
  Description of Artificial Sequence: Synthetic oligonucleotide
auuguaccagucaccauga

SEQ ID NO: 2095538 - RNA, 19 nt, Artificial Sequence
  Description of Artificial Sequence: Synthetic oligonucleotide
acaugugcuacugguauaa

SEQ ID NO: 2095539 - RNA, 19 nt, Artificial Sequence
  Description of Artificial Sequence: Synthetic oligonucleotide
ucuccucgaauucgauaga

SEQ ID NO: 2095540 - RNA, 19 nt, Artificial Sequence
  Description of Artificial Sequence: Synthetic oligonucleotide
ucggaugagccgguggcag

SEQ ID NO: 2095541 - RNA, 19 nt, Artificial Sequence
  Description of Artificial Sequence: Synthetic oligonucleotide
cauuauucaugauguagcu

SEQ ID NO: 2095542 - RNA, 19 nt, Artificial Sequence
  Description of Artificial Sequence: Synthetic oligonucleotide
guaugcuguagguacccuc

SEQ ID NO: 2095543 - RNA, 19 nt, Artificial Sequence
  Description of Artificial Sequence: Synthetic oligonucleotide
ccagauauccacauagaca

SEQ ID NO: 2095544 - RNA, 19 nt, Artificial Sequence
  Description of Artificial Sequence: Synthetic oligonucleotide
gaaauggcauuguaccagu

SEQ ID NO: 2095545 - RNA, 19 nt, Artificial Sequence
  Description of Artificial Sequence: Synthetic oligonucleotide
uggucuaacuuggucuugu

SEQ ID NO: 2095546 - RNA, 19 nt, Artificial Sequence
  Description of Artificial Sequence: Synthetic oligonucleotide
gugcuaauuuucccaaaga

SEQ ID NO: 2095547 - RNA, 19 nt, Artificial Sequence
  Description of Artificial Sequence: Synthetic oligonucleotide
cuucacacaugugcuacug

SEQ ID NO: 2095548 - RNA, 19 nt, Artificial Sequence
  Description of Artificial Sequence: Synthetic oligonucleotide
uucugcucgaaauggcauu

SEQ ID NO: 2095549 - RNA, 19 nt, Artificial Sequence
  Description of Artificial Sequence: Synthetic oligonucleotide
ugcucgaaauggcauugua

SEQ ID NO: 2095550 - RNA, 19 nt, Artificial Sequence
  Description of Artificial Sequence: Synthetic oligonucleotide
ugauguagcugaucccaua

SEQ ID NO: 2095551 - RNA, 19 nt, Artificial Sequence
  Description of Artificial Sequence: Synthetic oligonucleotide
uaccucucuguagggauug

SEQ ID NO: 2095552 - RNA, 19 nt, Artificial Sequence
  Description of Artificial Sequence: Synthetic oligonucleotide
gugaauccccagcuugacc

SEQ ID NO: 2095553 - RNA, 19 nt, Artificial Sequence
  Description of Artificial Sequence: Synthetic oligonucleotide
cugaauccaaaaucuccca

SEQ ID NO: 2095554 - RNA, 19 nt, Artificial Sequence
  Description of Artificial Sequence: Synthetic oligonucleotide
ucucuccucgaauucgaua

SEQ ID NO: 2095555 - RNA, 19 nt, Artificial Sequence
  Description of Artificial Sequence: Synthetic oligonucleotide
caaauguuuaggauccagu

SEQ ID NO: 2095556 - RNA, 19 nt, Artificial Sequence
  Description of Artificial Sequence: Synthetic oligonucleotide
ugauggagcugcgagcguc

SEQ ID NO: 2095557 - RNA, 19 nt, Artificial Sequence
  Description of Artificial Sequence: Synthetic oligonucleotide
cuguagguacccucaagga

SEQ ID NO: 2095558 - RNA, 19 nt, Artificial Sequence
  Description of Artificial Sequence: Synthetic oligonucleotide
cucgauguaaaaugauucu

SEQ ID NO: 2095559 - RNA, 19 nt, Artificial Sequence
  Description of Artificial Sequence: Synthetic oligonucleotide
gaauccccagcuugaccug

SEQ ID NO: 2095560 - RNA, 19 nt, Artificial Sequence
  Description of Artificial Sequence: Synthetic oligonucleotide
ggaaaaguuuccgcuuccg

SEQ ID NO: 2095561 - RNA, 19 nt, Artificial Sequence
  Description of Artificial Sequence: Synthetic oligonucleotide
uuacggugcugaauccaaa

SEQ ID NO: 2095562 - RNA, 19 nt, Artificial Sequence
  Description of Artificial Sequence: Synthetic oligonucleotide
aguucaggugcagcauagg

SEQ ID NO: 2095563 - RNA, 19 nt, Artificial Sequence
  Description of Artificial Sequence: Synthetic oligonucleotide
agacccacagaagguguuc

SEQ ID NO: 2095564 - RNA, 19 nt, Artificial Sequence
  Description of Artificial Sequence: Synthetic oligonucleotide
gaugagcuugcuuuccggu

SEQ ID NO: 2095565 - RNA, 19 nt, Artificial Sequence
  Description of Artificial Sequence: Synthetic oligonucleotide
acuuacggugcugaaucca

SEQ ID NO: 2095566 - RNA, 19 nt, Artificial Sequence
  Description of Artificial Sequence: Synthetic oligonucleotide
ccccaaguguucuaaagug

SEQ ID NO: 2095567 - RNA, 19 nt, Artificial Sequence
  Description of Artificial Sequence: Synthetic oligonucleotide
ccagucaccaugaaguaca

SEQ ID NO: 2095568 - RNA, 19 nt, Artificial Sequence
  Description of Artificial Sequence: Synthetic oligonucleotide
cuuacggugcugaauccaa

SEQ ID NO: 2095569 - RNA, 19 nt, Artificial Sequence
  Description of Artificial Sequence: Synthetic oligonucleotide
gcuacugguauaaaauaca

SEQ ID NO: 2095570 - RNA, 19 nt, Artificial Sequence
  Description of Artificial Sequence: Synthetic oligonucleotide
gugcuacugguauaaaaua

SEQ ID NO: 2095571 - RNA, 19 nt, Artificial Sequence
  Description of Artificial Sequence: Synthetic oligonucleotide
agggauuggcugaaggacu

SEQ ID NO: 2095572 - RNA, 19 nt, Artificial Sequence
  Description of Artificial Sequence: Synthetic oligonucleotide
uucccacgcgugauccucc

SEQ ID NO: 2095573 - RNA, 19 nt, Artificial Sequence
  Description of Artificial Sequence: Synthetic oligonucleotide
uuucccacgcgugauccuc

SEQ ID NO: 2095574 - RNA, 19 nt, Artificial Sequence
  Description of Artificial Sequence: Synthetic oligonucleotide
caguuggaaagguuggcaa

SEQ ID NO: 2095575 - RNA, 19 nt, Artificial Sequence
  Description of Artificial Sequence: Synthetic oligonucleotide
acggcggacacgaucuggg

SEQ ID NO: 2095576 - RNA, 19 nt, Artificial Sequence
  Description of Artificial Sequence: Synthetic oligonucleotide
gguauaugcucaucuguaa

SEQ ID NO: 2095577 - RNA, 19 nt, Artificial Sequence
  Description of Artificial Sequence: Synthetic oligonucleotide
augagcuugcuuuccgguu

SEQ ID NO: 2095578 - RNA, 19 nt, Artificial Sequence
  Description of Artificial Sequence: Synthetic oligonucleotide
gagugaauccccagcuuga

SEQ ID NO: 2095579 - RNA, 19 nt, Artificial Sequence
  Description of Artificial Sequence: Synthetic oligonucleotide
uguagacacccgugaugga

SEQ ID NO: 2095580 - RNA, 19 nt, Artificial Sequence
  Description of Artificial Sequence: Synthetic oligonucleotide
augcguuucccacgcguga

SEQ ID NO: 2095581 - RNA, 19 nt, Artificial Sequence
  Description of Artificial Sequence: Synthetic oligonucleotide
augauucuguagacacccg

SEQ ID NO: 2095582 - RNA, 19 nt, Artificial Sequence
  Description of Artificial Sequence: Synthetic oligonucleotide
gauagaagccuaugcguuu

SEQ ID NO: 2095583 - RNA, 19 nt, Artificial Sequence
  Description of Artificial Sequence: Synthetic oligonucleotide
agacacccgugauggagcu

SEQ ID NO: 2095584 - RNA, 19 nt, Artificial Sequence
  Description of Artificial Sequence: Synthetic oligonucleotide
acucauuauucaugaugua

SEQ ID NO: 2095585 - RNA, 19 nt, Artificial Sequence
  Description of Artificial Sequence: Synthetic oligonucleotide
uuuggguuuucuggucuaa

SEQ ID NO: 2095586 - RNA, 19 nt, Artificial Sequence
  Description of Artificial Sequence: Synthetic oligonucleotide
gucuuguccagaaucuuaa

SEQ ID NO: 2095587 - RNA, 19 nt, Artificial Sequence
  Description of Artificial Sequence: Synthetic oligonucleotide
cuuugcacucgauguaaaa

SEQ ID NO: 2095588 - RNA, 19 nt, Artificial Sequence
  Description of Artificial Sequence: Synthetic oligonucleotide
uucuucgaggcugcuggcu

SEQ ID NO: 2095589 - RNA, 19 nt, Artificial Sequence
  Description of Artificial Sequence: Synthetic oligonucleotide
auguaguguucaucucgga

SEQ ID NO: 2095590 - RNA, 19 nt, Artificial Sequence
  Description of Artificial Sequence: Synthetic oligonucleotide
guagcugaucccauaccuc

SEQ ID NO: 2095591 - RNA, 19 nt, Artificial Sequence
  Description of Artificial Sequence: Synthetic oligonucleotide
cauaggguggagacccaca

SEQ ID NO: 2095592 - RNA, 19 nt, Artificial Sequence
  Description of Artificial Sequence: Synthetic oligonucleotide
ugcuggcuucugacaaaug

SEQ ID NO: 2095593 - RNA, 19 nt, Artificial Sequence
  Description of Artificial Sequence: Synthetic oligonucleotide
gguucagagagcuuccccu

SEQ ID NO: 2095594 - RNA, 19 nt, Artificial Sequence
  Description of Artificial Sequence: Synthetic oligonucleotide
uccacucauuauucaugau

SEQ ID NO: 2095595 - RNA, 19 nt, Artificial Sequence
  Description of Artificial Sequence: Synthetic oligonucleotide
gguuagggagugaaucccc

SEQ ID NO: 2095596 - RNA, 19 nt, Artificial Sequence
  Description of Artificial Sequence: Synthetic oligonucleotide
cgugauggagcugcgagcg

SEQ ID NO: 2095597 - RNA, 19 nt, Artificial Sequence
  Description of Artificial Sequence: Synthetic oligonucleotide
guuagggagugaaucccca

SEQ ID NO: 2095598 - RNA, 19 nt, Artificial Sequence
  Description of Artificial Sequence: Synthetic oligonucleotide
ugagccgguggcagggcuc

SEQ ID NO: 2095599 - RNA, 19 nt, Artificial Sequence
  Description of Artificial Sequence: Synthetic oligonucleotide
acgcgugauccucccucac

SEQ ID NO: 2095600 - RNA, 19 nt, Artificial Sequence
  Description of Artificial Sequence: Synthetic oligonucleotide
gccuaugcguuucccacgc

SEQ ID NO: 2095601 - RNA, 19 nt, Artificial Sequence
  Description of Artificial Sequence: Synthetic oligonucleotide
ugggguuauuucgguauau

SEQ ID NO: 2095602 - RNA, 19 nt, Artificial Sequence
  Description of Artificial Sequence: Synthetic oligonucleotide
cuucgaggcugcuggcuuc

SEQ ID NO: 2095603 - RNA, 19 nt, Artificial Sequence
  Description of Artificial Sequence: Synthetic oligonucleotide
cucucuguagggauuggcu

SEQ ID NO: 2095604 - RNA, 19 nt, Artificial Sequence
  Description of Artificial Sequence: Synthetic oligonucleotide
agcugaucccauaccucuc

SEQ ID NO: 2095605 - RNA, 19 nt, Artificial Sequence
  Description of Artificial Sequence: Synthetic oligonucleotide
auguuggggugguguagcu

SEQ ID NO: 2095606 - RNA, 19 nt, Artificial Sequence
  Description of Artificial Sequence: Synthetic oligonucleotide
gcucgaaauggcauuguac

SEQ ID NO: 2095607 - RNA, 19 nt, Artificial Sequence
  Description of Artificial Sequence: Synthetic oligonucleotide
gaaggacuccucggaugag

SEQ ID NO: 2095608 - RNA, 19 nt, Artificial Sequence
  Description of Artificial Sequence: Synthetic oligonucleotide
ucaccaaguggagcuugga

SEQ ID NO: 2095609 - RNA, 19 nt, Artificial Sequence
  Description of Artificial Sequence: Synthetic oligonucleotide
ugcgagcgucucucccugg

SEQ ID NO: 2095610 - RNA, 19 nt, Artificial Sequence
  Description of Artificial Sequence: Synthetic oligonucleotide
ucccugggguuauuucggu

SEQ ID NO: 2095611 - RNA, 19 nt, Artificial Sequence
  Description of Artificial Sequence: Synthetic oligonucleotide
aggauccaguuggaaaggu

SEQ ID NO: 2095612 - RNA, 19 nt, Artificial Sequence
  Description of Artificial Sequence: Synthetic oligonucleotide
caccuuugguuagggagug

SEQ ID NO: 2095613 - RNA, 19 nt, Artificial Sequence
  Description of Artificial Sequence: Synthetic oligonucleotide
cuuuaguuuggccacuguu

SEQ ID NO: 2095614 - RNA, 19 nt, Artificial Sequence
  Description of Artificial Sequence: Synthetic oligonucleotide
acgacuucguaaaggcgga

SEQ ID NO: 2095615 - RNA, 19 nt, Artificial Sequence
  Description of Artificial Sequence: Synthetic oligonucleotide
ccacgacuucguaaaggcg

SEQ ID NO: 2095616 - RNA, 19 nt, Artificial Sequence
  Description of Artificial Sequence: Synthetic oligonucleotide
cccgugauggagcugcgag

SEQ ID NO: 2095617 - RNA, 19 nt, Artificial Sequence
  Description of Artificial Sequence: Synthetic oligonucleotide
uccccucagugcuaauuuu

SEQ ID NO: 2095618 - RNA, 19 nt, Artificial Sequence
  Description of Artificial Sequence: Synthetic oligonucleotide
ccucggaugagccgguggc

SEQ ID NO: 2095619 - RNA, 19 nt, Artificial Sequence
  Description of Artificial Sequence: Synthetic oligonucleotide
cuuccgaucucuccucgaa

SEQ ID NO: 2095620 - RNA, 19 nt, Artificial Sequence
  Description of Artificial Sequence: Synthetic oligonucleotide
gguacccucaaggaugcuc

SEQ ID NO: 2095621 - RNA, 19 nt, Artificial Sequence
  Description of Artificial Sequence: Synthetic oligonucleotide
ugcguuucccacgcgugau

SEQ ID NO: 2095622 - RNA, 19 nt, Artificial Sequence
  Description of Artificial Sequence: Synthetic oligonucleotide
cuuuccgguucagagagcu

SEQ ID NO: 2095623 - RNA, 19 nt, Artificial Sequence
  Description of Artificial Sequence: Synthetic oligonucleotide
gacaaauguuuaggaucca

SEQ ID NO: 2095624 - RNA, 19 nt, Artificial Sequence
  Description of Artificial Sequence: Synthetic oligonucleotide
cacucgauguaaaaugauu

SEQ ID NO: 2095625 - RNA, 19 nt, Artificial Sequence
  Description of Artificial Sequence: Synthetic oligonucleotide
gggguuauuucgguauaug

SEQ ID NO: 2095626 - RNA, 19 nt, Artificial Sequence
  Description of Artificial Sequence: Synthetic oligonucleotide
ucacggcggacacgaucug

SEQ ID NO: 2095627 - RNA, 19 nt, Artificial Sequence
  Description of Artificial Sequence: Synthetic oligonucleotide
cacacaugugcuacuggua

SEQ ID NO: 2095628 - RNA, 19 nt, Artificial Sequence
  Description of Artificial Sequence: Synthetic oligonucleotide
auagcagccuuuggguuuu

SEQ ID NO: 2095629 - RNA, 19 nt, Artificial Sequence
  Description of Artificial Sequence: Synthetic oligonucleotide
aaagugcuuuucaccucau

SEQ ID NO: 2095630 - RNA, 19 nt, Artificial Sequence
  Description of Artificial Sequence: Synthetic oligonucleotide
ucccacgcgugauccuccc

SEQ ID NO: 2095631 - RNA, 19 nt, Artificial Sequence
  Description of Artificial Sequence: Synthetic oligonucleotide
gcgugauccucccucacca

SEQ ID NO: 2095632 - RNA, 19 nt, Artificial Sequence
  Description of Artificial Sequence: Synthetic oligonucleotide
caccucauuuucuucuucu

SEQ ID NO: 2095633 - RNA, 19 nt, Artificial Sequence
  Description of Artificial Sequence: Synthetic oligonucleotide
gauuggcugaaggacuccu

SEQ ID NO: 2095634 - RNA, 19 nt, Artificial Sequence
  Description of Artificial Sequence: Synthetic oligonucleotide
cugcgagcgucucucccug

SEQ ID NO: 2095635 - RNA, 19 nt, Artificial Sequence
  Description of Artificial Sequence: Synthetic oligonucleotide
uccccagcuugaccuggga

SEQ ID NO: 2095636 - RNA, 19 nt, Artificial Sequence
  Description of Artificial Sequence: Synthetic oligonucleotide
gcucugaaacaugcugggg

SEQ ID NO: 2095637 - RNA, 19 nt, Artificial Sequence
  Description of Artificial Sequence: Synthetic oligonucleotide
cuaugcguuucccacgcgu

SEQ ID NO: 2095638 - RNA, 19 nt, Artificial Sequence
  Description of Artificial Sequence: Synthetic oligonucleotide
ggguaugcuguagguaccc

SEQ ID NO: 2095639 - RNA, 19 nt, Artificial Sequence
  Description of Artificial Sequence: Synthetic oligonucleotide
uuuccgguucagagagcuu

SEQ ID NO: 2095640 - RNA, 19 nt, Artificial Sequence
  Description of Artificial Sequence: Synthetic oligonucleotide
cuuuggguuuucuggucua

SEQ ID NO: 2095641 - RNA, 19 nt, Artificial Sequence
  Description of Artificial Sequence: Synthetic oligonucleotide
cggugcugaauccaaaauc

SEQ ID NO: 2095642 - RNA, 19 nt, Artificial Sequence
  Description of Artificial Sequence: Synthetic oligonucleotide
gcgagcgucucucccuggg

SEQ ID NO: 2095643 - RNA, 19 nt, Artificial Sequence
  Description of Artificial Sequence: Synthetic oligonucleotide
ggagcugcgagcgucucuc

SEQ ID NO: 2095644 - RNA, 19 nt, Artificial Sequence
  Description of Artificial Sequence: Synthetic oligonucleotide
cccauaccucucuguaggg

SEQ ID NO: 2095645 - RNA, 19 nt, Artificial Sequence
  Description of Artificial Sequence: Synthetic oligonucleotide
guaauccccaaguguucua

SEQ ID NO: 2095646 - RNA, 19 nt, Artificial Sequence
  Description of Artificial Sequence: Synthetic oligonucleotide
agcgucucucccugggguu

SEQ ID NO: 2095647 - RNA, 19 nt, Artificial Sequence
  Description of Artificial Sequence: Synthetic oligonucleotide
cuccugcauacuccaucac

SEQ ID NO: 2095648 - RNA, 19 nt, Artificial Sequence
  Description of Artificial Sequence: Synthetic oligonucleotide
augggaccccucucaucca

SEQ ID NO: 2095649 - RNA, 19 nt, Artificial Sequence
  Description of Artificial Sequence: Synthetic oligonucleotide
cuggucuaacuuggucuug

SEQ ID NO: 2095650 - RNA, 19 nt, Artificial Sequence
  Description of Artificial Sequence: Synthetic oligonucleotide
cuccucgaauucgauagaa

SEQ ID NO: 2095651 - RNA, 19 nt, Artificial Sequence
  Description of Artificial Sequence: Synthetic oligonucleotide
cgaucucuccucgaauucg

SEQ ID NO: 2095652 - RNA, 19 nt, Artificial Sequence
  Description of Artificial Sequence: Synthetic oligonucleotide
gaauucgauagaagccuau

SEQ ID NO: 2095653 - RNA, 19 nt, Artificial Sequence
  Description of Artificial Sequence: Synthetic oligonucleotide
gagcugcgagcgucucucc

SEQ ID NO: 2095654 - RNA, 19 nt, Artificial Sequence
  Description of Artificial Sequence: Synthetic oligonucleotide
uuggggugguguagcuuuu

SEQ ID NO: 2095655 - RNA, 19 nt, Artificial Sequence
  Description of Artificial Sequence: Synthetic oligonucleotide
ccugggaaaaguuuccgcu

SEQ ID NO: 2095656 - RNA, 19 nt, Artificial Sequence
  Description of Artificial Sequence: Synthetic oligonucleotide
ccuccugcauacuccauca

SEQ ID NO: 2095657 - RNA, 19 nt, Artificial Sequence
  Description of Artificial Sequence: Synthetic oligonucleotide
cagcuugaccugggaaaag

SEQ ID NO: 2095658 - RNA, 19 nt, Artificial Sequence
  Description of Artificial Sequence: Synthetic oligonucleotide
gcagcauaggguggagacc

SEQ ID NO: 2095659 - RNA, 19 nt, Artificial Sequence
  Description of Artificial Sequence: Synthetic oligonucleotide
ccgugauggagcugcgagc

SEQ ID NO: 2095660 - RNA, 19 nt, Artificial Sequence
  Description of Artificial Sequence: Synthetic oligonucleotide
guguucagcauuucaccuu

SEQ ID NO: 2095661 - RNA, 19 nt, Artificial Sequence
  Description of Artificial Sequence: Synthetic oligonucleotide
cacaugugcuacugguaua

SEQ ID NO: 2095662 - RNA, 19 nt, Artificial Sequence
  Description of Artificial Sequence: Synthetic oligonucleotide
ggucuccacgacuucguaa

SEQ ID NO: 2095663 - RNA, 19 nt, Artificial Sequence
  Description of Artificial Sequence: Synthetic oligonucleotide
cacgcgugauccucccuca

SEQ ID NO: 2095664 - RNA, 19 nt, Artificial Sequence
  Description of Artificial Sequence: Synthetic oligonucleotide
ggucuaacuuggucuuguc

SEQ ID NO: 2095665 - RNA, 19 nt, Artificial Sequence
  Description of Artificial Sequence: Synthetic oligonucleotide
gggguaugcuguagguacc

SEQ ID NO: 2095666 - RNA, 19 nt, Artificial Sequence
  Description of Artificial Sequence: Synthetic oligonucleotide
cacccgugauggagcugcg

SEQ ID NO: 2095667 - RNA, 19 nt, Artificial Sequence
  Description of Artificial Sequence: Synthetic oligonucleotide
cagugcuaauuuucccaaa

SEQ ID NO: 2095668 - RNA, 19 nt, Artificial Sequence
  Description of Artificial Sequence: Synthetic oligonucleotide
auaccucucuguagggauu

SEQ ID NO: 2095669 - RNA, 19 nt, Artificial Sequence
  Description of Artificial Sequence: Synthetic oligonucleotide
cugggaaaaguuuccgcuu

SEQ ID NO: 2095670 - RNA, 19 nt, Artificial Sequence
  Description of Artificial Sequence: Synthetic oligonucleotide
gauggagcugcgagcgucu

SEQ ID NO: 2095671 - RNA, 19 nt, Artificial Sequence
  Description of Artificial Sequence: Synthetic oligonucleotide
uggggugguguagcuuuuc

SEQ ID NO: 2095672 - RNA, 19 nt, Artificial Sequence
  Description of Artificial Sequence: Synthetic oligonucleotide
ggauuggcugaaggacucc

SEQ ID NO: 2095673 - RNA, 19 nt, Artificial Sequence
  Description of Artificial Sequence: Synthetic oligonucleotide
cguuucccacgcgugaucc

SEQ ID NO: 2095674 - RNA, 19 nt, Artificial Sequence
  Description of Artificial Sequence: Synthetic oligonucleotide
cuguagggauuggcugaag

SEQ ID NO: 2095675 - RNA, 19 nt, Artificial Sequence
  Description of Artificial Sequence: Synthetic oligonucleotide
agcuuccccucagugcuaa

SEQ ID NO: 2095676 - RNA, 19 nt, Artificial Sequence
  Description of Artificial Sequence: Synthetic oligonucleotide
gacacccgugauggagcug

SEQ ID NO: 2095677 - RNA, 19 nt, Artificial Sequence
  Description of Artificial Sequence: Synthetic oligonucleotide
cacagaagguguucagcau

SEQ ID NO: 2095678 - RNA, 19 nt, Artificial Sequence
  Description of Artificial Sequence: Synthetic oligonucleotide
ccacgcgugauccucccuc

SEQ ID NO: 2095679 - RNA, 19 nt, Artificial Sequence
  Description of Artificial Sequence: Synthetic oligonucleotide
cugggguuauuucgguaua

SEQ ID NO: 2095680 - RNA, 19 nt, Artificial Sequence
  Description of Artificial Sequence: Synthetic oligonucleotide
cccuccugcauacuccauc

SEQ ID NO: 2095681 - RNA, 19 nt, Artificial Sequence
  Description of Artificial Sequence: Synthetic oligonucleotide
ccgaucucuccucgaauuc

SEQ ID NO: 2095682 - RNA, 19 nt, Artificial Sequence
  Description of Artificial Sequence: Synthetic oligonucleotide
gcugaucccauaccucucu

SEQ ID NO: 2095683 - RNA, 19 nt, Artificial Sequence
  Description of Artificial Sequence: Synthetic oligonucleotide
ccaguuggaaagguuggca

SEQ ID NO: 2095684 - RNA, 19 nt, Artificial Sequence
  Description of Artificial Sequence: Synthetic oligonucleotide
caugugcuucacggcggac

SEQ ID NO: 2095685 - RNA, 19 nt, Artificial Sequence
  Description of Artificial Sequence: Synthetic oligonucleotide
agcuugcuuuccgguucag

SEQ ID NO: 2095686 - RNA, 19 nt, Artificial Sequence
  Description of Artificial Sequence: Synthetic oligonucleotide
cucggaugagccgguggca

SEQ ID NO: 2095687 - RNA, 19 nt, Artificial Sequence
  Description of Artificial Sequence: Synthetic oligonucleotide
gcaugugcuucacggcgga

SEQ ID NO: 2095688 - RNA, 19 nt, Artificial Sequence
  Description of Artificial Sequence: Synthetic oligonucleotide
cgguucagagagcuucccc

SEQ ID NO: 2095689 - RNA, 19 nt, Artificial Sequence
  Description of Artificial Sequence: Synthetic oligonucleotide
gcauaggguggagacccac

SEQ ID NO: 2095690 - RNA, 19 nt, Artificial Sequence
  Description of Artificial Sequence: Synthetic oligonucleotide
ccugggguuauuucgguau

SEQ ID NO: 2095691 - RNA, 19 nt, Artificial Sequence
  Description of Artificial Sequence: Synthetic oligonucleotide
ccuaugcguuucccacgcg

SEQ ID NO: 2095692 - RNA, 19 nt, Artificial Sequence
  Description of Artificial Sequence: Synthetic oligonucleotide
cgguauaugcucaucugua

SEQ ID NO: 2095693 - RNA, 19 nt, Artificial Sequence
  Description of Artificial Sequence: Synthetic oligonucleotide
agcauaggguggagaccca

SEQ ID NO: 2095694 - RNA, 19 nt, Artificial Sequence
  Description of Artificial Sequence: Synthetic oligonucleotide
cuucuuuaguuuggccacu

SEQ ID NO: 2095695 - RNA, 19 nt, Artificial Sequence
  Description of Artificial Sequence: Synthetic oligonucleotide
guuucccacgcgugauccu

SEQ ID NO: 2095696 - RNA, 19 nt, Artificial Sequence
  Description of Artificial Sequence: Synthetic oligonucleotide
cgcgugauccucccucacc

SEQ ID NO: 2095697 - RNA, 19 nt, Artificial Sequence
  Description of Artificial Sequence: Synthetic oligonucleotide
gcuuccgaucucuccucga

SEQ ID NO: 2095698 - RNA, 19 nt, Artificial Sequence
  Description of Artificial Sequence: Synthetic oligonucleotide
gugggauaugggaccccuc

SEQ ID NO: 2095699 - RNA, 19 nt, Artificial Sequence
  Description of Artificial Sequence: Synthetic oligonucleotide
caugugcuacugguauaaa

SEQ ID NO: 2095700 - RNA, 19 nt, Artificial Sequence
  Description of Artificial Sequence: Synthetic oligonucleotide
acuccucggaugagccggu

SEQ ID NO: 2095701 - RNA, 19 nt, Artificial Sequence
  Description of Artificial Sequence: Synthetic oligonucleotide
acccgugauggagcugcga

SEQ ID NO: 2095702 - RNA, 19 nt, Artificial Sequence
  Description of Artificial Sequence: Synthetic oligonucleotide
gcugaaggacuccucggau

SEQ ID NO: 2095703 - RNA, 19 nt, Artificial Sequence
  Description of Artificial Sequence: Synthetic oligonucleotide
ggcaaaggggugggauaug

SEQ ID NO: 2095704 - RNA, 19 nt, Artificial Sequence
  Description of Artificial Sequence: Synthetic oligonucleotide
gcugcgagcgucucucccu

SEQ ID NO: 2095705 - RNA, 19 nt, Artificial Sequence
  Description of Artificial Sequence: Synthetic oligonucleotide
gcucaucuguaauccccaa

SEQ ID NO: 2095706 - RNA, 19 nt, Artificial Sequence
  Description of Artificial Sequence: Synthetic oligonucleotide
ggugggauaugggaccccu

SEQ ID NO: 2095707 - RNA, 19 nt, Artificial Sequence
  Description of Artificial Sequence: Synthetic oligonucleotide
gagacccacagaagguguu

SEQ ID NO: 2095708 - RNA, 19 nt, Artificial Sequence
  Description of Artificial Sequence: Synthetic oligonucleotide
ccuuuggguuuucuggucu

SEQ ID NO: 2095709 - RNA, 19 nt, Artificial Sequence
  Description of Artificial Sequence: Synthetic oligonucleotide
cuucguaaaggcggaugau

SEQ ID NO: 2095710 - RNA, 19 nt, Artificial Sequence
  Description of Artificial Sequence: Synthetic oligonucleotide
cgcuuccgaucucuccucg

SEQ ID NO: 2095711 - RNA, 19 nt, Artificial Sequence
  Description of Artificial Sequence: Synthetic oligonucleotide
cugaaacaugcugggguau

SEQ ID NO: 2095712 - RNA, 19 nt, Artificial Sequence
  Description of Artificial Sequence: Synthetic oligonucleotide
gcguuucccacgcgugauc

SEQ ID NO: 2095713 - RNA, 19 nt, Artificial Sequence
  Description of Artificial Sequence: Synthetic oligonucleotide
ccauaccucucuguaggga

SEQ ID NO: 2095714 - RNA, 19 nt, Artificial Sequence
  Description of Artificial Sequence: Synthetic oligonucleotide
cuuccccucagugcuaauu

SEQ ID NO: 2095715 - RNA, 19 nt, Artificial Sequence
  Description of Artificial Sequence: Synthetic oligonucleotide
cuccucggaugagccggug

SEQ ID NO: 2095716 - RNA, 19 nt, Artificial Sequence
  Description of Artificial Sequence: Synthetic oligonucleotide
ccgguucagagagcuuccc

SEQ ID NO: 2095717 - RNA, 19 nt, Artificial Sequence
  Description of Artificial Sequence: Synthetic oligonucleotide
gugauggagcugcgagcgu

SEQ ID NO: 2095718 - RNA, 19 nt, Artificial Sequence
  Description of Artificial Sequence: Synthetic oligonucleotide
cggaaaaguucaggugcag

SEQ ID NO: 2095719 - RNA, 19 nt, Artificial Sequence
  Description of Artificial Sequence: Synthetic oligonucleotide
cgauagaagccuaugcguu

SEQ ID NO: 2095720 - RNA, 19 nt, Artificial Sequence
  Description of Artificial Sequence: Synthetic oligonucleotide
cgugauccucccucaccac

SEQ ID NO: 2095721 - RNA, 19 nt, Artificial Sequence
  Description of Artificial Sequence: Synthetic oligonucleotide
cugcuggcuucugacaaau

SEQ ID NO: 2095722 - RNA, 19 nt, Artificial Sequence
  Description of Artificial Sequence: Synthetic oligonucleotide
gcuuuccgguucagagagc

SEQ ID NO: 2095723 - RNA, 19 nt, Artificial Sequence
  Description of Artificial Sequence: Synthetic oligonucleotide
cgaauucgauagaagccua

SEQ ID NO: 2095724 - RNA, 19 nt, Artificial Sequence
  Description of Artificial Sequence: Synthetic oligonucleotide
ccgcuuccgaucucuccuc

SEQ ID NO: 2095725 - RNA, 19 nt, Artificial Sequence
  Description of Artificial Sequence: Synthetic oligonucleotide
cccucucauccacucauua

SEQ ID NO: 2095726 - RNA, 19 nt, Artificial Sequence
  Description of Artificial Sequence: Synthetic oligonucleotide
ggccacuguuucugcucga

SEQ ID NO: 2095727 - RNA, 19 nt, Artificial Sequence
  Description of Artificial Sequence: Synthetic oligonucleotide
ccacuguuucugcucgaaa

SEQ ID NO: 2095728 - RNA, 19 nt, Artificial Sequence
  Description of Artificial Sequence: Synthetic oligonucleotide
ggauccaguuggaaagguu

SEQ ID NO: 2095729 - RNA, 19 nt, Artificial Sequence
  Description of Artificial Sequence: Synthetic oligonucleotide
gcacucgauguaaaaugau

SEQ ID NO: 2095730 - RNA, 19 nt, Artificial Sequence
  Description of Artificial Sequence: Synthetic oligonucleotide
cugcucgaaauggcauugu

SEQ ID NO: 2095731 - RNA, 19 nt, Artificial Sequence
  Description of Artificial Sequence: Synthetic oligonucleotide
gccgguggcagggcucuga

SEQ ID NO: 2095732 - RNA, 19 nt, Artificial Sequence
  Description of Artificial Sequence: Synthetic oligonucleotide
cccugggguuauuucggua

SEQ ID NO: 2095733 - RNA, 19 nt, Artificial Sequence
  Description of Artificial Sequence: Synthetic oligonucleotide
agccgguggcagggcucug

SEQ ID NO: 2095734 - RNA, 19 nt, Artificial Sequence
  Description of Artificial Sequence: Synthetic oligonucleotide
gcgucucucccugggguua

SEQ ID NO: 2095735 - RNA, 19 nt, Artificial Sequence
  Description of Artificial Sequence: Synthetic oligonucleotide
cggcggacacgaucuggga

SEQ ID NO: 2095736 - RNA, 19 nt, Artificial Sequence
  Description of Artificial Sequence: Synthetic oligonucleotide
cggacacgaucugggagaa

SEQ ID NO: 2095737 - RNA, 19 nt, Artificial Sequence
  Description of Artificial Sequence: Synthetic oligonucleotide
gcuuccccucagugcuaau

SEQ ID NO: 2095738 - RNA, 19 nt, Artificial Sequence
  Description of Artificial Sequence: Synthetic oligonucleotide
ccccucucauccacucauu

SEQ ID NO: 2095739 - RNA, 19 nt, Artificial Sequence
  Description of Artificial Sequence: Synthetic oligonucleotide
cccacgcgugauccucccu

SEQ ID NO: 2095740 - RNA, 19 nt, Artificial Sequence
  Description of Artificial Sequence: Synthetic oligonucleotide
cgacuucguaaaggcggau

SEQ ID NO: 2095741 - RNA, 19 nt, Artificial Sequence
  Description of Artificial Sequence: Synthetic oligonucleotide
aagggguucaaauuaaggc

SEQ ID NO: 2095742 - RNA, 19 nt, Artificial Sequence
  Description of Artificial Sequence: Synthetic oligonucleotide
aauuucauaacuuuggcau

SEQ ID NO: 2095743 - RNA, 19 nt, Artificial Sequence
  Description of Artificial Sequence: Synthetic oligonucleotide
aauaauuucauaacuuugg

SEQ ID NO: 2095744 - RNA, 19 nt, Artificial Sequence
  Description of Artificial Sequence: Synthetic oligonucleotide
uaauauaauuacaucacag

SEQ ID NO: 2095745 - RNA, 19 nt, Artificial Sequence
  Description of Artificial Sequence: Synthetic oligonucleotide
uauaauuacaucacaggag

SEQ ID NO: 2095746 - RNA, 19 nt, Artificial Sequence
  Description of Artificial Sequence: Synthetic oligonucleotide
uuugcaaauaauuucauaa

SEQ ID NO: 2095747 - RNA, 19 nt, Artificial Sequence
  Description of Artificial Sequence: Synthetic oligonucleotide
agggguucaaauuaaggcc

SEQ ID NO: 2095748 - RNA, 19 nt, Artificial Sequence
  Description of Artificial Sequence: Synthetic oligonucleotide
uuagguaugaagaaagacu

SEQ ID NO: 2095749 - RNA, 19 nt, Artificial Sequence
  Description of Artificial Sequence: Synthetic oligonucleotide
cuuaauauaauuacaucac

SEQ ID NO: 2095750 - RNA, 19 nt, Artificial Sequence
  Description of Artificial Sequence: Synthetic oligonucleotide
uugaaugaaggcauuagcc

SEQ ID NO: 2095751 - RNA, 19 nt, Artificial Sequence
  Description of Artificial Sequence: Synthetic oligonucleotide
ucaaauuaaggccaucuug

SEQ ID NO: 2095752 - RNA, 19 nt, Artificial Sequence
  Description of Artificial Sequence: Synthetic oligonucleotide
uuuugcaagaaucucagaa

SEQ ID NO: 2095753 - RNA, 19 nt, Artificial Sequence
  Description of Artificial Sequence: Synthetic oligonucleotide
aguuuuacccacuuaggac

SEQ ID NO: 2095754 - RNA, 19 nt, Artificial Sequence
  Description of Artificial Sequence: Synthetic oligonucleotide
cuuuuagguaugaagaaag

SEQ ID NO: 2095755 - RNA, 19 nt, Artificial Sequence
  Description of Artificial Sequence: Synthetic oligonucleotide
aacucaaucacggaacgac

SEQ ID NO: 2095756 - RNA, 19 nt, Artificial Sequence
  Description of Artificial Sequence: Synthetic oligonucleotide
ugugagucaaaucauuggc

SEQ ID NO: 2095757 - RNA, 19 nt, Artificial Sequence
  Description of Artificial Sequence: Synthetic oligonucleotide
ucuuaucucaggaaugucc

SEQ ID NO: 2095758 - RNA, 19 nt, Artificial Sequence
  Description of Artificial Sequence: Synthetic oligonucleotide
uuaauauaauuacaucaca

SEQ ID NO: 2095759 - RNA, 19 nt, Artificial Sequence
  Description of Artificial Sequence: Synthetic oligonucleotide
cuucuuuauugaaugaagg

SEQ ID NO: 2095760 - RNA, 19 nt, Artificial Sequence
  Description of Artificial Sequence: Synthetic oligonucleotide
aaggcauuagccaaaggac

SEQ ID NO: 2095761 - RNA, 19 nt, Artificial Sequence
  Description of Artificial Sequence: Synthetic oligonucleotide
uaucuagaagcucaaacac

SEQ ID NO: 2095762 - RNA, 19 nt, Artificial Sequence
  Description of Artificial Sequence: Synthetic oligonucleotide
caagaaacacuccauaggc

SEQ ID NO: 2095763 - RNA, 19 nt, Artificial Sequence
  Description of Artificial Sequence: Synthetic oligonucleotide
cugucaaagaaucugcacg

SEQ ID NO: 2095764 - RNA, 19 nt, Artificial Sequence
  Description of Artificial Sequence: Synthetic oligonucleotide
ugugucaagaaacacucca

SEQ ID NO: 2095765 - RNA, 19 nt, Artificial Sequence
  Description of Artificial Sequence: Synthetic oligonucleotide
auaucuagaagcucaaaca

SEQ ID NO: 2095766 - RNA, 19 nt, Artificial Sequence
  Description of Artificial Sequence: Synthetic oligonucleotide
ucaggaauguccaucauuc

SEQ ID NO: 2095767 - RNA, 19 nt, Artificial Sequence
  Description of Artificial Sequence: Synthetic oligonucleotide
uaagggguucaaauuaagg

SEQ ID NO: 2095768 - RNA, 19 nt, Artificial Sequence
  Description of Artificial Sequence: Synthetic oligonucleotide
aguucuuugauucucccug

SEQ ID NO: 2095769 - RNA, 19 nt, Artificial Sequence
  Description of Artificial Sequence: Synthetic oligonucleotide
acgcacuuaauauaauuac

SEQ ID NO: 2095770 - RNA, 19 nt, Artificial Sequence
  Description of Artificial Sequence: Synthetic oligonucleotide
aaguuuuacccacuuagga

SEQ ID NO: 2095771 - RNA, 19 nt, Artificial Sequence
  Description of Artificial Sequence: Synthetic oligonucleotide
aacuuuaagggguucaaau

SEQ ID NO: 2095772 - RNA, 19 nt, Artificial Sequence
  Description of Artificial Sequence: Synthetic oligonucleotide
agaaacacuccauaggcug

SEQ ID NO: 2095773 - RNA, 19 nt, Artificial Sequence
  Description of Artificial Sequence: Synthetic oligonucleotide
ugucaaagaaucugcacgc

SEQ ID NO: 2095774 - RNA, 19 nt, Artificial Sequence
  Description of Artificial Sequence: Synthetic oligonucleotide
uuugaaugcugucagugac

SEQ ID NO: 2095775 - RNA, 19 nt, Artificial Sequence
  Description of Artificial Sequence: Synthetic oligonucleotide
ucgaaaaccagaaacuuua

SEQ ID NO: 2095776 - RNA, 19 nt, Artificial Sequence
  Description of Artificial Sequence: Synthetic oligonucleotide
cauaucuagaagcucaaac

SEQ ID NO: 2095777 - RNA, 19 nt, Artificial Sequence
  Description of Artificial Sequence: Synthetic oligonucleotide
acgacugccacuguaaugg

SEQ ID NO: 2095778 - RNA, 19 nt, Artificial Sequence
  Description of Artificial Sequence: Synthetic oligonucleotide
uuauguguuuugcaaauaa

SEQ ID NO: 2095779 - RNA, 19 nt, Artificial Sequence
  Description of Artificial Sequence: Synthetic oligonucleotide
auuaaggccaucuuguuua

SEQ ID NO: 2095780 - RNA, 19 nt, Artificial Sequence
  Description of Artificial Sequence: Synthetic oligonucleotide
aaacacuuccuuucuuauc

SEQ ID NO: 2095781 - RNA, 19 nt, Artificial Sequence
  Description of Artificial Sequence: Synthetic oligonucleotide
uuaguuucugaucucucca

SEQ ID NO: 2095782 - RNA, 19 nt, Artificial Sequence
  Description of Artificial Sequence: Synthetic oligonucleotide
ucuagaagcucaaacacuu

SEQ ID NO: 2095783 - RNA, 19 nt, Artificial Sequence
  Description of Artificial Sequence: Synthetic oligonucleotide
ucccauaucuagaagcuca

SEQ ID NO: 2095784 - RNA, 19 nt, Artificial Sequence
  Description of Artificial Sequence: Synthetic oligonucleotide
cuuaguuucugaucucucc

SEQ ID NO: 2095785 - RNA, 19 nt, Artificial Sequence
  Description of Artificial Sequence: Synthetic oligonucleotide
aacuuuggcaucuccuuug

SEQ ID NO: 2095786 - RNA, 19 nt, Artificial Sequence
  Description of Artificial Sequence: Synthetic oligonucleotide
uccucuuuuguuuccuucg

SEQ ID NO: 2095787 - RNA, 19 nt, Artificial Sequence
  Description of Artificial Sequence: Synthetic oligonucleotide
cucccaaugauccacuggg

SEQ ID NO: 2095788 - RNA, 19 nt, Artificial Sequence
  Description of Artificial Sequence: Synthetic oligonucleotide
guuugguuuccugugaugg

SEQ ID NO: 2095789 - RNA, 19 nt, Artificial Sequence
  Description of Artificial Sequence: Synthetic oligonucleotide
guuuuacccacuuaggaca

SEQ ID NO: 2095790 - RNA, 19 nt, Artificial Sequence
  Description of Artificial Sequence: Synthetic oligonucleotide
uaaugguccuugaugagcu

SEQ ID NO: 2095791 - RNA, 19 nt, Artificial Sequence
  Description of Artificial Sequence: Synthetic oligonucleotide
caaagaaucugcacgcagc

SEQ ID NO: 2095792 - RNA, 19 nt, Artificial Sequence
  Description of Artificial Sequence: Synthetic oligonucleotide
uuuuguuuccuucgguugu

SEQ ID NO: 2095793 - RNA, 19 nt, Artificial Sequence
  Description of Artificial Sequence: Synthetic oligonucleotide
uauugaaugaaggcauuag

SEQ ID NO: 2095794 - RNA, 19 nt, Artificial Sequence
  Description of Artificial Sequence: Synthetic oligonucleotide
auuacaucacaggagguag

SEQ ID NO: 2095795 - RNA, 19 nt, Artificial Sequence
  Description of Artificial Sequence: Synthetic oligonucleotide
uuuuagguaugaagaaaga

SEQ ID NO: 2095796 - RNA, 19 nt, Artificial Sequence
  Description of Artificial Sequence: Synthetic oligonucleotide
uuuaccugcucucggaccu

SEQ ID NO: 2095797 - RNA, 19 nt, Artificial Sequence
  Description of Artificial Sequence: Synthetic oligonucleotide
aacacucccauaucuagaa

SEQ ID NO: 2095798 - RNA, 19 nt, Artificial Sequence
  Description of Artificial Sequence: Synthetic oligonucleotide
uuuaagggguucaaauuaa

SEQ ID NO: 2095799 - RNA, 19 nt, Artificial Sequence
  Description of Artificial Sequence: Synthetic oligonucleotide
uuuuccgaaguuuuaccca

SEQ ID NO: 2095800 - RNA, 19 nt, Artificial Sequence
  Description of Artificial Sequence: Synthetic oligonucleotide
guuuuccgaaguuuuaccc

SEQ ID NO: 2095801 - RNA, 19 nt, Artificial Sequence
  Description of Artificial Sequence: Synthetic oligonucleotide
uccaacucaaucacggaac

SEQ ID NO: 2095802 - RNA, 19 nt, Artificial Sequence
  Description of Artificial Sequence: Synthetic oligonucleotide
uuaagggguucaaauuaag

SEQ ID NO: 2095803 - RNA, 19 nt, Artificial Sequence
  Description of Artificial Sequence: Synthetic oligonucleotide
cucugauuuugcaagaauc

SEQ ID NO: 2095804 - RNA, 19 nt, Artificial Sequence
  Description of Artificial Sequence: Synthetic oligonucleotide
uguaucacacgauucucca

SEQ ID NO: 2095805 - RNA, 19 nt, Artificial Sequence
  Description of Artificial Sequence: Synthetic oligonucleotide
gaaguuuuacccacuuagg

SEQ ID NO: 2095806 - RNA, 19 nt, Artificial Sequence
  Description of Artificial Sequence: Synthetic oligonucleotide
uuuccugugaugguucagg

SEQ ID NO: 2095807 - RNA, 19 nt, Artificial Sequence
  Description of Artificial Sequence: Synthetic oligonucleotide
cugugagucaaaucauugg

SEQ ID NO: 2095808 - RNA, 19 nt, Artificial Sequence
  Description of Artificial Sequence: Synthetic oligonucleotide
cuuucuuaucucaggaaug

SEQ ID NO: 2095809 - RNA, 19 nt, Artificial Sequence
  Description of Artificial Sequence: Synthetic oligonucleotide
caucacaggagguagcuac

SEQ ID NO: 2095810 - RNA, 19 nt, Artificial Sequence
  Description of Artificial Sequence: Synthetic oligonucleotide
ucaaucacggaacgacugc

SEQ ID NO: 2095811 - RNA, 19 nt, Artificial Sequence
  Description of Artificial Sequence: Synthetic oligonucleotide
guguuuugcaaauaauuuc

SEQ ID NO: 2095812 - RNA, 19 nt, Artificial Sequence
  Description of Artificial Sequence: Synthetic oligonucleotide
guagcuacugagcacuugc

SEQ ID NO: 2095813 - RNA, 19 nt, Artificial Sequence
  Description of Artificial Sequence: Synthetic oligonucleotide
aucuuguuuaacaaguucu

SEQ ID NO: 2095814 - RNA, 19 nt, Artificial Sequence
  Description of Artificial Sequence: Synthetic oligonucleotide
uuuccgaaguuuuacccac

SEQ ID NO: 2095815 - RNA, 19 nt, Artificial Sequence
  Description of Artificial Sequence: Synthetic oligonucleotide
agucaaaucauuggccuuc

SEQ ID NO: 2095816 - RNA, 19 nt, Artificial Sequence
  Description of Artificial Sequence: Synthetic oligonucleotide
uuucuuaucucaggaaugu

SEQ ID NO: 2095817 - RNA, 19 nt, Artificial Sequence
  Description of Artificial Sequence: Synthetic oligonucleotide
uucuuuuagguaugaagaa

SEQ ID NO: 2095818 - RNA, 19 nt, Artificial Sequence
  Description of Artificial Sequence: Synthetic oligonucleotide
acaggagguagcuacugag

SEQ ID NO: 2095819 - RNA, 19 nt, Artificial Sequence
  Description of Artificial Sequence: Synthetic oligonucleotide
ugcucucggaccuuuaugu

SEQ ID NO: 2095820 - RNA, 19 nt, Artificial Sequence
  Description of Artificial Sequence: Synthetic oligonucleotide
uugaaugcugucagugacc

SEQ ID NO: 2095821 - RNA, 19 nt, Artificial Sequence
  Description of Artificial Sequence: Synthetic oligonucleotide
aacuuuaccugcucucgga

SEQ ID NO: 2095822 - RNA, 19 nt, Artificial Sequence
  Description of Artificial Sequence: Synthetic oligonucleotide
gaacuuuaccugcucucgg

SEQ ID NO: 2095823 - RNA, 19 nt, Artificial Sequence
  Description of Artificial Sequence: Synthetic oligonucleotide
uuugauucucccuggaguu

SEQ ID NO: 2095824 - RNA, 19 nt, Artificial Sequence
  Description of Artificial Sequence: Synthetic oligonucleotide
guugugucaagaaacacuc

SEQ ID NO: 2095825 - RNA, 19 nt, Artificial Sequence
  Description of Artificial Sequence: Synthetic oligonucleotide
uuccaacucaaucacggaa

SEQ ID NO: 2095826 - RNA, 19 nt, Artificial Sequence
  Description of Artificial Sequence: Synthetic oligonucleotide
aauuacaucacaggaggua

SEQ ID NO: 2095827 - RNA, 19 nt, Artificial Sequence
  Description of Artificial Sequence: Synthetic oligonucleotide
uguaaugguccuugaugag

SEQ ID NO: 2095828 - RNA, 19 nt, Artificial Sequence
  Description of Artificial Sequence: Synthetic oligonucleotide
cacuuaauauaauuacauc

SEQ ID NO: 2095829 - RNA, 19 nt, Artificial Sequence
  Description of Artificial Sequence: Synthetic oligonucleotide
aacgacugccacuguaaug

SEQ ID NO: 2095830 - RNA, 19 nt, Artificial Sequence
  Description of Artificial Sequence: Synthetic oligonucleotide
uccaucauucuccuuaguu

SEQ ID NO: 2095831 - RNA, 19 nt, Artificial Sequence
  Description of Artificial Sequence: Synthetic oligonucleotide
cuuaucucaggaaugucca

SEQ ID NO: 2095832 - RNA, 19 nt, Artificial Sequence
  Description of Artificial Sequence: Synthetic oligonucleotide
cacacgauucuccaggaac

SEQ ID NO: 2095833 - RNA, 19 nt, Artificial Sequence
  Description of Artificial Sequence: Synthetic oligonucleotide
agguguaucacacgauucu

SEQ ID NO: 2095834 - RNA, 19 nt, Artificial Sequence
  Description of Artificial Sequence: Synthetic oligonucleotide
ucuuuuagguaugaagaaa

SEQ ID NO: 2095835 - RNA, 19 nt, Artificial Sequence
  Description of Artificial Sequence: Synthetic oligonucleotide
aaucauuggccuucaggaa

SEQ ID NO: 2095836 - RNA, 19 nt, Artificial Sequence
  Description of Artificial Sequence: Synthetic oligonucleotide
accuuuauguguuuugcaa

SEQ ID NO: 2095837 - RNA, 19 nt, Artificial Sequence
  Description of Artificial Sequence: Synthetic oligonucleotide
aaauuaaggccaucuuguu

SEQ ID NO: 2095838 - RNA, 19 nt, Artificial Sequence
  Description of Artificial Sequence: Synthetic oligonucleotide
aggcuaaacacucccauau

SEQ ID NO: 2095839 - RNA, 19 nt, Artificial Sequence
  Description of Artificial Sequence: Synthetic oligonucleotide
ucgguugugucaagaaaca

SEQ ID NO: 2095840 - RNA, 19 nt, Artificial Sequence
  Description of Artificial Sequence: Synthetic oligonucleotide
ucauuggccuucaggaaac

SEQ ID NO: 2095841 - RNA, 19 nt, Artificial Sequence
  Description of Artificial Sequence: Synthetic oligonucleotide
aucauuggccuucaggaaa

SEQ ID NO: 2095842 - RNA, 19 nt, Artificial Sequence
  Description of Artificial Sequence: Synthetic oligonucleotide
aagaaagacugugagucaa

SEQ ID NO: 2095843 - RNA, 19 nt, Artificial Sequence
  Description of Artificial Sequence: Synthetic oligonucleotide
cucaaucacggaacgacug

SEQ ID NO: 2095844 - RNA, 19 nt, Artificial Sequence
  Description of Artificial Sequence: Synthetic oligonucleotide
acuuuaagggguucaaauu

SEQ ID NO: 2095845 - RNA, 19 nt, Artificial Sequence
  Description of Artificial Sequence: Synthetic oligonucleotide
caaauuaaggccaucuugu

SEQ ID NO: 2095846 - RNA, 19 nt, Artificial Sequence
  Description of Artificial Sequence: Synthetic oligonucleotide
acauucgcagcugucaaag

SEQ ID NO: 2095847 - RNA, 19 nt, Artificial Sequence
  Description of Artificial Sequence: Synthetic oligonucleotide
cuuuaagggguucaaauua

SEQ ID NO: 2095848 - RNA, 19 nt, Artificial Sequence
  Description of Artificial Sequence: Synthetic oligonucleotide
acuuaggacagauuucuuu

SEQ ID NO: 2095849 - RNA, 19 nt, Artificial Sequence
  Description of Artificial Sequence: Synthetic oligonucleotide
guaaugguccuugaugagc

SEQ ID NO: 2095850 - RNA, 19 nt, Artificial Sequence
  Description of Artificial Sequence: Synthetic oligonucleotide
ugaaugcugucagugaccu

SEQ ID NO: 2095851 - RNA, 19 nt, Artificial Sequence
  Description of Artificial Sequence: Synthetic oligonucleotide
acccacuuaggacagauuu

SEQ ID NO: 2095852 - RNA, 19 nt, Artificial Sequence
  Description of Artificial Sequence: Synthetic oligonucleotide
uuacaucacaggagguagc

SEQ ID NO: 2095853 - RNA, 19 nt, Artificial Sequence
  Description of Artificial Sequence: Synthetic oligonucleotide
acucccaaugauccacugg

SEQ ID NO: 2095854 - RNA, 19 nt, Artificial Sequence
  Description of Artificial Sequence: Synthetic oligonucleotide
uucaaauuaaggccaucuu

SEQ ID NO: 2095855 - RNA, 19 nt, Artificial Sequence
  Description of Artificial Sequence: Synthetic oligonucleotide
cugucagugaccugaugag

SEQ ID NO: 2095856 - RNA, 19 nt, Artificial Sequence
  Description of Artificial Sequence: Synthetic oligonucleotide
ccagucgaaaaccagaaac

SEQ ID NO: 2095857 - RNA, 19 nt, Artificial Sequence
  Description of Artificial Sequence: Synthetic oligonucleotide
cagaucgucugccaucucc

SEQ ID NO: 2095858 - RNA, 19 nt, Artificial Sequence
  Description of Artificial Sequence: Synthetic oligonucleotide
auucgcagcugucaaagaa

SEQ ID NO: 2095859 - RNA, 19 nt, Artificial Sequence
  Description of Artificial Sequence: Synthetic oligonucleotide
ugauucucccuggaguucc

SEQ ID NO: 2095860 - RNA, 19 nt, Artificial Sequence
  Description of Artificial Sequence: Synthetic oligonucleotide
cuuuaccugcucucggacc

SEQ ID NO: 2095861 - RNA, 19 nt, Artificial Sequence
  Description of Artificial Sequence: Synthetic oligonucleotide
uucgcagcugucaaagaau

SEQ ID NO: 2095862 - RNA, 19 nt, Artificial Sequence
  Description of Artificial Sequence: Synthetic oligonucleotide
ugacgcacuuaauauaauu

SEQ ID NO: 2095863 - RNA, 19 nt, Artificial Sequence
  Description of Artificial Sequence: Synthetic oligonucleotide
cgaaguuuuacccacuuag

SEQ ID NO: 2095864 - RNA, 19 nt, Artificial Sequence
  Description of Artificial Sequence: Synthetic oligonucleotide
ucaggacccaggcuuagaa

SEQ ID NO: 2095865 - RNA, 19 nt, Artificial Sequence
  Description of Artificial Sequence: Synthetic oligonucleotide
ugaaggcauuagccaaagg

SEQ ID NO: 2095866 - RNA, 19 nt, Artificial Sequence
  Description of Artificial Sequence: Synthetic oligonucleotide
uguuugguuuccugugaug

SEQ ID NO: 2095867 - RNA, 19 nt, Artificial Sequence
  Description of Artificial Sequence: Synthetic oligonucleotide
ccaggcuuagaaaaggccc

SEQ ID NO: 2095868 - RNA, 19 nt, Artificial Sequence
  Description of Artificial Sequence: Synthetic oligonucleotide
gaagaaagacugugaguca

SEQ ID NO: 2095869 - RNA, 19 nt, Artificial Sequence
  Description of Artificial Sequence: Synthetic oligonucleotide
gugagucaaaucauuggcc

SEQ ID NO: 2095870 - RNA, 19 nt, Artificial Sequence
  Description of Artificial Sequence: Synthetic oligonucleotide
caacuggacacuucaucag

SEQ ID NO: 2095871 - RNA, 19 nt, Artificial Sequence
  Description of Artificial Sequence: Synthetic oligonucleotide
aagaaacacuccauaggcu

SEQ ID NO: 2095872 - RNA, 19 nt, Artificial Sequence
  Description of Artificial Sequence: Synthetic oligonucleotide
uaacaaguucuuugauucu

SEQ ID NO: 2095873 - RNA, 19 nt, Artificial Sequence
  Description of Artificial Sequence: Synthetic oligonucleotide
ccacucgucucccagaucg

SEQ ID NO: 2095874 - RNA, 19 nt, Artificial Sequence
  Description of Artificial Sequence: Synthetic oligonucleotide
gacccaggcuuagaaaagg

SEQ ID NO: 2095875 - RNA, 19 nt, Artificial Sequence
  Description of Artificial Sequence: Synthetic oligonucleotide
agaggcuaaacacucccau

SEQ ID NO: 2095876 - RNA, 19 nt, Artificial Sequence
  Description of Artificial Sequence: Synthetic oligonucleotide
ucuccgugcgacgcgaccg

SEQ ID NO: 2095877 - RNA, 19 nt, Artificial Sequence
  Description of Artificial Sequence: Synthetic oligonucleotide
gacagauuucuuuuaggua

SEQ ID NO: 2095878 - RNA, 19 nt, Artificial Sequence
  Description of Artificial Sequence: Synthetic oligonucleotide
uugugucaagaaacacucc

SEQ ID NO: 2095879 - RNA, 19 nt, Artificial Sequence
  Description of Artificial Sequence: Synthetic oligonucleotide
ucugaucucuccaguucca

SEQ ID NO: 2095880 - RNA, 19 nt, Artificial Sequence
  Description of Artificial Sequence: Synthetic oligonucleotide
ugcaucauuucugugucuc

SEQ ID NO: 2095881 - RNA, 19 nt, Artificial Sequence
  Description of Artificial Sequence: Synthetic oligonucleotide
aaugaaggcauuagccaaa

SEQ ID NO: 2095882 - RNA, 19 nt, Artificial Sequence
  Description of Artificial Sequence: Synthetic oligonucleotide
augauccacugggugacgc

SEQ ID NO: 2095883 - RNA, 19 nt, Artificial Sequence
  Description of Artificial Sequence: Synthetic oligonucleotide
agaucgucugccaucuccg

SEQ ID NO: 2095884 - RNA, 19 nt, Artificial Sequence
  Description of Artificial Sequence: Synthetic oligonucleotide
uccuugaugagcugcugaa

SEQ ID NO: 2095885 - RNA, 19 nt, Artificial Sequence
  Description of Artificial Sequence: Synthetic oligonucleotide
ggacacuucaucaggaccc

SEQ ID NO: 2095886 - RNA, 19 nt, Artificial Sequence
  Description of Artificial Sequence: Synthetic oligonucleotide
uggcaucuccuuugaaugc

SEQ ID NO: 2095887 - RNA, 19 nt, Artificial Sequence
  Description of Artificial Sequence: Synthetic oligonucleotide
uuaggacagauuucuuuua

SEQ ID NO: 2095888 - RNA, 19 nt, Artificial Sequence
  Description of Artificial Sequence: Synthetic oligonucleotide
acccagguguaucacacga

SEQ ID NO: 2095889 - RNA, 19 nt, Artificial Sequence
  Description of Artificial Sequence: Synthetic oligonucleotide
ugucagugaccugaugagc

SEQ ID NO: 2095890 - RNA, 19 nt, Artificial Sequence
  Description of Artificial Sequence: Synthetic oligonucleotide
uccuuaguuucugaucucu

SEQ ID NO: 2095891 - RNA, 19 nt, Artificial Sequence
  Description of Artificial Sequence: Synthetic oligonucleotide
ugguagguucagcucuucc

SEQ ID NO: 2095892 - RNA, 19 nt, Artificial Sequence
  Description of Artificial Sequence: Synthetic oligonucleotide
aucaccggaugguucuggg

SEQ ID NO: 2095893 - RNA, 19 nt, Artificial Sequence
  Description of Artificial Sequence: Synthetic oligonucleotide
ucucgcuguggguuuuccg

SEQ ID NO: 2095894 - RNA, 19 nt, Artificial Sequence
  Description of Artificial Sequence: Synthetic oligonucleotide
gacgcacuuaauauaauua

SEQ ID NO: 2095895 - RNA, 19 nt, Artificial Sequence
  Description of Artificial Sequence: Synthetic oligonucleotide
aaugauccacugggugacg

SEQ ID NO: 2095896 - RNA, 19 nt, Artificial Sequence
  Description of Artificial Sequence: Synthetic oligonucleotide
gacagacuucuucucgcug

SEQ ID NO: 2095897 - RNA, 19 nt, Artificial Sequence
  Description of Artificial Sequence: Synthetic oligonucleotide
gcaacuggacacuucauca

SEQ ID NO: 2095898 - RNA, 19 nt, Artificial Sequence
  Description of Artificial Sequence: Synthetic oligonucleotide
accgacgcgagcugacaac

SEQ ID NO: 2095899 - RNA, 19 nt, Artificial Sequence
  Description of Artificial Sequence: Synthetic oligonucleotide
aaacuuuaagggguucaaa

SEQ ID NO: 2095900 - RNA, 19 nt, Artificial Sequence
  Description of Artificial Sequence: Synthetic oligonucleotide
gagcacuugcagcauggug

SEQ ID NO: 2095901 - RNA, 19 nt, Artificial Sequence
  Description of Artificial Sequence: Synthetic oligonucleotide
guguaucacacgauucucc

SEQ ID NO: 2095902 - RNA, 19 nt, Artificial Sequence
  Description of Artificial Sequence: Synthetic oligonucleotide
agcaugguggcaacuggac

SEQ ID NO: 2095903 - RNA, 19 nt, Artificial Sequence
  Description of Artificial Sequence: Synthetic oligonucleotide
caaucacggaacgacugcc

SEQ ID NO: 2095904 - RNA, 19 nt, Artificial Sequence
  Description of Artificial Sequence: Synthetic oligonucleotide
uuccugugaugguucagga

SEQ ID NO: 2095905 - RNA, 19 nt, Artificial Sequence
  Description of Artificial Sequence: Synthetic oligonucleotide
ugaucucuccaguuccagu

SEQ ID NO: 2095906 - RNA, 19 nt, Artificial Sequence
  Description of Artificial Sequence: Synthetic oligonucleotide
gacuugcagaggcuaaaca

SEQ ID NO: 2095907 - RNA, 19 nt, Artificial Sequence
  Description of Artificial Sequence: Synthetic oligonucleotide
guagguucagcucuuccaa

SEQ ID NO: 2095908 - RNA, 19 nt, Artificial Sequence
  Description of Artificial Sequence: Synthetic oligonucleotide
cagguguaucacacgauuc

SEQ ID NO: 2095909 - RNA, 19 nt, Artificial Sequence
  Description of Artificial Sequence: Synthetic oligonucleotide
ucgucucccagaucgucug

SEQ ID NO: 2095910 - RNA, 19 nt, Artificial Sequence
  Description of Artificial Sequence: Synthetic oligonucleotide
aucuagaagcucaaacacu

SEQ ID NO: 2095911 - RNA, 19 nt, Artificial Sequence
  Description of Artificial Sequence: Synthetic oligonucleotide
cacggaacgacugccacug

SEQ ID NO: 2095912 - RNA, 19 nt, Artificial Sequence
  Description of Artificial Sequence: Synthetic oligonucleotide
ugguuuccugugaugguuc

SEQ ID NO: 2095913 - RNA, 19 nt, Artificial Sequence
  Description of Artificial Sequence: Synthetic oligonucleotide
ugugaugguucaggaacug

SEQ ID NO: 2095914 - RNA, 19 nt, Artificial Sequence
  Description of Artificial Sequence: Synthetic oligonucleotide
uuuauguguuuugcaaaua

SEQ ID NO: 2095915 - RNA, 19 nt, Artificial Sequence
  Description of Artificial Sequence: Synthetic oligonucleotide
agucgaaaaccagaaacuu

SEQ ID NO: 2095916 - RNA, 19 nt, Artificial Sequence
  Description of Artificial Sequence: Synthetic oligonucleotide
aggcauuagccaaaggaca

SEQ ID NO: 2095917 - RNA, 19 nt, Artificial Sequence
  Description of Artificial Sequence: Synthetic oligonucleotide
acccaggcuuagaaaaggc

SEQ ID NO: 2095918 - RNA, 19 nt, Artificial Sequence
  Description of Artificial Sequence: Synthetic oligonucleotide
gagucugguagguucagcu

SEQ ID NO: 2095919 - RNA, 19 nt, Artificial Sequence
  Description of Artificial Sequence: Synthetic oligonucleotide
caaggacucugacuugcag

SEQ ID NO: 2095920 - RNA, 19 nt, Artificial Sequence
  Description of Artificial Sequence: Synthetic oligonucleotide
aggcuguuugguuuccugu

SEQ ID NO: 2095921 - RNA, 19 nt, Artificial Sequence
  Description of Artificial Sequence: Synthetic oligonucleotide
auuuugcaagaaucucaga

SEQ ID NO: 2095922 - RNA, 19 nt, Artificial Sequence
  Description of Artificial Sequence: Synthetic oligonucleotide
ugcgacgcgaccgacgcga

SEQ ID NO: 2095923 - RNA, 19 nt, Artificial Sequence
  Description of Artificial Sequence: Synthetic oligonucleotide
augaaggcauuagccaaag

SEQ ID NO: 2095924 - RNA, 19 nt, Artificial Sequence
  Description of Artificial Sequence: Synthetic oligonucleotide
uguccugcugcaucauuuc

SEQ ID NO: 2095925 - RNA, 19 nt, Artificial Sequence
  Description of Artificial Sequence: Synthetic oligonucleotide
gcagcugucaaagaaucug

SEQ ID NO: 2095926 - RNA, 19 nt, Artificial Sequence
  Description of Artificial Sequence: Synthetic oligonucleotide
guuccagucgaaaaccaga

SEQ ID NO: 2095927 - RNA, 19 nt, Artificial Sequence
  Description of Artificial Sequence: Synthetic oligonucleotide
aaucacggaacgacugcca

SEQ ID NO: 2095928 - RNA, 19 nt, Artificial Sequence
  Description of Artificial Sequence: Synthetic oligonucleotide
acacgauucuccaggaacu

SEQ ID NO: 2095929 - RNA, 19 nt, Artificial Sequence
  Description of Artificial Sequence: Synthetic oligonucleotide
cuagaagcucaaacacuuc

SEQ ID NO: 2095930 - RNA, 19 nt, Artificial Sequence
  Description of Artificial Sequence: Synthetic oligonucleotide
cucgcuguggguuuuccga

SEQ ID NO: 2095931 - RNA, 19 nt, Artificial Sequence
  Description of Artificial Sequence: Synthetic oligonucleotide
aggccaucuuguuuaacaa

SEQ ID NO: 2095932 - RNA, 19 nt, Artificial Sequence
  Description of Artificial Sequence: Synthetic oligonucleotide
uuacccacuuaggacagau

SEQ ID NO: 2095933 - RNA, 19 nt, Artificial Sequence
  Description of Artificial Sequence: Synthetic oligonucleotide
gugaugguucaggaacugg

SEQ ID NO: 2095934 - RNA, 19 nt, Artificial Sequence
  Description of Artificial Sequence: Synthetic oligonucleotide
caggcuuagaaaaggccca

SEQ ID NO: 2095935 - RNA, 19 nt, Artificial Sequence
  Description of Artificial Sequence: Synthetic oligonucleotide
ucagugaccugaugagcuc

SEQ ID NO: 2095936 - RNA, 19 nt, Artificial Sequence
  Description of Artificial Sequence: Synthetic oligonucleotide
uccagucgaaaaccagaaa

SEQ ID NO: 2095937 - RNA, 19 nt, Artificial Sequence
  Description of Artificial Sequence: Synthetic oligonucleotide
uccgaaguuuuacccacuu

SEQ ID NO: 2095938 - RNA, 19 nt, Artificial Sequence
  Description of Artificial Sequence: Synthetic oligonucleotide
uguggguuuuccgaaguuu

SEQ ID NO: 2095939 - RNA, 19 nt, Artificial Sequence
  Description of Artificial Sequence: Synthetic oligonucleotide
acacuccauaggcuguuug

SEQ ID NO: 2095940 - RNA, 19 nt, Artificial Sequence
  Description of Artificial Sequence: Synthetic oligonucleotide
ucaccggaugguucugggc

SEQ ID NO: 2095941 - RNA, 19 nt, Artificial Sequence
  Description of Artificial Sequence: Synthetic oligonucleotide
acacauucgcagcugucaa

SEQ ID NO: 2095942 - RNA, 19 nt, Artificial Sequence
  Description of Artificial Sequence: Synthetic oligonucleotide
ucacaggagguagcuacug

SEQ ID NO: 2095943 - RNA, 19 nt, Artificial Sequence
  Description of Artificial Sequence: Synthetic oligonucleotide
cuuuauguguuuugcaaau

SEQ ID NO: 2095944 - RNA, 19 nt, Artificial Sequence
  Description of Artificial Sequence: Synthetic oligonucleotide
ucacggaacgacugccacu

SEQ ID NO: 2095945 - RNA, 19 nt, Artificial Sequence
  Description of Artificial Sequence: Synthetic oligonucleotide
ugauccacugggugacgca

SEQ ID NO: 2095946 - RNA, 19 nt, Artificial Sequence
  Description of Artificial Sequence: Synthetic oligonucleotide
auuggccuucaggaaacag

SEQ ID NO: 2095947 - RNA, 19 nt, Artificial Sequence
  Description of Artificial Sequence: Synthetic oligonucleotide
ucaucaggacccaggcuua

SEQ ID NO: 2095948 - RNA, 19 nt, Artificial Sequence
  Description of Artificial Sequence: Synthetic oligonucleotide
cuuaggacagauuucuuuu

SEQ ID NO: 2095949 - RNA, 19 nt, Artificial Sequence
  Description of Artificial Sequence: Synthetic oligonucleotide
gaaucucagaaauuuucuu

SEQ ID NO: 2095950 - RNA, 19 nt, Artificial Sequence
  Description of Artificial Sequence: Synthetic oligonucleotide
aggacacauucgcagcugu

SEQ ID NO: 2095951 - RNA, 19 nt, Artificial Sequence
  Description of Artificial Sequence: Synthetic oligonucleotide
uugguuuccugugaugguu

SEQ ID NO: 2095952 - RNA, 19 nt, Artificial Sequence
  Description of Artificial Sequence: Synthetic oligonucleotide
uggguuuuccgaaguuuua

SEQ ID NO: 2095953 - RNA, 19 nt, Artificial Sequence
  Description of Artificial Sequence: Synthetic oligonucleotide
ggacagauuucuuuuaggu

SEQ ID NO: 2095954 - RNA, 19 nt, Artificial Sequence
  Description of Artificial Sequence: Synthetic oligonucleotide
ucccaaugauccacugggu

SEQ ID NO: 2095955 - RNA, 19 nt, Artificial Sequence
  Description of Artificial Sequence: Synthetic oligonucleotide
uccugugaugguucaggaa

SEQ ID NO: 2095956 - RNA, 19 nt, Artificial Sequence
  Description of Artificial Sequence: Synthetic oligonucleotide
ugguucugggcugccggcg

SEQ ID NO: 2095957 - RNA, 19 nt, Artificial Sequence
  Description of Artificial Sequence: Synthetic oligonucleotide
gagguagcuacugagcacu

SEQ ID NO: 2095958 - RNA, 19 nt, Artificial Sequence
  Description of Artificial Sequence: Synthetic oligonucleotide
cagucgaaaaccagaaacu

SEQ ID NO: 2095959 - RNA, 19 nt, Artificial Sequence
  Description of Artificial Sequence: Synthetic oligonucleotide
uuccgaaguuuuacccacu

SEQ ID NO: 2095960 - RNA, 19 nt, Artificial Sequence
  Description of Artificial Sequence: Synthetic oligonucleotide
ggaccuuuauguguuuugc

SEQ ID NO: 2095961 - RNA, 19 nt, Artificial Sequence
  Description of Artificial Sequence: Synthetic oligonucleotide
gucugguagguucagcucu

SEQ ID NO: 2095962 - RNA, 19 nt, Artificial Sequence
  Description of Artificial Sequence: Synthetic oligonucleotide
ccuuugaaugcugucagug

SEQ ID NO: 2095963 - RNA, 19 nt, Artificial Sequence
  Description of Artificial Sequence: Synthetic oligonucleotide
agauuucuuuuagguauga

SEQ ID NO: 2095964 - RNA, 19 nt, Artificial Sequence
  Description of Artificial Sequence: Synthetic oligonucleotide
cagugaccugaugagcucc

SEQ ID NO: 2095965 - RNA, 19 nt, Artificial Sequence
  Description of Artificial Sequence: Synthetic oligonucleotide
uuccggguuuccucuuuug

SEQ ID NO: 2095966 - RNA, 19 nt, Artificial Sequence
  Description of Artificial Sequence: Synthetic oligonucleotide
uccgggagucccugguuug

SEQ ID NO: 2095967 - RNA, 19 nt, Artificial Sequence
  Description of Artificial Sequence: Synthetic oligonucleotide
ggugacgcacuuaauauaa

SEQ ID NO: 2095968 - RNA, 19 nt, Artificial Sequence
  Description of Artificial Sequence: Synthetic oligonucleotide
acucgucucccagaucguc

SEQ ID NO: 2095969 - RNA, 19 nt, Artificial Sequence
  Description of Artificial Sequence: Synthetic oligonucleotide
acucaaucacggaacgacu

SEQ ID NO: 2095970 - RNA, 19 nt, Artificial Sequence
  Description of Artificial Sequence: Synthetic oligonucleotide
accggaugguucugggcug

SEQ ID NO: 2095971 - RNA, 19 nt, Artificial Sequence
  Description of Artificial Sequence: Synthetic oligonucleotide
gaauguccaucauucuccu

SEQ ID NO: 2095972 - RNA, 19 nt, Artificial Sequence
  Description of Artificial Sequence: Synthetic oligonucleotide
agggcucggacagcugagc

SEQ ID NO: 2095973 - RNA, 19 nt, Artificial Sequence
  Description of Artificial Sequence: Synthetic oligonucleotide
gaggcuaaacacucccaua

SEQ ID NO: 2095974 - RNA, 19 nt, Artificial Sequence
  Description of Artificial Sequence: Synthetic oligonucleotide
cugggugacgcacuuaaua

SEQ ID NO: 2095975 - RNA, 19 nt, Artificial Sequence
  Description of Artificial Sequence: Synthetic oligonucleotide
cugcucucggaccuuuaug

SEQ ID NO: 2095976 - RNA, 19 nt, Artificial Sequence
  Description of Artificial Sequence: Synthetic oligonucleotide
ugccaucuccgugcgacgc

SEQ ID NO: 2095977 - RNA, 19 nt, Artificial Sequence
  Description of Artificial Sequence: Synthetic oligonucleotide
uccuucgguugugucaaga

SEQ ID NO: 2095978 - RNA, 19 nt, Artificial Sequence
  Description of Artificial Sequence: Synthetic oligonucleotide
ucgcuguggguuuuccgaa

SEQ ID NO: 2095979 - RNA, 19 nt, Artificial Sequence
  Description of Artificial Sequence: Synthetic oligonucleotide
aggcuuagaaaaggcccag

SEQ ID NO: 2095980 - RNA, 19 nt, Artificial Sequence
  Description of Artificial Sequence: Synthetic oligonucleotide
cccaggcuuagaaaaggcc

SEQ ID NO: 2095981 - RNA, 19 nt, Artificial Sequence
  Description of Artificial Sequence: Synthetic oligonucleotide
gcucggacagcugagcugc

SEQ ID NO: 2095982 - RNA, 19 nt, Artificial Sequence
  Description of Artificial Sequence: Synthetic oligonucleotide
uugauucucccuggaguuc

SEQ ID NO: 2095983 - RNA, 19 nt, Artificial Sequence
  Description of Artificial Sequence: Synthetic oligonucleotide
cugaucucuccaguuccag

SEQ ID NO: 2095984 - RNA, 19 nt, Artificial Sequence
  Description of Artificial Sequence: Synthetic oligonucleotide
uguguccugcugcaucauu

SEQ ID NO: 2095985 - RNA, 19 nt, Artificial Sequence
  Description of Artificial Sequence: Synthetic oligonucleotide
gucagugaccugaugagcu

SEQ ID NO: 2095986 - RNA, 19 nt, Artificial Sequence
  Description of Artificial Sequence: Synthetic oligonucleotide
caucaccggaugguucugg

SEQ ID NO: 2095987 - RNA, 19 nt, Artificial Sequence
  Description of Artificial Sequence: Synthetic oligonucleotide
ggagguagcuacugagcac

SEQ ID NO: 2095988 - RNA, 19 nt, Artificial Sequence
  Description of Artificial Sequence: Synthetic oligonucleotide
uccacugggugacgcacuu

SEQ ID NO: 2095989 - RNA, 19 nt, Artificial Sequence
  Description of Artificial Sequence: Synthetic oligonucleotide
uucauaacuuuggcaucuc

SEQ ID NO: 2095990 - RNA, 19 nt, Artificial Sequence
  Description of Artificial Sequence: Synthetic oligonucleotide
cucaucaccggaugguucu

SEQ ID NO: 2095991 - RNA, 19 nt, Artificial Sequence
  Description of Artificial Sequence: Synthetic oligonucleotide
ggcagagcuucuuuauuga

SEQ ID NO: 2095992 - RNA, 19 nt, Artificial Sequence
  Description of Artificial Sequence: Synthetic oligonucleotide
agacugugagucaaaucau

SEQ ID NO: 2095993 - RNA, 19 nt, Artificial Sequence
  Description of Artificial Sequence: Synthetic oligonucleotide
ucuuccggguuuccucuuu

SEQ ID NO: 2095994 - RNA, 19 nt, Artificial Sequence
  Description of Artificial Sequence: Synthetic oligonucleotide
gaaacacuccauaggcugu

SEQ ID NO: 2095995 - RNA, 19 nt, Artificial Sequence
  Description of Artificial Sequence: Synthetic oligonucleotide
ggguuuuccgaaguuuuac

SEQ ID NO: 2095996 - RNA, 19 nt, Artificial Sequence
  Description of Artificial Sequence: Synthetic oligonucleotide
gaaagacugugagucaaau

SEQ ID NO: 2095997 - RNA, 19 nt, Artificial Sequence
  Description of Artificial Sequence: Synthetic oligonucleotide
caggagucugguagguuca

SEQ ID NO: 2095998 - RNA, 19 nt, Artificial Sequence
  Description of Artificial Sequence: Synthetic oligonucleotide
cuccuuaguuucugaucuc

SEQ ID NO: 2095999 - RNA, 19 nt, Artificial Sequence
  Description of Artificial Sequence: Synthetic oligonucleotide
gaacuggagcuguguccug

SEQ ID NO: 2096000 - RNA, 19 nt, Artificial Sequence
  Description of Artificial Sequence: Synthetic oligonucleotide
cugccaucuccgugcgacg

SEQ ID NO: 2096001 - RNA, 19 nt, Artificial Sequence
  Description of Artificial Sequence: Synthetic oligonucleotide
cacucccaaugauccacug

SEQ ID NO: 2096002 - RNA, 19 nt, Artificial Sequence
  Description of Artificial Sequence: Synthetic oligonucleotide
cucucggaccuuuaugugu

SEQ ID NO: 2096003 - RNA, 19 nt, Artificial Sequence
  Description of Artificial Sequence: Synthetic oligonucleotide
gcuuagaaaaggcccagcu

SEQ ID NO: 2096004 - RNA, 19 nt, Artificial Sequence
  Description of Artificial Sequence: Synthetic oligonucleotide
uuuacccacuuaggacaga

SEQ ID NO: 2096005 - RNA, 19 nt, Artificial Sequence
  Description of Artificial Sequence: Synthetic oligonucleotide
gguguaucacacgauucuc

SEQ ID NO: 2096006 - RNA, 19 nt, Artificial Sequence
  Description of Artificial Sequence: Synthetic oligonucleotide
cacgcagcacucccaauga

SEQ ID NO: 2096007 - RNA, 19 nt, Artificial Sequence
  Description of Artificial Sequence: Synthetic oligonucleotide
ucaucaccggaugguucug

SEQ ID NO: 2096008 - RNA, 19 nt, Artificial Sequence
  Description of Artificial Sequence: Synthetic oligonucleotide
ugagcacuugcagcauggu

SEQ ID NO: 2096009 - RNA, 19 nt, Artificial Sequence
  Description of Artificial Sequence: Synthetic oligonucleotide
cagaggcuaaacacuccca

SEQ ID NO: 2096010 - RNA, 19 nt, Artificial Sequence
  Description of Artificial Sequence: Synthetic oligonucleotide
gacgcgaccgacgcgagcu

SEQ ID NO: 2096011 - RNA, 19 nt, Artificial Sequence
  Description of Artificial Sequence: Synthetic oligonucleotide
gauucucccuggaguuccc

SEQ ID NO: 2096012 - RNA, 19 nt, Artificial Sequence
  Description of Artificial Sequence: Synthetic oligonucleotide
agaaagacugugagucaaa

SEQ ID NO: 2096013 - RNA, 19 nt, Artificial Sequence
  Description of Artificial Sequence: Synthetic oligonucleotide
uaaggccaucuuguuuaac

SEQ ID NO: 2096014 - RNA, 19 nt, Artificial Sequence
  Description of Artificial Sequence: Synthetic oligonucleotide
aucacaggagguagcuacu

SEQ ID NO: 2096015 - RNA, 19 nt, Artificial Sequence
  Description of Artificial Sequence: Synthetic oligonucleotide
uccucaucaccggaugguu

SEQ ID NO: 2096016 - RNA, 19 nt, Artificial Sequence
  Description of Artificial Sequence: Synthetic oligonucleotide
cucccauaucuagaagcuc

SEQ ID NO: 2096017 - RNA, 19 nt, Artificial Sequence
  Description of Artificial Sequence: Synthetic oligonucleotide
cgcacuuaauauaauuaca

SEQ ID NO: 2096018 - RNA, 19 nt, Artificial Sequence
  Description of Artificial Sequence: Synthetic oligonucleotide
caccggaugguucugggcu

SEQ ID NO: 2096019 - RNA, 19 nt, Artificial Sequence
  Description of Artificial Sequence: Synthetic oligonucleotide
ggacccaggcuuagaaaag

SEQ ID NO: 2096020 - RNA, 19 nt, Artificial Sequence
  Description of Artificial Sequence: Synthetic oligonucleotide
aggagucugguagguucag

SEQ ID NO: 2096021 - RNA, 19 nt, Artificial Sequence
  Description of Artificial Sequence: Synthetic oligonucleotide
gaccgacgcgagcugacaa

SEQ ID NO: 2096022 - RNA, 19 nt, Artificial Sequence
  Description of Artificial Sequence: Synthetic oligonucleotide
gccaucuuguuuaacaagu

SEQ ID NO: 2096023 - RNA, 19 nt, Artificial Sequence
  Description of Artificial Sequence: Synthetic oligonucleotide
ccacuucuuggucuuccgg

SEQ ID NO: 2096024 - RNA, 19 nt, Artificial Sequence
  Description of Artificial Sequence: Synthetic oligonucleotide
cccacuuaggacagauuuc

SEQ ID NO: 2096025 - RNA, 19 nt, Artificial Sequence
  Description of Artificial Sequence: Synthetic oligonucleotide
cugugaugguucaggaacu

SEQ ID NO: 2096026 - RNA, 19 nt, Artificial Sequence
  Description of Artificial Sequence: Synthetic oligonucleotide
ggcucggacagcugagcug

SEQ ID NO: 2096027 - RNA, 19 nt, Artificial Sequence
  Description of Artificial Sequence: Synthetic oligonucleotide
ggcuaaacacucccauauc

SEQ ID NO: 2096028 - RNA, 19 nt, Artificial Sequence
  Description of Artificial Sequence: Synthetic oligonucleotide
gcucucggaccuuuaugug

SEQ ID NO: 2096029 - RNA, 19 nt, Artificial Sequence
  Description of Artificial Sequence: Synthetic oligonucleotide
ucuccgggagucccugguu

SEQ ID NO: 2096030 - RNA, 19 nt, Artificial Sequence
  Description of Artificial Sequence: Synthetic oligonucleotide
uuccuucgguugugucaag

SEQ ID NO: 2096031 - RNA, 19 nt, Artificial Sequence
  Description of Artificial Sequence: Synthetic oligonucleotide
uacccacuuaggacagauu

SEQ ID NO: 2096032 - RNA, 19 nt, Artificial Sequence
  Description of Artificial Sequence: Synthetic oligonucleotide
cauucgcagcugucaaaga

SEQ ID NO: 2096033 - RNA, 19 nt, Artificial Sequence
  Description of Artificial Sequence: Synthetic oligonucleotide
gagucaaaucauuggccuu

SEQ ID NO: 2096034 - RNA, 19 nt, Artificial Sequence
  Description of Artificial Sequence: Synthetic oligonucleotide
agugaccugaugagcucca

SEQ ID NO: 2096035 - RNA, 19 nt, Artificial Sequence
  Description of Artificial Sequence: Synthetic oligonucleotide
ccuuaguuucugaucucuc

SEQ ID NO: 2096036 - RNA, 19 nt, Artificial Sequence
  Description of Artificial Sequence: Synthetic oligonucleotide
guucugggcugccggcggc

SEQ ID NO: 2096037 - RNA, 19 nt, Artificial Sequence
  Description of Artificial Sequence: Synthetic oligonucleotide
ccauaggcuguuugguuuc

SEQ ID NO: 2096038 - RNA, 19 nt, Artificial Sequence
  Description of Artificial Sequence: Synthetic oligonucleotide
aacacuccauaggcuguuu

SEQ ID NO: 2096039 - RNA, 19 nt, Artificial Sequence
  Description of Artificial Sequence: Synthetic oligonucleotide
gaacgacugccacuguaau

SEQ ID NO: 2096040 - RNA, 19 nt, Artificial Sequence
  Description of Artificial Sequence: Synthetic oligonucleotide
ucggaccuuuauguguuuu

SEQ ID NO: 2096041 - RNA, 19 nt, Artificial Sequence
  Description of Artificial Sequence: Synthetic oligonucleotide
gcaugguggcaacuggaca

SEQ ID NO: 2096042 - RNA, 19 nt, Artificial Sequence
  Description of Artificial Sequence: Synthetic oligonucleotide
cacauucgcagcugucaaa

SEQ ID NO: 2096043 - RNA, 19 nt, Artificial Sequence
  Description of Artificial Sequence: Synthetic oligonucleotide
ucggacagcugagcugcac

SEQ ID NO: 2096044 - RNA, 19 nt, Artificial Sequence
  Description of Artificial Sequence: Synthetic oligonucleotide
cucucccaccacucgucuc

SEQ ID NO: 2096045 - RNA, 19 nt, Artificial Sequence
  Description of Artificial Sequence: Synthetic oligonucleotide
caacucaaucacggaacga

SEQ ID NO: 2096046 - RNA, 19 nt, Artificial Sequence
  Description of Artificial Sequence: Synthetic oligonucleotide
gacugugagucaaaucauu

SEQ ID NO: 2096047 - RNA, 19 nt, Artificial Sequence
  Description of Artificial Sequence: Synthetic oligonucleotide
gucgaaaaccagaaacuuu

SEQ ID NO: 2096048 - RNA, 19 nt, Artificial Sequence
  Description of Artificial Sequence: Synthetic oligonucleotide
cgugcgacgcgaccgacgc

SEQ ID NO: 2096049 - RNA, 19 nt, Artificial Sequence
  Description of Artificial Sequence: Synthetic oligonucleotide
cauuagccaaaggacacau

SEQ ID NO: 2096050 - RNA, 19 nt, Artificial Sequence
  Description of Artificial Sequence: Synthetic oligonucleotide
caggaacuuuaccugcucu

SEQ ID NO: 2096051 - RNA, 19 nt, Artificial Sequence
  Description of Artificial Sequence: Synthetic oligonucleotide
aucaggacccaggcuuaga

SEQ ID NO: 2096052 - RNA, 19 nt, Artificial Sequence
  Description of Artificial Sequence: Synthetic oligonucleotide
caggacccaggcuuagaaa

SEQ ID NO: 2096053 - RNA, 19 nt, Artificial Sequence
  Description of Artificial Sequence: Synthetic oligonucleotide
gggugacgcacuuaauaua

SEQ ID NO: 2096054 - RNA, 19 nt, Artificial Sequence
  Description of Artificial Sequence: Synthetic oligonucleotide
gaucgucugccaucuccgu

SEQ ID NO: 2096055 - RNA, 19 nt, Artificial Sequence
  Description of Artificial Sequence: Synthetic oligonucleotide
cucgucucccagaucgucu

SEQ ID NO: 2096056 - RNA, 19 nt, Artificial Sequence
  Description of Artificial Sequence: Synthetic oligonucleotide
ugcacgcagcacucccaau

SEQ ID NO: 2096057 - RNA, 19 nt, Artificial Sequence
  Description of Artificial Sequence: Synthetic oligonucleotide
ucuucucgcuguggguuuu

SEQ ID NO: 2096058 - RNA, 19 nt, Artificial Sequence
  Description of Artificial Sequence: Synthetic oligonucleotide
auuagccaaaggacacauu

SEQ ID NO: 2096059 - RNA, 19 nt, Artificial Sequence
  Description of Artificial Sequence: Synthetic oligonucleotide
caucuccgugcgacgcgac

SEQ ID NO: 2096060 - RNA, 19 nt, Artificial Sequence
  Description of Artificial Sequence: Synthetic oligonucleotide
gugucaagaaacacuccau

SEQ ID NO: 2096061 - RNA, 19 nt, Artificial Sequence
  Description of Artificial Sequence: Synthetic oligonucleotide
acaucacaggagguagcua

SEQ ID NO: 2096062 - RNA, 19 nt, Artificial Sequence
  Description of Artificial Sequence: Synthetic oligonucleotide
ccgacgcgagcugacaacc

SEQ ID NO: 2096063 - RNA, 19 nt, Artificial Sequence
  Description of Artificial Sequence: Synthetic oligonucleotide
ggagucugguagguucagc

SEQ ID NO: 2096064 - RNA, 19 nt, Artificial Sequence
  Description of Artificial Sequence: Synthetic oligonucleotide
gugcgacgcgaccgacgcg

SEQ ID NO: 2096065 - RNA, 19 nt, Artificial Sequence
  Description of Artificial Sequence: Synthetic oligonucleotide
ccaucauucuccuuaguuu

SEQ ID NO: 2096066 - RNA, 19 nt, Artificial Sequence
  Description of Artificial Sequence: Synthetic oligonucleotide
ggagucccugguuugggcu

SEQ ID NO: 2096067 - RNA, 19 nt, Artificial Sequence
  Description of Artificial Sequence: Synthetic oligonucleotide
cucccaccacucgucuccc

SEQ ID NO: 2096068 - RNA, 19 nt, Artificial Sequence
  Description of Artificial Sequence: Synthetic oligonucleotide
ggucuuccggguuuccucu

SEQ ID NO: 2096069 - RNA, 19 nt, Artificial Sequence
  Description of Artificial Sequence: Synthetic oligonucleotide
cuguuugguuuccugugau

SEQ ID NO: 2096070 - RNA, 19 nt, Artificial Sequence
  Description of Artificial Sequence: Synthetic oligonucleotide
ggucuccgggagucccugg

SEQ ID NO: 2096071 - RNA, 19 nt, Artificial Sequence
  Description of Artificial Sequence: Synthetic oligonucleotide
acgcgaccgacgcgagcug

SEQ ID NO: 2096072 - RNA, 19 nt, Artificial Sequence
  Description of Artificial Sequence: Synthetic oligonucleotide
acggaacgacugccacugu

SEQ ID NO: 2096073 - RNA, 19 nt, Artificial Sequence
  Description of Artificial Sequence: Synthetic oligonucleotide
ccuucgguugugucaagaa

SEQ ID NO: 2096074 - RNA, 19 nt, Artificial Sequence
  Description of Artificial Sequence: Synthetic oligonucleotide
ugguggcaacuggacacuu

SEQ ID NO: 2096075 - RNA, 19 nt, Artificial Sequence
  Description of Artificial Sequence: Synthetic oligonucleotide
cuccauaggcuguuugguu

SEQ ID NO: 2096076 - RNA, 19 nt, Artificial Sequence
  Description of Artificial Sequence: Synthetic oligonucleotide
uuaccugcucucggaccuu

SEQ ID NO: 2096077 - RNA, 19 nt, Artificial Sequence
  Description of Artificial Sequence: Synthetic oligonucleotide
uccgugcgacgcgaccgac

SEQ ID NO: 2096078 - RNA, 19 nt, Artificial Sequence
  Description of Artificial Sequence: Synthetic oligonucleotide
ccgugcgacgcgaccgacg

SEQ ID NO: 2096079 - RNA, 19 nt, Artificial Sequence
  Description of Artificial Sequence: Synthetic oligonucleotide
cccauaucuagaagcucaa

SEQ ID NO: 2096080 - RNA, 19 nt, Artificial Sequence
  Description of Artificial Sequence: Synthetic oligonucleotide
cgcuguggguuuuccgaag

SEQ ID NO: 2096081 - RNA, 19 nt, Artificial Sequence
  Description of Artificial Sequence: Synthetic oligonucleotide
ccuggaguucccacaccca

SEQ ID NO: 2096082 - RNA, 19 nt, Artificial Sequence
  Description of Artificial Sequence: Synthetic oligonucleotide
cugcaucauuucugugucu

SEQ ID NO: 2096083 - RNA, 19 nt, Artificial Sequence
  Description of Artificial Sequence: Synthetic oligonucleotide
ccgggagucccugguuugg

SEQ ID NO: 2096084 - RNA, 19 nt, Artificial Sequence
  Description of Artificial Sequence: Synthetic oligonucleotide
caccacucgucucccagau

SEQ ID NO: 2096085 - RNA, 19 nt, Artificial Sequence
  Description of Artificial Sequence: Synthetic oligonucleotide
ggccggcuggcucucccac

SEQ ID NO: 2096086 - RNA, 19 nt, Artificial Sequence
  Description of Artificial Sequence: Synthetic oligonucleotide
gccggcuggcucucccacc

SEQ ID NO: 2096087 - RNA, 19 nt, Artificial Sequence
  Description of Artificial Sequence: Synthetic oligonucleotide
cacuuaggacagauuucuu

SEQ ID NO: 2096088 - RNA, 19 nt, Artificial Sequence
  Description of Artificial Sequence: Synthetic oligonucleotide
ccagguguaucacacgauu

SEQ ID NO: 2096089 - RNA, 19 nt, Artificial Sequence
  Description of Artificial Sequence: Synthetic oligonucleotide
gugacgcacuuaauauaau

SEQ ID NO: 2096090 - RNA, 19 nt, Artificial Sequence
  Description of Artificial Sequence: Synthetic oligonucleotide
cucggacagcugagcugca

SEQ ID NO: 2096091 - RNA, 19 nt, Artificial Sequence
  Description of Artificial Sequence: Synthetic oligonucleotide
gggcucggacagcugagcu

SEQ ID NO: 2096092 - RNA, 19 nt, Artificial Sequence
  Description of Artificial Sequence: Synthetic oligonucleotide
ccggcuggcucucccacca

SEQ ID NO: 2096093 - RNA, 19 nt, Artificial Sequence
  Description of Artificial Sequence: Synthetic oligonucleotide
cacucgucucccagaucgu

SEQ ID NO: 2096094 - RNA, 19 nt, Artificial Sequence
  Description of Artificial Sequence: Synthetic oligonucleotide
ccaccacucgucucccaga

SEQ ID NO: 2096095 - RNA, 19 nt, Artificial Sequence
  Description of Artificial Sequence: Synthetic oligonucleotide
cuuccggguuuccucuuuu

SEQ ID NO: 2096096 - RNA, 19 nt, Artificial Sequence
  Description of Artificial Sequence: Synthetic oligonucleotide
ccgaaguuuuacccacuua

SEQ ID NO: 2096097 - RNA, 19 nt, Artificial Sequence
  Description of Artificial Sequence: Synthetic oligonucleotide
cacgauucuccaggaacuu

SEQ ID NO: 2096098 - RNA, 19 nt, Artificial Sequence
  Description of Artificial Sequence: Synthetic oligonucleotide
gcggccggcuggcucuccc

SEQ ID NO: 2096099 - RNA, 19 nt, Artificial Sequence
  Description of Artificial Sequence: Synthetic oligonucleotide
cgucucccagaucgucugc

SEQ ID NO: 2096100 - RNA, 19 nt, Artificial Sequence
  Description of Artificial Sequence: Synthetic oligonucleotide
ccauaucuagaagcucaaa

SEQ ID NO: 2096101 - RNA, 19 nt, Artificial Sequence
  Description of Artificial Sequence: Synthetic oligonucleotide
cgggagucccugguuuggg

SEQ ID NO: 2096102 - RNA, 19 nt, Artificial Sequence
  Description of Artificial Sequence: Synthetic oligonucleotide
gcgaccgacgcgagcugac

SEQ ID NO: 2096103 - RNA, 19 nt, Artificial Sequence
  Description of Artificial Sequence: Synthetic oligonucleotide
ccaucuccgugcgacgcga

SEQ ID NO: 2096104 - RNA, 19 nt, Artificial Sequence
  Description of Artificial Sequence: Synthetic oligonucleotide
cccagaucgucugccaucu

SEQ ID NO: 2096105 - RNA, 19 nt, Artificial Sequence
  Description of Artificial Sequence: Synthetic oligonucleotide
cucggaccuuuauguguuu

SEQ ID NO: 2096106 - RNA, 19 nt, Artificial Sequence
  Description of Artificial Sequence: Synthetic oligonucleotide
cggaacgacugccacugua

SEQ ID NO: 2096107 - RNA, 19 nt, Artificial Sequence
  Description of Artificial Sequence: Synthetic oligonucleotide
ccagaucgucugccaucuc

SEQ ID NO: 2096108 - RNA, 19 nt, Artificial Sequence
  Description of Artificial Sequence: Synthetic oligonucleotide
gcgacgcgaccgacgcgag

SEQ ID NO: 2096109 - RNA, 19 nt, Artificial Sequence
  Description of Artificial Sequence: Synthetic oligonucleotide
ccugcucucggaccuuuau

SEQ ID NO: 2096110 - RNA, 19 nt, Artificial Sequence
  Description of Artificial Sequence: Synthetic oligonucleotide
cccagguguaucacacgau

SEQ ID NO: 2096111 - RNA, 19 nt, Artificial Sequence
  Description of Artificial Sequence: Synthetic oligonucleotide
cggaugguucugggcugcc

SEQ ID NO: 2096112 - RNA, 19 nt, Artificial Sequence
  Description of Artificial Sequence: Synthetic oligonucleotide
cgaccgacgcgagcugaca

SEQ ID NO: 2096113 - RNA, 19 nt, Artificial Sequence
  Description of Artificial Sequence: Synthetic oligonucleotide
cgcgaccgacgcgagcuga

SEQ ID NO: 2096114 - RNA, 19 nt, Artificial Sequence
  Description of Artificial Sequence: Synthetic oligonucleotide
cgacugccacuguaauggu

SEQ ID NO: 2096115 - RNA, 19 nt, Artificial Sequence
  Description of Artificial Sequence: Synthetic oligonucleotide
acaacauacaaauaaagac

SEQ ID NO: 2096116 - RNA, 19 nt, Artificial Sequence
  Description of Artificial Sequence: Synthetic oligonucleotide
aaaguaugugaccagacac

SEQ ID NO: 2096117 - RNA, 19 nt, Artificial Sequence
  Description of Artificial Sequence: Synthetic oligonucleotide
aaacuguacagguagagac

SEQ ID NO: 2096118 - RNA, 19 nt, Artificial Sequence
  Description of Artificial Sequence: Synthetic oligonucleotide
ucuugcgauauuaagacag

SEQ ID NO: 2096119 - RNA, 19 nt, Artificial Sequence
  Description of Artificial Sequence: Synthetic oligonucleotide
acuccuagcacccacaugg

SEQ ID NO: 2096120 - RNA, 19 nt, Artificial Sequence
  Description of Artificial Sequence: Synthetic oligonucleotide
cuuggaacggaaaagaagc

SEQ ID NO: 2096121 - RNA, 19 nt, Artificial Sequence
  Description of Artificial Sequence: Synthetic oligonucleotide
cugcuaaucaucuucaagg

SEQ ID NO: 2096122 - RNA, 19 nt, Artificial Sequence
  Description of Artificial Sequence: Synthetic oligonucleotide
ugaucaaaggaccagguga

SEQ ID NO: 2096123 - RNA, 19 nt, Artificial Sequence
  Description of Artificial Sequence: Synthetic oligonucleotide
aaucuugaagccauugugc

SEQ ID NO: 2096124 - RNA, 19 nt, Artificial Sequence
  Description of Artificial Sequence: Synthetic oligonucleotide
cagaauauguuccuggugg

SEQ ID NO: 2096125 - RNA, 19 nt, Artificial Sequence
  Description of Artificial Sequence: Synthetic oligonucleotide
aagccuaaaaguaugugac

SEQ ID NO: 2096126 - RNA, 19 nt, Artificial Sequence
  Description of Artificial Sequence: Synthetic oligonucleotide
ucaguuguuaagcacagcu

SEQ ID NO: 2096127 - RNA, 19 nt, Artificial Sequence
  Description of Artificial Sequence: Synthetic oligonucleotide
cauuucauguccaggaugg

SEQ ID NO: 2096128 - RNA, 19 nt, Artificial Sequence
  Description of Artificial Sequence: Synthetic oligonucleotide
uuucuugcgauauuaagac

SEQ ID NO: 2096129 - RNA, 19 nt, Artificial Sequence
  Description of Artificial Sequence: Synthetic oligonucleotide
aauacacaaguucugucug

SEQ ID NO: 2096130 - RNA, 19 nt, Artificial Sequence
  Description of Artificial Sequence: Synthetic oligonucleotide
aauuaaugcucccaugcca

SEQ ID NO: 2096131 - RNA, 19 nt, Artificial Sequence
  Description of Artificial Sequence: Synthetic oligonucleotide
ucacaacauacaaauaaag

SEQ ID NO: 2096132 - RNA, 19 nt, Artificial Sequence
  Description of Artificial Sequence: Synthetic oligonucleotide
uuagaaucacugcuaauca

SEQ ID NO: 2096133 - RNA, 19 nt, Artificial Sequence
  Description of Artificial Sequence: Synthetic oligonucleotide
guagagacgaccuaaacga

SEQ ID NO: 2096134 - RNA, 19 nt, Artificial Sequence
  Description of Artificial Sequence: Synthetic oligonucleotide
cucgcuguaauucagcugc

SEQ ID NO: 2096135 - RNA, 19 nt, Artificial Sequence
  Description of Artificial Sequence: Synthetic oligonucleotide
aaaaguaugugaccagaca

SEQ ID NO: 2096136 - RNA, 19 nt, Artificial Sequence
  Description of Artificial Sequence: Synthetic oligonucleotide
cagaacaugcucaucauag

SEQ ID NO: 2096137 - RNA, 19 nt, Artificial Sequence
  Description of Artificial Sequence: Synthetic oligonucleotide
ugcuaaucaucuucaaggg

SEQ ID NO: 2096138 - RNA, 19 nt, Artificial Sequence
  Description of Artificial Sequence: Synthetic oligonucleotide
uuugccaagccuaaaagua

SEQ ID NO: 2096139 - RNA, 19 nt, Artificial Sequence
  Description of Artificial Sequence: Synthetic oligonucleotide
ucucauauuccaucaggcg

SEQ ID NO: 2096140 - RNA, 19 nt, Artificial Sequence
  Description of Artificial Sequence: Synthetic oligonucleotide
cuggauauugguuguaggg

SEQ ID NO: 2096141 - RNA, 19 nt, Artificial Sequence
  Description of Artificial Sequence: Synthetic oligonucleotide
aguuguuaagcacagcugu

SEQ ID NO: 2096142 - RNA, 19 nt, Artificial Sequence
  Description of Artificial Sequence: Synthetic oligonucleotide
uuggaccucaaccagaggu

SEQ ID NO: 2096143 - RNA, 19 nt, Artificial Sequence
  Description of Artificial Sequence: Synthetic oligonucleotide
aguaauugaaagcagcgau

SEQ ID NO: 2096144 - RNA, 19 nt, Artificial Sequence
  Description of Artificial Sequence: Synthetic oligonucleotide
aauucagcugcucccucac

SEQ ID NO: 2096145 - RNA, 19 nt, Artificial Sequence
  Description of Artificial Sequence: Synthetic oligonucleotide
uaauuaaugcucccaugcc

SEQ ID NO: 2096146 - RNA, 19 nt, Artificial Sequence
  Description of Artificial Sequence: Synthetic oligonucleotide
cuuuugcuagugaagacag

SEQ ID NO: 2096147 - RNA, 19 nt, Artificial Sequence
  Description of Artificial Sequence: Synthetic oligonucleotide
cuuagaaucacugcuaauc

SEQ ID NO: 2096148 - RNA, 19 nt, Artificial Sequence
  Description of Artificial Sequence: Synthetic oligonucleotide
ucugccaguaauugaaagc

SEQ ID NO: 2096149 - RNA, 19 nt, Artificial Sequence
  Description of Artificial Sequence: Synthetic oligonucleotide
agaacaugcucaucauagc

SEQ ID NO: 2096150 - RNA, 19 nt, Artificial Sequence
  Description of Artificial Sequence: Synthetic oligonucleotide
ugcgauauuaagacaguca

SEQ ID NO: 2096151 - RNA, 19 nt, Artificial Sequence
  Description of Artificial Sequence: Synthetic oligonucleotide
ucauugaaacuguacaggu

SEQ ID NO: 2096152 - RNA, 19 nt, Artificial Sequence
  Description of Artificial Sequence: Synthetic oligonucleotide
gguagagacgaccuaaacg

SEQ ID NO: 2096153 - RNA, 19 nt, Artificial Sequence
  Description of Artificial Sequence: Synthetic oligonucleotide
ucccaguugaccaauccag

SEQ ID NO: 2096154 - RNA, 19 nt, Artificial Sequence
  Description of Artificial Sequence: Synthetic oligonucleotide
ugcuagugaagacaggugu

SEQ ID NO: 2096155 - RNA, 19 nt, Artificial Sequence
  Description of Artificial Sequence: Synthetic oligonucleotide
uuugcuagugaagacaggu

SEQ ID NO: 2096156 - RNA, 19 nt, Artificial Sequence
  Description of Artificial Sequence: Synthetic oligonucleotide
uacacuaaugaguucggca

SEQ ID NO: 2096157 - RNA, 19 nt, Artificial Sequence
  Description of Artificial Sequence: Synthetic oligonucleotide
uaguauuucuaaaauuaaa

SEQ ID NO: 2096158 - RNA, 19 nt, Artificial Sequence
  Description of Artificial Sequence: Synthetic oligonucleotide
gagguugacuccuagcacc

SEQ ID NO: 2096159 - RNA, 19 nt, Artificial Sequence
  Description of Artificial Sequence: Synthetic oligonucleotide
uguaggguguaacuguucu

SEQ ID NO: 2096160 - RNA, 19 nt, Artificial Sequence
  Description of Artificial Sequence: Synthetic oligonucleotide
uuaagcacagcuguguugu

SEQ ID NO: 2096161 - RNA, 19 nt, Artificial Sequence
  Description of Artificial Sequence: Synthetic oligonucleotide
uaaaaguaugugaccagac

SEQ ID NO: 2096162 - RNA, 19 nt, Artificial Sequence
  Description of Artificial Sequence: Synthetic oligonucleotide
agugugggcuucuuggaac

SEQ ID NO: 2096163 - RNA, 19 nt, Artificial Sequence
  Description of Artificial Sequence: Synthetic oligonucleotide
agccuaaaaguaugugacc

SEQ ID NO: 2096164 - RNA, 19 nt, Artificial Sequence
  Description of Artificial Sequence: Synthetic oligonucleotide
acugcuaaucaucuucaag

SEQ ID NO: 2096165 - RNA, 19 nt, Artificial Sequence
  Description of Artificial Sequence: Synthetic oligonucleotide
uuuauguuccgaguguccc

SEQ ID NO: 2096166 - RNA, 19 nt, Artificial Sequence
  Description of Artificial Sequence: Synthetic oligonucleotide
augaguucggcauuucuug

SEQ ID NO: 2096167 - RNA, 19 nt, Artificial Sequence
  Description of Artificial Sequence: Synthetic oligonucleotide
agaauauguuccugguggg

SEQ ID NO: 2096168 - RNA, 19 nt, Artificial Sequence
  Description of Artificial Sequence: Synthetic oligonucleotide
uugagaaucuugaagccau

SEQ ID NO: 2096169 - RNA, 19 nt, Artificial Sequence
  Description of Artificial Sequence: Synthetic oligonucleotide
agaaucacugcuaaucauc

SEQ ID NO: 2096170 - RNA, 19 nt, Artificial Sequence
  Description of Artificial Sequence: Synthetic oligonucleotide
uuugaucaaaggaccaggu

SEQ ID NO: 2096171 - RNA, 19 nt, Artificial Sequence
  Description of Artificial Sequence: Synthetic oligonucleotide
ugugccaagcauccuagug

SEQ ID NO: 2096172 - RNA, 19 nt, Artificial Sequence
  Description of Artificial Sequence: Synthetic oligonucleotide
aguuaauuaaugcucccau

SEQ ID NO: 2096173 - RNA, 19 nt, Artificial Sequence
  Description of Artificial Sequence: Synthetic oligonucleotide
caucauagcugccaguagc

SEQ ID NO: 2096174 - RNA, 19 nt, Artificial Sequence
  Description of Artificial Sequence: Synthetic oligonucleotide
auuucuugcgauauuaaga

SEQ ID NO: 2096175 - RNA, 19 nt, Artificial Sequence
  Description of Artificial Sequence: Synthetic oligonucleotide
uucuuuggaccucaaccag

SEQ ID NO: 2096176 - RNA, 19 nt, Artificial Sequence
  Description of Artificial Sequence: Synthetic oligonucleotide
auuugccaagccuaaaagu

SEQ ID NO: 2096177 - RNA, 19 nt, Artificial Sequence
  Description of Artificial Sequence: Synthetic oligonucleotide
aaagugaugggcuggccau

SEQ ID NO: 2096178 - RNA, 19 nt, Artificial Sequence
  Description of Artificial Sequence: Synthetic oligonucleotide
gaucaaaggaccaggugag

SEQ ID NO: 2096179 - RNA, 19 nt, Artificial Sequence
  Description of Artificial Sequence: Synthetic oligonucleotide
gucccagccucucagaagg

SEQ ID NO: 2096180 - RNA, 19 nt, Artificial Sequence
  Description of Artificial Sequence: Synthetic oligonucleotide
acggaaaagaagccaggac

SEQ ID NO: 2096181 - RNA, 19 nt, Artificial Sequence
  Description of Artificial Sequence: Synthetic oligonucleotide
uaaagacuaguauuucuaa

SEQ ID NO: 2096182 - RNA, 19 nt, Artificial Sequence
  Description of Artificial Sequence: Synthetic oligonucleotide
uguacagguagagacgacc

SEQ ID NO: 2096183 - RNA, 19 nt, Artificial Sequence
  Description of Artificial Sequence: Synthetic oligonucleotide
ucuacagacccauuggcau

SEQ ID NO: 2096184 - RNA, 19 nt, Artificial Sequence
  Description of Artificial Sequence: Synthetic oligonucleotide
ugaaacuguacagguagag

SEQ ID NO: 2096185 - RNA, 19 nt, Artificial Sequence
  Description of Artificial Sequence: Synthetic oligonucleotide
cucaaccagagguuuagcc

SEQ ID NO: 2096186 - RNA, 19 nt, Artificial Sequence
  Description of Artificial Sequence: Synthetic oligonucleotide
acacuaaugaguucggcau

SEQ ID NO: 2096187 - RNA, 19 nt, Artificial Sequence
  Description of Artificial Sequence: Synthetic oligonucleotide
uuccgagugucccacagca

SEQ ID NO: 2096188 - RNA, 19 nt, Artificial Sequence
  Description of Artificial Sequence: Synthetic oligonucleotide
aagccacucgcuguaauuc

SEQ ID NO: 2096189 - RNA, 19 nt, Artificial Sequence
  Description of Artificial Sequence: Synthetic oligonucleotide
uugaucaaaggaccaggug

SEQ ID NO: 2096190 - RNA, 19 nt, Artificial Sequence
  Description of Artificial Sequence: Synthetic oligonucleotide
uccaggauaaggcuggaua

SEQ ID NO: 2096191 - RNA, 19 nt, Artificial Sequence
  Description of Artificial Sequence: Synthetic oligonucleotide
aucauagcugccaguagcc

SEQ ID NO: 2096192 - RNA, 19 nt, Artificial Sequence
  Description of Artificial Sequence: Synthetic oligonucleotide
auugguuguaggguguaac

SEQ ID NO: 2096193 - RNA, 19 nt, Artificial Sequence
  Description of Artificial Sequence: Synthetic oligonucleotide
agguuuagccguguugucc

SEQ ID NO: 2096194 - RNA, 19 nt, Artificial Sequence
  Description of Artificial Sequence: Synthetic oligonucleotide
gaauacacaaguucugucu

SEQ ID NO: 2096195 - RNA, 19 nt, Artificial Sequence
  Description of Artificial Sequence: Synthetic oligonucleotide
gaguucggcauuucuugcg

SEQ ID NO: 2096196 - RNA, 19 nt, Artificial Sequence
  Description of Artificial Sequence: Synthetic oligonucleotide
agaaucuugaagccauugu

SEQ ID NO: 2096197 - RNA, 19 nt, Artificial Sequence
  Description of Artificial Sequence: Synthetic oligonucleotide
auauuaagacagucacauc

SEQ ID NO: 2096198 - RNA, 19 nt, Artificial Sequence
  Description of Artificial Sequence: Synthetic oligonucleotide
uuuugcuagugaagacagg

SEQ ID NO: 2096199 - RNA, 19 nt, Artificial Sequence
  Description of Artificial Sequence: Synthetic oligonucleotide
guguuguccucauugaaac

SEQ ID NO: 2096200 - RNA, 19 nt, Artificial Sequence
  Description of Artificial Sequence: Synthetic oligonucleotide
auuuugaucaaaggaccag

SEQ ID NO: 2096201 - RNA, 19 nt, Artificial Sequence
  Description of Artificial Sequence: Synthetic oligonucleotide
caagccuaaaaguauguga

SEQ ID NO: 2096202 - RNA, 19 nt, Artificial Sequence
  Description of Artificial Sequence: Synthetic oligonucleotide
ugaauacacaaguucuguc

SEQ ID NO: 2096203 - RNA, 19 nt, Artificial Sequence
  Description of Artificial Sequence: Synthetic oligonucleotide
ucuuuggaccucaaccaga

SEQ ID NO: 2096204 - RNA, 19 nt, Artificial Sequence
  Description of Artificial Sequence: Synthetic oligonucleotide
cuuuauguuccgagugucc

SEQ ID NO: 2096205 - RNA, 19 nt, Artificial Sequence
  Description of Artificial Sequence: Synthetic oligonucleotide
ugccaagccuaaaaguaug

SEQ ID NO: 2096206 - RNA, 19 nt, Artificial Sequence
  Description of Artificial Sequence: Synthetic oligonucleotide
ccuucuuuggaccucaacc

SEQ ID NO: 2096207 - RNA, 19 nt, Artificial Sequence
  Description of Artificial Sequence: Synthetic oligonucleotide
cacaaguucugucugccag

SEQ ID NO: 2096208 - RNA, 19 nt, Artificial Sequence
  Description of Artificial Sequence: Synthetic oligonucleotide
uaaugaguucggcauuucu

SEQ ID NO: 2096209 - RNA, 19 nt, Artificial Sequence
  Description of Artificial Sequence: Synthetic oligonucleotide
uguuccgagugucccacag

SEQ ID NO: 2096210 - RNA, 19 nt, Artificial Sequence
  Description of Artificial Sequence: Synthetic oligonucleotide
agagguuuagccguguugu

SEQ ID NO: 2096211 - RNA, 19 nt, Artificial Sequence
  Description of Artificial Sequence: Synthetic oligonucleotide
ugcuuuauguuccgagugu

SEQ ID NO: 2096212 - RNA, 19 nt, Artificial Sequence
  Description of Artificial Sequence: Synthetic oligonucleotide
acagacaucucuccuccag

SEQ ID NO: 2096213 - RNA, 19 nt, Artificial Sequence
  Description of Artificial Sequence: Synthetic oligonucleotide
auggagugucuuuugcuag

SEQ ID NO: 2096214 - RNA, 19 nt, Artificial Sequence
  Description of Artificial Sequence: Synthetic oligonucleotide
gcaguugagaaucuugaag

SEQ ID NO: 2096215 - RNA, 19 nt, Artificial Sequence
  Description of Artificial Sequence: Synthetic oligonucleotide
ucaucauagcugccaguag

SEQ ID NO: 2096216 - RNA, 19 nt, Artificial Sequence
  Description of Artificial Sequence: Synthetic oligonucleotide
ugcucaucauagcugccag

SEQ ID NO: 2096217 - RNA, 19 nt, Artificial Sequence
  Description of Artificial Sequence: Synthetic oligonucleotide
uggauauugguuguagggu

SEQ ID NO: 2096218 - RNA, 19 nt, Artificial Sequence
  Description of Artificial Sequence: Synthetic oligonucleotide
cuucuuuggaccucaacca

SEQ ID NO: 2096219 - RNA, 19 nt, Artificial Sequence
  Description of Artificial Sequence: Synthetic oligonucleotide
gaauauguuccuggugggg

SEQ ID NO: 2096220 - RNA, 19 nt, Artificial Sequence
  Description of Artificial Sequence: Synthetic oligonucleotide
aacggaaaagaagccagga

SEQ ID NO: 2096221 - RNA, 19 nt, Artificial Sequence
  Description of Artificial Sequence: Synthetic oligonucleotide
gacaccggaauauggcacc

SEQ ID NO: 2096222 - RNA, 19 nt, Artificial Sequence
  Description of Artificial Sequence: Synthetic oligonucleotide
uucccaguugaccaaucca

SEQ ID NO: 2096223 - RNA, 19 nt, Artificial Sequence
  Description of Artificial Sequence: Synthetic oligonucleotide
cagaagaaucccuucuuug

SEQ ID NO: 2096224 - RNA, 19 nt, Artificial Sequence
  Description of Artificial Sequence: Synthetic oligonucleotide
agcuccguacacuaaugag

SEQ ID NO: 2096225 - RNA, 19 nt, Artificial Sequence
  Description of Artificial Sequence: Synthetic oligonucleotide
auauggcaccauuucaugu

SEQ ID NO: 2096226 - RNA, 19 nt, Artificial Sequence
  Description of Artificial Sequence: Synthetic oligonucleotide
agguagagacgaccuaaac

SEQ ID NO: 2096227 - RNA, 19 nt, Artificial Sequence
  Description of Artificial Sequence: Synthetic oligonucleotide
cauagcugccaguagccag

SEQ ID NO: 2096228 - RNA, 19 nt, Artificial Sequence
  Description of Artificial Sequence: Synthetic oligonucleotide
ccauuuugaucaaaggacc

SEQ ID NO: 2096229 - RNA, 19 nt, Artificial Sequence
  Description of Artificial Sequence: Synthetic oligonucleotide
ugagguugacuccuagcac

SEQ ID NO: 2096230 - RNA, 19 nt, Artificial Sequence
  Description of Artificial Sequence: Synthetic oligonucleotide
gcgauauuaagacagucac

SEQ ID NO: 2096231 - RNA, 19 nt, Artificial Sequence
  Description of Artificial Sequence: Synthetic oligonucleotide
acaaggacagacaucucuc

SEQ ID NO: 2096232 - RNA, 19 nt, Artificial Sequence
  Description of Artificial Sequence: Synthetic oligonucleotide
cacuugagccuccacacgc

SEQ ID NO: 2096233 - RNA, 19 nt, Artificial Sequence
  Description of Artificial Sequence: Synthetic oligonucleotide
caugccucaaagugauggg

SEQ ID NO: 2096234 - RNA, 19 nt, Artificial Sequence
  Description of Artificial Sequence: Synthetic oligonucleotide
ugccacuugagccuccaca

SEQ ID NO: 2096235 - RNA, 19 nt, Artificial Sequence
  Description of Artificial Sequence: Synthetic oligonucleotide
uguucuuucagagguccug

SEQ ID NO: 2096236 - RNA, 19 nt, Artificial Sequence
  Description of Artificial Sequence: Synthetic oligonucleotide
ggauauugguuguagggug

SEQ ID NO: 2096237 - RNA, 19 nt, Artificial Sequence
  Description of Artificial Sequence: Synthetic oligonucleotide
agagacgaccuaaacgaac

SEQ ID NO: 2096238 - RNA, 19 nt, Artificial Sequence
  Description of Artificial Sequence: Synthetic oligonucleotide
cuagugaagacaggugugc

SEQ ID NO: 2096239 - RNA, 19 nt, Artificial Sequence
  Description of Artificial Sequence: Synthetic oligonucleotide
aagacaggugugccaagca

SEQ ID NO: 2096240 - RNA, 19 nt, Artificial Sequence
  Description of Artificial Sequence: Synthetic oligonucleotide
ugccaguaauugaaagcag

SEQ ID NO: 2096241 - RNA, 19 nt, Artificial Sequence
  Description of Artificial Sequence: Synthetic oligonucleotide
ucugucugccaguaauuga

SEQ ID NO: 2096242 - RNA, 19 nt, Artificial Sequence
  Description of Artificial Sequence: Synthetic oligonucleotide
uugcuagugaagacaggug

SEQ ID NO: 2096243 - RNA, 19 nt, Artificial Sequence
  Description of Artificial Sequence: Synthetic oligonucleotide
auggcagaagaaucccuuc

SEQ ID NO: 2096244 - RNA, 19 nt, Artificial Sequence
  Description of Artificial Sequence: Synthetic oligonucleotide
uucuuggaacggaaaagaa

SEQ ID NO: 2096245 - RNA, 19 nt, Artificial Sequence
  Description of Artificial Sequence: Synthetic oligonucleotide
uggucuccgacccuuccag

SEQ ID NO: 2096246 - RNA, 19 nt, Artificial Sequence
  Description of Artificial Sequence: Synthetic oligonucleotide
ccuagcacccacauggugg

SEQ ID NO: 2096247 - RNA, 19 nt, Artificial Sequence
  Description of Artificial Sequence: Synthetic oligonucleotide
uaauucagcugcucccuca

SEQ ID NO: 2096248 - RNA, 19 nt, Artificial Sequence
  Description of Artificial Sequence: Synthetic oligonucleotide
aaugaguucggcauuucuu

SEQ ID NO: 2096249 - RNA, 19 nt, Artificial Sequence
  Description of Artificial Sequence: Synthetic oligonucleotide
uacacaaguucugucugcc

SEQ ID NO: 2096250 - RNA, 19 nt, Artificial Sequence
  Description of Artificial Sequence: Synthetic oligonucleotide
agcacagcuguguuguucu

SEQ ID NO: 2096251 - RNA, 19 nt, Artificial Sequence
  Description of Artificial Sequence: Synthetic oligonucleotide
cuagcacccacaugguggc

SEQ ID NO: 2096252 - RNA, 19 nt, Artificial Sequence
  Description of Artificial Sequence: Synthetic oligonucleotide
uggaacggaaaagaagcca

SEQ ID NO: 2096253 - RNA, 19 nt, Artificial Sequence
  Description of Artificial Sequence: Synthetic oligonucleotide
uaggguguaacuguucuuc

SEQ ID NO: 2096254 - RNA, 19 nt, Artificial Sequence
  Description of Artificial Sequence: Synthetic oligonucleotide
caaggacagacaucucucc

SEQ ID NO: 2096255 - RNA, 19 nt, Artificial Sequence
  Description of Artificial Sequence: Synthetic oligonucleotide
ucagcuccguacacuaaug

SEQ ID NO: 2096256 - RNA, 19 nt, Artificial Sequence
  Description of Artificial Sequence: Synthetic oligonucleotide
uccuuucacuggcacaucu

SEQ ID NO: 2096257 - RNA, 19 nt, Artificial Sequence
  Description of Artificial Sequence: Synthetic oligonucleotide
uuguuaagcacagcugugu

SEQ ID NO: 2096258 - RNA, 19 nt, Artificial Sequence
  Description of Artificial Sequence: Synthetic oligonucleotide
uggacugggugccacuuga

SEQ ID NO: 2096259 - RNA, 19 nt, Artificial Sequence
  Description of Artificial Sequence: Synthetic oligonucleotide
gaacggaaaagaagccagg

SEQ ID NO: 2096260 - RNA, 19 nt, Artificial Sequence
  Description of Artificial Sequence: Synthetic oligonucleotide
uugccaagccuaaaaguau

SEQ ID NO: 2096261 - RNA, 19 nt, Artificial Sequence
  Description of Artificial Sequence: Synthetic oligonucleotide
gcucacaacauacaaauaa

SEQ ID NO: 2096262 - RNA, 19 nt, Artificial Sequence
  Description of Artificial Sequence: Synthetic oligonucleotide
uuauguuccgaguguccca

SEQ ID NO: 2096263 - RNA, 19 nt, Artificial Sequence
  Description of Artificial Sequence: Synthetic oligonucleotide
agcgauccaugccucaaag

SEQ ID NO: 2096264 - RNA, 19 nt, Artificial Sequence
  Description of Artificial Sequence: Synthetic oligonucleotide
gccauuuugaucaaaggac

SEQ ID NO: 2096265 - RNA, 19 nt, Artificial Sequence
  Description of Artificial Sequence: Synthetic oligonucleotide
gacaaggacagacaucucu

SEQ ID NO: 2096266 - RNA, 19 nt, Artificial Sequence
  Description of Artificial Sequence: Synthetic oligonucleotide
caguuguuaagcacagcug

SEQ ID NO: 2096267 - RNA, 19 nt, Artificial Sequence
  Description of Artificial Sequence: Synthetic oligonucleotide
uucugucugccaguaauug

SEQ ID NO: 2096268 - RNA, 19 nt, Artificial Sequence
  Description of Artificial Sequence: Synthetic oligonucleotide
ugcacacacccauggagug

SEQ ID NO: 2096269 - RNA, 19 nt, Artificial Sequence
  Description of Artificial Sequence: Synthetic oligonucleotide
gacgaccuaaacgaacuug

SEQ ID NO: 2096270 - RNA, 19 nt, Artificial Sequence
  Description of Artificial Sequence: Synthetic oligonucleotide
cauuuugaucaaaggacca

SEQ ID NO: 2096271 - RNA, 19 nt, Artificial Sequence
  Description of Artificial Sequence: Synthetic oligonucleotide
agugucccacagcagaaca

SEQ ID NO: 2096272 - RNA, 19 nt, Artificial Sequence
  Description of Artificial Sequence: Synthetic oligonucleotide
uguuaagcacagcuguguu

SEQ ID NO: 2096273 - RNA, 19 nt, Artificial Sequence
  Description of Artificial Sequence: Synthetic oligonucleotide
ugccaagcauccuaguguc

SEQ ID NO: 2096274 - RNA, 19 nt, Artificial Sequence
  Description of Artificial Sequence: Synthetic oligonucleotide
gcuguaauucagcugcucc

SEQ ID NO: 2096275 - RNA, 19 nt, Artificial Sequence
  Description of Artificial Sequence: Synthetic oligonucleotide
agacaccggaauauggcac

SEQ ID NO: 2096276 - RNA, 19 nt, Artificial Sequence
  Description of Artificial Sequence: Synthetic oligonucleotide
uucuugcgauauuaagaca

SEQ ID NO: 2096277 - RNA, 19 nt, Artificial Sequence
  Description of Artificial Sequence: Synthetic oligonucleotide
caccauuucauguccagga

SEQ ID NO: 2096278 - RNA, 19 nt, Artificial Sequence
  Description of Artificial Sequence: Synthetic oligonucleotide
aguucggcauuucuugcga

SEQ ID NO: 2096279 - RNA, 19 nt, Artificial Sequence
  Description of Artificial Sequence: Synthetic oligonucleotide
agcauccuagugucccagc

SEQ ID NO: 2096280 - RNA, 19 nt, Artificial Sequence
  Description of Artificial Sequence: Synthetic oligonucleotide
aggcggagcagcucuacag

SEQ ID NO: 2096281 - RNA, 19 nt, Artificial Sequence
  Description of Artificial Sequence: Synthetic oligonucleotide
cagacaucucuccuccagg

SEQ ID NO: 2096282 - RNA, 19 nt, Artificial Sequence
  Description of Artificial Sequence: Synthetic oligonucleotide
ucccucacucagcaucagg

SEQ ID NO: 2096283 - RNA, 19 nt, Artificial Sequence
  Description of Artificial Sequence: Synthetic oligonucleotide
guaauugaaagcagcgauc

SEQ ID NO: 2096284 - RNA, 19 nt, Artificial Sequence
  Description of Artificial Sequence: Synthetic oligonucleotide
cagguuucccaguugacca

SEQ ID NO: 2096285 - RNA, 19 nt, Artificial Sequence
  Description of Artificial Sequence: Synthetic oligonucleotide
auuaaugcucccaugccau

SEQ ID NO: 2096286 - RNA, 19 nt, Artificial Sequence
  Description of Artificial Sequence: Synthetic oligonucleotide
aaucccuucuuuggaccuc

SEQ ID NO: 2096287 - RNA, 19 nt, Artificial Sequence
  Description of Artificial Sequence: Synthetic oligonucleotide
cuaaaaguaugugaccaga

SEQ ID NO: 2096288 - RNA, 19 nt, Artificial Sequence
  Description of Artificial Sequence: Synthetic oligonucleotide
agguugacuccuagcaccc

SEQ ID NO: 2096289 - RNA, 19 nt, Artificial Sequence
  Description of Artificial Sequence: Synthetic oligonucleotide
gguguaacuguucuucuca

SEQ ID NO: 2096290 - RNA, 19 nt, Artificial Sequence
  Description of Artificial Sequence: Synthetic oligonucleotide
ugucccagccucucagaag

SEQ ID NO: 2096291 - RNA, 19 nt, Artificial Sequence
  Description of Artificial Sequence: Synthetic oligonucleotide
uauguuccgagugucccac

SEQ ID NO: 2096292 - RNA, 19 nt, Artificial Sequence
  Description of Artificial Sequence: Synthetic oligonucleotide
ccucauugaaacuguacag

SEQ ID NO: 2096293 - RNA, 19 nt, Artificial Sequence
  Description of Artificial Sequence: Synthetic oligonucleotide
cauugugcaugcaggccgc

SEQ ID NO: 2096294 - RNA, 19 nt, Artificial Sequence
  Description of Artificial Sequence: Synthetic oligonucleotide
uugacuccuagcacccaca

SEQ ID NO: 2096295 - RNA, 19 nt, Artificial Sequence
  Description of Artificial Sequence: Synthetic oligonucleotide
gauccaugccucaaaguga

SEQ ID NO: 2096296 - RNA, 19 nt, Artificial Sequence
  Description of Artificial Sequence: Synthetic oligonucleotide
ugccccuuagaaucacugc

SEQ ID NO: 2096297 - RNA, 19 nt, Artificial Sequence
  Description of Artificial Sequence: Synthetic oligonucleotide
uguuguccucauugaaacu

SEQ ID NO: 2096298 - RNA, 19 nt, Artificial Sequence
  Description of Artificial Sequence: Synthetic oligonucleotide
cuucuuggaacggaaaaga

SEQ ID NO: 2096299 - RNA, 19 nt, Artificial Sequence
  Description of Artificial Sequence: Synthetic oligonucleotide
ccguacacuaaugaguucg

SEQ ID NO: 2096300 - RNA, 19 nt, Artificial Sequence
  Description of Artificial Sequence: Synthetic oligonucleotide
gacccuuccagguuuccca

SEQ ID NO: 2096301 - RNA, 19 nt, Artificial Sequence
  Description of Artificial Sequence: Synthetic oligonucleotide
uccuagcacccacauggug

SEQ ID NO: 2096302 - RNA, 19 nt, Artificial Sequence
  Description of Artificial Sequence: Synthetic oligonucleotide
uggagugucuuuugcuagu

SEQ ID NO: 2096303 - RNA, 19 nt, Artificial Sequence
  Description of Artificial Sequence: Synthetic oligonucleotide
acgaccuaaacgaacuuga

SEQ ID NO: 2096304 - RNA, 19 nt, Artificial Sequence
  Description of Artificial Sequence: Synthetic oligonucleotide
ggaauauggcaccauuuca

SEQ ID NO: 2096305 - RNA, 19 nt, Artificial Sequence
  Description of Artificial Sequence: Synthetic oligonucleotide
cacaucugccaauggcugc

SEQ ID NO: 2096306 - RNA, 19 nt, Artificial Sequence
  Description of Artificial Sequence: Synthetic oligonucleotide
guugagaaucuugaagcca

SEQ ID NO: 2096307 - RNA, 19 nt, Artificial Sequence
  Description of Artificial Sequence: Synthetic oligonucleotide
gcuaaucaucuucaagggc

SEQ ID NO: 2096308 - RNA, 19 nt, Artificial Sequence
  Description of Artificial Sequence: Synthetic oligonucleotide
accagacaccggaauaugg

SEQ ID NO: 2096309 - RNA, 19 nt, Artificial Sequence
  Description of Artificial Sequence: Synthetic oligonucleotide
uccugagguugacuccuag

SEQ ID NO: 2096310 - RNA, 19 nt, Artificial Sequence
  Description of Artificial Sequence: Synthetic oligonucleotide
gcuggauauugguuguagg

SEQ ID NO: 2096311 - RNA, 19 nt, Artificial Sequence
  Description of Artificial Sequence: Synthetic oligonucleotide
guugacuccuagcacccac

SEQ ID NO: 2096312 - RNA, 19 nt, Artificial Sequence
  Description of Artificial Sequence: Synthetic oligonucleotide
ugaccagacaccggaauau

SEQ ID NO: 2096313 - RNA, 19 nt, Artificial Sequence
  Description of Artificial Sequence: Synthetic oligonucleotide
cagcucuacagacccauug

SEQ ID NO: 2096314 - RNA, 19 nt, Artificial Sequence
  Description of Artificial Sequence: Synthetic oligonucleotide
cucucagaaggccaucauc

SEQ ID NO: 2096315 - RNA, 19 nt, Artificial Sequence
  Description of Artificial Sequence: Synthetic oligonucleotide
ucccacagcagaacaugcu

SEQ ID NO: 2096316 - RNA, 19 nt, Artificial Sequence
  Description of Artificial Sequence: Synthetic oligonucleotide
cacgccuccuuucacuggc

SEQ ID NO: 2096317 - RNA, 19 nt, Artificial Sequence
  Description of Artificial Sequence: Synthetic oligonucleotide
caguagccagaauauguuc

SEQ ID NO: 2096318 - RNA, 19 nt, Artificial Sequence
  Description of Artificial Sequence: Synthetic oligonucleotide
uagagacgaccuaaacgaa

SEQ ID NO: 2096319 - RNA, 19 nt, Artificial Sequence
  Description of Artificial Sequence: Synthetic oligonucleotide
cagagguuuagccguguug

SEQ ID NO: 2096320 - RNA, 19 nt, Artificial Sequence
  Description of Artificial Sequence: Synthetic oligonucleotide
aaucacugcuaaucaucuu

SEQ ID NO: 2096321 - RNA, 19 nt, Artificial Sequence
  Description of Artificial Sequence: Synthetic oligonucleotide
ccaguugaccaauccaggg

SEQ ID NO: 2096322 - RNA, 19 nt, Artificial Sequence
  Description of Artificial Sequence: Synthetic oligonucleotide
caaagugaugggcuggcca

SEQ ID NO: 2096323 - RNA, 19 nt, Artificial Sequence
  Description of Artificial Sequence: Synthetic oligonucleotide
accucaaccagagguuuag

SEQ ID NO: 2096324 - RNA, 19 nt, Artificial Sequence
  Description of Artificial Sequence: Synthetic oligonucleotide
gaaucacugcuaaucaucu

SEQ ID NO: 2096325 - RNA, 19 nt, Artificial Sequence
  Description of Artificial Sequence: Synthetic oligonucleotide
cugccccuuagaaucacug

SEQ ID NO: 2096326 - RNA, 19 nt, Artificial Sequence
  Description of Artificial Sequence: Synthetic oligonucleotide
ugucugccaguaauugaaa

SEQ ID NO: 2096327 - RNA, 19 nt, Artificial Sequence
  Description of Artificial Sequence: Synthetic oligonucleotide
ugcucccaugccauuuuga

SEQ ID NO: 2096328 - RNA, 19 nt, Artificial Sequence
  Description of Artificial Sequence: Synthetic oligonucleotide
uugcgauauuaagacaguc

SEQ ID NO: 2096329 - RNA, 19 nt, Artificial Sequence
  Description of Artificial Sequence: Synthetic oligonucleotide
ugguggcucacaacauaca

SEQ ID NO: 2096330 - RNA, 19 nt, Artificial Sequence
  Description of Artificial Sequence: Synthetic oligonucleotide
uugaccaauccagggacaa

SEQ ID NO: 2096331 - RNA, 19 nt, Artificial Sequence
  Description of Artificial Sequence: Synthetic oligonucleotide
ucggcauuucuugcgauau

SEQ ID NO: 2096332 - RNA, 19 nt, Artificial Sequence
  Description of Artificial Sequence: Synthetic oligonucleotide
ccuaaaaguaugugaccag

SEQ ID NO: 2096333 - RNA, 19 nt, Artificial Sequence
  Description of Artificial Sequence: Synthetic oligonucleotide
cauggagugucuuuugcua

SEQ ID NO: 2096334 - RNA, 19 nt, Artificial Sequence
  Description of Artificial Sequence: Synthetic oligonucleotide
ggcugcuuuauguuccgag

SEQ ID NO: 2096335 - RNA, 19 nt, Artificial Sequence
  Description of Artificial Sequence: Synthetic oligonucleotide
cgauccaugccucaaagug

SEQ ID NO: 2096336 - RNA, 19 nt, Artificial Sequence
  Description of Artificial Sequence: Synthetic oligonucleotide
uuguaggguguaacuguuc

SEQ ID NO: 2096337 - RNA, 19 nt, Artificial Sequence
  Description of Artificial Sequence: Synthetic oligonucleotide
cacacgccuccuuucacug

SEQ ID NO: 2096338 - RNA, 19 nt, Artificial Sequence
  Description of Artificial Sequence: Synthetic oligonucleotide
ugccaauggcugcuuuaug

SEQ ID NO: 2096339 - RNA, 19 nt, Artificial Sequence
  Description of Artificial Sequence: Synthetic oligonucleotide
cagacaccggaauauggca

SEQ ID NO: 2096340 - RNA, 19 nt, Artificial Sequence
  Description of Artificial Sequence: Synthetic oligonucleotide
uuuagccguguuguccuca

SEQ ID NO: 2096341 - RNA, 19 nt, Artificial Sequence
  Description of Artificial Sequence: Synthetic oligonucleotide
ggaccagucagcuccguac

SEQ ID NO: 2096342 - RNA, 19 nt, Artificial Sequence
  Description of Artificial Sequence: Synthetic oligonucleotide
gaccagucagcuccguaca

SEQ ID NO: 2096343 - RNA, 19 nt, Artificial Sequence
  Description of Artificial Sequence: Synthetic oligonucleotide
agccacucgcuguaauuca

SEQ ID NO: 2096344 - RNA, 19 nt, Artificial Sequence
  Description of Artificial Sequence: Synthetic oligonucleotide
gagacgaccuaaacgaacu

SEQ ID NO: 2096345 - RNA, 19 nt, Artificial Sequence
  Description of Artificial Sequence: Synthetic oligonucleotide
gccuaaaaguaugugacca

SEQ ID NO: 2096346 - RNA, 19 nt, Artificial Sequence
  Description of Artificial Sequence: Synthetic oligonucleotide
uucggcauuucuugcgaua

SEQ ID NO: 2096347 - RNA, 19 nt, Artificial Sequence
  Description of Artificial Sequence: Synthetic oligonucleotide
caucucuccuccaggauaa

SEQ ID NO: 2096348 - RNA, 19 nt, Artificial Sequence
  Description of Artificial Sequence: Synthetic oligonucleotide
augcucaucauagcugcca

SEQ ID NO: 2096349 - RNA, 19 nt, Artificial Sequence
  Description of Artificial Sequence: Synthetic oligonucleotide
caggaggugcagcugcccc

SEQ ID NO: 2096350 - RNA, 19 nt, Artificial Sequence
  Description of Artificial Sequence: Synthetic oligonucleotide
ggauaaggcuggauauugg

SEQ ID NO: 2096351 - RNA, 19 nt, Artificial Sequence
  Description of Artificial Sequence: Synthetic oligonucleotide
gggacaaggacagacaucu

SEQ ID NO: 2096352 - RNA, 19 nt, Artificial Sequence
  Description of Artificial Sequence: Synthetic oligonucleotide
ugaccaauccagggacaag

SEQ ID NO: 2096353 - RNA, 19 nt, Artificial Sequence
  Description of Artificial Sequence: Synthetic oligonucleotide
acacaaguucugucugcca

SEQ ID NO: 2096354 - RNA, 19 nt, Artificial Sequence
  Description of Artificial Sequence: Synthetic oligonucleotide
guacacuaaugaguucggc

SEQ ID NO: 2096355 - RNA, 19 nt, Artificial Sequence
  Description of Artificial Sequence: Synthetic oligonucleotide
auuccaucaggcggagcag

SEQ ID NO: 2096356 - RNA, 19 nt, Artificial Sequence
  Description of Artificial Sequence: Synthetic oligonucleotide
caaccagagguuuagccgu

SEQ ID NO: 2096357 - RNA, 19 nt, Artificial Sequence
  Description of Artificial Sequence: Synthetic oligonucleotide
uaaugcucccaugccauuu

SEQ ID NO: 2096358 - RNA, 19 nt, Artificial Sequence
  Description of Artificial Sequence: Synthetic oligonucleotide
agggacaaggacagacauc

SEQ ID NO: 2096359 - RNA, 19 nt, Artificial Sequence
  Description of Artificial Sequence: Synthetic oligonucleotide
uccacacgccuccuuucac

SEQ ID NO: 2096360 - RNA, 19 nt, Artificial Sequence
  Description of Artificial Sequence: Synthetic oligonucleotide
gauauugguuguagggugu

SEQ ID NO: 2096361 - RNA, 19 nt, Artificial Sequence
  Description of Artificial Sequence: Synthetic oligonucleotide
accggaauauggcaccauu

SEQ ID NO: 2096362 - RNA, 19 nt, Artificial Sequence
  Description of Artificial Sequence: Synthetic oligonucleotide
caguaauugaaagcagcga

SEQ ID NO: 2096363 - RNA, 19 nt, Artificial Sequence
  Description of Artificial Sequence: Synthetic oligonucleotide
gugaagacaggugugccaa

SEQ ID NO: 2096364 - RNA, 19 nt, Artificial Sequence
  Description of Artificial Sequence: Synthetic oligonucleotide
uggcaccauuucaugucca

SEQ ID NO: 2096365 - RNA, 19 nt, Artificial Sequence
  Description of Artificial Sequence: Synthetic oligonucleotide
gaccagacaccggaauaug

SEQ ID NO: 2096366 - RNA, 19 nt, Artificial Sequence
  Description of Artificial Sequence: Synthetic oligonucleotide
cucaucauagcugccagua

SEQ ID NO: 2096367 - RNA, 19 nt, Artificial Sequence
  Description of Artificial Sequence: Synthetic oligonucleotide
ccauuucauguccaggaug

SEQ ID NO: 2096368 - RNA, 19 nt, Artificial Sequence
  Description of Artificial Sequence: Synthetic oligonucleotide
guuccgagugucccacagc

SEQ ID NO: 2096369 - RNA, 19 nt, Artificial Sequence
  Description of Artificial Sequence: Synthetic oligonucleotide
gagugucuuuugcuaguga

SEQ ID NO: 2096370 - RNA, 19 nt, Artificial Sequence
  Description of Artificial Sequence: Synthetic oligonucleotide
guagccagaauauguuccu

SEQ ID NO: 2096371 - RNA, 19 nt, Artificial Sequence
  Description of Artificial Sequence: Synthetic oligonucleotide
auaaggcuggauauugguu

SEQ ID NO: 2096372 - RNA, 19 nt, Artificial Sequence
  Description of Artificial Sequence: Synthetic oligonucleotide
uuagccguguuguccucau

SEQ ID NO: 2096373 - RNA, 19 nt, Artificial Sequence
  Description of Artificial Sequence: Synthetic oligonucleotide
gagguuuagccguguuguc

SEQ ID NO: 2096374 - RNA, 19 nt, Artificial Sequence
  Description of Artificial Sequence: Synthetic oligonucleotide
cacacacccauggaguguc

SEQ ID NO: 2096375 - RNA, 19 nt, Artificial Sequence
  Description of Artificial Sequence: Synthetic oligonucleotide
guaauucagcugcucccuc

SEQ ID NO: 2096376 - RNA, 19 nt, Artificial Sequence
  Description of Artificial Sequence: Synthetic oligonucleotide
cccaguugaccaauccagg

SEQ ID NO: 2096377 - RNA, 19 nt, Artificial Sequence
  Description of Artificial Sequence: Synthetic oligonucleotide
uuaaugcucccaugccauu

SEQ ID NO: 2096378 - RNA, 19 nt, Artificial Sequence
  Description of Artificial Sequence: Synthetic oligonucleotide
ggcucaguuguuaagcaca

SEQ ID NO: 2096379 - RNA, 19 nt, Artificial Sequence
  Description of Artificial Sequence: Synthetic oligonucleotide
aaguucugucugccaguaa

SEQ ID NO: 2096380 - RNA, 19 nt, Artificial Sequence
  Description of Artificial Sequence: Synthetic oligonucleotide
uauugguuguaggguguaa

SEQ ID NO: 2096381 - RNA, 19 nt, Artificial Sequence
  Description of Artificial Sequence: Synthetic oligonucleotide
cuucaagggcuggucuccg

SEQ ID NO: 2096382 - RNA, 19 nt, Artificial Sequence
  Description of Artificial Sequence: Synthetic oligonucleotide
ggugugccaagcauccuag

SEQ ID NO: 2096383 - RNA, 19 nt, Artificial Sequence
  Description of Artificial Sequence: Synthetic oligonucleotide
agugaugggcuggccauga

SEQ ID NO: 2096384 - RNA, 19 nt, Artificial Sequence
  Description of Artificial Sequence: Synthetic oligonucleotide
agacagucacauccuguuu

SEQ ID NO: 2096385 - RNA, 19 nt, Artificial Sequence
  Description of Artificial Sequence: Synthetic oligonucleotide
gaccaggugagugugggcu

SEQ ID NO: 2096386 - RNA, 19 nt, Artificial Sequence
  Description of Artificial Sequence: Synthetic oligonucleotide
aaccagagguuuagccgug

SEQ ID NO: 2096387 - RNA, 19 nt, Artificial Sequence
  Description of Artificial Sequence: Synthetic oligonucleotide
augcucccaugccauuuug

SEQ ID NO: 2096388 - RNA, 19 nt, Artificial Sequence
  Description of Artificial Sequence: Synthetic oligonucleotide
cccauuggcauuugccaag

SEQ ID NO: 2096389 - RNA, 19 nt, Artificial Sequence
  Description of Artificial Sequence: Synthetic oligonucleotide
uccguacacuaaugaguuc

SEQ ID NO: 2096390 - RNA, 19 nt, Artificial Sequence
  Description of Artificial Sequence: Synthetic oligonucleotide
ccagguuucccaguugacc

SEQ ID NO: 2096391 - RNA, 19 nt, Artificial Sequence
  Description of Artificial Sequence: Synthetic oligonucleotide
gugaccagacaccggaaua

SEQ ID NO: 2096392 - RNA, 19 nt, Artificial Sequence
  Description of Artificial Sequence: Synthetic oligonucleotide
cagacccauuggcauuugc

SEQ ID NO: 2096393 - RNA, 19 nt, Artificial Sequence
  Description of Artificial Sequence: Synthetic oligonucleotide
ucgcuguaauucagcugcu

SEQ ID NO: 2096394 - RNA, 19 nt, Artificial Sequence
  Description of Artificial Sequence: Synthetic oligonucleotide
ugcaugcaggccgccagga

SEQ ID NO: 2096395 - RNA, 19 nt, Artificial Sequence
  Description of Artificial Sequence: Synthetic oligonucleotide
acacccauggagugucuuu

SEQ ID NO: 2096396 - RNA, 19 nt, Artificial Sequence
  Description of Artificial Sequence: Synthetic oligonucleotide
agguuucccaguugaccaa

SEQ ID NO: 2096397 - RNA, 19 nt, Artificial Sequence
  Description of Artificial Sequence: Synthetic oligonucleotide
cucaguuguuaagcacagc

SEQ ID NO: 2096398 - RNA, 19 nt, Artificial Sequence
  Description of Artificial Sequence: Synthetic oligonucleotide
ccugagguugacuccuagc

SEQ ID NO: 2096399 - RNA, 19 nt, Artificial Sequence
  Description of Artificial Sequence: Synthetic oligonucleotide
agccaggaccagucagcuc

SEQ ID NO: 2096400 - RNA, 19 nt, Artificial Sequence
  Description of Artificial Sequence: Synthetic oligonucleotide
cuccguacacuaaugaguu

SEQ ID NO: 2096401 - RNA, 19 nt, Artificial Sequence
  Description of Artificial Sequence: Synthetic oligonucleotide
ggcuggauauugguuguag

SEQ ID NO: 2096402 - RNA, 19 nt, Artificial Sequence
  Description of Artificial Sequence: Synthetic oligonucleotide
ggcuucuuggaacggaaaa

SEQ ID NO: 2096403 - RNA, 19 nt, Artificial Sequence
  Description of Artificial Sequence: Synthetic oligonucleotide
cugaauacacaaguucugu

SEQ ID NO: 2096404 - RNA, 19 nt, Artificial Sequence
  Description of Artificial Sequence: Synthetic oligonucleotide
gguuuagccguguuguccu

SEQ ID NO: 2096405 - RNA, 19 nt, Artificial Sequence
  Description of Artificial Sequence: Synthetic oligonucleotide
gagugucccacagcagaac

SEQ ID NO: 2096406 - RNA, 19 nt, Artificial Sequence
  Description of Artificial Sequence: Synthetic oligonucleotide
gcucaguuguuaagcacag

SEQ ID NO: 2096407 - RNA, 19 nt, Artificial Sequence
  Description of Artificial Sequence: Synthetic oligonucleotide
cuaaugaguucggcauuuc

SEQ ID NO: 2096408 - RNA, 19 nt, Artificial Sequence
  Description of Artificial Sequence: Synthetic oligonucleotide
cguacacuaaugaguucgg

SEQ ID NO: 2096409 - RNA, 19 nt, Artificial Sequence
  Description of Artificial Sequence: Synthetic oligonucleotide
agcagcgauccaugccuca

SEQ ID NO: 2096410 - RNA, 19 nt, Artificial Sequence
  Description of Artificial Sequence: Synthetic oligonucleotide
cuugcgauauuaagacagu

SEQ ID NO: 2096411 - RNA, 19 nt, Artificial Sequence
  Description of Artificial Sequence: Synthetic oligonucleotide
agacgaccuaaacgaacuu

SEQ ID NO: 2096412 - RNA, 19 nt, Artificial Sequence
  Description of Artificial Sequence: Synthetic oligonucleotide
ggcauuucuugcgauauua

SEQ ID NO: 2096413 - RNA, 19 nt, Artificial Sequence
  Description of Artificial Sequence: Synthetic oligonucleotide
uugugcaugcaggccgcca

SEQ ID NO: 2096414 - RNA, 19 nt, Artificial Sequence
  Description of Artificial Sequence: Synthetic oligonucleotide
auauugguuguagggugua

SEQ ID NO: 2096415 - RNA, 19 nt, Artificial Sequence
  Description of Artificial Sequence: Synthetic oligonucleotide
guacagguagagacgaccu

SEQ ID NO: 2096416 - RNA, 19 nt, Artificial Sequence
  Description of Artificial Sequence: Synthetic oligonucleotide
ggagugucuuuugcuagug

SEQ ID NO: 2096417 - RNA, 19 nt, Artificial Sequence
  Description of Artificial Sequence: Synthetic oligonucleotide
gcuuuauguuccgaguguc

SEQ ID NO: 2096418 - RNA, 19 nt, Artificial Sequence
  Description of Artificial Sequence: Synthetic oligonucleotide
cagcuccguacacuaauga

SEQ ID NO: 2096419 - RNA, 19 nt, Artificial Sequence
  Description of Artificial Sequence: Synthetic oligonucleotide
ggguguaacuguucuucuc

SEQ ID NO: 2096420 - RNA, 19 nt, Artificial Sequence
  Description of Artificial Sequence: Synthetic oligonucleotide
ucaggcggagcagcucuac

SEQ ID NO: 2096421 - RNA, 19 nt, Artificial Sequence
  Description of Artificial Sequence: Synthetic oligonucleotide
gucagcuccguacacuaau

SEQ ID NO: 2096422 - RNA, 19 nt, Artificial Sequence
  Description of Artificial Sequence: Synthetic oligonucleotide
uccgacccuuccagguuuc

SEQ ID NO: 2096423 - RNA, 19 nt, Artificial Sequence
  Description of Artificial Sequence: Synthetic oligonucleotide
agagguccugagguugacu

SEQ ID NO: 2096424 - RNA, 19 nt, Artificial Sequence
  Description of Artificial Sequence: Synthetic oligonucleotide
acaccggaauauggcacca

SEQ ID NO: 2096425 - RNA, 19 nt, Artificial Sequence
  Description of Artificial Sequence: Synthetic oligonucleotide
caucaggcggagcagcucu

SEQ ID NO: 2096426 - RNA, 19 nt, Artificial Sequence
  Description of Artificial Sequence: Synthetic oligonucleotide
cuagugucccagccucuca

SEQ ID NO: 2096427 - RNA, 19 nt, Artificial Sequence
  Description of Artificial Sequence: Synthetic oligonucleotide
gccauugugcaugcaggcc

SEQ ID NO: 2096428 - RNA, 19 nt, Artificial Sequence
  Description of Artificial Sequence: Synthetic oligonucleotide
ccaagccuaaaaguaugug

SEQ ID NO: 2096429 - RNA, 19 nt, Artificial Sequence
  Description of Artificial Sequence: Synthetic oligonucleotide
gucuccgacccuuccaggu

SEQ ID NO: 2096430 - RNA, 19 nt, Artificial Sequence
  Description of Artificial Sequence: Synthetic oligonucleotide
ccacuugagccuccacacg

SEQ ID NO: 2096431 - RNA, 19 nt, Artificial Sequence
  Description of Artificial Sequence: Synthetic oligonucleotide
gcugcuuuauguuccgagu

SEQ ID NO: 2096432 - RNA, 19 nt, Artificial Sequence
  Description of Artificial Sequence: Synthetic oligonucleotide
gccccuuagaaucacugcu

SEQ ID NO: 2096433 - RNA, 19 nt, Artificial Sequence
  Description of Artificial Sequence: Synthetic oligonucleotide
aggaccagucagcuccgua

SEQ ID NO: 2096434 - RNA, 19 nt, Artificial Sequence
  Description of Artificial Sequence: Synthetic oligonucleotide
gcuccguacacuaaugagu

SEQ ID NO: 2096435 - RNA, 19 nt, Artificial Sequence
  Description of Artificial Sequence: Synthetic oligonucleotide
cuggucuccgacccuucca

SEQ ID NO: 2096436 - RNA, 19 nt, Artificial Sequence
  Description of Artificial Sequence: Synthetic oligonucleotide
gacaucucuccuccaggau

SEQ ID NO: 2096437 - RNA, 19 nt, Artificial Sequence
  Description of Artificial Sequence: Synthetic oligonucleotide
ccgagugucccacagcaga

SEQ ID NO: 2096438 - RNA, 19 nt, Artificial Sequence
  Description of Artificial Sequence: Synthetic oligonucleotide
ugggugccacuugagccuc

SEQ ID NO: 2096439 - RNA, 19 nt, Artificial Sequence
  Description of Artificial Sequence: Synthetic oligonucleotide
gccaguagccagaauaugu

SEQ ID NO: 2096440 - RNA, 19 nt, Artificial Sequence
  Description of Artificial Sequence: Synthetic oligonucleotide
auguuccgagugucccaca

SEQ ID NO: 2096441 - RNA, 19 nt, Artificial Sequence
  Description of Artificial Sequence: Synthetic oligonucleotide
cagggacaaggacagacau

SEQ ID NO: 2096442 - RNA, 19 nt, Artificial Sequence
  Description of Artificial Sequence: Synthetic oligonucleotide
augcaggccgccaggagua

SEQ ID NO: 2096443 - RNA, 19 nt, Artificial Sequence
  Description of Artificial Sequence: Synthetic oligonucleotide
ugcaggccgccaggaguag

SEQ ID NO: 2096444 - RNA, 19 nt, Artificial Sequence
  Description of Artificial Sequence: Synthetic oligonucleotide
gccguguuguccucauuga

SEQ ID NO: 2096445 - RNA, 19 nt, Artificial Sequence
  Description of Artificial Sequence: Synthetic oligonucleotide
cguguuguccucauugaaa

SEQ ID NO: 2096446 - RNA, 19 nt, Artificial Sequence
  Description of Artificial Sequence: Synthetic oligonucleotide
guuguaggguguaacuguu

SEQ ID NO: 2096447 - RNA, 19 nt, Artificial Sequence
  Description of Artificial Sequence: Synthetic oligonucleotide
ccaggaccagucagcuccg

SEQ ID NO: 2096448 - RNA, 19 nt, Artificial Sequence
  Description of Artificial Sequence: Synthetic oligonucleotide
aucucuccuccaggauaag

SEQ ID NO: 2096449 - RNA, 19 nt, Artificial Sequence
  Description of Artificial Sequence: Synthetic oligonucleotide
cuacagacccauuggcauu

SEQ ID NO: 2096450 - RNA, 19 nt, Artificial Sequence
  Description of Artificial Sequence: Synthetic oligonucleotide
ccaggauaaggcuggauau

SEQ ID NO: 2096451 - RNA, 19 nt, Artificial Sequence
  Description of Artificial Sequence: Synthetic oligonucleotide
cagucacauccuguuucuc

SEQ ID NO: 2096452 - RNA, 19 nt, Artificial Sequence
  Description of Artificial Sequence: Synthetic oligonucleotide
gaccucaaccagagguuua

SEQ ID NO: 2096453 - RNA, 19 nt, Artificial Sequence
  Description of Artificial Sequence: Synthetic oligonucleotide
gcucccaugccauuuugau

SEQ ID NO: 2096454 - RNA, 19 nt, Artificial Sequence
  Description of Artificial Sequence: Synthetic oligonucleotide
gccuccuuucacuggcaca

SEQ ID NO: 2096455 - RNA, 19 nt, Artificial Sequence
  Description of Artificial Sequence: Synthetic oligonucleotide
caggcggagcagcucuaca

SEQ ID NO: 2096456 - RNA, 19 nt, Artificial Sequence
  Description of Artificial Sequence: Synthetic oligonucleotide
cucccucacucagcaucag

SEQ ID NO: 2096457 - RNA, 19 nt, Artificial Sequence
  Description of Artificial Sequence: Synthetic oligonucleotide
caggccgccaggaguaggu

SEQ ID NO: 2096458 - RNA, 19 nt, Artificial Sequence
  Description of Artificial Sequence: Synthetic oligonucleotide
cagcgauccaugccucaaa

SEQ ID NO: 2096459 - RNA, 19 nt, Artificial Sequence
  Description of Artificial Sequence: Synthetic oligonucleotide
guucugucugccaguaauu

SEQ ID NO: 2096460 - RNA, 19 nt, Artificial Sequence
  Description of Artificial Sequence: Synthetic oligonucleotide
guucggcauuucuugcgau

SEQ ID NO: 2096461 - RNA, 19 nt, Artificial Sequence
  Description of Artificial Sequence: Synthetic oligonucleotide
aggccgccaggaguaggug

SEQ ID NO: 2096462 - RNA, 19 nt, Artificial Sequence
  Description of Artificial Sequence: Synthetic oligonucleotide
ccuagugucccagccucuc

SEQ ID NO: 2096463 - RNA, 19 nt, Artificial Sequence
  Description of Artificial Sequence: Synthetic oligonucleotide
gccucucagaaggccauca

SEQ ID NO: 2096464 - RNA, 19 nt, Artificial Sequence
  Description of Artificial Sequence: Synthetic oligonucleotide
ccucaaccagagguuuagc

SEQ ID NO: 2096465 - RNA, 19 nt, Artificial Sequence
  Description of Artificial Sequence: Synthetic oligonucleotide
ccauggagugucuuuugcu

SEQ ID NO: 2096466 - RNA, 19 nt, Artificial Sequence
  Description of Artificial Sequence: Synthetic oligonucleotide
ccccuuagaaucacugcua

SEQ ID NO: 2096467 - RNA, 19 nt, Artificial Sequence
  Description of Artificial Sequence: Synthetic oligonucleotide
gccaagcauccuagugucc

SEQ ID NO: 2096468 - RNA, 19 nt, Artificial Sequence
  Description of Artificial Sequence: Synthetic oligonucleotide
cugccaauggcugcuuuau

SEQ ID NO: 2096469 - RNA, 19 nt, Artificial Sequence
  Description of Artificial Sequence: Synthetic oligonucleotide
ccaguagccagaauauguu

SEQ ID NO: 2096470 - RNA, 19 nt, Artificial Sequence
  Description of Artificial Sequence: Synthetic oligonucleotide
gcaggccgccaggaguagg

SEQ ID NO: 2096471 - RNA, 19 nt, Artificial Sequence
  Description of Artificial Sequence: Synthetic oligonucleotide
gugaugggcuggccaugaa

SEQ ID NO: 2096472 - RNA, 19 nt, Artificial Sequence
  Description of Artificial Sequence: Synthetic oligonucleotide
cuccuagcacccacauggu

SEQ ID NO: 2096473 - RNA, 19 nt, Artificial Sequence
  Description of Artificial Sequence: Synthetic oligonucleotide
aggcuggauauugguugua

SEQ ID NO: 2096474 - RNA, 19 nt, Artificial Sequence
  Description of Artificial Sequence: Synthetic oligonucleotide
ggauggcagaagaaucccu

SEQ ID NO: 2096475 - RNA, 19 nt, Artificial Sequence
  Description of Artificial Sequence: Synthetic oligonucleotide
gugugccaagcauccuagu

SEQ ID NO: 2096476 - RNA, 19 nt, Artificial Sequence
  Description of Artificial Sequence: Synthetic oligonucleotide
caggauaaggcuggauauu

SEQ ID NO: 2096477 - RNA, 19 nt, Artificial Sequence
  Description of Artificial Sequence: Synthetic oligonucleotide
gcgauccaugccucaaagu

SEQ ID NO: 2096478 - RNA, 19 nt, Artificial Sequence
  Description of Artificial Sequence: Synthetic oligonucleotide
acacacccauggagugucu

SEQ ID NO: 2096479 - RNA, 19 nt, Artificial Sequence
  Description of Artificial Sequence: Synthetic oligonucleotide
cagccucucagaaggccau

SEQ ID NO: 2096480 - RNA, 19 nt, Artificial Sequence
  Description of Artificial Sequence: Synthetic oligonucleotide
ggcauuugccaagccuaaa

SEQ ID NO: 2096481 - RNA, 19 nt, Artificial Sequence
  Description of Artificial Sequence: Synthetic oligonucleotide
gugucccacagcagaacau

SEQ ID NO: 2096482 - RNA, 19 nt, Artificial Sequence
  Description of Artificial Sequence: Synthetic oligonucleotide
gccaagccuaaaaguaugu

SEQ ID NO: 2096483 - RNA, 19 nt, Artificial Sequence
  Description of Artificial Sequence: Synthetic oligonucleotide
gcagcgauccaugccucaa

SEQ ID NO: 2096484 - RNA, 19 nt, Artificial Sequence
  Description of Artificial Sequence: Synthetic oligonucleotide
ggcucacaacauacaaaua

SEQ ID NO: 2096485 - RNA, 19 nt, Artificial Sequence
  Description of Artificial Sequence: Synthetic oligonucleotide
gguugacuccuagcaccca

SEQ ID NO: 2096486 - RNA, 19 nt, Artificial Sequence
  Description of Artificial Sequence: Synthetic oligonucleotide
cuccgacccuuccagguuu

SEQ ID NO: 2096487 - RNA, 19 nt, Artificial Sequence
  Description of Artificial Sequence: Synthetic oligonucleotide
gcucaucauagcugccagu

SEQ ID NO: 2096488 - RNA, 19 nt, Artificial Sequence
  Description of Artificial Sequence: Synthetic oligonucleotide
cacccauggagugucuuuu

SEQ ID NO: 2096489 - RNA, 19 nt, Artificial Sequence
  Description of Artificial Sequence: Synthetic oligonucleotide
acgccuccuuucacuggca

SEQ ID NO: 2096490 - RNA, 19 nt, Artificial Sequence
  Description of Artificial Sequence: Synthetic oligonucleotide
gggguggacugggugccac

SEQ ID NO: 2096491 - RNA, 19 nt, Artificial Sequence
  Description of Artificial Sequence: Synthetic oligonucleotide
ggacaaggacagacaucuc

SEQ ID NO: 2096492 - RNA, 19 nt, Artificial Sequence
  Description of Artificial Sequence: Synthetic oligonucleotide
aucaggcggagcagcucua

SEQ ID NO: 2096493 - RNA, 19 nt, Artificial Sequence
  Description of Artificial Sequence: Synthetic oligonucleotide
cgacccuuccagguuuccc

SEQ ID NO: 2096494 - RNA, 19 nt, Artificial Sequence
  Description of Artificial Sequence: Synthetic oligonucleotide
cgagugucccacagcagaa

SEQ ID NO: 2096495 - RNA, 19 nt, Artificial Sequence
  Description of Artificial Sequence: Synthetic oligonucleotide
gguuucccaguugaccaau

SEQ ID NO: 2096496 - RNA, 19 nt, Artificial Sequence
  Description of Artificial Sequence: Synthetic oligonucleotide
ccggaauauggcaccauuu

SEQ ID NO: 2096497 - RNA, 19 nt, Artificial Sequence
  Description of Artificial Sequence: Synthetic oligonucleotide
cacuggcacaucugccaau

SEQ ID NO: 2096498 - RNA, 19 nt, Artificial Sequence
  Description of Artificial Sequence: Synthetic oligonucleotide
ccacacgccuccuuucacu

SEQ ID NO: 2096499 - RNA, 19 nt, Artificial Sequence
  Description of Artificial Sequence: Synthetic oligonucleotide
ccuuagaaucacugcuaau

SEQ ID NO: 2096500 - RNA, 19 nt, Artificial Sequence
  Description of Artificial Sequence: Synthetic oligonucleotide
gcacacacccauggagugu

SEQ ID NO: 2096501 - RNA, 19 nt, Artificial Sequence
  Description of Artificial Sequence: Synthetic oligonucleotide
ccgacccuuccagguuucc

SEQ ID NO: 2096502 - RNA, 19 nt, Artificial Sequence
  Description of Artificial Sequence: Synthetic oligonucleotide
ccagucagcuccguacacu

SEQ ID NO: 2096503 - RNA, 19 nt, Artificial Sequence
  Description of Artificial Sequence: Synthetic oligonucleotide
gggugccacuugagccucc

SEQ ID NO: 2096504 - RNA, 19 nt, Artificial Sequence
  Description of Artificial Sequence: Synthetic oligonucleotide
ggguggacugggugccacu

SEQ ID NO: 2096505 - RNA, 19 nt, Artificial Sequence
  Description of Artificial Sequence: Synthetic oligonucleotide
caggugugccaagcauccu

SEQ ID NO: 2096506 - RNA, 19 nt, Artificial Sequence
  Description of Artificial Sequence: Synthetic oligonucleotide
ccucucagaaggccaucau

SEQ ID NO: 2096507 - RNA, 19 nt, Artificial Sequence
  Description of Artificial Sequence: Synthetic oligonucleotide
ccagagguuuagccguguu

SEQ ID NO: 2096508 - RNA, 19 nt, Artificial Sequence
  Description of Artificial Sequence: Synthetic oligonucleotide
caggaccagucagcuccgu

SEQ ID NO: 2096509 - RNA, 19 nt, Artificial Sequence
  Description of Artificial Sequence: Synthetic oligonucleotide
gcagcucuacagacccauu

SEQ ID NO: 2096510 - RNA, 19 nt, Artificial Sequence
  Description of Artificial Sequence: Synthetic oligonucleotide
cggcauuucuugcgauauu

SEQ ID NO: 2096511 - RNA, 19 nt, Artificial Sequence
  Description of Artificial Sequence: Synthetic oligonucleotide
augacaaucacacauggcu

SEQ ID NO: 2096512 - RNA, 19 nt, Artificial Sequence
  Description of Artificial Sequence: Synthetic oligonucleotide
ugagacuucauacuugucu

SEQ ID NO: 2096513 - RNA, 19 nt, Artificial Sequence
  Description of Artificial Sequence: Synthetic oligonucleotide
ugagguagcagacacggug

SEQ ID NO: 2096514 - RNA, 19 nt, Artificial Sequence
  Description of Artificial Sequence: Synthetic oligonucleotide
uucguuggagcacagcagg

SEQ ID NO: 2096515 - RNA, 19 nt, Artificial Sequence
  Description of Artificial Sequence: Synthetic oligonucleotide
gaggcagcgacauagcucc

SEQ ID NO: 2096516 - RNA, 19 nt, Artificial Sequence
  Description of Artificial Sequence: Synthetic oligonucleotide
uaacuguuccaugugaagg

SEQ ID NO: 2096517 - RNA, 19 nt, Artificial Sequence
  Description of Artificial Sequence: Synthetic oligonucleotide
ucccgcaaaacccugauga

SEQ ID NO: 2096518 - RNA, 19 nt, Artificial Sequence
  Description of Artificial Sequence: Synthetic oligonucleotide
acauagcucccgcaaaacc

SEQ ID NO: 2096519 - RNA, 19 nt, Artificial Sequence
  Description of Artificial Sequence: Synthetic oligonucleotide
cauagcucccgcaaaaccc

SEQ ID NO: 2096520 - RNA, 19 nt, Artificial Sequence
  Description of Artificial Sequence: Synthetic oligonucleotide
ugacuagccucccuuaucc

SEQ ID NO: 2096521 - RNA, 19 nt, Artificial Sequence
  Description of Artificial Sequence: Synthetic oligonucleotide
aucgagagcucucuugggc

SEQ ID NO: 2096522 - RNA, 19 nt, Artificial Sequence
  Description of Artificial Sequence: Synthetic oligonucleotide
aacuguuccaugugaagga

SEQ ID NO: 2096523 - RNA, 19 nt, Artificial Sequence
  Description of Artificial Sequence: Synthetic oligonucleotide
aaacccugaugacaaucac

SEQ ID NO: 2096524 - RNA, 19 nt, Artificial Sequence
  Description of Artificial Sequence: Synthetic oligonucleotide
ugacaaucacacauggcug

SEQ ID NO: 2096525 - RNA, 19 nt, Artificial Sequence
  Description of Artificial Sequence: Synthetic oligonucleotide
ucagaugagacuucauacu

SEQ ID NO: 2096526 - RNA, 19 nt, Artificial Sequence
  Description of Artificial Sequence: Synthetic oligonucleotide
ucccuuauccucuuccggg

SEQ ID NO: 2096527 - RNA, 19 nt, Artificial Sequence
  Description of Artificial Sequence: Synthetic oligonucleotide
gaccuuguguaucugucgg

SEQ ID NO: 2096528 - RNA, 19 nt, Artificial Sequence
  Description of Artificial Sequence: Synthetic oligonucleotide
gacacggugacccuucacc

SEQ ID NO: 2096529 - RNA, 19 nt, Artificial Sequence
  Description of Artificial Sequence: Synthetic oligonucleotide
gucagaugagacuucauac

SEQ ID NO: 2096530 - RNA, 19 nt, Artificial Sequence
  Description of Artificial Sequence: Synthetic oligonucleotide
acccugaugacaaucacac

SEQ ID NO: 2096531 - RNA, 19 nt, Artificial Sequence
  Description of Artificial Sequence: Synthetic oligonucleotide
uuacggaggggucuucacg

SEQ ID NO: 2096532 - RNA, 19 nt, Artificial Sequence
  Description of Artificial Sequence: Synthetic oligonucleotide
cauccucugggucagacag

SEQ ID NO: 2096533 - RNA, 19 nt, Artificial Sequence
  Description of Artificial Sequence: Synthetic oligonucleotide
ucucaaggcaucucucccg

SEQ ID NO: 2096534 - RNA, 19 nt, Artificial Sequence
  Description of Artificial Sequence: Synthetic oligonucleotide
uguaggagagagugcgugg

SEQ ID NO: 2096535 - RNA, 19 nt, Artificial Sequence
  Description of Artificial Sequence: Synthetic oligonucleotide
cucuguaggagagagugcg

SEQ ID NO: 2096536 - RNA, 19 nt, Artificial Sequence
  Description of Artificial Sequence: Synthetic oligonucleotide
gaaccacuuggcaugacgg

SEQ ID NO: 2096537 - RNA, 19 nt, Artificial Sequence
  Description of Artificial Sequence: Synthetic oligonucleotide
cucacagggauccuguagc

SEQ ID NO: 2096538 - RNA, 19 nt, Artificial Sequence
  Description of Artificial Sequence: Synthetic oligonucleotide
uggccguuaggucuucucg

SEQ ID NO: 2096539 - RNA, 19 nt, Artificial Sequence
  Description of Artificial Sequence: Synthetic oligonucleotide
agugcucuccguuccaggg

SEQ ID NO: 2096540 - RNA, 19 nt, Artificial Sequence
  Description of Artificial Sequence: Synthetic oligonucleotide
ucucacagggauccuguag

SEQ ID NO: 2096541 - RNA, 19 nt, Artificial Sequence
  Description of Artificial Sequence: Synthetic oligonucleotide
ugcaguccucguuuuacgg

SEQ ID NO: 2096542 - RNA, 19 nt, Artificial Sequence
  Description of Artificial Sequence: Synthetic oligonucleotide
acuaucgagagcucucuug

SEQ ID NO: 2096543 - RNA, 19 nt, Artificial Sequence
  Description of Artificial Sequence: Synthetic oligonucleotide
aaaacccugaugacaauca

SEQ ID NO: 2096544 - RNA, 19 nt, Artificial Sequence
  Description of Artificial Sequence: Synthetic oligonucleotide
cuugcuugauccucuguag

SEQ ID NO: 2096545 - RNA, 19 nt, Artificial Sequence
  Description of Artificial Sequence: Synthetic oligonucleotide
ugucggaaaggccacgaga

SEQ ID NO: 2096546 - RNA, 19 nt, Artificial Sequence
  Description of Artificial Sequence: Synthetic oligonucleotide
acuagccucccuuauccuc

SEQ ID NO: 2096547 - RNA, 19 nt, Artificial Sequence
  Description of Artificial Sequence: Synthetic oligonucleotide
gccgagauaacaauguugg

SEQ ID NO: 2096548 - RNA, 19 nt, Artificial Sequence
  Description of Artificial Sequence: Synthetic oligonucleotide
aaagccgagaauggcuggg

SEQ ID NO: 2096549 - RNA, 19 nt, Artificial Sequence
  Description of Artificial Sequence: Synthetic oligonucleotide
guaacuguuccaugugaag

SEQ ID NO: 2096550 - RNA, 19 nt, Artificial Sequence
  Description of Artificial Sequence: Synthetic oligonucleotide
ugaaggaccuuguguaucu

SEQ ID NO: 2096551 - RNA, 19 nt, Artificial Sequence
  Description of Artificial Sequence: Synthetic oligonucleotide
agugcgugggucuucguug

SEQ ID NO: 2096552 - RNA, 19 nt, Artificial Sequence
  Description of Artificial Sequence: Synthetic oligonucleotide
cauacuugucuucugccac

SEQ ID NO: 2096553 - RNA, 19 nt, Artificial Sequence
  Description of Artificial Sequence: Synthetic oligonucleotide
uuucucacagggauccugu

SEQ ID NO: 2096554 - RNA, 19 nt, Artificial Sequence
  Description of Artificial Sequence: Synthetic oligonucleotide
ugaggagcgcaccuguggc

SEQ ID NO: 2096555 - RNA, 19 nt, Artificial Sequence
  Description of Artificial Sequence: Synthetic oligonucleotide
guaucugucggaaaggcca

SEQ ID NO: 2096556 - RNA, 19 nt, Artificial Sequence
  Description of Artificial Sequence: Synthetic oligonucleotide
gaggugagguagcagacac

SEQ ID NO: 2096557 - RNA, 19 nt, Artificial Sequence
  Description of Artificial Sequence: Synthetic oligonucleotide
ggugagguagcagacacgg

SEQ ID NO: 2096558 - RNA, 19 nt, Artificial Sequence
  Description of Artificial Sequence: Synthetic oligonucleotide
gaaagccgagaauggcugg

SEQ ID NO: 2096559 - RNA, 19 nt, Artificial Sequence
  Description of Artificial Sequence: Synthetic oligonucleotide
aucauggucagaugagacu

SEQ ID NO: 2096560 - RNA, 19 nt, Artificial Sequence
  Description of Artificial Sequence: Synthetic oligonucleotide
uugcaguccucguuuuacg

SEQ ID NO: 2096561 - RNA, 19 nt, Artificial Sequence
  Description of Artificial Sequence: Synthetic oligonucleotide
ucggaaaggccacgagacg

SEQ ID NO: 2096562 - RNA, 19 nt, Artificial Sequence
  Description of Artificial Sequence: Synthetic oligonucleotide
ggugaugacuggcucauag

SEQ ID NO: 2096563 - RNA, 19 nt, Artificial Sequence
  Description of Artificial Sequence: Synthetic oligonucleotide
gaugagacuucauacuugu

SEQ ID NO: 2096564 - RNA, 19 nt, Artificial Sequence
  Description of Artificial Sequence: Synthetic oligonucleotide
gaugacuggcucauagcag

SEQ ID NO: 2096565 - RNA, 19 nt, Artificial Sequence
  Description of Artificial Sequence: Synthetic oligonucleotide
uaucgagagcucucuuggg

SEQ ID NO: 2096566 - RNA, 19 nt, Artificial Sequence
  Description of Artificial Sequence: Synthetic oligonucleotide
cauagcauccccugggcuc

SEQ ID NO: 2096567 - RNA, 19 nt, Artificial Sequence
  Description of Artificial Sequence: Synthetic oligonucleotide
uaggucuucucgcugcugu

SEQ ID NO: 2096568 - RNA, 19 nt, Artificial Sequence
  Description of Artificial Sequence: Synthetic oligonucleotide
agccauaccccacggggac

SEQ ID NO: 2096569 - RNA, 19 nt, Artificial Sequence
  Description of Artificial Sequence: Synthetic oligonucleotide
ucgagagcucucuugggca

SEQ ID NO: 2096570 - RNA, 19 nt, Artificial Sequence
  Description of Artificial Sequence: Synthetic oligonucleotide
uaacaauguuggcaucaug

SEQ ID NO: 2096571 - RNA, 19 nt, Artificial Sequence
  Description of Artificial Sequence: Synthetic oligonucleotide
ucguuggagcacagcaggg

SEQ ID NO: 2096572 - RNA, 19 nt, Artificial Sequence
  Description of Artificial Sequence: Synthetic oligonucleotide
cuucguuggagcacagcag

SEQ ID NO: 2096573 - RNA, 19 nt, Artificial Sequence
  Description of Artificial Sequence: Synthetic oligonucleotide
caguccucguuuuacggag

SEQ ID NO: 2096574 - RNA, 19 nt, Artificial Sequence
  Description of Artificial Sequence: Synthetic oligonucleotide
ucacgcaucagaggugagg

SEQ ID NO: 2096575 - RNA, 19 nt, Artificial Sequence
  Description of Artificial Sequence: Synthetic oligonucleotide
cucaaggcaucucucccgg

SEQ ID NO: 2096576 - RNA, 19 nt, Artificial Sequence
  Description of Artificial Sequence: Synthetic oligonucleotide
ucuucacgcaucagaggug

SEQ ID NO: 2096577 - RNA, 19 nt, Artificial Sequence
  Description of Artificial Sequence: Synthetic oligonucleotide
gagagucuugcaguccucg

SEQ ID NO: 2096578 - RNA, 19 nt, Artificial Sequence
  Description of Artificial Sequence: Synthetic oligonucleotide
guaggagagagugcguggg

SEQ ID NO: 2096579 - RNA, 19 nt, Artificial Sequence
  Description of Artificial Sequence: Synthetic oligonucleotide
gcagccauaccccacgggg

SEQ ID NO: 2096580 - RNA, 19 nt, Artificial Sequence
  Description of Artificial Sequence: Synthetic oligonucleotide
acauacuccaggacccgcc

SEQ ID NO: 2096581 - RNA, 19 nt, Artificial Sequence
  Description of Artificial Sequence: Synthetic oligonucleotide
uaucugucggaaaggccac

SEQ ID NO: 2096582 - RNA, 19 nt, Artificial Sequence
  Description of Artificial Sequence: Synthetic oligonucleotide
cugggagcagccauacccc

SEQ ID NO: 2096583 - RNA, 19 nt, Artificial Sequence
  Description of Artificial Sequence: Synthetic oligonucleotide
gucggaaaggccacgagac

SEQ ID NO: 2096584 - RNA, 19 nt, Artificial Sequence
  Description of Artificial Sequence: Synthetic oligonucleotide
cuuauccucuuccgggccc

SEQ ID NO: 2096585 - RNA, 19 nt, Artificial Sequence
  Description of Artificial Sequence: Synthetic oligonucleotide
gucucaaggcaucucuccc

SEQ ID NO: 2096586 - RNA, 19 nt, Artificial Sequence
  Description of Artificial Sequence: Synthetic oligonucleotide
cauacuccaggacccgccg

SEQ ID NO: 2096587 - RNA, 19 nt, Artificial Sequence
  Description of Artificial Sequence: Synthetic oligonucleotide
aacccugaugacaaucaca

SEQ ID NO: 2096588 - RNA, 19 nt, Artificial Sequence
  Description of Artificial Sequence: Synthetic oligonucleotide
acuggcucauagcagucca

SEQ ID NO: 2096589 - RNA, 19 nt, Artificial Sequence
  Description of Artificial Sequence: Synthetic oligonucleotide
uggacgacgggccggcacc

SEQ ID NO: 2096590 - RNA, 19 nt, Artificial Sequence
  Description of Artificial Sequence: Synthetic oligonucleotide
ugacggagggcugccaggg

SEQ ID NO: 2096591 - RNA, 19 nt, Artificial Sequence
  Description of Artificial Sequence: Synthetic oligonucleotide
ugcucuccguuccaggggu

SEQ ID NO: 2096592 - RNA, 19 nt, Artificial Sequence
  Description of Artificial Sequence: Synthetic oligonucleotide
cuguuccaugugaaggacc

SEQ ID NO: 2096593 - RNA, 19 nt, Artificial Sequence
  Description of Artificial Sequence: Synthetic oligonucleotide
cuugcaguccucguuuuac

SEQ ID NO: 2096594 - RNA, 19 nt, Artificial Sequence
  Description of Artificial Sequence: Synthetic oligonucleotide
uuuacggaggggucuucac

SEQ ID NO: 2096595 - RNA, 19 nt, Artificial Sequence
  Description of Artificial Sequence: Synthetic oligonucleotide
auacuugucuucugccacu

SEQ ID NO: 2096596 - RNA, 19 nt, Artificial Sequence
  Description of Artificial Sequence: Synthetic oligonucleotide
acgcagggcacgcugugcg

SEQ ID NO: 2096597 - RNA, 19 nt, Artificial Sequence
  Description of Artificial Sequence: Synthetic oligonucleotide
gucuucacgcaucagaggu

SEQ ID NO: 2096598 - RNA, 19 nt, Artificial Sequence
  Description of Artificial Sequence: Synthetic oligonucleotide
uuauccucuuccgggcccg

SEQ ID NO: 2096599 - RNA, 19 nt, Artificial Sequence
  Description of Artificial Sequence: Synthetic oligonucleotide
ugugaaggaccuuguguau

SEQ ID NO: 2096600 - RNA, 19 nt, Artificial Sequence
  Description of Artificial Sequence: Synthetic oligonucleotide
uccacgcaggccgagauaa

SEQ ID NO: 2096601 - RNA, 19 nt, Artificial Sequence
  Description of Artificial Sequence: Synthetic oligonucleotide
cauccuguggcccuuucuc

SEQ ID NO: 2096602 - RNA, 19 nt, Artificial Sequence
  Description of Artificial Sequence: Synthetic oligonucleotide
gugaugacuggcucauagc

SEQ ID NO: 2096603 - RNA, 19 nt, Artificial Sequence
  Description of Artificial Sequence: Synthetic oligonucleotide
cucccuuauccucuuccgg

SEQ ID NO: 2096604 - RNA, 19 nt, Artificial Sequence
  Description of Artificial Sequence: Synthetic oligonucleotide
caaaacccugaugacaauc

SEQ ID NO: 2096605 - RNA, 19 nt, Artificial Sequence
  Description of Artificial Sequence: Synthetic oligonucleotide
aggaccuuguguaucuguc

SEQ ID NO: 2096606 - RNA, 19 nt, Artificial Sequence
  Description of Artificial Sequence: Synthetic oligonucleotide
cuucugccacuaucgagag

SEQ ID NO: 2096607 - RNA, 19 nt, Artificial Sequence
  Description of Artificial Sequence: Synthetic oligonucleotide
agaugagacuucauacuug

SEQ ID NO: 2096608 - RNA, 19 nt, Artificial Sequence
  Description of Artificial Sequence: Synthetic oligonucleotide
guccucguuuuacggaggg

SEQ ID NO: 2096609 - RNA, 19 nt, Artificial Sequence
  Description of Artificial Sequence: Synthetic oligonucleotide
augacggagggcugccagg

SEQ ID NO: 2096610 - RNA, 19 nt, Artificial Sequence
  Description of Artificial Sequence: Synthetic oligonucleotide
ggaccuuguguaucugucg

SEQ ID NO: 2096611 - RNA, 19 nt, Artificial Sequence
  Description of Artificial Sequence: Synthetic oligonucleotide
uucaccccggggcuccacg

SEQ ID NO: 2096612 - RNA, 19 nt, Artificial Sequence
  Description of Artificial Sequence: Synthetic oligonucleotide
ugugcgcuggccguuaggu

SEQ ID NO: 2096613 - RNA, 19 nt, Artificial Sequence
  Description of Artificial Sequence: Synthetic oligonucleotide
uuuuacggaggggucuuca

SEQ ID NO: 2096614 - RNA, 19 nt, Artificial Sequence
  Description of Artificial Sequence: Synthetic oligonucleotide
cacuuggcaugacggaggg

SEQ ID NO: 2096615 - RNA, 19 nt, Artificial Sequence
  Description of Artificial Sequence: Synthetic oligonucleotide
uccagggguggacugcaug

SEQ ID NO: 2096616 - RNA, 19 nt, Artificial Sequence
  Description of Artificial Sequence: Synthetic oligonucleotide
guuggagcacagcaggguc

SEQ ID NO: 2096617 - RNA, 19 nt, Artificial Sequence
  Description of Artificial Sequence: Synthetic oligonucleotide
ggagcagccauaccccacg

SEQ ID NO: 2096618 - RNA, 19 nt, Artificial Sequence
  Description of Artificial Sequence: Synthetic oligonucleotide
gagagugcgugggucuucg

SEQ ID NO: 2096619 - RNA, 19 nt, Artificial Sequence
  Description of Artificial Sequence: Synthetic oligonucleotide
agcgacauagcucccgcaa

SEQ ID NO: 2096620 - RNA, 19 nt, Artificial Sequence
  Description of Artificial Sequence: Synthetic oligonucleotide
ucuguaggagagagugcgu

SEQ ID NO: 2096621 - RNA, 19 nt, Artificial Sequence
  Description of Artificial Sequence: Synthetic oligonucleotide
caugacggagggcugccag

SEQ ID NO: 2096622 - RNA, 19 nt, Artificial Sequence
  Description of Artificial Sequence: Synthetic oligonucleotide
uggcagugcucuccguucc

SEQ ID NO: 2096623 - RNA, 19 nt, Artificial Sequence
  Description of Artificial Sequence: Synthetic oligonucleotide
ucguuuuacggaggggucu

SEQ ID NO: 2096624 - RNA, 19 nt, Artificial Sequence
  Description of Artificial Sequence: Synthetic oligonucleotide
aggggaaagccgagaaugg

SEQ ID NO: 2096625 - RNA, 19 nt, Artificial Sequence
  Description of Artificial Sequence: Synthetic oligonucleotide
gugcgugggucuucguugg

SEQ ID NO: 2096626 - RNA, 19 nt, Artificial Sequence
  Description of Artificial Sequence: Synthetic oligonucleotide
caaggcaucucucccgguc

SEQ ID NO: 2096627 - RNA, 19 nt, Artificial Sequence
  Description of Artificial Sequence: Synthetic oligonucleotide
cuguaggagagagugcgug

SEQ ID NO: 2096628 - RNA, 19 nt, Artificial Sequence
  Description of Artificial Sequence: Synthetic oligonucleotide
ucugucggaaaggccacga

SEQ ID NO: 2096629 - RNA, 19 nt, Artificial Sequence
  Description of Artificial Sequence: Synthetic oligonucleotide
agacacggugacccuucac

SEQ ID NO: 2096630 - RNA, 19 nt, Artificial Sequence
  Description of Artificial Sequence: Synthetic oligonucleotide
caugugaaggaccuugugu

SEQ ID NO: 2096631 - RNA, 19 nt, Artificial Sequence
  Description of Artificial Sequence: Synthetic oligonucleotide
cucguuuuacggagggguc

SEQ ID NO: 2096632 - RNA, 19 nt, Artificial Sequence
  Description of Artificial Sequence: Synthetic oligonucleotide
gagguagcagacacgguga

SEQ ID NO: 2096633 - RNA, 19 nt, Artificial Sequence
  Description of Artificial Sequence: Synthetic oligonucleotide
gacauagcucccgcaaaac

SEQ ID NO: 2096634 - RNA, 19 nt, Artificial Sequence
  Description of Artificial Sequence: Synthetic oligonucleotide
aggccccaaaucugguccg

SEQ ID NO: 2096635 - RNA, 19 nt, Artificial Sequence
  Description of Artificial Sequence: Synthetic oligonucleotide
ggaaagccgagaauggcug

SEQ ID NO: 2096636 - RNA, 19 nt, Artificial Sequence
  Description of Artificial Sequence: Synthetic oligonucleotide
gaggagcgcaccuguggcc

SEQ ID NO: 2096637 - RNA, 19 nt, Artificial Sequence
  Description of Artificial Sequence: Synthetic oligonucleotide
uuggcaugacggagggcug

SEQ ID NO: 2096638 - RNA, 19 nt, Artificial Sequence
  Description of Artificial Sequence: Synthetic oligonucleotide
uaggagagagugcgugggu

SEQ ID NO: 2096639 - RNA, 19 nt, Artificial Sequence
  Description of Artificial Sequence: Synthetic oligonucleotide
auagcauccccugggcuca

SEQ ID NO: 2096640 - RNA, 19 nt, Artificial Sequence
  Description of Artificial Sequence: Synthetic oligonucleotide
cugggccugacuagccucc

SEQ ID NO: 2096641 - RNA, 19 nt, Artificial Sequence
  Description of Artificial Sequence: Synthetic oligonucleotide
uguggcccuuucucacagg

SEQ ID NO: 2096642 - RNA, 19 nt, Artificial Sequence
  Description of Artificial Sequence: Synthetic oligonucleotide
gagcagccauaccccacgg

SEQ ID NO: 2096643 - RNA, 19 nt, Artificial Sequence
  Description of Artificial Sequence: Synthetic oligonucleotide
gcacacuuggggcugggag

SEQ ID NO: 2096644 - RNA, 19 nt, Artificial Sequence
  Description of Artificial Sequence: Synthetic oligonucleotide
cucccgguccaggacaucc

SEQ ID NO: 2096645 - RNA, 19 nt, Artificial Sequence
  Description of Artificial Sequence: Synthetic oligonucleotide
auggucagaugagacuuca

SEQ ID NO: 2096646 - RNA, 19 nt, Artificial Sequence
  Description of Artificial Sequence: Synthetic oligonucleotide
cuggcagugcucuccguuc

SEQ ID NO: 2096647 - RNA, 19 nt, Artificial Sequence
  Description of Artificial Sequence: Synthetic oligonucleotide
cauggucagaugagacuuc

SEQ ID NO: 2096648 - RNA, 19 nt, Artificial Sequence
  Description of Artificial Sequence: Synthetic oligonucleotide
cuucacgcaucagagguga

SEQ ID NO: 2096649 - RNA, 19 nt, Artificial Sequence
  Description of Artificial Sequence: Synthetic oligonucleotide
accuuguguaucugucgga

SEQ ID NO: 2096650 - RNA, 19 nt, Artificial Sequence
  Description of Artificial Sequence: Synthetic oligonucleotide
cagugcucuccguuccagg

SEQ ID NO: 2096651 - RNA, 19 nt, Artificial Sequence
  Description of Artificial Sequence: Synthetic oligonucleotide
uucacgcaucagaggugag

SEQ ID NO: 2096652 - RNA, 19 nt, Artificial Sequence
  Description of Artificial Sequence: Synthetic oligonucleotide
cacacauggcugcaggcca

SEQ ID NO: 2096653 - RNA, 19 nt, Artificial Sequence
  Description of Artificial Sequence: Synthetic oligonucleotide
aucagaggugagguagcag

SEQ ID NO: 2096654 - RNA, 19 nt, Artificial Sequence
  Description of Artificial Sequence: Synthetic oligonucleotide
acaaucacacauggcugca

SEQ ID NO: 2096655 - RNA, 19 nt, Artificial Sequence
  Description of Artificial Sequence: Synthetic oligonucleotide
ugccacuaucgagagcucu

SEQ ID NO: 2096656 - RNA, 19 nt, Artificial Sequence
  Description of Artificial Sequence: Synthetic oligonucleotide
ugccagggucucaaggcau

SEQ ID NO: 2096657 - RNA, 19 nt, Artificial Sequence
  Description of Artificial Sequence: Synthetic oligonucleotide
ccaaaucugguccgugggg

SEQ ID NO: 2096658 - RNA, 19 nt, Artificial Sequence
  Description of Artificial Sequence: Synthetic oligonucleotide
ggcaucauggucagaugag

SEQ ID NO: 2096659 - RNA, 19 nt, Artificial Sequence
  Description of Artificial Sequence: Synthetic oligonucleotide
ggccgagauaacaauguug

SEQ ID NO: 2096660 - RNA, 19 nt, Artificial Sequence
  Description of Artificial Sequence: Synthetic oligonucleotide
ggccguuaggucuucucgc

SEQ ID NO: 2096661 - RNA, 19 nt, Artificial Sequence
  Description of Artificial Sequence: Synthetic oligonucleotide
cuggcucauagcaguccag

SEQ ID NO: 2096662 - RNA, 19 nt, Artificial Sequence
  Description of Artificial Sequence: Synthetic oligonucleotide
agaggugagguagcagaca

SEQ ID NO: 2096663 - RNA, 19 nt, Artificial Sequence
  Description of Artificial Sequence: Synthetic oligonucleotide
cacagggauccuguagccc

SEQ ID NO: 2096664 - RNA, 19 nt, Artificial Sequence
  Description of Artificial Sequence: Synthetic oligonucleotide
ggauccuguagcccugggc

SEQ ID NO: 2096665 - RNA, 19 nt, Artificial Sequence
  Description of Artificial Sequence: Synthetic oligonucleotide
uggcaugacggagggcugc

SEQ ID NO: 2096666 - RNA, 19 nt, Artificial Sequence
  Description of Artificial Sequence: Synthetic oligonucleotide
gccgagaauggcugggugc

SEQ ID NO: 2096667 - RNA, 19 nt, Artificial Sequence
  Description of Artificial Sequence: Synthetic oligonucleotide
uagcucccgcaaaacccug

SEQ ID NO: 2096668 - RNA, 19 nt, Artificial Sequence
  Description of Artificial Sequence: Synthetic oligonucleotide
cugucggaaaggccacgag

SEQ ID NO: 2096669 - RNA, 19 nt, Artificial Sequence
  Description of Artificial Sequence: Synthetic oligonucleotide
ugcgcgaggccggaagagc

SEQ ID NO: 2096670 - RNA, 19 nt, Artificial Sequence
  Description of Artificial Sequence: Synthetic oligonucleotide
cucuccguuccaggggugg

SEQ ID NO: 2096671 - RNA, 19 nt, Artificial Sequence
  Description of Artificial Sequence: Synthetic oligonucleotide
gggcgaggcagcgacauag

SEQ ID NO: 2096672 - RNA, 19 nt, Artificial Sequence
  Description of Artificial Sequence: Synthetic oligonucleotide
aguccucguuuuacggagg

SEQ ID NO: 2096673 - RNA, 19 nt, Artificial Sequence
  Description of Artificial Sequence: Synthetic oligonucleotide
gugggucuucguuggagca

SEQ ID NO: 2096674 - RNA, 19 nt, Artificial Sequence
  Description of Artificial Sequence: Synthetic oligonucleotide
augagacuucauacuuguc

SEQ ID NO: 2096675 - RNA, 19 nt, Artificial Sequence
  Description of Artificial Sequence: Synthetic oligonucleotide
cacauacuccaggacccgc

SEQ ID NO: 2096676 - RNA, 19 nt, Artificial Sequence
  Description of Artificial Sequence: Synthetic oligonucleotide
agagagugcgugggucuuc

SEQ ID NO: 2096677 - RNA, 19 nt, Artificial Sequence
  Description of Artificial Sequence: Synthetic oligonucleotide
acuuggcaugacggagggc

SEQ ID NO: 2096678 - RNA, 19 nt, Artificial Sequence
  Description of Artificial Sequence: Synthetic oligonucleotide
cguuaggucuucucgcugc

SEQ ID NO: 2096679 - RNA, 19 nt, Artificial Sequence
  Description of Artificial Sequence: Synthetic oligonucleotide
gaaggaccuuguguaucug

SEQ ID NO: 2096680 - RNA, 19 nt, Artificial Sequence
  Description of Artificial Sequence: Synthetic oligonucleotide
gugacccuucaccccgggg

SEQ ID NO: 2096681 - RNA, 19 nt, Artificial Sequence
  Description of Artificial Sequence: Synthetic oligonucleotide
ggguaacuguuccauguga

SEQ ID NO: 2096682 - RNA, 19 nt, Artificial Sequence
  Description of Artificial Sequence: Synthetic oligonucleotide
aggugagguagcagacacg

SEQ ID NO: 2096683 - RNA, 19 nt, Artificial Sequence
  Description of Artificial Sequence: Synthetic oligonucleotide
ccucccuuauccucuuccg

SEQ ID NO: 2096684 - RNA, 19 nt, Artificial Sequence
  Description of Artificial Sequence: Synthetic oligonucleotide
aucugucggaaaggccacg

SEQ ID NO: 2096685 - RNA, 19 nt, Artificial Sequence
  Description of Artificial Sequence: Synthetic oligonucleotide
agagagucuugcaguccuc

SEQ ID NO: 2096686 - RNA, 19 nt, Artificial Sequence
  Description of Artificial Sequence: Synthetic oligonucleotide
cucucuugggcagcucuug

SEQ ID NO: 2096687 - RNA, 19 nt, Artificial Sequence
  Description of Artificial Sequence: Synthetic oligonucleotide
cugggugcuggacgacggg

SEQ ID NO: 2096688 - RNA, 19 nt, Artificial Sequence
  Description of Artificial Sequence: Synthetic oligonucleotide
uguagcccugggccaucug

SEQ ID NO: 2096689 - RNA, 19 nt, Artificial Sequence
  Description of Artificial Sequence: Synthetic oligonucleotide
caggccgagauaacaaugu

SEQ ID NO: 2096690 - RNA, 19 nt, Artificial Sequence
  Description of Artificial Sequence: Synthetic oligonucleotide
uacuugucuucugccacua

SEQ ID NO: 2096691 - RNA, 19 nt, Artificial Sequence
  Description of Artificial Sequence: Synthetic oligonucleotide
agcccggaggggaaagccg

SEQ ID NO: 2096692 - RNA, 19 nt, Artificial Sequence
  Description of Artificial Sequence: Synthetic oligonucleotide
gacgggccggcacccugcg

SEQ ID NO: 2096693 - RNA, 19 nt, Artificial Sequence
  Description of Artificial Sequence: Synthetic oligonucleotide
ucaaggcaucucucccggu

SEQ ID NO: 2096694 - RNA, 19 nt, Artificial Sequence
  Description of Artificial Sequence: Synthetic oligonucleotide
ccccaaaucugguccgugg

SEQ ID NO: 2096695 - RNA, 19 nt, Artificial Sequence
  Description of Artificial Sequence: Synthetic oligonucleotide
ggccacgagacgcagggca

SEQ ID NO: 2096696 - RNA, 19 nt, Artificial Sequence
  Description of Artificial Sequence: Synthetic oligonucleotide
aggccgagauaacaauguu

SEQ ID NO: 2096697 - RNA, 19 nt, Artificial Sequence
  Description of Artificial Sequence: Synthetic oligonucleotide
uaccccacggggacgccuc

SEQ ID NO: 2096698 - RNA, 19 nt, Artificial Sequence
  Description of Artificial Sequence: Synthetic oligonucleotide
cgcaucagaggugagguag

SEQ ID NO: 2096699 - RNA, 19 nt, Artificial Sequence
  Description of Artificial Sequence: Synthetic oligonucleotide
cccuuauccucuuccgggc

SEQ ID NO: 2096700 - RNA, 19 nt, Artificial Sequence
  Description of Artificial Sequence: Synthetic oligonucleotide
ccgcauagcauccccuggg

SEQ ID NO: 2096701 - RNA, 19 nt, Artificial Sequence
  Description of Artificial Sequence: Synthetic oligonucleotide
gccgcauagcauccccugg

SEQ ID NO: 2096702 - RNA, 19 nt, Artificial Sequence
  Description of Artificial Sequence: Synthetic oligonucleotide
cagagagucuugcaguccu

SEQ ID NO: 2096703 - RNA, 19 nt, Artificial Sequence
  Description of Artificial Sequence: Synthetic oligonucleotide
ggcauagcuggccccagca

SEQ ID NO: 2096704 - RNA, 19 nt, Artificial Sequence
  Description of Artificial Sequence: Synthetic oligonucleotide
gacgcagggcacgcugugc

SEQ ID NO: 2096705 - RNA, 19 nt, Artificial Sequence
  Description of Artificial Sequence: Synthetic oligonucleotide
gcauccccugggcucaggg

SEQ ID NO: 2096706 - RNA, 19 nt, Artificial Sequence
  Description of Artificial Sequence: Synthetic oligonucleotide
ggggaaagccgagaauggc

SEQ ID NO: 2096707 - RNA, 19 nt, Artificial Sequence
  Description of Artificial Sequence: Synthetic oligonucleotide
cuggacgacgggccggcac

SEQ ID NO: 2096708 - RNA, 19 nt, Artificial Sequence
  Description of Artificial Sequence: Synthetic oligonucleotide
gcagcgacauagcucccgc

SEQ ID NO: 2096709 - RNA, 19 nt, Artificial Sequence
  Description of Artificial Sequence: Synthetic oligonucleotide
gcacgcugugcgcuggccg

SEQ ID NO: 2096710 - RNA, 19 nt, Artificial Sequence
  Description of Artificial Sequence: Synthetic oligonucleotide
agagcucucuugggcagcu

SEQ ID NO: 2096711 - RNA, 19 nt, Artificial Sequence
  Description of Artificial Sequence: Synthetic oligonucleotide
acggaggggucuucacgca

SEQ ID NO: 2096712 - RNA, 19 nt, Artificial Sequence
  Description of Artificial Sequence: Synthetic oligonucleotide
gggccaucugugaggagcg

SEQ ID NO: 2096713 - RNA, 19 nt, Artificial Sequence
  Description of Artificial Sequence: Synthetic oligonucleotide
ggcagcgacauagcucccg

SEQ ID NO: 2096714 - RNA, 19 nt, Artificial Sequence
  Description of Artificial Sequence: Synthetic oligonucleotide
cagcccggaggggaaagcc

SEQ ID NO: 2096715 - RNA, 19 nt, Artificial Sequence
  Description of Artificial Sequence: Synthetic oligonucleotide
gcaggccgagauaacaaug

SEQ ID NO: 2096716 - RNA, 19 nt, Artificial Sequence
  Description of Artificial Sequence: Synthetic oligonucleotide
gguggacugcauggcauag

SEQ ID NO: 2096717 - RNA, 19 nt, Artificial Sequence
  Description of Artificial Sequence: Synthetic oligonucleotide
gcaguccucguuuuacgga

SEQ ID NO: 2096718 - RNA, 19 nt, Artificial Sequence
  Description of Artificial Sequence: Synthetic oligonucleotide
ucuccguuccaggggugga

SEQ ID NO: 2096719 - RNA, 19 nt, Artificial Sequence
  Description of Artificial Sequence: Synthetic oligonucleotide
cacgagacgcagggcacgc

SEQ ID NO: 2096720 - RNA, 19 nt, Artificial Sequence
  Description of Artificial Sequence: Synthetic oligonucleotide
accccacggggacgccucc

SEQ ID NO: 2096721 - RNA, 19 nt, Artificial Sequence
  Description of Artificial Sequence: Synthetic oligonucleotide
cacgcaggccgagauaaca

SEQ ID NO: 2096722 - RNA, 19 nt, Artificial Sequence
  Description of Artificial Sequence: Synthetic oligonucleotide
cucccgcaaaacccugaug

SEQ ID NO: 2096723 - RNA, 19 nt, Artificial Sequence
  Description of Artificial Sequence: Synthetic oligonucleotide
ccgagauaacaauguuggc

SEQ ID NO: 2096724 - RNA, 19 nt, Artificial Sequence
  Description of Artificial Sequence: Synthetic oligonucleotide
ggcacccugcgcgaggccg

SEQ ID NO: 2096725 - RNA, 19 nt, Artificial Sequence
  Description of Artificial Sequence: Synthetic oligonucleotide
cggaaaggccacgagacgc

SEQ ID NO: 2096726 - RNA, 19 nt, Artificial Sequence
  Description of Artificial Sequence: Synthetic oligonucleotide
ccuuauccucuuccgggcc

SEQ ID NO: 2096727 - RNA, 19 nt, Artificial Sequence
  Description of Artificial Sequence: Synthetic oligonucleotide
ugcgugggucuucguugga

SEQ ID NO: 2096728 - RNA, 19 nt, Artificial Sequence
  Description of Artificial Sequence: Synthetic oligonucleotide
acgacgggccggcacccug

SEQ ID NO: 2096729 - RNA, 19 nt, Artificial Sequence
  Description of Artificial Sequence: Synthetic oligonucleotide
cucuuccgggcccgggccc

SEQ ID NO: 2096730 - RNA, 19 nt, Artificial Sequence
  Description of Artificial Sequence: Synthetic oligonucleotide
cgcaaaacccugaugacaa

SEQ ID NO: 2096731 - RNA, 19 nt, Artificial Sequence
  Description of Artificial Sequence: Synthetic oligonucleotide
gguagcagacacggugacc

SEQ ID NO: 2096732 - RNA, 19 nt, Artificial Sequence
  Description of Artificial Sequence: Synthetic oligonucleotide
cacgcaucagaggugaggu

SEQ ID NO: 2096733 - RNA, 19 nt, Artificial Sequence
  Description of Artificial Sequence: Synthetic oligonucleotide
cccugggccaucugugagg

SEQ ID NO: 2096734 - RNA, 19 nt, Artificial Sequence
  Description of Artificial Sequence: Synthetic oligonucleotide
cgcaccuguggccacauac

SEQ ID NO: 2096735 - RNA, 19 nt, Artificial Sequence
  Description of Artificial Sequence: Synthetic oligonucleotide
gucuucguuggagcacagc

SEQ ID NO: 2096736 - RNA, 19 nt, Artificial Sequence
  Description of Artificial Sequence: Synthetic oligonucleotide
gcugggugcuggacgacgg

SEQ ID NO: 2096737 - RNA, 19 nt, Artificial Sequence
  Description of Artificial Sequence: Synthetic oligonucleotide
gacccgccgcauagcaucc

SEQ ID NO: 2096738 - RNA, 19 nt, Artificial Sequence
  Description of Artificial Sequence: Synthetic oligonucleotide
caguccagcugugcccugc

SEQ ID NO: 2096739 - RNA, 19 nt, Artificial Sequence
  Description of Artificial Sequence: Synthetic oligonucleotide
uggcucgagccuggaacca

SEQ ID NO: 2096740 - RNA, 19 nt, Artificial Sequence
  Description of Artificial Sequence: Synthetic oligonucleotide
ggacgccuccuccuccagg

SEQ ID NO: 2096741 - RNA, 19 nt, Artificial Sequence
  Description of Artificial Sequence: Synthetic oligonucleotide
gacccuucaccccggggcu

SEQ ID NO: 2096742 - RNA, 19 nt, Artificial Sequence
  Description of Artificial Sequence: Synthetic oligonucleotide
guuaggucuucucgcugcu

SEQ ID NO: 2096743 - RNA, 19 nt, Artificial Sequence
  Description of Artificial Sequence: Synthetic oligonucleotide
caucagaggugagguagca

SEQ ID NO: 2096744 - RNA, 19 nt, Artificial Sequence
  Description of Artificial Sequence: Synthetic oligonucleotide
aggccacgagacgcagggc

SEQ ID NO: 2096745 - RNA, 19 nt, Artificial Sequence
  Description of Artificial Sequence: Synthetic oligonucleotide
ggaagagcggcuggccgcc

SEQ ID NO: 2096746 - RNA, 19 nt, Artificial Sequence
  Description of Artificial Sequence: Synthetic oligonucleotide
cuuccucuccccggcuccc

SEQ ID NO: 2096747 - RNA, 19 nt, Artificial Sequence
  Description of Artificial Sequence: Synthetic oligonucleotide
caggacccgccgcauagca

SEQ ID NO: 2096748 - RNA, 19 nt, Artificial Sequence
  Description of Artificial Sequence: Synthetic oligonucleotide
ggcugggugcuggacgacg

SEQ ID NO: 2096749 - RNA, 19 nt, Artificial Sequence
  Description of Artificial Sequence: Synthetic oligonucleotide
ggaaaggccacgagacgca

SEQ ID NO: 2096750 - RNA, 19 nt, Artificial Sequence
  Description of Artificial Sequence: Synthetic oligonucleotide
gugcuggacgacgggccgg

SEQ ID NO: 2096751 - RNA, 19 nt, Artificial Sequence
  Description of Artificial Sequence: Synthetic oligonucleotide
ccaugugaaggaccuugug

SEQ ID NO: 2096752 - RNA, 19 nt, Artificial Sequence
  Description of Artificial Sequence: Synthetic oligonucleotide
gacuagccucccuuauccu

SEQ ID NO: 2096753 - RNA, 19 nt, Artificial Sequence
  Description of Artificial Sequence: Synthetic oligonucleotide
acgcaggccgagauaacaa

SEQ ID NO: 2096754 - RNA, 19 nt, Artificial Sequence
  Description of Artificial Sequence: Synthetic oligonucleotide
ggugacccuucaccccggg

SEQ ID NO: 2096755 - RNA, 19 nt, Artificial Sequence
  Description of Artificial Sequence: Synthetic oligonucleotide
cugcgcgaggccggaagag

SEQ ID NO: 2096756 - RNA, 19 nt, Artificial Sequence
  Description of Artificial Sequence: Synthetic oligonucleotide
cccgcaaaacccugaugac

SEQ ID NO: 2096757 - RNA, 19 nt, Artificial Sequence
  Description of Artificial Sequence: Synthetic oligonucleotide
cagggcacgcugugcgcug

SEQ ID NO: 2096758 - RNA, 19 nt, Artificial Sequence
  Description of Artificial Sequence: Synthetic oligonucleotide
cuccguuccagggguggac

SEQ ID NO: 2096759 - RNA, 19 nt, Artificial Sequence
  Description of Artificial Sequence: Synthetic oligonucleotide
gagugcgugggucuucguu

SEQ ID NO: 2096760 - RNA, 19 nt, Artificial Sequence
  Description of Artificial Sequence: Synthetic oligonucleotide
ugcccugccggccccgcuu

SEQ ID NO: 2096761 - RNA, 19 nt, Artificial Sequence
  Description of Artificial Sequence: Synthetic oligonucleotide
ugggccugacuagccuccc

SEQ ID NO: 2096762 - RNA, 19 nt, Artificial Sequence
  Description of Artificial Sequence: Synthetic oligonucleotide
auaccccacggggacgccu

SEQ ID NO: 2096763 - RNA, 19 nt, Artificial Sequence
  Description of Artificial Sequence: Synthetic oligonucleotide
gggaaagccgagaauggcu

SEQ ID NO: 2096764 - RNA, 19 nt, Artificial Sequence
  Description of Artificial Sequence: Synthetic oligonucleotide
cccggcucccuccugggcc

SEQ ID NO: 2096765 - RNA, 19 nt, Artificial Sequence
  Description of Artificial Sequence: Synthetic oligonucleotide
acccgccgcauagcauccc

SEQ ID NO: 2096766 - RNA, 19 nt, Artificial Sequence
  Description of Artificial Sequence: Synthetic oligonucleotide
acgcaucagaggugaggua

SEQ ID NO: 2096767 - RNA, 19 nt, Artificial Sequence
  Description of Artificial Sequence: Synthetic oligonucleotide
gccacuaucgagagcucuc

SEQ ID NO: 2096768 - RNA, 19 nt, Artificial Sequence
  Description of Artificial Sequence: Synthetic oligonucleotide
gucuggguggcaggggcca

SEQ ID NO: 2096769 - RNA, 19 nt, Artificial Sequence
  Description of Artificial Sequence: Synthetic oligonucleotide
cgagagcucucuugggcag

SEQ ID NO: 2096770 - RNA, 19 nt, Artificial Sequence
  Description of Artificial Sequence: Synthetic oligonucleotide
ucaugggcuccagggcauc

SEQ ID NO: 2096771 - RNA, 19 nt, Artificial Sequence
  Description of Artificial Sequence: Synthetic oligonucleotide
cuucucgcugcuguggggu

SEQ ID NO: 2096772 - RNA, 19 nt, Artificial Sequence
  Description of Artificial Sequence: Synthetic oligonucleotide
gugcgcuggccguuagguc

SEQ ID NO: 2096773 - RNA, 19 nt, Artificial Sequence
  Description of Artificial Sequence: Synthetic oligonucleotide
ccauaccccacggggacgc

SEQ ID NO: 2096774 - RNA, 19 nt, Artificial Sequence
  Description of Artificial Sequence: Synthetic oligonucleotide
acccuucaccccggggcuc

SEQ ID NO: 2096775 - RNA, 19 nt, Artificial Sequence
  Description of Artificial Sequence: Synthetic oligonucleotide
gcgugggucuucguuggag

SEQ ID NO: 2096776 - RNA, 19 nt, Artificial Sequence
  Description of Artificial Sequence: Synthetic oligonucleotide
aggggccggggugcacugc

SEQ ID NO: 2096777 - RNA, 19 nt, Artificial Sequence
  Description of Artificial Sequence: Synthetic oligonucleotide
gcagugcucuccguuccag

SEQ ID NO: 2096778 - RNA, 19 nt, Artificial Sequence
  Description of Artificial Sequence: Synthetic oligonucleotide
aggggucuucacgcaucag

SEQ ID NO: 2096779 - RNA, 19 nt, Artificial Sequence
  Description of Artificial Sequence: Synthetic oligonucleotide
agcucccgcaaaacccuga

SEQ ID NO: 2096780 - RNA, 19 nt, Artificial Sequence
  Description of Artificial Sequence: Synthetic oligonucleotide
aggcagcgacauagcuccc

SEQ ID NO: 2096781 - RNA, 19 nt, Artificial Sequence
  Description of Artificial Sequence: Synthetic oligonucleotide
ggcaugacggagggcugcc

SEQ ID NO: 2096782 - RNA, 19 nt, Artificial Sequence
  Description of Artificial Sequence: Synthetic oligonucleotide
ggacugcauggcauagcug

SEQ ID NO: 2096783 - RNA, 19 nt, Artificial Sequence
  Description of Artificial Sequence: Synthetic oligonucleotide
gccauaccccacggggacg

SEQ ID NO: 2096784 - RNA, 19 nt, Artificial Sequence
  Description of Artificial Sequence: Synthetic oligonucleotide
ugugcccugccggccccgc

SEQ ID NO: 2096785 - RNA, 19 nt, Artificial Sequence
  Description of Artificial Sequence: Synthetic oligonucleotide
gcgacauagcucccgcaaa

SEQ ID NO: 2096786 - RNA, 19 nt, Artificial Sequence
  Description of Artificial Sequence: Synthetic oligonucleotide
agcauccccugggcucagg

SEQ ID NO: 2096787 - RNA, 19 nt, Artificial Sequence
  Description of Artificial Sequence: Synthetic oligonucleotide
cugggccaucugugaggag

SEQ ID NO: 2096788 - RNA, 19 nt, Artificial Sequence
  Description of Artificial Sequence: Synthetic oligonucleotide
caggggccggggugcacug

SEQ ID NO: 2096789 - RNA, 19 nt, Artificial Sequence
  Description of Artificial Sequence: Synthetic oligonucleotide
ccguuaggucuucucgcug

SEQ ID NO: 2096790 - RNA, 19 nt, Artificial Sequence
  Description of Artificial Sequence: Synthetic oligonucleotide
cagcgacauagcucccgca

SEQ ID NO: 2096791 - RNA, 19 nt, Artificial Sequence
  Description of Artificial Sequence: Synthetic oligonucleotide
ccacgagacgcagggcacg

SEQ ID NO: 2096792 - RNA, 19 nt, Artificial Sequence
  Description of Artificial Sequence: Synthetic oligonucleotide
ccgcaaaacccugaugaca

SEQ ID NO: 2096793 - RNA, 19 nt, Artificial Sequence
  Description of Artificial Sequence: Synthetic oligonucleotide
cgagacgcagggcacgcug

SEQ ID NO: 2096794 - RNA, 19 nt, Artificial Sequence
  Description of Artificial Sequence: Synthetic oligonucleotide
gagacgcagggcacgcugu

SEQ ID NO: 2096795 - RNA, 19 nt, Artificial Sequence
  Description of Artificial Sequence: Synthetic oligonucleotide
cauaccccacggggacgcc

SEQ ID NO: 2096796 - RNA, 19 nt, Artificial Sequence
  Description of Artificial Sequence: Synthetic oligonucleotide
cacgcugugcgcuggccgu

SEQ ID NO: 2096797 - RNA, 19 nt, Artificial Sequence
  Description of Artificial Sequence: Synthetic oligonucleotide
ccucguuuuacggaggggu

SEQ ID NO: 2096798 - RNA, 19 nt, Artificial Sequence
  Description of Artificial Sequence: Synthetic oligonucleotide
gccguuaggucuucucgcu

SEQ ID NO: 2096799 - RNA, 19 nt, Artificial Sequence
  Description of Artificial Sequence: Synthetic oligonucleotide
gccggggugcacugcucag

SEQ ID NO: 2096800 - RNA, 19 nt, Artificial Sequence
  Description of Artificial Sequence: Synthetic oligonucleotide
ggccggggugcacugcuca

SEQ ID NO: 2096801 - RNA, 19 nt, Artificial Sequence
  Description of Artificial Sequence: Synthetic oligonucleotide
ggguggacugcauggcaua

SEQ ID NO: 2096802 - RNA, 19 nt, Artificial Sequence
  Description of Artificial Sequence: Synthetic oligonucleotide
ggcagugcucuccguucca

SEQ ID NO: 2096803 - RNA, 19 nt, Artificial Sequence
  Description of Artificial Sequence: Synthetic oligonucleotide
gccggcacccugcgcgagg

SEQ ID NO: 2096804 - RNA, 19 nt, Artificial Sequence
  Description of Artificial Sequence: Synthetic oligonucleotide
gccccgcuuccucuccccg

SEQ ID NO: 2096805 - RNA, 19 nt, Artificial Sequence
  Description of Artificial Sequence: Synthetic oligonucleotide
gggagcagccauaccccac

SEQ ID NO: 2096806 - RNA, 19 nt, Artificial Sequence
  Description of Artificial Sequence: Synthetic oligonucleotide
cccugcgcgaggccggaag

SEQ ID NO: 2096807 - RNA, 19 nt, Artificial Sequence
  Description of Artificial Sequence: Synthetic oligonucleotide
gcacccugcgcgaggccgg

SEQ ID NO: 2096808 - RNA, 19 nt, Artificial Sequence
  Description of Artificial Sequence: Synthetic oligonucleotide
ggucuucguuggagcacag

SEQ ID NO: 2096809 - RNA, 19 nt, Artificial Sequence
  Description of Artificial Sequence: Synthetic oligonucleotide
ggcugggagcagccauacc

SEQ ID NO: 2096810 - RNA, 19 nt, Artificial Sequence
  Description of Artificial Sequence: Synthetic oligonucleotide
gagcgcaccuguggccaca

SEQ ID NO: 2096811 - RNA, 19 nt, Artificial Sequence
  Description of Artificial Sequence: Synthetic oligonucleotide
ggccggaagagcggcuggc

SEQ ID NO: 2096812 - RNA, 19 nt, Artificial Sequence
  Description of Artificial Sequence: Synthetic oligonucleotide
ccacggggacgccuccucc

SEQ ID NO: 2096813 - RNA, 19 nt, Artificial Sequence
  Description of Artificial Sequence: Synthetic oligonucleotide
ccguuccagggguggacug

SEQ ID NO: 2096814 - RNA, 19 nt, Artificial Sequence
  Description of Artificial Sequence: Synthetic oligonucleotide
aggacccgccgcauagcau

SEQ ID NO: 2096815 - RNA, 19 nt, Artificial Sequence
  Description of Artificial Sequence: Synthetic oligonucleotide
gggacgccuccuccuccag

SEQ ID NO: 2096816 - RNA, 19 nt, Artificial Sequence
  Description of Artificial Sequence: Synthetic oligonucleotide
ggccccgcuuccucucccc

SEQ ID NO: 2096817 - RNA, 19 nt, Artificial Sequence
  Description of Artificial Sequence: Synthetic oligonucleotide
cccggaggggaaagccgag

SEQ ID NO: 2096818 - RNA, 19 nt, Artificial Sequence
  Description of Artificial Sequence: Synthetic oligonucleotide
gacggagggcugccagggu

SEQ ID NO: 2096819 - RNA, 19 nt, Artificial Sequence
  Description of Artificial Sequence: Synthetic oligonucleotide
agcgcaccuguggccacau

SEQ ID NO: 2096820 - RNA, 19 nt, Artificial Sequence
  Description of Artificial Sequence: Synthetic oligonucleotide
gccagggucucaaggcauc

SEQ ID NO: 2096821 - RNA, 19 nt, Artificial Sequence
  Description of Artificial Sequence: Synthetic oligonucleotide
gaagagcggcuggccgcca

SEQ ID NO: 2096822 - RNA, 19 nt, Artificial Sequence
  Description of Artificial Sequence: Synthetic oligonucleotide
gggcagcucuugcuugauc

SEQ ID NO: 2096823 - RNA, 19 nt, Artificial Sequence
  Description of Artificial Sequence: Synthetic oligonucleotide
cgccgcauagcauccccug

SEQ ID NO: 2096824 - RNA, 19 nt, Artificial Sequence
  Description of Artificial Sequence: Synthetic oligonucleotide
cgacauagcucccgcaaaa

SEQ ID NO: 2096825 - RNA, 19 nt, Artificial Sequence
  Description of Artificial Sequence: Synthetic oligonucleotide
ucucccgguccaggacauc

SEQ ID NO: 2096826 - RNA, 19 nt, Artificial Sequence
  Description of Artificial Sequence: Synthetic oligonucleotide
cuucaccccggggcuccac

SEQ ID NO: 2096827 - RNA, 19 nt, Artificial Sequence
  Description of Artificial Sequence: Synthetic oligonucleotide
ggacgacgggccggcaccc

SEQ ID NO: 2096828 - RNA, 19 nt, Artificial Sequence
  Description of Artificial Sequence: Synthetic oligonucleotide
caccccggggcuccacgca

SEQ ID NO: 2096829 - RNA, 19 nt, Artificial Sequence
  Description of Artificial Sequence: Synthetic oligonucleotide
gccccaaaucugguccgug

SEQ ID NO: 2096830 - RNA, 19 nt, Artificial Sequence
  Description of Artificial Sequence: Synthetic oligonucleotide
gucaugggcuccagggcau

SEQ ID NO: 2096831 - RNA, 19 nt, Artificial Sequence
  Description of Artificial Sequence: Synthetic oligonucleotide
cccugaugacaaucacaca

SEQ ID NO: 2096832 - RNA, 19 nt, Artificial Sequence
  Description of Artificial Sequence: Synthetic oligonucleotide
gccugacuagccucccuua

SEQ ID NO: 2096833 - RNA, 19 nt, Artificial Sequence
  Description of Artificial Sequence: Synthetic oligonucleotide
ggcauccuguggcccuuuc

SEQ ID NO: 2096834 - RNA, 19 nt, Artificial Sequence
  Description of Artificial Sequence: Synthetic oligonucleotide
cuccacgcaggccgagaua

SEQ ID NO: 2096835 - RNA, 19 nt, Artificial Sequence
  Description of Artificial Sequence: Synthetic oligonucleotide
gcagcccggaggggaaagc

SEQ ID NO: 2096836 - RNA, 19 nt, Artificial Sequence
  Description of Artificial Sequence: Synthetic oligonucleotide
cacuggcucgagccuggaa

SEQ ID NO: 2096837 - RNA, 19 nt, Artificial Sequence
  Description of Artificial Sequence: Synthetic oligonucleotide
gugagguagcagacacggu

SEQ ID NO: 2096838 - RNA, 19 nt, Artificial Sequence
  Description of Artificial Sequence: Synthetic oligonucleotide
ccaggacccgccgcauagc

SEQ ID NO: 2096839 - RNA, 19 nt, Artificial Sequence
  Description of Artificial Sequence: Synthetic oligonucleotide
ggccaucugugaggagcgc

SEQ ID NO: 2096840 - RNA, 19 nt, Artificial Sequence
  Description of Artificial Sequence: Synthetic oligonucleotide
ccacgcaggccgagauaac

SEQ ID NO: 2096841 - RNA, 19 nt, Artificial Sequence
  Description of Artificial Sequence: Synthetic oligonucleotide
cgacgggccggcacccugc

SEQ ID NO: 2096842 - RNA, 19 nt, Artificial Sequence
  Description of Artificial Sequence: Synthetic oligonucleotide
ccgagaauggcugggugcu

SEQ ID NO: 2096843 - RNA, 19 nt, Artificial Sequence
  Description of Artificial Sequence: Synthetic oligonucleotide
ccugcgcgaggccggaaga

SEQ ID NO: 2096844 - RNA, 19 nt, Artificial Sequence
  Description of Artificial Sequence: Synthetic oligonucleotide
cacuaucgagagcucucuu

SEQ ID NO: 2096845 - RNA, 19 nt, Artificial Sequence
  Description of Artificial Sequence: Synthetic oligonucleotide
gcaaaacccugaugacaau

SEQ ID NO: 2096846 - RNA, 19 nt, Artificial Sequence
  Description of Artificial Sequence: Synthetic oligonucleotide
cccacggggacgccuccuc

SEQ ID NO: 2096847 - RNA, 19 nt, Artificial Sequence
  Description of Artificial Sequence: Synthetic oligonucleotide
cggggugcacugcucagca

SEQ ID NO: 2096848 - RNA, 19 nt, Artificial Sequence
  Description of Artificial Sequence: Synthetic oligonucleotide
gcucccgcaaaacccugau

SEQ ID NO: 2096849 - RNA, 19 nt, Artificial Sequence
  Description of Artificial Sequence: Synthetic oligonucleotide
gcuccacgcaggccgagau

SEQ ID NO: 2096850 - RNA, 19 nt, Artificial Sequence
  Description of Artificial Sequence: Synthetic oligonucleotide
gggguggacugcauggcau

SEQ ID NO: 2096851 - RNA, 19 nt, Artificial Sequence
  Description of Artificial Sequence: Synthetic oligonucleotide
cggugacccuucaccccgg

SEQ ID NO: 2096852 - RNA, 19 nt, Artificial Sequence
  Description of Artificial Sequence: Synthetic oligonucleotide
acgcugugcgcuggccguu

SEQ ID NO: 2096853 - RNA, 19 nt, Artificial Sequence
  Description of Artificial Sequence: Synthetic oligonucleotide
ggggccggggugcacugcu

SEQ ID NO: 2096854 - RNA, 19 nt, Artificial Sequence
  Description of Artificial Sequence: Synthetic oligonucleotide
cucuccccggcucccuccu

SEQ ID NO: 2096855 - RNA, 19 nt, Artificial Sequence
  Description of Artificial Sequence: Synthetic oligonucleotide
ccugacuagccucccuuau

SEQ ID NO: 2096856 - RNA, 19 nt, Artificial Sequence
  Description of Artificial Sequence: Synthetic oligonucleotide
ccacuaucgagagcucucu

SEQ ID NO: 2096857 - RNA, 19 nt, Artificial Sequence
  Description of Artificial Sequence: Synthetic oligonucleotide
gcaugacggagggcugcca

SEQ ID NO: 2096858 - RNA, 19 nt, Artificial Sequence
  Description of Artificial Sequence: Synthetic oligonucleotide
cgagaauggcugggugcug

SEQ ID NO: 2096859 - RNA, 19 nt, Artificial Sequence
  Description of Artificial Sequence: Synthetic oligonucleotide
ccccggcucccuccugggc

SEQ ID NO: 2096860 - RNA, 19 nt, Artificial Sequence
  Description of Artificial Sequence: Synthetic oligonucleotide
gacgacgggccggcacccu

SEQ ID NO: 2096861 - RNA, 19 nt, Artificial Sequence
  Description of Artificial Sequence: Synthetic oligonucleotide
ggccggcacccugcgcgag

SEQ ID NO: 2096862 - RNA, 19 nt, Artificial Sequence
  Description of Artificial Sequence: Synthetic oligonucleotide
cacccugcgcgaggccgga

SEQ ID NO: 2096863 - RNA, 19 nt, Artificial Sequence
  Description of Artificial Sequence: Synthetic oligonucleotide
ccggaggggaaagccgaga

SEQ ID NO: 2096864 - RNA, 19 nt, Artificial Sequence
  Description of Artificial Sequence: Synthetic oligonucleotide
cguuggagcacagcagggu

SEQ ID NO: 2096865 - RNA, 19 nt, Artificial Sequence
  Description of Artificial Sequence: Synthetic oligonucleotide
ggggcgaggcagcgacaua

SEQ ID NO: 2096866 - RNA, 19 nt, Artificial Sequence
  Description of Artificial Sequence: Synthetic oligonucleotide
cgcaggccgagauaacaau

SEQ ID NO: 2096867 - RNA, 19 nt, Artificial Sequence
  Description of Artificial Sequence: Synthetic oligonucleotide
ggccccaaaucugguccgu

SEQ ID NO: 2096868 - RNA, 19 nt, Artificial Sequence
  Description of Artificial Sequence: Synthetic oligonucleotide
ccagggucucaaggcaucu

SEQ ID NO: 2096869 - RNA, 19 nt, Artificial Sequence
  Description of Artificial Sequence: Synthetic oligonucleotide
acccugcgcgaggccggaa

SEQ ID NO: 2096870 - RNA, 19 nt, Artificial Sequence
  Description of Artificial Sequence: Synthetic oligonucleotide
gcucucuugggcagcucuu

SEQ ID NO: 2096871 - RNA, 19 nt, Artificial Sequence
  Description of Artificial Sequence: Synthetic oligonucleotide
gugcacugcucagcaccuu

SEQ ID NO: 2096872 - RNA, 19 nt, Artificial Sequence
  Description of Artificial Sequence: Synthetic oligonucleotide
ggcucccuccugggccuga

SEQ ID NO: 2096873 - RNA, 19 nt, Artificial Sequence
  Description of Artificial Sequence: Synthetic oligonucleotide
ccgccgcauagcauccccu

SEQ ID NO: 2096874 - RNA, 19 nt, Artificial Sequence
  Description of Artificial Sequence: Synthetic oligonucleotide
cguuuuacggaggggucuu

SEQ ID NO: 2096875 - RNA, 19 nt, Artificial Sequence
  Description of Artificial Sequence: Synthetic oligonucleotide
gcuggccguuaggucuucu

SEQ ID NO: 2096876 - RNA, 19 nt, Artificial Sequence
  Description of Artificial Sequence: Synthetic oligonucleotide
ccacuggcucgagccugga

SEQ ID NO: 2096877 - RNA, 19 nt, Artificial Sequence
  Description of Artificial Sequence: Synthetic oligonucleotide
cggaggggucuucacgcau

SEQ ID NO: 2096878 - RNA, 19 nt, Artificial Sequence
  Description of Artificial Sequence: Synthetic oligonucleotide
gcgcuggccguuaggucuu

SEQ ID NO: 2096879 - RNA, 19 nt, Artificial Sequence
  Description of Artificial Sequence: Synthetic oligonucleotide
gcgcaccuguggccacaua

SEQ ID NO: 2096880 - RNA, 19 nt, Artificial Sequence
  Description of Artificial Sequence: Synthetic oligonucleotide
cgaggccggaagagcggcu

SEQ ID NO: 2096881 - RNA, 19 nt, Artificial Sequence
  Description of Artificial Sequence: Synthetic oligonucleotide
cccgggcccaggccccaaa

SEQ ID NO: 2096882 - RNA, 19 nt, Artificial Sequence
  Description of Artificial Sequence: Synthetic oligonucleotide
ccgcuuccucuccccggcu

SEQ ID NO: 2096883 - RNA, 19 nt, Artificial Sequence
  Description of Artificial Sequence: Synthetic oligonucleotide
gggcauccuguggcccuuu

SEQ ID NO: 2096884 - RNA, 19 nt, Artificial Sequence
  Description of Artificial Sequence: Synthetic oligonucleotide
cgcugugcgcuggccguua

SEQ ID NO: 2096885 - RNA, 19 nt, Artificial Sequence
  Description of Artificial Sequence: Synthetic oligonucleotide
uuauuaacuagcaugaacc

SEQ ID NO: 2096886 - RNA, 19 nt, Artificial Sequence
  Description of Artificial Sequence: Synthetic oligonucleotide
auuaacagcauucuugagc

SEQ ID NO: 2096887 - RNA, 19 nt, Artificial Sequence
  Description of Artificial Sequence: Synthetic oligonucleotide
ucuucaauggcuagcaucg

SEQ ID NO: 2096888 - RNA, 19 nt, Artificial Sequence
  Description of Artificial Sequence: Synthetic oligonucleotide
uuacauacggcauacuucg

SEQ ID NO: 2096889 - RNA, 19 nt, Artificial Sequence
  Description of Artificial Sequence: Synthetic oligonucleotide
uuuauuaucuuuaugugaa

SEQ ID NO: 2096890 - RNA, 19 nt, Artificial Sequence
  Description of Artificial Sequence: Synthetic oligonucleotide
aaagauggcgcauagucag

SEQ ID NO: 2096891 - RNA, 19 nt, Artificial Sequence
  Description of Artificial Sequence: Synthetic oligonucleotide
uaugaucuaacuaugagau

SEQ ID NO: 2096892 - RNA, 19 nt, Artificial Sequence
  Description of Artificial Sequence: Synthetic oligonucleotide
ugagauucagguaacagug

SEQ ID NO: 2096893 - RNA, 19 nt, Artificial Sequence
  Description of Artificial Sequence: Synthetic oligonucleotide
aaaaguaggaaccaagcaa

SEQ ID NO: 2096894 - RNA, 19 nt, Artificial Sequence
  Description of Artificial Sequence: Synthetic oligonucleotide
aacaguguuacauacggca

SEQ ID NO: 2096895 - RNA, 19 nt, Artificial Sequence
  Description of Artificial Sequence: Synthetic oligonucleotide
aacuaugagauucagguaa

SEQ ID NO: 2096896 - RNA, 19 nt, Artificial Sequence
  Description of Artificial Sequence: Synthetic oligonucleotide
uccuacaacauacugacug

SEQ ID NO: 2096897 - RNA, 19 nt, Artificial Sequence
  Description of Artificial Sequence: Synthetic oligonucleotide
guaacaguguuacauacgg

SEQ ID NO: 2096898 - RNA, 19 nt, Artificial Sequence
  Description of Artificial Sequence: Synthetic oligonucleotide
uguagugccaagaacagac

SEQ ID NO: 2096899 - RNA, 19 nt, Artificial Sequence
  Description of Artificial Sequence: Synthetic oligonucleotide
uucuuauuaacuagcauga

SEQ ID NO: 2096900 - RNA, 19 nt, Artificial Sequence
  Description of Artificial Sequence: Synthetic oligonucleotide
acagaaauaaauauuaaca

SEQ ID NO: 2096901 - RNA, 19 nt, Artificial Sequence
  Description of Artificial Sequence: Synthetic oligonucleotide
aaaguaggaaccaagcaag

SEQ ID NO: 2096902 - RNA, 19 nt, Artificial Sequence
  Description of Artificial Sequence: Synthetic oligonucleotide
ucucaggcuaccuuaaagg

SEQ ID NO: 2096903 - RNA, 19 nt, Artificial Sequence
  Description of Artificial Sequence: Synthetic oligonucleotide
auguaauaaauaauuauuc

SEQ ID NO: 2096904 - RNA, 19 nt, Artificial Sequence
  Description of Artificial Sequence: Synthetic oligonucleotide
gaugauacaacugucuuug

SEQ ID NO: 2096905 - RNA, 19 nt, Artificial Sequence
  Description of Artificial Sequence: Synthetic oligonucleotide
aagaauguaauaaauaauu

SEQ ID NO: 2096906 - RNA, 19 nt, Artificial Sequence
  Description of Artificial Sequence: Synthetic oligonucleotide
ugugaaaugcaaacaacug

SEQ ID NO: 2096907 - RNA, 19 nt, Artificial Sequence
  Description of Artificial Sequence: Synthetic oligonucleotide
uucgucaauacacagaaua

SEQ ID NO: 2096908 - RNA, 19 nt, Artificial Sequence
  Description of Artificial Sequence: Synthetic oligonucleotide
ugaucuaacuaugagauuc

SEQ ID NO: 2096909 - RNA, 19 nt, Artificial Sequence
  Description of Artificial Sequence: Synthetic oligonucleotide
cacaguuucgucaauacac

SEQ ID NO: 2096910 - RNA, 19 nt, Artificial Sequence
  Description of Artificial Sequence: Synthetic oligonucleotide
ucuaacuaugagauucagg

SEQ ID NO: 2096911 - RNA, 19 nt, Artificial Sequence
  Description of Artificial Sequence: Synthetic oligonucleotide
ucuccuacaacauacugac

SEQ ID NO: 2096912 - RNA, 19 nt, Artificial Sequence
  Description of Artificial Sequence: Synthetic oligonucleotide
acuagcaugaaccauuccu

SEQ ID NO: 2096913 - RNA, 19 nt, Artificial Sequence
  Description of Artificial Sequence: Synthetic oligonucleotide
ugucuuuguaaacugcugc

SEQ ID NO: 2096914 - RNA, 19 nt, Artificial Sequence
  Description of Artificial Sequence: Synthetic oligonucleotide
uuucuuauuccccuuugcc

SEQ ID NO: 2096915 - RNA, 19 nt, Artificial Sequence
  Description of Artificial Sequence: Synthetic oligonucleotide
gagauuuacuuguagugcc

SEQ ID NO: 2096916 - RNA, 19 nt, Artificial Sequence
  Description of Artificial Sequence: Synthetic oligonucleotide
auaugaucuaacuaugaga

SEQ ID NO: 2096917 - RNA, 19 nt, Artificial Sequence
  Description of Artificial Sequence: Synthetic oligonucleotide
acuaaggcuaagcugcugg

SEQ ID NO: 2096918 - RNA, 19 nt, Artificial Sequence
  Description of Artificial Sequence: Synthetic oligonucleotide
aaacaacugcagaaaaccc

SEQ ID NO: 2096919 - RNA, 19 nt, Artificial Sequence
  Description of Artificial Sequence: Synthetic oligonucleotide
auaucuucguucuaaguca

SEQ ID NO: 2096920 - RNA, 19 nt, Artificial Sequence
  Description of Artificial Sequence: Synthetic oligonucleotide
cauaucuucguucuaaguc

SEQ ID NO: 2096921 - RNA, 19 nt, Artificial Sequence
  Description of Artificial Sequence: Synthetic oligonucleotide
cuuauuaacuagcaugaac

SEQ ID NO: 2096922 - RNA, 19 nt, Artificial Sequence
  Description of Artificial Sequence: Synthetic oligonucleotide
cuaacuaugagauucaggu

SEQ ID NO: 2096923 - RNA, 19 nt, Artificial Sequence
  Description of Artificial Sequence: Synthetic oligonucleotide
uuaacuagcaugaaccauu

SEQ ID NO: 2096924 - RNA, 19 nt, Artificial Sequence
  Description of Artificial Sequence: Synthetic oligonucleotide
agucagaugauacaacugu

SEQ ID NO: 2096925 - RNA, 19 nt, Artificial Sequence
  Description of Artificial Sequence: Synthetic oligonucleotide
agacuuaucaauaacagaa

SEQ ID NO: 2096926 - RNA, 19 nt, Artificial Sequence
  Description of Artificial Sequence: Synthetic oligonucleotide
aaugggacacaguuucguc

SEQ ID NO: 2096927 - RNA, 19 nt, Artificial Sequence
  Description of Artificial Sequence: Synthetic oligonucleotide
aaaugcaaacaacugcaga

SEQ ID NO: 2096928 - RNA, 19 nt, Artificial Sequence
  Description of Artificial Sequence: Synthetic oligonucleotide
aaggcuaagcugcugggag

SEQ ID NO: 2096929 - RNA, 19 nt, Artificial Sequence
  Description of Artificial Sequence: Synthetic oligonucleotide
gauacaacugucuuuguaa

SEQ ID NO: 2096930 - RNA, 19 nt, Artificial Sequence
  Description of Artificial Sequence: Synthetic oligonucleotide
uucuuauuccccuuugccc

SEQ ID NO: 2096931 - RNA, 19 nt, Artificial Sequence
  Description of Artificial Sequence: Synthetic oligonucleotide
auagucagaugauacaacu

SEQ ID NO: 2096932 - RNA, 19 nt, Artificial Sequence
  Description of Artificial Sequence: Synthetic oligonucleotide
cauucuugagccaacguug

SEQ ID NO: 2096933 - RNA, 19 nt, Artificial Sequence
  Description of Artificial Sequence: Synthetic oligonucleotide
aacguugagacccaacaaa

SEQ ID NO: 2096934 - RNA, 19 nt, Artificial Sequence
  Description of Artificial Sequence: Synthetic oligonucleotide
ucaauggcuagcaucgccc

SEQ ID NO: 2096935 - RNA, 19 nt, Artificial Sequence
  Description of Artificial Sequence: Synthetic oligonucleotide
ugagauuuacuuguagugc

SEQ ID NO: 2096936 - RNA, 19 nt, Artificial Sequence
  Description of Artificial Sequence: Synthetic oligonucleotide
uucuccuacaacauacuga

SEQ ID NO: 2096937 - RNA, 19 nt, Artificial Sequence
  Description of Artificial Sequence: Synthetic oligonucleotide
aaccacaggguuuaucuca

SEQ ID NO: 2096938 - RNA, 19 nt, Artificial Sequence
  Description of Artificial Sequence: Synthetic oligonucleotide
cugaagagcacacuucucc

SEQ ID NO: 2096939 - RNA, 19 nt, Artificial Sequence
  Description of Artificial Sequence: Synthetic oligonucleotide
uauuaacuagcaugaacca

SEQ ID NO: 2096940 - RNA, 19 nt, Artificial Sequence
  Description of Artificial Sequence: Synthetic oligonucleotide
uucguucuaagucauguuc

SEQ ID NO: 2096941 - RNA, 19 nt, Artificial Sequence
  Description of Artificial Sequence: Synthetic oligonucleotide
agagaggaacuuuauuauc

SEQ ID NO: 2096942 - RNA, 19 nt, Artificial Sequence
  Description of Artificial Sequence: Synthetic oligonucleotide
uuuaucucaggcuaccuua

SEQ ID NO: 2096943 - RNA, 19 nt, Artificial Sequence
  Description of Artificial Sequence: Synthetic oligonucleotide
acaacauacugacuggugu

SEQ ID NO: 2096944 - RNA, 19 nt, Artificial Sequence
  Description of Artificial Sequence: Synthetic oligonucleotide
augagauucagguaacagu

SEQ ID NO: 2096945 - RNA, 19 nt, Artificial Sequence
  Description of Artificial Sequence: Synthetic oligonucleotide
cuugagccaacguugagac

SEQ ID NO: 2096946 - RNA, 19 nt, Artificial Sequence
  Description of Artificial Sequence: Synthetic oligonucleotide
uuuacuuguagugccaaga

SEQ ID NO: 2096947 - RNA, 19 nt, Artificial Sequence
  Description of Artificial Sequence: Synthetic oligonucleotide
aaaccacaggguuuaucuc

SEQ ID NO: 2096948 - RNA, 19 nt, Artificial Sequence
  Description of Artificial Sequence: Synthetic oligonucleotide
aaccagucuguuccuggcc

SEQ ID NO: 2096949 - RNA, 19 nt, Artificial Sequence
  Description of Artificial Sequence: Synthetic oligonucleotide
uaugagauucagguaacag

SEQ ID NO: 2096950 - RNA, 19 nt, Artificial Sequence
  Description of Artificial Sequence: Synthetic oligonucleotide
aaauucauucaugacaguu

SEQ ID NO: 2096951 - RNA, 19 nt, Artificial Sequence
  Description of Artificial Sequence: Synthetic oligonucleotide
cucaggcuaccuuaaaggg

SEQ ID NO: 2096952 - RNA, 19 nt, Artificial Sequence
  Description of Artificial Sequence: Synthetic oligonucleotide
acauacggcauacuucggg

SEQ ID NO: 2096953 - RNA, 19 nt, Artificial Sequence
  Description of Artificial Sequence: Synthetic oligonucleotide
aauggcuagcaucgcccgc

SEQ ID NO: 2096954 - RNA, 19 nt, Artificial Sequence
  Description of Artificial Sequence: Synthetic oligonucleotide
auagcggaggcgcuucucc

SEQ ID NO: 2096955 - RNA, 19 nt, Artificial Sequence
  Description of Artificial Sequence: Synthetic oligonucleotide
uuugcucauucucuagugc

SEQ ID NO: 2096956 - RNA, 19 nt, Artificial Sequence
  Description of Artificial Sequence: Synthetic oligonucleotide
ucaggcuaccuuaaagggc

SEQ ID NO: 2096957 - RNA, 19 nt, Artificial Sequence
  Description of Artificial Sequence: Synthetic oligonucleotide
uugagacccaacaaaagua

SEQ ID NO: 2096958 - RNA, 19 nt, Artificial Sequence
  Description of Artificial Sequence: Synthetic oligonucleotide
ucuucuguguuccuuccug

SEQ ID NO: 2096959 - RNA, 19 nt, Artificial Sequence
  Description of Artificial Sequence: Synthetic oligonucleotide
cuagcaugaaccauuccug

SEQ ID NO: 2096960 - RNA, 19 nt, Artificial Sequence
  Description of Artificial Sequence: Synthetic oligonucleotide
uguuacauacggcauacuu

SEQ ID NO: 2096961 - RNA, 19 nt, Artificial Sequence
  Description of Artificial Sequence: Synthetic oligonucleotide
acuuaucaauaacagaaau

SEQ ID NO: 2096962 - RNA, 19 nt, Artificial Sequence
  Description of Artificial Sequence: Synthetic oligonucleotide
caugacaguuucuuauucc

SEQ ID NO: 2096963 - RNA, 19 nt, Artificial Sequence
  Description of Artificial Sequence: Synthetic oligonucleotide
accuuaaagggccauccuc

SEQ ID NO: 2096964 - RNA, 19 nt, Artificial Sequence
  Description of Artificial Sequence: Synthetic oligonucleotide
ugcaaucugagauuuacuu

SEQ ID NO: 2096965 - RNA, 19 nt, Artificial Sequence
  Description of Artificial Sequence: Synthetic oligonucleotide
gaugcaaucugagauuuac

SEQ ID NO: 2096966 - RNA, 19 nt, Artificial Sequence
  Description of Artificial Sequence: Synthetic oligonucleotide
aacuagcaugaaccauucc

SEQ ID NO: 2096967 - RNA, 19 nt, Artificial Sequence
  Description of Artificial Sequence: Synthetic oligonucleotide
ucaaccagucuguuccugg

SEQ ID NO: 2096968 - RNA, 19 nt, Artificial Sequence
  Description of Artificial Sequence: Synthetic oligonucleotide
ucuagugcugccaauucuc

SEQ ID NO: 2096969 - RNA, 19 nt, Artificial Sequence
  Description of Artificial Sequence: Synthetic oligonucleotide
ucguucuaagucauguucu

SEQ ID NO: 2096970 - RNA, 19 nt, Artificial Sequence
  Description of Artificial Sequence: Synthetic oligonucleotide
guuucgucaauacacagaa

SEQ ID NO: 2096971 - RNA, 19 nt, Artificial Sequence
  Description of Artificial Sequence: Synthetic oligonucleotide
acagacuuaucaauaacag

SEQ ID NO: 2096972 - RNA, 19 nt, Artificial Sequence
  Description of Artificial Sequence: Synthetic oligonucleotide
uucaauggcuagcaucgcc

SEQ ID NO: 2096973 - RNA, 19 nt, Artificial Sequence
  Description of Artificial Sequence: Synthetic oligonucleotide
uuuuguuccagaguucgcu

SEQ ID NO: 2096974 - RNA, 19 nt, Artificial Sequence
  Description of Artificial Sequence: Synthetic oligonucleotide
ugguucauccuccuuauua

SEQ ID NO: 2096975 - RNA, 19 nt, Artificial Sequence
  Description of Artificial Sequence: Synthetic oligonucleotide
uagucagaugauacaacug

SEQ ID NO: 2096976 - RNA, 19 nt, Artificial Sequence
  Description of Artificial Sequence: Synthetic oligonucleotide
uggcaaaugggacacaguu

SEQ ID NO: 2096977 - RNA, 19 nt, Artificial Sequence
  Description of Artificial Sequence: Synthetic oligonucleotide
aucucaggcuaccuuaaag

SEQ ID NO: 2096978 - RNA, 19 nt, Artificial Sequence
  Description of Artificial Sequence: Synthetic oligonucleotide
uacaacauacugacuggug

SEQ ID NO: 2096979 - RNA, 19 nt, Artificial Sequence
  Description of Artificial Sequence: Synthetic oligonucleotide
aaaagauggcgcauaguca

SEQ ID NO: 2096980 - RNA, 19 nt, Artificial Sequence
  Description of Artificial Sequence: Synthetic oligonucleotide
gucaauacacagaauauga

SEQ ID NO: 2096981 - RNA, 19 nt, Artificial Sequence
  Description of Artificial Sequence: Synthetic oligonucleotide
gcaagaauguaauaaauaa

SEQ ID NO: 2096982 - RNA, 19 nt, Artificial Sequence
  Description of Artificial Sequence: Synthetic oligonucleotide
uuacuuguagugccaagaa

SEQ ID NO: 2096983 - RNA, 19 nt, Artificial Sequence
  Description of Artificial Sequence: Synthetic oligonucleotide
ugcaaacaacugcagaaaa

SEQ ID NO: 2096984 - RNA, 19 nt, Artificial Sequence
  Description of Artificial Sequence: Synthetic oligonucleotide
auggcgcauagucagauga

SEQ ID NO: 2096985 - RNA, 19 nt, Artificial Sequence
  Description of Artificial Sequence: Synthetic oligonucleotide
gaacagacuuaucaauaac

SEQ ID NO: 2096986 - RNA, 19 nt, Artificial Sequence
  Description of Artificial Sequence: Synthetic oligonucleotide
aauucauucaugacaguuu

SEQ ID NO: 2096987 - RNA, 19 nt, Artificial Sequence
  Description of Artificial Sequence: Synthetic oligonucleotide
ucgucaauacacagaauau

SEQ ID NO: 2096988 - RNA, 19 nt, Artificial Sequence
  Description of Artificial Sequence: Synthetic oligonucleotide
cauacuucgggauugggaa

SEQ ID NO: 2096989 - RNA, 19 nt, Artificial Sequence
  Description of Artificial Sequence: Synthetic oligonucleotide
aguagggagagcugguuca

SEQ ID NO: 2096990 - RNA, 19 nt, Artificial Sequence
  Description of Artificial Sequence: Synthetic oligonucleotide
cacuuuaaaucaaccaguc

SEQ ID NO: 2096991 - RNA, 19 nt, Artificial Sequence
  Description of Artificial Sequence: Synthetic oligonucleotide
agaauaugaucuaacuaug

SEQ ID NO: 2096992 - RNA, 19 nt, Artificial Sequence
  Description of Artificial Sequence: Synthetic oligonucleotide
ugcaggcuacugaagagca

SEQ ID NO: 2096993 - RNA, 19 nt, Artificial Sequence
  Description of Artificial Sequence: Synthetic oligonucleotide
cacagcucaccuuucaaac

SEQ ID NO: 2096994 - RNA, 19 nt, Artificial Sequence
  Description of Artificial Sequence: Synthetic oligonucleotide
aaaugggacacaguuucgu

SEQ ID NO: 2096995 - RNA, 19 nt, Artificial Sequence
  Description of Artificial Sequence: Synthetic oligonucleotide
uaaaucaaccagucuguuc

SEQ ID NO: 2096996 - RNA, 19 nt, Artificial Sequence
  Description of Artificial Sequence: Synthetic oligonucleotide
acgggugucaauuugcuuu

SEQ ID NO: 2096997 - RNA, 19 nt, Artificial Sequence
  Description of Artificial Sequence: Synthetic oligonucleotide
cuuaucaauaacagaaaua

SEQ ID NO: 2096998 - RNA, 19 nt, Artificial Sequence
  Description of Artificial Sequence: Synthetic oligonucleotide
cauagucagaugauacaac

SEQ ID NO: 2096999 - RNA, 19 nt, Artificial Sequence
  Description of Artificial Sequence: Synthetic oligonucleotide
uccaugagauagcggaggc

SEQ ID NO: 2097000 - RNA, 19 nt, Artificial Sequence
  Description of Artificial Sequence: Synthetic oligonucleotide
ucuugagccaacguugaga

SEQ ID NO: 2097001 - RNA, 19 nt, Artificial Sequence
  Description of Artificial Sequence: Synthetic oligonucleotide
cuaguagagccuuucucac

SEQ ID NO: 2097002 - RNA, 19 nt, Artificial Sequence
  Description of Artificial Sequence: Synthetic oligonucleotide
uccgaggagagcagagagg

SEQ ID NO: 2097003 - RNA, 19 nt, Artificial Sequence
  Description of Artificial Sequence: Synthetic oligonucleotide
uguccaugagauagcggag

SEQ ID NO: 2097004 - RNA, 19 nt, Artificial Sequence
  Description of Artificial Sequence: Synthetic oligonucleotide
gguucauccuccuuauuag

SEQ ID NO: 2097005 - RNA, 19 nt, Artificial Sequence
  Description of Artificial Sequence: Synthetic oligonucleotide
gaaccauuccugcaucaug

SEQ ID NO: 2097006 - RNA, 19 nt, Artificial Sequence
  Description of Artificial Sequence: Synthetic oligonucleotide
uguguccaugagauagcgg

SEQ ID NO: 2097007 - RNA, 19 nt, Artificial Sequence
  Description of Artificial Sequence: Synthetic oligonucleotide
acuuuaaaucaaccagucu

SEQ ID NO: 2097008 - RNA, 19 nt, Artificial Sequence
  Description of Artificial Sequence: Synthetic oligonucleotide
gaaaugcaaacaacugcag

SEQ ID NO: 2097009 - RNA, 19 nt, Artificial Sequence
  Description of Artificial Sequence: Synthetic oligonucleotide
aacauacugacuggugucu

SEQ ID NO: 2097010 - RNA, 19 nt, Artificial Sequence
  Description of Artificial Sequence: Synthetic oligonucleotide
ucauaucuucguucuaagu

SEQ ID NO: 2097011 - RNA, 19 nt, Artificial Sequence
  Description of Artificial Sequence: Synthetic oligonucleotide
ugcugcucaucuaguagag

SEQ ID NO: 2097012 - RNA, 19 nt, Artificial Sequence
  Description of Artificial Sequence: Synthetic oligonucleotide
aguuucuuauuccccuuug

SEQ ID NO: 2097013 - RNA, 19 nt, Artificial Sequence
  Description of Artificial Sequence: Synthetic oligonucleotide
auuuacuuguagugccaag

SEQ ID NO: 2097014 - RNA, 19 nt, Artificial Sequence
  Description of Artificial Sequence: Synthetic oligonucleotide
ucuguuccuggccugggga

SEQ ID NO: 2097015 - RNA, 19 nt, Artificial Sequence
  Description of Artificial Sequence: Synthetic oligonucleotide
uaacaguguuacauacggc

SEQ ID NO: 2097016 - RNA, 19 nt, Artificial Sequence
  Description of Artificial Sequence: Synthetic oligonucleotide
cccacuuuaaaucaaccag

SEQ ID NO: 2097017 - RNA, 19 nt, Artificial Sequence
  Description of Artificial Sequence: Synthetic oligonucleotide
cuaaggcuaagcugcuggg

SEQ ID NO: 2097018 - RNA, 19 nt, Artificial Sequence
  Description of Artificial Sequence: Synthetic oligonucleotide
gccaagaacagacuuauca

SEQ ID NO: 2097019 - RNA, 19 nt, Artificial Sequence
  Description of Artificial Sequence: Synthetic oligonucleotide
guuucuuauuccccuuugc

SEQ ID NO: 2097020 - RNA, 19 nt, Artificial Sequence
  Description of Artificial Sequence: Synthetic oligonucleotide
guuacauacggcauacuuc

SEQ ID NO: 2097021 - RNA, 19 nt, Artificial Sequence
  Description of Artificial Sequence: Synthetic oligonucleotide
cuaccuuaaagggccaucc

SEQ ID NO: 2097022 - RNA, 19 nt, Artificial Sequence
  Description of Artificial Sequence: Synthetic oligonucleotide
uuguuccagaguucgcucc

SEQ ID NO: 2097023 - RNA, 19 nt, Artificial Sequence
  Description of Artificial Sequence: Synthetic oligonucleotide
accauuccugcaucauggc

SEQ ID NO: 2097024 - RNA, 19 nt, Artificial Sequence
  Description of Artificial Sequence: Synthetic oligonucleotide
caaucugagauuuacuugu

SEQ ID NO: 2097025 - RNA, 19 nt, Artificial Sequence
  Description of Artificial Sequence: Synthetic oligonucleotide
uggggacuaaggcuaagcu

SEQ ID NO: 2097026 - RNA, 19 nt, Artificial Sequence
  Description of Artificial Sequence: Synthetic oligonucleotide
uaacuagcaugaaccauuc

SEQ ID NO: 2097027 - RNA, 19 nt, Artificial Sequence
  Description of Artificial Sequence: Synthetic oligonucleotide
uuucaaaccacaggguuua

SEQ ID NO: 2097028 - RNA, 19 nt, Artificial Sequence
  Description of Artificial Sequence: Synthetic oligonucleotide
acuaugagauucagguaac

SEQ ID NO: 2097029 - RNA, 19 nt, Artificial Sequence
  Description of Artificial Sequence: Synthetic oligonucleotide
caaaaguaggaaccaagca

SEQ ID NO: 2097030 - RNA, 19 nt, Artificial Sequence
  Description of Artificial Sequence: Synthetic oligonucleotide
gagacccaacaaaaguagg

SEQ ID NO: 2097031 - RNA, 19 nt, Artificial Sequence
  Description of Artificial Sequence: Synthetic oligonucleotide
cuagugcugccaauucucc

SEQ ID NO: 2097032 - RNA, 19 nt, Artificial Sequence
  Description of Artificial Sequence: Synthetic oligonucleotide
uccagcaggaguuguuccc

SEQ ID NO: 2097033 - RNA, 19 nt, Artificial Sequence
  Description of Artificial Sequence: Synthetic oligonucleotide
uucccgucgcuucugggcc

SEQ ID NO: 2097034 - RNA, 19 nt, Artificial Sequence
  Description of Artificial Sequence: Synthetic oligonucleotide
uuaucucaggcuaccuuaa

SEQ ID NO: 2097035 - RNA, 19 nt, Artificial Sequence
  Description of Artificial Sequence: Synthetic oligonucleotide
caaaugggacacaguuucg

SEQ ID NO: 2097036 - RNA, 19 nt, Artificial Sequence
  Description of Artificial Sequence: Synthetic oligonucleotide
guugagacccaacaaaagu

SEQ ID NO: 2097037 - RNA, 19 nt, Artificial Sequence
  Description of Artificial Sequence: Synthetic oligonucleotide
uguuccagaguucgcucca

SEQ ID NO: 2097038 - RNA, 19 nt, Artificial Sequence
  Description of Artificial Sequence: Synthetic oligonucleotide
uuuguuccagaguucgcuc

SEQ ID NO: 2097039 - RNA, 19 nt, Artificial Sequence
  Description of Artificial Sequence: Synthetic oligonucleotide
aaucaaccagucuguuccu

SEQ ID NO: 2097040 - RNA, 19 nt, Artificial Sequence
  Description of Artificial Sequence: Synthetic oligonucleotide
caacauacugacugguguc

SEQ ID NO: 2097041 - RNA, 19 nt, Artificial Sequence
  Description of Artificial Sequence: Synthetic oligonucleotide
agaugauacaacugucuuu

SEQ ID NO: 2097042 - RNA, 19 nt, Artificial Sequence
  Description of Artificial Sequence: Synthetic oligonucleotide
ugcucaucuaguagagccu

SEQ ID NO: 2097043 - RNA, 19 nt, Artificial Sequence
  Description of Artificial Sequence: Synthetic oligonucleotide
cuacugaagagcacacuuc

SEQ ID NO: 2097044 - RNA, 19 nt, Artificial Sequence
  Description of Artificial Sequence: Synthetic oligonucleotide
acaacugcagaaaacccca

SEQ ID NO: 2097045 - RNA, 19 nt, Artificial Sequence
  Description of Artificial Sequence: Synthetic oligonucleotide
ucacagcucaccuuucaaa

SEQ ID NO: 2097046 - RNA, 19 nt, Artificial Sequence
  Description of Artificial Sequence: Synthetic oligonucleotide
uuuccaguagggagagcug

SEQ ID NO: 2097047 - RNA, 19 nt, Artificial Sequence
  Description of Artificial Sequence: Synthetic oligonucleotide
caauggcuagcaucgcccg

SEQ ID NO: 2097048 - RNA, 19 nt, Artificial Sequence
  Description of Artificial Sequence: Synthetic oligonucleotide
uacauacggcauacuucgg

SEQ ID NO: 2097049 - RNA, 19 nt, Artificial Sequence
  Description of Artificial Sequence: Synthetic oligonucleotide
ucucacagcucaccuuuca

SEQ ID NO: 2097050 - RNA, 19 nt, Artificial Sequence
  Description of Artificial Sequence: Synthetic oligonucleotide
caguuucgucaauacacag

SEQ ID NO: 2097051 - RNA, 19 nt, Artificial Sequence
  Description of Artificial Sequence: Synthetic oligonucleotide
uccuuauuagggcuauuuu

SEQ ID NO: 2097052 - RNA, 19 nt, Artificial Sequence
  Description of Artificial Sequence: Synthetic oligonucleotide
agcacacuucuccuccuuc

SEQ ID NO: 2097053 - RNA, 19 nt, Artificial Sequence
  Description of Artificial Sequence: Synthetic oligonucleotide
ugggacacaguuucgucaa

SEQ ID NO: 2097054 - RNA, 19 nt, Artificial Sequence
  Description of Artificial Sequence: Synthetic oligonucleotide
ucucuagugcugccaauuc

SEQ ID NO: 2097055 - RNA, 19 nt, Artificial Sequence
  Description of Artificial Sequence: Synthetic oligonucleotide
gacaguuucuuauuccccu

SEQ ID NO: 2097056 - RNA, 19 nt, Artificial Sequence
  Description of Artificial Sequence: Synthetic oligonucleotide
auuaacuagcaugaaccau

SEQ ID NO: 2097057 - RNA, 19 nt, Artificial Sequence
  Description of Artificial Sequence: Synthetic oligonucleotide
uaacuaugagauucaggua

SEQ ID NO: 2097058 - RNA, 19 nt, Artificial Sequence
  Description of Artificial Sequence: Synthetic oligonucleotide
uucuugagccaacguugag

SEQ ID NO: 2097059 - RNA, 19 nt, Artificial Sequence
  Description of Artificial Sequence: Synthetic oligonucleotide
agugcugccaauucuccua

SEQ ID NO: 2097060 - RNA, 19 nt, Artificial Sequence
  Description of Artificial Sequence: Synthetic oligonucleotide
gcagagaggaacuuuauua

SEQ ID NO: 2097061 - RNA, 19 nt, Artificial Sequence
  Description of Artificial Sequence: Synthetic oligonucleotide
ccuacaacauacugacugg

SEQ ID NO: 2097062 - RNA, 19 nt, Artificial Sequence
  Description of Artificial Sequence: Synthetic oligonucleotide
gguaacaguguuacauacg

SEQ ID NO: 2097063 - RNA, 19 nt, Artificial Sequence
  Description of Artificial Sequence: Synthetic oligonucleotide
agcaagaauguaauaaaua

SEQ ID NO: 2097064 - RNA, 19 nt, Artificial Sequence
  Description of Artificial Sequence: Synthetic oligonucleotide
aacugcugcucaucuagua

SEQ ID NO: 2097065 - RNA, 19 nt, Artificial Sequence
  Description of Artificial Sequence: Synthetic oligonucleotide
uaguagagccuuucucaca

SEQ ID NO: 2097066 - RNA, 19 nt, Artificial Sequence
  Description of Artificial Sequence: Synthetic oligonucleotide
cagacuuaucaauaacaga

SEQ ID NO: 2097067 - RNA, 19 nt, Artificial Sequence
  Description of Artificial Sequence: Synthetic oligonucleotide
uccuccgaggagagcagag

SEQ ID NO: 2097068 - RNA, 19 nt, Artificial Sequence
  Description of Artificial Sequence: Synthetic oligonucleotide
agcugguucauccuccuua

SEQ ID NO: 2097069 - RNA, 19 nt, Artificial Sequence
  Description of Artificial Sequence: Synthetic oligonucleotide
aguuucgucaauacacaga

SEQ ID NO: 2097070 - RNA, 19 nt, Artificial Sequence
  Description of Artificial Sequence: Synthetic oligonucleotide
cauacggcauacuucggga

SEQ ID NO: 2097071 - RNA, 19 nt, Artificial Sequence
  Description of Artificial Sequence: Synthetic oligonucleotide
gacuggugucuuugaaccc

SEQ ID NO: 2097072 - RNA, 19 nt, Artificial Sequence
  Description of Artificial Sequence: Synthetic oligonucleotide
uagcaucgcccgcaguucc

SEQ ID NO: 2097073 - RNA, 19 nt, Artificial Sequence
  Description of Artificial Sequence: Synthetic oligonucleotide
gaucuaacuaugagauuca

SEQ ID NO: 2097074 - RNA, 19 nt, Artificial Sequence
  Description of Artificial Sequence: Synthetic oligonucleotide
cuguguccaugagauagcg

SEQ ID NO: 2097075 - RNA, 19 nt, Artificial Sequence
  Description of Artificial Sequence: Synthetic oligonucleotide
ucggucuucugccagucuu

SEQ ID NO: 2097076 - RNA, 19 nt, Artificial Sequence
  Description of Artificial Sequence: Synthetic oligonucleotide
cuguguuccuuccuguguc

SEQ ID NO: 2097077 - RNA, 19 nt, Artificial Sequence
  Description of Artificial Sequence: Synthetic oligonucleotide
cagaaaaccccacuggcaa

SEQ ID NO: 2097078 - RNA, 19 nt, Artificial Sequence
  Description of Artificial Sequence: Synthetic oligonucleotide
agggccacuagcucgucca

SEQ ID NO: 2097079 - RNA, 19 nt, Artificial Sequence
  Description of Artificial Sequence: Synthetic oligonucleotide
acaguuucgucaauacaca

SEQ ID NO: 2097080 - RNA, 19 nt, Artificial Sequence
  Description of Artificial Sequence: Synthetic oligonucleotide
uaccuuaaagggccauccu

SEQ ID NO: 2097081 - RNA, 19 nt, Artificial Sequence
  Description of Artificial Sequence: Synthetic oligonucleotide
guaggaaccaagcaagaau

SEQ ID NO: 2097082 - RNA, 19 nt, Artificial Sequence
  Description of Artificial Sequence: Synthetic oligonucleotide
auacugacuggugucuuug

SEQ ID NO: 2097083 - RNA, 19 nt, Artificial Sequence
  Description of Artificial Sequence: Synthetic oligonucleotide
uaaggcuaagcugcuggga

SEQ ID NO: 2097084 - RNA, 19 nt, Artificial Sequence
  Description of Artificial Sequence: Synthetic oligonucleotide
caugaaccauuccugcauc

SEQ ID NO: 2097085 - RNA, 19 nt, Artificial Sequence
  Description of Artificial Sequence: Synthetic oligonucleotide
gacuuaucaauaacagaaa

SEQ ID NO: 2097086 - RNA, 19 nt, Artificial Sequence
  Description of Artificial Sequence: Synthetic oligonucleotide
uccagaguucgcuccaaau

SEQ ID NO: 2097087 - RNA, 19 nt, Artificial Sequence
  Description of Artificial Sequence: Synthetic oligonucleotide
uguucccgucgcuucuggg

SEQ ID NO: 2097088 - RNA, 19 nt, Artificial Sequence
  Description of Artificial Sequence: Synthetic oligonucleotide
ucuuauuaacuagcaugaa

SEQ ID NO: 2097089 - RNA, 19 nt, Artificial Sequence
  Description of Artificial Sequence: Synthetic oligonucleotide
aucuaacuaugagauucag

SEQ ID NO: 2097090 - RNA, 19 nt, Artificial Sequence
  Description of Artificial Sequence: Synthetic oligonucleotide
agcauucuugagccaacgu

SEQ ID NO: 2097091 - RNA, 19 nt, Artificial Sequence
  Description of Artificial Sequence: Synthetic oligonucleotide
uacuucgggauugggaaaa

SEQ ID NO: 2097092 - RNA, 19 nt, Artificial Sequence
  Description of Artificial Sequence: Synthetic oligonucleotide
ggggacuaaggcuaagcug

SEQ ID NO: 2097093 - RNA, 19 nt, Artificial Sequence
  Description of Artificial Sequence: Synthetic oligonucleotide
aggguuuaucucaggcuac

SEQ ID NO: 2097094 - RNA, 19 nt, Artificial Sequence
  Description of Artificial Sequence: Synthetic oligonucleotide
gauggcgcauagucagaug

SEQ ID NO: 2097095 - RNA, 19 nt, Artificial Sequence
  Description of Artificial Sequence: Synthetic oligonucleotide
ggugucaauuugcuuuugc

SEQ ID NO: 2097096 - RNA, 19 nt, Artificial Sequence
  Description of Artificial Sequence: Synthetic oligonucleotide
agcaggaguuguucccguc

SEQ ID NO: 2097097 - RNA, 19 nt, Artificial Sequence
  Description of Artificial Sequence: Synthetic oligonucleotide
cugccaauucuccuacaac

SEQ ID NO: 2097098 - RNA, 19 nt, Artificial Sequence
  Description of Artificial Sequence: Synthetic oligonucleotide
gcaggaguuguucccgucg

SEQ ID NO: 2097099 - RNA, 19 nt, Artificial Sequence
  Description of Artificial Sequence: Synthetic oligonucleotide
gaguuguucccgucgcuuc

SEQ ID NO: 2097100 - RNA, 19 nt, Artificial Sequence
  Description of Artificial Sequence: Synthetic oligonucleotide
cagcucaccuuucaaacca

SEQ ID NO: 2097101 - RNA, 19 nt, Artificial Sequence
  Description of Artificial Sequence: Synthetic oligonucleotide
aagggccauccuccgagga

SEQ ID NO: 2097102 - RNA, 19 nt, Artificial Sequence
  Description of Artificial Sequence: Synthetic oligonucleotide
uacggcauacuucgggauu

SEQ ID NO: 2097103 - RNA, 19 nt, Artificial Sequence
  Description of Artificial Sequence: Synthetic oligonucleotide
agggccauccuccgaggag

SEQ ID NO: 2097104 - RNA, 19 nt, Artificial Sequence
  Description of Artificial Sequence: Synthetic oligonucleotide
uucucuagugcugccaauu

SEQ ID NO: 2097105 - RNA, 19 nt, Artificial Sequence
  Description of Artificial Sequence: Synthetic oligonucleotide
caggguuuaucucaggcua

SEQ ID NO: 2097106 - RNA, 19 nt, Artificial Sequence
  Description of Artificial Sequence: Synthetic oligonucleotide
gcuccaaaugcucaucuuc

SEQ ID NO: 2097107 - RNA, 19 nt, Artificial Sequence
  Description of Artificial Sequence: Synthetic oligonucleotide
acggcauacuucgggauug

SEQ ID NO: 2097108 - RNA, 19 nt, Artificial Sequence
  Description of Artificial Sequence: Synthetic oligonucleotide
ccguuuguccaccagggcc

SEQ ID NO: 2097109 - RNA, 19 nt, Artificial Sequence
  Description of Artificial Sequence: Synthetic oligonucleotide
agauuuacuuguagugcca

SEQ ID NO: 2097110 - RNA, 19 nt, Artificial Sequence
  Description of Artificial Sequence: Synthetic oligonucleotide
ugccagucuucaauggcua

SEQ ID NO: 2097111 - RNA, 19 nt, Artificial Sequence
  Description of Artificial Sequence: Synthetic oligonucleotide
uaucucaggcuaccuuaaa

SEQ ID NO: 2097112 - RNA, 19 nt, Artificial Sequence
  Description of Artificial Sequence: Synthetic oligonucleotide
auucuugagccaacguuga

SEQ ID NO: 2097113 - RNA, 19 nt, Artificial Sequence
  Description of Artificial Sequence: Synthetic oligonucleotide
gucagaugauacaacuguc

SEQ ID NO: 2097114 - RNA, 19 nt, Artificial Sequence
  Description of Artificial Sequence: Synthetic oligonucleotide
uuucgucaauacacagaau

SEQ ID NO: 2097115 - RNA, 19 nt, Artificial Sequence
  Description of Artificial Sequence: Synthetic oligonucleotide
agguccccugacaagggcg

SEQ ID NO: 2097116 - RNA, 19 nt, Artificial Sequence
  Description of Artificial Sequence: Synthetic oligonucleotide
agagccuuucucacagcuc

SEQ ID NO: 2097117 - RNA, 19 nt, Artificial Sequence
  Description of Artificial Sequence: Synthetic oligonucleotide
auacggcauacuucgggau

SEQ ID NO: 2097118 - RNA, 19 nt, Artificial Sequence
  Description of Artificial Sequence: Synthetic oligonucleotide
acguugagacccaacaaaa

SEQ ID NO: 2097119 - RNA, 19 nt, Artificial Sequence
  Description of Artificial Sequence: Synthetic oligonucleotide
aguucgcuccaaaugcuca

SEQ ID NO: 2097120 - RNA, 19 nt, Artificial Sequence
  Description of Artificial Sequence: Synthetic oligonucleotide
caguagggagagcugguuc

SEQ ID NO: 2097121 - RNA, 19 nt, Artificial Sequence
  Description of Artificial Sequence: Synthetic oligonucleotide
cugggagaggucuggucug

SEQ ID NO: 2097122 - RNA, 19 nt, Artificial Sequence
  Description of Artificial Sequence: Synthetic oligonucleotide
auacuucgggauugggaaa

SEQ ID NO: 2097123 - RNA, 19 nt, Artificial Sequence
  Description of Artificial Sequence: Synthetic oligonucleotide
caggcuacugaagagcaca

SEQ ID NO: 2097124 - RNA, 19 nt, Artificial Sequence
  Description of Artificial Sequence: Synthetic oligonucleotide
uugagccaacguugagacc

SEQ ID NO: 2097125 - RNA, 19 nt, Artificial Sequence
  Description of Artificial Sequence: Synthetic oligonucleotide
gauucagguaacaguguua

SEQ ID NO: 2097126 - RNA, 19 nt, Artificial Sequence
  Description of Artificial Sequence: Synthetic oligonucleotide
augaucuaacuaugagauu

SEQ ID NO: 2097127 - RNA, 19 nt, Artificial Sequence
  Description of Artificial Sequence: Synthetic oligonucleotide
aggcuacugaagagcacac

SEQ ID NO: 2097128 - RNA, 19 nt, Artificial Sequence
  Description of Artificial Sequence: Synthetic oligonucleotide
acuagcucguccagcagga

SEQ ID NO: 2097129 - RNA, 19 nt, Artificial Sequence
  Description of Artificial Sequence: Synthetic oligonucleotide
cuguuccuggccuggggac

SEQ ID NO: 2097130 - RNA, 19 nt, Artificial Sequence
  Description of Artificial Sequence: Synthetic oligonucleotide
aggcuaagcugcugggaga

SEQ ID NO: 2097131 - RNA, 19 nt, Artificial Sequence
  Description of Artificial Sequence: Synthetic oligonucleotide
uguccaccagggccacuag

SEQ ID NO: 2097132 - RNA, 19 nt, Artificial Sequence
  Description of Artificial Sequence: Synthetic oligonucleotide
augauacaacugucuuugu

SEQ ID NO: 2097133 - RNA, 19 nt, Artificial Sequence
  Description of Artificial Sequence: Synthetic oligonucleotide
guuuuguuccagaguucgc

SEQ ID NO: 2097134 - RNA, 19 nt, Artificial Sequence
  Description of Artificial Sequence: Synthetic oligonucleotide
acaguguuacauacggcau

SEQ ID NO: 2097135 - RNA, 19 nt, Artificial Sequence
  Description of Artificial Sequence: Synthetic oligonucleotide
uccaccagcgcggcacggg

SEQ ID NO: 2097136 - RNA, 19 nt, Artificial Sequence
  Description of Artificial Sequence: Synthetic oligonucleotide
uguuccuuccuguguccau

SEQ ID NO: 2097137 - RNA, 19 nt, Artificial Sequence
  Description of Artificial Sequence: Synthetic oligonucleotide
cagagaggaacuuuauuau

SEQ ID NO: 2097138 - RNA, 19 nt, Artificial Sequence
  Description of Artificial Sequence: Synthetic oligonucleotide
uggcgcauagucagaugau

SEQ ID NO: 2097139 - RNA, 19 nt, Artificial Sequence
  Description of Artificial Sequence: Synthetic oligonucleotide
cauccuccgaggagagcag

SEQ ID NO: 2097140 - RNA, 19 nt, Artificial Sequence
  Description of Artificial Sequence: Synthetic oligonucleotide
ccaacguugagacccaaca

SEQ ID NO: 2097141 - RNA, 19 nt, Artificial Sequence
  Description of Artificial Sequence: Synthetic oligonucleotide
uucucacagcucaccuuuc

SEQ ID NO: 2097142 - RNA, 19 nt, Artificial Sequence
  Description of Artificial Sequence: Synthetic oligonucleotide
gcauagucagaugauacaa

SEQ ID NO: 2097143 - RNA, 19 nt, Artificial Sequence
  Description of Artificial Sequence: Synthetic oligonucleotide
caacugcagaaaaccccac

SEQ ID NO: 2097144 - RNA, 19 nt, Artificial Sequence
  Description of Artificial Sequence: Synthetic oligonucleotide
gaguucgcuccaaaugcuc

SEQ ID NO: 2097145 - RNA, 19 nt, Artificial Sequence
  Description of Artificial Sequence: Synthetic oligonucleotide
agauggcgcauagucagau

SEQ ID NO: 2097146 - RNA, 19 nt, Artificial Sequence
  Description of Artificial Sequence: Synthetic oligonucleotide
aggaaccaagcaagaaugu

SEQ ID NO: 2097147 - RNA, 19 nt, Artificial Sequence
  Description of Artificial Sequence: Synthetic oligonucleotide
gugcugccaauucuccuac

SEQ ID NO: 2097148 - RNA, 19 nt, Artificial Sequence
  Description of Artificial Sequence: Synthetic oligonucleotide
agcaucgcccgcaguuccc

SEQ ID NO: 2097149 - RNA, 19 nt, Artificial Sequence
  Description of Artificial Sequence: Synthetic oligonucleotide
aucaaccagucuguuccug

SEQ ID NO: 2097150 - RNA, 19 nt, Artificial Sequence
  Description of Artificial Sequence: Synthetic oligonucleotide
ugagauagcggaggcgcuu

SEQ ID NO: 2097151 - RNA, 19 nt, Artificial Sequence
  Description of Artificial Sequence: Synthetic oligonucleotide
cuucaauggcuagcaucgc

SEQ ID NO: 2097152 - RNA, 19 nt, Artificial Sequence
  Description of Artificial Sequence: Synthetic oligonucleotide
caacguugagacccaacaa

SEQ ID NO: 2097153 - RNA, 19 nt, Artificial Sequence
  Description of Artificial Sequence: Synthetic oligonucleotide
cuagcaucgcccgcaguuc

SEQ ID NO: 2097154 - RNA, 19 nt, Artificial Sequence
  Description of Artificial Sequence: Synthetic oligonucleotide
gagauagcggaggcgcuuc

SEQ ID NO: 2097155 - RNA, 19 nt, Artificial Sequence
  Description of Artificial Sequence: Synthetic oligonucleotide
ccauuccugcaucauggcc

SEQ ID NO: 2097156 - RNA, 19 nt, Artificial Sequence
  Description of Artificial Sequence: Synthetic oligonucleotide
augcaaucugagauuuacu

SEQ ID NO: 2097157 - RNA, 19 nt, Artificial Sequence
  Description of Artificial Sequence: Synthetic oligonucleotide
guaaacugcugcucaucua

SEQ ID NO: 2097158 - RNA, 19 nt, Artificial Sequence
  Description of Artificial Sequence: Synthetic oligonucleotide
uucgcuccaaaugcucauc

SEQ ID NO: 2097159 - RNA, 19 nt, Artificial Sequence
  Description of Artificial Sequence: Synthetic oligonucleotide
cgucaauacacagaauaug

SEQ ID NO: 2097160 - RNA, 19 nt, Artificial Sequence
  Description of Artificial Sequence: Synthetic oligonucleotide
cguugagacccaacaaaag

SEQ ID NO: 2097161 - RNA, 19 nt, Artificial Sequence
  Description of Artificial Sequence: Synthetic oligonucleotide
guuuaucucaggcuaccuu

SEQ ID NO: 2097162 - RNA, 19 nt, Artificial Sequence
  Description of Artificial Sequence: Synthetic oligonucleotide
ggcacgggugucaauuugc

SEQ ID NO: 2097163 - RNA, 19 nt, Artificial Sequence
  Description of Artificial Sequence: Synthetic oligonucleotide
caguguuacauacggcaua

SEQ ID NO: 2097164 - RNA, 19 nt, Artificial Sequence
  Description of Artificial Sequence: Synthetic oligonucleotide
agauagcggaggcgcuucu

SEQ ID NO: 2097165 - RNA, 19 nt, Artificial Sequence
  Description of Artificial Sequence: Synthetic oligonucleotide
ucguccagcaggaguuguu

SEQ ID NO: 2097166 - RNA, 19 nt, Artificial Sequence
  Description of Artificial Sequence: Synthetic oligonucleotide
cugccagucuucaauggcu

SEQ ID NO: 2097167 - RNA, 19 nt, Artificial Sequence
  Description of Artificial Sequence: Synthetic oligonucleotide
ggguuuaucucaggcuacc

SEQ ID NO: 2097168 - RNA, 19 nt, Artificial Sequence
  Description of Artificial Sequence: Synthetic oligonucleotide
gcgcauagucagaugauac

SEQ ID NO: 2097169 - RNA, 19 nt, Artificial Sequence
  Description of Artificial Sequence: Synthetic oligonucleotide
gcuacugaagagcacacuu

SEQ ID NO: 2097170 - RNA, 19 nt, Artificial Sequence
  Description of Artificial Sequence: Synthetic oligonucleotide
gcucauaucuucguucuaa

SEQ ID NO: 2097171 - RNA, 19 nt, Artificial Sequence
  Description of Artificial Sequence: Synthetic oligonucleotide
agccuuucucacagcucac

SEQ ID NO: 2097172 - RNA, 19 nt, Artificial Sequence
  Description of Artificial Sequence: Synthetic oligonucleotide
accccacuggcaaauggga

SEQ ID NO: 2097173 - RNA, 19 nt, Artificial Sequence
  Description of Artificial Sequence: Synthetic oligonucleotide
cuaagcugcugggagaggu

SEQ ID NO: 2097174 - RNA, 19 nt, Artificial Sequence
  Description of Artificial Sequence: Synthetic oligonucleotide
gauagcggaggcgcuucuc

SEQ ID NO: 2097175 - RNA, 19 nt, Artificial Sequence
  Description of Artificial Sequence: Synthetic oligonucleotide
gcauacuucgggauuggga

SEQ ID NO: 2097176 - RNA, 19 nt, Artificial Sequence
  Description of Artificial Sequence: Synthetic oligonucleotide
caucgcccgcaguucccgg

SEQ ID NO: 2097177 - RNA, 19 nt, Artificial Sequence
  Description of Artificial Sequence: Synthetic oligonucleotide
gcagaaaaccccacuggca

SEQ ID NO: 2097178 - RNA, 19 nt, Artificial Sequence
  Description of Artificial Sequence: Synthetic oligonucleotide
gcugccaauucuccuacaa

SEQ ID NO: 2097179 - RNA, 19 nt, Artificial Sequence
  Description of Artificial Sequence: Synthetic oligonucleotide
cagggccacuagcucgucc

SEQ ID NO: 2097180 - RNA, 19 nt, Artificial Sequence
  Description of Artificial Sequence: Synthetic oligonucleotide
agcucauaucuucguucua

SEQ ID NO: 2097181 - RNA, 19 nt, Artificial Sequence
  Description of Artificial Sequence: Synthetic oligonucleotide
augagauagcggaggcgcu

SEQ ID NO: 2097182 - RNA, 19 nt, Artificial Sequence
  Description of Artificial Sequence: Synthetic oligonucleotide
acauacugacuggugucuu

SEQ ID NO: 2097183 - RNA, 19 nt, Artificial Sequence
  Description of Artificial Sequence: Synthetic oligonucleotide
gugccaagaacagacuuau

SEQ ID NO: 2097184 - RNA, 19 nt, Artificial Sequence
  Description of Artificial Sequence: Synthetic oligonucleotide
ggaaccaagcaagaaugua

SEQ ID NO: 2097185 - RNA, 19 nt, Artificial Sequence
  Description of Artificial Sequence: Synthetic oligonucleotide
gcauucuugagccaacguu

SEQ ID NO: 2097186 - RNA, 19 nt, Artificial Sequence
  Description of Artificial Sequence: Synthetic oligonucleotide
uggugucuuugaacccuuu

SEQ ID NO: 2097187 - RNA, 19 nt, Artificial Sequence
  Description of Artificial Sequence: Synthetic oligonucleotide
ccaugagauagcggaggcg

SEQ ID NO: 2097188 - RNA, 19 nt, Artificial Sequence
  Description of Artificial Sequence: Synthetic oligonucleotide
cuacaacauacugacuggu

SEQ ID NO: 2097189 - RNA, 19 nt, Artificial Sequence
  Description of Artificial Sequence: Synthetic oligonucleotide
ccgaggagagcagagagga

SEQ ID NO: 2097190 - RNA, 19 nt, Artificial Sequence
  Description of Artificial Sequence: Synthetic oligonucleotide
ccacuggcaaaugggacac

SEQ ID NO: 2097191 - RNA, 19 nt, Artificial Sequence
  Description of Artificial Sequence: Synthetic oligonucleotide
uuccuguguccaugagaua

SEQ ID NO: 2097192 - RNA, 19 nt, Artificial Sequence
  Description of Artificial Sequence: Synthetic oligonucleotide
cuagcucguccagcaggag

SEQ ID NO: 2097193 - RNA, 19 nt, Artificial Sequence
  Description of Artificial Sequence: Synthetic oligonucleotide
cguuuguccaccagggcca

SEQ ID NO: 2097194 - RNA, 19 nt, Artificial Sequence
  Description of Artificial Sequence: Synthetic oligonucleotide
ucccgucgcuucugggccu

SEQ ID NO: 2097195 - RNA, 19 nt, Artificial Sequence
  Description of Artificial Sequence: Synthetic oligonucleotide
gccuuucucacagcucacc

SEQ ID NO: 2097196 - RNA, 19 nt, Artificial Sequence
  Description of Artificial Sequence: Synthetic oligonucleotide
caucuugccuuuguuuugu

SEQ ID NO: 2097197 - RNA, 19 nt, Artificial Sequence
  Description of Artificial Sequence: Synthetic oligonucleotide
ggaggcgcuucuccaccag

SEQ ID NO: 2097198 - RNA, 19 nt, Artificial Sequence
  Description of Artificial Sequence: Synthetic oligonucleotide
gcuagcaucgcccgcaguu

SEQ ID NO: 2097199 - RNA, 19 nt, Artificial Sequence
  Description of Artificial Sequence: Synthetic oligonucleotide
auccuccgaggagagcaga

SEQ ID NO: 2097200 - RNA, 19 nt, Artificial Sequence
  Description of Artificial Sequence: Synthetic oligonucleotide
caccagcgcggcacgggug

SEQ ID NO: 2097201 - RNA, 19 nt, Artificial Sequence
  Description of Artificial Sequence: Synthetic oligonucleotide
ggccucggucuucugccag

SEQ ID NO: 2097202 - RNA, 19 nt, Artificial Sequence
  Description of Artificial Sequence: Synthetic oligonucleotide
cuuggccaucuugccuuug

SEQ ID NO: 2097203 - RNA, 19 nt, Artificial Sequence
  Description of Artificial Sequence: Synthetic oligonucleotide
ggacacaguuucgucaaua

SEQ ID NO: 2097204 - RNA, 19 nt, Artificial Sequence
  Description of Artificial Sequence: Synthetic oligonucleotide
ccaauucuccuacaacaua

SEQ ID NO: 2097205 - RNA, 19 nt, Artificial Sequence
  Description of Artificial Sequence: Synthetic oligonucleotide
guucuaagucauguucuuu

SEQ ID NO: 2097206 - RNA, 19 nt, Artificial Sequence
  Description of Artificial Sequence: Synthetic oligonucleotide
cuggcaaaugggacacagu

SEQ ID NO: 2097207 - RNA, 19 nt, Artificial Sequence
  Description of Artificial Sequence: Synthetic oligonucleotide
ggccuggggacuaaggcua

SEQ ID NO: 2097208 - RNA, 19 nt, Artificial Sequence
  Description of Artificial Sequence: Synthetic oligonucleotide
ggcgcauagucagaugaua

SEQ ID NO: 2097209 - RNA, 19 nt, Artificial Sequence
  Description of Artificial Sequence: Synthetic oligonucleotide
cccguuuguccaccagggc

SEQ ID NO: 2097210 - RNA, 19 nt, Artificial Sequence
  Description of Artificial Sequence: Synthetic oligonucleotide
cgguucagcagcucauauc

SEQ ID NO: 2097211 - RNA, 19 nt, Artificial Sequence
  Description of Artificial Sequence: Synthetic oligonucleotide
cugacaagggcgucccguu

SEQ ID NO: 2097212 - RNA, 19 nt, Artificial Sequence
  Description of Artificial Sequence: Synthetic oligonucleotide
cagcagcucauaucuucgu

SEQ ID NO: 2097213 - RNA, 19 nt, Artificial Sequence
  Description of Artificial Sequence: Synthetic oligonucleotide
gcucaccuuucaaaccaca

SEQ ID NO: 2097214 - RNA, 19 nt, Artificial Sequence
  Description of Artificial Sequence: Synthetic oligonucleotide
gaggucuggucugcaggcu

SEQ ID NO: 2097215 - RNA, 19 nt, Artificial Sequence
  Description of Artificial Sequence: Synthetic oligonucleotide
gggugucaauuugcuuuug

SEQ ID NO: 2097216 - RNA, 19 nt, Artificial Sequence
  Description of Artificial Sequence: Synthetic oligonucleotide
gccaacguugagacccaac

SEQ ID NO: 2097217 - RNA, 19 nt, Artificial Sequence
  Description of Artificial Sequence: Synthetic oligonucleotide
cuccuacaacauacugacu

SEQ ID NO: 2097218 - RNA, 19 nt, Artificial Sequence
  Description of Artificial Sequence: Synthetic oligonucleotide
gucgcuucugggccucggu

SEQ ID NO: 2097219 - RNA, 19 nt, Artificial Sequence
  Description of Artificial Sequence: Synthetic oligonucleotide
gcaggcuacugaagagcac

SEQ ID NO: 2097220 - RNA, 19 nt, Artificial Sequence
  Description of Artificial Sequence: Synthetic oligonucleotide
agcgcggcacgggugucaa

SEQ ID NO: 2097221 - RNA, 19 nt, Artificial Sequence
  Description of Artificial Sequence: Synthetic oligonucleotide
aggcuaccuuaaagggcca

SEQ ID NO: 2097222 - RNA, 19 nt, Artificial Sequence
  Description of Artificial Sequence: Synthetic oligonucleotide
gcguccagguccccugaca

SEQ ID NO: 2097223 - RNA, 19 nt, Artificial Sequence
  Description of Artificial Sequence: Synthetic oligonucleotide
cggucuucugccagucuuc

SEQ ID NO: 2097224 - RNA, 19 nt, Artificial Sequence
  Description of Artificial Sequence: Synthetic oligonucleotide
guagggagagcugguucau

SEQ ID NO: 2097225 - RNA, 19 nt, Artificial Sequence
  Description of Artificial Sequence: Synthetic oligonucleotide
guucccgguucagcagcuc

SEQ ID NO: 2097226 - RNA, 19 nt, Artificial Sequence
  Description of Artificial Sequence: Synthetic oligonucleotide
ggcaaaugggacacaguuu

SEQ ID NO: 2097227 - RNA, 19 nt, Artificial Sequence
  Description of Artificial Sequence: Synthetic oligonucleotide
ggcgucccguuuguccacc

SEQ ID NO: 2097228 - RNA, 19 nt, Artificial Sequence
  Description of Artificial Sequence: Synthetic oligonucleotide
gcucguccagcaggaguug

SEQ ID NO: 2097229 - RNA, 19 nt, Artificial Sequence
  Description of Artificial Sequence: Synthetic oligonucleotide
cagcaggaguuguucccgu

SEQ ID NO: 2097230 - RNA, 19 nt, Artificial Sequence
  Description of Artificial Sequence: Synthetic oligonucleotide
agccaacguugagacccaa

SEQ ID NO: 2097231 - RNA, 19 nt, Artificial Sequence
  Description of Artificial Sequence: Synthetic oligonucleotide
gggcgucccguuuguccac

SEQ ID NO: 2097232 - RNA, 19 nt, Artificial Sequence
  Description of Artificial Sequence: Synthetic oligonucleotide
ccgcaguucccgguucagc

SEQ ID NO: 2097233 - RNA, 19 nt, Artificial Sequence
  Description of Artificial Sequence: Synthetic oligonucleotide
cacgggugucaauuugcuu

SEQ ID NO: 2097234 - RNA, 19 nt, Artificial Sequence
  Description of Artificial Sequence: Synthetic oligonucleotide
ccucggucuucugccaguc

SEQ ID NO: 2097235 - RNA, 19 nt, Artificial Sequence
  Description of Artificial Sequence: Synthetic oligonucleotide
cucguccagcaggaguugu

SEQ ID NO: 2097236 - RNA, 19 nt, Artificial Sequence
  Description of Artificial Sequence: Synthetic oligonucleotide
gcccgcaguucccgguuca

SEQ ID NO: 2097237 - RNA, 19 nt, Artificial Sequence
  Description of Artificial Sequence: Synthetic oligonucleotide
gcacgggugucaauuugcu

SEQ ID NO: 2097238 - RNA, 19 nt, Artificial Sequence
  Description of Artificial Sequence: Synthetic oligonucleotide
cccugacaagggcgucccg

SEQ ID NO: 2097239 - RNA, 19 nt, Artificial Sequence
  Description of Artificial Sequence: Synthetic oligonucleotide
ccugacaagggcgucccgu

SEQ ID NO: 2097240 - RNA, 19 nt, Artificial Sequence
  Description of Artificial Sequence: Synthetic oligonucleotide
cggcauacuucgggauugg

SEQ ID NO: 2097241 - RNA, 19 nt, Artificial Sequence
  Description of Artificial Sequence: Synthetic oligonucleotide
cagcgcggcacggguguca

SEQ ID NO: 2097242 - RNA, 19 nt, Artificial Sequence
  Description of Artificial Sequence: Synthetic oligonucleotide
cccgcaguucccgguucag

SEQ ID NO: 2097243 - RNA, 19 nt, Artificial Sequence
  Description of Artificial Sequence: Synthetic oligonucleotide
gccucggucuucugccagu

SEQ ID NO: 2097244 - RNA, 19 nt, Artificial Sequence
  Description of Artificial Sequence: Synthetic oligonucleotide
cguucuaagucauguucuu

SEQ ID NO: 2097245 - RNA, 19 nt, Artificial Sequence
  Description of Artificial Sequence: Synthetic oligonucleotide
gcgucccguuuguccacca

SEQ ID NO: 2097246 - RNA, 19 nt, Artificial Sequence
  Description of Artificial Sequence: Synthetic oligonucleotide
cugggcguccagguccccu

SEQ ID NO: 2097247 - RNA, 19 nt, Artificial Sequence
  Description of Artificial Sequence: Synthetic oligonucleotide
gggacacaguuucgucaau

SEQ ID NO: 2097248 - RNA, 19 nt, Artificial Sequence
  Description of Artificial Sequence: Synthetic oligonucleotide
cgucgcuucugggccucgg

SEQ ID NO: 2097249 - RNA, 19 nt, Artificial Sequence
  Description of Artificial Sequence: Synthetic oligonucleotide
ggcuaccuuaaagggccau

SEQ ID NO: 2097250 - RNA, 19 nt, Artificial Sequence
  Description of Artificial Sequence: Synthetic oligonucleotide
ccgguucagcagcucauau

SEQ ID NO: 2097251 - RNA, 19 nt, Artificial Sequence
  Description of Artificial Sequence: Synthetic oligonucleotide
gccuggggacuaaggcuaa

SEQ ID NO: 2097252 - RNA, 19 nt, Artificial Sequence
  Description of Artificial Sequence: Synthetic oligonucleotide
ggcuagcaucgcccgcagu

SEQ ID NO: 2097253 - RNA, 19 nt, Artificial Sequence
  Description of Artificial Sequence: Synthetic oligonucleotide
gcggcacgggugucaauuu

SEQ ID NO: 2097254 - RNA, 19 nt, Artificial Sequence
  Description of Artificial Sequence: Synthetic oligonucleotide
cgggugucaauuugcuuuu

SEQ ID NO: 2097255 - RNA, 19 nt, Artificial Sequence
  Description of Artificial Sequence: Synthetic oligonucleotide
ccaccagcgcggcacgggu

SEQ ID NO: 2097256 - RNA, 19 nt, Artificial Sequence
  Description of Artificial Sequence: Synthetic oligonucleotide
cccgguucagcagcucaua

SEQ ID NO: 2097257 - RNA, 19 nt, Artificial Sequence
  Description of Artificial Sequence: Synthetic oligonucleotide
ccugggcguccaggucccc

SEQ ID NO: 2097258 - RNA, 19 nt, Artificial Sequence
  Description of Artificial Sequence: Synthetic oligonucleotide
ccagcgcggcacggguguc

SEQ ID NO: 2097259 - RNA, 19 nt, Artificial Sequence
  Description of Artificial Sequence: Synthetic oligonucleotide
cgcggcacgggugucaauu

SEQ ID NO: 2097260 - RNA, 19 nt, Artificial Sequence
  Description of Artificial Sequence: Synthetic oligonucleotide
cgcuccaaaugcucaucuu

SEQ ID NO: 2097261 - RNA, 19 nt, Artificial Sequence
  Description of Artificial Sequence: Synthetic oligonucleotide
ccuccuuauuagggcuauu

SEQ ID NO: 2097262 - RNA, 19 nt, Artificial Sequence
  Description of Artificial Sequence: Synthetic oligonucleotide
gcgcggcacgggugucaau

SEQ ID NO: 2097263 - RNA, 19 nt, Artificial Sequence
  Description of Artificial Sequence: Synthetic oligonucleotide
aauuuuaagaaauugugcu

SEQ ID NO: 2097264 - RNA, 19 nt, Artificial Sequence
  Description of Artificial Sequence: Synthetic oligonucleotide
auggaacuaacuuagaacc

SEQ ID NO: 2097265 - RNA, 19 nt, Artificial Sequence
  Description of Artificial Sequence: Synthetic oligonucleotide
aagaaauugugcuauguac

SEQ ID NO: 2097266 - RNA, 19 nt, Artificial Sequence
  Description of Artificial Sequence: Synthetic oligonucleotide
aauacacccauccuaacgg

SEQ ID NO: 2097267 - RNA, 19 nt, Artificial Sequence
  Description of Artificial Sequence: Synthetic oligonucleotide
acuacuaucaccucguaag

SEQ ID NO: 2097268 - RNA, 19 nt, Artificial Sequence
  Description of Artificial Sequence: Synthetic oligonucleotide
ugauucuuucuccaaaugg

SEQ ID NO: 2097269 - RNA, 19 nt, Artificial Sequence
  Description of Artificial Sequence: Synthetic oligonucleotide
aauugugcuauguacagca

SEQ ID NO: 2097270 - RNA, 19 nt, Artificial Sequence
  Description of Artificial Sequence: Synthetic oligonucleotide
aaagacaucucaugguuuc

SEQ ID NO: 2097271 - RNA, 19 nt, Artificial Sequence
  Description of Artificial Sequence: Synthetic oligonucleotide
auuccuuugacacaaagga

SEQ ID NO: 2097272 - RNA, 19 nt, Artificial Sequence
  Description of Artificial Sequence: Synthetic oligonucleotide
acaucuggaaacuuugugg

SEQ ID NO: 2097273 - RNA, 19 nt, Artificial Sequence
  Description of Artificial Sequence: Synthetic oligonucleotide
uuuucuagguaguucagag

SEQ ID NO: 2097274 - RNA, 19 nt, Artificial Sequence
  Description of Artificial Sequence: Synthetic oligonucleotide
agcaauugauucuuucucc

SEQ ID NO: 2097275 - RNA, 19 nt, Artificial Sequence
  Description of Artificial Sequence: Synthetic oligonucleotide
aacuaacucacuuuccuug

SEQ ID NO: 2097276 - RNA, 19 nt, Artificial Sequence
  Description of Artificial Sequence: Synthetic oligonucleotide
ugcuauuggaauuuuaaga

SEQ ID NO: 2097277 - RNA, 19 nt, Artificial Sequence
  Description of Artificial Sequence: Synthetic oligonucleotide
cauaagaagaguacggaag

SEQ ID NO: 2097278 - RNA, 19 nt, Artificial Sequence
  Description of Artificial Sequence: Synthetic oligonucleotide
auuucaguccaguugacag

SEQ ID NO: 2097279 - RNA, 19 nt, Artificial Sequence
  Description of Artificial Sequence: Synthetic oligonucleotide
ucuuaagagcauacaaagg

SEQ ID NO: 2097280 - RNA, 19 nt, Artificial Sequence
  Description of Artificial Sequence: Synthetic oligonucleotide
gaguacggaaguaagagcg

SEQ ID NO: 2097281 - RNA, 19 nt, Artificial Sequence
  Description of Artificial Sequence: Synthetic oligonucleotide
uggaauuuuaagaaauugu

SEQ ID NO: 2097282 - RNA, 19 nt, Artificial Sequence
  Description of Artificial Sequence: Synthetic oligonucleotide
aguaauuugaacccgcacu

SEQ ID NO: 2097283 - RNA, 19 nt, Artificial Sequence
  Description of Artificial Sequence: Synthetic oligonucleotide
aagaguacggaaguaagag

SEQ ID NO: 2097284 - RNA, 19 nt, Artificial Sequence
  Description of Artificial Sequence: Synthetic oligonucleotide
ucgagaacugaauacaccc

SEQ ID NO: 2097285 - RNA, 19 nt, Artificial Sequence
  Description of Artificial Sequence: Synthetic oligonucleotide
aucgucaacuacuaucacc

SEQ ID NO: 2097286 - RNA, 19 nt, Artificial Sequence
  Description of Artificial Sequence: Synthetic oligonucleotide
agcaaacuaacucacuuuc

SEQ ID NO: 2097287 - RNA, 19 nt, Artificial Sequence
  Description of Artificial Sequence: Synthetic oligonucleotide
aaauccugauuucagguga

SEQ ID NO: 2097288 - RNA, 19 nt, Artificial Sequence
  Description of Artificial Sequence: Synthetic oligonucleotide
gaauacacccauccuaacg

SEQ ID NO: 2097289 - RNA, 19 nt, Artificial Sequence
  Description of Artificial Sequence: Synthetic oligonucleotide
gaaauugugcuauguacag

SEQ ID NO: 2097290 - RNA, 19 nt, Artificial Sequence
  Description of Artificial Sequence: Synthetic oligonucleotide
aaaaggaggucuuugccca

SEQ ID NO: 2097291 - RNA, 19 nt, Artificial Sequence
  Description of Artificial Sequence: Synthetic oligonucleotide
gaauuuuaagaaauugugc

SEQ ID NO: 2097292 - RNA, 19 nt, Artificial Sequence
  Description of Artificial Sequence: Synthetic oligonucleotide
ucgucaacuacuaucaccu

SEQ ID NO: 2097293 - RNA, 19 nt, Artificial Sequence
  Description of Artificial Sequence: Synthetic oligonucleotide
acuuagaacccucaauuuc

SEQ ID NO: 2097294 - RNA, 19 nt, Artificial Sequence
  Description of Artificial Sequence: Synthetic oligonucleotide
aacucacuuuccuuguugg

SEQ ID NO: 2097295 - RNA, 19 nt, Artificial Sequence
  Description of Artificial Sequence: Synthetic oligonucleotide
uugaaaauccugauuucag

SEQ ID NO: 2097296 - RNA, 19 nt, Artificial Sequence
  Description of Artificial Sequence: Synthetic oligonucleotide
cauacauaagaagaguacg

SEQ ID NO: 2097297 - RNA, 19 nt, Artificial Sequence
  Description of Artificial Sequence: Synthetic oligonucleotide
guaguucagagcuucaucc

SEQ ID NO: 2097298 - RNA, 19 nt, Artificial Sequence
  Description of Artificial Sequence: Synthetic oligonucleotide
aaauggaacuaacuuagaa

SEQ ID NO: 2097299 - RNA, 19 nt, Artificial Sequence
  Description of Artificial Sequence: Synthetic oligonucleotide
acacaaaggaaccacacca

SEQ ID NO: 2097300 - RNA, 19 nt, Artificial Sequence
  Description of Artificial Sequence: Synthetic oligonucleotide
gaaauugcaugacacuugc

SEQ ID NO: 2097301 - RNA, 19 nt, Artificial Sequence
  Description of Artificial Sequence: Synthetic oligonucleotide
guaggugagucccagaugc

SEQ ID NO: 2097302 - RNA, 19 nt, Artificial Sequence
  Description of Artificial Sequence: Synthetic oligonucleotide
uccaaaauggaacuaacuu

SEQ ID NO: 2097303 - RNA, 19 nt, Artificial Sequence
  Description of Artificial Sequence: Synthetic oligonucleotide
cauacaaaggcagauagug

SEQ ID NO: 2097304 - RNA, 19 nt, Artificial Sequence
  Description of Artificial Sequence: Synthetic oligonucleotide
aauuugaacccgcacugug

SEQ ID NO: 2097305 - RNA, 19 nt, Artificial Sequence
  Description of Artificial Sequence: Synthetic oligonucleotide
gaacugaauacacccaucc

SEQ ID NO: 2097306 - RNA, 19 nt, Artificial Sequence
  Description of Artificial Sequence: Synthetic oligonucleotide
uggcaguuaauucuuaaga

SEQ ID NO: 2097307 - RNA, 19 nt, Artificial Sequence
  Description of Artificial Sequence: Synthetic oligonucleotide
uuaauucuuaagagcauac

SEQ ID NO: 2097308 - RNA, 19 nt, Artificial Sequence
  Description of Artificial Sequence: Synthetic oligonucleotide
uuggcauugaggaagaauu

SEQ ID NO: 2097309 - RNA, 19 nt, Artificial Sequence
  Description of Artificial Sequence: Synthetic oligonucleotide
agaguacggaaguaagagc

SEQ ID NO: 2097310 - RNA, 19 nt, Artificial Sequence
  Description of Artificial Sequence: Synthetic oligonucleotide
ugaaauugcaugacacuug

SEQ ID NO: 2097311 - RNA, 19 nt, Artificial Sequence
  Description of Artificial Sequence: Synthetic oligonucleotide
gucacuuccguauuucugg

SEQ ID NO: 2097312 - RNA, 19 nt, Artificial Sequence
  Description of Artificial Sequence: Synthetic oligonucleotide
agugacaauggguccaucg

SEQ ID NO: 2097313 - RNA, 19 nt, Artificial Sequence
  Description of Artificial Sequence: Synthetic oligonucleotide
acaacagacagcuguuugg

SEQ ID NO: 2097314 - RNA, 19 nt, Artificial Sequence
  Description of Artificial Sequence: Synthetic oligonucleotide
gaugcuggguaauauuucc

SEQ ID NO: 2097315 - RNA, 19 nt, Artificial Sequence
  Description of Artificial Sequence: Synthetic oligonucleotide
aacaacagacagcuguuug

SEQ ID NO: 2097316 - RNA, 19 nt, Artificial Sequence
  Description of Artificial Sequence: Synthetic oligonucleotide
guaauuugaacccgcacug

SEQ ID NO: 2097317 - RNA, 19 nt, Artificial Sequence
  Description of Artificial Sequence: Synthetic oligonucleotide
ugcagagaugagaaggucc

SEQ ID NO: 2097318 - RNA, 19 nt, Artificial Sequence
  Description of Artificial Sequence: Synthetic oligonucleotide
gucaacuacuaucaccucg

SEQ ID NO: 2097319 - RNA, 19 nt, Artificial Sequence
  Description of Artificial Sequence: Synthetic oligonucleotide
caucagauaccgaagucgg

SEQ ID NO: 2097320 - RNA, 19 nt, Artificial Sequence
  Description of Artificial Sequence: Synthetic oligonucleotide
ucaacuacuaucaccucgu

SEQ ID NO: 2097321 - RNA, 19 nt, Artificial Sequence
  Description of Artificial Sequence: Synthetic oligonucleotide
aacggcaccaccuuucccu

SEQ ID NO: 2097322 - RNA, 19 nt, Artificial Sequence
  Description of Artificial Sequence: Synthetic oligonucleotide
agacccacaagcaauggcc

SEQ ID NO: 2097323 - RNA, 19 nt, Artificial Sequence
  Description of Artificial Sequence: Synthetic oligonucleotide
ucguaagugaacuuagagu

SEQ ID NO: 2097324 - RNA, 19 nt, Artificial Sequence
  Description of Artificial Sequence: Synthetic oligonucleotide
caguuaauucuuaagagca

SEQ ID NO: 2097325 - RNA, 19 nt, Artificial Sequence
  Description of Artificial Sequence: Synthetic oligonucleotide
agcaguucuacaucaaaug

SEQ ID NO: 2097326 - RNA, 19 nt, Artificial Sequence
  Description of Artificial Sequence: Synthetic oligonucleotide
cuggagagcacucaguccc

SEQ ID NO: 2097327 - RNA, 19 nt, Artificial Sequence
  Description of Artificial Sequence: Synthetic oligonucleotide
uuuguagccagcuccaaaa

SEQ ID NO: 2097328 - RNA, 19 nt, Artificial Sequence
  Description of Artificial Sequence: Synthetic oligonucleotide
ucugggaguauuugaaagc

SEQ ID NO: 2097329 - RNA, 19 nt, Artificial Sequence
  Description of Artificial Sequence: Synthetic oligonucleotide
guaauauuuccuucuggcc

SEQ ID NO: 2097330 - RNA, 19 nt, Artificial Sequence
  Description of Artificial Sequence: Synthetic oligonucleotide
ugagcaauugauucuuucu

SEQ ID NO: 2097331 - RNA, 19 nt, Artificial Sequence
  Description of Artificial Sequence: Synthetic oligonucleotide
uucaggugaaauugcauga

SEQ ID NO: 2097332 - RNA, 19 nt, Artificial Sequence
  Description of Artificial Sequence: Synthetic oligonucleotide
gaacccauacauaagaaga

SEQ ID NO: 2097333 - RNA, 19 nt, Artificial Sequence
  Description of Artificial Sequence: Synthetic oligonucleotide
acuuccguauuucugggag

SEQ ID NO: 2097334 - RNA, 19 nt, Artificial Sequence
  Description of Artificial Sequence: Synthetic oligonucleotide
ugaaagccaccuuugaagu

SEQ ID NO: 2097335 - RNA, 19 nt, Artificial Sequence
  Description of Artificial Sequence: Synthetic oligonucleotide
gaacccucaauuucagucc

SEQ ID NO: 2097336 - RNA, 19 nt, Artificial Sequence
  Description of Artificial Sequence: Synthetic oligonucleotide
ggaauuuuaagaaauugug

SEQ ID NO: 2097337 - RNA, 19 nt, Artificial Sequence
  Description of Artificial Sequence: Synthetic oligonucleotide
aaugcaguccagcccugac

SEQ ID NO: 2097338 - RNA, 19 nt, Artificial Sequence
  Description of Artificial Sequence: Synthetic oligonucleotide
cuucauuguaggaaggcac

SEQ ID NO: 2097339 - RNA, 19 nt, Artificial Sequence
  Description of Artificial Sequence: Synthetic oligonucleotide
gaacuuagaguccuguuuc

SEQ ID NO: 2097340 - RNA, 19 nt, Artificial Sequence
  Description of Artificial Sequence: Synthetic oligonucleotide
uuucccucgguucugcacc

SEQ ID NO: 2097341 - RNA, 19 nt, Artificial Sequence
  Description of Artificial Sequence: Synthetic oligonucleotide
ugauuucaggugaaauugc

SEQ ID NO: 2097342 - RNA, 19 nt, Artificial Sequence
  Description of Artificial Sequence: Synthetic oligonucleotide
uugcaugacacuugcaugu

SEQ ID NO: 2097343 - RNA, 19 nt, Artificial Sequence
  Description of Artificial Sequence: Synthetic oligonucleotide
uugacugccaucgucaacu

SEQ ID NO: 2097344 - RNA, 19 nt, Artificial Sequence
  Description of Artificial Sequence: Synthetic oligonucleotide
ugaacuuagaguccuguuu

SEQ ID NO: 2097345 - RNA, 19 nt, Artificial Sequence
  Description of Artificial Sequence: Synthetic oligonucleotide
ugcuauguacagcaguucu

SEQ ID NO: 2097346 - RNA, 19 nt, Artificial Sequence
  Description of Artificial Sequence: Synthetic oligonucleotide
ucucggguuaguaauuuga

SEQ ID NO: 2097347 - RNA, 19 nt, Artificial Sequence
  Description of Artificial Sequence: Synthetic oligonucleotide
uccaucaucacaggcaacc

SEQ ID NO: 2097348 - RNA, 19 nt, Artificial Sequence
  Description of Artificial Sequence: Synthetic oligonucleotide
uauuucugggaguauuuga

SEQ ID NO: 2097349 - RNA, 19 nt, Artificial Sequence
  Description of Artificial Sequence: Synthetic oligonucleotide
uaagaaauugugcuaugua

SEQ ID NO: 2097350 - RNA, 19 nt, Artificial Sequence
  Description of Artificial Sequence: Synthetic oligonucleotide
uguuugguaggugaguccc

SEQ ID NO: 2097351 - RNA, 19 nt, Artificial Sequence
  Description of Artificial Sequence: Synthetic oligonucleotide
aucacgcguacuuugucac

SEQ ID NO: 2097352 - RNA, 19 nt, Artificial Sequence
  Description of Artificial Sequence: Synthetic oligonucleotide
uguacagcaguucuacauc

SEQ ID NO: 2097353 - RNA, 19 nt, Artificial Sequence
  Description of Artificial Sequence: Synthetic oligonucleotide
cucguaagugaacuuagag

SEQ ID NO: 2097354 - RNA, 19 nt, Artificial Sequence
  Description of Artificial Sequence: Synthetic oligonucleotide
uuccuuguuggcucaaucc

SEQ ID NO: 2097355 - RNA, 19 nt, Artificial Sequence
  Description of Artificial Sequence: Synthetic oligonucleotide
caucaaaugcccaucguuc

SEQ ID NO: 2097356 - RNA, 19 nt, Artificial Sequence
  Description of Artificial Sequence: Synthetic oligonucleotide
uuagaacccucaauuucag

SEQ ID NO: 2097357 - RNA, 19 nt, Artificial Sequence
  Description of Artificial Sequence: Synthetic oligonucleotide
uggaacuaacuuagaaccc

SEQ ID NO: 2097358 - RNA, 19 nt, Artificial Sequence
  Description of Artificial Sequence: Synthetic oligonucleotide
auggaacccauacauaaga

SEQ ID NO: 2097359 - RNA, 19 nt, Artificial Sequence
  Description of Artificial Sequence: Synthetic oligonucleotide
acugaauacacccauccua

SEQ ID NO: 2097360 - RNA, 19 nt, Artificial Sequence
  Description of Artificial Sequence: Synthetic oligonucleotide
uuugacacaaaggaaccac

SEQ ID NO: 2097361 - RNA, 19 nt, Artificial Sequence
  Description of Artificial Sequence: Synthetic oligonucleotide
uguagccagcuccaaaaug

SEQ ID NO: 2097362 - RNA, 19 nt, Artificial Sequence
  Description of Artificial Sequence: Synthetic oligonucleotide
aacccauacauaagaagag

SEQ ID NO: 2097363 - RNA, 19 nt, Artificial Sequence
  Description of Artificial Sequence: Synthetic oligonucleotide
uucauccaucaucacaggc

SEQ ID NO: 2097364 - RNA, 19 nt, Artificial Sequence
  Description of Artificial Sequence: Synthetic oligonucleotide
auggccauuugaucaggcc

SEQ ID NO: 2097365 - RNA, 19 nt, Artificial Sequence
  Description of Artificial Sequence: Synthetic oligonucleotide
auacacccauccuaacggc

SEQ ID NO: 2097366 - RNA, 19 nt, Artificial Sequence
  Description of Artificial Sequence: Synthetic oligonucleotide
ggcaguuaauucuuaagag

SEQ ID NO: 2097367 - RNA, 19 nt, Artificial Sequence
  Description of Artificial Sequence: Synthetic oligonucleotide
aaaugcccaucguucaaug

SEQ ID NO: 2097368 - RNA, 19 nt, Artificial Sequence
  Description of Artificial Sequence: Synthetic oligonucleotide
caggaaauggaacccauac

SEQ ID NO: 2097369 - RNA, 19 nt, Artificial Sequence
  Description of Artificial Sequence: Synthetic oligonucleotide
aggugaaauugcaugacac

SEQ ID NO: 2097370 - RNA, 19 nt, Artificial Sequence
  Description of Artificial Sequence: Synthetic oligonucleotide
ucguucaaugugcagagau

SEQ ID NO: 2097371 - RNA, 19 nt, Artificial Sequence
  Description of Artificial Sequence: Synthetic oligonucleotide
aguugacagcaacuucugc

SEQ ID NO: 2097372 - RNA, 19 nt, Artificial Sequence
  Description of Artificial Sequence: Synthetic oligonucleotide
cuacaucaaaugcccaucg

SEQ ID NO: 2097373 - RNA, 19 nt, Artificial Sequence
  Description of Artificial Sequence: Synthetic oligonucleotide
ugacaauggguccaucgca

SEQ ID NO: 2097374 - RNA, 19 nt, Artificial Sequence
  Description of Artificial Sequence: Synthetic oligonucleotide
ugugcuauguacagcaguu

SEQ ID NO: 2097375 - RNA, 19 nt, Artificial Sequence
  Description of Artificial Sequence: Synthetic oligonucleotide
uucauguuggugauauggu

SEQ ID NO: 2097376 - RNA, 19 nt, Artificial Sequence
  Description of Artificial Sequence: Synthetic oligonucleotide
uacauaagaagaguacgga

SEQ ID NO: 2097377 - RNA, 19 nt, Artificial Sequence
  Description of Artificial Sequence: Synthetic oligonucleotide
uugaagucuggucuugacu

SEQ ID NO: 2097378 - RNA, 19 nt, Artificial Sequence
  Description of Artificial Sequence: Synthetic oligonucleotide
cugucucuuuucuagguag

SEQ ID NO: 2097379 - RNA, 19 nt, Artificial Sequence
  Description of Artificial Sequence: Synthetic oligonucleotide
aauggaacccauacauaag

SEQ ID NO: 2097380 - RNA, 19 nt, Artificial Sequence
  Description of Artificial Sequence: Synthetic oligonucleotide
aacugaauacacccauccu

SEQ ID NO: 2097381 - RNA, 19 nt, Artificial Sequence
  Description of Artificial Sequence: Synthetic oligonucleotide
uuucuagguaguucagagc

SEQ ID NO: 2097382 - RNA, 19 nt, Artificial Sequence
  Description of Artificial Sequence: Synthetic oligonucleotide
cguaagugaacuuagaguc

SEQ ID NO: 2097383 - RNA, 19 nt, Artificial Sequence
  Description of Artificial Sequence: Synthetic oligonucleotide
uugaggaagaauuucucuu

SEQ ID NO: 2097384 - RNA, 19 nt, Artificial Sequence
  Description of Artificial Sequence: Synthetic oligonucleotide
caucguucaaugugcagag

SEQ ID NO: 2097385 - RNA, 19 nt, Artificial Sequence
  Description of Artificial Sequence: Synthetic oligonucleotide
aauggccauuugaucaggc

SEQ ID NO: 2097386 - RNA, 19 nt, Artificial Sequence
  Description of Artificial Sequence: Synthetic oligonucleotide
gcaguuaauucuuaagagc

SEQ ID NO: 2097387 - RNA, 19 nt, Artificial Sequence
  Description of Artificial Sequence: Synthetic oligonucleotide
uugacacaaaggaaccaca

SEQ ID NO: 2097388 - RNA, 19 nt, Artificial Sequence
  Description of Artificial Sequence: Synthetic oligonucleotide
uauugaaaauccugauuuc

SEQ ID NO: 2097389 - RNA, 19 nt, Artificial Sequence
  Description of Artificial Sequence: Synthetic oligonucleotide
aagaagaguacggaaguaa

SEQ ID NO: 2097390 - RNA, 19 nt, Artificial Sequence
  Description of Artificial Sequence: Synthetic oligonucleotide
uaucacgcguacuuuguca

SEQ ID NO: 2097391 - RNA, 19 nt, Artificial Sequence
  Description of Artificial Sequence: Synthetic oligonucleotide
ugcccaucguucaaugugc

SEQ ID NO: 2097392 - RNA, 19 nt, Artificial Sequence
  Description of Artificial Sequence: Synthetic oligonucleotide
cugcuauuggaauuuuaag

SEQ ID NO: 2097393 - RNA, 19 nt, Artificial Sequence
  Description of Artificial Sequence: Synthetic oligonucleotide
uucaaugugcagagaugag

SEQ ID NO: 2097394 - RNA, 19 nt, Artificial Sequence
  Description of Artificial Sequence: Synthetic oligonucleotide
cacugugugucccugauuc

SEQ ID NO: 2097395 - RNA, 19 nt, Artificial Sequence
  Description of Artificial Sequence: Synthetic oligonucleotide
acaauggguccaucgcagc

SEQ ID NO: 2097396 - RNA, 19 nt, Artificial Sequence
  Description of Artificial Sequence: Synthetic oligonucleotide
acauaagaagaguacggaa

SEQ ID NO: 2097397 - RNA, 19 nt, Artificial Sequence
  Description of Artificial Sequence: Synthetic oligonucleotide
uccaaaugggcucgagacc

SEQ ID NO: 2097398 - RNA, 19 nt, Artificial Sequence
  Description of Artificial Sequence: Synthetic oligonucleotide
uggguaauauuuccuucug

SEQ ID NO: 2097399 - RNA, 19 nt, Artificial Sequence
  Description of Artificial Sequence: Synthetic oligonucleotide
aaacuaacucacuuuccuu

SEQ ID NO: 2097400 - RNA, 19 nt, Artificial Sequence
  Description of Artificial Sequence: Synthetic oligonucleotide
accaccuuucccucgguuc

SEQ ID NO: 2097401 - RNA, 19 nt, Artificial Sequence
  Description of Artificial Sequence: Synthetic oligonucleotide
augcccaucguucaaugug

SEQ ID NO: 2097402 - RNA, 19 nt, Artificial Sequence
  Description of Artificial Sequence: Synthetic oligonucleotide
gcuauuggaauuuuaagaa

SEQ ID NO: 2097403 - RNA, 19 nt, Artificial Sequence
  Description of Artificial Sequence: Synthetic oligonucleotide
aacuuagaguccuguuucu

SEQ ID NO: 2097404 - RNA, 19 nt, Artificial Sequence
  Description of Artificial Sequence: Synthetic oligonucleotide
guuaguaauuugaacccgc

SEQ ID NO: 2097405 - RNA, 19 nt, Artificial Sequence
  Description of Artificial Sequence: Synthetic oligonucleotide
aacuacuaucaccucguaa

SEQ ID NO: 2097406 - RNA, 19 nt, Artificial Sequence
  Description of Artificial Sequence: Synthetic oligonucleotide
uugugcuauguacagcagu

SEQ ID NO: 2097407 - RNA, 19 nt, Artificial Sequence
  Description of Artificial Sequence: Synthetic oligonucleotide
cucgagaacugaauacacc

SEQ ID NO: 2097408 - RNA, 19 nt, Artificial Sequence
  Description of Artificial Sequence: Synthetic oligonucleotide
ggguuaguaauuugaaccc

SEQ ID NO: 2097409 - RNA, 19 nt, Artificial Sequence
  Description of Artificial Sequence: Synthetic oligonucleotide
cuauguacagcaguucuac

SEQ ID NO: 2097410 - RNA, 19 nt, Artificial Sequence
  Description of Artificial Sequence: Synthetic oligonucleotide
uaguaauuugaacccgcac

SEQ ID NO: 2097411 - RNA, 19 nt, Artificial Sequence
  Description of Artificial Sequence: Synthetic oligonucleotide
uucuacaucaaaugcccau

SEQ ID NO: 2097412 - RNA, 19 nt, Artificial Sequence
  Description of Artificial Sequence: Synthetic oligonucleotide
aacccucaauuucagucca

SEQ ID NO: 2097413 - RNA, 19 nt, Artificial Sequence
  Description of Artificial Sequence: Synthetic oligonucleotide
gagaugagaagguccgggc

SEQ ID NO: 2097414 - RNA, 19 nt, Artificial Sequence
  Description of Artificial Sequence: Synthetic oligonucleotide
aauuucaguccaguugaca

SEQ ID NO: 2097415 - RNA, 19 nt, Artificial Sequence
  Description of Artificial Sequence: Synthetic oligonucleotide
aaugcccaucguucaaugu

SEQ ID NO: 2097416 - RNA, 19 nt, Artificial Sequence
  Description of Artificial Sequence: Synthetic oligonucleotide
aguaagagcgcugagcaau

SEQ ID NO: 2097417 - RNA, 19 nt, Artificial Sequence
  Description of Artificial Sequence: Synthetic oligonucleotide
guccaucgcagcuuuauug

SEQ ID NO: 2097418 - RNA, 19 nt, Artificial Sequence
  Description of Artificial Sequence: Synthetic oligonucleotide
agaagaguacggaaguaag

SEQ ID NO: 2097419 - RNA, 19 nt, Artificial Sequence
  Description of Artificial Sequence: Synthetic oligonucleotide
gacaauggguccaucgcag

SEQ ID NO: 2097420 - RNA, 19 nt, Artificial Sequence
  Description of Artificial Sequence: Synthetic oligonucleotide
ucagauaccgaagucggau

SEQ ID NO: 2097421 - RNA, 19 nt, Artificial Sequence
  Description of Artificial Sequence: Synthetic oligonucleotide
uccucgagaacugaauaca

SEQ ID NO: 2097422 - RNA, 19 nt, Artificial Sequence
  Description of Artificial Sequence: Synthetic oligonucleotide
gauagugacaaugggucca

SEQ ID NO: 2097423 - RNA, 19 nt, Artificial Sequence
  Description of Artificial Sequence: Synthetic oligonucleotide
cauugaggaagaauuucuc

SEQ ID NO: 2097424 - RNA, 19 nt, Artificial Sequence
  Description of Artificial Sequence: Synthetic oligonucleotide
ucuccaaaugggcucgaga

SEQ ID NO: 2097425 - RNA, 19 nt, Artificial Sequence
  Description of Artificial Sequence: Synthetic oligonucleotide
ggaacccauacauaagaag

SEQ ID NO: 2097426 - RNA, 19 nt, Artificial Sequence
  Description of Artificial Sequence: Synthetic oligonucleotide
acaucaaaugcccaucguu

SEQ ID NO: 2097427 - RNA, 19 nt, Artificial Sequence
  Description of Artificial Sequence: Synthetic oligonucleotide
aucgcagcuuuauugaaaa

SEQ ID NO: 2097428 - RNA, 19 nt, Artificial Sequence
  Description of Artificial Sequence: Synthetic oligonucleotide
aagagcgcugagcaauuga

SEQ ID NO: 2097429 - RNA, 19 nt, Artificial Sequence
  Description of Artificial Sequence: Synthetic oligonucleotide
gcaguucuacaucaaaugc

SEQ ID NO: 2097430 - RNA, 19 nt, Artificial Sequence
  Description of Artificial Sequence: Synthetic oligonucleotide
ucgagacccacaagcaaug

SEQ ID NO: 2097431 - RNA, 19 nt, Artificial Sequence
  Description of Artificial Sequence: Synthetic oligonucleotide
uuugcccauuuguagccag

SEQ ID NO: 2097432 - RNA, 19 nt, Artificial Sequence
  Description of Artificial Sequence: Synthetic oligonucleotide
gugacaauggguccaucgc

SEQ ID NO: 2097433 - RNA, 19 nt, Artificial Sequence
  Description of Artificial Sequence: Synthetic oligonucleotide
ucggguuaguaauuugaac

SEQ ID NO: 2097434 - RNA, 19 nt, Artificial Sequence
  Description of Artificial Sequence: Synthetic oligonucleotide
aguacggaaguaagagcgc

SEQ ID NO: 2097435 - RNA, 19 nt, Artificial Sequence
  Description of Artificial Sequence: Synthetic oligonucleotide
ugcuucucggguuaguaau

SEQ ID NO: 2097436 - RNA, 19 nt, Artificial Sequence
  Description of Artificial Sequence: Synthetic oligonucleotide
ugguaggugagucccagau

SEQ ID NO: 2097437 - RNA, 19 nt, Artificial Sequence
  Description of Artificial Sequence: Synthetic oligonucleotide
acugccaucgucaacuacu

SEQ ID NO: 2097438 - RNA, 19 nt, Artificial Sequence
  Description of Artificial Sequence: Synthetic oligonucleotide
ucuacaucaaaugcccauc

SEQ ID NO: 2097439 - RNA, 19 nt, Artificial Sequence
  Description of Artificial Sequence: Synthetic oligonucleotide
agcguuaucacgcguacuu

SEQ ID NO: 2097440 - RNA, 19 nt, Artificial Sequence
  Description of Artificial Sequence: Synthetic oligonucleotide
gaagucuggucuugacugc

SEQ ID NO: 2097441 - RNA, 19 nt, Artificial Sequence
  Description of Artificial Sequence: Synthetic oligonucleotide
guaggaaggcacaacaaca

SEQ ID NO: 2097442 - RNA, 19 nt, Artificial Sequence
  Description of Artificial Sequence: Synthetic oligonucleotide
gagacccacaagcaauggc

SEQ ID NO: 2097443 - RNA, 19 nt, Artificial Sequence
  Description of Artificial Sequence: Synthetic oligonucleotide
uaguucagagcuucaucca

SEQ ID NO: 2097444 - RNA, 19 nt, Artificial Sequence
  Description of Artificial Sequence: Synthetic oligonucleotide
ucuccucgagaacugaaua

SEQ ID NO: 2097445 - RNA, 19 nt, Artificial Sequence
  Description of Artificial Sequence: Synthetic oligonucleotide
acuaacuuagaacccucaa

SEQ ID NO: 2097446 - RNA, 19 nt, Artificial Sequence
  Description of Artificial Sequence: Synthetic oligonucleotide
guugacagcaacuucugcu

SEQ ID NO: 2097447 - RNA, 19 nt, Artificial Sequence
  Description of Artificial Sequence: Synthetic oligonucleotide
aggaucuucucuccucgag

SEQ ID NO: 2097448 - RNA, 19 nt, Artificial Sequence
  Description of Artificial Sequence: Synthetic oligonucleotide
uuggcucaauccuccaggc

SEQ ID NO: 2097449 - RNA, 19 nt, Artificial Sequence
  Description of Artificial Sequence: Synthetic oligonucleotide
ugggaguauuugaaagcca

SEQ ID NO: 2097450 - RNA, 19 nt, Artificial Sequence
  Description of Artificial Sequence: Synthetic oligonucleotide
cuccucgagaacugaauac

SEQ ID NO: 2097451 - RNA, 19 nt, Artificial Sequence
  Description of Artificial Sequence: Synthetic oligonucleotide
guaagugaacuuagagucc

SEQ ID NO: 2097452 - RNA, 19 nt, Artificial Sequence
  Description of Artificial Sequence: Synthetic oligonucleotide
uacaucaaaugcccaucgu

SEQ ID NO: 2097453 - RNA, 19 nt, Artificial Sequence
  Description of Artificial Sequence: Synthetic oligonucleotide
aucacaggcaaccguuucu

SEQ ID NO: 2097454 - RNA, 19 nt, Artificial Sequence
  Description of Artificial Sequence: Synthetic oligonucleotide
uacacccauccuaacggca

SEQ ID NO: 2097455 - RNA, 19 nt, Artificial Sequence
  Description of Artificial Sequence: Synthetic oligonucleotide
ugucucuuuucuagguagu

SEQ ID NO: 2097456 - RNA, 19 nt, Artificial Sequence
  Description of Artificial Sequence: Synthetic oligonucleotide
agauaccgaagucggauaa

SEQ ID NO: 2097457 - RNA, 19 nt, Artificial Sequence
  Description of Artificial Sequence: Synthetic oligonucleotide
uauguacagcaguucuaca

SEQ ID NO: 2097458 - RNA, 19 nt, Artificial Sequence
  Description of Artificial Sequence: Synthetic oligonucleotide
uacggaaguaagagcgcug

SEQ ID NO: 2097459 - RNA, 19 nt, Artificial Sequence
  Description of Artificial Sequence: Synthetic oligonucleotide
uuaucacgcguacuuuguc

SEQ ID NO: 2097460 - RNA, 19 nt, Artificial Sequence
  Description of Artificial Sequence: Synthetic oligonucleotide
cuauuggaauuuuaagaaa

SEQ ID NO: 2097461 - RNA, 19 nt, Artificial Sequence
  Description of Artificial Sequence: Synthetic oligonucleotide
guacagcaguucuacauca

SEQ ID NO: 2097462 - RNA, 19 nt, Artificial Sequence
  Description of Artificial Sequence: Synthetic oligonucleotide
agaacugaauacacccauc

SEQ ID NO: 2097463 - RNA, 19 nt, Artificial Sequence
  Description of Artificial Sequence: Synthetic oligonucleotide
aaaauggaacuaacuuaga

SEQ ID NO: 2097464 - RNA, 19 nt, Artificial Sequence
  Description of Artificial Sequence: Synthetic oligonucleotide
ucaggugaaauugcaugac

SEQ ID NO: 2097465 - RNA, 19 nt, Artificial Sequence
  Description of Artificial Sequence: Synthetic oligonucleotide
aggcacaacaacagacagc

SEQ ID NO: 2097466 - RNA, 19 nt, Artificial Sequence
  Description of Artificial Sequence: Synthetic oligonucleotide
gacaucucaugguuucuuc

SEQ ID NO: 2097467 - RNA, 19 nt, Artificial Sequence
  Description of Artificial Sequence: Synthetic oligonucleotide
cuaacggcaccaccuuucc

SEQ ID NO: 2097468 - RNA, 19 nt, Artificial Sequence
  Description of Artificial Sequence: Synthetic oligonucleotide
ccuuugacacaaaggaacc

SEQ ID NO: 2097469 - RNA, 19 nt, Artificial Sequence
  Description of Artificial Sequence: Synthetic oligonucleotide
ccaggcacccaucagauac

SEQ ID NO: 2097470 - RNA, 19 nt, Artificial Sequence
  Description of Artificial Sequence: Synthetic oligonucleotide
auuuguagccagcuccaaa

SEQ ID NO: 2097471 - RNA, 19 nt, Artificial Sequence
  Description of Artificial Sequence: Synthetic oligonucleotide
aacuaacuuagaacccuca

SEQ ID NO: 2097472 - RNA, 19 nt, Artificial Sequence
  Description of Artificial Sequence: Synthetic oligonucleotide
ugaauacacccauccuaac

SEQ ID NO: 2097473 - RNA, 19 nt, Artificial Sequence
  Description of Artificial Sequence: Synthetic oligonucleotide
uucucggguuaguaauuug

SEQ ID NO: 2097474 - RNA, 19 nt, Artificial Sequence
  Description of Artificial Sequence: Synthetic oligonucleotide
acacccauccuaacggcac

SEQ ID NO: 2097475 - RNA, 19 nt, Artificial Sequence
  Description of Artificial Sequence: Synthetic oligonucleotide
ggaaguaagagcgcugagc

SEQ ID NO: 2097476 - RNA, 19 nt, Artificial Sequence
  Description of Artificial Sequence: Synthetic oligonucleotide
aacccgcacuguguguccc

SEQ ID NO: 2097477 - RNA, 19 nt, Artificial Sequence
  Description of Artificial Sequence: Synthetic oligonucleotide
uagaguccuguuucugucu

SEQ ID NO: 2097478 - RNA, 19 nt, Artificial Sequence
  Description of Artificial Sequence: Synthetic oligonucleotide
guauuucugggaguauuug

SEQ ID NO: 2097479 - RNA, 19 nt, Artificial Sequence
  Description of Artificial Sequence: Synthetic oligonucleotide
aaguaagagcgcugagcaa

SEQ ID NO: 2097480 - RNA, 19 nt, Artificial Sequence
  Description of Artificial Sequence: Synthetic oligonucleotide
uaucaccucguaagugaac

SEQ ID NO: 2097481 - RNA, 19 nt, Artificial Sequence
  Description of Artificial Sequence: Synthetic oligonucleotide
uaauuugaacccgcacugu

SEQ ID NO: 2097482 - RNA, 19 nt, Artificial Sequence
  Description of Artificial Sequence: Synthetic oligonucleotide
caaacuaacucacuuuccu

SEQ ID NO: 2097483 - RNA, 19 nt, Artificial Sequence
  Description of Artificial Sequence: Synthetic oligonucleotide
uuguggcuccaucagcauc

SEQ ID NO: 2097484 - RNA, 19 nt, Artificial Sequence
  Description of Artificial Sequence: Synthetic oligonucleotide
ugaacccgcacuguguguc

SEQ ID NO: 2097485 - RNA, 19 nt, Artificial Sequence
  Description of Artificial Sequence: Synthetic oligonucleotide
cacccaucagauaccgaag

SEQ ID NO: 2097486 - RNA, 19 nt, Artificial Sequence
  Description of Artificial Sequence: Synthetic oligonucleotide
gccaucgucaacuacuauc

SEQ ID NO: 2097487 - RNA, 19 nt, Artificial Sequence
  Description of Artificial Sequence: Synthetic oligonucleotide
ugugucccugauuccuuug

SEQ ID NO: 2097488 - RNA, 19 nt, Artificial Sequence
  Description of Artificial Sequence: Synthetic oligonucleotide
cuuucccucgguucugcac

SEQ ID NO: 2097489 - RNA, 19 nt, Artificial Sequence
  Description of Artificial Sequence: Synthetic oligonucleotide
gcaauggccauuugaucag

SEQ ID NO: 2097490 - RNA, 19 nt, Artificial Sequence
  Description of Artificial Sequence: Synthetic oligonucleotide
gagaacugaauacacccau

SEQ ID NO: 2097491 - RNA, 19 nt, Artificial Sequence
  Description of Artificial Sequence: Synthetic oligonucleotide
gaacuaacuuagaacccuc

SEQ ID NO: 2097492 - RNA, 19 nt, Artificial Sequence
  Description of Artificial Sequence: Synthetic oligonucleotide
auuugaacccgcacugugu

SEQ ID NO: 2097493 - RNA, 19 nt, Artificial Sequence
  Description of Artificial Sequence: Synthetic oligonucleotide
uaagaagaguacggaagua

SEQ ID NO: 2097494 - RNA, 19 nt, Artificial Sequence
  Description of Artificial Sequence: Synthetic oligonucleotide
ugacagcaacuucugcuau

SEQ ID NO: 2097495 - RNA, 19 nt, Artificial Sequence
  Description of Artificial Sequence: Synthetic oligonucleotide
accucguaagugaacuuag

SEQ ID NO: 2097496 - RNA, 19 nt, Artificial Sequence
  Description of Artificial Sequence: Synthetic oligonucleotide
acccauacauaagaagagu

SEQ ID NO: 2097497 - RNA, 19 nt, Artificial Sequence
  Description of Artificial Sequence: Synthetic oligonucleotide
ucauuguaggaaggcacaa

SEQ ID NO: 2097498 - RNA, 19 nt, Artificial Sequence
  Description of Artificial Sequence: Synthetic oligonucleotide
uugcccauuuguagccagc

SEQ ID NO: 2097499 - RNA, 19 nt, Artificial Sequence
  Description of Artificial Sequence: Synthetic oligonucleotide
gggaguauuugaaagccac

SEQ ID NO: 2097500 - RNA, 19 nt, Artificial Sequence
  Description of Artificial Sequence: Synthetic oligonucleotide
uuccguauuucugggagua

SEQ ID NO: 2097501 - RNA, 19 nt, Artificial Sequence
  Description of Artificial Sequence: Synthetic oligonucleotide
aauccuccaggcacccauc

SEQ ID NO: 2097502 - RNA, 19 nt, Artificial Sequence
  Description of Artificial Sequence: Synthetic oligonucleotide
uucugcuauuggaauuuua

SEQ ID NO: 2097503 - RNA, 19 nt, Artificial Sequence
  Description of Artificial Sequence: Synthetic oligonucleotide
ggcacaacaacagacagcu

SEQ ID NO: 2097504 - RNA, 19 nt, Artificial Sequence
  Description of Artificial Sequence: Synthetic oligonucleotide
cauuguaggaaggcacaac

SEQ ID NO: 2097505 - RNA, 19 nt, Artificial Sequence
  Description of Artificial Sequence: Synthetic oligonucleotide
augcaguccagcccugaca

SEQ ID NO: 2097506 - RNA, 19 nt, Artificial Sequence
  Description of Artificial Sequence: Synthetic oligonucleotide
ucgguucugcaccagcguu

SEQ ID NO: 2097507 - RNA, 19 nt, Artificial Sequence
  Description of Artificial Sequence: Synthetic oligonucleotide
aguuaauucuuaagagcau

SEQ ID NO: 2097508 - RNA, 19 nt, Artificial Sequence
  Description of Artificial Sequence: Synthetic oligonucleotide
ccaucgucaacuacuauca

SEQ ID NO: 2097509 - RNA, 19 nt, Artificial Sequence
  Description of Artificial Sequence: Synthetic oligonucleotide
augggcucgagacccacaa

SEQ ID NO: 2097510 - RNA, 19 nt, Artificial Sequence
  Description of Artificial Sequence: Synthetic oligonucleotide
auuucaggugaaauugcau

SEQ ID NO: 2097511 - RNA, 19 nt, Artificial Sequence
  Description of Artificial Sequence: Synthetic oligonucleotide
aguccaguugacagcaacu

SEQ ID NO: 2097512 - RNA, 19 nt, Artificial Sequence
  Description of Artificial Sequence: Synthetic oligonucleotide
cauccuaacggcaccaccu

SEQ ID NO: 2097513 - RNA, 19 nt, Artificial Sequence
  Description of Artificial Sequence: Synthetic oligonucleotide
aaaugcaguccagcccuga

SEQ ID NO: 2097514 - RNA, 19 nt, Artificial Sequence
  Description of Artificial Sequence: Synthetic oligonucleotide
aauccugauuucaggugaa

SEQ ID NO: 2097515 - RNA, 19 nt, Artificial Sequence
  Description of Artificial Sequence: Synthetic oligonucleotide
acuuugucacuuccguauu

SEQ ID NO: 2097516 - RNA, 19 nt, Artificial Sequence
  Description of Artificial Sequence: Synthetic oligonucleotide
gaacccgcacugugugucc

SEQ ID NO: 2097517 - RNA, 19 nt, Artificial Sequence
  Description of Artificial Sequence: Synthetic oligonucleotide
acgcguacuuugucacuuc

SEQ ID NO: 2097518 - RNA, 19 nt, Artificial Sequence
  Description of Artificial Sequence: Synthetic oligonucleotide
aggcacccaucagauaccg

SEQ ID NO: 2097519 - RNA, 19 nt, Artificial Sequence
  Description of Artificial Sequence: Synthetic oligonucleotide
ucauggcaguuaauucuua

SEQ ID NO: 2097520 - RNA, 19 nt, Artificial Sequence
  Description of Artificial Sequence: Synthetic oligonucleotide
cuuuucuagguaguucaga

SEQ ID NO: 2097521 - RNA, 19 nt, Artificial Sequence
  Description of Artificial Sequence: Synthetic oligonucleotide
gucccugauuccuuugaca

SEQ ID NO: 2097522 - RNA, 19 nt, Artificial Sequence
  Description of Artificial Sequence: Synthetic oligonucleotide
cucggguuaguaauuugaa

SEQ ID NO: 2097523 - RNA, 19 nt, Artificial Sequence
  Description of Artificial Sequence: Synthetic oligonucleotide
uaagagcgcugagcaauug

SEQ ID NO: 2097524 - RNA, 19 nt, Artificial Sequence
  Description of Artificial Sequence: Synthetic oligonucleotide
gcacccaucagauaccgaa

SEQ ID NO: 2097525 - RNA, 19 nt, Artificial Sequence
  Description of Artificial Sequence: Synthetic oligonucleotide
uggagagcacucagucccu

SEQ ID NO: 2097526 - RNA, 19 nt, Artificial Sequence
  Description of Artificial Sequence: Synthetic oligonucleotide
ugggcucgagacccacaag

SEQ ID NO: 2097527 - RNA, 19 nt, Artificial Sequence
  Description of Artificial Sequence: Synthetic oligonucleotide
uugaacccgcacugugugu

SEQ ID NO: 2097528 - RNA, 19 nt, Artificial Sequence
  Description of Artificial Sequence: Synthetic oligonucleotide
ucacgcguacuuugucacu

SEQ ID NO: 2097529 - RNA, 19 nt, Artificial Sequence
  Description of Artificial Sequence: Synthetic oligonucleotide
cuaucaccucguaagugaa

SEQ ID NO: 2097530 - RNA, 19 nt, Artificial Sequence
  Description of Artificial Sequence: Synthetic oligonucleotide
ggaguauuugaaagccacc

SEQ ID NO: 2097531 - RNA, 19 nt, Artificial Sequence
  Description of Artificial Sequence: Synthetic oligonucleotide
uggcuggagagcacucagu

SEQ ID NO: 2097532 - RNA, 19 nt, Artificial Sequence
  Description of Artificial Sequence: Synthetic oligonucleotide
uuguuggcucaauccucca

SEQ ID NO: 2097533 - RNA, 19 nt, Artificial Sequence
  Description of Artificial Sequence: Synthetic oligonucleotide
caggccauggcuggagagc

SEQ ID NO: 2097534 - RNA, 19 nt, Artificial Sequence
  Description of Artificial Sequence: Synthetic oligonucleotide
cuuugacacaaaggaacca

SEQ ID NO: 2097535 - RNA, 19 nt, Artificial Sequence
  Description of Artificial Sequence: Synthetic oligonucleotide
caucgcagcuuuauugaaa

SEQ ID NO: 2097536 - RNA, 19 nt, Artificial Sequence
  Description of Artificial Sequence: Synthetic oligonucleotide
ggcauugaggaagaauuuc

SEQ ID NO: 2097537 - RNA, 19 nt, Artificial Sequence
  Description of Artificial Sequence: Synthetic oligonucleotide
caucgucaacuacuaucac

SEQ ID NO: 2097538 - RNA, 19 nt, Artificial Sequence
  Description of Artificial Sequence: Synthetic oligonucleotide
ggaucuucucuccucgaga

SEQ ID NO: 2097539 - RNA, 19 nt, Artificial Sequence
  Description of Artificial Sequence: Synthetic oligonucleotide
gcuggguaauauuuccuuc

SEQ ID NO: 2097540 - RNA, 19 nt, Artificial Sequence
  Description of Artificial Sequence: Synthetic oligonucleotide
gcuggagagcacucagucc

SEQ ID NO: 2097541 - RNA, 19 nt, Artificial Sequence
  Description of Artificial Sequence: Synthetic oligonucleotide
cacccauccuaacggcacc

SEQ ID NO: 2097542 - RNA, 19 nt, Artificial Sequence
  Description of Artificial Sequence: Synthetic oligonucleotide
ccucgguucugcaccagcg

SEQ ID NO: 2097543 - RNA, 19 nt, Artificial Sequence
  Description of Artificial Sequence: Synthetic oligonucleotide
cagagaugagaagguccgg

SEQ ID NO: 2097544 - RNA, 19 nt, Artificial Sequence
  Description of Artificial Sequence: Synthetic oligonucleotide
ccucgagaacugaauacac

SEQ ID NO: 2097545 - RNA, 19 nt, Artificial Sequence
  Description of Artificial Sequence: Synthetic oligonucleotide
uucccucgguucugcacca

SEQ ID NO: 2097546 - RNA, 19 nt, Artificial Sequence
  Description of Artificial Sequence: Synthetic oligonucleotide
ccuaacggcaccaccuuuc

SEQ ID NO: 2097547 - RNA, 19 nt, Artificial Sequence
  Description of Artificial Sequence: Synthetic oligonucleotide
agcuguuugguaggugagu

SEQ ID NO: 2097548 - RNA, 19 nt, Artificial Sequence
  Description of Artificial Sequence: Synthetic oligonucleotide
cucaauccuccaggcaccc

SEQ ID NO: 2097549 - RNA, 19 nt, Artificial Sequence
  Description of Artificial Sequence: Synthetic oligonucleotide
uccuaacggcaccaccuuu

SEQ ID NO: 2097550 - RNA, 19 nt, Artificial Sequence
  Description of Artificial Sequence: Synthetic oligonucleotide
ggucuugacugccaucguc

SEQ ID NO: 2097551 - RNA, 19 nt, Artificial Sequence
  Description of Artificial Sequence: Synthetic oligonucleotide
uggucuugacugccaucgu

SEQ ID NO: 2097552 - RNA, 19 nt, Artificial Sequence
  Description of Artificial Sequence: Synthetic oligonucleotide
ucagagcuucauccaucau

SEQ ID NO: 2097553 - RNA, 19 nt, Artificial Sequence
  Description of Artificial Sequence: Synthetic oligonucleotide
guacuuugucacuuccgua

SEQ ID NO: 2097554 - RNA, 19 nt, Artificial Sequence
  Description of Artificial Sequence: Synthetic oligonucleotide
ggaacuaacuuagaacccu

SEQ ID NO: 2097555 - RNA, 19 nt, Artificial Sequence
  Description of Artificial Sequence: Synthetic oligonucleotide
gauaccgaagucggauaaa

SEQ ID NO: 2097556 - RNA, 19 nt, Artificial Sequence
  Description of Artificial Sequence: Synthetic oligonucleotide
auccuaacggcaccaccuu

SEQ ID NO: 2097557 - RNA, 19 nt, Artificial Sequence
  Description of Artificial Sequence: Synthetic oligonucleotide
cucgagacccacaagcaau

SEQ ID NO: 2097558 - RNA, 19 nt, Artificial Sequence
  Description of Artificial Sequence: Synthetic oligonucleotide
gcuguuugguaggugaguc

SEQ ID NO: 2097559 - RNA, 19 nt, Artificial Sequence
  Description of Artificial Sequence: Synthetic oligonucleotide
cguuaucacgcguacuuug

SEQ ID NO: 2097560 - RNA, 19 nt, Artificial Sequence
  Description of Artificial Sequence: Synthetic oligonucleotide
uggugauaugguggcauuu

SEQ ID NO: 2097561 - RNA, 19 nt, Artificial Sequence
  Description of Artificial Sequence: Synthetic oligonucleotide
agacaucucaugguuucuu

SEQ ID NO: 2097562 - RNA, 19 nt, Artificial Sequence
  Description of Artificial Sequence: Synthetic oligonucleotide
ugaucaggccauggcugga

SEQ ID NO: 2097563 - RNA, 19 nt, Artificial Sequence
  Description of Artificial Sequence: Synthetic oligonucleotide
gcaccagcguuaucacgcg

SEQ ID NO: 2097564 - RNA, 19 nt, Artificial Sequence
  Description of Artificial Sequence: Synthetic oligonucleotide
gcguacuuugucacuuccg

SEQ ID NO: 2097565 - RNA, 19 nt, Artificial Sequence
  Description of Artificial Sequence: Synthetic oligonucleotide
ucgcagcuuuauugaaaau

SEQ ID NO: 2097566 - RNA, 19 nt, Artificial Sequence
  Description of Artificial Sequence: Synthetic oligonucleotide
cguucaaugugcagagaug

SEQ ID NO: 2097567 - RNA, 19 nt, Artificial Sequence
  Description of Artificial Sequence: Synthetic oligonucleotide
cccauacauaagaagagua

SEQ ID NO: 2097568 - RNA, 19 nt, Artificial Sequence
  Description of Artificial Sequence: Synthetic oligonucleotide
gcagauagugacaaugggu

SEQ ID NO: 2097569 - RNA, 19 nt, Artificial Sequence
  Description of Artificial Sequence: Synthetic oligonucleotide
aaggaggucuuugcccauu

SEQ ID NO: 2097570 - RNA, 19 nt, Artificial Sequence
  Description of Artificial Sequence: Synthetic oligonucleotide
gagaagguccgggcugcug

SEQ ID NO: 2097571 - RNA, 19 nt, Artificial Sequence
  Description of Artificial Sequence: Synthetic oligonucleotide
ugccaucgucaacuacuau

SEQ ID NO: 2097572 - RNA, 19 nt, Artificial Sequence
  Description of Artificial Sequence: Synthetic oligonucleotide
caucucaugguuucuucau

SEQ ID NO: 2097573 - RNA, 19 nt, Artificial Sequence
  Description of Artificial Sequence: Synthetic oligonucleotide
cagauaccgaagucggaua

SEQ ID NO: 2097574 - RNA, 19 nt, Artificial Sequence
  Description of Artificial Sequence: Synthetic oligonucleotide
ccauuugaucaggccaugg

SEQ ID NO: 2097575 - RNA, 19 nt, Artificial Sequence
  Description of Artificial Sequence: Synthetic oligonucleotide
accaggaaauggaacccau

SEQ ID NO: 2097576 - RNA, 19 nt, Artificial Sequence
  Description of Artificial Sequence: Synthetic oligonucleotide
accagcguuaucacgcgua

SEQ ID NO: 2097577 - RNA, 19 nt, Artificial Sequence
  Description of Artificial Sequence: Synthetic oligonucleotide
agacagcuguuugguaggu

SEQ ID NO: 2097578 - RNA, 19 nt, Artificial Sequence
  Description of Artificial Sequence: Synthetic oligonucleotide
ugacugccaucgucaacua

SEQ ID NO: 2097579 - RNA, 19 nt, Artificial Sequence
  Description of Artificial Sequence: Synthetic oligonucleotide
gugcuauguacagcaguuc

SEQ ID NO: 2097580 - RNA, 19 nt, Artificial Sequence
  Description of Artificial Sequence: Synthetic oligonucleotide
gcucaauccuccaggcacc

SEQ ID NO: 2097581 - RNA, 19 nt, Artificial Sequence
  Description of Artificial Sequence: Synthetic oligonucleotide
caucaucacaggcaaccgu

SEQ ID NO: 2097582 - RNA, 19 nt, Artificial Sequence
  Description of Artificial Sequence: Synthetic oligonucleotide
cugccaucgucaacuacua

SEQ ID NO: 2097583 - RNA, 19 nt, Artificial Sequence
  Description of Artificial Sequence: Synthetic oligonucleotide
caacagacagcuguuuggu

SEQ ID NO: 2097584 - RNA, 19 nt, Artificial Sequence
  Description of Artificial Sequence: Synthetic oligonucleotide
uccguauuucugggaguau

SEQ ID NO: 2097585 - RNA, 19 nt, Artificial Sequence
  Description of Artificial Sequence: Synthetic oligonucleotide
cacaagcaauggccauuug

SEQ ID NO: 2097586 - RNA, 19 nt, Artificial Sequence
  Description of Artificial Sequence: Synthetic oligonucleotide
acccauccuaacggcacca

SEQ ID NO: 2097587 - RNA, 19 nt, Artificial Sequence
  Description of Artificial Sequence: Synthetic oligonucleotide
caaaugggcucgagaccca

SEQ ID NO: 2097588 - RNA, 19 nt, Artificial Sequence
  Description of Artificial Sequence: Synthetic oligonucleotide
caauggguccaucgcagcu

SEQ ID NO: 2097589 - RNA, 19 nt, Artificial Sequence
  Description of Artificial Sequence: Synthetic oligonucleotide
aucguucaaugugcagaga

SEQ ID NO: 2097590 - RNA, 19 nt, Artificial Sequence
  Description of Artificial Sequence: Synthetic oligonucleotide
guuugguaggugaguccca

SEQ ID NO: 2097591 - RNA, 19 nt, Artificial Sequence
  Description of Artificial Sequence: Synthetic oligonucleotide
agucuggucuugacugcca

SEQ ID NO: 2097592 - RNA, 19 nt, Artificial Sequence
  Description of Artificial Sequence: Synthetic oligonucleotide
ucccagaugcuggguaaua

SEQ ID NO: 2097593 - RNA, 19 nt, Artificial Sequence
  Description of Artificial Sequence: Synthetic oligonucleotide
ccagcguuaucacgcguac

SEQ ID NO: 2097594 - RNA, 19 nt, Artificial Sequence
  Description of Artificial Sequence: Synthetic oligonucleotide
caccaggaaauggaaccca

SEQ ID NO: 2097595 - RNA, 19 nt, Artificial Sequence
  Description of Artificial Sequence: Synthetic oligonucleotide
cuuugcccauuuguagcca

SEQ ID NO: 2097596 - RNA, 19 nt, Artificial Sequence
  Description of Artificial Sequence: Synthetic oligonucleotide
gugaacuuagaguccuguu

SEQ ID NO: 2097597 - RNA, 19 nt, Artificial Sequence
  Description of Artificial Sequence: Synthetic oligonucleotide
cagcaaacuaacucacuuu

SEQ ID NO: 2097598 - RNA, 19 nt, Artificial Sequence
  Description of Artificial Sequence: Synthetic oligonucleotide
cucuccucgagaacugaau

SEQ ID NO: 2097599 - RNA, 19 nt, Artificial Sequence
  Description of Artificial Sequence: Synthetic oligonucleotide
acccgcacugugugucccu

SEQ ID NO: 2097600 - RNA, 19 nt, Artificial Sequence
  Description of Artificial Sequence: Synthetic oligonucleotide
cgcguacuuugucacuucc

SEQ ID NO: 2097601 - RNA, 19 nt, Artificial Sequence
  Description of Artificial Sequence: Synthetic oligonucleotide
cgagaacugaauacaccca

SEQ ID NO: 2097602 - RNA, 19 nt, Artificial Sequence
  Description of Artificial Sequence: Synthetic oligonucleotide
cuuugucacuuccguauuu

SEQ ID NO: 2097603 - RNA, 19 nt, Artificial Sequence
  Description of Artificial Sequence: Synthetic oligonucleotide
guccagcccugacagcaaa

SEQ ID NO: 2097604 - RNA, 19 nt, Artificial Sequence
  Description of Artificial Sequence: Synthetic oligonucleotide
guccaguugacagcaacuu

SEQ ID NO: 2097605 - RNA, 19 nt, Artificial Sequence
  Description of Artificial Sequence: Synthetic oligonucleotide
caccuuucccucgguucug

SEQ ID NO: 2097606 - RNA, 19 nt, Artificial Sequence
  Description of Artificial Sequence: Synthetic oligonucleotide
ucccucgguucugcaccag

SEQ ID NO: 2097607 - RNA, 19 nt, Artificial Sequence
  Description of Artificial Sequence: Synthetic oligonucleotide
cauuuguagccagcuccaa

SEQ ID NO: 2097608 - RNA, 19 nt, Artificial Sequence
  Description of Artificial Sequence: Synthetic oligonucleotide
cagcccugacagcaaacua

SEQ ID NO: 2097609 - RNA, 19 nt, Artificial Sequence
  Description of Artificial Sequence: Synthetic oligonucleotide
ccucguaagugaacuuaga

SEQ ID NO: 2097610 - RNA, 19 nt, Artificial Sequence
  Description of Artificial Sequence: Synthetic oligonucleotide
cucgguucugcaccagcgu

SEQ ID NO: 2097611 - RNA, 19 nt, Artificial Sequence
  Description of Artificial Sequence: Synthetic oligonucleotide
aagguccgggcugcugcuu

SEQ ID NO: 2097612 - RNA, 19 nt, Artificial Sequence
  Description of Artificial Sequence: Synthetic oligonucleotide
caacuacuaucaccucgua

SEQ ID NO: 2097613 - RNA, 19 nt, Artificial Sequence
  Description of Artificial Sequence: Synthetic oligonucleotide
gccauuugaucaggccaug

SEQ ID NO: 2097614 - RNA, 19 nt, Artificial Sequence
  Description of Artificial Sequence: Synthetic oligonucleotide
gcccauuuguagccagcuc

SEQ ID NO: 2097615 - RNA, 19 nt, Artificial Sequence
  Description of Artificial Sequence: Synthetic oligonucleotide
uggguccaucgcagcuuua

SEQ ID NO: 2097616 - RNA, 19 nt, Artificial Sequence
  Description of Artificial Sequence: Synthetic oligonucleotide
gucucuuuucuagguaguu

SEQ ID NO: 2097617 - RNA, 19 nt, Artificial Sequence
  Description of Artificial Sequence: Synthetic oligonucleotide
guaagagcgcugagcaauu

SEQ ID NO: 2097618 - RNA, 19 nt, Artificial Sequence
  Description of Artificial Sequence: Synthetic oligonucleotide
gcaaccguuucucuucauu

SEQ ID NO: 2097619 - RNA, 19 nt, Artificial Sequence
  Description of Artificial Sequence: Synthetic oligonucleotide
gcugcuucucggguuagua

SEQ ID NO: 2097620 - RNA, 19 nt, Artificial Sequence
  Description of Artificial Sequence: Synthetic oligonucleotide
cuucucggguuaguaauuu

SEQ ID NO: 2097621 - RNA, 19 nt, Artificial Sequence
  Description of Artificial Sequence: Synthetic oligonucleotide
cgagacccacaagcaaugg

SEQ ID NO: 2097622 - RNA, 19 nt, Artificial Sequence
  Description of Artificial Sequence: Synthetic oligonucleotide
uucuggccuuuggcauuga

SEQ ID NO: 2097623 - RNA, 19 nt, Artificial Sequence
  Description of Artificial Sequence: Synthetic oligonucleotide
ccaucgcagcuuuauugaa

SEQ ID NO: 2097624 - RNA, 19 nt, Artificial Sequence
  Description of Artificial Sequence: Synthetic oligonucleotide
cggaaguaagagcgcugag

SEQ ID NO: 2097625 - RNA, 19 nt, Artificial Sequence
  Description of Artificial Sequence: Synthetic oligonucleotide
cacgcguacuuugucacuu

SEQ ID NO: 2097626 - RNA, 19 nt, Artificial Sequence
  Description of Artificial Sequence: Synthetic oligonucleotide
gguucugcaccagcguuau

SEQ ID NO: 2097627 - RNA, 19 nt, Artificial Sequence
  Description of Artificial Sequence: Synthetic oligonucleotide
ccaccuuucccucgguucu

SEQ ID NO: 2097628 - RNA, 19 nt, Artificial Sequence
  Description of Artificial Sequence: Synthetic oligonucleotide
gcccaucguucaaugugca

SEQ ID NO: 2097629 - RNA, 19 nt, Artificial Sequence
  Description of Artificial Sequence: Synthetic oligonucleotide
gguccaucgcagcuuuauu

SEQ ID NO: 2097630 - RNA, 19 nt, Artificial Sequence
  Description of Artificial Sequence: Synthetic oligonucleotide
cccauccuaacggcaccac

SEQ ID NO: 2097631 - RNA, 19 nt, Artificial Sequence
  Description of Artificial Sequence: Synthetic oligonucleotide
ccucaauuucaguccaguu

SEQ ID NO: 2097632 - RNA, 19 nt, Artificial Sequence
  Description of Artificial Sequence: Synthetic oligonucleotide
cggcaccaccuuucccucg

SEQ ID NO: 2097633 - RNA, 19 nt, Artificial Sequence
  Description of Artificial Sequence: Synthetic oligonucleotide
caccagcguuaucacgcgu

SEQ ID NO: 2097634 - RNA, 19 nt, Artificial Sequence
  Description of Artificial Sequence: Synthetic oligonucleotide
gucccagaugcuggguaau

SEQ ID NO: 2097635 - RNA, 19 nt, Artificial Sequence
  Description of Artificial Sequence: Synthetic oligonucleotide
ccuuucccucgguucugca

SEQ ID NO: 2097636 - RNA, 19 nt, Artificial Sequence
  Description of Artificial Sequence: Synthetic oligonucleotide
cagcguuaucacgcguacu

SEQ ID NO: 2097637 - RNA, 19 nt, Artificial Sequence
  Description of Artificial Sequence: Synthetic oligonucleotide
ggcacccaucagauaccga

SEQ ID NO: 2097638 - RNA, 19 nt, Artificial Sequence
  Description of Artificial Sequence: Synthetic oligonucleotide
cccucaauuucaguccagu

SEQ ID NO: 2097639 - RNA, 19 nt, Artificial Sequence
  Description of Artificial Sequence: Synthetic oligonucleotide
gcuucucggguuaguaauu

SEQ ID NO: 2097640 - RNA, 19 nt, Artificial Sequence
  Description of Artificial Sequence: Synthetic oligonucleotide
caccaccuuucccucgguu

SEQ ID NO: 2097641 - RNA, 19 nt, Artificial Sequence
  Description of Artificial Sequence: Synthetic oligonucleotide
ccguauuucugggaguauu

SEQ ID NO: 2097642 - RNA, 19 nt, Artificial Sequence
  Description of Artificial Sequence: Synthetic oligonucleotide
cccugacagcaaacuaacu

SEQ ID NO: 2097643 - RNA, 19 nt, Artificial Sequence
  Description of Artificial Sequence: Synthetic oligonucleotide
gcguuaucacgcguacuuu

SEQ ID NO: 2097644 - RNA, 19 nt, Artificial Sequence
  Description of Artificial Sequence: Synthetic oligonucleotide
cccagaugcuggguaauau

SEQ ID NO: 2097645 - RNA, 19 nt, Artificial Sequence
  Description of Artificial Sequence: Synthetic oligonucleotide
ccgcacugugugucccuga

SEQ ID NO: 2097646 - RNA, 19 nt, Artificial Sequence
  Description of Artificial Sequence: Synthetic oligonucleotide
ggcaaccguuucucuucau

SEQ ID NO: 2097647 - RNA, 19 nt, Artificial Sequence
  Description of Artificial Sequence: Synthetic oligonucleotide
cgcacugugugucccugau

SEQ ID NO: 2097648 - RNA, 19 nt, Artificial Sequence
  Description of Artificial Sequence: Synthetic oligonucleotide
aacugaagagguuuggggc

SEQ ID NO: 2097649 - RNA, 19 nt, Artificial Sequence
  Description of Artificial Sequence: Synthetic oligonucleotide
guauauaagauacaucugg

SEQ ID NO: 2097650 - RNA, 19 nt, Artificial Sequence
  Description of Artificial Sequence: Synthetic oligonucleotide
aaaguggccuuguugaagc

SEQ ID NO: 2097651 - RNA, 19 nt, Artificial Sequence
  Description of Artificial Sequence: Synthetic oligonucleotide
acguauauaagauacaucu

SEQ ID NO: 2097652 - RNA, 19 nt, Artificial Sequence
  Description of Artificial Sequence: Synthetic oligonucleotide
aaacacguauauaagauac

SEQ ID NO: 2097653 - RNA, 19 nt, Artificial Sequence
  Description of Artificial Sequence: Synthetic oligonucleotide
uauaagauacaucuggcug

SEQ ID NO: 2097654 - RNA, 19 nt, Artificial Sequence
  Description of Artificial Sequence: Synthetic oligonucleotide
aaauuggugucccaucagc

SEQ ID NO: 2097655 - RNA, 19 nt, Artificial Sequence
  Description of Artificial Sequence: Synthetic oligonucleotide
uuauucuuagcugucaucg

SEQ ID NO: 2097656 - RNA, 19 nt, Artificial Sequence
  Description of Artificial Sequence: Synthetic oligonucleotide
gaugugaugagaaaagggg

SEQ ID NO: 2097657 - RNA, 19 nt, Artificial Sequence
  Description of Artificial Sequence: Synthetic oligonucleotide
uguugaagcaccuugauau

SEQ ID NO: 2097658 - RNA, 19 nt, Artificial Sequence
  Description of Artificial Sequence: Synthetic oligonucleotide
uagaaaaccgucagggucg

SEQ ID NO: 2097659 - RNA, 19 nt, Artificial Sequence
  Description of Artificial Sequence: Synthetic oligonucleotide
uaaugagccaaccaagucc

SEQ ID NO: 2097660 - RNA, 19 nt, Artificial Sequence
  Description of Artificial Sequence: Synthetic oligonucleotide
uauauaagauacaucuggc

SEQ ID NO: 2097661 - RNA, 19 nt, Artificial Sequence
  Description of Artificial Sequence: Synthetic oligonucleotide
ugcucguagaucuucaggg

SEQ ID NO: 2097662 - RNA, 19 nt, Artificial Sequence
  Description of Artificial Sequence: Synthetic oligonucleotide
ucucuuugcgcccaggagg

SEQ ID NO: 2097663 - RNA, 19 nt, Artificial Sequence
  Description of Artificial Sequence: Synthetic oligonucleotide
uauuccaccacauccauga

SEQ ID NO: 2097664 - RNA, 19 nt, Artificial Sequence
  Description of Artificial Sequence: Synthetic oligonucleotide
cucuccauuaaucuggugg

SEQ ID NO: 2097665 - RNA, 19 nt, Artificial Sequence
  Description of Artificial Sequence: Synthetic oligonucleotide
aauguuugggguuggggag

SEQ ID NO: 2097666 - RNA, 19 nt, Artificial Sequence
  Description of Artificial Sequence: Synthetic oligonucleotide
cuugauauggugcucguag

SEQ ID NO: 2097667 - RNA, 19 nt, Artificial Sequence
  Description of Artificial Sequence: Synthetic oligonucleotide
gaacgaaacacguauauaa

SEQ ID NO: 2097668 - RNA, 19 nt, Artificial Sequence
  Description of Artificial Sequence: Synthetic oligonucleotide
aauuggugucccaucagcc

SEQ ID NO: 2097669 - RNA, 19 nt, Artificial Sequence
  Description of Artificial Sequence: Synthetic oligonucleotide
cagaaggacaggcagaacg

SEQ ID NO: 2097670 - RNA, 19 nt, Artificial Sequence
  Description of Artificial Sequence: Synthetic oligonucleotide
aaaagcaguggccugcucu

SEQ ID NO: 2097671 - RNA, 19 nt, Artificial Sequence
  Description of Artificial Sequence: Synthetic oligonucleotide
gagauggagaaucuggagc

SEQ ID NO: 2097672 - RNA, 19 nt, Artificial Sequence
  Description of Artificial Sequence: Synthetic oligonucleotide
auaagauacaucuggcuga

SEQ ID NO: 2097673 - RNA, 19 nt, Artificial Sequence
  Description of Artificial Sequence: Synthetic oligonucleotide
auuggugucccaucagccc

SEQ ID NO: 2097674 - RNA, 19 nt, Artificial Sequence
  Description of Artificial Sequence: Synthetic oligonucleotide
ugcucagccuagaaaaccg

SEQ ID NO: 2097675 - RNA, 19 nt, Artificial Sequence
  Description of Artificial Sequence: Synthetic oligonucleotide
ucaucgagaagaccuggcg

SEQ ID NO: 2097676 - RNA, 19 nt, Artificial Sequence
  Description of Artificial Sequence: Synthetic oligonucleotide
uucuuucucaaacacccgc

SEQ ID NO: 2097677 - RNA, 19 nt, Artificial Sequence
  Description of Artificial Sequence: Synthetic oligonucleotide
uguacuaagguagggaugu

SEQ ID NO: 2097678 - RNA, 19 nt, Artificial Sequence
  Description of Artificial Sequence: Synthetic oligonucleotide
uguaaugagccaaccaagu

SEQ ID NO: 2097679 - RNA, 19 nt, Artificial Sequence
  Description of Artificial Sequence: Synthetic oligonucleotide
aggacagccaaauuggugu

SEQ ID NO: 2097680 - RNA, 19 nt, Artificial Sequence
  Description of Artificial Sequence: Synthetic oligonucleotide
gagggauguacuaagguag

SEQ ID NO: 2097681 - RNA, 19 nt, Artificial Sequence
  Description of Artificial Sequence: Synthetic oligonucleotide
auauggugcucguagaucu

SEQ ID NO: 2097682 - RNA, 19 nt, Artificial Sequence
  Description of Artificial Sequence: Synthetic oligonucleotide
uugcaugagcaacagagac

SEQ ID NO: 2097683 - RNA, 19 nt, Artificial Sequence
  Description of Artificial Sequence: Synthetic oligonucleotide
auucuuagcugucaucgag

SEQ ID NO: 2097684 - RNA, 19 nt, Artificial Sequence
  Description of Artificial Sequence: Synthetic oligonucleotide
auauaagauacaucuggcu

SEQ ID NO: 2097685 - RNA, 19 nt, Artificial Sequence
  Description of Artificial Sequence: Synthetic oligonucleotide
aaaaccgucagggucguca

SEQ ID NO: 2097686 - RNA, 19 nt, Artificial Sequence
  Description of Artificial Sequence: Synthetic oligonucleotide
aaugagccaaccaagucca

SEQ ID NO: 2097687 - RNA, 19 nt, Artificial Sequence
  Description of Artificial Sequence: Synthetic oligonucleotide
aacgaaacacguauauaag

SEQ ID NO: 2097688 - RNA, 19 nt, Artificial Sequence
  Description of Artificial Sequence: Synthetic oligonucleotide
ugaacugaagagguuuggg

SEQ ID NO: 2097689 - RNA, 19 nt, Artificial Sequence
  Description of Artificial Sequence: Synthetic oligonucleotide
uggugcucagccuagaaaa

SEQ ID NO: 2097690 - RNA, 19 nt, Artificial Sequence
  Description of Artificial Sequence: Synthetic oligonucleotide
acgaaacacguauauaaga

SEQ ID NO: 2097691 - RNA, 19 nt, Artificial Sequence
  Description of Artificial Sequence: Synthetic oligonucleotide
acucgguuucucuuugcgc

SEQ ID NO: 2097692 - RNA, 19 nt, Artificial Sequence
  Description of Artificial Sequence: Synthetic oligonucleotide
cucaaaguggccuuguuga

SEQ ID NO: 2097693 - RNA, 19 nt, Artificial Sequence
  Description of Artificial Sequence: Synthetic oligonucleotide
ugagcccucugacacauug

SEQ ID NO: 2097694 - RNA, 19 nt, Artificial Sequence
  Description of Artificial Sequence: Synthetic oligonucleotide
cuguaaugagccaaccaag

SEQ ID NO: 2097695 - RNA, 19 nt, Artificial Sequence
  Description of Artificial Sequence: Synthetic oligonucleotide
aucgagaagaccuggcgug

SEQ ID NO: 2097696 - RNA, 19 nt, Artificial Sequence
  Description of Artificial Sequence: Synthetic oligonucleotide
ugagcaacagagacuugcc

SEQ ID NO: 2097697 - RNA, 19 nt, Artificial Sequence
  Description of Artificial Sequence: Synthetic oligonucleotide
accgucagggucgucaucc

SEQ ID NO: 2097698 - RNA, 19 nt, Artificial Sequence
  Description of Artificial Sequence: Synthetic oligonucleotide
aagaaggagccaggggacc

SEQ ID NO: 2097699 - RNA, 19 nt, Artificial Sequence
  Description of Artificial Sequence: Synthetic oligonucleotide
ugguaggguccacagggcg

SEQ ID NO: 2097700 - RNA, 19 nt, Artificial Sequence
  Description of Artificial Sequence: Synthetic oligonucleotide
uucuuagcugucaucgaga

SEQ ID NO: 2097701 - RNA, 19 nt, Artificial Sequence
  Description of Artificial Sequence: Synthetic oligonucleotide
aaacccaccaccagaagga

SEQ ID NO: 2097702 - RNA, 19 nt, Artificial Sequence
  Description of Artificial Sequence: Synthetic oligonucleotide
aucagccccagguagagcu

SEQ ID NO: 2097703 - RNA, 19 nt, Artificial Sequence
  Description of Artificial Sequence: Synthetic oligonucleotide
uccauuaaucugguggugc

SEQ ID NO: 2097704 - RNA, 19 nt, Artificial Sequence
  Description of Artificial Sequence: Synthetic oligonucleotide
uucucuuugcgcccaggag

SEQ ID NO: 2097705 - RNA, 19 nt, Artificial Sequence
  Description of Artificial Sequence: Synthetic oligonucleotide
uuuauucuuagcugucauc

SEQ ID NO: 2097706 - RNA, 19 nt, Artificial Sequence
  Description of Artificial Sequence: Synthetic oligonucleotide
ugcaugagcaacagagacu

SEQ ID NO: 2097707 - RNA, 19 nt, Artificial Sequence
  Description of Artificial Sequence: Synthetic oligonucleotide
uuugcgcccaggaggacag

SEQ ID NO: 2097708 - RNA, 19 nt, Artificial Sequence
  Description of Artificial Sequence: Synthetic oligonucleotide
ucuucuccaccucucuugc

SEQ ID NO: 2097709 - RNA, 19 nt, Artificial Sequence
  Description of Artificial Sequence: Synthetic oligonucleotide
caaacacccgcucuucucc

SEQ ID NO: 2097710 - RNA, 19 nt, Artificial Sequence
  Description of Artificial Sequence: Synthetic oligonucleotide
gagacuugccaucaauuuc

SEQ ID NO: 2097711 - RNA, 19 nt, Artificial Sequence
  Description of Artificial Sequence: Synthetic oligonucleotide
ugaaguauuccaccacauc

SEQ ID NO: 2097712 - RNA, 19 nt, Artificial Sequence
  Description of Artificial Sequence: Synthetic oligonucleotide
agggcgaccacuccuugac

SEQ ID NO: 2097713 - RNA, 19 nt, Artificial Sequence
  Description of Artificial Sequence: Synthetic oligonucleotide
ugaagcaccuugauauggu

SEQ ID NO: 2097714 - RNA, 19 nt, Artificial Sequence
  Description of Artificial Sequence: Synthetic oligonucleotide
uuucucuuugcgcccagga

SEQ ID NO: 2097715 - RNA, 19 nt, Artificial Sequence
  Description of Artificial Sequence: Synthetic oligonucleotide
aaucuggagcagccgcaac

SEQ ID NO: 2097716 - RNA, 19 nt, Artificial Sequence
  Description of Artificial Sequence: Synthetic oligonucleotide
agcccucugacacauuguc

SEQ ID NO: 2097717 - RNA, 19 nt, Artificial Sequence
  Description of Artificial Sequence: Synthetic oligonucleotide
cucggugaaguauuccacc

SEQ ID NO: 2097718 - RNA, 19 nt, Artificial Sequence
  Description of Artificial Sequence: Synthetic oligonucleotide
aaaccugccucggugaagu

SEQ ID NO: 2097719 - RNA, 19 nt, Artificial Sequence
  Description of Artificial Sequence: Synthetic oligonucleotide
uccaacuaccccacacucc

SEQ ID NO: 2097720 - RNA, 19 nt, Artificial Sequence
  Description of Artificial Sequence: Synthetic oligonucleotide
ugauauggugcucguagau

SEQ ID NO: 2097721 - RNA, 19 nt, Artificial Sequence
  Description of Artificial Sequence: Synthetic oligonucleotide
agagggauguacuaaggua

SEQ ID NO: 2097722 - RNA, 19 nt, Artificial Sequence
  Description of Artificial Sequence: Synthetic oligonucleotide
ucggugaaguauuccacca

SEQ ID NO: 2097723 - RNA, 19 nt, Artificial Sequence
  Description of Artificial Sequence: Synthetic oligonucleotide
cuuaccucaccuguucucc

SEQ ID NO: 2097724 - RNA, 19 nt, Artificial Sequence
  Description of Artificial Sequence: Synthetic oligonucleotide
ggaugugaugagaaaaggg

SEQ ID NO: 2097725 - RNA, 19 nt, Artificial Sequence
  Description of Artificial Sequence: Synthetic oligonucleotide
auggagaaucuggagcagc

SEQ ID NO: 2097726 - RNA, 19 nt, Artificial Sequence
  Description of Artificial Sequence: Synthetic oligonucleotide
aucuguccguugcaugagc

SEQ ID NO: 2097727 - RNA, 19 nt, Artificial Sequence
  Description of Artificial Sequence: Synthetic oligonucleotide
ucuguccguugcaugagca

SEQ ID NO: 2097728 - RNA, 19 nt, Artificial Sequence
  Description of Artificial Sequence: Synthetic oligonucleotide
caaccaaguccaacuaccc

SEQ ID NO: 2097729 - RNA, 19 nt, Artificial Sequence
  Description of Artificial Sequence: Synthetic oligonucleotide
uugauauggugcucguaga

SEQ ID NO: 2097730 - RNA, 19 nt, Artificial Sequence
  Description of Artificial Sequence: Synthetic oligonucleotide
uggaggucaaggugugggg

SEQ ID NO: 2097731 - RNA, 19 nt, Artificial Sequence
  Description of Artificial Sequence: Synthetic oligonucleotide
gaagcaccuugauauggug

SEQ ID NO: 2097732 - RNA, 19 nt, Artificial Sequence
  Description of Artificial Sequence: Synthetic oligonucleotide
uagggaugugaugagaaaa

SEQ ID NO: 2097733 - RNA, 19 nt, Artificial Sequence
  Description of Artificial Sequence: Synthetic oligonucleotide
ugucaucgagaagaccugg

SEQ ID NO: 2097734 - RNA, 19 nt, Artificial Sequence
  Description of Artificial Sequence: Synthetic oligonucleotide
gauguacuaagguagggau

SEQ ID NO: 2097735 - RNA, 19 nt, Artificial Sequence
  Description of Artificial Sequence: Synthetic oligonucleotide
uauucuuagcugucaucga

SEQ ID NO: 2097736 - RNA, 19 nt, Artificial Sequence
  Description of Artificial Sequence: Synthetic oligonucleotide
acacguauauaagauacau

SEQ ID NO: 2097737 - RNA, 19 nt, Artificial Sequence
  Description of Artificial Sequence: Synthetic oligonucleotide
uugccaucaauuuccugcu

SEQ ID NO: 2097738 - RNA, 19 nt, Artificial Sequence
  Description of Artificial Sequence: Synthetic oligonucleotide
cuucuuucucaaacacccg

SEQ ID NO: 2097739 - RNA, 19 nt, Artificial Sequence
  Description of Artificial Sequence: Synthetic oligonucleotide
aacacccgcucuucuccac

SEQ ID NO: 2097740 - RNA, 19 nt, Artificial Sequence
  Description of Artificial Sequence: Synthetic oligonucleotide
ucuguggagagggauguac

SEQ ID NO: 2097741 - RNA, 19 nt, Artificial Sequence
  Description of Artificial Sequence: Synthetic oligonucleotide
cuuagcacucugagggccc

SEQ ID NO: 2097742 - RNA, 19 nt, Artificial Sequence
  Description of Artificial Sequence: Synthetic oligonucleotide
guaaugagccaaccaaguc

SEQ ID NO: 2097743 - RNA, 19 nt, Artificial Sequence
  Description of Artificial Sequence: Synthetic oligonucleotide
agggaugugaugagaaaag

SEQ ID NO: 2097744 - RNA, 19 nt, Artificial Sequence
  Description of Artificial Sequence: Synthetic oligonucleotide
uccuugacccucuccuuag

SEQ ID NO: 2097745 - RNA, 19 nt, Artificial Sequence
  Description of Artificial Sequence: Synthetic oligonucleotide
caacacaagcugauucccc

SEQ ID NO: 2097746 - RNA, 19 nt, Artificial Sequence
  Description of Artificial Sequence: Synthetic oligonucleotide
cacguauauaagauacauc

SEQ ID NO: 2097747 - RNA, 19 nt, Artificial Sequence
  Description of Artificial Sequence: Synthetic oligonucleotide
gugcucguagaucuucagg

SEQ ID NO: 2097748 - RNA, 19 nt, Artificial Sequence
  Description of Artificial Sequence: Synthetic oligonucleotide
uucucaaacacccgcucuu

SEQ ID NO: 2097749 - RNA, 19 nt, Artificial Sequence
  Description of Artificial Sequence: Synthetic oligonucleotide
gacaggcagaacgaaacac

SEQ ID NO: 2097750 - RNA, 19 nt, Artificial Sequence
  Description of Artificial Sequence: Synthetic oligonucleotide
agccuagaaaaccgucagg

SEQ ID NO: 2097751 - RNA, 19 nt, Artificial Sequence
  Description of Artificial Sequence: Synthetic oligonucleotide
cuaagguagggaugugaug

SEQ ID NO: 2097752 - RNA, 19 nt, Artificial Sequence
  Description of Artificial Sequence: Synthetic oligonucleotide
agagcugguuuuccuuggg

SEQ ID NO: 2097753 - RNA, 19 nt, Artificial Sequence
  Description of Artificial Sequence: Synthetic oligonucleotide
guugaagcaccuugauaug

SEQ ID NO: 2097754 - RNA, 19 nt, Artificial Sequence
  Description of Artificial Sequence: Synthetic oligonucleotide
uuuggggccacaggaaacu

SEQ ID NO: 2097755 - RNA, 19 nt, Artificial Sequence
  Description of Artificial Sequence: Synthetic oligonucleotide
ggcgaaaaggcacaggaga

SEQ ID NO: 2097756 - RNA, 19 nt, Artificial Sequence
  Description of Artificial Sequence: Synthetic oligonucleotide
uugacccucuccuuagcac

SEQ ID NO: 2097757 - RNA, 19 nt, Artificial Sequence
  Description of Artificial Sequence: Synthetic oligonucleotide
aagagguuuggggccacag

SEQ ID NO: 2097758 - RNA, 19 nt, Artificial Sequence
  Description of Artificial Sequence: Synthetic oligonucleotide
ggggcggucacucucaggc

SEQ ID NO: 2097759 - RNA, 19 nt, Artificial Sequence
  Description of Artificial Sequence: Synthetic oligonucleotide
cacucgguuucucuuugcg

SEQ ID NO: 2097760 - RNA, 19 nt, Artificial Sequence
  Description of Artificial Sequence: Synthetic oligonucleotide
gauauggugcucguagauc

SEQ ID NO: 2097761 - RNA, 19 nt, Artificial Sequence
  Description of Artificial Sequence: Synthetic oligonucleotide
cagccuagaaaaccgucag

SEQ ID NO: 2097762 - RNA, 19 nt, Artificial Sequence
  Description of Artificial Sequence: Synthetic oligonucleotide
caaauuggugucccaucag

SEQ ID NO: 2097763 - RNA, 19 nt, Artificial Sequence
  Description of Artificial Sequence: Synthetic oligonucleotide
acacccgcucuucuccacc

SEQ ID NO: 2097764 - RNA, 19 nt, Artificial Sequence
  Description of Artificial Sequence: Synthetic oligonucleotide
aaggucccuuaccucaccu

SEQ ID NO: 2097765 - RNA, 19 nt, Artificial Sequence
  Description of Artificial Sequence: Synthetic oligonucleotide
uguccguugcaugagcaac

SEQ ID NO: 2097766 - RNA, 19 nt, Artificial Sequence
  Description of Artificial Sequence: Synthetic oligonucleotide
gcuccugaaaagcaguggc

SEQ ID NO: 2097767 - RNA, 19 nt, Artificial Sequence
  Description of Artificial Sequence: Synthetic oligonucleotide
aaacacccgcucuucucca

SEQ ID NO: 2097768 - RNA, 19 nt, Artificial Sequence
  Description of Artificial Sequence: Synthetic oligonucleotide
uggugcugagcaccugcgg

SEQ ID NO: 2097769 - RNA, 19 nt, Artificial Sequence
  Description of Artificial Sequence: Synthetic oligonucleotide
ucugacacauuguccuccu

SEQ ID NO: 2097770 - RNA, 19 nt, Artificial Sequence
  Description of Artificial Sequence: Synthetic oligonucleotide
uaagauacaucuggcugaa

SEQ ID NO: 2097771 - RNA, 19 nt, Artificial Sequence
  Description of Artificial Sequence: Synthetic oligonucleotide
gacuggcuggugcucagcc

SEQ ID NO: 2097772 - RNA, 19 nt, Artificial Sequence
  Description of Artificial Sequence: Synthetic oligonucleotide
uguucuccagagguuggag

SEQ ID NO: 2097773 - RNA, 19 nt, Artificial Sequence
  Description of Artificial Sequence: Synthetic oligonucleotide
gaaaggguggccccuguaa

SEQ ID NO: 2097774 - RNA, 19 nt, Artificial Sequence
  Description of Artificial Sequence: Synthetic oligonucleotide
acagagacuugccaucaau

SEQ ID NO: 2097775 - RNA, 19 nt, Artificial Sequence
  Description of Artificial Sequence: Synthetic oligonucleotide
gagaagaccuggcgugugc

SEQ ID NO: 2097776 - RNA, 19 nt, Artificial Sequence
  Description of Artificial Sequence: Synthetic oligonucleotide
ggugaaguauuccaccaca

SEQ ID NO: 2097777 - RNA, 19 nt, Artificial Sequence
  Description of Artificial Sequence: Synthetic oligonucleotide
aaaccgucagggucgucau

SEQ ID NO: 2097778 - RNA, 19 nt, Artificial Sequence
  Description of Artificial Sequence: Synthetic oligonucleotide
ucgguuucucuuugcgccc

SEQ ID NO: 2097779 - RNA, 19 nt, Artificial Sequence
  Description of Artificial Sequence: Synthetic oligonucleotide
agggauguacuaagguagg

SEQ ID NO: 2097780 - RNA, 19 nt, Artificial Sequence
  Description of Artificial Sequence: Synthetic oligonucleotide
uggcgugugcagcugccag

SEQ ID NO: 2097781 - RNA, 19 nt, Artificial Sequence
  Description of Artificial Sequence: Synthetic oligonucleotide
uaccucaccuguucuccag

SEQ ID NO: 2097782 - RNA, 19 nt, Artificial Sequence
  Description of Artificial Sequence: Synthetic oligonucleotide
agaaggacaggcagaacga

SEQ ID NO: 2097783 - RNA, 19 nt, Artificial Sequence
  Description of Artificial Sequence: Synthetic oligonucleotide
cucugacacauuguccucc

SEQ ID NO: 2097784 - RNA, 19 nt, Artificial Sequence
  Description of Artificial Sequence: Synthetic oligonucleotide
acuaagguagggaugugau

SEQ ID NO: 2097785 - RNA, 19 nt, Artificial Sequence
  Description of Artificial Sequence: Synthetic oligonucleotide
caagguguggggagggcac

SEQ ID NO: 2097786 - RNA, 19 nt, Artificial Sequence
  Description of Artificial Sequence: Synthetic oligonucleotide
gaggggcaagacuggcugg

SEQ ID NO: 2097787 - RNA, 19 nt, Artificial Sequence
  Description of Artificial Sequence: Synthetic oligonucleotide
cucagccuagaaaaccguc

SEQ ID NO: 2097788 - RNA, 19 nt, Artificial Sequence
  Description of Artificial Sequence: Synthetic oligonucleotide
gggaugugaugagaaaagg

SEQ ID NO: 2097789 - RNA, 19 nt, Artificial Sequence
  Description of Artificial Sequence: Synthetic oligonucleotide
acuaccccacacuccaccu

SEQ ID NO: 2097790 - RNA, 19 nt, Artificial Sequence
  Description of Artificial Sequence: Synthetic oligonucleotide
uccguugcaugagcaacag

SEQ ID NO: 2097791 - RNA, 19 nt, Artificial Sequence
  Description of Artificial Sequence: Synthetic oligonucleotide
cacuccacugggucacucg

SEQ ID NO: 2097792 - RNA, 19 nt, Artificial Sequence
  Description of Artificial Sequence: Synthetic oligonucleotide
accuggcgugugcagcugc

SEQ ID NO: 2097793 - RNA, 19 nt, Artificial Sequence
  Description of Artificial Sequence: Synthetic oligonucleotide
auggugcucguagaucuuc

SEQ ID NO: 2097794 - RNA, 19 nt, Artificial Sequence
  Description of Artificial Sequence: Synthetic oligonucleotide
uuaccucaccuguucucca

SEQ ID NO: 2097795 - RNA, 19 nt, Artificial Sequence
  Description of Artificial Sequence: Synthetic oligonucleotide
cacugggucacucgguuuc

SEQ ID NO: 2097796 - RNA, 19 nt, Artificial Sequence
  Description of Artificial Sequence: Synthetic oligonucleotide
gugacgggaaaacccacca

SEQ ID NO: 2097797 - RNA, 19 nt, Artificial Sequence
  Description of Artificial Sequence: Synthetic oligonucleotide
aacagagacuugccaucaa

SEQ ID NO: 2097798 - RNA, 19 nt, Artificial Sequence
  Description of Artificial Sequence: Synthetic oligonucleotide
aaccgucagggucgucauc

SEQ ID NO: 2097799 - RNA, 19 nt, Artificial Sequence
  Description of Artificial Sequence: Synthetic oligonucleotide
auguacuaagguagggaug

SEQ ID NO: 2097800 - RNA, 19 nt, Artificial Sequence
  Description of Artificial Sequence: Synthetic oligonucleotide
auggacaggccagucagca

SEQ ID NO: 2097801 - RNA, 19 nt, Artificial Sequence
  Description of Artificial Sequence: Synthetic oligonucleotide
aagauacaucuggcugaac

SEQ ID NO: 2097802 - RNA, 19 nt, Artificial Sequence
  Description of Artificial Sequence: Synthetic oligonucleotide
gccuuguugaagcaccuug

SEQ ID NO: 2097803 - RNA, 19 nt, Artificial Sequence
  Description of Artificial Sequence: Synthetic oligonucleotide
uccacugggucacucgguu

SEQ ID NO: 2097804 - RNA, 19 nt, Artificial Sequence
  Description of Artificial Sequence: Synthetic oligonucleotide
gucacucgguuucucuuug

SEQ ID NO: 2097805 - RNA, 19 nt, Artificial Sequence
  Description of Artificial Sequence: Synthetic oligonucleotide
gagagggauguacuaaggu

SEQ ID NO: 2097806 - RNA, 19 nt, Artificial Sequence
  Description of Artificial Sequence: Synthetic oligonucleotide
ggcgaccacuccuugaccc

SEQ ID NO: 2097807 - RNA, 19 nt, Artificial Sequence
  Description of Artificial Sequence: Synthetic oligonucleotide
cucuuugcgcccaggagga

SEQ ID NO: 2097808 - RNA, 19 nt, Artificial Sequence
  Description of Artificial Sequence: Synthetic oligonucleotide
agguagagcugguuuuccu

SEQ ID NO: 2097809 - RNA, 19 nt, Artificial Sequence
  Description of Artificial Sequence: Synthetic oligonucleotide
acccaaggucccuuaccuc

SEQ ID NO: 2097810 - RNA, 19 nt, Artificial Sequence
  Description of Artificial Sequence: Synthetic oligonucleotide
ucugagcccucugacacau

SEQ ID NO: 2097811 - RNA, 19 nt, Artificial Sequence
  Description of Artificial Sequence: Synthetic oligonucleotide
gaaaccugccucggugaag

SEQ ID NO: 2097812 - RNA, 19 nt, Artificial Sequence
  Description of Artificial Sequence: Synthetic oligonucleotide
gacacauuguccuccuccu

SEQ ID NO: 2097813 - RNA, 19 nt, Artificial Sequence
  Description of Artificial Sequence: Synthetic oligonucleotide
gacccaaggucccuuaccu

SEQ ID NO: 2097814 - RNA, 19 nt, Artificial Sequence
  Description of Artificial Sequence: Synthetic oligonucleotide
cugguaggguccacagggc

SEQ ID NO: 2097815 - RNA, 19 nt, Artificial Sequence
  Description of Artificial Sequence: Synthetic oligonucleotide
cauuaaucugguggugcug

SEQ ID NO: 2097816 - RNA, 19 nt, Artificial Sequence
  Description of Artificial Sequence: Synthetic oligonucleotide
uucugagcccucugacaca

SEQ ID NO: 2097817 - RNA, 19 nt, Artificial Sequence
  Description of Artificial Sequence: Synthetic oligonucleotide
agaacgaaacacguauaua

SEQ ID NO: 2097818 - RNA, 19 nt, Artificial Sequence
  Description of Artificial Sequence: Synthetic oligonucleotide
cuggcugaacugaagaggu

SEQ ID NO: 2097819 - RNA, 19 nt, Artificial Sequence
  Description of Artificial Sequence: Synthetic oligonucleotide
cauccaugaccguccacuc

SEQ ID NO: 2097820 - RNA, 19 nt, Artificial Sequence
  Description of Artificial Sequence: Synthetic oligonucleotide
ccuguaaugagccaaccaa

SEQ ID NO: 2097821 - RNA, 19 nt, Artificial Sequence
  Description of Artificial Sequence: Synthetic oligonucleotide
guggccccuguaaugagcc

SEQ ID NO: 2097822 - RNA, 19 nt, Artificial Sequence
  Description of Artificial Sequence: Synthetic oligonucleotide
ggcagaacgaaacacguau

SEQ ID NO: 2097823 - RNA, 19 nt, Artificial Sequence
  Description of Artificial Sequence: Synthetic oligonucleotide
uuagcacucugagggcccc

SEQ ID NO: 2097824 - RNA, 19 nt, Artificial Sequence
  Description of Artificial Sequence: Synthetic oligonucleotide
agaaucuggagcagccgca

SEQ ID NO: 2097825 - RNA, 19 nt, Artificial Sequence
  Description of Artificial Sequence: Synthetic oligonucleotide
ucagcacaucuguccguug

SEQ ID NO: 2097826 - RNA, 19 nt, Artificial Sequence
  Description of Artificial Sequence: Synthetic oligonucleotide
gucaucgagaagaccuggc

SEQ ID NO: 2097827 - RNA, 19 nt, Artificial Sequence
  Description of Artificial Sequence: Synthetic oligonucleotide
cuugacccucuccuuagca

SEQ ID NO: 2097828 - RNA, 19 nt, Artificial Sequence
  Description of Artificial Sequence: Synthetic oligonucleotide
agucagcacaucuguccgu

SEQ ID NO: 2097829 - RNA, 19 nt, Artificial Sequence
  Description of Artificial Sequence: Synthetic oligonucleotide
uggccuuguugaagcaccu

SEQ ID NO: 2097830 - RNA, 19 nt, Artificial Sequence
  Description of Artificial Sequence: Synthetic oligonucleotide
ugcggggcggucacucuca

SEQ ID NO: 2097831 - RNA, 19 nt, Artificial Sequence
  Description of Artificial Sequence: Synthetic oligonucleotide
guagggaugugaugagaaa

SEQ ID NO: 2097832 - RNA, 19 nt, Artificial Sequence
  Description of Artificial Sequence: Synthetic oligonucleotide
gcucguagaucuucagggc

SEQ ID NO: 2097833 - RNA, 19 nt, Artificial Sequence
  Description of Artificial Sequence: Synthetic oligonucleotide
aggguggccccuguaauga

SEQ ID NO: 2097834 - RNA, 19 nt, Artificial Sequence
  Description of Artificial Sequence: Synthetic oligonucleotide
ggauguacuaagguaggga

SEQ ID NO: 2097835 - RNA, 19 nt, Artificial Sequence
  Description of Artificial Sequence: Synthetic oligonucleotide
gcaacacaagcugauuccc

SEQ ID NO: 2097836 - RNA, 19 nt, Artificial Sequence
  Description of Artificial Sequence: Synthetic oligonucleotide
acgggaaaacccaccacca

SEQ ID NO: 2097837 - RNA, 19 nt, Artificial Sequence
  Description of Artificial Sequence: Synthetic oligonucleotide
gggauguacuaagguaggg

SEQ ID NO: 2097838 - RNA, 19 nt, Artificial Sequence
  Description of Artificial Sequence: Synthetic oligonucleotide
guuuggggccacaggaaac

SEQ ID NO: 2097839 - RNA, 19 nt, Artificial Sequence
  Description of Artificial Sequence: Synthetic oligonucleotide
uccuccuccuccuccuccu

SEQ ID NO: 2097840 - RNA, 19 nt, Artificial Sequence
  Description of Artificial Sequence: Synthetic oligonucleotide
ucgagaagaccuggcgugu

SEQ ID NO: 2097841 - RNA, 19 nt, Artificial Sequence
  Description of Artificial Sequence: Synthetic oligonucleotide
accuugauauggugcucgu

SEQ ID NO: 2097842 - RNA, 19 nt, Artificial Sequence
  Description of Artificial Sequence: Synthetic oligonucleotide
uauggugcucguagaucuu

SEQ ID NO: 2097843 - RNA, 19 nt, Artificial Sequence
  Description of Artificial Sequence: Synthetic oligonucleotide
ccgcccuucauccuggccc

SEQ ID NO: 2097844 - RNA, 19 nt, Artificial Sequence
  Description of Artificial Sequence: Synthetic oligonucleotide
ccucaaaguggccuuguug

SEQ ID NO: 2097845 - RNA, 19 nt, Artificial Sequence
  Description of Artificial Sequence: Synthetic oligonucleotide
guaggguccacagggcgac

SEQ ID NO: 2097846 - RNA, 19 nt, Artificial Sequence
  Description of Artificial Sequence: Synthetic oligonucleotide
caaggucccuuaccucacc

SEQ ID NO: 2097847 - RNA, 19 nt, Artificial Sequence
  Description of Artificial Sequence: Synthetic oligonucleotide
ggugcucguagaucuucag

SEQ ID NO: 2097848 - RNA, 19 nt, Artificial Sequence
  Description of Artificial Sequence: Synthetic oligonucleotide
ccaacuaccccacacucca

SEQ ID NO: 2097849 - RNA, 19 nt, Artificial Sequence
  Description of Artificial Sequence: Synthetic oligonucleotide
guauuccaccacauccaug

SEQ ID NO: 2097850 - RNA, 19 nt, Artificial Sequence
  Description of Artificial Sequence: Synthetic oligonucleotide
agccaaauuggugucccau

SEQ ID NO: 2097851 - RNA, 19 nt, Artificial Sequence
  Description of Artificial Sequence: Synthetic oligonucleotide
agccaaccaaguccaacua

SEQ ID NO: 2097852 - RNA, 19 nt, Artificial Sequence
  Description of Artificial Sequence: Synthetic oligonucleotide
ggacccaaggucccuuacc

SEQ ID NO: 2097853 - RNA, 19 nt, Artificial Sequence
  Description of Artificial Sequence: Synthetic oligonucleotide
ccaaauuggugucccauca

SEQ ID NO: 2097854 - RNA, 19 nt, Artificial Sequence
  Description of Artificial Sequence: Synthetic oligonucleotide
gguagggaugugaugagaa

SEQ ID NO: 2097855 - RNA, 19 nt, Artificial Sequence
  Description of Artificial Sequence: Synthetic oligonucleotide
cacuccaccucuguggaga

SEQ ID NO: 2097856 - RNA, 19 nt, Artificial Sequence
  Description of Artificial Sequence: Synthetic oligonucleotide
cucguagaucuucagggcu

SEQ ID NO: 2097857 - RNA, 19 nt, Artificial Sequence
  Description of Artificial Sequence: Synthetic oligonucleotide
cagaacgaaacacguauau

SEQ ID NO: 2097858 - RNA, 19 nt, Artificial Sequence
  Description of Artificial Sequence: Synthetic oligonucleotide
cuccuccuccuccuccucc

SEQ ID NO: 2097859 - RNA, 19 nt, Artificial Sequence
  Description of Artificial Sequence: Synthetic oligonucleotide
uguuugggguuggggagaa

SEQ ID NO: 2097860 - RNA, 19 nt, Artificial Sequence
  Description of Artificial Sequence: Synthetic oligonucleotide
ugccucggugaaguauucc

SEQ ID NO: 2097861 - RNA, 19 nt, Artificial Sequence
  Description of Artificial Sequence: Synthetic oligonucleotide
ugccaucaauuuccugcuc

SEQ ID NO: 2097862 - RNA, 19 nt, Artificial Sequence
  Description of Artificial Sequence: Synthetic oligonucleotide
caggcagaacgaaacacgu

SEQ ID NO: 2097863 - RNA, 19 nt, Artificial Sequence
  Description of Artificial Sequence: Synthetic oligonucleotide
gaaaagcaguggccugcuc

SEQ ID NO: 2097864 - RNA, 19 nt, Artificial Sequence
  Description of Artificial Sequence: Synthetic oligonucleotide
uccucaaaguggccuuguu

SEQ ID NO: 2097865 - RNA, 19 nt, Artificial Sequence
  Description of Artificial Sequence: Synthetic oligonucleotide
caucgagaagaccuggcgu

SEQ ID NO: 2097866 - RNA, 19 nt, Artificial Sequence
  Description of Artificial Sequence: Synthetic oligonucleotide
gggcaagacuggcuggugc

SEQ ID NO: 2097867 - RNA, 19 nt, Artificial Sequence
  Description of Artificial Sequence: Synthetic oligonucleotide
ggugacgggaaaacccacc

SEQ ID NO: 2097868 - RNA, 19 nt, Artificial Sequence
  Description of Artificial Sequence: Synthetic oligonucleotide
accugcggggcggucacuc

SEQ ID NO: 2097869 - RNA, 19 nt, Artificial Sequence
  Description of Artificial Sequence: Synthetic oligonucleotide
aggccagucagcacaucug

SEQ ID NO: 2097870 - RNA, 19 nt, Artificial Sequence
  Description of Artificial Sequence: Synthetic oligonucleotide
guccuccuccuccuccucc

SEQ ID NO: 2097871 - RNA, 19 nt, Artificial Sequence
  Description of Artificial Sequence: Synthetic oligonucleotide
agaaaaccgucagggucgu

SEQ ID NO: 2097872 - RNA, 19 nt, Artificial Sequence
  Description of Artificial Sequence: Synthetic oligonucleotide
gguuuggggccacaggaaa

SEQ ID NO: 2097873 - RNA, 19 nt, Artificial Sequence
  Description of Artificial Sequence: Synthetic oligonucleotide
ggggagaaaggguggcccc

SEQ ID NO: 2097874 - RNA, 19 nt, Artificial Sequence
  Description of Artificial Sequence: Synthetic oligonucleotide
ggucaagguguggggaggg

SEQ ID NO: 2097875 - RNA, 19 nt, Artificial Sequence
  Description of Artificial Sequence: Synthetic oligonucleotide
ccuuagcacucugagggcc

SEQ ID NO: 2097876 - RNA, 19 nt, Artificial Sequence
  Description of Artificial Sequence: Synthetic oligonucleotide
cacucugagggccccgcuc

SEQ ID NO: 2097877 - RNA, 19 nt, Artificial Sequence
  Description of Artificial Sequence: Synthetic oligonucleotide
guggagagggauguacuaa

SEQ ID NO: 2097878 - RNA, 19 nt, Artificial Sequence
  Description of Artificial Sequence: Synthetic oligonucleotide
cuuugcgcccaggaggaca

SEQ ID NO: 2097879 - RNA, 19 nt, Artificial Sequence
  Description of Artificial Sequence: Synthetic oligonucleotide
gccaaauuggugucccauc

SEQ ID NO: 2097880 - RNA, 19 nt, Artificial Sequence
  Description of Artificial Sequence: Synthetic oligonucleotide
aggggcaagacuggcuggu

SEQ ID NO: 2097881 - RNA, 19 nt, Artificial Sequence
  Description of Artificial Sequence: Synthetic oligonucleotide
cuaccccacacuccaccuc

SEQ ID NO: 2097882 - RNA, 19 nt, Artificial Sequence
  Description of Artificial Sequence: Synthetic oligonucleotide
ccgcaacacaagcugauuc

SEQ ID NO: 2097883 - RNA, 19 nt, Artificial Sequence
  Description of Artificial Sequence: Synthetic oligonucleotide
uggcugaacugaagagguu

SEQ ID NO: 2097884 - RNA, 19 nt, Artificial Sequence
  Description of Artificial Sequence: Synthetic oligonucleotide
caacuaccccacacuccac

SEQ ID NO: 2097885 - RNA, 19 nt, Artificial Sequence
  Description of Artificial Sequence: Synthetic oligonucleotide
caagacuggcuggugcuca

SEQ ID NO: 2097886 - RNA, 19 nt, Artificial Sequence
  Description of Artificial Sequence: Synthetic oligonucleotide
ggacagccaaauugguguc

SEQ ID NO: 2097887 - RNA, 19 nt, Artificial Sequence
  Description of Artificial Sequence: Synthetic oligonucleotide
aggugcugguccccgcccu

SEQ ID NO: 2097888 - RNA, 19 nt, Artificial Sequence
  Description of Artificial Sequence: Synthetic oligonucleotide
uccuccuccuccuccucuu

SEQ ID NO: 2097889 - RNA, 19 nt, Artificial Sequence
  Description of Artificial Sequence: Synthetic oligonucleotide
uguccuccuccuccuccuc

SEQ ID NO: 2097890 - RNA, 19 nt, Artificial Sequence
  Description of Artificial Sequence: Synthetic oligonucleotide
cccgcucuccauuaaucug

SEQ ID NO: 2097891 - RNA, 19 nt, Artificial Sequence
  Description of Artificial Sequence: Synthetic oligonucleotide
ccucaccuguucuccagag

SEQ ID NO: 2097892 - RNA, 19 nt, Artificial Sequence
  Description of Artificial Sequence: Synthetic oligonucleotide
ccuuaccucaccuguucuc

SEQ ID NO: 2097893 - RNA, 19 nt, Artificial Sequence
  Description of Artificial Sequence: Synthetic oligonucleotide
ggugcucagccuagaaaac

SEQ ID NO: 2097894 - RNA, 19 nt, Artificial Sequence
  Description of Artificial Sequence: Synthetic oligonucleotide
ggucccuuaccucaccugu

SEQ ID NO: 2097895 - RNA, 19 nt, Artificial Sequence
  Description of Artificial Sequence: Synthetic oligonucleotide
cagagacuugccaucaauu

SEQ ID NO: 2097896 - RNA, 19 nt, Artificial Sequence
  Description of Artificial Sequence: Synthetic oligonucleotide
cugguccccgcccuucauc

SEQ ID NO: 2097897 - RNA, 19 nt, Artificial Sequence
  Description of Artificial Sequence: Synthetic oligonucleotide
guacuaagguagggaugug

SEQ ID NO: 2097898 - RNA, 19 nt, Artificial Sequence
  Description of Artificial Sequence: Synthetic oligonucleotide
cuguggagagggauguacu

SEQ ID NO: 2097899 - RNA, 19 nt, Artificial Sequence
  Description of Artificial Sequence: Synthetic oligonucleotide
gggcgaaaaggcacaggag

SEQ ID NO: 2097900 - RNA, 19 nt, Artificial Sequence
  Description of Artificial Sequence: Synthetic oligonucleotide
gguggccccuguaaugagc

SEQ ID NO: 2097901 - RNA, 19 nt, Artificial Sequence
  Description of Artificial Sequence: Synthetic oligonucleotide
cagccgcaacacaagcuga

SEQ ID NO: 2097902 - RNA, 19 nt, Artificial Sequence
  Description of Artificial Sequence: Synthetic oligonucleotide
cugccucggugaaguauuc

SEQ ID NO: 2097903 - RNA, 19 nt, Artificial Sequence
  Description of Artificial Sequence: Synthetic oligonucleotide
cuccuugacccucuccuua

SEQ ID NO: 2097904 - RNA, 19 nt, Artificial Sequence
  Description of Artificial Sequence: Synthetic oligonucleotide
ggaggucaaggugugggga

SEQ ID NO: 2097905 - RNA, 19 nt, Artificial Sequence
  Description of Artificial Sequence: Synthetic oligonucleotide
cuguccguugcaugagcaa

SEQ ID NO: 2097906 - RNA, 19 nt, Artificial Sequence
  Description of Artificial Sequence: Synthetic oligonucleotide
uggccccuguaaugagcca

SEQ ID NO: 2097907 - RNA, 19 nt, Artificial Sequence
  Description of Artificial Sequence: Synthetic oligonucleotide
cgaaacacguauauaagau

SEQ ID NO: 2097908 - RNA, 19 nt, Artificial Sequence
  Description of Artificial Sequence: Synthetic oligonucleotide
caggccagucagcacaucu

SEQ ID NO: 2097909 - RNA, 19 nt, Artificial Sequence
  Description of Artificial Sequence: Synthetic oligonucleotide
ggggugacgggaaaaccca

SEQ ID NO: 2097910 - RNA, 19 nt, Artificial Sequence
  Description of Artificial Sequence: Synthetic oligonucleotide
cugacacauuguccuccuc

SEQ ID NO: 2097911 - RNA, 19 nt, Artificial Sequence
  Description of Artificial Sequence: Synthetic oligonucleotide
gguaggguccacagggcga

SEQ ID NO: 2097912 - RNA, 19 nt, Artificial Sequence
  Description of Artificial Sequence: Synthetic oligonucleotide
agccgcaacacaagcugau

SEQ ID NO: 2097913 - RNA, 19 nt, Artificial Sequence
  Description of Artificial Sequence: Synthetic oligonucleotide
gucccaucagccccaggua

SEQ ID NO: 2097914 - RNA, 19 nt, Artificial Sequence
  Description of Artificial Sequence: Synthetic oligonucleotide
gguagagcugguuuuccuu

SEQ ID NO: 2097915 - RNA, 19 nt, Artificial Sequence
  Description of Artificial Sequence: Synthetic oligonucleotide
cuguucuccagagguugga

SEQ ID NO: 2097916 - RNA, 19 nt, Artificial Sequence
  Description of Artificial Sequence: Synthetic oligonucleotide
aaccugccucggugaagua

SEQ ID NO: 2097917 - RNA, 19 nt, Artificial Sequence
  Description of Artificial Sequence: Synthetic oligonucleotide
acccaccaccagaaggaca

SEQ ID NO: 2097918 - RNA, 19 nt, Artificial Sequence
  Description of Artificial Sequence: Synthetic oligonucleotide
gcccucugacacauugucc

SEQ ID NO: 2097919 - RNA, 19 nt, Artificial Sequence
  Description of Artificial Sequence: Synthetic oligonucleotide
ucuuugcgcccaggaggac

SEQ ID NO: 2097920 - RNA, 19 nt, Artificial Sequence
  Description of Artificial Sequence: Synthetic oligonucleotide
cagggcgaccacuccuuga

SEQ ID NO: 2097921 - RNA, 19 nt, Artificial Sequence
  Description of Artificial Sequence: Synthetic oligonucleotide
ccguccacuccacuggguc

SEQ ID NO: 2097922 - RNA, 19 nt, Artificial Sequence
  Description of Artificial Sequence: Synthetic oligonucleotide
ccuggcgugugcagcugcc

SEQ ID NO: 2097923 - RNA, 19 nt, Artificial Sequence
  Description of Artificial Sequence: Synthetic oligonucleotide
aggcagaacgaaacacgua

SEQ ID NO: 2097924 - RNA, 19 nt, Artificial Sequence
  Description of Artificial Sequence: Synthetic oligonucleotide
caaguccaacuaccccaca

SEQ ID NO: 2097925 - RNA, 19 nt, Artificial Sequence
  Description of Artificial Sequence: Synthetic oligonucleotide
ccagguagagcugguuuuc

SEQ ID NO: 2097926 - RNA, 19 nt, Artificial Sequence
  Description of Artificial Sequence: Synthetic oligonucleotide
ccucugacacauuguccuc

SEQ ID NO: 2097927 - RNA, 19 nt, Artificial Sequence
  Description of Artificial Sequence: Synthetic oligonucleotide
cagccaaauugguguccca

SEQ ID NO: 2097928 - RNA, 19 nt, Artificial Sequence
  Description of Artificial Sequence: Synthetic oligonucleotide
gggacccaaggucccuuac

SEQ ID NO: 2097929 - RNA, 19 nt, Artificial Sequence
  Description of Artificial Sequence: Synthetic oligonucleotide
cucugagggccccgcucuc

SEQ ID NO: 2097930 - RNA, 19 nt, Artificial Sequence
  Description of Artificial Sequence: Synthetic oligonucleotide
ggcugaacugaagagguuu

SEQ ID NO: 2097931 - RNA, 19 nt, Artificial Sequence
  Description of Artificial Sequence: Synthetic oligonucleotide
gggcgaccacuccuugacc

SEQ ID NO: 2097932 - RNA, 19 nt, Artificial Sequence
  Description of Artificial Sequence: Synthetic oligonucleotide
cgggaaaacccaccaccag

SEQ ID NO: 2097933 - RNA, 19 nt, Artificial Sequence
  Description of Artificial Sequence: Synthetic oligonucleotide
gcucuccauuaaucuggug

SEQ ID NO: 2097934 - RNA, 19 nt, Artificial Sequence
  Description of Artificial Sequence: Synthetic oligonucleotide
ccuagaaaaccgucagggu

SEQ ID NO: 2097935 - RNA, 19 nt, Artificial Sequence
  Description of Artificial Sequence: Synthetic oligonucleotide
cggugaaguauuccaccac

SEQ ID NO: 2097936 - RNA, 19 nt, Artificial Sequence
  Description of Artificial Sequence: Synthetic oligonucleotide
cugggucacucgguuucuc

SEQ ID NO: 2097937 - RNA, 19 nt, Artificial Sequence
  Description of Artificial Sequence: Synthetic oligonucleotide
ggccccuguaaugagccaa

SEQ ID NO: 2097938 - RNA, 19 nt, Artificial Sequence
  Description of Artificial Sequence: Synthetic oligonucleotide
gcgaaaaggcacaggagau

SEQ ID NO: 2097939 - RNA, 19 nt, Artificial Sequence
  Description of Artificial Sequence: Synthetic oligonucleotide
gcagaacgaaacacguaua

SEQ ID NO: 2097940 - RNA, 19 nt, Artificial Sequence
  Description of Artificial Sequence: Synthetic oligonucleotide
gagcccucugacacauugu

SEQ ID NO: 2097941 - RNA, 19 nt, Artificial Sequence
  Description of Artificial Sequence: Synthetic oligonucleotide
gaaaaccgucagggucguc

SEQ ID NO: 2097942 - RNA, 19 nt, Artificial Sequence
  Description of Artificial Sequence: Synthetic oligonucleotide
gacaggccagucagcacau

SEQ ID NO: 2097943 - RNA, 19 nt, Artificial Sequence
  Description of Artificial Sequence: Synthetic oligonucleotide
accguccacuccacugggu

SEQ ID NO: 2097944 - RNA, 19 nt, Artificial Sequence
  Description of Artificial Sequence: Synthetic oligonucleotide
gccccuguaaugagccaac

SEQ ID NO: 2097945 - RNA, 19 nt, Artificial Sequence
  Description of Artificial Sequence: Synthetic oligonucleotide
cuucuccaccucucuugcu

SEQ ID NO: 2097946 - RNA, 19 nt, Artificial Sequence
  Description of Artificial Sequence: Synthetic oligonucleotide
gcaccugcggggcggucac

SEQ ID NO: 2097947 - RNA, 19 nt, Artificial Sequence
  Description of Artificial Sequence: Synthetic oligonucleotide
ccucuccuuagcacucuga

SEQ ID NO: 2097948 - RNA, 19 nt, Artificial Sequence
  Description of Artificial Sequence: Synthetic oligonucleotide
cuggcgugugcagcugcca

SEQ ID NO: 2097949 - RNA, 19 nt, Artificial Sequence
  Description of Artificial Sequence: Synthetic oligonucleotide
gccccgcucuccauuaauc

SEQ ID NO: 2097950 - RNA, 19 nt, Artificial Sequence
  Description of Artificial Sequence: Synthetic oligonucleotide
gggcggucacucucaggca

SEQ ID NO: 2097951 - RNA, 19 nt, Artificial Sequence
  Description of Artificial Sequence: Synthetic oligonucleotide
cacccgcucuucuccaccu

SEQ ID NO: 2097952 - RNA, 19 nt, Artificial Sequence
  Description of Artificial Sequence: Synthetic oligonucleotide
gccaggugcugguccccgc

SEQ ID NO: 2097953 - RNA, 19 nt, Artificial Sequence
  Description of Artificial Sequence: Synthetic oligonucleotide
cuccuccuccuccuccucu

SEQ ID NO: 2097954 - RNA, 19 nt, Artificial Sequence
  Description of Artificial Sequence: Synthetic oligonucleotide
ccugccucggugaaguauu

SEQ ID NO: 2097955 - RNA, 19 nt, Artificial Sequence
  Description of Artificial Sequence: Synthetic oligonucleotide
cguccacuccacuggguca

SEQ ID NO: 2097956 - RNA, 19 nt, Artificial Sequence
  Description of Artificial Sequence: Synthetic oligonucleotide
gcgaccacuccuugacccu

SEQ ID NO: 2097957 - RNA, 19 nt, Artificial Sequence
  Description of Artificial Sequence: Synthetic oligonucleotide
cggauggacaggccaguca

SEQ ID NO: 2097958 - RNA, 19 nt, Artificial Sequence
  Description of Artificial Sequence: Synthetic oligonucleotide
cgagaagaccuggcgugug

SEQ ID NO: 2097959 - RNA, 19 nt, Artificial Sequence
  Description of Artificial Sequence: Synthetic oligonucleotide
ggcccugguaggguccaca

SEQ ID NO: 2097960 - RNA, 19 nt, Artificial Sequence
  Description of Artificial Sequence: Synthetic oligonucleotide
ccccgcucuccauuaaucu

SEQ ID NO: 2097961 - RNA, 19 nt, Artificial Sequence
  Description of Artificial Sequence: Synthetic oligonucleotide
gcggauggacaggccaguc

SEQ ID NO: 2097962 - RNA, 19 nt, Artificial Sequence
  Description of Artificial Sequence: Synthetic oligonucleotide
gcucagccuagaaaaccgu

SEQ ID NO: 2097963 - RNA, 19 nt, Artificial Sequence
  Description of Artificial Sequence: Synthetic oligonucleotide
cccagguagagcugguuuu

SEQ ID NO: 2097964 - RNA, 19 nt, Artificial Sequence
  Description of Artificial Sequence: Synthetic oligonucleotide
ggggacccaaggucccuua

SEQ ID NO: 2097965 - RNA, 19 nt, Artificial Sequence
  Description of Artificial Sequence: Synthetic oligonucleotide
guuugggguuggggagaaa

SEQ ID NO: 2097966 - RNA, 19 nt, Artificial Sequence
  Description of Artificial Sequence: Synthetic oligonucleotide
gucccuuaccucaccuguu

SEQ ID NO: 2097967 - RNA, 19 nt, Artificial Sequence
  Description of Artificial Sequence: Synthetic oligonucleotide
cagggucgucauccucaaa

SEQ ID NO: 2097968 - RNA, 19 nt, Artificial Sequence
  Description of Artificial Sequence: Synthetic oligonucleotide
ggcacaggagauggagaau

SEQ ID NO: 2097969 - RNA, 19 nt, Artificial Sequence
  Description of Artificial Sequence: Synthetic oligonucleotide
ccguugcaugagcaacaga

SEQ ID NO: 2097970 - RNA, 19 nt, Artificial Sequence
  Description of Artificial Sequence: Synthetic oligonucleotide
ccacuccacugggucacuc

SEQ ID NO: 2097971 - RNA, 19 nt, Artificial Sequence
  Description of Artificial Sequence: Synthetic oligonucleotide
ccuugauauggugcucgua

SEQ ID NO: 2097972 - RNA, 19 nt, Artificial Sequence
  Description of Artificial Sequence: Synthetic oligonucleotide
ccuccuccuccuccuccuc

SEQ ID NO: 2097973 - RNA, 19 nt, Artificial Sequence
  Description of Artificial Sequence: Synthetic oligonucleotide
cccuuaccucaccuguucu

SEQ ID NO: 2097974 - RNA, 19 nt, Artificial Sequence
  Description of Artificial Sequence: Synthetic oligonucleotide
ggcggauggacaggccagu

SEQ ID NO: 2097975 - RNA, 19 nt, Artificial Sequence
  Description of Artificial Sequence: Synthetic oligonucleotide
ggccugcucugggaaaccu

SEQ ID NO: 2097976 - RNA, 19 nt, Artificial Sequence
  Description of Artificial Sequence: Synthetic oligonucleotide
ggccccgcucuccauuaau

SEQ ID NO: 2097977 - RNA, 19 nt, Artificial Sequence
  Description of Artificial Sequence: Synthetic oligonucleotide
gguccccgcccuucauccu

SEQ ID NO: 2097978 - RNA, 19 nt, Artificial Sequence
  Description of Artificial Sequence: Synthetic oligonucleotide
cugggcccaggcggaugga

SEQ ID NO: 2097979 - RNA, 19 nt, Artificial Sequence
  Description of Artificial Sequence: Synthetic oligonucleotide
caggggacccaaggucccu

SEQ ID NO: 2097980 - RNA, 19 nt, Artificial Sequence
  Description of Artificial Sequence: Synthetic oligonucleotide
gcccaggaggacagccaaa

SEQ ID NO: 2097981 - RNA, 19 nt, Artificial Sequence
  Description of Artificial Sequence: Synthetic oligonucleotide
cgcucuccauuaaucuggu

SEQ ID NO: 2097982 - RNA, 19 nt, Artificial Sequence
  Description of Artificial Sequence: Synthetic oligonucleotide
gcccuucauccuggcccug

SEQ ID NO: 2097983 - RNA, 19 nt, Artificial Sequence
  Description of Artificial Sequence: Synthetic oligonucleotide
ggccuuguugaagcaccuu

SEQ ID NO: 2097984 - RNA, 19 nt, Artificial Sequence
  Description of Artificial Sequence: Synthetic oligonucleotide
cgcccuucauccuggcccu

SEQ ID NO: 2097985 - RNA, 19 nt, Artificial Sequence
  Description of Artificial Sequence: Synthetic oligonucleotide
ccacugggucacucgguuu

SEQ ID NO: 2097986 - RNA, 19 nt, Artificial Sequence
  Description of Artificial Sequence: Synthetic oligonucleotide
cugagcccucugacacauu

SEQ ID NO: 2097987 - RNA, 19 nt, Artificial Sequence
  Description of Artificial Sequence: Synthetic oligonucleotide
ccgucagggucgucauccu

SEQ ID NO: 2097988 - RNA, 19 nt, Artificial Sequence
  Description of Artificial Sequence: Synthetic oligonucleotide
caccugcggggcggucacu

SEQ ID NO: 2097989 - RNA, 19 nt, Artificial Sequence
  Description of Artificial Sequence: Synthetic oligonucleotide
aauaauuauauauuugccc

SEQ ID NO: 2097990 - RNA, 19 nt, Artificial Sequence
  Description of Artificial Sequence: Synthetic oligonucleotide
aauaccuucacucuugagc

SEQ ID NO: 2097991 - RNA, 19 nt, Artificial Sequence
  Description of Artificial Sequence: Synthetic oligonucleotide
aaagguuacacuuuauuuc

SEQ ID NO: 2097992 - RNA, 19 nt, Artificial Sequence
  Description of Artificial Sequence: Synthetic oligonucleotide
aagguuacacuuuauuucc

SEQ ID NO: 2097993 - RNA, 19 nt, Artificial Sequence
  Description of Artificial Sequence: Synthetic oligonucleotide
uuauaaauggcacaaaugu

SEQ ID NO: 2097994 - RNA, 19 nt, Artificial Sequence
  Description of Artificial Sequence: Synthetic oligonucleotide
aauuagauuacaaauacag

SEQ ID NO: 2097995 - RNA, 19 nt, Artificial Sequence
  Description of Artificial Sequence: Synthetic oligonucleotide
aaauauuuucuuuccaacg

SEQ ID NO: 2097996 - RNA, 19 nt, Artificial Sequence
  Description of Artificial Sequence: Synthetic oligonucleotide
uuagauuacaaauacaggu

SEQ ID NO: 2097997 - RNA, 19 nt, Artificial Sequence
  Description of Artificial Sequence: Synthetic oligonucleotide
aauguuaugcuccaaaaga

SEQ ID NO: 2097998 - RNA, 19 nt, Artificial Sequence
  Description of Artificial Sequence: Synthetic oligonucleotide
ugaaauaguagacuucugg

SEQ ID NO: 2097999 - RNA, 19 nt, Artificial Sequence
  Description of Artificial Sequence: Synthetic oligonucleotide
aaauaauuauauauuugcc

SEQ ID NO: 2098000 - RNA, 19 nt, Artificial Sequence
  Description of Artificial Sequence: Synthetic oligonucleotide
ggacauuacauuuagaugg

SEQ ID NO: 2098001 - RNA, 19 nt, Artificial Sequence
  Description of Artificial Sequence: Synthetic oligonucleotide
aguuucaaaagcuaucuac

SEQ ID NO: 2098002 - RNA, 19 nt, Artificial Sequence
  Description of Artificial Sequence: Synthetic oligonucleotide
uuuauuuccucuuaaacac

SEQ ID NO: 2098003 - RNA, 19 nt, Artificial Sequence
  Description of Artificial Sequence: Synthetic oligonucleotide
acugauaugaauuuaccag

SEQ ID NO: 2098004 - RNA, 19 nt, Artificial Sequence
  Description of Artificial Sequence: Synthetic oligonucleotide
uuauauucaacaaauuacu

SEQ ID NO: 2098005 - RNA, 19 nt, Artificial Sequence
  Description of Artificial Sequence: Synthetic oligonucleotide
aaagaacuaacuuuucuug

SEQ ID NO: 2098006 - RNA, 19 nt, Artificial Sequence
  Description of Artificial Sequence: Synthetic oligonucleotide
auaauuauauauuugccca

SEQ ID NO: 2098007 - RNA, 19 nt, Artificial Sequence
  Description of Artificial Sequence: Synthetic oligonucleotide
aauauuuucuuuccaacgu

SEQ ID NO: 2098008 - RNA, 19 nt, Artificial Sequence
  Description of Artificial Sequence: Synthetic oligonucleotide
acaaauacagguuaaauau

SEQ ID NO: 2098009 - RNA, 19 nt, Artificial Sequence
  Description of Artificial Sequence: Synthetic oligonucleotide
aaacuaaaucgucuguuac

SEQ ID NO: 2098010 - RNA, 19 nt, Artificial Sequence
  Description of Artificial Sequence: Synthetic oligonucleotide
aguacuuuaguucagucug

SEQ ID NO: 2098011 - RNA, 19 nt, Artificial Sequence
  Description of Artificial Sequence: Synthetic oligonucleotide
uuuccauggagacagugcg

SEQ ID NO: 2098012 - RNA, 19 nt, Artificial Sequence
  Description of Artificial Sequence: Synthetic oligonucleotide
aaauguuaugcuccaaaag

SEQ ID NO: 2098013 - RNA, 19 nt, Artificial Sequence
  Description of Artificial Sequence: Synthetic oligonucleotide
ucgucuguuacuuugauac

SEQ ID NO: 2098014 - RNA, 19 nt, Artificial Sequence
  Description of Artificial Sequence: Synthetic oligonucleotide
aggguauuuauucaguuuc

SEQ ID NO: 2098015 - RNA, 19 nt, Artificial Sequence
  Description of Artificial Sequence: Synthetic oligonucleotide
uaaacaaacuaaaucgucu

SEQ ID NO: 2098016 - RNA, 19 nt, Artificial Sequence
  Description of Artificial Sequence: Synthetic oligonucleotide
cuuugauacacaaauuccc

SEQ ID NO: 2098017 - RNA, 19 nt, Artificial Sequence
  Description of Artificial Sequence: Synthetic oligonucleotide
gaaauaguagacuucuggc

SEQ ID NO: 2098018 - RNA, 19 nt, Artificial Sequence
  Description of Artificial Sequence: Synthetic oligonucleotide
uauucaacaaauuacugau

SEQ ID NO: 2098019 - RNA, 19 nt, Artificial Sequence
  Description of Artificial Sequence: Synthetic oligonucleotide
uuucuauucaaacacaguu

SEQ ID NO: 2098020 - RNA, 19 nt, Artificial Sequence
  Description of Artificial Sequence: Synthetic oligonucleotide
aaauaguagacuucuggcu

SEQ ID NO: 2098021 - RNA, 19 nt, Artificial Sequence
  Description of Artificial Sequence: Synthetic oligonucleotide
aauuauauauuugcccaac

SEQ ID NO: 2098022 - RNA, 19 nt, Artificial Sequence
  Description of Artificial Sequence: Synthetic oligonucleotide
ugcuccaaaagaaacauac

SEQ ID NO: 2098023 - RNA, 19 nt, Artificial Sequence
  Description of Artificial Sequence: Synthetic oligonucleotide
aaaagguuacacuuuauuu

SEQ ID NO: 2098024 - RNA, 19 nt, Artificial Sequence
  Description of Artificial Sequence: Synthetic oligonucleotide
uuguuuauauucaacaaau

SEQ ID NO: 2098025 - RNA, 19 nt, Artificial Sequence
  Description of Artificial Sequence: Synthetic oligonucleotide
aagguuuuguaacugcaag

SEQ ID NO: 2098026 - RNA, 19 nt, Artificial Sequence
  Description of Artificial Sequence: Synthetic oligonucleotide
agaugguaaaauuagauua

SEQ ID NO: 2098027 - RNA, 19 nt, Artificial Sequence
  Description of Artificial Sequence: Synthetic oligonucleotide
aaugcaauaccuucacucu

SEQ ID NO: 2098028 - RNA, 19 nt, Artificial Sequence
  Description of Artificial Sequence: Synthetic oligonucleotide
uucaacaaauuacugauau

SEQ ID NO: 2098029 - RNA, 19 nt, Artificial Sequence
  Description of Artificial Sequence: Synthetic oligonucleotide
uauauauuugcccaacauc

SEQ ID NO: 2098030 - RNA, 19 nt, Artificial Sequence
  Description of Artificial Sequence: Synthetic oligonucleotide
uauauucaacaaauuacug

SEQ ID NO: 2098031 - RNA, 19 nt, Artificial Sequence
  Description of Artificial Sequence: Synthetic oligonucleotide
uaaagcaagccucagagua

SEQ ID NO: 2098032 - RNA, 19 nt, Artificial Sequence
  Description of Artificial Sequence: Synthetic oligonucleotide
uuagaugguaaaauuagau

SEQ ID NO: 2098033 - RNA, 19 nt, Artificial Sequence
  Description of Artificial Sequence: Synthetic oligonucleotide
aaauaugaaauaguagacu

SEQ ID NO: 2098034 - RNA, 19 nt, Artificial Sequence
  Description of Artificial Sequence: Synthetic oligonucleotide
auuugagaaccacacguac

SEQ ID NO: 2098035 - RNA, 19 nt, Artificial Sequence
  Description of Artificial Sequence: Synthetic oligonucleotide
aagaaacauaccaacacag

SEQ ID NO: 2098036 - RNA, 19 nt, Artificial Sequence
  Description of Artificial Sequence: Synthetic oligonucleotide
agucauucuguuuccaugg

SEQ ID NO: 2098037 - RNA, 19 nt, Artificial Sequence
  Description of Artificial Sequence: Synthetic oligonucleotide
auuacugauaugaauuuac

SEQ ID NO: 2098038 - RNA, 19 nt, Artificial Sequence
  Description of Artificial Sequence: Synthetic oligonucleotide
uguacacuaaacaaacuaa

SEQ ID NO: 2098039 - RNA, 19 nt, Artificial Sequence
  Description of Artificial Sequence: Synthetic oligonucleotide
uucucaaucuucuuuacgu

SEQ ID NO: 2098040 - RNA, 19 nt, Artificial Sequence
  Description of Artificial Sequence: Synthetic oligonucleotide
uaaaucgucuguuacuuug

SEQ ID NO: 2098041 - RNA, 19 nt, Artificial Sequence
  Description of Artificial Sequence: Synthetic oligonucleotide
augcuuaguacuuuaguuc

SEQ ID NO: 2098042 - RNA, 19 nt, Artificial Sequence
  Description of Artificial Sequence: Synthetic oligonucleotide
uguaacugcaagcagugac

SEQ ID NO: 2098043 - RNA, 19 nt, Artificial Sequence
  Description of Artificial Sequence: Synthetic oligonucleotide
uaugaaauaguagacuucu

SEQ ID NO: 2098044 - RNA, 19 nt, Artificial Sequence
  Description of Artificial Sequence: Synthetic oligonucleotide
auaccaacacagcaaaagg

SEQ ID NO: 2098045 - RNA, 19 nt, Artificial Sequence
  Description of Artificial Sequence: Synthetic oligonucleotide
gaaacauaccaacacagca

SEQ ID NO: 2098046 - RNA, 19 nt, Artificial Sequence
  Description of Artificial Sequence: Synthetic oligonucleotide
aauaguagacuucuggcuu

SEQ ID NO: 2098047 - RNA, 19 nt, Artificial Sequence
  Description of Artificial Sequence: Synthetic oligonucleotide
auauauuugcccaacauca

SEQ ID NO: 2098048 - RNA, 19 nt, Artificial Sequence
  Description of Artificial Sequence: Synthetic oligonucleotide
uuuaaugcaauaccuucac

SEQ ID NO: 2098049 - RNA, 19 nt, Artificial Sequence
  Description of Artificial Sequence: Synthetic oligonucleotide
augccuguauuugagaacc

SEQ ID NO: 2098050 - RNA, 19 nt, Artificial Sequence
  Description of Artificial Sequence: Synthetic oligonucleotide
uuucucaaucuucuuuacg

SEQ ID NO: 2098051 - RNA, 19 nt, Artificial Sequence
  Description of Artificial Sequence: Synthetic oligonucleotide
uuuagaugguaaaauuaga

SEQ ID NO: 2098052 - RNA, 19 nt, Artificial Sequence
  Description of Artificial Sequence: Synthetic oligonucleotide
aacuaaaucgucuguuacu

SEQ ID NO: 2098053 - RNA, 19 nt, Artificial Sequence
  Description of Artificial Sequence: Synthetic oligonucleotide
aagaacuaacuuuucuugu

SEQ ID NO: 2098054 - RNA, 19 nt, Artificial Sequence
  Description of Artificial Sequence: Synthetic oligonucleotide
uuauuggagaccuaacagu

SEQ ID NO: 2098055 - RNA, 19 nt, Artificial Sequence
  Description of Artificial Sequence: Synthetic oligonucleotide
uuaguucagucugagaugc

SEQ ID NO: 2098056 - RNA, 19 nt, Artificial Sequence
  Description of Artificial Sequence: Synthetic oligonucleotide
agcucaguuacauaaauau

SEQ ID NO: 2098057 - RNA, 19 nt, Artificial Sequence
  Description of Artificial Sequence: Synthetic oligonucleotide
uaucuacuucccaagaaca

SEQ ID NO: 2098058 - RNA, 19 nt, Artificial Sequence
  Description of Artificial Sequence: Synthetic oligonucleotide
ugggacauuacauuuagau

SEQ ID NO: 2098059 - RNA, 19 nt, Artificial Sequence
  Description of Artificial Sequence: Synthetic oligonucleotide
uuaugcuccaaaagaaaca

SEQ ID NO: 2098060 - RNA, 19 nt, Artificial Sequence
  Description of Artificial Sequence: Synthetic oligonucleotide
ugcuuaguacuuuaguuca

SEQ ID NO: 2098061 - RNA, 19 nt, Artificial Sequence
  Description of Artificial Sequence: Synthetic oligonucleotide
auaccuucacucuugagca

SEQ ID NO: 2098062 - RNA, 19 nt, Artificial Sequence
  Description of Artificial Sequence: Synthetic oligonucleotide
uugaaccugguaaggaagg

SEQ ID NO: 2098063 - RNA, 19 nt, Artificial Sequence
  Description of Artificial Sequence: Synthetic oligonucleotide
aaauuacugauaugaauuu

SEQ ID NO: 2098064 - RNA, 19 nt, Artificial Sequence
  Description of Artificial Sequence: Synthetic oligonucleotide
agaacauacaaacagucuu

SEQ ID NO: 2098065 - RNA, 19 nt, Artificial Sequence
  Description of Artificial Sequence: Synthetic oligonucleotide
caaucuagaaagaacuaac

SEQ ID NO: 2098066 - RNA, 19 nt, Artificial Sequence
  Description of Artificial Sequence: Synthetic oligonucleotide
uuacugauaugaauuuacc

SEQ ID NO: 2098067 - RNA, 19 nt, Artificial Sequence
  Description of Artificial Sequence: Synthetic oligonucleotide
uaaagguuuuguaacugca

SEQ ID NO: 2098068 - RNA, 19 nt, Artificial Sequence
  Description of Artificial Sequence: Synthetic oligonucleotide
uuuaguucagucugagaug

SEQ ID NO: 2098069 - RNA, 19 nt, Artificial Sequence
  Description of Artificial Sequence: Synthetic oligonucleotide
accacacguaccuucaugg

SEQ ID NO: 2098070 - RNA, 19 nt, Artificial Sequence
  Description of Artificial Sequence: Synthetic oligonucleotide
uacugauaugaauuuacca

SEQ ID NO: 2098071 - RNA, 19 nt, Artificial Sequence
  Description of Artificial Sequence: Synthetic oligonucleotide
cuguauuugagaaccacac

SEQ ID NO: 2098072 - RNA, 19 nt, Artificial Sequence
  Description of Artificial Sequence: Synthetic oligonucleotide
auuagauuacaaauacagg

SEQ ID NO: 2098073 - RNA, 19 nt, Artificial Sequence
  Description of Artificial Sequence: Synthetic oligonucleotide
uucuaggguauuuauucag

SEQ ID NO: 2098074 - RNA, 19 nt, Artificial Sequence
  Description of Artificial Sequence: Synthetic oligonucleotide
agaaagaacuaacuuuucu

SEQ ID NO: 2098075 - RNA, 19 nt, Artificial Sequence
  Description of Artificial Sequence: Synthetic oligonucleotide
uucaaacacaguuuugaac

SEQ ID NO: 2098076 - RNA, 19 nt, Artificial Sequence
  Description of Artificial Sequence: Synthetic oligonucleotide
uaugcuuaguacuuuaguu

SEQ ID NO: 2098077 - RNA, 19 nt, Artificial Sequence
  Description of Artificial Sequence: Synthetic oligonucleotide
ucuuaaacacaaucuagaa

SEQ ID NO: 2098078 - RNA, 19 nt, Artificial Sequence
  Description of Artificial Sequence: Synthetic oligonucleotide
cuaaacaaacuaaaucguc

SEQ ID NO: 2098079 - RNA, 19 nt, Artificial Sequence
  Description of Artificial Sequence: Synthetic oligonucleotide
aacaaacuaaaucgucugu

SEQ ID NO: 2098080 - RNA, 19 nt, Artificial Sequence
  Description of Artificial Sequence: Synthetic oligonucleotide
uuggagaccuaacaguucu

SEQ ID NO: 2098081 - RNA, 19 nt, Artificial Sequence
  Description of Artificial Sequence: Synthetic oligonucleotide
ucagcugccacguuuauua

SEQ ID NO: 2098082 - RNA, 19 nt, Artificial Sequence
  Description of Artificial Sequence: Synthetic oligonucleotide
aacaugggacauuacauuu

SEQ ID NO: 2098083 - RNA, 19 nt, Artificial Sequence
  Description of Artificial Sequence: Synthetic oligonucleotide
ucaggugcacugcagagca

SEQ ID NO: 2098084 - RNA, 19 nt, Artificial Sequence
  Description of Artificial Sequence: Synthetic oligonucleotide
uagauuacaaauacagguu

SEQ ID NO: 2098085 - RNA, 19 nt, Artificial Sequence
  Description of Artificial Sequence: Synthetic oligonucleotide
ugacauucccacucuaaag

SEQ ID NO: 2098086 - RNA, 19 nt, Artificial Sequence
  Description of Artificial Sequence: Synthetic oligonucleotide
ucaguuucaaaagcuaucu

SEQ ID NO: 2098087 - RNA, 19 nt, Artificial Sequence
  Description of Artificial Sequence: Synthetic oligonucleotide
ugauaugaauuuaccagaa

SEQ ID NO: 2098088 - RNA, 19 nt, Artificial Sequence
  Description of Artificial Sequence: Synthetic oligonucleotide
uggaacugaggcaucgcgg

SEQ ID NO: 2098089 - RNA, 19 nt, Artificial Sequence
  Description of Artificial Sequence: Synthetic oligonucleotide
auuauaaauggcacaaaug

SEQ ID NO: 2098090 - RNA, 19 nt, Artificial Sequence
  Description of Artificial Sequence: Synthetic oligonucleotide
aaaccgcagucucaccggc

SEQ ID NO: 2098091 - RNA, 19 nt, Artificial Sequence
  Description of Artificial Sequence: Synthetic oligonucleotide
uauuggagaccuaacaguu

SEQ ID NO: 2098092 - RNA, 19 nt, Artificial Sequence
  Description of Artificial Sequence: Synthetic oligonucleotide
auuucucaaucuucuuuac

SEQ ID NO: 2098093 - RNA, 19 nt, Artificial Sequence
  Description of Artificial Sequence: Synthetic oligonucleotide
uucacucuugagcagacaa

SEQ ID NO: 2098094 - RNA, 19 nt, Artificial Sequence
  Description of Artificial Sequence: Synthetic oligonucleotide
uuucuuguuuauauucaac

SEQ ID NO: 2098095 - RNA, 19 nt, Artificial Sequence
  Description of Artificial Sequence: Synthetic oligonucleotide
aaaagcuaucuacuuccca

SEQ ID NO: 2098096 - RNA, 19 nt, Artificial Sequence
  Description of Artificial Sequence: Synthetic oligonucleotide
cuaccaauccuuucuauuc

SEQ ID NO: 2098097 - RNA, 19 nt, Artificial Sequence
  Description of Artificial Sequence: Synthetic oligonucleotide
cauaagucgcauuaguuga

SEQ ID NO: 2098098 - RNA, 19 nt, Artificial Sequence
  Description of Artificial Sequence: Synthetic oligonucleotide
ucaacaugccuguauuuga

SEQ ID NO: 2098099 - RNA, 19 nt, Artificial Sequence
  Description of Artificial Sequence: Synthetic oligonucleotide
ugauacacaaauucccauc

SEQ ID NO: 2098100 - RNA, 19 nt, Artificial Sequence
  Description of Artificial Sequence: Synthetic oligonucleotide
uccucuuaaacacaaucua

SEQ ID NO: 2098101 - RNA, 19 nt, Artificial Sequence
  Description of Artificial Sequence: Synthetic oligonucleotide
uaguacuuuaguucagucu

SEQ ID NO: 2098102 - RNA, 19 nt, Artificial Sequence
  Description of Artificial Sequence: Synthetic oligonucleotide
ucaguuacauaaauauuuu

SEQ ID NO: 2098103 - RNA, 19 nt, Artificial Sequence
  Description of Artificial Sequence: Synthetic oligonucleotide
ucuaggguauuuauucagu

SEQ ID NO: 2098104 - RNA, 19 nt, Artificial Sequence
  Description of Artificial Sequence: Synthetic oligonucleotide
cacguuuauuauaaauggc

SEQ ID NO: 2098105 - RNA, 19 nt, Artificial Sequence
  Description of Artificial Sequence: Synthetic oligonucleotide
agauuacaaauacagguua

SEQ ID NO: 2098106 - RNA, 19 nt, Artificial Sequence
  Description of Artificial Sequence: Synthetic oligonucleotide
acguuuauuauaaauggca

SEQ ID NO: 2098107 - RNA, 19 nt, Artificial Sequence
  Description of Artificial Sequence: Synthetic oligonucleotide
uccuuggccaccauaaguc

SEQ ID NO: 2098108 - RNA, 19 nt, Artificial Sequence
  Description of Artificial Sequence: Synthetic oligonucleotide
auucccaucaacaugccug

SEQ ID NO: 2098109 - RNA, 19 nt, Artificial Sequence
  Description of Artificial Sequence: Synthetic oligonucleotide
gaaaccgcagucucaccgg

SEQ ID NO: 2098110 - RNA, 19 nt, Artificial Sequence
  Description of Artificial Sequence: Synthetic oligonucleotide
agugcgggauuccuuggcc

SEQ ID NO: 2098111 - RNA, 19 nt, Artificial Sequence
  Description of Artificial Sequence: Synthetic oligonucleotide
uagaugguaaaauuagauu

SEQ ID NO: 2098112 - RNA, 19 nt, Artificial Sequence
  Description of Artificial Sequence: Synthetic oligonucleotide
guauuugagaaccacacgu

SEQ ID NO: 2098113 - RNA, 19 nt, Artificial Sequence
  Description of Artificial Sequence: Synthetic oligonucleotide
ugguaaaauuagauuacaa

SEQ ID NO: 2098114 - RNA, 19 nt, Artificial Sequence
  Description of Artificial Sequence: Synthetic oligonucleotide
acaucaaaugaucugcaaa

SEQ ID NO: 2098115 - RNA, 19 nt, Artificial Sequence
  Description of Artificial Sequence: Synthetic oligonucleotide
uuucuaggguauuuauuca

SEQ ID NO: 2098116 - RNA, 19 nt, Artificial Sequence
  Description of Artificial Sequence: Synthetic oligonucleotide
uguggaauuucucaaucuu

SEQ ID NO: 2098117 - RNA, 19 nt, Artificial Sequence
  Description of Artificial Sequence: Synthetic oligonucleotide
acaaauguuaugcuccaaa

SEQ ID NO: 2098118 - RNA, 19 nt, Artificial Sequence
  Description of Artificial Sequence: Synthetic oligonucleotide
uaauuauauauuugcccaa

SEQ ID NO: 2098119 - RNA, 19 nt, Artificial Sequence
  Description of Artificial Sequence: Synthetic oligonucleotide
cugauaugaauuuaccaga

SEQ ID NO: 2098120 - RNA, 19 nt, Artificial Sequence
  Description of Artificial Sequence: Synthetic oligonucleotide
aacauacaaacagucuuca

SEQ ID NO: 2098121 - RNA, 19 nt, Artificial Sequence
  Description of Artificial Sequence: Synthetic oligonucleotide
cucuuaaacacaaucuaga

SEQ ID NO: 2098122 - RNA, 19 nt, Artificial Sequence
  Description of Artificial Sequence: Synthetic oligonucleotide
uucuuuccaacguucucag

SEQ ID NO: 2098123 - RNA, 19 nt, Artificial Sequence
  Description of Artificial Sequence: Synthetic oligonucleotide
ucucaguuucaaaagcuau

SEQ ID NO: 2098124 - RNA, 19 nt, Artificial Sequence
  Description of Artificial Sequence: Synthetic oligonucleotide
aaaauuucuaggguauuua

SEQ ID NO: 2098125 - RNA, 19 nt, Artificial Sequence
  Description of Artificial Sequence: Synthetic oligonucleotide
aaacauaccaacacagcaa

SEQ ID NO: 2098126 - RNA, 19 nt, Artificial Sequence
  Description of Artificial Sequence: Synthetic oligonucleotide
caugggacauuacauuuag

SEQ ID NO: 2098127 - RNA, 19 nt, Artificial Sequence
  Description of Artificial Sequence: Synthetic oligonucleotide
auaugaaauaguagacuuc

SEQ ID NO: 2098128 - RNA, 19 nt, Artificial Sequence
  Description of Artificial Sequence: Synthetic oligonucleotide
uucaaaccagucauucugu

SEQ ID NO: 2098129 - RNA, 19 nt, Artificial Sequence
  Description of Artificial Sequence: Synthetic oligonucleotide
aagaacauacaaacagucu

SEQ ID NO: 2098130 - RNA, 19 nt, Artificial Sequence
  Description of Artificial Sequence: Synthetic oligonucleotide
caucaaaugaucugcaaaa

SEQ ID NO: 2098131 - RNA, 19 nt, Artificial Sequence
  Description of Artificial Sequence: Synthetic oligonucleotide
uauuugagaaccacacgua

SEQ ID NO: 2098132 - RNA, 19 nt, Artificial Sequence
  Description of Artificial Sequence: Synthetic oligonucleotide
caguuuugaaccugguaag

SEQ ID NO: 2098133 - RNA, 19 nt, Artificial Sequence
  Description of Artificial Sequence: Synthetic oligonucleotide
gacagugcgggauuccuug

SEQ ID NO: 2098134 - RNA, 19 nt, Artificial Sequence
  Description of Artificial Sequence: Synthetic oligonucleotide
acuaaacaaacuaaaucgu

SEQ ID NO: 2098135 - RNA, 19 nt, Artificial Sequence
  Description of Artificial Sequence: Synthetic oligonucleotide
acguucucaguuucaaaag

SEQ ID NO: 2098136 - RNA, 19 nt, Artificial Sequence
  Description of Artificial Sequence: Synthetic oligonucleotide
cacacguaccuucaugggg

SEQ ID NO: 2098137 - RNA, 19 nt, Artificial Sequence
  Description of Artificial Sequence: Synthetic oligonucleotide
ggaaaccgcagucucaccg

SEQ ID NO: 2098138 - RNA, 19 nt, Artificial Sequence
  Description of Artificial Sequence: Synthetic oligonucleotide
uccuuucuauucaaacaca

SEQ ID NO: 2098139 - RNA, 19 nt, Artificial Sequence
  Description of Artificial Sequence: Synthetic oligonucleotide
aagucgcauuaguugacug

SEQ ID NO: 2098140 - RNA, 19 nt, Artificial Sequence
  Description of Artificial Sequence: Synthetic oligonucleotide
agguagagcuucucggccg

SEQ ID NO: 2098141 - RNA, 19 nt, Artificial Sequence
  Description of Artificial Sequence: Synthetic oligonucleotide
aauucccaucaacaugccu

SEQ ID NO: 2098142 - RNA, 19 nt, Artificial Sequence
  Description of Artificial Sequence: Synthetic oligonucleotide
cagaguacaggcugguccc

SEQ ID NO: 2098143 - RNA, 19 nt, Artificial Sequence
  Description of Artificial Sequence: Synthetic oligonucleotide
agcuuggucuguucuguac

SEQ ID NO: 2098144 - RNA, 19 nt, Artificial Sequence
  Description of Artificial Sequence: Synthetic oligonucleotide
aacaugccuguauuugaga

SEQ ID NO: 2098145 - RNA, 19 nt, Artificial Sequence
  Description of Artificial Sequence: Synthetic oligonucleotide
uuaaugcaauaccuucacu

SEQ ID NO: 2098146 - RNA, 19 nt, Artificial Sequence
  Description of Artificial Sequence: Synthetic oligonucleotide
acacaaauucccaucaaca

SEQ ID NO: 2098147 - RNA, 19 nt, Artificial Sequence
  Description of Artificial Sequence: Synthetic oligonucleotide
gagaccuaacaguucugag

SEQ ID NO: 2098148 - RNA, 19 nt, Artificial Sequence
  Description of Artificial Sequence: Synthetic oligonucleotide
ucuguacacuaaacaaacu

SEQ ID NO: 2098149 - RNA, 19 nt, Artificial Sequence
  Description of Artificial Sequence: Synthetic oligonucleotide
agaacuaacuuuucuuguu

SEQ ID NO: 2098150 - RNA, 19 nt, Artificial Sequence
  Description of Artificial Sequence: Synthetic oligonucleotide
ggaaggagaagcaagcuug

SEQ ID NO: 2098151 - RNA, 19 nt, Artificial Sequence
  Description of Artificial Sequence: Synthetic oligonucleotide
acaaucuagaaagaacuaa

SEQ ID NO: 2098152 - RNA, 19 nt, Artificial Sequence
  Description of Artificial Sequence: Synthetic oligonucleotide
uugauacacaaauucccau

SEQ ID NO: 2098153 - RNA, 19 nt, Artificial Sequence
  Description of Artificial Sequence: Synthetic oligonucleotide
cucaguuacauaaauauuu

SEQ ID NO: 2098154 - RNA, 19 nt, Artificial Sequence
  Description of Artificial Sequence: Synthetic oligonucleotide
gaaagaacuaacuuuucuu

SEQ ID NO: 2098155 - RNA, 19 nt, Artificial Sequence
  Description of Artificial Sequence: Synthetic oligonucleotide
ucgcauuaguugacugugg

SEQ ID NO: 2098156 - RNA, 19 nt, Artificial Sequence
  Description of Artificial Sequence: Synthetic oligonucleotide
auauuugcccaacaucaaa

SEQ ID NO: 2098157 - RNA, 19 nt, Artificial Sequence
  Description of Artificial Sequence: Synthetic oligonucleotide
uuuucacaaugccggguca

SEQ ID NO: 2098158 - RNA, 19 nt, Artificial Sequence
  Description of Artificial Sequence: Synthetic oligonucleotide
aacaaauuacugauaugaa

SEQ ID NO: 2098159 - RNA, 19 nt, Artificial Sequence
  Description of Artificial Sequence: Synthetic oligonucleotide
cuuuacgucuugagcuugg

SEQ ID NO: 2098160 - RNA, 19 nt, Artificial Sequence
  Description of Artificial Sequence: Synthetic oligonucleotide
agaugcuaccaauccuuuc

SEQ ID NO: 2098161 - RNA, 19 nt, Artificial Sequence
  Description of Artificial Sequence: Synthetic oligonucleotide
cuggaacugaggcaucgcg

SEQ ID NO: 2098162 - RNA, 19 nt, Artificial Sequence
  Description of Artificial Sequence: Synthetic oligonucleotide
agggaaaccgcagucucac

SEQ ID NO: 2098163 - RNA, 19 nt, Artificial Sequence
  Description of Artificial Sequence: Synthetic oligonucleotide
caacagcucaguuacauaa

SEQ ID NO: 2098164 - RNA, 19 nt, Artificial Sequence
  Description of Artificial Sequence: Synthetic oligonucleotide
ucccaagaacauacaaaca

SEQ ID NO: 2098165 - RNA, 19 nt, Artificial Sequence
  Description of Artificial Sequence: Synthetic oligonucleotide
auuaguugacuguggaauu

SEQ ID NO: 2098166 - RNA, 19 nt, Artificial Sequence
  Description of Artificial Sequence: Synthetic oligonucleotide
gggacauuacauuuagaug

SEQ ID NO: 2098167 - RNA, 19 nt, Artificial Sequence
  Description of Artificial Sequence: Synthetic oligonucleotide
uacuuuaguucagucugag

SEQ ID NO: 2098168 - RNA, 19 nt, Artificial Sequence
  Description of Artificial Sequence: Synthetic oligonucleotide
acuaaaucgucuguuacuu

SEQ ID NO: 2098169 - RNA, 19 nt, Artificial Sequence
  Description of Artificial Sequence: Synthetic oligonucleotide
cagucauucuguuuccaug

SEQ ID NO: 2098170 - RNA, 19 nt, Artificial Sequence
  Description of Artificial Sequence: Synthetic oligonucleotide
agcaaaagguuacacuuua

SEQ ID NO: 2098171 - RNA, 19 nt, Artificial Sequence
  Description of Artificial Sequence: Synthetic oligonucleotide
cauggggucggcgagguag

SEQ ID NO: 2098172 - RNA, 19 nt, Artificial Sequence
  Description of Artificial Sequence: Synthetic oligonucleotide
agucgcauuaguugacugu

SEQ ID NO: 2098173 - RNA, 19 nt, Artificial Sequence
  Description of Artificial Sequence: Synthetic oligonucleotide
gauuccuuggccaccauaa

SEQ ID NO: 2098174 - RNA, 19 nt, Artificial Sequence
  Description of Artificial Sequence: Synthetic oligonucleotide
ccaacaucaaaugaucugc

SEQ ID NO: 2098175 - RNA, 19 nt, Artificial Sequence
  Description of Artificial Sequence: Synthetic oligonucleotide
ccauaagucgcauuaguug

SEQ ID NO: 2098176 - RNA, 19 nt, Artificial Sequence
  Description of Artificial Sequence: Synthetic oligonucleotide
acaacaugggacauuacau

SEQ ID NO: 2098177 - RNA, 19 nt, Artificial Sequence
  Description of Artificial Sequence: Synthetic oligonucleotide
ucacucuugagcagacaac

SEQ ID NO: 2098178 - RNA, 19 nt, Artificial Sequence
  Description of Artificial Sequence: Synthetic oligonucleotide
auaagucgcauuaguugac

SEQ ID NO: 2098179 - RNA, 19 nt, Artificial Sequence
  Description of Artificial Sequence: Synthetic oligonucleotide
gucuguuacuuugauacac

SEQ ID NO: 2098180 - RNA, 19 nt, Artificial Sequence
  Description of Artificial Sequence: Synthetic oligonucleotide
ucccucagcucucaacagc

SEQ ID NO: 2098181 - RNA, 19 nt, Artificial Sequence
  Description of Artificial Sequence: Synthetic oligonucleotide
aaucgucuguuacuuugau

SEQ ID NO: 2098182 - RNA, 19 nt, Artificial Sequence
  Description of Artificial Sequence: Synthetic oligonucleotide
ccuaacaguucugagaggc

SEQ ID NO: 2098183 - RNA, 19 nt, Artificial Sequence
  Description of Artificial Sequence: Synthetic oligonucleotide
cuguacacuaaacaaacua

SEQ ID NO: 2098184 - RNA, 19 nt, Artificial Sequence
  Description of Artificial Sequence: Synthetic oligonucleotide
uggcacaaauguuaugcuc

SEQ ID NO: 2098185 - RNA, 19 nt, Artificial Sequence
  Description of Artificial Sequence: Synthetic oligonucleotide
ccucuuaaacacaaucuag

SEQ ID NO: 2098186 - RNA, 19 nt, Artificial Sequence
  Description of Artificial Sequence: Synthetic oligonucleotide
auucccacucuaaagcaag

SEQ ID NO: 2098187 - RNA, 19 nt, Artificial Sequence
  Description of Artificial Sequence: Synthetic oligonucleotide
gaacugaggcaucgcggcg

SEQ ID NO: 2098188 - RNA, 19 nt, Artificial Sequence
  Description of Artificial Sequence: Synthetic oligonucleotide
gauaugaauuuaccagaaa

SEQ ID NO: 2098189 - RNA, 19 nt, Artificial Sequence
  Description of Artificial Sequence: Synthetic oligonucleotide
cuuggucuguucuguacac

SEQ ID NO: 2098190 - RNA, 19 nt, Artificial Sequence
  Description of Artificial Sequence: Synthetic oligonucleotide
aaaucgucuguuacuuuga

SEQ ID NO: 2098191 - RNA, 19 nt, Artificial Sequence
  Description of Artificial Sequence: Synthetic oligonucleotide
gucgcauuaguugacugug

SEQ ID NO: 2098192 - RNA, 19 nt, Artificial Sequence
  Description of Artificial Sequence: Synthetic oligonucleotide
ccugcaaccgcccacggcg

SEQ ID NO: 2098193 - RNA, 19 nt, Artificial Sequence
  Description of Artificial Sequence: Synthetic oligonucleotide
agguuaaauaugaaauagu

SEQ ID NO: 2098194 - RNA, 19 nt, Artificial Sequence
  Description of Artificial Sequence: Synthetic oligonucleotide
ggaacugaggcaucgcggc

SEQ ID NO: 2098195 - RNA, 19 nt, Artificial Sequence
  Description of Artificial Sequence: Synthetic oligonucleotide
caaauguuaugcuccaaaa

SEQ ID NO: 2098196 - RNA, 19 nt, Artificial Sequence
  Description of Artificial Sequence: Synthetic oligonucleotide
uggucuguucuguacacua

SEQ ID NO: 2098197 - RNA, 19 nt, Artificial Sequence
  Description of Artificial Sequence: Synthetic oligonucleotide
gguuuuguaacugcaagca

SEQ ID NO: 2098198 - RNA, 19 nt, Artificial Sequence
  Description of Artificial Sequence: Synthetic oligonucleotide
uuuccaacguucucaguuu

SEQ ID NO: 2098199 - RNA, 19 nt, Artificial Sequence
  Description of Artificial Sequence: Synthetic oligonucleotide
uaacaguucugagaggcau

SEQ ID NO: 2098200 - RNA, 19 nt, Artificial Sequence
  Description of Artificial Sequence: Synthetic oligonucleotide
caaacagucuucauuucaa

SEQ ID NO: 2098201 - RNA, 19 nt, Artificial Sequence
  Description of Artificial Sequence: Synthetic oligonucleotide
gacuucuggcuuauuggag

SEQ ID NO: 2098202 - RNA, 19 nt, Artificial Sequence
  Description of Artificial Sequence: Synthetic oligonucleotide
uccaacguucucaguuuca

SEQ ID NO: 2098203 - RNA, 19 nt, Artificial Sequence
  Description of Artificial Sequence: Synthetic oligonucleotide
guuucaaaagcuaucuacu

SEQ ID NO: 2098204 - RNA, 19 nt, Artificial Sequence
  Description of Artificial Sequence: Synthetic oligonucleotide
ucuuuacgucuugagcuug

SEQ ID NO: 2098205 - RNA, 19 nt, Artificial Sequence
  Description of Artificial Sequence: Synthetic oligonucleotide
uucccacucuaaagcaagc

SEQ ID NO: 2098206 - RNA, 19 nt, Artificial Sequence
  Description of Artificial Sequence: Synthetic oligonucleotide
agcuaucuacuucccaaga

SEQ ID NO: 2098207 - RNA, 19 nt, Artificial Sequence
  Description of Artificial Sequence: Synthetic oligonucleotide
auaguagacuucuggcuua

SEQ ID NO: 2098208 - RNA, 19 nt, Artificial Sequence
  Description of Artificial Sequence: Synthetic oligonucleotide
accgcagucucaccggcag

SEQ ID NO: 2098209 - RNA, 19 nt, Artificial Sequence
  Description of Artificial Sequence: Synthetic oligonucleotide
aggaaggagaagcaagcuu

SEQ ID NO: 2098210 - RNA, 19 nt, Artificial Sequence
  Description of Artificial Sequence: Synthetic oligonucleotide
guacacuaaacaaacuaaa

SEQ ID NO: 2098211 - RNA, 19 nt, Artificial Sequence
  Description of Artificial Sequence: Synthetic oligonucleotide
guaacugcaagcagugaca

SEQ ID NO: 2098212 - RNA, 19 nt, Artificial Sequence
  Description of Artificial Sequence: Synthetic oligonucleotide
gcuuauuggagaccuaaca

SEQ ID NO: 2098213 - RNA, 19 nt, Artificial Sequence
  Description of Artificial Sequence: Synthetic oligonucleotide
acuuuaguucagucugaga

SEQ ID NO: 2098214 - RNA, 19 nt, Artificial Sequence
  Description of Artificial Sequence: Synthetic oligonucleotide
aggucuggaacugaggcau

SEQ ID NO: 2098215 - RNA, 19 nt, Artificial Sequence
  Description of Artificial Sequence: Synthetic oligonucleotide
uaagucgcauuaguugacu

SEQ ID NO: 2098216 - RNA, 19 nt, Artificial Sequence
  Description of Artificial Sequence: Synthetic oligonucleotide
ucccacucuaaagcaagcc

SEQ ID NO: 2098217 - RNA, 19 nt, Artificial Sequence
  Description of Artificial Sequence: Synthetic oligonucleotide
acacguaccuucauggggu

SEQ ID NO: 2098218 - RNA, 19 nt, Artificial Sequence
  Description of Artificial Sequence: Synthetic oligonucleotide
aaugccgggucaggugcac

SEQ ID NO: 2098219 - RNA, 19 nt, Artificial Sequence
  Description of Artificial Sequence: Synthetic oligonucleotide
guuuugaaccugguaagga

SEQ ID NO: 2098220 - RNA, 19 nt, Artificial Sequence
  Description of Artificial Sequence: Synthetic oligonucleotide
ugcuaugcuuaguacuuua

SEQ ID NO: 2098221 - RNA, 19 nt, Artificial Sequence
  Description of Artificial Sequence: Synthetic oligonucleotide
acagugcgggauuccuugg

SEQ ID NO: 2098222 - RNA, 19 nt, Artificial Sequence
  Description of Artificial Sequence: Synthetic oligonucleotide
uggcuuauuggagaccuaa

SEQ ID NO: 2098223 - RNA, 19 nt, Artificial Sequence
  Description of Artificial Sequence: Synthetic oligonucleotide
uuccaacguucucaguuuc

SEQ ID NO: 2098224 - RNA, 19 nt, Artificial Sequence
  Description of Artificial Sequence: Synthetic oligonucleotide
accuucauggggucggcga

SEQ ID NO: 2098225 - RNA, 19 nt, Artificial Sequence
  Description of Artificial Sequence: Synthetic oligonucleotide
uuacgucuugagcuugguc

SEQ ID NO: 2098226 - RNA, 19 nt, Artificial Sequence
  Description of Artificial Sequence: Synthetic oligonucleotide
ucaacagcucaguuacaua

SEQ ID NO: 2098227 - RNA, 19 nt, Artificial Sequence
  Description of Artificial Sequence: Synthetic oligonucleotide
aggcaugcuaugcuuagua

SEQ ID NO: 2098228 - RNA, 19 nt, Artificial Sequence
  Description of Artificial Sequence: Synthetic oligonucleotide
cacucuaaagcaagccuca

SEQ ID NO: 2098229 - RNA, 19 nt, Artificial Sequence
  Description of Artificial Sequence: Synthetic oligonucleotide
guuacacuuuauuuccucu

SEQ ID NO: 2098230 - RNA, 19 nt, Artificial Sequence
  Description of Artificial Sequence: Synthetic oligonucleotide
ggcgagguagagcuucucg

SEQ ID NO: 2098231 - RNA, 19 nt, Artificial Sequence
  Description of Artificial Sequence: Synthetic oligonucleotide
gucuggaacugaggcaucg

SEQ ID NO: 2098232 - RNA, 19 nt, Artificial Sequence
  Description of Artificial Sequence: Synthetic oligonucleotide
uaacugcaagcagugacau

SEQ ID NO: 2098233 - RNA, 19 nt, Artificial Sequence
  Description of Artificial Sequence: Synthetic oligonucleotide
gugacauucccacucuaaa

SEQ ID NO: 2098234 - RNA, 19 nt, Artificial Sequence
  Description of Artificial Sequence: Synthetic oligonucleotide
cucaccggcagcccgcgcc

SEQ ID NO: 2098235 - RNA, 19 nt, Artificial Sequence
  Description of Artificial Sequence: Synthetic oligonucleotide
aguacaggcuggucccuca

SEQ ID NO: 2098236 - RNA, 19 nt, Artificial Sequence
  Description of Artificial Sequence: Synthetic oligonucleotide
gguuacacuuuauuuccuc

SEQ ID NO: 2098237 - RNA, 19 nt, Artificial Sequence
  Description of Artificial Sequence: Synthetic oligonucleotide
cuuuccaacguucucaguu

SEQ ID NO: 2098238 - RNA, 19 nt, Artificial Sequence
  Description of Artificial Sequence: Synthetic oligonucleotide
ugcgggauuccuuggccac

SEQ ID NO: 2098239 - RNA, 19 nt, Artificial Sequence
  Description of Artificial Sequence: Synthetic oligonucleotide
uaguugacuguggaauuuc

SEQ ID NO: 2098240 - RNA, 19 nt, Artificial Sequence
  Description of Artificial Sequence: Synthetic oligonucleotide
augcaauaccuucacucuu

SEQ ID NO: 2098241 - RNA, 19 nt, Artificial Sequence
  Description of Artificial Sequence: Synthetic oligonucleotide
ucggccgcgcggcugaacu

SEQ ID NO: 2098242 - RNA, 19 nt, Artificial Sequence
  Description of Artificial Sequence: Synthetic oligonucleotide
agaaccacacguaccuuca

SEQ ID NO: 2098243 - RNA, 19 nt, Artificial Sequence
  Description of Artificial Sequence: Synthetic oligonucleotide
gaacuaacuuuucuuguuu

SEQ ID NO: 2098244 - RNA, 19 nt, Artificial Sequence
  Description of Artificial Sequence: Synthetic oligonucleotide
ugccgggucaggugcacug

SEQ ID NO: 2098245 - RNA, 19 nt, Artificial Sequence
  Description of Artificial Sequence: Synthetic oligonucleotide
ccacucuaaagcaagccuc

SEQ ID NO: 2098246 - RNA, 19 nt, Artificial Sequence
  Description of Artificial Sequence: Synthetic oligonucleotide
ugcuaccaauccuuucuau

SEQ ID NO: 2098247 - RNA, 19 nt, Artificial Sequence
  Description of Artificial Sequence: Synthetic oligonucleotide
uccugcaaccgcccacggc

SEQ ID NO: 2098248 - RNA, 19 nt, Artificial Sequence
  Description of Artificial Sequence: Synthetic oligonucleotide
ucucaacagcucaguuaca

SEQ ID NO: 2098249 - RNA, 19 nt, Artificial Sequence
  Description of Artificial Sequence: Synthetic oligonucleotide
cuuucuauucaaacacagu

SEQ ID NO: 2098250 - RNA, 19 nt, Artificial Sequence
  Description of Artificial Sequence: Synthetic oligonucleotide
uuuacgucuugagcuuggu

SEQ ID NO: 2098251 - RNA, 19 nt, Artificial Sequence
  Description of Artificial Sequence: Synthetic oligonucleotide
gagcuucucggccgcgcgg

SEQ ID NO: 2098252 - RNA, 19 nt, Artificial Sequence
  Description of Artificial Sequence: Synthetic oligonucleotide
accauaagucgcauuaguu

SEQ ID NO: 2098253 - RNA, 19 nt, Artificial Sequence
  Description of Artificial Sequence: Synthetic oligonucleotide
cucuaaagcaagccucaga

SEQ ID NO: 2098254 - RNA, 19 nt, Artificial Sequence
  Description of Artificial Sequence: Synthetic oligonucleotide
ugccuguauuugagaacca

SEQ ID NO: 2098255 - RNA, 19 nt, Artificial Sequence
  Description of Artificial Sequence: Synthetic oligonucleotide
augaaauaguagacuucug

SEQ ID NO: 2098256 - RNA, 19 nt, Artificial Sequence
  Description of Artificial Sequence: Synthetic oligonucleotide
uucucggccgcgcggcuga

SEQ ID NO: 2098257 - RNA, 19 nt, Artificial Sequence
  Description of Artificial Sequence: Synthetic oligonucleotide
aggugcacugcagagcagu

SEQ ID NO: 2098258 - RNA, 19 nt, Artificial Sequence
  Description of Artificial Sequence: Synthetic oligonucleotide
aucgucuguuacuuugaua

SEQ ID NO: 2098259 - RNA, 19 nt, Artificial Sequence
  Description of Artificial Sequence: Synthetic oligonucleotide
uggucccucagcucucaac

SEQ ID NO: 2098260 - RNA, 19 nt, Artificial Sequence
  Description of Artificial Sequence: Synthetic oligonucleotide
ucuuuccaacguucucagu

SEQ ID NO: 2098261 - RNA, 19 nt, Artificial Sequence
  Description of Artificial Sequence: Synthetic oligonucleotide
uucuggcuuauuggagacc

SEQ ID NO: 2098262 - RNA, 19 nt, Artificial Sequence
  Description of Artificial Sequence: Synthetic oligonucleotide
aguugacuguggaauuucu

SEQ ID NO: 2098263 - RNA, 19 nt, Artificial Sequence
  Description of Artificial Sequence: Synthetic oligonucleotide
cauucccacucuaaagcaa

SEQ ID NO: 2098264 - RNA, 19 nt, Artificial Sequence
  Description of Artificial Sequence: Synthetic oligonucleotide
caaaagguuacacuuuauu

SEQ ID NO: 2098265 - RNA, 19 nt, Artificial Sequence
  Description of Artificial Sequence: Synthetic oligonucleotide
uuguaacugcaagcaguga

SEQ ID NO: 2098266 - RNA, 19 nt, Artificial Sequence
  Description of Artificial Sequence: Synthetic oligonucleotide
aacugcaagcagugacauu

SEQ ID NO: 2098267 - RNA, 19 nt, Artificial Sequence
  Description of Artificial Sequence: Synthetic oligonucleotide
cagugcgggauuccuuggc

SEQ ID NO: 2098268 - RNA, 19 nt, Artificial Sequence
  Description of Artificial Sequence: Synthetic oligonucleotide
gccaccauaagucgcauua

SEQ ID NO: 2098269 - RNA, 19 nt, Artificial Sequence
  Description of Artificial Sequence: Synthetic oligonucleotide
ggcaugcuaugcuuaguac

SEQ ID NO: 2098270 - RNA, 19 nt, Artificial Sequence
  Description of Artificial Sequence: Synthetic oligonucleotide
gcuaugcuuaguacuuuag

SEQ ID NO: 2098271 - RNA, 19 nt, Artificial Sequence
  Description of Artificial Sequence: Synthetic oligonucleotide
uuggucuguucuguacacu

SEQ ID NO: 2098272 - RNA, 19 nt, Artificial Sequence
  Description of Artificial Sequence: Synthetic oligonucleotide
gucauucuguuuccaugga

SEQ ID NO: 2098273 - RNA, 19 nt, Artificial Sequence
  Description of Artificial Sequence: Synthetic oligonucleotide
gcaagccucagaguacagg

SEQ ID NO: 2098274 - RNA, 19 nt, Artificial Sequence
  Description of Artificial Sequence: Synthetic oligonucleotide
cagacaacaugggacauua

SEQ ID NO: 2098275 - RNA, 19 nt, Artificial Sequence
  Description of Artificial Sequence: Synthetic oligonucleotide
gcuuggucuguucuguaca

SEQ ID NO: 2098276 - RNA, 19 nt, Artificial Sequence
  Description of Artificial Sequence: Synthetic oligonucleotide
agcugccacguuuauuaua

SEQ ID NO: 2098277 - RNA, 19 nt, Artificial Sequence
  Description of Artificial Sequence: Synthetic oligonucleotide
gcuaucuacuucccaagaa

SEQ ID NO: 2098278 - RNA, 19 nt, Artificial Sequence
  Description of Artificial Sequence: Synthetic oligonucleotide
gcaugcuaugcuuaguacu

SEQ ID NO: 2098279 - RNA, 19 nt, Artificial Sequence
  Description of Artificial Sequence: Synthetic oligonucleotide
agcucucaacagcucaguu

SEQ ID NO: 2098280 - RNA, 19 nt, Artificial Sequence
  Description of Artificial Sequence: Synthetic oligonucleotide
aaccgcccacggcgcagcg

SEQ ID NO: 2098281 - RNA, 19 nt, Artificial Sequence
  Description of Artificial Sequence: Synthetic oligonucleotide
acguaccuucauggggucg

SEQ ID NO: 2098282 - RNA, 19 nt, Artificial Sequence
  Description of Artificial Sequence: Synthetic oligonucleotide
cuuaguacuuuaguucagu

SEQ ID NO: 2098283 - RNA, 19 nt, Artificial Sequence
  Description of Artificial Sequence: Synthetic oligonucleotide
agacaacaugggacauuac

SEQ ID NO: 2098284 - RNA, 19 nt, Artificial Sequence
  Description of Artificial Sequence: Synthetic oligonucleotide
acaugggacauuacauuua

SEQ ID NO: 2098285 - RNA, 19 nt, Artificial Sequence
  Description of Artificial Sequence: Synthetic oligonucleotide
cgagguagagcuucucggc

SEQ ID NO: 2098286 - RNA, 19 nt, Artificial Sequence
  Description of Artificial Sequence: Synthetic oligonucleotide
ccacacguaccuucauggg

SEQ ID NO: 2098287 - RNA, 19 nt, Artificial Sequence
  Description of Artificial Sequence: Synthetic oligonucleotide
ucggcgagguagagcuucu

SEQ ID NO: 2098288 - RNA, 19 nt, Artificial Sequence
  Description of Artificial Sequence: Synthetic oligonucleotide
gucggcgagguagagcuuc

SEQ ID NO: 2098289 - RNA, 19 nt, Artificial Sequence
  Description of Artificial Sequence: Synthetic oligonucleotide
cuaggguauuuauucaguu

SEQ ID NO: 2098290 - RNA, 19 nt, Artificial Sequence
  Description of Artificial Sequence: Synthetic oligonucleotide
cugcaaccgcccacggcgc

SEQ ID NO: 2098291 - RNA, 19 nt, Artificial Sequence
  Description of Artificial Sequence: Synthetic oligonucleotide
ugcaaccgcccacggcgca

SEQ ID NO: 2098292 - RNA, 19 nt, Artificial Sequence
  Description of Artificial Sequence: Synthetic oligonucleotide
ggagaccuaacaguucuga

SEQ ID NO: 2098293 - RNA, 19 nt, Artificial Sequence
  Description of Artificial Sequence: Synthetic oligonucleotide
caacaugggacauuacauu

SEQ ID NO: 2098294 - RNA, 19 nt, Artificial Sequence
  Description of Artificial Sequence: Synthetic oligonucleotide
agguuacacuuuauuuccu

SEQ ID NO: 2098295 - RNA, 19 nt, Artificial Sequence
  Description of Artificial Sequence: Synthetic oligonucleotide
uaguagacuucuggcuuau

SEQ ID NO: 2098296 - RNA, 19 nt, Artificial Sequence
  Description of Artificial Sequence: Synthetic oligonucleotide
gugcgggauuccuuggcca

SEQ ID NO: 2098297 - RNA, 19 nt, Artificial Sequence
  Description of Artificial Sequence: Synthetic oligonucleotide
gcuuaguacuuuaguucag

SEQ ID NO: 2098298 - RNA, 19 nt, Artificial Sequence
  Description of Artificial Sequence: Synthetic oligonucleotide
gagaggcaugcuaugcuua

SEQ ID NO: 2098299 - RNA, 19 nt, Artificial Sequence
  Description of Artificial Sequence: Synthetic oligonucleotide
gcauuaguugacuguggaa

SEQ ID NO: 2098300 - RNA, 19 nt, Artificial Sequence
  Description of Artificial Sequence: Synthetic oligonucleotide
cacguaccuucaugggguc

SEQ ID NO: 2098301 - RNA, 19 nt, Artificial Sequence
  Description of Artificial Sequence: Synthetic oligonucleotide
auuuccucuuaaacacaau

SEQ ID NO: 2098302 - RNA, 19 nt, Artificial Sequence
  Description of Artificial Sequence: Synthetic oligonucleotide
cacugcagagcagugaccu

SEQ ID NO: 2098303 - RNA, 19 nt, Artificial Sequence
  Description of Artificial Sequence: Synthetic oligonucleotide
ugagaaccacacguaccuu

SEQ ID NO: 2098304 - RNA, 19 nt, Artificial Sequence
  Description of Artificial Sequence: Synthetic oligonucleotide
caccauaagucgcauuagu

SEQ ID NO: 2098305 - RNA, 19 nt, Artificial Sequence
  Description of Artificial Sequence: Synthetic oligonucleotide
gcggcugaacuccucccag

SEQ ID NO: 2098306 - RNA, 19 nt, Artificial Sequence
  Description of Artificial Sequence: Synthetic oligonucleotide
cguaccuucauggggucgg

SEQ ID NO: 2098307 - RNA, 19 nt, Artificial Sequence
  Description of Artificial Sequence: Synthetic oligonucleotide
agcagacaacaugggacau

SEQ ID NO: 2098308 - RNA, 19 nt, Artificial Sequence
  Description of Artificial Sequence: Synthetic oligonucleotide
aaccgcagucucaccggca

SEQ ID NO: 2098309 - RNA, 19 nt, Artificial Sequence
  Description of Artificial Sequence: Synthetic oligonucleotide
caguuucaaaagcuaucua

SEQ ID NO: 2098310 - RNA, 19 nt, Artificial Sequence
  Description of Artificial Sequence: Synthetic oligonucleotide
cucagaguacaggcugguc

SEQ ID NO: 2098311 - RNA, 19 nt, Artificial Sequence
  Description of Artificial Sequence: Synthetic oligonucleotide
gagacagugcgggauuccu

SEQ ID NO: 2098312 - RNA, 19 nt, Artificial Sequence
  Description of Artificial Sequence: Synthetic oligonucleotide
gaguacaggcuggucccuc

SEQ ID NO: 2098313 - RNA, 19 nt, Artificial Sequence
  Description of Artificial Sequence: Synthetic oligonucleotide
gggucaggugcacugcaga

SEQ ID NO: 2098314 - RNA, 19 nt, Artificial Sequence
  Description of Artificial Sequence: Synthetic oligonucleotide
ggcuuauuggagaccuaac

SEQ ID NO: 2098315 - RNA, 19 nt, Artificial Sequence
  Description of Artificial Sequence: Synthetic oligonucleotide
gucucaccggcagcccgcg

SEQ ID NO: 2098316 - RNA, 19 nt, Artificial Sequence
  Description of Artificial Sequence: Synthetic oligonucleotide
gaccucagcugccacguuu

SEQ ID NO: 2098317 - RNA, 19 nt, Artificial Sequence
  Description of Artificial Sequence: Synthetic oligonucleotide
ccuccugcaaccgcccacg

SEQ ID NO: 2098318 - RNA, 19 nt, Artificial Sequence
  Description of Artificial Sequence: Synthetic oligonucleotide
augcuaugcuuaguacuuu

SEQ ID NO: 2098319 - RNA, 19 nt, Artificial Sequence
  Description of Artificial Sequence: Synthetic oligonucleotide
ucucaccggcagcccgcgc

SEQ ID NO: 2098320 - RNA, 19 nt, Artificial Sequence
  Description of Artificial Sequence: Synthetic oligonucleotide
cagugaccucagcugccac

SEQ ID NO: 2098321 - RNA, 19 nt, Artificial Sequence
  Description of Artificial Sequence: Synthetic oligonucleotide
ggagacagugcgggauucc

SEQ ID NO: 2098322 - RNA, 19 nt, Artificial Sequence
  Description of Artificial Sequence: Synthetic oligonucleotide
gagcuuggucuguucugua

SEQ ID NO: 2098323 - RNA, 19 nt, Artificial Sequence
  Description of Artificial Sequence: Synthetic oligonucleotide
gcuaccaauccuuucuauu

SEQ ID NO: 2098324 - RNA, 19 nt, Artificial Sequence
  Description of Artificial Sequence: Synthetic oligonucleotide
ggugcacugcagagcagug

SEQ ID NO: 2098325 - RNA, 19 nt, Artificial Sequence
  Description of Artificial Sequence: Synthetic oligonucleotide
ccaccauaagucgcauuag

SEQ ID NO: 2098326 - RNA, 19 nt, Artificial Sequence
  Description of Artificial Sequence: Synthetic oligonucleotide
gggaaaccgcagucucacc

SEQ ID NO: 2098327 - RNA, 19 nt, Artificial Sequence
  Description of Artificial Sequence: Synthetic oligonucleotide
cagcaaaagguuacacuuu

SEQ ID NO: 2098328 - RNA, 19 nt, Artificial Sequence
  Description of Artificial Sequence: Synthetic oligonucleotide
caaccgcccacggcgcagc

SEQ ID NO: 2098329 - RNA, 19 nt, Artificial Sequence
  Description of Artificial Sequence: Synthetic oligonucleotide
cuaaaucgucuguuacuuu

SEQ ID NO: 2098330 - RNA, 19 nt, Artificial Sequence
  Description of Artificial Sequence: Synthetic oligonucleotide
gcagcccgcgcccuccugc

SEQ ID NO: 2098331 - RNA, 19 nt, Artificial Sequence
  Description of Artificial Sequence: Synthetic oligonucleotide
cuucucggccgcgcggcug

SEQ ID NO: 2098332 - RNA, 19 nt, Artificial Sequence
  Description of Artificial Sequence: Synthetic oligonucleotide
ggauuccuuggccaccaua

SEQ ID NO: 2098333 - RNA, 19 nt, Artificial Sequence
  Description of Artificial Sequence: Synthetic oligonucleotide
agacagugcgggauuccuu

SEQ ID NO: 2098334 - RNA, 19 nt, Artificial Sequence
  Description of Artificial Sequence: Synthetic oligonucleotide
gagaugcuaccaauccuuu

SEQ ID NO: 2098335 - RNA, 19 nt, Artificial Sequence
  Description of Artificial Sequence: Synthetic oligonucleotide
cgcauuaguugacugugga

SEQ ID NO: 2098336 - RNA, 19 nt, Artificial Sequence
  Description of Artificial Sequence: Synthetic oligonucleotide
gaaccacacguaccuucau

SEQ ID NO: 2098337 - RNA, 19 nt, Artificial Sequence
  Description of Artificial Sequence: Synthetic oligonucleotide
ggccgcgcggcugaacucc

SEQ ID NO: 2098338 - RNA, 19 nt, Artificial Sequence
  Description of Artificial Sequence: Synthetic oligonucleotide
cacggagggaaaccgcagu

SEQ ID NO: 2098339 - RNA, 19 nt, Artificial Sequence
  Description of Artificial Sequence: Synthetic oligonucleotide
ggucuguucuguacacuaa

SEQ ID NO: 2098340 - RNA, 19 nt, Artificial Sequence
  Description of Artificial Sequence: Synthetic oligonucleotide
ucauggggucggcgaggua

SEQ ID NO: 2098341 - RNA, 19 nt, Artificial Sequence
  Description of Artificial Sequence: Synthetic oligonucleotide
uggccaccauaagucgcau

SEQ ID NO: 2098342 - RNA, 19 nt, Artificial Sequence
  Description of Artificial Sequence: Synthetic oligonucleotide
cccacucuaaagcaagccu

SEQ ID NO: 2098343 - RNA, 19 nt, Artificial Sequence
  Description of Artificial Sequence: Synthetic oligonucleotide
gcagagcagugaccucagc

SEQ ID NO: 2098344 - RNA, 19 nt, Artificial Sequence
  Description of Artificial Sequence: Synthetic oligonucleotide
gcggccacggagggaaacc

SEQ ID NO: 2098345 - RNA, 19 nt, Artificial Sequence
  Description of Artificial Sequence: Synthetic oligonucleotide
ccaacguucucaguuucaa

SEQ ID NO: 2098346 - RNA, 19 nt, Artificial Sequence
  Description of Artificial Sequence: Synthetic oligonucleotide
cagugacauucccacucua

SEQ ID NO: 2098347 - RNA, 19 nt, Artificial Sequence
  Description of Artificial Sequence: Synthetic oligonucleotide
ggggucggcgagguagagc

SEQ ID NO: 2098348 - RNA, 19 nt, Artificial Sequence
  Description of Artificial Sequence: Synthetic oligonucleotide
ggccacggagggaaaccgc

SEQ ID NO: 2098349 - RNA, 19 nt, Artificial Sequence
  Description of Artificial Sequence: Synthetic oligonucleotide
gcgcggcugaacuccuccc

SEQ ID NO: 2098350 - RNA, 19 nt, Artificial Sequence
  Description of Artificial Sequence: Synthetic oligonucleotide
gcaaccgcccacggcgcag

SEQ ID NO: 2098351 - RNA, 19 nt, Artificial Sequence
  Description of Artificial Sequence: Synthetic oligonucleotide
cuggcuuauuggagaccua

SEQ ID NO: 2098352 - RNA, 19 nt, Artificial Sequence
  Description of Artificial Sequence: Synthetic oligonucleotide
gcucaguuacauaaauauu

SEQ ID NO: 2098353 - RNA, 19 nt, Artificial Sequence
  Description of Artificial Sequence: Synthetic oligonucleotide
augccgggucaggugcacu

SEQ ID NO: 2098354 - RNA, 19 nt, Artificial Sequence
  Description of Artificial Sequence: Synthetic oligonucleotide
cccgcgcccuccugcaacc

SEQ ID NO: 2098355 - RNA, 19 nt, Artificial Sequence
  Description of Artificial Sequence: Synthetic oligonucleotide
gcgggauuccuuggccacc

SEQ ID NO: 2098356 - RNA, 19 nt, Artificial Sequence
  Description of Artificial Sequence: Synthetic oligonucleotide
gcccaacaucaaaugaucu

SEQ ID NO: 2098357 - RNA, 19 nt, Artificial Sequence
  Description of Artificial Sequence: Synthetic oligonucleotide
cgucuguuacuuugauaca

SEQ ID NO: 2098358 - RNA, 19 nt, Artificial Sequence
  Description of Artificial Sequence: Synthetic oligonucleotide
cagcccgcgcccuccugca

SEQ ID NO: 2098359 - RNA, 19 nt, Artificial Sequence
  Description of Artificial Sequence: Synthetic oligonucleotide
gccgggucaggugcacugc

SEQ ID NO: 2098360 - RNA, 19 nt, Artificial Sequence
  Description of Artificial Sequence: Synthetic oligonucleotide
gcccgcgcccuccugcaac

SEQ ID NO: 2098361 - RNA, 19 nt, Artificial Sequence
  Description of Artificial Sequence: Synthetic oligonucleotide
cccaucaacaugccuguau

SEQ ID NO: 2098362 - RNA, 19 nt, Artificial Sequence
  Description of Artificial Sequence: Synthetic oligonucleotide
cggccacggagggaaaccg

SEQ ID NO: 2098363 - RNA, 19 nt, Artificial Sequence
  Description of Artificial Sequence: Synthetic oligonucleotide
ggucuggaacugaggcauc

SEQ ID NO: 2098364 - RNA, 19 nt, Artificial Sequence
  Description of Artificial Sequence: Synthetic oligonucleotide
ggcggccacggagggaaac

SEQ ID NO: 2098365 - RNA, 19 nt, Artificial Sequence
  Description of Artificial Sequence: Synthetic oligonucleotide
cagcucucaacagcucagu

SEQ ID NO: 2098366 - RNA, 19 nt, Artificial Sequence
  Description of Artificial Sequence: Synthetic oligonucleotide
agcccgcgcccuccugcaa

SEQ ID NO: 2098367 - RNA, 19 nt, Artificial Sequence
  Description of Artificial Sequence: Synthetic oligonucleotide
cagcugccacguuuauuau

SEQ ID NO: 2098368 - RNA, 19 nt, Artificial Sequence
  Description of Artificial Sequence: Synthetic oligonucleotide
gcggcggcggcggcggcgg

SEQ ID NO: 2098369 - RNA, 19 nt, Artificial Sequence
  Description of Artificial Sequence: Synthetic oligonucleotide
ggcggcggcggcggcggcg

SEQ ID NO: 2098370 - RNA, 19 nt, Artificial Sequence
  Description of Artificial Sequence: Synthetic oligonucleotide
ccgggucaggugcacugca

SEQ ID NO: 2098371 - RNA, 19 nt, Artificial Sequence
  Description of Artificial Sequence: Synthetic oligonucleotide
ucgcggcggcggcggcggc

SEQ ID NO: 2098372 - RNA, 19 nt, Artificial Sequence
  Description of Artificial Sequence: Synthetic oligonucleotide
gcagacaacaugggacauu

SEQ ID NO: 2098373 - RNA, 19 nt, Artificial Sequence
  Description of Artificial Sequence: Synthetic oligonucleotide
cgcgcccuccugcaaccgc

SEQ ID NO: 2098374 - RNA, 19 nt, Artificial Sequence
  Description of Artificial Sequence: Synthetic oligonucleotide
cgcggcugaacuccuccca

SEQ ID NO: 2098375 - RNA, 19 nt, Artificial Sequence
  Description of Artificial Sequence: Synthetic oligonucleotide
ggcggcggcggcggcggcc

SEQ ID NO: 2098376 - RNA, 19 nt, Artificial Sequence
  Description of Artificial Sequence: Synthetic oligonucleotide
ccgcccacggcgcagcgcu

SEQ ID NO: 2098377 - RNA, 19 nt, Artificial Sequence
  Description of Artificial Sequence: Synthetic oligonucleotide
ggccaccauaagucgcauu

SEQ ID NO: 2098378 - RNA, 19 nt, Artificial Sequence
  Description of Artificial Sequence: Synthetic oligonucleotide
ccgcgcccuccugcaaccg

SEQ ID NO: 2098379 - RNA, 19 nt, Artificial Sequence
  Description of Artificial Sequence: Synthetic oligonucleotide
gcuucucggccgcgcggcu

SEQ ID NO: 2098380 - RNA, 19 nt, Artificial Sequence
  Description of Artificial Sequence: Synthetic oligonucleotide
gcggcggcggcggcggcca

SEQ ID NO: 2098381 - RNA, 19 nt, Artificial Sequence
  Description of Artificial Sequence: Synthetic oligonucleotide
ccgcgcggcugaacuccuc

SEQ ID NO: 2098382 - RNA, 19 nt, Artificial Sequence
  Description of Artificial Sequence: Synthetic oligonucleotide
cggccgcgcggcugaacuc

SEQ ID NO: 2098383 - RNA, 19 nt, Artificial Sequence
  Description of Artificial Sequence: Synthetic oligonucleotide
cgcggcggcggcggcggcg

SEQ ID NO: 2098384 - RNA, 19 nt, Artificial Sequence
  Description of Artificial Sequence: Synthetic oligonucleotide
cggcgagguagagcuucuc

SEQ ID NO: 2098385 - RNA, 19 nt, Artificial Sequence
  Description of Artificial Sequence: Synthetic oligonucleotide
cgucuugagcuuggucugu

SEQ ID NO: 2098386 - RNA, 19 nt, Artificial Sequence
  Description of Artificial Sequence: Synthetic oligonucleotide
gccgcgcggcugaacuccu

SEQ ID NO: 2098387 - RNA, 19 nt, Artificial Sequence
  Description of Artificial Sequence: Synthetic oligonucleotide
ggucggcgagguagagcuu

SEQ ID NO: 2098388 - RNA, 19 nt, Artificial Sequence
  Description of Artificial Sequence: Synthetic oligonucleotide
cggcggcggcggcggcggc

SEQ ID NO: 2098389 - RNA, 19 nt, Artificial Sequence
  Description of Artificial Sequence: Synthetic oligonucleotide
acacauuucaauuugaucu

SEQ ID NO: 2098390 - RNA, 19 nt, Artificial Sequence
  Description of Artificial Sequence: Synthetic oligonucleotide
aaagauuaacuccaucuuc

SEQ ID NO: 2098391 - RNA, 19 nt, Artificial Sequence
  Description of Artificial Sequence: Synthetic oligonucleotide
auuacuauuugguuuuacc

SEQ ID NO: 2098392 - RNA, 19 nt, Artificial Sequence
  Description of Artificial Sequence: Synthetic oligonucleotide
ucuguuugagauaaacacg

SEQ ID NO: 2098393 - RNA, 19 nt, Artificial Sequence
  Description of Artificial Sequence: Synthetic oligonucleotide
uucuguuugagauaaacac

SEQ ID NO: 2098394 - RNA, 19 nt, Artificial Sequence
  Description of Artificial Sequence: Synthetic oligonucleotide
acaaugaacaguuuugcag

SEQ ID NO: 2098395 - RNA, 19 nt, Artificial Sequence
  Description of Artificial Sequence: Synthetic oligonucleotide
cuguuugagauaaacacgg

SEQ ID NO: 2098396 - RNA, 19 nt, Artificial Sequence
  Description of Artificial Sequence: Synthetic oligonucleotide
aaugcagucaaaucuggug

SEQ ID NO: 2098397 - RNA, 19 nt, Artificial Sequence
  Description of Artificial Sequence: Synthetic oligonucleotide
uuuugucuaggucagaggu

SEQ ID NO: 2098398 - RNA, 19 nt, Artificial Sequence
  Description of Artificial Sequence: Synthetic oligonucleotide
uuugagauaaacacggguc

SEQ ID NO: 2098399 - RNA, 19 nt, Artificial Sequence
  Description of Artificial Sequence: Synthetic oligonucleotide
uuucuuauucugaacuagg

SEQ ID NO: 2098400 - RNA, 19 nt, Artificial Sequence
  Description of Artificial Sequence: Synthetic oligonucleotide
auuugguuuuaccugugcc

SEQ ID NO: 2098401 - RNA, 19 nt, Artificial Sequence
  Description of Artificial Sequence: Synthetic oligonucleotide
aacugcgugagacacagug

SEQ ID NO: 2098402 - RNA, 19 nt, Artificial Sequence
  Description of Artificial Sequence: Synthetic oligonucleotide
ucuggauacagucucgaag

SEQ ID NO: 2098403 - RNA, 19 nt, Artificial Sequence
  Description of Artificial Sequence: Synthetic oligonucleotide
agcaacaauuuucuuauuc

SEQ ID NO: 2098404 - RNA, 19 nt, Artificial Sequence
  Description of Artificial Sequence: Synthetic oligonucleotide
aaacucccugaccaaaucg

SEQ ID NO: 2098405 - RNA, 19 nt, Artificial Sequence
  Description of Artificial Sequence: Synthetic oligonucleotide
ugaacaguuuugcagaaac

SEQ ID NO: 2098406 - RNA, 19 nt, Artificial Sequence
  Description of Artificial Sequence: Synthetic oligonucleotide
uuacuauuugguuuuaccu

SEQ ID NO: 2098407 - RNA, 19 nt, Artificial Sequence
  Description of Artificial Sequence: Synthetic oligonucleotide
aagaauucgacccuacaau

SEQ ID NO: 2098408 - RNA, 19 nt, Artificial Sequence
  Description of Artificial Sequence: Synthetic oligonucleotide
cuggauacagucucgaagc

SEQ ID NO: 2098409 - RNA, 19 nt, Artificial Sequence
  Description of Artificial Sequence: Synthetic oligonucleotide
aaaucugguggcaucacac

SEQ ID NO: 2098410 - RNA, 19 nt, Artificial Sequence
  Description of Artificial Sequence: Synthetic oligonucleotide
ucugcuuuucacaaugaca

SEQ ID NO: 2098411 - RNA, 19 nt, Artificial Sequence
  Description of Artificial Sequence: Synthetic oligonucleotide
uucacaaugacagaguauc

SEQ ID NO: 2098412 - RNA, 19 nt, Artificial Sequence
  Description of Artificial Sequence: Synthetic oligonucleotide
auaucaacugcacuucuag

SEQ ID NO: 2098413 - RNA, 19 nt, Artificial Sequence
  Description of Artificial Sequence: Synthetic oligonucleotide
uugagauaaacacggguca

SEQ ID NO: 2098414 - RNA, 19 nt, Artificial Sequence
  Description of Artificial Sequence: Synthetic oligonucleotide
uuggcuuguaaaauguagc

SEQ ID NO: 2098415 - RNA, 19 nt, Artificial Sequence
  Description of Artificial Sequence: Synthetic oligonucleotide
gauacagucucgaagcucc

SEQ ID NO: 2098416 - RNA, 19 nt, Artificial Sequence
  Description of Artificial Sequence: Synthetic oligonucleotide
uguaaaauguagccuuuug

SEQ ID NO: 2098417 - RNA, 19 nt, Artificial Sequence
  Description of Artificial Sequence: Synthetic oligonucleotide
ucaacugcacuucuaguug

SEQ ID NO: 2098418 - RNA, 19 nt, Artificial Sequence
  Description of Artificial Sequence: Synthetic oligonucleotide
aggucuucuggauacaguc

SEQ ID NO: 2098419 - RNA, 19 nt, Artificial Sequence
  Description of Artificial Sequence: Synthetic oligonucleotide
ucugaacuagguuuucuag

SEQ ID NO: 2098420 - RNA, 19 nt, Artificial Sequence
  Description of Artificial Sequence: Synthetic oligonucleotide
gacagaguaucucagcagc

SEQ ID NO: 2098421 - RNA, 19 nt, Artificial Sequence
  Description of Artificial Sequence: Synthetic oligonucleotide
uuuucuuauucugaacuag

SEQ ID NO: 2098422 - RNA, 19 nt, Artificial Sequence
  Description of Artificial Sequence: Synthetic oligonucleotide
guagcuguaugucaaacug

SEQ ID NO: 2098423 - RNA, 19 nt, Artificial Sequence
  Description of Artificial Sequence: Synthetic oligonucleotide
ugucaaacuguuuagcaaa

SEQ ID NO: 2098424 - RNA, 19 nt, Artificial Sequence
  Description of Artificial Sequence: Synthetic oligonucleotide
acuauuugguuuuaccugu

SEQ ID NO: 2098425 - RNA, 19 nt, Artificial Sequence
  Description of Artificial Sequence: Synthetic oligonucleotide
uuaucuucucaacugcgug

SEQ ID NO: 2098426 - RNA, 19 nt, Artificial Sequence
  Description of Artificial Sequence: Synthetic oligonucleotide
gaaacuugccucugaaagc

SEQ ID NO: 2098427 - RNA, 19 nt, Artificial Sequence
  Description of Artificial Sequence: Synthetic oligonucleotide
ugugcgacucccaggacgg

SEQ ID NO: 2098428 - RNA, 19 nt, Artificial Sequence
  Description of Artificial Sequence: Synthetic oligonucleotide
uaagcacugagcuugaguu

SEQ ID NO: 2098429 - RNA, 19 nt, Artificial Sequence
  Description of Artificial Sequence: Synthetic oligonucleotide
caagacaucuggaaacucc

SEQ ID NO: 2098430 - RNA, 19 nt, Artificial Sequence
  Description of Artificial Sequence: Synthetic oligonucleotide
uugugcgacucccaggacg

SEQ ID NO: 2098431 - RNA, 19 nt, Artificial Sequence
  Description of Artificial Sequence: Synthetic oligonucleotide
uccaaggaaagauuaacuc

SEQ ID NO: 2098432 - RNA, 19 nt, Artificial Sequence
  Description of Artificial Sequence: Synthetic oligonucleotide
agaauucgacccuacaaug

SEQ ID NO: 2098433 - RNA, 19 nt, Artificial Sequence
  Description of Artificial Sequence: Synthetic oligonucleotide
uucgacccuacaaugaaca

SEQ ID NO: 2098434 - RNA, 19 nt, Artificial Sequence
  Description of Artificial Sequence: Synthetic oligonucleotide
aacuugauuacuauuuggu

SEQ ID NO: 2098435 - RNA, 19 nt, Artificial Sequence
  Description of Artificial Sequence: Synthetic oligonucleotide
uucaaggucuucuggauac

SEQ ID NO: 2098436 - RNA, 19 nt, Artificial Sequence
  Description of Artificial Sequence: Synthetic oligonucleotide
aaacuugccucugaaagca

SEQ ID NO: 2098437 - RNA, 19 nt, Artificial Sequence
  Description of Artificial Sequence: Synthetic oligonucleotide
aauguagccuuuugacuug

SEQ ID NO: 2098438 - RNA, 19 nt, Artificial Sequence
  Description of Artificial Sequence: Synthetic oligonucleotide
uugaguuguaguuacgauc

SEQ ID NO: 2098439 - RNA, 19 nt, Artificial Sequence
  Description of Artificial Sequence: Synthetic oligonucleotide
uuuaucuucucaacugcgu

SEQ ID NO: 2098440 - RNA, 19 nt, Artificial Sequence
  Description of Artificial Sequence: Synthetic oligonucleotide
aauucgacccuacaaugaa

SEQ ID NO: 2098441 - RNA, 19 nt, Artificial Sequence
  Description of Artificial Sequence: Synthetic oligonucleotide
uguuuugucuaggucagag

SEQ ID NO: 2098442 - RNA, 19 nt, Artificial Sequence
  Description of Artificial Sequence: Synthetic oligonucleotide
ucuuuugggucauuaugag

SEQ ID NO: 2098443 - RNA, 19 nt, Artificial Sequence
  Description of Artificial Sequence: Synthetic oligonucleotide
auuaugagucaguagcugu

SEQ ID NO: 2098444 - RNA, 19 nt, Artificial Sequence
  Description of Artificial Sequence: Synthetic oligonucleotide
accaaaucggggcugaucu

SEQ ID NO: 2098445 - RNA, 19 nt, Artificial Sequence
  Description of Artificial Sequence: Synthetic oligonucleotide
uuccaagacaucuggaaac

SEQ ID NO: 2098446 - RNA, 19 nt, Artificial Sequence
  Description of Artificial Sequence: Synthetic oligonucleotide
uuuucacaaugacagagua

SEQ ID NO: 2098447 - RNA, 19 nt, Artificial Sequence
  Description of Artificial Sequence: Synthetic oligonucleotide
uguuugagauaaacacggg

SEQ ID NO: 2098448 - RNA, 19 nt, Artificial Sequence
  Description of Artificial Sequence: Synthetic oligonucleotide
ucauuaugagucaguagcu

SEQ ID NO: 2098449 - RNA, 19 nt, Artificial Sequence
  Description of Artificial Sequence: Synthetic oligonucleotide
uugauuacuauuugguuuu

SEQ ID NO: 2098450 - RNA, 19 nt, Artificial Sequence
  Description of Artificial Sequence: Synthetic oligonucleotide
aacacgggucaguaagcac

SEQ ID NO: 2098451 - RNA, 19 nt, Artificial Sequence
  Description of Artificial Sequence: Synthetic oligonucleotide
uucuuauucugaacuaggu

SEQ ID NO: 2098452 - RNA, 19 nt, Artificial Sequence
  Description of Artificial Sequence: Synthetic oligonucleotide
gaacuccacucauucaagg

SEQ ID NO: 2098453 - RNA, 19 nt, Artificial Sequence
  Description of Artificial Sequence: Synthetic oligonucleotide
ugagucaguagcuguaugu

SEQ ID NO: 2098454 - RNA, 19 nt, Artificial Sequence
  Description of Artificial Sequence: Synthetic oligonucleotide
caacaauuuucuuauucug

SEQ ID NO: 2098455 - RNA, 19 nt, Artificial Sequence
  Description of Artificial Sequence: Synthetic oligonucleotide
uucaaugggaggugaagca

SEQ ID NO: 2098456 - RNA, 19 nt, Artificial Sequence
  Description of Artificial Sequence: Synthetic oligonucleotide
uugucuaggucagaggugc

SEQ ID NO: 2098457 - RNA, 19 nt, Artificial Sequence
  Description of Artificial Sequence: Synthetic oligonucleotide
aaacuuucauuuccucucu

SEQ ID NO: 2098458 - RNA, 19 nt, Artificial Sequence
  Description of Artificial Sequence: Synthetic oligonucleotide
agugcauuccaagacaucu

SEQ ID NO: 2098459 - RNA, 19 nt, Artificial Sequence
  Description of Artificial Sequence: Synthetic oligonucleotide
aacucccugaccaaaucgg

SEQ ID NO: 2098460 - RNA, 19 nt, Artificial Sequence
  Description of Artificial Sequence: Synthetic oligonucleotide
gaagaauucgacccuacaa

SEQ ID NO: 2098461 - RNA, 19 nt, Artificial Sequence
  Description of Artificial Sequence: Synthetic oligonucleotide
aguugugcgacucccagga

SEQ ID NO: 2098462 - RNA, 19 nt, Artificial Sequence
  Description of Artificial Sequence: Synthetic oligonucleotide
aacuccacucauucaaggu

SEQ ID NO: 2098463 - RNA, 19 nt, Artificial Sequence
  Description of Artificial Sequence: Synthetic oligonucleotide
caaaugcagucaaaucugg

SEQ ID NO: 2098464 - RNA, 19 nt, Artificial Sequence
  Description of Artificial Sequence: Synthetic oligonucleotide
uguaguuacgauccccuuc

SEQ ID NO: 2098465 - RNA, 19 nt, Artificial Sequence
  Description of Artificial Sequence: Synthetic oligonucleotide
cuguuuagcaaaugcaguc

SEQ ID NO: 2098466 - RNA, 19 nt, Artificial Sequence
  Description of Artificial Sequence: Synthetic oligonucleotide
uuugucuaggucagaggug

SEQ ID NO: 2098467 - RNA, 19 nt, Artificial Sequence
  Description of Artificial Sequence: Synthetic oligonucleotide
uacaaugaacaguuuugca

SEQ ID NO: 2098468 - RNA, 19 nt, Artificial Sequence
  Description of Artificial Sequence: Synthetic oligonucleotide
uaucuucuguuugagauaa

SEQ ID NO: 2098469 - RNA, 19 nt, Artificial Sequence
  Description of Artificial Sequence: Synthetic oligonucleotide
ugcagaugcuccaaggaaa

SEQ ID NO: 2098470 - RNA, 19 nt, Artificial Sequence
  Description of Artificial Sequence: Synthetic oligonucleotide
aaugaacaguuuugcagaa

SEQ ID NO: 2098471 - RNA, 19 nt, Artificial Sequence
  Description of Artificial Sequence: Synthetic oligonucleotide
ugacagaguaucucagcag

SEQ ID NO: 2098472 - RNA, 19 nt, Artificial Sequence
  Description of Artificial Sequence: Synthetic oligonucleotide
aagauuaacuugauuacua

SEQ ID NO: 2098473 - RNA, 19 nt, Artificial Sequence
  Description of Artificial Sequence: Synthetic oligonucleotide
agucaaaucugguggcauc

SEQ ID NO: 2098474 - RNA, 19 nt, Artificial Sequence
  Description of Artificial Sequence: Synthetic oligonucleotide
cuacaaugaacaguuuugc

SEQ ID NO: 2098475 - RNA, 19 nt, Artificial Sequence
  Description of Artificial Sequence: Synthetic oligonucleotide
guuuugucuaggucagagg

SEQ ID NO: 2098476 - RNA, 19 nt, Artificial Sequence
  Description of Artificial Sequence: Synthetic oligonucleotide
ucugguggcaucacacagc

SEQ ID NO: 2098477 - RNA, 19 nt, Artificial Sequence
  Description of Artificial Sequence: Synthetic oligonucleotide
agcacgccauaucaacugc

SEQ ID NO: 2098478 - RNA, 19 nt, Artificial Sequence
  Description of Artificial Sequence: Synthetic oligonucleotide
uuuuaccugugcccacugg

SEQ ID NO: 2098479 - RNA, 19 nt, Artificial Sequence
  Description of Artificial Sequence: Synthetic oligonucleotide
aguagcuguaugucaaacu

SEQ ID NO: 2098480 - RNA, 19 nt, Artificial Sequence
  Description of Artificial Sequence: Synthetic oligonucleotide
aucugguggcaucacacag

SEQ ID NO: 2098481 - RNA, 19 nt, Artificial Sequence
  Description of Artificial Sequence: Synthetic oligonucleotide
uucaucgggguuuaucuuc

SEQ ID NO: 2098482 - RNA, 19 nt, Artificial Sequence
  Description of Artificial Sequence: Synthetic oligonucleotide
ucccugaccaaaucggggc

SEQ ID NO: 2098483 - RNA, 19 nt, Artificial Sequence
  Description of Artificial Sequence: Synthetic oligonucleotide
agauuaacuugauuacuau

SEQ ID NO: 2098484 - RNA, 19 nt, Artificial Sequence
  Description of Artificial Sequence: Synthetic oligonucleotide
acugucgguacccauggca

SEQ ID NO: 2098485 - RNA, 19 nt, Artificial Sequence
  Description of Artificial Sequence: Synthetic oligonucleotide
ucgaugucagggaugcucu

SEQ ID NO: 2098486 - RNA, 19 nt, Artificial Sequence
  Description of Artificial Sequence: Synthetic oligonucleotide
ugcagucaaaucugguggc

SEQ ID NO: 2098487 - RNA, 19 nt, Artificial Sequence
  Description of Artificial Sequence: Synthetic oligonucleotide
aguaucucagcagccacag

SEQ ID NO: 2098488 - RNA, 19 nt, Artificial Sequence
  Description of Artificial Sequence: Synthetic oligonucleotide
ggaaagauuaacuccaucu

SEQ ID NO: 2098489 - RNA, 19 nt, Artificial Sequence
  Description of Artificial Sequence: Synthetic oligonucleotide
aagcacugagcuugaguug

SEQ ID NO: 2098490 - RNA, 19 nt, Artificial Sequence
  Description of Artificial Sequence: Synthetic oligonucleotide
caguugagcagguuccccg

SEQ ID NO: 2098491 - RNA, 19 nt, Artificial Sequence
  Description of Artificial Sequence: Synthetic oligonucleotide
augucaaacuguuuagcaa

SEQ ID NO: 2098492 - RNA, 19 nt, Artificial Sequence
  Description of Artificial Sequence: Synthetic oligonucleotide
gguuuaucuucucaacugc

SEQ ID NO: 2098493 - RNA, 19 nt, Artificial Sequence
  Description of Artificial Sequence: Synthetic oligonucleotide
acuugauuacuauuugguu

SEQ ID NO: 2098494 - RNA, 19 nt, Artificial Sequence
  Description of Artificial Sequence: Synthetic oligonucleotide
acuccgcgcggccacagcc

SEQ ID NO: 2098495 - RNA, 19 nt, Artificial Sequence
  Description of Artificial Sequence: Synthetic oligonucleotide
uuucacaaugacagaguau

SEQ ID NO: 2098496 - RNA, 19 nt, Artificial Sequence
  Description of Artificial Sequence: Synthetic oligonucleotide
cugggcuucgaugucaggg

SEQ ID NO: 2098497 - RNA, 19 nt, Artificial Sequence
  Description of Artificial Sequence: Synthetic oligonucleotide
gcaagauuaacuugauuac

SEQ ID NO: 2098498 - RNA, 19 nt, Artificial Sequence
  Description of Artificial Sequence: Synthetic oligonucleotide
cuucucaacugcgugagac

SEQ ID NO: 2098499 - RNA, 19 nt, Artificial Sequence
  Description of Artificial Sequence: Synthetic oligonucleotide
ccuacaaugaacaguuuug

SEQ ID NO: 2098500 - RNA, 19 nt, Artificial Sequence
  Description of Artificial Sequence: Synthetic oligonucleotide
uuugggucauuaugaguca

SEQ ID NO: 2098501 - RNA, 19 nt, Artificial Sequence
  Description of Artificial Sequence: Synthetic oligonucleotide
gagcuugaguuguaguuac

SEQ ID NO: 2098502 - RNA, 19 nt, Artificial Sequence
  Description of Artificial Sequence: Synthetic oligonucleotide
uuacgauccccuucuuuug

SEQ ID NO: 2098503 - RNA, 19 nt, Artificial Sequence
  Description of Artificial Sequence: Synthetic oligonucleotide
ugcccacugguacagcugc

SEQ ID NO: 2098504 - RNA, 19 nt, Artificial Sequence
  Description of Artificial Sequence: Synthetic oligonucleotide
acagaguaucucagcagcc

SEQ ID NO: 2098505 - RNA, 19 nt, Artificial Sequence
  Description of Artificial Sequence: Synthetic oligonucleotide
acgauccccuucuuuuggc

SEQ ID NO: 2098506 - RNA, 19 nt, Artificial Sequence
  Description of Artificial Sequence: Synthetic oligonucleotide
uuaucuucuguuugagaua

SEQ ID NO: 2098507 - RNA, 19 nt, Artificial Sequence
  Description of Artificial Sequence: Synthetic oligonucleotide
uagcuguaugucaaacugu

SEQ ID NO: 2098508 - RNA, 19 nt, Artificial Sequence
  Description of Artificial Sequence: Synthetic oligonucleotide
ggguuuaucuucucaacug

SEQ ID NO: 2098509 - RNA, 19 nt, Artificial Sequence
  Description of Artificial Sequence: Synthetic oligonucleotide
gacggagcacgccauauca

SEQ ID NO: 2098510 - RNA, 19 nt, Artificial Sequence
  Description of Artificial Sequence: Synthetic oligonucleotide
aggugaagcaaugaugaca

SEQ ID NO: 2098511 - RNA, 19 nt, Artificial Sequence
  Description of Artificial Sequence: Synthetic oligonucleotide
cuguaugucaaacuguuua

SEQ ID NO: 2098512 - RNA, 19 nt, Artificial Sequence
  Description of Artificial Sequence: Synthetic oligonucleotide
cuaguuccucccaguaagg

SEQ ID NO: 2098513 - RNA, 19 nt, Artificial Sequence
  Description of Artificial Sequence: Synthetic oligonucleotide
ucacaaugacagaguaucu

SEQ ID NO: 2098514 - RNA, 19 nt, Artificial Sequence
  Description of Artificial Sequence: Synthetic oligonucleotide
acuugccucugaaagcagc

SEQ ID NO: 2098515 - RNA, 19 nt, Artificial Sequence
  Description of Artificial Sequence: Synthetic oligonucleotide
aaacacgggucaguaagca

SEQ ID NO: 2098516 - RNA, 19 nt, Artificial Sequence
  Description of Artificial Sequence: Synthetic oligonucleotide
gaaagcagcucuuuugggu

SEQ ID NO: 2098517 - RNA, 19 nt, Artificial Sequence
  Description of Artificial Sequence: Synthetic oligonucleotide
uaucaacugcacuucuagu

SEQ ID NO: 2098518 - RNA, 19 nt, Artificial Sequence
  Description of Artificial Sequence: Synthetic oligonucleotide
ugacuugaugauuccucug

SEQ ID NO: 2098519 - RNA, 19 nt, Artificial Sequence
  Description of Artificial Sequence: Synthetic oligonucleotide
ugggaggugaagcaaugau

SEQ ID NO: 2098520 - RNA, 19 nt, Artificial Sequence
  Description of Artificial Sequence: Synthetic oligonucleotide
guaugucaaacuguuuagc

SEQ ID NO: 2098521 - RNA, 19 nt, Artificial Sequence
  Description of Artificial Sequence: Synthetic oligonucleotide
acugcgugagacacagugc

SEQ ID NO: 2098522 - RNA, 19 nt, Artificial Sequence
  Description of Artificial Sequence: Synthetic oligonucleotide
acuugaugauuccucugcu

SEQ ID NO: 2098523 - RNA, 19 nt, Artificial Sequence
  Description of Artificial Sequence: Synthetic oligonucleotide
ccaguaaggcugcagaugc

SEQ ID NO: 2098524 - RNA, 19 nt, Artificial Sequence
  Description of Artificial Sequence: Synthetic oligonucleotide
cugcacuucuaguugauga

SEQ ID NO: 2098525 - RNA, 19 nt, Artificial Sequence
  Description of Artificial Sequence: Synthetic oligonucleotide
uucucaacugcgugagaca

SEQ ID NO: 2098526 - RNA, 19 nt, Artificial Sequence
  Description of Artificial Sequence: Synthetic oligonucleotide
ucgggguuuaucuucucaa

SEQ ID NO: 2098527 - RNA, 19 nt, Artificial Sequence
  Description of Artificial Sequence: Synthetic oligonucleotide
acuguuuagcaaaugcagu

SEQ ID NO: 2098528 - RNA, 19 nt, Artificial Sequence
  Description of Artificial Sequence: Synthetic oligonucleotide
cuugauuacuauuugguuu

SEQ ID NO: 2098529 - RNA, 19 nt, Artificial Sequence
  Description of Artificial Sequence: Synthetic oligonucleotide
cauuaugagucaguagcug

SEQ ID NO: 2098530 - RNA, 19 nt, Artificial Sequence
  Description of Artificial Sequence: Synthetic oligonucleotide
cugggaacuccacucauuc

SEQ ID NO: 2098531 - RNA, 19 nt, Artificial Sequence
  Description of Artificial Sequence: Synthetic oligonucleotide
cauuccaagacaucuggaa

SEQ ID NO: 2098532 - RNA, 19 nt, Artificial Sequence
  Description of Artificial Sequence: Synthetic oligonucleotide
cuuucaucgggguuuaucu

SEQ ID NO: 2098533 - RNA, 19 nt, Artificial Sequence
  Description of Artificial Sequence: Synthetic oligonucleotide
gaauucgacccuacaauga

SEQ ID NO: 2098534 - RNA, 19 nt, Artificial Sequence
  Description of Artificial Sequence: Synthetic oligonucleotide
uccaagacaucuggaaacu

SEQ ID NO: 2098535 - RNA, 19 nt, Artificial Sequence
  Description of Artificial Sequence: Synthetic oligonucleotide
cagaggugccuauagcaac

SEQ ID NO: 2098536 - RNA, 19 nt, Artificial Sequence
  Description of Artificial Sequence: Synthetic oligonucleotide
aaaucggggcugaucuggg

SEQ ID NO: 2098537 - RNA, 19 nt, Artificial Sequence
  Description of Artificial Sequence: Synthetic oligonucleotide
uaccugugcccacugguac

SEQ ID NO: 2098538 - RNA, 19 nt, Artificial Sequence
  Description of Artificial Sequence: Synthetic oligonucleotide
guuugagauaaacacgggu

SEQ ID NO: 2098539 - RNA, 19 nt, Artificial Sequence
  Description of Artificial Sequence: Synthetic oligonucleotide
aaaugcagucaaaucuggu

SEQ ID NO: 2098540 - RNA, 19 nt, Artificial Sequence
  Description of Artificial Sequence: Synthetic oligonucleotide
guaguuacgauccccuucu

SEQ ID NO: 2098541 - RNA, 19 nt, Artificial Sequence
  Description of Artificial Sequence: Synthetic oligonucleotide
cacaaugacagaguaucuc

SEQ ID NO: 2098542 - RNA, 19 nt, Artificial Sequence
  Description of Artificial Sequence: Synthetic oligonucleotide
ucuuucaucgggguuuauc

SEQ ID NO: 2098543 - RNA, 19 nt, Artificial Sequence
  Description of Artificial Sequence: Synthetic oligonucleotide
agcaggaggcaagauuaac

SEQ ID NO: 2098544 - RNA, 19 nt, Artificial Sequence
  Description of Artificial Sequence: Synthetic oligonucleotide
ugggucauuaugagucagu

SEQ ID NO: 2098545 - RNA, 19 nt, Artificial Sequence
  Description of Artificial Sequence: Synthetic oligonucleotide
acauuucaauuugaucuug

SEQ ID NO: 2098546 - RNA, 19 nt, Artificial Sequence
  Description of Artificial Sequence: Synthetic oligonucleotide
auucgacccuacaaugaac

SEQ ID NO: 2098547 - RNA, 19 nt, Artificial Sequence
  Description of Artificial Sequence: Synthetic oligonucleotide
acacgggucaguaagcacu

SEQ ID NO: 2098548 - RNA, 19 nt, Artificial Sequence
  Description of Artificial Sequence: Synthetic oligonucleotide
cucugcuuuucacaaugac

SEQ ID NO: 2098549 - RNA, 19 nt, Artificial Sequence
  Description of Artificial Sequence: Synthetic oligonucleotide
gauaaacacgggucaguaa

SEQ ID NO: 2098550 - RNA, 19 nt, Artificial Sequence
  Description of Artificial Sequence: Synthetic oligonucleotide
guuuagcaaaugcagucaa

SEQ ID NO: 2098551 - RNA, 19 nt, Artificial Sequence
  Description of Artificial Sequence: Synthetic oligonucleotide
ggucauuaugagucaguag

SEQ ID NO: 2098552 - RNA, 19 nt, Artificial Sequence
  Description of Artificial Sequence: Synthetic oligonucleotide
augaagaauucgacccuac

SEQ ID NO: 2098553 - RNA, 19 nt, Artificial Sequence
  Description of Artificial Sequence: Synthetic oligonucleotide
uccagcuguguuuugucua

SEQ ID NO: 2098554 - RNA, 19 nt, Artificial Sequence
  Description of Artificial Sequence: Synthetic oligonucleotide
augagucaguagcuguaug

SEQ ID NO: 2098555 - RNA, 19 nt, Artificial Sequence
  Description of Artificial Sequence: Synthetic oligonucleotide
cacgccauaucaacugcac

SEQ ID NO: 2098556 - RNA, 19 nt, Artificial Sequence
  Description of Artificial Sequence: Synthetic oligonucleotide
agcuguguuuugucuaggu

SEQ ID NO: 2098557 - RNA, 19 nt, Artificial Sequence
  Description of Artificial Sequence: Synthetic oligonucleotide
aucgggguuuaucuucuca

SEQ ID NO: 2098558 - RNA, 19 nt, Artificial Sequence
  Description of Artificial Sequence: Synthetic oligonucleotide
cugcgugagacacagugca

SEQ ID NO: 2098559 - RNA, 19 nt, Artificial Sequence
  Description of Artificial Sequence: Synthetic oligonucleotide
aguugagcagguuccccgu

SEQ ID NO: 2098560 - RNA, 19 nt, Artificial Sequence
  Description of Artificial Sequence: Synthetic oligonucleotide
ugaugauuccucugcuuuu

SEQ ID NO: 2098561 - RNA, 19 nt, Artificial Sequence
  Description of Artificial Sequence: Synthetic oligonucleotide
uaugagucaguagcuguau

SEQ ID NO: 2098562 - RNA, 19 nt, Artificial Sequence
  Description of Artificial Sequence: Synthetic oligonucleotide
ugucgguacccauggcagc

SEQ ID NO: 2098563 - RNA, 19 nt, Artificial Sequence
  Description of Artificial Sequence: Synthetic oligonucleotide
gccuauagcaacaauuuuc

SEQ ID NO: 2098564 - RNA, 19 nt, Artificial Sequence
  Description of Artificial Sequence: Synthetic oligonucleotide
agcgcgaggcugccgacuc

SEQ ID NO: 2098565 - RNA, 19 nt, Artificial Sequence
  Description of Artificial Sequence: Synthetic oligonucleotide
ugugcgcucgggcccgagg

SEQ ID NO: 2098566 - RNA, 19 nt, Artificial Sequence
  Description of Artificial Sequence: Synthetic oligonucleotide
caguugugcgacucccagg

SEQ ID NO: 2098567 - RNA, 19 nt, Artificial Sequence
  Description of Artificial Sequence: Synthetic oligonucleotide
agauaaacacgggucagua

SEQ ID NO: 2098568 - RNA, 19 nt, Artificial Sequence
  Description of Artificial Sequence: Synthetic oligonucleotide
ugggaacuccacucauuca

SEQ ID NO: 2098569 - RNA, 19 nt, Artificial Sequence
  Description of Artificial Sequence: Synthetic oligonucleotide
gaguuguaguuacgauccc

SEQ ID NO: 2098570 - RNA, 19 nt, Artificial Sequence
  Description of Artificial Sequence: Synthetic oligonucleotide
aacuuucauuuccucucuu

SEQ ID NO: 2098571 - RNA, 19 nt, Artificial Sequence
  Description of Artificial Sequence: Synthetic oligonucleotide
auucugaacuagguuuucu

SEQ ID NO: 2098572 - RNA, 19 nt, Artificial Sequence
  Description of Artificial Sequence: Synthetic oligonucleotide
uuucaucgggguuuaucuu

SEQ ID NO: 2098573 - RNA, 19 nt, Artificial Sequence
  Description of Artificial Sequence: Synthetic oligonucleotide
uccucucuuucaucggggu

SEQ ID NO: 2098574 - RNA, 19 nt, Artificial Sequence
  Description of Artificial Sequence: Synthetic oligonucleotide
aaggucuucuggauacagu

SEQ ID NO: 2098575 - RNA, 19 nt, Artificial Sequence
  Description of Artificial Sequence: Synthetic oligonucleotide
ucuuggaaacuugccucug

SEQ ID NO: 2098576 - RNA, 19 nt, Artificial Sequence
  Description of Artificial Sequence: Synthetic oligonucleotide
gcuucgaugucagggaugc

SEQ ID NO: 2098577 - RNA, 19 nt, Artificial Sequence
  Description of Artificial Sequence: Synthetic oligonucleotide
cugguggcaucacacagca

SEQ ID NO: 2098578 - RNA, 19 nt, Artificial Sequence
  Description of Artificial Sequence: Synthetic oligonucleotide
ggucaguaagcacugagcu

SEQ ID NO: 2098579 - RNA, 19 nt, Artificial Sequence
  Description of Artificial Sequence: Synthetic oligonucleotide
acaguuuugcagaaacuuu

SEQ ID NO: 2098580 - RNA, 19 nt, Artificial Sequence
  Description of Artificial Sequence: Synthetic oligonucleotide
gaugaagaauucgacccua

SEQ ID NO: 2098581 - RNA, 19 nt, Artificial Sequence
  Description of Artificial Sequence: Synthetic oligonucleotide
gacccuacaaugaacaguu

SEQ ID NO: 2098582 - RNA, 19 nt, Artificial Sequence
  Description of Artificial Sequence: Synthetic oligonucleotide
cacgggucaguaagcacug

SEQ ID NO: 2098583 - RNA, 19 nt, Artificial Sequence
  Description of Artificial Sequence: Synthetic oligonucleotide
agucucgaagcuccucgcu

SEQ ID NO: 2098584 - RNA, 19 nt, Artificial Sequence
  Description of Artificial Sequence: Synthetic oligonucleotide
agcucuuuugggucauuau

SEQ ID NO: 2098585 - RNA, 19 nt, Artificial Sequence
  Description of Artificial Sequence: Synthetic oligonucleotide
agcuguaugucaaacuguu

SEQ ID NO: 2098586 - RNA, 19 nt, Artificial Sequence
  Description of Artificial Sequence: Synthetic oligonucleotide
ucuaggucagaggugccua

SEQ ID NO: 2098587 - RNA, 19 nt, Artificial Sequence
  Description of Artificial Sequence: Synthetic oligonucleotide
ugcgacucccaggacggag

SEQ ID NO: 2098588 - RNA, 19 nt, Artificial Sequence
  Description of Artificial Sequence: Synthetic oligonucleotide
uggaaacucccugaccaaa

SEQ ID NO: 2098589 - RNA, 19 nt, Artificial Sequence
  Description of Artificial Sequence: Synthetic oligonucleotide
agaggugccuauagcaaca

SEQ ID NO: 2098590 - RNA, 19 nt, Artificial Sequence
  Description of Artificial Sequence: Synthetic oligonucleotide
acgccauaucaacugcacu

SEQ ID NO: 2098591 - RNA, 19 nt, Artificial Sequence
  Description of Artificial Sequence: Synthetic oligonucleotide
ucccaguaaggcugcagau

SEQ ID NO: 2098592 - RNA, 19 nt, Artificial Sequence
  Description of Artificial Sequence: Synthetic oligonucleotide
agcuccucgcugugcgugg

SEQ ID NO: 2098593 - RNA, 19 nt, Artificial Sequence
  Description of Artificial Sequence: Synthetic oligonucleotide
cugaacuagguuuucuagu

SEQ ID NO: 2098594 - RNA, 19 nt, Artificial Sequence
  Description of Artificial Sequence: Synthetic oligonucleotide
uuccccgucugcaggugca

SEQ ID NO: 2098595 - RNA, 19 nt, Artificial Sequence
  Description of Artificial Sequence: Synthetic oligonucleotide
cuccaaggaaagauuaacu

SEQ ID NO: 2098596 - RNA, 19 nt, Artificial Sequence
  Description of Artificial Sequence: Synthetic oligonucleotide
cagucucgaagcuccucgc

SEQ ID NO: 2098597 - RNA, 19 nt, Artificial Sequence
  Description of Artificial Sequence: Synthetic oligonucleotide
gaugcucuccugaagggcu

SEQ ID NO: 2098598 - RNA, 19 nt, Artificial Sequence
  Description of Artificial Sequence: Synthetic oligonucleotide
acagugcauuccaagacau

SEQ ID NO: 2098599 - RNA, 19 nt, Artificial Sequence
  Description of Artificial Sequence: Synthetic oligonucleotide
guaagcacugagcuugagu

SEQ ID NO: 2098600 - RNA, 19 nt, Artificial Sequence
  Description of Artificial Sequence: Synthetic oligonucleotide
guuguaguuacgauccccu

SEQ ID NO: 2098601 - RNA, 19 nt, Artificial Sequence
  Description of Artificial Sequence: Synthetic oligonucleotide
caaaucugguggcaucaca

SEQ ID NO: 2098602 - RNA, 19 nt, Artificial Sequence
  Description of Artificial Sequence: Synthetic oligonucleotide
cuuggaaacuugccucuga

SEQ ID NO: 2098603 - RNA, 19 nt, Artificial Sequence
  Description of Artificial Sequence: Synthetic oligonucleotide
ugguuuuaccugugcccac

SEQ ID NO: 2098604 - RNA, 19 nt, Artificial Sequence
  Description of Artificial Sequence: Synthetic oligonucleotide
gcagaugcuccaaggaaag

SEQ ID NO: 2098605 - RNA, 19 nt, Artificial Sequence
  Description of Artificial Sequence: Synthetic oligonucleotide
cauaucaacugcacuucua

SEQ ID NO: 2098606 - RNA, 19 nt, Artificial Sequence
  Description of Artificial Sequence: Synthetic oligonucleotide
accugugcccacugguaca

SEQ ID NO: 2098607 - RNA, 19 nt, Artificial Sequence
  Description of Artificial Sequence: Synthetic oligonucleotide
uuguaguuacgauccccuu

SEQ ID NO: 2098608 - RNA, 19 nt, Artificial Sequence
  Description of Artificial Sequence: Synthetic oligonucleotide
gaguaucucagcagccaca

SEQ ID NO: 2098609 - RNA, 19 nt, Artificial Sequence
  Description of Artificial Sequence: Synthetic oligonucleotide
ggaggggcgagcgggagcg

SEQ ID NO: 2098610 - RNA, 19 nt, Artificial Sequence
  Description of Artificial Sequence: Synthetic oligonucleotide
gcuccaaggaaagauuaac

SEQ ID NO: 2098611 - RNA, 19 nt, Artificial Sequence
  Description of Artificial Sequence: Synthetic oligonucleotide
caagauuaacuugauuacu

SEQ ID NO: 2098612 - RNA, 19 nt, Artificial Sequence
  Description of Artificial Sequence: Synthetic oligonucleotide
ugcguggacgggcacuuuu

SEQ ID NO: 2098613 - RNA, 19 nt, Artificial Sequence
  Description of Artificial Sequence: Synthetic oligonucleotide
gacggggccgcggaggggc

SEQ ID NO: 2098614 - RNA, 19 nt, Artificial Sequence
  Description of Artificial Sequence: Synthetic oligonucleotide
ugcgugagacacagugcau

SEQ ID NO: 2098615 - RNA, 19 nt, Artificial Sequence
  Description of Artificial Sequence: Synthetic oligonucleotide
cacugagcuugaguuguag

SEQ ID NO: 2098616 - RNA, 19 nt, Artificial Sequence
  Description of Artificial Sequence: Synthetic oligonucleotide
agcuugaguuguaguuacg

SEQ ID NO: 2098617 - RNA, 19 nt, Artificial Sequence
  Description of Artificial Sequence: Synthetic oligonucleotide
gcuguguuuugucuagguc

SEQ ID NO: 2098618 - RNA, 19 nt, Artificial Sequence
  Description of Artificial Sequence: Synthetic oligonucleotide
augacagaguccaguugug

SEQ ID NO: 2098619 - RNA, 19 nt, Artificial Sequence
  Description of Artificial Sequence: Synthetic oligonucleotide
aguaagcacugagcuugag

SEQ ID NO: 2098620 - RNA, 19 nt, Artificial Sequence
  Description of Artificial Sequence: Synthetic oligonucleotide
gaccaaaucggggcugauc

SEQ ID NO: 2098621 - RNA, 19 nt, Artificial Sequence
  Description of Artificial Sequence: Synthetic oligonucleotide
ucgaagcuccucgcugugc

SEQ ID NO: 2098622 - RNA, 19 nt, Artificial Sequence
  Description of Artificial Sequence: Synthetic oligonucleotide
gagauaaacacgggucagu

SEQ ID NO: 2098623 - RNA, 19 nt, Artificial Sequence
  Description of Artificial Sequence: Synthetic oligonucleotide
augcuccaaggaaagauua

SEQ ID NO: 2098624 - RNA, 19 nt, Artificial Sequence
  Description of Artificial Sequence: Synthetic oligonucleotide
cuugccucugaaagcagcu

SEQ ID NO: 2098625 - RNA, 19 nt, Artificial Sequence
  Description of Artificial Sequence: Synthetic oligonucleotide
uuuuccgcaggcggcccca

SEQ ID NO: 2098626 - RNA, 19 nt, Artificial Sequence
  Description of Artificial Sequence: Synthetic oligonucleotide
guuccccgucugcaggugc

SEQ ID NO: 2098627 - RNA, 19 nt, Artificial Sequence
  Description of Artificial Sequence: Synthetic oligonucleotide
agcgacggggccgcggagg

SEQ ID NO: 2098628 - RNA, 19 nt, Artificial Sequence
  Description of Artificial Sequence: Synthetic oligonucleotide
aacugcacuucuaguugau

SEQ ID NO: 2098629 - RNA, 19 nt, Artificial Sequence
  Description of Artificial Sequence: Synthetic oligonucleotide
cuugaguuguaguuacgau

SEQ ID NO: 2098630 - RNA, 19 nt, Artificial Sequence
  Description of Artificial Sequence: Synthetic oligonucleotide
cagugcauuccaagacauc

SEQ ID NO: 2098631 - RNA, 19 nt, Artificial Sequence
  Description of Artificial Sequence: Synthetic oligonucleotide
ucgggcccgaggaggccgg

SEQ ID NO: 2098632 - RNA, 19 nt, Artificial Sequence
  Description of Artificial Sequence: Synthetic oligonucleotide
ugauuacuauuugguuuua

SEQ ID NO: 2098633 - RNA, 19 nt, Artificial Sequence
  Description of Artificial Sequence: Synthetic oligonucleotide
gacugucgguacccauggc

SEQ ID NO: 2098634 - RNA, 19 nt, Artificial Sequence
  Description of Artificial Sequence: Synthetic oligonucleotide
cacugguacagcugcucca

SEQ ID NO: 2098635 - RNA, 19 nt, Artificial Sequence
  Description of Artificial Sequence: Synthetic oligonucleotide
ucucuuucaucgggguuua

SEQ ID NO: 2098636 - RNA, 19 nt, Artificial Sequence
  Description of Artificial Sequence: Synthetic oligonucleotide
ugguggcaucacacagcag

SEQ ID NO: 2098637 - RNA, 19 nt, Artificial Sequence
  Description of Artificial Sequence: Synthetic oligonucleotide
gggguuuaucuucucaacu

SEQ ID NO: 2098638 - RNA, 19 nt, Artificial Sequence
  Description of Artificial Sequence: Synthetic oligonucleotide
ugugcguggacgggcacuu

SEQ ID NO: 2098639 - RNA, 19 nt, Artificial Sequence
  Description of Artificial Sequence: Synthetic oligonucleotide
ucgcugugcguggacgggc

SEQ ID NO: 2098640 - RNA, 19 nt, Artificial Sequence
  Description of Artificial Sequence: Synthetic oligonucleotide
augaacaguuuugcagaaa

SEQ ID NO: 2098641 - RNA, 19 nt, Artificial Sequence
  Description of Artificial Sequence: Synthetic oligonucleotide
cgaagcuccucgcugugcg

SEQ ID NO: 2098642 - RNA, 19 nt, Artificial Sequence
  Description of Artificial Sequence: Synthetic oligonucleotide
cucgggcccgaggaggccg

SEQ ID NO: 2098643 - RNA, 19 nt, Artificial Sequence
  Description of Artificial Sequence: Synthetic oligonucleotide
cucccaggacggagcacgc

SEQ ID NO: 2098644 - RNA, 19 nt, Artificial Sequence
  Description of Artificial Sequence: Synthetic oligonucleotide
ggauacagucucgaagcuc

SEQ ID NO: 2098645 - RNA, 19 nt, Artificial Sequence
  Description of Artificial Sequence: Synthetic oligonucleotide
ggcccgaggaggccgggcg

SEQ ID NO: 2098646 - RNA, 19 nt, Artificial Sequence
  Description of Artificial Sequence: Synthetic oligonucleotide
ggugccuauagcaacaauu

SEQ ID NO: 2098647 - RNA, 19 nt, Artificial Sequence
  Description of Artificial Sequence: Synthetic oligonucleotide
caaugggaggugaagcaau

SEQ ID NO: 2098648 - RNA, 19 nt, Artificial Sequence
  Description of Artificial Sequence: Synthetic oligonucleotide
cugagggguccggggagcg

SEQ ID NO: 2098649 - RNA, 19 nt, Artificial Sequence
  Description of Artificial Sequence: Synthetic oligonucleotide
gugcgcucgggcccgagga

SEQ ID NO: 2098650 - RNA, 19 nt, Artificial Sequence
  Description of Artificial Sequence: Synthetic oligonucleotide
ucgguacccauggcagcug

SEQ ID NO: 2098651 - RNA, 19 nt, Artificial Sequence
  Description of Artificial Sequence: Synthetic oligonucleotide
caggcggccccaguugagc

SEQ ID NO: 2098652 - RNA, 19 nt, Artificial Sequence
  Description of Artificial Sequence: Synthetic oligonucleotide
cacccauuccugggcuucg

SEQ ID NO: 2098653 - RNA, 19 nt, Artificial Sequence
  Description of Artificial Sequence: Synthetic oligonucleotide
gagacacagugcauuccaa

SEQ ID NO: 2098654 - RNA, 19 nt, Artificial Sequence
  Description of Artificial Sequence: Synthetic oligonucleotide
aggugccuauagcaacaau

SEQ ID NO: 2098655 - RNA, 19 nt, Artificial Sequence
  Description of Artificial Sequence: Synthetic oligonucleotide
aggacggagcacgccauau

SEQ ID NO: 2098656 - RNA, 19 nt, Artificial Sequence
  Description of Artificial Sequence: Synthetic oligonucleotide
acagcccggugugcgcucg

SEQ ID NO: 2098657 - RNA, 19 nt, Artificial Sequence
  Description of Artificial Sequence: Synthetic oligonucleotide
ccucgcugugcguggacgg

SEQ ID NO: 2098658 - RNA, 19 nt, Artificial Sequence
  Description of Artificial Sequence: Synthetic oligonucleotide
guugugcgacucccaggac

SEQ ID NO: 2098659 - RNA, 19 nt, Artificial Sequence
  Description of Artificial Sequence: Synthetic oligonucleotide
cugaucugggaacuccacu

SEQ ID NO: 2098660 - RNA, 19 nt, Artificial Sequence
  Description of Artificial Sequence: Synthetic oligonucleotide
cuugaugauuccucugcuu

SEQ ID NO: 2098661 - RNA, 19 nt, Artificial Sequence
  Description of Artificial Sequence: Synthetic oligonucleotide
aucuucaaugggaggugaa

SEQ ID NO: 2098662 - RNA, 19 nt, Artificial Sequence
  Description of Artificial Sequence: Synthetic oligonucleotide
ugcgggcccgcgccaggag

SEQ ID NO: 2098663 - RNA, 19 nt, Artificial Sequence
  Description of Artificial Sequence: Synthetic oligonucleotide
cucucuuucaucgggguuu

SEQ ID NO: 2098664 - RNA, 19 nt, Artificial Sequence
  Description of Artificial Sequence: Synthetic oligonucleotide
cccggugugcgcucgggcc

SEQ ID NO: 2098665 - RNA, 19 nt, Artificial Sequence
  Description of Artificial Sequence: Synthetic oligonucleotide
gcgacugucgguacccaug

SEQ ID NO: 2098666 - RNA, 19 nt, Artificial Sequence
  Description of Artificial Sequence: Synthetic oligonucleotide
ucccaggacggagcacgcc

SEQ ID NO: 2098667 - RNA, 19 nt, Artificial Sequence
  Description of Artificial Sequence: Synthetic oligonucleotide
gacuccgcgcggccacagc

SEQ ID NO: 2098668 - RNA, 19 nt, Artificial Sequence
  Description of Artificial Sequence: Synthetic oligonucleotide
cggagcacgccauaucaac

SEQ ID NO: 2098669 - RNA, 19 nt, Artificial Sequence
  Description of Artificial Sequence: Synthetic oligonucleotide
gggucauuaugagucagua

SEQ ID NO: 2098670 - RNA, 19 nt, Artificial Sequence
  Description of Artificial Sequence: Synthetic oligonucleotide
aggagcgccccggccgcgc

SEQ ID NO: 2098671 - RNA, 19 nt, Artificial Sequence
  Description of Artificial Sequence: Synthetic oligonucleotide
cugaccaaaucggggcuga

SEQ ID NO: 2098672 - RNA, 19 nt, Artificial Sequence
  Description of Artificial Sequence: Synthetic oligonucleotide
gcaggaggcaagauuaacu

SEQ ID NO: 2098673 - RNA, 19 nt, Artificial Sequence
  Description of Artificial Sequence: Synthetic oligonucleotide
caucgggguuuaucuucuc

SEQ ID NO: 2098674 - RNA, 19 nt, Artificial Sequence
  Description of Artificial Sequence: Synthetic oligonucleotide
gaggugccuauagcaacaa

SEQ ID NO: 2098675 - RNA, 19 nt, Artificial Sequence
  Description of Artificial Sequence: Synthetic oligonucleotide
caggugcagggugcgggcc

SEQ ID NO: 2098676 - RNA, 19 nt, Artificial Sequence
  Description of Artificial Sequence: Synthetic oligonucleotide
gggagcgcgaggcugccga

SEQ ID NO: 2098677 - RNA, 19 nt, Artificial Sequence
  Description of Artificial Sequence: Synthetic oligonucleotide
caauuugaucuugaauuuu

SEQ ID NO: 2098678 - RNA, 19 nt, Artificial Sequence
  Description of Artificial Sequence: Synthetic oligonucleotide
gcagaaacuuucauuuccu

SEQ ID NO: 2098679 - RNA, 19 nt, Artificial Sequence
  Description of Artificial Sequence: Synthetic oligonucleotide
uuuccgcaggcggccccag

SEQ ID NO: 2098680 - RNA, 19 nt, Artificial Sequence
  Description of Artificial Sequence: Synthetic oligonucleotide
ggcuucgaugucagggaug

SEQ ID NO: 2098681 - RNA, 19 nt, Artificial Sequence
  Description of Artificial Sequence: Synthetic oligonucleotide
gucgguacccauggcagcu

SEQ ID NO: 2098682 - RNA, 19 nt, Artificial Sequence
  Description of Artificial Sequence: Synthetic oligonucleotide
gcgacggggccgcggaggg

SEQ ID NO: 2098683 - RNA, 19 nt, Artificial Sequence
  Description of Artificial Sequence: Synthetic oligonucleotide
ggugcagggugcgggcccg

SEQ ID NO: 2098684 - RNA, 19 nt, Artificial Sequence
  Description of Artificial Sequence: Synthetic oligonucleotide
agcugccgcccugaggggu

SEQ ID NO: 2098685 - RNA, 19 nt, Artificial Sequence
  Description of Artificial Sequence: Synthetic oligonucleotide
agcgccccggccgcgcgac

SEQ ID NO: 2098686 - RNA, 19 nt, Artificial Sequence
  Description of Artificial Sequence: Synthetic oligonucleotide
cgggguuuaucuucucaac

SEQ ID NO: 2098687 - RNA, 19 nt, Artificial Sequence
  Description of Artificial Sequence: Synthetic oligonucleotide
ggcggccccaguugagcag

SEQ ID NO: 2098688 - RNA, 19 nt, Artificial Sequence
  Description of Artificial Sequence: Synthetic oligonucleotide
ggacggagcacgccauauc

SEQ ID NO: 2098689 - RNA, 19 nt, Artificial Sequence
  Description of Artificial Sequence: Synthetic oligonucleotide
gcggccccaguugagcagg

SEQ ID NO: 2098690 - RNA, 19 nt, Artificial Sequence
  Description of Artificial Sequence: Synthetic oligonucleotide
gaagcuccucgcugugcgu

SEQ ID NO: 2098691 - RNA, 19 nt, Artificial Sequence
  Description of Artificial Sequence: Synthetic oligonucleotide
ggcggagaggcggucccgg

SEQ ID NO: 2098692 - RNA, 19 nt, Artificial Sequence
  Description of Artificial Sequence: Synthetic oligonucleotide
gagcgacggggccgcggag

SEQ ID NO: 2098693 - RNA, 19 nt, Artificial Sequence
  Description of Artificial Sequence: Synthetic oligonucleotide
cugccgacuccgcgcggcc

SEQ ID NO: 2098694 - RNA, 19 nt, Artificial Sequence
  Description of Artificial Sequence: Synthetic oligonucleotide
uuccgcaggcggccccagu

SEQ ID NO: 2098695 - RNA, 19 nt, Artificial Sequence
  Description of Artificial Sequence: Synthetic oligonucleotide
ggagcgacggggccgcgga

SEQ ID NO: 2098696 - RNA, 19 nt, Artificial Sequence
  Description of Artificial Sequence: Synthetic oligonucleotide
acggagcacgccauaucaa

SEQ ID NO: 2098697 - RNA, 19 nt, Artificial Sequence
  Description of Artificial Sequence: Synthetic oligonucleotide
ugaccaaaucggggcugau

SEQ ID NO: 2098698 - RNA, 19 nt, Artificial Sequence
  Description of Artificial Sequence: Synthetic oligonucleotide
cagaugcuccaaggaaaga

SEQ ID NO: 2098699 - RNA, 19 nt, Artificial Sequence
  Description of Artificial Sequence: Synthetic oligonucleotide
gacucccaggacggagcac

SEQ ID NO: 2098700 - RNA, 19 nt, Artificial Sequence
  Description of Artificial Sequence: Synthetic oligonucleotide
gguacccauggcagcugcc

SEQ ID NO: 2098701 - RNA, 19 nt, Artificial Sequence
  Description of Artificial Sequence: Synthetic oligonucleotide
cuccucgcugugcguggac

SEQ ID NO: 2098702 - RNA, 19 nt, Artificial Sequence
  Description of Artificial Sequence: Synthetic oligonucleotide
ccggugugcgcucgggccc

SEQ ID NO: 2098703 - RNA, 19 nt, Artificial Sequence
  Description of Artificial Sequence: Synthetic oligonucleotide
gguuuuaccugugcccacu

SEQ ID NO: 2098704 - RNA, 19 nt, Artificial Sequence
  Description of Artificial Sequence: Synthetic oligonucleotide
ugccgacuccgcgcggcca

SEQ ID NO: 2098705 - RNA, 19 nt, Artificial Sequence
  Description of Artificial Sequence: Synthetic oligonucleotide
aggaggccgggcggcggcg

SEQ ID NO: 2098706 - RNA, 19 nt, Artificial Sequence
  Description of Artificial Sequence: Synthetic oligonucleotide
ccugaccaaaucggggcug

SEQ ID NO: 2098707 - RNA, 19 nt, Artificial Sequence
  Description of Artificial Sequence: Synthetic oligonucleotide
ggagcacgccauaucaacu

SEQ ID NO: 2098708 - RNA, 19 nt, Artificial Sequence
  Description of Artificial Sequence: Synthetic oligonucleotide
cacagcccggugugcgcuc

SEQ ID NO: 2098709 - RNA, 19 nt, Artificial Sequence
  Description of Artificial Sequence: Synthetic oligonucleotide
guguuuugucuaggucaga

SEQ ID NO: 2098710 - RNA, 19 nt, Artificial Sequence
  Description of Artificial Sequence: Synthetic oligonucleotide
cccaguugagcagguuccc

SEQ ID NO: 2098711 - RNA, 19 nt, Artificial Sequence
  Description of Artificial Sequence: Synthetic oligonucleotide
gccacagcccggugugcgc

SEQ ID NO: 2098712 - RNA, 19 nt, Artificial Sequence
  Description of Artificial Sequence: Synthetic oligonucleotide
cuaggucagaggugccuau

SEQ ID NO: 2098713 - RNA, 19 nt, Artificial Sequence
  Description of Artificial Sequence: Synthetic oligonucleotide
gcgcucgggcccgaggagg

SEQ ID NO: 2098714 - RNA, 19 nt, Artificial Sequence
  Description of Artificial Sequence: Synthetic oligonucleotide
cugugcccacugguacagc

SEQ ID NO: 2098715 - RNA, 19 nt, Artificial Sequence
  Description of Artificial Sequence: Synthetic oligonucleotide
gcugccgacuccgcgcggc

SEQ ID NO: 2098716 - RNA, 19 nt, Artificial Sequence
  Description of Artificial Sequence: Synthetic oligonucleotide
gcacgccauaucaacugca

SEQ ID NO: 2098717 - RNA, 19 nt, Artificial Sequence
  Description of Artificial Sequence: Synthetic oligonucleotide
gcggcggagaggcgguccc

SEQ ID NO: 2098718 - RNA, 19 nt, Artificial Sequence
  Description of Artificial Sequence: Synthetic oligonucleotide
acgggucaguaagcacuga

SEQ ID NO: 2098719 - RNA, 19 nt, Artificial Sequence
  Description of Artificial Sequence: Synthetic oligonucleotide
ggguccggggagcgacggg

SEQ ID NO: 2098720 - RNA, 19 nt, Artificial Sequence
  Description of Artificial Sequence: Synthetic oligonucleotide
cagucaaaucugguggcau

SEQ ID NO: 2098721 - RNA, 19 nt, Artificial Sequence
  Description of Artificial Sequence: Synthetic oligonucleotide
ugccgcccugagggguccg

SEQ ID NO: 2098722 - RNA, 19 nt, Artificial Sequence
  Description of Artificial Sequence: Synthetic oligonucleotide
ccugagggguccggggagc

SEQ ID NO: 2098723 - RNA, 19 nt, Artificial Sequence
  Description of Artificial Sequence: Synthetic oligonucleotide
gcccugagggguccgggga

SEQ ID NO: 2098724 - RNA, 19 nt, Artificial Sequence
  Description of Artificial Sequence: Synthetic oligonucleotide
ggccgcggaggggcgagcg

SEQ ID NO: 2098725 - RNA, 19 nt, Artificial Sequence
  Description of Artificial Sequence: Synthetic oligonucleotide
gcagggugcgggcccgcgc

SEQ ID NO: 2098726 - RNA, 19 nt, Artificial Sequence
  Description of Artificial Sequence: Synthetic oligonucleotide
gccgacuccgcgcggccac

SEQ ID NO: 2098727 - RNA, 19 nt, Artificial Sequence
  Description of Artificial Sequence: Synthetic oligonucleotide
cgcgaggcugccgacuccg

SEQ ID NO: 2098728 - RNA, 19 nt, Artificial Sequence
  Description of Artificial Sequence: Synthetic oligonucleotide
cgccauaucaacugcacuu

SEQ ID NO: 2098729 - RNA, 19 nt, Artificial Sequence
  Description of Artificial Sequence: Synthetic oligonucleotide
gccgcggaggggcgagcgg

SEQ ID NO: 2098730 - RNA, 19 nt, Artificial Sequence
  Description of Artificial Sequence: Synthetic oligonucleotide
ggcgagcgggagcgcgagg

SEQ ID NO: 2098731 - RNA, 19 nt, Artificial Sequence
  Description of Artificial Sequence: Synthetic oligonucleotide
ggagcgcgaggcugccgac

SEQ ID NO: 2098732 - RNA, 19 nt, Artificial Sequence
  Description of Artificial Sequence: Synthetic oligonucleotide
cgguacccauggcagcugc

SEQ ID NO: 2098733 - RNA, 19 nt, Artificial Sequence
  Description of Artificial Sequence: Synthetic oligonucleotide
gcugugcguggacgggcac

SEQ ID NO: 2098734 - RNA, 19 nt, Artificial Sequence
  Description of Artificial Sequence: Synthetic oligonucleotide
cgcgcgacugucgguaccc

SEQ ID NO: 2098735 - RNA, 19 nt, Artificial Sequence
  Description of Artificial Sequence: Synthetic oligonucleotide
acccuacaaugaacaguuu

SEQ ID NO: 2098736 - RNA, 19 nt, Artificial Sequence
  Description of Artificial Sequence: Synthetic oligonucleotide
cgcucgggcccgaggaggc

SEQ ID NO: 2098737 - RNA, 19 nt, Artificial Sequence
  Description of Artificial Sequence: Synthetic oligonucleotide
caggagcgccccggccgcg

SEQ ID NO: 2098738 - RNA, 19 nt, Artificial Sequence
  Description of Artificial Sequence: Synthetic oligonucleotide
gaggggcgagcgggagcgc

SEQ ID NO: 2098739 - RNA, 19 nt, Artificial Sequence
  Description of Artificial Sequence: Synthetic oligonucleotide
caggacggagcacgccaua

SEQ ID NO: 2098740 - RNA, 19 nt, Artificial Sequence
  Description of Artificial Sequence: Synthetic oligonucleotide
gagcgcgaggcugccgacu

SEQ ID NO: 2098741 - RNA, 19 nt, Artificial Sequence
  Description of Artificial Sequence: Synthetic oligonucleotide
cugugcguggacgggcacu

SEQ ID NO: 2098742 - RNA, 19 nt, Artificial Sequence
  Description of Artificial Sequence: Synthetic oligonucleotide
gcgugagacacagugcauu

SEQ ID NO: 2098743 - RNA, 19 nt, Artificial Sequence
  Description of Artificial Sequence: Synthetic oligonucleotide
gccuuuugacuugaugauu

SEQ ID NO: 2098744 - RNA, 19 nt, Artificial Sequence
  Description of Artificial Sequence: Synthetic oligonucleotide
gagcgccccggccgcgcga

SEQ ID NO: 2098745 - RNA, 19 nt, Artificial Sequence
  Description of Artificial Sequence: Synthetic oligonucleotide
gugugcgcucgggcccgag

SEQ ID NO: 2098746 - RNA, 19 nt, Artificial Sequence
  Description of Artificial Sequence: Synthetic oligonucleotide
gcgcgaggcugccgacucc

SEQ ID NO: 2098747 - RNA, 19 nt, Artificial Sequence
  Description of Artificial Sequence: Synthetic oligonucleotide
gcggaggggcgagcgggag

SEQ ID NO: 2098748 - RNA, 19 nt, Artificial Sequence
  Description of Artificial Sequence: Synthetic oligonucleotide
gugcgggcccgcgccagga

SEQ ID NO: 2098749 - RNA, 19 nt, Artificial Sequence
  Description of Artificial Sequence: Synthetic oligonucleotide
ggccgcgcgacugucggua

SEQ ID NO: 2098750 - RNA, 19 nt, Artificial Sequence
  Description of Artificial Sequence: Synthetic oligonucleotide
ggggccgcggaggggcgag

SEQ ID NO: 2098751 - RNA, 19 nt, Artificial Sequence
  Description of Artificial Sequence: Synthetic oligonucleotide
gcgccaggagcgccccggc

SEQ ID NO: 2098752 - RNA, 19 nt, Artificial Sequence
  Description of Artificial Sequence: Synthetic oligonucleotide
gccgcccugagggguccgg

SEQ ID NO: 2098753 - RNA, 19 nt, Artificial Sequence
  Description of Artificial Sequence: Synthetic oligonucleotide
ccgaggaggccgggcggcg

SEQ ID NO: 2098754 - RNA, 19 nt, Artificial Sequence
  Description of Artificial Sequence: Synthetic oligonucleotide
gugcgacucccaggacgga

SEQ ID NO: 2098755 - RNA, 19 nt, Artificial Sequence
  Description of Artificial Sequence: Synthetic oligonucleotide
cccugaccaaaucggggcu

SEQ ID NO: 2098756 - RNA, 19 nt, Artificial Sequence
  Description of Artificial Sequence: Synthetic oligonucleotide
ccgcccugagggguccggg

SEQ ID NO: 2098757 - RNA, 19 nt, Artificial Sequence
  Description of Artificial Sequence: Synthetic oligonucleotide
cgacucccaggacggagca

SEQ ID NO: 2098758 - RNA, 19 nt, Artificial Sequence
  Description of Artificial Sequence: Synthetic oligonucleotide
caacugcgugagacacagu

SEQ ID NO: 2098759 - RNA, 19 nt, Artificial Sequence
  Description of Artificial Sequence: Synthetic oligonucleotide
gcucgggcccgaggaggcc

SEQ ID NO: 2098760 - RNA, 19 nt, Artificial Sequence
  Description of Artificial Sequence: Synthetic oligonucleotide
cggugugcgcucgggcccg

SEQ ID NO: 2098761 - RNA, 19 nt, Artificial Sequence
  Description of Artificial Sequence: Synthetic oligonucleotide
cgcugugcguggacgggca

SEQ ID NO: 2098762 - RNA, 19 nt, Artificial Sequence
  Description of Artificial Sequence: Synthetic oligonucleotide
cuucgaugucagggaugcu

SEQ ID NO: 2098763 - RNA, 19 nt, Artificial Sequence
  Description of Artificial Sequence: Synthetic oligonucleotide
gcgggagcgcgaggcugcc

SEQ ID NO: 2098764 - RNA, 19 nt, Artificial Sequence
  Description of Artificial Sequence: Synthetic oligonucleotide
ccaggacggagcacgccau

SEQ ID NO: 2098765 - RNA, 19 nt, Artificial Sequence
  Description of Artificial Sequence: Synthetic oligonucleotide
ccucucuuucaucgggguu

SEQ ID NO: 2098766 - RNA, 19 nt, Artificial Sequence
  Description of Artificial Sequence: Synthetic oligonucleotide
gggcccgcgccaggagcgc

SEQ ID NO: 2098767 - RNA, 19 nt, Artificial Sequence
  Description of Artificial Sequence: Synthetic oligonucleotide
gcgcgacugucgguaccca

SEQ ID NO: 2098768 - RNA, 19 nt, Artificial Sequence
  Description of Artificial Sequence: Synthetic oligonucleotide
cucuuucaucgggguuuau

SEQ ID NO: 2098769 - RNA, 19 nt, Artificial Sequence
  Description of Artificial Sequence: Synthetic oligonucleotide
ccacagcccggugugcgcu

SEQ ID NO: 2098770 - RNA, 19 nt, Artificial Sequence
  Description of Artificial Sequence: Synthetic oligonucleotide
ggugugcgcucgggcccga

SEQ ID NO: 2098771 - RNA, 19 nt, Artificial Sequence
  Description of Artificial Sequence: Synthetic oligonucleotide
gcgcggccacagcccggug

SEQ ID NO: 2098772 - RNA, 19 nt, Artificial Sequence
  Description of Artificial Sequence: Synthetic oligonucleotide
cgggagcgcgaggcugccg

SEQ ID NO: 2098773 - RNA, 19 nt, Artificial Sequence
  Description of Artificial Sequence: Synthetic oligonucleotide
cggggcugaucugggaacu

SEQ ID NO: 2098774 - RNA, 19 nt, Artificial Sequence
  Description of Artificial Sequence: Synthetic oligonucleotide
gccccggccgcgcgacugu

SEQ ID NO: 2098775 - RNA, 19 nt, Artificial Sequence
  Description of Artificial Sequence: Synthetic oligonucleotide
gugcguggacgggcacuuu

SEQ ID NO: 2098776 - RNA, 19 nt, Artificial Sequence
  Description of Artificial Sequence: Synthetic oligonucleotide
cgcgacugucgguacccau

SEQ ID NO: 2098777 - RNA, 19 nt, Artificial Sequence
  Description of Artificial Sequence: Synthetic oligonucleotide
ccgacuccgcgcggccaca

SEQ ID NO: 2098778 - RNA, 19 nt, Artificial Sequence
  Description of Artificial Sequence: Synthetic oligonucleotide
cgggcccgaggaggccggg

SEQ ID NO: 2098779 - RNA, 19 nt, Artificial Sequence
  Description of Artificial Sequence: Synthetic oligonucleotide
ggccccaguugagcagguu

SEQ ID NO: 2098780 - RNA, 19 nt, Artificial Sequence
  Description of Artificial Sequence: Synthetic oligonucleotide
cgcgcggccacagcccggu

SEQ ID NO: 2098781 - RNA, 19 nt, Artificial Sequence
  Description of Artificial Sequence: Synthetic oligonucleotide
ccccuucuuuuggcuugua

SEQ ID NO: 2098782 - RNA, 19 nt, Artificial Sequence
  Description of Artificial Sequence: Synthetic oligonucleotide
cggggccgcggaggggcga

SEQ ID NO: 2098783 - RNA, 19 nt, Artificial Sequence
  Description of Artificial Sequence: Synthetic oligonucleotide
aaauaaagcaagcaucaac

SEQ ID NO: 2098784 - RNA, 19 nt, Artificial Sequence
  Description of Artificial Sequence: Synthetic oligonucleotide
ucgacauaagcucagaagg

SEQ ID NO: 2098785 - RNA, 19 nt, Artificial Sequence
  Description of Artificial Sequence: Synthetic oligonucleotide
uauauauauauuuauauau

SEQ ID NO: 2098786 - RNA, 19 nt, Artificial Sequence
  Description of Artificial Sequence: Synthetic oligonucleotide
aaaggguuaaguuuacaac

SEQ ID NO: 2098787 - RNA, 19 nt, Artificial Sequence
  Description of Artificial Sequence: Synthetic oligonucleotide
uuuucgauccccauggugg

SEQ ID NO: 2098788 - RNA, 19 nt, Artificial Sequence
  Description of Artificial Sequence: Synthetic oligonucleotide
aacuuuuauauauauauau

SEQ ID NO: 2098789 - RNA, 19 nt, Artificial Sequence
  Description of Artificial Sequence: Synthetic oligonucleotide
uuuggguucaguuauaaca

SEQ ID NO: 2098790 - RNA, 19 nt, Artificial Sequence
  Description of Artificial Sequence: Synthetic oligonucleotide
ugaacugguauuuauuugg

SEQ ID NO: 2098791 - RNA, 19 nt, Artificial Sequence
  Description of Artificial Sequence: Synthetic oligonucleotide
aucaacauucaauaaacac

SEQ ID NO: 2098792 - RNA, 19 nt, Artificial Sequence
  Description of Artificial Sequence: Synthetic oligonucleotide
ucaguuauaacauagcauc

SEQ ID NO: 2098793 - RNA, 19 nt, Artificial Sequence
  Description of Artificial Sequence: Synthetic oligonucleotide
uauauauauauauuuauau

SEQ ID NO: 2098794 - RNA, 19 nt, Artificial Sequence
  Description of Artificial Sequence: Synthetic oligonucleotide
uaaguaaccgaauacuggg

SEQ ID NO: 2098795 - RNA, 19 nt, Artificial Sequence
  Description of Artificial Sequence: Synthetic oligonucleotide
cauuuauucagccacagag

SEQ ID NO: 2098796 - RNA, 19 nt, Artificial Sequence
  Description of Artificial Sequence: Synthetic oligonucleotide
uuuauuuguauaaaagggu

SEQ ID NO: 2098797 - RNA, 19 nt, Artificial Sequence
  Description of Artificial Sequence: Synthetic oligonucleotide
aaacacacgauuuauuugu

SEQ ID NO: 2098798 - RNA, 19 nt, Artificial Sequence
  Description of Artificial Sequence: Synthetic oligonucleotide
uaacauagcaucaauaaaa

SEQ ID NO: 2098799 - RNA, 19 nt, Artificial Sequence
  Description of Artificial Sequence: Synthetic oligonucleotide
uauauaaaagaaaaccuuc

SEQ ID NO: 2098800 - RNA, 19 nt, Artificial Sequence
  Description of Artificial Sequence: Synthetic oligonucleotide
uuaaguuuacaacuaaacu

SEQ ID NO: 2098801 - RNA, 19 nt, Artificial Sequence
  Description of Artificial Sequence: Synthetic oligonucleotide
uauaaaaggguuaaguuua

SEQ ID NO: 2098802 - RNA, 19 nt, Artificial Sequence
  Description of Artificial Sequence: Synthetic oligonucleotide
aaggguuaaguuuacaacu

SEQ ID NO: 2098803 - RNA, 19 nt, Artificial Sequence
  Description of Artificial Sequence: Synthetic oligonucleotide
uauauauauuuauauauaa

SEQ ID NO: 2098804 - RNA, 19 nt, Artificial Sequence
  Description of Artificial Sequence: Synthetic oligonucleotide
aaaguccauuuauucagcc

SEQ ID NO: 2098805 - RNA, 19 nt, Artificial Sequence
  Description of Artificial Sequence: Synthetic oligonucleotide
aguccauuuauucagccac

SEQ ID NO: 2098806 - RNA, 19 nt, Artificial Sequence
  Description of Artificial Sequence: Synthetic oligonucleotide
uuuauauauauauauuuau

SEQ ID NO: 2098807 - RNA, 19 nt, Artificial Sequence
  Description of Artificial Sequence: Synthetic oligonucleotide
aagucucucauaaauaacg

SEQ ID NO: 2098808 - RNA, 19 nt, Artificial Sequence
  Description of Artificial Sequence: Synthetic oligonucleotide
ucuacauagauuugaacug

SEQ ID NO: 2098809 - RNA, 19 nt, Artificial Sequence
  Description of Artificial Sequence: Synthetic oligonucleotide
aaggacagaaugcugaugu

SEQ ID NO: 2098810 - RNA, 19 nt, Artificial Sequence
  Description of Artificial Sequence: Synthetic oligonucleotide
uuuuauauauauauauuua

SEQ ID NO: 2098811 - RNA, 19 nt, Artificial Sequence
  Description of Artificial Sequence: Synthetic oligonucleotide
aguacuuugcuaucguucg

SEQ ID NO: 2098812 - RNA, 19 nt, Artificial Sequence
  Description of Artificial Sequence: Synthetic oligonucleotide
uuuacaacuaaacuuuuau

SEQ ID NO: 2098813 - RNA, 19 nt, Artificial Sequence
  Description of Artificial Sequence: Synthetic oligonucleotide
uauaaaagaaaaccuucca

SEQ ID NO: 2098814 - RNA, 19 nt, Artificial Sequence
  Description of Artificial Sequence: Synthetic oligonucleotide
gauguaaucgaugacgugc

SEQ ID NO: 2098815 - RNA, 19 nt, Artificial Sequence
  Description of Artificial Sequence: Synthetic oligonucleotide
uuccuaacggaccucaccg

SEQ ID NO: 2098816 - RNA, 19 nt, Artificial Sequence
  Description of Artificial Sequence: Synthetic oligonucleotide
aaagguccauuucaaauug

SEQ ID NO: 2098817 - RNA, 19 nt, Artificial Sequence
  Description of Artificial Sequence: Synthetic oligonucleotide
aauaacgguaucgcagucc

SEQ ID NO: 2098818 - RNA, 19 nt, Artificial Sequence
  Description of Artificial Sequence: Synthetic oligonucleotide
ugucaaauaggccauuucu

SEQ ID NO: 2098819 - RNA, 19 nt, Artificial Sequence
  Description of Artificial Sequence: Synthetic oligonucleotide
uuauauauauauauuuaua

SEQ ID NO: 2098820 - RNA, 19 nt, Artificial Sequence
  Description of Artificial Sequence: Synthetic oligonucleotide
uugaaagucucucauaaau

SEQ ID NO: 2098821 - RNA, 19 nt, Artificial Sequence
  Description of Artificial Sequence: Synthetic oligonucleotide
uucaggguggucaacggcg

SEQ ID NO: 2098822 - RNA, 19 nt, Artificial Sequence
  Description of Artificial Sequence: Synthetic oligonucleotide
auaaauaacgguaucgcag

SEQ ID NO: 2098823 - RNA, 19 nt, Artificial Sequence
  Description of Artificial Sequence: Synthetic oligonucleotide
aaaagguccauuucaaauu

SEQ ID NO: 2098824 - RNA, 19 nt, Artificial Sequence
  Description of Artificial Sequence: Synthetic oligonucleotide
uuucaugcugcucuuagga

SEQ ID NO: 2098825 - RNA, 19 nt, Artificial Sequence
  Description of Artificial Sequence: Synthetic oligonucleotide
uuauuuguauaaaaggguu

SEQ ID NO: 2098826 - RNA, 19 nt, Artificial Sequence
  Description of Artificial Sequence: Synthetic oligonucleotide
ucaaauuguccuccaaaag

SEQ ID NO: 2098827 - RNA, 19 nt, Artificial Sequence
  Description of Artificial Sequence: Synthetic oligonucleotide
auaacgguaucgcaguccg

SEQ ID NO: 2098828 - RNA, 19 nt, Artificial Sequence
  Description of Artificial Sequence: Synthetic oligonucleotide
aauacuggguccuucgggu

SEQ ID NO: 2098829 - RNA, 19 nt, Artificial Sequence
  Description of Artificial Sequence: Synthetic oligonucleotide
ucaaauaggccauuucuga

SEQ ID NO: 2098830 - RNA, 19 nt, Artificial Sequence
  Description of Artificial Sequence: Synthetic oligonucleotide
ucucucauaaauaacggua

SEQ ID NO: 2098831 - RNA, 19 nt, Artificial Sequence
  Description of Artificial Sequence: Synthetic oligonucleotide
aaaucaaagcacugguugu

SEQ ID NO: 2098832 - RNA, 19 nt, Artificial Sequence
  Description of Artificial Sequence: Synthetic oligonucleotide
uucgacauaagcucagaag

SEQ ID NO: 2098833 - RNA, 19 nt, Artificial Sequence
  Description of Artificial Sequence: Synthetic oligonucleotide
auacagucuacauagauuu

SEQ ID NO: 2098834 - RNA, 19 nt, Artificial Sequence
  Description of Artificial Sequence: Synthetic oligonucleotide
uuuauucagccacagagua

SEQ ID NO: 2098835 - RNA, 19 nt, Artificial Sequence
  Description of Artificial Sequence: Synthetic oligonucleotide
ucauaaauaacgguaucgc

SEQ ID NO: 2098836 - RNA, 19 nt, Artificial Sequence
  Description of Artificial Sequence: Synthetic oligonucleotide
agggaauucagaugccugc

SEQ ID NO: 2098837 - RNA, 19 nt, Artificial Sequence
  Description of Artificial Sequence: Synthetic oligonucleotide
uaaauaacgguaucgcagu

SEQ ID NO: 2098838 - RNA, 19 nt, Artificial Sequence
  Description of Artificial Sequence: Synthetic oligonucleotide
auauauauauauuuauaua

SEQ ID NO: 2098839 - RNA, 19 nt, Artificial Sequence
  Description of Artificial Sequence: Synthetic oligonucleotide
auaguauauaaaagaaaac

SEQ ID NO: 2098840 - RNA, 19 nt, Artificial Sequence
  Description of Artificial Sequence: Synthetic oligonucleotide
aguaaccgaauacuggguc

SEQ ID NO: 2098841 - RNA, 19 nt, Artificial Sequence
  Description of Artificial Sequence: Synthetic oligonucleotide
uaaacacacgauuuauuug

SEQ ID NO: 2098842 - RNA, 19 nt, Artificial Sequence
  Description of Artificial Sequence: Synthetic oligonucleotide
acacauuuuauuauaaucu

SEQ ID NO: 2098843 - RNA, 19 nt, Artificial Sequence
  Description of Artificial Sequence: Synthetic oligonucleotide
aaucuuaauacagucuaca

SEQ ID NO: 2098844 - RNA, 19 nt, Artificial Sequence
  Description of Artificial Sequence: Synthetic oligonucleotide
aacgguaucgcaguccggg

SEQ ID NO: 2098845 - RNA, 19 nt, Artificial Sequence
  Description of Artificial Sequence: Synthetic oligonucleotide
uaucguucgacauaagcuc

SEQ ID NO: 2098846 - RNA, 19 nt, Artificial Sequence
  Description of Artificial Sequence: Synthetic oligonucleotide
aaagucucucauaaauaac

SEQ ID NO: 2098847 - RNA, 19 nt, Artificial Sequence
  Description of Artificial Sequence: Synthetic oligonucleotide
guagcagucguucauguug

SEQ ID NO: 2098848 - RNA, 19 nt, Artificial Sequence
  Description of Artificial Sequence: Synthetic oligonucleotide
aaguuuacaacuaaacuuu

SEQ ID NO: 2098849 - RNA, 19 nt, Artificial Sequence
  Description of Artificial Sequence: Synthetic oligonucleotide
acuucauuuaaguaaccga

SEQ ID NO: 2098850 - RNA, 19 nt, Artificial Sequence
  Description of Artificial Sequence: Synthetic oligonucleotide
acuaaacuuuuauauauau

SEQ ID NO: 2098851 - RNA, 19 nt, Artificial Sequence
  Description of Artificial Sequence: Synthetic oligonucleotide
ugcaggcugacgauggugg

SEQ ID NO: 2098852 - RNA, 19 nt, Artificial Sequence
  Description of Artificial Sequence: Synthetic oligonucleotide
ucauuuaaguaaccgaaua

SEQ ID NO: 2098853 - RNA, 19 nt, Artificial Sequence
  Description of Artificial Sequence: Synthetic oligonucleotide
uuuauugacgucagacaca

SEQ ID NO: 2098854 - RNA, 19 nt, Artificial Sequence
  Description of Artificial Sequence: Synthetic oligonucleotide
cauuuaaguaaccgaauac

SEQ ID NO: 2098855 - RNA, 19 nt, Artificial Sequence
  Description of Artificial Sequence: Synthetic oligonucleotide
uuugaacugguauuuauuu

SEQ ID NO: 2098856 - RNA, 19 nt, Artificial Sequence
  Description of Artificial Sequence: Synthetic oligonucleotide
uuauaacauagcaucaaua

SEQ ID NO: 2098857 - RNA, 19 nt, Artificial Sequence
  Description of Artificial Sequence: Synthetic oligonucleotide
uauucagccacagaguacu

SEQ ID NO: 2098858 - RNA, 19 nt, Artificial Sequence
  Description of Artificial Sequence: Synthetic oligonucleotide
gaauacuggguccuucggg

SEQ ID NO: 2098859 - RNA, 19 nt, Artificial Sequence
  Description of Artificial Sequence: Synthetic oligonucleotide
guaggcucaugucaaauag

SEQ ID NO: 2098860 - RNA, 19 nt, Artificial Sequence
  Description of Artificial Sequence: Synthetic oligonucleotide
aaauaacgguaucgcaguc

SEQ ID NO: 2098861 - RNA, 19 nt, Artificial Sequence
  Description of Artificial Sequence: Synthetic oligonucleotide
aauugggcaauuccuugug

SEQ ID NO: 2098862 - RNA, 19 nt, Artificial Sequence
  Description of Artificial Sequence: Synthetic oligonucleotide
gaauucagaugccugcaag

SEQ ID NO: 2098863 - RNA, 19 nt, Artificial Sequence
  Description of Artificial Sequence: Synthetic oligonucleotide
cugauguccguguucaggg

SEQ ID NO: 2098864 - RNA, 19 nt, Artificial Sequence
  Description of Artificial Sequence: Synthetic oligonucleotide
gacagaaugcugauguccg

SEQ ID NO: 2098865 - RNA, 19 nt, Artificial Sequence
  Description of Artificial Sequence: Synthetic oligonucleotide
uuucugaccaaagacuuca

SEQ ID NO: 2098866 - RNA, 19 nt, Artificial Sequence
  Description of Artificial Sequence: Synthetic oligonucleotide
aagucugcuucaauugggc

SEQ ID NO: 2098867 - RNA, 19 nt, Artificial Sequence
  Description of Artificial Sequence: Synthetic oligonucleotide
caaauuguccuccaaaaga

SEQ ID NO: 2098868 - RNA, 19 nt, Artificial Sequence
  Description of Artificial Sequence: Synthetic oligonucleotide
ucaauugggcaauuccuug

SEQ ID NO: 2098869 - RNA, 19 nt, Artificial Sequence
  Description of Artificial Sequence: Synthetic oligonucleotide
gucuacauagauuugaacu

SEQ ID NO: 2098870 - RNA, 19 nt, Artificial Sequence
  Description of Artificial Sequence: Synthetic oligonucleotide
uguagagcaggcucaucgg

SEQ ID NO: 2098871 - RNA, 19 nt, Artificial Sequence
  Description of Artificial Sequence: Synthetic oligonucleotide
ugaaagucucucauaaaua

SEQ ID NO: 2098872 - RNA, 19 nt, Artificial Sequence
  Description of Artificial Sequence: Synthetic oligonucleotide
auaacauagcaucaauaaa

SEQ ID NO: 2098873 - RNA, 19 nt, Artificial Sequence
  Description of Artificial Sequence: Synthetic oligonucleotide
uuuccuaacggaccucacc

SEQ ID NO: 2098874 - RNA, 19 nt, Artificial Sequence
  Description of Artificial Sequence: Synthetic oligonucleotide
aagauggucacucucccuu

SEQ ID NO: 2098875 - RNA, 19 nt, Artificial Sequence
  Description of Artificial Sequence: Synthetic oligonucleotide
ugucugaaauaaagcaagc

SEQ ID NO: 2098876 - RNA, 19 nt, Artificial Sequence
  Description of Artificial Sequence: Synthetic oligonucleotide
uaaucgaugacgugcugca

SEQ ID NO: 2098877 - RNA, 19 nt, Artificial Sequence
  Description of Artificial Sequence: Synthetic oligonucleotide
guucaguuauaacauagca

SEQ ID NO: 2098878 - RNA, 19 nt, Artificial Sequence
  Description of Artificial Sequence: Synthetic oligonucleotide
uaggcucaugucaaauagg

SEQ ID NO: 2098879 - RNA, 19 nt, Artificial Sequence
  Description of Artificial Sequence: Synthetic oligonucleotide
uuguccuccaaaagaaaga

SEQ ID NO: 2098880 - RNA, 19 nt, Artificial Sequence
  Description of Artificial Sequence: Synthetic oligonucleotide
uaaucuuaauacagucuac

SEQ ID NO: 2098881 - RNA, 19 nt, Artificial Sequence
  Description of Artificial Sequence: Synthetic oligonucleotide
uucaguaggcucaugucaa

SEQ ID NO: 2098882 - RNA, 19 nt, Artificial Sequence
  Description of Artificial Sequence: Synthetic oligonucleotide
uucauguuguagagcaggc

SEQ ID NO: 2098883 - RNA, 19 nt, Artificial Sequence
  Description of Artificial Sequence: Synthetic oligonucleotide
uuugcuaucguucgacaua

SEQ ID NO: 2098884 - RNA, 19 nt, Artificial Sequence
  Description of Artificial Sequence: Synthetic oligonucleotide
aaguccauuuauucagcca

SEQ ID NO: 2098885 - RNA, 19 nt, Artificial Sequence
  Description of Artificial Sequence: Synthetic oligonucleotide
ucagacacauuuuauuaua

SEQ ID NO: 2098886 - RNA, 19 nt, Artificial Sequence
  Description of Artificial Sequence: Synthetic oligonucleotide
aauacagucuacauagauu

SEQ ID NO: 2098887 - RNA, 19 nt, Artificial Sequence
  Description of Artificial Sequence: Synthetic oligonucleotide
uucauuuaaguaaccgaau

SEQ ID NO: 2098888 - RNA, 19 nt, Artificial Sequence
  Description of Artificial Sequence: Synthetic oligonucleotide
cuuuuauauauauauauuu

SEQ ID NO: 2098889 - RNA, 19 nt, Artificial Sequence
  Description of Artificial Sequence: Synthetic oligonucleotide
acacgauuuauuuguauaa

SEQ ID NO: 2098890 - RNA, 19 nt, Artificial Sequence
  Description of Artificial Sequence: Synthetic oligonucleotide
gaacugguauuuauuuggg

SEQ ID NO: 2098891 - RNA, 19 nt, Artificial Sequence
  Description of Artificial Sequence: Synthetic oligonucleotide
ucucugguggugcaggcug

SEQ ID NO: 2098892 - RNA, 19 nt, Artificial Sequence
  Description of Artificial Sequence: Synthetic oligonucleotide
uuacaacuaaacuuuuaua

SEQ ID NO: 2098893 - RNA, 19 nt, Artificial Sequence
  Description of Artificial Sequence: Synthetic oligonucleotide
gaauaguauauaaaagaaa

SEQ ID NO: 2098894 - RNA, 19 nt, Artificial Sequence
  Description of Artificial Sequence: Synthetic oligonucleotide
uccaccgggguuuugcucc

SEQ ID NO: 2098895 - RNA, 19 nt, Artificial Sequence
  Description of Artificial Sequence: Synthetic oligonucleotide
aacugguauuuauuugggu

SEQ ID NO: 2098896 - RNA, 19 nt, Artificial Sequence
  Description of Artificial Sequence: Synthetic oligonucleotide
acgauuuauuuguauaaaa

SEQ ID NO: 2098897 - RNA, 19 nt, Artificial Sequence
  Description of Artificial Sequence: Synthetic oligonucleotide
augucaaauaggccauuuc

SEQ ID NO: 2098898 - RNA, 19 nt, Artificial Sequence
  Description of Artificial Sequence: Synthetic oligonucleotide
acagaguacuuugcuaucg

SEQ ID NO: 2098899 - RNA, 19 nt, Artificial Sequence
  Description of Artificial Sequence: Synthetic oligonucleotide
agucguucauguuguagag

SEQ ID NO: 2098900 - RNA, 19 nt, Artificial Sequence
  Description of Artificial Sequence: Synthetic oligonucleotide
guaaccgaauacugggucc

SEQ ID NO: 2098901 - RNA, 19 nt, Artificial Sequence
  Description of Artificial Sequence: Synthetic oligonucleotide
uguucugcgggaugcuggg

SEQ ID NO: 2098902 - RNA, 19 nt, Artificial Sequence
  Description of Artificial Sequence: Synthetic oligonucleotide
gcucaugucaaauaggcca

SEQ ID NO: 2098903 - RNA, 19 nt, Artificial Sequence
  Description of Artificial Sequence: Synthetic oligonucleotide
uucaauugggcaauuccuu

SEQ ID NO: 2098904 - RNA, 19 nt, Artificial Sequence
  Description of Artificial Sequence: Synthetic oligonucleotide
cauugaaagucucucauaa

SEQ ID NO: 2098905 - RNA, 19 nt, Artificial Sequence
  Description of Artificial Sequence: Synthetic oligonucleotide
auauauauuuauauauaaa

SEQ ID NO: 2098906 - RNA, 19 nt, Artificial Sequence
  Description of Artificial Sequence: Synthetic oligonucleotide
cauaaauaacgguaucgca

SEQ ID NO: 2098907 - RNA, 19 nt, Artificial Sequence
  Description of Artificial Sequence: Synthetic oligonucleotide
auauauauauuuauauaua

SEQ ID NO: 2098908 - RNA, 19 nt, Artificial Sequence
  Description of Artificial Sequence: Synthetic oligonucleotide
aauaaacacacgauuuauu

SEQ ID NO: 2098909 - RNA, 19 nt, Artificial Sequence
  Description of Artificial Sequence: Synthetic oligonucleotide
aucuuaauacagucuacau

SEQ ID NO: 2098910 - RNA, 19 nt, Artificial Sequence
  Description of Artificial Sequence: Synthetic oligonucleotide
agagcaggcucaucggguc

SEQ ID NO: 2098911 - RNA, 19 nt, Artificial Sequence
  Description of Artificial Sequence: Synthetic oligonucleotide
ucaacggcguccuggacac

SEQ ID NO: 2098912 - RNA, 19 nt, Artificial Sequence
  Description of Artificial Sequence: Synthetic oligonucleotide
aaacuuuuauauauauaua

SEQ ID NO: 2098913 - RNA, 19 nt, Artificial Sequence
  Description of Artificial Sequence: Synthetic oligonucleotide
acagucuacauagauuuga

SEQ ID NO: 2098914 - RNA, 19 nt, Artificial Sequence
  Description of Artificial Sequence: Synthetic oligonucleotide
gucaaauaggccauuucug

SEQ ID NO: 2098915 - RNA, 19 nt, Artificial Sequence
  Description of Artificial Sequence: Synthetic oligonucleotide
ucacgcuccaccuuugaaa

SEQ ID NO: 2098916 - RNA, 19 nt, Artificial Sequence
  Description of Artificial Sequence: Synthetic oligonucleotide
guauaaaaggguuaaguuu

SEQ ID NO: 2098917 - RNA, 19 nt, Artificial Sequence
  Description of Artificial Sequence: Synthetic oligonucleotide
uucagaugccugcaaggac

SEQ ID NO: 2098918 - RNA, 19 nt, Artificial Sequence
  Description of Artificial Sequence: Synthetic oligonucleotide
agggcauugaaagucucuc

SEQ ID NO: 2098919 - RNA, 19 nt, Artificial Sequence
  Description of Artificial Sequence: Synthetic oligonucleotide
accucaccggacugaaggc

SEQ ID NO: 2098920 - RNA, 19 nt, Artificial Sequence
  Description of Artificial Sequence: Synthetic oligonucleotide
uagauuugaacugguauuu

SEQ ID NO: 2098921 - RNA, 19 nt, Artificial Sequence
  Description of Artificial Sequence: Synthetic oligonucleotide
ugccugcaaggacagaaug

SEQ ID NO: 2098922 - RNA, 19 nt, Artificial Sequence
  Description of Artificial Sequence: Synthetic oligonucleotide
uguccuccaaaagaaagaa

SEQ ID NO: 2098923 - RNA, 19 nt, Artificial Sequence
  Description of Artificial Sequence: Synthetic oligonucleotide
guaaucgaugacgugcugc

SEQ ID NO: 2098924 - RNA, 19 nt, Artificial Sequence
  Description of Artificial Sequence: Synthetic oligonucleotide
cuucggguagucacgcucc

SEQ ID NO: 2098925 - RNA, 19 nt, Artificial Sequence
  Description of Artificial Sequence: Synthetic oligonucleotide
cuaucguucgacauaagcu

SEQ ID NO: 2098926 - RNA, 19 nt, Artificial Sequence
  Description of Artificial Sequence: Synthetic oligonucleotide
uucugcgggaugcugggca

SEQ ID NO: 2098927 - RNA, 19 nt, Artificial Sequence
  Description of Artificial Sequence: Synthetic oligonucleotide
aagggaauucagaugccug

SEQ ID NO: 2098928 - RNA, 19 nt, Artificial Sequence
  Description of Artificial Sequence: Synthetic oligonucleotide
gcuucaauugggcaauucc

SEQ ID NO: 2098929 - RNA, 19 nt, Artificial Sequence
  Description of Artificial Sequence: Synthetic oligonucleotide
gaguacuuugcuaucguuc

SEQ ID NO: 2098930 - RNA, 19 nt, Artificial Sequence
  Description of Artificial Sequence: Synthetic oligonucleotide
aguuauaacauagcaucaa

SEQ ID NO: 2098931 - RNA, 19 nt, Artificial Sequence
  Description of Artificial Sequence: Synthetic oligonucleotide
caggauuuccaucuugguc

SEQ ID NO: 2098932 - RNA, 19 nt, Artificial Sequence
  Description of Artificial Sequence: Synthetic oligonucleotide
ugacgucagacacauuuua

SEQ ID NO: 2098933 - RNA, 19 nt, Artificial Sequence
  Description of Artificial Sequence: Synthetic oligonucleotide
ggaauaguauauaaaagaa

SEQ ID NO: 2098934 - RNA, 19 nt, Artificial Sequence
  Description of Artificial Sequence: Synthetic oligonucleotide
gcuaucguucgacauaagc

SEQ ID NO: 2098935 - RNA, 19 nt, Artificial Sequence
  Description of Artificial Sequence: Synthetic oligonucleotide
acuuuuauauauauauauu

SEQ ID NO: 2098936 - RNA, 19 nt, Artificial Sequence
  Description of Artificial Sequence: Synthetic oligonucleotide
agacacauuuuauuauaau

SEQ ID NO: 2098937 - RNA, 19 nt, Artificial Sequence
  Description of Artificial Sequence: Synthetic oligonucleotide
ucguucgacauaagcucag

SEQ ID NO: 2098938 - RNA, 19 nt, Artificial Sequence
  Description of Artificial Sequence: Synthetic oligonucleotide
gacauaagcucagaaggga

SEQ ID NO: 2098939 - RNA, 19 nt, Artificial Sequence
  Description of Artificial Sequence: Synthetic oligonucleotide
guuggagaacuucugggga

SEQ ID NO: 2098940 - RNA, 19 nt, Artificial Sequence
  Description of Artificial Sequence: Synthetic oligonucleotide
uccuaacggaccucaccgg

SEQ ID NO: 2098941 - RNA, 19 nt, Artificial Sequence
  Description of Artificial Sequence: Synthetic oligonucleotide
caucgggucguccaccggg

SEQ ID NO: 2098942 - RNA, 19 nt, Artificial Sequence
  Description of Artificial Sequence: Synthetic oligonucleotide
guugucugaaauaaagcaa

SEQ ID NO: 2098943 - RNA, 19 nt, Artificial Sequence
  Description of Artificial Sequence: Synthetic oligonucleotide
uacuuugcuaucguucgac

SEQ ID NO: 2098944 - RNA, 19 nt, Artificial Sequence
  Description of Artificial Sequence: Synthetic oligonucleotide
gcaucaacauucaauaaac

SEQ ID NO: 2098945 - RNA, 19 nt, Artificial Sequence
  Description of Artificial Sequence: Synthetic oligonucleotide
uccagggcgaucugcaggu

SEQ ID NO: 2098946 - RNA, 19 nt, Artificial Sequence
  Description of Artificial Sequence: Synthetic oligonucleotide
uaacggaccucaccggacu

SEQ ID NO: 2098947 - RNA, 19 nt, Artificial Sequence
  Description of Artificial Sequence: Synthetic oligonucleotide
uugggcaauuccuugugau

SEQ ID NO: 2098948 - RNA, 19 nt, Artificial Sequence
  Description of Artificial Sequence: Synthetic oligonucleotide
cuuggaguagcagucguuc

SEQ ID NO: 2098949 - RNA, 19 nt, Artificial Sequence
  Description of Artificial Sequence: Synthetic oligonucleotide
uauuuggguucaguuauaa

SEQ ID NO: 2098950 - RNA, 19 nt, Artificial Sequence
  Description of Artificial Sequence: Synthetic oligonucleotide
uggggugcgaguccagggc

SEQ ID NO: 2098951 - RNA, 19 nt, Artificial Sequence
  Description of Artificial Sequence: Synthetic oligonucleotide
uugcuaucguucgacauaa

SEQ ID NO: 2098952 - RNA, 19 nt, Artificial Sequence
  Description of Artificial Sequence: Synthetic oligonucleotide
guguucaggguggucaacg

SEQ ID NO: 2098953 - RNA, 19 nt, Artificial Sequence
  Description of Artificial Sequence: Synthetic oligonucleotide
gaugccugcaaggacagaa

SEQ ID NO: 2098954 - RNA, 19 nt, Artificial Sequence
  Description of Artificial Sequence: Synthetic oligonucleotide
cagucguucauguuguaga

SEQ ID NO: 2098955 - RNA, 19 nt, Artificial Sequence
  Description of Artificial Sequence: Synthetic oligonucleotide
uguaaucgaugacgugcug

SEQ ID NO: 2098956 - RNA, 19 nt, Artificial Sequence
  Description of Artificial Sequence: Synthetic oligonucleotide
cagguccaagauguaaucg

SEQ ID NO: 2098957 - RNA, 19 nt, Artificial Sequence
  Description of Artificial Sequence: Synthetic oligonucleotide
agaagggaauucagaugcc

SEQ ID NO: 2098958 - RNA, 19 nt, Artificial Sequence
  Description of Artificial Sequence: Synthetic oligonucleotide
acgucagacacauuuuauu

SEQ ID NO: 2098959 - RNA, 19 nt, Artificial Sequence
  Description of Artificial Sequence: Synthetic oligonucleotide
uuggaguagcagucguuca

SEQ ID NO: 2098960 - RNA, 19 nt, Artificial Sequence
  Description of Artificial Sequence: Synthetic oligonucleotide
aguaggcucaugucaaaua

SEQ ID NO: 2098961 - RNA, 19 nt, Artificial Sequence
  Description of Artificial Sequence: Synthetic oligonucleotide
gauuugaacugguauuuau

SEQ ID NO: 2098962 - RNA, 19 nt, Artificial Sequence
  Description of Artificial Sequence: Synthetic oligonucleotide
uccgggagaugcccaagcc

SEQ ID NO: 2098963 - RNA, 19 nt, Artificial Sequence
  Description of Artificial Sequence: Synthetic oligonucleotide
cucaucgggucguccaccg

SEQ ID NO: 2098964 - RNA, 19 nt, Artificial Sequence
  Description of Artificial Sequence: Synthetic oligonucleotide
uaaccgaauacuggguccu

SEQ ID NO: 2098965 - RNA, 19 nt, Artificial Sequence
  Description of Artificial Sequence: Synthetic oligonucleotide
caguuauaacauagcauca

SEQ ID NO: 2098966 - RNA, 19 nt, Artificial Sequence
  Description of Artificial Sequence: Synthetic oligonucleotide
aaguaaccgaauacugggu

SEQ ID NO: 2098967 - RNA, 19 nt, Artificial Sequence
  Description of Artificial Sequence: Synthetic oligonucleotide
agacuucauuuaaguaacc

SEQ ID NO: 2098968 - RNA, 19 nt, Artificial Sequence
  Description of Artificial Sequence: Synthetic oligonucleotide
acuuugcuaucguucgaca

SEQ ID NO: 2098969 - RNA, 19 nt, Artificial Sequence
  Description of Artificial Sequence: Synthetic oligonucleotide
guggucaacggcguccugg

SEQ ID NO: 2098970 - RNA, 19 nt, Artificial Sequence
  Description of Artificial Sequence: Synthetic oligonucleotide
cuaacggaccucaccggac

SEQ ID NO: 2098971 - RNA, 19 nt, Artificial Sequence
  Description of Artificial Sequence: Synthetic oligonucleotide
gucaacggcguccuggaca

SEQ ID NO: 2098972 - RNA, 19 nt, Artificial Sequence
  Description of Artificial Sequence: Synthetic oligonucleotide
ggacagaaugcugaugucc

SEQ ID NO: 2098973 - RNA, 19 nt, Artificial Sequence
  Description of Artificial Sequence: Synthetic oligonucleotide
uucuguccaggucucuggu

SEQ ID NO: 2098974 - RNA, 19 nt, Artificial Sequence
  Description of Artificial Sequence: Synthetic oligonucleotide
aacggcguccuggacaccu

SEQ ID NO: 2098975 - RNA, 19 nt, Artificial Sequence
  Description of Artificial Sequence: Synthetic oligonucleotide
caucaacauucaauaaaca

SEQ ID NO: 2098976 - RNA, 19 nt, Artificial Sequence
  Description of Artificial Sequence: Synthetic oligonucleotide
cacacgauuuauuuguaua

SEQ ID NO: 2098977 - RNA, 19 nt, Artificial Sequence
  Description of Artificial Sequence: Synthetic oligonucleotide
gucugcuucaauugggcaa

SEQ ID NO: 2098978 - RNA, 19 nt, Artificial Sequence
  Description of Artificial Sequence: Synthetic oligonucleotide
gggguuggagaacuucugg

SEQ ID NO: 2098979 - RNA, 19 nt, Artificial Sequence
  Description of Artificial Sequence: Synthetic oligonucleotide
ucauguuguagagcaggcu

SEQ ID NO: 2098980 - RNA, 19 nt, Artificial Sequence
  Description of Artificial Sequence: Synthetic oligonucleotide
uaacgguaucgcaguccgg

SEQ ID NO: 2098981 - RNA, 19 nt, Artificial Sequence
  Description of Artificial Sequence: Synthetic oligonucleotide
uaagcucagaagggaauuc

SEQ ID NO: 2098982 - RNA, 19 nt, Artificial Sequence
  Description of Artificial Sequence: Synthetic oligonucleotide
gagcaggcucaucgggucg

SEQ ID NO: 2098983 - RNA, 19 nt, Artificial Sequence
  Description of Artificial Sequence: Synthetic oligonucleotide
auguaaucgaugacgugcu

SEQ ID NO: 2098984 - RNA, 19 nt, Artificial Sequence
  Description of Artificial Sequence: Synthetic oligonucleotide
acacacgauuuauuuguau

SEQ ID NO: 2098985 - RNA, 19 nt, Artificial Sequence
  Description of Artificial Sequence: Synthetic oligonucleotide
uggucaacggcguccugga

SEQ ID NO: 2098986 - RNA, 19 nt, Artificial Sequence
  Description of Artificial Sequence: Synthetic oligonucleotide
cugacgaugguggggugcg

SEQ ID NO: 2098987 - RNA, 19 nt, Artificial Sequence
  Description of Artificial Sequence: Synthetic oligonucleotide
gguucaguuauaacauagc

SEQ ID NO: 2098988 - RNA, 19 nt, Artificial Sequence
  Description of Artificial Sequence: Synthetic oligonucleotide
acgguaucgcaguccgggg

SEQ ID NO: 2098989 - RNA, 19 nt, Artificial Sequence
  Description of Artificial Sequence: Synthetic oligonucleotide
agaugcccaagccgugguc

SEQ ID NO: 2098990 - RNA, 19 nt, Artificial Sequence
  Description of Artificial Sequence: Synthetic oligonucleotide
auaagcucagaagggaauu

SEQ ID NO: 2098991 - RNA, 19 nt, Artificial Sequence
  Description of Artificial Sequence: Synthetic oligonucleotide
caccaguuccuugagcuug

SEQ ID NO: 2098992 - RNA, 19 nt, Artificial Sequence
  Description of Artificial Sequence: Synthetic oligonucleotide
agaguacuuugcuaucguu

SEQ ID NO: 2098993 - RNA, 19 nt, Artificial Sequence
  Description of Artificial Sequence: Synthetic oligonucleotide
augcccaagccgugguccg

SEQ ID NO: 2098994 - RNA, 19 nt, Artificial Sequence
  Description of Artificial Sequence: Synthetic oligonucleotide
ucaucgggucguccaccgg

SEQ ID NO: 2098995 - RNA, 19 nt, Artificial Sequence
  Description of Artificial Sequence: Synthetic oligonucleotide
agcuuggaguagcagucgu

SEQ ID NO: 2098996 - RNA, 19 nt, Artificial Sequence
  Description of Artificial Sequence: Synthetic oligonucleotide
caaagcacugguugucuga

SEQ ID NO: 2098997 - RNA, 19 nt, Artificial Sequence
  Description of Artificial Sequence: Synthetic oligonucleotide
cagacacauuuuauuauaa

SEQ ID NO: 2098998 - RNA, 19 nt, Artificial Sequence
  Description of Artificial Sequence: Synthetic oligonucleotide
gcugauguccguguucagg

SEQ ID NO: 2098999 - RNA, 19 nt, Artificial Sequence
  Description of Artificial Sequence: Synthetic oligonucleotide
gggaagauggucacucucc

SEQ ID NO: 2099000 - RNA, 19 nt, Artificial Sequence
  Description of Artificial Sequence: Synthetic oligonucleotide
gacgaugguggggugcgag

SEQ ID NO: 2099001 - RNA, 19 nt, Artificial Sequence
  Description of Artificial Sequence: Synthetic oligonucleotide
aucguucgacauaagcuca

SEQ ID NO: 2099002 - RNA, 19 nt, Artificial Sequence
  Description of Artificial Sequence: Synthetic oligonucleotide
ugauguccguguucagggu

SEQ ID NO: 2099003 - RNA, 19 nt, Artificial Sequence
  Description of Artificial Sequence: Synthetic oligonucleotide
cacgcuccaccuuugaaaa

SEQ ID NO: 2099004 - RNA, 19 nt, Artificial Sequence
  Description of Artificial Sequence: Synthetic oligonucleotide
accgaauacuggguccuuc

SEQ ID NO: 2099005 - RNA, 19 nt, Artificial Sequence
  Description of Artificial Sequence: Synthetic oligonucleotide
ucaguaggcucaugucaaa

SEQ ID NO: 2099006 - RNA, 19 nt, Artificial Sequence
  Description of Artificial Sequence: Synthetic oligonucleotide
cuucuuguucugcgggaug

SEQ ID NO: 2099007 - RNA, 19 nt, Artificial Sequence
  Description of Artificial Sequence: Synthetic oligonucleotide
cgacauaagcucagaaggg

SEQ ID NO: 2099008 - RNA, 19 nt, Artificial Sequence
  Description of Artificial Sequence: Synthetic oligonucleotide
uggguucaguuauaacaua

SEQ ID NO: 2099009 - RNA, 19 nt, Artificial Sequence
  Description of Artificial Sequence: Synthetic oligonucleotide
cuggacaccugguucuguc

SEQ ID NO: 2099010 - RNA, 19 nt, Artificial Sequence
  Description of Artificial Sequence: Synthetic oligonucleotide
aagguccauuucaaauugu

SEQ ID NO: 2099011 - RNA, 19 nt, Artificial Sequence
  Description of Artificial Sequence: Synthetic oligonucleotide
acuguagaaagggcauuga

SEQ ID NO: 2099012 - RNA, 19 nt, Artificial Sequence
  Description of Artificial Sequence: Synthetic oligonucleotide
cacauuuuauuauaaucuu

SEQ ID NO: 2099013 - RNA, 19 nt, Artificial Sequence
  Description of Artificial Sequence: Synthetic oligonucleotide
ccgaauacuggguccuucg

SEQ ID NO: 2099014 - RNA, 19 nt, Artificial Sequence
  Description of Artificial Sequence: Synthetic oligonucleotide
cauggugggaauaguauau

SEQ ID NO: 2099015 - RNA, 19 nt, Artificial Sequence
  Description of Artificial Sequence: Synthetic oligonucleotide
gaaagggcauugaaagucu

SEQ ID NO: 2099016 - RNA, 19 nt, Artificial Sequence
  Description of Artificial Sequence: Synthetic oligonucleotide
guucgacauaagcucagaa

SEQ ID NO: 2099017 - RNA, 19 nt, Artificial Sequence
  Description of Artificial Sequence: Synthetic oligonucleotide
cacugguugucugaaauaa

SEQ ID NO: 2099018 - RNA, 19 nt, Artificial Sequence
  Description of Artificial Sequence: Synthetic oligonucleotide
uagucacgcuccaccuuug

SEQ ID NO: 2099019 - RNA, 19 nt, Artificial Sequence
  Description of Artificial Sequence: Synthetic oligonucleotide
gaugacgugcugcaggauu

SEQ ID NO: 2099020 - RNA, 19 nt, Artificial Sequence
  Description of Artificial Sequence: Synthetic oligonucleotide
gucagacacauuuuauuau

SEQ ID NO: 2099021 - RNA, 19 nt, Artificial Sequence
  Description of Artificial Sequence: Synthetic oligonucleotide
gucucucauaaauaacggu

SEQ ID NO: 2099022 - RNA, 19 nt, Artificial Sequence
  Description of Artificial Sequence: Synthetic oligonucleotide
uucggguagucacgcucca

SEQ ID NO: 2099023 - RNA, 19 nt, Artificial Sequence
  Description of Artificial Sequence: Synthetic oligonucleotide
aggguuaaguuuacaacua

SEQ ID NO: 2099024 - RNA, 19 nt, Artificial Sequence
  Description of Artificial Sequence: Synthetic oligonucleotide
gucguucauguuguagagc

SEQ ID NO: 2099025 - RNA, 19 nt, Artificial Sequence
  Description of Artificial Sequence: Synthetic oligonucleotide
uaucgcaguccgggguugg

SEQ ID NO: 2099026 - RNA, 19 nt, Artificial Sequence
  Description of Artificial Sequence: Synthetic oligonucleotide
cuguagaaagggcauugaa

SEQ ID NO: 2099027 - RNA, 19 nt, Artificial Sequence
  Description of Artificial Sequence: Synthetic oligonucleotide
ugcuaucguucgacauaag

SEQ ID NO: 2099028 - RNA, 19 nt, Artificial Sequence
  Description of Artificial Sequence: Synthetic oligonucleotide
uggggaagauggucacucu

SEQ ID NO: 2099029 - RNA, 19 nt, Artificial Sequence
  Description of Artificial Sequence: Synthetic oligonucleotide
agguaaagucugcuucaau

SEQ ID NO: 2099030 - RNA, 19 nt, Artificial Sequence
  Description of Artificial Sequence: Synthetic oligonucleotide
aguccgggguuggagaacu

SEQ ID NO: 2099031 - RNA, 19 nt, Artificial Sequence
  Description of Artificial Sequence: Synthetic oligonucleotide
aggcugacgaugguggggu

SEQ ID NO: 2099032 - RNA, 19 nt, Artificial Sequence
  Description of Artificial Sequence: Synthetic oligonucleotide
guuuacaacuaaacuuuua

SEQ ID NO: 2099033 - RNA, 19 nt, Artificial Sequence
  Description of Artificial Sequence: Synthetic oligonucleotide
aacacacgauuuauuugua

SEQ ID NO: 2099034 - RNA, 19 nt, Artificial Sequence
  Description of Artificial Sequence: Synthetic oligonucleotide
ggggugcgaguccagggcg

SEQ ID NO: 2099035 - RNA, 19 nt, Artificial Sequence
  Description of Artificial Sequence: Synthetic oligonucleotide
ucgauccccauggugggaa

SEQ ID NO: 2099036 - RNA, 19 nt, Artificial Sequence
  Description of Artificial Sequence: Synthetic oligonucleotide
cacgauuuauuuguauaaa

SEQ ID NO: 2099037 - RNA, 19 nt, Artificial Sequence
  Description of Artificial Sequence: Synthetic oligonucleotide
agcaagcaucaacauucaa

SEQ ID NO: 2099038 - RNA, 19 nt, Artificial Sequence
  Description of Artificial Sequence: Synthetic oligonucleotide
ugcuucaauugggcaauuc

SEQ ID NO: 2099039 - RNA, 19 nt, Artificial Sequence
  Description of Artificial Sequence: Synthetic oligonucleotide
agauuugaacugguauuua

SEQ ID NO: 2099040 - RNA, 19 nt, Artificial Sequence
  Description of Artificial Sequence: Synthetic oligonucleotide
acgaugguggggugcgagu

SEQ ID NO: 2099041 - RNA, 19 nt, Artificial Sequence
  Description of Artificial Sequence: Synthetic oligonucleotide
agaaaaccuuccaacugua

SEQ ID NO: 2099042 - RNA, 19 nt, Artificial Sequence
  Description of Artificial Sequence: Synthetic oligonucleotide
ggugggaauaguauauaaa

SEQ ID NO: 2099043 - RNA, 19 nt, Artificial Sequence
  Description of Artificial Sequence: Synthetic oligonucleotide
gguccuucggguagucacg

SEQ ID NO: 2099044 - RNA, 19 nt, Artificial Sequence
  Description of Artificial Sequence: Synthetic oligonucleotide
cauaagcucagaagggaau

SEQ ID NO: 2099045 - RNA, 19 nt, Artificial Sequence
  Description of Artificial Sequence: Synthetic oligonucleotide
guacuuugcuaucguucga

SEQ ID NO: 2099046 - RNA, 19 nt, Artificial Sequence
  Description of Artificial Sequence: Synthetic oligonucleotide
gaaggcuuucaugcugcuc

SEQ ID NO: 2099047 - RNA, 19 nt, Artificial Sequence
  Description of Artificial Sequence: Synthetic oligonucleotide
gacugaaggcuuucaugcu

SEQ ID NO: 2099048 - RNA, 19 nt, Artificial Sequence
  Description of Artificial Sequence: Synthetic oligonucleotide
ucgcaguccgggguuggag

SEQ ID NO: 2099049 - RNA, 19 nt, Artificial Sequence
  Description of Artificial Sequence: Synthetic oligonucleotide
agucacgcuccaccuuuga

SEQ ID NO: 2099050 - RNA, 19 nt, Artificial Sequence
  Description of Artificial Sequence: Synthetic oligonucleotide
cucaugucaaauaggccau

SEQ ID NO: 2099051 - RNA, 19 nt, Artificial Sequence
  Description of Artificial Sequence: Synthetic oligonucleotide
ggccauuucugaccaaaga

SEQ ID NO: 2099052 - RNA, 19 nt, Artificial Sequence
  Description of Artificial Sequence: Synthetic oligonucleotide
aggccauuucugaccaaag

SEQ ID NO: 2099053 - RNA, 19 nt, Artificial Sequence
  Description of Artificial Sequence: Synthetic oligonucleotide
aucgggucguccaccgggg

SEQ ID NO: 2099054 - RNA, 19 nt, Artificial Sequence
  Description of Artificial Sequence: Synthetic oligonucleotide
uccgggguuggagaacuuc

SEQ ID NO: 2099055 - RNA, 19 nt, Artificial Sequence
  Description of Artificial Sequence: Synthetic oligonucleotide
cuuugcuaucguucgacau

SEQ ID NO: 2099056 - RNA, 19 nt, Artificial Sequence
  Description of Artificial Sequence: Synthetic oligonucleotide
auacuggguccuucgggua

SEQ ID NO: 2099057 - RNA, 19 nt, Artificial Sequence
  Description of Artificial Sequence: Synthetic oligonucleotide
guccuucggguagucacgc

SEQ ID NO: 2099058 - RNA, 19 nt, Artificial Sequence
  Description of Artificial Sequence: Synthetic oligonucleotide
ggguuaaguuuacaacuaa

SEQ ID NO: 2099059 - RNA, 19 nt, Artificial Sequence
  Description of Artificial Sequence: Synthetic oligonucleotide
guagucacgcuccaccuuu

SEQ ID NO: 2099060 - RNA, 19 nt, Artificial Sequence
  Description of Artificial Sequence: Synthetic oligonucleotide
ucaccggacugaaggcuuu

SEQ ID NO: 2099061 - RNA, 19 nt, Artificial Sequence
  Description of Artificial Sequence: Synthetic oligonucleotide
augacgugcugcaggauuu

SEQ ID NO: 2099062 - RNA, 19 nt, Artificial Sequence
  Description of Artificial Sequence: Synthetic oligonucleotide
acugguugucugaaauaaa

SEQ ID NO: 2099063 - RNA, 19 nt, Artificial Sequence
  Description of Artificial Sequence: Synthetic oligonucleotide
gccgugguccgacaggcug

SEQ ID NO: 2099064 - RNA, 19 nt, Artificial Sequence
  Description of Artificial Sequence: Synthetic oligonucleotide
ggcauugaaagucucucau

SEQ ID NO: 2099065 - RNA, 19 nt, Artificial Sequence
  Description of Artificial Sequence: Synthetic oligonucleotide
ggcucaugucaaauaggcc

SEQ ID NO: 2099066 - RNA, 19 nt, Artificial Sequence
  Description of Artificial Sequence: Synthetic oligonucleotide
gugcaggcugacgauggug

SEQ ID NO: 2099067 - RNA, 19 nt, Artificial Sequence
  Description of Artificial Sequence: Synthetic oligonucleotide
uccuggacaccugguucug

SEQ ID NO: 2099068 - RNA, 19 nt, Artificial Sequence
  Description of Artificial Sequence: Synthetic oligonucleotide
ccuucggguagucacgcuc

SEQ ID NO: 2099069 - RNA, 19 nt, Artificial Sequence
  Description of Artificial Sequence: Synthetic oligonucleotide
uccuucggguagucacgcu

SEQ ID NO: 2099070 - RNA, 19 nt, Artificial Sequence
  Description of Artificial Sequence: Synthetic oligonucleotide
guaucgcaguccgggguug

SEQ ID NO: 2099071 - RNA, 19 nt, Artificial Sequence
  Description of Artificial Sequence: Synthetic oligonucleotide
gacgucagacacauuuuau

SEQ ID NO: 2099072 - RNA, 19 nt, Artificial Sequence
  Description of Artificial Sequence: Synthetic oligonucleotide
gggaauucagaugccugca

SEQ ID NO: 2099073 - RNA, 19 nt, Artificial Sequence
  Description of Artificial Sequence: Synthetic oligonucleotide
gcauugaaagucucucaua

SEQ ID NO: 2099074 - RNA, 19 nt, Artificial Sequence
  Description of Artificial Sequence: Synthetic oligonucleotide
cggguagucacgcuccacc

SEQ ID NO: 2099075 - RNA, 19 nt, Artificial Sequence
  Description of Artificial Sequence: Synthetic oligonucleotide
cgaauacuggguccuucgg

SEQ ID NO: 2099076 - RNA, 19 nt, Artificial Sequence
  Description of Artificial Sequence: Synthetic oligonucleotide
cgucagacacauuuuauua

SEQ ID NO: 2099077 - RNA, 19 nt, Artificial Sequence
  Description of Artificial Sequence: Synthetic oligonucleotide
gcugacgaugguggggugc

SEQ ID NO: 2099078 - RNA, 19 nt, Artificial Sequence
  Description of Artificial Sequence: Synthetic oligonucleotide
ccuccaaaagaaagaagua

SEQ ID NO: 2099079 - RNA, 19 nt, Artificial Sequence
  Description of Artificial Sequence: Synthetic oligonucleotide
uguccguguucaggguggu

SEQ ID NO: 2099080 - RNA, 19 nt, Artificial Sequence
  Description of Artificial Sequence: Synthetic oligonucleotide
ucggguagucacgcuccac

SEQ ID NO: 2099081 - RNA, 19 nt, Artificial Sequence
  Description of Artificial Sequence: Synthetic oligonucleotide
cagaguacuuugcuaucgu

SEQ ID NO: 2099082 - RNA, 19 nt, Artificial Sequence
  Description of Artificial Sequence: Synthetic oligonucleotide
gaaugcugauguccguguu

SEQ ID NO: 2099083 - RNA, 19 nt, Artificial Sequence
  Description of Artificial Sequence: Synthetic oligonucleotide
aaccgaauacuggguccuu

SEQ ID NO: 2099084 - RNA, 19 nt, Artificial Sequence
  Description of Artificial Sequence: Synthetic oligonucleotide
acggaccucaccggacuga

SEQ ID NO: 2099085 - RNA, 19 nt, Artificial Sequence
  Description of Artificial Sequence: Synthetic oligonucleotide
ccuaacggaccucaccgga

SEQ ID NO: 2099086 - RNA, 19 nt, Artificial Sequence
  Description of Artificial Sequence: Synthetic oligonucleotide
augccugcaaggacagaau

SEQ ID NO: 2099087 - RNA, 19 nt, Artificial Sequence
  Description of Artificial Sequence: Synthetic oligonucleotide
ccacagaguacuuugcuau

SEQ ID NO: 2099088 - RNA, 19 nt, Artificial Sequence
  Description of Artificial Sequence: Synthetic oligonucleotide
ggucaccuucuuguucugc

SEQ ID NO: 2099089 - RNA, 19 nt, Artificial Sequence
  Description of Artificial Sequence: Synthetic oligonucleotide
gagaacuucuggggaagau

SEQ ID NO: 2099090 - RNA, 19 nt, Artificial Sequence
  Description of Artificial Sequence: Synthetic oligonucleotide
ccauggugggaauaguaua

SEQ ID NO: 2099091 - RNA, 19 nt, Artificial Sequence
  Description of Artificial Sequence: Synthetic oligonucleotide
gggcaauuccuugugauuu

SEQ ID NO: 2099092 - RNA, 19 nt, Artificial Sequence
  Description of Artificial Sequence: Synthetic oligonucleotide
gauccccauggugggaaua

SEQ ID NO: 2099093 - RNA, 19 nt, Artificial Sequence
  Description of Artificial Sequence: Synthetic oligonucleotide
ugcccaagccgugguccga

SEQ ID NO: 2099094 - RNA, 19 nt, Artificial Sequence
  Description of Artificial Sequence: Synthetic oligonucleotide
caguccgggguuggagaac

SEQ ID NO: 2099095 - RNA, 19 nt, Artificial Sequence
  Description of Artificial Sequence: Synthetic oligonucleotide
ggcgaucugcagguccaag

SEQ ID NO: 2099096 - RNA, 19 nt, Artificial Sequence
  Description of Artificial Sequence: Synthetic oligonucleotide
cucaccggacugaaggcuu

SEQ ID NO: 2099097 - RNA, 19 nt, Artificial Sequence
  Description of Artificial Sequence: Synthetic oligonucleotide
aucgcaguccgggguugga

SEQ ID NO: 2099098 - RNA, 19 nt, Artificial Sequence
  Description of Artificial Sequence: Synthetic oligonucleotide
gcucaucgggucguccacc

SEQ ID NO: 2099099 - RNA, 19 nt, Artificial Sequence
  Description of Artificial Sequence: Synthetic oligonucleotide
ggguagucacgcuccaccu

SEQ ID NO: 2099100 - RNA, 19 nt, Artificial Sequence
  Description of Artificial Sequence: Synthetic oligonucleotide
gguaucgcaguccgggguu

SEQ ID NO: 2099101 - RNA, 19 nt, Artificial Sequence
  Description of Artificial Sequence: Synthetic oligonucleotide
agaugccugcaaggacaga

SEQ ID NO: 2099102 - RNA, 19 nt, Artificial Sequence
  Description of Artificial Sequence: Synthetic oligonucleotide
ccaccgggguuuugcuccg

SEQ ID NO: 2099103 - RNA, 19 nt, Artificial Sequence
  Description of Artificial Sequence: Synthetic oligonucleotide
ggucaacggcguccuggac

SEQ ID NO: 2099104 - RNA, 19 nt, Artificial Sequence
  Description of Artificial Sequence: Synthetic oligonucleotide
caccggacugaaggcuuuc

SEQ ID NO: 2099105 - RNA, 19 nt, Artificial Sequence
  Description of Artificial Sequence: Synthetic oligonucleotide
ggcaauuccuugugauuuu

SEQ ID NO: 2099106 - RNA, 19 nt, Artificial Sequence
  Description of Artificial Sequence: Synthetic oligonucleotide
caguaggcucaugucaaau

SEQ ID NO: 2099107 - RNA, 19 nt, Artificial Sequence
  Description of Artificial Sequence: Synthetic oligonucleotide
ggcugacgaugguggggug

SEQ ID NO: 2099108 - RNA, 19 nt, Artificial Sequence
  Description of Artificial Sequence: Synthetic oligonucleotide
ggaccucaccggacugaag

SEQ ID NO: 2099109 - RNA, 19 nt, Artificial Sequence
  Description of Artificial Sequence: Synthetic oligonucleotide
caccugguucuguccaggu

SEQ ID NO: 2099110 - RNA, 19 nt, Artificial Sequence
  Description of Artificial Sequence: Synthetic oligonucleotide
cgaguccagggcgaucugc

SEQ ID NO: 2099111 - RNA, 19 nt, Artificial Sequence
  Description of Artificial Sequence: Synthetic oligonucleotide
caccgggguuuugcuccgg

SEQ ID NO: 2099112 - RNA, 19 nt, Artificial Sequence
  Description of Artificial Sequence: Synthetic oligonucleotide
gguagucacgcuccaccuu

SEQ ID NO: 2099113 - RNA, 19 nt, Artificial Sequence
  Description of Artificial Sequence: Synthetic oligonucleotide
ccgggguuggagaacuucu

SEQ ID NO: 2099114 - RNA, 19 nt, Artificial Sequence
  Description of Artificial Sequence: Synthetic oligonucleotide
guccguguucagggugguc

SEQ ID NO: 2099115 - RNA, 19 nt, Artificial Sequence
  Description of Artificial Sequence: Synthetic oligonucleotide
ccaggucucugguggugca

SEQ ID NO: 2099116 - RNA, 19 nt, Artificial Sequence
  Description of Artificial Sequence: Synthetic oligonucleotide
gcgaguccagggcgaucug

SEQ ID NO: 2099117 - RNA, 19 nt, Artificial Sequence
  Description of Artificial Sequence: Synthetic oligonucleotide
ggugcaggcugacgauggu

SEQ ID NO: 2099118 - RNA, 19 nt, Artificial Sequence
  Description of Artificial Sequence: Synthetic oligonucleotide
caacggcguccuggacacc

SEQ ID NO: 2099119 - RNA, 19 nt, Artificial Sequence
  Description of Artificial Sequence: Synthetic oligonucleotide
gcccaagccgugguccgac

SEQ ID NO: 2099120 - RNA, 19 nt, Artificial Sequence
  Description of Artificial Sequence: Synthetic oligonucleotide
gggugcgaguccagggcga

SEQ ID NO: 2099121 - RNA, 19 nt, Artificial Sequence
  Description of Artificial Sequence: Synthetic oligonucleotide
gugcgaguccagggcgauc

SEQ ID NO: 2099122 - RNA, 19 nt, Artificial Sequence
  Description of Artificial Sequence: Synthetic oligonucleotide
ccguguucaggguggucaa

SEQ ID NO: 2099123 - RNA, 19 nt, Artificial Sequence
  Description of Artificial Sequence: Synthetic oligonucleotide
gggucguccaccgggguuu

SEQ ID NO: 2099124 - RNA, 19 nt, Artificial Sequence
  Description of Artificial Sequence: Synthetic oligonucleotide
cguguucaggguggucaac

SEQ ID NO: 2099125 - RNA, 19 nt, Artificial Sequence
  Description of Artificial Sequence: Synthetic oligonucleotide
cguucgacauaagcucaga

SEQ ID NO: 2099126 - RNA, 19 nt, Artificial Sequence
  Description of Artificial Sequence: Synthetic oligonucleotide
ccucaccggacugaaggcu

SEQ ID NO: 2099127 - RNA, 19 nt, Artificial Sequence
  Description of Artificial Sequence: Synthetic oligonucleotide
ccuucuuguucugcgggau

SEQ ID NO: 2099128 - RNA, 19 nt, Artificial Sequence
  Description of Artificial Sequence: Synthetic oligonucleotide
ccggacugaaggcuuucau

SEQ ID NO: 2099129 - RNA, 19 nt, Artificial Sequence
  Description of Artificial Sequence: Synthetic oligonucleotide
ggugcgaguccagggcgau

SEQ ID NO: 2099130 - RNA, 19 nt, Artificial Sequence
  Description of Artificial Sequence: Synthetic oligonucleotide
cgguaucgcaguccggggu

SEQ ID NO: 2099131 - RNA, 19 nt, Artificial Sequence
  Description of Artificial Sequence: Synthetic oligonucleotide
ccagggcgaucugcagguc

SEQ ID NO: 2099132 - RNA, 19 nt, Artificial Sequence
  Description of Artificial Sequence: Synthetic oligonucleotide
cugcuucaauugggcaauu

SEQ ID NO: 2099133 - RNA, 19 nt, Artificial Sequence
  Description of Artificial Sequence: Synthetic oligonucleotide
ccuggacaccugguucugu

SEQ ID NO: 2099134 - RNA, 19 nt, Artificial Sequence
  Description of Artificial Sequence: Synthetic oligonucleotide
guccgggguuggagaacuu

SEQ ID NO: 2099135 - RNA, 19 nt, Artificial Sequence
  Description of Artificial Sequence: Synthetic oligonucleotide
gugguccgacaggcuguuu

SEQ ID NO: 2099136 - RNA, 19 nt, Artificial Sequence
  Description of Artificial Sequence: Synthetic oligonucleotide
ggucguccaccgggguuuu

SEQ ID NO: 2099137 - RNA, 19 nt, Artificial Sequence
  Description of Artificial Sequence: Synthetic oligonucleotide
cgauccccauggugggaau

SEQ ID NO: 2099138 - RNA, 19 nt, Artificial Sequence
  Description of Artificial Sequence: Synthetic oligonucleotide
cgggucguccaccgggguu

SEQ ID NO: 2099139 - RNA, 19 nt, Artificial Sequence
  Description of Artificial Sequence: Synthetic oligonucleotide
cgugguccgacaggcuguu

SEQ ID NO: 2099140 - RNA, 19 nt, Artificial Sequence
  Description of Artificial Sequence: Synthetic oligonucleotide
uuacaaaugaggcagaacc

SEQ ID NO: 2099141 - RNA, 19 nt, Artificial Sequence
  Description of Artificial Sequence: Synthetic oligonucleotide
aauaaauguauccgaaccg

SEQ ID NO: 2099142 - RNA, 19 nt, Artificial Sequence
  Description of Artificial Sequence: Synthetic oligonucleotide
acuuauaucaacauucucc

SEQ ID NO: 2099143 - RNA, 19 nt, Artificial Sequence
  Description of Artificial Sequence: Synthetic oligonucleotide
aggaucacaagcuuaaagc

SEQ ID NO: 2099144 - RNA, 19 nt, Artificial Sequence
  Description of Artificial Sequence: Synthetic oligonucleotide
uaauaaauguauccgaacc

SEQ ID NO: 2099145 - RNA, 19 nt, Artificial Sequence
  Description of Artificial Sequence: Synthetic oligonucleotide
aguggugaagucuugauuc

SEQ ID NO: 2099146 - RNA, 19 nt, Artificial Sequence
  Description of Artificial Sequence: Synthetic oligonucleotide
aaacaagugaaccucuguc

SEQ ID NO: 2099147 - RNA, 19 nt, Artificial Sequence
  Description of Artificial Sequence: Synthetic oligonucleotide
aaugcuacucagaaugucc

SEQ ID NO: 2099148 - RNA, 19 nt, Artificial Sequence
  Description of Artificial Sequence: Synthetic oligonucleotide
auaguuacaaaugaggcag

SEQ ID NO: 2099149 - RNA, 19 nt, Artificial Sequence
  Description of Artificial Sequence: Synthetic oligonucleotide
uguaucuucucacuggugc

SEQ ID NO: 2099150 - RNA, 19 nt, Artificial Sequence
  Description of Artificial Sequence: Synthetic oligonucleotide
uugguuaauaaauguaucc

SEQ ID NO: 2099151 - RNA, 19 nt, Artificial Sequence
  Description of Artificial Sequence: Synthetic oligonucleotide
agauaguuacaaaugaggc

SEQ ID NO: 2099152 - RNA, 19 nt, Artificial Sequence
  Description of Artificial Sequence: Synthetic oligonucleotide
aauguauccgaaccgaaga

SEQ ID NO: 2099153 - RNA, 19 nt, Artificial Sequence
  Description of Artificial Sequence: Synthetic oligonucleotide
aucuuggacagauaguuac

SEQ ID NO: 2099154 - RNA, 19 nt, Artificial Sequence
  Description of Artificial Sequence: Synthetic oligonucleotide
uuuugguuaauaaauguau

SEQ ID NO: 2099155 - RNA, 19 nt, Artificial Sequence
  Description of Artificial Sequence: Synthetic oligonucleotide
cagauaguuacaaaugagg

SEQ ID NO: 2099156 - RNA, 19 nt, Artificial Sequence
  Description of Artificial Sequence: Synthetic oligonucleotide
ugagaaaugagaucggcca

SEQ ID NO: 2099157 - RNA, 19 nt, Artificial Sequence
  Description of Artificial Sequence: Synthetic oligonucleotide
aauguucagagcccugcgc

SEQ ID NO: 2099158 - RNA, 19 nt, Artificial Sequence
  Description of Artificial Sequence: Synthetic oligonucleotide
ucaaucacucgccucaagg

SEQ ID NO: 2099159 - RNA, 19 nt, Artificial Sequence
  Description of Artificial Sequence: Synthetic oligonucleotide
uugaagauuguccuugugc

SEQ ID NO: 2099160 - RNA, 19 nt, Artificial Sequence
  Description of Artificial Sequence: Synthetic oligonucleotide
uccaugaugugucuguagg

SEQ ID NO: 2099161 - RNA, 19 nt, Artificial Sequence
  Description of Artificial Sequence: Synthetic oligonucleotide
ugguuaauaaauguauccg

SEQ ID NO: 2099162 - RNA, 19 nt, Artificial Sequence
  Description of Artificial Sequence: Synthetic oligonucleotide
cuggugagaaaugagaucg

SEQ ID NO: 2099163 - RNA, 19 nt, Artificial Sequence
  Description of Artificial Sequence: Synthetic oligonucleotide
uguacuacaugcuccaggc

SEQ ID NO: 2099164 - RNA, 19 nt, Artificial Sequence
  Description of Artificial Sequence: Synthetic oligonucleotide
aacaagugaaccucuguca

SEQ ID NO: 2099165 - RNA, 19 nt, Artificial Sequence
  Description of Artificial Sequence: Synthetic oligonucleotide
ugaagauuguccuugugcu

SEQ ID NO: 2099166 - RNA, 19 nt, Artificial Sequence
  Description of Artificial Sequence: Synthetic oligonucleotide
aaucggaaccuugugcacc

SEQ ID NO: 2099167 - RNA, 19 nt, Artificial Sequence
  Description of Artificial Sequence: Synthetic oligonucleotide
ucuuuguacagcugcuugg

SEQ ID NO: 2099168 - RNA, 19 nt, Artificial Sequence
  Description of Artificial Sequence: Synthetic oligonucleotide
uuguacuacaugcuccagg

SEQ ID NO: 2099169 - RNA, 19 nt, Artificial Sequence
  Description of Artificial Sequence: Synthetic oligonucleotide
aaugucuauuccucgguca

SEQ ID NO: 2099170 - RNA, 19 nt, Artificial Sequence
  Description of Artificial Sequence: Synthetic oligonucleotide
uucucaaucacucgccuca

SEQ ID NO: 2099171 - RNA, 19 nt, Artificial Sequence
  Description of Artificial Sequence: Synthetic oligonucleotide
uacuacaugcuccaggcga

SEQ ID NO: 2099172 - RNA, 19 nt, Artificial Sequence
  Description of Artificial Sequence: Synthetic oligonucleotide
uuugguuaauaaauguauc

SEQ ID NO: 2099173 - RNA, 19 nt, Artificial Sequence
  Description of Artificial Sequence: Synthetic oligonucleotide
ucucuggugacuugaaaag

SEQ ID NO: 2099174 - RNA, 19 nt, Artificial Sequence
  Description of Artificial Sequence: Synthetic oligonucleotide
aaaucggaaccuugugcac

SEQ ID NO: 2099175 - RNA, 19 nt, Artificial Sequence
  Description of Artificial Sequence: Synthetic oligonucleotide
aauguuggcgauaucuguc

SEQ ID NO: 2099176 - RNA, 19 nt, Artificial Sequence
  Description of Artificial Sequence: Synthetic oligonucleotide
aagucuugauucagcaucc

SEQ ID NO: 2099177 - RNA, 19 nt, Artificial Sequence
  Description of Artificial Sequence: Synthetic oligonucleotide
gagacgaucaggucucugg

SEQ ID NO: 2099178 - RNA, 19 nt, Artificial Sequence
  Description of Artificial Sequence: Synthetic oligonucleotide
uggacagauaguuacaaau

SEQ ID NO: 2099179 - RNA, 19 nt, Artificial Sequence
  Description of Artificial Sequence: Synthetic oligonucleotide
uuaaagccuuucuugaaga

SEQ ID NO: 2099180 - RNA, 19 nt, Artificial Sequence
  Description of Artificial Sequence: Synthetic oligonucleotide
gaacuucucaaucacucgc

SEQ ID NO: 2099181 - RNA, 19 nt, Artificial Sequence
  Description of Artificial Sequence: Synthetic oligonucleotide
cuuaaagccuuucuugaag

SEQ ID NO: 2099182 - RNA, 19 nt, Artificial Sequence
  Description of Artificial Sequence: Synthetic oligonucleotide
ggaaccaugaguucaggcg

SEQ ID NO: 2099183 - RNA, 19 nt, Artificial Sequence
  Description of Artificial Sequence: Synthetic oligonucleotide
acaagugaaccucugucag

SEQ ID NO: 2099184 - RNA, 19 nt, Artificial Sequence
  Description of Artificial Sequence: Synthetic oligonucleotide
aaucacucgccucaaggca

SEQ ID NO: 2099185 - RNA, 19 nt, Artificial Sequence
  Description of Artificial Sequence: Synthetic oligonucleotide
guugguacucugcagaaug

SEQ ID NO: 2099186 - RNA, 19 nt, Artificial Sequence
  Description of Artificial Sequence: Synthetic oligonucleotide
uauuccucggucaucagau

SEQ ID NO: 2099187 - RNA, 19 nt, Artificial Sequence
  Description of Artificial Sequence: Synthetic oligonucleotide
ucuauacucaaugucugcc

SEQ ID NO: 2099188 - RNA, 19 nt, Artificial Sequence
  Description of Artificial Sequence: Synthetic oligonucleotide
cuugauucagcauccaguc

SEQ ID NO: 2099189 - RNA, 19 nt, Artificial Sequence
  Description of Artificial Sequence: Synthetic oligonucleotide
ugaaccucugucaggaugu

SEQ ID NO: 2099190 - RNA, 19 nt, Artificial Sequence
  Description of Artificial Sequence: Synthetic oligonucleotide
cuccucuuguacuacaugc

SEQ ID NO: 2099191 - RNA, 19 nt, Artificial Sequence
  Description of Artificial Sequence: Synthetic oligonucleotide
ucugugcacaaacaaguga

SEQ ID NO: 2099192 - RNA, 19 nt, Artificial Sequence
  Description of Artificial Sequence: Synthetic oligonucleotide
ugcaaggcagggaugaucu

SEQ ID NO: 2099193 - RNA, 19 nt, Artificial Sequence
  Description of Artificial Sequence: Synthetic oligonucleotide
guauccgaaccgaagaugg

SEQ ID NO: 2099194 - RNA, 19 nt, Artificial Sequence
  Description of Artificial Sequence: Synthetic oligonucleotide
aaagucaacucugugcaca

SEQ ID NO: 2099195 - RNA, 19 nt, Artificial Sequence
  Description of Artificial Sequence: Synthetic oligonucleotide
caaagcugaggauuggccc

SEQ ID NO: 2099196 - RNA, 19 nt, Artificial Sequence
  Description of Artificial Sequence: Synthetic oligonucleotide
ucacugaugaacuucugaa

SEQ ID NO: 2099197 - RNA, 19 nt, Artificial Sequence
  Description of Artificial Sequence: Synthetic oligonucleotide
aaauguauccgaaccgaag

SEQ ID NO: 2099198 - RNA, 19 nt, Artificial Sequence
  Description of Artificial Sequence: Synthetic oligonucleotide
augacuguacagaugcugc

SEQ ID NO: 2099199 - RNA, 19 nt, Artificial Sequence
  Description of Artificial Sequence: Synthetic oligonucleotide
ucacuuauaucaacauucu

SEQ ID NO: 2099200 - RNA, 19 nt, Artificial Sequence
  Description of Artificial Sequence: Synthetic oligonucleotide
gaagauggaaagucaacuc

SEQ ID NO: 2099201 - RNA, 19 nt, Artificial Sequence
  Description of Artificial Sequence: Synthetic oligonucleotide
aaccuugugcaccuggacu

SEQ ID NO: 2099202 - RNA, 19 nt, Artificial Sequence
  Description of Artificial Sequence: Synthetic oligonucleotide
aggaaccaugaguucaggc

SEQ ID NO: 2099203 - RNA, 19 nt, Artificial Sequence
  Description of Artificial Sequence: Synthetic oligonucleotide
uggucgguacuuuucaacc

SEQ ID NO: 2099204 - RNA, 19 nt, Artificial Sequence
  Description of Artificial Sequence: Synthetic oligonucleotide
guacuuuucaacccagggc

SEQ ID NO: 2099205 - RNA, 19 nt, Artificial Sequence
  Description of Artificial Sequence: Synthetic oligonucleotide
augaguucaggcgucaggg

SEQ ID NO: 2099206 - RNA, 19 nt, Artificial Sequence
  Description of Artificial Sequence: Synthetic oligonucleotide
uacaaaugaggcagaaccu

SEQ ID NO: 2099207 - RNA, 19 nt, Artificial Sequence
  Description of Artificial Sequence: Synthetic oligonucleotide
augucugccauuuugguua

SEQ ID NO: 2099208 - RNA, 19 nt, Artificial Sequence
  Description of Artificial Sequence: Synthetic oligonucleotide
ugacuugaaaagcagcgau

SEQ ID NO: 2099209 - RNA, 19 nt, Artificial Sequence
  Description of Artificial Sequence: Synthetic oligonucleotide
uuaucuuuguacagcugcu

SEQ ID NO: 2099210 - RNA, 19 nt, Artificial Sequence
  Description of Artificial Sequence: Synthetic oligonucleotide
uucucacuggugccgacgg

SEQ ID NO: 2099211 - RNA, 19 nt, Artificial Sequence
  Description of Artificial Sequence: Synthetic oligonucleotide
uuccucggucaucagaugc

SEQ ID NO: 2099212 - RNA, 19 nt, Artificial Sequence
  Description of Artificial Sequence: Synthetic oligonucleotide
ggaucacaagcuuaaagcc

SEQ ID NO: 2099213 - RNA, 19 nt, Artificial Sequence
  Description of Artificial Sequence: Synthetic oligonucleotide
ucugagacgaucaggucuc

SEQ ID NO: 2099214 - RNA, 19 nt, Artificial Sequence
  Description of Artificial Sequence: Synthetic oligonucleotide
auaaauguauccgaaccga

SEQ ID NO: 2099215 - RNA, 19 nt, Artificial Sequence
  Description of Artificial Sequence: Synthetic oligonucleotide
gaauguucagagcccugcg

SEQ ID NO: 2099216 - RNA, 19 nt, Artificial Sequence
  Description of Artificial Sequence: Synthetic oligonucleotide
ugacuguacagaugcugcg

SEQ ID NO: 2099217 - RNA, 19 nt, Artificial Sequence
  Description of Artificial Sequence: Synthetic oligonucleotide
caaucacucgccucaaggc

SEQ ID NO: 2099218 - RNA, 19 nt, Artificial Sequence
  Description of Artificial Sequence: Synthetic oligonucleotide
uucagcuccaugauguguc

SEQ ID NO: 2099219 - RNA, 19 nt, Artificial Sequence
  Description of Artificial Sequence: Synthetic oligonucleotide
gugaugagggccuucauuc

SEQ ID NO: 2099220 - RNA, 19 nt, Artificial Sequence
  Description of Artificial Sequence: Synthetic oligonucleotide
aaugucugccauuuugguu

SEQ ID NO: 2099221 - RNA, 19 nt, Artificial Sequence
  Description of Artificial Sequence: Synthetic oligonucleotide
uggacugcaaggcagggau

SEQ ID NO: 2099222 - RNA, 19 nt, Artificial Sequence
  Description of Artificial Sequence: Synthetic oligonucleotide
caaaucggaaccuugugca

SEQ ID NO: 2099223 - RNA, 19 nt, Artificial Sequence
  Description of Artificial Sequence: Synthetic oligonucleotide
aucaacauucuccucuugu

SEQ ID NO: 2099224 - RNA, 19 nt, Artificial Sequence
  Description of Artificial Sequence: Synthetic oligonucleotide
gcgauaucugucuuuaggg

SEQ ID NO: 2099225 - RNA, 19 nt, Artificial Sequence
  Description of Artificial Sequence: Synthetic oligonucleotide
acuugaaaagcagcgauga

SEQ ID NO: 2099226 - RNA, 19 nt, Artificial Sequence
  Description of Artificial Sequence: Synthetic oligonucleotide
augucaugcagagccaagc

SEQ ID NO: 2099227 - RNA, 19 nt, Artificial Sequence
  Description of Artificial Sequence: Synthetic oligonucleotide
agaaaugagaucggccagg

SEQ ID NO: 2099228 - RNA, 19 nt, Artificial Sequence
  Description of Artificial Sequence: Synthetic oligonucleotide
gccaugacuguacagaugc

SEQ ID NO: 2099229 - RNA, 19 nt, Artificial Sequence
  Description of Artificial Sequence: Synthetic oligonucleotide
cuuauaucaacauucuccu

SEQ ID NO: 2099230 - RNA, 19 nt, Artificial Sequence
  Description of Artificial Sequence: Synthetic oligonucleotide
uaaauguauccgaaccgaa

SEQ ID NO: 2099231 - RNA, 19 nt, Artificial Sequence
  Description of Artificial Sequence: Synthetic oligonucleotide
uccaagaccauggagccga

SEQ ID NO: 2099232 - RNA, 19 nt, Artificial Sequence
  Description of Artificial Sequence: Synthetic oligonucleotide
ggcgauaucugucuuuagg

SEQ ID NO: 2099233 - RNA, 19 nt, Artificial Sequence
  Description of Artificial Sequence: Synthetic oligonucleotide
ugugcuggcaaagcugagg

SEQ ID NO: 2099234 - RNA, 19 nt, Artificial Sequence
  Description of Artificial Sequence: Synthetic oligonucleotide
acagauaguuacaaaugag

SEQ ID NO: 2099235 - RNA, 19 nt, Artificial Sequence
  Description of Artificial Sequence: Synthetic oligonucleotide
ggagagucuauacucaaug

SEQ ID NO: 2099236 - RNA, 19 nt, Artificial Sequence
  Description of Artificial Sequence: Synthetic oligonucleotide
augaugugucuguaggcag

SEQ ID NO: 2099237 - RNA, 19 nt, Artificial Sequence
  Description of Artificial Sequence: Synthetic oligonucleotide
gaaccgaagauggaaaguc

SEQ ID NO: 2099238 - RNA, 19 nt, Artificial Sequence
  Description of Artificial Sequence: Synthetic oligonucleotide
uccuggugagaaaugagau

SEQ ID NO: 2099239 - RNA, 19 nt, Artificial Sequence
  Description of Artificial Sequence: Synthetic oligonucleotide
caggaucacaagcuuaaag

SEQ ID NO: 2099240 - RNA, 19 nt, Artificial Sequence
  Description of Artificial Sequence: Synthetic oligonucleotide
ucugcagaauguucagagc

SEQ ID NO: 2099241 - RNA, 19 nt, Artificial Sequence
  Description of Artificial Sequence: Synthetic oligonucleotide
ugaaugcuacucagaaugu

SEQ ID NO: 2099242 - RNA, 19 nt, Artificial Sequence
  Description of Artificial Sequence: Synthetic oligonucleotide
uacacggucucuucuguca

SEQ ID NO: 2099243 - RNA, 19 nt, Artificial Sequence
  Description of Artificial Sequence: Synthetic oligonucleotide
uguauccgaaccgaagaug

SEQ ID NO: 2099244 - RNA, 19 nt, Artificial Sequence
  Description of Artificial Sequence: Synthetic oligonucleotide
gaagauuguccuugugcug

SEQ ID NO: 2099245 - RNA, 19 nt, Artificial Sequence
  Description of Artificial Sequence: Synthetic oligonucleotide
gaaccugguguuuucugug

SEQ ID NO: 2099246 - RNA, 19 nt, Artificial Sequence
  Description of Artificial Sequence: Synthetic oligonucleotide
uugauucagcauccagucc

SEQ ID NO: 2099247 - RNA, 19 nt, Artificial Sequence
  Description of Artificial Sequence: Synthetic oligonucleotide
ucaacauucuccucuugua

SEQ ID NO: 2099248 - RNA, 19 nt, Artificial Sequence
  Description of Artificial Sequence: Synthetic oligonucleotide
auguucagagcccugcgca

SEQ ID NO: 2099249 - RNA, 19 nt, Artificial Sequence
  Description of Artificial Sequence: Synthetic oligonucleotide
uggugagaaaugagaucgg

SEQ ID NO: 2099250 - RNA, 19 nt, Artificial Sequence
  Description of Artificial Sequence: Synthetic oligonucleotide
uccucuuguacuacaugcu

SEQ ID NO: 2099251 - RNA, 19 nt, Artificial Sequence
  Description of Artificial Sequence: Synthetic oligonucleotide
ugaguucaggcgucagggg

SEQ ID NO: 2099252 - RNA, 19 nt, Artificial Sequence
  Description of Artificial Sequence: Synthetic oligonucleotide
caugaguucaggcgucagg

SEQ ID NO: 2099253 - RNA, 19 nt, Artificial Sequence
  Description of Artificial Sequence: Synthetic oligonucleotide
acaaugucuauuccucggu

SEQ ID NO: 2099254 - RNA, 19 nt, Artificial Sequence
  Description of Artificial Sequence: Synthetic oligonucleotide
guaucuucucacuggugcc

SEQ ID NO: 2099255 - RNA, 19 nt, Artificial Sequence
  Description of Artificial Sequence: Synthetic oligonucleotide
gcagggaugaucuuggaca

SEQ ID NO: 2099256 - RNA, 19 nt, Artificial Sequence
  Description of Artificial Sequence: Synthetic oligonucleotide
cuggugacuugaaaagcag

SEQ ID NO: 2099257 - RNA, 19 nt, Artificial Sequence
  Description of Artificial Sequence: Synthetic oligonucleotide
agauggaaagucaacucug

SEQ ID NO: 2099258 - RNA, 19 nt, Artificial Sequence
  Description of Artificial Sequence: Synthetic oligonucleotide
cugugcacaaacaagugaa

SEQ ID NO: 2099259 - RNA, 19 nt, Artificial Sequence
  Description of Artificial Sequence: Synthetic oligonucleotide
cucagcuguaucuucucac

SEQ ID NO: 2099260 - RNA, 19 nt, Artificial Sequence
  Description of Artificial Sequence: Synthetic oligonucleotide
cuggcaaagcugaggauug

SEQ ID NO: 2099261 - RNA, 19 nt, Artificial Sequence
  Description of Artificial Sequence: Synthetic oligonucleotide
cauagagaaguaggugugg

SEQ ID NO: 2099262 - RNA, 19 nt, Artificial Sequence
  Description of Artificial Sequence: Synthetic oligonucleotide
ucuguggucgguacuuuuc

SEQ ID NO: 2099263 - RNA, 19 nt, Artificial Sequence
  Description of Artificial Sequence: Synthetic oligonucleotide
auuuugguuaauaaaugua

SEQ ID NO: 2099264 - RNA, 19 nt, Artificial Sequence
  Description of Artificial Sequence: Synthetic oligonucleotide
caugacuguacagaugcug

SEQ ID NO: 2099265 - RNA, 19 nt, Artificial Sequence
  Description of Artificial Sequence: Synthetic oligonucleotide
ucgccucaaggcauucugg

SEQ ID NO: 2099266 - RNA, 19 nt, Artificial Sequence
  Description of Artificial Sequence: Synthetic oligonucleotide
ucgguacuuuucaacccag

SEQ ID NO: 2099267 - RNA, 19 nt, Artificial Sequence
  Description of Artificial Sequence: Synthetic oligonucleotide
gugaaccucugucaggaug

SEQ ID NO: 2099268 - RNA, 19 nt, Artificial Sequence
  Description of Artificial Sequence: Synthetic oligonucleotide
ucagaugcauucagcucca

SEQ ID NO: 2099269 - RNA, 19 nt, Artificial Sequence
  Description of Artificial Sequence: Synthetic oligonucleotide
ugaugagggccuucauucc

SEQ ID NO: 2099270 - RNA, 19 nt, Artificial Sequence
  Description of Artificial Sequence: Synthetic oligonucleotide
ugcgcauauccccacugga

SEQ ID NO: 2099271 - RNA, 19 nt, Artificial Sequence
  Description of Artificial Sequence: Synthetic oligonucleotide
auguuggcgauaucugucu

SEQ ID NO: 2099272 - RNA, 19 nt, Artificial Sequence
  Description of Artificial Sequence: Synthetic oligonucleotide
aggaugguggaugucuuuc

SEQ ID NO: 2099273 - RNA, 19 nt, Artificial Sequence
  Description of Artificial Sequence: Synthetic oligonucleotide
cagcauccaguccagaaug

SEQ ID NO: 2099274 - RNA, 19 nt, Artificial Sequence
  Description of Artificial Sequence: Synthetic oligonucleotide
gagucuauacucaaugucu

SEQ ID NO: 2099275 - RNA, 19 nt, Artificial Sequence
  Description of Artificial Sequence: Synthetic oligonucleotide
agaauguuggcgauaucug

SEQ ID NO: 2099276 - RNA, 19 nt, Artificial Sequence
  Description of Artificial Sequence: Synthetic oligonucleotide
uccgaaccgaagauggaaa

SEQ ID NO: 2099277 - RNA, 19 nt, Artificial Sequence
  Description of Artificial Sequence: Synthetic oligonucleotide
gacuugaaaagcagcgaug

SEQ ID NO: 2099278 - RNA, 19 nt, Artificial Sequence
  Description of Artificial Sequence: Synthetic oligonucleotide
gucuauacucaaugucugc

SEQ ID NO: 2099279 - RNA, 19 nt, Artificial Sequence
  Description of Artificial Sequence: Synthetic oligonucleotide
aagucaacucugugcacaa

SEQ ID NO: 2099280 - RNA, 19 nt, Artificial Sequence
  Description of Artificial Sequence: Synthetic oligonucleotide
agucuauacucaaugucug

SEQ ID NO: 2099281 - RNA, 19 nt, Artificial Sequence
  Description of Artificial Sequence: Synthetic oligonucleotide
gugagaaaugagaucggcc

SEQ ID NO: 2099282 - RNA, 19 nt, Artificial Sequence
  Description of Artificial Sequence: Synthetic oligonucleotide
gaugagggccuucauucca

SEQ ID NO: 2099283 - RNA, 19 nt, Artificial Sequence
  Description of Artificial Sequence: Synthetic oligonucleotide
caucuucacuuauaucaac

SEQ ID NO: 2099284 - RNA, 19 nt, Artificial Sequence
  Description of Artificial Sequence: Synthetic oligonucleotide
gaaccaugaguucaggcgu

SEQ ID NO: 2099285 - RNA, 19 nt, Artificial Sequence
  Description of Artificial Sequence: Synthetic oligonucleotide
uugguacucugcagaaugu

SEQ ID NO: 2099286 - RNA, 19 nt, Artificial Sequence
  Description of Artificial Sequence: Synthetic oligonucleotide
ugaagucuugauucagcau

SEQ ID NO: 2099287 - RNA, 19 nt, Artificial Sequence
  Description of Artificial Sequence: Synthetic oligonucleotide
uuauaucaacauucuccuc

SEQ ID NO: 2099288 - RNA, 19 nt, Artificial Sequence
  Description of Artificial Sequence: Synthetic oligonucleotide
ggacaaugucuauuccucg

SEQ ID NO: 2099289 - RNA, 19 nt, Artificial Sequence
  Description of Artificial Sequence: Synthetic oligonucleotide
aaaugaggcagaaccuggu

SEQ ID NO: 2099290 - RNA, 19 nt, Artificial Sequence
  Description of Artificial Sequence: Synthetic oligonucleotide
gagcccugcgcauaucccc

SEQ ID NO: 2099291 - RNA, 19 nt, Artificial Sequence
  Description of Artificial Sequence: Synthetic oligonucleotide
uaguuacaaaugaggcaga

SEQ ID NO: 2099292 - RNA, 19 nt, Artificial Sequence
  Description of Artificial Sequence: Synthetic oligonucleotide
uuuucaacccagggcaagu

SEQ ID NO: 2099293 - RNA, 19 nt, Artificial Sequence
  Description of Artificial Sequence: Synthetic oligonucleotide
aaccaugaguucaggcguc

SEQ ID NO: 2099294 - RNA, 19 nt, Artificial Sequence
  Description of Artificial Sequence: Synthetic oligonucleotide
auaucaacauucuccucuu

SEQ ID NO: 2099295 - RNA, 19 nt, Artificial Sequence
  Description of Artificial Sequence: Synthetic oligonucleotide
uucaacccagggcaaguuc

SEQ ID NO: 2099296 - RNA, 19 nt, Artificial Sequence
  Description of Artificial Sequence: Synthetic oligonucleotide
uaucaacauucuccucuug

SEQ ID NO: 2099297 - RNA, 19 nt, Artificial Sequence
  Description of Artificial Sequence: Synthetic oligonucleotide
agacgaucaggucucuggu

SEQ ID NO: 2099298 - RNA, 19 nt, Artificial Sequence
  Description of Artificial Sequence: Synthetic oligonucleotide
aaaggccauguugguacuc

SEQ ID NO: 2099299 - RNA, 19 nt, Artificial Sequence
  Description of Artificial Sequence: Synthetic oligonucleotide
gcuacucagaauguccugg

SEQ ID NO: 2099300 - RNA, 19 nt, Artificial Sequence
  Description of Artificial Sequence: Synthetic oligonucleotide
gaauguuggcgauaucugu

SEQ ID NO: 2099301 - RNA, 19 nt, Artificial Sequence
  Description of Artificial Sequence: Synthetic oligonucleotide
cuuggaucugcuaggccuc

SEQ ID NO: 2099302 - RNA, 19 nt, Artificial Sequence
  Description of Artificial Sequence: Synthetic oligonucleotide
cucuggugacuugaaaagc

SEQ ID NO: 2099303 - RNA, 19 nt, Artificial Sequence
  Description of Artificial Sequence: Synthetic oligonucleotide
ccaaaucggaaccuugugc

SEQ ID NO: 2099304 - RNA, 19 nt, Artificial Sequence
  Description of Artificial Sequence: Synthetic oligonucleotide
aggcgguccucacugauga

SEQ ID NO: 2099305 - RNA, 19 nt, Artificial Sequence
  Description of Artificial Sequence: Synthetic oligonucleotide
gaugugucuguaggcagug

SEQ ID NO: 2099306 - RNA, 19 nt, Artificial Sequence
  Description of Artificial Sequence: Synthetic oligonucleotide
auguauccgaaccgaagau

SEQ ID NO: 2099307 - RNA, 19 nt, Artificial Sequence
  Description of Artificial Sequence: Synthetic oligonucleotide
aaccgaagauggaaaguca

SEQ ID NO: 2099308 - RNA, 19 nt, Artificial Sequence
  Description of Artificial Sequence: Synthetic oligonucleotide
ugcuacucagaauguccug

SEQ ID NO: 2099309 - RNA, 19 nt, Artificial Sequence
  Description of Artificial Sequence: Synthetic oligonucleotide
aucggaaccuugugcaccu

SEQ ID NO: 2099310 - RNA, 19 nt, Artificial Sequence
  Description of Artificial Sequence: Synthetic oligonucleotide
gaugucaugcagagccaag

SEQ ID NO: 2099311 - RNA, 19 nt, Artificial Sequence
  Description of Artificial Sequence: Synthetic oligonucleotide
uuggacagauaguuacaaa

SEQ ID NO: 2099312 - RNA, 19 nt, Artificial Sequence
  Description of Artificial Sequence: Synthetic oligonucleotide
uauccgaaccgaagaugga

SEQ ID NO: 2099313 - RNA, 19 nt, Artificial Sequence
  Description of Artificial Sequence: Synthetic oligonucleotide
caugaugugucuguaggca

SEQ ID NO: 2099314 - RNA, 19 nt, Artificial Sequence
  Description of Artificial Sequence: Synthetic oligonucleotide
guacuacaugcuccaggcg

SEQ ID NO: 2099315 - RNA, 19 nt, Artificial Sequence
  Description of Artificial Sequence: Synthetic oligonucleotide
gaaccuugugcaccuggac

SEQ ID NO: 2099316 - RNA, 19 nt, Artificial Sequence
  Description of Artificial Sequence: Synthetic oligonucleotide
gaaugcuacucagaauguc

SEQ ID NO: 2099317 - RNA, 19 nt, Artificial Sequence
  Description of Artificial Sequence: Synthetic oligonucleotide
acuacaugcuccaggcgag

SEQ ID NO: 2099318 - RNA, 19 nt, Artificial Sequence
  Description of Artificial Sequence: Synthetic oligonucleotide
acauucuccucuuguacua

SEQ ID NO: 2099319 - RNA, 19 nt, Artificial Sequence
  Description of Artificial Sequence: Synthetic oligonucleotide
guggucgguacuuuucaac

SEQ ID NO: 2099320 - RNA, 19 nt, Artificial Sequence
  Description of Artificial Sequence: Synthetic oligonucleotide
cucgccucaaggcauucug

SEQ ID NO: 2099321 - RNA, 19 nt, Artificial Sequence
  Description of Artificial Sequence: Synthetic oligonucleotide
cuccaugaugugucuguag

SEQ ID NO: 2099322 - RNA, 19 nt, Artificial Sequence
  Description of Artificial Sequence: Synthetic oligonucleotide
caugcuccaggcgaggaac

SEQ ID NO: 2099323 - RNA, 19 nt, Artificial Sequence
  Description of Artificial Sequence: Synthetic oligonucleotide
agcgaugagggagcucagc

SEQ ID NO: 2099324 - RNA, 19 nt, Artificial Sequence
  Description of Artificial Sequence: Synthetic oligonucleotide
gagagucuauacucaaugu

SEQ ID NO: 2099325 - RNA, 19 nt, Artificial Sequence
  Description of Artificial Sequence: Synthetic oligonucleotide
caaguuccgggcccgggcc

SEQ ID NO: 2099326 - RNA, 19 nt, Artificial Sequence
  Description of Artificial Sequence: Synthetic oligonucleotide
auguugguacucugcagaa

SEQ ID NO: 2099327 - RNA, 19 nt, Artificial Sequence
  Description of Artificial Sequence: Synthetic oligonucleotide
uggagccgaauucuuuauc

SEQ ID NO: 2099328 - RNA, 19 nt, Artificial Sequence
  Description of Artificial Sequence: Synthetic oligonucleotide
caucuugagucauggcauc

SEQ ID NO: 2099329 - RNA, 19 nt, Artificial Sequence
  Description of Artificial Sequence: Synthetic oligonucleotide
gugcaccuggacugcaagg

SEQ ID NO: 2099330 - RNA, 19 nt, Artificial Sequence
  Description of Artificial Sequence: Synthetic oligonucleotide
augagaucggccagggucu

SEQ ID NO: 2099331 - RNA, 19 nt, Artificial Sequence
  Description of Artificial Sequence: Synthetic oligonucleotide
cgauaucugucuuuagggg

SEQ ID NO: 2099332 - RNA, 19 nt, Artificial Sequence
  Description of Artificial Sequence: Synthetic oligonucleotide
cugcgcauauccccacugg

SEQ ID NO: 2099333 - RNA, 19 nt, Artificial Sequence
  Description of Artificial Sequence: Synthetic oligonucleotide
gguguuuucugugaacuuc

SEQ ID NO: 2099334 - RNA, 19 nt, Artificial Sequence
  Description of Artificial Sequence: Synthetic oligonucleotide
aacccagggcaaguuccgg

SEQ ID NO: 2099335 - RNA, 19 nt, Artificial Sequence
  Description of Artificial Sequence: Synthetic oligonucleotide
ggucgguacuuuucaaccc

SEQ ID NO: 2099336 - RNA, 19 nt, Artificial Sequence
  Description of Artificial Sequence: Synthetic oligonucleotide
cuucucacuggugccgacg

SEQ ID NO: 2099337 - RNA, 19 nt, Artificial Sequence
  Description of Artificial Sequence: Synthetic oligonucleotide
ggugagaaaugagaucggc

SEQ ID NO: 2099338 - RNA, 19 nt, Artificial Sequence
  Description of Artificial Sequence: Synthetic oligonucleotide
ucagcuccaugaugugucu

SEQ ID NO: 2099339 - RNA, 19 nt, Artificial Sequence
  Description of Artificial Sequence: Synthetic oligonucleotide
gacggagagucuauacuca

SEQ ID NO: 2099340 - RNA, 19 nt, Artificial Sequence
  Description of Artificial Sequence: Synthetic oligonucleotide
cucugagacgaucaggucu

SEQ ID NO: 2099341 - RNA, 19 nt, Artificial Sequence
  Description of Artificial Sequence: Synthetic oligonucleotide
uguggucgguacuuuucaa

SEQ ID NO: 2099342 - RNA, 19 nt, Artificial Sequence
  Description of Artificial Sequence: Synthetic oligonucleotide
aguuacaaaugaggcagaa

SEQ ID NO: 2099343 - RNA, 19 nt, Artificial Sequence
  Description of Artificial Sequence: Synthetic oligonucleotide
cuauuccucggucaucaga

SEQ ID NO: 2099344 - RNA, 19 nt, Artificial Sequence
  Description of Artificial Sequence: Synthetic oligonucleotide
uuccugucccuggagggcc

SEQ ID NO: 2099345 - RNA, 19 nt, Artificial Sequence
  Description of Artificial Sequence: Synthetic oligonucleotide
gaucggccagggucugugg

SEQ ID NO: 2099346 - RNA, 19 nt, Artificial Sequence
  Description of Artificial Sequence: Synthetic oligonucleotide
gccauagagaaguaggugu

SEQ ID NO: 2099347 - RNA, 19 nt, Artificial Sequence
  Description of Artificial Sequence: Synthetic oligonucleotide
ggcaccgccgccaugacug

SEQ ID NO: 2099348 - RNA, 19 nt, Artificial Sequence
  Description of Artificial Sequence: Synthetic oligonucleotide
guccuggugagaaaugaga

SEQ ID NO: 2099349 - RNA, 19 nt, Artificial Sequence
  Description of Artificial Sequence: Synthetic oligonucleotide
acggagagucuauacucaa

SEQ ID NO: 2099350 - RNA, 19 nt, Artificial Sequence
  Description of Artificial Sequence: Synthetic oligonucleotide
ucaggucucuggugacuug

SEQ ID NO: 2099351 - RNA, 19 nt, Artificial Sequence
  Description of Artificial Sequence: Synthetic oligonucleotide
cugccauuuugguuaauaa

SEQ ID NO: 2099352 - RNA, 19 nt, Artificial Sequence
  Description of Artificial Sequence: Synthetic oligonucleotide
cuuggacagauaguuacaa

SEQ ID NO: 2099353 - RNA, 19 nt, Artificial Sequence
  Description of Artificial Sequence: Synthetic oligonucleotide
uggcaaagcugaggauugg

SEQ ID NO: 2099354 - RNA, 19 nt, Artificial Sequence
  Description of Artificial Sequence: Synthetic oligonucleotide
auggagccgaauucuuuau

SEQ ID NO: 2099355 - RNA, 19 nt, Artificial Sequence
  Description of Artificial Sequence: Synthetic oligonucleotide
agaauguccuggugagaaa

SEQ ID NO: 2099356 - RNA, 19 nt, Artificial Sequence
  Description of Artificial Sequence: Synthetic oligonucleotide
auccgaaccgaagauggaa

SEQ ID NO: 2099357 - RNA, 19 nt, Artificial Sequence
  Description of Artificial Sequence: Synthetic oligonucleotide
ccaugaugugucuguaggc

SEQ ID NO: 2099358 - RNA, 19 nt, Artificial Sequence
  Description of Artificial Sequence: Synthetic oligonucleotide
gccgaauucuuuaucuuug

SEQ ID NO: 2099359 - RNA, 19 nt, Artificial Sequence
  Description of Artificial Sequence: Synthetic oligonucleotide
gauggaaagucaacucugu

SEQ ID NO: 2099360 - RNA, 19 nt, Artificial Sequence
  Description of Artificial Sequence: Synthetic oligonucleotide
auacucaaugucugccauu

SEQ ID NO: 2099361 - RNA, 19 nt, Artificial Sequence
  Description of Artificial Sequence: Synthetic oligonucleotide
agaucggccagggucugug

SEQ ID NO: 2099362 - RNA, 19 nt, Artificial Sequence
  Description of Artificial Sequence: Synthetic oligonucleotide
gaauguccuggugagaaau

SEQ ID NO: 2099363 - RNA, 19 nt, Artificial Sequence
  Description of Artificial Sequence: Synthetic oligonucleotide
gucuuuccugucccuggag

SEQ ID NO: 2099364 - RNA, 19 nt, Artificial Sequence
  Description of Artificial Sequence: Synthetic oligonucleotide
gcaaagcugaggauuggcc

SEQ ID NO: 2099365 - RNA, 19 nt, Artificial Sequence
  Description of Artificial Sequence: Synthetic oligonucleotide
uguuggcgauaucugucuu

SEQ ID NO: 2099366 - RNA, 19 nt, Artificial Sequence
  Description of Artificial Sequence: Synthetic oligonucleotide
ggagccgaauucuuuaucu

SEQ ID NO: 2099367 - RNA, 19 nt, Artificial Sequence
  Description of Artificial Sequence: Synthetic oligonucleotide
aggcgaggaaccaugaguu

SEQ ID NO: 2099368 - RNA, 19 nt, Artificial Sequence
  Description of Artificial Sequence: Synthetic oligonucleotide
accgccgccaugacuguac

SEQ ID NO: 2099369 - RNA, 19 nt, Artificial Sequence
  Description of Artificial Sequence: Synthetic oligonucleotide
cuggugccgacggagaguc

SEQ ID NO: 2099370 - RNA, 19 nt, Artificial Sequence
  Description of Artificial Sequence: Synthetic oligonucleotide
cuuguacuacaugcuccag

SEQ ID NO: 2099371 - RNA, 19 nt, Artificial Sequence
  Description of Artificial Sequence: Synthetic oligonucleotide
gcagcgaugagggagcuca

SEQ ID NO: 2099372 - RNA, 19 nt, Artificial Sequence
  Description of Artificial Sequence: Synthetic oligonucleotide
cucaaucacucgccucaag

SEQ ID NO: 2099373 - RNA, 19 nt, Artificial Sequence
  Description of Artificial Sequence: Synthetic oligonucleotide
cacggucucuucugucacc

SEQ ID NO: 2099374 - RNA, 19 nt, Artificial Sequence
  Description of Artificial Sequence: Synthetic oligonucleotide
acggucucuucugucaccu

SEQ ID NO: 2099375 - RNA, 19 nt, Artificial Sequence
  Description of Artificial Sequence: Synthetic oligonucleotide
gcauucugggcaucuugag

SEQ ID NO: 2099376 - RNA, 19 nt, Artificial Sequence
  Description of Artificial Sequence: Synthetic oligonucleotide
cauucuccucuuguacuac

SEQ ID NO: 2099377 - RNA, 19 nt, Artificial Sequence
  Description of Artificial Sequence: Synthetic oligonucleotide
cuguggucgguacuuuuca

SEQ ID NO: 2099378 - RNA, 19 nt, Artificial Sequence
  Description of Artificial Sequence: Synthetic oligonucleotide
uugugcaccuggacugcaa

SEQ ID NO: 2099379 - RNA, 19 nt, Artificial Sequence
  Description of Artificial Sequence: Synthetic oligonucleotide
ugagacgaucaggucucug

SEQ ID NO: 2099380 - RNA, 19 nt, Artificial Sequence
  Description of Artificial Sequence: Synthetic oligonucleotide
uguugguacucugcagaau

SEQ ID NO: 2099381 - RNA, 19 nt, Artificial Sequence
  Description of Artificial Sequence: Synthetic oligonucleotide
gaugaacuucugaaugcua

SEQ ID NO: 2099382 - RNA, 19 nt, Artificial Sequence
  Description of Artificial Sequence: Synthetic oligonucleotide
ucucacuggugccgacgga

SEQ ID NO: 2099383 - RNA, 19 nt, Artificial Sequence
  Description of Artificial Sequence: Synthetic oligonucleotide
gagggagcucagcuguauc

SEQ ID NO: 2099384 - RNA, 19 nt, Artificial Sequence
  Description of Artificial Sequence: Synthetic oligonucleotide
aguuccgggcccgggccgc

SEQ ID NO: 2099385 - RNA, 19 nt, Artificial Sequence
  Description of Artificial Sequence: Synthetic oligonucleotide
gccaaaucggaaccuugug

SEQ ID NO: 2099386 - RNA, 19 nt, Artificial Sequence
  Description of Artificial Sequence: Synthetic oligonucleotide
ugguacucugcagaauguu

SEQ ID NO: 2099387 - RNA, 19 nt, Artificial Sequence
  Description of Artificial Sequence: Synthetic oligonucleotide
aucacucgccucaaggcau

SEQ ID NO: 2099388 - RNA, 19 nt, Artificial Sequence
  Description of Artificial Sequence: Synthetic oligonucleotide
aggccaggaugguggaugu

SEQ ID NO: 2099389 - RNA, 19 nt, Artificial Sequence
  Description of Artificial Sequence: Synthetic oligonucleotide
ccuggugagaaaugagauc

SEQ ID NO: 2099390 - RNA, 19 nt, Artificial Sequence
  Description of Artificial Sequence: Synthetic oligonucleotide
agggcaaguuccgggcccg

SEQ ID NO: 2099391 - RNA, 19 nt, Artificial Sequence
  Description of Artificial Sequence: Synthetic oligonucleotide
ggcagggaugaucuuggac

SEQ ID NO: 2099392 - RNA, 19 nt, Artificial Sequence
  Description of Artificial Sequence: Synthetic oligonucleotide
uuucaacccagggcaaguu

SEQ ID NO: 2099393 - RNA, 19 nt, Artificial Sequence
  Description of Artificial Sequence: Synthetic oligonucleotide
ggccauagagaaguaggug

SEQ ID NO: 2099394 - RNA, 19 nt, Artificial Sequence
  Description of Artificial Sequence: Synthetic oligonucleotide
agguguggcaggcgguccu

SEQ ID NO: 2099395 - RNA, 19 nt, Artificial Sequence
  Description of Artificial Sequence: Synthetic oligonucleotide
ccgaaccgaagauggaaag

SEQ ID NO: 2099396 - RNA, 19 nt, Artificial Sequence
  Description of Artificial Sequence: Synthetic oligonucleotide
ccucuuguacuacaugcuc

SEQ ID NO: 2099397 - RNA, 19 nt, Artificial Sequence
  Description of Artificial Sequence: Synthetic oligonucleotide
guacacggucucuucuguc

SEQ ID NO: 2099398 - RNA, 19 nt, Artificial Sequence
  Description of Artificial Sequence: Synthetic oligonucleotide
ccgaagauggaaagucaac

SEQ ID NO: 2099399 - RNA, 19 nt, Artificial Sequence
  Description of Artificial Sequence: Synthetic oligonucleotide
ugagggccuucauuccauc

SEQ ID NO: 2099400 - RNA, 19 nt, Artificial Sequence
  Description of Artificial Sequence: Synthetic oligonucleotide
caggcgaggaaccaugagu

SEQ ID NO: 2099401 - RNA, 19 nt, Artificial Sequence
  Description of Artificial Sequence: Synthetic oligonucleotide
cuccaagaccauggagccg

SEQ ID NO: 2099402 - RNA, 19 nt, Artificial Sequence
  Description of Artificial Sequence: Synthetic oligonucleotide
agggucuguggucgguacu

SEQ ID NO: 2099403 - RNA, 19 nt, Artificial Sequence
  Description of Artificial Sequence: Synthetic oligonucleotide
cggacaaugucuauuccuc

SEQ ID NO: 2099404 - RNA, 19 nt, Artificial Sequence
  Description of Artificial Sequence: Synthetic oligonucleotide
ccaguccagaauguuggcg

SEQ ID NO: 2099405 - RNA, 19 nt, Artificial Sequence
  Description of Artificial Sequence: Synthetic oligonucleotide
ggcaaagcugaggauuggc

SEQ ID NO: 2099406 - RNA, 19 nt, Artificial Sequence
  Description of Artificial Sequence: Synthetic oligonucleotide
uagguguggcaggcggucc

SEQ ID NO: 2099407 - RNA, 19 nt, Artificial Sequence
  Description of Artificial Sequence: Synthetic oligonucleotide
ugagggagcucagcuguau

SEQ ID NO: 2099408 - RNA, 19 nt, Artificial Sequence
  Description of Artificial Sequence: Synthetic oligonucleotide
ucucaaucacucgccucaa

SEQ ID NO: 2099409 - RNA, 19 nt, Artificial Sequence
  Description of Artificial Sequence: Synthetic oligonucleotide
cgacggagagucuauacuc

SEQ ID NO: 2099410 - RNA, 19 nt, Artificial Sequence
  Description of Artificial Sequence: Synthetic oligonucleotide
ucacucgccucaaggcauu

SEQ ID NO: 2099411 - RNA, 19 nt, Artificial Sequence
  Description of Artificial Sequence: Synthetic oligonucleotide
caccuuuccaaaggccaug

SEQ ID NO: 2099412 - RNA, 19 nt, Artificial Sequence
  Description of Artificial Sequence: Synthetic oligonucleotide
gcaaguuccgggcccgggc

SEQ ID NO: 2099413 - RNA, 19 nt, Artificial Sequence
  Description of Artificial Sequence: Synthetic oligonucleotide
guacagcugcuuggcacag

SEQ ID NO: 2099414 - RNA, 19 nt, Artificial Sequence
  Description of Artificial Sequence: Synthetic oligonucleotide
augcagagccaagcccuuc

SEQ ID NO: 2099415 - RNA, 19 nt, Artificial Sequence
  Description of Artificial Sequence: Synthetic oligonucleotide
agugaaccucugucaggau

SEQ ID NO: 2099416 - RNA, 19 nt, Artificial Sequence
  Description of Artificial Sequence: Synthetic oligonucleotide
cuaggccucugagacgauc

SEQ ID NO: 2099417 - RNA, 19 nt, Artificial Sequence
  Description of Artificial Sequence: Synthetic oligonucleotide
uuggaucugcuaggccucu

SEQ ID NO: 2099418 - RNA, 19 nt, Artificial Sequence
  Description of Artificial Sequence: Synthetic oligonucleotide
cgccucaaggcauucuggg

SEQ ID NO: 2099419 - RNA, 19 nt, Artificial Sequence
  Description of Artificial Sequence: Synthetic oligonucleotide
ggaucugcuaggccucuga

SEQ ID NO: 2099420 - RNA, 19 nt, Artificial Sequence
  Description of Artificial Sequence: Synthetic oligonucleotide
cccagugcagguguacacg

SEQ ID NO: 2099421 - RNA, 19 nt, Artificial Sequence
  Description of Artificial Sequence: Synthetic oligonucleotide
gucuguaggcaguggugaa

SEQ ID NO: 2099422 - RNA, 19 nt, Artificial Sequence
  Description of Artificial Sequence: Synthetic oligonucleotide
cuacucagaauguccuggu

SEQ ID NO: 2099423 - RNA, 19 nt, Artificial Sequence
  Description of Artificial Sequence: Synthetic oligonucleotide
aagcagcgaugagggagcu

SEQ ID NO: 2099424 - RNA, 19 nt, Artificial Sequence
  Description of Artificial Sequence: Synthetic oligonucleotide
ggccauguugguacucugc

SEQ ID NO: 2099425 - RNA, 19 nt, Artificial Sequence
  Description of Artificial Sequence: Synthetic oligonucleotide
ccccggacaaugucuauuc

SEQ ID NO: 2099426 - RNA, 19 nt, Artificial Sequence
  Description of Artificial Sequence: Synthetic oligonucleotide
augagggccuucauuccau

SEQ ID NO: 2099427 - RNA, 19 nt, Artificial Sequence
  Description of Artificial Sequence: Synthetic oligonucleotide
gccgacggagagucuauac

SEQ ID NO: 2099428 - RNA, 19 nt, Artificial Sequence
  Description of Artificial Sequence: Synthetic oligonucleotide
acucaaugucugccauuuu

SEQ ID NO: 2099429 - RNA, 19 nt, Artificial Sequence
  Description of Artificial Sequence: Synthetic oligonucleotide
uggaucugcuaggccucug

SEQ ID NO: 2099430 - RNA, 19 nt, Artificial Sequence
  Description of Artificial Sequence: Synthetic oligonucleotide
agcagcgaugagggagcuc

SEQ ID NO: 2099431 - RNA, 19 nt, Artificial Sequence
  Description of Artificial Sequence: Synthetic oligonucleotide
agcccugcgcauaucccca

SEQ ID NO: 2099432 - RNA, 19 nt, Artificial Sequence
  Description of Artificial Sequence: Synthetic oligonucleotide
cagcgaugagggagcucag

SEQ ID NO: 2099433 - RNA, 19 nt, Artificial Sequence
  Description of Artificial Sequence: Synthetic oligonucleotide
gaaccucugucaggauguc

SEQ ID NO: 2099434 - RNA, 19 nt, Artificial Sequence
  Description of Artificial Sequence: Synthetic oligonucleotide
ccugcgcauauccccacug

SEQ ID NO: 2099435 - RNA, 19 nt, Artificial Sequence
  Description of Artificial Sequence: Synthetic oligonucleotide
gcgcauauccccacuggac

SEQ ID NO: 2099436 - RNA, 19 nt, Artificial Sequence
  Description of Artificial Sequence: Synthetic oligonucleotide
acucgccucaaggcauucu

SEQ ID NO: 2099437 - RNA, 19 nt, Artificial Sequence
  Description of Artificial Sequence: Synthetic oligonucleotide
gggccaaaucggaaccuug

SEQ ID NO: 2099438 - RNA, 19 nt, Artificial Sequence
  Description of Artificial Sequence: Synthetic oligonucleotide
gggaugaucuuggacagau

SEQ ID NO: 2099439 - RNA, 19 nt, Artificial Sequence
  Description of Artificial Sequence: Synthetic oligonucleotide
gcaucuugagucauggcau

SEQ ID NO: 2099440 - RNA, 19 nt, Artificial Sequence
  Description of Artificial Sequence: Synthetic oligonucleotide
accauggagccgaauucuu

SEQ ID NO: 2099441 - RNA, 19 nt, Artificial Sequence
  Description of Artificial Sequence: Synthetic oligonucleotide
cgguacuuuucaacccagg

SEQ ID NO: 2099442 - RNA, 19 nt, Artificial Sequence
  Description of Artificial Sequence: Synthetic oligonucleotide
cucaaggcauucugggcau

SEQ ID NO: 2099443 - RNA, 19 nt, Artificial Sequence
  Description of Artificial Sequence: Synthetic oligonucleotide
gccuuggaucugcuaggcc

SEQ ID NO: 2099444 - RNA, 19 nt, Artificial Sequence
  Description of Artificial Sequence: Synthetic oligonucleotide
gcccagugcagguguacac

SEQ ID NO: 2099445 - RNA, 19 nt, Artificial Sequence
  Description of Artificial Sequence: Synthetic oligonucleotide
cccggacaaugucuauucc

SEQ ID NO: 2099446 - RNA, 19 nt, Artificial Sequence
  Description of Artificial Sequence: Synthetic oligonucleotide
agucaacucugugcacaaa

SEQ ID NO: 2099447 - RNA, 19 nt, Artificial Sequence
  Description of Artificial Sequence: Synthetic oligonucleotide
ggaugucaugcagagccaa

SEQ ID NO: 2099448 - RNA, 19 nt, Artificial Sequence
  Description of Artificial Sequence: Synthetic oligonucleotide
cggaaccuugugcaccugg

SEQ ID NO: 2099449 - RNA, 19 nt, Artificial Sequence
  Description of Artificial Sequence: Synthetic oligonucleotide
gcaccuggacugcaaggca

SEQ ID NO: 2099450 - RNA, 19 nt, Artificial Sequence
  Description of Artificial Sequence: Synthetic oligonucleotide
ggcaaguuccgggcccggg

SEQ ID NO: 2099451 - RNA, 19 nt, Artificial Sequence
  Description of Artificial Sequence: Synthetic oligonucleotide
ggcaguggugaagucuuga

SEQ ID NO: 2099452 - RNA, 19 nt, Artificial Sequence
  Description of Artificial Sequence: Synthetic oligonucleotide
cagagugaugagggccuuc

SEQ ID NO: 2099453 - RNA, 19 nt, Artificial Sequence
  Description of Artificial Sequence: Synthetic oligonucleotide
acugcaaggcagggaugau

SEQ ID NO: 2099454 - RNA, 19 nt, Artificial Sequence
  Description of Artificial Sequence: Synthetic oligonucleotide
guucagagcccugcgcaua

SEQ ID NO: 2099455 - RNA, 19 nt, Artificial Sequence
  Description of Artificial Sequence: Synthetic oligonucleotide
gaggcaccgccgccaugac

SEQ ID NO: 2099456 - RNA, 19 nt, Artificial Sequence
  Description of Artificial Sequence: Synthetic oligonucleotide
ucggaaccuugugcaccug

SEQ ID NO: 2099457 - RNA, 19 nt, Artificial Sequence
  Description of Artificial Sequence: Synthetic oligonucleotide
ccaggcgaggaaccaugag

SEQ ID NO: 2099458 - RNA, 19 nt, Artificial Sequence
  Description of Artificial Sequence: Synthetic oligonucleotide
gcuggcaaagcugaggauu

SEQ ID NO: 2099459 - RNA, 19 nt, Artificial Sequence
  Description of Artificial Sequence: Synthetic oligonucleotide
caguggugaagucuugauu

SEQ ID NO: 2099460 - RNA, 19 nt, Artificial Sequence
  Description of Artificial Sequence: Synthetic oligonucleotide
ucagagcccugcgcauauc

SEQ ID NO: 2099461 - RNA, 19 nt, Artificial Sequence
  Description of Artificial Sequence: Synthetic oligonucleotide
uggcacaggccaggauggu

SEQ ID NO: 2099462 - RNA, 19 nt, Artificial Sequence
  Description of Artificial Sequence: Synthetic oligonucleotide
gugcccagugcagguguac

SEQ ID NO: 2099463 - RNA, 19 nt, Artificial Sequence
  Description of Artificial Sequence: Synthetic oligonucleotide
cgaagauggaaagucaacu

SEQ ID NO: 2099464 - RNA, 19 nt, Artificial Sequence
  Description of Artificial Sequence: Synthetic oligonucleotide
ccggacaaugucuauuccu

SEQ ID NO: 2099465 - RNA, 19 nt, Artificial Sequence
  Description of Artificial Sequence: Synthetic oligonucleotide
uggugccgacggagagucu

SEQ ID NO: 2099466 - RNA, 19 nt, Artificial Sequence
  Description of Artificial Sequence: Synthetic oligonucleotide
ugccgacggagagucuaua

SEQ ID NO: 2099467 - RNA, 19 nt, Artificial Sequence
  Description of Artificial Sequence: Synthetic oligonucleotide
gcaguggugaagucuugau

SEQ ID NO: 2099468 - RNA, 19 nt, Artificial Sequence
  Description of Artificial Sequence: Synthetic oligonucleotide
cccacuggacagagugaug

SEQ ID NO: 2099469 - RNA, 19 nt, Artificial Sequence
  Description of Artificial Sequence: Synthetic oligonucleotide
guggcaggcgguccucacu

SEQ ID NO: 2099470 - RNA, 19 nt, Artificial Sequence
  Description of Artificial Sequence: Synthetic oligonucleotide
ccaugaguucaggcgucag

SEQ ID NO: 2099471 - RNA, 19 nt, Artificial Sequence
  Description of Artificial Sequence: Synthetic oligonucleotide
cgccaugacuguacagaug

SEQ ID NO: 2099472 - RNA, 19 nt, Artificial Sequence
  Description of Artificial Sequence: Synthetic oligonucleotide
cacucgccucaaggcauuc

SEQ ID NO: 2099473 - RNA, 19 nt, Artificial Sequence
  Description of Artificial Sequence: Synthetic oligonucleotide
augagggagcucagcugua

SEQ ID NO: 2099474 - RNA, 19 nt, Artificial Sequence
  Description of Artificial Sequence: Synthetic oligonucleotide
ccgaauucuuuaucuuugu

SEQ ID NO: 2099475 - RNA, 19 nt, Artificial Sequence
  Description of Artificial Sequence: Synthetic oligonucleotide
cagugcagguguacacggu

SEQ ID NO: 2099476 - RNA, 19 nt, Artificial Sequence
  Description of Artificial Sequence: Synthetic oligonucleotide
ccgacggagagucuauacu

SEQ ID NO: 2099477 - RNA, 19 nt, Artificial Sequence
  Description of Artificial Sequence: Synthetic oligonucleotide
gggugcccagugcaggugu

SEQ ID NO: 2099478 - RNA, 19 nt, Artificial Sequence
  Description of Artificial Sequence: Synthetic oligonucleotide
ccagaauguuggcgauauc

SEQ ID NO: 2099479 - RNA, 19 nt, Artificial Sequence
  Description of Artificial Sequence: Synthetic oligonucleotide
cagguguacacggucucuu

SEQ ID NO: 2099480 - RNA, 19 nt, Artificial Sequence
  Description of Artificial Sequence: Synthetic oligonucleotide
ggaugaucuuggacagaua

SEQ ID NO: 2099481 - RNA, 19 nt, Artificial Sequence
  Description of Artificial Sequence: Synthetic oligonucleotide
gggcaaguuccgggcccgg

SEQ ID NO: 2099482 - RNA, 19 nt, Artificial Sequence
  Description of Artificial Sequence: Synthetic oligonucleotide
gcccugcgcauauccccac

SEQ ID NO: 2099483 - RNA, 19 nt, Artificial Sequence
  Description of Artificial Sequence: Synthetic oligonucleotide
gguccucacugaugaacuu

SEQ ID NO: 2099484 - RNA, 19 nt, Artificial Sequence
  Description of Artificial Sequence: Synthetic oligonucleotide
gagaucggccagggucugu

SEQ ID NO: 2099485 - RNA, 19 nt, Artificial Sequence
  Description of Artificial Sequence: Synthetic oligonucleotide
gggucuguggucgguacuu

SEQ ID NO: 2099486 - RNA, 19 nt, Artificial Sequence
  Description of Artificial Sequence: Synthetic oligonucleotide
gcaggcgguccucacugau

SEQ ID NO: 2099487 - RNA, 19 nt, Artificial Sequence
  Description of Artificial Sequence: Synthetic oligonucleotide
ccgccaugacuguacagau

SEQ ID NO: 2099488 - RNA, 19 nt, Artificial Sequence
  Description of Artificial Sequence: Synthetic oligonucleotide
cgccgccaugacuguacag

SEQ ID NO: 2099489 - RNA, 19 nt, Artificial Sequence
  Description of Artificial Sequence: Synthetic oligonucleotide
cagaugcauucagcuccaa

SEQ ID NO: 2099490 - RNA, 19 nt, Artificial Sequence
  Description of Artificial Sequence: Synthetic oligonucleotide
ggcgguccucacugaugaa

SEQ ID NO: 2099491 - RNA, 19 nt, Artificial Sequence
  Description of Artificial Sequence: Synthetic oligonucleotide
cgaaccgaagauggaaagu

SEQ ID NO: 2099492 - RNA, 19 nt, Artificial Sequence
  Description of Artificial Sequence: Synthetic oligonucleotide
gugccgacggagagucuau

SEQ ID NO: 2099493 - RNA, 19 nt, Artificial Sequence
  Description of Artificial Sequence: Synthetic oligonucleotide
cugagacgaucaggucucu

SEQ ID NO: 2099494 - RNA, 19 nt, Artificial Sequence
  Description of Artificial Sequence: Synthetic oligonucleotide
caagaccauggagccgaau

SEQ ID NO: 2099495 - RNA, 19 nt, Artificial Sequence
  Description of Artificial Sequence: Synthetic oligonucleotide
ccaagaccauggagccgaa

SEQ ID NO: 2099496 - RNA, 19 nt, Artificial Sequence
  Description of Artificial Sequence: Synthetic oligonucleotide
gcuccaggcgaggaaccau

SEQ ID NO: 2099497 - RNA, 19 nt, Artificial Sequence
  Description of Artificial Sequence: Synthetic oligonucleotide
cggagagucuauacucaau

SEQ ID NO: 2099498 - RNA, 19 nt, Artificial Sequence
  Description of Artificial Sequence: Synthetic oligonucleotide
ggucuguggucgguacuuu

SEQ ID NO: 2099499 - RNA, 19 nt, Artificial Sequence
  Description of Artificial Sequence: Synthetic oligonucleotide
ccagggucuguggucggua

SEQ ID NO: 2099500 - RNA, 19 nt, Artificial Sequence
  Description of Artificial Sequence: Synthetic oligonucleotide
ccgccgccaugacuguaca

SEQ ID NO: 2099501 - RNA, 19 nt, Artificial Sequence
  Description of Artificial Sequence: Synthetic oligonucleotide
caccgccgccaugacugua

SEQ ID NO: 2099502 - RNA, 19 nt, Artificial Sequence
  Description of Artificial Sequence: Synthetic oligonucleotide
cccugcgcauauccccacu

SEQ ID NO: 2099503 - RNA, 19 nt, Artificial Sequence
  Description of Artificial Sequence: Synthetic oligonucleotide
cggaggcaccgccgccaug

SEQ ID NO: 2099504 - RNA, 19 nt, Artificial Sequence
  Description of Artificial Sequence: Synthetic oligonucleotide
ccggaggcaccgccgccau

SEQ ID NO: 2099505 - RNA, 19 nt, Artificial Sequence
  Description of Artificial Sequence: Synthetic oligonucleotide
cgcgggccgcugcuccgga

SEQ ID NO: 2099506 - RNA, 19 nt, Artificial Sequence
  Description of Artificial Sequence: Synthetic oligonucleotide
aguuauacagacuaaaucc

SEQ ID NO: 2099507 - RNA, 19 nt, Artificial Sequence
  Description of Artificial Sequence: Synthetic oligonucleotide
aacaauaucauacagccgg

SEQ ID NO: 2099508 - RNA, 19 nt, Artificial Sequence
  Description of Artificial Sequence: Synthetic oligonucleotide
ucaacaauaugauugaugg

SEQ ID NO: 2099509 - RNA, 19 nt, Artificial Sequence
  Description of Artificial Sequence: Synthetic oligonucleotide
uuuaaguauaucuaaauga

SEQ ID NO: 2099510 - RNA, 19 nt, Artificial Sequence
  Description of Artificial Sequence: Synthetic oligonucleotide
acuggauagaauuacauuc

SEQ ID NO: 2099511 - RNA, 19 nt, Artificial Sequence
  Description of Artificial Sequence: Synthetic oligonucleotide
aucugcaucaaauugaggg

SEQ ID NO: 2099512 - RNA, 19 nt, Artificial Sequence
  Description of Artificial Sequence: Synthetic oligonucleotide
aaacguuacagugagacgg

SEQ ID NO: 2099513 - RNA, 19 nt, Artificial Sequence
  Description of Artificial Sequence: Synthetic oligonucleotide
uguacaauugguaaaguug

SEQ ID NO: 2099514 - RNA, 19 nt, Artificial Sequence
  Description of Artificial Sequence: Synthetic oligonucleotide
aacaacugaauauccaagg

SEQ ID NO: 2099515 - RNA, 19 nt, Artificial Sequence
  Description of Artificial Sequence: Synthetic oligonucleotide
cuuaaagucaacaauauga

SEQ ID NO: 2099516 - RNA, 19 nt, Artificial Sequence
  Description of Artificial Sequence: Synthetic oligonucleotide
ucuaguuaaaauuuuaauc

SEQ ID NO: 2099517 - RNA, 19 nt, Artificial Sequence
  Description of Artificial Sequence: Synthetic oligonucleotide
aacaauaugauugauggca

SEQ ID NO: 2099518 - RNA, 19 nt, Artificial Sequence
  Description of Artificial Sequence: Synthetic oligonucleotide
ucuaaaugaauuuaacugu

SEQ ID NO: 2099519 - RNA, 19 nt, Artificial Sequence
  Description of Artificial Sequence: Synthetic oligonucleotide
aaguucaaagcccagaccu

SEQ ID NO: 2099520 - RNA, 19 nt, Artificial Sequence
  Description of Artificial Sequence: Synthetic oligonucleotide
ugugcaagcaacaugaaaa

SEQ ID NO: 2099521 - RNA, 19 nt, Artificial Sequence
  Description of Artificial Sequence: Synthetic oligonucleotide
uuaaguauaucuaaaugaa

SEQ ID NO: 2099522 - RNA, 19 nt, Artificial Sequence
  Description of Artificial Sequence: Synthetic oligonucleotide
aguagucugaauauaaagc

SEQ ID NO: 2099523 - RNA, 19 nt, Artificial Sequence
  Description of Artificial Sequence: Synthetic oligonucleotide
ucuguaacuauaauuguca

SEQ ID NO: 2099524 - RNA, 19 nt, Artificial Sequence
  Description of Artificial Sequence: Synthetic oligonucleotide
aaaaugguaauuucucugu

SEQ ID NO: 2099525 - RNA, 19 nt, Artificial Sequence
  Description of Artificial Sequence: Synthetic oligonucleotide
gaaauaaucccaaaagcag

SEQ ID NO: 2099526 - RNA, 19 nt, Artificial Sequence
  Description of Artificial Sequence: Synthetic oligonucleotide
uguuuuaguagucugaaua

SEQ ID NO: 2099527 - RNA, 19 nt, Artificial Sequence
  Description of Artificial Sequence: Synthetic oligonucleotide
auuguguaccuucucaucg

SEQ ID NO: 2099528 - RNA, 19 nt, Artificial Sequence
  Description of Artificial Sequence: Synthetic oligonucleotide
acuguuaguauucagagaa

SEQ ID NO: 2099529 - RNA, 19 nt, Artificial Sequence
  Description of Artificial Sequence: Synthetic oligonucleotide
cucuguuacaguuauacag

SEQ ID NO: 2099530 - RNA, 19 nt, Artificial Sequence
  Description of Artificial Sequence: Synthetic oligonucleotide
aauugccacauuaauaggg

SEQ ID NO: 2099531 - RNA, 19 nt, Artificial Sequence
  Description of Artificial Sequence: Synthetic oligonucleotide
uuuuaaucggucuugauuu

SEQ ID NO: 2099532 - RNA, 19 nt, Artificial Sequence
  Description of Artificial Sequence: Synthetic oligonucleotide
agcugauggagacugaggc

SEQ ID NO: 2099533 - RNA, 19 nt, Artificial Sequence
  Description of Artificial Sequence: Synthetic oligonucleotide
acagacuaaauccacaucu

SEQ ID NO: 2099534 - RNA, 19 nt, Artificial Sequence
  Description of Artificial Sequence: Synthetic oligonucleotide
agaauuacauucuuuccuc

SEQ ID NO: 2099535 - RNA, 19 nt, Artificial Sequence
  Description of Artificial Sequence: Synthetic oligonucleotide
cuuggcuucauuuucagac

SEQ ID NO: 2099536 - RNA, 19 nt, Artificial Sequence
  Description of Artificial Sequence: Synthetic oligonucleotide
uugugaagaguucagaaac

SEQ ID NO: 2099537 - RNA, 19 nt, Artificial Sequence
  Description of Artificial Sequence: Synthetic oligonucleotide
aaugaauuuaacuguuagu

SEQ ID NO: 2099538 - RNA, 19 nt, Artificial Sequence
  Description of Artificial Sequence: Synthetic oligonucleotide
ugaaaauaucaacucagca

SEQ ID NO: 2099539 - RNA, 19 nt, Artificial Sequence
  Description of Artificial Sequence: Synthetic oligonucleotide
uagaauuacauucuuuccu

SEQ ID NO: 2099540 - RNA, 19 nt, Artificial Sequence
  Description of Artificial Sequence: Synthetic oligonucleotide
agugagacggaucuguaac

SEQ ID NO: 2099541 - RNA, 19 nt, Artificial Sequence
  Description of Artificial Sequence: Synthetic oligonucleotide
uauaucuaaaugaauuuaa

SEQ ID NO: 2099542 - RNA, 19 nt, Artificial Sequence
  Description of Artificial Sequence: Synthetic oligonucleotide
aauauccaaggugagcagc

SEQ ID NO: 2099543 - RNA, 19 nt, Artificial Sequence
  Description of Artificial Sequence: Synthetic oligonucleotide
uguagaaauaaucccaaaa

SEQ ID NO: 2099544 - RNA, 19 nt, Artificial Sequence
  Description of Artificial Sequence: Synthetic oligonucleotide
auaauugucaaucuaguua

SEQ ID NO: 2099545 - RNA, 19 nt, Artificial Sequence
  Description of Artificial Sequence: Synthetic oligonucleotide
uuuaguagucugaauauaa

SEQ ID NO: 2099546 - RNA, 19 nt, Artificial Sequence
  Description of Artificial Sequence: Synthetic oligonucleotide
uucccuuccacugugaccg

SEQ ID NO: 2099547 - RNA, 19 nt, Artificial Sequence
  Description of Artificial Sequence: Synthetic oligonucleotide
ucuguuacaguuauacaga

SEQ ID NO: 2099548 - RNA, 19 nt, Artificial Sequence
  Description of Artificial Sequence: Synthetic oligonucleotide
aaacacugcaacaauauca

SEQ ID NO: 2099549 - RNA, 19 nt, Artificial Sequence
  Description of Artificial Sequence: Synthetic oligonucleotide
aaaacguuacagugagacg

SEQ ID NO: 2099550 - RNA, 19 nt, Artificial Sequence
  Description of Artificial Sequence: Synthetic oligonucleotide
uuaguauucagagaacacc

SEQ ID NO: 2099551 - RNA, 19 nt, Artificial Sequence
  Description of Artificial Sequence: Synthetic oligonucleotide
aaauugagggcauuggaaa

SEQ ID NO: 2099552 - RNA, 19 nt, Artificial Sequence
  Description of Artificial Sequence: Synthetic oligonucleotide
uuaaagucaacaauaugau

SEQ ID NO: 2099553 - RNA, 19 nt, Artificial Sequence
  Description of Artificial Sequence: Synthetic oligonucleotide
uaguagucugaauauaaag

SEQ ID NO: 2099554 - RNA, 19 nt, Artificial Sequence
  Description of Artificial Sequence: Synthetic oligonucleotide
ugcaacaauaucauacagc

SEQ ID NO: 2099555 - RNA, 19 nt, Artificial Sequence
  Description of Artificial Sequence: Synthetic oligonucleotide
cuuuaaguauaucuaaaug

SEQ ID NO: 2099556 - RNA, 19 nt, Artificial Sequence
  Description of Artificial Sequence: Synthetic oligonucleotide
acuauaauugucaaucuag

SEQ ID NO: 2099557 - RNA, 19 nt, Artificial Sequence
  Description of Artificial Sequence: Synthetic oligonucleotide
auagacaaguucaaagccc

SEQ ID NO: 2099558 - RNA, 19 nt, Artificial Sequence
  Description of Artificial Sequence: Synthetic oligonucleotide
ugagcugaaaagagggagg

SEQ ID NO: 2099559 - RNA, 19 nt, Artificial Sequence
  Description of Artificial Sequence: Synthetic oligonucleotide
aacugaauauccaagguga

SEQ ID NO: 2099560 - RNA, 19 nt, Artificial Sequence
  Description of Artificial Sequence: Synthetic oligonucleotide
cauagacaaguucaaagcc

SEQ ID NO: 2099561 - RNA, 19 nt, Artificial Sequence
  Description of Artificial Sequence: Synthetic oligonucleotide
auugguaaaguugugaaga

SEQ ID NO: 2099562 - RNA, 19 nt, Artificial Sequence
  Description of Artificial Sequence: Synthetic oligonucleotide
aaucggucuugauuuuccc

SEQ ID NO: 2099563 - RNA, 19 nt, Artificial Sequence
  Description of Artificial Sequence: Synthetic oligonucleotide
agaaauaaucccaaaagca

SEQ ID NO: 2099564 - RNA, 19 nt, Artificial Sequence
  Description of Artificial Sequence: Synthetic oligonucleotide
uauagcagggccauagaca

SEQ ID NO: 2099565 - RNA, 19 nt, Artificial Sequence
  Description of Artificial Sequence: Synthetic oligonucleotide
guuacaguuauacagacua

SEQ ID NO: 2099566 - RNA, 19 nt, Artificial Sequence
  Description of Artificial Sequence: Synthetic oligonucleotide
aauaugauugauggcaaca

SEQ ID NO: 2099567 - RNA, 19 nt, Artificial Sequence
  Description of Artificial Sequence: Synthetic oligonucleotide
aaguauaucuaaaugaauu

SEQ ID NO: 2099568 - RNA, 19 nt, Artificial Sequence
  Description of Artificial Sequence: Synthetic oligonucleotide
cuaguuucuggcuuuaaug

SEQ ID NO: 2099569 - RNA, 19 nt, Artificial Sequence
  Description of Artificial Sequence: Synthetic oligonucleotide
caaaacguuacagugagac

SEQ ID NO: 2099570 - RNA, 19 nt, Artificial Sequence
  Description of Artificial Sequence: Synthetic oligonucleotide
uucagaaacugcuacuggc

SEQ ID NO: 2099571 - RNA, 19 nt, Artificial Sequence
  Description of Artificial Sequence: Synthetic oligonucleotide
auaucaacucagcagaagu

SEQ ID NO: 2099572 - RNA, 19 nt, Artificial Sequence
  Description of Artificial Sequence: Synthetic oligonucleotide
agagccuucaaguccgagc

SEQ ID NO: 2099573 - RNA, 19 nt, Artificial Sequence
  Description of Artificial Sequence: Synthetic oligonucleotide
ugaccgaugagcugaaaag

SEQ ID NO: 2099574 - RNA, 19 nt, Artificial Sequence
  Description of Artificial Sequence: Synthetic oligonucleotide
uuuccuuaaagucaacaau

SEQ ID NO: 2099575 - RNA, 19 nt, Artificial Sequence
  Description of Artificial Sequence: Synthetic oligonucleotide
cuuucuugcaagcuggaag

SEQ ID NO: 2099576 - RNA, 19 nt, Artificial Sequence
  Description of Artificial Sequence: Synthetic oligonucleotide
cucaaaacguuacagugag

SEQ ID NO: 2099577 - RNA, 19 nt, Artificial Sequence
  Description of Artificial Sequence: Synthetic oligonucleotide
cuaagugugugcaagcaac

SEQ ID NO: 2099578 - RNA, 19 nt, Artificial Sequence
  Description of Artificial Sequence: Synthetic oligonucleotide
ucugcaucaaauugagggc

SEQ ID NO: 2099579 - RNA, 19 nt, Artificial Sequence
  Description of Artificial Sequence: Synthetic oligonucleotide
agacagcccaaacaguagc

SEQ ID NO: 2099580 - RNA, 19 nt, Artificial Sequence
  Description of Artificial Sequence: Synthetic oligonucleotide
aaauaaucccaaaagcagu

SEQ ID NO: 2099581 - RNA, 19 nt, Artificial Sequence
  Description of Artificial Sequence: Synthetic oligonucleotide
ucaaauugagggcauugga

SEQ ID NO: 2099582 - RNA, 19 nt, Artificial Sequence
  Description of Artificial Sequence: Synthetic oligonucleotide
ggaucuguaacuauaauug

SEQ ID NO: 2099583 - RNA, 19 nt, Artificial Sequence
  Description of Artificial Sequence: Synthetic oligonucleotide
uguuaguauucagagaaca

SEQ ID NO: 2099584 - RNA, 19 nt, Artificial Sequence
  Description of Artificial Sequence: Synthetic oligonucleotide
auaucuaaaugaauuuaac

SEQ ID NO: 2099585 - RNA, 19 nt, Artificial Sequence
  Description of Artificial Sequence: Synthetic oligonucleotide
uagucugaauauaaagcug

SEQ ID NO: 2099586 - RNA, 19 nt, Artificial Sequence
  Description of Artificial Sequence: Synthetic oligonucleotide
ugaagaguucagaaacugc

SEQ ID NO: 2099587 - RNA, 19 nt, Artificial Sequence
  Description of Artificial Sequence: Synthetic oligonucleotide
uaaaguugugaagaguuca

SEQ ID NO: 2099588 - RNA, 19 nt, Artificial Sequence
  Description of Artificial Sequence: Synthetic oligonucleotide
aauaucaacucagcagaag

SEQ ID NO: 2099589 - RNA, 19 nt, Artificial Sequence
  Description of Artificial Sequence: Synthetic oligonucleotide
aguauaucuaaaugaauuu

SEQ ID NO: 2099590 - RNA, 19 nt, Artificial Sequence
  Description of Artificial Sequence: Synthetic oligonucleotide
gaaguaaaaugguaauuuc

SEQ ID NO: 2099591 - RNA, 19 nt, Artificial Sequence
  Description of Artificial Sequence: Synthetic oligonucleotide
gguaauuucucuguuacag

SEQ ID NO: 2099592 - RNA, 19 nt, Artificial Sequence
  Description of Artificial Sequence: Synthetic oligonucleotide
uuauagcagggccauagac

SEQ ID NO: 2099593 - RNA, 19 nt, Artificial Sequence
  Description of Artificial Sequence: Synthetic oligonucleotide
auggcaacaacugaauauc

SEQ ID NO: 2099594 - RNA, 19 nt, Artificial Sequence
  Description of Artificial Sequence: Synthetic oligonucleotide
aacgccgccaugcugacgu

SEQ ID NO: 2099595 - RNA, 19 nt, Artificial Sequence
  Description of Artificial Sequence: Synthetic oligonucleotide
uaaucggucuugauuuucc

SEQ ID NO: 2099596 - RNA, 19 nt, Artificial Sequence
  Description of Artificial Sequence: Synthetic oligonucleotide
uccuaguuucuccauggag

SEQ ID NO: 2099597 - RNA, 19 nt, Artificial Sequence
  Description of Artificial Sequence: Synthetic oligonucleotide
cucacuggguuuuauuugc

SEQ ID NO: 2099598 - RNA, 19 nt, Artificial Sequence
  Description of Artificial Sequence: Synthetic oligonucleotide
uaaguauaucuaaaugaau

SEQ ID NO: 2099599 - RNA, 19 nt, Artificial Sequence
  Description of Artificial Sequence: Synthetic oligonucleotide
uuagguccaaaucugcgaa

SEQ ID NO: 2099600 - RNA, 19 nt, Artificial Sequence
  Description of Artificial Sequence: Synthetic oligonucleotide
aaugguaauuucucuguua

SEQ ID NO: 2099601 - RNA, 19 nt, Artificial Sequence
  Description of Artificial Sequence: Synthetic oligonucleotide
aucgucgcaucucuuauag

SEQ ID NO: 2099602 - RNA, 19 nt, Artificial Sequence
  Description of Artificial Sequence: Synthetic oligonucleotide
aucccaaaagcaguuuucc

SEQ ID NO: 2099603 - RNA, 19 nt, Artificial Sequence
  Description of Artificial Sequence: Synthetic oligonucleotide
ucggucuugauuuucccug

SEQ ID NO: 2099604 - RNA, 19 nt, Artificial Sequence
  Description of Artificial Sequence: Synthetic oligonucleotide
uauuugcuguuuuaguagu

SEQ ID NO: 2099605 - RNA, 19 nt, Artificial Sequence
  Description of Artificial Sequence: Synthetic oligonucleotide
aucaacucagcagaaguuc

SEQ ID NO: 2099606 - RNA, 19 nt, Artificial Sequence
  Description of Artificial Sequence: Synthetic oligonucleotide
agaaauacagcucggcaau

SEQ ID NO: 2099607 - RNA, 19 nt, Artificial Sequence
  Description of Artificial Sequence: Synthetic oligonucleotide
auagcagggccauagacaa

SEQ ID NO: 2099608 - RNA, 19 nt, Artificial Sequence
  Description of Artificial Sequence: Synthetic oligonucleotide
aaaguugugaagaguucag

SEQ ID NO: 2099609 - RNA, 19 nt, Artificial Sequence
  Description of Artificial Sequence: Synthetic oligonucleotide
uuaguagucugaauauaaa

SEQ ID NO: 2099610 - RNA, 19 nt, Artificial Sequence
  Description of Artificial Sequence: Synthetic oligonucleotide
aaucuaguuaaaauuuuaa

SEQ ID NO: 2099611 - RNA, 19 nt, Artificial Sequence
  Description of Artificial Sequence: Synthetic oligonucleotide
ugugaagaguucagaaacu

SEQ ID NO: 2099612 - RNA, 19 nt, Artificial Sequence
  Description of Artificial Sequence: Synthetic oligonucleotide
cagacugcuaguuucuggc

SEQ ID NO: 2099613 - RNA, 19 nt, Artificial Sequence
  Description of Artificial Sequence: Synthetic oligonucleotide
cagagaacaccucacuggg

SEQ ID NO: 2099614 - RNA, 19 nt, Artificial Sequence
  Description of Artificial Sequence: Synthetic oligonucleotide
uuacauucuuuccucugca

SEQ ID NO: 2099615 - RNA, 19 nt, Artificial Sequence
  Description of Artificial Sequence: Synthetic oligonucleotide
ucuggcuuuaaugaaaaua

SEQ ID NO: 2099616 - RNA, 19 nt, Artificial Sequence
  Description of Artificial Sequence: Synthetic oligonucleotide
aacuguuaguauucagaga

SEQ ID NO: 2099617 - RNA, 19 nt, Artificial Sequence
  Description of Artificial Sequence: Synthetic oligonucleotide
caacaacugaauauccaag

SEQ ID NO: 2099618 - RNA, 19 nt, Artificial Sequence
  Description of Artificial Sequence: Synthetic oligonucleotide
ugauuuucccuguacaauu

SEQ ID NO: 2099619 - RNA, 19 nt, Artificial Sequence
  Description of Artificial Sequence: Synthetic oligonucleotide
aguugugaagaguucagaa

SEQ ID NO: 2099620 - RNA, 19 nt, Artificial Sequence
  Description of Artificial Sequence: Synthetic oligonucleotide
uaacuauaauugucaaucu

SEQ ID NO: 2099621 - RNA, 19 nt, Artificial Sequence
  Description of Artificial Sequence: Synthetic oligonucleotide
ugcagcacuggauagaauu

SEQ ID NO: 2099622 - RNA, 19 nt, Artificial Sequence
  Description of Artificial Sequence: Synthetic oligonucleotide
uuugccacaucguaugguc

SEQ ID NO: 2099623 - RNA, 19 nt, Artificial Sequence
  Description of Artificial Sequence: Synthetic oligonucleotide
uauaauugucaaucuaguu

SEQ ID NO: 2099624 - RNA, 19 nt, Artificial Sequence
  Description of Artificial Sequence: Synthetic oligonucleotide
auugccacauuaauagggg

SEQ ID NO: 2099625 - RNA, 19 nt, Artificial Sequence
  Description of Artificial Sequence: Synthetic oligonucleotide
guagucugaauauaaagcu

SEQ ID NO: 2099626 - RNA, 19 nt, Artificial Sequence
  Description of Artificial Sequence: Synthetic oligonucleotide
uacagcucggcaauuugug

SEQ ID NO: 2099627 - RNA, 19 nt, Artificial Sequence
  Description of Artificial Sequence: Synthetic oligonucleotide
augagcugaaaagagggag

SEQ ID NO: 2099628 - RNA, 19 nt, Artificial Sequence
  Description of Artificial Sequence: Synthetic oligonucleotide
aucaaauugagggcauugg

SEQ ID NO: 2099629 - RNA, 19 nt, Artificial Sequence
  Description of Artificial Sequence: Synthetic oligonucleotide
aguucagaaacugcuacug

SEQ ID NO: 2099630 - RNA, 19 nt, Artificial Sequence
  Description of Artificial Sequence: Synthetic oligonucleotide
uccucggauuuccaaaggc

SEQ ID NO: 2099631 - RNA, 19 nt, Artificial Sequence
  Description of Artificial Sequence: Synthetic oligonucleotide
acagacugcuaguuucugg

SEQ ID NO: 2099632 - RNA, 19 nt, Artificial Sequence
  Description of Artificial Sequence: Synthetic oligonucleotide
ugcuguuuuaguagucuga

SEQ ID NO: 2099633 - RNA, 19 nt, Artificial Sequence
  Description of Artificial Sequence: Synthetic oligonucleotide
acaucuaagugugugcaag

SEQ ID NO: 2099634 - RNA, 19 nt, Artificial Sequence
  Description of Artificial Sequence: Synthetic oligonucleotide
agucugaauauaaagcugu

SEQ ID NO: 2099635 - RNA, 19 nt, Artificial Sequence
  Description of Artificial Sequence: Synthetic oligonucleotide
uaaaugaauuuaacuguua

SEQ ID NO: 2099636 - RNA, 19 nt, Artificial Sequence
  Description of Artificial Sequence: Synthetic oligonucleotide
cagaccucggucaauugcc

SEQ ID NO: 2099637 - RNA, 19 nt, Artificial Sequence
  Description of Artificial Sequence: Synthetic oligonucleotide
aauaaucccaaaagcaguu

SEQ ID NO: 2099638 - RNA, 19 nt, Artificial Sequence
  Description of Artificial Sequence: Synthetic oligonucleotide
uuugcuguuuuaguagucu

SEQ ID NO: 2099639 - RNA, 19 nt, Artificial Sequence
  Description of Artificial Sequence: Synthetic oligonucleotide
gaagacagucaucauccac

SEQ ID NO: 2099640 - RNA, 19 nt, Artificial Sequence
  Description of Artificial Sequence: Synthetic oligonucleotide
ugagcagcggucuccacca

SEQ ID NO: 2099641 - RNA, 19 nt, Artificial Sequence
  Description of Artificial Sequence: Synthetic oligonucleotide
ucauccacuucugauggcc

SEQ ID NO: 2099642 - RNA, 19 nt, Artificial Sequence
  Description of Artificial Sequence: Synthetic oligonucleotide
aaaugguaauuucucuguu

SEQ ID NO: 2099643 - RNA, 19 nt, Artificial Sequence
  Description of Artificial Sequence: Synthetic oligonucleotide
ucugcgaacgccgccaugc

SEQ ID NO: 2099644 - RNA, 19 nt, Artificial Sequence
  Description of Artificial Sequence: Synthetic oligonucleotide
uguuacaguuauacagacu

SEQ ID NO: 2099645 - RNA, 19 nt, Artificial Sequence
  Description of Artificial Sequence: Synthetic oligonucleotide
guuauacagacuaaaucca

SEQ ID NO: 2099646 - RNA, 19 nt, Artificial Sequence
  Description of Artificial Sequence: Synthetic oligonucleotide
guucaaagcccagaccucg

SEQ ID NO: 2099647 - RNA, 19 nt, Artificial Sequence
  Description of Artificial Sequence: Synthetic oligonucleotide
caacaauaucauacagccg

SEQ ID NO: 2099648 - RNA, 19 nt, Artificial Sequence
  Description of Artificial Sequence: Synthetic oligonucleotide
aguucccuuccacugugac

SEQ ID NO: 2099649 - RNA, 19 nt, Artificial Sequence
  Description of Artificial Sequence: Synthetic oligonucleotide
aaaucugcgaacgccgcca

SEQ ID NO: 2099650 - RNA, 19 nt, Artificial Sequence
  Description of Artificial Sequence: Synthetic oligonucleotide
auauccaaggugagcagcg

SEQ ID NO: 2099651 - RNA, 19 nt, Artificial Sequence
  Description of Artificial Sequence: Synthetic oligonucleotide
uucucaucgucgcaucucu

SEQ ID NO: 2099652 - RNA, 19 nt, Artificial Sequence
  Description of Artificial Sequence: Synthetic oligonucleotide
acugugaccgaugagcuga

SEQ ID NO: 2099653 - RNA, 19 nt, Artificial Sequence
  Description of Artificial Sequence: Synthetic oligonucleotide
uaaucccaaaagcaguuuu

SEQ ID NO: 2099654 - RNA, 19 nt, Artificial Sequence
  Description of Artificial Sequence: Synthetic oligonucleotide
ucaaguccgagcccgcucu

SEQ ID NO: 2099655 - RNA, 19 nt, Artificial Sequence
  Description of Artificial Sequence: Synthetic oligonucleotide
gauggcaacaacugaauau

SEQ ID NO: 2099656 - RNA, 19 nt, Artificial Sequence
  Description of Artificial Sequence: Synthetic oligonucleotide
acagccggacccuugaaga

SEQ ID NO: 2099657 - RNA, 19 nt, Artificial Sequence
  Description of Artificial Sequence: Synthetic oligonucleotide
ucggucaauugccacauua

SEQ ID NO: 2099658 - RNA, 19 nt, Artificial Sequence
  Description of Artificial Sequence: Synthetic oligonucleotide
uacagugagacggaucugu

SEQ ID NO: 2099659 - RNA, 19 nt, Artificial Sequence
  Description of Artificial Sequence: Synthetic oligonucleotide
uaaagucaacaauaugauu

SEQ ID NO: 2099660 - RNA, 19 nt, Artificial Sequence
  Description of Artificial Sequence: Synthetic oligonucleotide
cagaucugcaucaaauuga

SEQ ID NO: 2099661 - RNA, 19 nt, Artificial Sequence
  Description of Artificial Sequence: Synthetic oligonucleotide
caucuaagugugugcaagc

SEQ ID NO: 2099662 - RNA, 19 nt, Artificial Sequence
  Description of Artificial Sequence: Synthetic oligonucleotide
cuucauuuucagacagccc

SEQ ID NO: 2099663 - RNA, 19 nt, Artificial Sequence
  Description of Artificial Sequence: Synthetic oligonucleotide
agggccauagacaaguuca

SEQ ID NO: 2099664 - RNA, 19 nt, Artificial Sequence
  Description of Artificial Sequence: Synthetic oligonucleotide
uugcuguuuuaguagucug

SEQ ID NO: 2099665 - RNA, 19 nt, Artificial Sequence
  Description of Artificial Sequence: Synthetic oligonucleotide
ucucagcccucacauuuag

SEQ ID NO: 2099666 - RNA, 19 nt, Artificial Sequence
  Description of Artificial Sequence: Synthetic oligonucleotide
agacuaaauccacaucuaa

SEQ ID NO: 2099667 - RNA, 19 nt, Artificial Sequence
  Description of Artificial Sequence: Synthetic oligonucleotide
caauugguaaaguugugaa

SEQ ID NO: 2099668 - RNA, 19 nt, Artificial Sequence
  Description of Artificial Sequence: Synthetic oligonucleotide
guugugaagaguucagaaa

SEQ ID NO: 2099669 - RNA, 19 nt, Artificial Sequence
  Description of Artificial Sequence: Synthetic oligonucleotide
ggcuuuaaugaaaauauca

SEQ ID NO: 2099670 - RNA, 19 nt, Artificial Sequence
  Description of Artificial Sequence: Synthetic oligonucleotide
uagguuugccacaucguau

SEQ ID NO: 2099671 - RNA, 19 nt, Artificial Sequence
  Description of Artificial Sequence: Synthetic oligonucleotide
gcagaucugcaucaaauug

SEQ ID NO: 2099672 - RNA, 19 nt, Artificial Sequence
  Description of Artificial Sequence: Synthetic oligonucleotide
ugaaaagagggaggcagcu

SEQ ID NO: 2099673 - RNA, 19 nt, Artificial Sequence
  Description of Artificial Sequence: Synthetic oligonucleotide
cugcaacaauaucauacag

SEQ ID NO: 2099674 - RNA, 19 nt, Artificial Sequence
  Description of Artificial Sequence: Synthetic oligonucleotide
guuaguauucagagaacac

SEQ ID NO: 2099675 - RNA, 19 nt, Artificial Sequence
  Description of Artificial Sequence: Synthetic oligonucleotide
uuuuaguagucugaauaua

SEQ ID NO: 2099676 - RNA, 19 nt, Artificial Sequence
  Description of Artificial Sequence: Synthetic oligonucleotide
cuuagguccaaaucugcga

SEQ ID NO: 2099677 - RNA, 19 nt, Artificial Sequence
  Description of Artificial Sequence: Synthetic oligonucleotide
uacagacuaaauccacauc

SEQ ID NO: 2099678 - RNA, 19 nt, Artificial Sequence
  Description of Artificial Sequence: Synthetic oligonucleotide
guugcucucaaaacguuac

SEQ ID NO: 2099679 - RNA, 19 nt, Artificial Sequence
  Description of Artificial Sequence: Synthetic oligonucleotide
uugagggcauuggaaauug

SEQ ID NO: 2099680 - RNA, 19 nt, Artificial Sequence
  Description of Artificial Sequence: Synthetic oligonucleotide
cugaauauccaaggugagc

SEQ ID NO: 2099681 - RNA, 19 nt, Artificial Sequence
  Description of Artificial Sequence: Synthetic oligonucleotide
uggagaaauacagcucggc

SEQ ID NO: 2099682 - RNA, 19 nt, Artificial Sequence
  Description of Artificial Sequence: Synthetic oligonucleotide
caugcugacgucccaggag

SEQ ID NO: 2099683 - RNA, 19 nt, Artificial Sequence
  Description of Artificial Sequence: Synthetic oligonucleotide
uccaaaggccucucugcag

SEQ ID NO: 2099684 - RNA, 19 nt, Artificial Sequence
  Description of Artificial Sequence: Synthetic oligonucleotide
uggcuuuaaugaaaauauc

SEQ ID NO: 2099685 - RNA, 19 nt, Artificial Sequence
  Description of Artificial Sequence: Synthetic oligonucleotide
gagggcauuggaaauugug

SEQ ID NO: 2099686 - RNA, 19 nt, Artificial Sequence
  Description of Artificial Sequence: Synthetic oligonucleotide
caauaugauugauggcaac

SEQ ID NO: 2099687 - RNA, 19 nt, Artificial Sequence
  Description of Artificial Sequence: Synthetic oligonucleotide
uggauagaauuacauucuu

SEQ ID NO: 2099688 - RNA, 19 nt, Artificial Sequence
  Description of Artificial Sequence: Synthetic oligonucleotide
auggccgagguuucuucac

SEQ ID NO: 2099689 - RNA, 19 nt, Artificial Sequence
  Description of Artificial Sequence: Synthetic oligonucleotide
aaguugugaagaguucaga

SEQ ID NO: 2099690 - RNA, 19 nt, Artificial Sequence
  Description of Artificial Sequence: Synthetic oligonucleotide
aguauucagagaacaccuc

SEQ ID NO: 2099691 - RNA, 19 nt, Artificial Sequence
  Description of Artificial Sequence: Synthetic oligonucleotide
ucaucgucgcaucucuuau

SEQ ID NO: 2099692 - RNA, 19 nt, Artificial Sequence
  Description of Artificial Sequence: Synthetic oligonucleotide
auaugauugauggcaacaa

SEQ ID NO: 2099693 - RNA, 19 nt, Artificial Sequence
  Description of Artificial Sequence: Synthetic oligonucleotide
accgaugagcugaaaagag

SEQ ID NO: 2099694 - RNA, 19 nt, Artificial Sequence
  Description of Artificial Sequence: Synthetic oligonucleotide
auugucaaucuaguuaaaa

SEQ ID NO: 2099695 - RNA, 19 nt, Artificial Sequence
  Description of Artificial Sequence: Synthetic oligonucleotide
ugccacaucguaugguccu

SEQ ID NO: 2099696 - RNA, 19 nt, Artificial Sequence
  Description of Artificial Sequence: Synthetic oligonucleotide
ugguaauuucucuguuaca

SEQ ID NO: 2099697 - RNA, 19 nt, Artificial Sequence
  Description of Artificial Sequence: Synthetic oligonucleotide
ugcagaucugcaucaaauu

SEQ ID NO: 2099698 - RNA, 19 nt, Artificial Sequence
  Description of Artificial Sequence: Synthetic oligonucleotide
guacaauugguaaaguugu

SEQ ID NO: 2099699 - RNA, 19 nt, Artificial Sequence
  Description of Artificial Sequence: Synthetic oligonucleotide
uguguaccuucucaucguc

SEQ ID NO: 2099700 - RNA, 19 nt, Artificial Sequence
  Description of Artificial Sequence: Synthetic oligonucleotide
guagcccuagguuugccac

SEQ ID NO: 2099701 - RNA, 19 nt, Artificial Sequence
  Description of Artificial Sequence: Synthetic oligonucleotide
ucggauuuccaaaggccuc

SEQ ID NO: 2099702 - RNA, 19 nt, Artificial Sequence
  Description of Artificial Sequence: Synthetic oligonucleotide
ggacccuugaagaaguugc

SEQ ID NO: 2099703 - RNA, 19 nt, Artificial Sequence
  Description of Artificial Sequence: Synthetic oligonucleotide
caucaaauugagggcauug

SEQ ID NO: 2099704 - RNA, 19 nt, Artificial Sequence
  Description of Artificial Sequence: Synthetic oligonucleotide
agcccucacauuuagcuuu

SEQ ID NO: 2099705 - RNA, 19 nt, Artificial Sequence
  Description of Artificial Sequence: Synthetic oligonucleotide
aaauacagcucggcaauuu

SEQ ID NO: 2099706 - RNA, 19 nt, Artificial Sequence
  Description of Artificial Sequence: Synthetic oligonucleotide
ucccaaaagcaguuuuccu

SEQ ID NO: 2099707 - RNA, 19 nt, Artificial Sequence
  Description of Artificial Sequence: Synthetic oligonucleotide
ugaagaaguugcucucaaa

SEQ ID NO: 2099708 - RNA, 19 nt, Artificial Sequence
  Description of Artificial Sequence: Synthetic oligonucleotide
aucggucuugauuuucccu

SEQ ID NO: 2099709 - RNA, 19 nt, Artificial Sequence
  Description of Artificial Sequence: Synthetic oligonucleotide
uuaaucggucuugauuuuc

SEQ ID NO: 2099710 - RNA, 19 nt, Artificial Sequence
  Description of Artificial Sequence: Synthetic oligonucleotide
cuauaauugucaaucuagu

SEQ ID NO: 2099711 - RNA, 19 nt, Artificial Sequence
  Description of Artificial Sequence: Synthetic oligonucleotide
caaucuaguuaaaauuuua

SEQ ID NO: 2099712 - RNA, 19 nt, Artificial Sequence
  Description of Artificial Sequence: Synthetic oligonucleotide
cagacagcccaaacaguag

SEQ ID NO: 2099713 - RNA, 19 nt, Artificial Sequence
  Description of Artificial Sequence: Synthetic oligonucleotide
uauccaaggugagcagcgg

SEQ ID NO: 2099714 - RNA, 19 nt, Artificial Sequence
  Description of Artificial Sequence: Synthetic oligonucleotide
ucauacagccggacccuug

SEQ ID NO: 2099715 - RNA, 19 nt, Artificial Sequence
  Description of Artificial Sequence: Synthetic oligonucleotide
ugguaaaguugugaagagu

SEQ ID NO: 2099716 - RNA, 19 nt, Artificial Sequence
  Description of Artificial Sequence: Synthetic oligonucleotide
gacagcccaaacaguagcc

SEQ ID NO: 2099717 - RNA, 19 nt, Artificial Sequence
  Description of Artificial Sequence: Synthetic oligonucleotide
auuugcuguuuuaguaguc

SEQ ID NO: 2099718 - RNA, 19 nt, Artificial Sequence
  Description of Artificial Sequence: Synthetic oligonucleotide
cuguuaguauucagagaac

SEQ ID NO: 2099719 - RNA, 19 nt, Artificial Sequence
  Description of Artificial Sequence: Synthetic oligonucleotide
ggcauuggaaauuguguac

SEQ ID NO: 2099720 - RNA, 19 nt, Artificial Sequence
  Description of Artificial Sequence: Synthetic oligonucleotide
gaaguugcucucaaaacgu

SEQ ID NO: 2099721 - RNA, 19 nt, Artificial Sequence
  Description of Artificial Sequence: Synthetic oligonucleotide
aguagcccuagguuugcca

SEQ ID NO: 2099722 - RNA, 19 nt, Artificial Sequence
  Description of Artificial Sequence: Synthetic oligonucleotide
cagcugauggagacugagg

SEQ ID NO: 2099723 - RNA, 19 nt, Artificial Sequence
  Description of Artificial Sequence: Synthetic oligonucleotide
ucaaaacguuacagugaga

SEQ ID NO: 2099724 - RNA, 19 nt, Artificial Sequence
  Description of Artificial Sequence: Synthetic oligonucleotide
uuuaaucggucuugauuuu

SEQ ID NO: 2099725 - RNA, 19 nt, Artificial Sequence
  Description of Artificial Sequence: Synthetic oligonucleotide
uuucuucacuguagaaaua

SEQ ID NO: 2099726 - RNA, 19 nt, Artificial Sequence
  Description of Artificial Sequence: Synthetic oligonucleotide
ugguccucggauuuccaaa

SEQ ID NO: 2099727 - RNA, 19 nt, Artificial Sequence
  Description of Artificial Sequence: Synthetic oligonucleotide
gaccgaugagcugaaaaga

SEQ ID NO: 2099728 - RNA, 19 nt, Artificial Sequence
  Description of Artificial Sequence: Synthetic oligonucleotide
aguccgagcccgcucuuag

SEQ ID NO: 2099729 - RNA, 19 nt, Artificial Sequence
  Description of Artificial Sequence: Synthetic oligonucleotide
agccuucaaguccgagccc

SEQ ID NO: 2099730 - RNA, 19 nt, Artificial Sequence
  Description of Artificial Sequence: Synthetic oligonucleotide
gucuugauuuucccuguac

SEQ ID NO: 2099731 - RNA, 19 nt, Artificial Sequence
  Description of Artificial Sequence: Synthetic oligonucleotide
gaucugcaucaaauugagg

SEQ ID NO: 2099732 - RNA, 19 nt, Artificial Sequence
  Description of Artificial Sequence: Synthetic oligonucleotide
gcauuggaaauuguguacc

SEQ ID NO: 2099733 - RNA, 19 nt, Artificial Sequence
  Description of Artificial Sequence: Synthetic oligonucleotide
ucggcaauuuguggacacg

SEQ ID NO: 2099734 - RNA, 19 nt, Artificial Sequence
  Description of Artificial Sequence: Synthetic oligonucleotide
cgaagagccuucaaguccg

SEQ ID NO: 2099735 - RNA, 19 nt, Artificial Sequence
  Description of Artificial Sequence: Synthetic oligonucleotide
aacguuacagugagacgga

SEQ ID NO: 2099736 - RNA, 19 nt, Artificial Sequence
  Description of Artificial Sequence: Synthetic oligonucleotide
cuaaaugaauuuaacuguu

SEQ ID NO: 2099737 - RNA, 19 nt, Artificial Sequence
  Description of Artificial Sequence: Synthetic oligonucleotide
ucguaugguccucggauuu

SEQ ID NO: 2099738 - RNA, 19 nt, Artificial Sequence
  Description of Artificial Sequence: Synthetic oligonucleotide
gguccucggauuuccaaag

SEQ ID NO: 2099739 - RNA, 19 nt, Artificial Sequence
  Description of Artificial Sequence: Synthetic oligonucleotide
cacauuuagcuuucuugca

SEQ ID NO: 2099740 - RNA, 19 nt, Artificial Sequence
  Description of Artificial Sequence: Synthetic oligonucleotide
cuggauagaauuacauucu

SEQ ID NO: 2099741 - RNA, 19 nt, Artificial Sequence
  Description of Artificial Sequence: Synthetic oligonucleotide
acaauaugauugauggcaa

SEQ ID NO: 2099742 - RNA, 19 nt, Artificial Sequence
  Description of Artificial Sequence: Synthetic oligonucleotide
uucaaguccgagcccgcuc

SEQ ID NO: 2099743 - RNA, 19 nt, Artificial Sequence
  Description of Artificial Sequence: Synthetic oligonucleotide
acugcuaguuucuggcuuu

SEQ ID NO: 2099744 - RNA, 19 nt, Artificial Sequence
  Description of Artificial Sequence: Synthetic oligonucleotide
cucggcaauuuguggacac

SEQ ID NO: 2099745 - RNA, 19 nt, Artificial Sequence
  Description of Artificial Sequence: Synthetic oligonucleotide
guaaaguugugaagaguuc

SEQ ID NO: 2099746 - RNA, 19 nt, Artificial Sequence
  Description of Artificial Sequence: Synthetic oligonucleotide
cacaucguaugguccucgg

SEQ ID NO: 2099747 - RNA, 19 nt, Artificial Sequence
  Description of Artificial Sequence: Synthetic oligonucleotide
gauggccgagguuucuuca

SEQ ID NO: 2099748 - RNA, 19 nt, Artificial Sequence
  Description of Artificial Sequence: Synthetic oligonucleotide
uguggacacggcagccuug

SEQ ID NO: 2099749 - RNA, 19 nt, Artificial Sequence
  Description of Artificial Sequence: Synthetic oligonucleotide
ccucggauuuccaaaggcc

SEQ ID NO: 2099750 - RNA, 19 nt, Artificial Sequence
  Description of Artificial Sequence: Synthetic oligonucleotide
guccucggauuuccaaagg

SEQ ID NO: 2099751 - RNA, 19 nt, Artificial Sequence
  Description of Artificial Sequence: Synthetic oligonucleotide
ccgaugagcugaaaagagg

SEQ ID NO: 2099752 - RNA, 19 nt, Artificial Sequence
  Description of Artificial Sequence: Synthetic oligonucleotide
auccaaggugagcagcggu

SEQ ID NO: 2099753 - RNA, 19 nt, Artificial Sequence
  Description of Artificial Sequence: Synthetic oligonucleotide
gugaccgaugagcugaaaa

SEQ ID NO: 2099754 - RNA, 19 nt, Artificial Sequence
  Description of Artificial Sequence: Synthetic oligonucleotide
ugcgaacgccgccaugcug

SEQ ID NO: 2099755 - RNA, 19 nt, Artificial Sequence
  Description of Artificial Sequence: Synthetic oligonucleotide
agacugcuaguuucuggcu

SEQ ID NO: 2099756 - RNA, 19 nt, Artificial Sequence
  Description of Artificial Sequence: Synthetic oligonucleotide
ccgaagagccuucaagucc

SEQ ID NO: 2099757 - RNA, 19 nt, Artificial Sequence
  Description of Artificial Sequence: Synthetic oligonucleotide
cuagguuugccacaucgua

SEQ ID NO: 2099758 - RNA, 19 nt, Artificial Sequence
  Description of Artificial Sequence: Synthetic oligonucleotide
ugauggccgagguuucuuc

SEQ ID NO: 2099759 - RNA, 19 nt, Artificial Sequence
  Description of Artificial Sequence: Synthetic oligonucleotide
gagaacaccucacuggguu

SEQ ID NO: 2099760 - RNA, 19 nt, Artificial Sequence
  Description of Artificial Sequence: Synthetic oligonucleotide
gguuucuucacuguagaaa

SEQ ID NO: 2099761 - RNA, 19 nt, Artificial Sequence
  Description of Artificial Sequence: Synthetic oligonucleotide
caauaucauacagccggac

SEQ ID NO: 2099762 - RNA, 19 nt, Artificial Sequence
  Description of Artificial Sequence: Synthetic oligonucleotide
cugcaucaaauugagggca

SEQ ID NO: 2099763 - RNA, 19 nt, Artificial Sequence
  Description of Artificial Sequence: Synthetic oligonucleotide
aagagccuucaaguccgag

SEQ ID NO: 2099764 - RNA, 19 nt, Artificial Sequence
  Description of Artificial Sequence: Synthetic oligonucleotide
aucguaugguccucggauu

SEQ ID NO: 2099765 - RNA, 19 nt, Artificial Sequence
  Description of Artificial Sequence: Synthetic oligonucleotide
acaucguaugguccucgga

SEQ ID NO: 2099766 - RNA, 19 nt, Artificial Sequence
  Description of Artificial Sequence: Synthetic oligonucleotide
auugagggcauuggaaauu

SEQ ID NO: 2099767 - RNA, 19 nt, Artificial Sequence
  Description of Artificial Sequence: Synthetic oligonucleotide
cagcacuggauagaauuac

SEQ ID NO: 2099768 - RNA, 19 nt, Artificial Sequence
  Description of Artificial Sequence: Synthetic oligonucleotide
guggacacggcagccuugg

SEQ ID NO: 2099769 - RNA, 19 nt, Artificial Sequence
  Description of Artificial Sequence: Synthetic oligonucleotide
cuguaacuauaauugucaa

SEQ ID NO: 2099770 - RNA, 19 nt, Artificial Sequence
  Description of Artificial Sequence: Synthetic oligonucleotide
uucucagcccucacauuua

SEQ ID NO: 2099771 - RNA, 19 nt, Artificial Sequence
  Description of Artificial Sequence: Synthetic oligonucleotide
aaucugcgaacgccgccau

SEQ ID NO: 2099772 - RNA, 19 nt, Artificial Sequence
  Description of Artificial Sequence: Synthetic oligonucleotide
gacggaucuguaacuauaa

SEQ ID NO: 2099773 - RNA, 19 nt, Artificial Sequence
  Description of Artificial Sequence: Synthetic oligonucleotide
cucggauuuccaaaggccu

SEQ ID NO: 2099774 - RNA, 19 nt, Artificial Sequence
  Description of Artificial Sequence: Synthetic oligonucleotide
ugagggcauuggaaauugu

SEQ ID NO: 2099775 - RNA, 19 nt, Artificial Sequence
  Description of Artificial Sequence: Synthetic oligonucleotide
acaauaucauacagccgga

SEQ ID NO: 2099776 - RNA, 19 nt, Artificial Sequence
  Description of Artificial Sequence: Synthetic oligonucleotide
cauacagccggacccuuga

SEQ ID NO: 2099777 - RNA, 19 nt, Artificial Sequence
  Description of Artificial Sequence: Synthetic oligonucleotide
cauucuuuccucugcagau

SEQ ID NO: 2099778 - RNA, 19 nt, Artificial Sequence
  Description of Artificial Sequence: Synthetic oligonucleotide
gguaaaguugugaagaguu

SEQ ID NO: 2099779 - RNA, 19 nt, Artificial Sequence
  Description of Artificial Sequence: Synthetic oligonucleotide
agguuucuucacuguagaa

SEQ ID NO: 2099780 - RNA, 19 nt, Artificial Sequence
  Description of Artificial Sequence: Synthetic oligonucleotide
cucagcccucacauuuagc

SEQ ID NO: 2099781 - RNA, 19 nt, Artificial Sequence
  Description of Artificial Sequence: Synthetic oligonucleotide
agcacuggauagaauuaca

SEQ ID NO: 2099782 - RNA, 19 nt, Artificial Sequence
  Description of Artificial Sequence: Synthetic oligonucleotide
cucucugcagcacuggaua

SEQ ID NO: 2099783 - RNA, 19 nt, Artificial Sequence
  Description of Artificial Sequence: Synthetic oligonucleotide
cuuauagcagggccauaga

SEQ ID NO: 2099784 - RNA, 19 nt, Artificial Sequence
  Description of Artificial Sequence: Synthetic oligonucleotide
ggaaauuguguaccuucuc

SEQ ID NO: 2099785 - RNA, 19 nt, Artificial Sequence
  Description of Artificial Sequence: Synthetic oligonucleotide
acggaucuguaacuauaau

SEQ ID NO: 2099786 - RNA, 19 nt, Artificial Sequence
  Description of Artificial Sequence: Synthetic oligonucleotide
uuacagugagacggaucug

SEQ ID NO: 2099787 - RNA, 19 nt, Artificial Sequence
  Description of Artificial Sequence: Synthetic oligonucleotide
ucgucgcaucucuuauagc

SEQ ID NO: 2099788 - RNA, 19 nt, Artificial Sequence
  Description of Artificial Sequence: Synthetic oligonucleotide
caagcuggaagacagucau

SEQ ID NO: 2099789 - RNA, 19 nt, Artificial Sequence
  Description of Artificial Sequence: Synthetic oligonucleotide
uucuugcaagcuggaagac

SEQ ID NO: 2099790 - RNA, 19 nt, Artificial Sequence
  Description of Artificial Sequence: Synthetic oligonucleotide
agccggacccuugaagaag

SEQ ID NO: 2099791 - RNA, 19 nt, Artificial Sequence
  Description of Artificial Sequence: Synthetic oligonucleotide
caaacaguagcccuagguu

SEQ ID NO: 2099792 - RNA, 19 nt, Artificial Sequence
  Description of Artificial Sequence: Synthetic oligonucleotide
gacacggcagccuuggcuu

SEQ ID NO: 2099793 - RNA, 19 nt, Artificial Sequence
  Description of Artificial Sequence: Synthetic oligonucleotide
ccagaccucggucaauugc

SEQ ID NO: 2099794 - RNA, 19 nt, Artificial Sequence
  Description of Artificial Sequence: Synthetic oligonucleotide
cagacuaaauccacaucua

SEQ ID NO: 2099795 - RNA, 19 nt, Artificial Sequence
  Description of Artificial Sequence: Synthetic oligonucleotide
augguccucggauuuccaa

SEQ ID NO: 2099796 - RNA, 19 nt, Artificial Sequence
  Description of Artificial Sequence: Synthetic oligonucleotide
ggagacugaggccuucuca

SEQ ID NO: 2099797 - RNA, 19 nt, Artificial Sequence
  Description of Artificial Sequence: Synthetic oligonucleotide
aaguugcucucaaaacguu

SEQ ID NO: 2099798 - RNA, 19 nt, Artificial Sequence
  Description of Artificial Sequence: Synthetic oligonucleotide
acuucugauggccgagguu

SEQ ID NO: 2099799 - RNA, 19 nt, Artificial Sequence
  Description of Artificial Sequence: Synthetic oligonucleotide
cgucgcaucucuuauagca

SEQ ID NO: 2099800 - RNA, 19 nt, Artificial Sequence
  Description of Artificial Sequence: Synthetic oligonucleotide
acacggcagccuuggcuuc

SEQ ID NO: 2099801 - RNA, 19 nt, Artificial Sequence
  Description of Artificial Sequence: Synthetic oligonucleotide
uucuggcuuuaaugaaaau

SEQ ID NO: 2099802 - RNA, 19 nt, Artificial Sequence
  Description of Artificial Sequence: Synthetic oligonucleotide
caucguaugguccucggau

SEQ ID NO: 2099803 - RNA, 19 nt, Artificial Sequence
  Description of Artificial Sequence: Synthetic oligonucleotide
gguccaaaucugcgaacgc

SEQ ID NO: 2099804 - RNA, 19 nt, Artificial Sequence
  Description of Artificial Sequence: Synthetic oligonucleotide
aguugcucucaaaacguua

SEQ ID NO: 2099805 - RNA, 19 nt, Artificial Sequence
  Description of Artificial Sequence: Synthetic oligonucleotide
gggcauuggaaauugugua

SEQ ID NO: 2099806 - RNA, 19 nt, Artificial Sequence
  Description of Artificial Sequence: Synthetic oligonucleotide
cacugugaccgaugagcug

SEQ ID NO: 2099807 - RNA, 19 nt, Artificial Sequence
  Description of Artificial Sequence: Synthetic oligonucleotide
cucaucgucgcaucucuua

SEQ ID NO: 2099808 - RNA, 19 nt, Artificial Sequence
  Description of Artificial Sequence: Synthetic oligonucleotide
agacggaucuguaacuaua

SEQ ID NO: 2099809 - RNA, 19 nt, Artificial Sequence
  Description of Artificial Sequence: Synthetic oligonucleotide
cuucucagcccucacauuu

SEQ ID NO: 2099810 - RNA, 19 nt, Artificial Sequence
  Description of Artificial Sequence: Synthetic oligonucleotide
guccgagcccgcucuuagg

SEQ ID NO: 2099811 - RNA, 19 nt, Artificial Sequence
  Description of Artificial Sequence: Synthetic oligonucleotide
cuucugauggccgagguuu

SEQ ID NO: 2099812 - RNA, 19 nt, Artificial Sequence
  Description of Artificial Sequence: Synthetic oligonucleotide
aggccuucucagcccucac

SEQ ID NO: 2099813 - RNA, 19 nt, Artificial Sequence
  Description of Artificial Sequence: Synthetic oligonucleotide
gcuguuuuaguagucugaa

SEQ ID NO: 2099814 - RNA, 19 nt, Artificial Sequence
  Description of Artificial Sequence: Synthetic oligonucleotide
acacugcaacaauaucaua

SEQ ID NO: 2099815 - RNA, 19 nt, Artificial Sequence
  Description of Artificial Sequence: Synthetic oligonucleotide
cccaaaagcaguuuuccua

SEQ ID NO: 2099816 - RNA, 19 nt, Artificial Sequence
  Description of Artificial Sequence: Synthetic oligonucleotide
guaccuucucaucgucgca

SEQ ID NO: 2099817 - RNA, 19 nt, Artificial Sequence
  Description of Artificial Sequence: Synthetic oligonucleotide
ggcaauuuguggacacggc

SEQ ID NO: 2099818 - RNA, 19 nt, Artificial Sequence
  Description of Artificial Sequence: Synthetic oligonucleotide
gacugcuaguuucuggcuu

SEQ ID NO: 2099819 - RNA, 19 nt, Artificial Sequence
  Description of Artificial Sequence: Synthetic oligonucleotide
caaggugagcagcggucuc

SEQ ID NO: 2099820 - RNA, 19 nt, Artificial Sequence
  Description of Artificial Sequence: Synthetic oligonucleotide
ucucaucgucgcaucucuu

SEQ ID NO: 2099821 - RNA, 19 nt, Artificial Sequence
  Description of Artificial Sequence: Synthetic oligonucleotide
gauggagacugaggccuuc

SEQ ID NO: 2099822 - RNA, 19 nt, Artificial Sequence
  Description of Artificial Sequence: Synthetic oligonucleotide
cacaucuaagugugugcaa

SEQ ID NO: 2099823 - RNA, 19 nt, Artificial Sequence
  Description of Artificial Sequence: Synthetic oligonucleotide
cagugagacggaucuguaa

SEQ ID NO: 2099824 - RNA, 19 nt, Artificial Sequence
  Description of Artificial Sequence: Synthetic oligonucleotide
gagacggaucuguaacuau

SEQ ID NO: 2099825 - RNA, 19 nt, Artificial Sequence
  Description of Artificial Sequence: Synthetic oligonucleotide
gccuuggcuucauuuucag

SEQ ID NO: 2099826 - RNA, 19 nt, Artificial Sequence
  Description of Artificial Sequence: Synthetic oligonucleotide
gcucucaaaacguuacagu

SEQ ID NO: 2099827 - RNA, 19 nt, Artificial Sequence
  Description of Artificial Sequence: Synthetic oligonucleotide
aaguucccuuccacuguga

SEQ ID NO: 2099828 - RNA, 19 nt, Artificial Sequence
  Description of Artificial Sequence: Synthetic oligonucleotide
cgagcccgcucuuaggucc

SEQ ID NO: 2099829 - RNA, 19 nt, Artificial Sequence
  Description of Artificial Sequence: Synthetic oligonucleotide
cacuggauagaauuacauu

SEQ ID NO: 2099830 - RNA, 19 nt, Artificial Sequence
  Description of Artificial Sequence: Synthetic oligonucleotide
uggacacggcagccuuggc

SEQ ID NO: 2099831 - RNA, 19 nt, Artificial Sequence
  Description of Artificial Sequence: Synthetic oligonucleotide
cccgaagagccuucaaguc

SEQ ID NO: 2099832 - RNA, 19 nt, Artificial Sequence
  Description of Artificial Sequence: Synthetic oligonucleotide
auacagccggacccuugaa

SEQ ID NO: 2099833 - RNA, 19 nt, Artificial Sequence
  Description of Artificial Sequence: Synthetic oligonucleotide
agaccucggucaauugcca

SEQ ID NO: 2099834 - RNA, 19 nt, Artificial Sequence
  Description of Artificial Sequence: Synthetic oligonucleotide
ugcuaguuucuggcuuuaa

SEQ ID NO: 2099835 - RNA, 19 nt, Artificial Sequence
  Description of Artificial Sequence: Synthetic oligonucleotide
gaacgccgccaugcugacg

SEQ ID NO: 2099836 - RNA, 19 nt, Artificial Sequence
  Description of Artificial Sequence: Synthetic oligonucleotide
cggcaauuuguggacacgg

SEQ ID NO: 2099837 - RNA, 19 nt, Artificial Sequence
  Description of Artificial Sequence: Synthetic oligonucleotide
gcgaacgccgccaugcuga

SEQ ID NO: 2099838 - RNA, 19 nt, Artificial Sequence
  Description of Artificial Sequence: Synthetic oligonucleotide
gcuacuggcuuuucaauuu

SEQ ID NO: 2099839 - RNA, 19 nt, Artificial Sequence
  Description of Artificial Sequence: Synthetic oligonucleotide
agcccaaacaguagcccua

SEQ ID NO: 2099840 - RNA, 19 nt, Artificial Sequence
  Description of Artificial Sequence: Synthetic oligonucleotide
gagcagcggucuccaccag

SEQ ID NO: 2099841 - RNA, 19 nt, Artificial Sequence
  Description of Artificial Sequence: Synthetic oligonucleotide
ccaaacaguagcccuaggu

SEQ ID NO: 2099842 - RNA, 19 nt, Artificial Sequence
  Description of Artificial Sequence: Synthetic oligonucleotide
caaaagcaguuuuccuagu

SEQ ID NO: 2099843 - RNA, 19 nt, Artificial Sequence
  Description of Artificial Sequence: Synthetic oligonucleotide
caguagcccuagguuugcc

SEQ ID NO: 2099844 - RNA, 19 nt, Artificial Sequence
  Description of Artificial Sequence: Synthetic oligonucleotide
caucgucgcaucucuuaua

SEQ ID NO: 2099845 - RNA, 19 nt, Artificial Sequence
  Description of Artificial Sequence: Synthetic oligonucleotide
acguuacagugagacggau

SEQ ID NO: 2099846 - RNA, 19 nt, Artificial Sequence
  Description of Artificial Sequence: Synthetic oligonucleotide
gcuaguuucuggcuuuaau

SEQ ID NO: 2099847 - RNA, 19 nt, Artificial Sequence
  Description of Artificial Sequence: Synthetic oligonucleotide
cguuacagugagacggauc

SEQ ID NO: 2099848 - RNA, 19 nt, Artificial Sequence
  Description of Artificial Sequence: Synthetic oligonucleotide
cgcucuuagguccaaaucu

SEQ ID NO: 2099849 - RNA, 19 nt, Artificial Sequence
  Description of Artificial Sequence: Synthetic oligonucleotide
caguccccgaagagccuuc

SEQ ID NO: 2099850 - RNA, 19 nt, Artificial Sequence
  Description of Artificial Sequence: Synthetic oligonucleotide
ggacacggcagccuuggcu

SEQ ID NO: 2099851 - RNA, 19 nt, Artificial Sequence
  Description of Artificial Sequence: Synthetic oligonucleotide
cuguuuuaguagucugaau

SEQ ID NO: 2099852 - RNA, 19 nt, Artificial Sequence
  Description of Artificial Sequence: Synthetic oligonucleotide
aggccucucugcagcacug

SEQ ID NO: 2099853 - RNA, 19 nt, Artificial Sequence
  Description of Artificial Sequence: Synthetic oligonucleotide
ugugaccgaugagcugaaa

SEQ ID NO: 2099854 - RNA, 19 nt, Artificial Sequence
  Description of Artificial Sequence: Synthetic oligonucleotide
ccucugcagaucugcauca

SEQ ID NO: 2099855 - RNA, 19 nt, Artificial Sequence
  Description of Artificial Sequence: Synthetic oligonucleotide
ccacaucguaugguccucg

SEQ ID NO: 2099856 - RNA, 19 nt, Artificial Sequence
  Description of Artificial Sequence: Synthetic oligonucleotide
ccgcucuuagguccaaauc

SEQ ID NO: 2099857 - RNA, 19 nt, Artificial Sequence
  Description of Artificial Sequence: Synthetic oligonucleotide
aucauacagccggacccuu

SEQ ID NO: 2099858 - RNA, 19 nt, Artificial Sequence
  Description of Artificial Sequence: Synthetic oligonucleotide
gaaauacagcucggcaauu

SEQ ID NO: 2099859 - RNA, 19 nt, Artificial Sequence
  Description of Artificial Sequence: Synthetic oligonucleotide
cagccggacccuugaagaa

SEQ ID NO: 2099860 - RNA, 19 nt, Artificial Sequence
  Description of Artificial Sequence: Synthetic oligonucleotide
ggauagaauuacauucuuu

SEQ ID NO: 2099861 - RNA, 19 nt, Artificial Sequence
  Description of Artificial Sequence: Synthetic oligonucleotide
ccacuucugauggccgagg

SEQ ID NO: 2099862 - RNA, 19 nt, Artificial Sequence
  Description of Artificial Sequence: Synthetic oligonucleotide
cacuucugauggccgaggu

SEQ ID NO: 2099863 - RNA, 19 nt, Artificial Sequence
  Description of Artificial Sequence: Synthetic oligonucleotide
cugaggccuucucagcccu

SEQ ID NO: 2099864 - RNA, 19 nt, Artificial Sequence
  Description of Artificial Sequence: Synthetic oligonucleotide
cccaaacaguagcccuagg

SEQ ID NO: 2099865 - RNA, 19 nt, Artificial Sequence
  Description of Artificial Sequence: Synthetic oligonucleotide
ggguuuuauuugcuguuuu

SEQ ID NO: 2099866 - RNA, 19 nt, Artificial Sequence
  Description of Artificial Sequence: Synthetic oligonucleotide
ggauuuccaaaggccucuc

SEQ ID NO: 2099867 - RNA, 19 nt, Artificial Sequence
  Description of Artificial Sequence: Synthetic oligonucleotide
gucugaauauaaagcuguu

SEQ ID NO: 2099868 - RNA, 19 nt, Artificial Sequence
  Description of Artificial Sequence: Synthetic oligonucleotide
cugugaccgaugagcugaa

SEQ ID NO: 2099869 - RNA, 19 nt, Artificial Sequence
  Description of Artificial Sequence: Synthetic oligonucleotide
gagcccgcucuuaggucca

SEQ ID NO: 2099870 - RNA, 19 nt, Artificial Sequence
  Description of Artificial Sequence: Synthetic oligonucleotide
gccucucugcagcacugga

SEQ ID NO: 2099871 - RNA, 19 nt, Artificial Sequence
  Description of Artificial Sequence: Synthetic oligonucleotide
cggucaauugccacauuaa

SEQ ID NO: 2099872 - RNA, 19 nt, Artificial Sequence
  Description of Artificial Sequence: Synthetic oligonucleotide
ccacugugaccgaugagcu

SEQ ID NO: 2099873 - RNA, 19 nt, Artificial Sequence
  Description of Artificial Sequence: Synthetic oligonucleotide
cccagaccucggucaauug

SEQ ID NO: 2099874 - RNA, 19 nt, Artificial Sequence
  Description of Artificial Sequence: Synthetic oligonucleotide
ccuagguuugccacaucgu

SEQ ID NO: 2099875 - RNA, 19 nt, Artificial Sequence
  Description of Artificial Sequence: Synthetic oligonucleotide
gggccauagacaaguucaa

SEQ ID NO: 2099876 - RNA, 19 nt, Artificial Sequence
  Description of Artificial Sequence: Synthetic oligonucleotide
ggugagcagcggucuccac

SEQ ID NO: 2099877 - RNA, 19 nt, Artificial Sequence
  Description of Artificial Sequence: Synthetic oligonucleotide
ccaugcugacgucccagga

SEQ ID NO: 2099878 - RNA, 19 nt, Artificial Sequence
  Description of Artificial Sequence: Synthetic oligonucleotide
cuucaaguccgagcccgcu

SEQ ID NO: 2099879 - RNA, 19 nt, Artificial Sequence
  Description of Artificial Sequence: Synthetic oligonucleotide
guccccgaagagccuucaa

SEQ ID NO: 2099880 - RNA, 19 nt, Artificial Sequence
  Description of Artificial Sequence: Synthetic oligonucleotide
cacggcagccuuggcuuca

SEQ ID NO: 2099881 - RNA, 19 nt, Artificial Sequence
  Description of Artificial Sequence: Synthetic oligonucleotide
cggacccuugaagaaguug

SEQ ID NO: 2099882 - RNA, 19 nt, Artificial Sequence
  Description of Artificial Sequence: Synthetic oligonucleotide
gccgagguuucuucacugu

SEQ ID NO: 2099883 - RNA, 19 nt, Artificial Sequence
  Description of Artificial Sequence: Synthetic oligonucleotide
ccgagguuucuucacugua

SEQ ID NO: 2099884 - RNA, 19 nt, Artificial Sequence
  Description of Artificial Sequence: Synthetic oligonucleotide
ccgagcccgcucuuagguc

SEQ ID NO: 2099885 - RNA, 19 nt, Artificial Sequence
  Description of Artificial Sequence: Synthetic oligonucleotide
gcccucacauuuagcuuuc

SEQ ID NO: 2099886 - RNA, 19 nt, Artificial Sequence
  Description of Artificial Sequence: Synthetic oligonucleotide
cugcuaguuucuggcuuua

SEQ ID NO: 2099887 - RNA, 19 nt, Artificial Sequence
  Description of Artificial Sequence: Synthetic oligonucleotide
gccggacccuugaagaagu

SEQ ID NO: 2099888 - RNA, 19 nt, Artificial Sequence
  Description of Artificial Sequence: Synthetic oligonucleotide
cugcgaacgccgccaugcu

SEQ ID NO: 2099889 - RNA, 19 nt, Artificial Sequence
  Description of Artificial Sequence: Synthetic oligonucleotide
ccaaggugagcagcggucu

SEQ ID NO: 2099890 - RNA, 19 nt, Artificial Sequence
  Description of Artificial Sequence: Synthetic oligonucleotide
cgaacgccgccaugcugac

SEQ ID NO: 2099891 - RNA, 19 nt, Artificial Sequence
  Description of Artificial Sequence: Synthetic oligonucleotide
cugauggccgagguuucuu

SEQ ID NO: 2099892 - RNA, 19 nt, Artificial Sequence
  Description of Artificial Sequence: Synthetic oligonucleotide
ccucucugcagcacuggau

SEQ ID NO: 2099893 - RNA, 19 nt, Artificial Sequence
  Description of Artificial Sequence: Synthetic oligonucleotide
cccgcucuuagguccaaau

SEQ ID NO: 2099894 - RNA, 19 nt, Artificial Sequence
  Description of Artificial Sequence: Synthetic oligonucleotide
gcaucaaauugagggcauu

SEQ ID NO: 2099895 - RNA, 19 nt, Artificial Sequence
  Description of Artificial Sequence: Synthetic oligonucleotide
agcccgcucuuagguccaa

SEQ ID NO: 2099896 - RNA, 19 nt, Artificial Sequence
  Description of Artificial Sequence: Synthetic oligonucleotide
cggauuuccaaaggccucu

SEQ ID NO: 2099897 - RNA, 19 nt, Artificial Sequence
  Description of Artificial Sequence: Synthetic oligonucleotide
cggucuugauuuucccugu

SEQ ID NO: 2099898 - RNA, 19 nt, Artificial Sequence
  Description of Artificial Sequence: Synthetic oligonucleotide
cucggucaauugccacauu

SEQ ID NO: 2099899 - RNA, 19 nt, Artificial Sequence
  Description of Artificial Sequence: Synthetic oligonucleotide
ccaguccccgaagagccuu

SEQ ID NO: 2099900 - RNA, 19 nt, Artificial Sequence
  Description of Artificial Sequence: Synthetic oligonucleotide
gcccgcucuuagguccaaa

SEQ ID NO: 2099901 - RNA, 19 nt, Artificial Sequence
  Description of Artificial Sequence: Synthetic oligonucleotide
ccggacccuugaagaaguu

SEQ ID NO: 2099902 - RNA, 19 nt, Artificial Sequence
  Description of Artificial Sequence: Synthetic oligonucleotide
cggcagccuuggcuucauu

SEQ ID NO: 2099903 - RNA, 19 nt, Artificial Sequence
  Description of Artificial Sequence: Synthetic oligonucleotide
ugagaaauaacucaaaacu

SEQ ID NO: 2099904 - RNA, 19 nt, Artificial Sequence
  Description of Artificial Sequence: Synthetic oligonucleotide
uuggauguaagaaagagga

SEQ ID NO: 2099905 - RNA, 19 nt, Artificial Sequence
  Description of Artificial Sequence: Synthetic oligonucleotide
ugaagagaaagaaagacga

SEQ ID NO: 2099906 - RNA, 19 nt, Artificial Sequence
  Description of Artificial Sequence: Synthetic oligonucleotide
uauggaauuaaacauuccc

SEQ ID NO: 2099907 - RNA, 19 nt, Artificial Sequence
  Description of Artificial Sequence: Synthetic oligonucleotide
uaaacauucccauuaaggc

SEQ ID NO: 2099908 - RNA, 19 nt, Artificial Sequence
  Description of Artificial Sequence: Synthetic oligonucleotide
aaagcugagaaauaacuca

SEQ ID NO: 2099909 - RNA, 19 nt, Artificial Sequence
  Description of Artificial Sequence: Synthetic oligonucleotide
ugugauuacauauaaauua

SEQ ID NO: 2099910 - RNA, 19 nt, Artificial Sequence
  Description of Artificial Sequence: Synthetic oligonucleotide
gaugugaauguccagaaag

SEQ ID NO: 2099911 - RNA, 19 nt, Artificial Sequence
  Description of Artificial Sequence: Synthetic oligonucleotide
uguauggaaauacugaaga

SEQ ID NO: 2099912 - RNA, 19 nt, Artificial Sequence
  Description of Artificial Sequence: Synthetic oligonucleotide
aaauccaccagccuguuug

SEQ ID NO: 2099913 - RNA, 19 nt, Artificial Sequence
  Description of Artificial Sequence: Synthetic oligonucleotide
cuuauuaaagaagucaucc

SEQ ID NO: 2099914 - RNA, 19 nt, Artificial Sequence
  Description of Artificial Sequence: Synthetic oligonucleotide
uuuguugucgaccagcuga

SEQ ID NO: 2099915 - RNA, 19 nt, Artificial Sequence
  Description of Artificial Sequence: Synthetic oligonucleotide
ucuaccaucaaauauggaa

SEQ ID NO: 2099916 - RNA, 19 nt, Artificial Sequence
  Description of Artificial Sequence: Synthetic oligonucleotide
auugacauaguacagagaa

SEQ ID NO: 2099917 - RNA, 19 nt, Artificial Sequence
  Description of Artificial Sequence: Synthetic oligonucleotide
uaagaaagaggagugaagg

SEQ ID NO: 2099918 - RNA, 19 nt, Artificial Sequence
  Description of Artificial Sequence: Synthetic oligonucleotide
ugaauguccagaaaguaug

SEQ ID NO: 2099919 - RNA, 19 nt, Artificial Sequence
  Description of Artificial Sequence: Synthetic oligonucleotide
aauaacucaaaacuagaau

SEQ ID NO: 2099920 - RNA, 19 nt, Artificial Sequence
  Description of Artificial Sequence: Synthetic oligonucleotide
acagagaauauacaggaag

SEQ ID NO: 2099921 - RNA, 19 nt, Artificial Sequence
  Description of Artificial Sequence: Synthetic oligonucleotide
uauaccaauuguuaagugc

SEQ ID NO: 2099922 - RNA, 19 nt, Artificial Sequence
  Description of Artificial Sequence: Synthetic oligonucleotide
auaccaauuguuaagugcc

SEQ ID NO: 2099923 - RNA, 19 nt, Artificial Sequence
  Description of Artificial Sequence: Synthetic oligonucleotide
gaauugacauaguacagag

SEQ ID NO: 2099924 - RNA, 19 nt, Artificial Sequence
  Description of Artificial Sequence: Synthetic oligonucleotide
ugucuugccagucugaugu

SEQ ID NO: 2099925 - RNA, 19 nt, Artificial Sequence
  Description of Artificial Sequence: Synthetic oligonucleotide
agaaagacgauauuuguga

SEQ ID NO: 2099926 - RNA, 19 nt, Artificial Sequence
  Description of Artificial Sequence: Synthetic oligonucleotide
uaguacagagaauauacag

SEQ ID NO: 2099927 - RNA, 19 nt, Artificial Sequence
  Description of Artificial Sequence: Synthetic oligonucleotide
uuaagugccauucucauuu

SEQ ID NO: 2099928 - RNA, 19 nt, Artificial Sequence
  Description of Artificial Sequence: Synthetic oligonucleotide
uucaagaaaacuuuccaga

SEQ ID NO: 2099929 - RNA, 19 nt, Artificial Sequence
  Description of Artificial Sequence: Synthetic oligonucleotide
cucaaaacuagaauguggc

SEQ ID NO: 2099930 - RNA, 19 nt, Artificial Sequence
  Description of Artificial Sequence: Synthetic oligonucleotide
uuaaagaagucauccauga

SEQ ID NO: 2099931 - RNA, 19 nt, Artificial Sequence
  Description of Artificial Sequence: Synthetic oligonucleotide
uauucaaaagcugagaaau

SEQ ID NO: 2099932 - RNA, 19 nt, Artificial Sequence
  Description of Artificial Sequence: Synthetic oligonucleotide
aauguuuugccgaauugac

SEQ ID NO: 2099933 - RNA, 19 nt, Artificial Sequence
  Description of Artificial Sequence: Synthetic oligonucleotide
uauuaaagaagucauccau

SEQ ID NO: 2099934 - RNA, 19 nt, Artificial Sequence
  Description of Artificial Sequence: Synthetic oligonucleotide
agaauauacaggaagauga

SEQ ID NO: 2099935 - RNA, 19 nt, Artificial Sequence
  Description of Artificial Sequence: Synthetic oligonucleotide
aaaagcugagaaauaacuc

SEQ ID NO: 2099936 - RNA, 19 nt, Artificial Sequence
  Description of Artificial Sequence: Synthetic oligonucleotide
aaauuacccaauuuaacua

SEQ ID NO: 2099937 - RNA, 19 nt, Artificial Sequence
  Description of Artificial Sequence: Synthetic oligonucleotide
uuuugauccuauucaaaag

SEQ ID NO: 2099938 - RNA, 19 nt, Artificial Sequence
  Description of Artificial Sequence: Synthetic oligonucleotide
uaacucaaaacuagaaugu

SEQ ID NO: 2099939 - RNA, 19 nt, Artificial Sequence
  Description of Artificial Sequence: Synthetic oligonucleotide
uguguguauggaaauacug

SEQ ID NO: 2099940 - RNA, 19 nt, Artificial Sequence
  Description of Artificial Sequence: Synthetic oligonucleotide
agaaauaacucaaaacuag

SEQ ID NO: 2099941 - RNA, 19 nt, Artificial Sequence
  Description of Artificial Sequence: Synthetic oligonucleotide
uccaugaccacacagcacu

SEQ ID NO: 2099942 - RNA, 19 nt, Artificial Sequence
  Description of Artificial Sequence: Synthetic oligonucleotide
aauuacccaauuuaacuaa

SEQ ID NO: 2099943 - RNA, 19 nt, Artificial Sequence
  Description of Artificial Sequence: Synthetic oligonucleotide
aguaugacaggaaauaaag

SEQ ID NO: 2099944 - RNA, 19 nt, Artificial Sequence
  Description of Artificial Sequence: Synthetic oligonucleotide
acauggauuucauucguac

SEQ ID NO: 2099945 - RNA, 19 nt, Artificial Sequence
  Description of Artificial Sequence: Synthetic oligonucleotide
uguuuugccgaauugacau

SEQ ID NO: 2099946 - RNA, 19 nt, Artificial Sequence
  Description of Artificial Sequence: Synthetic oligonucleotide
ucuguuauaguuuccuucu

SEQ ID NO: 2099947 - RNA, 19 nt, Artificial Sequence
  Description of Artificial Sequence: Synthetic oligonucleotide
ucuauuguuguucuuuagu

SEQ ID NO: 2099948 - RNA, 19 nt, Artificial Sequence
  Description of Artificial Sequence: Synthetic oligonucleotide
uauggaaauacugaagaga

SEQ ID NO: 2099949 - RNA, 19 nt, Artificial Sequence
  Description of Artificial Sequence: Synthetic oligonucleotide
uauacaggaagaugaagga

SEQ ID NO: 2099950 - RNA, 19 nt, Artificial Sequence
  Description of Artificial Sequence: Synthetic oligonucleotide
ugauuacauauaaauuacc

SEQ ID NO: 2099951 - RNA, 19 nt, Artificial Sequence
  Description of Artificial Sequence: Synthetic oligonucleotide
auuuugauccuauucaaaa

SEQ ID NO: 2099952 - RNA, 19 nt, Artificial Sequence
  Description of Artificial Sequence: Synthetic oligonucleotide
aguacagagaauauacagg

SEQ ID NO: 2099953 - RNA, 19 nt, Artificial Sequence
  Description of Artificial Sequence: Synthetic oligonucleotide
ugaaggagcagucuguggu

SEQ ID NO: 2099954 - RNA, 19 nt, Artificial Sequence
  Description of Artificial Sequence: Synthetic oligonucleotide
uaaagaauucuccuuuccu

SEQ ID NO: 2099955 - RNA, 19 nt, Artificial Sequence
  Description of Artificial Sequence: Synthetic oligonucleotide
aauccuuggauguaagaaa

SEQ ID NO: 2099956 - RNA, 19 nt, Artificial Sequence
  Description of Artificial Sequence: Synthetic oligonucleotide
uuauuaaagaagucaucca

SEQ ID NO: 2099957 - RNA, 19 nt, Artificial Sequence
  Description of Artificial Sequence: Synthetic oligonucleotide
acccaauuuaacuaaugag

SEQ ID NO: 2099958 - RNA, 19 nt, Artificial Sequence
  Description of Artificial Sequence: Synthetic oligonucleotide
cacucuaccaucaaauaug

SEQ ID NO: 2099959 - RNA, 19 nt, Artificial Sequence
  Description of Artificial Sequence: Synthetic oligonucleotide
uacccaauuuaacuaauga

SEQ ID NO: 2099960 - RNA, 19 nt, Artificial Sequence
  Description of Artificial Sequence: Synthetic oligonucleotide
caauuuaacuaaugagucc

SEQ ID NO: 2099961 - RNA, 19 nt, Artificial Sequence
  Description of Artificial Sequence: Synthetic oligonucleotide
uguguauggaaauacugaa

SEQ ID NO: 2099962 - RNA, 19 nt, Artificial Sequence
  Description of Artificial Sequence: Synthetic oligonucleotide
caagaaauccaccagccug

SEQ ID NO: 2099963 - RNA, 19 nt, Artificial Sequence
  Description of Artificial Sequence: Synthetic oligonucleotide
aagaagucauccaugacca

SEQ ID NO: 2099964 - RNA, 19 nt, Artificial Sequence
  Description of Artificial Sequence: Synthetic oligonucleotide
aagacgauauuugugauua

SEQ ID NO: 2099965 - RNA, 19 nt, Artificial Sequence
  Description of Artificial Sequence: Synthetic oligonucleotide
uggaauuaaacauucccau

SEQ ID NO: 2099966 - RNA, 19 nt, Artificial Sequence
  Description of Artificial Sequence: Synthetic oligonucleotide
uuucauucguaccauugac

SEQ ID NO: 2099967 - RNA, 19 nt, Artificial Sequence
  Description of Artificial Sequence: Synthetic oligonucleotide
aacuaaugaguccacuuau

SEQ ID NO: 2099968 - RNA, 19 nt, Artificial Sequence
  Description of Artificial Sequence: Synthetic oligonucleotide
ugacauaguacagagaaua

SEQ ID NO: 2099969 - RNA, 19 nt, Artificial Sequence
  Description of Artificial Sequence: Synthetic oligonucleotide
aaaacgaugagcagcgugu

SEQ ID NO: 2099970 - RNA, 19 nt, Artificial Sequence
  Description of Artificial Sequence: Synthetic oligonucleotide
gaaaacuuuccagaaggag

SEQ ID NO: 2099971 - RNA, 19 nt, Artificial Sequence
  Description of Artificial Sequence: Synthetic oligonucleotide
uuuugccgaauugacauag

SEQ ID NO: 2099972 - RNA, 19 nt, Artificial Sequence
  Description of Artificial Sequence: Synthetic oligonucleotide
ugagacaauccuuggaugu

SEQ ID NO: 2099973 - RNA, 19 nt, Artificial Sequence
  Description of Artificial Sequence: Synthetic oligonucleotide
ucgagaaggggcaaggcca

SEQ ID NO: 2099974 - RNA, 19 nt, Artificial Sequence
  Description of Artificial Sequence: Synthetic oligonucleotide
aauuguuaagugccauucu

SEQ ID NO: 2099975 - RNA, 19 nt, Artificial Sequence
  Description of Artificial Sequence: Synthetic oligonucleotide
uugauccuauucaaaagcu

SEQ ID NO: 2099976 - RNA, 19 nt, Artificial Sequence
  Description of Artificial Sequence: Synthetic oligonucleotide
uuguuaagugccauucuca

SEQ ID NO: 2099977 - RNA, 19 nt, Artificial Sequence
  Description of Artificial Sequence: Synthetic oligonucleotide
aauguccagaaaguaugac

SEQ ID NO: 2099978 - RNA, 19 nt, Artificial Sequence
  Description of Artificial Sequence: Synthetic oligonucleotide
aaacauggauuucauucgu

SEQ ID NO: 2099979 - RNA, 19 nt, Artificial Sequence
  Description of Artificial Sequence: Synthetic oligonucleotide
gaaaacgaugagcagcgug

SEQ ID NO: 2099980 - RNA, 19 nt, Artificial Sequence
  Description of Artificial Sequence: Synthetic oligonucleotide
ucuuguacuugucuguccu

SEQ ID NO: 2099981 - RNA, 19 nt, Artificial Sequence
  Description of Artificial Sequence: Synthetic oligonucleotide
aagaaagacgauauuugug

SEQ ID NO: 2099982 - RNA, 19 nt, Artificial Sequence
  Description of Artificial Sequence: Synthetic oligonucleotide
cacuauaccaauuguuaag

SEQ ID NO: 2099983 - RNA, 19 nt, Artificial Sequence
  Description of Artificial Sequence: Synthetic oligonucleotide
ugauccuauucaaaagcug

SEQ ID NO: 2099984 - RNA, 19 nt, Artificial Sequence
  Description of Artificial Sequence: Synthetic oligonucleotide
agucuguggugucaucucc

SEQ ID NO: 2099985 - RNA, 19 nt, Artificial Sequence
  Description of Artificial Sequence: Synthetic oligonucleotide
cucauuuugauccuauuca

SEQ ID NO: 2099986 - RNA, 19 nt, Artificial Sequence
  Description of Artificial Sequence: Synthetic oligonucleotide
uucauucguaccauugaca

SEQ ID NO: 2099987 - RNA, 19 nt, Artificial Sequence
  Description of Artificial Sequence: Synthetic oligonucleotide
auugcaaacauggauuuca

SEQ ID NO: 2099988 - RNA, 19 nt, Artificial Sequence
  Description of Artificial Sequence: Synthetic oligonucleotide
ucaaaacuagaauguggcc

SEQ ID NO: 2099989 - RNA, 19 nt, Artificial Sequence
  Description of Artificial Sequence: Synthetic oligonucleotide
uccagaaaguaugacagga

SEQ ID NO: 2099990 - RNA, 19 nt, Artificial Sequence
  Description of Artificial Sequence: Synthetic oligonucleotide
ucuccuuuccuucaagaaa

SEQ ID NO: 2099991 - RNA, 19 nt, Artificial Sequence
  Description of Artificial Sequence: Synthetic oligonucleotide
auugacagaucucuauugu

SEQ ID NO: 2099992 - RNA, 19 nt, Artificial Sequence
  Description of Artificial Sequence: Synthetic oligonucleotide
uugugauuacauauaaauu

SEQ ID NO: 2099993 - RNA, 19 nt, Artificial Sequence
  Description of Artificial Sequence: Synthetic oligonucleotide
acucaaaacuagaaugugg

SEQ ID NO: 2099994 - RNA, 19 nt, Artificial Sequence
  Description of Artificial Sequence: Synthetic oligonucleotide
uguguguguguguguaugg

SEQ ID NO: 2099995 - RNA, 19 nt, Artificial Sequence
  Description of Artificial Sequence: Synthetic oligonucleotide
guauggaaauacugaagag

SEQ ID NO: 2099996 - RNA, 19 nt, Artificial Sequence
  Description of Artificial Sequence: Synthetic oligonucleotide
agcgugucagcaaacaugg

SEQ ID NO: 2099997 - RNA, 19 nt, Artificial Sequence
  Description of Artificial Sequence: Synthetic oligonucleotide
auuucauucguaccauuga

SEQ ID NO: 2099998 - RNA, 19 nt, Artificial Sequence
  Description of Artificial Sequence: Synthetic oligonucleotide
uuacccaauuuaacuaaug

SEQ ID NO: 2099999 - RNA, 19 nt, Artificial Sequence
  Description of Artificial Sequence: Synthetic oligonucleotide
uaaugaguccacuuauuaa

SEQ ID NO: 2100000 - RNA, 19 nt, Artificial Sequence
  Description of Artificial Sequence: Synthetic oligonucleotide
gauccuauucaaaagcuga

SEQ ID NO: 2100001 - RNA, 19 nt, Artificial Sequence
  Description of Artificial Sequence: Synthetic oligonucleotide
cauggauuucauucguacc

SEQ ID NO: 2100002 - RNA, 19 nt, Artificial Sequence
  Description of Artificial Sequence: Synthetic oligonucleotide
cauugacagaucucuauug

SEQ ID NO: 2100003 - RNA, 19 nt, Artificial Sequence
  Description of Artificial Sequence: Synthetic oligonucleotide
ugccgaauugacauaguac

SEQ ID NO: 2100004 - RNA, 19 nt, Artificial Sequence
  Description of Artificial Sequence: Synthetic oligonucleotide
aauguggccaggugucuug

SEQ ID NO: 2100005 - RNA, 19 nt, Artificial Sequence
  Description of Artificial Sequence: Synthetic oligonucleotide
agucucuuguacuugucug

SEQ ID NO: 2100006 - RNA, 19 nt, Artificial Sequence
  Description of Artificial Sequence: Synthetic oligonucleotide
aauugcaaacauggauuuc

SEQ ID NO: 2100007 - RNA, 19 nt, Artificial Sequence
  Description of Artificial Sequence: Synthetic oligonucleotide
gaaauaacucaaaacuaga

SEQ ID NO: 2100008 - RNA, 19 nt, Artificial Sequence
  Description of Artificial Sequence: Synthetic oligonucleotide
acuauaccaauuguuaagu

SEQ ID NO: 2100009 - RNA, 19 nt, Artificial Sequence
  Description of Artificial Sequence: Synthetic oligonucleotide
uagaauguggccagguguc

SEQ ID NO: 2100010 - RNA, 19 nt, Artificial Sequence
  Description of Artificial Sequence: Synthetic oligonucleotide
aagaggagugaaggggagc

SEQ ID NO: 2100011 - RNA, 19 nt, Artificial Sequence
  Description of Artificial Sequence: Synthetic oligonucleotide
aaaagccaauugcaaacau

SEQ ID NO: 2100012 - RNA, 19 nt, Artificial Sequence
  Description of Artificial Sequence: Synthetic oligonucleotide
aaagacgauauuugugauu

SEQ ID NO: 2100013 - RNA, 19 nt, Artificial Sequence
  Description of Artificial Sequence: Synthetic oligonucleotide
aaagccaauugcaaacaug

SEQ ID NO: 2100014 - RNA, 19 nt, Artificial Sequence
  Description of Artificial Sequence: Synthetic oligonucleotide
gaauguuuugccgaauuga

SEQ ID NO: 2100015 - RNA, 19 nt, Artificial Sequence
  Description of Artificial Sequence: Synthetic oligonucleotide
uguuaagugccauucucau

SEQ ID NO: 2100016 - RNA, 19 nt, Artificial Sequence
  Description of Artificial Sequence: Synthetic oligonucleotide
agagaaagaaagacgauau

SEQ ID NO: 2100017 - RNA, 19 nt, Artificial Sequence
  Description of Artificial Sequence: Synthetic oligonucleotide
ucgaugagacaauccuugg

SEQ ID NO: 2100018 - RNA, 19 nt, Artificial Sequence
  Description of Artificial Sequence: Synthetic oligonucleotide
ccaauuuaacuaaugaguc

SEQ ID NO: 2100019 - RNA, 19 nt, Artificial Sequence
  Description of Artificial Sequence: Synthetic oligonucleotide
acggagaugaaaacgauga

SEQ ID NO: 2100020 - RNA, 19 nt, Artificial Sequence
  Description of Artificial Sequence: Synthetic oligonucleotide
auggaaauacugaagagaa

SEQ ID NO: 2100021 - RNA, 19 nt, Artificial Sequence
  Description of Artificial Sequence: Synthetic oligonucleotide
auggaauuaaacauuccca

SEQ ID NO: 2100022 - RNA, 19 nt, Artificial Sequence
  Description of Artificial Sequence: Synthetic oligonucleotide
gaguccacuuauuaaagaa

SEQ ID NO: 2100023 - RNA, 19 nt, Artificial Sequence
  Description of Artificial Sequence: Synthetic oligonucleotide
auauggaauuaaacauucc

SEQ ID NO: 2100024 - RNA, 19 nt, Artificial Sequence
  Description of Artificial Sequence: Synthetic oligonucleotide
agaucucuauuguuguucu

SEQ ID NO: 2100025 - RNA, 19 nt, Artificial Sequence
  Description of Artificial Sequence: Synthetic oligonucleotide
uguguguguguguaugugu

SEQ ID NO: 2100026 - RNA, 19 nt, Artificial Sequence
  Description of Artificial Sequence: Synthetic oligonucleotide
ugaguccacuuauuaaaga

SEQ ID NO: 2100027 - RNA, 19 nt, Artificial Sequence
  Description of Artificial Sequence: Synthetic oligonucleotide
ugaccacacagcacuauac

SEQ ID NO: 2100028 - RNA, 19 nt, Artificial Sequence
  Description of Artificial Sequence: Synthetic oligonucleotide
acucuaccaucaaauaugg

SEQ ID NO: 2100029 - RNA, 19 nt, Artificial Sequence
  Description of Artificial Sequence: Synthetic oligonucleotide
uuuaacuaaugaguccacu

SEQ ID NO: 2100030 - RNA, 19 nt, Artificial Sequence
  Description of Artificial Sequence: Synthetic oligonucleotide
ugagcagcgugucagcaaa

SEQ ID NO: 2100031 - RNA, 19 nt, Artificial Sequence
  Description of Artificial Sequence: Synthetic oligonucleotide
gaugagacaauccuuggau

SEQ ID NO: 2100032 - RNA, 19 nt, Artificial Sequence
  Description of Artificial Sequence: Synthetic oligonucleotide
aaguaugacaggaaauaaa

SEQ ID NO: 2100033 - RNA, 19 nt, Artificial Sequence
  Description of Artificial Sequence: Synthetic oligonucleotide
uccacuuauuaaagaaguc

SEQ ID NO: 2100034 - RNA, 19 nt, Artificial Sequence
  Description of Artificial Sequence: Synthetic oligonucleotide
ggagaugaaaacgaugagc

SEQ ID NO: 2100035 - RNA, 19 nt, Artificial Sequence
  Description of Artificial Sequence: Synthetic oligonucleotide
gagaaauaacucaaaacua

SEQ ID NO: 2100036 - RNA, 19 nt, Artificial Sequence
  Description of Artificial Sequence: Synthetic oligonucleotide
ucguaccauugacagaucu

SEQ ID NO: 2100037 - RNA, 19 nt, Artificial Sequence
  Description of Artificial Sequence: Synthetic oligonucleotide
gccgaauugacauaguaca

SEQ ID NO: 2100038 - RNA, 19 nt, Artificial Sequence
  Description of Artificial Sequence: Synthetic oligonucleotide
auacaggaagaugaaggag

SEQ ID NO: 2100039 - RNA, 19 nt, Artificial Sequence
  Description of Artificial Sequence: Synthetic oligonucleotide
acuagaauguggccaggug

SEQ ID NO: 2100040 - RNA, 19 nt, Artificial Sequence
  Description of Artificial Sequence: Synthetic oligonucleotide
aaacgaugagcagcguguc

SEQ ID NO: 2100041 - RNA, 19 nt, Artificial Sequence
  Description of Artificial Sequence: Synthetic oligonucleotide
gucauccaugaccacacag

SEQ ID NO: 2100042 - RNA, 19 nt, Artificial Sequence
  Description of Artificial Sequence: Synthetic oligonucleotide
guuucgaugagacaauccu

SEQ ID NO: 2100043 - RNA, 19 nt, Artificial Sequence
  Description of Artificial Sequence: Synthetic oligonucleotide
cucgagaaggggcaaggcc

SEQ ID NO: 2100044 - RNA, 19 nt, Artificial Sequence
  Description of Artificial Sequence: Synthetic oligonucleotide
gacgauauuugugauuaca

SEQ ID NO: 2100045 - RNA, 19 nt, Artificial Sequence
  Description of Artificial Sequence: Synthetic oligonucleotide
cacacggagaugaaaacga

SEQ ID NO: 2100046 - RNA, 19 nt, Artificial Sequence
  Description of Artificial Sequence: Synthetic oligonucleotide
uuucgaugagacaauccuu

SEQ ID NO: 2100047 - RNA, 19 nt, Artificial Sequence
  Description of Artificial Sequence: Synthetic oligonucleotide
accugggagacgcuuggcg

SEQ ID NO: 2100048 - RNA, 19 nt, Artificial Sequence
  Description of Artificial Sequence: Synthetic oligonucleotide
uugucgaccagcugacucu

SEQ ID NO: 2100049 - RNA, 19 nt, Artificial Sequence
  Description of Artificial Sequence: Synthetic oligonucleotide
auuuaacuaaugaguccac

SEQ ID NO: 2100050 - RNA, 19 nt, Artificial Sequence
  Description of Artificial Sequence: Synthetic oligonucleotide
cagcgugucagcaaacaug

SEQ ID NO: 2100051 - RNA, 19 nt, Artificial Sequence
  Description of Artificial Sequence: Synthetic oligonucleotide
cuucugaauguuuugccga

SEQ ID NO: 2100052 - RNA, 19 nt, Artificial Sequence
  Description of Artificial Sequence: Synthetic oligonucleotide
guuauaguuuccuucuucu

SEQ ID NO: 2100053 - RNA, 19 nt, Artificial Sequence
  Description of Artificial Sequence: Synthetic oligonucleotide
acagcacuauaccaauugu

SEQ ID NO: 2100054 - RNA, 19 nt, Artificial Sequence
  Description of Artificial Sequence: Synthetic oligonucleotide
ggcaguaaaacaaaagcca

SEQ ID NO: 2100055 - RNA, 19 nt, Artificial Sequence
  Description of Artificial Sequence: Synthetic oligonucleotide
uguguguguguguauggaa

SEQ ID NO: 2100056 - RNA, 19 nt, Artificial Sequence
  Description of Artificial Sequence: Synthetic oligonucleotide
ucccauuaaggcaguaaaa

SEQ ID NO: 2100057 - RNA, 19 nt, Artificial Sequence
  Description of Artificial Sequence: Synthetic oligonucleotide
cuccuuuccuucaagaaaa

SEQ ID NO: 2100058 - RNA, 19 nt, Artificial Sequence
  Description of Artificial Sequence: Synthetic oligonucleotide
accauugacagaucucuau

SEQ ID NO: 2100059 - RNA, 19 nt, Artificial Sequence
  Description of Artificial Sequence: Synthetic oligonucleotide
ugccagucugaugugaaug

SEQ ID NO: 2100060 - RNA, 19 nt, Artificial Sequence
  Description of Artificial Sequence: Synthetic oligonucleotide
uacagagaauauacaggaa

SEQ ID NO: 2100061 - RNA, 19 nt, Artificial Sequence
  Description of Artificial Sequence: Synthetic oligonucleotide
uaccaauuguuaagugcca

SEQ ID NO: 2100062 - RNA, 19 nt, Artificial Sequence
  Description of Artificial Sequence: Synthetic oligonucleotide
uuguugucgaccagcugac

SEQ ID NO: 2100063 - RNA, 19 nt, Artificial Sequence
  Description of Artificial Sequence: Synthetic oligonucleotide
ucaucucccagcagguuuc

SEQ ID NO: 2100064 - RNA, 19 nt, Artificial Sequence
  Description of Artificial Sequence: Synthetic oligonucleotide
agaccugggagacgcuugg

SEQ ID NO: 2100065 - RNA, 19 nt, Artificial Sequence
  Description of Artificial Sequence: Synthetic oligonucleotide
uguguguguguguguaugu

SEQ ID NO: 2100066 - RNA, 19 nt, Artificial Sequence
  Description of Artificial Sequence: Synthetic oligonucleotide
uugccgaauugacauagua

SEQ ID NO: 2100067 - RNA, 19 nt, Artificial Sequence
  Description of Artificial Sequence: Synthetic oligonucleotide
guaugugugugugugugug

SEQ ID NO: 2100068 - RNA, 19 nt, Artificial Sequence
  Description of Artificial Sequence: Synthetic oligonucleotide
uucugaauguuuugccgaa

SEQ ID NO: 2100069 - RNA, 19 nt, Artificial Sequence
  Description of Artificial Sequence: Synthetic oligonucleotide
cacggagaugaaaacgaug

SEQ ID NO: 2100070 - RNA, 19 nt, Artificial Sequence
  Description of Artificial Sequence: Synthetic oligonucleotide
aaacuagaauguggccagg

SEQ ID NO: 2100071 - RNA, 19 nt, Artificial Sequence
  Description of Artificial Sequence: Synthetic oligonucleotide
uguguguguaugugugugu

SEQ ID NO: 2100072 - RNA, 19 nt, Artificial Sequence
  Description of Artificial Sequence: Synthetic oligonucleotide
guccuguaaaccaggaccc

SEQ ID NO: 2100073 - RNA, 19 nt, Artificial Sequence
  Description of Artificial Sequence: Synthetic oligonucleotide
aauugacauaguacagaga

SEQ ID NO: 2100074 - RNA, 19 nt, Artificial Sequence
  Description of Artificial Sequence: Synthetic oligonucleotide
uugguggcagcucgagaag

SEQ ID NO: 2100075 - RNA, 19 nt, Artificial Sequence
  Description of Artificial Sequence: Synthetic oligonucleotide
cuuuccuucaagaaaacuu

SEQ ID NO: 2100076 - RNA, 19 nt, Artificial Sequence
  Description of Artificial Sequence: Synthetic oligonucleotide
uugacauaguacagagaau

SEQ ID NO: 2100077 - RNA, 19 nt, Artificial Sequence
  Description of Artificial Sequence: Synthetic oligonucleotide
guguguaugugugugugug

SEQ ID NO: 2100078 - RNA, 19 nt, Artificial Sequence
  Description of Artificial Sequence: Synthetic oligonucleotide
uccuuggauguaagaaaga

SEQ ID NO: 2100079 - RNA, 19 nt, Artificial Sequence
  Description of Artificial Sequence: Synthetic oligonucleotide
agaaaguaugacaggaaau

SEQ ID NO: 2100080 - RNA, 19 nt, Artificial Sequence
  Description of Artificial Sequence: Synthetic oligonucleotide
cugggagacgcuuggcggg

SEQ ID NO: 2100081 - RNA, 19 nt, Artificial Sequence
  Description of Artificial Sequence: Synthetic oligonucleotide
uugacagaucucuauuguu

SEQ ID NO: 2100082 - RNA, 19 nt, Artificial Sequence
  Description of Artificial Sequence: Synthetic oligonucleotide
ugaugugaauguccagaaa

SEQ ID NO: 2100083 - RNA, 19 nt, Artificial Sequence
  Description of Artificial Sequence: Synthetic oligonucleotide
uguaugugugugugugugu

SEQ ID NO: 2100084 - RNA, 19 nt, Artificial Sequence
  Description of Artificial Sequence: Synthetic oligonucleotide
guugucgaccagcugacuc

SEQ ID NO: 2100085 - RNA, 19 nt, Artificial Sequence
  Description of Artificial Sequence: Synthetic oligonucleotide
agcacuauaccaauuguua

SEQ ID NO: 2100086 - RNA, 19 nt, Artificial Sequence
  Description of Artificial Sequence: Synthetic oligonucleotide
ugcacacggagaugaaaac

SEQ ID NO: 2100087 - RNA, 19 nt, Artificial Sequence
  Description of Artificial Sequence: Synthetic oligonucleotide
agacgauauuugugauuac

SEQ ID NO: 2100088 - RNA, 19 nt, Artificial Sequence
  Description of Artificial Sequence: Synthetic oligonucleotide
agaggagugaaggggagcu

SEQ ID NO: 2100089 - RNA, 19 nt, Artificial Sequence
  Description of Artificial Sequence: Synthetic oligonucleotide
uguguaugugugugugugu

SEQ ID NO: 2100090 - RNA, 19 nt, Artificial Sequence
  Description of Artificial Sequence: Synthetic oligonucleotide
cagaaaguaugacaggaaa

SEQ ID NO: 2100091 - RNA, 19 nt, Artificial Sequence
  Description of Artificial Sequence: Synthetic oligonucleotide
uuauaguuuccuucuucuu

SEQ ID NO: 2100092 - RNA, 19 nt, Artificial Sequence
  Description of Artificial Sequence: Synthetic oligonucleotide
ugucagcaaacauggugcu

SEQ ID NO: 2100093 - RNA, 19 nt, Artificial Sequence
  Description of Artificial Sequence: Synthetic oligonucleotide
cuaaugaguccacuuauua

SEQ ID NO: 2100094 - RNA, 19 nt, Artificial Sequence
  Description of Artificial Sequence: Synthetic oligonucleotide
uguguguguguaugugugu

SEQ ID NO: 2100095 - RNA, 19 nt, Artificial Sequence
  Description of Artificial Sequence: Synthetic oligonucleotide
gugaaggggagcuuugcca

SEQ ID NO: 2100096 - RNA, 19 nt, Artificial Sequence
  Description of Artificial Sequence: Synthetic oligonucleotide
uguguguaugugugugugu

SEQ ID NO: 2100097 - RNA, 19 nt, Artificial Sequence
  Description of Artificial Sequence: Synthetic oligonucleotide
cagcagguuucgaugagac

SEQ ID NO: 2100098 - RNA, 19 nt, Artificial Sequence
  Description of Artificial Sequence: Synthetic oligonucleotide
cauccaugaccacacagca

SEQ ID NO: 2100099 - RNA, 19 nt, Artificial Sequence
  Description of Artificial Sequence: Synthetic oligonucleotide
auaguacagagaauauaca

SEQ ID NO: 2100100 - RNA, 19 nt, Artificial Sequence
  Description of Artificial Sequence: Synthetic oligonucleotide
uguuugguggcagcucgag

SEQ ID NO: 2100101 - RNA, 19 nt, Artificial Sequence
  Description of Artificial Sequence: Synthetic oligonucleotide
caggacccagguuaugccc

SEQ ID NO: 2100102 - RNA, 19 nt, Artificial Sequence
  Description of Artificial Sequence: Synthetic oligonucleotide
cuaccaucaaauauggaau

SEQ ID NO: 2100103 - RNA, 19 nt, Artificial Sequence
  Description of Artificial Sequence: Synthetic oligonucleotide
agugccauucucauuuuga

SEQ ID NO: 2100104 - RNA, 19 nt, Artificial Sequence
  Description of Artificial Sequence: Synthetic oligonucleotide
guguaugugugugugugug

SEQ ID NO: 2100105 - RNA, 19 nt, Artificial Sequence
  Description of Artificial Sequence: Synthetic oligonucleotide
ugacucuguuauaguuucc

SEQ ID NO: 2100106 - RNA, 19 nt, Artificial Sequence
  Description of Artificial Sequence: Synthetic oligonucleotide
agcugacucuguuauaguu

SEQ ID NO: 2100107 - RNA, 19 nt, Artificial Sequence
  Description of Artificial Sequence: Synthetic oligonucleotide
acgauauuugugauuacau

SEQ ID NO: 2100108 - RNA, 19 nt, Artificial Sequence
  Description of Artificial Sequence: Synthetic oligonucleotide
guguguguguguaugugug

SEQ ID NO: 2100109 - RNA, 19 nt, Artificial Sequence
  Description of Artificial Sequence: Synthetic oligonucleotide
uaugugugugugugugugu

SEQ ID NO: 2100110 - RNA, 19 nt, Artificial Sequence
  Description of Artificial Sequence: Synthetic oligonucleotide
acauaguacagagaauaua

SEQ ID NO: 2100111 - RNA, 19 nt, Artificial Sequence
  Description of Artificial Sequence: Synthetic oligonucleotide
augugugugugugugugug

SEQ ID NO: 2100112 - RNA, 19 nt, Artificial Sequence
  Description of Artificial Sequence: Synthetic oligonucleotide
caauccuuggauguaagaa

SEQ ID NO: 2100113 - RNA, 19 nt, Artificial Sequence
  Description of Artificial Sequence: Synthetic oligonucleotide
uuugccgaauugacauagu

SEQ ID NO: 2100114 - RNA, 19 nt, Artificial Sequence
  Description of Artificial Sequence: Synthetic oligonucleotide
cauuuugauccuauucaaa

SEQ ID NO: 2100115 - RNA, 19 nt, Artificial Sequence
  Description of Artificial Sequence: Synthetic oligonucleotide
cuagaauguggccaggugu

SEQ ID NO: 2100116 - RNA, 19 nt, Artificial Sequence
  Description of Artificial Sequence: Synthetic oligonucleotide
ggagagaccugggagacgc

SEQ ID NO: 2100117 - RNA, 19 nt, Artificial Sequence
  Description of Artificial Sequence: Synthetic oligonucleotide
agguuaugcccucggcgag

SEQ ID NO: 2100118 - RNA, 19 nt, Artificial Sequence
  Description of Artificial Sequence: Synthetic oligonucleotide
guguguguguaugugugug

SEQ ID NO: 2100119 - RNA, 19 nt, Artificial Sequence
  Description of Artificial Sequence: Synthetic oligonucleotide
cccaauuuaacuaaugagu

SEQ ID NO: 2100120 - RNA, 19 nt, Artificial Sequence
  Description of Artificial Sequence: Synthetic oligonucleotide
cccauuaaggcaguaaaac

SEQ ID NO: 2100121 - RNA, 19 nt, Artificial Sequence
  Description of Artificial Sequence: Synthetic oligonucleotide
agguuucgaugagacaauc

SEQ ID NO: 2100122 - RNA, 19 nt, Artificial Sequence
  Description of Artificial Sequence: Synthetic oligonucleotide
cuuguacuugucuguccug

SEQ ID NO: 2100123 - RNA, 19 nt, Artificial Sequence
  Description of Artificial Sequence: Synthetic oligonucleotide
guaccauugacagaucucu

SEQ ID NO: 2100124 - RNA, 19 nt, Artificial Sequence
  Description of Artificial Sequence: Synthetic oligonucleotide
gagacgcuuggcgggaccg

SEQ ID NO: 2100125 - RNA, 19 nt, Artificial Sequence
  Description of Artificial Sequence: Synthetic oligonucleotide
guguguguaugugugugug

SEQ ID NO: 2100126 - RNA, 19 nt, Artificial Sequence
  Description of Artificial Sequence: Synthetic oligonucleotide
uguuguucuuuaguuucuc

SEQ ID NO: 2100127 - RNA, 19 nt, Artificial Sequence
  Description of Artificial Sequence: Synthetic oligonucleotide
gcacacggagaugaaaacg

SEQ ID NO: 2100128 - RNA, 19 nt, Artificial Sequence
  Description of Artificial Sequence: Synthetic oligonucleotide
uccuuuccuucaagaaaac

SEQ ID NO: 2100129 - RNA, 19 nt, Artificial Sequence
  Description of Artificial Sequence: Synthetic oligonucleotide
ucuugccagucugauguga

SEQ ID NO: 2100130 - RNA, 19 nt, Artificial Sequence
  Description of Artificial Sequence: Synthetic oligonucleotide
ccuguuugguggcagcucg

SEQ ID NO: 2100131 - RNA, 19 nt, Artificial Sequence
  Description of Artificial Sequence: Synthetic oligonucleotide
ccagguuaugcccucggcg

SEQ ID NO: 2100132 - RNA, 19 nt, Artificial Sequence
  Description of Artificial Sequence: Synthetic oligonucleotide
ugugugugugugugugugu

SEQ ID NO: 2100133 - RNA, 19 nt, Artificial Sequence
  Description of Artificial Sequence: Synthetic oligonucleotide
agcucgagaaggggcaagg

SEQ ID NO: 2100134 - RNA, 19 nt, Artificial Sequence
  Description of Artificial Sequence: Synthetic oligonucleotide
agaugaaggagcagucugu

SEQ ID NO: 2100135 - RNA, 19 nt, Artificial Sequence
  Description of Artificial Sequence: Synthetic oligonucleotide
cugaugugaauguccagaa

SEQ ID NO: 2100136 - RNA, 19 nt, Artificial Sequence
  Description of Artificial Sequence: Synthetic oligonucleotide
guguguguguguguguaug

SEQ ID NO: 2100137 - RNA, 19 nt, Artificial Sequence
  Description of Artificial Sequence: Synthetic oligonucleotide
accacucuaccaucaaaua

SEQ ID NO: 2100138 - RNA, 19 nt, Artificial Sequence
  Description of Artificial Sequence: Synthetic oligonucleotide
gugugugugugugugugug

SEQ ID NO: 2100139 - RNA, 19 nt, Artificial Sequence
  Description of Artificial Sequence: Synthetic oligonucleotide
gucuguccuguaaaccagg

SEQ ID NO: 2100140 - RNA, 19 nt, Artificial Sequence
  Description of Artificial Sequence: Synthetic oligonucleotide
guccacuuauuaaagaagu

SEQ ID NO: 2100141 - RNA, 19 nt, Artificial Sequence
  Description of Artificial Sequence: Synthetic oligonucleotide
augaccacacagcacuaua

SEQ ID NO: 2100142 - RNA, 19 nt, Artificial Sequence
  Description of Artificial Sequence: Synthetic oligonucleotide
auuugugauuacauauaaa

SEQ ID NO: 2100143 - RNA, 19 nt, Artificial Sequence
  Description of Artificial Sequence: Synthetic oligonucleotide
ggggccaagaaauccacca

SEQ ID NO: 2100144 - RNA, 19 nt, Artificial Sequence
  Description of Artificial Sequence: Synthetic oligonucleotide
gaaagacgauauuugugau

SEQ ID NO: 2100145 - RNA, 19 nt, Artificial Sequence
  Description of Artificial Sequence: Synthetic oligonucleotide
acccagguuaugcccucgg

SEQ ID NO: 2100146 - RNA, 19 nt, Artificial Sequence
  Description of Artificial Sequence: Synthetic oligonucleotide
gaugagcagcgugucagca

SEQ ID NO: 2100147 - RNA, 19 nt, Artificial Sequence
  Description of Artificial Sequence: Synthetic oligonucleotide
uguacuugucuguccugua

SEQ ID NO: 2100148 - RNA, 19 nt, Artificial Sequence
  Description of Artificial Sequence: Synthetic oligonucleotide
ccgaauugacauaguacag

SEQ ID NO: 2100149 - RNA, 19 nt, Artificial Sequence
  Description of Artificial Sequence: Synthetic oligonucleotide
ugucgaccagcugacucug

SEQ ID NO: 2100150 - RNA, 19 nt, Artificial Sequence
  Description of Artificial Sequence: Synthetic oligonucleotide
auuacccaauuuaacuaau

SEQ ID NO: 2100151 - RNA, 19 nt, Artificial Sequence
  Description of Artificial Sequence: Synthetic oligonucleotide
auucccauuaaggcaguaa

SEQ ID NO: 2100152 - RNA, 19 nt, Artificial Sequence
  Description of Artificial Sequence: Synthetic oligonucleotide
gacucuguuauaguuuccu

SEQ ID NO: 2100153 - RNA, 19 nt, Artificial Sequence
  Description of Artificial Sequence: Synthetic oligonucleotide
acucuguuauaguuuccuu

SEQ ID NO: 2100154 - RNA, 19 nt, Artificial Sequence
  Description of Artificial Sequence: Synthetic oligonucleotide
aacauggauuucauucgua

SEQ ID NO: 2100155 - RNA, 19 nt, Artificial Sequence
  Description of Artificial Sequence: Synthetic oligonucleotide
uaccauugacagaucucua

SEQ ID NO: 2100156 - RNA, 19 nt, Artificial Sequence
  Description of Artificial Sequence: Synthetic oligonucleotide
agcagguuucgaugagaca

SEQ ID NO: 2100157 - RNA, 19 nt, Artificial Sequence
  Description of Artificial Sequence: Synthetic oligonucleotide
agacaauccuuggauguaa

SEQ ID NO: 2100158 - RNA, 19 nt, Artificial Sequence
  Description of Artificial Sequence: Synthetic oligonucleotide
uguguguguguguguguau

SEQ ID NO: 2100159 - RNA, 19 nt, Artificial Sequence
  Description of Artificial Sequence: Synthetic oligonucleotide
ucgaccagcugacucuguu

SEQ ID NO: 2100160 - RNA, 19 nt, Artificial Sequence
  Description of Artificial Sequence: Synthetic oligonucleotide
gagaccugggagacgcuug

SEQ ID NO: 2100161 - RNA, 19 nt, Artificial Sequence
  Description of Artificial Sequence: Synthetic oligonucleotide
acauggugcucaucucgcu

SEQ ID NO: 2100162 - RNA, 19 nt, Artificial Sequence
  Description of Artificial Sequence: Synthetic oligonucleotide
ucgcucguccguccccgcg

SEQ ID NO: 2100163 - RNA, 19 nt, Artificial Sequence
  Description of Artificial Sequence: Synthetic oligonucleotide
guacuugucuguccuguaa

SEQ ID NO: 2100164 - RNA, 19 nt, Artificial Sequence
  Description of Artificial Sequence: Synthetic oligonucleotide
gguuucgaugagacaaucc

SEQ ID NO: 2100165 - RNA, 19 nt, Artificial Sequence
  Description of Artificial Sequence: Synthetic oligonucleotide
agaaggggcaaggccaaga

SEQ ID NO: 2100166 - RNA, 19 nt, Artificial Sequence
  Description of Artificial Sequence: Synthetic oligonucleotide
accaucaaauauggaauua

SEQ ID NO: 2100167 - RNA, 19 nt, Artificial Sequence
  Description of Artificial Sequence: Synthetic oligonucleotide
guguguguguguguaugug

SEQ ID NO: 2100168 - RNA, 19 nt, Artificial Sequence
  Description of Artificial Sequence: Synthetic oligonucleotide
accaauuguuaagugccau

SEQ ID NO: 2100169 - RNA, 19 nt, Artificial Sequence
  Description of Artificial Sequence: Synthetic oligonucleotide
agcagucuguggugucauc

SEQ ID NO: 2100170 - RNA, 19 nt, Artificial Sequence
  Description of Artificial Sequence: Synthetic oligonucleotide
guggcagcucgagaagggg

SEQ ID NO: 2100171 - RNA, 19 nt, Artificial Sequence
  Description of Artificial Sequence: Synthetic oligonucleotide
guguguguguguauggaaa

SEQ ID NO: 2100172 - RNA, 19 nt, Artificial Sequence
  Description of Artificial Sequence: Synthetic oligonucleotide
augagcagcgugucagcaa

SEQ ID NO: 2100173 - RNA, 19 nt, Artificial Sequence
  Description of Artificial Sequence: Synthetic oligonucleotide
uggugucaucucccagcag

SEQ ID NO: 2100174 - RNA, 19 nt, Artificial Sequence
  Description of Artificial Sequence: Synthetic oligonucleotide
cuugccagucugaugugaa

SEQ ID NO: 2100175 - RNA, 19 nt, Artificial Sequence
  Description of Artificial Sequence: Synthetic oligonucleotide
acuaaugaguccacuuauu

SEQ ID NO: 2100176 - RNA, 19 nt, Artificial Sequence
  Description of Artificial Sequence: Synthetic oligonucleotide
uccuguaaaccaggaccca

SEQ ID NO: 2100177 - RNA, 19 nt, Artificial Sequence
  Description of Artificial Sequence: Synthetic oligonucleotide
gcacuauaccaauuguuaa

SEQ ID NO: 2100178 - RNA, 19 nt, Artificial Sequence
  Description of Artificial Sequence: Synthetic oligonucleotide
gucucuuguacuugucugu

SEQ ID NO: 2100179 - RNA, 19 nt, Artificial Sequence
  Description of Artificial Sequence: Synthetic oligonucleotide
uugccagucugaugugaau

SEQ ID NO: 2100180 - RNA, 19 nt, Artificial Sequence
  Description of Artificial Sequence: Synthetic oligonucleotide
caauugcaaacauggauuu

SEQ ID NO: 2100181 - RNA, 19 nt, Artificial Sequence
  Description of Artificial Sequence: Synthetic oligonucleotide
agaauguggccaggugucu

SEQ ID NO: 2100182 - RNA, 19 nt, Artificial Sequence
  Description of Artificial Sequence: Synthetic oligonucleotide
agcaaacauggugcucauc

SEQ ID NO: 2100183 - RNA, 19 nt, Artificial Sequence
  Description of Artificial Sequence: Synthetic oligonucleotide
gccaauugcaaacauggau

SEQ ID NO: 2100184 - RNA, 19 nt, Artificial Sequence
  Description of Artificial Sequence: Synthetic oligonucleotide
guggccaggugucuugcca

SEQ ID NO: 2100185 - RNA, 19 nt, Artificial Sequence
  Description of Artificial Sequence: Synthetic oligonucleotide
ucguccguccccgcgcucc

SEQ ID NO: 2100186 - RNA, 19 nt, Artificial Sequence
  Description of Artificial Sequence: Synthetic oligonucleotide
ugaaaacgaugagcagcgu

SEQ ID NO: 2100187 - RNA, 19 nt, Artificial Sequence
  Description of Artificial Sequence: Synthetic oligonucleotide
uggugcucaucucgcucgu

SEQ ID NO: 2100188 - RNA, 19 nt, Artificial Sequence
  Description of Artificial Sequence: Synthetic oligonucleotide
caguaaaacaaaagccaau

SEQ ID NO: 2100189 - RNA, 19 nt, Artificial Sequence
  Description of Artificial Sequence: Synthetic oligonucleotide
gagacaauccuuggaugua

SEQ ID NO: 2100190 - RNA, 19 nt, Artificial Sequence
  Description of Artificial Sequence: Synthetic oligonucleotide
gacauaguacagagaauau

SEQ ID NO: 2100191 - RNA, 19 nt, Artificial Sequence
  Description of Artificial Sequence: Synthetic oligonucleotide
aggacccagguuaugcccu

SEQ ID NO: 2100192 - RNA, 19 nt, Artificial Sequence
  Description of Artificial Sequence: Synthetic oligonucleotide
cagccuguuugguggcagc

SEQ ID NO: 2100193 - RNA, 19 nt, Artificial Sequence
  Description of Artificial Sequence: Synthetic oligonucleotide
ccaggacccagguuaugcc

SEQ ID NO: 2100194 - RNA, 19 nt, Artificial Sequence
  Description of Artificial Sequence: Synthetic oligonucleotide
guuuugccgaauugacaua

SEQ ID NO: 2100195 - RNA, 19 nt, Artificial Sequence
  Description of Artificial Sequence: Synthetic oligonucleotide
guguguguguguguaugga

SEQ ID NO: 2100196 - RNA, 19 nt, Artificial Sequence
  Description of Artificial Sequence: Synthetic oligonucleotide
guuaugcccucggcgagca

SEQ ID NO: 2100197 - RNA, 19 nt, Artificial Sequence
  Description of Artificial Sequence: Synthetic oligonucleotide
ccuguaaaccaggacccag

SEQ ID NO: 2100198 - RNA, 19 nt, Artificial Sequence
  Description of Artificial Sequence: Synthetic oligonucleotide
uuaugcccucggcgagcag

SEQ ID NO: 2100199 - RNA, 19 nt, Artificial Sequence
  Description of Artificial Sequence: Synthetic oligonucleotide
ugggagacgcuuggcggga

SEQ ID NO: 2100200 - RNA, 19 nt, Artificial Sequence
  Description of Artificial Sequence: Synthetic oligonucleotide
agccaauugcaaacaugga

SEQ ID NO: 2100201 - RNA, 19 nt, Artificial Sequence
  Description of Artificial Sequence: Synthetic oligonucleotide
gacgcuuggcgggaccgac

SEQ ID NO: 2100202 - RNA, 19 nt, Artificial Sequence
  Description of Artificial Sequence: Synthetic oligonucleotide
acgcuuggcgggaccgacc

SEQ ID NO: 2100203 - RNA, 19 nt, Artificial Sequence
  Description of Artificial Sequence: Synthetic oligonucleotide
uguugucgaccagcugacu

SEQ ID NO: 2100204 - RNA, 19 nt, Artificial Sequence
  Description of Artificial Sequence: Synthetic oligonucleotide
cucuaccaucaaauaugga

SEQ ID NO: 2100205 - RNA, 19 nt, Artificial Sequence
  Description of Artificial Sequence: Synthetic oligonucleotide
gagaaggggcaaggccaag

SEQ ID NO: 2100206 - RNA, 19 nt, Artificial Sequence
  Description of Artificial Sequence: Synthetic oligonucleotide
acacggagaugaaaacgau

SEQ ID NO: 2100207 - RNA, 19 nt, Artificial Sequence
  Description of Artificial Sequence: Synthetic oligonucleotide
guuaagugccauucucauu

SEQ ID NO: 2100208 - RNA, 19 nt, Artificial Sequence
  Description of Artificial Sequence: Synthetic oligonucleotide
uccguccccgcgcucccac

SEQ ID NO: 2100209 - RNA, 19 nt, Artificial Sequence
  Description of Artificial Sequence: Synthetic oligonucleotide
gcuuugccaccacucuacc

SEQ ID NO: 2100210 - RNA, 19 nt, Artificial Sequence
  Description of Artificial Sequence: Synthetic oligonucleotide
cguaccauugacagaucuc

SEQ ID NO: 2100211 - RNA, 19 nt, Artificial Sequence
  Description of Artificial Sequence: Synthetic oligonucleotide
gugugugugugugugugua

SEQ ID NO: 2100212 - RNA, 19 nt, Artificial Sequence
  Description of Artificial Sequence: Synthetic oligonucleotide
gguuaugcccucggcgagc

SEQ ID NO: 2100213 - RNA, 19 nt, Artificial Sequence
  Description of Artificial Sequence: Synthetic oligonucleotide
cagucucuuguacuugucu

SEQ ID NO: 2100214 - RNA, 19 nt, Artificial Sequence
  Description of Artificial Sequence: Synthetic oligonucleotide
ggagugaaggggagcuuug

SEQ ID NO: 2100215 - RNA, 19 nt, Artificial Sequence
  Description of Artificial Sequence: Synthetic oligonucleotide
uccccgcgcucccacccug

SEQ ID NO: 2100216 - RNA, 19 nt, Artificial Sequence
  Description of Artificial Sequence: Synthetic oligonucleotide
gcccucggcgagcagcgcg

SEQ ID NO: 2100217 - RNA, 19 nt, Artificial Sequence
  Description of Artificial Sequence: Synthetic oligonucleotide
guguguguauggaaauacu

SEQ ID NO: 2100218 - RNA, 19 nt, Artificial Sequence
  Description of Artificial Sequence: Synthetic oligonucleotide
ggagcuuugccaccacucu

SEQ ID NO: 2100219 - RNA, 19 nt, Artificial Sequence
  Description of Artificial Sequence: Synthetic oligonucleotide
cugccuucagucucuugua

SEQ ID NO: 2100220 - RNA, 19 nt, Artificial Sequence
  Description of Artificial Sequence: Synthetic oligonucleotide
gaccugggagacgcuuggc

SEQ ID NO: 2100221 - RNA, 19 nt, Artificial Sequence
  Description of Artificial Sequence: Synthetic oligonucleotide
cuguuugguggcagcucga

SEQ ID NO: 2100222 - RNA, 19 nt, Artificial Sequence
  Description of Artificial Sequence: Synthetic oligonucleotide
gcggugcacacggagauga

SEQ ID NO: 2100223 - RNA, 19 nt, Artificial Sequence
  Description of Artificial Sequence: Synthetic oligonucleotide
ggagacgcuuggcgggacc

SEQ ID NO: 2100224 - RNA, 19 nt, Artificial Sequence
  Description of Artificial Sequence: Synthetic oligonucleotide
gccagucugaugugaaugu

SEQ ID NO: 2100225 - RNA, 19 nt, Artificial Sequence
  Description of Artificial Sequence: Synthetic oligonucleotide
caagaaucuucugaauguu

SEQ ID NO: 2100226 - RNA, 19 nt, Artificial Sequence
  Description of Artificial Sequence: Synthetic oligonucleotide
cgauauuugugauuacaua

SEQ ID NO: 2100227 - RNA, 19 nt, Artificial Sequence
  Description of Artificial Sequence: Synthetic oligonucleotide
acauucccauuaaggcagu

SEQ ID NO: 2100228 - RNA, 19 nt, Artificial Sequence
  Description of Artificial Sequence: Synthetic oligonucleotide
ggagcagucugugguguca

SEQ ID NO: 2100229 - RNA, 19 nt, Artificial Sequence
  Description of Artificial Sequence: Synthetic oligonucleotide
aggugucuugccagucuga

SEQ ID NO: 2100230 - RNA, 19 nt, Artificial Sequence
  Description of Artificial Sequence: Synthetic oligonucleotide
caugugugugugugugugu

SEQ ID NO: 2100231 - RNA, 19 nt, Artificial Sequence
  Description of Artificial Sequence: Synthetic oligonucleotide
gagcagcgugucagcaaac

SEQ ID NO: 2100232 - RNA, 19 nt, Artificial Sequence
  Description of Artificial Sequence: Synthetic oligonucleotide
cccucggcgagcagcgcgg

SEQ ID NO: 2100233 - RNA, 19 nt, Artificial Sequence
  Description of Artificial Sequence: Synthetic oligonucleotide
gaucucuauuguuguucuu

SEQ ID NO: 2100234 - RNA, 19 nt, Artificial Sequence
  Description of Artificial Sequence: Synthetic oligonucleotide
cccagguuaugcccucggc

SEQ ID NO: 2100235 - RNA, 19 nt, Artificial Sequence
  Description of Artificial Sequence: Synthetic oligonucleotide
ggugcacacggagaugaaa

SEQ ID NO: 2100236 - RNA, 19 nt, Artificial Sequence
  Description of Artificial Sequence: Synthetic oligonucleotide
acacagcacuauaccaauu

SEQ ID NO: 2100237 - RNA, 19 nt, Artificial Sequence
  Description of Artificial Sequence: Synthetic oligonucleotide
gaagcgcuccagggccagc

SEQ ID NO: 2100238 - RNA, 19 nt, Artificial Sequence
  Description of Artificial Sequence: Synthetic oligonucleotide
cucgcucguccguccccgc

SEQ ID NO: 2100239 - RNA, 19 nt, Artificial Sequence
  Description of Artificial Sequence: Synthetic oligonucleotide
cagguuucgaugagacaau

SEQ ID NO: 2100240 - RNA, 19 nt, Artificial Sequence
  Description of Artificial Sequence: Synthetic oligonucleotide
gcucgagaaggggcaaggc

SEQ ID NO: 2100241 - RNA, 19 nt, Artificial Sequence
  Description of Artificial Sequence: Synthetic oligonucleotide
gaaauccaccagccuguuu

SEQ ID NO: 2100242 - RNA, 19 nt, Artificial Sequence
  Description of Artificial Sequence: Synthetic oligonucleotide
gugucaucucccagcaggu

SEQ ID NO: 2100243 - RNA, 19 nt, Artificial Sequence
  Description of Artificial Sequence: Synthetic oligonucleotide
cgcuuggcgggaccgaccc

SEQ ID NO: 2100244 - RNA, 19 nt, Artificial Sequence
  Description of Artificial Sequence: Synthetic oligonucleotide
ccagucugaugugaauguc

SEQ ID NO: 2100245 - RNA, 19 nt, Artificial Sequence
  Description of Artificial Sequence: Synthetic oligonucleotide
agacgcuuggcgggaccga

SEQ ID NO: 2100246 - RNA, 19 nt, Artificial Sequence
  Description of Artificial Sequence: Synthetic oligonucleotide
cgaugagacaauccuugga

SEQ ID NO: 2100247 - RNA, 19 nt, Artificial Sequence
  Description of Artificial Sequence: Synthetic oligonucleotide
cccagcagguuucgaugag

SEQ ID NO: 2100248 - RNA, 19 nt, Artificial Sequence
  Description of Artificial Sequence: Synthetic oligonucleotide
ccacucuaccaucaaauau

SEQ ID NO: 2100249 - RNA, 19 nt, Artificial Sequence
  Description of Artificial Sequence: Synthetic oligonucleotide
cucggcgagcagcgcggug

SEQ ID NO: 2100250 - RNA, 19 nt, Artificial Sequence
  Description of Artificial Sequence: Synthetic oligonucleotide
gcugacucuguuauaguuu

SEQ ID NO: 2100251 - RNA, 19 nt, Artificial Sequence
  Description of Artificial Sequence: Synthetic oligonucleotide
cuugucucucuaucuucuu

SEQ ID NO: 2100252 - RNA, 19 nt, Artificial Sequence
  Description of Artificial Sequence: Synthetic oligonucleotide
cagcugacucuguuauagu

SEQ ID NO: 2100253 - RNA, 19 nt, Artificial Sequence
  Description of Artificial Sequence: Synthetic oligonucleotide
ccgaggaacaccacaacuu

SEQ ID NO: 2100254 - RNA, 19 nt, Artificial Sequence
  Description of Artificial Sequence: Synthetic oligonucleotide
cuguuauaguuuccuucuu

SEQ ID NO: 2100255 - RNA, 19 nt, Artificial Sequence
  Description of Artificial Sequence: Synthetic oligonucleotide
gcgcucccacccugcacgg

SEQ ID NO: 2100256 - RNA, 19 nt, Artificial Sequence
  Description of Artificial Sequence: Synthetic oligonucleotide
ggugucuugccagucugau

SEQ ID NO: 2100257 - RNA, 19 nt, Artificial Sequence
  Description of Artificial Sequence: Synthetic oligonucleotide
caugaccacacagcacuau

SEQ ID NO: 2100258 - RNA, 19 nt, Artificial Sequence
  Description of Artificial Sequence: Synthetic oligonucleotide
gcagcgugucagcaaacau

SEQ ID NO: 2100259 - RNA, 19 nt, Artificial Sequence
  Description of Artificial Sequence: Synthetic oligonucleotide
ggccaagaaucuucugaau

SEQ ID NO: 2100260 - RNA, 19 nt, Artificial Sequence
  Description of Artificial Sequence: Synthetic oligonucleotide
ccaauuguuaagugccauu

SEQ ID NO: 2100261 - RNA, 19 nt, Artificial Sequence
  Description of Artificial Sequence: Synthetic oligonucleotide
ccagcagguuucgaugaga

SEQ ID NO: 2100262 - RNA, 19 nt, Artificial Sequence
  Description of Artificial Sequence: Synthetic oligonucleotide
cauucccauuaaggcagua

SEQ ID NO: 2100263 - RNA, 19 nt, Artificial Sequence
  Description of Artificial Sequence: Synthetic oligonucleotide
ccaccacucuaccaucaaa

SEQ ID NO: 2100264 - RNA, 19 nt, Artificial Sequence
  Description of Artificial Sequence: Synthetic oligonucleotide
gcuuggcgggaccgacccc

SEQ ID NO: 2100265 - RNA, 19 nt, Artificial Sequence
  Description of Artificial Sequence: Synthetic oligonucleotide
cgcucguccguccccgcgc

SEQ ID NO: 2100266 - RNA, 19 nt, Artificial Sequence
  Description of Artificial Sequence: Synthetic oligonucleotide
ccuuuccuucaagaaaacu

SEQ ID NO: 2100267 - RNA, 19 nt, Artificial Sequence
  Description of Artificial Sequence: Synthetic oligonucleotide
cagcaaacauggugcucau

SEQ ID NO: 2100268 - RNA, 19 nt, Artificial Sequence
  Description of Artificial Sequence: Synthetic oligonucleotide
gaggagugaaggggagcuu

SEQ ID NO: 2100269 - RNA, 19 nt, Artificial Sequence
  Description of Artificial Sequence: Synthetic oligonucleotide
ggggagcuuugccaccacu

SEQ ID NO: 2100270 - RNA, 19 nt, Artificial Sequence
  Description of Artificial Sequence: Synthetic oligonucleotide
ccacuucugccuucagucu

SEQ ID NO: 2100271 - RNA, 19 nt, Artificial Sequence
  Description of Artificial Sequence: Synthetic oligonucleotide
ggugcucaucucgcucguc

SEQ ID NO: 2100272 - RNA, 19 nt, Artificial Sequence
  Description of Artificial Sequence: Synthetic oligonucleotide
ggccaggugucuugccagu

SEQ ID NO: 2100273 - RNA, 19 nt, Artificial Sequence
  Description of Artificial Sequence: Synthetic oligonucleotide
gcgcggugcacacggagau

SEQ ID NO: 2100274 - RNA, 19 nt, Artificial Sequence
  Description of Artificial Sequence: Synthetic oligonucleotide
ccaugaccacacagcacua

SEQ ID NO: 2100275 - RNA, 19 nt, Artificial Sequence
  Description of Artificial Sequence: Synthetic oligonucleotide
gggagacgcuuggcgggac

SEQ ID NO: 2100276 - RNA, 19 nt, Artificial Sequence
  Description of Artificial Sequence: Synthetic oligonucleotide
cgaccagcugacucuguua

SEQ ID NO: 2100277 - RNA, 19 nt, Artificial Sequence
  Description of Artificial Sequence: Synthetic oligonucleotide
ccguccccgcgcucccacc

SEQ ID NO: 2100278 - RNA, 19 nt, Artificial Sequence
  Description of Artificial Sequence: Synthetic oligonucleotide
gucgaccagcugacucugu

SEQ ID NO: 2100279 - RNA, 19 nt, Artificial Sequence
  Description of Artificial Sequence: Synthetic oligonucleotide
gcucguccguccccgcgcu

SEQ ID NO: 2100280 - RNA, 19 nt, Artificial Sequence
  Description of Artificial Sequence: Synthetic oligonucleotide
cguccguccccgcgcuccc

SEQ ID NO: 2100281 - RNA, 19 nt, Artificial Sequence
  Description of Artificial Sequence: Synthetic oligonucleotide
guccguccccgcgcuccca

SEQ ID NO: 2100282 - RNA, 19 nt, Artificial Sequence
  Description of Artificial Sequence: Synthetic oligonucleotide
cgcggugcacacggagaug

SEQ ID NO: 2100283 - RNA, 19 nt, Artificial Sequence
  Description of Artificial Sequence: Synthetic oligonucleotide
ccucggcgagcagcgcggu

SEQ ID NO: 2100284 - RNA, 19 nt, Artificial Sequence
  Description of Artificial Sequence: Synthetic oligonucleotide
ucaugaauaagcaggaacc

SEQ ID NO: 2100285 - RNA, 19 nt, Artificial Sequence
  Description of Artificial Sequence: Synthetic oligonucleotide
uacaguaucaccaugugga

SEQ ID NO: 2100286 - RNA, 19 nt, Artificial Sequence
  Description of Artificial Sequence: Synthetic oligonucleotide
auauugacucaauagcucc

SEQ ID NO: 2100287 - RNA, 19 nt, Artificial Sequence
  Description of Artificial Sequence: Synthetic oligonucleotide
augaguuccgauucgagcc

SEQ ID NO: 2100288 - RNA, 19 nt, Artificial Sequence
  Description of Artificial Sequence: Synthetic oligonucleotide
gacaguaaguuucuuacgg

SEQ ID NO: 2100289 - RNA, 19 nt, Artificial Sequence
  Description of Artificial Sequence: Synthetic oligonucleotide
auauaguuggagugcagcc

SEQ ID NO: 2100290 - RNA, 19 nt, Artificial Sequence
  Description of Artificial Sequence: Synthetic oligonucleotide
guuucuuacggugugaugg

SEQ ID NO: 2100291 - RNA, 19 nt, Artificial Sequence
  Description of Artificial Sequence: Synthetic oligonucleotide
uccgauucgagccugagca

SEQ ID NO: 2100292 - RNA, 19 nt, Artificial Sequence
  Description of Artificial Sequence: Synthetic oligonucleotide
ugaaugggagucaagacga

SEQ ID NO: 2100293 - RNA, 19 nt, Artificial Sequence
  Description of Artificial Sequence: Synthetic oligonucleotide
cacauauugacucaauagc

SEQ ID NO: 2100294 - RNA, 19 nt, Artificial Sequence
  Description of Artificial Sequence: Synthetic oligonucleotide
acucaauagcuccuguucc

SEQ ID NO: 2100295 - RNA, 19 nt, Artificial Sequence
  Description of Artificial Sequence: Synthetic oligonucleotide
ucaacaaugucacugcggu

SEQ ID NO: 2100296 - RNA, 19 nt, Artificial Sequence
  Description of Artificial Sequence: Synthetic oligonucleotide
aacaucaaggcugggaggg

SEQ ID NO: 2100297 - RNA, 19 nt, Artificial Sequence
  Description of Artificial Sequence: Synthetic oligonucleotide
acgguguucacauauugac

SEQ ID NO: 2100298 - RNA, 19 nt, Artificial Sequence
  Description of Artificial Sequence: Synthetic oligonucleotide
aacaaugucacugcgguca

SEQ ID NO: 2100299 - RNA, 19 nt, Artificial Sequence
  Description of Artificial Sequence: Synthetic oligonucleotide
aaugucacugcggucauuc

SEQ ID NO: 2100300 - RNA, 19 nt, Artificial Sequence
  Description of Artificial Sequence: Synthetic oligonucleotide
aguaucaccauguggagca

SEQ ID NO: 2100301 - RNA, 19 nt, Artificial Sequence
  Description of Artificial Sequence: Synthetic oligonucleotide
uuggagugcagccugacug

SEQ ID NO: 2100302 - RNA, 19 nt, Artificial Sequence
  Description of Artificial Sequence: Synthetic oligonucleotide
aagagcacuguccaggacu

SEQ ID NO: 2100303 - RNA, 19 nt, Artificial Sequence
  Description of Artificial Sequence: Synthetic oligonucleotide
gucaagacgacaugaaugc

SEQ ID NO: 2100304 - RNA, 19 nt, Artificial Sequence
  Description of Artificial Sequence: Synthetic oligonucleotide
acucucaauguccugcagc

SEQ ID NO: 2100305 - RNA, 19 nt, Artificial Sequence
  Description of Artificial Sequence: Synthetic oligonucleotide
aucagcagaaacaucaagg

SEQ ID NO: 2100306 - RNA, 19 nt, Artificial Sequence
  Description of Artificial Sequence: Synthetic oligonucleotide
aaacaucaaggcugggagg

SEQ ID NO: 2100307 - RNA, 19 nt, Artificial Sequence
  Description of Artificial Sequence: Synthetic oligonucleotide
uguccucuuaugcugaaug

SEQ ID NO: 2100308 - RNA, 19 nt, Artificial Sequence
  Description of Artificial Sequence: Synthetic oligonucleotide
agcagaaacaucaaggcug

SEQ ID NO: 2100309 - RNA, 19 nt, Artificial Sequence
  Description of Artificial Sequence: Synthetic oligonucleotide
acugcggucauucacggug

SEQ ID NO: 2100310 - RNA, 19 nt, Artificial Sequence
  Description of Artificial Sequence: Synthetic oligonucleotide
cucaugaauaagcaggaac

SEQ ID NO: 2100311 - RNA, 19 nt, Artificial Sequence
  Description of Artificial Sequence: Synthetic oligonucleotide
gagggauauaguuggagug

SEQ ID NO: 2100312 - RNA, 19 nt, Artificial Sequence
  Description of Artificial Sequence: Synthetic oligonucleotide
gauauaguuggagugcagc

SEQ ID NO: 2100313 - RNA, 19 nt, Artificial Sequence
  Description of Artificial Sequence: Synthetic oligonucleotide
uccggcuugucuaucagcc

SEQ ID NO: 2100314 - RNA, 19 nt, Artificial Sequence
  Description of Artificial Sequence: Synthetic oligonucleotide
uggagcaagagcacugucc

SEQ ID NO: 2100315 - RNA, 19 nt, Artificial Sequence
  Description of Artificial Sequence: Synthetic oligonucleotide
agggauauaguuggagugc

SEQ ID NO: 2100316 - RNA, 19 nt, Artificial Sequence
  Description of Artificial Sequence: Synthetic oligonucleotide
uucaguacugccaccucag

SEQ ID NO: 2100317 - RNA, 19 nt, Artificial Sequence
  Description of Artificial Sequence: Synthetic oligonucleotide
cugcuucucaugaauaagc

SEQ ID NO: 2100318 - RNA, 19 nt, Artificial Sequence
  Description of Artificial Sequence: Synthetic oligonucleotide
ugaguuuccugcuucuuga

SEQ ID NO: 2100319 - RNA, 19 nt, Artificial Sequence
  Description of Artificial Sequence: Synthetic oligonucleotide
cauauugacucaauagcuc

SEQ ID NO: 2100320 - RNA, 19 nt, Artificial Sequence
  Description of Artificial Sequence: Synthetic oligonucleotide
caugaguuccgauucgagc

SEQ ID NO: 2100321 - RNA, 19 nt, Artificial Sequence
  Description of Artificial Sequence: Synthetic oligonucleotide
ugagggauauaguuggagu

SEQ ID NO: 2100322 - RNA, 19 nt, Artificial Sequence
  Description of Artificial Sequence: Synthetic oligonucleotide
uccucuuaugcugaauggg

SEQ ID NO: 2100323 - RNA, 19 nt, Artificial Sequence
  Description of Artificial Sequence: Synthetic oligonucleotide
agucaagacgacaugaaug

SEQ ID NO: 2100324 - RNA, 19 nt, Artificial Sequence
  Description of Artificial Sequence: Synthetic oligonucleotide
caagacgacaugaaugcug

SEQ ID NO: 2100325 - RNA, 19 nt, Artificial Sequence
  Description of Artificial Sequence: Synthetic oligonucleotide
aaccccuggagaugcacuc

SEQ ID NO: 2100326 - RNA, 19 nt, Artificial Sequence
  Description of Artificial Sequence: Synthetic oligonucleotide
ucauucacgguguucacau

SEQ ID NO: 2100327 - RNA, 19 nt, Artificial Sequence
  Description of Artificial Sequence: Synthetic oligonucleotide
acgacaugaaugcuggugu

SEQ ID NO: 2100328 - RNA, 19 nt, Artificial Sequence
  Description of Artificial Sequence: Synthetic oligonucleotide
gacucaauagcuccuguuc

SEQ ID NO: 2100329 - RNA, 19 nt, Artificial Sequence
  Description of Artificial Sequence: Synthetic oligonucleotide
gagagguuacaguaucacc

SEQ ID NO: 2100330 - RNA, 19 nt, Artificial Sequence
  Description of Artificial Sequence: Synthetic oligonucleotide
acauauugacucaauagcu

SEQ ID NO: 2100331 - RNA, 19 nt, Artificial Sequence
  Description of Artificial Sequence: Synthetic oligonucleotide
uucacauauugacucaaua

SEQ ID NO: 2100332 - RNA, 19 nt, Artificial Sequence
  Description of Artificial Sequence: Synthetic oligonucleotide
ucacgguguucacauauug

SEQ ID NO: 2100333 - RNA, 19 nt, Artificial Sequence
  Description of Artificial Sequence: Synthetic oligonucleotide
caguaaguuucuuacggug

SEQ ID NO: 2100334 - RNA, 19 nt, Artificial Sequence
  Description of Artificial Sequence: Synthetic oligonucleotide
ucuuaugcugaaugggagu

SEQ ID NO: 2100335 - RNA, 19 nt, Artificial Sequence
  Description of Artificial Sequence: Synthetic oligonucleotide
guaaguuucuuacggugug

SEQ ID NO: 2100336 - RNA, 19 nt, Artificial Sequence
  Description of Artificial Sequence: Synthetic oligonucleotide
ucuaucagccuccgcagcu

SEQ ID NO: 2100337 - RNA, 19 nt, Artificial Sequence
  Description of Artificial Sequence: Synthetic oligonucleotide
cucuuaugcugaaugggag

SEQ ID NO: 2100338 - RNA, 19 nt, Artificial Sequence
  Description of Artificial Sequence: Synthetic oligonucleotide
accauguggagcaagagca

SEQ ID NO: 2100339 - RNA, 19 nt, Artificial Sequence
  Description of Artificial Sequence: Synthetic oligonucleotide
ucuagcugacucucaaugu

SEQ ID NO: 2100340 - RNA, 19 nt, Artificial Sequence
  Description of Artificial Sequence: Synthetic oligonucleotide
ugcugaaugggagucaaga

SEQ ID NO: 2100341 - RNA, 19 nt, Artificial Sequence
  Description of Artificial Sequence: Synthetic oligonucleotide
cuuggaaaagcugaaccug

SEQ ID NO: 2100342 - RNA, 19 nt, Artificial Sequence
  Description of Artificial Sequence: Synthetic oligonucleotide
uggagugcagccugacugg

SEQ ID NO: 2100343 - RNA, 19 nt, Artificial Sequence
  Description of Artificial Sequence: Synthetic oligonucleotide
ucuuacggugugauggaga

SEQ ID NO: 2100344 - RNA, 19 nt, Artificial Sequence
  Description of Artificial Sequence: Synthetic oligonucleotide
uugaggaccagaucuugga

SEQ ID NO: 2100345 - RNA, 19 nt, Artificial Sequence
  Description of Artificial Sequence: Synthetic oligonucleotide
uggucuuaccaaccccugg

SEQ ID NO: 2100346 - RNA, 19 nt, Artificial Sequence
  Description of Artificial Sequence: Synthetic oligonucleotide
acaugaaugcuggugucgg

SEQ ID NO: 2100347 - RNA, 19 nt, Artificial Sequence
  Description of Artificial Sequence: Synthetic oligonucleotide
ucuuaccaaccccuggaga

SEQ ID NO: 2100348 - RNA, 19 nt, Artificial Sequence
  Description of Artificial Sequence: Synthetic oligonucleotide
uauaguuggagugcagccu

SEQ ID NO: 2100349 - RNA, 19 nt, Artificial Sequence
  Description of Artificial Sequence: Synthetic oligonucleotide
guuacaguaucaccaugug

SEQ ID NO: 2100350 - RNA, 19 nt, Artificial Sequence
  Description of Artificial Sequence: Synthetic oligonucleotide
gacgacaugaaugcuggug

SEQ ID NO: 2100351 - RNA, 19 nt, Artificial Sequence
  Description of Artificial Sequence: Synthetic oligonucleotide
uauccaccggcuucaggcg

SEQ ID NO: 2100352 - RNA, 19 nt, Artificial Sequence
  Description of Artificial Sequence: Synthetic oligonucleotide
augaauaagcaggaaccag

SEQ ID NO: 2100353 - RNA, 19 nt, Artificial Sequence
  Description of Artificial Sequence: Synthetic oligonucleotide
acaguaaguuucuuacggu

SEQ ID NO: 2100354 - RNA, 19 nt, Artificial Sequence
  Description of Artificial Sequence: Synthetic oligonucleotide
gggacaguaaguuucuuac

SEQ ID NO: 2100355 - RNA, 19 nt, Artificial Sequence
  Description of Artificial Sequence: Synthetic oligonucleotide
acaguaucaccauguggag

SEQ ID NO: 2100356 - RNA, 19 nt, Artificial Sequence
  Description of Artificial Sequence: Synthetic oligonucleotide
ucucucuuguccuccaggu

SEQ ID NO: 2100357 - RNA, 19 nt, Artificial Sequence
  Description of Artificial Sequence: Synthetic oligonucleotide
guccucuuaugcugaaugg

SEQ ID NO: 2100358 - RNA, 19 nt, Artificial Sequence
  Description of Artificial Sequence: Synthetic oligonucleotide
gucacugcggucauucacg

SEQ ID NO: 2100359 - RNA, 19 nt, Artificial Sequence
  Description of Artificial Sequence: Synthetic oligonucleotide
aaccuggacuucuucuucu

SEQ ID NO: 2100360 - RNA, 19 nt, Artificial Sequence
  Description of Artificial Sequence: Synthetic oligonucleotide
ggugucggagcucuuaucc

SEQ ID NO: 2100361 - RNA, 19 nt, Artificial Sequence
  Description of Artificial Sequence: Synthetic oligonucleotide
uuucuuacggugugaugga

SEQ ID NO: 2100362 - RNA, 19 nt, Artificial Sequence
  Description of Artificial Sequence: Synthetic oligonucleotide
uggacuuguacaugaguuc

SEQ ID NO: 2100363 - RNA, 19 nt, Artificial Sequence
  Description of Artificial Sequence: Synthetic oligonucleotide
accggcuucaggcgggccc

SEQ ID NO: 2100364 - RNA, 19 nt, Artificial Sequence
  Description of Artificial Sequence: Synthetic oligonucleotide
ucacugcggucauucacgg

SEQ ID NO: 2100365 - RNA, 19 nt, Artificial Sequence
  Description of Artificial Sequence: Synthetic oligonucleotide
aguugccgcuccuccaggc

SEQ ID NO: 2100366 - RNA, 19 nt, Artificial Sequence
  Description of Artificial Sequence: Synthetic oligonucleotide
agugcagccugacuggaga

SEQ ID NO: 2100367 - RNA, 19 nt, Artificial Sequence
  Description of Artificial Sequence: Synthetic oligonucleotide
ugccaccucagcuuguggc

SEQ ID NO: 2100368 - RNA, 19 nt, Artificial Sequence
  Description of Artificial Sequence: Synthetic oligonucleotide
gaauaagcaggaaccaguc

SEQ ID NO: 2100369 - RNA, 19 nt, Artificial Sequence
  Description of Artificial Sequence: Synthetic oligonucleotide
gucaacaaugucacugcgg

SEQ ID NO: 2100370 - RNA, 19 nt, Artificial Sequence
  Description of Artificial Sequence: Synthetic oligonucleotide
cuuaugcugaaugggaguc

SEQ ID NO: 2100371 - RNA, 19 nt, Artificial Sequence
  Description of Artificial Sequence: Synthetic oligonucleotide
guacaugaguuccgauucg

SEQ ID NO: 2100372 - RNA, 19 nt, Artificial Sequence
  Description of Artificial Sequence: Synthetic oligonucleotide
ucggagcucuuauccaccg

SEQ ID NO: 2100373 - RNA, 19 nt, Artificial Sequence
  Description of Artificial Sequence: Synthetic oligonucleotide
ugucggagcucuuauccac

SEQ ID NO: 2100374 - RNA, 19 nt, Artificial Sequence
  Description of Artificial Sequence: Synthetic oligonucleotide
aguaaguuucuuacggugu

SEQ ID NO: 2100375 - RNA, 19 nt, Artificial Sequence
  Description of Artificial Sequence: Synthetic oligonucleotide
accagucucuuccugagaa

SEQ ID NO: 2100376 - RNA, 19 nt, Artificial Sequence
  Description of Artificial Sequence: Synthetic oligonucleotide
agcacuggucuuaccaacc

SEQ ID NO: 2100377 - RNA, 19 nt, Artificial Sequence
  Description of Artificial Sequence: Synthetic oligonucleotide
augaaugcuggugucggag

SEQ ID NO: 2100378 - RNA, 19 nt, Artificial Sequence
  Description of Artificial Sequence: Synthetic oligonucleotide
ugaguuccgauucgagccu

SEQ ID NO: 2100379 - RNA, 19 nt, Artificial Sequence
  Description of Artificial Sequence: Synthetic oligonucleotide
cuccugagggauauaguug

SEQ ID NO: 2100380 - RNA, 19 nt, Artificial Sequence
  Description of Artificial Sequence: Synthetic oligonucleotide
aggaccagaucuuggaaaa

SEQ ID NO: 2100381 - RNA, 19 nt, Artificial Sequence
  Description of Artificial Sequence: Synthetic oligonucleotide
gaaucagccaggcguggug

SEQ ID NO: 2100382 - RNA, 19 nt, Artificial Sequence
  Description of Artificial Sequence: Synthetic oligonucleotide
gacuuguacaugaguuccg

SEQ ID NO: 2100383 - RNA, 19 nt, Artificial Sequence
  Description of Artificial Sequence: Synthetic oligonucleotide
uuguucccggagccgaucc

SEQ ID NO: 2100384 - RNA, 19 nt, Artificial Sequence
  Description of Artificial Sequence: Synthetic oligonucleotide
ugaggaccagaucuuggaa

SEQ ID NO: 2100385 - RNA, 19 nt, Artificial Sequence
  Description of Artificial Sequence: Synthetic oligonucleotide
ggacaguaaguuucuuacg

SEQ ID NO: 2100386 - RNA, 19 nt, Artificial Sequence
  Description of Artificial Sequence: Synthetic oligonucleotide
ggagccaaucagcagaaac

SEQ ID NO: 2100387 - RNA, 19 nt, Artificial Sequence
  Description of Artificial Sequence: Synthetic oligonucleotide
uuccgauucgagccugagc

SEQ ID NO: 2100388 - RNA, 19 nt, Artificial Sequence
  Description of Artificial Sequence: Synthetic oligonucleotide
auugacucaauagcuccug

SEQ ID NO: 2100389 - RNA, 19 nt, Artificial Sequence
  Description of Artificial Sequence: Synthetic oligonucleotide
ucaggcgggcccuccaucc

SEQ ID NO: 2100390 - RNA, 19 nt, Artificial Sequence
  Description of Artificial Sequence: Synthetic oligonucleotide
aaguuucuuacggugugau

SEQ ID NO: 2100391 - RNA, 19 nt, Artificial Sequence
  Description of Artificial Sequence: Synthetic oligonucleotide
ugacuggagagguuacagu

SEQ ID NO: 2100392 - RNA, 19 nt, Artificial Sequence
  Description of Artificial Sequence: Synthetic oligonucleotide
gaggaccagaucuuggaaa

SEQ ID NO: 2100393 - RNA, 19 nt, Artificial Sequence
  Description of Artificial Sequence: Synthetic oligonucleotide
cuugagcucuggcuggagc

SEQ ID NO: 2100394 - RNA, 19 nt, Artificial Sequence
  Description of Artificial Sequence: Synthetic oligonucleotide
aguuucuuacggugugaug

SEQ ID NO: 2100395 - RNA, 19 nt, Artificial Sequence
  Description of Artificial Sequence: Synthetic oligonucleotide
cugacuggagagguuacag

SEQ ID NO: 2100396 - RNA, 19 nt, Artificial Sequence
  Description of Artificial Sequence: Synthetic oligonucleotide
uguucacauauugacucaa

SEQ ID NO: 2100397 - RNA, 19 nt, Artificial Sequence
  Description of Artificial Sequence: Synthetic oligonucleotide
uugacucaauagcuccugu

SEQ ID NO: 2100398 - RNA, 19 nt, Artificial Sequence
  Description of Artificial Sequence: Synthetic oligonucleotide
ggagcucuuauccaccggc

SEQ ID NO: 2100399 - RNA, 19 nt, Artificial Sequence
  Description of Artificial Sequence: Synthetic oligonucleotide
uaugcugaaugggagucaa

SEQ ID NO: 2100400 - RNA, 19 nt, Artificial Sequence
  Description of Artificial Sequence: Synthetic oligonucleotide
ggacuuguacaugaguucc

SEQ ID NO: 2100401 - RNA, 19 nt, Artificial Sequence
  Description of Artificial Sequence: Synthetic oligonucleotide
ugggagucaagacgacaug

SEQ ID NO: 2100402 - RNA, 19 nt, Artificial Sequence
  Description of Artificial Sequence: Synthetic oligonucleotide
uacaugaguuccgauucga

SEQ ID NO: 2100403 - RNA, 19 nt, Artificial Sequence
  Description of Artificial Sequence: Synthetic oligonucleotide
cuuacggugugauggagaa

SEQ ID NO: 2100404 - RNA, 19 nt, Artificial Sequence
  Description of Artificial Sequence: Synthetic oligonucleotide
aaucagccaggcguggugu

SEQ ID NO: 2100405 - RNA, 19 nt, Artificial Sequence
  Description of Artificial Sequence: Synthetic oligonucleotide
cuggagagguuacaguauc

SEQ ID NO: 2100406 - RNA, 19 nt, Artificial Sequence
  Description of Artificial Sequence: Synthetic oligonucleotide
gaaccuggacccuucagua

SEQ ID NO: 2100407 - RNA, 19 nt, Artificial Sequence
  Description of Artificial Sequence: Synthetic oligonucleotide
uaaguuucuuacgguguga

SEQ ID NO: 2100408 - RNA, 19 nt, Artificial Sequence
  Description of Artificial Sequence: Synthetic oligonucleotide
gcuucucaugaauaagcag

SEQ ID NO: 2100409 - RNA, 19 nt, Artificial Sequence
  Description of Artificial Sequence: Synthetic oligonucleotide
gaucuuggaaaagcugaac

SEQ ID NO: 2100410 - RNA, 19 nt, Artificial Sequence
  Description of Artificial Sequence: Synthetic oligonucleotide
ucaguacugccaccucagc

SEQ ID NO: 2100411 - RNA, 19 nt, Artificial Sequence
  Description of Artificial Sequence: Synthetic oligonucleotide
gucuuaccaaccccuggag

SEQ ID NO: 2100412 - RNA, 19 nt, Artificial Sequence
  Description of Artificial Sequence: Synthetic oligonucleotide
cugagggauauaguuggag

SEQ ID NO: 2100413 - RNA, 19 nt, Artificial Sequence
  Description of Artificial Sequence: Synthetic oligonucleotide
uaccaaccccuggagaugc

SEQ ID NO: 2100414 - RNA, 19 nt, Artificial Sequence
  Description of Artificial Sequence: Synthetic oligonucleotide
gcagaaacaucaaggcugg

SEQ ID NO: 2100415 - RNA, 19 nt, Artificial Sequence
  Description of Artificial Sequence: Synthetic oligonucleotide
agguuacaguaucaccaug

SEQ ID NO: 2100416 - RNA, 19 nt, Artificial Sequence
  Description of Artificial Sequence: Synthetic oligonucleotide
uuaugcugaaugggaguca

SEQ ID NO: 2100417 - RNA, 19 nt, Artificial Sequence
  Description of Artificial Sequence: Synthetic oligonucleotide
cuuauccaccggcuucagg

SEQ ID NO: 2100418 - RNA, 19 nt, Artificial Sequence
  Description of Artificial Sequence: Synthetic oligonucleotide
caugaauaagcaggaacca

SEQ ID NO: 2100419 - RNA, 19 nt, Artificial Sequence
  Description of Artificial Sequence: Synthetic oligonucleotide
uuaccaaccccuggagaug

SEQ ID NO: 2100420 - RNA, 19 nt, Artificial Sequence
  Description of Artificial Sequence: Synthetic oligonucleotide
acuuguacaugaguuccga

SEQ ID NO: 2100421 - RNA, 19 nt, Artificial Sequence
  Description of Artificial Sequence: Synthetic oligonucleotide
uucuuacggugugauggag

SEQ ID NO: 2100422 - RNA, 19 nt, Artificial Sequence
  Description of Artificial Sequence: Synthetic oligonucleotide
ugacucaauagcuccuguu

SEQ ID NO: 2100423 - RNA, 19 nt, Artificial Sequence
  Description of Artificial Sequence: Synthetic oligonucleotide
uaucaccauguggagcaag

SEQ ID NO: 2100424 - RNA, 19 nt, Artificial Sequence
  Description of Artificial Sequence: Synthetic oligonucleotide
aucucccucggcugcccgc

SEQ ID NO: 2100425 - RNA, 19 nt, Artificial Sequence
  Description of Artificial Sequence: Synthetic oligonucleotide
gacucucaauguccugcag

SEQ ID NO: 2100426 - RNA, 19 nt, Artificial Sequence
  Description of Artificial Sequence: Synthetic oligonucleotide
uucgagccugagcagcaac

SEQ ID NO: 2100427 - RNA, 19 nt, Artificial Sequence
  Description of Artificial Sequence: Synthetic oligonucleotide
cagcucuacaccccugagc

SEQ ID NO: 2100428 - RNA, 19 nt, Artificial Sequence
  Description of Artificial Sequence: Synthetic oligonucleotide
cuuaccaaccccuggagau

SEQ ID NO: 2100429 - RNA, 19 nt, Artificial Sequence
  Description of Artificial Sequence: Synthetic oligonucleotide
auagcuccuguucccgcug

SEQ ID NO: 2100430 - RNA, 19 nt, Artificial Sequence
  Description of Artificial Sequence: Synthetic oligonucleotide
cuucaguacugccaccuca

SEQ ID NO: 2100431 - RNA, 19 nt, Artificial Sequence
  Description of Artificial Sequence: Synthetic oligonucleotide
caguaucaccauguggagc

SEQ ID NO: 2100432 - RNA, 19 nt, Artificial Sequence
  Description of Artificial Sequence: Synthetic oligonucleotide
cacuggucuuaccaacccc

SEQ ID NO: 2100433 - RNA, 19 nt, Artificial Sequence
  Description of Artificial Sequence: Synthetic oligonucleotide
gggacuucagacccuccgg

SEQ ID NO: 2100434 - RNA, 19 nt, Artificial Sequence
  Description of Artificial Sequence: Synthetic oligonucleotide
gauccucauccagaaaguc

SEQ ID NO: 2100435 - RNA, 19 nt, Artificial Sequence
  Description of Artificial Sequence: Synthetic oligonucleotide
ucaagacgacaugaaugcu

SEQ ID NO: 2100436 - RNA, 19 nt, Artificial Sequence
  Description of Artificial Sequence: Synthetic oligonucleotide
augaggcuguccucugcag

SEQ ID NO: 2100437 - RNA, 19 nt, Artificial Sequence
  Description of Artificial Sequence: Synthetic oligonucleotide
gaucauguucuccagcauu

SEQ ID NO: 2100438 - RNA, 19 nt, Artificial Sequence
  Description of Artificial Sequence: Synthetic oligonucleotide
cagcacuggucuuaccaac

SEQ ID NO: 2100439 - RNA, 19 nt, Artificial Sequence
  Description of Artificial Sequence: Synthetic oligonucleotide
agagcacuguccaggacug

SEQ ID NO: 2100440 - RNA, 19 nt, Artificial Sequence
  Description of Artificial Sequence: Synthetic oligonucleotide
uccaguugccgcuccucca

SEQ ID NO: 2100441 - RNA, 19 nt, Artificial Sequence
  Description of Artificial Sequence: Synthetic oligonucleotide
gagcaagagcacuguccag

SEQ ID NO: 2100442 - RNA, 19 nt, Artificial Sequence
  Description of Artificial Sequence: Synthetic oligonucleotide
agacccuccggcuugucua

SEQ ID NO: 2100443 - RNA, 19 nt, Artificial Sequence
  Description of Artificial Sequence: Synthetic oligonucleotide
acaugaguuccgauucgag

SEQ ID NO: 2100444 - RNA, 19 nt, Artificial Sequence
  Description of Artificial Sequence: Synthetic oligonucleotide
uucacgguguucacauauu

SEQ ID NO: 2100445 - RNA, 19 nt, Artificial Sequence
  Description of Artificial Sequence: Synthetic oligonucleotide
ggucuuaccaaccccugga

SEQ ID NO: 2100446 - RNA, 19 nt, Artificial Sequence
  Description of Artificial Sequence: Synthetic oligonucleotide
aucagccaggcgugguguc

SEQ ID NO: 2100447 - RNA, 19 nt, Artificial Sequence
  Description of Artificial Sequence: Synthetic oligonucleotide
cuuugcucuuugaggacca

SEQ ID NO: 2100448 - RNA, 19 nt, Artificial Sequence
  Description of Artificial Sequence: Synthetic oligonucleotide
caggaaccaguccaccaug

SEQ ID NO: 2100449 - RNA, 19 nt, Artificial Sequence
  Description of Artificial Sequence: Synthetic oligonucleotide
aggucugcccgccuuugcu

SEQ ID NO: 2100450 - RNA, 19 nt, Artificial Sequence
  Description of Artificial Sequence: Synthetic oligonucleotide
cacgguguucacauauuga

SEQ ID NO: 2100451 - RNA, 19 nt, Artificial Sequence
  Description of Artificial Sequence: Synthetic oligonucleotide
cuccggcuugucuaucagc

SEQ ID NO: 2100452 - RNA, 19 nt, Artificial Sequence
  Description of Artificial Sequence: Synthetic oligonucleotide
gggagggacaguaaguuuc

SEQ ID NO: 2100453 - RNA, 19 nt, Artificial Sequence
  Description of Artificial Sequence: Synthetic oligonucleotide
gauucgagccugagcagca

SEQ ID NO: 2100454 - RNA, 19 nt, Artificial Sequence
  Description of Artificial Sequence: Synthetic oligonucleotide
cuggucuuaccaaccccug

SEQ ID NO: 2100455 - RNA, 19 nt, Artificial Sequence
  Description of Artificial Sequence: Synthetic oligonucleotide
gguucuuggccugaguuuc

SEQ ID NO: 2100456 - RNA, 19 nt, Artificial Sequence
  Description of Artificial Sequence: Synthetic oligonucleotide
cccuccaucccucuggccc

SEQ ID NO: 2100457 - RNA, 19 nt, Artificial Sequence
  Description of Artificial Sequence: Synthetic oligonucleotide
cuugucuaucagccuccgc

SEQ ID NO: 2100458 - RNA, 19 nt, Artificial Sequence
  Description of Artificial Sequence: Synthetic oligonucleotide
aggcgcugguccuuggacu

SEQ ID NO: 2100459 - RNA, 19 nt, Artificial Sequence
  Description of Artificial Sequence: Synthetic oligonucleotide
caugaggcuguccucugca

SEQ ID NO: 2100460 - RNA, 19 nt, Artificial Sequence
  Description of Artificial Sequence: Synthetic oligonucleotide
ucuacaccccugagcucca

SEQ ID NO: 2100461 - RNA, 19 nt, Artificial Sequence
  Description of Artificial Sequence: Synthetic oligonucleotide
ggagagguuacaguaucac

SEQ ID NO: 2100462 - RNA, 19 nt, Artificial Sequence
  Description of Artificial Sequence: Synthetic oligonucleotide
agccgauccucauccagaa

SEQ ID NO: 2100463 - RNA, 19 nt, Artificial Sequence
  Description of Artificial Sequence: Synthetic oligonucleotide
caucaaggcugggagggac

SEQ ID NO: 2100464 - RNA, 19 nt, Artificial Sequence
  Description of Artificial Sequence: Synthetic oligonucleotide
cucucuuguccuccaggug

SEQ ID NO: 2100465 - RNA, 19 nt, Artificial Sequence
  Description of Artificial Sequence: Synthetic oligonucleotide
ccgccuuugcucuuugagg

SEQ ID NO: 2100466 - RNA, 19 nt, Artificial Sequence
  Description of Artificial Sequence: Synthetic oligonucleotide
cagcaacugcuucucauga

SEQ ID NO: 2100467 - RNA, 19 nt, Artificial Sequence
  Description of Artificial Sequence: Synthetic oligonucleotide
ggaaccaguccaccaugag

SEQ ID NO: 2100468 - RNA, 19 nt, Artificial Sequence
  Description of Artificial Sequence: Synthetic oligonucleotide
ugggagggacaguaaguuu

SEQ ID NO: 2100469 - RNA, 19 nt, Artificial Sequence
  Description of Artificial Sequence: Synthetic oligonucleotide
ucuuauccaccggcuucag

SEQ ID NO: 2100470 - RNA, 19 nt, Artificial Sequence
  Description of Artificial Sequence: Synthetic oligonucleotide
cucggcugcccgcagccgc

SEQ ID NO: 2100471 - RNA, 19 nt, Artificial Sequence
  Description of Artificial Sequence: Synthetic oligonucleotide
uucaggcgggcccuccauc

SEQ ID NO: 2100472 - RNA, 19 nt, Artificial Sequence
  Description of Artificial Sequence: Synthetic oligonucleotide
cuuguggccuggagccagc

SEQ ID NO: 2100473 - RNA, 19 nt, Artificial Sequence
  Description of Artificial Sequence: Synthetic oligonucleotide
gagggucgggcccggaauc

SEQ ID NO: 2100474 - RNA, 19 nt, Artificial Sequence
  Description of Artificial Sequence: Synthetic oligonucleotide
gagccgauccucauccaga

SEQ ID NO: 2100475 - RNA, 19 nt, Artificial Sequence
  Description of Artificial Sequence: Synthetic oligonucleotide
cauccagaaagucaacaau

SEQ ID NO: 2100476 - RNA, 19 nt, Artificial Sequence
  Description of Artificial Sequence: Synthetic oligonucleotide
ccucuuaugcugaauggga

SEQ ID NO: 2100477 - RNA, 19 nt, Artificial Sequence
  Description of Artificial Sequence: Synthetic oligonucleotide
gugucggagcucuuaucca

SEQ ID NO: 2100478 - RNA, 19 nt, Artificial Sequence
  Description of Artificial Sequence: Synthetic oligonucleotide
agccagcacuggucuuacc

SEQ ID NO: 2100479 - RNA, 19 nt, Artificial Sequence
  Description of Artificial Sequence: Synthetic oligonucleotide
gucggagcucuuauccacc

SEQ ID NO: 2100480 - RNA, 19 nt, Artificial Sequence
  Description of Artificial Sequence: Synthetic oligonucleotide
ccggagccgauccucaucc

SEQ ID NO: 2100481 - RNA, 19 nt, Artificial Sequence
  Description of Artificial Sequence: Synthetic oligonucleotide
gaaugggagucaagacgac

SEQ ID NO: 2100482 - RNA, 19 nt, Artificial Sequence
  Description of Artificial Sequence: Synthetic oligonucleotide
ucaggucugcccgccuuug

SEQ ID NO: 2100483 - RNA, 19 nt, Artificial Sequence
  Description of Artificial Sequence: Synthetic oligonucleotide
cagcauuugguccucuucu

SEQ ID NO: 2100484 - RNA, 19 nt, Artificial Sequence
  Description of Artificial Sequence: Synthetic oligonucleotide
gucauucacgguguucaca

SEQ ID NO: 2100485 - RNA, 19 nt, Artificial Sequence
  Description of Artificial Sequence: Synthetic oligonucleotide
augcuggugucggagcucu

SEQ ID NO: 2100486 - RNA, 19 nt, Artificial Sequence
  Description of Artificial Sequence: Synthetic oligonucleotide
caagagcacuguccaggac

SEQ ID NO: 2100487 - RNA, 19 nt, Artificial Sequence
  Description of Artificial Sequence: Synthetic oligonucleotide
gaguuccgauucgagccug

SEQ ID NO: 2100488 - RNA, 19 nt, Artificial Sequence
  Description of Artificial Sequence: Synthetic oligonucleotide
uggugucggagcucuuauc

SEQ ID NO: 2100489 - RNA, 19 nt, Artificial Sequence
  Description of Artificial Sequence: Synthetic oligonucleotide
gggcccuccaucccucugg

SEQ ID NO: 2100490 - RNA, 19 nt, Artificial Sequence
  Description of Artificial Sequence: Synthetic oligonucleotide
gacuucagacccuccggcu

SEQ ID NO: 2100491 - RNA, 19 nt, Artificial Sequence
  Description of Artificial Sequence: Synthetic oligonucleotide
ggaaccuggacccuucagu

SEQ ID NO: 2100492 - RNA, 19 nt, Artificial Sequence
  Description of Artificial Sequence: Synthetic oligonucleotide
gucgggcccggaaucagcc

SEQ ID NO: 2100493 - RNA, 19 nt, Artificial Sequence
  Description of Artificial Sequence: Synthetic oligonucleotide
guuccgauucgagccugag

SEQ ID NO: 2100494 - RNA, 19 nt, Artificial Sequence
  Description of Artificial Sequence: Synthetic oligonucleotide
aggaaccaguccaccauga

SEQ ID NO: 2100495 - RNA, 19 nt, Artificial Sequence
  Description of Artificial Sequence: Synthetic oligonucleotide
ucucccucggcugcccgca

SEQ ID NO: 2100496 - RNA, 19 nt, Artificial Sequence
  Description of Artificial Sequence: Synthetic oligonucleotide
gggauauaguuggagugca

SEQ ID NO: 2100497 - RNA, 19 nt, Artificial Sequence
  Description of Artificial Sequence: Synthetic oligonucleotide
aggcgugguguccucuuau

SEQ ID NO: 2100498 - RNA, 19 nt, Artificial Sequence
  Description of Artificial Sequence: Synthetic oligonucleotide
gguccuuggacuuguacau

SEQ ID NO: 2100499 - RNA, 19 nt, Artificial Sequence
  Description of Artificial Sequence: Synthetic oligonucleotide
cccgccuuugcucuuugag

SEQ ID NO: 2100500 - RNA, 19 nt, Artificial Sequence
  Description of Artificial Sequence: Synthetic oligonucleotide
cagcagaaacaucaaggcu

SEQ ID NO: 2100501 - RNA, 19 nt, Artificial Sequence
  Description of Artificial Sequence: Synthetic oligonucleotide
caggcuucucucuuguccu

SEQ ID NO: 2100502 - RNA, 19 nt, Artificial Sequence
  Description of Artificial Sequence: Synthetic oligonucleotide
agacgacaugaaugcuggu

SEQ ID NO: 2100503 - RNA, 19 nt, Artificial Sequence
  Description of Artificial Sequence: Synthetic oligonucleotide
gguaccagcccugggcagc

SEQ ID NO: 2100504 - RNA, 19 nt, Artificial Sequence
  Description of Artificial Sequence: Synthetic oligonucleotide
ucccucggcugcccgcagc

SEQ ID NO: 2100505 - RNA, 19 nt, Artificial Sequence
  Description of Artificial Sequence: Synthetic oligonucleotide
ggcgugguguccucuuaug

SEQ ID NO: 2100506 - RNA, 19 nt, Artificial Sequence
  Description of Artificial Sequence: Synthetic oligonucleotide
caguacugccaccucagcu

SEQ ID NO: 2100507 - RNA, 19 nt, Artificial Sequence
  Description of Artificial Sequence: Synthetic oligonucleotide
cuggcccuuccuccuggcc

SEQ ID NO: 2100508 - RNA, 19 nt, Artificial Sequence
  Description of Artificial Sequence: Synthetic oligonucleotide
caggucugcccgccuuugc

SEQ ID NO: 2100509 - RNA, 19 nt, Artificial Sequence
  Description of Artificial Sequence: Synthetic oligonucleotide
cuuguucccggagccgauc

SEQ ID NO: 2100510 - RNA, 19 nt, Artificial Sequence
  Description of Artificial Sequence: Synthetic oligonucleotide
ccggaaucagccaggcgug

SEQ ID NO: 2100511 - RNA, 19 nt, Artificial Sequence
  Description of Artificial Sequence: Synthetic oligonucleotide
aggcgggcccuccaucccu

SEQ ID NO: 2100512 - RNA, 19 nt, Artificial Sequence
  Description of Artificial Sequence: Synthetic oligonucleotide
ccauguggagcaagagcac

SEQ ID NO: 2100513 - RNA, 19 nt, Artificial Sequence
  Description of Artificial Sequence: Synthetic oligonucleotide
cccggaaucagccaggcgu

SEQ ID NO: 2100514 - RNA, 19 nt, Artificial Sequence
  Description of Artificial Sequence: Synthetic oligonucleotide
ggagucaagacgacaugaa

SEQ ID NO: 2100515 - RNA, 19 nt, Artificial Sequence
  Description of Artificial Sequence: Synthetic oligonucleotide
guuggagugcagccugacu

SEQ ID NO: 2100516 - RNA, 19 nt, Artificial Sequence
  Description of Artificial Sequence: Synthetic oligonucleotide
ucccgcuggcggucucggg

SEQ ID NO: 2100517 - RNA, 19 nt, Artificial Sequence
  Description of Artificial Sequence: Synthetic oligonucleotide
ugcccgccuuugcucuuug

SEQ ID NO: 2100518 - RNA, 19 nt, Artificial Sequence
  Description of Artificial Sequence: Synthetic oligonucleotide
agguccaguugccgcuccu

SEQ ID NO: 2100519 - RNA, 19 nt, Artificial Sequence
  Description of Artificial Sequence: Synthetic oligonucleotide
gcucuuugaggaccagauc

SEQ ID NO: 2100520 - RNA, 19 nt, Artificial Sequence
  Description of Artificial Sequence: Synthetic oligonucleotide
ggccugaguuuccugcuuc

SEQ ID NO: 2100521 - RNA, 19 nt, Artificial Sequence
  Description of Artificial Sequence: Synthetic oligonucleotide
augcugaaugggagucaag

SEQ ID NO: 2100522 - RNA, 19 nt, Artificial Sequence
  Description of Artificial Sequence: Synthetic oligonucleotide
agccaggcgugguguccuc

SEQ ID NO: 2100523 - RNA, 19 nt, Artificial Sequence
  Description of Artificial Sequence: Synthetic oligonucleotide
ggucugcccgccuuugcuc

SEQ ID NO: 2100524 - RNA, 19 nt, Artificial Sequence
  Description of Artificial Sequence: Synthetic oligonucleotide
ugggcgucuucuccuccuu

SEQ ID NO: 2100525 - RNA, 19 nt, Artificial Sequence
  Description of Artificial Sequence: Synthetic oligonucleotide
ugcggucauucacgguguu

SEQ ID NO: 2100526 - RNA, 19 nt, Artificial Sequence
  Description of Artificial Sequence: Synthetic oligonucleotide
cgauucgagccugagcagc

SEQ ID NO: 2100527 - RNA, 19 nt, Artificial Sequence
  Description of Artificial Sequence: Synthetic oligonucleotide
gcagcucaggucugcccgc

SEQ ID NO: 2100528 - RNA, 19 nt, Artificial Sequence
  Description of Artificial Sequence: Synthetic oligonucleotide
gccuuugcucuuugaggac

SEQ ID NO: 2100529 - RNA, 19 nt, Artificial Sequence
  Description of Artificial Sequence: Synthetic oligonucleotide
accccuggagaugcacuca

SEQ ID NO: 2100530 - RNA, 19 nt, Artificial Sequence
  Description of Artificial Sequence: Synthetic oligonucleotide
agcucaggucugcccgccu

SEQ ID NO: 2100531 - RNA, 19 nt, Artificial Sequence
  Description of Artificial Sequence: Synthetic oligonucleotide
gucugcccgccuuugcucu

SEQ ID NO: 2100532 - RNA, 19 nt, Artificial Sequence
  Description of Artificial Sequence: Synthetic oligonucleotide
agggucgggcccggaauca

SEQ ID NO: 2100533 - RNA, 19 nt, Artificial Sequence
  Description of Artificial Sequence: Synthetic oligonucleotide
aguuccgauucgagccuga

SEQ ID NO: 2100534 - RNA, 19 nt, Artificial Sequence
  Description of Artificial Sequence: Synthetic oligonucleotide
cccgcagccgcuucuccag

SEQ ID NO: 2100535 - RNA, 19 nt, Artificial Sequence
  Description of Artificial Sequence: Synthetic oligonucleotide
gagcucuuauccaccggcu

SEQ ID NO: 2100536 - RNA, 19 nt, Artificial Sequence
  Description of Artificial Sequence: Synthetic oligonucleotide
ccgauucgagccugagcag

SEQ ID NO: 2100537 - RNA, 19 nt, Artificial Sequence
  Description of Artificial Sequence: Synthetic oligonucleotide
gacugcaggcuucucucuu

SEQ ID NO: 2100538 - RNA, 19 nt, Artificial Sequence
  Description of Artificial Sequence: Synthetic oligonucleotide
gagcacuguccaggacugc

SEQ ID NO: 2100539 - RNA, 19 nt, Artificial Sequence
  Description of Artificial Sequence: Synthetic oligonucleotide
gcucugguaccagcccugg

SEQ ID NO: 2100540 - RNA, 19 nt, Artificial Sequence
  Description of Artificial Sequence: Synthetic oligonucleotide
auucgagccugagcagcaa

SEQ ID NO: 2100541 - RNA, 19 nt, Artificial Sequence
  Description of Artificial Sequence: Synthetic oligonucleotide
caaccccuggagaugcacu

SEQ ID NO: 2100542 - RNA, 19 nt, Artificial Sequence
  Description of Artificial Sequence: Synthetic oligonucleotide
agcuuguggccuggagcca

SEQ ID NO: 2100543 - RNA, 19 nt, Artificial Sequence
  Description of Artificial Sequence: Synthetic oligonucleotide
gggcaucuagcugacucuc

SEQ ID NO: 2100544 - RNA, 19 nt, Artificial Sequence
  Description of Artificial Sequence: Synthetic oligonucleotide
caccaugaggcuguccucu

SEQ ID NO: 2100545 - RNA, 19 nt, Artificial Sequence
  Description of Artificial Sequence: Synthetic oligonucleotide
uggagccaaucagcagaaa

SEQ ID NO: 2100546 - RNA, 19 nt, Artificial Sequence
  Description of Artificial Sequence: Synthetic oligonucleotide
gguggaaccuggacccuuc

SEQ ID NO: 2100547 - RNA, 19 nt, Artificial Sequence
  Description of Artificial Sequence: Synthetic oligonucleotide
caucuagcugacucucaau

SEQ ID NO: 2100548 - RNA, 19 nt, Artificial Sequence
  Description of Artificial Sequence: Synthetic oligonucleotide
guucacauauugacucaau

SEQ ID NO: 2100549 - RNA, 19 nt, Artificial Sequence
  Description of Artificial Sequence: Synthetic oligonucleotide
ccaguccaccaugaggcug

SEQ ID NO: 2100550 - RNA, 19 nt, Artificial Sequence
  Description of Artificial Sequence: Synthetic oligonucleotide
cugggagggacaguaaguu

SEQ ID NO: 2100551 - RNA, 19 nt, Artificial Sequence
  Description of Artificial Sequence: Synthetic oligonucleotide
cauucacgguguucacaua

SEQ ID NO: 2100552 - RNA, 19 nt, Artificial Sequence
  Description of Artificial Sequence: Synthetic oligonucleotide
ggagaugcacucaggcucu

SEQ ID NO: 2100553 - RNA, 19 nt, Artificial Sequence
  Description of Artificial Sequence: Synthetic oligonucleotide
cgacaugaaugcugguguc

SEQ ID NO: 2100554 - RNA, 19 nt, Artificial Sequence
  Description of Artificial Sequence: Synthetic oligonucleotide
ccuccggcuugucuaucag

SEQ ID NO: 2100555 - RNA, 19 nt, Artificial Sequence
  Description of Artificial Sequence: Synthetic oligonucleotide
cuucugguucuuggccuga

SEQ ID NO: 2100556 - RNA, 19 nt, Artificial Sequence
  Description of Artificial Sequence: Synthetic oligonucleotide
gugggcgucuucuccuccu

SEQ ID NO: 2100557 - RNA, 19 nt, Artificial Sequence
  Description of Artificial Sequence: Synthetic oligonucleotide
cuacaccccugagcuccag

SEQ ID NO: 2100558 - RNA, 19 nt, Artificial Sequence
  Description of Artificial Sequence: Synthetic oligonucleotide
ccuucaguacugccaccuc

SEQ ID NO: 2100559 - RNA, 19 nt, Artificial Sequence
  Description of Artificial Sequence: Synthetic oligonucleotide
gguguccucuuaugcugaa

SEQ ID NO: 2100560 - RNA, 19 nt, Artificial Sequence
  Description of Artificial Sequence: Synthetic oligonucleotide
gcccggaaucagccaggcg

SEQ ID NO: 2100561 - RNA, 19 nt, Artificial Sequence
  Description of Artificial Sequence: Synthetic oligonucleotide
cuggugucggagcucuuau

SEQ ID NO: 2100562 - RNA, 19 nt, Artificial Sequence
  Description of Artificial Sequence: Synthetic oligonucleotide
gacccuccggcuugucuau

SEQ ID NO: 2100563 - RNA, 19 nt, Artificial Sequence
  Description of Artificial Sequence: Synthetic oligonucleotide
ggagggacaguaaguuucu

SEQ ID NO: 2100564 - RNA, 19 nt, Artificial Sequence
  Description of Artificial Sequence: Synthetic oligonucleotide
cugcaggcuucucucuugu

SEQ ID NO: 2100565 - RNA, 19 nt, Artificial Sequence
  Description of Artificial Sequence: Synthetic oligonucleotide
ccaaccccuggagaugcac

SEQ ID NO: 2100566 - RNA, 19 nt, Artificial Sequence
  Description of Artificial Sequence: Synthetic oligonucleotide
guaucaccauguggagcaa

SEQ ID NO: 2100567 - RNA, 19 nt, Artificial Sequence
  Description of Artificial Sequence: Synthetic oligonucleotide
gcagccugacuggagaggu

SEQ ID NO: 2100568 - RNA, 19 nt, Artificial Sequence
  Description of Artificial Sequence: Synthetic oligonucleotide
gggucgggcccggaaucag

SEQ ID NO: 2100569 - RNA, 19 nt, Artificial Sequence
  Description of Artificial Sequence: Synthetic oligonucleotide
cggagcucuuauccaccgg

SEQ ID NO: 2100570 - RNA, 19 nt, Artificial Sequence
  Description of Artificial Sequence: Synthetic oligonucleotide
gcuggugucggagcucuua

SEQ ID NO: 2100571 - RNA, 19 nt, Artificial Sequence
  Description of Artificial Sequence: Synthetic oligonucleotide
ggagggucgggcccggaau

SEQ ID NO: 2100572 - RNA, 19 nt, Artificial Sequence
  Description of Artificial Sequence: Synthetic oligonucleotide
gagguggaaccuggacccu

SEQ ID NO: 2100573 - RNA, 19 nt, Artificial Sequence
  Description of Artificial Sequence: Synthetic oligonucleotide
cccuccggcuugucuauca

SEQ ID NO: 2100574 - RNA, 19 nt, Artificial Sequence
  Description of Artificial Sequence: Synthetic oligonucleotide
ggaaucagccaggcguggu

SEQ ID NO: 2100575 - RNA, 19 nt, Artificial Sequence
  Description of Artificial Sequence: Synthetic oligonucleotide
guaccagcccugggcagcu

SEQ ID NO: 2100576 - RNA, 19 nt, Artificial Sequence
  Description of Artificial Sequence: Synthetic oligonucleotide
caggcgugguguccucuua

SEQ ID NO: 2100577 - RNA, 19 nt, Artificial Sequence
  Description of Artificial Sequence: Synthetic oligonucleotide
gcucuggcuggagccaauc

SEQ ID NO: 2100578 - RNA, 19 nt, Artificial Sequence
  Description of Artificial Sequence: Synthetic oligonucleotide
uccaucccucuggcccuuc

SEQ ID NO: 2100579 - RNA, 19 nt, Artificial Sequence
  Description of Artificial Sequence: Synthetic oligonucleotide
cuucaggcgggcccuccau

SEQ ID NO: 2100580 - RNA, 19 nt, Artificial Sequence
  Description of Artificial Sequence: Synthetic oligonucleotide
cggaaucagccaggcgugg

SEQ ID NO: 2100581 - RNA, 19 nt, Artificial Sequence
  Description of Artificial Sequence: Synthetic oligonucleotide
cucaggucugcccgccuuu

SEQ ID NO: 2100582 - RNA, 19 nt, Artificial Sequence
  Description of Artificial Sequence: Synthetic oligonucleotide
gagggacaguaaguuucuu

SEQ ID NO: 2100583 - RNA, 19 nt, Artificial Sequence
  Description of Artificial Sequence: Synthetic oligonucleotide
cacugcggucauucacggu

SEQ ID NO: 2100584 - RNA, 19 nt, Artificial Sequence
  Description of Artificial Sequence: Synthetic oligonucleotide
gccgauccucauccagaaa

SEQ ID NO: 2100585 - RNA, 19 nt, Artificial Sequence
  Description of Artificial Sequence: Synthetic oligonucleotide
uaccagcccugggcagcuc

SEQ ID NO: 2100586 - RNA, 19 nt, Artificial Sequence
  Description of Artificial Sequence: Synthetic oligonucleotide
gccuuccugagagguggaa

SEQ ID NO: 2100587 - RNA, 19 nt, Artificial Sequence
  Description of Artificial Sequence: Synthetic oligonucleotide
gcucaggucugcccgccuu

SEQ ID NO: 2100588 - RNA, 19 nt, Artificial Sequence
  Description of Artificial Sequence: Synthetic oligonucleotide
ggccuuccugagaggugga

SEQ ID NO: 2100589 - RNA, 19 nt, Artificial Sequence
  Description of Artificial Sequence: Synthetic oligonucleotide
gagaugcacucaggcucuu

SEQ ID NO: 2100590 - RNA, 19 nt, Artificial Sequence
  Description of Artificial Sequence: Synthetic oligonucleotide
gcccgccuuugcucuuuga

SEQ ID NO: 2100591 - RNA, 19 nt, Artificial Sequence
  Description of Artificial Sequence: Synthetic oligonucleotide
cuguucccgcuggcggucu

SEQ ID NO: 2100592 - RNA, 19 nt, Artificial Sequence
  Description of Artificial Sequence: Synthetic oligonucleotide
cgggcccuccaucccucug

SEQ ID NO: 2100593 - RNA, 19 nt, Artificial Sequence
  Description of Artificial Sequence: Synthetic oligonucleotide
ccaggcgugguguccucuu

SEQ ID NO: 2100594 - RNA, 19 nt, Artificial Sequence
  Description of Artificial Sequence: Synthetic oligonucleotide
cggagccgauccucaucca

SEQ ID NO: 2100595 - RNA, 19 nt, Artificial Sequence
  Description of Artificial Sequence: Synthetic oligonucleotide
gcgggcccuccaucccucu

SEQ ID NO: 2100596 - RNA, 19 nt, Artificial Sequence
  Description of Artificial Sequence: Synthetic oligonucleotide
cuccaucccucuggcccuu

SEQ ID NO: 2100597 - RNA, 19 nt, Artificial Sequence
  Description of Artificial Sequence: Synthetic oligonucleotide
cgcugguccuuggacuugu

SEQ ID NO: 2100598 - RNA, 19 nt, Artificial Sequence
  Description of Artificial Sequence: Synthetic oligonucleotide
uaaauuguagaaaaguuug

SEQ ID NO: 2100599 - RNA, 19 nt, Artificial Sequence
  Description of Artificial Sequence: Synthetic oligonucleotide
auaacaaaaucacaucugc

SEQ ID NO: 2100600 - RNA, 19 nt, Artificial Sequence
  Description of Artificial Sequence: Synthetic oligonucleotide
uauagcgucucacugaugg

SEQ ID NO: 2100601 - RNA, 19 nt, Artificial Sequence
  Description of Artificial Sequence: Synthetic oligonucleotide
gaaacuauaaucaaucccc

SEQ ID NO: 2100602 - RNA, 19 nt, Artificial Sequence
  Description of Artificial Sequence: Synthetic oligonucleotide
aacauccucagauucaaac

SEQ ID NO: 2100603 - RNA, 19 nt, Artificial Sequence
  Description of Artificial Sequence: Synthetic oligonucleotide
aaaaguucuuuauggacuc

SEQ ID NO: 2100604 - RNA, 19 nt, Artificial Sequence
  Description of Artificial Sequence: Synthetic oligonucleotide
ugaauacaaacucagguca

SEQ ID NO: 2100605 - RNA, 19 nt, Artificial Sequence
  Description of Artificial Sequence: Synthetic oligonucleotide
uuucucauuggcaugaacc

SEQ ID NO: 2100606 - RNA, 19 nt, Artificial Sequence
  Description of Artificial Sequence: Synthetic oligonucleotide
ucuucaacauuucaaaaug

SEQ ID NO: 2100607 - RNA, 19 nt, Artificial Sequence
  Description of Artificial Sequence: Synthetic oligonucleotide
acuauaaucaauccccuuc

SEQ ID NO: 2100608 - RNA, 19 nt, Artificial Sequence
  Description of Artificial Sequence: Synthetic oligonucleotide
acgauaaaagucuuucacc

SEQ ID NO: 2100609 - RNA, 19 nt, Artificial Sequence
  Description of Artificial Sequence: Synthetic oligonucleotide
aacuaucuuggcaacaucc

SEQ ID NO: 2100610 - RNA, 19 nt, Artificial Sequence
  Description of Artificial Sequence: Synthetic oligonucleotide
aauguugguguacaaacug

SEQ ID NO: 2100611 - RNA, 19 nt, Artificial Sequence
  Description of Artificial Sequence: Synthetic oligonucleotide
cagauaugcacauagaaug

SEQ ID NO: 2100612 - RNA, 19 nt, Artificial Sequence
  Description of Artificial Sequence: Synthetic oligonucleotide
uguugaaauugauugaagc

SEQ ID NO: 2100613 - RNA, 19 nt, Artificial Sequence
  Description of Artificial Sequence: Synthetic oligonucleotide
aauuuacacgauaaaaguc

SEQ ID NO: 2100614 - RNA, 19 nt, Artificial Sequence
  Description of Artificial Sequence: Synthetic oligonucleotide
aaucaauccccuucuuggc

SEQ ID NO: 2100615 - RNA, 19 nt, Artificial Sequence
  Description of Artificial Sequence: Synthetic oligonucleotide
auuguagaaaaguuugguc

SEQ ID NO: 2100616 - RNA, 19 nt, Artificial Sequence
  Description of Artificial Sequence: Synthetic oligonucleotide
aauagugccaaacugggua

SEQ ID NO: 2100617 - RNA, 19 nt, Artificial Sequence
  Description of Artificial Sequence: Synthetic oligonucleotide
aaaguuuggucacuguuug

SEQ ID NO: 2100618 - RNA, 19 nt, Artificial Sequence
  Description of Artificial Sequence: Synthetic oligonucleotide
auagaaugcuuucaggauc

SEQ ID NO: 2100619 - RNA, 19 nt, Artificial Sequence
  Description of Artificial Sequence: Synthetic oligonucleotide
uucaacauuucaaaaugcc

SEQ ID NO: 2100620 - RNA, 19 nt, Artificial Sequence
  Description of Artificial Sequence: Synthetic oligonucleotide
acuucuuuggauuagguaa

SEQ ID NO: 2100621 - RNA, 19 nt, Artificial Sequence
  Description of Artificial Sequence: Synthetic oligonucleotide
guugaaauugauugaagcc

SEQ ID NO: 2100622 - RNA, 19 nt, Artificial Sequence
  Description of Artificial Sequence: Synthetic oligonucleotide
acgaagggaaacuauaauc

SEQ ID NO: 2100623 - RNA, 19 nt, Artificial Sequence
  Description of Artificial Sequence: Synthetic oligonucleotide
agaugugcguuucagaaag

SEQ ID NO: 2100624 - RNA, 19 nt, Artificial Sequence
  Description of Artificial Sequence: Synthetic oligonucleotide
cuaauagugccaaacuggg

SEQ ID NO: 2100625 - RNA, 19 nt, Artificial Sequence
  Description of Artificial Sequence: Synthetic oligonucleotide
aaucugaaucugcuaauag

SEQ ID NO: 2100626 - RNA, 19 nt, Artificial Sequence
  Description of Artificial Sequence: Synthetic oligonucleotide
uuuauaacaaaaucacauc

SEQ ID NO: 2100627 - RNA, 19 nt, Artificial Sequence
  Description of Artificial Sequence: Synthetic oligonucleotide
aaagugggccuuuauaaca

SEQ ID NO: 2100628 - RNA, 19 nt, Artificial Sequence
  Description of Artificial Sequence: Synthetic oligonucleotide
ugaaauugauugaagccug

SEQ ID NO: 2100629 - RNA, 19 nt, Artificial Sequence
  Description of Artificial Sequence: Synthetic oligonucleotide
ucugcaacuaucuuggcaa

SEQ ID NO: 2100630 - RNA, 19 nt, Artificial Sequence
  Description of Artificial Sequence: Synthetic oligonucleotide
ugaaucugcuaauagugcc

SEQ ID NO: 2100631 - RNA, 19 nt, Artificial Sequence
  Description of Artificial Sequence: Synthetic oligonucleotide
uuuccuuccucuugaaccg

SEQ ID NO: 2100632 - RNA, 19 nt, Artificial Sequence
  Description of Artificial Sequence: Synthetic oligonucleotide
ugaaucuugaauacaccug

SEQ ID NO: 2100633 - RNA, 19 nt, Artificial Sequence
  Description of Artificial Sequence: Synthetic oligonucleotide
aauacaccuguugaaauug

SEQ ID NO: 2100634 - RNA, 19 nt, Artificial Sequence
  Description of Artificial Sequence: Synthetic oligonucleotide
acauagaaugcuuucagga

SEQ ID NO: 2100635 - RNA, 19 nt, Artificial Sequence
  Description of Artificial Sequence: Synthetic oligonucleotide
ugauuauagcgucucacug

SEQ ID NO: 2100636 - RNA, 19 nt, Artificial Sequence
  Description of Artificial Sequence: Synthetic oligonucleotide
aagaccaacgaagggaaac

SEQ ID NO: 2100637 - RNA, 19 nt, Artificial Sequence
  Description of Artificial Sequence: Synthetic oligonucleotide
uugaaucuugaauacaccu

SEQ ID NO: 2100638 - RNA, 19 nt, Artificial Sequence
  Description of Artificial Sequence: Synthetic oligonucleotide
gguggcauaaauuuacacg

SEQ ID NO: 2100639 - RNA, 19 nt, Artificial Sequence
  Description of Artificial Sequence: Synthetic oligonucleotide
aaaagguaguuguccauug

SEQ ID NO: 2100640 - RNA, 19 nt, Artificial Sequence
  Description of Artificial Sequence: Synthetic oligonucleotide
aauuguagaaaaguuuggu

SEQ ID NO: 2100641 - RNA, 19 nt, Artificial Sequence
  Description of Artificial Sequence: Synthetic oligonucleotide
aaauuguagaaaaguuugg

SEQ ID NO: 2100642 - RNA, 19 nt, Artificial Sequence
  Description of Artificial Sequence: Synthetic oligonucleotide
ugcuaauagugccaaacug

SEQ ID NO: 2100643 - RNA, 19 nt, Artificial Sequence
  Description of Artificial Sequence: Synthetic oligonucleotide
aaacagcgagucuuccugc

SEQ ID NO: 2100644 - RNA, 19 nt, Artificial Sequence
  Description of Artificial Sequence: Synthetic oligonucleotide
ugcaccugguaaaauaaag

SEQ ID NO: 2100645 - RNA, 19 nt, Artificial Sequence
  Description of Artificial Sequence: Synthetic oligonucleotide
ccugguaaaauaaaguggg

SEQ ID NO: 2100646 - RNA, 19 nt, Artificial Sequence
  Description of Artificial Sequence: Synthetic oligonucleotide
uuugaaucuugaauacacc

SEQ ID NO: 2100647 - RNA, 19 nt, Artificial Sequence
  Description of Artificial Sequence: Synthetic oligonucleotide
ugguaaaauaaagugggcc

SEQ ID NO: 2100648 - RNA, 19 nt, Artificial Sequence
  Description of Artificial Sequence: Synthetic oligonucleotide
cuuuauggacucuuucugg

SEQ ID NO: 2100649 - RNA, 19 nt, Artificial Sequence
  Description of Artificial Sequence: Synthetic oligonucleotide
uguagaaaaguuuggucac

SEQ ID NO: 2100650 - RNA, 19 nt, Artificial Sequence
  Description of Artificial Sequence: Synthetic oligonucleotide
gaagccugaauacaaacuc

SEQ ID NO: 2100651 - RNA, 19 nt, Artificial Sequence
  Description of Artificial Sequence: Synthetic oligonucleotide
gaaacagcgagucuuccug

SEQ ID NO: 2100652 - RNA, 19 nt, Artificial Sequence
  Description of Artificial Sequence: Synthetic oligonucleotide
uuucacuguggacacaggc

SEQ ID NO: 2100653 - RNA, 19 nt, Artificial Sequence
  Description of Artificial Sequence: Synthetic oligonucleotide
uugauugaagccugaauac

SEQ ID NO: 2100654 - RNA, 19 nt, Artificial Sequence
  Description of Artificial Sequence: Synthetic oligonucleotide
auagaugugcguuucagaa

SEQ ID NO: 2100655 - RNA, 19 nt, Artificial Sequence
  Description of Artificial Sequence: Synthetic oligonucleotide
aaacggaacauuccauucu

SEQ ID NO: 2100656 - RNA, 19 nt, Artificial Sequence
  Description of Artificial Sequence: Synthetic oligonucleotide
guaaaguagucauagaugu

SEQ ID NO: 2100657 - RNA, 19 nt, Artificial Sequence
  Description of Artificial Sequence: Synthetic oligonucleotide
aacuggguaaaguagucau

SEQ ID NO: 2100658 - RNA, 19 nt, Artificial Sequence
  Description of Artificial Sequence: Synthetic oligonucleotide
auaaucaauccccuucuug

SEQ ID NO: 2100659 - RNA, 19 nt, Artificial Sequence
  Description of Artificial Sequence: Synthetic oligonucleotide
uuucugguggcauaaauuu

SEQ ID NO: 2100660 - RNA, 19 nt, Artificial Sequence
  Description of Artificial Sequence: Synthetic oligonucleotide
uguuggaguguuuugcccc

SEQ ID NO: 2100661 - RNA, 19 nt, Artificial Sequence
  Description of Artificial Sequence: Synthetic oligonucleotide
ugucaacagacuucuuugg

SEQ ID NO: 2100662 - RNA, 19 nt, Artificial Sequence
  Description of Artificial Sequence: Synthetic oligonucleotide
cuucaacauuucaaaaugc

SEQ ID NO: 2100663 - RNA, 19 nt, Artificial Sequence
  Description of Artificial Sequence: Synthetic oligonucleotide
caccugguaaaauaaagug

SEQ ID NO: 2100664 - RNA, 19 nt, Artificial Sequence
  Description of Artificial Sequence: Synthetic oligonucleotide
uuuauggacucuuucuggu

SEQ ID NO: 2100665 - RNA, 19 nt, Artificial Sequence
  Description of Artificial Sequence: Synthetic oligonucleotide
uucucauuggcaugaacca

SEQ ID NO: 2100666 - RNA, 19 nt, Artificial Sequence
  Description of Artificial Sequence: Synthetic oligonucleotide
gauuagguaagaccaacga

SEQ ID NO: 2100667 - RNA, 19 nt, Artificial Sequence
  Description of Artificial Sequence: Synthetic oligonucleotide
cacgauaaaagucuuucac

SEQ ID NO: 2100668 - RNA, 19 nt, Artificial Sequence
  Description of Artificial Sequence: Synthetic oligonucleotide
ggaaacuauaaucaauccc

SEQ ID NO: 2100669 - RNA, 19 nt, Artificial Sequence
  Description of Artificial Sequence: Synthetic oligonucleotide
gauuauagcgucucacuga

SEQ ID NO: 2100670 - RNA, 19 nt, Artificial Sequence
  Description of Artificial Sequence: Synthetic oligonucleotide
uguccauuguuucugcaac

SEQ ID NO: 2100671 - RNA, 19 nt, Artificial Sequence
  Description of Artificial Sequence: Synthetic oligonucleotide
gacaaucugaaucugcuaa

SEQ ID NO: 2100672 - RNA, 19 nt, Artificial Sequence
  Description of Artificial Sequence: Synthetic oligonucleotide
guuugaaucuugaauacac

SEQ ID NO: 2100673 - RNA, 19 nt, Artificial Sequence
  Description of Artificial Sequence: Synthetic oligonucleotide
aguguuuugccccucuucu

SEQ ID NO: 2100674 - RNA, 19 nt, Artificial Sequence
  Description of Artificial Sequence: Synthetic oligonucleotide
uuggacuugcgucaccucc

SEQ ID NO: 2100675 - RNA, 19 nt, Artificial Sequence
  Description of Artificial Sequence: Synthetic oligonucleotide
ucuuucacuguggacacag

SEQ ID NO: 2100676 - RNA, 19 nt, Artificial Sequence
  Description of Artificial Sequence: Synthetic oligonucleotide
aacagcgagucuuccugcg

SEQ ID NO: 2100677 - RNA, 19 nt, Artificial Sequence
  Description of Artificial Sequence: Synthetic oligonucleotide
accugguaaaauaaagugg

SEQ ID NO: 2100678 - RNA, 19 nt, Artificial Sequence
  Description of Artificial Sequence: Synthetic oligonucleotide
uguugguguacaaacuggu

SEQ ID NO: 2100679 - RNA, 19 nt, Artificial Sequence
  Description of Artificial Sequence: Synthetic oligonucleotide
ucugcuaauagugccaaac

SEQ ID NO: 2100680 - RNA, 19 nt, Artificial Sequence
  Description of Artificial Sequence: Synthetic oligonucleotide
uccucuugaaccgauauuc

SEQ ID NO: 2100681 - RNA, 19 nt, Artificial Sequence
  Description of Artificial Sequence: Synthetic oligonucleotide
aucugaaucugcuaauagu

SEQ ID NO: 2100682 - RNA, 19 nt, Artificial Sequence
  Description of Artificial Sequence: Synthetic oligonucleotide
ucagaaaguguugaaggca

SEQ ID NO: 2100683 - RNA, 19 nt, Artificial Sequence
  Description of Artificial Sequence: Synthetic oligonucleotide
uuacugucauugauuucgg

SEQ ID NO: 2100684 - RNA, 19 nt, Artificial Sequence
  Description of Artificial Sequence: Synthetic oligonucleotide
uugauuucggucacuucug

SEQ ID NO: 2100685 - RNA, 19 nt, Artificial Sequence
  Description of Artificial Sequence: Synthetic oligonucleotide
gcuaauagugccaaacugg

SEQ ID NO: 2100686 - RNA, 19 nt, Artificial Sequence
  Description of Artificial Sequence: Synthetic oligonucleotide
aacgaagggaaacuauaau

SEQ ID NO: 2100687 - RNA, 19 nt, Artificial Sequence
  Description of Artificial Sequence: Synthetic oligonucleotide
uaaagugggccuuuauaac

SEQ ID NO: 2100688 - RNA, 19 nt, Artificial Sequence
  Description of Artificial Sequence: Synthetic oligonucleotide
uaaaguagucauagaugug

SEQ ID NO: 2100689 - RNA, 19 nt, Artificial Sequence
  Description of Artificial Sequence: Synthetic oligonucleotide
uacacgauaaaagucuuuc

SEQ ID NO: 2100690 - RNA, 19 nt, Artificial Sequence
  Description of Artificial Sequence: Synthetic oligonucleotide
gaaacggaacauuccauuc

SEQ ID NO: 2100691 - RNA, 19 nt, Artificial Sequence
  Description of Artificial Sequence: Synthetic oligonucleotide
cacauagaaugcuuucagg

SEQ ID NO: 2100692 - RNA, 19 nt, Artificial Sequence
  Description of Artificial Sequence: Synthetic oligonucleotide
cugaaucugcuaauagugc

SEQ ID NO: 2100693 - RNA, 19 nt, Artificial Sequence
  Description of Artificial Sequence: Synthetic oligonucleotide
auuauagcgucucacugau

SEQ ID NO: 2100694 - RNA, 19 nt, Artificial Sequence
  Description of Artificial Sequence: Synthetic oligonucleotide
uacaaacucaggucaggag

SEQ ID NO: 2100695 - RNA, 19 nt, Artificial Sequence
  Description of Artificial Sequence: Synthetic oligonucleotide
ugauuuucgucucuccaaa

SEQ ID NO: 2100696 - RNA, 19 nt, Artificial Sequence
  Description of Artificial Sequence: Synthetic oligonucleotide
guuaagacuuccuuccuuc

SEQ ID NO: 2100697 - RNA, 19 nt, Artificial Sequence
  Description of Artificial Sequence: Synthetic oligonucleotide
acaaacuggugugggaccc

SEQ ID NO: 2100698 - RNA, 19 nt, Artificial Sequence
  Description of Artificial Sequence: Synthetic oligonucleotide
ugugcguuucagaaagugu

SEQ ID NO: 2100699 - RNA, 19 nt, Artificial Sequence
  Description of Artificial Sequence: Synthetic oligonucleotide
cucauuggcaugaaccaac

SEQ ID NO: 2100700 - RNA, 19 nt, Artificial Sequence
  Description of Artificial Sequence: Synthetic oligonucleotide
aagacuuccuuccuucuuu

SEQ ID NO: 2100701 - RNA, 19 nt, Artificial Sequence
  Description of Artificial Sequence: Synthetic oligonucleotide
ugaauacaccuguugaaau

SEQ ID NO: 2100702 - RNA, 19 nt, Artificial Sequence
  Description of Artificial Sequence: Synthetic oligonucleotide
uuucggucacuucugauuu

SEQ ID NO: 2100703 - RNA, 19 nt, Artificial Sequence
  Description of Artificial Sequence: Synthetic oligonucleotide
uuuucccagagcgugcagg

SEQ ID NO: 2100704 - RNA, 19 nt, Artificial Sequence
  Description of Artificial Sequence: Synthetic oligonucleotide
gaaccgauauuccaucuuc

SEQ ID NO: 2100705 - RNA, 19 nt, Artificial Sequence
  Description of Artificial Sequence: Synthetic oligonucleotide
ucugauuauagcgucucac

SEQ ID NO: 2100706 - RNA, 19 nt, Artificial Sequence
  Description of Artificial Sequence: Synthetic oligonucleotide
ucauagaugugcguuucag

SEQ ID NO: 2100707 - RNA, 19 nt, Artificial Sequence
  Description of Artificial Sequence: Synthetic oligonucleotide
uuccaguccguuuacuucu

SEQ ID NO: 2100708 - RNA, 19 nt, Artificial Sequence
  Description of Artificial Sequence: Synthetic oligonucleotide
uucagcgccagauucggcu

SEQ ID NO: 2100709 - RNA, 19 nt, Artificial Sequence
  Description of Artificial Sequence: Synthetic oligonucleotide
ugcguuucagaaaguguug

SEQ ID NO: 2100710 - RNA, 19 nt, Artificial Sequence
  Description of Artificial Sequence: Synthetic oligonucleotide
cccguuucugauuauagcg

SEQ ID NO: 2100711 - RNA, 19 nt, Artificial Sequence
  Description of Artificial Sequence: Synthetic oligonucleotide
augcacauagaaugcuuuc

SEQ ID NO: 2100712 - RNA, 19 nt, Artificial Sequence
  Description of Artificial Sequence: Synthetic oligonucleotide
aagguaguuguccauuguu

SEQ ID NO: 2100713 - RNA, 19 nt, Artificial Sequence
  Description of Artificial Sequence: Synthetic oligonucleotide
ugaaacggaacauuccauu

SEQ ID NO: 2100714 - RNA, 19 nt, Artificial Sequence
  Description of Artificial Sequence: Synthetic oligonucleotide
uaugcacauagaaugcuuu

SEQ ID NO: 2100715 - RNA, 19 nt, Artificial Sequence
  Description of Artificial Sequence: Synthetic oligonucleotide
uguacaaacugguguggga

SEQ ID NO: 2100716 - RNA, 19 nt, Artificial Sequence
  Description of Artificial Sequence: Synthetic oligonucleotide
aaauaaagugggccuuuau

SEQ ID NO: 2100717 - RNA, 19 nt, Artificial Sequence
  Description of Artificial Sequence: Synthetic oligonucleotide
ccagauucggcuuugcggg

SEQ ID NO: 2100718 - RNA, 19 nt, Artificial Sequence
  Description of Artificial Sequence: Synthetic oligonucleotide
ugauugaagccugaauaca

SEQ ID NO: 2100719 - RNA, 19 nt, Artificial Sequence
  Description of Artificial Sequence: Synthetic oligonucleotide
auggacucuuucugguggc

SEQ ID NO: 2100720 - RNA, 19 nt, Artificial Sequence
  Description of Artificial Sequence: Synthetic oligonucleotide
ucuuggcuagcuucuuccg

SEQ ID NO: 2100721 - RNA, 19 nt, Artificial Sequence
  Description of Artificial Sequence: Synthetic oligonucleotide
aacggaacauuccauucuu

SEQ ID NO: 2100722 - RNA, 19 nt, Artificial Sequence
  Description of Artificial Sequence: Synthetic oligonucleotide
cuccuucugaaacagcgag

SEQ ID NO: 2100723 - RNA, 19 nt, Artificial Sequence
  Description of Artificial Sequence: Synthetic oligonucleotide
ucugcuauuuccaguccgu

SEQ ID NO: 2100724 - RNA, 19 nt, Artificial Sequence
  Description of Artificial Sequence: Synthetic oligonucleotide
uuuacacgauaaaagucuu

SEQ ID NO: 2100725 - RNA, 19 nt, Artificial Sequence
  Description of Artificial Sequence: Synthetic oligonucleotide
uuggcuagcuucuuccgga

SEQ ID NO: 2100726 - RNA, 19 nt, Artificial Sequence
  Description of Artificial Sequence: Synthetic oligonucleotide
uuauggacucuuucuggug

SEQ ID NO: 2100727 - RNA, 19 nt, Artificial Sequence
  Description of Artificial Sequence: Synthetic oligonucleotide
aaacuauaaucaauccccu

SEQ ID NO: 2100728 - RNA, 19 nt, Artificial Sequence
  Description of Artificial Sequence: Synthetic oligonucleotide
cuugaaccgauauuccauc

SEQ ID NO: 2100729 - RNA, 19 nt, Artificial Sequence
  Description of Artificial Sequence: Synthetic oligonucleotide
gaucacuggucccucuucc

SEQ ID NO: 2100730 - RNA, 19 nt, Artificial Sequence
  Description of Artificial Sequence: Synthetic oligonucleotide
ucugaaacagcgagucuuc

SEQ ID NO: 2100731 - RNA, 19 nt, Artificial Sequence
  Description of Artificial Sequence: Synthetic oligonucleotide
uccguuuacuucuggacaa

SEQ ID NO: 2100732 - RNA, 19 nt, Artificial Sequence
  Description of Artificial Sequence: Synthetic oligonucleotide
ucauuggcaugaaccaaca

SEQ ID NO: 2100733 - RNA, 19 nt, Artificial Sequence
  Description of Artificial Sequence: Synthetic oligonucleotide
caucagucucaucaguggc

SEQ ID NO: 2100734 - RNA, 19 nt, Artificial Sequence
  Description of Artificial Sequence: Synthetic oligonucleotide
ugggccuuuauaacaaaau

SEQ ID NO: 2100735 - RNA, 19 nt, Artificial Sequence
  Description of Artificial Sequence: Synthetic oligonucleotide
cuguugaaauugauugaag

SEQ ID NO: 2100736 - RNA, 19 nt, Artificial Sequence
  Description of Artificial Sequence: Synthetic oligonucleotide
cucugcuauuuccaguccg

SEQ ID NO: 2100737 - RNA, 19 nt, Artificial Sequence
  Description of Artificial Sequence: Synthetic oligonucleotide
cugguaaaauaaagugggc

SEQ ID NO: 2100738 - RNA, 19 nt, Artificial Sequence
  Description of Artificial Sequence: Synthetic oligonucleotide
cuucuuucacuguggacac

SEQ ID NO: 2100739 - RNA, 19 nt, Artificial Sequence
  Description of Artificial Sequence: Synthetic oligonucleotide
gaagggaaacuauaaucaa

SEQ ID NO: 2100740 - RNA, 19 nt, Artificial Sequence
  Description of Artificial Sequence: Synthetic oligonucleotide
ugaaacagcgagucuuccu

SEQ ID NO: 2100741 - RNA, 19 nt, Artificial Sequence
  Description of Artificial Sequence: Synthetic oligonucleotide
cuuggcuagcuucuuccgg

SEQ ID NO: 2100742 - RNA, 19 nt, Artificial Sequence
  Description of Artificial Sequence: Synthetic oligonucleotide
auguugguguacaaacugg

SEQ ID NO: 2100743 - RNA, 19 nt, Artificial Sequence
  Description of Artificial Sequence: Synthetic oligonucleotide
aaucacaucugcccagaua

SEQ ID NO: 2100744 - RNA, 19 nt, Artificial Sequence
  Description of Artificial Sequence: Synthetic oligonucleotide
gucacuucugauuuucguc

SEQ ID NO: 2100745 - RNA, 19 nt, Artificial Sequence
  Description of Artificial Sequence: Synthetic oligonucleotide
uugaaacggaacauuccau

SEQ ID NO: 2100746 - RNA, 19 nt, Artificial Sequence
  Description of Artificial Sequence: Synthetic oligonucleotide
uaguuguccauuguuucug

SEQ ID NO: 2100747 - RNA, 19 nt, Artificial Sequence
  Description of Artificial Sequence: Synthetic oligonucleotide
aagggaaacuauaaucaau

SEQ ID NO: 2100748 - RNA, 19 nt, Artificial Sequence
  Description of Artificial Sequence: Synthetic oligonucleotide
aacuauaaucaauccccuu

SEQ ID NO: 2100749 - RNA, 19 nt, Artificial Sequence
  Description of Artificial Sequence: Synthetic oligonucleotide
auggaaaugauggcuguug

SEQ ID NO: 2100750 - RNA, 19 nt, Artificial Sequence
  Description of Artificial Sequence: Synthetic oligonucleotide
uuaagacuuccuuccuucu

SEQ ID NO: 2100751 - RNA, 19 nt, Artificial Sequence
  Description of Artificial Sequence: Synthetic oligonucleotide
ugauggaaaugauggcugu

SEQ ID NO: 2100752 - RNA, 19 nt, Artificial Sequence
  Description of Artificial Sequence: Synthetic oligonucleotide
uucugauuuucgucucucc

SEQ ID NO: 2100753 - RNA, 19 nt, Artificial Sequence
  Description of Artificial Sequence: Synthetic oligonucleotide
gccagauucggcuuugcgg

SEQ ID NO: 2100754 - RNA, 19 nt, Artificial Sequence
  Description of Artificial Sequence: Synthetic oligonucleotide
ugucauugauuucggucac

SEQ ID NO: 2100755 - RNA, 19 nt, Artificial Sequence
  Description of Artificial Sequence: Synthetic oligonucleotide
uaauagugccaaacugggu

SEQ ID NO: 2100756 - RNA, 19 nt, Artificial Sequence
  Description of Artificial Sequence: Synthetic oligonucleotide
uggccuuucucauuggcau

SEQ ID NO: 2100757 - RNA, 19 nt, Artificial Sequence
  Description of Artificial Sequence: Synthetic oligonucleotide
ugauuucggucacuucuga

SEQ ID NO: 2100758 - RNA, 19 nt, Artificial Sequence
  Description of Artificial Sequence: Synthetic oligonucleotide
uuguccauuguuucugcaa

SEQ ID NO: 2100759 - RNA, 19 nt, Artificial Sequence
  Description of Artificial Sequence: Synthetic oligonucleotide
ugguggcauaaauuuacac

SEQ ID NO: 2100760 - RNA, 19 nt, Artificial Sequence
  Description of Artificial Sequence: Synthetic oligonucleotide
cuugaauacaccuguugaa

SEQ ID NO: 2100761 - RNA, 19 nt, Artificial Sequence
  Description of Artificial Sequence: Synthetic oligonucleotide
uggcccagaaagaucacuc

SEQ ID NO: 2100762 - RNA, 19 nt, Artificial Sequence
  Description of Artificial Sequence: Synthetic oligonucleotide
caggguuaagacuuccuuc

SEQ ID NO: 2100763 - RNA, 19 nt, Artificial Sequence
  Description of Artificial Sequence: Synthetic oligonucleotide
acacgauaaaagucuuuca

SEQ ID NO: 2100764 - RNA, 19 nt, Artificial Sequence
  Description of Artificial Sequence: Synthetic oligonucleotide
uuucugauuauagcgucuc

SEQ ID NO: 2100765 - RNA, 19 nt, Artificial Sequence
  Description of Artificial Sequence: Synthetic oligonucleotide
agaaaaguuuggucacugu

SEQ ID NO: 2100766 - RNA, 19 nt, Artificial Sequence
  Description of Artificial Sequence: Synthetic oligonucleotide
aucaauccccuucuuggcu

SEQ ID NO: 2100767 - RNA, 19 nt, Artificial Sequence
  Description of Artificial Sequence: Synthetic oligonucleotide
gguaagaccaacgaaggga

SEQ ID NO: 2100768 - RNA, 19 nt, Artificial Sequence
  Description of Artificial Sequence: Synthetic oligonucleotide
aagccugaauacaaacuca

SEQ ID NO: 2100769 - RNA, 19 nt, Artificial Sequence
  Description of Artificial Sequence: Synthetic oligonucleotide
uggauuagguaagaccaac

SEQ ID NO: 2100770 - RNA, 19 nt, Artificial Sequence
  Description of Artificial Sequence: Synthetic oligonucleotide
aaauugauugaagccugaa

SEQ ID NO: 2100771 - RNA, 19 nt, Artificial Sequence
  Description of Artificial Sequence: Synthetic oligonucleotide
uugaaccgauauuccaucu

SEQ ID NO: 2100772 - RNA, 19 nt, Artificial Sequence
  Description of Artificial Sequence: Synthetic oligonucleotide
ugccccucuucuuucacug

SEQ ID NO: 2100773 - RNA, 19 nt, Artificial Sequence
  Description of Artificial Sequence: Synthetic oligonucleotide
aaucugcuaauagugccaa

SEQ ID NO: 2100774 - RNA, 19 nt, Artificial Sequence
  Description of Artificial Sequence: Synthetic oligonucleotide
gaucacuccaggguuaaga

SEQ ID NO: 2100775 - RNA, 19 nt, Artificial Sequence
  Description of Artificial Sequence: Synthetic oligonucleotide
uuggauuagguaagaccaa

SEQ ID NO: 2100776 - RNA, 19 nt, Artificial Sequence
  Description of Artificial Sequence: Synthetic oligonucleotide
gggaaacuauaaucaaucc

SEQ ID NO: 2100777 - RNA, 19 nt, Artificial Sequence
  Description of Artificial Sequence: Synthetic oligonucleotide
cuguuugaaaaugacuuca

SEQ ID NO: 2100778 - RNA, 19 nt, Artificial Sequence
  Description of Artificial Sequence: Synthetic oligonucleotide
gucaggagagggcaaaaca

SEQ ID NO: 2100779 - RNA, 19 nt, Artificial Sequence
  Description of Artificial Sequence: Synthetic oligonucleotide
uucugauuauagcgucuca

SEQ ID NO: 2100780 - RNA, 19 nt, Artificial Sequence
  Description of Artificial Sequence: Synthetic oligonucleotide
uuucaggaucacugguccc

SEQ ID NO: 2100781 - RNA, 19 nt, Artificial Sequence
  Description of Artificial Sequence: Synthetic oligonucleotide
ugcggggccgucuaacacc

SEQ ID NO: 2100782 - RNA, 19 nt, Artificial Sequence
  Description of Artificial Sequence: Synthetic oligonucleotide
gaaucugcuaauagugcca

SEQ ID NO: 2100783 - RNA, 19 nt, Artificial Sequence
  Description of Artificial Sequence: Synthetic oligonucleotide
auagugccaaacuggguaa

SEQ ID NO: 2100784 - RNA, 19 nt, Artificial Sequence
  Description of Artificial Sequence: Synthetic oligonucleotide
cuuccugcggguucagcgc

SEQ ID NO: 2100785 - RNA, 19 nt, Artificial Sequence
  Description of Artificial Sequence: Synthetic oligonucleotide
uguuggacuugcgucaccu

SEQ ID NO: 2100786 - RNA, 19 nt, Artificial Sequence
  Description of Artificial Sequence: Synthetic oligonucleotide
aaguuuggucacuguuuga

SEQ ID NO: 2100787 - RNA, 19 nt, Artificial Sequence
  Description of Artificial Sequence: Synthetic oligonucleotide
gaaagaucacuccaggguu

SEQ ID NO: 2100788 - RNA, 19 nt, Artificial Sequence
  Description of Artificial Sequence: Synthetic oligonucleotide
uccuucugaaacagcgagu

SEQ ID NO: 2100789 - RNA, 19 nt, Artificial Sequence
  Description of Artificial Sequence: Synthetic oligonucleotide
agauucggcuuugcggggc

SEQ ID NO: 2100790 - RNA, 19 nt, Artificial Sequence
  Description of Artificial Sequence: Synthetic oligonucleotide
gaaaaguuuggucacuguu

SEQ ID NO: 2100791 - RNA, 19 nt, Artificial Sequence
  Description of Artificial Sequence: Synthetic oligonucleotide
ugaaccgauauuccaucuu

SEQ ID NO: 2100792 - RNA, 19 nt, Artificial Sequence
  Description of Artificial Sequence: Synthetic oligonucleotide
cgauauuccaucuucaaca

SEQ ID NO: 2100793 - RNA, 19 nt, Artificial Sequence
  Description of Artificial Sequence: Synthetic oligonucleotide
guguacaaacugguguggg

SEQ ID NO: 2100794 - RNA, 19 nt, Artificial Sequence
  Description of Artificial Sequence: Synthetic oligonucleotide
acagcgagucuuccugcgg

SEQ ID NO: 2100795 - RNA, 19 nt, Artificial Sequence
  Description of Artificial Sequence: Synthetic oligonucleotide
uauaaucaauccccuucuu

SEQ ID NO: 2100796 - RNA, 19 nt, Artificial Sequence
  Description of Artificial Sequence: Synthetic oligonucleotide
ugcgucaccuccuucugaa

SEQ ID NO: 2100797 - RNA, 19 nt, Artificial Sequence
  Description of Artificial Sequence: Synthetic oligonucleotide
guccguuuacuucuggaca

SEQ ID NO: 2100798 - RNA, 19 nt, Artificial Sequence
  Description of Artificial Sequence: Synthetic oligonucleotide
uuugcggggccgucuaaca

SEQ ID NO: 2100799 - RNA, 19 nt, Artificial Sequence
  Description of Artificial Sequence: Synthetic oligonucleotide
ggauuagguaagaccaacg

SEQ ID NO: 2100800 - RNA, 19 nt, Artificial Sequence
  Description of Artificial Sequence: Synthetic oligonucleotide
auacaaacucaggucagga

SEQ ID NO: 2100801 - RNA, 19 nt, Artificial Sequence
  Description of Artificial Sequence: Synthetic oligonucleotide
aaaauaaagugggccuuua

SEQ ID NO: 2100802 - RNA, 19 nt, Artificial Sequence
  Description of Artificial Sequence: Synthetic oligonucleotide
gguguuggaguguuuugcc

SEQ ID NO: 2100803 - RNA, 19 nt, Artificial Sequence
  Description of Artificial Sequence: Synthetic oligonucleotide
gaguguuuugccccucuuc

SEQ ID NO: 2100804 - RNA, 19 nt, Artificial Sequence
  Description of Artificial Sequence: Synthetic oligonucleotide
aaguucuuuauggacucuu

SEQ ID NO: 2100805 - RNA, 19 nt, Artificial Sequence
  Description of Artificial Sequence: Synthetic oligonucleotide
augugcguuucagaaagug

SEQ ID NO: 2100806 - RNA, 19 nt, Artificial Sequence
  Description of Artificial Sequence: Synthetic oligonucleotide
gacuucuuuggauuaggua

SEQ ID NO: 2100807 - RNA, 19 nt, Artificial Sequence
  Description of Artificial Sequence: Synthetic oligonucleotide
gauauuccaucuucaacau

SEQ ID NO: 2100808 - RNA, 19 nt, Artificial Sequence
  Description of Artificial Sequence: Synthetic oligonucleotide
cagcgagucuuccugcggg

SEQ ID NO: 2100809 - RNA, 19 nt, Artificial Sequence
  Description of Artificial Sequence: Synthetic oligonucleotide
uggguaaaguagucauaga

SEQ ID NO: 2100810 - RNA, 19 nt, Artificial Sequence
  Description of Artificial Sequence: Synthetic oligonucleotide
gacugcaccugguaaaaua

SEQ ID NO: 2100811 - RNA, 19 nt, Artificial Sequence
  Description of Artificial Sequence: Synthetic oligonucleotide
uuuugccccucuucuuuca

SEQ ID NO: 2100812 - RNA, 19 nt, Artificial Sequence
  Description of Artificial Sequence: Synthetic oligonucleotide
uuacacgauaaaagucuuu

SEQ ID NO: 2100813 - RNA, 19 nt, Artificial Sequence
  Description of Artificial Sequence: Synthetic oligonucleotide
aaccgauauuccaucuuca

SEQ ID NO: 2100814 - RNA, 19 nt, Artificial Sequence
  Description of Artificial Sequence: Synthetic oligonucleotide
aagugggccuuuauaacaa

SEQ ID NO: 2100815 - RNA, 19 nt, Artificial Sequence
  Description of Artificial Sequence: Synthetic oligonucleotide
ugauggccuuucucauugg

SEQ ID NO: 2100816 - RNA, 19 nt, Artificial Sequence
  Description of Artificial Sequence: Synthetic oligonucleotide
accgauauuccaucuucaa

SEQ ID NO: 2100817 - RNA, 19 nt, Artificial Sequence
  Description of Artificial Sequence: Synthetic oligonucleotide
gucucacugauggaaauga

SEQ ID NO: 2100818 - RNA, 19 nt, Artificial Sequence
  Description of Artificial Sequence: Synthetic oligonucleotide
cuuucacuguggacacagg

SEQ ID NO: 2100819 - RNA, 19 nt, Artificial Sequence
  Description of Artificial Sequence: Synthetic oligonucleotide
agaccaacgaagggaaacu

SEQ ID NO: 2100820 - RNA, 19 nt, Artificial Sequence
  Description of Artificial Sequence: Synthetic oligonucleotide
gggccuuuauaacaaaauc

SEQ ID NO: 2100821 - RNA, 19 nt, Artificial Sequence
  Description of Artificial Sequence: Synthetic oligonucleotide
uggcacaugacugcaccug

SEQ ID NO: 2100822 - RNA, 19 nt, Artificial Sequence
  Description of Artificial Sequence: Synthetic oligonucleotide
cuauaaucaauccccuucu

SEQ ID NO: 2100823 - RNA, 19 nt, Artificial Sequence
  Description of Artificial Sequence: Synthetic oligonucleotide
ggcacaugacugcaccugg

SEQ ID NO: 2100824 - RNA, 19 nt, Artificial Sequence
  Description of Artificial Sequence: Synthetic oligonucleotide
ucucacugauggaaaugau

SEQ ID NO: 2100825 - RNA, 19 nt, Artificial Sequence
  Description of Artificial Sequence: Synthetic oligonucleotide
ugcaacuaucuuggcaaca

SEQ ID NO: 2100826 - RNA, 19 nt, Artificial Sequence
  Description of Artificial Sequence: Synthetic oligonucleotide
cgaagggaaacuauaauca

SEQ ID NO: 2100827 - RNA, 19 nt, Artificial Sequence
  Description of Artificial Sequence: Synthetic oligonucleotide
aaagaucacuccaggguua

SEQ ID NO: 2100828 - RNA, 19 nt, Artificial Sequence
  Description of Artificial Sequence: Synthetic oligonucleotide
uagcgucucacugauggaa

SEQ ID NO: 2100829 - RNA, 19 nt, Artificial Sequence
  Description of Artificial Sequence: Synthetic oligonucleotide
caacgaagggaaacuauaa

SEQ ID NO: 2100830 - RNA, 19 nt, Artificial Sequence
  Description of Artificial Sequence: Synthetic oligonucleotide
uuugccccucuucuuucac

SEQ ID NO: 2100831 - RNA, 19 nt, Artificial Sequence
  Description of Artificial Sequence: Synthetic oligonucleotide
cgauaaaagucuuucacca

SEQ ID NO: 2100832 - RNA, 19 nt, Artificial Sequence
  Description of Artificial Sequence: Synthetic oligonucleotide
uccauuguuucugcaacua

SEQ ID NO: 2100833 - RNA, 19 nt, Artificial Sequence
  Description of Artificial Sequence: Synthetic oligonucleotide
aucuuuacugucauugauu

SEQ ID NO: 2100834 - RNA, 19 nt, Artificial Sequence
  Description of Artificial Sequence: Synthetic oligonucleotide
gauucggcuuugcggggcc

SEQ ID NO: 2100835 - RNA, 19 nt, Artificial Sequence
  Description of Artificial Sequence: Synthetic oligonucleotide
uuauagcgucucacugaug

SEQ ID NO: 2100836 - RNA, 19 nt, Artificial Sequence
  Description of Artificial Sequence: Synthetic oligonucleotide
acugcaccugguaaaauaa

SEQ ID NO: 2100837 - RNA, 19 nt, Artificial Sequence
  Description of Artificial Sequence: Synthetic oligonucleotide
gaauacaccuguugaaauu

SEQ ID NO: 2100838 - RNA, 19 nt, Artificial Sequence
  Description of Artificial Sequence: Synthetic oligonucleotide
aauccccuucuuggcuagc

SEQ ID NO: 2100839 - RNA, 19 nt, Artificial Sequence
  Description of Artificial Sequence: Synthetic oligonucleotide
uuucugcaacuaucuuggc

SEQ ID NO: 2100840 - RNA, 19 nt, Artificial Sequence
  Description of Artificial Sequence: Synthetic oligonucleotide
aagaucacuccaggguuaa

SEQ ID NO: 2100841 - RNA, 19 nt, Artificial Sequence
  Description of Artificial Sequence: Synthetic oligonucleotide
gacuuccuuccuucuuuug

SEQ ID NO: 2100842 - RNA, 19 nt, Artificial Sequence
  Description of Artificial Sequence: Synthetic oligonucleotide
uuguuucugcaacuaucuu

SEQ ID NO: 2100843 - RNA, 19 nt, Artificial Sequence
  Description of Artificial Sequence: Synthetic oligonucleotide
gagcgugcagguguuggag

SEQ ID NO: 2100844 - RNA, 19 nt, Artificial Sequence
  Description of Artificial Sequence: Synthetic oligonucleotide
cccagaaagaucacuccag

SEQ ID NO: 2100845 - RNA, 19 nt, Artificial Sequence
  Description of Artificial Sequence: Synthetic oligonucleotide
ucggucacuucugauuuuc

SEQ ID NO: 2100846 - RNA, 19 nt, Artificial Sequence
  Description of Artificial Sequence: Synthetic oligonucleotide
uccugauggccuuucucau

SEQ ID NO: 2100847 - RNA, 19 nt, Artificial Sequence
  Description of Artificial Sequence: Synthetic oligonucleotide
gaaaguguugaaggcaggu

SEQ ID NO: 2100848 - RNA, 19 nt, Artificial Sequence
  Description of Artificial Sequence: Synthetic oligonucleotide
aucagucucaucaguggcu

SEQ ID NO: 2100849 - RNA, 19 nt, Artificial Sequence
  Description of Artificial Sequence: Synthetic oligonucleotide
cugauuauagcgucucacu

SEQ ID NO: 2100850 - RNA, 19 nt, Artificial Sequence
  Description of Artificial Sequence: Synthetic oligonucleotide
cauagaaugcuuucaggau

SEQ ID NO: 2100851 - RNA, 19 nt, Artificial Sequence
  Description of Artificial Sequence: Synthetic oligonucleotide
ccgucuaacaccgccaugc

SEQ ID NO: 2100852 - RNA, 19 nt, Artificial Sequence
  Description of Artificial Sequence: Synthetic oligonucleotide
guaguuguccauuguuucu

SEQ ID NO: 2100853 - RNA, 19 nt, Artificial Sequence
  Description of Artificial Sequence: Synthetic oligonucleotide
gcuggcacaugacugcacc

SEQ ID NO: 2100854 - RNA, 19 nt, Artificial Sequence
  Description of Artificial Sequence: Synthetic oligonucleotide
cagauucggcuuugcgggg

SEQ ID NO: 2100855 - RNA, 19 nt, Artificial Sequence
  Description of Artificial Sequence: Synthetic oligonucleotide
auagcgucucacugaugga

SEQ ID NO: 2100856 - RNA, 19 nt, Artificial Sequence
  Description of Artificial Sequence: Synthetic oligonucleotide
uugcggggccgucuaacac

SEQ ID NO: 2100857 - RNA, 19 nt, Artificial Sequence
  Description of Artificial Sequence: Synthetic oligonucleotide
gguucagcgccagauucgg

SEQ ID NO: 2100858 - RNA, 19 nt, Artificial Sequence
  Description of Artificial Sequence: Synthetic oligonucleotide
caauccccuucuuggcuag

SEQ ID NO: 2100859 - RNA, 19 nt, Artificial Sequence
  Description of Artificial Sequence: Synthetic oligonucleotide
aggcuguuugaaaaugacu

SEQ ID NO: 2100860 - RNA, 19 nt, Artificial Sequence
  Description of Artificial Sequence: Synthetic oligonucleotide
cauuggcaugaaccaacac

SEQ ID NO: 2100861 - RNA, 19 nt, Artificial Sequence
  Description of Artificial Sequence: Synthetic oligonucleotide
ugcggguucagcgccagau

SEQ ID NO: 2100862 - RNA, 19 nt, Artificial Sequence
  Description of Artificial Sequence: Synthetic oligonucleotide
agcgugcagguguuggagu

SEQ ID NO: 2100863 - RNA, 19 nt, Artificial Sequence
  Description of Artificial Sequence: Synthetic oligonucleotide
cacuccaggguuaagacuu

SEQ ID NO: 2100864 - RNA, 19 nt, Artificial Sequence
  Description of Artificial Sequence: Synthetic oligonucleotide
agggcaaaacagccaaguu

SEQ ID NO: 2100865 - RNA, 19 nt, Artificial Sequence
  Description of Artificial Sequence: Synthetic oligonucleotide
auauuccaucuucaacauu

SEQ ID NO: 2100866 - RNA, 19 nt, Artificial Sequence
  Description of Artificial Sequence: Synthetic oligonucleotide
cucaucaguggcuggcaca

SEQ ID NO: 2100867 - RNA, 19 nt, Artificial Sequence
  Description of Artificial Sequence: Synthetic oligonucleotide
ccucuugaaccgauauucc

SEQ ID NO: 2100868 - RNA, 19 nt, Artificial Sequence
  Description of Artificial Sequence: Synthetic oligonucleotide
ggcauaaauuuacacgaua

SEQ ID NO: 2100869 - RNA, 19 nt, Artificial Sequence
  Description of Artificial Sequence: Synthetic oligonucleotide
ccgauauuccaucuucaac

SEQ ID NO: 2100870 - RNA, 19 nt, Artificial Sequence
  Description of Artificial Sequence: Synthetic oligonucleotide
ggcccagaaagaucacucc

SEQ ID NO: 2100871 - RNA, 19 nt, Artificial Sequence
  Description of Artificial Sequence: Synthetic oligonucleotide
aggcauauccucugcuauu

SEQ ID NO: 2100872 - RNA, 19 nt, Artificial Sequence
  Description of Artificial Sequence: Synthetic oligonucleotide
gacucuuucugguggcaua

SEQ ID NO: 2100873 - RNA, 19 nt, Artificial Sequence
  Description of Artificial Sequence: Synthetic oligonucleotide
augacugcaccugguaaaa

SEQ ID NO: 2100874 - RNA, 19 nt, Artificial Sequence
  Description of Artificial Sequence: Synthetic oligonucleotide
gagggcaaaacagccaagu

SEQ ID NO: 2100875 - RNA, 19 nt, Artificial Sequence
  Description of Artificial Sequence: Synthetic oligonucleotide
agacuucuuuggauuaggu

SEQ ID NO: 2100876 - RNA, 19 nt, Artificial Sequence
  Description of Artificial Sequence: Synthetic oligonucleotide
guagucauagaugugcguu

SEQ ID NO: 2100877 - RNA, 19 nt, Artificial Sequence
  Description of Artificial Sequence: Synthetic oligonucleotide
ugugggacccuggcuguca

SEQ ID NO: 2100878 - RNA, 19 nt, Artificial Sequence
  Description of Artificial Sequence: Synthetic oligonucleotide
agacuuccuuccuucuuuu

SEQ ID NO: 2100879 - RNA, 19 nt, Artificial Sequence
  Description of Artificial Sequence: Synthetic oligonucleotide
agugggccuuuauaacaaa

SEQ ID NO: 2100880 - RNA, 19 nt, Artificial Sequence
  Description of Artificial Sequence: Synthetic oligonucleotide
cuuugcggggccgucuaac

SEQ ID NO: 2100881 - RNA, 19 nt, Artificial Sequence
  Description of Artificial Sequence: Synthetic oligonucleotide
agcgagucuuccugcgggu

SEQ ID NO: 2100882 - RNA, 19 nt, Artificial Sequence
  Description of Artificial Sequence: Synthetic oligonucleotide
guaaaauaaagugggccuu

SEQ ID NO: 2100883 - RNA, 19 nt, Artificial Sequence
  Description of Artificial Sequence: Synthetic oligonucleotide
uucacgcgcuguuggacuu

SEQ ID NO: 2100884 - RNA, 19 nt, Artificial Sequence
  Description of Artificial Sequence: Synthetic oligonucleotide
caguccguuuacuucugga

SEQ ID NO: 2100885 - RNA, 19 nt, Artificial Sequence
  Description of Artificial Sequence: Synthetic oligonucleotide
ggaaaugauggcuguugaa

SEQ ID NO: 2100886 - RNA, 19 nt, Artificial Sequence
  Description of Artificial Sequence: Synthetic oligonucleotide
cagauucaaacuccacaaa

SEQ ID NO: 2100887 - RNA, 19 nt, Artificial Sequence
  Description of Artificial Sequence: Synthetic oligonucleotide
uggacucuuucugguggca

SEQ ID NO: 2100888 - RNA, 19 nt, Artificial Sequence
  Description of Artificial Sequence: Synthetic oligonucleotide
ggggccgucuaacaccgcc

SEQ ID NO: 2100889 - RNA, 19 nt, Artificial Sequence
  Description of Artificial Sequence: Synthetic oligonucleotide
aguucuuuauggacucuuu

SEQ ID NO: 2100890 - RNA, 19 nt, Artificial Sequence
  Description of Artificial Sequence: Synthetic oligonucleotide
ggcaugaaccaacacauuu

SEQ ID NO: 2100891 - RNA, 19 nt, Artificial Sequence
  Description of Artificial Sequence: Synthetic oligonucleotide
aggaucacuggucccucuu

SEQ ID NO: 2100892 - RNA, 19 nt, Artificial Sequence
  Description of Artificial Sequence: Synthetic oligonucleotide
ccccguuucugauuauagc

SEQ ID NO: 2100893 - RNA, 19 nt, Artificial Sequence
  Description of Artificial Sequence: Synthetic oligonucleotide
agagggcaaaacagccaag

SEQ ID NO: 2100894 - RNA, 19 nt, Artificial Sequence
  Description of Artificial Sequence: Synthetic oligonucleotide
gugcguuucagaaaguguu

SEQ ID NO: 2100895 - RNA, 19 nt, Artificial Sequence
  Description of Artificial Sequence: Synthetic oligonucleotide
ccuguugaaauugauugaa

SEQ ID NO: 2100896 - RNA, 19 nt, Artificial Sequence
  Description of Artificial Sequence: Synthetic oligonucleotide
uucggucacuucugauuuu

SEQ ID NO: 2100897 - RNA, 19 nt, Artificial Sequence
  Description of Artificial Sequence: Synthetic oligonucleotide
acuggguaaaguagucaua

SEQ ID NO: 2100898 - RNA, 19 nt, Artificial Sequence
  Description of Artificial Sequence: Synthetic oligonucleotide
cuuccucuugaaccgauau

SEQ ID NO: 2100899 - RNA, 19 nt, Artificial Sequence
  Description of Artificial Sequence: Synthetic oligonucleotide
guagaaaaguuuggucacu

SEQ ID NO: 2100900 - RNA, 19 nt, Artificial Sequence
  Description of Artificial Sequence: Synthetic oligonucleotide
gcgcuguuggacuugcguc

SEQ ID NO: 2100901 - RNA, 19 nt, Artificial Sequence
  Description of Artificial Sequence: Synthetic oligonucleotide
ccaacgaagggaaacuaua

SEQ ID NO: 2100902 - RNA, 19 nt, Artificial Sequence
  Description of Artificial Sequence: Synthetic oligonucleotide
cugcaccugguaaaauaaa

SEQ ID NO: 2100903 - RNA, 19 nt, Artificial Sequence
  Description of Artificial Sequence: Synthetic oligonucleotide
aucugcuaauagugccaaa

SEQ ID NO: 2100904 - RNA, 19 nt, Artificial Sequence
  Description of Artificial Sequence: Synthetic oligonucleotide
ggccuuucucauuggcaug

SEQ ID NO: 2100905 - RNA, 19 nt, Artificial Sequence
  Description of Artificial Sequence: Synthetic oligonucleotide
gaccaacgaagggaaacua

SEQ ID NO: 2100906 - RNA, 19 nt, Artificial Sequence
  Description of Artificial Sequence: Synthetic oligonucleotide
agcgucucacugauggaaa

SEQ ID NO: 2100907 - RNA, 19 nt, Artificial Sequence
  Description of Artificial Sequence: Synthetic oligonucleotide
guccauuguuucugcaacu

SEQ ID NO: 2100908 - RNA, 19 nt, Artificial Sequence
  Description of Artificial Sequence: Synthetic oligonucleotide
auucggcuuugcggggccg

SEQ ID NO: 2100909 - RNA, 19 nt, Artificial Sequence
  Description of Artificial Sequence: Synthetic oligonucleotide
gugggccuuuauaacaaaa

SEQ ID NO: 2100910 - RNA, 19 nt, Artificial Sequence
  Description of Artificial Sequence: Synthetic oligonucleotide
gacuugcgucaccuccuuc

SEQ ID NO: 2100911 - RNA, 19 nt, Artificial Sequence
  Description of Artificial Sequence: Synthetic oligonucleotide
agaucacuccaggguuaag

SEQ ID NO: 2100912 - RNA, 19 nt, Artificial Sequence
  Description of Artificial Sequence: Synthetic oligonucleotide
ccagauaugcacauagaau

SEQ ID NO: 2100913 - RNA, 19 nt, Artificial Sequence
  Description of Artificial Sequence: Synthetic oligonucleotide
ggucacuucugauuuucgu

SEQ ID NO: 2100914 - RNA, 19 nt, Artificial Sequence
  Description of Artificial Sequence: Synthetic oligonucleotide
ugacugcaccugguaaaau

SEQ ID NO: 2100915 - RNA, 19 nt, Artificial Sequence
  Description of Artificial Sequence: Synthetic oligonucleotide
uucggcuuugcggggccgu

SEQ ID NO: 2100916 - RNA, 19 nt, Artificial Sequence
  Description of Artificial Sequence: Synthetic oligonucleotide
ucacgcgcuguuggacuug

SEQ ID NO: 2100917 - RNA, 19 nt, Artificial Sequence
  Description of Artificial Sequence: Synthetic oligonucleotide
cacgcgcuguuggacuugc

SEQ ID NO: 2100918 - RNA, 19 nt, Artificial Sequence
  Description of Artificial Sequence: Synthetic oligonucleotide
ggucaggagagggcaaaac

SEQ ID NO: 2100919 - RNA, 19 nt, Artificial Sequence
  Description of Artificial Sequence: Synthetic oligonucleotide
gcggggccgucuaacaccg

SEQ ID NO: 2100920 - RNA, 19 nt, Artificial Sequence
  Description of Artificial Sequence: Synthetic oligonucleotide
agcgccagauucggcuuug

SEQ ID NO: 2100921 - RNA, 19 nt, Artificial Sequence
  Description of Artificial Sequence: Synthetic oligonucleotide
ugcagguguuggaguguuu

SEQ ID NO: 2100922 - RNA, 19 nt, Artificial Sequence
  Description of Artificial Sequence: Synthetic oligonucleotide
gcaccugguaaaauaaagu

SEQ ID NO: 2100923 - RNA, 19 nt, Artificial Sequence
  Description of Artificial Sequence: Synthetic oligonucleotide
gauggaaaugauggcuguu

SEQ ID NO: 2100924 - RNA, 19 nt, Artificial Sequence
  Description of Artificial Sequence: Synthetic oligonucleotide
cuucuuccggaguaauuuu

SEQ ID NO: 2100925 - RNA, 19 nt, Artificial Sequence
  Description of Artificial Sequence: Synthetic oligonucleotide
uuggaguguuuugccccuc

SEQ ID NO: 2100926 - RNA, 19 nt, Artificial Sequence
  Description of Artificial Sequence: Synthetic oligonucleotide
ccucugcuauuuccagucc

SEQ ID NO: 2100927 - RNA, 19 nt, Artificial Sequence
  Description of Artificial Sequence: Synthetic oligonucleotide
guucagcgccagauucggc

SEQ ID NO: 2100928 - RNA, 19 nt, Artificial Sequence
  Description of Artificial Sequence: Synthetic oligonucleotide
gugccaaacuggguaaagu

SEQ ID NO: 2100929 - RNA, 19 nt, Artificial Sequence
  Description of Artificial Sequence: Synthetic oligonucleotide
gcauauccucugcuauuuc

SEQ ID NO: 2100930 - RNA, 19 nt, Artificial Sequence
  Description of Artificial Sequence: Synthetic oligonucleotide
ccaguccguuuacuucugg

SEQ ID NO: 2100931 - RNA, 19 nt, Artificial Sequence
  Description of Artificial Sequence: Synthetic oligonucleotide
cuucugaaacagcgagucu

SEQ ID NO: 2100932 - RNA, 19 nt, Artificial Sequence
  Description of Artificial Sequence: Synthetic oligonucleotide
aggucaggagagggcaaaa

SEQ ID NO: 2100933 - RNA, 19 nt, Artificial Sequence
  Description of Artificial Sequence: Synthetic oligonucleotide
acggaacauuccauucuuu

SEQ ID NO: 2100934 - RNA, 19 nt, Artificial Sequence
  Description of Artificial Sequence: Synthetic oligonucleotide
caguggcuggcacaugacu

SEQ ID NO: 2100935 - RNA, 19 nt, Artificial Sequence
  Description of Artificial Sequence: Synthetic oligonucleotide
gaugugcguuucagaaagu

SEQ ID NO: 2100936 - RNA, 19 nt, Artificial Sequence
  Description of Artificial Sequence: Synthetic oligonucleotide
ccguuucugauuauagcgu

SEQ ID NO: 2100937 - RNA, 19 nt, Artificial Sequence
  Description of Artificial Sequence: Synthetic oligonucleotide
cggucacuucugauuuucg

SEQ ID NO: 2100938 - RNA, 19 nt, Artificial Sequence
  Description of Artificial Sequence: Synthetic oligonucleotide
cuggcacaugacugcaccu

SEQ ID NO: 2100939 - RNA, 19 nt, Artificial Sequence
  Description of Artificial Sequence: Synthetic oligonucleotide
caggucaggagagggcaaa

SEQ ID NO: 2100940 - RNA, 19 nt, Artificial Sequence
  Description of Artificial Sequence: Synthetic oligonucleotide
gcaugaaccaacacauuuu

SEQ ID NO: 2100941 - RNA, 19 nt, Artificial Sequence
  Description of Artificial Sequence: Synthetic oligonucleotide
cgcuguuggacuugcguca

SEQ ID NO: 2100942 - RNA, 19 nt, Artificial Sequence
  Description of Artificial Sequence: Synthetic oligonucleotide
caucaguggcuggcacaug

SEQ ID NO: 2100943 - RNA, 19 nt, Artificial Sequence
  Description of Artificial Sequence: Synthetic oligonucleotide
ucggcuuugcggggccguc

SEQ ID NO: 2100944 - RNA, 19 nt, Artificial Sequence
  Description of Artificial Sequence: Synthetic oligonucleotide
cggaacauuccauucuuua

SEQ ID NO: 2100945 - RNA, 19 nt, Artificial Sequence
  Description of Artificial Sequence: Synthetic oligonucleotide
ggguuaagacuuccuuccu

SEQ ID NO: 2100946 - RNA, 19 nt, Artificial Sequence
  Description of Artificial Sequence: Synthetic oligonucleotide
gccgucuaacaccgccaug

SEQ ID NO: 2100947 - RNA, 19 nt, Artificial Sequence
  Description of Artificial Sequence: Synthetic oligonucleotide
gugggacccuggcugucaa

SEQ ID NO: 2100948 - RNA, 19 nt, Artificial Sequence
  Description of Artificial Sequence: Synthetic oligonucleotide
ggugugggacccuggcugu

SEQ ID NO: 2100949 - RNA, 19 nt, Artificial Sequence
  Description of Artificial Sequence: Synthetic oligonucleotide
cacuggucccucuuccuuu

SEQ ID NO: 2100950 - RNA, 19 nt, Artificial Sequence
  Description of Artificial Sequence: Synthetic oligonucleotide
cuggugugggacccuggcu

SEQ ID NO: 2100951 - RNA, 19 nt, Artificial Sequence
  Description of Artificial Sequence: Synthetic oligonucleotide
acgcgcuguuggacuugcg

SEQ ID NO: 2100952 - RNA, 19 nt, Artificial Sequence
  Description of Artificial Sequence: Synthetic oligonucleotide
gcagguguuggaguguuuu

SEQ ID NO: 2100953 - RNA, 19 nt, Artificial Sequence
  Description of Artificial Sequence: Synthetic oligonucleotide
gggccgucuaacaccgcca

SEQ ID NO: 2100954 - RNA, 19 nt, Artificial Sequence
  Description of Artificial Sequence: Synthetic oligonucleotide
ggcuuugcggggccgucua

SEQ ID NO: 2100955 - RNA, 19 nt, Artificial Sequence
  Description of Artificial Sequence: Synthetic oligonucleotide
caggaucacuggucccucu

SEQ ID NO: 2100956 - RNA, 19 nt, Artificial Sequence
  Description of Artificial Sequence: Synthetic oligonucleotide
gugugggacccuggcuguc

SEQ ID NO: 2100957 - RNA, 19 nt, Artificial Sequence
  Description of Artificial Sequence: Synthetic oligonucleotide
ccuggcugucaacagacuu

SEQ ID NO: 2100958 - RNA, 19 nt, Artificial Sequence
  Description of Artificial Sequence: Synthetic oligonucleotide
gcgucucacugauggaaau

SEQ ID NO: 2100959 - RNA, 19 nt, Artificial Sequence
  Description of Artificial Sequence: Synthetic oligonucleotide
ggccgucuaacaccgccau

SEQ ID NO: 2100960 - RNA, 19 nt, Artificial Sequence
  Description of Artificial Sequence: Synthetic oligonucleotide
cugcuauuuccaguccguu

SEQ ID NO: 2100961 - RNA, 19 nt, Artificial Sequence
  Description of Artificial Sequence: Synthetic oligonucleotide
ggacucuuucugguggcau

SEQ ID NO: 2100962 - RNA, 19 nt, Artificial Sequence
  Description of Artificial Sequence: Synthetic oligonucleotide
cugcccagauaugcacaua

SEQ ID NO: 2100963 - RNA, 19 nt, Artificial Sequence
  Description of Artificial Sequence: Synthetic oligonucleotide
gcacaugacugcaccuggu

SEQ ID NO: 2100964 - RNA, 19 nt, Artificial Sequence
  Description of Artificial Sequence: Synthetic oligonucleotide
gcuuugcggggccgucuaa

SEQ ID NO: 2100965 - RNA, 19 nt, Artificial Sequence
  Description of Artificial Sequence: Synthetic oligonucleotide
ggacuugcgucaccuccuu

SEQ ID NO: 2100966 - RNA, 19 nt, Artificial Sequence
  Description of Artificial Sequence: Synthetic oligonucleotide
ccagagcgugcagguguug

SEQ ID NO: 2100967 - RNA, 19 nt, Artificial Sequence
  Description of Artificial Sequence: Synthetic oligonucleotide
gcgccagauucggcuuugc

SEQ ID NO: 2100968 - RNA, 19 nt, Artificial Sequence
  Description of Artificial Sequence: Synthetic oligonucleotide
cgcgcuguuggacuugcgu

SEQ ID NO: 2100969 - RNA, 19 nt, Artificial Sequence
  Description of Artificial Sequence: Synthetic oligonucleotide
cagcgccagauucggcuuu

SEQ ID NO: 2100970 - RNA, 19 nt, Artificial Sequence
  Description of Artificial Sequence: Synthetic oligonucleotide
gcggguucagcgccagauu

SEQ ID NO: 2100971 - RNA, 19 nt, Artificial Sequence
  Description of Artificial Sequence: Synthetic oligonucleotide
gcgagucuuccugcggguu

SEQ ID NO: 2100972 - RNA, 19 nt, Artificial Sequence
  Description of Artificial Sequence: Synthetic oligonucleotide
ccguuuacuucuggacaau

SEQ ID NO: 2100973 - RNA, 19 nt, Artificial Sequence
  Description of Artificial Sequence: Synthetic oligonucleotide
cggggccgucuaacaccgc

SEQ ID NO: 2100974 - RNA, 19 nt, Artificial Sequence
  Description of Artificial Sequence: Synthetic oligonucleotide
cggcuuugcggggccgucu

SEQ ID NO: 2100975 - RNA, 19 nt, Artificial Sequence
  Description of Artificial Sequence: Synthetic oligonucleotide
aacauagagauuuugaccg

SEQ ID NO: 2100976 - RNA, 19 nt, Artificial Sequence
  Description of Artificial Sequence: Synthetic oligonucleotide
aaaugaauaacauagagau

SEQ ID NO: 2100977 - RNA, 19 nt, Artificial Sequence
  Description of Artificial Sequence: Synthetic oligonucleotide
uauauuuaggcuuucaugg

SEQ ID NO: 2100978 - RNA, 19 nt, Artificial Sequence
  Description of Artificial Sequence: Synthetic oligonucleotide
aagucuauaagccucaugg

SEQ ID NO: 2100979 - RNA, 19 nt, Artificial Sequence
  Description of Artificial Sequence: Synthetic oligonucleotide
cuuauuaucaccaaacacc

SEQ ID NO: 2100980 - RNA, 19 nt, Artificial Sequence
  Description of Artificial Sequence: Synthetic oligonucleotide
aacucuguacauuagcucc

SEQ ID NO: 2100981 - RNA, 19 nt, Artificial Sequence
  Description of Artificial Sequence: Synthetic oligonucleotide
auuaucaccaaacaccugc

SEQ ID NO: 2100982 - RNA, 19 nt, Artificial Sequence
  Description of Artificial Sequence: Synthetic oligonucleotide
auaaucuugauugucaucc

SEQ ID NO: 2100983 - RNA, 19 nt, Artificial Sequence
  Description of Artificial Sequence: Synthetic oligonucleotide
aauacuggagugcaaaagg

SEQ ID NO: 2100984 - RNA, 19 nt, Artificial Sequence
  Description of Artificial Sequence: Synthetic oligonucleotide
aaaacuuagacuugaagca

SEQ ID NO: 2100985 - RNA, 19 nt, Artificial Sequence
  Description of Artificial Sequence: Synthetic oligonucleotide
cugguuauaaauaaguggg

SEQ ID NO: 2100986 - RNA, 19 nt, Artificial Sequence
  Description of Artificial Sequence: Synthetic oligonucleotide
gcuaaaauaagcuauauag

SEQ ID NO: 2100987 - RNA, 19 nt, Artificial Sequence
  Description of Artificial Sequence: Synthetic oligonucleotide
agagaaaugaauaacauag

SEQ ID NO: 2100988 - RNA, 19 nt, Artificial Sequence
  Description of Artificial Sequence: Synthetic oligonucleotide
cuuauuuugaggauuagag

SEQ ID NO: 2100989 - RNA, 19 nt, Artificial Sequence
  Description of Artificial Sequence: Synthetic oligonucleotide
ucauucauagaccucauag

SEQ ID NO: 2100990 - RNA, 19 nt, Artificial Sequence
  Description of Artificial Sequence: Synthetic oligonucleotide
auaacauagagauuuugac

SEQ ID NO: 2100991 - RNA, 19 nt, Artificial Sequence
  Description of Artificial Sequence: Synthetic oligonucleotide
auagguauuaaccacaacu

SEQ ID NO: 2100992 - RNA, 19 nt, Artificial Sequence
  Description of Artificial Sequence: Synthetic oligonucleotide
aaauaagcuauauagcaga

SEQ ID NO: 2100993 - RNA, 19 nt, Artificial Sequence
  Description of Artificial Sequence: Synthetic oligonucleotide
auucauagaccucauaggg

SEQ ID NO: 2100994 - RNA, 19 nt, Artificial Sequence
  Description of Artificial Sequence: Synthetic oligonucleotide
auuauacugaaaaucaccc

SEQ ID NO: 2100995 - RNA, 19 nt, Artificial Sequence
  Description of Artificial Sequence: Synthetic oligonucleotide
ugauggaacacccaaacug

SEQ ID NO: 2100996 - RNA, 19 nt, Artificial Sequence
  Description of Artificial Sequence: Synthetic oligonucleotide
cacagcauguauuugaugg

SEQ ID NO: 2100997 - RNA, 19 nt, Artificial Sequence
  Description of Artificial Sequence: Synthetic oligonucleotide
uaagcuauauagcagagaa

SEQ ID NO: 2100998 - RNA, 19 nt, Artificial Sequence
  Description of Artificial Sequence: Synthetic oligonucleotide
agagauuuugaccguagcc

SEQ ID NO: 2100999 - RNA, 19 nt, Artificial Sequence
  Description of Artificial Sequence: Synthetic oligonucleotide
cagaaagugaugaugagcc

SEQ ID NO: 2101000 - RNA, 19 nt, Artificial Sequence
  Description of Artificial Sequence: Synthetic oligonucleotide
auguaaacucucuuaaugg

SEQ ID NO: 2101001 - RNA, 19 nt, Artificial Sequence
  Description of Artificial Sequence: Synthetic oligonucleotide
acugugaagcuuucuaucc

SEQ ID NO: 2101002 - RNA, 19 nt, Artificial Sequence
  Description of Artificial Sequence: Synthetic oligonucleotide
uuauuaucaccaaacaccu

SEQ ID NO: 2101003 - RNA, 19 nt, Artificial Sequence
  Description of Artificial Sequence: Synthetic oligonucleotide
ucuucauuugccagcagcg

SEQ ID NO: 2101004 - RNA, 19 nt, Artificial Sequence
  Description of Artificial Sequence: Synthetic oligonucleotide
auaacuuaggcuuauagua

SEQ ID NO: 2101005 - RNA, 19 nt, Artificial Sequence
  Description of Artificial Sequence: Synthetic oligonucleotide
augguaaccaaagagaauc

SEQ ID NO: 2101006 - RNA, 19 nt, Artificial Sequence
  Description of Artificial Sequence: Synthetic oligonucleotide
uaaacaucugcacagcaug

SEQ ID NO: 2101007 - RNA, 19 nt, Artificial Sequence
  Description of Artificial Sequence: Synthetic oligonucleotide
uggauauucuugaugaagc

SEQ ID NO: 2101008 - RNA, 19 nt, Artificial Sequence
  Description of Artificial Sequence: Synthetic oligonucleotide
auuguuuccaaaugaguuc

SEQ ID NO: 2101009 - RNA, 19 nt, Artificial Sequence
  Description of Artificial Sequence: Synthetic oligonucleotide
uaacauagagauuuugacc

SEQ ID NO: 2101010 - RNA, 19 nt, Artificial Sequence
  Description of Artificial Sequence: Synthetic oligonucleotide
aaacuuuaccgucuucaac

SEQ ID NO: 2101011 - RNA, 19 nt, Artificial Sequence
  Description of Artificial Sequence: Synthetic oligonucleotide
ucuuauuaucaccaaacac

SEQ ID NO: 2101012 - RNA, 19 nt, Artificial Sequence
  Description of Artificial Sequence: Synthetic oligonucleotide
auuagagugguucucaaca

SEQ ID NO: 2101013 - RNA, 19 nt, Artificial Sequence
  Description of Artificial Sequence: Synthetic oligonucleotide
uuugcaaaguccuaaacau

SEQ ID NO: 2101014 - RNA, 19 nt, Artificial Sequence
  Description of Artificial Sequence: Synthetic oligonucleotide
uccaaaugaguucagucag

SEQ ID NO: 2101015 - RNA, 19 nt, Artificial Sequence
  Description of Artificial Sequence: Synthetic oligonucleotide
aaguccuaaacaucugcac

SEQ ID NO: 2101016 - RNA, 19 nt, Artificial Sequence
  Description of Artificial Sequence: Synthetic oligonucleotide
ucauaacuuaggcuuauag

SEQ ID NO: 2101017 - RNA, 19 nt, Artificial Sequence
  Description of Artificial Sequence: Synthetic oligonucleotide
uuuaccgucuucaacagaa

SEQ ID NO: 2101018 - RNA, 19 nt, Artificial Sequence
  Description of Artificial Sequence: Synthetic oligonucleotide
uuagacuugaagcaauugu

SEQ ID NO: 2101019 - RNA, 19 nt, Artificial Sequence
  Description of Artificial Sequence: Synthetic oligonucleotide
uuaacucuguacauuagcu

SEQ ID NO: 2101020 - RNA, 19 nt, Artificial Sequence
  Description of Artificial Sequence: Synthetic oligonucleotide
uauaguauuucuaccauua

SEQ ID NO: 2101021 - RNA, 19 nt, Artificial Sequence
  Description of Artificial Sequence: Synthetic oligonucleotide
ucaacauugaagucuauaa

SEQ ID NO: 2101022 - RNA, 19 nt, Artificial Sequence
  Description of Artificial Sequence: Synthetic oligonucleotide
ugaaaaucacccuuaaauc

SEQ ID NO: 2101023 - RNA, 19 nt, Artificial Sequence
  Description of Artificial Sequence: Synthetic oligonucleotide
gaugguucauaacuuaggc

SEQ ID NO: 2101024 - RNA, 19 nt, Artificial Sequence
  Description of Artificial Sequence: Synthetic oligonucleotide
uguaaacucucuuaauggc

SEQ ID NO: 2101025 - RNA, 19 nt, Artificial Sequence
  Description of Artificial Sequence: Synthetic oligonucleotide
aggcuuauaguauuucuac

SEQ ID NO: 2101026 - RNA, 19 nt, Artificial Sequence
  Description of Artificial Sequence: Synthetic oligonucleotide
uuugauggaacacccaaac

SEQ ID NO: 2101027 - RNA, 19 nt, Artificial Sequence
  Description of Artificial Sequence: Synthetic oligonucleotide
caaaaggccucuaagguag

SEQ ID NO: 2101028 - RNA, 19 nt, Artificial Sequence
  Description of Artificial Sequence: Synthetic oligonucleotide
uucugugacucauucauag

SEQ ID NO: 2101029 - RNA, 19 nt, Artificial Sequence
  Description of Artificial Sequence: Synthetic oligonucleotide
ugcuggauauucuugauga

SEQ ID NO: 2101030 - RNA, 19 nt, Artificial Sequence
  Description of Artificial Sequence: Synthetic oligonucleotide
auuaaaaguuuucaggaaa

SEQ ID NO: 2101031 - RNA, 19 nt, Artificial Sequence
  Description of Artificial Sequence: Synthetic oligonucleotide
uguacauuagcuccugcug

SEQ ID NO: 2101032 - RNA, 19 nt, Artificial Sequence
  Description of Artificial Sequence: Synthetic oligonucleotide
aaaguuuucaggaaaguaa

SEQ ID NO: 2101033 - RNA, 19 nt, Artificial Sequence
  Description of Artificial Sequence: Synthetic oligonucleotide
agaauuuuaauuauacuga

SEQ ID NO: 2101034 - RNA, 19 nt, Artificial Sequence
  Description of Artificial Sequence: Synthetic oligonucleotide
auaucugaaacuuuaccgu

SEQ ID NO: 2101035 - RNA, 19 nt, Artificial Sequence
  Description of Artificial Sequence: Synthetic oligonucleotide
cuuuagcuaauccucaggc

SEQ ID NO: 2101036 - RNA, 19 nt, Artificial Sequence
  Description of Artificial Sequence: Synthetic oligonucleotide
auagaccuuuagcuaaucc

SEQ ID NO: 2101037 - RNA, 19 nt, Artificial Sequence
  Description of Artificial Sequence: Synthetic oligonucleotide
ugguuauaaauaagugggg

SEQ ID NO: 2101038 - RNA, 19 nt, Artificial Sequence
  Description of Artificial Sequence: Synthetic oligonucleotide
cuuucuauccaacauggug

SEQ ID NO: 2101039 - RNA, 19 nt, Artificial Sequence
  Description of Artificial Sequence: Synthetic oligonucleotide
aauccuuuuauaaaaugga

SEQ ID NO: 2101040 - RNA, 19 nt, Artificial Sequence
  Description of Artificial Sequence: Synthetic oligonucleotide
acugcuacguuucugucuc

SEQ ID NO: 2101041 - RNA, 19 nt, Artificial Sequence
  Description of Artificial Sequence: Synthetic oligonucleotide
uggauaaucuugauuguca

SEQ ID NO: 2101042 - RNA, 19 nt, Artificial Sequence
  Description of Artificial Sequence: Synthetic oligonucleotide
ugguucauaacuuaggcuu

SEQ ID NO: 2101043 - RNA, 19 nt, Artificial Sequence
  Description of Artificial Sequence: Synthetic oligonucleotide
acagaaagugaugaugagc

SEQ ID NO: 2101044 - RNA, 19 nt, Artificial Sequence
  Description of Artificial Sequence: Synthetic oligonucleotide
aauagguauuaaccacaac

SEQ ID NO: 2101045 - RNA, 19 nt, Artificial Sequence
  Description of Artificial Sequence: Synthetic oligonucleotide
aaaggcuaaaauaagcuau

SEQ ID NO: 2101046 - RNA, 19 nt, Artificial Sequence
  Description of Artificial Sequence: Synthetic oligonucleotide
aaauacuggagugcaaaag

SEQ ID NO: 2101047 - RNA, 19 nt, Artificial Sequence
  Description of Artificial Sequence: Synthetic oligonucleotide
ugcaaaaggccucuaaggu

SEQ ID NO: 2101048 - RNA, 19 nt, Artificial Sequence
  Description of Artificial Sequence: Synthetic oligonucleotide
auugaagucuauaagccuc

SEQ ID NO: 2101049 - RNA, 19 nt, Artificial Sequence
  Description of Artificial Sequence: Synthetic oligonucleotide
uuagcuaauccucaggcua

SEQ ID NO: 2101050 - RNA, 19 nt, Artificial Sequence
  Description of Artificial Sequence: Synthetic oligonucleotide
uaauuauacugaaaaucac

SEQ ID NO: 2101051 - RNA, 19 nt, Artificial Sequence
  Description of Artificial Sequence: Synthetic oligonucleotide
aauuguuuccaaaugaguu

SEQ ID NO: 2101052 - RNA, 19 nt, Artificial Sequence
  Description of Artificial Sequence: Synthetic oligonucleotide
uuuuaauuauacugaaaau

SEQ ID NO: 2101053 - RNA, 19 nt, Artificial Sequence
  Description of Artificial Sequence: Synthetic oligonucleotide
accacaacuucuuauuauc

SEQ ID NO: 2101054 - RNA, 19 nt, Artificial Sequence
  Description of Artificial Sequence: Synthetic oligonucleotide
uggaauaucacuguucggu

SEQ ID NO: 2101055 - RNA, 19 nt, Artificial Sequence
  Description of Artificial Sequence: Synthetic oligonucleotide
ucauagaccucauagggaa

SEQ ID NO: 2101056 - RNA, 19 nt, Artificial Sequence
  Description of Artificial Sequence: Synthetic oligonucleotide
uuauuuugaggauuagagu

SEQ ID NO: 2101057 - RNA, 19 nt, Artificial Sequence
  Description of Artificial Sequence: Synthetic oligonucleotide
aauaucacuguucgguuaa

SEQ ID NO: 2101058 - RNA, 19 nt, Artificial Sequence
  Description of Artificial Sequence: Synthetic oligonucleotide
uaagccucaugggagaugg

SEQ ID NO: 2101059 - RNA, 19 nt, Artificial Sequence
  Description of Artificial Sequence: Synthetic oligonucleotide
gacccaauagguauuaacc

SEQ ID NO: 2101060 - RNA, 19 nt, Artificial Sequence
  Description of Artificial Sequence: Synthetic oligonucleotide
aagcaauuguuuccaaaug

SEQ ID NO: 2101061 - RNA, 19 nt, Artificial Sequence
  Description of Artificial Sequence: Synthetic oligonucleotide
ucaggcuagugucauaucu

SEQ ID NO: 2101062 - RNA, 19 nt, Artificial Sequence
  Description of Artificial Sequence: Synthetic oligonucleotide
agguauuaaccacaacuuc

SEQ ID NO: 2101063 - RNA, 19 nt, Artificial Sequence
  Description of Artificial Sequence: Synthetic oligonucleotide
uagaccuuuagcuaauccu

SEQ ID NO: 2101064 - RNA, 19 nt, Artificial Sequence
  Description of Artificial Sequence: Synthetic oligonucleotide
agcaauuguuuccaaauga

SEQ ID NO: 2101065 - RNA, 19 nt, Artificial Sequence
  Description of Artificial Sequence: Synthetic oligonucleotide
ugucauaucugaaacuuua

SEQ ID NO: 2101066 - RNA, 19 nt, Artificial Sequence
  Description of Artificial Sequence: Synthetic oligonucleotide
aaacauagaccuuuagcua

SEQ ID NO: 2101067 - RNA, 19 nt, Artificial Sequence
  Description of Artificial Sequence: Synthetic oligonucleotide
accauuauaaaaguaauuu

SEQ ID NO: 2101068 - RNA, 19 nt, Artificial Sequence
  Description of Artificial Sequence: Synthetic oligonucleotide
gauauucuugaugaagccc

SEQ ID NO: 2101069 - RNA, 19 nt, Artificial Sequence
  Description of Artificial Sequence: Synthetic oligonucleotide
aaagugaugaugagccuuc

SEQ ID NO: 2101070 - RNA, 19 nt, Artificial Sequence
  Description of Artificial Sequence: Synthetic oligonucleotide
guuaacucuguacauuagc

SEQ ID NO: 2101071 - RNA, 19 nt, Artificial Sequence
  Description of Artificial Sequence: Synthetic oligonucleotide
uggaugguucauaacuuag

SEQ ID NO: 2101072 - RNA, 19 nt, Artificial Sequence
  Description of Artificial Sequence: Synthetic oligonucleotide
aaccaaagagaaucacaag

SEQ ID NO: 2101073 - RNA, 19 nt, Artificial Sequence
  Description of Artificial Sequence: Synthetic oligonucleotide
uagguauuaaccacaacuu

SEQ ID NO: 2101074 - RNA, 19 nt, Artificial Sequence
  Description of Artificial Sequence: Synthetic oligonucleotide
aauaagcuauauagcagag

SEQ ID NO: 2101075 - RNA, 19 nt, Artificial Sequence
  Description of Artificial Sequence: Synthetic oligonucleotide
gaaagcugguuauaaauaa

SEQ ID NO: 2101076 - RNA, 19 nt, Artificial Sequence
  Description of Artificial Sequence: Synthetic oligonucleotide
aguucagucagcaaaguca

SEQ ID NO: 2101077 - RNA, 19 nt, Artificial Sequence
  Description of Artificial Sequence: Synthetic oligonucleotide
gaauuuuaauuauacugaa

SEQ ID NO: 2101078 - RNA, 19 nt, Artificial Sequence
  Description of Artificial Sequence: Synthetic oligonucleotide
uaauccucaggcuaguguc

SEQ ID NO: 2101079 - RNA, 19 nt, Artificial Sequence
  Description of Artificial Sequence: Synthetic oligonucleotide
uuaggcuuauaguauuucu

SEQ ID NO: 2101080 - RNA, 19 nt, Artificial Sequence
  Description of Artificial Sequence: Synthetic oligonucleotide
agucuauaagccucauggg

SEQ ID NO: 2101081 - RNA, 19 nt, Artificial Sequence
  Description of Artificial Sequence: Synthetic oligonucleotide
ucacuguucgguuaacucu

SEQ ID NO: 2101082 - RNA, 19 nt, Artificial Sequence
  Description of Artificial Sequence: Synthetic oligonucleotide
ugacaagccaacaauggua

SEQ ID NO: 2101083 - RNA, 19 nt, Artificial Sequence
  Description of Artificial Sequence: Synthetic oligonucleotide
aauggcugagcugccaccg

SEQ ID NO: 2101084 - RNA, 19 nt, Artificial Sequence
  Description of Artificial Sequence: Synthetic oligonucleotide
uuuaggcuuucauggauug

SEQ ID NO: 2101085 - RNA, 19 nt, Artificial Sequence
  Description of Artificial Sequence: Synthetic oligonucleotide
agcauuaguguccaucuca

SEQ ID NO: 2101086 - RNA, 19 nt, Artificial Sequence
  Description of Artificial Sequence: Synthetic oligonucleotide
guccuaaacaucugcacag

SEQ ID NO: 2101087 - RNA, 19 nt, Artificial Sequence
  Description of Artificial Sequence: Synthetic oligonucleotide
uacuggagugcaaaaggcc

SEQ ID NO: 2101088 - RNA, 19 nt, Artificial Sequence
  Description of Artificial Sequence: Synthetic oligonucleotide
auuaaccacaacuucuuau

SEQ ID NO: 2101089 - RNA, 19 nt, Artificial Sequence
  Description of Artificial Sequence: Synthetic oligonucleotide
caacauugaagucuauaag

SEQ ID NO: 2101090 - RNA, 19 nt, Artificial Sequence
  Description of Artificial Sequence: Synthetic oligonucleotide
aaaaguuuucaggaaagua

SEQ ID NO: 2101091 - RNA, 19 nt, Artificial Sequence
  Description of Artificial Sequence: Synthetic oligonucleotide
agauuuugaccguagccug

SEQ ID NO: 2101092 - RNA, 19 nt, Artificial Sequence
  Description of Artificial Sequence: Synthetic oligonucleotide
acaaugguaaccaaagaga

SEQ ID NO: 2101093 - RNA, 19 nt, Artificial Sequence
  Description of Artificial Sequence: Synthetic oligonucleotide
aguccuaaacaucugcaca

SEQ ID NO: 2101094 - RNA, 19 nt, Artificial Sequence
  Description of Artificial Sequence: Synthetic oligonucleotide
uuucuaccauuauaaaagu

SEQ ID NO: 2101095 - RNA, 19 nt, Artificial Sequence
  Description of Artificial Sequence: Synthetic oligonucleotide
uuauacugaaaaucacccu

SEQ ID NO: 2101096 - RNA, 19 nt, Artificial Sequence
  Description of Artificial Sequence: Synthetic oligonucleotide
aaacugcuacguuucuguc

SEQ ID NO: 2101097 - RNA, 19 nt, Artificial Sequence
  Description of Artificial Sequence: Synthetic oligonucleotide
uguucgguuaacucuguac

SEQ ID NO: 2101098 - RNA, 19 nt, Artificial Sequence
  Description of Artificial Sequence: Synthetic oligonucleotide
aaggaaaacuuagacuuga

SEQ ID NO: 2101099 - RNA, 19 nt, Artificial Sequence
  Description of Artificial Sequence: Synthetic oligonucleotide
uccacagaaagugaugaug

SEQ ID NO: 2101100 - RNA, 19 nt, Artificial Sequence
  Description of Artificial Sequence: Synthetic oligonucleotide
uaacuuaggcuuauaguau

SEQ ID NO: 2101101 - RNA, 19 nt, Artificial Sequence
  Description of Artificial Sequence: Synthetic oligonucleotide
uauuuaggcuuucauggau

SEQ ID NO: 2101102 - RNA, 19 nt, Artificial Sequence
  Description of Artificial Sequence: Synthetic oligonucleotide
agaccuuuagcuaauccuc

SEQ ID NO: 2101103 - RNA, 19 nt, Artificial Sequence
  Description of Artificial Sequence: Synthetic oligonucleotide
auauucuugaugaagccca

SEQ ID NO: 2101104 - RNA, 19 nt, Artificial Sequence
  Description of Artificial Sequence: Synthetic oligonucleotide
aaguaauuugcaaaggcua

SEQ ID NO: 2101105 - RNA, 19 nt, Artificial Sequence
  Description of Artificial Sequence: Synthetic oligonucleotide
uagcuaauccucaggcuag

SEQ ID NO: 2101106 - RNA, 19 nt, Artificial Sequence
  Description of Artificial Sequence: Synthetic oligonucleotide
uugaggauuagagugguuc

SEQ ID NO: 2101107 - RNA, 19 nt, Artificial Sequence
  Description of Artificial Sequence: Synthetic oligonucleotide
ucugcugacaagccaacaa

SEQ ID NO: 2101108 - RNA, 19 nt, Artificial Sequence
  Description of Artificial Sequence: Synthetic oligonucleotide
aucuugauugucauccucg

SEQ ID NO: 2101109 - RNA, 19 nt, Artificial Sequence
  Description of Artificial Sequence: Synthetic oligonucleotide
uuuagcuaauccucaggcu

SEQ ID NO: 2101110 - RNA, 19 nt, Artificial Sequence
  Description of Artificial Sequence: Synthetic oligonucleotide
gacuugaagcaauuguuuc

SEQ ID NO: 2101111 - RNA, 19 nt, Artificial Sequence
  Description of Artificial Sequence: Synthetic oligonucleotide
uugaagucuauaagccuca

SEQ ID NO: 2101112 - RNA, 19 nt, Artificial Sequence
  Description of Artificial Sequence: Synthetic oligonucleotide
aacuuaggcuuauaguauu

SEQ ID NO: 2101113 - RNA, 19 nt, Artificial Sequence
  Description of Artificial Sequence: Synthetic oligonucleotide
guucgguuaacucuguaca

SEQ ID NO: 2101114 - RNA, 19 nt, Artificial Sequence
  Description of Artificial Sequence: Synthetic oligonucleotide
ugacuuauuuugaggauua

SEQ ID NO: 2101115 - RNA, 19 nt, Artificial Sequence
  Description of Artificial Sequence: Synthetic oligonucleotide
aaaguccuaaacaucugca

SEQ ID NO: 2101116 - RNA, 19 nt, Artificial Sequence
  Description of Artificial Sequence: Synthetic oligonucleotide
aaagucaauuuugcaaagu

SEQ ID NO: 2101117 - RNA, 19 nt, Artificial Sequence
  Description of Artificial Sequence: Synthetic oligonucleotide
cugaaaaucacccuuaaau

SEQ ID NO: 2101118 - RNA, 19 nt, Artificial Sequence
  Description of Artificial Sequence: Synthetic oligonucleotide
cuuucauggauuggggagg

SEQ ID NO: 2101119 - RNA, 19 nt, Artificial Sequence
  Description of Artificial Sequence: Synthetic oligonucleotide
gaauaacauagagauuuug

SEQ ID NO: 2101120 - RNA, 19 nt, Artificial Sequence
  Description of Artificial Sequence: Synthetic oligonucleotide
auuuugaccguagccuggc

SEQ ID NO: 2101121 - RNA, 19 nt, Artificial Sequence
  Description of Artificial Sequence: Synthetic oligonucleotide
ugaggauuagagugguucu

SEQ ID NO: 2101122 - RNA, 19 nt, Artificial Sequence
  Description of Artificial Sequence: Synthetic oligonucleotide
aauuuuaauuauacugaaa

SEQ ID NO: 2101123 - RNA, 19 nt, Artificial Sequence
  Description of Artificial Sequence: Synthetic oligonucleotide
cacaacuucuuauuaucac

SEQ ID NO: 2101124 - RNA, 19 nt, Artificial Sequence
  Description of Artificial Sequence: Synthetic oligonucleotide
auaaguggggaaauggaug

SEQ ID NO: 2101125 - RNA, 19 nt, Artificial Sequence
  Description of Artificial Sequence: Synthetic oligonucleotide
uagagauuuugaccguagc

SEQ ID NO: 2101126 - RNA, 19 nt, Artificial Sequence
  Description of Artificial Sequence: Synthetic oligonucleotide
agcagagaaaugaauaaca

SEQ ID NO: 2101127 - RNA, 19 nt, Artificial Sequence
  Description of Artificial Sequence: Synthetic oligonucleotide
cuggauauucuugaugaag

SEQ ID NO: 2101128 - RNA, 19 nt, Artificial Sequence
  Description of Artificial Sequence: Synthetic oligonucleotide
auauuuaggcuuucaugga

SEQ ID NO: 2101129 - RNA, 19 nt, Artificial Sequence
  Description of Artificial Sequence: Synthetic oligonucleotide
gucuauaagccucauggga

SEQ ID NO: 2101130 - RNA, 19 nt, Artificial Sequence
  Description of Artificial Sequence: Synthetic oligonucleotide
gcugugaaaacauagaccu

SEQ ID NO: 2101131 - RNA, 19 nt, Artificial Sequence
  Description of Artificial Sequence: Synthetic oligonucleotide
uauucuugaugaagcccag

SEQ ID NO: 2101132 - RNA, 19 nt, Artificial Sequence
  Description of Artificial Sequence: Synthetic oligonucleotide
aaaggaaaacuuagacuug

SEQ ID NO: 2101133 - RNA, 19 nt, Artificial Sequence
  Description of Artificial Sequence: Synthetic oligonucleotide
ugaugagccuucuggauaa

SEQ ID NO: 2101134 - RNA, 19 nt, Artificial Sequence
  Description of Artificial Sequence: Synthetic oligonucleotide
uacauuagcuccugcugug

SEQ ID NO: 2101135 - RNA, 19 nt, Artificial Sequence
  Description of Artificial Sequence: Synthetic oligonucleotide
caacuucuuauuaucacca

SEQ ID NO: 2101136 - RNA, 19 nt, Artificial Sequence
  Description of Artificial Sequence: Synthetic oligonucleotide
acuuuaccgucuucaacag

SEQ ID NO: 2101137 - RNA, 19 nt, Artificial Sequence
  Description of Artificial Sequence: Synthetic oligonucleotide
auaaauaaguggggaaaug

SEQ ID NO: 2101138 - RNA, 19 nt, Artificial Sequence
  Description of Artificial Sequence: Synthetic oligonucleotide
aaacuuagacuugaagcaa

SEQ ID NO: 2101139 - RNA, 19 nt, Artificial Sequence
  Description of Artificial Sequence: Synthetic oligonucleotide
uuaucaccaaacaccugcu

SEQ ID NO: 2101140 - RNA, 19 nt, Artificial Sequence
  Description of Artificial Sequence: Synthetic oligonucleotide
ucucuuaauggcugagcug

SEQ ID NO: 2101141 - RNA, 19 nt, Artificial Sequence
  Description of Artificial Sequence: Synthetic oligonucleotide
uaacucuguacauuagcuc

SEQ ID NO: 2101142 - RNA, 19 nt, Artificial Sequence
  Description of Artificial Sequence: Synthetic oligonucleotide
ugugaagcuuucuauccaa

SEQ ID NO: 2101143 - RNA, 19 nt, Artificial Sequence
  Description of Artificial Sequence: Synthetic oligonucleotide
augguucauaacuuaggcu

SEQ ID NO: 2101144 - RNA, 19 nt, Artificial Sequence
  Description of Artificial Sequence: Synthetic oligonucleotide
gauuuugaccguagccugg

SEQ ID NO: 2101145 - RNA, 19 nt, Artificial Sequence
  Description of Artificial Sequence: Synthetic oligonucleotide
ucauagggaaggagugucc

SEQ ID NO: 2101146 - RNA, 19 nt, Artificial Sequence
  Description of Artificial Sequence: Synthetic oligonucleotide
agcagcauuaguguccauc

SEQ ID NO: 2101147 - RNA, 19 nt, Artificial Sequence
  Description of Artificial Sequence: Synthetic oligonucleotide
agugucauaucugaaacuu

SEQ ID NO: 2101148 - RNA, 19 nt, Artificial Sequence
  Description of Artificial Sequence: Synthetic oligonucleotide
gauuagagugguucucaac

SEQ ID NO: 2101149 - RNA, 19 nt, Artificial Sequence
  Description of Artificial Sequence: Synthetic oligonucleotide
auggaaacugcuacguuuc

SEQ ID NO: 2101150 - RNA, 19 nt, Artificial Sequence
  Description of Artificial Sequence: Synthetic oligonucleotide
uaauuugcaaaggcuaaaa

SEQ ID NO: 2101151 - RNA, 19 nt, Artificial Sequence
  Description of Artificial Sequence: Synthetic oligonucleotide
ugguaaccaaagagaauca

SEQ ID NO: 2101152 - RNA, 19 nt, Artificial Sequence
  Description of Artificial Sequence: Synthetic oligonucleotide
cacuguucgguuaacucug

SEQ ID NO: 2101153 - RNA, 19 nt, Artificial Sequence
  Description of Artificial Sequence: Synthetic oligonucleotide
uuucauggauuggggaggg

SEQ ID NO: 2101154 - RNA, 19 nt, Artificial Sequence
  Description of Artificial Sequence: Synthetic oligonucleotide
gggaaauggauguaaacuc

SEQ ID NO: 2101155 - RNA, 19 nt, Artificial Sequence
  Description of Artificial Sequence: Synthetic oligonucleotide
aaggaaaggaaaacuuaga

SEQ ID NO: 2101156 - RNA, 19 nt, Artificial Sequence
  Description of Artificial Sequence: Synthetic oligonucleotide
aaaaggggacuggaauauc

SEQ ID NO: 2101157 - RNA, 19 nt, Artificial Sequence
  Description of Artificial Sequence: Synthetic oligonucleotide
acucucuuaauggcugagc

SEQ ID NO: 2101158 - RNA, 19 nt, Artificial Sequence
  Description of Artificial Sequence: Synthetic oligonucleotide
aggugcaggaaauauggaa

SEQ ID NO: 2101159 - RNA, 19 nt, Artificial Sequence
  Description of Artificial Sequence: Synthetic oligonucleotide
uauuaucaccaaacaccug

SEQ ID NO: 2101160 - RNA, 19 nt, Artificial Sequence
  Description of Artificial Sequence: Synthetic oligonucleotide
uuagcuccugcugugaaaa

SEQ ID NO: 2101161 - RNA, 19 nt, Artificial Sequence
  Description of Artificial Sequence: Synthetic oligonucleotide
aauggaugguucauaacuu

SEQ ID NO: 2101162 - RNA, 19 nt, Artificial Sequence
  Description of Artificial Sequence: Synthetic oligonucleotide
ucuugauugucauccucgu

SEQ ID NO: 2101163 - RNA, 19 nt, Artificial Sequence
  Description of Artificial Sequence: Synthetic oligonucleotide
acuuauuuugaggauuaga

SEQ ID NO: 2101164 - RNA, 19 nt, Artificial Sequence
  Description of Artificial Sequence: Synthetic oligonucleotide
uuagagugguucucaacau

SEQ ID NO: 2101165 - RNA, 19 nt, Artificial Sequence
  Description of Artificial Sequence: Synthetic oligonucleotide
ucacccuuaaauccuuuua

SEQ ID NO: 2101166 - RNA, 19 nt, Artificial Sequence
  Description of Artificial Sequence: Synthetic oligonucleotide
aggguucuucauuugccag

SEQ ID NO: 2101167 - RNA, 19 nt, Artificial Sequence
  Description of Artificial Sequence: Synthetic oligonucleotide
uuugaccguagccuggcau

SEQ ID NO: 2101168 - RNA, 19 nt, Artificial Sequence
  Description of Artificial Sequence: Synthetic oligonucleotide
gagauuuugaccguagccu

SEQ ID NO: 2101169 - RNA, 19 nt, Artificial Sequence
  Description of Artificial Sequence: Synthetic oligonucleotide
ucucugguccacuuguaaa

SEQ ID NO: 2101170 - RNA, 19 nt, Artificial Sequence
  Description of Artificial Sequence: Synthetic oligonucleotide
uguugcaggugcaggaaau

SEQ ID NO: 2101171 - RNA, 19 nt, Artificial Sequence
  Description of Artificial Sequence: Synthetic oligonucleotide
gaaacuuuaccgucuucaa

SEQ ID NO: 2101172 - RNA, 19 nt, Artificial Sequence
  Description of Artificial Sequence: Synthetic oligonucleotide
ugaauaacauagagauuuu

SEQ ID NO: 2101173 - RNA, 19 nt, Artificial Sequence
  Description of Artificial Sequence: Synthetic oligonucleotide
ggauauucuugaugaagcc

SEQ ID NO: 2101174 - RNA, 19 nt, Artificial Sequence
  Description of Artificial Sequence: Synthetic oligonucleotide
ucugugacucauucauaga

SEQ ID NO: 2101175 - RNA, 19 nt, Artificial Sequence
  Description of Artificial Sequence: Synthetic oligonucleotide
gcaaagucaauuuugcaaa

SEQ ID NO: 2101176 - RNA, 19 nt, Artificial Sequence
  Description of Artificial Sequence: Synthetic oligonucleotide
uuugccagcagcggguucu

SEQ ID NO: 2101177 - RNA, 19 nt, Artificial Sequence
  Description of Artificial Sequence: Synthetic oligonucleotide
uauuaaccacaacuucuua

SEQ ID NO: 2101178 - RNA, 19 nt, Artificial Sequence
  Description of Artificial Sequence: Synthetic oligonucleotide
cauuaaaaguuuucaggaa

SEQ ID NO: 2101179 - RNA, 19 nt, Artificial Sequence
  Description of Artificial Sequence: Synthetic oligonucleotide
aggcuagugucauaucuga

SEQ ID NO: 2101180 - RNA, 19 nt, Artificial Sequence
  Description of Artificial Sequence: Synthetic oligonucleotide
uuaggcuuucauggauugg

SEQ ID NO: 2101181 - RNA, 19 nt, Artificial Sequence
  Description of Artificial Sequence: Synthetic oligonucleotide
ucuuaauggcugagcugcc

SEQ ID NO: 2101182 - RNA, 19 nt, Artificial Sequence
  Description of Artificial Sequence: Synthetic oligonucleotide
aaggaguguccaucaccag

SEQ ID NO: 2101183 - RNA, 19 nt, Artificial Sequence
  Description of Artificial Sequence: Synthetic oligonucleotide
ugcacagcauguauuugau

SEQ ID NO: 2101184 - RNA, 19 nt, Artificial Sequence
  Description of Artificial Sequence: Synthetic oligonucleotide
acaagccaacaaugguaac

SEQ ID NO: 2101185 - RNA, 19 nt, Artificial Sequence
  Description of Artificial Sequence: Synthetic oligonucleotide
uaaucuugauugucauccu

SEQ ID NO: 2101186 - RNA, 19 nt, Artificial Sequence
  Description of Artificial Sequence: Synthetic oligonucleotide
caggcuagugucauaucug

SEQ ID NO: 2101187 - RNA, 19 nt, Artificial Sequence
  Description of Artificial Sequence: Synthetic oligonucleotide
ucuguacauuagcuccugc

SEQ ID NO: 2101188 - RNA, 19 nt, Artificial Sequence
  Description of Artificial Sequence: Synthetic oligonucleotide
gcaauuguuuccaaaugag

SEQ ID NO: 2101189 - RNA, 19 nt, Artificial Sequence
  Description of Artificial Sequence: Synthetic oligonucleotide
agcugguuauaaauaagug

SEQ ID NO: 2101190 - RNA, 19 nt, Artificial Sequence
  Description of Artificial Sequence: Synthetic oligonucleotide
agugguucucaacauugaa

SEQ ID NO: 2101191 - RNA, 19 nt, Artificial Sequence
  Description of Artificial Sequence: Synthetic oligonucleotide
cuugaagcaauuguuucca

SEQ ID NO: 2101192 - RNA, 19 nt, Artificial Sequence
  Description of Artificial Sequence: Synthetic oligonucleotide
augaugagccuucuggaua

SEQ ID NO: 2101193 - RNA, 19 nt, Artificial Sequence
  Description of Artificial Sequence: Synthetic oligonucleotide
gaguucagucagcaaaguc

SEQ ID NO: 2101194 - RNA, 19 nt, Artificial Sequence
  Description of Artificial Sequence: Synthetic oligonucleotide
uucgguuaacucuguacau

SEQ ID NO: 2101195 - RNA, 19 nt, Artificial Sequence
  Description of Artificial Sequence: Synthetic oligonucleotide
cuucauuugccagcagcgg

SEQ ID NO: 2101196 - RNA, 19 nt, Artificial Sequence
  Description of Artificial Sequence: Synthetic oligonucleotide
auccucguugucuucccag

SEQ ID NO: 2101197 - RNA, 19 nt, Artificial Sequence
  Description of Artificial Sequence: Synthetic oligonucleotide
auagagauuuugaccguag

SEQ ID NO: 2101198 - RNA, 19 nt, Artificial Sequence
  Description of Artificial Sequence: Synthetic oligonucleotide
uucucugguccacuuguaa

SEQ ID NO: 2101199 - RNA, 19 nt, Artificial Sequence
  Description of Artificial Sequence: Synthetic oligonucleotide
guguccaucaccagggcug

SEQ ID NO: 2101200 - RNA, 19 nt, Artificial Sequence
  Description of Artificial Sequence: Synthetic oligonucleotide
aaugaauaacauagagauu

SEQ ID NO: 2101201 - RNA, 19 nt, Artificial Sequence
  Description of Artificial Sequence: Synthetic oligonucleotide
gaagcuuucuauccaacau

SEQ ID NO: 2101202 - RNA, 19 nt, Artificial Sequence
  Description of Artificial Sequence: Synthetic oligonucleotide
ggcuuauaguauuucuacc

SEQ ID NO: 2101203 - RNA, 19 nt, Artificial Sequence
  Description of Artificial Sequence: Synthetic oligonucleotide
aacuuagacuugaagcaau

SEQ ID NO: 2101204 - RNA, 19 nt, Artificial Sequence
  Description of Artificial Sequence: Synthetic oligonucleotide
gguuauaaauaagugggga

SEQ ID NO: 2101205 - RNA, 19 nt, Artificial Sequence
  Description of Artificial Sequence: Synthetic oligonucleotide
cuggaauaucacuguucgg

SEQ ID NO: 2101206 - RNA, 19 nt, Artificial Sequence
  Description of Artificial Sequence: Synthetic oligonucleotide
agaaagugaugaugagccu

SEQ ID NO: 2101207 - RNA, 19 nt, Artificial Sequence
  Description of Artificial Sequence: Synthetic oligonucleotide
ucaugggagauggugguuc

SEQ ID NO: 2101208 - RNA, 19 nt, Artificial Sequence
  Description of Artificial Sequence: Synthetic oligonucleotide
caaaggcuaaaauaagcua

SEQ ID NO: 2101209 - RNA, 19 nt, Artificial Sequence
  Description of Artificial Sequence: Synthetic oligonucleotide
agugaugaugagccuucug

SEQ ID NO: 2101210 - RNA, 19 nt, Artificial Sequence
  Description of Artificial Sequence: Synthetic oligonucleotide
uguccaucaccagggcugg

SEQ ID NO: 2101211 - RNA, 19 nt, Artificial Sequence
  Description of Artificial Sequence: Synthetic oligonucleotide
ggaugguucauaacuuagg

SEQ ID NO: 2101212 - RNA, 19 nt, Artificial Sequence
  Description of Artificial Sequence: Synthetic oligonucleotide
gaauaucacuguucgguua

SEQ ID NO: 2101213 - RNA, 19 nt, Artificial Sequence
  Description of Artificial Sequence: Synthetic oligonucleotide
auaaaauggaugguucaua

SEQ ID NO: 2101214 - RNA, 19 nt, Artificial Sequence
  Description of Artificial Sequence: Synthetic oligonucleotide
caucaccagggcuggaccc

SEQ ID NO: 2101215 - RNA, 19 nt, Artificial Sequence
  Description of Artificial Sequence: Synthetic oligonucleotide
agggaaggaguguccauca

SEQ ID NO: 2101216 - RNA, 19 nt, Artificial Sequence
  Description of Artificial Sequence: Synthetic oligonucleotide
auaagcuauauagcagaga

SEQ ID NO: 2101217 - RNA, 19 nt, Artificial Sequence
  Description of Artificial Sequence: Synthetic oligonucleotide
gauggaacacccaaacugu

SEQ ID NO: 2101218 - RNA, 19 nt, Artificial Sequence
  Description of Artificial Sequence: Synthetic oligonucleotide
acauagagauuuugaccgu

SEQ ID NO: 2101219 - RNA, 19 nt, Artificial Sequence
  Description of Artificial Sequence: Synthetic oligonucleotide
uccuaaacaucugcacagc

SEQ ID NO: 2101220 - RNA, 19 nt, Artificial Sequence
  Description of Artificial Sequence: Synthetic oligonucleotide
cuauaagccucaugggaga

SEQ ID NO: 2101221 - RNA, 19 nt, Artificial Sequence
  Description of Artificial Sequence: Synthetic oligonucleotide
caugggagauggugguucc

SEQ ID NO: 2101222 - RNA, 19 nt, Artificial Sequence
  Description of Artificial Sequence: Synthetic oligonucleotide
cucauagggaaggaguguc

SEQ ID NO: 2101223 - RNA, 19 nt, Artificial Sequence
  Description of Artificial Sequence: Synthetic oligonucleotide
uccaacauggugacuuauu

SEQ ID NO: 2101224 - RNA, 19 nt, Artificial Sequence
  Description of Artificial Sequence: Synthetic oligonucleotide
guagccuggcauuaaaagu

SEQ ID NO: 2101225 - RNA, 19 nt, Artificial Sequence
  Description of Artificial Sequence: Synthetic oligonucleotide
ucauggauuggggagggua

SEQ ID NO: 2101226 - RNA, 19 nt, Artificial Sequence
  Description of Artificial Sequence: Synthetic oligonucleotide
gugacucauucauagaccu

SEQ ID NO: 2101227 - RNA, 19 nt, Artificial Sequence
  Description of Artificial Sequence: Synthetic oligonucleotide
cuuaggcuuauaguauuuc

SEQ ID NO: 2101228 - RNA, 19 nt, Artificial Sequence
  Description of Artificial Sequence: Synthetic oligonucleotide
auccuuuuauaaaauggau

SEQ ID NO: 2101229 - RNA, 19 nt, Artificial Sequence
  Description of Artificial Sequence: Synthetic oligonucleotide
guuucugcugacaagccaa

SEQ ID NO: 2101230 - RNA, 19 nt, Artificial Sequence
  Description of Artificial Sequence: Synthetic oligonucleotide
uaucacuguucgguuaacu

SEQ ID NO: 2101231 - RNA, 19 nt, Artificial Sequence
  Description of Artificial Sequence: Synthetic oligonucleotide
uugaccguagccuggcauu

SEQ ID NO: 2101232 - RNA, 19 nt, Artificial Sequence
  Description of Artificial Sequence: Synthetic oligonucleotide
caauuuugcaaaguccuaa

SEQ ID NO: 2101233 - RNA, 19 nt, Artificial Sequence
  Description of Artificial Sequence: Synthetic oligonucleotide
gguauuaaccacaacuucu

SEQ ID NO: 2101234 - RNA, 19 nt, Artificial Sequence
  Description of Artificial Sequence: Synthetic oligonucleotide
ggggacuggaauaucacug

SEQ ID NO: 2101235 - RNA, 19 nt, Artificial Sequence
  Description of Artificial Sequence: Synthetic oligonucleotide
ugacucauucauagaccuc

SEQ ID NO: 2101236 - RNA, 19 nt, Artificial Sequence
  Description of Artificial Sequence: Synthetic oligonucleotide
aggccucuaagguaguuuu

SEQ ID NO: 2101237 - RNA, 19 nt, Artificial Sequence
  Description of Artificial Sequence: Synthetic oligonucleotide
uggaaacugcuacguuucu

SEQ ID NO: 2101238 - RNA, 19 nt, Artificial Sequence
  Description of Artificial Sequence: Synthetic oligonucleotide
gcuagugucauaucugaaa

SEQ ID NO: 2101239 - RNA, 19 nt, Artificial Sequence
  Description of Artificial Sequence: Synthetic oligonucleotide
guucagucagcaaagucaa

SEQ ID NO: 2101240 - RNA, 19 nt, Artificial Sequence
  Description of Artificial Sequence: Synthetic oligonucleotide
guacauuagcuccugcugu

SEQ ID NO: 2101241 - RNA, 19 nt, Artificial Sequence
  Description of Artificial Sequence: Synthetic oligonucleotide
agccucaugggagauggug

SEQ ID NO: 2101242 - RNA, 19 nt, Artificial Sequence
  Description of Artificial Sequence: Synthetic oligonucleotide
uaguuuuguuucugcugac

SEQ ID NO: 2101243 - RNA, 19 nt, Artificial Sequence
  Description of Artificial Sequence: Synthetic oligonucleotide
ggguucuucauuugccagc

SEQ ID NO: 2101244 - RNA, 19 nt, Artificial Sequence
  Description of Artificial Sequence: Synthetic oligonucleotide
gucauaucugaaacuuuac

SEQ ID NO: 2101245 - RNA, 19 nt, Artificial Sequence
  Description of Artificial Sequence: Synthetic oligonucleotide
cuggagugcaaaaggccuc

SEQ ID NO: 2101246 - RNA, 19 nt, Artificial Sequence
  Description of Artificial Sequence: Synthetic oligonucleotide
uuuugaccguagccuggca

SEQ ID NO: 2101247 - RNA, 19 nt, Artificial Sequence
  Description of Artificial Sequence: Synthetic oligonucleotide
auaucacuguucgguuaac

SEQ ID NO: 2101248 - RNA, 19 nt, Artificial Sequence
  Description of Artificial Sequence: Synthetic oligonucleotide
caauuguuuccaaaugagu

SEQ ID NO: 2101249 - RNA, 19 nt, Artificial Sequence
  Description of Artificial Sequence: Synthetic oligonucleotide
augagccuucuggauaauc

SEQ ID NO: 2101250 - RNA, 19 nt, Artificial Sequence
  Description of Artificial Sequence: Synthetic oligonucleotide
cauugaagucuauaagccu

SEQ ID NO: 2101251 - RNA, 19 nt, Artificial Sequence
  Description of Artificial Sequence: Synthetic oligonucleotide
agacuugaagcaauuguuu

SEQ ID NO: 2101252 - RNA, 19 nt, Artificial Sequence
  Description of Artificial Sequence: Synthetic oligonucleotide
ccuuuagcuaauccucagg

SEQ ID NO: 2101253 - RNA, 19 nt, Artificial Sequence
  Description of Artificial Sequence: Synthetic oligonucleotide
ccaauagguauuaaccaca

SEQ ID NO: 2101254 - RNA, 19 nt, Artificial Sequence
  Description of Artificial Sequence: Synthetic oligonucleotide
agaccucauagggaaggag

SEQ ID NO: 2101255 - RNA, 19 nt, Artificial Sequence
  Description of Artificial Sequence: Synthetic oligonucleotide
cuuauaguauuucuaccau

SEQ ID NO: 2101256 - RNA, 19 nt, Artificial Sequence
  Description of Artificial Sequence: Synthetic oligonucleotide
ucgguuaacucuguacauu

SEQ ID NO: 2101257 - RNA, 19 nt, Artificial Sequence
  Description of Artificial Sequence: Synthetic oligonucleotide
ggaacacccaaacugugaa

SEQ ID NO: 2101258 - RNA, 19 nt, Artificial Sequence
  Description of Artificial Sequence: Synthetic oligonucleotide
auuugauggaacacccaaa

SEQ ID NO: 2101259 - RNA, 19 nt, Artificial Sequence
  Description of Artificial Sequence: Synthetic oligonucleotide
aagcuauauagcagagaaa

SEQ ID NO: 2101260 - RNA, 19 nt, Artificial Sequence
  Description of Artificial Sequence: Synthetic oligonucleotide
uauccaacauggugacuua

SEQ ID NO: 2101261 - RNA, 19 nt, Artificial Sequence
  Description of Artificial Sequence: Synthetic oligonucleotide
ccuuaaauccuuuuauaaa

SEQ ID NO: 2101262 - RNA, 19 nt, Artificial Sequence
  Description of Artificial Sequence: Synthetic oligonucleotide
ucugguccacuuguaaaua

SEQ ID NO: 2101263 - RNA, 19 nt, Artificial Sequence
  Description of Artificial Sequence: Synthetic oligonucleotide
cauggauuggggaggguaa

SEQ ID NO: 2101264 - RNA, 19 nt, Artificial Sequence
  Description of Artificial Sequence: Synthetic oligonucleotide
accgucuucaacagaauuu

SEQ ID NO: 2101265 - RNA, 19 nt, Artificial Sequence
  Description of Artificial Sequence: Synthetic oligonucleotide
uugcaggugcaggaaauau

SEQ ID NO: 2101266 - RNA, 19 nt, Artificial Sequence
  Description of Artificial Sequence: Synthetic oligonucleotide
aggcuuucauggauugggg

SEQ ID NO: 2101267 - RNA, 19 nt, Artificial Sequence
  Description of Artificial Sequence: Synthetic oligonucleotide
auuuaggcuuucauggauu

SEQ ID NO: 2101268 - RNA, 19 nt, Artificial Sequence
  Description of Artificial Sequence: Synthetic oligonucleotide
uauaagccucaugggagau

SEQ ID NO: 2101269 - RNA, 19 nt, Artificial Sequence
  Description of Artificial Sequence: Synthetic oligonucleotide
guaauuugcaaaggcuaaa

SEQ ID NO: 2101270 - RNA, 19 nt, Artificial Sequence
  Description of Artificial Sequence: Synthetic oligonucleotide
gaaagugaugaugagccuu

SEQ ID NO: 2101271 - RNA, 19 nt, Artificial Sequence
  Description of Artificial Sequence: Synthetic oligonucleotide
auagggaaggaguguccau

SEQ ID NO: 2101272 - RNA, 19 nt, Artificial Sequence
  Description of Artificial Sequence: Synthetic oligonucleotide
cugugaagcuuucuaucca

SEQ ID NO: 2101273 - RNA, 19 nt, Artificial Sequence
  Description of Artificial Sequence: Synthetic oligonucleotide
gguaaccaaagagaaucac

SEQ ID NO: 2101274 - RNA, 19 nt, Artificial Sequence
  Description of Artificial Sequence: Synthetic oligonucleotide
acauggugacuuauuuuga

SEQ ID NO: 2101275 - RNA, 19 nt, Artificial Sequence
  Description of Artificial Sequence: Synthetic oligonucleotide
gaccucauagggaaggagu

SEQ ID NO: 2101276 - RNA, 19 nt, Artificial Sequence
  Description of Artificial Sequence: Synthetic oligonucleotide
aagugaugaugagccuucu

SEQ ID NO: 2101277 - RNA, 19 nt, Artificial Sequence
  Description of Artificial Sequence: Synthetic oligonucleotide
uucugcugacaagccaaca

SEQ ID NO: 2101278 - RNA, 19 nt, Artificial Sequence
  Description of Artificial Sequence: Synthetic oligonucleotide
auaagccucaugggagaug

SEQ ID NO: 2101279 - RNA, 19 nt, Artificial Sequence
  Description of Artificial Sequence: Synthetic oligonucleotide
auggaacacccaaacugug

SEQ ID NO: 2101280 - RNA, 19 nt, Artificial Sequence
  Description of Artificial Sequence: Synthetic oligonucleotide
acucuguacauuagcuccu

SEQ ID NO: 2101281 - RNA, 19 nt, Artificial Sequence
  Description of Artificial Sequence: Synthetic oligonucleotide
aggcuaaaauaagcuauau

SEQ ID NO: 2101282 - RNA, 19 nt, Artificial Sequence
  Description of Artificial Sequence: Synthetic oligonucleotide
cuaauccucaggcuagugu

SEQ ID NO: 2101283 - RNA, 19 nt, Artificial Sequence
  Description of Artificial Sequence: Synthetic oligonucleotide
cuguacauuagcuccugcu

SEQ ID NO: 2101284 - RNA, 19 nt, Artificial Sequence
  Description of Artificial Sequence: Synthetic oligonucleotide
gguucucaacauugaaguc

SEQ ID NO: 2101285 - RNA, 19 nt, Artificial Sequence
  Description of Artificial Sequence: Synthetic oligonucleotide
guauuugauggaacaccca

SEQ ID NO: 2101286 - RNA, 19 nt, Artificial Sequence
  Description of Artificial Sequence: Synthetic oligonucleotide
gcaaaggcuaaaauaagcu

SEQ ID NO: 2101287 - RNA, 19 nt, Artificial Sequence
  Description of Artificial Sequence: Synthetic oligonucleotide
gaagcccagguugaaccca

SEQ ID NO: 2101288 - RNA, 19 nt, Artificial Sequence
  Description of Artificial Sequence: Synthetic oligonucleotide
accaaacaccugcuggaua

SEQ ID NO: 2101289 - RNA, 19 nt, Artificial Sequence
  Description of Artificial Sequence: Synthetic oligonucleotide
ggcuaaaauaagcuauaua

SEQ ID NO: 2101290 - RNA, 19 nt, Artificial Sequence
  Description of Artificial Sequence: Synthetic oligonucleotide
ucccaggguucuucauuug

SEQ ID NO: 2101291 - RNA, 19 nt, Artificial Sequence
  Description of Artificial Sequence: Synthetic oligonucleotide
gcaaaaggccucuaaggua

SEQ ID NO: 2101292 - RNA, 19 nt, Artificial Sequence
  Description of Artificial Sequence: Synthetic oligonucleotide
acguuucugucuccacaga

SEQ ID NO: 2101293 - RNA, 19 nt, Artificial Sequence
  Description of Artificial Sequence: Synthetic oligonucleotide
aaaaggccucuaagguagu

SEQ ID NO: 2101294 - RNA, 19 nt, Artificial Sequence
  Description of Artificial Sequence: Synthetic oligonucleotide
gcagcauuaguguccaucu

SEQ ID NO: 2101295 - RNA, 19 nt, Artificial Sequence
  Description of Artificial Sequence: Synthetic oligonucleotide
accguagccuggcauuaaa

SEQ ID NO: 2101296 - RNA, 19 nt, Artificial Sequence
  Description of Artificial Sequence: Synthetic oligonucleotide
aaaggccucuaagguaguu

SEQ ID NO: 2101297 - RNA, 19 nt, Artificial Sequence
  Description of Artificial Sequence: Synthetic oligonucleotide
ugaugaagcccagguugaa

SEQ ID NO: 2101298 - RNA, 19 nt, Artificial Sequence
  Description of Artificial Sequence: Synthetic oligonucleotide
uucauaacuuaggcuuaua

SEQ ID NO: 2101299 - RNA, 19 nt, Artificial Sequence
  Description of Artificial Sequence: Synthetic oligonucleotide
cuuaauggcugagcugcca

SEQ ID NO: 2101300 - RNA, 19 nt, Artificial Sequence
  Description of Artificial Sequence: Synthetic oligonucleotide
ugaagucuauaagccucau

SEQ ID NO: 2101301 - RNA, 19 nt, Artificial Sequence
  Description of Artificial Sequence: Synthetic oligonucleotide
acuuagacuugaagcaauu

SEQ ID NO: 2101302 - RNA, 19 nt, Artificial Sequence
  Description of Artificial Sequence: Synthetic oligonucleotide
cauagaccuuuagcuaauc

SEQ ID NO: 2101303 - RNA, 19 nt, Artificial Sequence
  Description of Artificial Sequence: Synthetic oligonucleotide
acauagaccuuuagcuaau

SEQ ID NO: 2101304 - RNA, 19 nt, Artificial Sequence
  Description of Artificial Sequence: Synthetic oligonucleotide
cuuuaccgucuucaacaga

SEQ ID NO: 2101305 - RNA, 19 nt, Artificial Sequence
  Description of Artificial Sequence: Synthetic oligonucleotide
ugaccguagccuggcauua

SEQ ID NO: 2101306 - RNA, 19 nt, Artificial Sequence
  Description of Artificial Sequence: Synthetic oligonucleotide
cagcauuaguguccaucuc

SEQ ID NO: 2101307 - RNA, 19 nt, Artificial Sequence
  Description of Artificial Sequence: Synthetic oligonucleotide
cauagagauuuugaccgua

SEQ ID NO: 2101308 - RNA, 19 nt, Artificial Sequence
  Description of Artificial Sequence: Synthetic oligonucleotide
cucaggcuagugucauauc

SEQ ID NO: 2101309 - RNA, 19 nt, Artificial Sequence
  Description of Artificial Sequence: Synthetic oligonucleotide
ggauaaucuugauugucau

SEQ ID NO: 2101310 - RNA, 19 nt, Artificial Sequence
  Description of Artificial Sequence: Synthetic oligonucleotide
gugacuuauuuugaggauu

SEQ ID NO: 2101311 - RNA, 19 nt, Artificial Sequence
  Description of Artificial Sequence: Synthetic oligonucleotide
cauuagcuccugcugugaa

SEQ ID NO: 2101312 - RNA, 19 nt, Artificial Sequence
  Description of Artificial Sequence: Synthetic oligonucleotide
ccucguugucuucccaggg

SEQ ID NO: 2101313 - RNA, 19 nt, Artificial Sequence
  Description of Artificial Sequence: Synthetic oligonucleotide
guuuccaaaugaguucagu

SEQ ID NO: 2101314 - RNA, 19 nt, Artificial Sequence
  Description of Artificial Sequence: Synthetic oligonucleotide
gcaaaguccuaaacaucug

SEQ ID NO: 2101315 - RNA, 19 nt, Artificial Sequence
  Description of Artificial Sequence: Synthetic oligonucleotide
aggaaaacuuagacuugaa

SEQ ID NO: 2101316 - RNA, 19 nt, Artificial Sequence
  Description of Artificial Sequence: Synthetic oligonucleotide
agccaacaaugguaaccaa

SEQ ID NO: 2101317 - RNA, 19 nt, Artificial Sequence
  Description of Artificial Sequence: Synthetic oligonucleotide
caggaaaguaauuccuuuu

SEQ ID NO: 2101318 - RNA, 19 nt, Artificial Sequence
  Description of Artificial Sequence: Synthetic oligonucleotide
gacugaaaggaaagcuggu

SEQ ID NO: 2101319 - RNA, 19 nt, Artificial Sequence
  Description of Artificial Sequence: Synthetic oligonucleotide
agcggguucugugacucau

SEQ ID NO: 2101320 - RNA, 19 nt, Artificial Sequence
  Description of Artificial Sequence: Synthetic oligonucleotide
agcuaauccucaggcuagu

SEQ ID NO: 2101321 - RNA, 19 nt, Artificial Sequence
  Description of Artificial Sequence: Synthetic oligonucleotide
ccuaaacaucugcacagca

SEQ ID NO: 2101322 - RNA, 19 nt, Artificial Sequence
  Description of Artificial Sequence: Synthetic oligonucleotide
ggauuagagugguucucaa

SEQ ID NO: 2101323 - RNA, 19 nt, Artificial Sequence
  Description of Artificial Sequence: Synthetic oligonucleotide
cagucagcaaagucaauuu

SEQ ID NO: 2101324 - RNA, 19 nt, Artificial Sequence
  Description of Artificial Sequence: Synthetic oligonucleotide
cugccaccgaagcuuaaaa

SEQ ID NO: 2101325 - RNA, 19 nt, Artificial Sequence
  Description of Artificial Sequence: Synthetic oligonucleotide
ggcuggacccaauagguau

SEQ ID NO: 2101326 - RNA, 19 nt, Artificial Sequence
  Description of Artificial Sequence: Synthetic oligonucleotide
gggacuggaauaucacugu

SEQ ID NO: 2101327 - RNA, 19 nt, Artificial Sequence
  Description of Artificial Sequence: Synthetic oligonucleotide
cugcuacguuucugucucc

SEQ ID NO: 2101328 - RNA, 19 nt, Artificial Sequence
  Description of Artificial Sequence: Synthetic oligonucleotide
ggaauaucacuguucgguu

SEQ ID NO: 2101329 - RNA, 19 nt, Artificial Sequence
  Description of Artificial Sequence: Synthetic oligonucleotide
acuguucgguuaacucugu

SEQ ID NO: 2101330 - RNA, 19 nt, Artificial Sequence
  Description of Artificial Sequence: Synthetic oligonucleotide
ggugacuuauuuugaggau

SEQ ID NO: 2101331 - RNA, 19 nt, Artificial Sequence
  Description of Artificial Sequence: Synthetic oligonucleotide
uggacccaauagguauuaa

SEQ ID NO: 2101332 - RNA, 19 nt, Artificial Sequence
  Description of Artificial Sequence: Synthetic oligonucleotide
ggauguaaacucucuuaau

SEQ ID NO: 2101333 - RNA, 19 nt, Artificial Sequence
  Description of Artificial Sequence: Synthetic oligonucleotide
cucauucauagaccucaua

SEQ ID NO: 2101334 - RNA, 19 nt, Artificial Sequence
  Description of Artificial Sequence: Synthetic oligonucleotide
uucauggauuggggagggu

SEQ ID NO: 2101335 - RNA, 19 nt, Artificial Sequence
  Description of Artificial Sequence: Synthetic oligonucleotide
cucguugucuucccagggu

SEQ ID NO: 2101336 - RNA, 19 nt, Artificial Sequence
  Description of Artificial Sequence: Synthetic oligonucleotide
uccucaggcuagugucaua

SEQ ID NO: 2101337 - RNA, 19 nt, Artificial Sequence
  Description of Artificial Sequence: Synthetic oligonucleotide
gggaaggaguguccaucac

SEQ ID NO: 2101338 - RNA, 19 nt, Artificial Sequence
  Description of Artificial Sequence: Synthetic oligonucleotide
gcuggauauucuugaugaa

SEQ ID NO: 2101339 - RNA, 19 nt, Artificial Sequence
  Description of Artificial Sequence: Synthetic oligonucleotide
cauccucguugucuuccca

SEQ ID NO: 2101340 - RNA, 19 nt, Artificial Sequence
  Description of Artificial Sequence: Synthetic oligonucleotide
gcagcggguucugugacuc

SEQ ID NO: 2101341 - RNA, 19 nt, Artificial Sequence
  Description of Artificial Sequence: Synthetic oligonucleotide
aagcagcauuaguguccau

SEQ ID NO: 2101342 - RNA, 19 nt, Artificial Sequence
  Description of Artificial Sequence: Synthetic oligonucleotide
ggccucuaagguaguuuug

SEQ ID NO: 2101343 - RNA, 19 nt, Artificial Sequence
  Description of Artificial Sequence: Synthetic oligonucleotide
gccucuaagguaguuuugu

SEQ ID NO: 2101344 - RNA, 19 nt, Artificial Sequence
  Description of Artificial Sequence: Synthetic oligonucleotide
cuggacccaauagguauua

SEQ ID NO: 2101345 - RNA, 19 nt, Artificial Sequence
  Description of Artificial Sequence: Synthetic oligonucleotide
cccaaacugugaagcuuuc

SEQ ID NO: 2101346 - RNA, 19 nt, Artificial Sequence
  Description of Artificial Sequence: Synthetic oligonucleotide
ccaacauggugacuuauuu

SEQ ID NO: 2101347 - RNA, 19 nt, Artificial Sequence
  Description of Artificial Sequence: Synthetic oligonucleotide
cuguucgguuaacucugua

SEQ ID NO: 2101348 - RNA, 19 nt, Artificial Sequence
  Description of Artificial Sequence: Synthetic oligonucleotide
gaccguagccuggcauuaa

SEQ ID NO: 2101349 - RNA, 19 nt, Artificial Sequence
  Description of Artificial Sequence: Synthetic oligonucleotide
cacccaaacugugaagcuu

SEQ ID NO: 2101350 - RNA, 19 nt, Artificial Sequence
  Description of Artificial Sequence: Synthetic oligonucleotide
ccguagccuggcauuaaaa

SEQ ID NO: 2101351 - RNA, 19 nt, Artificial Sequence
  Description of Artificial Sequence: Synthetic oligonucleotide
cagcggguucugugacuca

SEQ ID NO: 2101352 - RNA, 19 nt, Artificial Sequence
  Description of Artificial Sequence: Synthetic oligonucleotide
ccucaggcuagugucauau

SEQ ID NO: 2101353 - RNA, 19 nt, Artificial Sequence
  Description of Artificial Sequence: Synthetic oligonucleotide
gaugagccuucuggauaau

SEQ ID NO: 2101354 - RNA, 19 nt, Artificial Sequence
  Description of Artificial Sequence: Synthetic oligonucleotide
cauuugccagcagcggguu

SEQ ID NO: 2101355 - RNA, 19 nt, Artificial Sequence
  Description of Artificial Sequence: Synthetic oligonucleotide
gggcuggacccaauaggua

SEQ ID NO: 2101356 - RNA, 19 nt, Artificial Sequence
  Description of Artificial Sequence: Synthetic oligonucleotide
cccagguugaacccauuuu

SEQ ID NO: 2101357 - RNA, 19 nt, Artificial Sequence
  Description of Artificial Sequence: Synthetic oligonucleotide
ccucuaagguaguuuuguu

SEQ ID NO: 2101358 - RNA, 19 nt, Artificial Sequence
  Description of Artificial Sequence: Synthetic oligonucleotide
ccucauagggaaggagugu

SEQ ID NO: 2101359 - RNA, 19 nt, Artificial Sequence
  Description of Artificial Sequence: Synthetic oligonucleotide
cucaugggagauggugguu

SEQ ID NO: 2101360 - RNA, 19 nt, Artificial Sequence
  Description of Artificial Sequence: Synthetic oligonucleotide
gcuggacccaauagguauu

SEQ ID NO: 2101361 - RNA, 19 nt, Artificial Sequence
  Description of Artificial Sequence: Synthetic oligonucleotide
gcggguucugugacucauu

SEQ ID NO: 2101362 - RNA, 19 nt, Artificial Sequence
  Description of Artificial Sequence: Synthetic oligonucleotide
aaagacuugguacaaaagc

SEQ ID NO: 2101363 - RNA, 19 nt, Artificial Sequence
  Description of Artificial Sequence: Synthetic oligonucleotide
uucaggaugaccuugaggg

SEQ ID NO: 2101364 - RNA, 19 nt, Artificial Sequence
  Description of Artificial Sequence: Synthetic oligonucleotide
aauguguccacccugcagc

SEQ ID NO: 2101365 - RNA, 19 nt, Artificial Sequence
  Description of Artificial Sequence: Synthetic oligonucleotide
uuaacuuucacuuuaaguu

SEQ ID NO: 2101366 - RNA, 19 nt, Artificial Sequence
  Description of Artificial Sequence: Synthetic oligonucleotide
ugcuguuugagucucaucc

SEQ ID NO: 2101367 - RNA, 19 nt, Artificial Sequence
  Description of Artificial Sequence: Synthetic oligonucleotide
acacaaaacaggcaaaggg

SEQ ID NO: 2101368 - RNA, 19 nt, Artificial Sequence
  Description of Artificial Sequence: Synthetic oligonucleotide
uuuaaguugauuccggagu

SEQ ID NO: 2101369 - RNA, 19 nt, Artificial Sequence
  Description of Artificial Sequence: Synthetic oligonucleotide
aagacaauccuguccuugc

SEQ ID NO: 2101370 - RNA, 19 nt, Artificial Sequence
  Description of Artificial Sequence: Synthetic oligonucleotide
uuuccuuugucuuagggug

SEQ ID NO: 2101371 - RNA, 19 nt, Artificial Sequence
  Description of Artificial Sequence: Synthetic oligonucleotide
uucagagacgcucaggucc

SEQ ID NO: 2101372 - RNA, 19 nt, Artificial Sequence
  Description of Artificial Sequence: Synthetic oligonucleotide
aaccaucacaucuucagag

SEQ ID NO: 2101373 - RNA, 19 nt, Artificial Sequence
  Description of Artificial Sequence: Synthetic oligonucleotide
aaagccagcaggaaaacgg

SEQ ID NO: 2101374 - RNA, 19 nt, Artificial Sequence
  Description of Artificial Sequence: Synthetic oligonucleotide
augaacauguucccaaagc

SEQ ID NO: 2101375 - RNA, 19 nt, Artificial Sequence
  Description of Artificial Sequence: Synthetic oligonucleotide
aaaagccacauuccugggc

SEQ ID NO: 2101376 - RNA, 19 nt, Artificial Sequence
  Description of Artificial Sequence: Synthetic oligonucleotide
gaaugaagcuuccaguccg

SEQ ID NO: 2101377 - RNA, 19 nt, Artificial Sequence
  Description of Artificial Sequence: Synthetic oligonucleotide
aaagcagucaagcacuaca

SEQ ID NO: 2101378 - RNA, 19 nt, Artificial Sequence
  Description of Artificial Sequence: Synthetic oligonucleotide
aaagcuggaaugaagcuuc

SEQ ID NO: 2101379 - RNA, 19 nt, Artificial Sequence
  Description of Artificial Sequence: Synthetic oligonucleotide
uugggcuucgaaaaggcgg

SEQ ID NO: 2101380 - RNA, 19 nt, Artificial Sequence
  Description of Artificial Sequence: Synthetic oligonucleotide
aucacaucuucagagacgc

SEQ ID NO: 2101381 - RNA, 19 nt, Artificial Sequence
  Description of Artificial Sequence: Synthetic oligonucleotide
uguuuuaucccaacuguca

SEQ ID NO: 2101382 - RNA, 19 nt, Artificial Sequence
  Description of Artificial Sequence: Synthetic oligonucleotide
aaggaugcgguuugccugc

SEQ ID NO: 2101383 - RNA, 19 nt, Artificial Sequence
  Description of Artificial Sequence: Synthetic oligonucleotide
agaagugucaguggcagcc

SEQ ID NO: 2101384 - RNA, 19 nt, Artificial Sequence
  Description of Artificial Sequence: Synthetic oligonucleotide
uaacuuucacuuuaaguug

SEQ ID NO: 2101385 - RNA, 19 nt, Artificial Sequence
  Description of Artificial Sequence: Synthetic oligonucleotide
ugaggcauuuugaugaaca

SEQ ID NO: 2101386 - RNA, 19 nt, Artificial Sequence
  Description of Artificial Sequence: Synthetic oligonucleotide
ucagucucuuguuuuaucc

SEQ ID NO: 2101387 - RNA, 19 nt, Artificial Sequence
  Description of Artificial Sequence: Synthetic oligonucleotide
aagcacacaaaacaggcaa

SEQ ID NO: 2101388 - RNA, 19 nt, Artificial Sequence
  Description of Artificial Sequence: Synthetic oligonucleotide
ucuucagagacgcucaggu

SEQ ID NO: 2101389 - RNA, 19 nt, Artificial Sequence
  Description of Artificial Sequence: Synthetic oligonucleotide
acacacuuccuagaaaugc

SEQ ID NO: 2101390 - RNA, 19 nt, Artificial Sequence
  Description of Artificial Sequence: Synthetic oligonucleotide
ucacuuuaaguugauuccg

SEQ ID NO: 2101391 - RNA, 19 nt, Artificial Sequence
  Description of Artificial Sequence: Synthetic oligonucleotide
uccacuucgaccagguacc

SEQ ID NO: 2101392 - RNA, 19 nt, Artificial Sequence
  Description of Artificial Sequence: Synthetic oligonucleotide
uuuugaugaacauguuccc

SEQ ID NO: 2101393 - RNA, 19 nt, Artificial Sequence
  Description of Artificial Sequence: Synthetic oligonucleotide
agcucauccugguugaggg

SEQ ID NO: 2101394 - RNA, 19 nt, Artificial Sequence
  Description of Artificial Sequence: Synthetic oligonucleotide
agguuaaaacccuucagcu

SEQ ID NO: 2101395 - RNA, 19 nt, Artificial Sequence
  Description of Artificial Sequence: Synthetic oligonucleotide
acuuccuagaaaugccucg

SEQ ID NO: 2101396 - RNA, 19 nt, Artificial Sequence
  Description of Artificial Sequence: Synthetic oligonucleotide
uuaaguugauuccggaguc

SEQ ID NO: 2101397 - RNA, 19 nt, Artificial Sequence
  Description of Artificial Sequence: Synthetic oligonucleotide
aaggcgguuaacuuucacu

SEQ ID NO: 2101398 - RNA, 19 nt, Artificial Sequence
  Description of Artificial Sequence: Synthetic oligonucleotide
uucagguuaaaacccuuca

SEQ ID NO: 2101399 - RNA, 19 nt, Artificial Sequence
  Description of Artificial Sequence: Synthetic oligonucleotide
uggaucauuuccuuugucu

SEQ ID NO: 2101400 - RNA, 19 nt, Artificial Sequence
  Description of Artificial Sequence: Synthetic oligonucleotide
agcauggcgacacacagcu

SEQ ID NO: 2101401 - RNA, 19 nt, Artificial Sequence
  Description of Artificial Sequence: Synthetic oligonucleotide
uuaggaaggaugcgguuug

SEQ ID NO: 2101402 - RNA, 19 nt, Artificial Sequence
  Description of Artificial Sequence: Synthetic oligonucleotide
uguugagaagugucagugg

SEQ ID NO: 2101403 - RNA, 19 nt, Artificial Sequence
  Description of Artificial Sequence: Synthetic oligonucleotide
ugucacaaagcagucaagc

SEQ ID NO: 2101404 - RNA, 19 nt, Artificial Sequence
  Description of Artificial Sequence: Synthetic oligonucleotide
gaccuugagggcuuuaagc

SEQ ID NO: 2101405 - RNA, 19 nt, Artificial Sequence
  Description of Artificial Sequence: Synthetic oligonucleotide
ugucacacacacuuccuag

SEQ ID NO: 2101406 - RNA, 19 nt, Artificial Sequence
  Description of Artificial Sequence: Synthetic oligonucleotide
ugucaauaggucuuguguc

SEQ ID NO: 2101407 - RNA, 19 nt, Artificial Sequence
  Description of Artificial Sequence: Synthetic oligonucleotide
uuuaucccaacugucacac

SEQ ID NO: 2101408 - RNA, 19 nt, Artificial Sequence
  Description of Artificial Sequence: Synthetic oligonucleotide
uggccgaagucaaaggucc

SEQ ID NO: 2101409 - RNA, 19 nt, Artificial Sequence
  Description of Artificial Sequence: Synthetic oligonucleotide
ucaggggacagcauggcga

SEQ ID NO: 2101410 - RNA, 19 nt, Artificial Sequence
  Description of Artificial Sequence: Synthetic oligonucleotide
caucuaaacagcaggcuac

SEQ ID NO: 2101411 - RNA, 19 nt, Artificial Sequence
  Description of Artificial Sequence: Synthetic oligonucleotide
aaaggcgguuaacuuucac

SEQ ID NO: 2101412 - RNA, 19 nt, Artificial Sequence
  Description of Artificial Sequence: Synthetic oligonucleotide
uggaaugaagcuuccaguc

SEQ ID NO: 2101413 - RNA, 19 nt, Artificial Sequence
  Description of Artificial Sequence: Synthetic oligonucleotide
cacauuaggaaggaugcgg

SEQ ID NO: 2101414 - RNA, 19 nt, Artificial Sequence
  Description of Artificial Sequence: Synthetic oligonucleotide
aaaacggacaggacugggg

SEQ ID NO: 2101415 - RNA, 19 nt, Artificial Sequence
  Description of Artificial Sequence: Synthetic oligonucleotide
ucuacaaucugccgcuugu

SEQ ID NO: 2101416 - RNA, 19 nt, Artificial Sequence
  Description of Artificial Sequence: Synthetic oligonucleotide
cuuagggugaggcauuuug

SEQ ID NO: 2101417 - RNA, 19 nt, Artificial Sequence
  Description of Artificial Sequence: Synthetic oligonucleotide
uugaugaacauguucccaa

SEQ ID NO: 2101418 - RNA, 19 nt, Artificial Sequence
  Description of Artificial Sequence: Synthetic oligonucleotide
gucaauaggucuugugucc

SEQ ID NO: 2101419 - RNA, 19 nt, Artificial Sequence
  Description of Artificial Sequence: Synthetic oligonucleotide
aaggccucccaucucaaga

SEQ ID NO: 2101420 - RNA, 19 nt, Artificial Sequence
  Description of Artificial Sequence: Synthetic oligonucleotide
uuuuaucccaacugucaca

SEQ ID NO: 2101421 - RNA, 19 nt, Artificial Sequence
  Description of Artificial Sequence: Synthetic oligonucleotide
uucgaaaaggcgguuaacu

SEQ ID NO: 2101422 - RNA, 19 nt, Artificial Sequence
  Description of Artificial Sequence: Synthetic oligonucleotide
cacuuuaaguugauuccgg

SEQ ID NO: 2101423 - RNA, 19 nt, Artificial Sequence
  Description of Artificial Sequence: Synthetic oligonucleotide
uuagggugaggcauuuuga

SEQ ID NO: 2101424 - RNA, 19 nt, Artificial Sequence
  Description of Artificial Sequence: Synthetic oligonucleotide
cuugcaggucucaagguug

SEQ ID NO: 2101425 - RNA, 19 nt, Artificial Sequence
  Description of Artificial Sequence: Synthetic oligonucleotide
uccuagaaaugccucgccc

SEQ ID NO: 2101426 - RNA, 19 nt, Artificial Sequence
  Description of Artificial Sequence: Synthetic oligonucleotide
uacuauggaaagccagcag

SEQ ID NO: 2101427 - RNA, 19 nt, Artificial Sequence
  Description of Artificial Sequence: Synthetic oligonucleotide
caggucuacaaucugccgc

SEQ ID NO: 2101428 - RNA, 19 nt, Artificial Sequence
  Description of Artificial Sequence: Synthetic oligonucleotide
cuuugucuuagggugaggc

SEQ ID NO: 2101429 - RNA, 19 nt, Artificial Sequence
  Description of Artificial Sequence: Synthetic oligonucleotide
gaaaaggcgguuaacuuuc

SEQ ID NO: 2101430 - RNA, 19 nt, Artificial Sequence
  Description of Artificial Sequence: Synthetic oligonucleotide
guuuuaucccaacugucac

SEQ ID NO: 2101431 - RNA, 19 nt, Artificial Sequence
  Description of Artificial Sequence: Synthetic oligonucleotide
uaccgcaucacccgcuccg

SEQ ID NO: 2101432 - RNA, 19 nt, Artificial Sequence
  Description of Artificial Sequence: Synthetic oligonucleotide
agucucuuguuuuauccca

SEQ ID NO: 2101433 - RNA, 19 nt, Artificial Sequence
  Description of Artificial Sequence: Synthetic oligonucleotide
cacaccuacagauggcugc

SEQ ID NO: 2101434 - RNA, 19 nt, Artificial Sequence
  Description of Artificial Sequence: Synthetic oligonucleotide
cuacagauggcugccaggg

SEQ ID NO: 2101435 - RNA, 19 nt, Artificial Sequence
  Description of Artificial Sequence: Synthetic oligonucleotide
uuugaugaacauguuccca

SEQ ID NO: 2101436 - RNA, 19 nt, Artificial Sequence
  Description of Artificial Sequence: Synthetic oligonucleotide
ucugauuccucuugguauc

SEQ ID NO: 2101437 - RNA, 19 nt, Artificial Sequence
  Description of Artificial Sequence: Synthetic oligonucleotide
aaugccucgcccugcagaa

SEQ ID NO: 2101438 - RNA, 19 nt, Artificial Sequence
  Description of Artificial Sequence: Synthetic oligonucleotide
uuugucuuagggugaggca

SEQ ID NO: 2101439 - RNA, 19 nt, Artificial Sequence
  Description of Artificial Sequence: Synthetic oligonucleotide
gagggugacugacagcacc

SEQ ID NO: 2101440 - RNA, 19 nt, Artificial Sequence
  Description of Artificial Sequence: Synthetic oligonucleotide
aggaaaacggacaggacug

SEQ ID NO: 2101441 - RNA, 19 nt, Artificial Sequence
  Description of Artificial Sequence: Synthetic oligonucleotide
uugguauccaggucuacaa

SEQ ID NO: 2101442 - RNA, 19 nt, Artificial Sequence
  Description of Artificial Sequence: Synthetic oligonucleotide
cuuguguccaccaagcucu

SEQ ID NO: 2101443 - RNA, 19 nt, Artificial Sequence
  Description of Artificial Sequence: Synthetic oligonucleotide
aguggccgaagucaaaggu

SEQ ID NO: 2101444 - RNA, 19 nt, Artificial Sequence
  Description of Artificial Sequence: Synthetic oligonucleotide
agucuuucuauuucuuuau

SEQ ID NO: 2101445 - RNA, 19 nt, Artificial Sequence
  Description of Artificial Sequence: Synthetic oligonucleotide
ccaagcacacaaaacaggc

SEQ ID NO: 2101446 - RNA, 19 nt, Artificial Sequence
  Description of Artificial Sequence: Synthetic oligonucleotide
gaaagccagcaggaaaacg

SEQ ID NO: 2101447 - RNA, 19 nt, Artificial Sequence
  Description of Artificial Sequence: Synthetic oligonucleotide
caucucaagagcaaccaca

SEQ ID NO: 2101448 - RNA, 19 nt, Artificial Sequence
  Description of Artificial Sequence: Synthetic oligonucleotide
agcaccuacuauggaaagc

SEQ ID NO: 2101449 - RNA, 19 nt, Artificial Sequence
  Description of Artificial Sequence: Synthetic oligonucleotide
cuguugagaagugucagug

SEQ ID NO: 2101450 - RNA, 19 nt, Artificial Sequence
  Description of Artificial Sequence: Synthetic oligonucleotide
ucgguucugauuccucuug

SEQ ID NO: 2101451 - RNA, 19 nt, Artificial Sequence
  Description of Artificial Sequence: Synthetic oligonucleotide
gacagcaccuacuauggaa

SEQ ID NO: 2101452 - RNA, 19 nt, Artificial Sequence
  Description of Artificial Sequence: Synthetic oligonucleotide
aggucuacaaucugccgcu

SEQ ID NO: 2101453 - RNA, 19 nt, Artificial Sequence
  Description of Artificial Sequence: Synthetic oligonucleotide
ugggccaguccucuguaag

SEQ ID NO: 2101454 - RNA, 19 nt, Artificial Sequence
  Description of Artificial Sequence: Synthetic oligonucleotide
ugggcuucgaaaaggcggu

SEQ ID NO: 2101455 - RNA, 19 nt, Artificial Sequence
  Description of Artificial Sequence: Synthetic oligonucleotide
ucacauuaggaaggaugcg

SEQ ID NO: 2101456 - RNA, 19 nt, Artificial Sequence
  Description of Artificial Sequence: Synthetic oligonucleotide
aacccuucagcuccgguuu

SEQ ID NO: 2101457 - RNA, 19 nt, Artificial Sequence
  Description of Artificial Sequence: Synthetic oligonucleotide
gaaaacggacaggacuggg

SEQ ID NO: 2101458 - RNA, 19 nt, Artificial Sequence
  Description of Artificial Sequence: Synthetic oligonucleotide
uguucccaaagcaaaccau

SEQ ID NO: 2101459 - RNA, 19 nt, Artificial Sequence
  Description of Artificial Sequence: Synthetic oligonucleotide
cauguucccaaagcaaacc

SEQ ID NO: 2101460 - RNA, 19 nt, Artificial Sequence
  Description of Artificial Sequence: Synthetic oligonucleotide
agaagcaaacugucagucu

SEQ ID NO: 2101461 - RNA, 19 nt, Artificial Sequence
  Description of Artificial Sequence: Synthetic oligonucleotide
cuugggcuucgaaaaggcg

SEQ ID NO: 2101462 - RNA, 19 nt, Artificial Sequence
  Description of Artificial Sequence: Synthetic oligonucleotide
uugucuuagggugaggcau

SEQ ID NO: 2101463 - RNA, 19 nt, Artificial Sequence
  Description of Artificial Sequence: Synthetic oligonucleotide
gcuggaaugaagcuuccag

SEQ ID NO: 2101464 - RNA, 19 nt, Artificial Sequence
  Description of Artificial Sequence: Synthetic oligonucleotide
gguacaaaagccacauucc

SEQ ID NO: 2101465 - RNA, 19 nt, Artificial Sequence
  Description of Artificial Sequence: Synthetic oligonucleotide
aggcgguuaacuuucacuu

SEQ ID NO: 2101466 - RNA, 19 nt, Artificial Sequence
  Description of Artificial Sequence: Synthetic oligonucleotide
ucaagguuggggagggagu

SEQ ID NO: 2101467 - RNA, 19 nt, Artificial Sequence
  Description of Artificial Sequence: Synthetic oligonucleotide
acauguucccaaagcaaac

SEQ ID NO: 2101468 - RNA, 19 nt, Artificial Sequence
  Description of Artificial Sequence: Synthetic oligonucleotide
ucccaacugucacacacac

SEQ ID NO: 2101469 - RNA, 19 nt, Artificial Sequence
  Description of Artificial Sequence: Synthetic oligonucleotide
cagucucuuguuuuauccc

SEQ ID NO: 2101470 - RNA, 19 nt, Artificial Sequence
  Description of Artificial Sequence: Synthetic oligonucleotide
ucgaccagguaccgcauca

SEQ ID NO: 2101471 - RNA, 19 nt, Artificial Sequence
  Description of Artificial Sequence: Synthetic oligonucleotide
uauccaggucuacaaucug

SEQ ID NO: 2101472 - RNA, 19 nt, Artificial Sequence
  Description of Artificial Sequence: Synthetic oligonucleotide
aucucaagagcaaccacag

SEQ ID NO: 2101473 - RNA, 19 nt, Artificial Sequence
  Description of Artificial Sequence: Synthetic oligonucleotide
acaccuacagauggcugcc

SEQ ID NO: 2101474 - RNA, 19 nt, Artificial Sequence
  Description of Artificial Sequence: Synthetic oligonucleotide
gggugaggcauuuugauga

SEQ ID NO: 2101475 - RNA, 19 nt, Artificial Sequence
  Description of Artificial Sequence: Synthetic oligonucleotide
ggcccaucuaaacagcagg

SEQ ID NO: 2101476 - RNA, 19 nt, Artificial Sequence
  Description of Artificial Sequence: Synthetic oligonucleotide
ucaauaggucuugugucca

SEQ ID NO: 2101477 - RNA, 19 nt, Artificial Sequence
  Description of Artificial Sequence: Synthetic oligonucleotide
uuccuagaaaugccucgcc

SEQ ID NO: 2101478 - RNA, 19 nt, Artificial Sequence
  Description of Artificial Sequence: Synthetic oligonucleotide
auggaaagccagcaggaaa

SEQ ID NO: 2101479 - RNA, 19 nt, Artificial Sequence
  Description of Artificial Sequence: Synthetic oligonucleotide
ucgaaaaggcgguuaacuu

SEQ ID NO: 2101480 - RNA, 19 nt, Artificial Sequence
  Description of Artificial Sequence: Synthetic oligonucleotide
ugacugacagcaccuacua

SEQ ID NO: 2101481 - RNA, 19 nt, Artificial Sequence
  Description of Artificial Sequence: Synthetic oligonucleotide
acuguugagaagugucagu

SEQ ID NO: 2101482 - RNA, 19 nt, Artificial Sequence
  Description of Artificial Sequence: Synthetic oligonucleotide
cuauggaaagccagcagga

SEQ ID NO: 2101483 - RNA, 19 nt, Artificial Sequence
  Description of Artificial Sequence: Synthetic oligonucleotide
accaucacaucuucagaga

SEQ ID NO: 2101484 - RNA, 19 nt, Artificial Sequence
  Description of Artificial Sequence: Synthetic oligonucleotide
cuuccuagaaaugccucgc

SEQ ID NO: 2101485 - RNA, 19 nt, Artificial Sequence
  Description of Artificial Sequence: Synthetic oligonucleotide
ucauccuuucaggaugacc

SEQ ID NO: 2101486 - RNA, 19 nt, Artificial Sequence
  Description of Artificial Sequence: Synthetic oligonucleotide
gacuugguacaaaagccac

SEQ ID NO: 2101487 - RNA, 19 nt, Artificial Sequence
  Description of Artificial Sequence: Synthetic oligonucleotide
cuuguuuuaucccaacugu

SEQ ID NO: 2101488 - RNA, 19 nt, Artificial Sequence
  Description of Artificial Sequence: Synthetic oligonucleotide
aaaacccuucagcuccggu

SEQ ID NO: 2101489 - RNA, 19 nt, Artificial Sequence
  Description of Artificial Sequence: Synthetic oligonucleotide
uccgcuucaggggacagca

SEQ ID NO: 2101490 - RNA, 19 nt, Artificial Sequence
  Description of Artificial Sequence: Synthetic oligonucleotide
ggaaugaagcuuccagucc

SEQ ID NO: 2101491 - RNA, 19 nt, Artificial Sequence
  Description of Artificial Sequence: Synthetic oligonucleotide
uccucuguaaggccuccca

SEQ ID NO: 2101492 - RNA, 19 nt, Artificial Sequence
  Description of Artificial Sequence: Synthetic oligonucleotide
uguuugagucucauccuuu

SEQ ID NO: 2101493 - RNA, 19 nt, Artificial Sequence
  Description of Artificial Sequence: Synthetic oligonucleotide
gguauccaggucuacaauc

SEQ ID NO: 2101494 - RNA, 19 nt, Artificial Sequence
  Description of Artificial Sequence: Synthetic oligonucleotide
ccuacuauggaaagccagc

SEQ ID NO: 2101495 - RNA, 19 nt, Artificial Sequence
  Description of Artificial Sequence: Synthetic oligonucleotide
uagggugaggcauuuugau

SEQ ID NO: 2101496 - RNA, 19 nt, Artificial Sequence
  Description of Artificial Sequence: Synthetic oligonucleotide
agacuugguacaaaagcca

SEQ ID NO: 2101497 - RNA, 19 nt, Artificial Sequence
  Description of Artificial Sequence: Synthetic oligonucleotide
ugggccuauccccuuaaaa

SEQ ID NO: 2101498 - RNA, 19 nt, Artificial Sequence
  Description of Artificial Sequence: Synthetic oligonucleotide
ucuugucacaaagcaguca

SEQ ID NO: 2101499 - RNA, 19 nt, Artificial Sequence
  Description of Artificial Sequence: Synthetic oligonucleotide
aggaaggaugcgguuugcc

SEQ ID NO: 2101500 - RNA, 19 nt, Artificial Sequence
  Description of Artificial Sequence: Synthetic oligonucleotide
cagagggugacugacagca

SEQ ID NO: 2101501 - RNA, 19 nt, Artificial Sequence
  Description of Artificial Sequence: Synthetic oligonucleotide
uuuggggaaauguguccac

SEQ ID NO: 2101502 - RNA, 19 nt, Artificial Sequence
  Description of Artificial Sequence: Synthetic oligonucleotide
uuguccgacagcaccgccu

SEQ ID NO: 2101503 - RNA, 19 nt, Artificial Sequence
  Description of Artificial Sequence: Synthetic oligonucleotide
agcucugguggccaggcca

SEQ ID NO: 2101504 - RNA, 19 nt, Artificial Sequence
  Description of Artificial Sequence: Synthetic oligonucleotide
cucaagguuggggagggag

SEQ ID NO: 2101505 - RNA, 19 nt, Artificial Sequence
  Description of Artificial Sequence: Synthetic oligonucleotide
agucucauccuuucaggau

SEQ ID NO: 2101506 - RNA, 19 nt, Artificial Sequence
  Description of Artificial Sequence: Synthetic oligonucleotide
auuaggaaggaugcgguuu

SEQ ID NO: 2101507 - RNA, 19 nt, Artificial Sequence
  Description of Artificial Sequence: Synthetic oligonucleotide
accuacuauggaaagccag

SEQ ID NO: 2101508 - RNA, 19 nt, Artificial Sequence
  Description of Artificial Sequence: Synthetic oligonucleotide
ccugcagaaagcuggaaug

SEQ ID NO: 2101509 - RNA, 19 nt, Artificial Sequence
  Description of Artificial Sequence: Synthetic oligonucleotide
accuacagauggcugccag

SEQ ID NO: 2101510 - RNA, 19 nt, Artificial Sequence
  Description of Artificial Sequence: Synthetic oligonucleotide
ggcauuuugaugaacaugu

SEQ ID NO: 2101511 - RNA, 19 nt, Artificial Sequence
  Description of Artificial Sequence: Synthetic oligonucleotide
cagaagcaaacugucaguc

SEQ ID NO: 2101512 - RNA, 19 nt, Artificial Sequence
  Description of Artificial Sequence: Synthetic oligonucleotide
agaaaugccucgcccugca

SEQ ID NO: 2101513 - RNA, 19 nt, Artificial Sequence
  Description of Artificial Sequence: Synthetic oligonucleotide
gaccagguaccgcaucacc

SEQ ID NO: 2101514 - RNA, 19 nt, Artificial Sequence
  Description of Artificial Sequence: Synthetic oligonucleotide
gccaggcccaucuaaacag

SEQ ID NO: 2101515 - RNA, 19 nt, Artificial Sequence
  Description of Artificial Sequence: Synthetic oligonucleotide
ugcgguuugccugcccugg

SEQ ID NO: 2101516 - RNA, 19 nt, Artificial Sequence
  Description of Artificial Sequence: Synthetic oligonucleotide
aagcuggaaugaagcuucc

SEQ ID NO: 2101517 - RNA, 19 nt, Artificial Sequence
  Description of Artificial Sequence: Synthetic oligonucleotide
acauuaggaaggaugcggu

SEQ ID NO: 2101518 - RNA, 19 nt, Artificial Sequence
  Description of Artificial Sequence: Synthetic oligonucleotide
uguccgacagcaccgccuc

SEQ ID NO: 2101519 - RNA, 19 nt, Artificial Sequence
  Description of Artificial Sequence: Synthetic oligonucleotide
agcagucaagcacuacaga

SEQ ID NO: 2101520 - RNA, 19 nt, Artificial Sequence
  Description of Artificial Sequence: Synthetic oligonucleotide
cacacacuuccuagaaaug

SEQ ID NO: 2101521 - RNA, 19 nt, Artificial Sequence
  Description of Artificial Sequence: Synthetic oligonucleotide
aaacagcaggcuacuguug

SEQ ID NO: 2101522 - RNA, 19 nt, Artificial Sequence
  Description of Artificial Sequence: Synthetic oligonucleotide
ugccgcuuguccgacagca

SEQ ID NO: 2101523 - RNA, 19 nt, Artificial Sequence
  Description of Artificial Sequence: Synthetic oligonucleotide
uaaguugauuccggagucu

SEQ ID NO: 2101524 - RNA, 19 nt, Artificial Sequence
  Description of Artificial Sequence: Synthetic oligonucleotide
aaguugauuccggagucuu

SEQ ID NO: 2101525 - RNA, 19 nt, Artificial Sequence
  Description of Artificial Sequence: Synthetic oligonucleotide
agcaggcuacuguugagaa

SEQ ID NO: 2101526 - RNA, 19 nt, Artificial Sequence
  Description of Artificial Sequence: Synthetic oligonucleotide
ucuaaacagcaggcuacug

SEQ ID NO: 2101527 - RNA, 19 nt, Artificial Sequence
  Description of Artificial Sequence: Synthetic oligonucleotide
ggaaauguguccacccugc

SEQ ID NO: 2101528 - RNA, 19 nt, Artificial Sequence
  Description of Artificial Sequence: Synthetic oligonucleotide
cugucaauaggucuugugu

SEQ ID NO: 2101529 - RNA, 19 nt, Artificial Sequence
  Description of Artificial Sequence: Synthetic oligonucleotide
cacauuccugggccuaucc

SEQ ID NO: 2101530 - RNA, 19 nt, Artificial Sequence
  Description of Artificial Sequence: Synthetic oligonucleotide
caggaaaacggacaggacu

SEQ ID NO: 2101531 - RNA, 19 nt, Artificial Sequence
  Description of Artificial Sequence: Synthetic oligonucleotide
gucucaagguuggggaggg

SEQ ID NO: 2101532 - RNA, 19 nt, Artificial Sequence
  Description of Artificial Sequence: Synthetic oligonucleotide
cacuuccuagaaaugccuc

SEQ ID NO: 2101533 - RNA, 19 nt, Artificial Sequence
  Description of Artificial Sequence: Synthetic oligonucleotide
ugauuccggagucuuucua

SEQ ID NO: 2101534 - RNA, 19 nt, Artificial Sequence
  Description of Artificial Sequence: Synthetic oligonucleotide
aagccagcaggaaaacgga

SEQ ID NO: 2101535 - RNA, 19 nt, Artificial Sequence
  Description of Artificial Sequence: Synthetic oligonucleotide
cauggcgacacacagcucu

SEQ ID NO: 2101536 - RNA, 19 nt, Artificial Sequence
  Description of Artificial Sequence: Synthetic oligonucleotide
aacaggcaaaggguucucu

SEQ ID NO: 2101537 - RNA, 19 nt, Artificial Sequence
  Description of Artificial Sequence: Synthetic oligonucleotide
uuauccaggugcuccugau

SEQ ID NO: 2101538 - RNA, 19 nt, Artificial Sequence
  Description of Artificial Sequence: Synthetic oligonucleotide
cuaaacagcaggcuacugu

SEQ ID NO: 2101539 - RNA, 19 nt, Artificial Sequence
  Description of Artificial Sequence: Synthetic oligonucleotide
ugguauccaggucuacaau

SEQ ID NO: 2101540 - RNA, 19 nt, Artificial Sequence
  Description of Artificial Sequence: Synthetic oligonucleotide
ugcagaaagcuggaaugaa

SEQ ID NO: 2101541 - RNA, 19 nt, Artificial Sequence
  Description of Artificial Sequence: Synthetic oligonucleotide
ugucuuagggugaggcauu

SEQ ID NO: 2101542 - RNA, 19 nt, Artificial Sequence
  Description of Artificial Sequence: Synthetic oligonucleotide
gggaaauguguccacccug

SEQ ID NO: 2101543 - RNA, 19 nt, Artificial Sequence
  Description of Artificial Sequence: Synthetic oligonucleotide
guguggggcacuaaggguc

SEQ ID NO: 2101544 - RNA, 19 nt, Artificial Sequence
  Description of Artificial Sequence: Synthetic oligonucleotide
uccuugcaggucucaaggu

SEQ ID NO: 2101545 - RNA, 19 nt, Artificial Sequence
  Description of Artificial Sequence: Synthetic oligonucleotide
cacccgcuccgcuucaggg

SEQ ID NO: 2101546 - RNA, 19 nt, Artificial Sequence
  Description of Artificial Sequence: Synthetic oligonucleotide
ccagguaccgcaucacccg

SEQ ID NO: 2101547 - RNA, 19 nt, Artificial Sequence
  Description of Artificial Sequence: Synthetic oligonucleotide
acagcaccuacuauggaaa

SEQ ID NO: 2101548 - RNA, 19 nt, Artificial Sequence
  Description of Artificial Sequence: Synthetic oligonucleotide
uuugccugcccugggccag

SEQ ID NO: 2101549 - RNA, 19 nt, Artificial Sequence
  Description of Artificial Sequence: Synthetic oligonucleotide
ggaguggccgaagucaaag

SEQ ID NO: 2101550 - RNA, 19 nt, Artificial Sequence
  Description of Artificial Sequence: Synthetic oligonucleotide
gccaagcacacaaaacagg

SEQ ID NO: 2101551 - RNA, 19 nt, Artificial Sequence
  Description of Artificial Sequence: Synthetic oligonucleotide
caauaggucuuguguccac

SEQ ID NO: 2101552 - RNA, 19 nt, Artificial Sequence
  Description of Artificial Sequence: Synthetic oligonucleotide
aucuaaacagcaggcuacu

SEQ ID NO: 2101553 - RNA, 19 nt, Artificial Sequence
  Description of Artificial Sequence: Synthetic oligonucleotide
auuccggagucuuucuauu

SEQ ID NO: 2101554 - RNA, 19 nt, Artificial Sequence
  Description of Artificial Sequence: Synthetic oligonucleotide
cuucagagacgcucagguc

SEQ ID NO: 2101555 - RNA, 19 nt, Artificial Sequence
  Description of Artificial Sequence: Synthetic oligonucleotide
cagcaccuacuauggaaag

SEQ ID NO: 2101556 - RNA, 19 nt, Artificial Sequence
  Description of Artificial Sequence: Synthetic oligonucleotide
cuacuauggaaagccagca

SEQ ID NO: 2101557 - RNA, 19 nt, Artificial Sequence
  Description of Artificial Sequence: Synthetic oligonucleotide
gauuccggagucuuucuau

SEQ ID NO: 2101558 - RNA, 19 nt, Artificial Sequence
  Description of Artificial Sequence: Synthetic oligonucleotide
ccauccugcuguuugaguc

SEQ ID NO: 2101559 - RNA, 19 nt, Artificial Sequence
  Description of Artificial Sequence: Synthetic oligonucleotide
aguccucuguaaggccucc

SEQ ID NO: 2101560 - RNA, 19 nt, Artificial Sequence
  Description of Artificial Sequence: Synthetic oligonucleotide
ggucuuguguccaccaagc

SEQ ID NO: 2101561 - RNA, 19 nt, Artificial Sequence
  Description of Artificial Sequence: Synthetic oligonucleotide
cuugguauccaggucuaca

SEQ ID NO: 2101562 - RNA, 19 nt, Artificial Sequence
  Description of Artificial Sequence: Synthetic oligonucleotide
acacuuccuagaaaugccu

SEQ ID NO: 2101563 - RNA, 19 nt, Artificial Sequence
  Description of Artificial Sequence: Synthetic oligonucleotide
ggccaagcacacaaaacag

SEQ ID NO: 2101564 - RNA, 19 nt, Artificial Sequence
  Description of Artificial Sequence: Synthetic oligonucleotide
uccgguuuuccuugggcuu

SEQ ID NO: 2101565 - RNA, 19 nt, Artificial Sequence
  Description of Artificial Sequence: Synthetic oligonucleotide
caggcuacuguugagaagu

SEQ ID NO: 2101566 - RNA, 19 nt, Artificial Sequence
  Description of Artificial Sequence: Synthetic oligonucleotide
cugauuccucuugguaucc

SEQ ID NO: 2101567 - RNA, 19 nt, Artificial Sequence
  Description of Artificial Sequence: Synthetic oligonucleotide
guucagguuaaaacccuuc

SEQ ID NO: 2101568 - RNA, 19 nt, Artificial Sequence
  Description of Artificial Sequence: Synthetic oligonucleotide
cagcauggcgacacacagc

SEQ ID NO: 2101569 - RNA, 19 nt, Artificial Sequence
  Description of Artificial Sequence: Synthetic oligonucleotide
ggucucaagguuggggagg

SEQ ID NO: 2101570 - RNA, 19 nt, Artificial Sequence
  Description of Artificial Sequence: Synthetic oligonucleotide
gaaagcuggaaugaagcuu

SEQ ID NO: 2101571 - RNA, 19 nt, Artificial Sequence
  Description of Artificial Sequence: Synthetic oligonucleotide
gguuugccugcccugggcc

SEQ ID NO: 2101572 - RNA, 19 nt, Artificial Sequence
  Description of Artificial Sequence: Synthetic oligonucleotide
aggcaaaggguucucucuu

SEQ ID NO: 2101573 - RNA, 19 nt, Artificial Sequence
  Description of Artificial Sequence: Synthetic oligonucleotide
cuggaaugaagcuuccagu

SEQ ID NO: 2101574 - RNA, 19 nt, Artificial Sequence
  Description of Artificial Sequence: Synthetic oligonucleotide
ucugguggccaggccaagc

SEQ ID NO: 2101575 - RNA, 19 nt, Artificial Sequence
  Description of Artificial Sequence: Synthetic oligonucleotide
caccgccucggccagcucc

SEQ ID NO: 2101576 - RNA, 19 nt, Artificial Sequence
  Description of Artificial Sequence: Synthetic oligonucleotide
cuuguccgacagcaccgcc

SEQ ID NO: 2101577 - RNA, 19 nt, Artificial Sequence
  Description of Artificial Sequence: Synthetic oligonucleotide
aaaaggcgguuaacuuuca

SEQ ID NO: 2101578 - RNA, 19 nt, Artificial Sequence
  Description of Artificial Sequence: Synthetic oligonucleotide
agcuccgguuuuccuuggg

SEQ ID NO: 2101579 - RNA, 19 nt, Artificial Sequence
  Description of Artificial Sequence: Synthetic oligonucleotide
ugucagucucuuguuuuau

SEQ ID NO: 2101580 - RNA, 19 nt, Artificial Sequence
  Description of Artificial Sequence: Synthetic oligonucleotide
acacagaagcaaacuguca

SEQ ID NO: 2101581 - RNA, 19 nt, Artificial Sequence
  Description of Artificial Sequence: Synthetic oligonucleotide
cuucgaaaaggcgguuaac

SEQ ID NO: 2101582 - RNA, 19 nt, Artificial Sequence
  Description of Artificial Sequence: Synthetic oligonucleotide
uucgaccagguaccgcauc

SEQ ID NO: 2101583 - RNA, 19 nt, Artificial Sequence
  Description of Artificial Sequence: Synthetic oligonucleotide
uaagcucauccugguugag

SEQ ID NO: 2101584 - RNA, 19 nt, Artificial Sequence
  Description of Artificial Sequence: Synthetic oligonucleotide
uuucuuuauccaggugcuc

SEQ ID NO: 2101585 - RNA, 19 nt, Artificial Sequence
  Description of Artificial Sequence: Synthetic oligonucleotide
accgcaucacccgcuccgc

SEQ ID NO: 2101586 - RNA, 19 nt, Artificial Sequence
  Description of Artificial Sequence: Synthetic oligonucleotide
agagacgcucagguccuuc

SEQ ID NO: 2101587 - RNA, 19 nt, Artificial Sequence
  Description of Artificial Sequence: Synthetic oligonucleotide
cagguaccgcaucacccgc

SEQ ID NO: 2101588 - RNA, 19 nt, Artificial Sequence
  Description of Artificial Sequence: Synthetic oligonucleotide
caguccgcccucucucucc

SEQ ID NO: 2101589 - RNA, 19 nt, Artificial Sequence
  Description of Artificial Sequence: Synthetic oligonucleotide
cuugguacaaaagccacau

SEQ ID NO: 2101590 - RNA, 19 nt, Artificial Sequence
  Description of Artificial Sequence: Synthetic oligonucleotide
ggugcuccugaucuuucug

SEQ ID NO: 2101591 - RNA, 19 nt, Artificial Sequence
  Description of Artificial Sequence: Synthetic oligonucleotide
guggccgaagucaaagguc

SEQ ID NO: 2101592 - RNA, 19 nt, Artificial Sequence
  Description of Artificial Sequence: Synthetic oligonucleotide
ugauuccucuugguaucca

SEQ ID NO: 2101593 - RNA, 19 nt, Artificial Sequence
  Description of Artificial Sequence: Synthetic oligonucleotide
ccuacagauggcugccagg

SEQ ID NO: 2101594 - RNA, 19 nt, Artificial Sequence
  Description of Artificial Sequence: Synthetic oligonucleotide
accaagcucugguggccag

SEQ ID NO: 2101595 - RNA, 19 nt, Artificial Sequence
  Description of Artificial Sequence: Synthetic oligonucleotide
cuuuauccaggugcuccug

SEQ ID NO: 2101596 - RNA, 19 nt, Artificial Sequence
  Description of Artificial Sequence: Synthetic oligonucleotide
ugcaggucucaagguuggg

SEQ ID NO: 2101597 - RNA, 19 nt, Artificial Sequence
  Description of Artificial Sequence: Synthetic oligonucleotide
cucgcccugcagaaagcug

SEQ ID NO: 2101598 - RNA, 19 nt, Artificial Sequence
  Description of Artificial Sequence: Synthetic oligonucleotide
cucucuccaucccuggcca

SEQ ID NO: 2101599 - RNA, 19 nt, Artificial Sequence
  Description of Artificial Sequence: Synthetic oligonucleotide
ggggcuuuggggaaaugug

SEQ ID NO: 2101600 - RNA, 19 nt, Artificial Sequence
  Description of Artificial Sequence: Synthetic oligonucleotide
augaccuugagggcuuuaa

SEQ ID NO: 2101601 - RNA, 19 nt, Artificial Sequence
  Description of Artificial Sequence: Synthetic oligonucleotide
gaggcauuuugaugaacau

SEQ ID NO: 2101602 - RNA, 19 nt, Artificial Sequence
  Description of Artificial Sequence: Synthetic oligonucleotide
augcgguuugccugcccug

SEQ ID NO: 2101603 - RNA, 19 nt, Artificial Sequence
  Description of Artificial Sequence: Synthetic oligonucleotide
agggugacugacagcaccu

SEQ ID NO: 2101604 - RNA, 19 nt, Artificial Sequence
  Description of Artificial Sequence: Synthetic oligonucleotide
caaagcagucaagcacuac

SEQ ID NO: 2101605 - RNA, 19 nt, Artificial Sequence
  Description of Artificial Sequence: Synthetic oligonucleotide
cuacaaucugccgcuuguc

SEQ ID NO: 2101606 - RNA, 19 nt, Artificial Sequence
  Description of Artificial Sequence: Synthetic oligonucleotide
agagggugacugacagcac

SEQ ID NO: 2101607 - RNA, 19 nt, Artificial Sequence
  Description of Artificial Sequence: Synthetic oligonucleotide
ucuugguauccaggucuac

SEQ ID NO: 2101608 - RNA, 19 nt, Artificial Sequence
  Description of Artificial Sequence: Synthetic oligonucleotide
caguccucuguaaggccuc

SEQ ID NO: 2101609 - RNA, 19 nt, Artificial Sequence
  Description of Artificial Sequence: Synthetic oligonucleotide
gcgguuaacuuucacuuua

SEQ ID NO: 2101610 - RNA, 19 nt, Artificial Sequence
  Description of Artificial Sequence: Synthetic oligonucleotide
ccaggucuacaaucugccg

SEQ ID NO: 2101611 - RNA, 19 nt, Artificial Sequence
  Description of Artificial Sequence: Synthetic oligonucleotide
gacgcucagguccuucugu

SEQ ID NO: 2101612 - RNA, 19 nt, Artificial Sequence
  Description of Artificial Sequence: Synthetic oligonucleotide
aguccgcccucucucucca

SEQ ID NO: 2101613 - RNA, 19 nt, Artificial Sequence
  Description of Artificial Sequence: Synthetic oligonucleotide
agcacacaaaacaggcaaa

SEQ ID NO: 2101614 - RNA, 19 nt, Artificial Sequence
  Description of Artificial Sequence: Synthetic oligonucleotide
gcaggcuacuguugagaag

SEQ ID NO: 2101615 - RNA, 19 nt, Artificial Sequence
  Description of Artificial Sequence: Synthetic oligonucleotide
acacaccuacagauggcug

SEQ ID NO: 2101616 - RNA, 19 nt, Artificial Sequence
  Description of Artificial Sequence: Synthetic oligonucleotide
caggcaaaggguucucucu

SEQ ID NO: 2101617 - RNA, 19 nt, Artificial Sequence
  Description of Artificial Sequence: Synthetic oligonucleotide
gcuccgguuuuccuugggc

SEQ ID NO: 2101618 - RNA, 19 nt, Artificial Sequence
  Description of Artificial Sequence: Synthetic oligonucleotide
aucccaacugucacacaca

SEQ ID NO: 2101619 - RNA, 19 nt, Artificial Sequence
  Description of Artificial Sequence: Synthetic oligonucleotide
cugucagucucuuguuuua

SEQ ID NO: 2101620 - RNA, 19 nt, Artificial Sequence
  Description of Artificial Sequence: Synthetic oligonucleotide
gcuucgaaaaggcgguuaa

SEQ ID NO: 2101621 - RNA, 19 nt, Artificial Sequence
  Description of Artificial Sequence: Synthetic oligonucleotide
ggaaggaugcgguuugccu

SEQ ID NO: 2101622 - RNA, 19 nt, Artificial Sequence
  Description of Artificial Sequence: Synthetic oligonucleotide
gcccaucuaaacagcaggc

SEQ ID NO: 2101623 - RNA, 19 nt, Artificial Sequence
  Description of Artificial Sequence: Synthetic oligonucleotide
gagacgcucagguccuucu

SEQ ID NO: 2101624 - RNA, 19 nt, Artificial Sequence
  Description of Artificial Sequence: Synthetic oligonucleotide
acgcucagguccuucugua

SEQ ID NO: 2101625 - RNA, 19 nt, Artificial Sequence
  Description of Artificial Sequence: Synthetic oligonucleotide
ggggacagcauggcgacac

SEQ ID NO: 2101626 - RNA, 19 nt, Artificial Sequence
  Description of Artificial Sequence: Synthetic oligonucleotide
ggcacuaagggucugucuu

SEQ ID NO: 2101627 - RNA, 19 nt, Artificial Sequence
  Description of Artificial Sequence: Synthetic oligonucleotide
caccuacuauggaaagcca

SEQ ID NO: 2101628 - RNA, 19 nt, Artificial Sequence
  Description of Artificial Sequence: Synthetic oligonucleotide
caggugcuccugaucuuuc

SEQ ID NO: 2101629 - RNA, 19 nt, Artificial Sequence
  Description of Artificial Sequence: Synthetic oligonucleotide
guaccgcaucacccgcucc

SEQ ID NO: 2101630 - RNA, 19 nt, Artificial Sequence
  Description of Artificial Sequence: Synthetic oligonucleotide
gugacugacagcaccuacu

SEQ ID NO: 2101631 - RNA, 19 nt, Artificial Sequence
  Description of Artificial Sequence: Synthetic oligonucleotide
cuguaaggccucccaucuc

SEQ ID NO: 2101632 - RNA, 19 nt, Artificial Sequence
  Description of Artificial Sequence: Synthetic oligonucleotide
cuccgguuuuccuugggcu

SEQ ID NO: 2101633 - RNA, 19 nt, Artificial Sequence
  Description of Artificial Sequence: Synthetic oligonucleotide
caggaugaccuugagggcu

SEQ ID NO: 2101634 - RNA, 19 nt, Artificial Sequence
  Description of Artificial Sequence: Synthetic oligonucleotide
ggucugucaauaggucuug

SEQ ID NO: 2101635 - RNA, 19 nt, Artificial Sequence
  Description of Artificial Sequence: Synthetic oligonucleotide
acuaagggucugucuucuu

SEQ ID NO: 2101636 - RNA, 19 nt, Artificial Sequence
  Description of Artificial Sequence: Synthetic oligonucleotide
uccugggccuauccccuua

SEQ ID NO: 2101637 - RNA, 19 nt, Artificial Sequence
  Description of Artificial Sequence: Synthetic oligonucleotide
gcacuaagggucugucuuc

SEQ ID NO: 2101638 - RNA, 19 nt, Artificial Sequence
  Description of Artificial Sequence: Synthetic oligonucleotide
gugaggcauuuugaugaac

SEQ ID NO: 2101639 - RNA, 19 nt, Artificial Sequence
  Description of Artificial Sequence: Synthetic oligonucleotide
ccacacaccuacagauggc

SEQ ID NO: 2101640 - RNA, 19 nt, Artificial Sequence
  Description of Artificial Sequence: Synthetic oligonucleotide
ccaucuaaacagcaggcua

SEQ ID NO: 2101641 - RNA, 19 nt, Artificial Sequence
  Description of Artificial Sequence: Synthetic oligonucleotide
cacuucgaccagguaccgc

SEQ ID NO: 2101642 - RNA, 19 nt, Artificial Sequence
  Description of Artificial Sequence: Synthetic oligonucleotide
cagcuccgguuuuccuugg

SEQ ID NO: 2101643 - RNA, 19 nt, Artificial Sequence
  Description of Artificial Sequence: Synthetic oligonucleotide
ggagggaguggccgaaguc

SEQ ID NO: 2101644 - RNA, 19 nt, Artificial Sequence
  Description of Artificial Sequence: Synthetic oligonucleotide
caauccuguccuugcaggu

SEQ ID NO: 2101645 - RNA, 19 nt, Artificial Sequence
  Description of Artificial Sequence: Synthetic oligonucleotide
gguaccgcaucacccgcuc

SEQ ID NO: 2101646 - RNA, 19 nt, Artificial Sequence
  Description of Artificial Sequence: Synthetic oligonucleotide
ccuuucaggaugaccuuga

SEQ ID NO: 2101647 - RNA, 19 nt, Artificial Sequence
  Description of Artificial Sequence: Synthetic oligonucleotide
gcagccauucucacacccc

SEQ ID NO: 2101648 - RNA, 19 nt, Artificial Sequence
  Description of Artificial Sequence: Synthetic oligonucleotide
agggaguggccgaagucaa

SEQ ID NO: 2101649 - RNA, 19 nt, Artificial Sequence
  Description of Artificial Sequence: Synthetic oligonucleotide
aguugauuccggagucuuu

SEQ ID NO: 2101650 - RNA, 19 nt, Artificial Sequence
  Description of Artificial Sequence: Synthetic oligonucleotide
gcuguuugagucucauccu

SEQ ID NO: 2101651 - RNA, 19 nt, Artificial Sequence
  Description of Artificial Sequence: Synthetic oligonucleotide
cuccgcuucaggggacagc

SEQ ID NO: 2101652 - RNA, 19 nt, Artificial Sequence
  Description of Artificial Sequence: Synthetic oligonucleotide
cacacaccuacagauggcu

SEQ ID NO: 2101653 - RNA, 19 nt, Artificial Sequence
  Description of Artificial Sequence: Synthetic oligonucleotide
ggugaggcauuuugaugaa

SEQ ID NO: 2101654 - RNA, 19 nt, Artificial Sequence
  Description of Artificial Sequence: Synthetic oligonucleotide
cuguuugagucucauccuu

SEQ ID NO: 2101655 - RNA, 19 nt, Artificial Sequence
  Description of Artificial Sequence: Synthetic oligonucleotide
gcaucacccgcuccgcuuc

SEQ ID NO: 2101656 - RNA, 19 nt, Artificial Sequence
  Description of Artificial Sequence: Synthetic oligonucleotide
ucuuagggugaggcauuuu

SEQ ID NO: 2101657 - RNA, 19 nt, Artificial Sequence
  Description of Artificial Sequence: Synthetic oligonucleotide
ggacagcauggcgacacac

SEQ ID NO: 2101658 - RNA, 19 nt, Artificial Sequence
  Description of Artificial Sequence: Synthetic oligonucleotide
cgcuucaggggacagcaug

SEQ ID NO: 2101659 - RNA, 19 nt, Artificial Sequence
  Description of Artificial Sequence: Synthetic oligonucleotide
ggagucuuucuauuucuuu

SEQ ID NO: 2101660 - RNA, 19 nt, Artificial Sequence
  Description of Artificial Sequence: Synthetic oligonucleotide
aggaugaccuugagggcuu

SEQ ID NO: 2101661 - RNA, 19 nt, Artificial Sequence
  Description of Artificial Sequence: Synthetic oligonucleotide
gacugacagcaccuacuau

SEQ ID NO: 2101662 - RNA, 19 nt, Artificial Sequence
  Description of Artificial Sequence: Synthetic oligonucleotide
ucucaagguuggggaggga

SEQ ID NO: 2101663 - RNA, 19 nt, Artificial Sequence
  Description of Artificial Sequence: Synthetic oligonucleotide
aggcuacuguugagaagug

SEQ ID NO: 2101664 - RNA, 19 nt, Artificial Sequence
  Description of Artificial Sequence: Synthetic oligonucleotide
cucauccuuucaggaugac

SEQ ID NO: 2101665 - RNA, 19 nt, Artificial Sequence
  Description of Artificial Sequence: Synthetic oligonucleotide
uggggagggaguggccgaa

SEQ ID NO: 2101666 - RNA, 19 nt, Artificial Sequence
  Description of Artificial Sequence: Synthetic oligonucleotide
ccgcccucucucuccaucc

SEQ ID NO: 2101667 - RNA, 19 nt, Artificial Sequence
  Description of Artificial Sequence: Synthetic oligonucleotide
cauuaggaaggaugcgguu

SEQ ID NO: 2101668 - RNA, 19 nt, Artificial Sequence
  Description of Artificial Sequence: Synthetic oligonucleotide
aucacccgcuccgcuucag

SEQ ID NO: 2101669 - RNA, 19 nt, Artificial Sequence
  Description of Artificial Sequence: Synthetic oligonucleotide
gcgguuugccugcccuggg

SEQ ID NO: 2101670 - RNA, 19 nt, Artificial Sequence
  Description of Artificial Sequence: Synthetic oligonucleotide
aucugccgcuuguccgaca

SEQ ID NO: 2101671 - RNA, 19 nt, Artificial Sequence
  Description of Artificial Sequence: Synthetic oligonucleotide
agguaccgcaucacccgcu

SEQ ID NO: 2101672 - RNA, 19 nt, Artificial Sequence
  Description of Artificial Sequence: Synthetic oligonucleotide
aggcccucucgguucugau

SEQ ID NO: 2101673 - RNA, 19 nt, Artificial Sequence
  Description of Artificial Sequence: Synthetic oligonucleotide
gcuuguccgacagcaccgc

SEQ ID NO: 2101674 - RNA, 19 nt, Artificial Sequence
  Description of Artificial Sequence: Synthetic oligonucleotide
gccucccaucucaagagca

SEQ ID NO: 2101675 - RNA, 19 nt, Artificial Sequence
  Description of Artificial Sequence: Synthetic oligonucleotide
cacuaagggucugucuucu

SEQ ID NO: 2101676 - RNA, 19 nt, Artificial Sequence
  Description of Artificial Sequence: Synthetic oligonucleotide
ggaugcgguuugccugccc

SEQ ID NO: 2101677 - RNA, 19 nt, Artificial Sequence
  Description of Artificial Sequence: Synthetic oligonucleotide
agccacauuccugggccua

SEQ ID NO: 2101678 - RNA, 19 nt, Artificial Sequence
  Description of Artificial Sequence: Synthetic oligonucleotide
gaugaccuugagggcuuua

SEQ ID NO: 2101679 - RNA, 19 nt, Artificial Sequence
  Description of Artificial Sequence: Synthetic oligonucleotide
gggcuuuggggaaaugugu

SEQ ID NO: 2101680 - RNA, 19 nt, Artificial Sequence
  Description of Artificial Sequence: Synthetic oligonucleotide
cucgguucugauuccucuu

SEQ ID NO: 2101681 - RNA, 19 nt, Artificial Sequence
  Description of Artificial Sequence: Synthetic oligonucleotide
ggccgaagucaaagguccc

SEQ ID NO: 2101682 - RNA, 19 nt, Artificial Sequence
  Description of Artificial Sequence: Synthetic oligonucleotide
cgcucagguccuucuguag

SEQ ID NO: 2101683 - RNA, 19 nt, Artificial Sequence
  Description of Artificial Sequence: Synthetic oligonucleotide
ccuuugucuuagggugagg

SEQ ID NO: 2101684 - RNA, 19 nt, Artificial Sequence
  Description of Artificial Sequence: Synthetic oligonucleotide
ggggcacuaagggucuguc

SEQ ID NO: 2101685 - RNA, 19 nt, Artificial Sequence
  Description of Artificial Sequence: Synthetic oligonucleotide
ggcuucgaaaaggcgguua

SEQ ID NO: 2101686 - RNA, 19 nt, Artificial Sequence
  Description of Artificial Sequence: Synthetic oligonucleotide
caucacccgcuccgcuuca

SEQ ID NO: 2101687 - RNA, 19 nt, Artificial Sequence
  Description of Artificial Sequence: Synthetic oligonucleotide
ccacuucgaccagguaccg

SEQ ID NO: 2101688 - RNA, 19 nt, Artificial Sequence
  Description of Artificial Sequence: Synthetic oligonucleotide
ccucccaucucaagagcaa

SEQ ID NO: 2101689 - RNA, 19 nt, Artificial Sequence
  Description of Artificial Sequence: Synthetic oligonucleotide
ccggagucuuucuauuucu

SEQ ID NO: 2101690 - RNA, 19 nt, Artificial Sequence
  Description of Artificial Sequence: Synthetic oligonucleotide
gggacagcauggcgacaca

SEQ ID NO: 2101691 - RNA, 19 nt, Artificial Sequence
  Description of Artificial Sequence: Synthetic oligonucleotide
cgguuugccugcccugggc

SEQ ID NO: 2101692 - RNA, 19 nt, Artificial Sequence
  Description of Artificial Sequence: Synthetic oligonucleotide
ggcgguuaacuuucacuuu

SEQ ID NO: 2101693 - RNA, 19 nt, Artificial Sequence
  Description of Artificial Sequence: Synthetic oligonucleotide
cuucgaccagguaccgcau

SEQ ID NO: 2101694 - RNA, 19 nt, Artificial Sequence
  Description of Artificial Sequence: Synthetic oligonucleotide
caccuacagauggcugcca

SEQ ID NO: 2101695 - RNA, 19 nt, Artificial Sequence
  Description of Artificial Sequence: Synthetic oligonucleotide
gucugucaauaggucuugu

SEQ ID NO: 2101696 - RNA, 19 nt, Artificial Sequence
  Description of Artificial Sequence: Synthetic oligonucleotide
gggcacuaagggucugucu

SEQ ID NO: 2101697 - RNA, 19 nt, Artificial Sequence
  Description of Artificial Sequence: Synthetic oligonucleotide
cugggccuauccccuuaaa

SEQ ID NO: 2101698 - RNA, 19 nt, Artificial Sequence
  Description of Artificial Sequence: Synthetic oligonucleotide
ggggagggaguggccgaag

SEQ ID NO: 2101699 - RNA, 19 nt, Artificial Sequence
  Description of Artificial Sequence: Synthetic oligonucleotide
gguucagguuaaaacccuu

SEQ ID NO: 2101700 - RNA, 19 nt, Artificial Sequence
  Description of Artificial Sequence: Synthetic oligonucleotide
gcugccagggucugucaau

SEQ ID NO: 2101701 - RNA, 19 nt, Artificial Sequence
  Description of Artificial Sequence: Synthetic oligonucleotide
gcuccgcuucaggggacag

SEQ ID NO: 2101702 - RNA, 19 nt, Artificial Sequence
  Description of Artificial Sequence: Synthetic oligonucleotide
gcaaccacagagggugacu

SEQ ID NO: 2101703 - RNA, 19 nt, Artificial Sequence
  Description of Artificial Sequence: Synthetic oligonucleotide
ccaguccgcccucucucuc

SEQ ID NO: 2101704 - RNA, 19 nt, Artificial Sequence
  Description of Artificial Sequence: Synthetic oligonucleotide
agcugguguggggcacuaa

SEQ ID NO: 2101705 - RNA, 19 nt, Artificial Sequence
  Description of Artificial Sequence: Synthetic oligonucleotide
cgguuaacuuucacuuuaa

SEQ ID NO: 2101706 - RNA, 19 nt, Artificial Sequence
  Description of Artificial Sequence: Synthetic oligonucleotide
augccucgcccugcagaaa

SEQ ID NO: 2101707 - RNA, 19 nt, Artificial Sequence
  Description of Artificial Sequence: Synthetic oligonucleotide
cccugcagaaagcuggaau

SEQ ID NO: 2101708 - RNA, 19 nt, Artificial Sequence
  Description of Artificial Sequence: Synthetic oligonucleotide
ccuugcaggucucaagguu

SEQ ID NO: 2101709 - RNA, 19 nt, Artificial Sequence
  Description of Artificial Sequence: Synthetic oligonucleotide
gguccuucuguagggcccu

SEQ ID NO: 2101710 - RNA, 19 nt, Artificial Sequence
  Description of Artificial Sequence: Synthetic oligonucleotide
cccaucuaaacagcaggcu

SEQ ID NO: 2101711 - RNA, 19 nt, Artificial Sequence
  Description of Artificial Sequence: Synthetic oligonucleotide
guagggcccucaggcccuc

SEQ ID NO: 2101712 - RNA, 19 nt, Artificial Sequence
  Description of Artificial Sequence: Synthetic oligonucleotide
cucggccagcuccuccacu

SEQ ID NO: 2101713 - RNA, 19 nt, Artificial Sequence
  Description of Artificial Sequence: Synthetic oligonucleotide
ccacauuccugggccuauc

SEQ ID NO: 2101714 - RNA, 19 nt, Artificial Sequence
  Description of Artificial Sequence: Synthetic oligonucleotide
gccugcccugggccagucc

SEQ ID NO: 2101715 - RNA, 19 nt, Artificial Sequence
  Description of Artificial Sequence: Synthetic oligonucleotide
gcauuuugaugaacauguu

SEQ ID NO: 2101716 - RNA, 19 nt, Artificial Sequence
  Description of Artificial Sequence: Synthetic oligonucleotide
ggcccucucgguucugauu

SEQ ID NO: 2101717 - RNA, 19 nt, Artificial Sequence
  Description of Artificial Sequence: Synthetic oligonucleotide
cccauccugcuguuugagu

SEQ ID NO: 2101718 - RNA, 19 nt, Artificial Sequence
  Description of Artificial Sequence: Synthetic oligonucleotide
gcauggcgacacacagcuc

SEQ ID NO: 2101719 - RNA, 19 nt, Artificial Sequence
  Description of Artificial Sequence: Synthetic oligonucleotide
ccgcuccgcuucaggggac

SEQ ID NO: 2101720 - RNA, 19 nt, Artificial Sequence
  Description of Artificial Sequence: Synthetic oligonucleotide
cagcugguguggggcacua

SEQ ID NO: 2101721 - RNA, 19 nt, Artificial Sequence
  Description of Artificial Sequence: Synthetic oligonucleotide
ccaggugcuccugaucuuu

SEQ ID NO: 2101722 - RNA, 19 nt, Artificial Sequence
  Description of Artificial Sequence: Synthetic oligonucleotide
ccuccacuucgaccaggua

SEQ ID NO: 2101723 - RNA, 19 nt, Artificial Sequence
  Description of Artificial Sequence: Synthetic oligonucleotide
ggaugaccuugagggcuuu

SEQ ID NO: 2101724 - RNA, 19 nt, Artificial Sequence
  Description of Artificial Sequence: Synthetic oligonucleotide
gggcuucgaaaaggcgguu

SEQ ID NO: 2101725 - RNA, 19 nt, Artificial Sequence
  Description of Artificial Sequence: Synthetic oligonucleotide
cgcuccgcuucaggggaca

SEQ ID NO: 2101726 - RNA, 19 nt, Artificial Sequence
  Description of Artificial Sequence: Synthetic oligonucleotide
cagagacgcucagguccuu

SEQ ID NO: 2101727 - RNA, 19 nt, Artificial Sequence
  Description of Artificial Sequence: Synthetic oligonucleotide
ccgcuucaggggacagcau

SEQ ID NO: 2101728 - RNA, 19 nt, Artificial Sequence
  Description of Artificial Sequence: Synthetic oligonucleotide
ccgccucggccagcuccuc

SEQ ID NO: 2101729 - RNA, 19 nt, Artificial Sequence
  Description of Artificial Sequence: Synthetic oligonucleotide
uuauugauaaggaacaccc

SEQ ID NO: 2101730 - RNA, 19 nt, Artificial Sequence
  Description of Artificial Sequence: Synthetic oligonucleotide
uugaaguuuaacaagcucc

SEQ ID NO: 2101731 - RNA, 19 nt, Artificial Sequence
  Description of Artificial Sequence: Synthetic oligonucleotide
aaacaaacguaacuuuccc

SEQ ID NO: 2101732 - RNA, 19 nt, Artificial Sequence
  Description of Artificial Sequence: Synthetic oligonucleotide
uaugcuacaucuuaguucu

SEQ ID NO: 2101733 - RNA, 19 nt, Artificial Sequence
  Description of Artificial Sequence: Synthetic oligonucleotide
aacaaacguaacuuucccc

SEQ ID NO: 2101734 - RNA, 19 nt, Artificial Sequence
  Description of Artificial Sequence: Synthetic oligonucleotide
gagaagucaagugagaggg

SEQ ID NO: 2101735 - RNA, 19 nt, Artificial Sequence
  Description of Artificial Sequence: Synthetic oligonucleotide
aagaacaggucucaccucg

SEQ ID NO: 2101736 - RNA, 19 nt, Artificial Sequence
  Description of Artificial Sequence: Synthetic oligonucleotide
aacuauucaacaugaccac

SEQ ID NO: 2101737 - RNA, 19 nt, Artificial Sequence
  Description of Artificial Sequence: Synthetic oligonucleotide
cagaauucgaggaauaggg

SEQ ID NO: 2101738 - RNA, 19 nt, Artificial Sequence
  Description of Artificial Sequence: Synthetic oligonucleotide
uguuauacaccucaaacuc

SEQ ID NO: 2101739 - RNA, 19 nt, Artificial Sequence
  Description of Artificial Sequence: Synthetic oligonucleotide
ugagauuuguuauacaccu

SEQ ID NO: 2101740 - RNA, 19 nt, Artificial Sequence
  Description of Artificial Sequence: Synthetic oligonucleotide
aaggggacaaaucagcuug

SEQ ID NO: 2101741 - RNA, 19 nt, Artificial Sequence
  Description of Artificial Sequence: Synthetic oligonucleotide
auaugcuacaucuuaguuc

SEQ ID NO: 2101742 - RNA, 19 nt, Artificial Sequence
  Description of Artificial Sequence: Synthetic oligonucleotide
ucuacagucagccaugacu

SEQ ID NO: 2101743 - RNA, 19 nt, Artificial Sequence
  Description of Artificial Sequence: Synthetic oligonucleotide
guaucuacagaauucgagg

SEQ ID NO: 2101744 - RNA, 19 nt, Artificial Sequence
  Description of Artificial Sequence: Synthetic oligonucleotide
ucaauauucuuacacuuga

SEQ ID NO: 2101745 - RNA, 19 nt, Artificial Sequence
  Description of Artificial Sequence: Synthetic oligonucleotide
agaaucucccucuaguuuc

SEQ ID NO: 2101746 - RNA, 19 nt, Artificial Sequence
  Description of Artificial Sequence: Synthetic oligonucleotide
ugaaguuuaacaagcuccc

SEQ ID NO: 2101747 - RNA, 19 nt, Artificial Sequence
  Description of Artificial Sequence: Synthetic oligonucleotide
uuuaacaagcucccagggg

SEQ ID NO: 2101748 - RNA, 19 nt, Artificial Sequence
  Description of Artificial Sequence: Synthetic oligonucleotide
aguuuaacaagcucccagg

SEQ ID NO: 2101749 - RNA, 19 nt, Artificial Sequence
  Description of Artificial Sequence: Synthetic oligonucleotide
uguuacugacacaagacac

SEQ ID NO: 2101750 - RNA, 19 nt, Artificial Sequence
  Description of Artificial Sequence: Synthetic oligonucleotide
gacaucuccagcuaggcug

SEQ ID NO: 2101751 - RNA, 19 nt, Artificial Sequence
  Description of Artificial Sequence: Synthetic oligonucleotide
uaagacuuguggcaguuag

SEQ ID NO: 2101752 - RNA, 19 nt, Artificial Sequence
  Description of Artificial Sequence: Synthetic oligonucleotide
uucccuucacuccauaggg

SEQ ID NO: 2101753 - RNA, 19 nt, Artificial Sequence
  Description of Artificial Sequence: Synthetic oligonucleotide
uuuccuacuaggaagccca

SEQ ID NO: 2101754 - RNA, 19 nt, Artificial Sequence
  Description of Artificial Sequence: Synthetic oligonucleotide
uuagaaggggacaaaucag

SEQ ID NO: 2101755 - RNA, 19 nt, Artificial Sequence
  Description of Artificial Sequence: Synthetic oligonucleotide
gccaugacuacauagaccg

SEQ ID NO: 2101756 - RNA, 19 nt, Artificial Sequence
  Description of Artificial Sequence: Synthetic oligonucleotide
auugauaaggaacaccccu

SEQ ID NO: 2101757 - RNA, 19 nt, Artificial Sequence
  Description of Artificial Sequence: Synthetic oligonucleotide
caacuauucaacaugacca

SEQ ID NO: 2101758 - RNA, 19 nt, Artificial Sequence
  Description of Artificial Sequence: Synthetic oligonucleotide
aguuuuacacagaaucucc

SEQ ID NO: 2101759 - RNA, 19 nt, Artificial Sequence
  Description of Artificial Sequence: Synthetic oligonucleotide
acaaacguaacuuuccccu

SEQ ID NO: 2101760 - RNA, 19 nt, Artificial Sequence
  Description of Artificial Sequence: Synthetic oligonucleotide
aaagacugguccugccugc

SEQ ID NO: 2101761 - RNA, 19 nt, Artificial Sequence
  Description of Artificial Sequence: Synthetic oligonucleotide
aagaccauagcccucacuu

SEQ ID NO: 2101762 - RNA, 19 nt, Artificial Sequence
  Description of Artificial Sequence: Synthetic oligonucleotide
uacaccucaaacuccagcc

SEQ ID NO: 2101763 - RNA, 19 nt, Artificial Sequence
  Description of Artificial Sequence: Synthetic oligonucleotide
uuuauugauaaggaacacc

SEQ ID NO: 2101764 - RNA, 19 nt, Artificial Sequence
  Description of Artificial Sequence: Synthetic oligonucleotide
acacuuuaagaccuggguc

SEQ ID NO: 2101765 - RNA, 19 nt, Artificial Sequence
  Description of Artificial Sequence: Synthetic oligonucleotide
uguacuuaggagaguaucu

SEQ ID NO: 2101766 - RNA, 19 nt, Artificial Sequence
  Description of Artificial Sequence: Synthetic oligonucleotide
ucaacaugaccacugguga

SEQ ID NO: 2101767 - RNA, 19 nt, Artificial Sequence
  Description of Artificial Sequence: Synthetic oligonucleotide
agaguaucuacagaauucg

SEQ ID NO: 2101768 - RNA, 19 nt, Artificial Sequence
  Description of Artificial Sequence: Synthetic oligonucleotide
cuaggcuggagaaagacug

SEQ ID NO: 2101769 - RNA, 19 nt, Artificial Sequence
  Description of Artificial Sequence: Synthetic oligonucleotide
uuuaguacuggagucaaga

SEQ ID NO: 2101770 - RNA, 19 nt, Artificial Sequence
  Description of Artificial Sequence: Synthetic oligonucleotide
cacuugaaguuuaacaagc

SEQ ID NO: 2101771 - RNA, 19 nt, Artificial Sequence
  Description of Artificial Sequence: Synthetic oligonucleotide
ugagcauccuaucacauau

SEQ ID NO: 2101772 - RNA, 19 nt, Artificial Sequence
  Description of Artificial Sequence: Synthetic oligonucleotide
uaguacuggagucaagacc

SEQ ID NO: 2101773 - RNA, 19 nt, Artificial Sequence
  Description of Artificial Sequence: Synthetic oligonucleotide
aaaggauucugggagccac

SEQ ID NO: 2101774 - RNA, 19 nt, Artificial Sequence
  Description of Artificial Sequence: Synthetic oligonucleotide
ucucagaguagacaucucc

SEQ ID NO: 2101775 - RNA, 19 nt, Artificial Sequence
  Description of Artificial Sequence: Synthetic oligonucleotide
gaugguuucaaguccucag

SEQ ID NO: 2101776 - RNA, 19 nt, Artificial Sequence
  Description of Artificial Sequence: Synthetic oligonucleotide
uagggagaagucaagugag

SEQ ID NO: 2101777 - RNA, 19 nt, Artificial Sequence
  Description of Artificial Sequence: Synthetic oligonucleotide
augguuucaaguccucagc

SEQ ID NO: 2101778 - RNA, 19 nt, Artificial Sequence
  Description of Artificial Sequence: Synthetic oligonucleotide
uagcuuucagguaaaaccu

SEQ ID NO: 2101779 - RNA, 19 nt, Artificial Sequence
  Description of Artificial Sequence: Synthetic oligonucleotide
uugcacuugaaguuuaaca

SEQ ID NO: 2101780 - RNA, 19 nt, Artificial Sequence
  Description of Artificial Sequence: Synthetic oligonucleotide
uagaaggggacaaaucagc

SEQ ID NO: 2101781 - RNA, 19 nt, Artificial Sequence
  Description of Artificial Sequence: Synthetic oligonucleotide
aauucgaggaauaggguug

SEQ ID NO: 2101782 - RNA, 19 nt, Artificial Sequence
  Description of Artificial Sequence: Synthetic oligonucleotide
uggagucaagaccauagcc

SEQ ID NO: 2101783 - RNA, 19 nt, Artificial Sequence
  Description of Artificial Sequence: Synthetic oligonucleotide
ucagguaaaaccugagaga

SEQ ID NO: 2101784 - RNA, 19 nt, Artificial Sequence
  Description of Artificial Sequence: Synthetic oligonucleotide
aaauaggacuucccuucac

SEQ ID NO: 2101785 - RNA, 19 nt, Artificial Sequence
  Description of Artificial Sequence: Synthetic oligonucleotide
gagaauguggcagaggccc

SEQ ID NO: 2101786 - RNA, 19 nt, Artificial Sequence
  Description of Artificial Sequence: Synthetic oligonucleotide
acuacauagaccgcuugcc

SEQ ID NO: 2101787 - RNA, 19 nt, Artificial Sequence
  Description of Artificial Sequence: Synthetic oligonucleotide
auacaccucaaacuccagc

SEQ ID NO: 2101788 - RNA, 19 nt, Artificial Sequence
  Description of Artificial Sequence: Synthetic oligonucleotide
ugcaguaagacuuguggca

SEQ ID NO: 2101789 - RNA, 19 nt, Artificial Sequence
  Description of Artificial Sequence: Synthetic oligonucleotide
uuuaaaauggcuugucguu

SEQ ID NO: 2101790 - RNA, 19 nt, Artificial Sequence
  Description of Artificial Sequence: Synthetic oligonucleotide
cuuaggagaguaucuacag

SEQ ID NO: 2101791 - RNA, 19 nt, Artificial Sequence
  Description of Artificial Sequence: Synthetic oligonucleotide
uacacuugagauuuguuau

SEQ ID NO: 2101792 - RNA, 19 nt, Artificial Sequence
  Description of Artificial Sequence: Synthetic oligonucleotide
uucucaauauucuuacacu

SEQ ID NO: 2101793 - RNA, 19 nt, Artificial Sequence
  Description of Artificial Sequence: Synthetic oligonucleotide
ucaaacuccagccuuuaaa

SEQ ID NO: 2101794 - RNA, 19 nt, Artificial Sequence
  Description of Artificial Sequence: Synthetic oligonucleotide
aguacuggagucaagacca

SEQ ID NO: 2101795 - RNA, 19 nt, Artificial Sequence
  Description of Artificial Sequence: Synthetic oligonucleotide
uuugcuuccuucaaacaaa

SEQ ID NO: 2101796 - RNA, 19 nt, Artificial Sequence
  Description of Artificial Sequence: Synthetic oligonucleotide
auccacaugguccauuuag

SEQ ID NO: 2101797 - RNA, 19 nt, Artificial Sequence
  Description of Artificial Sequence: Synthetic oligonucleotide
cuauucaacaugaccacug

SEQ ID NO: 2101798 - RNA, 19 nt, Artificial Sequence
  Description of Artificial Sequence: Synthetic oligonucleotide
ccuaguuuuacacagaauc

SEQ ID NO: 2101799 - RNA, 19 nt, Artificial Sequence
  Description of Artificial Sequence: Synthetic oligonucleotide
aacaggucucaccucgagg

SEQ ID NO: 2101800 - RNA, 19 nt, Artificial Sequence
  Description of Artificial Sequence: Synthetic oligonucleotide
auagucuacagucagccau

SEQ ID NO: 2101801 - RNA, 19 nt, Artificial Sequence
  Description of Artificial Sequence: Synthetic oligonucleotide
cuaguacacacaauucacc

SEQ ID NO: 2101802 - RNA, 19 nt, Artificial Sequence
  Description of Artificial Sequence: Synthetic oligonucleotide
acuguuacugacacaagac

SEQ ID NO: 2101803 - RNA, 19 nt, Artificial Sequence
  Description of Artificial Sequence: Synthetic oligonucleotide
guuuaacaagcucccaggg

SEQ ID NO: 2101804 - RNA, 19 nt, Artificial Sequence
  Description of Artificial Sequence: Synthetic oligonucleotide
aaucagcuuguacuuagga

SEQ ID NO: 2101805 - RNA, 19 nt, Artificial Sequence
  Description of Artificial Sequence: Synthetic oligonucleotide
aaaucuuacucccuuuauu

SEQ ID NO: 2101806 - RNA, 19 nt, Artificial Sequence
  Description of Artificial Sequence: Synthetic oligonucleotide
uacuaggaagcccagucca

SEQ ID NO: 2101807 - RNA, 19 nt, Artificial Sequence
  Description of Artificial Sequence: Synthetic oligonucleotide
uauugauaaggaacacccc

SEQ ID NO: 2101808 - RNA, 19 nt, Artificial Sequence
  Description of Artificial Sequence: Synthetic oligonucleotide
aaaauaggacuucccuuca

SEQ ID NO: 2101809 - RNA, 19 nt, Artificial Sequence
  Description of Artificial Sequence: Synthetic oligonucleotide
uacauagaccgcuugcccc

SEQ ID NO: 2101810 - RNA, 19 nt, Artificial Sequence
  Description of Artificial Sequence: Synthetic oligonucleotide
gauucugggagccacucac

SEQ ID NO: 2101811 - RNA, 19 nt, Artificial Sequence
  Description of Artificial Sequence: Synthetic oligonucleotide
aguaucuacagaauucgag

SEQ ID NO: 2101812 - RNA, 19 nt, Artificial Sequence
  Description of Artificial Sequence: Synthetic oligonucleotide
ugacacuuuaagaccuggg

SEQ ID NO: 2101813 - RNA, 19 nt, Artificial Sequence
  Description of Artificial Sequence: Synthetic oligonucleotide
uuuuacacagaaucucccu

SEQ ID NO: 2101814 - RNA, 19 nt, Artificial Sequence
  Description of Artificial Sequence: Synthetic oligonucleotide
aaccugacagccugaacug

SEQ ID NO: 2101815 - RNA, 19 nt, Artificial Sequence
  Description of Artificial Sequence: Synthetic oligonucleotide
ucucaauauucuuacacuu

SEQ ID NO: 2101816 - RNA, 19 nt, Artificial Sequence
  Description of Artificial Sequence: Synthetic oligonucleotide
uggcaguuagcuuucaggu

SEQ ID NO: 2101817 - RNA, 19 nt, Artificial Sequence
  Description of Artificial Sequence: Synthetic oligonucleotide
ggggcuuuuauugauaagg

SEQ ID NO: 2101818 - RNA, 19 nt, Artificial Sequence
  Description of Artificial Sequence: Synthetic oligonucleotide
uccauuuaguacuggaguc

SEQ ID NO: 2101819 - RNA, 19 nt, Artificial Sequence
  Description of Artificial Sequence: Synthetic oligonucleotide
aaaccugagagaccugaga

SEQ ID NO: 2101820 - RNA, 19 nt, Artificial Sequence
  Description of Artificial Sequence: Synthetic oligonucleotide
ggugacacaacacuguuac

SEQ ID NO: 2101821 - RNA, 19 nt, Artificial Sequence
  Description of Artificial Sequence: Synthetic oligonucleotide
cauccuaucacauaugcua

SEQ ID NO: 2101822 - RNA, 19 nt, Artificial Sequence
  Description of Artificial Sequence: Synthetic oligonucleotide
uuacacagaaucucccucu

SEQ ID NO: 2101823 - RNA, 19 nt, Artificial Sequence
  Description of Artificial Sequence: Synthetic oligonucleotide
uauucucuucaacuauuca

SEQ ID NO: 2101824 - RNA, 19 nt, Artificial Sequence
  Description of Artificial Sequence: Synthetic oligonucleotide
cagguaaaaccugagagac

SEQ ID NO: 2101825 - RNA, 19 nt, Artificial Sequence
  Description of Artificial Sequence: Synthetic oligonucleotide
acucacuucagacgugggg

SEQ ID NO: 2101826 - RNA, 19 nt, Artificial Sequence
  Description of Artificial Sequence: Synthetic oligonucleotide
uuaggagaguaucuacaga

SEQ ID NO: 2101827 - RNA, 19 nt, Artificial Sequence
  Description of Artificial Sequence: Synthetic oligonucleotide
uacaucuuaguucuuccau

SEQ ID NO: 2101828 - RNA, 19 nt, Artificial Sequence
  Description of Artificial Sequence: Synthetic oligonucleotide
aacuggcuagcuuccaucu

SEQ ID NO: 2101829 - RNA, 19 nt, Artificial Sequence
  Description of Artificial Sequence: Synthetic oligonucleotide
uaaaaccugagagaccuga

SEQ ID NO: 2101830 - RNA, 19 nt, Artificial Sequence
  Description of Artificial Sequence: Synthetic oligonucleotide
gaaccugacagccugaacu

SEQ ID NO: 2101831 - RNA, 19 nt, Artificial Sequence
  Description of Artificial Sequence: Synthetic oligonucleotide
cauagggagaagucaagug

SEQ ID NO: 2101832 - RNA, 19 nt, Artificial Sequence
  Description of Artificial Sequence: Synthetic oligonucleotide
uugauaaggaacaccccuc

SEQ ID NO: 2101833 - RNA, 19 nt, Artificial Sequence
  Description of Artificial Sequence: Synthetic oligonucleotide
ucuuacucccuuuauucuc

SEQ ID NO: 2101834 - RNA, 19 nt, Artificial Sequence
  Description of Artificial Sequence: Synthetic oligonucleotide
caugugagcauccuaucac

SEQ ID NO: 2101835 - RNA, 19 nt, Artificial Sequence
  Description of Artificial Sequence: Synthetic oligonucleotide
gacuacauagaccgcuugc

SEQ ID NO: 2101836 - RNA, 19 nt, Artificial Sequence
  Description of Artificial Sequence: Synthetic oligonucleotide
agaccugagaauguggcag

SEQ ID NO: 2101837 - RNA, 19 nt, Artificial Sequence
  Description of Artificial Sequence: Synthetic oligonucleotide
uccccuaguacacacaauu

SEQ ID NO: 2101838 - RNA, 19 nt, Artificial Sequence
  Description of Artificial Sequence: Synthetic oligonucleotide
aagacuuguggcaguuagc

SEQ ID NO: 2101839 - RNA, 19 nt, Artificial Sequence
  Description of Artificial Sequence: Synthetic oligonucleotide
accugcuugcacuugaagu

SEQ ID NO: 2101840 - RNA, 19 nt, Artificial Sequence
  Description of Artificial Sequence: Synthetic oligonucleotide
ugguuucaaguccucagcu

SEQ ID NO: 2101841 - RNA, 19 nt, Artificial Sequence
  Description of Artificial Sequence: Synthetic oligonucleotide
uacagaauucgaggaauag

SEQ ID NO: 2101842 - RNA, 19 nt, Artificial Sequence
  Description of Artificial Sequence: Synthetic oligonucleotide
uuaguacuggagucaagac

SEQ ID NO: 2101843 - RNA, 19 nt, Artificial Sequence
  Description of Artificial Sequence: Synthetic oligonucleotide
cugcaguaagacuuguggc

SEQ ID NO: 2101844 - RNA, 19 nt, Artificial Sequence
  Description of Artificial Sequence: Synthetic oligonucleotide
aaacguaacuuuccccuaa

SEQ ID NO: 2101845 - RNA, 19 nt, Artificial Sequence
  Description of Artificial Sequence: Synthetic oligonucleotide
ucuacagaauucgaggaau

SEQ ID NO: 2101846 - RNA, 19 nt, Artificial Sequence
  Description of Artificial Sequence: Synthetic oligonucleotide
uaaaauggcuugucguuuc

SEQ ID NO: 2101847 - RNA, 19 nt, Artificial Sequence
  Description of Artificial Sequence: Synthetic oligonucleotide
accaccuauccacaugguc

SEQ ID NO: 2101848 - RNA, 19 nt, Artificial Sequence
  Description of Artificial Sequence: Synthetic oligonucleotide
uagucuacagucagccaug

SEQ ID NO: 2101849 - RNA, 19 nt, Artificial Sequence
  Description of Artificial Sequence: Synthetic oligonucleotide
uacuuaggagaguaucuac

SEQ ID NO: 2101850 - RNA, 19 nt, Artificial Sequence
  Description of Artificial Sequence: Synthetic oligonucleotide
cuggcuagcuuccaucugc

SEQ ID NO: 2101851 - RNA, 19 nt, Artificial Sequence
  Description of Artificial Sequence: Synthetic oligonucleotide
ugagaauguggcagaggcc

SEQ ID NO: 2101852 - RNA, 19 nt, Artificial Sequence
  Description of Artificial Sequence: Synthetic oligonucleotide
cuuucagguaaaaccugag

SEQ ID NO: 2101853 - RNA, 19 nt, Artificial Sequence
  Description of Artificial Sequence: Synthetic oligonucleotide
ucguuucugcuucuuuucc

SEQ ID NO: 2101854 - RNA, 19 nt, Artificial Sequence
  Description of Artificial Sequence: Synthetic oligonucleotide
ggagaagucaagugagagg

SEQ ID NO: 2101855 - RNA, 19 nt, Artificial Sequence
  Description of Artificial Sequence: Synthetic oligonucleotide
cagccuuuaaaauggcuug

SEQ ID NO: 2101856 - RNA, 19 nt, Artificial Sequence
  Description of Artificial Sequence: Synthetic oligonucleotide
auucgaggaauaggguugc

SEQ ID NO: 2101857 - RNA, 19 nt, Artificial Sequence
  Description of Artificial Sequence: Synthetic oligonucleotide
acaugugagcauccuauca

SEQ ID NO: 2101858 - RNA, 19 nt, Artificial Sequence
  Description of Artificial Sequence: Synthetic oligonucleotide
aaaauggcuugucguuucu

SEQ ID NO: 2101859 - RNA, 19 nt, Artificial Sequence
  Description of Artificial Sequence: Synthetic oligonucleotide
uccauagggagaagucaag

SEQ ID NO: 2101860 - RNA, 19 nt, Artificial Sequence
  Description of Artificial Sequence: Synthetic oligonucleotide
uuuuccuacuaggaagccc

SEQ ID NO: 2101861 - RNA, 19 nt, Artificial Sequence
  Description of Artificial Sequence: Synthetic oligonucleotide
auccuaucacauaugcuac

SEQ ID NO: 2101862 - RNA, 19 nt, Artificial Sequence
  Description of Artificial Sequence: Synthetic oligonucleotide
ggaucugagagggaggugg

SEQ ID NO: 2101863 - RNA, 19 nt, Artificial Sequence
  Description of Artificial Sequence: Synthetic oligonucleotide
aaucugcuccuaguuuuac

SEQ ID NO: 2101864 - RNA, 19 nt, Artificial Sequence
  Description of Artificial Sequence: Synthetic oligonucleotide
ucucccucuaguuucugcu

SEQ ID NO: 2101865 - RNA, 19 nt, Artificial Sequence
  Description of Artificial Sequence: Synthetic oligonucleotide
guuauacaccucaaacucc

SEQ ID NO: 2101866 - RNA, 19 nt, Artificial Sequence
  Description of Artificial Sequence: Synthetic oligonucleotide
uccuuuguggaggcaaagg

SEQ ID NO: 2101867 - RNA, 19 nt, Artificial Sequence
  Description of Artificial Sequence: Synthetic oligonucleotide
cuacauagaccgcuugccc

SEQ ID NO: 2101868 - RNA, 19 nt, Artificial Sequence
  Description of Artificial Sequence: Synthetic oligonucleotide
uuccccuaauagcugaggu

SEQ ID NO: 2101869 - RNA, 19 nt, Artificial Sequence
  Description of Artificial Sequence: Synthetic oligonucleotide
agacuuguggcaguuagcu

SEQ ID NO: 2101870 - RNA, 19 nt, Artificial Sequence
  Description of Artificial Sequence: Synthetic oligonucleotide
ccaccuauccacauggucc

SEQ ID NO: 2101871 - RNA, 19 nt, Artificial Sequence
  Description of Artificial Sequence: Synthetic oligonucleotide
agccaugacuacauagacc

SEQ ID NO: 2101872 - RNA, 19 nt, Artificial Sequence
  Description of Artificial Sequence: Synthetic oligonucleotide
aggacuucccuucacucca

SEQ ID NO: 2101873 - RNA, 19 nt, Artificial Sequence
  Description of Artificial Sequence: Synthetic oligonucleotide
uuguacuuaggagaguauc

SEQ ID NO: 2101874 - RNA, 19 nt, Artificial Sequence
  Description of Artificial Sequence: Synthetic oligonucleotide
cugaacugggaccugcuug

SEQ ID NO: 2101875 - RNA, 19 nt, Artificial Sequence
  Description of Artificial Sequence: Synthetic oligonucleotide
ugagagaccugagaaugug

SEQ ID NO: 2101876 - RNA, 19 nt, Artificial Sequence
  Description of Artificial Sequence: Synthetic oligonucleotide
aagacugguccugccugcc

SEQ ID NO: 2101877 - RNA, 19 nt, Artificial Sequence
  Description of Artificial Sequence: Synthetic oligonucleotide
agcuaggcuggagaaagac

SEQ ID NO: 2101878 - RNA, 19 nt, Artificial Sequence
  Description of Artificial Sequence: Synthetic oligonucleotide
ugugcuuugcuuccuucaa

SEQ ID NO: 2101879 - RNA, 19 nt, Artificial Sequence
  Description of Artificial Sequence: Synthetic oligonucleotide
cuuccuuccccuaguacac

SEQ ID NO: 2101880 - RNA, 19 nt, Artificial Sequence
  Description of Artificial Sequence: Synthetic oligonucleotide
uuacugacacaagacacuc

SEQ ID NO: 2101881 - RNA, 19 nt, Artificial Sequence
  Description of Artificial Sequence: Synthetic oligonucleotide
cuuuaaaauggcuugucgu

SEQ ID NO: 2101882 - RNA, 19 nt, Artificial Sequence
  Description of Artificial Sequence: Synthetic oligonucleotide
uuucaaguccucagcugga

SEQ ID NO: 2101883 - RNA, 19 nt, Artificial Sequence
  Description of Artificial Sequence: Synthetic oligonucleotide
guagacaucuccagcuagg

SEQ ID NO: 2101884 - RNA, 19 nt, Artificial Sequence
  Description of Artificial Sequence: Synthetic oligonucleotide
cuacuaggaagcccagucc

SEQ ID NO: 2101885 - RNA, 19 nt, Artificial Sequence
  Description of Artificial Sequence: Synthetic oligonucleotide
ugcuaccaccuuagaaggg

SEQ ID NO: 2101886 - RNA, 19 nt, Artificial Sequence
  Description of Artificial Sequence: Synthetic oligonucleotide
ucacuugucuccagaacau

SEQ ID NO: 2101887 - RNA, 19 nt, Artificial Sequence
  Description of Artificial Sequence: Synthetic oligonucleotide
uccccuaauagcugaggug

SEQ ID NO: 2101888 - RNA, 19 nt, Artificial Sequence
  Description of Artificial Sequence: Synthetic oligonucleotide
ucuuacacuugagauuugu

SEQ ID NO: 2101889 - RNA, 19 nt, Artificial Sequence
  Description of Artificial Sequence: Synthetic oligonucleotide
acuuuccccuaauagcuga

SEQ ID NO: 2101890 - RNA, 19 nt, Artificial Sequence
  Description of Artificial Sequence: Synthetic oligonucleotide
ugguccauuuaguacugga

SEQ ID NO: 2101891 - RNA, 19 nt, Artificial Sequence
  Description of Artificial Sequence: Synthetic oligonucleotide
uccuucaaacaaacguaac

SEQ ID NO: 2101892 - RNA, 19 nt, Artificial Sequence
  Description of Artificial Sequence: Synthetic oligonucleotide
aaaaccugagagaccugag

SEQ ID NO: 2101893 - RNA, 19 nt, Artificial Sequence
  Description of Artificial Sequence: Synthetic oligonucleotide
uauacaccucaaacuccag

SEQ ID NO: 2101894 - RNA, 19 nt, Artificial Sequence
  Description of Artificial Sequence: Synthetic oligonucleotide
guugccacugcaguaagac

SEQ ID NO: 2101895 - RNA, 19 nt, Artificial Sequence
  Description of Artificial Sequence: Synthetic oligonucleotide
ugacuacauagaccgcuug

SEQ ID NO: 2101896 - RNA, 19 nt, Artificial Sequence
  Description of Artificial Sequence: Synthetic oligonucleotide
gacacuuuaagaccugggu

SEQ ID NO: 2101897 - RNA, 19 nt, Artificial Sequence
  Description of Artificial Sequence: Synthetic oligonucleotide
gcacuugaaguuuaacaag

SEQ ID NO: 2101898 - RNA, 19 nt, Artificial Sequence
  Description of Artificial Sequence: Synthetic oligonucleotide
gagagaccugagaaugugg

SEQ ID NO: 2101899 - RNA, 19 nt, Artificial Sequence
  Description of Artificial Sequence: Synthetic oligonucleotide
agaaccugacagccugaac

SEQ ID NO: 2101900 - RNA, 19 nt, Artificial Sequence
  Description of Artificial Sequence: Synthetic oligonucleotide
ugucguuucugcuucuuuu

SEQ ID NO: 2101901 - RNA, 19 nt, Artificial Sequence
  Description of Artificial Sequence: Synthetic oligonucleotide
ucugagagggagguggcca

SEQ ID NO: 2101902 - RNA, 19 nt, Artificial Sequence
  Description of Artificial Sequence: Synthetic oligonucleotide
ugugagcauccuaucacau

SEQ ID NO: 2101903 - RNA, 19 nt, Artificial Sequence
  Description of Artificial Sequence: Synthetic oligonucleotide
uuuccccuaauagcugagg

SEQ ID NO: 2101904 - RNA, 19 nt, Artificial Sequence
  Description of Artificial Sequence: Synthetic oligonucleotide
ucccucuaguuucugcuac

SEQ ID NO: 2101905 - RNA, 19 nt, Artificial Sequence
  Description of Artificial Sequence: Synthetic oligonucleotide
cuacagucagccaugacua

SEQ ID NO: 2101906 - RNA, 19 nt, Artificial Sequence
  Description of Artificial Sequence: Synthetic oligonucleotide
aagcagacuucugaugaca

SEQ ID NO: 2101907 - RNA, 19 nt, Artificial Sequence
  Description of Artificial Sequence: Synthetic oligonucleotide
acuuaggagaguaucuaca

SEQ ID NO: 2101908 - RNA, 19 nt, Artificial Sequence
  Description of Artificial Sequence: Synthetic oligonucleotide
cacuggugacacaacacug

SEQ ID NO: 2101909 - RNA, 19 nt, Artificial Sequence
  Description of Artificial Sequence: Synthetic oligonucleotide
uggagaaagacugguccug

SEQ ID NO: 2101910 - RNA, 19 nt, Artificial Sequence
  Description of Artificial Sequence: Synthetic oligonucleotide
cacuugagauuuguuauac

SEQ ID NO: 2101911 - RNA, 19 nt, Artificial Sequence
  Description of Artificial Sequence: Synthetic oligonucleotide
auucaacaugaccacuggu

SEQ ID NO: 2101912 - RNA, 19 nt, Artificial Sequence
  Description of Artificial Sequence: Synthetic oligonucleotide
auagcugaggugguuucuc

SEQ ID NO: 2101913 - RNA, 19 nt, Artificial Sequence
  Description of Artificial Sequence: Synthetic oligonucleotide
cucaccucgaggucucugc

SEQ ID NO: 2101914 - RNA, 19 nt, Artificial Sequence
  Description of Artificial Sequence: Synthetic oligonucleotide
cuaguuuuacacagaaucu

SEQ ID NO: 2101915 - RNA, 19 nt, Artificial Sequence
  Description of Artificial Sequence: Synthetic oligonucleotide
agcagacuucugaugacac

SEQ ID NO: 2101916 - RNA, 19 nt, Artificial Sequence
  Description of Artificial Sequence: Synthetic oligonucleotide
aacguaacuuuccccuaau

SEQ ID NO: 2101917 - RNA, 19 nt, Artificial Sequence
  Description of Artificial Sequence: Synthetic oligonucleotide
gaacaggucucaccucgag

SEQ ID NO: 2101918 - RNA, 19 nt, Artificial Sequence
  Description of Artificial Sequence: Synthetic oligonucleotide
cacuuuaagaccugggucu

SEQ ID NO: 2101919 - RNA, 19 nt, Artificial Sequence
  Description of Artificial Sequence: Synthetic oligonucleotide
uucuuccauagucuacagu

SEQ ID NO: 2101920 - RNA, 19 nt, Artificial Sequence
  Description of Artificial Sequence: Synthetic oligonucleotide
agguaaaaccugagagacc

SEQ ID NO: 2101921 - RNA, 19 nt, Artificial Sequence
  Description of Artificial Sequence: Synthetic oligonucleotide
gaauucgaggaauaggguu

SEQ ID NO: 2101922 - RNA, 19 nt, Artificial Sequence
  Description of Artificial Sequence: Synthetic oligonucleotide
acuugagauuuguuauaca

SEQ ID NO: 2101923 - RNA, 19 nt, Artificial Sequence
  Description of Artificial Sequence: Synthetic oligonucleotide
cacuguuacugacacaaga

SEQ ID NO: 2101924 - RNA, 19 nt, Artificial Sequence
  Description of Artificial Sequence: Synthetic oligonucleotide
cguaacuuuccccuaauag

SEQ ID NO: 2101925 - RNA, 19 nt, Artificial Sequence
  Description of Artificial Sequence: Synthetic oligonucleotide
acuccauagggagaaguca

SEQ ID NO: 2101926 - RNA, 19 nt, Artificial Sequence
  Description of Artificial Sequence: Synthetic oligonucleotide
gagggagguggccaaaaga

SEQ ID NO: 2101927 - RNA, 19 nt, Artificial Sequence
  Description of Artificial Sequence: Synthetic oligonucleotide
augaccacuggugacacaa

SEQ ID NO: 2101928 - RNA, 19 nt, Artificial Sequence
  Description of Artificial Sequence: Synthetic oligonucleotide
ccccuaauagcugaggugg

SEQ ID NO: 2101929 - RNA, 19 nt, Artificial Sequence
  Description of Artificial Sequence: Synthetic oligonucleotide
gcuaccaccuuagaagggg

SEQ ID NO: 2101930 - RNA, 19 nt, Artificial Sequence
  Description of Artificial Sequence: Synthetic oligonucleotide
caacaugaccacuggugac

SEQ ID NO: 2101931 - RNA, 19 nt, Artificial Sequence
  Description of Artificial Sequence: Synthetic oligonucleotide
cagccaugacuacauagac

SEQ ID NO: 2101932 - RNA, 19 nt, Artificial Sequence
  Description of Artificial Sequence: Synthetic oligonucleotide
gcuacaucuuaguucuucc

SEQ ID NO: 2101933 - RNA, 19 nt, Artificial Sequence
  Description of Artificial Sequence: Synthetic oligonucleotide
uacugacacaagacacuca

SEQ ID NO: 2101934 - RNA, 19 nt, Artificial Sequence
  Description of Artificial Sequence: Synthetic oligonucleotide
aguuucugcuaccaccuua

SEQ ID NO: 2101935 - RNA, 19 nt, Artificial Sequence
  Description of Artificial Sequence: Synthetic oligonucleotide
ugaugguuucaaguccuca

SEQ ID NO: 2101936 - RNA, 19 nt, Artificial Sequence
  Description of Artificial Sequence: Synthetic oligonucleotide
ucccacugugcuuugcuuc

SEQ ID NO: 2101937 - RNA, 19 nt, Artificial Sequence
  Description of Artificial Sequence: Synthetic oligonucleotide
agagggagguggccaaaag

SEQ ID NO: 2101938 - RNA, 19 nt, Artificial Sequence
  Description of Artificial Sequence: Synthetic oligonucleotide
gcaguuagcuuucagguaa

SEQ ID NO: 2101939 - RNA, 19 nt, Artificial Sequence
  Description of Artificial Sequence: Synthetic oligonucleotide
caugguccauuuaguacug

SEQ ID NO: 2101940 - RNA, 19 nt, Artificial Sequence
  Description of Artificial Sequence: Synthetic oligonucleotide
agaacaugugagcauccua

SEQ ID NO: 2101941 - RNA, 19 nt, Artificial Sequence
  Description of Artificial Sequence: Synthetic oligonucleotide
acuauucaacaugaccacu

SEQ ID NO: 2101942 - RNA, 19 nt, Artificial Sequence
  Description of Artificial Sequence: Synthetic oligonucleotide
ucgaggaauaggguugcca

SEQ ID NO: 2101943 - RNA, 19 nt, Artificial Sequence
  Description of Artificial Sequence: Synthetic oligonucleotide
gugguuucucaacauuuuc

SEQ ID NO: 2101944 - RNA, 19 nt, Artificial Sequence
  Description of Artificial Sequence: Synthetic oligonucleotide
cacuccauagggagaaguc

SEQ ID NO: 2101945 - RNA, 19 nt, Artificial Sequence
  Description of Artificial Sequence: Synthetic oligonucleotide
cuuccauagucuacaguca

SEQ ID NO: 2101946 - RNA, 19 nt, Artificial Sequence
  Description of Artificial Sequence: Synthetic oligonucleotide
ccauagucuacagucagcc

SEQ ID NO: 2101947 - RNA, 19 nt, Artificial Sequence
  Description of Artificial Sequence: Synthetic oligonucleotide
acuaggaagcccaguccac

SEQ ID NO: 2101948 - RNA, 19 nt, Artificial Sequence
  Description of Artificial Sequence: Synthetic oligonucleotide
cuaguuucugcuaccaccu

SEQ ID NO: 2101949 - RNA, 19 nt, Artificial Sequence
  Description of Artificial Sequence: Synthetic oligonucleotide
agaaggggacaaaucagcu

SEQ ID NO: 2101950 - RNA, 19 nt, Artificial Sequence
  Description of Artificial Sequence: Synthetic oligonucleotide
gaugacacuuuaagaccug

SEQ ID NO: 2101951 - RNA, 19 nt, Artificial Sequence
  Description of Artificial Sequence: Synthetic oligonucleotide
agaauguggcagaggcccc

SEQ ID NO: 2101952 - RNA, 19 nt, Artificial Sequence
  Description of Artificial Sequence: Synthetic oligonucleotide
caagcagacuucugaugac

SEQ ID NO: 2101953 - RNA, 19 nt, Artificial Sequence
  Description of Artificial Sequence: Synthetic oligonucleotide
gaccugcuugcacuugaag

SEQ ID NO: 2101954 - RNA, 19 nt, Artificial Sequence
  Description of Artificial Sequence: Synthetic oligonucleotide
uccuaguuuuacacagaau

SEQ ID NO: 2101955 - RNA, 19 nt, Artificial Sequence
  Description of Artificial Sequence: Synthetic oligonucleotide
ucccuucacuccauaggga

SEQ ID NO: 2101956 - RNA, 19 nt, Artificial Sequence
  Description of Artificial Sequence: Synthetic oligonucleotide
acacuugagauuuguuaua

SEQ ID NO: 2101957 - RNA, 19 nt, Artificial Sequence
  Description of Artificial Sequence: Synthetic oligonucleotide
ggugaugaugguuucaagu

SEQ ID NO: 2101958 - RNA, 19 nt, Artificial Sequence
  Description of Artificial Sequence: Synthetic oligonucleotide
gaacaugugagcauccuau

SEQ ID NO: 2101959 - RNA, 19 nt, Artificial Sequence
  Description of Artificial Sequence: Synthetic oligonucleotide
agggaaucugcuccuaguu

SEQ ID NO: 2101960 - RNA, 19 nt, Artificial Sequence
  Description of Artificial Sequence: Synthetic oligonucleotide
uucugggagccacucacuu

SEQ ID NO: 2101961 - RNA, 19 nt, Artificial Sequence
  Description of Artificial Sequence: Synthetic oligonucleotide
uggcuagcuuccaucugca

SEQ ID NO: 2101962 - RNA, 19 nt, Artificial Sequence
  Description of Artificial Sequence: Synthetic oligonucleotide
agacaucuccagcuaggcu

SEQ ID NO: 2101963 - RNA, 19 nt, Artificial Sequence
  Description of Artificial Sequence: Synthetic oligonucleotide
uaccaccuuagaaggggac

SEQ ID NO: 2101964 - RNA, 19 nt, Artificial Sequence
  Description of Artificial Sequence: Synthetic oligonucleotide
uguggaggcaaaggauucu

SEQ ID NO: 2101965 - RNA, 19 nt, Artificial Sequence
  Description of Artificial Sequence: Synthetic oligonucleotide
uuccuuuguggaggcaaag

SEQ ID NO: 2101966 - RNA, 19 nt, Artificial Sequence
  Description of Artificial Sequence: Synthetic oligonucleotide
acagucagccaugacuaca

SEQ ID NO: 2101967 - RNA, 19 nt, Artificial Sequence
  Description of Artificial Sequence: Synthetic oligonucleotide
cuccauagggagaagucaa

SEQ ID NO: 2101968 - RNA, 19 nt, Artificial Sequence
  Description of Artificial Sequence: Synthetic oligonucleotide
uuccuacuaggaagcccag

SEQ ID NO: 2101969 - RNA, 19 nt, Artificial Sequence
  Description of Artificial Sequence: Synthetic oligonucleotide
ucugggagccacucacuuc

SEQ ID NO: 2101970 - RNA, 19 nt, Artificial Sequence
  Description of Artificial Sequence: Synthetic oligonucleotide
cuugcacuugaaguuuaac

SEQ ID NO: 2101971 - RNA, 19 nt, Artificial Sequence
  Description of Artificial Sequence: Synthetic oligonucleotide
uucuuacacuugagauuug

SEQ ID NO: 2101972 - RNA, 19 nt, Artificial Sequence
  Description of Artificial Sequence: Synthetic oligonucleotide
uuucugcuaccaccuuaga

SEQ ID NO: 2101973 - RNA, 19 nt, Artificial Sequence
  Description of Artificial Sequence: Synthetic oligonucleotide
aagugagaggggcuuccuu

SEQ ID NO: 2101974 - RNA, 19 nt, Artificial Sequence
  Description of Artificial Sequence: Synthetic oligonucleotide
cauagcccucacuugucuc

SEQ ID NO: 2101975 - RNA, 19 nt, Artificial Sequence
  Description of Artificial Sequence: Synthetic oligonucleotide
acuggcuagcuuccaucug

SEQ ID NO: 2101976 - RNA, 19 nt, Artificial Sequence
  Description of Artificial Sequence: Synthetic oligonucleotide
gaccugagaauguggcaga

SEQ ID NO: 2101977 - RNA, 19 nt, Artificial Sequence
  Description of Artificial Sequence: Synthetic oligonucleotide
ccucagcuggaucugagag

SEQ ID NO: 2101978 - RNA, 19 nt, Artificial Sequence
  Description of Artificial Sequence: Synthetic oligonucleotide
gaucugagagggagguggc

SEQ ID NO: 2101979 - RNA, 19 nt, Artificial Sequence
  Description of Artificial Sequence: Synthetic oligonucleotide
uacagucagccaugacuac

SEQ ID NO: 2101980 - RNA, 19 nt, Artificial Sequence
  Description of Artificial Sequence: Synthetic oligonucleotide
ccaagcagacuucugauga

SEQ ID NO: 2101981 - RNA, 19 nt, Artificial Sequence
  Description of Artificial Sequence: Synthetic oligonucleotide
cuuacucccuuuauucucu

SEQ ID NO: 2101982 - RNA, 19 nt, Artificial Sequence
  Description of Artificial Sequence: Synthetic oligonucleotide
cuccuaguuuuacacagaa

SEQ ID NO: 2101983 - RNA, 19 nt, Artificial Sequence
  Description of Artificial Sequence: Synthetic oligonucleotide
ugcuugcacuugaaguuua

SEQ ID NO: 2101984 - RNA, 19 nt, Artificial Sequence
  Description of Artificial Sequence: Synthetic oligonucleotide
gggacaaaucagcuuguac

SEQ ID NO: 2101985 - RNA, 19 nt, Artificial Sequence
  Description of Artificial Sequence: Synthetic oligonucleotide
uugucguuucugcuucuuu

SEQ ID NO: 2101986 - RNA, 19 nt, Artificial Sequence
  Description of Artificial Sequence: Synthetic oligonucleotide
agcuuucagguaaaaccug

SEQ ID NO: 2101987 - RNA, 19 nt, Artificial Sequence
  Description of Artificial Sequence: Synthetic oligonucleotide
gguccugccugccugagga

SEQ ID NO: 2101988 - RNA, 19 nt, Artificial Sequence
  Description of Artificial Sequence: Synthetic oligonucleotide
accaccuuagaaggggaca

SEQ ID NO: 2101989 - RNA, 19 nt, Artificial Sequence
  Description of Artificial Sequence: Synthetic oligonucleotide
agcccaguccaccaccuau

SEQ ID NO: 2101990 - RNA, 19 nt, Artificial Sequence
  Description of Artificial Sequence: Synthetic oligonucleotide
accuuagaaggggacaaau

SEQ ID NO: 2101991 - RNA, 19 nt, Artificial Sequence
  Description of Artificial Sequence: Synthetic oligonucleotide
ccagcuaggcuggagaaag

SEQ ID NO: 2101992 - RNA, 19 nt, Artificial Sequence
  Description of Artificial Sequence: Synthetic oligonucleotide
agccuuuaaaauggcuugu

SEQ ID NO: 2101993 - RNA, 19 nt, Artificial Sequence
  Description of Artificial Sequence: Synthetic oligonucleotide
cuuccccuaguacacacaa

SEQ ID NO: 2101994 - RNA, 19 nt, Artificial Sequence
  Description of Artificial Sequence: Synthetic oligonucleotide
auuuaguacuggagucaag

SEQ ID NO: 2101995 - RNA, 19 nt, Artificial Sequence
  Description of Artificial Sequence: Synthetic oligonucleotide
gaguaucuacagaauucga

SEQ ID NO: 2101996 - RNA, 19 nt, Artificial Sequence
  Description of Artificial Sequence: Synthetic oligonucleotide
ccuugaaaccccagaggcc

SEQ ID NO: 2101997 - RNA, 19 nt, Artificial Sequence
  Description of Artificial Sequence: Synthetic oligonucleotide
aguaagacuuguggcaguu

SEQ ID NO: 2101998 - RNA, 19 nt, Artificial Sequence
  Description of Artificial Sequence: Synthetic oligonucleotide
gccccuugaaaccccagag

SEQ ID NO: 2101999 - RNA, 19 nt, Artificial Sequence
  Description of Artificial Sequence: Synthetic oligonucleotide
gacuucugaugacacuuua

SEQ ID NO: 2102000 - RNA, 19 nt, Artificial Sequence
  Description of Artificial Sequence: Synthetic oligonucleotide
gagauuuguuauacaccuc

SEQ ID NO: 2102001 - RNA, 19 nt, Artificial Sequence
  Description of Artificial Sequence: Synthetic oligonucleotide
cacucacuucagacguggg

SEQ ID NO: 2102002 - RNA, 19 nt, Artificial Sequence
  Description of Artificial Sequence: Synthetic oligonucleotide
cagaggccccuugaaaccc

SEQ ID NO: 2102003 - RNA, 19 nt, Artificial Sequence
  Description of Artificial Sequence: Synthetic oligonucleotide
aggucucaccucgaggucu

SEQ ID NO: 2102004 - RNA, 19 nt, Artificial Sequence
  Description of Artificial Sequence: Synthetic oligonucleotide
caugacuacauagaccgcu

SEQ ID NO: 2102005 - RNA, 19 nt, Artificial Sequence
  Description of Artificial Sequence: Synthetic oligonucleotide
agaccugggucugagggaa

SEQ ID NO: 2102006 - RNA, 19 nt, Artificial Sequence
  Description of Artificial Sequence: Synthetic oligonucleotide
accugggucugagggaauc

SEQ ID NO: 2102007 - RNA, 19 nt, Artificial Sequence
  Description of Artificial Sequence: Synthetic oligonucleotide
ugaaaccccagaggccucu

SEQ ID NO: 2102008 - RNA, 19 nt, Artificial Sequence
  Description of Artificial Sequence: Synthetic oligonucleotide
cauuuaguacuggagucaa

SEQ ID NO: 2102009 - RNA, 19 nt, Artificial Sequence
  Description of Artificial Sequence: Synthetic oligonucleotide
accauagcccucacuuguc

SEQ ID NO: 2102010 - RNA, 19 nt, Artificial Sequence
  Description of Artificial Sequence: Synthetic oligonucleotide
cauagucuacagucagcca

SEQ ID NO: 2102011 - RNA, 19 nt, Artificial Sequence
  Description of Artificial Sequence: Synthetic oligonucleotide
guggccaaaagaacagguc

SEQ ID NO: 2102012 - RNA, 19 nt, Artificial Sequence
  Description of Artificial Sequence: Synthetic oligonucleotide
ugaccacuggugacacaac

SEQ ID NO: 2102013 - RNA, 19 nt, Artificial Sequence
  Description of Artificial Sequence: Synthetic oligonucleotide
cgaggaauaggguugccac

SEQ ID NO: 2102014 - RNA, 19 nt, Artificial Sequence
  Description of Artificial Sequence: Synthetic oligonucleotide
augaugguuucaaguccuc

SEQ ID NO: 2102015 - RNA, 19 nt, Artificial Sequence
  Description of Artificial Sequence: Synthetic oligonucleotide
cacagaaucucccucuagu

SEQ ID NO: 2102016 - RNA, 19 nt, Artificial Sequence
  Description of Artificial Sequence: Synthetic oligonucleotide
ccuuagaaggggacaaauc

SEQ ID NO: 2102017 - RNA, 19 nt, Artificial Sequence
  Description of Artificial Sequence: Synthetic oligonucleotide
agcugaggugguuucucaa

SEQ ID NO: 2102018 - RNA, 19 nt, Artificial Sequence
  Description of Artificial Sequence: Synthetic oligonucleotide
accucgaggucucugccuu

SEQ ID NO: 2102019 - RNA, 19 nt, Artificial Sequence
  Description of Artificial Sequence: Synthetic oligonucleotide
guacuuaggagaguaucua

SEQ ID NO: 2102020 - RNA, 19 nt, Artificial Sequence
  Description of Artificial Sequence: Synthetic oligonucleotide
agucaagugagaggggcuu

SEQ ID NO: 2102021 - RNA, 19 nt, Artificial Sequence
  Description of Artificial Sequence: Synthetic oligonucleotide
uauccacaugguccauuua

SEQ ID NO: 2102022 - RNA, 19 nt, Artificial Sequence
  Description of Artificial Sequence: Synthetic oligonucleotide
gaggaauaggguugccacu

SEQ ID NO: 2102023 - RNA, 19 nt, Artificial Sequence
  Description of Artificial Sequence: Synthetic oligonucleotide
gcugaggugguuucucaac

SEQ ID NO: 2102024 - RNA, 19 nt, Artificial Sequence
  Description of Artificial Sequence: Synthetic oligonucleotide
aaucucccucuaguuucug

SEQ ID NO: 2102025 - RNA, 19 nt, Artificial Sequence
  Description of Artificial Sequence: Synthetic oligonucleotide
gagcauccuaucacauaug

SEQ ID NO: 2102026 - RNA, 19 nt, Artificial Sequence
  Description of Artificial Sequence: Synthetic oligonucleotide
gagggaaucugcuccuagu

SEQ ID NO: 2102027 - RNA, 19 nt, Artificial Sequence
  Description of Artificial Sequence: Synthetic oligonucleotide
ggagaaagacugguccugc

SEQ ID NO: 2102028 - RNA, 19 nt, Artificial Sequence
  Description of Artificial Sequence: Synthetic oligonucleotide
cccuaguacacacaauuca

SEQ ID NO: 2102029 - RNA, 19 nt, Artificial Sequence
  Description of Artificial Sequence: Synthetic oligonucleotide
ccuuuguggaggcaaagga

SEQ ID NO: 2102030 - RNA, 19 nt, Artificial Sequence
  Description of Artificial Sequence: Synthetic oligonucleotide
ucucaccucgaggucucug

SEQ ID NO: 2102031 - RNA, 19 nt, Artificial Sequence
  Description of Artificial Sequence: Synthetic oligonucleotide
aggccucucagaguagaca

SEQ ID NO: 2102032 - RNA, 19 nt, Artificial Sequence
  Description of Artificial Sequence: Synthetic oligonucleotide
acguaacuuuccccuaaua

SEQ ID NO: 2102033 - RNA, 19 nt, Artificial Sequence
  Description of Artificial Sequence: Synthetic oligonucleotide
aggagaguaucuacagaau

SEQ ID NO: 2102034 - RNA, 19 nt, Artificial Sequence
  Description of Artificial Sequence: Synthetic oligonucleotide
cugacagccugaacuggga

SEQ ID NO: 2102035 - RNA, 19 nt, Artificial Sequence
  Description of Artificial Sequence: Synthetic oligonucleotide
uccuacuaggaagcccagu

SEQ ID NO: 2102036 - RNA, 19 nt, Artificial Sequence
  Description of Artificial Sequence: Synthetic oligonucleotide
cacuugucuccagaacaug

SEQ ID NO: 2102037 - RNA, 19 nt, Artificial Sequence
  Description of Artificial Sequence: Synthetic oligonucleotide
agucuacagucagccauga

SEQ ID NO: 2102038 - RNA, 19 nt, Artificial Sequence
  Description of Artificial Sequence: Synthetic oligonucleotide
caaacguaacuuuccccua

SEQ ID NO: 2102039 - RNA, 19 nt, Artificial Sequence
  Description of Artificial Sequence: Synthetic oligonucleotide
ccccuugaaaccccagagg

SEQ ID NO: 2102040 - RNA, 19 nt, Artificial Sequence
  Description of Artificial Sequence: Synthetic oligonucleotide
ggagaguaucuacagaauu

SEQ ID NO: 2102041 - RNA, 19 nt, Artificial Sequence
  Description of Artificial Sequence: Synthetic oligonucleotide
gugagcauccuaucacaua

SEQ ID NO: 2102042 - RNA, 19 nt, Artificial Sequence
  Description of Artificial Sequence: Synthetic oligonucleotide
uggaucugagagggaggug

SEQ ID NO: 2102043 - RNA, 19 nt, Artificial Sequence
  Description of Artificial Sequence: Synthetic oligonucleotide
ccacucacuucagacgugg

SEQ ID NO: 2102044 - RNA, 19 nt, Artificial Sequence
  Description of Artificial Sequence: Synthetic oligonucleotide
guaaaaccugagagaccug

SEQ ID NO: 2102045 - RNA, 19 nt, Artificial Sequence
  Description of Artificial Sequence: Synthetic oligonucleotide
gcuuguacuuaggagagua

SEQ ID NO: 2102046 - RNA, 19 nt, Artificial Sequence
  Description of Artificial Sequence: Synthetic oligonucleotide
uucgaggaauaggguugcc

SEQ ID NO: 2102047 - RNA, 19 nt, Artificial Sequence
  Description of Artificial Sequence: Synthetic oligonucleotide
ggccaaaagaacaggucuc

SEQ ID NO: 2102048 - RNA, 19 nt, Artificial Sequence
  Description of Artificial Sequence: Synthetic oligonucleotide
augacuacauagaccgcuu

SEQ ID NO: 2102049 - RNA, 19 nt, Artificial Sequence
  Description of Artificial Sequence: Synthetic oligonucleotide
aguuagcuuucagguaaaa

SEQ ID NO: 2102050 - RNA, 19 nt, Artificial Sequence
  Description of Artificial Sequence: Synthetic oligonucleotide
uacuggagucaagaccaua

SEQ ID NO: 2102051 - RNA, 19 nt, Artificial Sequence
  Description of Artificial Sequence: Synthetic oligonucleotide
gagaaccugacagccugaa

SEQ ID NO: 2102052 - RNA, 19 nt, Artificial Sequence
  Description of Artificial Sequence: Synthetic oligonucleotide
cccaagcagacuucugaug

SEQ ID NO: 2102053 - RNA, 19 nt, Artificial Sequence
  Description of Artificial Sequence: Synthetic oligonucleotide
auucugggagccacucacu

SEQ ID NO: 2102054 - RNA, 19 nt, Artificial Sequence
  Description of Artificial Sequence: Synthetic oligonucleotide
gaggccucucagaguagac

SEQ ID NO: 2102055 - RNA, 19 nt, Artificial Sequence
  Description of Artificial Sequence: Synthetic oligonucleotide
uucucccacugugcuuugc

SEQ ID NO: 2102056 - RNA, 19 nt, Artificial Sequence
  Description of Artificial Sequence: Synthetic oligonucleotide
cuccagcuaggcuggagaa

SEQ ID NO: 2102057 - RNA, 19 nt, Artificial Sequence
  Description of Artificial Sequence: Synthetic oligonucleotide
gucuacagucagccaugac

SEQ ID NO: 2102058 - RNA, 19 nt, Artificial Sequence
  Description of Artificial Sequence: Synthetic oligonucleotide
aguccucagcuggaucuga

SEQ ID NO: 2102059 - RNA, 19 nt, Artificial Sequence
  Description of Artificial Sequence: Synthetic oligonucleotide
ccccuaguacacacaauuc

SEQ ID NO: 2102060 - RNA, 19 nt, Artificial Sequence
  Description of Artificial Sequence: Synthetic oligonucleotide
agcccucacuugucuccag

SEQ ID NO: 2102061 - RNA, 19 nt, Artificial Sequence
  Description of Artificial Sequence: Synthetic oligonucleotide
aagcccaguccaccaccua

SEQ ID NO: 2102062 - RNA, 19 nt, Artificial Sequence
  Description of Artificial Sequence: Synthetic oligonucleotide
gaaucucccucuaguuucu

SEQ ID NO: 2102063 - RNA, 19 nt, Artificial Sequence
  Description of Artificial Sequence: Synthetic oligonucleotide
cugagagggagguggccaa

SEQ ID NO: 2102064 - RNA, 19 nt, Artificial Sequence
  Description of Artificial Sequence: Synthetic oligonucleotide
gucaagugagaggggcuuc

SEQ ID NO: 2102065 - RNA, 19 nt, Artificial Sequence
  Description of Artificial Sequence: Synthetic oligonucleotide
agcuuguacuuaggagagu

SEQ ID NO: 2102066 - RNA, 19 nt, Artificial Sequence
  Description of Artificial Sequence: Synthetic oligonucleotide
cccucuaguuucugcuacc

SEQ ID NO: 2102067 - RNA, 19 nt, Artificial Sequence
  Description of Artificial Sequence: Synthetic oligonucleotide
ggguugccacugcaguaag

SEQ ID NO: 2102068 - RNA, 19 nt, Artificial Sequence
  Description of Artificial Sequence: Synthetic oligonucleotide
gggagguggccaaaagaac

SEQ ID NO: 2102069 - RNA, 19 nt, Artificial Sequence
  Description of Artificial Sequence: Synthetic oligonucleotide
ggcaguuagcuuucaggua

SEQ ID NO: 2102070 - RNA, 19 nt, Artificial Sequence
  Description of Artificial Sequence: Synthetic oligonucleotide
ggcuagcuuccaucugcag

SEQ ID NO: 2102071 - RNA, 19 nt, Artificial Sequence
  Description of Artificial Sequence: Synthetic oligonucleotide
cuuguacuuaggagaguau

SEQ ID NO: 2102072 - RNA, 19 nt, Artificial Sequence
  Description of Artificial Sequence: Synthetic oligonucleotide
cuggaucugagagggaggu

SEQ ID NO: 2102073 - RNA, 19 nt, Artificial Sequence
  Description of Artificial Sequence: Synthetic oligonucleotide
accucaaacuccagccuuu

SEQ ID NO: 2102074 - RNA, 19 nt, Artificial Sequence
  Description of Artificial Sequence: Synthetic oligonucleotide
guccugccugccugaggag

SEQ ID NO: 2102075 - RNA, 19 nt, Artificial Sequence
  Description of Artificial Sequence: Synthetic oligonucleotide
aggaacuggcuagcuucca

SEQ ID NO: 2102076 - RNA, 19 nt, Artificial Sequence
  Description of Artificial Sequence: Synthetic oligonucleotide
gaauguggcagaggccccu

SEQ ID NO: 2102077 - RNA, 19 nt, Artificial Sequence
  Description of Artificial Sequence: Synthetic oligonucleotide
ccaugacuacauagaccgc

SEQ ID NO: 2102078 - RNA, 19 nt, Artificial Sequence
  Description of Artificial Sequence: Synthetic oligonucleotide
ggauucugggagccacuca

SEQ ID NO: 2102079 - RNA, 19 nt, Artificial Sequence
  Description of Artificial Sequence: Synthetic oligonucleotide
uuguggcaguuagcuuuca

SEQ ID NO: 2102080 - RNA, 19 nt, Artificial Sequence
  Description of Artificial Sequence: Synthetic oligonucleotide
gaacugggaccugcuugca

SEQ ID NO: 2102081 - RNA, 19 nt, Artificial Sequence
  Description of Artificial Sequence: Synthetic oligonucleotide
gaagcccaguccaccaccu

SEQ ID NO: 2102082 - RNA, 19 nt, Artificial Sequence
  Description of Artificial Sequence: Synthetic oligonucleotide
cucccucuaguuucugcua

SEQ ID NO: 2102083 - RNA, 19 nt, Artificial Sequence
  Description of Artificial Sequence: Synthetic oligonucleotide
gacuucccuucacuccaua

SEQ ID NO: 2102084 - RNA, 19 nt, Artificial Sequence
  Description of Artificial Sequence: Synthetic oligonucleotide
gaggagaaccugacagccu

SEQ ID NO: 2102085 - RNA, 19 nt, Artificial Sequence
  Description of Artificial Sequence: Synthetic oligonucleotide
guaagacuuguggcaguua

SEQ ID NO: 2102086 - RNA, 19 nt, Artificial Sequence
  Description of Artificial Sequence: Synthetic oligonucleotide
caguaagacuuguggcagu

SEQ ID NO: 2102087 - RNA, 19 nt, Artificial Sequence
  Description of Artificial Sequence: Synthetic oligonucleotide
uagcuuccaucugcaguuu

SEQ ID NO: 2102088 - RNA, 19 nt, Artificial Sequence
  Description of Artificial Sequence: Synthetic oligonucleotide
cugccugccugaggagaac

SEQ ID NO: 2102089 - RNA, 19 nt, Artificial Sequence
  Description of Artificial Sequence: Synthetic oligonucleotide
ggaacuggcuagcuuccau

SEQ ID NO: 2102090 - RNA, 19 nt, Artificial Sequence
  Description of Artificial Sequence: Synthetic oligonucleotide
gcuccuaguuuuacacaga

SEQ ID NO: 2102091 - RNA, 19 nt, Artificial Sequence
  Description of Artificial Sequence: Synthetic oligonucleotide
ggucucaccucgaggucuc

SEQ ID NO: 2102092 - RNA, 19 nt, Artificial Sequence
  Description of Artificial Sequence: Synthetic oligonucleotide
ccucuaguuucugcuacca

SEQ ID NO: 2102093 - RNA, 19 nt, Artificial Sequence
  Description of Artificial Sequence: Synthetic oligonucleotide
ggugguuucucaacauuuu

SEQ ID NO: 2102094 - RNA, 19 nt, Artificial Sequence
  Description of Artificial Sequence: Synthetic oligonucleotide
ggagaaccugacagccuga

SEQ ID NO: 2102095 - RNA, 19 nt, Artificial Sequence
  Description of Artificial Sequence: Synthetic oligonucleotide
gcccucacuugucuccaga

SEQ ID NO: 2102096 - RNA, 19 nt, Artificial Sequence
  Description of Artificial Sequence: Synthetic oligonucleotide
gguugccacugcaguaaga

SEQ ID NO: 2102097 - RNA, 19 nt, Artificial Sequence
  Description of Artificial Sequence: Synthetic oligonucleotide
aggccccuugaaaccccag

SEQ ID NO: 2102098 - RNA, 19 nt, Artificial Sequence
  Description of Artificial Sequence: Synthetic oligonucleotide
gcccaguccaccaccuauc

SEQ ID NO: 2102099 - RNA, 19 nt, Artificial Sequence
  Description of Artificial Sequence: Synthetic oligonucleotide
ccuuccccuaguacacaca

SEQ ID NO: 2102100 - RNA, 19 nt, Artificial Sequence
  Description of Artificial Sequence: Synthetic oligonucleotide
ccauagggagaagucaagu

SEQ ID NO: 2102101 - RNA, 19 nt, Artificial Sequence
  Description of Artificial Sequence: Synthetic oligonucleotide
guccaccaccuauccacau

SEQ ID NO: 2102102 - RNA, 19 nt, Artificial Sequence
  Description of Artificial Sequence: Synthetic oligonucleotide
caagugagaggggcuuccu

SEQ ID NO: 2102103 - RNA, 19 nt, Artificial Sequence
  Description of Artificial Sequence: Synthetic oligonucleotide
caccaccuauccacauggu

SEQ ID NO: 2102104 - RNA, 19 nt, Artificial Sequence
  Description of Artificial Sequence: Synthetic oligonucleotide
gggaggaacuggcuagcuu

SEQ ID NO: 2102105 - RNA, 19 nt, Artificial Sequence
  Description of Artificial Sequence: Synthetic oligonucleotide
cuugucguuucugcuucuu

SEQ ID NO: 2102106 - RNA, 19 nt, Artificial Sequence
  Description of Artificial Sequence: Synthetic oligonucleotide
ggaccugcuugcacuugaa

SEQ ID NO: 2102107 - RNA, 19 nt, Artificial Sequence
  Description of Artificial Sequence: Synthetic oligonucleotide
guacuggagucaagaccau

SEQ ID NO: 2102108 - RNA, 19 nt, Artificial Sequence
  Description of Artificial Sequence: Synthetic oligonucleotide
gcuugucguuucugcuucu

SEQ ID NO: 2102109 - RNA, 19 nt, Artificial Sequence
  Description of Artificial Sequence: Synthetic oligonucleotide
cucgaggucucugccuuuu

SEQ ID NO: 2102110 - RNA, 19 nt, Artificial Sequence
  Description of Artificial Sequence: Synthetic oligonucleotide
ccccaagcagacuucugau

SEQ ID NO: 2102111 - RNA, 19 nt, Artificial Sequence
  Description of Artificial Sequence: Synthetic oligonucleotide
cccuaauagcugagguggu

SEQ ID NO: 2102112 - RNA, 19 nt, Artificial Sequence
  Description of Artificial Sequence: Synthetic oligonucleotide
ccucaaacuccagccuuua

SEQ ID NO: 2102113 - RNA, 19 nt, Artificial Sequence
  Description of Artificial Sequence: Synthetic oligonucleotide
ccuaauagcugaggugguu

SEQ ID NO: 2102114 - RNA, 19 nt, Artificial Sequence
  Description of Artificial Sequence: Synthetic oligonucleotide
gaccugggucugagggaau

SEQ ID NO: 2102115 - RNA, 19 nt, Artificial Sequence
  Description of Artificial Sequence: Synthetic oligonucleotide
gucucaccucgaggucucu

SEQ ID NO: 2102116 - RNA, 19 nt, Artificial Sequence
  Description of Artificial Sequence: Synthetic oligonucleotide
ggacuucccuucacuccau

SEQ ID NO: 2102117 - RNA, 19 nt, Artificial Sequence
  Description of Artificial Sequence: Synthetic oligonucleotide
ccacugugcuuugcuuccu

SEQ ID NO: 2102118 - RNA, 19 nt, Artificial Sequence
  Description of Artificial Sequence: Synthetic oligonucleotide
ccucgaggucucugccuuu

SEQ ID NO: 2102119 - RNA, 19 nt, Artificial Sequence
  Description of Artificial Sequence: Synthetic oligonucleotide
  modified_base (17)..(17): a, c, u, g, unknown or other
aaaggggugaaguuuancc

SEQ ID NO: 2102120 - RNA, 19 nt, Artificial Sequence
  Description of Artificial Sequence: Synthetic oligonucleotide
uguauauagaauuugaagu

SEQ ID NO: 2102121 - RNA, 19 nt, Artificial Sequence
  Description of Artificial Sequence: Synthetic oligonucleotide
aguccauccagucacagcc

SEQ ID NO: 2102122 - RNA, 19 nt, Artificial Sequence
  Description of Artificial Sequence: Synthetic oligonucleotide
aacauuaaaacugucuuuc

SEQ ID NO: 2102123 - RNA, 19 nt, Artificial Sequence
  Description of Artificial Sequence: Synthetic oligonucleotide
gauagaaaugcucuggucc

SEQ ID NO: 2102124 - RNA, 19 nt, Artificial Sequence
  Description of Artificial Sequence: Synthetic oligonucleotide
aaaacauuaaaacugucuu

SEQ ID NO: 2102125 - RNA, 19 nt, Artificial Sequence
  Description of Artificial Sequence: Synthetic oligonucleotide
aauagggcuaaggaaacgc

SEQ ID NO: 2102126 - RNA, 19 nt, Artificial Sequence
  Description of Artificial Sequence: Synthetic oligonucleotide
uuuaagcaaauucaggaca

SEQ ID NO: 2102127 - RNA, 19 nt, Artificial Sequence
  Description of Artificial Sequence: Synthetic oligonucleotide
augagagcagcuuaaaggg

SEQ ID NO: 2102128 - RNA, 19 nt, Artificial Sequence
  Description of Artificial Sequence: Synthetic oligonucleotide
  modified_base (10)..(10): a, c, u, g, unknown or other
ugaaguuuanccagggcug

SEQ ID NO: 2102129 - RNA, 19 nt, Artificial Sequence
  Description of Artificial Sequence: Synthetic oligonucleotide
aauaagccagauccagucc

SEQ ID NO: 2102130 - RNA, 19 nt, Artificial Sequence
  Description of Artificial Sequence: Synthetic oligonucleotide
aaggaaacacuaaauaggg

SEQ ID NO: 2102131 - RNA, 19 nt, Artificial Sequence
  Description of Artificial Sequence: Synthetic oligonucleotide
aacccuaaaauauugugga

SEQ ID NO: 2102132 - RNA, 19 nt, Artificial Sequence
  Description of Artificial Sequence: Synthetic oligonucleotide
gaacugugaacucaggagg

SEQ ID NO: 2102133 - RNA, 19 nt, Artificial Sequence
  Description of Artificial Sequence: Synthetic oligonucleotide
uuaagcaaauucaggacag

SEQ ID NO: 2102134 - RNA, 19 nt, Artificial Sequence
  Description of Artificial Sequence: Synthetic oligonucleotide
gaucuuuauaucuuccuag

SEQ ID NO: 2102135 - RNA, 19 nt, Artificial Sequence
  Description of Artificial Sequence: Synthetic oligonucleotide
gaguucuaaaaccacagcc

SEQ ID NO: 2102136 - RNA, 19 nt, Artificial Sequence
  Description of Artificial Sequence: Synthetic oligonucleotide
cuguauauagaauuugaag

SEQ ID NO: 2102137 - RNA, 19 nt, Artificial Sequence
  Description of Artificial Sequence: Synthetic oligonucleotide
aguucuaaaaccacagccc

SEQ ID NO: 2102138 - RNA, 19 nt, Artificial Sequence
  Description of Artificial Sequence: Synthetic oligonucleotide
aaacugucuuucucgaggg

SEQ ID NO: 2102139 - RNA, 19 nt, Artificial Sequence
  Description of Artificial Sequence: Synthetic oligonucleotide
aaacuggcauugcauagac

SEQ ID NO: 2102140 - RNA, 19 nt, Artificial Sequence
  Description of Artificial Sequence: Synthetic oligonucleotide
agaacugugaacucaggag

SEQ ID NO: 2102141 - RNA, 19 nt, Artificial Sequence
  Description of Artificial Sequence: Synthetic oligonucleotide
aaaugagagcagcuuaaag

SEQ ID NO: 2102142 - RNA, 19 nt, Artificial Sequence
  Description of Artificial Sequence: Synthetic oligonucleotide
acagacaaagggcuggggc

SEQ ID NO: 2102143 - RNA, 19 nt, Artificial Sequence
  Description of Artificial Sequence: Synthetic oligonucleotide
gaugcucagaccuuucagg

SEQ ID NO: 2102144 - RNA, 19 nt, Artificial Sequence
  Description of Artificial Sequence: Synthetic oligonucleotide
uuaauauauccuaucucug

SEQ ID NO: 2102145 - RNA, 19 nt, Artificial Sequence
  Description of Artificial Sequence: Synthetic oligonucleotide
accagggaguucuaaaacc

SEQ ID NO: 2102146 - RNA, 19 nt, Artificial Sequence
  Description of Artificial Sequence: Synthetic oligonucleotide
uauauagaauuugaagucc

SEQ ID NO: 2102147 - RNA, 19 nt, Artificial Sequence
  Description of Artificial Sequence: Synthetic oligonucleotide
uugauacaaaaugagagca

SEQ ID NO: 2102148 - RNA, 19 nt, Artificial Sequence
  Description of Artificial Sequence: Synthetic oligonucleotide
  modified_base (16)..(16): a, c, u, g, unknown or other
aaggggugaaguuuancca

SEQ ID NO: 2102149 - RNA, 19 nt, Artificial Sequence
  Description of Artificial Sequence: Synthetic oligonucleotide
gaacccuaaaauauugugg

SEQ ID NO: 2102150 - RNA, 19 nt, Artificial Sequence
  Description of Artificial Sequence: Synthetic oligonucleotide
cauugcauagaccaauucc

SEQ ID NO: 2102151 - RNA, 19 nt, Artificial Sequence
  Description of Artificial Sequence: Synthetic oligonucleotide
ugcuagcuaaggaagacag

SEQ ID NO: 2102152 - RNA, 19 nt, Artificial Sequence
  Description of Artificial Sequence: Synthetic oligonucleotide
auauuguggaucuuuauau

SEQ ID NO: 2102153 - RNA, 19 nt, Artificial Sequence
  Description of Artificial Sequence: Synthetic oligonucleotide
aaggaagacagaaacuggg

SEQ ID NO: 2102154 - RNA, 19 nt, Artificial Sequence
  Description of Artificial Sequence: Synthetic oligonucleotide
uggguugauacaaaaugag

SEQ ID NO: 2102155 - RNA, 19 nt, Artificial Sequence
  Description of Artificial Sequence: Synthetic oligonucleotide
guauauagaauuugaaguc

SEQ ID NO: 2102156 - RNA, 19 nt, Artificial Sequence
  Description of Artificial Sequence: Synthetic oligonucleotide
cuaaggaagacagaaacug

SEQ ID NO: 2102157 - RNA, 19 nt, Artificial Sequence
  Description of Artificial Sequence: Synthetic oligonucleotide
aagcaaauucaggacagac

SEQ ID NO: 2102158 - RNA, 19 nt, Artificial Sequence
  Description of Artificial Sequence: Synthetic oligonucleotide
auccaguccauccagucac

SEQ ID NO: 2102159 - RNA, 19 nt, Artificial Sequence
  Description of Artificial Sequence: Synthetic oligonucleotide
ugauacaaaaugagagcag

SEQ ID NO: 2102160 - RNA, 19 nt, Artificial Sequence
  Description of Artificial Sequence: Synthetic oligonucleotide
gaaagcaugccccuugccc

SEQ ID NO: 2102161 - RNA, 19 nt, Artificial Sequence
  Description of Artificial Sequence: Synthetic oligonucleotide
acuaaauagggcuaaggaa

SEQ ID NO: 2102162 - RNA, 19 nt, Artificial Sequence
  Description of Artificial Sequence: Synthetic oligonucleotide
aauauauccuaucucugua

SEQ ID NO: 2102163 - RNA, 19 nt, Artificial Sequence
  Description of Artificial Sequence: Synthetic oligonucleotide
aaagcaugccccuugccca

SEQ ID NO: 2102164 - RNA, 19 nt, Artificial Sequence
  Description of Artificial Sequence: Synthetic oligonucleotide
agaaaagaacccuaaaaua

SEQ ID NO: 2102165 - RNA, 19 nt, Artificial Sequence
  Description of Artificial Sequence: Synthetic oligonucleotide
agaacccuaaaauauugug

SEQ ID NO: 2102166 - RNA, 19 nt, Artificial Sequence
  Description of Artificial Sequence: Synthetic oligonucleotide
aaagaacccuaaaauauug

SEQ ID NO: 2102167 - RNA, 19 nt, Artificial Sequence
  Description of Artificial Sequence: Synthetic oligonucleotide
agaauacagaacugugaac

SEQ ID NO: 2102168 - RNA, 19 nt, Artificial Sequence
  Description of Artificial Sequence: Synthetic oligonucleotide
agaaacugggcaaggaacc

SEQ ID NO: 2102169 - RNA, 19 nt, Artificial Sequence
  Description of Artificial Sequence: Synthetic oligonucleotide
cuuaauauauccuaucucu

SEQ ID NO: 2102170 - RNA, 19 nt, Artificial Sequence
  Description of Artificial Sequence: Synthetic oligonucleotide
uacagaacugugaacucag

SEQ ID NO: 2102171 - RNA, 19 nt, Artificial Sequence
  Description of Artificial Sequence: Synthetic oligonucleotide
ucugguccuaacaccaggg

SEQ ID NO: 2102172 - RNA, 19 nt, Artificial Sequence
  Description of Artificial Sequence: Synthetic oligonucleotide
ucuguauauagaauuugaa

SEQ ID NO: 2102173 - RNA, 19 nt, Artificial Sequence
  Description of Artificial Sequence: Synthetic oligonucleotide
agugccacguuccagccgg

SEQ ID NO: 2102174 - RNA, 19 nt, Artificial Sequence
  Description of Artificial Sequence: Synthetic oligonucleotide
agcucaagaggauagaaau

SEQ ID NO: 2102175 - RNA, 19 nt, Artificial Sequence
  Description of Artificial Sequence: Synthetic oligonucleotide
guucuaaaaccacagcccc

SEQ ID NO: 2102176 - RNA, 19 nt, Artificial Sequence
  Description of Artificial Sequence: Synthetic oligonucleotide
uaaauagggcuaaggaaac

SEQ ID NO: 2102177 - RNA, 19 nt, Artificial Sequence
  Description of Artificial Sequence: Synthetic oligonucleotide
  modified_base (4)..(4): a, c, u, g, unknown or other
uuanccagggcugacuggc

SEQ ID NO: 2102178 - RNA, 19 nt, Artificial Sequence
  Description of Artificial Sequence: Synthetic oligonucleotide
cugacuggcagccaguacc

SEQ ID NO: 2102179 - RNA, 19 nt, Artificial Sequence
  Description of Artificial Sequence: Synthetic oligonucleotide
ugagagcagcuuaaagggg

SEQ ID NO: 2102180 - RNA, 19 nt, Artificial Sequence
  Description of Artificial Sequence: Synthetic oligonucleotide
agccagauccaguccaucc

SEQ ID NO: 2102181 - RNA, 19 nt, Artificial Sequence
  Description of Artificial Sequence: Synthetic oligonucleotide
gaaccggugucccauaccc

SEQ ID NO: 2102182 - RNA, 19 nt, Artificial Sequence
  Description of Artificial Sequence: Synthetic oligonucleotide
aacuugcuagcuaaggaag

SEQ ID NO: 2102183 - RNA, 19 nt, Artificial Sequence
  Description of Artificial Sequence: Synthetic oligonucleotide
auagaaaugcucugguccu

SEQ ID NO: 2102184 - RNA, 19 nt, Artificial Sequence
  Description of Artificial Sequence: Synthetic oligonucleotide
aaaugcucugguccuaaca

SEQ ID NO: 2102185 - RNA, 19 nt, Artificial Sequence
  Description of Artificial Sequence: Synthetic oligonucleotide
gaauacagaacugugaacu

SEQ ID NO: 2102186 - RNA, 19 nt, Artificial Sequence
  Description of Artificial Sequence: Synthetic oligonucleotide
gaggauagaaaugcucugg

SEQ ID NO: 2102187 - RNA, 19 nt, Artificial Sequence
  Description of Artificial Sequence: Synthetic oligonucleotide
ugguccuaacaccagggag

SEQ ID NO: 2102188 - RNA, 19 nt, Artificial Sequence
  Description of Artificial Sequence: Synthetic oligonucleotide
auugcauagaccaauuccu

SEQ ID NO: 2102189 - RNA, 19 nt, Artificial Sequence
  Description of Artificial Sequence: Synthetic oligonucleotide
ggaaacgccagccugcugg

SEQ ID NO: 2102190 - RNA, 19 nt, Artificial Sequence
  Description of Artificial Sequence: Synthetic oligonucleotide
  modified_base (5)..(5): a, c, u, g, unknown or other
uuuanccagggcugacugg

SEQ ID NO: 2102191 - RNA, 19 nt, Artificial Sequence
  Description of Artificial Sequence: Synthetic oligonucleotide
auaagccagauccagucca

SEQ ID NO: 2102192 - RNA, 19 nt, Artificial Sequence
  Description of Artificial Sequence: Synthetic oligonucleotide
cuuuauaucuuccuaguaa

SEQ ID NO: 2102193 - RNA, 19 nt, Artificial Sequence
  Description of Artificial Sequence: Synthetic oligonucleotide
cuuccuuuccugcaggaag

SEQ ID NO: 2102194 - RNA, 19 nt, Artificial Sequence
  Description of Artificial Sequence: Synthetic oligonucleotide
ugcagugaucaguuguggg

SEQ ID NO: 2102195 - RNA, 19 nt, Artificial Sequence
  Description of Artificial Sequence: Synthetic oligonucleotide
  modified_base (15)..(15): a, c, u, g, unknown or other
aggggugaaguuuanccag

SEQ ID NO: 2102196 - RNA, 19 nt, Artificial Sequence
  Description of Artificial Sequence: Synthetic oligonucleotide
uugcuuacccagcacagcu

SEQ ID NO: 2102197 - RNA, 19 nt, Artificial Sequence
  Description of Artificial Sequence: Synthetic oligonucleotide
aucuuuauaucuuccuagu

SEQ ID NO: 2102198 - RNA, 19 nt, Artificial Sequence
  Description of Artificial Sequence: Synthetic oligonucleotide
cuaaggaaacgccagccug

SEQ ID NO: 2102199 - RNA, 19 nt, Artificial Sequence
  Description of Artificial Sequence: Synthetic oligonucleotide
gcuggguugauacaaaaug

SEQ ID NO: 2102200 - RNA, 19 nt, Artificial Sequence
  Description of Artificial Sequence: Synthetic oligonucleotide
uaaaacugucuuucucgag

SEQ ID NO: 2102201 - RNA, 19 nt, Artificial Sequence
  Description of Artificial Sequence: Synthetic oligonucleotide
ucucgaggguuccaaacug

SEQ ID NO: 2102202 - RNA, 19 nt, Artificial Sequence
  Description of Artificial Sequence: Synthetic oligonucleotide
ugcucuaggcacccugugg

SEQ ID NO: 2102203 - RNA, 19 nt, Artificial Sequence
  Description of Artificial Sequence: Synthetic oligonucleotide
  modified_base (6)..(6): a, c, u, g, unknown or other
guuuanccagggcugacug

SEQ ID NO: 2102204 - RNA, 19 nt, Artificial Sequence
  Description of Artificial Sequence: Synthetic oligonucleotide
ucucuuaauauauccuauc

SEQ ID NO: 2102205 - RNA, 19 nt, Artificial Sequence
  Description of Artificial Sequence: Synthetic oligonucleotide
uauauccuaucucuguaua

SEQ ID NO: 2102206 - RNA, 19 nt, Artificial Sequence
  Description of Artificial Sequence: Synthetic oligonucleotide
aaaagaacccuaaaauauu

SEQ ID NO: 2102207 - RNA, 19 nt, Artificial Sequence
  Description of Artificial Sequence: Synthetic oligonucleotide
guaccaagaagguggguag

SEQ ID NO: 2102208 - RNA, 19 nt, Artificial Sequence
  Description of Artificial Sequence: Synthetic oligonucleotide
uggguuugguugcacagca

SEQ ID NO: 2102209 - RNA, 19 nt, Artificial Sequence
  Description of Artificial Sequence: Synthetic oligonucleotide
cuuugcuuacccagcacag

SEQ ID NO: 2102210 - RNA, 19 nt, Artificial Sequence
  Description of Artificial Sequence: Synthetic oligonucleotide
ucucuguauauagaauuug

SEQ ID NO: 2102211 - RNA, 19 nt, Artificial Sequence
  Description of Artificial Sequence: Synthetic oligonucleotide
gggauaauuagagggaggg

SEQ ID NO: 2102212 - RNA, 19 nt, Artificial Sequence
  Description of Artificial Sequence: Synthetic oligonucleotide
ucaagaggauagaaaugcu

SEQ ID NO: 2102213 - RNA, 19 nt, Artificial Sequence
  Description of Artificial Sequence: Synthetic oligonucleotide
  modified_base (11)..(11): a, c, u, g, unknown or other
gugaaguuuanccagggcu

SEQ ID NO: 2102214 - RNA, 19 nt, Artificial Sequence
  Description of Artificial Sequence: Synthetic oligonucleotide
cauagaccaauuccuuucc

SEQ ID NO: 2102215 - RNA, 19 nt, Artificial Sequence
  Description of Artificial Sequence: Synthetic oligonucleotide
agaggauagaaaugcucug

SEQ ID NO: 2102216 - RNA, 19 nt, Artificial Sequence
  Description of Artificial Sequence: Synthetic oligonucleotide
ucuuuauaucuuccuagua

SEQ ID NO: 2102217 - RNA, 19 nt, Artificial Sequence
  Description of Artificial Sequence: Synthetic oligonucleotide
uggaucuuuauaucuuccu

SEQ ID NO: 2102218 - RNA, 19 nt, Artificial Sequence
  Description of Artificial Sequence: Synthetic oligonucleotide
ggaaacacuaaauagggcu

SEQ ID NO: 2102219 - RNA, 19 nt, Artificial Sequence
  Description of Artificial Sequence: Synthetic oligonucleotide
aauuugaaguccaggugcu

SEQ ID NO: 2102220 - RNA, 19 nt, Artificial Sequence
  Description of Artificial Sequence: Synthetic oligonucleotide
auagggcuaaggaaacgcc

SEQ ID NO: 2102221 - RNA, 19 nt, Artificial Sequence
  Description of Artificial Sequence: Synthetic oligonucleotide
uagggcuaaggaaacgcca

SEQ ID NO: 2102222 - RNA, 19 nt, Artificial Sequence
  Description of Artificial Sequence: Synthetic oligonucleotide
agaaccggugucccauacc

SEQ ID NO: 2102223 - RNA, 19 nt, Artificial Sequence
  Description of Artificial Sequence: Synthetic oligonucleotide
gcaaauucaggacagacaa

SEQ ID NO: 2102224 - RNA, 19 nt, Artificial Sequence
  Description of Artificial Sequence: Synthetic oligonucleotide
aagaagguggguagguaag

SEQ ID NO: 2102225 - RNA, 19 nt, Artificial Sequence
  Description of Artificial Sequence: Synthetic oligonucleotide
acccauagaaccggugucc

SEQ ID NO: 2102226 - RNA, 19 nt, Artificial Sequence
  Description of Artificial Sequence: Synthetic oligonucleotide
aaaauauuguggaucuuua

SEQ ID NO: 2102227 - RNA, 19 nt, Artificial Sequence
  Description of Artificial Sequence: Synthetic oligonucleotide
agaccuuucaggcucuagu

SEQ ID NO: 2102228 - RNA, 19 nt, Artificial Sequence
  Description of Artificial Sequence: Synthetic oligonucleotide
cugagaugcagguggagug

SEQ ID NO: 2102229 - RNA, 19 nt, Artificial Sequence
  Description of Artificial Sequence: Synthetic oligonucleotide
acacuaaauagggcuaagg

SEQ ID NO: 2102230 - RNA, 19 nt, Artificial Sequence
  Description of Artificial Sequence: Synthetic oligonucleotide
uuucucgaggguuccaaac

SEQ ID NO: 2102231 - RNA, 19 nt, Artificial Sequence
  Description of Artificial Sequence: Synthetic oligonucleotide
cugagcuggggauaauuag

SEQ ID NO: 2102232 - RNA, 19 nt, Artificial Sequence
  Description of Artificial Sequence: Synthetic oligonucleotide
  modified_base (2)..(2): a, c, u, g, unknown or other
anccagggcugacuggcag

SEQ ID NO: 2102233 - RNA, 19 nt, Artificial Sequence
  Description of Artificial Sequence: Synthetic oligonucleotide
uucuaaaaccacagcccca

SEQ ID NO: 2102234 - RNA, 19 nt, Artificial Sequence
  Description of Artificial Sequence: Synthetic oligonucleotide
cacuaaauagggcuaagga

SEQ ID NO: 2102235 - RNA, 19 nt, Artificial Sequence
  Description of Artificial Sequence: Synthetic oligonucleotide
acagccccaacuugcuagc

SEQ ID NO: 2102236 - RNA, 19 nt, Artificial Sequence
  Description of Artificial Sequence: Synthetic oligonucleotide
aggauagaaaugcucuggu

SEQ ID NO: 2102237 - RNA, 19 nt, Artificial Sequence
  Description of Artificial Sequence: Synthetic oligonucleotide
cacagccccaacuugcuag

SEQ ID NO: 2102238 - RNA, 19 nt, Artificial Sequence
  Description of Artificial Sequence: Synthetic oligonucleotide
acauuaaaacugucuuucu

SEQ ID NO: 2102239 - RNA, 19 nt, Artificial Sequence
  Description of Artificial Sequence: Synthetic oligonucleotide
aggaaacacuaaauagggc

SEQ ID NO: 2102240 - RNA, 19 nt, Artificial Sequence
  Description of Artificial Sequence: Synthetic oligonucleotide
cucuguauauagaauuuga

SEQ ID NO: 2102241 - RNA, 19 nt, Artificial Sequence
  Description of Artificial Sequence: Synthetic oligonucleotide
  modified_base (8)..(8): a, c, u, g, unknown or other
aaguuuanccagggcugac

SEQ ID NO: 2102242 - RNA, 19 nt, Artificial Sequence
  Description of Artificial Sequence: Synthetic oligonucleotide
cuggguugauacaaaauga

SEQ ID NO: 2102243 - RNA, 19 nt, Artificial Sequence
  Description of Artificial Sequence: Synthetic oligonucleotide
ucgaggguuccaaacuggc

SEQ ID NO: 2102244 - RNA, 19 nt, Artificial Sequence
  Description of Artificial Sequence: Synthetic oligonucleotide
cuagcuaaggaagacagaa

SEQ ID NO: 2102245 - RNA, 19 nt, Artificial Sequence
  Description of Artificial Sequence: Synthetic oligonucleotide
uccaaacuggcauugcaua

SEQ ID NO: 2102246 - RNA, 19 nt, Artificial Sequence
  Description of Artificial Sequence: Synthetic oligonucleotide
uuccaaacuggcauugcau

SEQ ID NO: 2102247 - RNA, 19 nt, Artificial Sequence
  Description of Artificial Sequence: Synthetic oligonucleotide
aacacuaaauagggcuaag

SEQ ID NO: 2102248 - RNA, 19 nt, Artificial Sequence
  Description of Artificial Sequence: Synthetic oligonucleotide
auauagaauuugaagucca

SEQ ID NO: 2102249 - RNA, 19 nt, Artificial Sequence
  Description of Artificial Sequence: Synthetic oligonucleotide
aggacagacaaagggcugg

SEQ ID NO: 2102250 - RNA, 19 nt, Artificial Sequence
  Description of Artificial Sequence: Synthetic oligonucleotide
uagaccaauuccuuuccaa

SEQ ID NO: 2102251 - RNA, 19 nt, Artificial Sequence
  Description of Artificial Sequence: Synthetic oligonucleotide
cacccugugggaaucacug

SEQ ID NO: 2102252 - RNA, 19 nt, Artificial Sequence
  Description of Artificial Sequence: Synthetic oligonucleotide
aaacacuaaauagggcuaa

SEQ ID NO: 2102253 - RNA, 19 nt, Artificial Sequence
  Description of Artificial Sequence: Synthetic oligonucleotide
acugagcucaagaggauag

SEQ ID NO: 2102254 - RNA, 19 nt, Artificial Sequence
  Description of Artificial Sequence: Synthetic oligonucleotide
gaaacgccagccugcuggg

SEQ ID NO: 2102255 - RNA, 19 nt, Artificial Sequence
  Description of Artificial Sequence: Synthetic oligonucleotide
aguacccuccuuuaagcaa

SEQ ID NO: 2102256 - RNA, 19 nt, Artificial Sequence
  Description of Artificial Sequence: Synthetic oligonucleotide
cucgaggguuccaaacugg

SEQ ID NO: 2102257 - RNA, 19 nt, Artificial Sequence
  Description of Artificial Sequence: Synthetic oligonucleotide
aacugugaacucaggagga

SEQ ID NO: 2102258 - RNA, 19 nt, Artificial Sequence
  Description of Artificial Sequence: Synthetic oligonucleotide
auauccuaucucuguauau

SEQ ID NO: 2102259 - RNA, 19 nt, Artificial Sequence
  Description of Artificial Sequence: Synthetic oligonucleotide
gcagauggcaccacgaugc

SEQ ID NO: 2102260 - RNA, 19 nt, Artificial Sequence
  Description of Artificial Sequence: Synthetic oligonucleotide
aagcaugccccuugcccag

SEQ ID NO: 2102261 - RNA, 19 nt, Artificial Sequence
  Description of Artificial Sequence: Synthetic oligonucleotide
gcucuaggcacccuguggg

SEQ ID NO: 2102262 - RNA, 19 nt, Artificial Sequence
  Description of Artificial Sequence: Synthetic oligonucleotide
caaaaugagagcagcuuaa

SEQ ID NO: 2102263 - RNA, 19 nt, Artificial Sequence
  Description of Artificial Sequence: Synthetic oligonucleotide
uagucuugggucugagcug

SEQ ID NO: 2102264 - RNA, 19 nt, Artificial Sequence
  Description of Artificial Sequence: Synthetic oligonucleotide
uuugcuuacccagcacagc

SEQ ID NO: 2102265 - RNA, 19 nt, Artificial Sequence
  Description of Artificial Sequence: Synthetic oligonucleotide
cagaggaaaaggccuuugc

SEQ ID NO: 2102266 - RNA, 19 nt, Artificial Sequence
  Description of Artificial Sequence: Synthetic oligonucleotide
agggaaagcaugccccuug

SEQ ID NO: 2102267 - RNA, 19 nt, Artificial Sequence
  Description of Artificial Sequence: Synthetic oligonucleotide
  modified_base (19)..(19): a, c, u, g, unknown or other
uuaaaggggugaaguuuan

SEQ ID NO: 2102268 - RNA, 19 nt, Artificial Sequence
  Description of Artificial Sequence: Synthetic oligonucleotide
  modified_base (7)..(7): a, c, u, g, unknown or other
aguuuanccagggcugacu

SEQ ID NO: 2102269 - RNA, 19 nt, Artificial Sequence
  Description of Artificial Sequence: Synthetic oligonucleotide
uuacccagcacagcugggc

SEQ ID NO: 2102270 - RNA, 19 nt, Artificial Sequence
  Description of Artificial Sequence: Synthetic oligonucleotide
uacccagcacagcugggcc

SEQ ID NO: 2102271 - RNA, 19 nt, Artificial Sequence
  Description of Artificial Sequence: Synthetic oligonucleotide
ccuaccuccccuuacuggg

SEQ ID NO: 2102272 - RNA, 19 nt, Artificial Sequence
  Description of Artificial Sequence: Synthetic oligonucleotide
acaccagggaguucuaaaa

SEQ ID NO: 2102273 - RNA, 19 nt, Artificial Sequence
  Description of Artificial Sequence: Synthetic oligonucleotide
gcuuacccagcacagcugg

SEQ ID NO: 2102274 - RNA, 19 nt, Artificial Sequence
  Description of Artificial Sequence: Synthetic oligonucleotide
gaaacacuaaauagggcua

SEQ ID NO: 2102275 - RNA, 19 nt, Artificial Sequence
  Description of Artificial Sequence: Synthetic oligonucleotide
gaaaaggccuuugcuuacc

SEQ ID NO: 2102276 - RNA, 19 nt, Artificial Sequence
  Description of Artificial Sequence: Synthetic oligonucleotide
uagcuaaggaagacagaaa

SEQ ID NO: 2102277 - RNA, 19 nt, Artificial Sequence
  Description of Artificial Sequence: Synthetic oligonucleotide
uccaggugcucuaggcacc

SEQ ID NO: 2102278 - RNA, 19 nt, Artificial Sequence
  Description of Artificial Sequence: Synthetic oligonucleotide
uggcaauaagccagaucca

SEQ ID NO: 2102279 - RNA, 19 nt, Artificial Sequence
  Description of Artificial Sequence: Synthetic oligonucleotide
uagccagaaaagaacccua

SEQ ID NO: 2102280 - RNA, 19 nt, Artificial Sequence
  Description of Artificial Sequence: Synthetic oligonucleotide
cuuucaggcucuagucuug

SEQ ID NO: 2102281 - RNA, 19 nt, Artificial Sequence
  Description of Artificial Sequence: Synthetic oligonucleotide
cucuuaauauauccuaucu

SEQ ID NO: 2102282 - RNA, 19 nt, Artificial Sequence
  Description of Artificial Sequence: Synthetic oligonucleotide
auagaccaauuccuuucca

SEQ ID NO: 2102283 - RNA, 19 nt, Artificial Sequence
  Description of Artificial Sequence: Synthetic oligonucleotide
  modified_base (9)..(9): a, c, u, g, unknown or other
gaaguuuanccagggcuga

SEQ ID NO: 2102284 - RNA, 19 nt, Artificial Sequence
  Description of Artificial Sequence: Synthetic oligonucleotide
ccuccuuuaagcaaauuca

SEQ ID NO: 2102285 - RNA, 19 nt, Artificial Sequence
  Description of Artificial Sequence: Synthetic oligonucleotide
caagaagguggguagguaa

SEQ ID NO: 2102286 - RNA, 19 nt, Artificial Sequence
  Description of Artificial Sequence: Synthetic oligonucleotide
guacccuggguuugguugc

SEQ ID NO: 2102287 - RNA, 19 nt, Artificial Sequence
  Description of Artificial Sequence: Synthetic oligonucleotide
ugccaggccaugcagugau

SEQ ID NO: 2102288 - RNA, 19 nt, Artificial Sequence
  Description of Artificial Sequence: Synthetic oligonucleotide
aaccggugucccauacccc

SEQ ID NO: 2102289 - RNA, 19 nt, Artificial Sequence
  Description of Artificial Sequence: Synthetic oligonucleotide
uucaggcucuagucuuggg

SEQ ID NO: 2102290 - RNA, 19 nt, Artificial Sequence
  Description of Artificial Sequence: Synthetic oligonucleotide
aacugucuuucucgagggu

SEQ ID NO: 2102291 - RNA, 19 nt, Artificial Sequence
  Description of Artificial Sequence: Synthetic oligonucleotide
gcauagaccaauuccuuuc

SEQ ID NO: 2102292 - RNA, 19 nt, Artificial Sequence
  Description of Artificial Sequence: Synthetic oligonucleotide
agggcuaaggaaacgccag

SEQ ID NO: 2102293 - RNA, 19 nt, Artificial Sequence
  Description of Artificial Sequence: Synthetic oligonucleotide
ucacagcccaccuggcuga

SEQ ID NO: 2102294 - RNA, 19 nt, Artificial Sequence
  Description of Artificial Sequence: Synthetic oligonucleotide
ugcucagaccuuucaggcu

SEQ ID NO: 2102295 - RNA, 19 nt, Artificial Sequence
  Description of Artificial Sequence: Synthetic oligonucleotide
  modified_base (18)..(18): a, c, u, g, unknown or other
uaaaggggugaaguuuanc

SEQ ID NO: 2102296 - RNA, 19 nt, Artificial Sequence
  Description of Artificial Sequence: Synthetic oligonucleotide
aacgccagccugcuggguu

SEQ ID NO: 2102297 - RNA, 19 nt, Artificial Sequence
  Description of Artificial Sequence: Synthetic oligonucleotide
cagaacugugaacucagga

SEQ ID NO: 2102298 - RNA, 19 nt, Artificial Sequence
  Description of Artificial Sequence: Synthetic oligonucleotide
agcuuaaaggggugaaguu

SEQ ID NO: 2102299 - RNA, 19 nt, Artificial Sequence
  Description of Artificial Sequence: Synthetic oligonucleotide
ggaguucuaaaaccacagc

SEQ ID NO: 2102300 - RNA, 19 nt, Artificial Sequence
  Description of Artificial Sequence: Synthetic oligonucleotide
  modified_base (12)..(12): a, c, u, g, unknown or other
ggugaaguuuanccagggc

SEQ ID NO: 2102301 - RNA, 19 nt, Artificial Sequence
  Description of Artificial Sequence: Synthetic oligonucleotide
uaagcaaauucaggacaga

SEQ ID NO: 2102302 - RNA, 19 nt, Artificial Sequence
  Description of Artificial Sequence: Synthetic oligonucleotide
uacuguacccuggguuugg

SEQ ID NO: 2102303 - RNA, 19 nt, Artificial Sequence
  Description of Artificial Sequence: Synthetic oligonucleotide
agacagaaacugggcaagg

SEQ ID NO: 2102304 - RNA, 19 nt, Artificial Sequence
  Description of Artificial Sequence: Synthetic oligonucleotide
aucucuuaauauauccuau

SEQ ID NO: 2102305 - RNA, 19 nt, Artificial Sequence
  Description of Artificial Sequence: Synthetic oligonucleotide
  modified_base (14)..(14): a, c, u, g, unknown or other
ggggugaaguuuanccagg

SEQ ID NO: 2102306 - RNA, 19 nt, Artificial Sequence
  Description of Artificial Sequence: Synthetic oligonucleotide
gaucaguugugggguagcc

SEQ ID NO: 2102307 - RNA, 19 nt, Artificial Sequence
  Description of Artificial Sequence: Synthetic oligonucleotide
aaggaaacgccagccugcu

SEQ ID NO: 2102308 - RNA, 19 nt, Artificial Sequence
  Description of Artificial Sequence: Synthetic oligonucleotide
ugaucaguugugggguagc

SEQ ID NO: 2102309 - RNA, 19 nt, Artificial Sequence
  Description of Artificial Sequence: Synthetic oligonucleotide
auuugaaguccaggugcuc

SEQ ID NO: 2102310 - RNA, 19 nt, Artificial Sequence
  Description of Artificial Sequence: Synthetic oligonucleotide
gguugcacagcagacagca

SEQ ID NO: 2102311 - RNA, 19 nt, Artificial Sequence
  Description of Artificial Sequence: Synthetic oligonucleotide
cuuacccagcacagcuggg

SEQ ID NO: 2102312 - RNA, 19 nt, Artificial Sequence
  Description of Artificial Sequence: Synthetic oligonucleotide
cuaccuccccuuacugggg

SEQ ID NO: 2102313 - RNA, 19 nt, Artificial Sequence
  Description of Artificial Sequence: Synthetic oligonucleotide
ggauaauuagagggagggg

SEQ ID NO: 2102314 - RNA, 19 nt, Artificial Sequence
  Description of Artificial Sequence: Synthetic oligonucleotide
aagccagauccaguccauc

SEQ ID NO: 2102315 - RNA, 19 nt, Artificial Sequence
  Description of Artificial Sequence: Synthetic oligonucleotide
ucuuucucgaggguuccaa

SEQ ID NO: 2102316 - RNA, 19 nt, Artificial Sequence
  Description of Artificial Sequence: Synthetic oligonucleotide
ccaaacuggcauugcauag

SEQ ID NO: 2102317 - RNA, 19 nt, Artificial Sequence
  Description of Artificial Sequence: Synthetic oligonucleotide
uggcauugcauagaccaau

SEQ ID NO: 2102318 - RNA, 19 nt, Artificial Sequence
  Description of Artificial Sequence: Synthetic oligonucleotide
ggggaguccagccaucccc

SEQ ID NO: 2102319 - RNA, 19 nt, Artificial Sequence
  Description of Artificial Sequence: Synthetic oligonucleotide
gccaguacccuccuuuaag

SEQ ID NO: 2102320 - RNA, 19 nt, Artificial Sequence
  Description of Artificial Sequence: Synthetic oligonucleotide
ugugggaaucacugagcuc

SEQ ID NO: 2102321 - RNA, 19 nt, Artificial Sequence
  Description of Artificial Sequence: Synthetic oligonucleotide
acgaugcucagaccuuuca

SEQ ID NO: 2102322 - RNA, 19 nt, Artificial Sequence
  Description of Artificial Sequence: Synthetic oligonucleotide
caguccauccagucacagc

SEQ ID NO: 2102323 - RNA, 19 nt, Artificial Sequence
  Description of Artificial Sequence: Synthetic oligonucleotide
aggugcucuaggcacccug

SEQ ID NO: 2102324 - RNA, 19 nt, Artificial Sequence
  Description of Artificial Sequence: Synthetic oligonucleotide
ccuaucucuguauauagaa

SEQ ID NO: 2102325 - RNA, 19 nt, Artificial Sequence
  Description of Artificial Sequence: Synthetic oligonucleotide
aggcucuagucuugggucu

SEQ ID NO: 2102326 - RNA, 19 nt, Artificial Sequence
  Description of Artificial Sequence: Synthetic oligonucleotide
ggugaacagaggcaccuac

SEQ ID NO: 2102327 - RNA, 19 nt, Artificial Sequence
  Description of Artificial Sequence: Synthetic oligonucleotide
cugggcagauggcaccacg

SEQ ID NO: 2102328 - RNA, 19 nt, Artificial Sequence
  Description of Artificial Sequence: Synthetic oligonucleotide
acugucuuucucgaggguu

SEQ ID NO: 2102329 - RNA, 19 nt, Artificial Sequence
  Description of Artificial Sequence: Synthetic oligonucleotide
  modified_base (3)..(3): a, c, u, g, unknown or other
uanccagggcugacuggca

SEQ ID NO: 2102330 - RNA, 19 nt, Artificial Sequence
  Description of Artificial Sequence: Synthetic oligonucleotide
acuugcuagcuaaggaaga

SEQ ID NO: 2102331 - RNA, 19 nt, Artificial Sequence
  Description of Artificial Sequence: Synthetic oligonucleotide
ccuaaaauauuguggaucu

SEQ ID NO: 2102332 - RNA, 19 nt, Artificial Sequence
  Description of Artificial Sequence: Synthetic oligonucleotide
ugguugcacagcagacagc

SEQ ID NO: 2102333 - RNA, 19 nt, Artificial Sequence
  Description of Artificial Sequence: Synthetic oligonucleotide
aucucuguauauagaauuu

SEQ ID NO: 2102334 - RNA, 19 nt, Artificial Sequence
  Description of Artificial Sequence: Synthetic oligonucleotide
gagagcagcuuaaaggggu

SEQ ID NO: 2102335 - RNA, 19 nt, Artificial Sequence
  Description of Artificial Sequence: Synthetic oligonucleotide
cccuaaaauauuguggauc

SEQ ID NO: 2102336 - RNA, 19 nt, Artificial Sequence
  Description of Artificial Sequence: Synthetic oligonucleotide
ggauagaaaugcucugguc

SEQ ID NO: 2102337 - RNA, 19 nt, Artificial Sequence
  Description of Artificial Sequence: Synthetic oligonucleotide
cacccauagaaccgguguc

SEQ ID NO: 2102338 - RNA, 19 nt, Artificial Sequence
  Description of Artificial Sequence: Synthetic oligonucleotide
ucacugagcucaagaggau

SEQ ID NO: 2102339 - RNA, 19 nt, Artificial Sequence
  Description of Artificial Sequence: Synthetic oligonucleotide
acagaacugugaacucagg

SEQ ID NO: 2102340 - RNA, 19 nt, Artificial Sequence
  Description of Artificial Sequence: Synthetic oligonucleotide
ggaucuuuauaucuuccua

SEQ ID NO: 2102341 - RNA, 19 nt, Artificial Sequence
  Description of Artificial Sequence: Synthetic oligonucleotide
accaagaagguggguaggu

SEQ ID NO: 2102342 - RNA, 19 nt, Artificial Sequence
  Description of Artificial Sequence: Synthetic oligonucleotide
gugaucaguugugggguag

SEQ ID NO: 2102343 - RNA, 19 nt, Artificial Sequence
  Description of Artificial Sequence: Synthetic oligonucleotide
ggcagauggcaccacgaug

SEQ ID NO: 2102344 - RNA, 19 nt, Artificial Sequence
  Description of Artificial Sequence: Synthetic oligonucleotide
agauggcaccacgaugcuc

SEQ ID NO: 2102345 - RNA, 19 nt, Artificial Sequence
  Description of Artificial Sequence: Synthetic oligonucleotide
ggcuaaggaaacgccagcc

SEQ ID NO: 2102346 - RNA, 19 nt, Artificial Sequence
  Description of Artificial Sequence: Synthetic oligonucleotide
guagccagaaaagaacccu

SEQ ID NO: 2102347 - RNA, 19 nt, Artificial Sequence
  Description of Artificial Sequence: Synthetic oligonucleotide
ggggauaauuagagggagg

SEQ ID NO: 2102348 - RNA, 19 nt, Artificial Sequence
  Description of Artificial Sequence: Synthetic oligonucleotide
gaaggccagcugcucagga

SEQ ID NO: 2102349 - RNA, 19 nt, Artificial Sequence
  Description of Artificial Sequence: Synthetic oligonucleotide
ggaggagagaauacagaac

SEQ ID NO: 2102350 - RNA, 19 nt, Artificial Sequence
  Description of Artificial Sequence: Synthetic oligonucleotide
agaaaugcucugguccuaa

SEQ ID NO: 2102351 - RNA, 19 nt, Artificial Sequence
  Description of Artificial Sequence: Synthetic oligonucleotide
uccuuuccugcaggaaggc

SEQ ID NO: 2102352 - RNA, 19 nt, Artificial Sequence
  Description of Artificial Sequence: Synthetic oligonucleotide
gguaccaagaaggugggua

SEQ ID NO: 2102353 - RNA, 19 nt, Artificial Sequence
  Description of Artificial Sequence: Synthetic oligonucleotide
caguacccuccuuuaagca

SEQ ID NO: 2102354 - RNA, 19 nt, Artificial Sequence
  Description of Artificial Sequence: Synthetic oligonucleotide
aguugugggguagccagaa

SEQ ID NO: 2102355 - RNA, 19 nt, Artificial Sequence
  Description of Artificial Sequence: Synthetic oligonucleotide
guacccuccuuuaagcaaa

SEQ ID NO: 2102356 - RNA, 19 nt, Artificial Sequence
  Description of Artificial Sequence: Synthetic oligonucleotide
cagacaaagggcuggggcu

SEQ ID NO: 2102357 - RNA, 19 nt, Artificial Sequence
  Description of Artificial Sequence: Synthetic oligonucleotide
cuaaaaccacagccccaac

SEQ ID NO: 2102358 - RNA, 19 nt, Artificial Sequence
  Description of Artificial Sequence: Synthetic oligonucleotide
ugaggcuugccuggcaaua

SEQ ID NO: 2102359 - RNA, 19 nt, Artificial Sequence
  Description of Artificial Sequence: Synthetic oligonucleotide
aggguuccaaacuggcauu

SEQ ID NO: 2102360 - RNA, 19 nt, Artificial Sequence
  Description of Artificial Sequence: Synthetic oligonucleotide
agugaucaguuguggggua

SEQ ID NO: 2102361 - RNA, 19 nt, Artificial Sequence
  Description of Artificial Sequence: Synthetic oligonucleotide
gcucaagaggauagaaaug

SEQ ID NO: 2102362 - RNA, 19 nt, Artificial Sequence
  Description of Artificial Sequence: Synthetic oligonucleotide
cuacuguacccuggguuug

SEQ ID NO: 2102363 - RNA, 19 nt, Artificial Sequence
  Description of Artificial Sequence: Synthetic oligonucleotide
gugggguagccagaaaaga

SEQ ID NO: 2102364 - RNA, 19 nt, Artificial Sequence
  Description of Artificial Sequence: Synthetic oligonucleotide
caaauucaggacagacaaa

SEQ ID NO: 2102365 - RNA, 19 nt, Artificial Sequence
  Description of Artificial Sequence: Synthetic oligonucleotide
caccacgaugcucagaccu

SEQ ID NO: 2102366 - RNA, 19 nt, Artificial Sequence
  Description of Artificial Sequence: Synthetic oligonucleotide
cagcagacagcacccagga

SEQ ID NO: 2102367 - RNA, 19 nt, Artificial Sequence
  Description of Artificial Sequence: Synthetic oligonucleotide
agcccaggccugcugacau

SEQ ID NO: 2102368 - RNA, 19 nt, Artificial Sequence
  Description of Artificial Sequence: Synthetic oligonucleotide
gggaaagcaugccccuugc

SEQ ID NO: 2102369 - RNA, 19 nt, Artificial Sequence
  Description of Artificial Sequence: Synthetic oligonucleotide
caccuaccuccccuuacug

SEQ ID NO: 2102370 - RNA, 19 nt, Artificial Sequence
  Description of Artificial Sequence: Synthetic oligonucleotide
cugugggaaucacugagcu

SEQ ID NO: 2102371 - RNA, 19 nt, Artificial Sequence
  Description of Artificial Sequence: Synthetic oligonucleotide
cagugccacguuccagccg

SEQ ID NO: 2102372 - RNA, 19 nt, Artificial Sequence
  Description of Artificial Sequence: Synthetic oligonucleotide
ccaacuugcuagcuaagga

SEQ ID NO: 2102373 - RNA, 19 nt, Artificial Sequence
  Description of Artificial Sequence: Synthetic oligonucleotide
uaacaccagggaguucuaa

SEQ ID NO: 2102374 - RNA, 19 nt, Artificial Sequence
  Description of Artificial Sequence: Synthetic oligonucleotide
ggaaagcaugccccuugcc

SEQ ID NO: 2102375 - RNA, 19 nt, Artificial Sequence
  Description of Artificial Sequence: Synthetic oligonucleotide
cccaacuugcuagcuaagg

SEQ ID NO: 2102376 - RNA, 19 nt, Artificial Sequence
  Description of Artificial Sequence: Synthetic oligonucleotide
ggacagacaaagggcuggg

SEQ ID NO: 2102377 - RNA, 19 nt, Artificial Sequence
  Description of Artificial Sequence: Synthetic oligonucleotide
uuccagccgggcuacugua

SEQ ID NO: 2102378 - RNA, 19 nt, Artificial Sequence
  Description of Artificial Sequence: Synthetic oligonucleotide
acaugagagcagaggaaaa

SEQ ID NO: 2102379 - RNA, 19 nt, Artificial Sequence
  Description of Artificial Sequence: Synthetic oligonucleotide
agccagaaaagaacccuaa

SEQ ID NO: 2102380 - RNA, 19 nt, Artificial Sequence
  Description of Artificial Sequence: Synthetic oligonucleotide
uagaaaugcucugguccua

SEQ ID NO: 2102381 - RNA, 19 nt, Artificial Sequence
  Description of Artificial Sequence: Synthetic oligonucleotide
agguggaguggugaacaga

SEQ ID NO: 2102382 - RNA, 19 nt, Artificial Sequence
  Description of Artificial Sequence: Synthetic oligonucleotide
ccuuugcuuacccagcaca

SEQ ID NO: 2102383 - RNA, 19 nt, Artificial Sequence
  Description of Artificial Sequence: Synthetic oligonucleotide
gugcucuaggcacccugug

SEQ ID NO: 2102384 - RNA, 19 nt, Artificial Sequence
  Description of Artificial Sequence: Synthetic oligonucleotide
auagaaccggugucccaua

SEQ ID NO: 2102385 - RNA, 19 nt, Artificial Sequence
  Description of Artificial Sequence: Synthetic oligonucleotide
gcagcuuaaaggggugaag

SEQ ID NO: 2102386 - RNA, 19 nt, Artificial Sequence
  Description of Artificial Sequence: Synthetic oligonucleotide
uacccuccuuuaagcaaau

SEQ ID NO: 2102387 - RNA, 19 nt, Artificial Sequence
  Description of Artificial Sequence: Synthetic oligonucleotide
agccaguacccuccuuuaa

SEQ ID NO: 2102388 - RNA, 19 nt, Artificial Sequence
  Description of Artificial Sequence: Synthetic oligonucleotide
cacgaugcucagaccuuuc

SEQ ID NO: 2102389 - RNA, 19 nt, Artificial Sequence
  Description of Artificial Sequence: Synthetic oligonucleotide
caugccccuugcccagagg

SEQ ID NO: 2102390 - RNA, 19 nt, Artificial Sequence
  Description of Artificial Sequence: Synthetic oligonucleotide
cuuucucgaggguuccaaa

SEQ ID NO: 2102391 - RNA, 19 nt, Artificial Sequence
  Description of Artificial Sequence: Synthetic oligonucleotide
gguccuaacaccagggagu

SEQ ID NO: 2102392 - RNA, 19 nt, Artificial Sequence
  Description of Artificial Sequence: Synthetic oligonucleotide
cugguccuaacaccaggga

SEQ ID NO: 2102393 - RNA, 19 nt, Artificial Sequence
  Description of Artificial Sequence: Synthetic oligonucleotide
cucuagucuugggucugag

SEQ ID NO: 2102394 - RNA, 19 nt, Artificial Sequence
  Description of Artificial Sequence: Synthetic oligonucleotide
ggcuugccuggcaauaagc

SEQ ID NO: 2102395 - RNA, 19 nt, Artificial Sequence
  Description of Artificial Sequence: Synthetic oligonucleotide
cagcuuaaaggggugaagu

SEQ ID NO: 2102396 - RNA, 19 nt, Artificial Sequence
  Description of Artificial Sequence: Synthetic oligonucleotide
gggagguaccaagaaggug

SEQ ID NO: 2102397 - RNA, 19 nt, Artificial Sequence
  Description of Artificial Sequence: Synthetic oligonucleotide
gccagauccaguccaucca

SEQ ID NO: 2102398 - RNA, 19 nt, Artificial Sequence
  Description of Artificial Sequence: Synthetic oligonucleotide
guccauccagucacagccc

SEQ ID NO: 2102399 - RNA, 19 nt, Artificial Sequence
  Description of Artificial Sequence: Synthetic oligonucleotide
gcagguggaguggugaaca

SEQ ID NO: 2102400 - RNA, 19 nt, Artificial Sequence
  Description of Artificial Sequence: Synthetic oligonucleotide
aggaaacgccagccugcug

SEQ ID NO: 2102401 - RNA, 19 nt, Artificial Sequence
  Description of Artificial Sequence: Synthetic oligonucleotide
cagaccuuucaggcucuag

SEQ ID NO: 2102402 - RNA, 19 nt, Artificial Sequence
  Description of Artificial Sequence: Synthetic oligonucleotide
cauagaaccggugucccau

SEQ ID NO: 2102403 - RNA, 19 nt, Artificial Sequence
  Description of Artificial Sequence: Synthetic oligonucleotide
cucuaggcacccuguggga

SEQ ID NO: 2102404 - RNA, 19 nt, Artificial Sequence
  Description of Artificial Sequence: Synthetic oligonucleotide
gaggcuugccuggcaauaa

SEQ ID NO: 2102405 - RNA, 19 nt, Artificial Sequence
  Description of Artificial Sequence: Synthetic oligonucleotide
ggguuccaaacuggcauug

SEQ ID NO: 2102406 - RNA, 19 nt, Artificial Sequence
  Description of Artificial Sequence: Synthetic oligonucleotide
guggugaacagaggcaccu

SEQ ID NO: 2102407 - RNA, 19 nt, Artificial Sequence
  Description of Artificial Sequence: Synthetic oligonucleotide
ccuaacaccagggaguucu

SEQ ID NO: 2102408 - RNA, 19 nt, Artificial Sequence
  Description of Artificial Sequence: Synthetic oligonucleotide
gccccaacuugcuagcuaa

SEQ ID NO: 2102409 - RNA, 19 nt, Artificial Sequence
  Description of Artificial Sequence: Synthetic oligonucleotide
cagugaucaguuguggggu

SEQ ID NO: 2102410 - RNA, 19 nt, Artificial Sequence
  Description of Artificial Sequence: Synthetic oligonucleotide
ggcaccuaccuccccuuac

SEQ ID NO: 2102411 - RNA, 19 nt, Artificial Sequence
  Description of Artificial Sequence: Synthetic oligonucleotide
aaacgccagccugcugggu

SEQ ID NO: 2102412 - RNA, 19 nt, Artificial Sequence
  Description of Artificial Sequence: Synthetic oligonucleotide
guuccagccgggcuacugu

SEQ ID NO: 2102413 - RNA, 19 nt, Artificial Sequence
  Description of Artificial Sequence: Synthetic oligonucleotide
cacguuccagccgggcuac

SEQ ID NO: 2102414 - RNA, 19 nt, Artificial Sequence
  Description of Artificial Sequence: Synthetic oligonucleotide
gccagaaaagaacccuaaa

SEQ ID NO: 2102415 - RNA, 19 nt, Artificial Sequence
  Description of Artificial Sequence: Synthetic oligonucleotide
gcuacuguacccuggguuu

SEQ ID NO: 2102416 - RNA, 19 nt, Artificial Sequence
  Description of Artificial Sequence: Synthetic oligonucleotide
ggccuuugcuuacccagca

SEQ ID NO: 2102417 - RNA, 19 nt, Artificial Sequence
  Description of Artificial Sequence: Synthetic oligonucleotide
agcagaggaaaaggccuuu

SEQ ID NO: 2102418 - RNA, 19 nt, Artificial Sequence
  Description of Artificial Sequence: Synthetic oligonucleotide
gcuaaggaagacagaaacu

SEQ ID NO: 2102419 - RNA, 19 nt, Artificial Sequence
  Description of Artificial Sequence: Synthetic oligonucleotide
ugccacguuccagccgggc

SEQ ID NO: 2102420 - RNA, 19 nt, Artificial Sequence
  Description of Artificial Sequence: Synthetic oligonucleotide
ccuggcaauaagccagauc

SEQ ID NO: 2102421 - RNA, 19 nt, Artificial Sequence
  Description of Artificial Sequence: Synthetic oligonucleotide
gcuaaggaaacgccagccu

SEQ ID NO: 2102422 - RNA, 19 nt, Artificial Sequence
  Description of Artificial Sequence: Synthetic oligonucleotide
cccauagaaccgguguccc

SEQ ID NO: 2102423 - RNA, 19 nt, Artificial Sequence
  Description of Artificial Sequence: Synthetic oligonucleotide
cagaggcaccuaccucccc

SEQ ID NO: 2102424 - RNA, 19 nt, Artificial Sequence
  Description of Artificial Sequence: Synthetic oligonucleotide
cugagcucaagaggauaga

SEQ ID NO: 2102425 - RNA, 19 nt, Artificial Sequence
  Description of Artificial Sequence: Synthetic oligonucleotide
guugcacagcagacagcac

SEQ ID NO: 2102426 - RNA, 19 nt, Artificial Sequence
  Description of Artificial Sequence: Synthetic oligonucleotide
gcuuaaaggggugaaguuu

SEQ ID NO: 2102427 - RNA, 19 nt, Artificial Sequence
  Description of Artificial Sequence: Synthetic oligonucleotide
ggcuacuguacccuggguu

SEQ ID NO: 2102428 - RNA, 19 nt, Artificial Sequence
  Description of Artificial Sequence: Synthetic oligonucleotide
ccgggcuacuguacccugg

SEQ ID NO: 2102429 - RNA, 19 nt, Artificial Sequence
  Description of Artificial Sequence: Synthetic oligonucleotide
ccaugcagugaucaguugu

SEQ ID NO: 2102430 - RNA, 19 nt, Artificial Sequence
  Description of Artificial Sequence: Synthetic oligonucleotide
ggcucuagucuugggucug

SEQ ID NO: 2102431 - RNA, 19 nt, Artificial Sequence
  Description of Artificial Sequence: Synthetic oligonucleotide
cacugagcucaagaggaua

SEQ ID NO: 2102432 - RNA, 19 nt, Artificial Sequence
  Description of Artificial Sequence: Synthetic oligonucleotide
gcccugggcagauggcacc

SEQ ID NO: 2102433 - RNA, 19 nt, Artificial Sequence
  Description of Artificial Sequence: Synthetic oligonucleotide
cagccaguacccuccuuua

SEQ ID NO: 2102434 - RNA, 19 nt, Artificial Sequence
  Description of Artificial Sequence: Synthetic oligonucleotide
gccuuugcuuacccagcac

SEQ ID NO: 2102435 - RNA, 19 nt, Artificial Sequence
  Description of Artificial Sequence: Synthetic oligonucleotide
cgggcuacuguacccuggg

SEQ ID NO: 2102436 - RNA, 19 nt, Artificial Sequence
  Description of Artificial Sequence: Synthetic oligonucleotide
agguaccaagaaggugggu

SEQ ID NO: 2102437 - RNA, 19 nt, Artificial Sequence
  Description of Artificial Sequence: Synthetic oligonucleotide
gggaaucacugagcucaag

SEQ ID NO: 2102438 - RNA, 19 nt, Artificial Sequence
  Description of Artificial Sequence: Synthetic oligonucleotide
uccuaacaccagggaguuc

SEQ ID NO: 2102439 - RNA, 19 nt, Artificial Sequence
  Description of Artificial Sequence: Synthetic oligonucleotide
gccugcuggguugauacaa

SEQ ID NO: 2102440 - RNA, 19 nt, Artificial Sequence
  Description of Artificial Sequence: Synthetic oligonucleotide
ucagaccuuucaggcucua

SEQ ID NO: 2102441 - RNA, 19 nt, Artificial Sequence
  Description of Artificial Sequence: Synthetic oligonucleotide
cccacccauagaaccggug

SEQ ID NO: 2102442 - RNA, 19 nt, Artificial Sequence
  Description of Artificial Sequence: Synthetic oligonucleotide
cucagaccuuucaggcucu

SEQ ID NO: 2102443 - RNA, 19 nt, Artificial Sequence
  Description of Artificial Sequence: Synthetic oligonucleotide
aggcaccuaccuccccuua

SEQ ID NO: 2102444 - RNA, 19 nt, Artificial Sequence
  Description of Artificial Sequence: Synthetic oligonucleotide
ccaggccaugcagugauca

SEQ ID NO: 2102445 - RNA, 19 nt, Artificial Sequence
  Description of Artificial Sequence: Synthetic oligonucleotide
guccuaacaccagggaguu

SEQ ID NO: 2102446 - RNA, 19 nt, Artificial Sequence
  Description of Artificial Sequence: Synthetic oligonucleotide
ccacccauagaaccggugu

SEQ ID NO: 2102447 - RNA, 19 nt, Artificial Sequence
  Description of Artificial Sequence: Synthetic oligonucleotide
gccgggcuacuguacccug

SEQ ID NO: 2102448 - RNA, 19 nt, Artificial Sequence
  Description of Artificial Sequence: Synthetic oligonucleotide
agcaugccccuugcccaga

SEQ ID NO: 2102449 - RNA, 19 nt, Artificial Sequence
  Description of Artificial Sequence: Synthetic oligonucleotide
acagcccaccuggcugacu

SEQ ID NO: 2102450 - RNA, 19 nt, Artificial Sequence
  Description of Artificial Sequence: Synthetic oligonucleotide
gugccacguuccagccggg

SEQ ID NO: 2102451 - RNA, 19 nt, Artificial Sequence
  Description of Artificial Sequence: Synthetic oligonucleotide
cgaggguuccaaacuggca

SEQ ID NO: 2102452 - RNA, 19 nt, Artificial Sequence
  Description of Artificial Sequence: Synthetic oligonucleotide
cugaggcuugccuggcaau

SEQ ID NO: 2102453 - RNA, 19 nt, Artificial Sequence
  Description of Artificial Sequence: Synthetic oligonucleotide
ggugcucuaggcacccugu

SEQ ID NO: 2102454 - RNA, 19 nt, Artificial Sequence
  Description of Artificial Sequence: Synthetic oligonucleotide
cagauggcaccacgaugcu

SEQ ID NO: 2102455 - RNA, 19 nt, Artificial Sequence
  Description of Artificial Sequence: Synthetic oligonucleotide
cugccaggccaugcaguga

SEQ ID NO: 2102456 - RNA, 19 nt, Artificial Sequence
  Description of Artificial Sequence: Synthetic oligonucleotide
ggcugaggcuugccuggca

SEQ ID NO: 2102457 - RNA, 19 nt, Artificial Sequence
  Description of Artificial Sequence: Synthetic oligonucleotide
ccacguuccagccgggcua

SEQ ID NO: 2102458 - RNA, 19 nt, Artificial Sequence
  Description of Artificial Sequence: Synthetic oligonucleotide
acccuccuuuaagcaaauu

SEQ ID NO: 2102459 - RNA, 19 nt, Artificial Sequence
  Description of Artificial Sequence: Synthetic oligonucleotide
ggcauugcauagaccaauu

SEQ ID NO: 2102460 - RNA, 19 nt, Artificial Sequence
  Description of Artificial Sequence: Synthetic oligonucleotide
gggcagauggcaccacgau

SEQ ID NO: 2102461 - RNA, 19 nt, Artificial Sequence
  Description of Artificial Sequence: Synthetic oligonucleotide
caccuggcugacugccucu

SEQ ID NO: 2102462 - RNA, 19 nt, Artificial Sequence
  Description of Artificial Sequence: Synthetic oligonucleotide
gcucuagucuugggucuga

SEQ ID NO: 2102463 - RNA, 19 nt, Artificial Sequence
  Description of Artificial Sequence: Synthetic oligonucleotide
cugccucugcagccuggaa

SEQ ID NO: 2102464 - RNA, 19 nt, Artificial Sequence
  Description of Artificial Sequence: Synthetic oligonucleotide
ccaagaagguggguaggua

SEQ ID NO: 2102465 - RNA, 19 nt, Artificial Sequence
  Description of Artificial Sequence: Synthetic oligonucleotide
cuguacccuggguuugguu

SEQ ID NO: 2102466 - RNA, 19 nt, Artificial Sequence
  Description of Artificial Sequence: Synthetic oligonucleotide
gacccagcccugggcagau

SEQ ID NO: 2102467 - RNA, 19 nt, Artificial Sequence
  Description of Artificial Sequence: Synthetic oligonucleotide
acccagcccugggcagaug

SEQ ID NO: 2102468 - RNA, 19 nt, Artificial Sequence
  Description of Artificial Sequence: Synthetic oligonucleotide
ccccugaccuggggagucc

SEQ ID NO: 2102469 - RNA, 19 nt, Artificial Sequence
  Description of Artificial Sequence: Synthetic oligonucleotide
gggcuacuguacccugggu

SEQ ID NO: 2102470 - RNA, 19 nt, Artificial Sequence
  Description of Artificial Sequence: Synthetic oligonucleotide
ccugggcagauggcaccac

SEQ ID NO: 2102471 - RNA, 19 nt, Artificial Sequence
  Description of Artificial Sequence: Synthetic oligonucleotide
gcacccugugggaaucacu

SEQ ID NO: 2102472 - RNA, 19 nt, Artificial Sequence
  Description of Artificial Sequence: Synthetic oligonucleotide
ccccagcccugcugagaug

SEQ ID NO: 2102473 - RNA, 19 nt, Artificial Sequence
  Description of Artificial Sequence: Synthetic oligonucleotide
caggugcucuaggcacccu

SEQ ID NO: 2102474 - RNA, 19 nt, Artificial Sequence
  Description of Artificial Sequence: Synthetic oligonucleotide
ccccacccauagaaccggu

SEQ ID NO: 2102475 - RNA, 19 nt, Artificial Sequence
  Description of Artificial Sequence: Synthetic oligonucleotide
gccuggcaauaagccagau

SEQ ID NO: 2102476 - RNA, 19 nt, Artificial Sequence
  Description of Artificial Sequence: Synthetic oligonucleotide
gccagccugcuggguugau

SEQ ID NO: 2102477 - RNA, 19 nt, Artificial Sequence
  Description of Artificial Sequence: Synthetic oligonucleotide
uaaaauaaaauaaaauaaa

SEQ ID NO: 2102478 - RNA, 19 nt, Artificial Sequence
  Description of Artificial Sequence: Synthetic oligonucleotide
aagauuuagaacugggccg

SEQ ID NO: 2102479 - RNA, 19 nt, Artificial Sequence
  Description of Artificial Sequence: Synthetic oligonucleotide
aacaaaagucccugggucc

SEQ ID NO: 2102480 - RNA, 19 nt, Artificial Sequence
  Description of Artificial Sequence: Synthetic oligonucleotide
aaaagggagaacaaaaguc

SEQ ID NO: 2102481 - RNA, 19 nt, Artificial Sequence
  Description of Artificial Sequence: Synthetic oligonucleotide
gaagauuuagaacugggcc

SEQ ID NO: 2102482 - RNA, 19 nt, Artificial Sequence
  Description of Artificial Sequence: Synthetic oligonucleotide
ucugguguaguucucaucc

SEQ ID NO: 2102483 - RNA, 19 nt, Artificial Sequence
  Description of Artificial Sequence: Synthetic oligonucleotide
aaauaaaauaaaauaaaau

SEQ ID NO: 2102484 - RNA, 19 nt, Artificial Sequence
  Description of Artificial Sequence: Synthetic oligonucleotide
aaaauaaaauaaaauaaaa

SEQ ID NO: 2102485 - RNA, 19 nt, Artificial Sequence
  Description of Artificial Sequence: Synthetic oligonucleotide
uguugguuuucucauaaug

SEQ ID NO: 2102486 - RNA, 19 nt, Artificial Sequence
  Description of Artificial Sequence: Synthetic oligonucleotide
ugauccaaggagcugcagg

SEQ ID NO: 2102487 - RNA, 19 nt, Artificial Sequence
  Description of Artificial Sequence: Synthetic oligonucleotide
guugguuuucucauaaugg

SEQ ID NO: 2102488 - RNA, 19 nt, Artificial Sequence
  Description of Artificial Sequence: Synthetic oligonucleotide
gacgaugaggccuagacga

SEQ ID NO: 2102489 - RNA, 19 nt, Artificial Sequence
  Description of Artificial Sequence: Synthetic oligonucleotide
agugguccugcaaagaucc

SEQ ID NO: 2102490 - RNA, 19 nt, Artificial Sequence
  Description of Artificial Sequence: Synthetic oligonucleotide
uucguuaucaucuucccau

SEQ ID NO: 2102491 - RNA, 19 nt, Artificial Sequence
  Description of Artificial Sequence: Synthetic oligonucleotide
aacacuggacgccauucgg

SEQ ID NO: 2102492 - RNA, 19 nt, Artificial Sequence
  Description of Artificial Sequence: Synthetic oligonucleotide
uucccauucaugaagcaca

SEQ ID NO: 2102493 - RNA, 19 nt, Artificial Sequence
  Description of Artificial Sequence: Synthetic oligonucleotide
agggugaccaccucaacac

SEQ ID NO: 2102494 - RNA, 19 nt, Artificial Sequence
  Description of Artificial Sequence: Synthetic oligonucleotide
ugugacuccgguuugccag

SEQ ID NO: 2102495 - RNA, 19 nt, Artificial Sequence
  Description of Artificial Sequence: Synthetic oligonucleotide
agauuuagaacugggccgc

SEQ ID NO: 2102496 - RNA, 19 nt, Artificial Sequence
  Description of Artificial Sequence: Synthetic oligonucleotide
aguucguuaucaucuuccc

SEQ ID NO: 2102497 - RNA, 19 nt, Artificial Sequence
  Description of Artificial Sequence: Synthetic oligonucleotide
aagccgguggccuccaggc

SEQ ID NO: 2102498 - RNA, 19 nt, Artificial Sequence
  Description of Artificial Sequence: Synthetic oligonucleotide
gcagcuguaacacuggacg

SEQ ID NO: 2102499 - RNA, 19 nt, Artificial Sequence
  Description of Artificial Sequence: Synthetic oligonucleotide
aaccccucgggcuccaggc

SEQ ID NO: 2102500 - RNA, 19 nt, Artificial Sequence
  Description of Artificial Sequence: Synthetic oligonucleotide
uuugaguucacgcgauagc

SEQ ID NO: 2102501 - RNA, 19 nt, Artificial Sequence
  Description of Artificial Sequence: Synthetic oligonucleotide
agucccgaagauuuagaac

SEQ ID NO: 2102502 - RNA, 19 nt, Artificial Sequence
  Description of Artificial Sequence: Synthetic oligonucleotide
ucucucaucuccaacucca

SEQ ID NO: 2102503 - RNA, 19 nt, Artificial Sequence
  Description of Artificial Sequence: Synthetic oligonucleotide
aaagucccuggguccagcc

SEQ ID NO: 2102504 - RNA, 19 nt, Artificial Sequence
  Description of Artificial Sequence: Synthetic oligonucleotide
aaaggcaaccccucgggcu

SEQ ID NO: 2102505 - RNA, 19 nt, Artificial Sequence
  Description of Artificial Sequence: Synthetic oligonucleotide
ugguuuucucauaaugggc

SEQ ID NO: 2102506 - RNA, 19 nt, Artificial Sequence
  Description of Artificial Sequence: Synthetic oligonucleotide
augcacuccagguaacggc

SEQ ID NO: 2102507 - RNA, 19 nt, Artificial Sequence
  Description of Artificial Sequence: Synthetic oligonucleotide
gaacaaaagucccuggguc

SEQ ID NO: 2102508 - RNA, 19 nt, Artificial Sequence
  Description of Artificial Sequence: Synthetic oligonucleotide
aaggcaaccccucgggcuc

SEQ ID NO: 2102509 - RNA, 19 nt, Artificial Sequence
  Description of Artificial Sequence: Synthetic oligonucleotide
gguuuucucauaaugggcg

SEQ ID NO: 2102510 - RNA, 19 nt, Artificial Sequence
  Description of Artificial Sequence: Synthetic oligonucleotide
ugguaagucccgaagauuu

SEQ ID NO: 2102511 - RNA, 19 nt, Artificial Sequence
  Description of Artificial Sequence: Synthetic oligonucleotide
uaacacuggacgccauucg

SEQ ID NO: 2102512 - RNA, 19 nt, Artificial Sequence
  Description of Artificial Sequence: Synthetic oligonucleotide
uguugcagacgucuguggc

SEQ ID NO: 2102513 - RNA, 19 nt, Artificial Sequence
  Description of Artificial Sequence: Synthetic oligonucleotide
uguucuccgggauagcggc

SEQ ID NO: 2102514 - RNA, 19 nt, Artificial Sequence
  Description of Artificial Sequence: Synthetic oligonucleotide
caguucguuaucaucuucc

SEQ ID NO: 2102515 - RNA, 19 nt, Artificial Sequence
  Description of Artificial Sequence: Synthetic oligonucleotide
aaaccggcuaugcccgggc

SEQ ID NO: 2102516 - RNA, 19 nt, Artificial Sequence
  Description of Artificial Sequence: Synthetic oligonucleotide
ucauaaugggcgcagucuc

SEQ ID NO: 2102517 - RNA, 19 nt, Artificial Sequence
  Description of Artificial Sequence: Synthetic oligonucleotide
ugcacuccagguaacggcc

SEQ ID NO: 2102518 - RNA, 19 nt, Artificial Sequence
  Description of Artificial Sequence: Synthetic oligonucleotide
acgucuguggcacacacga

SEQ ID NO: 2102519 - RNA, 19 nt, Artificial Sequence
  Description of Artificial Sequence: Synthetic oligonucleotide
cucaacacacuguucuccg

SEQ ID NO: 2102520 - RNA, 19 nt, Artificial Sequence
  Description of Artificial Sequence: Synthetic oligonucleotide
caucuucccauucaugaag

SEQ ID NO: 2102521 - RNA, 19 nt, Artificial Sequence
  Description of Artificial Sequence: Synthetic oligonucleotide
uagggugaccaccucaaca

SEQ ID NO: 2102522 - RNA, 19 nt, Artificial Sequence
  Description of Artificial Sequence: Synthetic oligonucleotide
agcuguaacacuggacgcc

SEQ ID NO: 2102523 - RNA, 19 nt, Artificial Sequence
  Description of Artificial Sequence: Synthetic oligonucleotide
ucaggacucagguccagag

SEQ ID NO: 2102524 - RNA, 19 nt, Artificial Sequence
  Description of Artificial Sequence: Synthetic oligonucleotide
ucacagcacgagauguugg

SEQ ID NO: 2102525 - RNA, 19 nt, Artificial Sequence
  Description of Artificial Sequence: Synthetic oligonucleotide
auagcggcauugcaggcuc

SEQ ID NO: 2102526 - RNA, 19 nt, Artificial Sequence
  Description of Artificial Sequence: Synthetic oligonucleotide
ugauccaucgguccccggc

SEQ ID NO: 2102527 - RNA, 19 nt, Artificial Sequence
  Description of Artificial Sequence: Synthetic oligonucleotide
agacgaugaggccuagacg

SEQ ID NO: 2102528 - RNA, 19 nt, Artificial Sequence
  Description of Artificial Sequence: Synthetic oligonucleotide
uucacgcgauagcucaugg

SEQ ID NO: 2102529 - RNA, 19 nt, Artificial Sequence
  Description of Artificial Sequence: Synthetic oligonucleotide
uugaguucacgcgauagcu

SEQ ID NO: 2102530 - RNA, 19 nt, Artificial Sequence
  Description of Artificial Sequence: Synthetic oligonucleotide
ucuuuggaggaacacccgu

SEQ ID NO: 2102531 - RNA, 19 nt, Artificial Sequence
  Description of Artificial Sequence: Synthetic oligonucleotide
aagucccgaagauuuagaa

SEQ ID NO: 2102532 - RNA, 19 nt, Artificial Sequence
  Description of Artificial Sequence: Synthetic oligonucleotide
cugacggucaggagcaggg

SEQ ID NO: 2102533 - RNA, 19 nt, Artificial Sequence
  Description of Artificial Sequence: Synthetic oligonucleotide
ucuguggcacacacgaccu

SEQ ID NO: 2102534 - RNA, 19 nt, Artificial Sequence
  Description of Artificial Sequence: Synthetic oligonucleotide
gaguucacgcgauagcuca

SEQ ID NO: 2102535 - RNA, 19 nt, Artificial Sequence
  Description of Artificial Sequence: Synthetic oligonucleotide
acaugggagccuuggcacc

SEQ ID NO: 2102536 - RNA, 19 nt, Artificial Sequence
  Description of Artificial Sequence: Synthetic oligonucleotide
caacacacuguucuccggg

SEQ ID NO: 2102537 - RNA, 19 nt, Artificial Sequence
  Description of Artificial Sequence: Synthetic oligonucleotide
ucggugguaagucccgaag

SEQ ID NO: 2102538 - RNA, 19 nt, Artificial Sequence
  Description of Artificial Sequence: Synthetic oligonucleotide
gaugaucuuugaguucacg

SEQ ID NO: 2102539 - RNA, 19 nt, Artificial Sequence
  Description of Artificial Sequence: Synthetic oligonucleotide
ccucucacagcucugaucc

SEQ ID NO: 2102540 - RNA, 19 nt, Artificial Sequence
  Description of Artificial Sequence: Synthetic oligonucleotide
ccauucaugaagcacagug

SEQ ID NO: 2102541 - RNA, 19 nt, Artificial Sequence
  Description of Artificial Sequence: Synthetic oligonucleotide
ucaacacacuguucuccgg

SEQ ID NO: 2102542 - RNA, 19 nt, Artificial Sequence
  Description of Artificial Sequence: Synthetic oligonucleotide
uuggaggaacacccguggg

SEQ ID NO: 2102543 - RNA, 19 nt, Artificial Sequence
  Description of Artificial Sequence: Synthetic oligonucleotide
cacagcacgagauguuggg

SEQ ID NO: 2102544 - RNA, 19 nt, Artificial Sequence
  Description of Artificial Sequence: Synthetic oligonucleotide
ucggccaggcugaugaucu

SEQ ID NO: 2102545 - RNA, 19 nt, Artificial Sequence
  Description of Artificial Sequence: Synthetic oligonucleotide
agacgagcagggucugucc

SEQ ID NO: 2102546 - RNA, 19 nt, Artificial Sequence
  Description of Artificial Sequence: Synthetic oligonucleotide
cucugauccaaggagcugc

SEQ ID NO: 2102547 - RNA, 19 nt, Artificial Sequence
  Description of Artificial Sequence: Synthetic oligonucleotide
uccccggcagucaacgagg

SEQ ID NO: 2102548 - RNA, 19 nt, Artificial Sequence
  Description of Artificial Sequence: Synthetic oligonucleotide
guuuucucauaaugggcgc

SEQ ID NO: 2102549 - RNA, 19 nt, Artificial Sequence
  Description of Artificial Sequence: Synthetic oligonucleotide
cuuuccgugcuccguaggg

SEQ ID NO: 2102550 - RNA, 19 nt, Artificial Sequence
  Description of Artificial Sequence: Synthetic oligonucleotide
cuuugaguucacgcgauag

SEQ ID NO: 2102551 - RNA, 19 nt, Artificial Sequence
  Description of Artificial Sequence: Synthetic oligonucleotide
cacgcgauagcucaugguc

SEQ ID NO: 2102552 - RNA, 19 nt, Artificial Sequence
  Description of Artificial Sequence: Synthetic oligonucleotide
uuucucauaaugggcgcag

SEQ ID NO: 2102553 - RNA, 19 nt, Artificial Sequence
  Description of Artificial Sequence: Synthetic oligonucleotide
ugaggccuagacgagcagg

SEQ ID NO: 2102554 - RNA, 19 nt, Artificial Sequence
  Description of Artificial Sequence: Synthetic oligonucleotide
uaagucccgaagauuuaga

SEQ ID NO: 2102555 - RNA, 19 nt, Artificial Sequence
  Description of Artificial Sequence: Synthetic oligonucleotide
uggaggaacacccgugggu

SEQ ID NO: 2102556 - RNA, 19 nt, Artificial Sequence
  Description of Artificial Sequence: Synthetic oligonucleotide
guaguucucauccuucaga

SEQ ID NO: 2102557 - RNA, 19 nt, Artificial Sequence
  Description of Artificial Sequence: Synthetic oligonucleotide
cacaugggagccuuggcac

SEQ ID NO: 2102558 - RNA, 19 nt, Artificial Sequence
  Description of Artificial Sequence: Synthetic oligonucleotide
cuuuggaggaacacccgug

SEQ ID NO: 2102559 - RNA, 19 nt, Artificial Sequence
  Description of Artificial Sequence: Synthetic oligonucleotide
aagacugccacagccucug

SEQ ID NO: 2102560 - RNA, 19 nt, Artificial Sequence
  Description of Artificial Sequence: Synthetic oligonucleotide
cauucggugguaagucccg

SEQ ID NO: 2102561 - RNA, 19 nt, Artificial Sequence
  Description of Artificial Sequence: Synthetic oligonucleotide
ucucauaaugggcgcaguc

SEQ ID NO: 2102562 - RNA, 19 nt, Artificial Sequence
  Description of Artificial Sequence: Synthetic oligonucleotide
uucagacuccuuuccgugc

SEQ ID NO: 2102563 - RNA, 19 nt, Artificial Sequence
  Description of Artificial Sequence: Synthetic oligonucleotide
gaagccgucgagcagccuc

SEQ ID NO: 2102564 - RNA, 19 nt, Artificial Sequence
  Description of Artificial Sequence: Synthetic oligonucleotide
gacggucaggagcagggag

SEQ ID NO: 2102565 - RNA, 19 nt, Artificial Sequence
  Description of Artificial Sequence: Synthetic oligonucleotide
guaagucccgaagauuuag

SEQ ID NO: 2102566 - RNA, 19 nt, Artificial Sequence
  Description of Artificial Sequence: Synthetic oligonucleotide
gaggccuagacgagcaggg

SEQ ID NO: 2102567 - RNA, 19 nt, Artificial Sequence
  Description of Artificial Sequence: Synthetic oligonucleotide
acgcgauagcucauggucc

SEQ ID NO: 2102568 - RNA, 19 nt, Artificial Sequence
  Description of Artificial Sequence: Synthetic oligonucleotide
ggaaaggcaaccccucggg

SEQ ID NO: 2102569 - RNA, 19 nt, Artificial Sequence
  Description of Artificial Sequence: Synthetic oligonucleotide
aggccccauagccugacgg

SEQ ID NO: 2102570 - RNA, 19 nt, Artificial Sequence
  Description of Artificial Sequence: Synthetic oligonucleotide
auaaugggcgcagucucuc

SEQ ID NO: 2102571 - RNA, 19 nt, Artificial Sequence
  Description of Artificial Sequence: Synthetic oligonucleotide
uggggcucaggacucaggu

SEQ ID NO: 2102572 - RNA, 19 nt, Artificial Sequence
  Description of Artificial Sequence: Synthetic oligonucleotide
uuuucucauaaugggcgca

SEQ ID NO: 2102573 - RNA, 19 nt, Artificial Sequence
  Description of Artificial Sequence: Synthetic oligonucleotide
ucccgaagauuuagaacug

SEQ ID NO: 2102574 - RNA, 19 nt, Artificial Sequence
  Description of Artificial Sequence: Synthetic oligonucleotide
accaccucaacacacuguu

SEQ ID NO: 2102575 - RNA, 19 nt, Artificial Sequence
  Description of Artificial Sequence: Synthetic oligonucleotide
ugcagcaucucaggaagug

SEQ ID NO: 2102576 - RNA, 19 nt, Artificial Sequence
  Description of Artificial Sequence: Synthetic oligonucleotide
cucuuuggaggaacacccg

SEQ ID NO: 2102577 - RNA, 19 nt, Artificial Sequence
  Description of Artificial Sequence: Synthetic oligonucleotide
agcacgagauguuggggug

SEQ ID NO: 2102578 - RNA, 19 nt, Artificial Sequence
  Description of Artificial Sequence: Synthetic oligonucleotide
ucugauccaaggagcugca

SEQ ID NO: 2102579 - RNA, 19 nt, Artificial Sequence
  Description of Artificial Sequence: Synthetic oligonucleotide
cauccuucagacuccuuuc

SEQ ID NO: 2102580 - RNA, 19 nt, Artificial Sequence
  Description of Artificial Sequence: Synthetic oligonucleotide
agucucuuuggaggaacac

SEQ ID NO: 2102581 - RNA, 19 nt, Artificial Sequence
  Description of Artificial Sequence: Synthetic oligonucleotide
gucgagcagccucucacgg

SEQ ID NO: 2102582 - RNA, 19 nt, Artificial Sequence
  Description of Artificial Sequence: Synthetic oligonucleotide
cucgcagcuguaacacugg

SEQ ID NO: 2102583 - RNA, 19 nt, Artificial Sequence
  Description of Artificial Sequence: Synthetic oligonucleotide
cuucccauucaugaagcac

SEQ ID NO: 2102584 - RNA, 19 nt, Artificial Sequence
  Description of Artificial Sequence: Synthetic oligonucleotide
cagcuguaacacuggacgc

SEQ ID NO: 2102585 - RNA, 19 nt, Artificial Sequence
  Description of Artificial Sequence: Synthetic oligonucleotide
acagccgcugccaucacag

SEQ ID NO: 2102586 - RNA, 19 nt, Artificial Sequence
  Description of Artificial Sequence: Synthetic oligonucleotide
ugggcgcagucucucaucu

SEQ ID NO: 2102587 - RNA, 19 nt, Artificial Sequence
  Description of Artificial Sequence: Synthetic oligonucleotide
cuguugcagacgucugugg

SEQ ID NO: 2102588 - RNA, 19 nt, Artificial Sequence
  Description of Artificial Sequence: Synthetic oligonucleotide
guccauuacagccgcugcc

SEQ ID NO: 2102589 - RNA, 19 nt, Artificial Sequence
  Description of Artificial Sequence: Synthetic oligonucleotide
acaugcacuccagguaacg

SEQ ID NO: 2102590 - RNA, 19 nt, Artificial Sequence
  Description of Artificial Sequence: Synthetic oligonucleotide
ugggccgccauugcagugg

SEQ ID NO: 2102591 - RNA, 19 nt, Artificial Sequence
  Description of Artificial Sequence: Synthetic oligonucleotide
gacgccauucggugguaag

SEQ ID NO: 2102592 - RNA, 19 nt, Artificial Sequence
  Description of Artificial Sequence: Synthetic oligonucleotide
ggcgcagucucucaucucc

SEQ ID NO: 2102593 - RNA, 19 nt, Artificial Sequence
  Description of Artificial Sequence: Synthetic oligonucleotide
acuccgguuugccagcaca

SEQ ID NO: 2102594 - RNA, 19 nt, Artificial Sequence
  Description of Artificial Sequence: Synthetic oligonucleotide
ugguguaguucucauccuu

SEQ ID NO: 2102595 - RNA, 19 nt, Artificial Sequence
  Description of Artificial Sequence: Synthetic oligonucleotide
gacuccuuuccgugcuccg

SEQ ID NO: 2102596 - RNA, 19 nt, Artificial Sequence
  Description of Artificial Sequence: Synthetic oligonucleotide
gaugaggccuagacgagca

SEQ ID NO: 2102597 - RNA, 19 nt, Artificial Sequence
  Description of Artificial Sequence: Synthetic oligonucleotide
uugcagacgucuguggcac

SEQ ID NO: 2102598 - RNA, 19 nt, Artificial Sequence
  Description of Artificial Sequence: Synthetic oligonucleotide
acagcacgagauguugggg

SEQ ID NO: 2102599 - RNA, 19 nt, Artificial Sequence
  Description of Artificial Sequence: Synthetic oligonucleotide
ccgaagauuuagaacuggg

SEQ ID NO: 2102600 - RNA, 19 nt, Artificial Sequence
  Description of Artificial Sequence: Synthetic oligonucleotide
ugcaccgcaggcccgggga

SEQ ID NO: 2102601 - RNA, 19 nt, Artificial Sequence
  Description of Artificial Sequence: Synthetic oligonucleotide
accggcuaugcccgggcac

SEQ ID NO: 2102602 - RNA, 19 nt, Artificial Sequence
  Description of Artificial Sequence: Synthetic oligonucleotide
ugguugccauggaaaccgg

SEQ ID NO: 2102603 - RNA, 19 nt, Artificial Sequence
  Description of Artificial Sequence: Synthetic oligonucleotide
gucucucaucuccaacucc

SEQ ID NO: 2102604 - RNA, 19 nt, Artificial Sequence
  Description of Artificial Sequence: Synthetic oligonucleotide
gauccaucgguccccggca

SEQ ID NO: 2102605 - RNA, 19 nt, Artificial Sequence
  Description of Artificial Sequence: Synthetic oligonucleotide
gggaaaggcaaccccucgg

SEQ ID NO: 2102606 - RNA, 19 nt, Artificial Sequence
  Description of Artificial Sequence: Synthetic oligonucleotide
ggcacugauccaucggucc

SEQ ID NO: 2102607 - RNA, 19 nt, Artificial Sequence
  Description of Artificial Sequence: Synthetic oligonucleotide
gaaaccggcuaugcccggg

SEQ ID NO: 2102608 - RNA, 19 nt, Artificial Sequence
  Description of Artificial Sequence: Synthetic oligonucleotide
uccuuuccgugcuccguag

SEQ ID NO: 2102609 - RNA, 19 nt, Artificial Sequence
  Description of Artificial Sequence: Synthetic oligonucleotide
ucucacggugugacuccgg

SEQ ID NO: 2102610 - RNA, 19 nt, Artificial Sequence
  Description of Artificial Sequence: Synthetic oligonucleotide
augggcgcagucucucauc

SEQ ID NO: 2102611 - RNA, 19 nt, Artificial Sequence
  Description of Artificial Sequence: Synthetic oligonucleotide
cgaagauuuagaacugggc

SEQ ID NO: 2102612 - RNA, 19 nt, Artificial Sequence
  Description of Artificial Sequence: Synthetic oligonucleotide
guccccggcagucaacgag

SEQ ID NO: 2102613 - RNA, 19 nt, Artificial Sequence
  Description of Artificial Sequence: Synthetic oligonucleotide
cuuggcaccaggaagccgu

SEQ ID NO: 2102614 - RNA, 19 nt, Artificial Sequence
  Description of Artificial Sequence: Synthetic oligonucleotide
aagucccuggguccagcca

SEQ ID NO: 2102615 - RNA, 19 nt, Artificial Sequence
  Description of Artificial Sequence: Synthetic oligonucleotide
agccgcugccaucacagca

SEQ ID NO: 2102616 - RNA, 19 nt, Artificial Sequence
  Description of Artificial Sequence: Synthetic oligonucleotide
cacgaccucggccaggcug

SEQ ID NO: 2102617 - RNA, 19 nt, Artificial Sequence
  Description of Artificial Sequence: Synthetic oligonucleotide
aguucuggcuguccucaca

SEQ ID NO: 2102618 - RNA, 19 nt, Artificial Sequence
  Description of Artificial Sequence: Synthetic oligonucleotide
ugaugaucuuugaguucac

SEQ ID NO: 2102619 - RNA, 19 nt, Artificial Sequence
  Description of Artificial Sequence: Synthetic oligonucleotide
uccagguaacggccccggg

SEQ ID NO: 2102620 - RNA, 19 nt, Artificial Sequence
  Description of Artificial Sequence: Synthetic oligonucleotide
ccucacacugcaugcaccg

SEQ ID NO: 2102621 - RNA, 19 nt, Artificial Sequence
  Description of Artificial Sequence: Synthetic oligonucleotide
gggagaacaaaagucccug

SEQ ID NO: 2102622 - RNA, 19 nt, Artificial Sequence
  Description of Artificial Sequence: Synthetic oligonucleotide
aagcacagugguccugcaa

SEQ ID NO: 2102623 - RNA, 19 nt, Artificial Sequence
  Description of Artificial Sequence: Synthetic oligonucleotide
uaaugggcgcagucucuca

SEQ ID NO: 2102624 - RNA, 19 nt, Artificial Sequence
  Description of Artificial Sequence: Synthetic oligonucleotide
ucuuugaguucacgcgaua

SEQ ID NO: 2102625 - RNA, 19 nt, Artificial Sequence
  Description of Artificial Sequence: Synthetic oligonucleotide
ucaacgagggaagucucuu

SEQ ID NO: 2102626 - RNA, 19 nt, Artificial Sequence
  Description of Artificial Sequence: Synthetic oligonucleotide
uagacgagcagggucuguc

SEQ ID NO: 2102627 - RNA, 19 nt, Artificial Sequence
  Description of Artificial Sequence: Synthetic oligonucleotide
ccauucggugguaaguccc

SEQ ID NO: 2102628 - RNA, 19 nt, Artificial Sequence
  Description of Artificial Sequence: Synthetic oligonucleotide
ucacgcgauagcucauggu

SEQ ID NO: 2102629 - RNA, 19 nt, Artificial Sequence
  Description of Artificial Sequence: Synthetic oligonucleotide
uacagccgcugccaucaca

SEQ ID NO: 2102630 - RNA, 19 nt, Artificial Sequence
  Description of Artificial Sequence: Synthetic oligonucleotide
acugauccaucgguccccg

SEQ ID NO: 2102631 - RNA, 19 nt, Artificial Sequence
  Description of Artificial Sequence: Synthetic oligonucleotide
cauagccugacggucagga

SEQ ID NO: 2102632 - RNA, 19 nt, Artificial Sequence
  Description of Artificial Sequence: Synthetic oligonucleotide
gacgucuguggcacacacg

SEQ ID NO: 2102633 - RNA, 19 nt, Artificial Sequence
  Description of Artificial Sequence: Synthetic oligonucleotide
uugcccucgcagcuguaac

SEQ ID NO: 2102634 - RNA, 19 nt, Artificial Sequence
  Description of Artificial Sequence: Synthetic oligonucleotide
guaacggccccggggaaag

SEQ ID NO: 2102635 - RNA, 19 nt, Artificial Sequence
  Description of Artificial Sequence: Synthetic oligonucleotide
ggacaugcacuccagguaa

SEQ ID NO: 2102636 - RNA, 19 nt, Artificial Sequence
  Description of Artificial Sequence: Synthetic oligonucleotide
caccucaacacacuguucu

SEQ ID NO: 2102637 - RNA, 19 nt, Artificial Sequence
  Description of Artificial Sequence: Synthetic oligonucleotide
cauuacagccgcugccauc

SEQ ID NO: 2102638 - RNA, 19 nt, Artificial Sequence
  Description of Artificial Sequence: Synthetic oligonucleotide
auguugggguggcucagga

SEQ ID NO: 2102639 - RNA, 19 nt, Artificial Sequence
  Description of Artificial Sequence: Synthetic oligonucleotide
acgagcagggucuguccug

SEQ ID NO: 2102640 - RNA, 19 nt, Artificial Sequence
  Description of Artificial Sequence: Synthetic oligonucleotide
cucaggaaguggaaggugu

SEQ ID NO: 2102641 - RNA, 19 nt, Artificial Sequence
  Description of Artificial Sequence: Synthetic oligonucleotide
gauuuagaacugggccgcc

SEQ ID NO: 2102642 - RNA, 19 nt, Artificial Sequence
  Description of Artificial Sequence: Synthetic oligonucleotide
ucguuaucaucuucccauu

SEQ ID NO: 2102643 - RNA, 19 nt, Artificial Sequence
  Description of Artificial Sequence: Synthetic oligonucleotide
uccgugcuccguaggguga

SEQ ID NO: 2102644 - RNA, 19 nt, Artificial Sequence
  Description of Artificial Sequence: Synthetic oligonucleotide
ugcaaagauccuggcccag

SEQ ID NO: 2102645 - RNA, 19 nt, Artificial Sequence
  Description of Artificial Sequence: Synthetic oligonucleotide
gcacacacgaccucggcca

SEQ ID NO: 2102646 - RNA, 19 nt, Artificial Sequence
  Description of Artificial Sequence: Synthetic oligonucleotide
agggagaacaaaagucccu

SEQ ID NO: 2102647 - RNA, 19 nt, Artificial Sequence
  Description of Artificial Sequence: Synthetic oligonucleotide
uccgggauagcggcauugc

SEQ ID NO: 2102648 - RNA, 19 nt, Artificial Sequence
  Description of Artificial Sequence: Synthetic oligonucleotide
uucggugguaagucccgaa

SEQ ID NO: 2102649 - RNA, 19 nt, Artificial Sequence
  Description of Artificial Sequence: Synthetic oligonucleotide
gugacuccgguuugccagc

SEQ ID NO: 2102650 - RNA, 19 nt, Artificial Sequence
  Description of Artificial Sequence: Synthetic oligonucleotide
ggcaucugccacaugggag

SEQ ID NO: 2102651 - RNA, 19 nt, Artificial Sequence
  Description of Artificial Sequence: Synthetic oligonucleotide
uggcacacacgaccucggc

SEQ ID NO: 2102652 - RNA, 19 nt, Artificial Sequence
  Description of Artificial Sequence: Synthetic oligonucleotide
ggggaaaggcaaccccucg

SEQ ID NO: 2102653 - RNA, 19 nt, Artificial Sequence
  Description of Artificial Sequence: Synthetic oligonucleotide
cagguaacggccccgggga

SEQ ID NO: 2102654 - RNA, 19 nt, Artificial Sequence
  Description of Artificial Sequence: Synthetic oligonucleotide
ucgagcagccucucacggu

SEQ ID NO: 2102655 - RNA, 19 nt, Artificial Sequence
  Description of Artificial Sequence: Synthetic oligonucleotide
agcucugauccaaggagcu

SEQ ID NO: 2102656 - RNA, 19 nt, Artificial Sequence
  Description of Artificial Sequence: Synthetic oligonucleotide
cacugauccaucggucccc

SEQ ID NO: 2102657 - RNA, 19 nt, Artificial Sequence
  Description of Artificial Sequence: Synthetic oligonucleotide
cucugguguaguucucauc

SEQ ID NO: 2102658 - RNA, 19 nt, Artificial Sequence
  Description of Artificial Sequence: Synthetic oligonucleotide
gguccauuacagccgcugc

SEQ ID NO: 2102659 - RNA, 19 nt, Artificial Sequence
  Description of Artificial Sequence: Synthetic oligonucleotide
cacacgaccucggccaggc

SEQ ID NO: 2102660 - RNA, 19 nt, Artificial Sequence
  Description of Artificial Sequence: Synthetic oligonucleotide
ccgguuugccagcacaucc

SEQ ID NO: 2102661 - RNA, 19 nt, Artificial Sequence
  Description of Artificial Sequence: Synthetic oligonucleotide
cacagcucugauccaagga

SEQ ID NO: 2102662 - RNA, 19 nt, Artificial Sequence
  Description of Artificial Sequence: Synthetic oligonucleotide
uaugcccgggcacccggga

SEQ ID NO: 2102663 - RNA, 19 nt, Artificial Sequence
  Description of Artificial Sequence: Synthetic oligonucleotide
ggcacacacgaccucggcc

SEQ ID NO: 2102664 - RNA, 19 nt, Artificial Sequence
  Description of Artificial Sequence: Synthetic oligonucleotide
augaggccuagacgagcag

SEQ ID NO: 2102665 - RNA, 19 nt, Artificial Sequence
  Description of Artificial Sequence: Synthetic oligonucleotide
cacuccagguaacggcccc

SEQ ID NO: 2102666 - RNA, 19 nt, Artificial Sequence
  Description of Artificial Sequence: Synthetic oligonucleotide
ccucgcagcuguaacacug

SEQ ID NO: 2102667 - RNA, 19 nt, Artificial Sequence
  Description of Artificial Sequence: Synthetic oligonucleotide
auccaucgguccccggcag

SEQ ID NO: 2102668 - RNA, 19 nt, Artificial Sequence
  Description of Artificial Sequence: Synthetic oligonucleotide
ccagguaacggccccgggg

SEQ ID NO: 2102669 - RNA, 19 nt, Artificial Sequence
  Description of Artificial Sequence: Synthetic oligonucleotide
gcagcaucucaggaagugg

SEQ ID NO: 2102670 - RNA, 19 nt, Artificial Sequence
  Description of Artificial Sequence: Synthetic oligonucleotide
cacccgggaagacugccac

SEQ ID NO: 2102671 - RNA, 19 nt, Artificial Sequence
  Description of Artificial Sequence: Synthetic oligonucleotide
uccuguugguuuucucaua

SEQ ID NO: 2102672 - RNA, 19 nt, Artificial Sequence
  Description of Artificial Sequence: Synthetic oligonucleotide
cuaugcccgggcacccggg

SEQ ID NO: 2102673 - RNA, 19 nt, Artificial Sequence
  Description of Artificial Sequence: Synthetic oligonucleotide
acggugugacuccgguuug

SEQ ID NO: 2102674 - RNA, 19 nt, Artificial Sequence
  Description of Artificial Sequence: Synthetic oligonucleotide
uucucauaaugggcgcagu

SEQ ID NO: 2102675 - RNA, 19 nt, Artificial Sequence
  Description of Artificial Sequence: Synthetic oligonucleotide
aagccgucgagcagccucu

SEQ ID NO: 2102676 - RNA, 19 nt, Artificial Sequence
  Description of Artificial Sequence: Synthetic oligonucleotide
guucacgcgauagcucaug

SEQ ID NO: 2102677 - RNA, 19 nt, Artificial Sequence
  Description of Artificial Sequence: Synthetic oligonucleotide
gugggugcuguugcccucg

SEQ ID NO: 2102678 - RNA, 19 nt, Artificial Sequence
  Description of Artificial Sequence: Synthetic oligonucleotide
ggugaccaccucaacacac

SEQ ID NO: 2102679 - RNA, 19 nt, Artificial Sequence
  Description of Artificial Sequence: Synthetic oligonucleotide
cacgagauguugggguggc

SEQ ID NO: 2102680 - RNA, 19 nt, Artificial Sequence
  Description of Artificial Sequence: Synthetic oligonucleotide
gauagcggcauugcaggcu

SEQ ID NO: 2102681 - RNA, 19 nt, Artificial Sequence
  Description of Artificial Sequence: Synthetic oligonucleotide
gguguaguucucauccuuc

SEQ ID NO: 2102682 - RNA, 19 nt, Artificial Sequence
  Description of Artificial Sequence: Synthetic oligonucleotide
acucagguccagaggagga

SEQ ID NO: 2102683 - RNA, 19 nt, Artificial Sequence
  Description of Artificial Sequence: Synthetic oligonucleotide
uucuccgggauagcggcau

SEQ ID NO: 2102684 - RNA, 19 nt, Artificial Sequence
  Description of Artificial Sequence: Synthetic oligonucleotide
cucucacggugugacuccg

SEQ ID NO: 2102685 - RNA, 19 nt, Artificial Sequence
  Description of Artificial Sequence: Synthetic oligonucleotide
acgccauucggugguaagu

SEQ ID NO: 2102686 - RNA, 19 nt, Artificial Sequence
  Description of Artificial Sequence: Synthetic oligonucleotide
uccaucgguccccggcagu

SEQ ID NO: 2102687 - RNA, 19 nt, Artificial Sequence
  Description of Artificial Sequence: Synthetic oligonucleotide
cagccucucacggugugac

SEQ ID NO: 2102688 - RNA, 19 nt, Artificial Sequence
  Description of Artificial Sequence: Synthetic oligonucleotide
guccugcaaagauccuggc

SEQ ID NO: 2102689 - RNA, 19 nt, Artificial Sequence
  Description of Artificial Sequence: Synthetic oligonucleotide
aucuuugaguucacgcgau

SEQ ID NO: 2102690 - RNA, 19 nt, Artificial Sequence
  Description of Artificial Sequence: Synthetic oligonucleotide
gccaucacagcacgagaug

SEQ ID NO: 2102691 - RNA, 19 nt, Artificial Sequence
  Description of Artificial Sequence: Synthetic oligonucleotide
ugcuccguagggugaccac

SEQ ID NO: 2102692 - RNA, 19 nt, Artificial Sequence
  Description of Artificial Sequence: Synthetic oligonucleotide
gccauucggugguaagucc

SEQ ID NO: 2102693 - RNA, 19 nt, Artificial Sequence
  Description of Artificial Sequence: Synthetic oligonucleotide
acggucaggagcagggaga

SEQ ID NO: 2102694 - RNA, 19 nt, Artificial Sequence
  Description of Artificial Sequence: Synthetic oligonucleotide
ggcauugcaggcucugcuc

SEQ ID NO: 2102695 - RNA, 19 nt, Artificial Sequence
  Description of Artificial Sequence: Synthetic oligonucleotide
gaggccccauagccugacg

SEQ ID NO: 2102696 - RNA, 19 nt, Artificial Sequence
  Description of Artificial Sequence: Synthetic oligonucleotide
gacaugcacuccagguaac

SEQ ID NO: 2102697 - RNA, 19 nt, Artificial Sequence
  Description of Artificial Sequence: Synthetic oligonucleotide
cgggaagacugccacagcc

SEQ ID NO: 2102698 - RNA, 19 nt, Artificial Sequence
  Description of Artificial Sequence: Synthetic oligonucleotide
guggcacacacgaccucgg

SEQ ID NO: 2102699 - RNA, 19 nt, Artificial Sequence
  Description of Artificial Sequence: Synthetic oligonucleotide
acgaugaggccuagacgag

SEQ ID NO: 2102700 - RNA, 19 nt, Artificial Sequence
  Description of Artificial Sequence: Synthetic oligonucleotide
cuccagguaacggccccgg

SEQ ID NO: 2102701 - RNA, 19 nt, Artificial Sequence
  Description of Artificial Sequence: Synthetic oligonucleotide
guagggugaccaccucaac

SEQ ID NO: 2102702 - RNA, 19 nt, Artificial Sequence
  Description of Artificial Sequence: Synthetic oligonucleotide
cauccaagccgguggccuc

SEQ ID NO: 2102703 - RNA, 19 nt, Artificial Sequence
  Description of Artificial Sequence: Synthetic oligonucleotide
gcuaugcccgggcacccgg

SEQ ID NO: 2102704 - RNA, 19 nt, Artificial Sequence
  Description of Artificial Sequence: Synthetic oligonucleotide
acacccgugggugcuguug

SEQ ID NO: 2102705 - RNA, 19 nt, Artificial Sequence
  Description of Artificial Sequence: Synthetic oligonucleotide
augaagcacagugguccug

SEQ ID NO: 2102706 - RNA, 19 nt, Artificial Sequence
  Description of Artificial Sequence: Synthetic oligonucleotide
caaaagucccuggguccag

SEQ ID NO: 2102707 - RNA, 19 nt, Artificial Sequence
  Description of Artificial Sequence: Synthetic oligonucleotide
cuggcccagggcacacucc

SEQ ID NO: 2102708 - RNA, 19 nt, Artificial Sequence
  Description of Artificial Sequence: Synthetic oligonucleotide
cagucaacgagggaagucu

SEQ ID NO: 2102709 - RNA, 19 nt, Artificial Sequence
  Description of Artificial Sequence: Synthetic oligonucleotide
gccgccauugcagugggug

SEQ ID NO: 2102710 - RNA, 19 nt, Artificial Sequence
  Description of Artificial Sequence: Synthetic oligonucleotide
gagcagggucuguccuggg

SEQ ID NO: 2102711 - RNA, 19 nt, Artificial Sequence
  Description of Artificial Sequence: Synthetic oligonucleotide
acuccuuuccgugcuccgu

SEQ ID NO: 2102712 - RNA, 19 nt, Artificial Sequence
  Description of Artificial Sequence: Synthetic oligonucleotide
cacacacgaccucggccag

SEQ ID NO: 2102713 - RNA, 19 nt, Artificial Sequence
  Description of Artificial Sequence: Synthetic oligonucleotide
ggccuagacgagcaggguc

SEQ ID NO: 2102714 - RNA, 19 nt, Artificial Sequence
  Description of Artificial Sequence: Synthetic oligonucleotide
aucuccaacuccaguucgu

SEQ ID NO: 2102715 - RNA, 19 nt, Artificial Sequence
  Description of Artificial Sequence: Synthetic oligonucleotide
gacgagcagggucuguccu

SEQ ID NO: 2102716 - RNA, 19 nt, Artificial Sequence
  Description of Artificial Sequence: Synthetic oligonucleotide
cuuggggcucaggacucag

SEQ ID NO: 2102717 - RNA, 19 nt, Artificial Sequence
  Description of Artificial Sequence: Synthetic oligonucleotide
acgaccucggccaggcuga

SEQ ID NO: 2102718 - RNA, 19 nt, Artificial Sequence
  Description of Artificial Sequence: Synthetic oligonucleotide
cauaaugggcgcagucucu

SEQ ID NO: 2102719 - RNA, 19 nt, Artificial Sequence
  Description of Artificial Sequence: Synthetic oligonucleotide
gcacauccaagccgguggc

SEQ ID NO: 2102720 - RNA, 19 nt, Artificial Sequence
  Description of Artificial Sequence: Synthetic oligonucleotide
aggcaaccccucgggcucc

SEQ ID NO: 2102721 - RNA, 19 nt, Artificial Sequence
  Description of Artificial Sequence: Synthetic oligonucleotide
uccgguuugccagcacauc

SEQ ID NO: 2102722 - RNA, 19 nt, Artificial Sequence
  Description of Artificial Sequence: Synthetic oligonucleotide
cagcacgagauguuggggu

SEQ ID NO: 2102723 - RNA, 19 nt, Artificial Sequence
  Description of Artificial Sequence: Synthetic oligonucleotide
gugugacuccgguuugcca

SEQ ID NO: 2102724 - RNA, 19 nt, Artificial Sequence
  Description of Artificial Sequence: Synthetic oligonucleotide
cacauccaagccgguggcc

SEQ ID NO: 2102725 - RNA, 19 nt, Artificial Sequence
  Description of Artificial Sequence: Synthetic oligonucleotide
guccuguugguuuucucau

SEQ ID NO: 2102726 - RNA, 19 nt, Artificial Sequence
  Description of Artificial Sequence: Synthetic oligonucleotide
uccguagggugaccaccuc

SEQ ID NO: 2102727 - RNA, 19 nt, Artificial Sequence
  Description of Artificial Sequence: Synthetic oligonucleotide
ucacggugugacuccgguu

SEQ ID NO: 2102728 - RNA, 19 nt, Artificial Sequence
  Description of Artificial Sequence: Synthetic oligonucleotide
cacggugugacuccgguuu

SEQ ID NO: 2102729 - RNA, 19 nt, Artificial Sequence
  Description of Artificial Sequence: Synthetic oligonucleotide
auucggugguaagucccga

SEQ ID NO: 2102730 - RNA, 19 nt, Artificial Sequence
  Description of Artificial Sequence: Synthetic oligonucleotide
ccuguugguuuucucauaa

SEQ ID NO: 2102731 - RNA, 19 nt, Artificial Sequence
  Description of Artificial Sequence: Synthetic oligonucleotide
gcacgagauguuggggugg

SEQ ID NO: 2102732 - RNA, 19 nt, Artificial Sequence
  Description of Artificial Sequence: Synthetic oligonucleotide
caggcacugauccaucggu

SEQ ID NO: 2102733 - RNA, 19 nt, Artificial Sequence
  Description of Artificial Sequence: Synthetic oligonucleotide
ccuguugcagacgucugug

SEQ ID NO: 2102734 - RNA, 19 nt, Artificial Sequence
  Description of Artificial Sequence: Synthetic oligonucleotide
agcaucucaggaaguggaa

SEQ ID NO: 2102735 - RNA, 19 nt, Artificial Sequence
  Description of Artificial Sequence: Synthetic oligonucleotide
acacacgaccucggccagg

SEQ ID NO: 2102736 - RNA, 19 nt, Artificial Sequence
  Description of Artificial Sequence: Synthetic oligonucleotide
cuccgggauagcggcauug

SEQ ID NO: 2102737 - RNA, 19 nt, Artificial Sequence
  Description of Artificial Sequence: Synthetic oligonucleotide
agcggcauugcaggcucug

SEQ ID NO: 2102738 - RNA, 19 nt, Artificial Sequence
  Description of Artificial Sequence: Synthetic oligonucleotide
ugacuccgguuugccagca

SEQ ID NO: 2102739 - RNA, 19 nt, Artificial Sequence
  Description of Artificial Sequence: Synthetic oligonucleotide
ccucucacggugugacucc

SEQ ID NO: 2102740 - RNA, 19 nt, Artificial Sequence
  Description of Artificial Sequence: Synthetic oligonucleotide
cugauccaucgguccccgg

SEQ ID NO: 2102741 - RNA, 19 nt, Artificial Sequence
  Description of Artificial Sequence: Synthetic oligonucleotide
cugauccaaggagcugcag

SEQ ID NO: 2102742 - RNA, 19 nt, Artificial Sequence
  Description of Artificial Sequence: Synthetic oligonucleotide
cccgggaagacugccacag

SEQ ID NO: 2102743 - RNA, 19 nt, Artificial Sequence
  Description of Artificial Sequence: Synthetic oligonucleotide
ugcagacgucuguggcaca

SEQ ID NO: 2102744 - RNA, 19 nt, Artificial Sequence
  Description of Artificial Sequence: Synthetic oligonucleotide
uuacagccgcugccaucac

SEQ ID NO: 2102745 - RNA, 19 nt, Artificial Sequence
  Description of Artificial Sequence: Synthetic oligonucleotide
gcagggagacgaugaggcc

SEQ ID NO: 2102746 - RNA, 19 nt, Artificial Sequence
  Description of Artificial Sequence: Synthetic oligonucleotide
gcuccguagggugaccacc

SEQ ID NO: 2102747 - RNA, 19 nt, Artificial Sequence
  Description of Artificial Sequence: Synthetic oligonucleotide
caugaagcacagugguccu

SEQ ID NO: 2102748 - RNA, 19 nt, Artificial Sequence
  Description of Artificial Sequence: Synthetic oligonucleotide
gggcacacuccuucaccag

SEQ ID NO: 2102749 - RNA, 19 nt, Artificial Sequence
  Description of Artificial Sequence: Synthetic oligonucleotide
ccgccauugcagugggugg

SEQ ID NO: 2102750 - RNA, 19 nt, Artificial Sequence
  Description of Artificial Sequence: Synthetic oligonucleotide
uccagaggaggaggcccca

SEQ ID NO: 2102751 - RNA, 19 nt, Artificial Sequence
  Description of Artificial Sequence: Synthetic oligonucleotide
gguuugccagcacauccaa

SEQ ID NO: 2102752 - RNA, 19 nt, Artificial Sequence
  Description of Artificial Sequence: Synthetic oligonucleotide
uaacggccccggggaaagg

SEQ ID NO: 2102753 - RNA, 19 nt, Artificial Sequence
  Description of Artificial Sequence: Synthetic oligonucleotide
cugggccgccauugcagug

SEQ ID NO: 2102754 - RNA, 19 nt, Artificial Sequence
  Description of Artificial Sequence: Synthetic oligonucleotide
acccgggaagacugccaca

SEQ ID NO: 2102755 - RNA, 19 nt, Artificial Sequence
  Description of Artificial Sequence: Synthetic oligonucleotide
ccgucgagcagccucucac

SEQ ID NO: 2102756 - RNA, 19 nt, Artificial Sequence
  Description of Artificial Sequence: Synthetic oligonucleotide
cagggagacgaugaggccu

SEQ ID NO: 2102757 - RNA, 19 nt, Artificial Sequence
  Description of Artificial Sequence: Synthetic oligonucleotide
gauagcucaugguccuguu

SEQ ID NO: 2102758 - RNA, 19 nt, Artificial Sequence
  Description of Artificial Sequence: Synthetic oligonucleotide
gacuccgguuugccagcac

SEQ ID NO: 2102759 - RNA, 19 nt, Artificial Sequence
  Description of Artificial Sequence: Synthetic oligonucleotide
ucgguccccggcagucaac

SEQ ID NO: 2102760 - RNA, 19 nt, Artificial Sequence
  Description of Artificial Sequence: Synthetic oligonucleotide
agccucucacggugugacu

SEQ ID NO: 2102761 - RNA, 19 nt, Artificial Sequence
  Description of Artificial Sequence: Synthetic oligonucleotide
agggagacgaugaggccua

SEQ ID NO: 2102762 - RNA, 19 nt, Artificial Sequence
  Description of Artificial Sequence: Synthetic oligonucleotide
cccggggaaaggcaacccc

SEQ ID NO: 2102763 - RNA, 19 nt, Artificial Sequence
  Description of Artificial Sequence: Synthetic oligonucleotide
cgucgagcagccucucacg

SEQ ID NO: 2102764 - RNA, 19 nt, Artificial Sequence
  Description of Artificial Sequence: Synthetic oligonucleotide
cuccaacuccaguucguua

SEQ ID NO: 2102765 - RNA, 19 nt, Artificial Sequence
  Description of Artificial Sequence: Synthetic oligonucleotide
gccucucacggugugacuc

SEQ ID NO: 2102766 - RNA, 19 nt, Artificial Sequence
  Description of Artificial Sequence: Synthetic oligonucleotide
cuggacgccauucgguggu

SEQ ID NO: 2102767 - RNA, 19 nt, Artificial Sequence
  Description of Artificial Sequence: Synthetic oligonucleotide
agguaacggccccggggaa

SEQ ID NO: 2102768 - RNA, 19 nt, Artificial Sequence
  Description of Artificial Sequence: Synthetic oligonucleotide
cagccgcugccaucacagc

SEQ ID NO: 2102769 - RNA, 19 nt, Artificial Sequence
  Description of Artificial Sequence: Synthetic oligonucleotide
cagacuccuuuccgugcuc

SEQ ID NO: 2102770 - RNA, 19 nt, Artificial Sequence
  Description of Artificial Sequence: Synthetic oligonucleotide
ucggccuguugcagacguc

SEQ ID NO: 2102771 - RNA, 19 nt, Artificial Sequence
  Description of Artificial Sequence: Synthetic oligonucleotide
cuguggcacacacgaccuc

SEQ ID NO: 2102772 - RNA, 19 nt, Artificial Sequence
  Description of Artificial Sequence: Synthetic oligonucleotide
cuccguagggugaccaccu

SEQ ID NO: 2102773 - RNA, 19 nt, Artificial Sequence
  Description of Artificial Sequence: Synthetic oligonucleotide
cuccuuuccgugcuccgua

SEQ ID NO: 2102774 - RNA, 19 nt, Artificial Sequence
  Description of Artificial Sequence: Synthetic oligonucleotide
aacacccgugggugcuguu

SEQ ID NO: 2102775 - RNA, 19 nt, Artificial Sequence
  Description of Artificial Sequence: Synthetic oligonucleotide
agccgguggccuccaggca

SEQ ID NO: 2102776 - RNA, 19 nt, Artificial Sequence
  Description of Artificial Sequence: Synthetic oligonucleotide
gcagucaacgagggaaguc

SEQ ID NO: 2102777 - RNA, 19 nt, Artificial Sequence
  Description of Artificial Sequence: Synthetic oligonucleotide
gccgcugccaucacagcac

SEQ ID NO: 2102778 - RNA, 19 nt, Artificial Sequence
  Description of Artificial Sequence: Synthetic oligonucleotide
gcagacgucuguggcacac

SEQ ID NO: 2102779 - RNA, 19 nt, Artificial Sequence
  Description of Artificial Sequence: Synthetic oligonucleotide
cucacggugugacuccggu

SEQ ID NO: 2102780 - RNA, 19 nt, Artificial Sequence
  Description of Artificial Sequence: Synthetic oligonucleotide
cguuaucaucuucccauuc

SEQ ID NO: 2102781 - RNA, 19 nt, Artificial Sequence
  Description of Artificial Sequence: Synthetic oligonucleotide
ccggcagucaacgagggaa

SEQ ID NO: 2102782 - RNA, 19 nt, Artificial Sequence
  Description of Artificial Sequence: Synthetic oligonucleotide
cccauagccugacggucag

SEQ ID NO: 2102783 - RNA, 19 nt, Artificial Sequence
  Description of Artificial Sequence: Synthetic oligonucleotide
cucggccuguugcagacgu

SEQ ID NO: 2102784 - RNA, 19 nt, Artificial Sequence
  Description of Artificial Sequence: Synthetic oligonucleotide
gggccgccauugcaguggg

SEQ ID NO: 2102785 - RNA, 19 nt, Artificial Sequence
  Description of Artificial Sequence: Synthetic oligonucleotide
ccugacggucaggagcagg

SEQ ID NO: 2102786 - RNA, 19 nt, Artificial Sequence
  Description of Artificial Sequence: Synthetic oligonucleotide
gggugaccaccucaacaca

SEQ ID NO: 2102787 - RNA, 19 nt, Artificial Sequence
  Description of Artificial Sequence: Synthetic oligonucleotide
aguucacgcgauagcucau

SEQ ID NO: 2102788 - RNA, 19 nt, Artificial Sequence
  Description of Artificial Sequence: Synthetic oligonucleotide
aggccuagacgagcagggu

SEQ ID NO: 2102789 - RNA, 19 nt, Artificial Sequence
  Description of Artificial Sequence: Synthetic oligonucleotide
caugcaccgcaggcccggg

SEQ ID NO: 2102790 - RNA, 19 nt, Artificial Sequence
  Description of Artificial Sequence: Synthetic oligonucleotide
gcccucgcagcuguaacac

SEQ ID NO: 2102791 - RNA, 19 nt, Artificial Sequence
  Description of Artificial Sequence: Synthetic oligonucleotide
gcucugauccaaggagcug

SEQ ID NO: 2102792 - RNA, 19 nt, Artificial Sequence
  Description of Artificial Sequence: Synthetic oligonucleotide
gugcuccguagggugacca

SEQ ID NO: 2102793 - RNA, 19 nt, Artificial Sequence
  Description of Artificial Sequence: Synthetic oligonucleotide
ccggcuaugcccgggcacc

SEQ ID NO: 2102794 - RNA, 19 nt, Artificial Sequence
  Description of Artificial Sequence: Synthetic oligonucleotide
cgggcacccgggaagacug

SEQ ID NO: 2102795 - RNA, 19 nt, Artificial Sequence
  Description of Artificial Sequence: Synthetic oligonucleotide
caucacagcacgagauguu

SEQ ID NO: 2102796 - RNA, 19 nt, Artificial Sequence
  Description of Artificial Sequence: Synthetic oligonucleotide
ccgcugccaucacagcacg

SEQ ID NO: 2102797 - RNA, 19 nt, Artificial Sequence
  Description of Artificial Sequence: Synthetic oligonucleotide
gccuagacgagcagggucu

SEQ ID NO: 2102798 - RNA, 19 nt, Artificial Sequence
  Description of Artificial Sequence: Synthetic oligonucleotide
cgagauguugggguggcuc

SEQ ID NO: 2102799 - RNA, 19 nt, Artificial Sequence
  Description of Artificial Sequence: Synthetic oligonucleotide
ggucaggagcagggagacg

SEQ ID NO: 2102800 - RNA, 19 nt, Artificial Sequence
  Description of Artificial Sequence: Synthetic oligonucleotide
gccgcuucuggguccauua

SEQ ID NO: 2102801 - RNA, 19 nt, Artificial Sequence
  Description of Artificial Sequence: Synthetic oligonucleotide
ccuucagacuccuuuccgu

SEQ ID NO: 2102802 - RNA, 19 nt, Artificial Sequence
  Description of Artificial Sequence: Synthetic oligonucleotide
cugccacaugggagccuug

SEQ ID NO: 2102803 - RNA, 19 nt, Artificial Sequence
  Description of Artificial Sequence: Synthetic oligonucleotide
cguagggugaccaccucaa

SEQ ID NO: 2102804 - RNA, 19 nt, Artificial Sequence
  Description of Artificial Sequence: Synthetic oligonucleotide
ggcuaugcccgggcacccg

SEQ ID NO: 2102805 - RNA, 19 nt, Artificial Sequence
  Description of Artificial Sequence: Synthetic oligonucleotide
cuccgguuugccagcacau

SEQ ID NO: 2102806 - RNA, 19 nt, Artificial Sequence
  Description of Artificial Sequence: Synthetic oligonucleotide
ccaccucaacacacuguuc

SEQ ID NO: 2102807 - RNA, 19 nt, Artificial Sequence
  Description of Artificial Sequence: Synthetic oligonucleotide
guucuccgggauagcggca

SEQ ID NO: 2102808 - RNA, 19 nt, Artificial Sequence
  Description of Artificial Sequence: Synthetic oligonucleotide
acgagauguugggguggcu

SEQ ID NO: 2102809 - RNA, 19 nt, Artificial Sequence
  Description of Artificial Sequence: Synthetic oligonucleotide
ccuuggcaccaggaagccg

SEQ ID NO: 2102810 - RNA, 19 nt, Artificial Sequence
  Description of Artificial Sequence: Synthetic oligonucleotide
cuguugguuuucucauaau

SEQ ID NO: 2102811 - RNA, 19 nt, Artificial Sequence
  Description of Artificial Sequence: Synthetic oligonucleotide
ccccauagccugacgguca

SEQ ID NO: 2102812 - RNA, 19 nt, Artificial Sequence
  Description of Artificial Sequence: Synthetic oligonucleotide
ggaacacccgugggugcug

SEQ ID NO: 2102813 - RNA, 19 nt, Artificial Sequence
  Description of Artificial Sequence: Synthetic oligonucleotide
gccccauagccugacgguc

SEQ ID NO: 2102814 - RNA, 19 nt, Artificial Sequence
  Description of Artificial Sequence: Synthetic oligonucleotide
gaccucggccaggcugaug

SEQ ID NO: 2102815 - RNA, 19 nt, Artificial Sequence
  Description of Artificial Sequence: Synthetic oligonucleotide
gguaacggccccggggaaa

SEQ ID NO: 2102816 - RNA, 19 nt, Artificial Sequence
  Description of Artificial Sequence: Synthetic oligonucleotide
ggccuguugcagacgucug

SEQ ID NO: 2102817 - RNA, 19 nt, Artificial Sequence
  Description of Artificial Sequence: Synthetic oligonucleotide
caacgagggaagucucuuu

SEQ ID NO: 2102818 - RNA, 19 nt, Artificial Sequence
  Description of Artificial Sequence: Synthetic oligonucleotide
cccgugggugcuguugccc

SEQ ID NO: 2102819 - RNA, 19 nt, Artificial Sequence
  Description of Artificial Sequence: Synthetic oligonucleotide
ccguagggugaccaccuca

SEQ ID NO: 2102820 - RNA, 19 nt, Artificial Sequence
  Description of Artificial Sequence: Synthetic oligonucleotide
cagacgucuguggcacaca

SEQ ID NO: 2102821 - RNA, 19 nt, Artificial Sequence
  Description of Artificial Sequence: Synthetic oligonucleotide
gaacacccgugggugcugu

SEQ ID NO: 2102822 - RNA, 19 nt, Artificial Sequence
  Description of Artificial Sequence: Synthetic oligonucleotide
ggccccauagccugacggu

SEQ ID NO: 2102823 - RNA, 19 nt, Artificial Sequence
  Description of Artificial Sequence: Synthetic oligonucleotide
gcggcauugcaggcucugc

SEQ ID NO: 2102824 - RNA, 19 nt, Artificial Sequence
  Description of Artificial Sequence: Synthetic oligonucleotide
uggacgccauucgguggua

SEQ ID NO: 2102825 - RNA, 19 nt, Artificial Sequence
  Description of Artificial Sequence: Synthetic oligonucleotide
cgccauucggugguaaguc

SEQ ID NO: 2102826 - RNA, 19 nt, Artificial Sequence
  Description of Artificial Sequence: Synthetic oligonucleotide
caucgguccccggcaguca

SEQ ID NO: 2102827 - RNA, 19 nt, Artificial Sequence
  Description of Artificial Sequence: Synthetic oligonucleotide
ccaucgguccccggcaguc

SEQ ID NO: 2102828 - RNA, 19 nt, Artificial Sequence
  Description of Artificial Sequence: Synthetic oligonucleotide
cucgggcuccaggccucgg

SEQ ID NO: 2102829 - RNA, 19 nt, Artificial Sequence
  Description of Artificial Sequence: Synthetic oligonucleotide
ccgcuucuggguccauuac

SEQ ID NO: 2102830 - RNA, 19 nt, Artificial Sequence
  Description of Artificial Sequence: Synthetic oligonucleotide
ccgggaagacugccacagc

SEQ ID NO: 2102831 - RNA, 19 nt, Artificial Sequence
  Description of Artificial Sequence: Synthetic oligonucleotide
ccuagacgagcagggucug

SEQ ID NO: 2102832 - RNA, 19 nt, Artificial Sequence
  Description of Artificial Sequence: Synthetic oligonucleotide
cgguccccggcagucaacg

SEQ ID NO: 2102833 - RNA, 19 nt, Artificial Sequence
  Description of Artificial Sequence: Synthetic oligonucleotide
gcgauagcucaugguccug

SEQ ID NO: 2102834 - RNA, 19 nt, Artificial Sequence
  Description of Artificial Sequence: Synthetic oligonucleotide
ggagacgaugaggccuaga

SEQ ID NO: 2102835 - RNA, 19 nt, Artificial Sequence
  Description of Artificial Sequence: Synthetic oligonucleotide
gggcgccgcuucugggucc

SEQ ID NO: 2102836 - RNA, 19 nt, Artificial Sequence
  Description of Artificial Sequence: Synthetic oligonucleotide
ccggggaaaggcaaccccu

SEQ ID NO: 2102837 - RNA, 19 nt, Artificial Sequence
  Description of Artificial Sequence: Synthetic oligonucleotide
cccuggguccagccagggc

SEQ ID NO: 2102838 - RNA, 19 nt, Artificial Sequence
  Description of Artificial Sequence: Synthetic oligonucleotide
ccgggauagcggcauugca

SEQ ID NO: 2102839 - RNA, 19 nt, Artificial Sequence
  Description of Artificial Sequence: Synthetic oligonucleotide
gguccccggcagucaacga

SEQ ID NO: 2102840 - RNA, 19 nt, Artificial Sequence
  Description of Artificial Sequence: Synthetic oligonucleotide
gggagacgaugaggccuag

SEQ ID NO: 2102841 - RNA, 19 nt, Artificial Sequence
  Description of Artificial Sequence: Synthetic oligonucleotide
ccccggggaaaggcaaccc

SEQ ID NO: 2102842 - RNA, 19 nt, Artificial Sequence
  Description of Artificial Sequence: Synthetic oligonucleotide
gggugcuguugcccucgca

SEQ ID NO: 2102843 - RNA, 19 nt, Artificial Sequence
  Description of Artificial Sequence: Synthetic oligonucleotide
ggcagucaacgagggaagu

SEQ ID NO: 2102844 - RNA, 19 nt, Artificial Sequence
  Description of Artificial Sequence: Synthetic oligonucleotide
cuagacgagcagggucugu

SEQ ID NO: 2102845 - RNA, 19 nt, Artificial Sequence
  Description of Artificial Sequence: Synthetic oligonucleotide
ccgugcuccguagggugac

SEQ ID NO: 2102846 - RNA, 19 nt, Artificial Sequence
  Description of Artificial Sequence: Synthetic oligonucleotide
gccgucgagcagccucuca

SEQ ID NO: 2102847 - RNA, 19 nt, Artificial Sequence
  Description of Artificial Sequence: Synthetic oligonucleotide
cccucgggcuccaggccuc

SEQ ID NO: 2102848 - RNA, 19 nt, Artificial Sequence
  Description of Artificial Sequence: Synthetic oligonucleotide
ggccccggggaaaggcaac

SEQ ID NO: 2102849 - RNA, 19 nt, Artificial Sequence
  Description of Artificial Sequence: Synthetic oligonucleotide
cgcgauagcucaugguccu

SEQ ID NO: 2102850 - RNA, 19 nt, Artificial Sequence
  Description of Artificial Sequence: Synthetic oligonucleotide
cgugggugcuguugcccuc

SEQ ID NO: 2102851 - RNA, 19 nt, Artificial Sequence
  Description of Artificial Sequence: Synthetic oligonucleotide
gugguccugcaaagauccu

SEQ ID NO: 2102852 - RNA, 19 nt, Artificial Sequence
  Description of Artificial Sequence: Synthetic oligonucleotide
ggacgccauucggugguaa

SEQ ID NO: 2102853 - RNA, 19 nt, Artificial Sequence
  Description of Artificial Sequence: Synthetic oligonucleotide
ggcgccgcuucugggucca

SEQ ID NO: 2102854 - RNA, 19 nt, Artificial Sequence
  Description of Artificial Sequence: Synthetic oligonucleotide
cgccauugcagugggugga

SEQ ID NO: 2102855 - RNA, 19 nt, Artificial Sequence
  Description of Artificial Sequence: Synthetic oligonucleotide
gccugacggucaggagcag

SEQ ID NO: 2102856 - RNA, 19 nt, Artificial Sequence
  Description of Artificial Sequence: Synthetic oligonucleotide
ccgugggugcuguugcccu

SEQ ID NO: 2102857 - RNA, 19 nt, Artificial Sequence
  Description of Artificial Sequence: Synthetic oligonucleotide
ccauuacagccgcugccau

SEQ ID NO: 2102858 - RNA, 19 nt, Artificial Sequence
  Description of Artificial Sequence: Synthetic oligonucleotide
cgauagcucaugguccugu

SEQ ID NO: 2102859 - RNA, 19 nt, Artificial Sequence
  Description of Artificial Sequence: Synthetic oligonucleotide
cggcauugcaggcucugcu

SEQ ID NO: 2102860 - RNA, 19 nt, Artificial Sequence
  Description of Artificial Sequence: Synthetic oligonucleotide
cccggcagucaacgaggga

SEQ ID NO: 2102861 - RNA, 19 nt, Artificial Sequence
  Description of Artificial Sequence: Synthetic oligonucleotide
cggcuaugcccgggcaccc

SEQ ID NO: 2102862 - RNA, 19 nt, Artificial Sequence
  Description of Artificial Sequence: Synthetic oligonucleotide
cccucgcagcuguaacacu

SEQ ID NO: 2102863 - RNA, 19 nt, Artificial Sequence
  Description of Artificial Sequence: Synthetic oligonucleotide
cgcugccaucacagcacga

SEQ ID NO: 2102864 - RNA, 19 nt, Artificial Sequence
  Description of Artificial Sequence: Synthetic oligonucleotide
cggccccggggaaaggcaa

SEQ ID NO: 2102865 - RNA, 19 nt, Artificial Sequence
  Description of Artificial Sequence: Synthetic oligonucleotide
cccgggcacccgggaagac

SEQ ID NO: 2102866 - RNA, 19 nt, Artificial Sequence
  Description of Artificial Sequence: Synthetic oligonucleotide
ggaagccgucgagcagccu

SEQ ID NO: 2102867 - RNA, 19 nt, Artificial Sequence
  Description of Artificial Sequence: Synthetic oligonucleotide
ccgggcacccgggaagacu

SEQ ID NO: 2102868 - RNA, 19 nt, Artificial Sequence
  Description of Artificial Sequence: Synthetic oligonucleotide
cgguggccuccaggcacug

SEQ ID NO: 2102869 - RNA, 19 nt, Artificial Sequence
  Description of Artificial Sequence: Synthetic oligonucleotide
ccucggccaggcugaugau

SEQ ID NO: 2102870 - RNA, 19 nt, Artificial Sequence
  Description of Artificial Sequence: Synthetic oligonucleotide
ggccgccauugcagugggu

SEQ ID NO: 2102871 - RNA, 19 nt, Artificial Sequence
  Description of Artificial Sequence: Synthetic oligonucleotide
cgccgcuucuggguccauu

SEQ ID NO: 2102872 - RNA, 19 nt, Artificial Sequence
  Description of Artificial Sequence: Synthetic oligonucleotide
gcgccgcuucuggguccau

SEQ ID NO: 2102873 - RNA, 19 nt, Artificial Sequence
  Description of Artificial Sequence: Synthetic oligonucleotide
aaaggcuucgaacacgccc

SEQ ID NO: 2102874 - RNA, 19 nt, Artificial Sequence
  Description of Artificial Sequence: Synthetic oligonucleotide
ucuaaugaggaauuugggg

SEQ ID NO: 2102875 - RNA, 19 nt, Artificial Sequence
  Description of Artificial Sequence: Synthetic oligonucleotide
uggauguucacaaacacgc

SEQ ID NO: 2102876 - RNA, 19 nt, Artificial Sequence
  Description of Artificial Sequence: Synthetic oligonucleotide
uguagagagggacagacag

SEQ ID NO: 2102877 - RNA, 19 nt, Artificial Sequence
  Description of Artificial Sequence: Synthetic oligonucleotide
aauuuggggagugaggccc

SEQ ID NO: 2102878 - RNA, 19 nt, Artificial Sequence
  Description of Artificial Sequence: Synthetic oligonucleotide
aauucuguuacauuccaga

SEQ ID NO: 2102879 - RNA, 19 nt, Artificial Sequence
  Description of Artificial Sequence: Synthetic oligonucleotide
ucauacaggacuuugcugc

SEQ ID NO: 2102880 - RNA, 19 nt, Artificial Sequence
  Description of Artificial Sequence: Synthetic oligonucleotide
agaaccaccacauuaaccu

SEQ ID NO: 2102881 - RNA, 19 nt, Artificial Sequence
  Description of Artificial Sequence: Synthetic oligonucleotide
uuguaaaaggcuucgaaca

SEQ ID NO: 2102882 - RNA, 19 nt, Artificial Sequence
  Description of Artificial Sequence: Synthetic oligonucleotide
uuuacagucccuuccauug

SEQ ID NO: 2102883 - RNA, 19 nt, Artificial Sequence
  Description of Artificial Sequence: Synthetic oligonucleotide
aagucaacgggacuugggg

SEQ ID NO: 2102884 - RNA, 19 nt, Artificial Sequence
  Description of Artificial Sequence: Synthetic oligonucleotide
aauucacaggucuugguca

SEQ ID NO: 2102885 - RNA, 19 nt, Artificial Sequence
  Description of Artificial Sequence: Synthetic oligonucleotide
gauauucugaaucucugug

SEQ ID NO: 2102886 - RNA, 19 nt, Artificial Sequence
  Description of Artificial Sequence: Synthetic oligonucleotide
gaaacaggcacaucugggg

SEQ ID NO: 2102887 - RNA, 19 nt, Artificial Sequence
  Description of Artificial Sequence: Synthetic oligonucleotide
uucuguuacauuccagagg

SEQ ID NO: 2102888 - RNA, 19 nt, Artificial Sequence
  Description of Artificial Sequence: Synthetic oligonucleotide
cuuccauugucaaagacac

SEQ ID NO: 2102889 - RNA, 19 nt, Artificial Sequence
  Description of Artificial Sequence: Synthetic oligonucleotide
ugcagcuggacuauguccg

SEQ ID NO: 2102890 - RNA, 19 nt, Artificial Sequence
  Description of Artificial Sequence: Synthetic oligonucleotide
aagaagaaccaccacauua

SEQ ID NO: 2102891 - RNA, 19 nt, Artificial Sequence
  Description of Artificial Sequence: Synthetic oligonucleotide
cuagagaugaccaccacac

SEQ ID NO: 2102892 - RNA, 19 nt, Artificial Sequence
  Description of Artificial Sequence: Synthetic oligonucleotide
uucagcacgucuauggugc

SEQ ID NO: 2102893 - RNA, 19 nt, Artificial Sequence
  Description of Artificial Sequence: Synthetic oligonucleotide
aagguuuccggggugaugg

SEQ ID NO: 2102894 - RNA, 19 nt, Artificial Sequence
  Description of Artificial Sequence: Synthetic oligonucleotide
gaucuugcaacacagguga

SEQ ID NO: 2102895 - RNA, 19 nt, Artificial Sequence
  Description of Artificial Sequence: Synthetic oligonucleotide
aacacgcccacacuuuugg

SEQ ID NO: 2102896 - RNA, 19 nt, Artificial Sequence
  Description of Artificial Sequence: Synthetic oligonucleotide
cuaaugaggaauuugggga

SEQ ID NO: 2102897 - RNA, 19 nt, Artificial Sequence
  Description of Artificial Sequence: Synthetic oligonucleotide
ucuuugacguucugcaagg

SEQ ID NO: 2102898 - RNA, 19 nt, Artificial Sequence
  Description of Artificial Sequence: Synthetic oligonucleotide
aagaaccaccacauuaacc

SEQ ID NO: 2102899 - RNA, 19 nt, Artificial Sequence
  Description of Artificial Sequence: Synthetic oligonucleotide
ucuauggugcugcugagga

SEQ ID NO: 2102900 - RNA, 19 nt, Artificial Sequence
  Description of Artificial Sequence: Synthetic oligonucleotide
augaacgaugaauucacag

SEQ ID NO: 2102901 - RNA, 19 nt, Artificial Sequence
  Description of Artificial Sequence: Synthetic oligonucleotide
aagggaaucucagucuuac

SEQ ID NO: 2102902 - RNA, 19 nt, Artificial Sequence
  Description of Artificial Sequence: Synthetic oligonucleotide
agucuuaccacuggggagc

SEQ ID NO: 2102903 - RNA, 19 nt, Artificial Sequence
  Description of Artificial Sequence: Synthetic oligonucleotide
uuugcuagagaugaccacc

SEQ ID NO: 2102904 - RNA, 19 nt, Artificial Sequence
  Description of Artificial Sequence: Synthetic oligonucleotide
auuuggauauucugaaucu

SEQ ID NO: 2102905 - RNA, 19 nt, Artificial Sequence
  Description of Artificial Sequence: Synthetic oligonucleotide
uccauugucaaagacacuc

SEQ ID NO: 2102906 - RNA, 19 nt, Artificial Sequence
  Description of Artificial Sequence: Synthetic oligonucleotide
aacacaggugaggaaauuc

SEQ ID NO: 2102907 - RNA, 19 nt, Artificial Sequence
  Description of Artificial Sequence: Synthetic oligonucleotide
agcucuaugcuccggauag

SEQ ID NO: 2102908 - RNA, 19 nt, Artificial Sequence
  Description of Artificial Sequence: Synthetic oligonucleotide
ucuuugcuagagaugacca

SEQ ID NO: 2102909 - RNA, 19 nt, Artificial Sequence
  Description of Artificial Sequence: Synthetic oligonucleotide
agagaugaccaccacacca

SEQ ID NO: 2102910 - RNA, 19 nt, Artificial Sequence
  Description of Artificial Sequence: Synthetic oligonucleotide
ucagucuuaccacugggga

SEQ ID NO: 2102911 - RNA, 19 nt, Artificial Sequence
  Description of Artificial Sequence: Synthetic oligonucleotide
acaaauguccccaucggcg

SEQ ID NO: 2102912 - RNA, 19 nt, Artificial Sequence
  Description of Artificial Sequence: Synthetic oligonucleotide
auuaaccucaaacuccacu

SEQ ID NO: 2102913 - RNA, 19 nt, Artificial Sequence
  Description of Artificial Sequence: Synthetic oligonucleotide
ucugugaucuugcaacaca

SEQ ID NO: 2102914 - RNA, 19 nt, Artificial Sequence
  Description of Artificial Sequence: Synthetic oligonucleotide
cuggauguucacaaacacg

SEQ ID NO: 2102915 - RNA, 19 nt, Artificial Sequence
  Description of Artificial Sequence: Synthetic oligonucleotide
gaaugaacgaugaauucac

SEQ ID NO: 2102916 - RNA, 19 nt, Artificial Sequence
  Description of Artificial Sequence: Synthetic oligonucleotide
acgacguccaccugugagc

SEQ ID NO: 2102917 - RNA, 19 nt, Artificial Sequence
  Description of Artificial Sequence: Synthetic oligonucleotide
cagacagacguccacgugg

SEQ ID NO: 2102918 - RNA, 19 nt, Artificial Sequence
  Description of Artificial Sequence: Synthetic oligonucleotide
uuaguggucuccaggguug

SEQ ID NO: 2102919 - RNA, 19 nt, Artificial Sequence
  Description of Artificial Sequence: Synthetic oligonucleotide
uucugcaagguuuccgggg

SEQ ID NO: 2102920 - RNA, 19 nt, Artificial Sequence
  Description of Artificial Sequence: Synthetic oligonucleotide
acgaugaauucacaggucu

SEQ ID NO: 2102921 - RNA, 19 nt, Artificial Sequence
  Description of Artificial Sequence: Synthetic oligonucleotide
uggacggagucuuugcuag

SEQ ID NO: 2102922 - RNA, 19 nt, Artificial Sequence
  Description of Artificial Sequence: Synthetic oligonucleotide
agcugaagcucuaugcucc

SEQ ID NO: 2102923 - RNA, 19 nt, Artificial Sequence
  Description of Artificial Sequence: Synthetic oligonucleotide
auuuccccggcgucgauac

SEQ ID NO: 2102924 - RNA, 19 nt, Artificial Sequence
  Description of Artificial Sequence: Synthetic oligonucleotide
uugacguucugcaagguuu

SEQ ID NO: 2102925 - RNA, 19 nt, Artificial Sequence
  Description of Artificial Sequence: Synthetic oligonucleotide
uacuggauguucacaaaca

SEQ ID NO: 2102926 - RNA, 19 nt, Artificial Sequence
  Description of Artificial Sequence: Synthetic oligonucleotide
agaguuguaaaaggcuucg

SEQ ID NO: 2102927 - RNA, 19 nt, Artificial Sequence
  Description of Artificial Sequence: Synthetic oligonucleotide
ucuugcaacacaggugagg

SEQ ID NO: 2102928 - RNA, 19 nt, Artificial Sequence
  Description of Artificial Sequence: Synthetic oligonucleotide
cucuuugacguucugcaag

SEQ ID NO: 2102929 - RNA, 19 nt, Artificial Sequence
  Description of Artificial Sequence: Synthetic oligonucleotide
uguggcaucgcgugcauac

SEQ ID NO: 2102930 - RNA, 19 nt, Artificial Sequence
  Description of Artificial Sequence: Synthetic oligonucleotide
aguuguaaaaggcuucgaa

SEQ ID NO: 2102931 - RNA, 19 nt, Artificial Sequence
  Description of Artificial Sequence: Synthetic oligonucleotide
acaaacacgccgugguagg

SEQ ID NO: 2102932 - RNA, 19 nt, Artificial Sequence
  Description of Artificial Sequence: Synthetic oligonucleotide
uucagugggaaguucucug

SEQ ID NO: 2102933 - RNA, 19 nt, Artificial Sequence
  Description of Artificial Sequence: Synthetic oligonucleotide
guaaaaggcuucgaacacg

SEQ ID NO: 2102934 - RNA, 19 nt, Artificial Sequence
  Description of Artificial Sequence: Synthetic oligonucleotide
ugugaugagguggucagca

SEQ ID NO: 2102935 - RNA, 19 nt, Artificial Sequence
  Description of Artificial Sequence: Synthetic oligonucleotide
cuaaagagaaacaggcaca

SEQ ID NO: 2102936 - RNA, 19 nt, Artificial Sequence
  Description of Artificial Sequence: Synthetic oligonucleotide
ccuaaagagaaacaggcac

SEQ ID NO: 2102937 - RNA, 19 nt, Artificial Sequence
  Description of Artificial Sequence: Synthetic oligonucleotide
gaacgaugaauucacaggu

SEQ ID NO: 2102938 - RNA, 19 nt, Artificial Sequence
  Description of Artificial Sequence: Synthetic oligonucleotide
uggacuauguccggcagag

SEQ ID NO: 2102939 - RNA, 19 nt, Artificial Sequence
  Description of Artificial Sequence: Synthetic oligonucleotide
cucgaagggaaucucaguc

SEQ ID NO: 2102940 - RNA, 19 nt, Artificial Sequence
  Description of Artificial Sequence: Synthetic oligonucleotide
ugaagcucuaugcuccgga

SEQ ID NO: 2102941 - RNA, 19 nt, Artificial Sequence
  Description of Artificial Sequence: Synthetic oligonucleotide
acaccagagagcauuuccc

SEQ ID NO: 2102942 - RNA, 19 nt, Artificial Sequence
  Description of Artificial Sequence: Synthetic oligonucleotide
acgucuauggugcugcuga

SEQ ID NO: 2102943 - RNA, 19 nt, Artificial Sequence
  Description of Artificial Sequence: Synthetic oligonucleotide
ucugcaagguuuccggggu

SEQ ID NO: 2102944 - RNA, 19 nt, Artificial Sequence
  Description of Artificial Sequence: Synthetic oligonucleotide
ggugaggaaauucuguuac

SEQ ID NO: 2102945 - RNA, 19 nt, Artificial Sequence
  Description of Artificial Sequence: Synthetic oligonucleotide
accgccgcaugucacagcg

SEQ ID NO: 2102946 - RNA, 19 nt, Artificial Sequence
  Description of Artificial Sequence: Synthetic oligonucleotide
aacaggcacaucuggggcu

SEQ ID NO: 2102947 - RNA, 19 nt, Artificial Sequence
  Description of Artificial Sequence: Synthetic oligonucleotide
ccuacaaauguccccaucg

SEQ ID NO: 2102948 - RNA, 19 nt, Artificial Sequence
  Description of Artificial Sequence: Synthetic oligonucleotide
agaaacaggcacaucuggg

SEQ ID NO: 2102949 - RNA, 19 nt, Artificial Sequence
  Description of Artificial Sequence: Synthetic oligonucleotide
gauggcacaguugguagag

SEQ ID NO: 2102950 - RNA, 19 nt, Artificial Sequence
  Description of Artificial Sequence: Synthetic oligonucleotide
ugaggagcagaaugaacga

SEQ ID NO: 2102951 - RNA, 19 nt, Artificial Sequence
  Description of Artificial Sequence: Synthetic oligonucleotide
gucccuuccauugucaaag

SEQ ID NO: 2102952 - RNA, 19 nt, Artificial Sequence
  Description of Artificial Sequence: Synthetic oligonucleotide
gagaugaccaccacaccag

SEQ ID NO: 2102953 - RNA, 19 nt, Artificial Sequence
  Description of Artificial Sequence: Synthetic oligonucleotide
cacaccagagagcauuucc

SEQ ID NO: 2102954 - RNA, 19 nt, Artificial Sequence
  Description of Artificial Sequence: Synthetic oligonucleotide
gauggugaagucaacggga

SEQ ID NO: 2102955 - RNA, 19 nt, Artificial Sequence
  Description of Artificial Sequence: Synthetic oligonucleotide
ugagcuggagguuuacagu

SEQ ID NO: 2102956 - RNA, 19 nt, Artificial Sequence
  Description of Artificial Sequence: Synthetic oligonucleotide
auucacaggucuuggucag

SEQ ID NO: 2102957 - RNA, 19 nt, Artificial Sequence
  Description of Artificial Sequence: Synthetic oligonucleotide
uugcuagagaugaccacca

SEQ ID NO: 2102958 - RNA, 19 nt, Artificial Sequence
  Description of Artificial Sequence: Synthetic oligonucleotide
uauggugcugcugaggauc

SEQ ID NO: 2102959 - RNA, 19 nt, Artificial Sequence
  Description of Artificial Sequence: Synthetic oligonucleotide
uccaggguugggcagguga

SEQ ID NO: 2102960 - RNA, 19 nt, Artificial Sequence
  Description of Artificial Sequence: Synthetic oligonucleotide
guacuggauguucacaaac

SEQ ID NO: 2102961 - RNA, 19 nt, Artificial Sequence
  Description of Artificial Sequence: Synthetic oligonucleotide
ggaauuuggggagugaggc

SEQ ID NO: 2102962 - RNA, 19 nt, Artificial Sequence
  Description of Artificial Sequence: Synthetic oligonucleotide
ucgaagggaaucucagucu

SEQ ID NO: 2102963 - RNA, 19 nt, Artificial Sequence
  Description of Artificial Sequence: Synthetic oligonucleotide
agagcauuuccccggcguc

SEQ ID NO: 2102964 - RNA, 19 nt, Artificial Sequence
  Description of Artificial Sequence: Synthetic oligonucleotide
gaauuuggggagugaggcc

SEQ ID NO: 2102965 - RNA, 19 nt, Artificial Sequence
  Description of Artificial Sequence: Synthetic oligonucleotide
ugaggaaauucuguuacau

SEQ ID NO: 2102966 - RNA, 19 nt, Artificial Sequence
  Description of Artificial Sequence: Synthetic oligonucleotide
uagaguucagauguccucu

SEQ ID NO: 2102967 - RNA, 19 nt, Artificial Sequence
  Description of Artificial Sequence: Synthetic oligonucleotide
cgucgauacacuuuguucg

SEQ ID NO: 2102968 - RNA, 19 nt, Artificial Sequence
  Description of Artificial Sequence: Synthetic oligonucleotide
uucgaacacgcccacacuu

SEQ ID NO: 2102969 - RNA, 19 nt, Artificial Sequence
  Description of Artificial Sequence: Synthetic oligonucleotide
aaggcuucgaacacgccca

SEQ ID NO: 2102970 - RNA, 19 nt, Artificial Sequence
  Description of Artificial Sequence: Synthetic oligonucleotide
uccucuaaugaggaauuug

SEQ ID NO: 2102971 - RNA, 19 nt, Artificial Sequence
  Description of Artificial Sequence: Synthetic oligonucleotide
uucacaugcagaggaaacu

SEQ ID NO: 2102972 - RNA, 19 nt, Artificial Sequence
  Description of Artificial Sequence: Synthetic oligonucleotide
uguucacaaacacgccgug

SEQ ID NO: 2102973 - RNA, 19 nt, Artificial Sequence
  Description of Artificial Sequence: Synthetic oligonucleotide
gaagucaacgggacuuggg

SEQ ID NO: 2102974 - RNA, 19 nt, Artificial Sequence
  Description of Artificial Sequence: Synthetic oligonucleotide
ugaauucacaggucuuggu

SEQ ID NO: 2102975 - RNA, 19 nt, Artificial Sequence
  Description of Artificial Sequence: Synthetic oligonucleotide
aaacacgccgugguagguc

SEQ ID NO: 2102976 - RNA, 19 nt, Artificial Sequence
  Description of Artificial Sequence: Synthetic oligonucleotide
accauguagagagggacag

SEQ ID NO: 2102977 - RNA, 19 nt, Artificial Sequence
  Description of Artificial Sequence: Synthetic oligonucleotide
agggaaucucagucuuacc

SEQ ID NO: 2102978 - RNA, 19 nt, Artificial Sequence
  Description of Artificial Sequence: Synthetic oligonucleotide
cagaugaccagacagacgu

SEQ ID NO: 2102979 - RNA, 19 nt, Artificial Sequence
  Description of Artificial Sequence: Synthetic oligonucleotide
cauacaggacuuugcugcc

SEQ ID NO: 2102980 - RNA, 19 nt, Artificial Sequence
  Description of Artificial Sequence: Synthetic oligonucleotide
agaggaaaggccgaggcaa

SEQ ID NO: 2102981 - RNA, 19 nt, Artificial Sequence
  Description of Artificial Sequence: Synthetic oligonucleotide
aaaaggcuucgaacacgcc

SEQ ID NO: 2102982 - RNA, 19 nt, Artificial Sequence
  Description of Artificial Sequence: Synthetic oligonucleotide
agaagaaccaccacauuaa

SEQ ID NO: 2102983 - RNA, 19 nt, Artificial Sequence
  Description of Artificial Sequence: Synthetic oligonucleotide
aaucucagucuuaccacug

SEQ ID NO: 2102984 - RNA, 19 nt, Artificial Sequence
  Description of Artificial Sequence: Synthetic oligonucleotide
uuuggauauucugaaucuc

SEQ ID NO: 2102985 - RNA, 19 nt, Artificial Sequence
  Description of Artificial Sequence: Synthetic oligonucleotide
gggaaucucagucuuacca

SEQ ID NO: 2102986 - RNA, 19 nt, Artificial Sequence
  Description of Artificial Sequence: Synthetic oligonucleotide
uguccucuaaugaggaauu

SEQ ID NO: 2102987 - RNA, 19 nt, Artificial Sequence
  Description of Artificial Sequence: Synthetic oligonucleotide
guaggucucauacaggacu

SEQ ID NO: 2102988 - RNA, 19 nt, Artificial Sequence
  Description of Artificial Sequence: Synthetic oligonucleotide
uacccuucugcacacccac

SEQ ID NO: 2102989 - RNA, 19 nt, Artificial Sequence
  Description of Artificial Sequence: Synthetic oligonucleotide
aacagggaccgccgcaugu

SEQ ID NO: 2102990 - RNA, 19 nt, Artificial Sequence
  Description of Artificial Sequence: Synthetic oligonucleotide
cuuugcuagagaugaccac

SEQ ID NO: 2102991 - RNA, 19 nt, Artificial Sequence
  Description of Artificial Sequence: Synthetic oligonucleotide
gucgauacacuuuguucgc

SEQ ID NO: 2102992 - RNA, 19 nt, Artificial Sequence
  Description of Artificial Sequence: Synthetic oligonucleotide
guagaguucagauguccuc

SEQ ID NO: 2102993 - RNA, 19 nt, Artificial Sequence
  Description of Artificial Sequence: Synthetic oligonucleotide
ucacaugcagaggaaacuc

SEQ ID NO: 2102994 - RNA, 19 nt, Artificial Sequence
  Description of Artificial Sequence: Synthetic oligonucleotide
cagucuuaccacuggggag

SEQ ID NO: 2102995 - RNA, 19 nt, Artificial Sequence
  Description of Artificial Sequence: Synthetic oligonucleotide
cacaaacacgccgugguag

SEQ ID NO: 2102996 - RNA, 19 nt, Artificial Sequence
  Description of Artificial Sequence: Synthetic oligonucleotide
aaacucgaagggaaucuca

SEQ ID NO: 2102997 - RNA, 19 nt, Artificial Sequence
  Description of Artificial Sequence: Synthetic oligonucleotide
uggcaucgcgugcauaccc

SEQ ID NO: 2102998 - RNA, 19 nt, Artificial Sequence
  Description of Artificial Sequence: Synthetic oligonucleotide
ugaggcccucucuuugacg

SEQ ID NO: 2102999 - RNA, 19 nt, Artificial Sequence
  Description of Artificial Sequence: Synthetic oligonucleotide
agucaacgggacuuggggu

SEQ ID NO: 2103000 - RNA, 19 nt, Artificial Sequence
  Description of Artificial Sequence: Synthetic oligonucleotide
aguucagauguccucuaau

SEQ ID NO: 2103001 - RNA, 19 nt, Artificial Sequence
  Description of Artificial Sequence: Synthetic oligonucleotide
agguuuacagucccuucca

SEQ ID NO: 2103002 - RNA, 19 nt, Artificial Sequence
  Description of Artificial Sequence: Synthetic oligonucleotide
ggaaucucagucuuaccac

SEQ ID NO: 2103003 - RNA, 19 nt, Artificial Sequence
  Description of Artificial Sequence: Synthetic oligonucleotide
gacggagucuuugcuagag

SEQ ID NO: 2103004 - RNA, 19 nt, Artificial Sequence
  Description of Artificial Sequence: Synthetic oligonucleotide
guccccaucggcgauuugg

SEQ ID NO: 2103005 - RNA, 19 nt, Artificial Sequence
  Description of Artificial Sequence: Synthetic oligonucleotide
uccggggugauggugaagu

SEQ ID NO: 2103006 - RNA, 19 nt, Artificial Sequence
  Description of Artificial Sequence: Synthetic oligonucleotide
ugacguucugcaagguuuc

SEQ ID NO: 2103007 - RNA, 19 nt, Artificial Sequence
  Description of Artificial Sequence: Synthetic oligonucleotide
cacgacguccaccugugag

SEQ ID NO: 2103008 - RNA, 19 nt, Artificial Sequence
  Description of Artificial Sequence: Synthetic oligonucleotide
ucggcgauuuggauauucu

SEQ ID NO: 2103009 - RNA, 19 nt, Artificial Sequence
  Description of Artificial Sequence: Synthetic oligonucleotide
uccgagugcuccaccacca

SEQ ID NO: 2103010 - RNA, 19 nt, Artificial Sequence
  Description of Artificial Sequence: Synthetic oligonucleotide
gaaaggccgaggcaaggca

SEQ ID NO: 2103011 - RNA, 19 nt, Artificial Sequence
  Description of Artificial Sequence: Synthetic oligonucleotide
aaggccgaggcaaggcacg

SEQ ID NO: 2103012 - RNA, 19 nt, Artificial Sequence
  Description of Artificial Sequence: Synthetic oligonucleotide
gucaacgggacuugggguc

SEQ ID NO: 2103013 - RNA, 19 nt, Artificial Sequence
  Description of Artificial Sequence: Synthetic oligonucleotide
guguacuggauguucacaa

SEQ ID NO: 2103014 - RNA, 19 nt, Artificial Sequence
  Description of Artificial Sequence: Synthetic oligonucleotide
ucuccugucaggggcugcg

SEQ ID NO: 2103015 - RNA, 19 nt, Artificial Sequence
  Description of Artificial Sequence: Synthetic oligonucleotide
gagugaggcccucucuuug

SEQ ID NO: 2103016 - RNA, 19 nt, Artificial Sequence
  Description of Artificial Sequence: Synthetic oligonucleotide
acacgcccacacuuuuggc

SEQ ID NO: 2103017 - RNA, 19 nt, Artificial Sequence
  Description of Artificial Sequence: Synthetic oligonucleotide
agcuggagguuuacagucc

SEQ ID NO: 2103018 - RNA, 19 nt, Artificial Sequence
  Description of Artificial Sequence: Synthetic oligonucleotide
aguuaguggucuccagggu

SEQ ID NO: 2103019 - RNA, 19 nt, Artificial Sequence
  Description of Artificial Sequence: Synthetic oligonucleotide
acagaguuguaaaaggcuu

SEQ ID NO: 2103020 - RNA, 19 nt, Artificial Sequence
  Description of Artificial Sequence: Synthetic oligonucleotide
uaggucucauacaggacuu

SEQ ID NO: 2103021 - RNA, 19 nt, Artificial Sequence
  Description of Artificial Sequence: Synthetic oligonucleotide
ugaacagucuggggaagac

SEQ ID NO: 2103022 - RNA, 19 nt, Artificial Sequence
  Description of Artificial Sequence: Synthetic oligonucleotide
acagacagacuccuacaaa

SEQ ID NO: 2103023 - RNA, 19 nt, Artificial Sequence
  Description of Artificial Sequence: Synthetic oligonucleotide
ugcuggacggagucuuugc

SEQ ID NO: 2103024 - RNA, 19 nt, Artificial Sequence
  Description of Artificial Sequence: Synthetic oligonucleotide
aaucucuguggcaucgcgu

SEQ ID NO: 2103025 - RNA, 19 nt, Artificial Sequence
  Description of Artificial Sequence: Synthetic oligonucleotide
aucggcgauuuggauauuc

SEQ ID NO: 2103026 - RNA, 19 nt, Artificial Sequence
  Description of Artificial Sequence: Synthetic oligonucleotide
auguucacaaacacgccgu

SEQ ID NO: 2103027 - RNA, 19 nt, Artificial Sequence
  Description of Artificial Sequence: Synthetic oligonucleotide
caaauguccccaucggcga

SEQ ID NO: 2103028 - RNA, 19 nt, Artificial Sequence
  Description of Artificial Sequence: Synthetic oligonucleotide
uccccaucggcgauuugga

SEQ ID NO: 2103029 - RNA, 19 nt, Artificial Sequence
  Description of Artificial Sequence: Synthetic oligonucleotide
gauacacuuuguucgcucu

SEQ ID NO: 2103030 - RNA, 19 nt, Artificial Sequence
  Description of Artificial Sequence: Synthetic oligonucleotide
gaaacucgaagggaaucuc

SEQ ID NO: 2103031 - RNA, 19 nt, Artificial Sequence
  Description of Artificial Sequence: Synthetic oligonucleotide
aagcucuaugcuccggaua

SEQ ID NO: 2103032 - RNA, 19 nt, Artificial Sequence
  Description of Artificial Sequence: Synthetic oligonucleotide
agugaggcccucucuuuga

SEQ ID NO: 2103033 - RNA, 19 nt, Artificial Sequence
  Description of Artificial Sequence: Synthetic oligonucleotide
aucgcgugcauacccuucu

SEQ ID NO: 2103034 - RNA, 19 nt, Artificial Sequence
  Description of Artificial Sequence: Synthetic oligonucleotide
ccagagagcauuuccccgg

SEQ ID NO: 2103035 - RNA, 19 nt, Artificial Sequence
  Description of Artificial Sequence: Synthetic oligonucleotide
aguguguacuggauguuca

SEQ ID NO: 2103036 - RNA, 19 nt, Artificial Sequence
  Description of Artificial Sequence: Synthetic oligonucleotide
aggacuuugcugcccuuca

SEQ ID NO: 2103037 - RNA, 19 nt, Artificial Sequence
  Description of Artificial Sequence: Synthetic oligonucleotide
acguucugcaagguuuccg

SEQ ID NO: 2103038 - RNA, 19 nt, Artificial Sequence
  Description of Artificial Sequence: Synthetic oligonucleotide
agagagcauuuccccggcg

SEQ ID NO: 2103039 - RNA, 19 nt, Artificial Sequence
  Description of Artificial Sequence: Synthetic oligonucleotide
uggcacaguugguagaguu

SEQ ID NO: 2103040 - RNA, 19 nt, Artificial Sequence
  Description of Artificial Sequence: Synthetic oligonucleotide
agauguccucuaaugagga

SEQ ID NO: 2103041 - RNA, 19 nt, Artificial Sequence
  Description of Artificial Sequence: Synthetic oligonucleotide
uggugaagucaacgggacu

SEQ ID NO: 2103042 - RNA, 19 nt, Artificial Sequence
  Description of Artificial Sequence: Synthetic oligonucleotide
cuauguccggcagagcuuc

SEQ ID NO: 2103043 - RNA, 19 nt, Artificial Sequence
  Description of Artificial Sequence: Synthetic oligonucleotide
agcuggacuauguccggca

SEQ ID NO: 2103044 - RNA, 19 nt, Artificial Sequence
  Description of Artificial Sequence: Synthetic oligonucleotide
gcuucgaacacgcccacac

SEQ ID NO: 2103045 - RNA, 19 nt, Artificial Sequence
  Description of Artificial Sequence: Synthetic oligonucleotide
uccugucaggggcugcgug

SEQ ID NO: 2103046 - RNA, 19 nt, Artificial Sequence
  Description of Artificial Sequence: Synthetic oligonucleotide
ucgaacacgcccacacuuu

SEQ ID NO: 2103047 - RNA, 19 nt, Artificial Sequence
  Description of Artificial Sequence: Synthetic oligonucleotide
ucacaaacacgccguggua

SEQ ID NO: 2103048 - RNA, 19 nt, Artificial Sequence
  Description of Artificial Sequence: Synthetic oligonucleotide
aggcacgacguccaccugu

SEQ ID NO: 2103049 - RNA, 19 nt, Artificial Sequence
  Description of Artificial Sequence: Synthetic oligonucleotide
gucuauggugcugcugagg

SEQ ID NO: 2103050 - RNA, 19 nt, Artificial Sequence
  Description of Artificial Sequence: Synthetic oligonucleotide
uucugugaucuugcaacac

SEQ ID NO: 2103051 - RNA, 19 nt, Artificial Sequence
  Description of Artificial Sequence: Synthetic oligonucleotide
ugcaagguuuccgggguga

SEQ ID NO: 2103052 - RNA, 19 nt, Artificial Sequence
  Description of Artificial Sequence: Synthetic oligonucleotide
ggcgauuuggauauucuga

SEQ ID NO: 2103053 - RNA, 19 nt, Artificial Sequence
  Description of Artificial Sequence: Synthetic oligonucleotide
cacccggaccagcugaagc

SEQ ID NO: 2103054 - RNA, 19 nt, Artificial Sequence
  Description of Artificial Sequence: Synthetic oligonucleotide
accuaaagagaaacaggca

SEQ ID NO: 2103055 - RNA, 19 nt, Artificial Sequence
  Description of Artificial Sequence: Synthetic oligonucleotide
ugcuagagaugaccaccac

SEQ ID NO: 2103056 - RNA, 19 nt, Artificial Sequence
  Description of Artificial Sequence: Synthetic oligonucleotide
ccauugucaaagacacucc

SEQ ID NO: 2103057 - RNA, 19 nt, Artificial Sequence
  Description of Artificial Sequence: Synthetic oligonucleotide
gccgugguaggucucauac

SEQ ID NO: 2103058 - RNA, 19 nt, Artificial Sequence
  Description of Artificial Sequence: Synthetic oligonucleotide
uuccccggcgucgauacac

SEQ ID NO: 2103059 - RNA, 19 nt, Artificial Sequence
  Description of Artificial Sequence: Synthetic oligonucleotide
uuccauugucaaagacacu

SEQ ID NO: 2103060 - RNA, 19 nt, Artificial Sequence
  Description of Artificial Sequence: Synthetic oligonucleotide
gccgaggcaaggcacgacg

SEQ ID NO: 2103061 - RNA, 19 nt, Artificial Sequence
  Description of Artificial Sequence: Synthetic oligonucleotide
uacacuuuguucgcucuuu

SEQ ID NO: 2103062 - RNA, 19 nt, Artificial Sequence
  Description of Artificial Sequence: Synthetic oligonucleotide
cacgcccacacuuuuggca

SEQ ID NO: 2103063 - RNA, 19 nt, Artificial Sequence
  Description of Artificial Sequence: Synthetic oligonucleotide
aacgggacuuggggucagc

SEQ ID NO: 2103064 - RNA, 19 nt, Artificial Sequence
  Description of Artificial Sequence: Synthetic oligonucleotide
uggcuguccccuccugcag

SEQ ID NO: 2103065 - RNA, 19 nt, Artificial Sequence
  Description of Artificial Sequence: Synthetic oligonucleotide
gugaggaaauucuguuaca

SEQ ID NO: 2103066 - RNA, 19 nt, Artificial Sequence
  Description of Artificial Sequence: Synthetic oligonucleotide
acagggaccgccgcauguc

SEQ ID NO: 2103067 - RNA, 19 nt, Artificial Sequence
  Description of Artificial Sequence: Synthetic oligonucleotide
ucacagcgcaguguguacu

SEQ ID NO: 2103068 - RNA, 19 nt, Artificial Sequence
  Description of Artificial Sequence: Synthetic oligonucleotide
cagagagcauuuccccggc

SEQ ID NO: 2103069 - RNA, 19 nt, Artificial Sequence
  Description of Artificial Sequence: Synthetic oligonucleotide
gcuagagaugaccaccaca

SEQ ID NO: 2103070 - RNA, 19 nt, Artificial Sequence
  Description of Artificial Sequence: Synthetic oligonucleotide
uggagguuuacagucccuu

SEQ ID NO: 2103071 - RNA, 19 nt, Artificial Sequence
  Description of Artificial Sequence: Synthetic oligonucleotide
gaccauguagagagggaca

SEQ ID NO: 2103072 - RNA, 19 nt, Artificial Sequence
  Description of Artificial Sequence: Synthetic oligonucleotide
gcgauuuggauauucugaa

SEQ ID NO: 2103073 - RNA, 19 nt, Artificial Sequence
  Description of Artificial Sequence: Synthetic oligonucleotide
ucgauacacuuuguucgcu

SEQ ID NO: 2103074 - RNA, 19 nt, Artificial Sequence
  Description of Artificial Sequence: Synthetic oligonucleotide
agucuuugcuagagaugac

SEQ ID NO: 2103075 - RNA, 19 nt, Artificial Sequence
  Description of Artificial Sequence: Synthetic oligonucleotide
gcuggagguuuacaguccc

SEQ ID NO: 2103076 - RNA, 19 nt, Artificial Sequence
  Description of Artificial Sequence: Synthetic oligonucleotide
cauuaaccucaaacuccac

SEQ ID NO: 2103077 - RNA, 19 nt, Artificial Sequence
  Description of Artificial Sequence: Synthetic oligonucleotide
gaacacgcccacacuuuug

SEQ ID NO: 2103078 - RNA, 19 nt, Artificial Sequence
  Description of Artificial Sequence: Synthetic oligonucleotide
aggcuucgaacacgcccac

SEQ ID NO: 2103079 - RNA, 19 nt, Artificial Sequence
  Description of Artificial Sequence: Synthetic oligonucleotide
ucuccacccggaccagcug

SEQ ID NO: 2103080 - RNA, 19 nt, Artificial Sequence
  Description of Artificial Sequence: Synthetic oligonucleotide
gcgucgauacacuuuguuc

SEQ ID NO: 2103081 - RNA, 19 nt, Artificial Sequence
  Description of Artificial Sequence: Synthetic oligonucleotide
agucccuuccauugucaaa

SEQ ID NO: 2103082 - RNA, 19 nt, Artificial Sequence
  Description of Artificial Sequence: Synthetic oligonucleotide
aggguugggcaggugaaca

SEQ ID NO: 2103083 - RNA, 19 nt, Artificial Sequence
  Description of Artificial Sequence: Synthetic oligonucleotide
guggucuccaggguugggc

SEQ ID NO: 2103084 - RNA, 19 nt, Artificial Sequence
  Description of Artificial Sequence: Synthetic oligonucleotide
caaggcacgacguccaccu

SEQ ID NO: 2103085 - RNA, 19 nt, Artificial Sequence
  Description of Artificial Sequence: Synthetic oligonucleotide
gugaagucaacgggacuug

SEQ ID NO: 2103086 - RNA, 19 nt, Artificial Sequence
  Description of Artificial Sequence: Synthetic oligonucleotide
gauguccucuaaugaggaa

SEQ ID NO: 2103087 - RNA, 19 nt, Artificial Sequence
  Description of Artificial Sequence: Synthetic oligonucleotide
gagagcauuuccccggcgu

SEQ ID NO: 2103088 - RNA, 19 nt, Artificial Sequence
  Description of Artificial Sequence: Synthetic oligonucleotide
agaguucagauguccucua

SEQ ID NO: 2103089 - RNA, 19 nt, Artificial Sequence
  Description of Artificial Sequence: Synthetic oligonucleotide
acagcgcaguguguacugg

SEQ ID NO: 2103090 - RNA, 19 nt, Artificial Sequence
  Description of Artificial Sequence: Synthetic oligonucleotide
cucuaugcuccggauagca

SEQ ID NO: 2103091 - RNA, 19 nt, Artificial Sequence
  Description of Artificial Sequence: Synthetic oligonucleotide
ggagcagaaugaacgauga

SEQ ID NO: 2103092 - RNA, 19 nt, Artificial Sequence
  Description of Artificial Sequence: Synthetic oligonucleotide
gucacagcgcaguguguac

SEQ ID NO: 2103093 - RNA, 19 nt, Artificial Sequence
  Description of Artificial Sequence: Synthetic oligonucleotide
guuaguggucuccaggguu

SEQ ID NO: 2103094 - RNA, 19 nt, Artificial Sequence
  Description of Artificial Sequence: Synthetic oligonucleotide
aaggcacgacguccaccug

SEQ ID NO: 2103095 - RNA, 19 nt, Artificial Sequence
  Description of Artificial Sequence: Synthetic oligonucleotide
cauccgagugcuccaccac

SEQ ID NO: 2103096 - RNA, 19 nt, Artificial Sequence
  Description of Artificial Sequence: Synthetic oligonucleotide
gaguucagauguccucuaa

SEQ ID NO: 2103097 - RNA, 19 nt, Artificial Sequence
  Description of Artificial Sequence: Synthetic oligonucleotide
ucgcgugcauacccuucug

SEQ ID NO: 2103098 - RNA, 19 nt, Artificial Sequence
  Description of Artificial Sequence: Synthetic oligonucleotide
ccugugagcagaugaccag

SEQ ID NO: 2103099 - RNA, 19 nt, Artificial Sequence
  Description of Artificial Sequence: Synthetic oligonucleotide
caucgcgugcauacccuuc

SEQ ID NO: 2103100 - RNA, 19 nt, Artificial Sequence
  Description of Artificial Sequence: Synthetic oligonucleotide
ucagcacgucuauggugcu

SEQ ID NO: 2103101 - RNA, 19 nt, Artificial Sequence
  Description of Artificial Sequence: Synthetic oligonucleotide
gcacaguugguagaguuca

SEQ ID NO: 2103102 - RNA, 19 nt, Artificial Sequence
  Description of Artificial Sequence: Synthetic oligonucleotide
uugcaacacaggugaggaa

SEQ ID NO: 2103103 - RNA, 19 nt, Artificial Sequence
  Description of Artificial Sequence: Synthetic oligonucleotide
uuuccggggugauggugaa

SEQ ID NO: 2103104 - RNA, 19 nt, Artificial Sequence
  Description of Artificial Sequence: Synthetic oligonucleotide
aauguccccaucggcgauu

SEQ ID NO: 2103105 - RNA, 19 nt, Artificial Sequence
  Description of Artificial Sequence: Synthetic oligonucleotide
cugaagcucuaugcuccgg

SEQ ID NO: 2103106 - RNA, 19 nt, Artificial Sequence
  Description of Artificial Sequence: Synthetic oligonucleotide
ggaaaggccgaggcaaggc

SEQ ID NO: 2103107 - RNA, 19 nt, Artificial Sequence
  Description of Artificial Sequence: Synthetic oligonucleotide
ggauguucacaaacacgcc

SEQ ID NO: 2103108 - RNA, 19 nt, Artificial Sequence
  Description of Artificial Sequence: Synthetic oligonucleotide
guagagagggacagacaga

SEQ ID NO: 2103109 - RNA, 19 nt, Artificial Sequence
  Description of Artificial Sequence: Synthetic oligonucleotide
ggauauucugaaucucugu

SEQ ID NO: 2103110 - RNA, 19 nt, Artificial Sequence
  Description of Artificial Sequence: Synthetic oligonucleotide
gugagcagaugaccagaca

SEQ ID NO: 2103111 - RNA, 19 nt, Artificial Sequence
  Description of Artificial Sequence: Synthetic oligonucleotide
uccacccggaccagcugaa

SEQ ID NO: 2103112 - RNA, 19 nt, Artificial Sequence
  Description of Artificial Sequence: Synthetic oligonucleotide
ccacuuugaaguuaguggu

SEQ ID NO: 2103113 - RNA, 19 nt, Artificial Sequence
  Description of Artificial Sequence: Synthetic oligonucleotide
gugaggcccucucuuugac

SEQ ID NO: 2103114 - RNA, 19 nt, Artificial Sequence
  Description of Artificial Sequence: Synthetic oligonucleotide
gcuggacuauguccggcag

SEQ ID NO: 2103115 - RNA, 19 nt, Artificial Sequence
  Description of Artificial Sequence: Synthetic oligonucleotide
ccggcgucgauacacuuug

SEQ ID NO: 2103116 - RNA, 19 nt, Artificial Sequence
  Description of Artificial Sequence: Synthetic oligonucleotide
auguagagagggacagaca

SEQ ID NO: 2103117 - RNA, 19 nt, Artificial Sequence
  Description of Artificial Sequence: Synthetic oligonucleotide
gagcagaaugaacgaugaa

SEQ ID NO: 2103118 - RNA, 19 nt, Artificial Sequence
  Description of Artificial Sequence: Synthetic oligonucleotide
guuuacagucccuuccauu

SEQ ID NO: 2103119 - RNA, 19 nt, Artificial Sequence
  Description of Artificial Sequence: Synthetic oligonucleotide
cagagcuucagugggaagu

SEQ ID NO: 2103120 - RNA, 19 nt, Artificial Sequence
  Description of Artificial Sequence: Synthetic oligonucleotide
gacguccaccugugagcag

SEQ ID NO: 2103121 - RNA, 19 nt, Artificial Sequence
  Description of Artificial Sequence: Synthetic oligonucleotide
uccccggcgucgauacacu

SEQ ID NO: 2103122 - RNA, 19 nt, Artificial Sequence
  Description of Artificial Sequence: Synthetic oligonucleotide
gaagcucuaugcuccggau

SEQ ID NO: 2103123 - RNA, 19 nt, Artificial Sequence
  Description of Artificial Sequence: Synthetic oligonucleotide
gcgugcauacccuucugca

SEQ ID NO: 2103124 - RNA, 19 nt, Artificial Sequence
  Description of Artificial Sequence: Synthetic oligonucleotide
gcagaaugaacgaugaauu

SEQ ID NO: 2103125 - RNA, 19 nt, Artificial Sequence
  Description of Artificial Sequence: Synthetic oligonucleotide
cuggacggagucuuugcua

SEQ ID NO: 2103126 - RNA, 19 nt, Artificial Sequence
  Description of Artificial Sequence: Synthetic oligonucleotide
ggugaacagucuggggaag

SEQ ID NO: 2103127 - RNA, 19 nt, Artificial Sequence
  Description of Artificial Sequence: Synthetic oligonucleotide
cucuguggcaucgcgugca

SEQ ID NO: 2103128 - RNA, 19 nt, Artificial Sequence
  Description of Artificial Sequence: Synthetic oligonucleotide
cuggacuauguccggcaga

SEQ ID NO: 2103129 - RNA, 19 nt, Artificial Sequence
  Description of Artificial Sequence: Synthetic oligonucleotide
guccacguggccaccuggc

SEQ ID NO: 2103130 - RNA, 19 nt, Artificial Sequence
  Description of Artificial Sequence: Synthetic oligonucleotide
gugaacagucuggggaaga

SEQ ID NO: 2103131 - RNA, 19 nt, Artificial Sequence
  Description of Artificial Sequence: Synthetic oligonucleotide
cugcaagguuuccggggug

SEQ ID NO: 2103132 - RNA, 19 nt, Artificial Sequence
  Description of Artificial Sequence: Synthetic oligonucleotide
ggaaacucgaagggaaucu

SEQ ID NO: 2103133 - RNA, 19 nt, Artificial Sequence
  Description of Artificial Sequence: Synthetic oligonucleotide
ccuuggccaacagggaccg

SEQ ID NO: 2103134 - RNA, 19 nt, Artificial Sequence
  Description of Artificial Sequence: Synthetic oligonucleotide
cuccacccggaccagcuga

SEQ ID NO: 2103135 - RNA, 19 nt, Artificial Sequence
  Description of Artificial Sequence: Synthetic oligonucleotide
cagcuggacuauguccggc

SEQ ID NO: 2103136 - RNA, 19 nt, Artificial Sequence
  Description of Artificial Sequence: Synthetic oligonucleotide
gaagggaaucucagucuua

SEQ ID NO: 2103137 - RNA, 19 nt, Artificial Sequence
  Description of Artificial Sequence: Synthetic oligonucleotide
ggugaagucaacgggacuu

SEQ ID NO: 2103138 - RNA, 19 nt, Artificial Sequence
  Description of Artificial Sequence: Synthetic oligonucleotide
ggcugucagaaauguuuuc

SEQ ID NO: 2103139 - RNA, 19 nt, Artificial Sequence
  Description of Artificial Sequence: Synthetic oligonucleotide
uuuccccggcgucgauaca

SEQ ID NO: 2103140 - RNA, 19 nt, Artificial Sequence
  Description of Artificial Sequence: Synthetic oligonucleotide
guggcaucgcgugcauacc

SEQ ID NO: 2103141 - RNA, 19 nt, Artificial Sequence
  Description of Artificial Sequence: Synthetic oligonucleotide
cacgucuauggugcugcug

SEQ ID NO: 2103142 - RNA, 19 nt, Artificial Sequence
  Description of Artificial Sequence: Synthetic oligonucleotide
gcauccgagugcuccacca

SEQ ID NO: 2103143 - RNA, 19 nt, Artificial Sequence
  Description of Artificial Sequence: Synthetic oligonucleotide
gagggacagacagacuccu

SEQ ID NO: 2103144 - RNA, 19 nt, Artificial Sequence
  Description of Artificial Sequence: Synthetic oligonucleotide
gaccgccgcaugucacagc

SEQ ID NO: 2103145 - RNA, 19 nt, Artificial Sequence
  Description of Artificial Sequence: Synthetic oligonucleotide
ggcacaguugguagaguuc

SEQ ID NO: 2103146 - RNA, 19 nt, Artificial Sequence
  Description of Artificial Sequence: Synthetic oligonucleotide
caacagggaccgccgcaug

SEQ ID NO: 2103147 - RNA, 19 nt, Artificial Sequence
  Description of Artificial Sequence: Synthetic oligonucleotide
gguuuccggggugauggug

SEQ ID NO: 2103148 - RNA, 19 nt, Artificial Sequence
  Description of Artificial Sequence: Synthetic oligonucleotide
caggguugggcaggugaac

SEQ ID NO: 2103149 - RNA, 19 nt, Artificial Sequence
  Description of Artificial Sequence: Synthetic oligonucleotide
cgauacacuuuguucgcuc

SEQ ID NO: 2103150 - RNA, 19 nt, Artificial Sequence
  Description of Artificial Sequence: Synthetic oligonucleotide
ggcacgacguccaccugug

SEQ ID NO: 2103151 - RNA, 19 nt, Artificial Sequence
  Description of Artificial Sequence: Synthetic oligonucleotide
auggcacaguugguagagu

SEQ ID NO: 2103152 - RNA, 19 nt, Artificial Sequence
  Description of Artificial Sequence: Synthetic oligonucleotide
uguccccaucggcgauuug

SEQ ID NO: 2103153 - RNA, 19 nt, Artificial Sequence
  Description of Artificial Sequence: Synthetic oligonucleotide
cacugagcuggagguuuac

SEQ ID NO: 2103154 - RNA, 19 nt, Artificial Sequence
  Description of Artificial Sequence: Synthetic oligonucleotide
ccaucggcgauuuggauau

SEQ ID NO: 2103155 - RNA, 19 nt, Artificial Sequence
  Description of Artificial Sequence: Synthetic oligonucleotide
cggcgauuuggauauucug

SEQ ID NO: 2103156 - RNA, 19 nt, Artificial Sequence
  Description of Artificial Sequence: Synthetic oligonucleotide
ccacguggccaccuggcug

SEQ ID NO: 2103157 - RNA, 19 nt, Artificial Sequence
  Description of Artificial Sequence: Synthetic oligonucleotide
gcaaggcacgacguccacc

SEQ ID NO: 2103158 - RNA, 19 nt, Artificial Sequence
  Description of Artificial Sequence: Synthetic oligonucleotide
cagcacgucuauggugcug

SEQ ID NO: 2103159 - RNA, 19 nt, Artificial Sequence
  Description of Artificial Sequence: Synthetic oligonucleotide
cagcauccgagugcuccac

SEQ ID NO: 2103160 - RNA, 19 nt, Artificial Sequence
  Description of Artificial Sequence: Synthetic oligonucleotide
cagggaccgccgcauguca

SEQ ID NO: 2103161 - RNA, 19 nt, Artificial Sequence
  Description of Artificial Sequence: Synthetic oligonucleotide
ggaccgccgcaugucacag

SEQ ID NO: 2103162 - RNA, 19 nt, Artificial Sequence
  Description of Artificial Sequence: Synthetic oligonucleotide
cuucgaacacgcccacacu

SEQ ID NO: 2103163 - RNA, 19 nt, Artificial Sequence
  Description of Artificial Sequence: Synthetic oligonucleotide
cuguuacauuccagaggaa

SEQ ID NO: 2103164 - RNA, 19 nt, Artificial Sequence
  Description of Artificial Sequence: Synthetic oligonucleotide
gggaccgccgcaugucaca

SEQ ID NO: 2103165 - RNA, 19 nt, Artificial Sequence
  Description of Artificial Sequence: Synthetic oligonucleotide
augucacagcgcagugugu

SEQ ID NO: 2103166 - RNA, 19 nt, Artificial Sequence
  Description of Artificial Sequence: Synthetic oligonucleotide
caacgggacuuggggucag

SEQ ID NO: 2103167 - RNA, 19 nt, Artificial Sequence
  Description of Artificial Sequence: Synthetic oligonucleotide
gccaacagggaccgccgca

SEQ ID NO: 2103168 - RNA, 19 nt, Artificial Sequence
  Description of Artificial Sequence: Synthetic oligonucleotide
cgcgugcauacccuucugc

SEQ ID NO: 2103169 - RNA, 19 nt, Artificial Sequence
  Description of Artificial Sequence: Synthetic oligonucleotide
aggucuccacccggaccag

SEQ ID NO: 2103170 - RNA, 19 nt, Artificial Sequence
  Description of Artificial Sequence: Synthetic oligonucleotide
cuggcuucagcacgucuau

SEQ ID NO: 2103171 - RNA, 19 nt, Artificial Sequence
  Description of Artificial Sequence: Synthetic oligonucleotide
ggccaacagggaccgccgc

SEQ ID NO: 2103172 - RNA, 19 nt, Artificial Sequence
  Description of Artificial Sequence: Synthetic oligonucleotide
acacgccgugguaggucuc

SEQ ID NO: 2103173 - RNA, 19 nt, Artificial Sequence
  Description of Artificial Sequence: Synthetic oligonucleotide
cuggagguuuacagucccu

SEQ ID NO: 2103174 - RNA, 19 nt, Artificial Sequence
  Description of Artificial Sequence: Synthetic oligonucleotide
gcucuaugcuccggauagc

SEQ ID NO: 2103175 - RNA, 19 nt, Artificial Sequence
  Description of Artificial Sequence: Synthetic oligonucleotide
gguuuacagucccuuccau

SEQ ID NO: 2103176 - RNA, 19 nt, Artificial Sequence
  Description of Artificial Sequence: Synthetic oligonucleotide
cuauggugcugcugaggau

SEQ ID NO: 2103177 - RNA, 19 nt, Artificial Sequence
  Description of Artificial Sequence: Synthetic oligonucleotide
ggacggagucuuugcuaga

SEQ ID NO: 2103178 - RNA, 19 nt, Artificial Sequence
  Description of Artificial Sequence: Synthetic oligonucleotide
acccuucugcacacccaca

SEQ ID NO: 2103179 - RNA, 19 nt, Artificial Sequence
  Description of Artificial Sequence: Synthetic oligonucleotide
cuuggccaacagggaccgc

SEQ ID NO: 2103180 - RNA, 19 nt, Artificial Sequence
  Description of Artificial Sequence: Synthetic oligonucleotide
cuggggagcuuuccuggcu

SEQ ID NO: 2103181 - RNA, 19 nt, Artificial Sequence
  Description of Artificial Sequence: Synthetic oligonucleotide
ccaggguugggcaggugaa

SEQ ID NO: 2103182 - RNA, 19 nt, Artificial Sequence
  Description of Artificial Sequence: Synthetic oligonucleotide
ggcgucgauacacuuuguu

SEQ ID NO: 2103183 - RNA, 19 nt, Artificial Sequence
  Description of Artificial Sequence: Synthetic oligonucleotide
ccgagugcuccaccaccag

SEQ ID NO: 2103184 - RNA, 19 nt, Artificial Sequence
  Description of Artificial Sequence: Synthetic oligonucleotide
cuuugacguucugcaaggu

SEQ ID NO: 2103185 - RNA, 19 nt, Artificial Sequence
  Description of Artificial Sequence: Synthetic oligonucleotide
ccgugguaggucucauaca

SEQ ID NO: 2103186 - RNA, 19 nt, Artificial Sequence
  Description of Artificial Sequence: Synthetic oligonucleotide
gccgcaugucacagcgcag

SEQ ID NO: 2103187 - RNA, 19 nt, Artificial Sequence
  Description of Artificial Sequence: Synthetic oligonucleotide
ggcacugagcuggagguuu

SEQ ID NO: 2103188 - RNA, 19 nt, Artificial Sequence
  Description of Artificial Sequence: Synthetic oligonucleotide
agggacagacagacuccua

SEQ ID NO: 2103189 - RNA, 19 nt, Artificial Sequence
  Description of Artificial Sequence: Synthetic oligonucleotide
cgaggcaaggcacgacguc

SEQ ID NO: 2103190 - RNA, 19 nt, Artificial Sequence
  Description of Artificial Sequence: Synthetic oligonucleotide
gucuuaccacuggggagcu

SEQ ID NO: 2103191 - RNA, 19 nt, Artificial Sequence
  Description of Artificial Sequence: Synthetic oligonucleotide
ggggagugaggcccucucu

SEQ ID NO: 2103192 - RNA, 19 nt, Artificial Sequence
  Description of Artificial Sequence: Synthetic oligonucleotide
ggcaucgcgugcauacccu

SEQ ID NO: 2103193 - RNA, 19 nt, Artificial Sequence
  Description of Artificial Sequence: Synthetic oligonucleotide
gggcugucagaaauguuuu

SEQ ID NO: 2103194 - RNA, 19 nt, Artificial Sequence
  Description of Artificial Sequence: Synthetic oligonucleotide
guccucuaaugaggaauuu

SEQ ID NO: 2103195 - RNA, 19 nt, Artificial Sequence
  Description of Artificial Sequence: Synthetic oligonucleotide
acgccgugguaggucucau

SEQ ID NO: 2103196 - RNA, 19 nt, Artificial Sequence
  Description of Artificial Sequence: Synthetic oligonucleotide
ccauguagagagggacaga

SEQ ID NO: 2103197 - RNA, 19 nt, Artificial Sequence
  Description of Artificial Sequence: Synthetic oligonucleotide
ggcuucgaacacgcccaca

SEQ ID NO: 2103198 - RNA, 19 nt, Artificial Sequence
  Description of Artificial Sequence: Synthetic oligonucleotide
gggcugcgugauggcacag

SEQ ID NO: 2103199 - RNA, 19 nt, Artificial Sequence
  Description of Artificial Sequence: Synthetic oligonucleotide
ggccgaggcaaggcacgac

SEQ ID NO: 2103200 - RNA, 19 nt, Artificial Sequence
  Description of Artificial Sequence: Synthetic oligonucleotide
ccgccgcaugucacagcgc

SEQ ID NO: 2103201 - RNA, 19 nt, Artificial Sequence
  Description of Artificial Sequence: Synthetic oligonucleotide
cgauuuggauauucugaau

SEQ ID NO: 2103202 - RNA, 19 nt, Artificial Sequence
  Description of Artificial Sequence: Synthetic oligonucleotide
ccacccggaccagcugaag

SEQ ID NO: 2103203 - RNA, 19 nt, Artificial Sequence
  Description of Artificial Sequence: Synthetic oligonucleotide
ccgaggcaaggcacgacgu

SEQ ID NO: 2103204 - RNA, 19 nt, Artificial Sequence
  Description of Artificial Sequence: Synthetic oligonucleotide
gcaucgcgugcauacccuu

SEQ ID NO: 2103205 - RNA, 19 nt, Artificial Sequence
  Description of Artificial Sequence: Synthetic oligonucleotide
ccgcaugucacagcgcagu

SEQ ID NO: 2103206 - RNA, 19 nt, Artificial Sequence
  Description of Artificial Sequence: Synthetic oligonucleotide
gcaguguguacuggauguu

SEQ ID NO: 2103207 - RNA, 19 nt, Artificial Sequence
  Description of Artificial Sequence: Synthetic oligonucleotide
gcaagguuuccggggugau

SEQ ID NO: 2103208 - RNA, 19 nt, Artificial Sequence
  Description of Artificial Sequence: Synthetic oligonucleotide
cccggcgucgauacacuuu

SEQ ID NO: 2103209 - RNA, 19 nt, Artificial Sequence
  Description of Artificial Sequence: Synthetic oligonucleotide
cgaacacgcccacacuuuu

SEQ ID NO: 2103210 - RNA, 19 nt, Artificial Sequence
  Description of Artificial Sequence: Synthetic oligonucleotide
ccccaucggcgauuuggau

SEQ ID NO: 2103211 - RNA, 19 nt, Artificial Sequence
  Description of Artificial Sequence: Synthetic oligonucleotide
cgccgugguaggucucaua

SEQ ID NO: 2103212 - RNA, 19 nt, Artificial Sequence
  Description of Artificial Sequence: Synthetic oligonucleotide
caucggcgauuuggauauu

SEQ ID NO: 2103213 - RNA, 19 nt, Artificial Sequence
  Description of Artificial Sequence: Synthetic oligonucleotide
ccccggcgucgauacacuu

SEQ ID NO: 2103214 - RNA, 19 nt, Artificial Sequence
  Description of Artificial Sequence: Synthetic oligonucleotide
cggcgucgauacacuuugu

SEQ ID NO: 2103215 - RNA, 19 nt, Artificial Sequence
  Description of Artificial Sequence: Synthetic oligonucleotide
aaugacauggcacucauac

SEQ ID NO: 2103216 - RNA, 19 nt, Artificial Sequence
  Description of Artificial Sequence: Synthetic oligonucleotide
gagagagagaguuagagag

SEQ ID NO: 2103217 - RNA, 19 nt, Artificial Sequence
  Description of Artificial Sequence: Synthetic oligonucleotide
uuacaaaucagcuuggaga

SEQ ID NO: 2103218 - RNA, 19 nt, Artificial Sequence
  Description of Artificial Sequence: Synthetic oligonucleotide
aaaggugacagccauggag

SEQ ID NO: 2103219 - RNA, 19 nt, Artificial Sequence
  Description of Artificial Sequence: Synthetic oligonucleotide
agagauacaucaucguucc

SEQ ID NO: 2103220 - RNA, 19 nt, Artificial Sequence
  Description of Artificial Sequence: Synthetic oligonucleotide
acauauucgaaccagucuc

SEQ ID NO: 2103221 - RNA, 19 nt, Artificial Sequence
  Description of Artificial Sequence: Synthetic oligonucleotide
auaaaggcugccuuaaaac

SEQ ID NO: 2103222 - RNA, 19 nt, Artificial Sequence
  Description of Artificial Sequence: Synthetic oligonucleotide
gugauuacaaaucagcuug

SEQ ID NO: 2103223 - RNA, 19 nt, Artificial Sequence
  Description of Artificial Sequence: Synthetic oligonucleotide
uguaaagcuuggcagaaag

SEQ ID NO: 2103224 - RNA, 19 nt, Artificial Sequence
  Description of Artificial Sequence: Synthetic oligonucleotide
gaagacacauauucgaacc

SEQ ID NO: 2103225 - RNA, 19 nt, Artificial Sequence
  Description of Artificial Sequence: Synthetic oligonucleotide
gagaguuagagagagagag

SEQ ID NO: 2103226 - RNA, 19 nt, Artificial Sequence
  Description of Artificial Sequence: Synthetic oligonucleotide
uacaucaucguuccgagga

SEQ ID NO: 2103227 - RNA, 19 nt, Artificial Sequence
  Description of Artificial Sequence: Synthetic oligonucleotide
uaaguuguggaacccaaag

SEQ ID NO: 2103228 - RNA, 19 nt, Artificial Sequence
  Description of Artificial Sequence: Synthetic oligonucleotide
agagagagaggacugacuc

SEQ ID NO: 2103229 - RNA, 19 nt, Artificial Sequence
  Description of Artificial Sequence: Synthetic oligonucleotide
guuagagagagagagagag

SEQ ID NO: 2103230 - RNA, 19 nt, Artificial Sequence
  Description of Artificial Sequence: Synthetic oligonucleotide
uuagugugauuacaaauca

SEQ ID NO: 2103231 - RNA, 19 nt, Artificial Sequence
  Description of Artificial Sequence: Synthetic oligonucleotide
uauacucccgcuuagugug

SEQ ID NO: 2103232 - RNA, 19 nt, Artificial Sequence
  Description of Artificial Sequence: Synthetic oligonucleotide
cuuagugugauuacaaauc

SEQ ID NO: 2103233 - RNA, 19 nt, Artificial Sequence
  Description of Artificial Sequence: Synthetic oligonucleotide
gagagaguuagagagagag

SEQ ID NO: 2103234 - RNA, 19 nt, Artificial Sequence
  Description of Artificial Sequence: Synthetic oligonucleotide
aguuguggaacccaaaggu

SEQ ID NO: 2103235 - RNA, 19 nt, Artificial Sequence
  Description of Artificial Sequence: Synthetic oligonucleotide
aagccauuccauaauacgg

SEQ ID NO: 2103236 - RNA, 19 nt, Artificial Sequence
  Description of Artificial Sequence: Synthetic oligonucleotide
aaugggaggaacgcuuucc

SEQ ID NO: 2103237 - RNA, 19 nt, Artificial Sequence
  Description of Artificial Sequence: Synthetic oligonucleotide
aggaacauuugccuugccc

SEQ ID NO: 2103238 - RNA, 19 nt, Artificial Sequence
  Description of Artificial Sequence: Synthetic oligonucleotide
gagagagagagagagagag

SEQ ID NO: 2103239 - RNA, 19 nt, Artificial Sequence
  Description of Artificial Sequence: Synthetic oligonucleotide
gaguuagagagagagagag

SEQ ID NO: 2103240 - RNA, 19 nt, Artificial Sequence
  Description of Artificial Sequence: Synthetic oligonucleotide
gaauuugugguugaagaag

SEQ ID NO: 2103241 - RNA, 19 nt, Artificial Sequence
  Description of Artificial Sequence: Synthetic oligonucleotide
uuuggguaggagacaaacg

SEQ ID NO: 2103242 - RNA, 19 nt, Artificial Sequence
  Description of Artificial Sequence: Synthetic oligonucleotide
ucugcuagguaguuagccg

SEQ ID NO: 2103243 - RNA, 19 nt, Artificial Sequence
  Description of Artificial Sequence: Synthetic oligonucleotide
gaugaccagagauacauca

SEQ ID NO: 2103244 - RNA, 19 nt, Artificial Sequence
  Description of Artificial Sequence: Synthetic oligonucleotide
aaacauucccacugcaugu

SEQ ID NO: 2103245 - RNA, 19 nt, Artificial Sequence
  Description of Artificial Sequence: Synthetic oligonucleotide
gauacaucaucguuccgag

SEQ ID NO: 2103246 - RNA, 19 nt, Artificial Sequence
  Description of Artificial Sequence: Synthetic oligonucleotide
caaguuaaguuguggaacc

SEQ ID NO: 2103247 - RNA, 19 nt, Artificial Sequence
  Description of Artificial Sequence: Synthetic oligonucleotide
gaaaggugcucccaggaag

SEQ ID NO: 2103248 - RNA, 19 nt, Artificial Sequence
  Description of Artificial Sequence: Synthetic oligonucleotide
acggagacgacguagaagu

SEQ ID NO: 2103249 - RNA, 19 nt, Artificial Sequence
  Description of Artificial Sequence: Synthetic oligonucleotide
cugaagaagacauacguca

SEQ ID NO: 2103250 - RNA, 19 nt, Artificial Sequence
  Description of Artificial Sequence: Synthetic oligonucleotide
uagagagagagagagagga

SEQ ID NO: 2103251 - RNA, 19 nt, Artificial Sequence
  Description of Artificial Sequence: Synthetic oligonucleotide
ugauuacaaaucagcuugg

SEQ ID NO: 2103252 - RNA, 19 nt, Artificial Sequence
  Description of Artificial Sequence: Synthetic oligonucleotide
agaggacugacucaagcag

SEQ ID NO: 2103253 - RNA, 19 nt, Artificial Sequence
  Description of Artificial Sequence: Synthetic oligonucleotide
aaugucaaacauucccacu

SEQ ID NO: 2103254 - RNA, 19 nt, Artificial Sequence
  Description of Artificial Sequence: Synthetic oligonucleotide
uuagagagagagagagagg

SEQ ID NO: 2103255 - RNA, 19 nt, Artificial Sequence
  Description of Artificial Sequence: Synthetic oligonucleotide
gagagagagagagaguuag

SEQ ID NO: 2103256 - RNA, 19 nt, Artificial Sequence
  Description of Artificial Sequence: Synthetic oligonucleotide
aaguuaaguuguggaaccc

SEQ ID NO: 2103257 - RNA, 19 nt, Artificial Sequence
  Description of Artificial Sequence: Synthetic oligonucleotide
agcucugcuagguaguuag

SEQ ID NO: 2103258 - RNA, 19 nt, Artificial Sequence
  Description of Artificial Sequence: Synthetic oligonucleotide
aaugucuucuccaggaaca

SEQ ID NO: 2103259 - RNA, 19 nt, Artificial Sequence
  Description of Artificial Sequence: Synthetic oligonucleotide
gagagagagagaguuagag

SEQ ID NO: 2103260 - RNA, 19 nt, Artificial Sequence
  Description of Artificial Sequence: Synthetic oligonucleotide
gagagagaguuagagagag

SEQ ID NO: 2103261 - RNA, 19 nt, Artificial Sequence
  Description of Artificial Sequence: Synthetic oligonucleotide
caaacauucccacugcaug

SEQ ID NO: 2103262 - RNA, 19 nt, Artificial Sequence
  Description of Artificial Sequence: Synthetic oligonucleotide
gaacccaaaggugacagcc

SEQ ID NO: 2103263 - RNA, 19 nt, Artificial Sequence
  Description of Artificial Sequence: Synthetic oligonucleotide
accaagaaggcagacagag

SEQ ID NO: 2103264 - RNA, 19 nt, Artificial Sequence
  Description of Artificial Sequence: Synthetic oligonucleotide
uguuuauacucccgcuuag

SEQ ID NO: 2103265 - RNA, 19 nt, Artificial Sequence
  Description of Artificial Sequence: Synthetic oligonucleotide
cagagauacaucaucguuc

SEQ ID NO: 2103266 - RNA, 19 nt, Artificial Sequence
  Description of Artificial Sequence: Synthetic oligonucleotide
agacagagucagcucaccc

SEQ ID NO: 2103267 - RNA, 19 nt, Artificial Sequence
  Description of Artificial Sequence: Synthetic oligonucleotide
aagacacauauucgaacca

SEQ ID NO: 2103268 - RNA, 19 nt, Artificial Sequence
  Description of Artificial Sequence: Synthetic oligonucleotide
ugcaaggcuguuuauacuc

SEQ ID NO: 2103269 - RNA, 19 nt, Artificial Sequence
  Description of Artificial Sequence: Synthetic oligonucleotide
agcagauuccacucgaaga

SEQ ID NO: 2103270 - RNA, 19 nt, Artificial Sequence
  Description of Artificial Sequence: Synthetic oligonucleotide
aaaugggaggaacgcuuuc

SEQ ID NO: 2103271 - RNA, 19 nt, Artificial Sequence
  Description of Artificial Sequence: Synthetic oligonucleotide
uguacuugcgugcugucuc

SEQ ID NO: 2103272 - RNA, 19 nt, Artificial Sequence
  Description of Artificial Sequence: Synthetic oligonucleotide
uaauacggagacgacguag

SEQ ID NO: 2103273 - RNA, 19 nt, Artificial Sequence
  Description of Artificial Sequence: Synthetic oligonucleotide
uuggagaugcccauuuacu

SEQ ID NO: 2103274 - RNA, 19 nt, Artificial Sequence
  Description of Artificial Sequence: Synthetic oligonucleotide
uuuucaguugucucuguaa

SEQ ID NO: 2103275 - RNA, 19 nt, Artificial Sequence
  Description of Artificial Sequence: Synthetic oligonucleotide
cccacuaucauuugggagg

SEQ ID NO: 2103276 - RNA, 19 nt, Artificial Sequence
  Description of Artificial Sequence: Synthetic oligonucleotide
cauauucgaaccagucucc

SEQ ID NO: 2103277 - RNA, 19 nt, Artificial Sequence
  Description of Artificial Sequence: Synthetic oligonucleotide
ggagauguagaucaucagc

SEQ ID NO: 2103278 - RNA, 19 nt, Artificial Sequence
  Description of Artificial Sequence: Synthetic oligonucleotide
uagguaguuagccgaagac

SEQ ID NO: 2103279 - RNA, 19 nt, Artificial Sequence
  Description of Artificial Sequence: Synthetic oligonucleotide
ugggcagaugaccagagau

SEQ ID NO: 2103280 - RNA, 19 nt, Artificial Sequence
  Description of Artificial Sequence: Synthetic oligonucleotide
aagacauacgucaccacca

SEQ ID NO: 2103281 - RNA, 19 nt, Artificial Sequence
  Description of Artificial Sequence: Synthetic oligonucleotide
ugaccagagauacaucauc

SEQ ID NO: 2103282 - RNA, 19 nt, Artificial Sequence
  Description of Artificial Sequence: Synthetic oligonucleotide
agauacaucaucguuccga

SEQ ID NO: 2103283 - RNA, 19 nt, Artificial Sequence
  Description of Artificial Sequence: Synthetic oligonucleotide
aggacguggaaccaccgag

SEQ ID NO: 2103284 - RNA, 19 nt, Artificial Sequence
  Description of Artificial Sequence: Synthetic oligonucleotide
guuccgaggacguggaacc

SEQ ID NO: 2103285 - RNA, 19 nt, Artificial Sequence
  Description of Artificial Sequence: Synthetic oligonucleotide
uugggaaaggugcucccag

SEQ ID NO: 2103286 - RNA, 19 nt, Artificial Sequence
  Description of Artificial Sequence: Synthetic oligonucleotide
ggagaugcccauuuacugg

SEQ ID NO: 2103287 - RNA, 19 nt, Artificial Sequence
  Description of Artificial Sequence: Synthetic oligonucleotide
ucuuguagaauuugugguu

SEQ ID NO: 2103288 - RNA, 19 nt, Artificial Sequence
  Description of Artificial Sequence: Synthetic oligonucleotide
aagcacgaagccauuuugg

SEQ ID NO: 2103289 - RNA, 19 nt, Artificial Sequence
  Description of Artificial Sequence: Synthetic oligonucleotide
ugcauguguacuugcgugc

SEQ ID NO: 2103290 - RNA, 19 nt, Artificial Sequence
  Description of Artificial Sequence: Synthetic oligonucleotide
gcagauuccacucgaagag

SEQ ID NO: 2103291 - RNA, 19 nt, Artificial Sequence
  Description of Artificial Sequence: Synthetic oligonucleotide
cuuguagaauuugugguug

SEQ ID NO: 2103292 - RNA, 19 nt, Artificial Sequence
  Description of Artificial Sequence: Synthetic oligonucleotide
agagagagagaguuagaga

SEQ ID NO: 2103293 - RNA, 19 nt, Artificial Sequence
  Description of Artificial Sequence: Synthetic oligonucleotide
ucgaaccagucuccaaagg

SEQ ID NO: 2103294 - RNA, 19 nt, Artificial Sequence
  Description of Artificial Sequence: Synthetic oligonucleotide
ugagcaaagcacgaagcca

SEQ ID NO: 2103295 - RNA, 19 nt, Artificial Sequence
  Description of Artificial Sequence: Synthetic oligonucleotide
aauacggagacgacguaga

SEQ ID NO: 2103296 - RNA, 19 nt, Artificial Sequence
  Description of Artificial Sequence: Synthetic oligonucleotide
ggaaccaccgagcugguag

SEQ ID NO: 2103297 - RNA, 19 nt, Artificial Sequence
  Description of Artificial Sequence: Synthetic oligonucleotide
gagacgacguagaagugag

SEQ ID NO: 2103298 - RNA, 19 nt, Artificial Sequence
  Description of Artificial Sequence: Synthetic oligonucleotide
uggaacccaaaggugacag

SEQ ID NO: 2103299 - RNA, 19 nt, Artificial Sequence
  Description of Artificial Sequence: Synthetic oligonucleotide
uguggaacccaaaggugac

SEQ ID NO: 2103300 - RNA, 19 nt, Artificial Sequence
  Description of Artificial Sequence: Synthetic oligonucleotide
uggcagugaacuaucacua

SEQ ID NO: 2103301 - RNA, 19 nt, Artificial Sequence
  Description of Artificial Sequence: Synthetic oligonucleotide
guagaauuugugguugaag

SEQ ID NO: 2103302 - RNA, 19 nt, Artificial Sequence
  Description of Artificial Sequence: Synthetic oligonucleotide
agagagagagaggacugac

SEQ ID NO: 2103303 - RNA, 19 nt, Artificial Sequence
  Description of Artificial Sequence: Synthetic oligonucleotide
augucgaaggcccugcaga

SEQ ID NO: 2103304 - RNA, 19 nt, Artificial Sequence
  Description of Artificial Sequence: Synthetic oligonucleotide
aggacugacucaagcaggc

SEQ ID NO: 2103305 - RNA, 19 nt, Artificial Sequence
  Description of Artificial Sequence: Synthetic oligonucleotide
gagaggacugacucaagca

SEQ ID NO: 2103306 - RNA, 19 nt, Artificial Sequence
  Description of Artificial Sequence: Synthetic oligonucleotide
gccauuuugggaaaggugc

SEQ ID NO: 2103307 - RNA, 19 nt, Artificial Sequence
  Description of Artificial Sequence: Synthetic oligonucleotide
accaaguuaaguuguggaa

SEQ ID NO: 2103308 - RNA, 19 nt, Artificial Sequence
  Description of Artificial Sequence: Synthetic oligonucleotide
acacauauucgaaccaguc

SEQ ID NO: 2103309 - RNA, 19 nt, Artificial Sequence
  Description of Artificial Sequence: Synthetic oligonucleotide
cauaauacggagacgacgu

SEQ ID NO: 2103310 - RNA, 19 nt, Artificial Sequence
  Description of Artificial Sequence: Synthetic oligonucleotide
agacacauauucgaaccag

SEQ ID NO: 2103311 - RNA, 19 nt, Artificial Sequence
  Description of Artificial Sequence: Synthetic oligonucleotide
acccacuaucauuugggag

SEQ ID NO: 2103312 - RNA, 19 nt, Artificial Sequence
  Description of Artificial Sequence: Synthetic oligonucleotide
gaugucgaaggcccugcag

SEQ ID NO: 2103313 - RNA, 19 nt, Artificial Sequence
  Description of Artificial Sequence: Synthetic oligonucleotide
agacauacgucaccaccag

SEQ ID NO: 2103314 - RNA, 19 nt, Artificial Sequence
  Description of Artificial Sequence: Synthetic oligonucleotide
acuaucauuugggaggccu

SEQ ID NO: 2103315 - RNA, 19 nt, Artificial Sequence
  Description of Artificial Sequence: Synthetic oligonucleotide
gguaguuagccgaagacac

SEQ ID NO: 2103316 - RNA, 19 nt, Artificial Sequence
  Description of Artificial Sequence: Synthetic oligonucleotide
cacgaagccauuuugggaa

SEQ ID NO: 2103317 - RNA, 19 nt, Artificial Sequence
  Description of Artificial Sequence: Synthetic oligonucleotide
ugugcuggcagugaacuau

SEQ ID NO: 2103318 - RNA, 19 nt, Artificial Sequence
  Description of Artificial Sequence: Synthetic oligonucleotide
cucacccacuaucauuugg

SEQ ID NO: 2103319 - RNA, 19 nt, Artificial Sequence
  Description of Artificial Sequence: Synthetic oligonucleotide
ugggaaaggugcucccagg

SEQ ID NO: 2103320 - RNA, 19 nt, Artificial Sequence
  Description of Artificial Sequence: Synthetic oligonucleotide
auuccacucgaagagccuc

SEQ ID NO: 2103321 - RNA, 19 nt, Artificial Sequence
  Description of Artificial Sequence: Synthetic oligonucleotide
cuaugcuuuggguaggaga

SEQ ID NO: 2103322 - RNA, 19 nt, Artificial Sequence
  Description of Artificial Sequence: Synthetic oligonucleotide
uguagaucaucagcucugc

SEQ ID NO: 2103323 - RNA, 19 nt, Artificial Sequence
  Description of Artificial Sequence: Synthetic oligonucleotide
cacugcauguguacuugcg

SEQ ID NO: 2103324 - RNA, 19 nt, Artificial Sequence
  Description of Artificial Sequence: Synthetic oligonucleotide
acauuugccuugcccagug

SEQ ID NO: 2103325 - RNA, 19 nt, Artificial Sequence
  Description of Artificial Sequence: Synthetic oligonucleotide
caucguuccgaggacgugg

SEQ ID NO: 2103326 - RNA, 19 nt, Artificial Sequence
  Description of Artificial Sequence: Synthetic oligonucleotide
uacggagacgacguagaag

SEQ ID NO: 2103327 - RNA, 19 nt, Artificial Sequence
  Description of Artificial Sequence: Synthetic oligonucleotide
uuguagaauuugugguuga

SEQ ID NO: 2103328 - RNA, 19 nt, Artificial Sequence
  Description of Artificial Sequence: Synthetic oligonucleotide
uaguuagccgaagacacau

SEQ ID NO: 2103329 - RNA, 19 nt, Artificial Sequence
  Description of Artificial Sequence: Synthetic oligonucleotide
uccauaauacggagacgac

SEQ ID NO: 2103330 - RNA, 19 nt, Artificial Sequence
  Description of Artificial Sequence: Synthetic oligonucleotide
auacaucaucguuccgagg

SEQ ID NO: 2103331 - RNA, 19 nt, Artificial Sequence
  Description of Artificial Sequence: Synthetic oligonucleotide
gacgacguagaagugagaa

SEQ ID NO: 2103332 - RNA, 19 nt, Artificial Sequence
  Description of Artificial Sequence: Synthetic oligonucleotide
gagacugagaaaggaacca

SEQ ID NO: 2103333 - RNA, 19 nt, Artificial Sequence
  Description of Artificial Sequence: Synthetic oligonucleotide
aaauaccucuuggggaugu

SEQ ID NO: 2103334 - RNA, 19 nt, Artificial Sequence
  Description of Artificial Sequence: Synthetic oligonucleotide
auuugccuugcccagugaa

SEQ ID NO: 2103335 - RNA, 19 nt, Artificial Sequence
  Description of Artificial Sequence: Synthetic oligonucleotide
ugccaggaaugucuucucc

SEQ ID NO: 2103336 - RNA, 19 nt, Artificial Sequence
  Description of Artificial Sequence: Synthetic oligonucleotide
guacuugcgugcugucucg

SEQ ID NO: 2103337 - RNA, 19 nt, Artificial Sequence
  Description of Artificial Sequence: Synthetic oligonucleotide
uuccacucgaagagccucc

SEQ ID NO: 2103338 - RNA, 19 nt, Artificial Sequence
  Description of Artificial Sequence: Synthetic oligonucleotide
aaaauaccucuuggggaug

SEQ ID NO: 2103339 - RNA, 19 nt, Artificial Sequence
  Description of Artificial Sequence: Synthetic oligonucleotide
uuguuucuccugagguugc

SEQ ID NO: 2103340 - RNA, 19 nt, Artificial Sequence
  Description of Artificial Sequence: Synthetic oligonucleotide
gcagugaacuaucacuacc

SEQ ID NO: 2103341 - RNA, 19 nt, Artificial Sequence
  Description of Artificial Sequence: Synthetic oligonucleotide
gaaccaccgagcugguagc

SEQ ID NO: 2103342 - RNA, 19 nt, Artificial Sequence
  Description of Artificial Sequence: Synthetic oligonucleotide
gaggaacgcuuuccuaugc

SEQ ID NO: 2103343 - RNA, 19 nt, Artificial Sequence
  Description of Artificial Sequence: Synthetic oligonucleotide
cucaagcaggcaugcacgc

SEQ ID NO: 2103344 - RNA, 19 nt, Artificial Sequence
  Description of Artificial Sequence: Synthetic oligonucleotide
aguuaaguuguggaaccca

SEQ ID NO: 2103345 - RNA, 19 nt, Artificial Sequence
  Description of Artificial Sequence: Synthetic oligonucleotide
accagagauacaucaucgu

SEQ ID NO: 2103346 - RNA, 19 nt, Artificial Sequence
  Description of Artificial Sequence: Synthetic oligonucleotide
cucuguaaagcuuggcaga

SEQ ID NO: 2103347 - RNA, 19 nt, Artificial Sequence
  Description of Artificial Sequence: Synthetic oligonucleotide
aaccagucuccaaagggga

SEQ ID NO: 2103348 - RNA, 19 nt, Artificial Sequence
  Description of Artificial Sequence: Synthetic oligonucleotide
uguggacccaaggaacacc

SEQ ID NO: 2103349 - RNA, 19 nt, Artificial Sequence
  Description of Artificial Sequence: Synthetic oligonucleotide
agagagagagagaggacug

SEQ ID NO: 2103350 - RNA, 19 nt, Artificial Sequence
  Description of Artificial Sequence: Synthetic oligonucleotide
gagacaaacgugcucuugu

SEQ ID NO: 2103351 - RNA, 19 nt, Artificial Sequence
  Description of Artificial Sequence: Synthetic oligonucleotide
gagauacaucaucguuccg

SEQ ID NO: 2103352 - RNA, 19 nt, Artificial Sequence
  Description of Artificial Sequence: Synthetic oligonucleotide
ucggugucuccagggaugg

SEQ ID NO: 2103353 - RNA, 19 nt, Artificial Sequence
  Description of Artificial Sequence: Synthetic oligonucleotide
guaaagcuuggcagaaagc

SEQ ID NO: 2103354 - RNA, 19 nt, Artificial Sequence
  Description of Artificial Sequence: Synthetic oligonucleotide
gacauacgucaccaccagc

SEQ ID NO: 2103355 - RNA, 19 nt, Artificial Sequence
  Description of Artificial Sequence: Synthetic oligonucleotide
agagagagagagagaggac

SEQ ID NO: 2103356 - RNA, 19 nt, Artificial Sequence
  Description of Artificial Sequence: Synthetic oligonucleotide
uauucgaaccagucuccaa

SEQ ID NO: 2103357 - RNA, 19 nt, Artificial Sequence
  Description of Artificial Sequence: Synthetic oligonucleotide
cucggugucuccagggaug

SEQ ID NO: 2103358 - RNA, 19 nt, Artificial Sequence
  Description of Artificial Sequence: Synthetic oligonucleotide
cagcagauuccacucgaag

SEQ ID NO: 2103359 - RNA, 19 nt, Artificial Sequence
  Description of Artificial Sequence: Synthetic oligonucleotide
uguagaauuugugguugaa

SEQ ID NO: 2103360 - RNA, 19 nt, Artificial Sequence
  Description of Artificial Sequence: Synthetic oligonucleotide
cuugcgugcugucucggug

SEQ ID NO: 2103361 - RNA, 19 nt, Artificial Sequence
  Description of Artificial Sequence: Synthetic oligonucleotide
ccauaauacggagacgacg

SEQ ID NO: 2103362 - RNA, 19 nt, Artificial Sequence
  Description of Artificial Sequence: Synthetic oligonucleotide
ugcuuuggguaggagacaa

SEQ ID NO: 2103363 - RNA, 19 nt, Artificial Sequence
  Description of Artificial Sequence: Synthetic oligonucleotide
gagagagagagagaggacu

SEQ ID NO: 2103364 - RNA, 19 nt, Artificial Sequence
  Description of Artificial Sequence: Synthetic oligonucleotide
uacugguuuucaguugucu

SEQ ID NO: 2103365 - RNA, 19 nt, Artificial Sequence
  Description of Artificial Sequence: Synthetic oligonucleotide
uggcacucauacugauggg

SEQ ID NO: 2103366 - RNA, 19 nt, Artificial Sequence
  Description of Artificial Sequence: Synthetic oligonucleotide
gauuacaaaucagcuugga

SEQ ID NO: 2103367 - RNA, 19 nt, Artificial Sequence
  Description of Artificial Sequence: Synthetic oligonucleotide
ggguaggagacaaacgugc

SEQ ID NO: 2103368 - RNA, 19 nt, Artificial Sequence
  Description of Artificial Sequence: Synthetic oligonucleotide
agccauuccauaauacgga

SEQ ID NO: 2103369 - RNA, 19 nt, Artificial Sequence
  Description of Artificial Sequence: Synthetic oligonucleotide
aggaagagagacugagaaa

SEQ ID NO: 2103370 - RNA, 19 nt, Artificial Sequence
  Description of Artificial Sequence: Synthetic oligonucleotide
aggcagacagagucagcuc

SEQ ID NO: 2103371 - RNA, 19 nt, Artificial Sequence
  Description of Artificial Sequence: Synthetic oligonucleotide
aaggcugccuuaaaacaaa

SEQ ID NO: 2103372 - RNA, 19 nt, Artificial Sequence
  Description of Artificial Sequence: Synthetic oligonucleotide
uuagccgaagacacauauu

SEQ ID NO: 2103373 - RNA, 19 nt, Artificial Sequence
  Description of Artificial Sequence: Synthetic oligonucleotide
uugcgugcugucucggugu

SEQ ID NO: 2103374 - RNA, 19 nt, Artificial Sequence
  Description of Artificial Sequence: Synthetic oligonucleotide
gagaugcccauuuacuggu

SEQ ID NO: 2103375 - RNA, 19 nt, Artificial Sequence
  Description of Artificial Sequence: Synthetic oligonucleotide
ugcuagguaguuagccgaa

SEQ ID NO: 2103376 - RNA, 19 nt, Artificial Sequence
  Description of Artificial Sequence: Synthetic oligonucleotide
uuccuaugcuuuggguagg

SEQ ID NO: 2103377 - RNA, 19 nt, Artificial Sequence
  Description of Artificial Sequence: Synthetic oligonucleotide
ccaaguuaaguuguggaac

SEQ ID NO: 2103378 - RNA, 19 nt, Artificial Sequence
  Description of Artificial Sequence: Synthetic oligonucleotide
gagagagagagagagaguu

SEQ ID NO: 2103379 - RNA, 19 nt, Artificial Sequence
  Description of Artificial Sequence: Synthetic oligonucleotide
ucucggugucuccagggau

SEQ ID NO: 2103380 - RNA, 19 nt, Artificial Sequence
  Description of Artificial Sequence: Synthetic oligonucleotide
cugcuagguaguuagccga

SEQ ID NO: 2103381 - RNA, 19 nt, Artificial Sequence
  Description of Artificial Sequence: Synthetic oligonucleotide
cuagguaguuagccgaaga

SEQ ID NO: 2103382 - RNA, 19 nt, Artificial Sequence
  Description of Artificial Sequence: Synthetic oligonucleotide
ugagaaugacauggcacuc

SEQ ID NO: 2103383 - RNA, 19 nt, Artificial Sequence
  Description of Artificial Sequence: Synthetic oligonucleotide
cgaaccagucuccaaaggg

SEQ ID NO: 2103384 - RNA, 19 nt, Artificial Sequence
  Description of Artificial Sequence: Synthetic oligonucleotide
cugacucaagcaggcaugc

SEQ ID NO: 2103385 - RNA, 19 nt, Artificial Sequence
  Description of Artificial Sequence: Synthetic oligonucleotide
uccagggauggaaucuguc

SEQ ID NO: 2103386 - RNA, 19 nt, Artificial Sequence
  Description of Artificial Sequence: Synthetic oligonucleotide
agagagacugagaaaggaa

SEQ ID NO: 2103387 - RNA, 19 nt, Artificial Sequence
  Description of Artificial Sequence: Synthetic oligonucleotide
ucagcucacccacuaucau

SEQ ID NO: 2103388 - RNA, 19 nt, Artificial Sequence
  Description of Artificial Sequence: Synthetic oligonucleotide
ucccauaaaggcugccuua

SEQ ID NO: 2103389 - RNA, 19 nt, Artificial Sequence
  Description of Artificial Sequence: Synthetic oligonucleotide
caaacgugcucuuguagaa

SEQ ID NO: 2103390 - RNA, 19 nt, Artificial Sequence
  Description of Artificial Sequence: Synthetic oligonucleotide
agcaggcaugcacgcuugc

SEQ ID NO: 2103391 - RNA, 19 nt, Artificial Sequence
  Description of Artificial Sequence: Synthetic oligonucleotide
gccauuccauaauacggag

SEQ ID NO: 2103392 - RNA, 19 nt, Artificial Sequence
  Description of Artificial Sequence: Synthetic oligonucleotide
aaacgugcucuuguagaau

SEQ ID NO: 2103393 - RNA, 19 nt, Artificial Sequence
  Description of Artificial Sequence: Synthetic oligonucleotide
guuagccgaagacacauau

SEQ ID NO: 2103394 - RNA, 19 nt, Artificial Sequence
  Description of Artificial Sequence: Synthetic oligonucleotide
uccacucgaagagccuccg

SEQ ID NO: 2103395 - RNA, 19 nt, Artificial Sequence
  Description of Artificial Sequence: Synthetic oligonucleotide
acccaaaggugacagccau

SEQ ID NO: 2103396 - RNA, 19 nt, Artificial Sequence
  Description of Artificial Sequence: Synthetic oligonucleotide
ugcacgcuugcaaggcugu

SEQ ID NO: 2103397 - RNA, 19 nt, Artificial Sequence
  Description of Artificial Sequence: Synthetic oligonucleotide
cagauuccacucgaagagc

SEQ ID NO: 2103398 - RNA, 19 nt, Artificial Sequence
  Description of Artificial Sequence: Synthetic oligonucleotide
aguucugagcaaagcacga

SEQ ID NO: 2103399 - RNA, 19 nt, Artificial Sequence
  Description of Artificial Sequence: Synthetic oligonucleotide
cauggagauguagaucauc

SEQ ID NO: 2103400 - RNA, 19 nt, Artificial Sequence
  Description of Artificial Sequence: Synthetic oligonucleotide
agcucacccacuaucauuu

SEQ ID NO: 2103401 - RNA, 19 nt, Artificial Sequence
  Description of Artificial Sequence: Synthetic oligonucleotide
uguguggcuccaagaguuc

SEQ ID NO: 2103402 - RNA, 19 nt, Artificial Sequence
  Description of Artificial Sequence: Synthetic oligonucleotide
auauucgaaccagucucca

SEQ ID NO: 2103403 - RNA, 19 nt, Artificial Sequence
  Description of Artificial Sequence: Synthetic oligonucleotide
agagagagaguuagagaga

SEQ ID NO: 2103404 - RNA, 19 nt, Artificial Sequence
  Description of Artificial Sequence: Synthetic oligonucleotide
acauucccacugcaugugu

SEQ ID NO: 2103405 - RNA, 19 nt, Artificial Sequence
  Description of Artificial Sequence: Synthetic oligonucleotide
acgacguagaagugagaaa

SEQ ID NO: 2103406 - RNA, 19 nt, Artificial Sequence
  Description of Artificial Sequence: Synthetic oligonucleotide
cagugaacuaucacuaccu

SEQ ID NO: 2103407 - RNA, 19 nt, Artificial Sequence
  Description of Artificial Sequence: Synthetic oligonucleotide
ggcacucauacugaugggc

SEQ ID NO: 2103408 - RNA, 19 nt, Artificial Sequence
  Description of Artificial Sequence: Synthetic oligonucleotide
aucuugugcuggcagugaa

SEQ ID NO: 2103409 - RNA, 19 nt, Artificial Sequence
  Description of Artificial Sequence: Synthetic oligonucleotide
agacaaacgugcucuugua

SEQ ID NO: 2103410 - RNA, 19 nt, Artificial Sequence
  Description of Artificial Sequence: Synthetic oligonucleotide
cagcacugcaguggaaggg

SEQ ID NO: 2103411 - RNA, 19 nt, Artificial Sequence
  Description of Artificial Sequence: Synthetic oligonucleotide
ggcagacaaggcuuggcug

SEQ ID NO: 2103412 - RNA, 19 nt, Artificial Sequence
  Description of Artificial Sequence: Synthetic oligonucleotide
agaguuagagagagagaga

SEQ ID NO: 2103413 - RNA, 19 nt, Artificial Sequence
  Description of Artificial Sequence: Synthetic oligonucleotide
acgcuugcaaggcuguuua

SEQ ID NO: 2103414 - RNA, 19 nt, Artificial Sequence
  Description of Artificial Sequence: Synthetic oligonucleotide
caggcuguggacccaagga

SEQ ID NO: 2103415 - RNA, 19 nt, Artificial Sequence
  Description of Artificial Sequence: Synthetic oligonucleotide
ggaggaacgcuuuccuaug

SEQ ID NO: 2103416 - RNA, 19 nt, Artificial Sequence
  Description of Artificial Sequence: Synthetic oligonucleotide
cuguuuauacucccgcuua

SEQ ID NO: 2103417 - RNA, 19 nt, Artificial Sequence
  Description of Artificial Sequence: Synthetic oligonucleotide
gugugauuacaaaucagcu

SEQ ID NO: 2103418 - RNA, 19 nt, Artificial Sequence
  Description of Artificial Sequence: Synthetic oligonucleotide
gguagcagcagauuccacu

SEQ ID NO: 2103419 - RNA, 19 nt, Artificial Sequence
  Description of Artificial Sequence: Synthetic oligonucleotide
cacauauucgaaccagucu

SEQ ID NO: 2103420 - RNA, 19 nt, Artificial Sequence
  Description of Artificial Sequence: Synthetic oligonucleotide
agagaguuagagagagaga

SEQ ID NO: 2103421 - RNA, 19 nt, Artificial Sequence
  Description of Artificial Sequence: Synthetic oligonucleotide
acgcuuuccuaugcuuugg

SEQ ID NO: 2103422 - RNA, 19 nt, Artificial Sequence
  Description of Artificial Sequence: Synthetic oligonucleotide
uacuugcgugcugucucgg

SEQ ID NO: 2103423 - RNA, 19 nt, Artificial Sequence
  Description of Artificial Sequence: Synthetic oligonucleotide
auaauacggagacgacgua

SEQ ID NO: 2103424 - RNA, 19 nt, Artificial Sequence
  Description of Artificial Sequence: Synthetic oligonucleotide
ugcccauuuacugguuuuc

SEQ ID NO: 2103425 - RNA, 19 nt, Artificial Sequence
  Description of Artificial Sequence: Synthetic oligonucleotide
cuccgcaggcuguggaccc

SEQ ID NO: 2103426 - RNA, 19 nt, Artificial Sequence
  Description of Artificial Sequence: Synthetic oligonucleotide
ucaagcaggcaugcacgcu

SEQ ID NO: 2103427 - RNA, 19 nt, Artificial Sequence
  Description of Artificial Sequence: Synthetic oligonucleotide
aguuagagagagagagaga

SEQ ID NO: 2103428 - RNA, 19 nt, Artificial Sequence
  Description of Artificial Sequence: Synthetic oligonucleotide
ugccuugcccagugaacac

SEQ ID NO: 2103429 - RNA, 19 nt, Artificial Sequence
  Description of Artificial Sequence: Synthetic oligonucleotide
uguguacuugcgugcuguc

SEQ ID NO: 2103430 - RNA, 19 nt, Artificial Sequence
  Description of Artificial Sequence: Synthetic oligonucleotide
ggggaucuugugcuggcag

SEQ ID NO: 2103431 - RNA, 19 nt, Artificial Sequence
  Description of Artificial Sequence: Synthetic oligonucleotide
auacggagacgacguagaa

SEQ ID NO: 2103432 - RNA, 19 nt, Artificial Sequence
  Description of Artificial Sequence: Synthetic oligonucleotide
cauacgucaccaccagcca

SEQ ID NO: 2103433 - RNA, 19 nt, Artificial Sequence
  Description of Artificial Sequence: Synthetic oligonucleotide
agugaacacugcagcacug

SEQ ID NO: 2103434 - RNA, 19 nt, Artificial Sequence
  Description of Artificial Sequence: Synthetic oligonucleotide
cgaagacacauauucgaac

SEQ ID NO: 2103435 - RNA, 19 nt, Artificial Sequence
  Description of Artificial Sequence: Synthetic oligonucleotide
aagcaggcaugcacgcuug

SEQ ID NO: 2103436 - RNA, 19 nt, Artificial Sequence
  Description of Artificial Sequence: Synthetic oligonucleotide
gaggacguggaaccaccga

SEQ ID NO: 2103437 - RNA, 19 nt, Artificial Sequence
  Description of Artificial Sequence: Synthetic oligonucleotide
cagaugaccagagauacau

SEQ ID NO: 2103438 - RNA, 19 nt, Artificial Sequence
  Description of Artificial Sequence: Synthetic oligonucleotide
cauguguacuugcgugcug

SEQ ID NO: 2103439 - RNA, 19 nt, Artificial Sequence
  Description of Artificial Sequence: Synthetic oligonucleotide
gcccagugaacacugcagc

SEQ ID NO: 2103440 - RNA, 19 nt, Artificial Sequence
  Description of Artificial Sequence: Synthetic oligonucleotide
gagagagagagaggacuga

SEQ ID NO: 2103441 - RNA, 19 nt, Artificial Sequence
  Description of Artificial Sequence: Synthetic oligonucleotide
aucaucguuccgaggacgu

SEQ ID NO: 2103442 - RNA, 19 nt, Artificial Sequence
  Description of Artificial Sequence: Synthetic oligonucleotide
gacguggaaccaccgagcu

SEQ ID NO: 2103443 - RNA, 19 nt, Artificial Sequence
  Description of Artificial Sequence: Synthetic oligonucleotide
gucgaaggcccugcagacg

SEQ ID NO: 2103444 - RNA, 19 nt, Artificial Sequence
  Description of Artificial Sequence: Synthetic oligonucleotide
ucaucguuccgaggacgug

SEQ ID NO: 2103445 - RNA, 19 nt, Artificial Sequence
  Description of Artificial Sequence: Synthetic oligonucleotide
aaggcccugcagacggcgg

SEQ ID NO: 2103446 - RNA, 19 nt, Artificial Sequence
  Description of Artificial Sequence: Synthetic oligonucleotide
ucccgcuuagugugauuac

SEQ ID NO: 2103447 - RNA, 19 nt, Artificial Sequence
  Description of Artificial Sequence: Synthetic oligonucleotide
ggaagccauuccauaauac

SEQ ID NO: 2103448 - RNA, 19 nt, Artificial Sequence
  Description of Artificial Sequence: Synthetic oligonucleotide
ucauacugaugggcagaug

SEQ ID NO: 2103449 - RNA, 19 nt, Artificial Sequence
  Description of Artificial Sequence: Synthetic oligonucleotide
acuugcgugcugucucggu

SEQ ID NO: 2103450 - RNA, 19 nt, Artificial Sequence
  Description of Artificial Sequence: Synthetic oligonucleotide
uccuaugcuuuggguagga

SEQ ID NO: 2103451 - RNA, 19 nt, Artificial Sequence
  Description of Artificial Sequence: Synthetic oligonucleotide
acguggaaccaccgagcug

SEQ ID NO: 2103452 - RNA, 19 nt, Artificial Sequence
  Description of Artificial Sequence: Synthetic oligonucleotide
ucaccuggcucgagugccu

SEQ ID NO: 2103453 - RNA, 19 nt, Artificial Sequence
  Description of Artificial Sequence: Synthetic oligonucleotide
ggagacgacguagaaguga

SEQ ID NO: 2103454 - RNA, 19 nt, Artificial Sequence
  Description of Artificial Sequence: Synthetic oligonucleotide
gacacauauucgaaccagu

SEQ ID NO: 2103455 - RNA, 19 nt, Artificial Sequence
  Description of Artificial Sequence: Synthetic oligonucleotide
gcugaagaagacauacguc

SEQ ID NO: 2103456 - RNA, 19 nt, Artificial Sequence
  Description of Artificial Sequence: Synthetic oligonucleotide
gaucuugugcuggcaguga

SEQ ID NO: 2103457 - RNA, 19 nt, Artificial Sequence
  Description of Artificial Sequence: Synthetic oligonucleotide
agagagagagagagagaga

SEQ ID NO: 2103458 - RNA, 19 nt, Artificial Sequence
  Description of Artificial Sequence: Synthetic oligonucleotide
agagagagagagagagagu

SEQ ID NO: 2103459 - RNA, 19 nt, Artificial Sequence
  Description of Artificial Sequence: Synthetic oligonucleotide
ggcagugaacuaucacuac

SEQ ID NO: 2103460 - RNA, 19 nt, Artificial Sequence
  Description of Artificial Sequence: Synthetic oligonucleotide
guaguuagccgaagacaca

SEQ ID NO: 2103461 - RNA, 19 nt, Artificial Sequence
  Description of Artificial Sequence: Synthetic oligonucleotide
gagagaggacugacucaag

SEQ ID NO: 2103462 - RNA, 19 nt, Artificial Sequence
  Description of Artificial Sequence: Synthetic oligonucleotide
gacggcggggcgccgcggg

SEQ ID NO: 2103463 - RNA, 19 nt, Artificial Sequence
  Description of Artificial Sequence: Synthetic oligonucleotide
cugguagcagcagauucca

SEQ ID NO: 2103464 - RNA, 19 nt, Artificial Sequence
  Description of Artificial Sequence: Synthetic oligonucleotide
acgaagccauuuugggaaa

SEQ ID NO: 2103465 - RNA, 19 nt, Artificial Sequence
  Description of Artificial Sequence: Synthetic oligonucleotide
ugccucccauaaaggcugc

SEQ ID NO: 2103466 - RNA, 19 nt, Artificial Sequence
  Description of Artificial Sequence: Synthetic oligonucleotide
augaccagagauacaucau

SEQ ID NO: 2103467 - RNA, 19 nt, Artificial Sequence
  Description of Artificial Sequence: Synthetic oligonucleotide
aaccaccgagcugguagca

SEQ ID NO: 2103468 - RNA, 19 nt, Artificial Sequence
  Description of Artificial Sequence: Synthetic oligonucleotide
agagagagagagaguuaga

SEQ ID NO: 2103469 - RNA, 19 nt, Artificial Sequence
  Description of Artificial Sequence: Synthetic oligonucleotide
cuccugagguugcugagaa

SEQ ID NO: 2103470 - RNA, 19 nt, Artificial Sequence
  Description of Artificial Sequence: Synthetic oligonucleotide
cacccacuaucauuuggga

SEQ ID NO: 2103471 - RNA, 19 nt, Artificial Sequence
  Description of Artificial Sequence: Synthetic oligonucleotide
caguugucucuguaaagcu

SEQ ID NO: 2103472 - RNA, 19 nt, Artificial Sequence
  Description of Artificial Sequence: Synthetic oligonucleotide
ggccuugggcuccaucucc

SEQ ID NO: 2103473 - RNA, 19 nt, Artificial Sequence
  Description of Artificial Sequence: Synthetic oligonucleotide
gcuggcagugaacuaucac

SEQ ID NO: 2103474 - RNA, 19 nt, Artificial Sequence
  Description of Artificial Sequence: Synthetic oligonucleotide
ugcgugcugucucgguguc

SEQ ID NO: 2103475 - RNA, 19 nt, Artificial Sequence
  Description of Artificial Sequence: Synthetic oligonucleotide
ugacucaagcaggcaugca

SEQ ID NO: 2103476 - RNA, 19 nt, Artificial Sequence
  Description of Artificial Sequence: Synthetic oligonucleotide
gucucggugucuccaggga

SEQ ID NO: 2103477 - RNA, 19 nt, Artificial Sequence
  Description of Artificial Sequence: Synthetic oligonucleotide
cuguggacccaaggaacac

SEQ ID NO: 2103478 - RNA, 19 nt, Artificial Sequence
  Description of Artificial Sequence: Synthetic oligonucleotide
accaccgagcugguagcag

SEQ ID NO: 2103479 - RNA, 19 nt, Artificial Sequence
  Description of Artificial Sequence: Synthetic oligonucleotide
ccacuaucauuugggaggc

SEQ ID NO: 2103480 - RNA, 19 nt, Artificial Sequence
  Description of Artificial Sequence: Synthetic oligonucleotide
ggagacaaacgugcucuug

SEQ ID NO: 2103481 - RNA, 19 nt, Artificial Sequence
  Description of Artificial Sequence: Synthetic oligonucleotide
ccagggauggaaucuguca

SEQ ID NO: 2103482 - RNA, 19 nt, Artificial Sequence
  Description of Artificial Sequence: Synthetic oligonucleotide
ccaccgagcugguagcagc

SEQ ID NO: 2103483 - RNA, 19 nt, Artificial Sequence
  Description of Artificial Sequence: Synthetic oligonucleotide
ggacguggaaccaccgagc

SEQ ID NO: 2103484 - RNA, 19 nt, Artificial Sequence
  Description of Artificial Sequence: Synthetic oligonucleotide
cuuggcugaagaagacaua

SEQ ID NO: 2103485 - RNA, 19 nt, Artificial Sequence
  Description of Artificial Sequence: Synthetic oligonucleotide
agagagagagagagaguua

SEQ ID NO: 2103486 - RNA, 19 nt, Artificial Sequence
  Description of Artificial Sequence: Synthetic oligonucleotide
gcaugcacgcuugcaaggc

SEQ ID NO: 2103487 - RNA, 19 nt, Artificial Sequence
  Description of Artificial Sequence: Synthetic oligonucleotide
guucugagcaaagcacgaa

SEQ ID NO: 2103488 - RNA, 19 nt, Artificial Sequence
  Description of Artificial Sequence: Synthetic oligonucleotide
uuccgaggacguggaacca

SEQ ID NO: 2103489 - RNA, 19 nt, Artificial Sequence
  Description of Artificial Sequence: Synthetic oligonucleotide
ccgaggacguggaaccacc

SEQ ID NO: 2103490 - RNA, 19 nt, Artificial Sequence
  Description of Artificial Sequence: Synthetic oligonucleotide
aucguuccgaggacgugga

SEQ ID NO: 2103491 - RNA, 19 nt, Artificial Sequence
  Description of Artificial Sequence: Synthetic oligonucleotide
gggaggaacgcuuuccuau

SEQ ID NO: 2103492 - RNA, 19 nt, Artificial Sequence
  Description of Artificial Sequence: Synthetic oligonucleotide
agagagaguuagagagaga

SEQ ID NO: 2103493 - RNA, 19 nt, Artificial Sequence
  Description of Artificial Sequence: Synthetic oligonucleotide
uggcucgagugccucccau

SEQ ID NO: 2103494 - RNA, 19 nt, Artificial Sequence
  Description of Artificial Sequence: Synthetic oligonucleotide
cgacguagaagugagaaaa

SEQ ID NO: 2103495 - RNA, 19 nt, Artificial Sequence
  Description of Artificial Sequence: Synthetic oligonucleotide
caggaacauuugccuugcc

SEQ ID NO: 2103496 - RNA, 19 nt, Artificial Sequence
  Description of Artificial Sequence: Synthetic oligonucleotide
gcuagguaguuagccgaag

SEQ ID NO: 2103497 - RNA, 19 nt, Artificial Sequence
  Description of Artificial Sequence: Synthetic oligonucleotide
uccugagguugcugagaau

SEQ ID NO: 2103498 - RNA, 19 nt, Artificial Sequence
  Description of Artificial Sequence: Synthetic oligonucleotide
cucccgcuuagugugauua

SEQ ID NO: 2103499 - RNA, 19 nt, Artificial Sequence
  Description of Artificial Sequence: Synthetic oligonucleotide
gauuccacucgaagagccu

SEQ ID NO: 2103500 - RNA, 19 nt, Artificial Sequence
  Description of Artificial Sequence: Synthetic oligonucleotide
cagacggcggggcgccgcg

SEQ ID NO: 2103501 - RNA, 19 nt, Artificial Sequence
  Description of Artificial Sequence: Synthetic oligonucleotide
guagaucaucagcucugcu

SEQ ID NO: 2103502 - RNA, 19 nt, Artificial Sequence
  Description of Artificial Sequence: Synthetic oligonucleotide
cugcagacggcggggcgcc

SEQ ID NO: 2103503 - RNA, 19 nt, Artificial Sequence
  Description of Artificial Sequence: Synthetic oligonucleotide
gcucgagugccucccauaa

SEQ ID NO: 2103504 - RNA, 19 nt, Artificial Sequence
  Description of Artificial Sequence: Synthetic oligonucleotide
caagcaggcaugcacgcuu

SEQ ID NO: 2103505 - RNA, 19 nt, Artificial Sequence
  Description of Artificial Sequence: Synthetic oligonucleotide
gggaugucgaaggcccugc

SEQ ID NO: 2103506 - RNA, 19 nt, Artificial Sequence
  Description of Artificial Sequence: Synthetic oligonucleotide
ccauuccauaauacggaga

SEQ ID NO: 2103507 - RNA, 19 nt, Artificial Sequence
  Description of Artificial Sequence: Synthetic oligonucleotide
ccgaagacacauauucgaa

SEQ ID NO: 2103508 - RNA, 19 nt, Artificial Sequence
  Description of Artificial Sequence: Synthetic oligonucleotide
ucguuccgaggacguggaa

SEQ ID NO: 2103509 - RNA, 19 nt, Artificial Sequence
  Description of Artificial Sequence: Synthetic oligonucleotide
gugcuggcagugaacuauc

SEQ ID NO: 2103510 - RNA, 19 nt, Artificial Sequence
  Description of Artificial Sequence: Synthetic oligonucleotide
aggggaucuugugcuggca

SEQ ID NO: 2103511 - RNA, 19 nt, Artificial Sequence
  Description of Artificial Sequence: Synthetic oligonucleotide
cccagugaacacugcagca

SEQ ID NO: 2103512 - RNA, 19 nt, Artificial Sequence
  Description of Artificial Sequence: Synthetic oligonucleotide
cacuaucauuugggaggcc

SEQ ID NO: 2103513 - RNA, 19 nt, Artificial Sequence
  Description of Artificial Sequence: Synthetic oligonucleotide
ccagccaccaaguuaaguu

SEQ ID NO: 2103514 - RNA, 19 nt, Artificial Sequence
  Description of Artificial Sequence: Synthetic oligonucleotide
gcuguuuauacucccgcuu

SEQ ID NO: 2103515 - RNA, 19 nt, Artificial Sequence
  Description of Artificial Sequence: Synthetic oligonucleotide
gcaguggaagggaaauguc

SEQ ID NO: 2103516 - RNA, 19 nt, Artificial Sequence
  Description of Artificial Sequence: Synthetic oligonucleotide
ccagucuccaaaggggauc

SEQ ID NO: 2103517 - RNA, 19 nt, Artificial Sequence
  Description of Artificial Sequence: Synthetic oligonucleotide
caggaagccauuccauaau

SEQ ID NO: 2103518 - RNA, 19 nt, Artificial Sequence
  Description of Artificial Sequence: Synthetic oligonucleotide
cauuugccuugcccaguga

SEQ ID NO: 2103519 - RNA, 19 nt, Artificial Sequence
  Description of Artificial Sequence: Synthetic oligonucleotide
cccacugcauguguacuug

SEQ ID NO: 2103520 - RNA, 19 nt, Artificial Sequence
  Description of Artificial Sequence: Synthetic oligonucleotide
cgcuuuccuaugcuuuggg

SEQ ID NO: 2103521 - RNA, 19 nt, Artificial Sequence
  Description of Artificial Sequence: Synthetic oligonucleotide
caaggaacaccagcaccaa

SEQ ID NO: 2103522 - RNA, 19 nt, Artificial Sequence
  Description of Artificial Sequence: Synthetic oligonucleotide
gaaugacauggcacucaua

SEQ ID NO: 2103523 - RNA, 19 nt, Artificial Sequence
  Description of Artificial Sequence: Synthetic oligonucleotide
aguuagccgaagacacaua

SEQ ID NO: 2103524 - RNA, 19 nt, Artificial Sequence
  Description of Artificial Sequence: Synthetic oligonucleotide
gggauggaaucugucaccu

SEQ ID NO: 2103525 - RNA, 19 nt, Artificial Sequence
  Description of Artificial Sequence: Synthetic oligonucleotide
aggcugccuuaaaacaaaa

SEQ ID NO: 2103526 - RNA, 19 nt, Artificial Sequence
  Description of Artificial Sequence: Synthetic oligonucleotide
cguuccgaggacguggaac

SEQ ID NO: 2103527 - RNA, 19 nt, Artificial Sequence
  Description of Artificial Sequence: Synthetic oligonucleotide
uccgcaggcuguggaccca

SEQ ID NO: 2103528 - RNA, 19 nt, Artificial Sequence
  Description of Artificial Sequence: Synthetic oligonucleotide
auacucccgcuuaguguga

SEQ ID NO: 2103529 - RNA, 19 nt, Artificial Sequence
  Description of Artificial Sequence: Synthetic oligonucleotide
caugcacgcuugcaaggcu

SEQ ID NO: 2103530 - RNA, 19 nt, Artificial Sequence
  Description of Artificial Sequence: Synthetic oligonucleotide
gguaggagacaaacgugcu

SEQ ID NO: 2103531 - RNA, 19 nt, Artificial Sequence
  Description of Artificial Sequence: Synthetic oligonucleotide
agacgacguagaagugaga

SEQ ID NO: 2103532 - RNA, 19 nt, Artificial Sequence
  Description of Artificial Sequence: Synthetic oligonucleotide
guguacuugcgugcugucu

SEQ ID NO: 2103533 - RNA, 19 nt, Artificial Sequence
  Description of Artificial Sequence: Synthetic oligonucleotide
ggaacgcuuuccuaugcuu

SEQ ID NO: 2103534 - RNA, 19 nt, Artificial Sequence
  Description of Artificial Sequence: Synthetic oligonucleotide
cgaggacguggaaccaccg

SEQ ID NO: 2103535 - RNA, 19 nt, Artificial Sequence
  Description of Artificial Sequence: Synthetic oligonucleotide
ccgcuuagugugauuacaa

SEQ ID NO: 2103536 - RNA, 19 nt, Artificial Sequence
  Description of Artificial Sequence: Synthetic oligonucleotide
gagucagcucacccacuau

SEQ ID NO: 2103537 - RNA, 19 nt, Artificial Sequence
  Description of Artificial Sequence: Synthetic oligonucleotide
ccuccgcaggcuguggacc

SEQ ID NO: 2103538 - RNA, 19 nt, Artificial Sequence
  Description of Artificial Sequence: Synthetic oligonucleotide
ggaugucgaaggcccugca

SEQ ID NO: 2103539 - RNA, 19 nt, Artificial Sequence
  Description of Artificial Sequence: Synthetic oligonucleotide
cucgagugccucccauaaa

SEQ ID NO: 2103540 - RNA, 19 nt, Artificial Sequence
  Description of Artificial Sequence: Synthetic oligonucleotide
gggcagaugaccagagaua

SEQ ID NO: 2103541 - RNA, 19 nt, Artificial Sequence
  Description of Artificial Sequence: Synthetic oligonucleotide
ugcagacggcggggcgccg

SEQ ID NO: 2103542 - RNA, 19 nt, Artificial Sequence
  Description of Artificial Sequence: Synthetic oligonucleotide
guguggcuccaagaguucu

SEQ ID NO: 2103543 - RNA, 19 nt, Artificial Sequence
  Description of Artificial Sequence: Synthetic oligonucleotide
cagcucacccacuaucauu

SEQ ID NO: 2103544 - RNA, 19 nt, Artificial Sequence
  Description of Artificial Sequence: Synthetic oligonucleotide
ccuaugcuuuggguaggag

SEQ ID NO: 2103545 - RNA, 19 nt, Artificial Sequence
  Description of Artificial Sequence: Synthetic oligonucleotide
ccagagauacaucaucguu

SEQ ID NO: 2103546 - RNA, 19 nt, Artificial Sequence
  Description of Artificial Sequence: Synthetic oligonucleotide
agaugcccauuuacugguu

SEQ ID NO: 2103547 - RNA, 19 nt, Artificial Sequence
  Description of Artificial Sequence: Synthetic oligonucleotide
cccauaaaggcugccuuaa

SEQ ID NO: 2103548 - RNA, 19 nt, Artificial Sequence
  Description of Artificial Sequence: Synthetic oligonucleotide
cccgcuuagugugauuaca

SEQ ID NO: 2103549 - RNA, 19 nt, Artificial Sequence
  Description of Artificial Sequence: Synthetic oligonucleotide
gcuuggagaugcccauuua

SEQ ID NO: 2103550 - RNA, 19 nt, Artificial Sequence
  Description of Artificial Sequence: Synthetic oligonucleotide
caccuggcucgagugccuc

SEQ ID NO: 2103551 - RNA, 19 nt, Artificial Sequence
  Description of Artificial Sequence: Synthetic oligonucleotide
ccacucgaagagccuccgc

SEQ ID NO: 2103552 - RNA, 19 nt, Artificial Sequence
  Description of Artificial Sequence: Synthetic oligonucleotide
ccgcgggccggacagcuug

SEQ ID NO: 2103553 - RNA, 19 nt, Artificial Sequence
  Description of Artificial Sequence: Synthetic oligonucleotide
gcauguguacuugcgugcu

SEQ ID NO: 2103554 - RNA, 19 nt, Artificial Sequence
  Description of Artificial Sequence: Synthetic oligonucleotide
ggacugacucaagcaggca

SEQ ID NO: 2103555 - RNA, 19 nt, Artificial Sequence
  Description of Artificial Sequence: Synthetic oligonucleotide
ggcucgagugccucccaua

SEQ ID NO: 2103556 - RNA, 19 nt, Artificial Sequence
  Description of Artificial Sequence: Synthetic oligonucleotide
cagagucagcucacccacu

SEQ ID NO: 2103557 - RNA, 19 nt, Artificial Sequence
  Description of Artificial Sequence: Synthetic oligonucleotide
cgcuuagugugauuacaaa

SEQ ID NO: 2103558 - RNA, 19 nt, Artificial Sequence
  Description of Artificial Sequence: Synthetic oligonucleotide
ccgagcugguagcagcaga

SEQ ID NO: 2103559 - RNA, 19 nt, Artificial Sequence
  Description of Artificial Sequence: Synthetic oligonucleotide
gcccaggucugccaggaau

SEQ ID NO: 2103560 - RNA, 19 nt, Artificial Sequence
  Description of Artificial Sequence: Synthetic oligonucleotide
agucuccaaaggggaucuu

SEQ ID NO: 2103561 - RNA, 19 nt, Artificial Sequence
  Description of Artificial Sequence: Synthetic oligonucleotide
cggagacgacguagaagug

SEQ ID NO: 2103562 - RNA, 19 nt, Artificial Sequence
  Description of Artificial Sequence: Synthetic oligonucleotide
cugcagcacugcaguggaa

SEQ ID NO: 2103563 - RNA, 19 nt, Artificial Sequence
  Description of Artificial Sequence: Synthetic oligonucleotide
cacgcuugcaaggcuguuu

SEQ ID NO: 2103564 - RNA, 19 nt, Artificial Sequence
  Description of Artificial Sequence: Synthetic oligonucleotide
cgaaggcccugcagacggc

SEQ ID NO: 2103565 - RNA, 19 nt, Artificial Sequence
  Description of Artificial Sequence: Synthetic oligonucleotide
gcaaagcacgaagccauuu

SEQ ID NO: 2103566 - RNA, 19 nt, Artificial Sequence
  Description of Artificial Sequence: Synthetic oligonucleotide
gcucccaggaagagagacu

SEQ ID NO: 2103567 - RNA, 19 nt, Artificial Sequence
  Description of Artificial Sequence: Synthetic oligonucleotide
cgcgggccggacagcuugg

SEQ ID NO: 2103568 - RNA, 19 nt, Artificial Sequence
  Description of Artificial Sequence: Synthetic oligonucleotide
cgggccggacagcuugguc

SEQ ID NO: 2103569 - RNA, 19 nt, Artificial Sequence
  Description of Artificial Sequence: Synthetic oligonucleotide
gccggacagcuuggucuuc

SEQ ID NO: 2103570 - RNA, 19 nt, Artificial Sequence
  Description of Artificial Sequence: Synthetic oligonucleotide
gggcgccgcgggccggaca

SEQ ID NO: 2103571 - RNA, 19 nt, Artificial Sequence
  Description of Artificial Sequence: Synthetic oligonucleotide
gcgugcugucucggugucu

SEQ ID NO: 2103572 - RNA, 19 nt, Artificial Sequence
  Description of Artificial Sequence: Synthetic oligonucleotide
gcacgcuugcaaggcuguu

SEQ ID NO: 2103573 - RNA, 19 nt, Artificial Sequence
  Description of Artificial Sequence: Synthetic oligonucleotide
ggggcgccgcgggccggac

SEQ ID NO: 2103574 - RNA, 19 nt, Artificial Sequence
  Description of Artificial Sequence: Synthetic oligonucleotide
cgcuugcaaggcuguuuau

SEQ ID NO: 2103575 - RNA, 19 nt, Artificial Sequence
  Description of Artificial Sequence: Synthetic oligonucleotide
gcgggccggacagcuuggu

SEQ ID NO: 2103576 - RNA, 19 nt, Artificial Sequence
  Description of Artificial Sequence: Synthetic oligonucleotide
aauaccuugucaugugacc

SEQ ID NO: 2103577 - RNA, 19 nt, Artificial Sequence
  Description of Artificial Sequence: Synthetic oligonucleotide
aguagaaagagucuggugu

SEQ ID NO: 2103578 - RNA, 19 nt, Artificial Sequence
  Description of Artificial Sequence: Synthetic oligonucleotide
ucucauaguagaaagaguc

SEQ ID NO: 2103579 - RNA, 19 nt, Artificial Sequence
  Description of Artificial Sequence: Synthetic oligonucleotide
uuuuagugcauccagaaua

SEQ ID NO: 2103580 - RNA, 19 nt, Artificial Sequence
  Description of Artificial Sequence: Synthetic oligonucleotide
aaugaaggcguggauauac

SEQ ID NO: 2103581 - RNA, 19 nt, Artificial Sequence
  Description of Artificial Sequence: Synthetic oligonucleotide
ucgaauaauggucacaaac

SEQ ID NO: 2103582 - RNA, 19 nt, Artificial Sequence
  Description of Artificial Sequence: Synthetic oligonucleotide
ucagccuauagucaggucc

SEQ ID NO: 2103583 - RNA, 19 nt, Artificial Sequence
  Description of Artificial Sequence: Synthetic oligonucleotide
aauaacagggaugcgauug

SEQ ID NO: 2103584 - RNA, 19 nt, Artificial Sequence
  Description of Artificial Sequence: Synthetic oligonucleotide
uuaaguggcccaauaacag

SEQ ID NO: 2103585 - RNA, 19 nt, Artificial Sequence
  Description of Artificial Sequence: Synthetic oligonucleotide
aucaggaaagcucucauag

SEQ ID NO: 2103586 - RNA, 19 nt, Artificial Sequence
  Description of Artificial Sequence: Synthetic oligonucleotide
agaucuuugggucacgauc

SEQ ID NO: 2103587 - RNA, 19 nt, Artificial Sequence
  Description of Artificial Sequence: Synthetic oligonucleotide
uggucacaaacuuuuaccg

SEQ ID NO: 2103588 - RNA, 19 nt, Artificial Sequence
  Description of Artificial Sequence: Synthetic oligonucleotide
aacaucucaauguguucgc

SEQ ID NO: 2103589 - RNA, 19 nt, Artificial Sequence
  Description of Artificial Sequence: Synthetic oligonucleotide
aaaagcacacguuucagau

SEQ ID NO: 2103590 - RNA, 19 nt, Artificial Sequence
  Description of Artificial Sequence: Synthetic oligonucleotide
aagaacuggugauagucuc

SEQ ID NO: 2103591 - RNA, 19 nt, Artificial Sequence
  Description of Artificial Sequence: Synthetic oligonucleotide
auuguugucuccugaggcc

SEQ ID NO: 2103592 - RNA, 19 nt, Artificial Sequence
  Description of Artificial Sequence: Synthetic oligonucleotide
uacuuugugcucuuggcgg

SEQ ID NO: 2103593 - RNA, 19 nt, Artificial Sequence
  Description of Artificial Sequence: Synthetic oligonucleotide
auauacuuguccuuccagg

SEQ ID NO: 2103594 - RNA, 19 nt, Artificial Sequence
  Description of Artificial Sequence: Synthetic oligonucleotide
acagagaccaugcagcauc

SEQ ID NO: 2103595 - RNA, 19 nt, Artificial Sequence
  Description of Artificial Sequence: Synthetic oligonucleotide
caaacuuuuaccgagcuug

SEQ ID NO: 2103596 - RNA, 19 nt, Artificial Sequence
  Description of Artificial Sequence: Synthetic oligonucleotide
uccagaauacuuuuauugc

SEQ ID NO: 2103597 - RNA, 19 nt, Artificial Sequence
  Description of Artificial Sequence: Synthetic oligonucleotide
ucuuaaguggcccaauaac

SEQ ID NO: 2103598 - RNA, 19 nt, Artificial Sequence
  Description of Artificial Sequence: Synthetic oligonucleotide
ugauacuuugugcucuugg

SEQ ID NO: 2103599 - RNA, 19 nt, Artificial Sequence
  Description of Artificial Sequence: Synthetic oligonucleotide
acuuuuaccgagcuuguag

SEQ ID NO: 2103600 - RNA, 19 nt, Artificial Sequence
  Description of Artificial Sequence: Synthetic oligonucleotide
aguguaguuaguuguggcg

SEQ ID NO: 2103601 - RNA, 19 nt, Artificial Sequence
  Description of Artificial Sequence: Synthetic oligonucleotide
gauuguugucuccugaggc

SEQ ID NO: 2103602 - RNA, 19 nt, Artificial Sequence
  Description of Artificial Sequence: Synthetic oligonucleotide
aagcacacguuucagauaa

SEQ ID NO: 2103603 - RNA, 19 nt, Artificial Sequence
  Description of Artificial Sequence: Synthetic oligonucleotide
ucaugaaccagccaucuuc

SEQ ID NO: 2103604 - RNA, 19 nt, Artificial Sequence
  Description of Artificial Sequence: Synthetic oligonucleotide
aucuucaaaucugaugucc

SEQ ID NO: 2103605 - RNA, 19 nt, Artificial Sequence
  Description of Artificial Sequence: Synthetic oligonucleotide
uauacuuguccuuccaggc

SEQ ID NO: 2103606 - RNA, 19 nt, Artificial Sequence
  Description of Artificial Sequence: Synthetic oligonucleotide
gauaagccaagguaguggc

SEQ ID NO: 2103607 - RNA, 19 nt, Artificial Sequence
  Description of Artificial Sequence: Synthetic oligonucleotide
uugagguacagcuugcuca

SEQ ID NO: 2103608 - RNA, 19 nt, Artificial Sequence
  Description of Artificial Sequence: Synthetic oligonucleotide
cuuuuaccgagcuuguagg

SEQ ID NO: 2103609 - RNA, 19 nt, Artificial Sequence
  Description of Artificial Sequence: Synthetic oligonucleotide
uuuagugcauccagaauac

SEQ ID NO: 2103610 - RNA, 19 nt, Artificial Sequence
  Description of Artificial Sequence: Synthetic oligonucleotide
auacuuugugcucuuggcg

SEQ ID NO: 2103611 - RNA, 19 nt, Artificial Sequence
  Description of Artificial Sequence: Synthetic oligonucleotide
gucacaaacuuuuaccgag

SEQ ID NO: 2103612 - RNA, 19 nt, Artificial Sequence
  Description of Artificial Sequence: Synthetic oligonucleotide
ugcacaaauaccuugucau

SEQ ID NO: 2103613 - RNA, 19 nt, Artificial Sequence
  Description of Artificial Sequence: Synthetic oligonucleotide
gauacuuugugcucuuggc

SEQ ID NO: 2103614 - RNA, 19 nt, Artificial Sequence
  Description of Artificial Sequence: Synthetic oligonucleotide
aaauaccuugucaugugac

SEQ ID NO: 2103615 - RNA, 19 nt, Artificial Sequence
  Description of Artificial Sequence: Synthetic oligonucleotide
acacguuucagauaagcca

SEQ ID NO: 2103616 - RNA, 19 nt, Artificial Sequence
  Description of Artificial Sequence: Synthetic oligonucleotide
ucauaguagaaagagucug

SEQ ID NO: 2103617 - RNA, 19 nt, Artificial Sequence
  Description of Artificial Sequence: Synthetic oligonucleotide
uucaaaucugauguccugg

SEQ ID NO: 2103618 - RNA, 19 nt, Artificial Sequence
  Description of Artificial Sequence: Synthetic oligonucleotide
aaggcguggauauacuugu

SEQ ID NO: 2103619 - RNA, 19 nt, Artificial Sequence
  Description of Artificial Sequence: Synthetic oligonucleotide
uaacagcuaacccaagucu

SEQ ID NO: 2103620 - RNA, 19 nt, Artificial Sequence
  Description of Artificial Sequence: Synthetic oligonucleotide
auacuuguccuuccaggcc

SEQ ID NO: 2103621 - RNA, 19 nt, Artificial Sequence
  Description of Artificial Sequence: Synthetic oligonucleotide
aaagcagaucuuuggguca

SEQ ID NO: 2103622 - RNA, 19 nt, Artificial Sequence
  Description of Artificial Sequence: Synthetic oligonucleotide
aacagcuaacccaagucuc

SEQ ID NO: 2103623 - RNA, 19 nt, Artificial Sequence
  Description of Artificial Sequence: Synthetic oligonucleotide
uugucaugugaccaggugu

SEQ ID NO: 2103624 - RNA, 19 nt, Artificial Sequence
  Description of Artificial Sequence: Synthetic oligonucleotide
ucgaaaagcacacguuuca

SEQ ID NO: 2103625 - RNA, 19 nt, Artificial Sequence
  Description of Artificial Sequence: Synthetic oligonucleotide
agaaucauugugggaaggc

SEQ ID NO: 2103626 - RNA, 19 nt, Artificial Sequence
  Description of Artificial Sequence: Synthetic oligonucleotide
aagguaguggcauuggcua

SEQ ID NO: 2103627 - RNA, 19 nt, Artificial Sequence
  Description of Artificial Sequence: Synthetic oligonucleotide
ucaaggcucgaaaagcaca

SEQ ID NO: 2103628 - RNA, 19 nt, Artificial Sequence
  Description of Artificial Sequence: Synthetic oligonucleotide
aaauugagguacagcuugc

SEQ ID NO: 2103629 - RNA, 19 nt, Artificial Sequence
  Description of Artificial Sequence: Synthetic oligonucleotide
uguccuuccaggccugugg

SEQ ID NO: 2103630 - RNA, 19 nt, Artificial Sequence
  Description of Artificial Sequence: Synthetic oligonucleotide
ucacgaucaggaaagcucu

SEQ ID NO: 2103631 - RNA, 19 nt, Artificial Sequence
  Description of Artificial Sequence: Synthetic oligonucleotide
agauaagccaagguagugg

SEQ ID NO: 2103632 - RNA, 19 nt, Artificial Sequence
  Description of Artificial Sequence: Synthetic oligonucleotide
uuaguuguggcgugugugc

SEQ ID NO: 2103633 - RNA, 19 nt, Artificial Sequence
  Description of Artificial Sequence: Synthetic oligonucleotide
cuuaaguggcccaauaaca

SEQ ID NO: 2103634 - RNA, 19 nt, Artificial Sequence
  Description of Artificial Sequence: Synthetic oligonucleotide
ucuucaaaucugauguccu

SEQ ID NO: 2103635 - RNA, 19 nt, Artificial Sequence
  Description of Artificial Sequence: Synthetic oligonucleotide
cuuuuauugccaaaauuga

SEQ ID NO: 2103636 - RNA, 19 nt, Artificial Sequence
  Description of Artificial Sequence: Synthetic oligonucleotide
caaagcagaucuuuggguc

SEQ ID NO: 2103637 - RNA, 19 nt, Artificial Sequence
  Description of Artificial Sequence: Synthetic oligonucleotide
uggugauagucucggagag

SEQ ID NO: 2103638 - RNA, 19 nt, Artificial Sequence
  Description of Artificial Sequence: Synthetic oligonucleotide
ucagauaagccaagguagu

SEQ ID NO: 2103639 - RNA, 19 nt, Artificial Sequence
  Description of Artificial Sequence: Synthetic oligonucleotide
agucucagccuauagucag

SEQ ID NO: 2103640 - RNA, 19 nt, Artificial Sequence
  Description of Artificial Sequence: Synthetic oligonucleotide
ugggaaugugccuaacaag

SEQ ID NO: 2103641 - RNA, 19 nt, Artificial Sequence
  Description of Artificial Sequence: Synthetic oligonucleotide
caauguguucgcuuccugg

SEQ ID NO: 2103642 - RNA, 19 nt, Artificial Sequence
  Description of Artificial Sequence: Synthetic oligonucleotide
gaaagagucuggugugggg

SEQ ID NO: 2103643 - RNA, 19 nt, Artificial Sequence
  Description of Artificial Sequence: Synthetic oligonucleotide
gggaaugugccuaacaagg

SEQ ID NO: 2103644 - RNA, 19 nt, Artificial Sequence
  Description of Artificial Sequence: Synthetic oligonucleotide
auugagguacagcuugcuc

SEQ ID NO: 2103645 - RNA, 19 nt, Artificial Sequence
  Description of Artificial Sequence: Synthetic oligonucleotide
ugagaaucauugugggaag

SEQ ID NO: 2103646 - RNA, 19 nt, Artificial Sequence
  Description of Artificial Sequence: Synthetic oligonucleotide
aacaagggaagcccaguga

SEQ ID NO: 2103647 - RNA, 19 nt, Artificial Sequence
  Description of Artificial Sequence: Synthetic oligonucleotide
guagaaagagucuggugug

SEQ ID NO: 2103648 - RNA, 19 nt, Artificial Sequence
  Description of Artificial Sequence: Synthetic oligonucleotide
aggaccucgaauaaugguc

SEQ ID NO: 2103649 - RNA, 19 nt, Artificial Sequence
  Description of Artificial Sequence: Synthetic oligonucleotide
cuaacagcuaacccaaguc

SEQ ID NO: 2103650 - RNA, 19 nt, Artificial Sequence
  Description of Artificial Sequence: Synthetic oligonucleotide
cacacguuucagauaagcc

SEQ ID NO: 2103651 - RNA, 19 nt, Artificial Sequence
  Description of Artificial Sequence: Synthetic oligonucleotide
caaccuaacagcuaaccca

SEQ ID NO: 2103652 - RNA, 19 nt, Artificial Sequence
  Description of Artificial Sequence: Synthetic oligonucleotide
uguacauaguccagccuga

SEQ ID NO: 2103653 - RNA, 19 nt, Artificial Sequence
  Description of Artificial Sequence: Synthetic oligonucleotide
uguguucgcuuccuggcag

SEQ ID NO: 2103654 - RNA, 19 nt, Artificial Sequence
  Description of Artificial Sequence: Synthetic oligonucleotide
uauagucagguccacuguc

SEQ ID NO: 2103655 - RNA, 19 nt, Artificial Sequence
  Description of Artificial Sequence: Synthetic oligonucleotide
ucaaaucugauguccugga

SEQ ID NO: 2103656 - RNA, 19 nt, Artificial Sequence
  Description of Artificial Sequence: Synthetic oligonucleotide
uuuuaccgagcuuguaggc

SEQ ID NO: 2103657 - RNA, 19 nt, Artificial Sequence
  Description of Artificial Sequence: Synthetic oligonucleotide
uuaccgagcuuguaggcca

SEQ ID NO: 2103658 - RNA, 19 nt, Artificial Sequence
  Description of Artificial Sequence: Synthetic oligonucleotide
caccaaagcagaucuuugg

SEQ ID NO: 2103659 - RNA, 19 nt, Artificial Sequence
  Description of Artificial Sequence: Synthetic oligonucleotide
gaacuggugauagucucgg

SEQ ID NO: 2103660 - RNA, 19 nt, Artificial Sequence
  Description of Artificial Sequence: Synthetic oligonucleotide
cuuugggucacgaucagga

SEQ ID NO: 2103661 - RNA, 19 nt, Artificial Sequence
  Description of Artificial Sequence: Synthetic oligonucleotide
ggaaucaaggcucgaaaag

SEQ ID NO: 2103662 - RNA, 19 nt, Artificial Sequence
  Description of Artificial Sequence: Synthetic oligonucleotide
ucaccaaagcagaucuuug

SEQ ID NO: 2103663 - RNA, 19 nt, Artificial Sequence
  Description of Artificial Sequence: Synthetic oligonucleotide
uguaguuaguuguggcgug

SEQ ID NO: 2103664 - RNA, 19 nt, Artificial Sequence
  Description of Artificial Sequence: Synthetic oligonucleotide
cuaggaccucgaauaaugg

SEQ ID NO: 2103665 - RNA, 19 nt, Artificial Sequence
  Description of Artificial Sequence: Synthetic oligonucleotide
caagacacucuccagguuc

SEQ ID NO: 2103666 - RNA, 19 nt, Artificial Sequence
  Description of Artificial Sequence: Synthetic oligonucleotide
agcggaucgcugcugcucc

SEQ ID NO: 2103667 - RNA, 19 nt, Artificial Sequence
  Description of Artificial Sequence: Synthetic oligonucleotide
gaguguaguuaguuguggc

SEQ ID NO: 2103668 - RNA, 19 nt, Artificial Sequence
  Description of Artificial Sequence: Synthetic oligonucleotide
cacccagugaaaugaaggc

SEQ ID NO: 2103669 - RNA, 19 nt, Artificial Sequence
  Description of Artificial Sequence: Synthetic oligonucleotide
uuuaccgagcuuguaggcc

SEQ ID NO: 2103670 - RNA, 19 nt, Artificial Sequence
  Description of Artificial Sequence: Synthetic oligonucleotide
uuuggggacuccaaccuaa

SEQ ID NO: 2103671 - RNA, 19 nt, Artificial Sequence
  Description of Artificial Sequence: Synthetic oligonucleotide
gagauggugggaaugugcc

SEQ ID NO: 2103672 - RNA, 19 nt, Artificial Sequence
  Description of Artificial Sequence: Synthetic oligonucleotide
gaaugugccuaacaaggga

SEQ ID NO: 2103673 - RNA, 19 nt, Artificial Sequence
  Description of Artificial Sequence: Synthetic oligonucleotide
ugguuuggggacuccaacc

SEQ ID NO: 2103674 - RNA, 19 nt, Artificial Sequence
  Description of Artificial Sequence: Synthetic oligonucleotide
gaaaagcacacguuucaga

SEQ ID NO: 2103675 - RNA, 19 nt, Artificial Sequence
  Description of Artificial Sequence: Synthetic oligonucleotide
uaacccaagucucagccua

SEQ ID NO: 2103676 - RNA, 19 nt, Artificial Sequence
  Description of Artificial Sequence: Synthetic oligonucleotide
acuccaaccuaacagcuaa

SEQ ID NO: 2103677 - RNA, 19 nt, Artificial Sequence
  Description of Artificial Sequence: Synthetic oligonucleotide
ugguggagacagcggaucg

SEQ ID NO: 2103678 - RNA, 19 nt, Artificial Sequence
  Description of Artificial Sequence: Synthetic oligonucleotide
aaugugccuaacaagggaa

SEQ ID NO: 2103679 - RNA, 19 nt, Artificial Sequence
  Description of Artificial Sequence: Synthetic oligonucleotide
gucagagcccaagagaugc

SEQ ID NO: 2103680 - RNA, 19 nt, Artificial Sequence
  Description of Artificial Sequence: Synthetic oligonucleotide
ucaaccagcccuucugugu

SEQ ID NO: 2103681 - RNA, 19 nt, Artificial Sequence
  Description of Artificial Sequence: Synthetic oligonucleotide
uacagcuugcucagggccc

SEQ ID NO: 2103682 - RNA, 19 nt, Artificial Sequence
  Description of Artificial Sequence: Synthetic oligonucleotide
gaaggcguggauauacuug

SEQ ID NO: 2103683 - RNA, 19 nt, Artificial Sequence
  Description of Artificial Sequence: Synthetic oligonucleotide
cugucccuaagacaggccc

SEQ ID NO: 2103684 - RNA, 19 nt, Artificial Sequence
  Description of Artificial Sequence: Synthetic oligonucleotide
uaguagaaagagucuggug

SEQ ID NO: 2103685 - RNA, 19 nt, Artificial Sequence
  Description of Artificial Sequence: Synthetic oligonucleotide
uagaaagagucuggugugg

SEQ ID NO: 2103686 - RNA, 19 nt, Artificial Sequence
  Description of Artificial Sequence: Synthetic oligonucleotide
agaugcuccaugguccagc

SEQ ID NO: 2103687 - RNA, 19 nt, Artificial Sequence
  Description of Artificial Sequence: Synthetic oligonucleotide
agcuaacccaagucucagc

SEQ ID NO: 2103688 - RNA, 19 nt, Artificial Sequence
  Description of Artificial Sequence: Synthetic oligonucleotide
caaggcucgaaaagcacac

SEQ ID NO: 2103689 - RNA, 19 nt, Artificial Sequence
  Description of Artificial Sequence: Synthetic oligonucleotide
uccaaccuaacagcuaacc

SEQ ID NO: 2103690 - RNA, 19 nt, Artificial Sequence
  Description of Artificial Sequence: Synthetic oligonucleotide
guacagcuugcucagggcc

SEQ ID NO: 2103691 - RNA, 19 nt, Artificial Sequence
  Description of Artificial Sequence: Synthetic oligonucleotide
ugcucccggaucuuaagug

SEQ ID NO: 2103692 - RNA, 19 nt, Artificial Sequence
  Description of Artificial Sequence: Synthetic oligonucleotide
ucucaauguguucgcuucc

SEQ ID NO: 2103693 - RNA, 19 nt, Artificial Sequence
  Description of Artificial Sequence: Synthetic oligonucleotide
agaauacuuuuauugccaa

SEQ ID NO: 2103694 - RNA, 19 nt, Artificial Sequence
  Description of Artificial Sequence: Synthetic oligonucleotide
aggcaguguacauagucca

SEQ ID NO: 2103695 - RNA, 19 nt, Artificial Sequence
  Description of Artificial Sequence: Synthetic oligonucleotide
uaggccaugaaagggucag

SEQ ID NO: 2103696 - RNA, 19 nt, Artificial Sequence
  Description of Artificial Sequence: Synthetic oligonucleotide
uggcaucauggcuucaacc

SEQ ID NO: 2103697 - RNA, 19 nt, Artificial Sequence
  Description of Artificial Sequence: Synthetic oligonucleotide
acccagugaaaugaaggcg

SEQ ID NO: 2103698 - RNA, 19 nt, Artificial Sequence
  Description of Artificial Sequence: Synthetic oligonucleotide
agaaagagucugguguggg

SEQ ID NO: 2103699 - RNA, 19 nt, Artificial Sequence
  Description of Artificial Sequence: Synthetic oligonucleotide
uaccuugucaugugaccag

SEQ ID NO: 2103700 - RNA, 19 nt, Artificial Sequence
  Description of Artificial Sequence: Synthetic oligonucleotide
uggcccaauaacagggaug

SEQ ID NO: 2103701 - RNA, 19 nt, Artificial Sequence
  Description of Artificial Sequence: Synthetic oligonucleotide
auaguagaaagagucuggu

SEQ ID NO: 2103702 - RNA, 19 nt, Artificial Sequence
  Description of Artificial Sequence: Synthetic oligonucleotide
agcccagugagaaucauug

SEQ ID NO: 2103703 - RNA, 19 nt, Artificial Sequence
  Description of Artificial Sequence: Synthetic oligonucleotide
aaccuaacagcuaacccaa

SEQ ID NO: 2103704 - RNA, 19 nt, Artificial Sequence
  Description of Artificial Sequence: Synthetic oligonucleotide
ugccuaacaagggaagccc

SEQ ID NO: 2103705 - RNA, 19 nt, Artificial Sequence
  Description of Artificial Sequence: Synthetic oligonucleotide
aguuguggcgugugugcac

SEQ ID NO: 2103706 - RNA, 19 nt, Artificial Sequence
  Description of Artificial Sequence: Synthetic oligonucleotide
uguccugccucaugaacca

SEQ ID NO: 2103707 - RNA, 19 nt, Artificial Sequence
  Description of Artificial Sequence: Synthetic oligonucleotide
cucgaaaagcacacguuuc

SEQ ID NO: 2103708 - RNA, 19 nt, Artificial Sequence
  Description of Artificial Sequence: Synthetic oligonucleotide
ugcgauuguugucuccuga

SEQ ID NO: 2103709 - RNA, 19 nt, Artificial Sequence
  Description of Artificial Sequence: Synthetic oligonucleotide
gagaaucauugugggaagg

SEQ ID NO: 2103710 - RNA, 19 nt, Artificial Sequence
  Description of Artificial Sequence: Synthetic oligonucleotide
ucaauguguucgcuuccug

SEQ ID NO: 2103711 - RNA, 19 nt, Artificial Sequence
  Description of Artificial Sequence: Synthetic oligonucleotide
cuggaagaacuggugauag

SEQ ID NO: 2103712 - RNA, 19 nt, Artificial Sequence
  Description of Artificial Sequence: Synthetic oligonucleotide
cuaacaucucaauguguuc

SEQ ID NO: 2103713 - RNA, 19 nt, Artificial Sequence
  Description of Artificial Sequence: Synthetic oligonucleotide
accaucaccaaagcagauc

SEQ ID NO: 2103714 - RNA, 19 nt, Artificial Sequence
  Description of Artificial Sequence: Synthetic oligonucleotide
aucuuaaguggcccaauaa

SEQ ID NO: 2103715 - RNA, 19 nt, Artificial Sequence
  Description of Artificial Sequence: Synthetic oligonucleotide
ucaggaaagcucucauagu

SEQ ID NO: 2103716 - RNA, 19 nt, Artificial Sequence
  Description of Artificial Sequence: Synthetic oligonucleotide
ugugccuaacaagggaagc

SEQ ID NO: 2103717 - RNA, 19 nt, Artificial Sequence
  Description of Artificial Sequence: Synthetic oligonucleotide
agugagaaucauuguggga

SEQ ID NO: 2103718 - RNA, 19 nt, Artificial Sequence
  Description of Artificial Sequence: Synthetic oligonucleotide
auaacagggaugcgauugu

SEQ ID NO: 2103719 - RNA, 19 nt, Artificial Sequence
  Description of Artificial Sequence: Synthetic oligonucleotide
gucacgaucaggaaagcuc

SEQ ID NO: 2103720 - RNA, 19 nt, Artificial Sequence
  Description of Artificial Sequence: Synthetic oligonucleotide
agaacuggugauagucucg

SEQ ID NO: 2103721 - RNA, 19 nt, Artificial Sequence
  Description of Artificial Sequence: Synthetic oligonucleotide
aauugagguacagcuugcu

SEQ ID NO: 2103722 - RNA, 19 nt, Artificial Sequence
  Description of Artificial Sequence: Synthetic oligonucleotide
agggaugcgauuguugucu

SEQ ID NO: 2103723 - RNA, 19 nt, Artificial Sequence
  Description of Artificial Sequence: Synthetic oligonucleotide
agagcccaagagaugcucc

SEQ ID NO: 2103724 - RNA, 19 nt, Artificial Sequence
  Description of Artificial Sequence: Synthetic oligonucleotide
cacguuucagauaagccaa

SEQ ID NO: 2103725 - RNA, 19 nt, Artificial Sequence
  Description of Artificial Sequence: Synthetic oligonucleotide
cuugucaugugaccaggug

SEQ ID NO: 2103726 - RNA, 19 nt, Artificial Sequence
  Description of Artificial Sequence: Synthetic oligonucleotide
ugucccuaagacaggccca

SEQ ID NO: 2103727 - RNA, 19 nt, Artificial Sequence
  Description of Artificial Sequence: Synthetic oligonucleotide
aggcucgaaaagcacacgu

SEQ ID NO: 2103728 - RNA, 19 nt, Artificial Sequence
  Description of Artificial Sequence: Synthetic oligonucleotide
auugugggaaggcagugua

SEQ ID NO: 2103729 - RNA, 19 nt, Artificial Sequence
  Description of Artificial Sequence: Synthetic oligonucleotide
aucaaggcucgaaaagcac

SEQ ID NO: 2103730 - RNA, 19 nt, Artificial Sequence
  Description of Artificial Sequence: Synthetic oligonucleotide
gaaucauugugggaaggca

SEQ ID NO: 2103731 - RNA, 19 nt, Artificial Sequence
  Description of Artificial Sequence: Synthetic oligonucleotide
ccuauagucagguccacug

SEQ ID NO: 2103732 - RNA, 19 nt, Artificial Sequence
  Description of Artificial Sequence: Synthetic oligonucleotide
uuguugucuccugaggcca

SEQ ID NO: 2103733 - RNA, 19 nt, Artificial Sequence
  Description of Artificial Sequence: Synthetic oligonucleotide
aaggcucgaaaagcacacg

SEQ ID NO: 2103734 - RNA, 19 nt, Artificial Sequence
  Description of Artificial Sequence: Synthetic oligonucleotide
ucaccaucccugcugucac

SEQ ID NO: 2103735 - RNA, 19 nt, Artificial Sequence
  Description of Artificial Sequence: Synthetic oligonucleotide
cucuuggcggcucugccag

SEQ ID NO: 2103736 - RNA, 19 nt, Artificial Sequence
  Description of Artificial Sequence: Synthetic oligonucleotide
cuggugauagucucggaga

SEQ ID NO: 2103737 - RNA, 19 nt, Artificial Sequence
  Description of Artificial Sequence: Synthetic oligonucleotide
gagcuuguaggccaugaaa

SEQ ID NO: 2103738 - RNA, 19 nt, Artificial Sequence
  Description of Artificial Sequence: Synthetic oligonucleotide
uguugucuccugaggccag

SEQ ID NO: 2103739 - RNA, 19 nt, Artificial Sequence
  Description of Artificial Sequence: Synthetic oligonucleotide
ggcccaauaacagggaugc

SEQ ID NO: 2103740 - RNA, 19 nt, Artificial Sequence
  Description of Artificial Sequence: Synthetic oligonucleotide
aguguacauaguccagccu

SEQ ID NO: 2103741 - RNA, 19 nt, Artificial Sequence
  Description of Artificial Sequence: Synthetic oligonucleotide
ccaaaauugagguacagcu

SEQ ID NO: 2103742 - RNA, 19 nt, Artificial Sequence
  Description of Artificial Sequence: Synthetic oligonucleotide
caugaaccagccaucuuca

SEQ ID NO: 2103743 - RNA, 19 nt, Artificial Sequence
  Description of Artificial Sequence: Synthetic oligonucleotide
uacauaguccagccugaaa

SEQ ID NO: 2103744 - RNA, 19 nt, Artificial Sequence
  Description of Artificial Sequence: Synthetic oligonucleotide
gugggaaugugccuaacaa

SEQ ID NO: 2103745 - RNA, 19 nt, Artificial Sequence
  Description of Artificial Sequence: Synthetic oligonucleotide
cauggcuucaaccagcccu

SEQ ID NO: 2103746 - RNA, 19 nt, Artificial Sequence
  Description of Artificial Sequence: Synthetic oligonucleotide
gaccaggugugguuguaug

SEQ ID NO: 2103747 - RNA, 19 nt, Artificial Sequence
  Description of Artificial Sequence: Synthetic oligonucleotide
aaacuuuuaccgagcuugu

SEQ ID NO: 2103748 - RNA, 19 nt, Artificial Sequence
  Description of Artificial Sequence: Synthetic oligonucleotide
cucccggaucuuaaguggc

SEQ ID NO: 2103749 - RNA, 19 nt, Artificial Sequence
  Description of Artificial Sequence: Synthetic oligonucleotide
gcacccagugaaaugaagg

SEQ ID NO: 2103750 - RNA, 19 nt, Artificial Sequence
  Description of Artificial Sequence: Synthetic oligonucleotide
agugcauccagaauacuuu

SEQ ID NO: 2103751 - RNA, 19 nt, Artificial Sequence
  Description of Artificial Sequence: Synthetic oligonucleotide
aucaccaaagcagaucuuu

SEQ ID NO: 2103752 - RNA, 19 nt, Artificial Sequence
  Description of Artificial Sequence: Synthetic oligonucleotide
accaucccugcugucacac

SEQ ID NO: 2103753 - RNA, 19 nt, Artificial Sequence
  Description of Artificial Sequence: Synthetic oligonucleotide
gauagucucggagagugua

SEQ ID NO: 2103754 - RNA, 19 nt, Artificial Sequence
  Description of Artificial Sequence: Synthetic oligonucleotide
ugaaagugguuuggggacu

SEQ ID NO: 2103755 - RNA, 19 nt, Artificial Sequence
  Description of Artificial Sequence: Synthetic oligonucleotide
ugaaggcguggauauacuu

SEQ ID NO: 2103756 - RNA, 19 nt, Artificial Sequence
  Description of Artificial Sequence: Synthetic oligonucleotide
ggaaugugccuaacaaggg

SEQ ID NO: 2103757 - RNA, 19 nt, Artificial Sequence
  Description of Artificial Sequence: Synthetic oligonucleotide
ggcguggauauacuugucc

SEQ ID NO: 2103758 - RNA, 19 nt, Artificial Sequence
  Description of Artificial Sequence: Synthetic oligonucleotide
ugcucuuggcggcucugcc

SEQ ID NO: 2103759 - RNA, 19 nt, Artificial Sequence
  Description of Artificial Sequence: Synthetic oligonucleotide
ugcauccagaauacuuuua

SEQ ID NO: 2103760 - RNA, 19 nt, Artificial Sequence
  Description of Artificial Sequence: Synthetic oligonucleotide
gugccuaacaagggaagcc

SEQ ID NO: 2103761 - RNA, 19 nt, Artificial Sequence
  Description of Artificial Sequence: Synthetic oligonucleotide
ugccaaaauugagguacag

SEQ ID NO: 2103762 - RNA, 19 nt, Artificial Sequence
  Description of Artificial Sequence: Synthetic oligonucleotide
ucucagccuauagucaggu

SEQ ID NO: 2103763 - RNA, 19 nt, Artificial Sequence
  Description of Artificial Sequence: Synthetic oligonucleotide
gauggugggaaugugccua

SEQ ID NO: 2103764 - RNA, 19 nt, Artificial Sequence
  Description of Artificial Sequence: Synthetic oligonucleotide
uugugggaaggcaguguac

SEQ ID NO: 2103765 - RNA, 19 nt, Artificial Sequence
  Description of Artificial Sequence: Synthetic oligonucleotide
gaucuuaaguggcccaaua

SEQ ID NO: 2103766 - RNA, 19 nt, Artificial Sequence
  Description of Artificial Sequence: Synthetic oligonucleotide
gguuguauggcaguagcca

SEQ ID NO: 2103767 - RNA, 19 nt, Artificial Sequence
  Description of Artificial Sequence: Synthetic oligonucleotide
caguguagcuccacaccag

SEQ ID NO: 2103768 - RNA, 19 nt, Artificial Sequence
  Description of Artificial Sequence: Synthetic oligonucleotide
ggcgugugugcacaaauac

SEQ ID NO: 2103769 - RNA, 19 nt, Artificial Sequence
  Description of Artificial Sequence: Synthetic oligonucleotide
auguguucgcuuccuggca

SEQ ID NO: 2103770 - RNA, 19 nt, Artificial Sequence
  Description of Artificial Sequence: Synthetic oligonucleotide
ucaugugaccagguguggu

SEQ ID NO: 2103771 - RNA, 19 nt, Artificial Sequence
  Description of Artificial Sequence: Synthetic oligonucleotide
ccaaccuaacagcuaaccc

SEQ ID NO: 2103772 - RNA, 19 nt, Artificial Sequence
  Description of Artificial Sequence: Synthetic oligonucleotide
gcuucaaccagcccuucug

SEQ ID NO: 2103773 - RNA, 19 nt, Artificial Sequence
  Description of Artificial Sequence: Synthetic oligonucleotide
cccagugagaaucauugug

SEQ ID NO: 2103774 - RNA, 19 nt, Artificial Sequence
  Description of Artificial Sequence: Synthetic oligonucleotide
ggggacgccagucccauag

SEQ ID NO: 2103775 - RNA, 19 nt, Artificial Sequence
  Description of Artificial Sequence: Synthetic oligonucleotide
aucuuugggucacgaucag

SEQ ID NO: 2103776 - RNA, 19 nt, Artificial Sequence
  Description of Artificial Sequence: Synthetic oligonucleotide
aagugguuuggggacucca

SEQ ID NO: 2103777 - RNA, 19 nt, Artificial Sequence
  Description of Artificial Sequence: Synthetic oligonucleotide
guuucagauaagccaaggu

SEQ ID NO: 2103778 - RNA, 19 nt, Artificial Sequence
  Description of Artificial Sequence: Synthetic oligonucleotide
gacgcgcagggucuuggcc

SEQ ID NO: 2103779 - RNA, 19 nt, Artificial Sequence
  Description of Artificial Sequence: Synthetic oligonucleotide
ugauagucucggagagugu

SEQ ID NO: 2103780 - RNA, 19 nt, Artificial Sequence
  Description of Artificial Sequence: Synthetic oligonucleotide
caaccagcccuucuguguc

SEQ ID NO: 2103781 - RNA, 19 nt, Artificial Sequence
  Description of Artificial Sequence: Synthetic oligonucleotide
ggcacugcaagacacucuc

SEQ ID NO: 2103782 - RNA, 19 nt, Artificial Sequence
  Description of Artificial Sequence: Synthetic oligonucleotide
auagucucggagaguguag

SEQ ID NO: 2103783 - RNA, 19 nt, Artificial Sequence
  Description of Artificial Sequence: Synthetic oligonucleotide
acaaacuuuuaccgagcuu

SEQ ID NO: 2103784 - RNA, 19 nt, Artificial Sequence
  Description of Artificial Sequence: Synthetic oligonucleotide
acugucccuaagacaggcc

SEQ ID NO: 2103785 - RNA, 19 nt, Artificial Sequence
  Description of Artificial Sequence: Synthetic oligonucleotide
gaucaggaaagcucucaua

SEQ ID NO: 2103786 - RNA, 19 nt, Artificial Sequence
  Description of Artificial Sequence: Synthetic oligonucleotide
gugguuuggggacuccaac

SEQ ID NO: 2103787 - RNA, 19 nt, Artificial Sequence
  Description of Artificial Sequence: Synthetic oligonucleotide
agccugaaagugguuuggg

SEQ ID NO: 2103788 - RNA, 19 nt, Artificial Sequence
  Description of Artificial Sequence: Synthetic oligonucleotide
agagucugguguggggacg

SEQ ID NO: 2103789 - RNA, 19 nt, Artificial Sequence
  Description of Artificial Sequence: Synthetic oligonucleotide
ugugaccaggugugguugu

SEQ ID NO: 2103790 - RNA, 19 nt, Artificial Sequence
  Description of Artificial Sequence: Synthetic oligonucleotide
cagauaagccaagguagug

SEQ ID NO: 2103791 - RNA, 19 nt, Artificial Sequence
  Description of Artificial Sequence: Synthetic oligonucleotide
gaugcgauuguugucuccu

SEQ ID NO: 2103792 - RNA, 19 nt, Artificial Sequence
  Description of Artificial Sequence: Synthetic oligonucleotide
uaguuaguuguggcgugug

SEQ ID NO: 2103793 - RNA, 19 nt, Artificial Sequence
  Description of Artificial Sequence: Synthetic oligonucleotide
cuuccaggccugugguugc

SEQ ID NO: 2103794 - RNA, 19 nt, Artificial Sequence
  Description of Artificial Sequence: Synthetic oligonucleotide
ccugaaagugguuugggga

SEQ ID NO: 2103795 - RNA, 19 nt, Artificial Sequence
  Description of Artificial Sequence: Synthetic oligonucleotide
uagucucggagaguguagu

SEQ ID NO: 2103796 - RNA, 19 nt, Artificial Sequence
  Description of Artificial Sequence: Synthetic oligonucleotide
cccagagucaccaucccug

SEQ ID NO: 2103797 - RNA, 19 nt, Artificial Sequence
  Description of Artificial Sequence: Synthetic oligonucleotide
uaguuguggcgugugugca

SEQ ID NO: 2103798 - RNA, 19 nt, Artificial Sequence
  Description of Artificial Sequence: Synthetic oligonucleotide
ggucacaaacuuuuaccga

SEQ ID NO: 2103799 - RNA, 19 nt, Artificial Sequence
  Description of Artificial Sequence: Synthetic oligonucleotide
augugccuaacaagggaag

SEQ ID NO: 2103800 - RNA, 19 nt, Artificial Sequence
  Description of Artificial Sequence: Synthetic oligonucleotide
agagaccaugcagcauccc

SEQ ID NO: 2103801 - RNA, 19 nt, Artificial Sequence
  Description of Artificial Sequence: Synthetic oligonucleotide
gaagaacuggugauagucu

SEQ ID NO: 2103802 - RNA, 19 nt, Artificial Sequence
  Description of Artificial Sequence: Synthetic oligonucleotide
acgaucaggaaagcucuca

SEQ ID NO: 2103803 - RNA, 19 nt, Artificial Sequence
  Description of Artificial Sequence: Synthetic oligonucleotide
gcgauuguugucuccugag

SEQ ID NO: 2103804 - RNA, 19 nt, Artificial Sequence
  Description of Artificial Sequence: Synthetic oligonucleotide
cacaccagguggcaucaug

SEQ ID NO: 2103805 - RNA, 19 nt, Artificial Sequence
  Description of Artificial Sequence: Synthetic oligonucleotide
ucggagaguguaguuaguu

SEQ ID NO: 2103806 - RNA, 19 nt, Artificial Sequence
  Description of Artificial Sequence: Synthetic oligonucleotide
cagccugaaagugguuugg

SEQ ID NO: 2103807 - RNA, 19 nt, Artificial Sequence
  Description of Artificial Sequence: Synthetic oligonucleotide
uggcgugugugcacaaaua

SEQ ID NO: 2103808 - RNA, 19 nt, Artificial Sequence
  Description of Artificial Sequence: Synthetic oligonucleotide
caagguaguggcauuggcu

SEQ ID NO: 2103809 - RNA, 19 nt, Artificial Sequence
  Description of Artificial Sequence: Synthetic oligonucleotide
agucagguccacugucccu

SEQ ID NO: 2103810 - RNA, 19 nt, Artificial Sequence
  Description of Artificial Sequence: Synthetic oligonucleotide
uuagugcauccagaauacu

SEQ ID NO: 2103811 - RNA, 19 nt, Artificial Sequence
  Description of Artificial Sequence: Synthetic oligonucleotide
gaaagugguuuggggacuc

SEQ ID NO: 2103812 - RNA, 19 nt, Artificial Sequence
  Description of Artificial Sequence: Synthetic oligonucleotide
agaggcaguguagcuccac

SEQ ID NO: 2103813 - RNA, 19 nt, Artificial Sequence
  Description of Artificial Sequence: Synthetic oligonucleotide
gaccucgaauaauggucac

SEQ ID NO: 2103814 - RNA, 19 nt, Artificial Sequence
  Description of Artificial Sequence: Synthetic oligonucleotide
gucaugugaccaggugugg

SEQ ID NO: 2103815 - RNA, 19 nt, Artificial Sequence
  Description of Artificial Sequence: Synthetic oligonucleotide
gucccuaagacaggcccag

SEQ ID NO: 2103816 - RNA, 19 nt, Artificial Sequence
  Description of Artificial Sequence: Synthetic oligonucleotide
caggaaucaaggcucgaaa

SEQ ID NO: 2103817 - RNA, 19 nt, Artificial Sequence
  Description of Artificial Sequence: Synthetic oligonucleotide
caucaccaucaccaaagca

SEQ ID NO: 2103818 - RNA, 19 nt, Artificial Sequence
  Description of Artificial Sequence: Synthetic oligonucleotide
gccaaaauugagguacagc

SEQ ID NO: 2103819 - RNA, 19 nt, Artificial Sequence
  Description of Artificial Sequence: Synthetic oligonucleotide
gagucugguguggggacgc

SEQ ID NO: 2103820 - RNA, 19 nt, Artificial Sequence
  Description of Artificial Sequence: Synthetic oligonucleotide
augcgauuguugucuccug

SEQ ID NO: 2103821 - RNA, 19 nt, Artificial Sequence
  Description of Artificial Sequence: Synthetic oligonucleotide
cuccugcaaugauacuuug

SEQ ID NO: 2103822 - RNA, 19 nt, Artificial Sequence
  Description of Artificial Sequence: Synthetic oligonucleotide
guccacugucccuaagaca

SEQ ID NO: 2103823 - RNA, 19 nt, Artificial Sequence
  Description of Artificial Sequence: Synthetic oligonucleotide
cugcugucacacagagacc

SEQ ID NO: 2103824 - RNA, 19 nt, Artificial Sequence
  Description of Artificial Sequence: Synthetic oligonucleotide
agccaagguaguggcauug

SEQ ID NO: 2103825 - RNA, 19 nt, Artificial Sequence
  Description of Artificial Sequence: Synthetic oligonucleotide
gcacacguuucagauaagc

SEQ ID NO: 2103826 - RNA, 19 nt, Artificial Sequence
  Description of Artificial Sequence: Synthetic oligonucleotide
aucgcugcugcucccggau

SEQ ID NO: 2103827 - RNA, 19 nt, Artificial Sequence
  Description of Artificial Sequence: Synthetic oligonucleotide
ggacgccagucccauagag

SEQ ID NO: 2103828 - RNA, 19 nt, Artificial Sequence
  Description of Artificial Sequence: Synthetic oligonucleotide
aaaugaaggcguggauaua

SEQ ID NO: 2103829 - RNA, 19 nt, Artificial Sequence
  Description of Artificial Sequence: Synthetic oligonucleotide
agguaguggcauuggcuaa

SEQ ID NO: 2103830 - RNA, 19 nt, Artificial Sequence
  Description of Artificial Sequence: Synthetic oligonucleotide
aacuuuuaccgagcuugua

SEQ ID NO: 2103831 - RNA, 19 nt, Artificial Sequence
  Description of Artificial Sequence: Synthetic oligonucleotide
guguaguuaguuguggcgu

SEQ ID NO: 2103832 - RNA, 19 nt, Artificial Sequence
  Description of Artificial Sequence: Synthetic oligonucleotide
guggcaucauggcuucaac

SEQ ID NO: 2103833 - RNA, 19 nt, Artificial Sequence
  Description of Artificial Sequence: Synthetic oligonucleotide
cagcuaacccaagucucag

SEQ ID NO: 2103834 - RNA, 19 nt, Artificial Sequence
  Description of Artificial Sequence: Synthetic oligonucleotide
gguguggggacgccagucc

SEQ ID NO: 2103835 - RNA, 19 nt, Artificial Sequence
  Description of Artificial Sequence: Synthetic oligonucleotide
acaucucaauguguucgcu

SEQ ID NO: 2103836 - RNA, 19 nt, Artificial Sequence
  Description of Artificial Sequence: Synthetic oligonucleotide
guguucgcuuccuggcagc

SEQ ID NO: 2103837 - RNA, 19 nt, Artificial Sequence
  Description of Artificial Sequence: Synthetic oligonucleotide
ucuuggcggcucugccagg

SEQ ID NO: 2103838 - RNA, 19 nt, Artificial Sequence
  Description of Artificial Sequence: Synthetic oligonucleotide
guugucuccugaggccagg

SEQ ID NO: 2103839 - RNA, 19 nt, Artificial Sequence
  Description of Artificial Sequence: Synthetic oligonucleotide
caagggaagcccagugaga

SEQ ID NO: 2103840 - RNA, 19 nt, Artificial Sequence
  Description of Artificial Sequence: Synthetic oligonucleotide
accucgaauaauggucaca

SEQ ID NO: 2103841 - RNA, 19 nt, Artificial Sequence
  Description of Artificial Sequence: Synthetic oligonucleotide
ggaccucgaauaaugguca

SEQ ID NO: 2103842 - RNA, 19 nt, Artificial Sequence
  Description of Artificial Sequence: Synthetic oligonucleotide
guuguggcgugugugcaca

SEQ ID NO: 2103843 - RNA, 19 nt, Artificial Sequence
  Description of Artificial Sequence: Synthetic oligonucleotide
ccaccaucaggugagggag

SEQ ID NO: 2103844 - RNA, 19 nt, Artificial Sequence
  Description of Artificial Sequence: Synthetic oligonucleotide
uguucgcuuccuggcagcu

SEQ ID NO: 2103845 - RNA, 19 nt, Artificial Sequence
  Description of Artificial Sequence: Synthetic oligonucleotide
caaaauugagguacagcuu

SEQ ID NO: 2103846 - RNA, 19 nt, Artificial Sequence
  Description of Artificial Sequence: Synthetic oligonucleotide
cuccaaccuaacagcuaac

SEQ ID NO: 2103847 - RNA, 19 nt, Artificial Sequence
  Description of Artificial Sequence: Synthetic oligonucleotide
caggugugguuguauggca

SEQ ID NO: 2103848 - RNA, 19 nt, Artificial Sequence
  Description of Artificial Sequence: Synthetic oligonucleotide
cagguggcaucauggcuuc

SEQ ID NO: 2103849 - RNA, 19 nt, Artificial Sequence
  Description of Artificial Sequence: Synthetic oligonucleotide
acguuucagauaagccaag

SEQ ID NO: 2103850 - RNA, 19 nt, Artificial Sequence
  Description of Artificial Sequence: Synthetic oligonucleotide
aggacgcgcagggucuugg

SEQ ID NO: 2103851 - RNA, 19 nt, Artificial Sequence
  Description of Artificial Sequence: Synthetic oligonucleotide
cccuaagacaggcccagag

SEQ ID NO: 2103852 - RNA, 19 nt, Artificial Sequence
  Description of Artificial Sequence: Synthetic oligonucleotide
augauacuuugugcucuug

SEQ ID NO: 2103853 - RNA, 19 nt, Artificial Sequence
  Description of Artificial Sequence: Synthetic oligonucleotide
agccuauagucagguccac

SEQ ID NO: 2103854 - RNA, 19 nt, Artificial Sequence
  Description of Artificial Sequence: Synthetic oligonucleotide
agucugguguggggacgcc

SEQ ID NO: 2103855 - RNA, 19 nt, Artificial Sequence
  Description of Artificial Sequence: Synthetic oligonucleotide
agcagcccagccuggcaca

SEQ ID NO: 2103856 - RNA, 19 nt, Artificial Sequence
  Description of Artificial Sequence: Synthetic oligonucleotide
auaagccaagguaguggca

SEQ ID NO: 2103857 - RNA, 19 nt, Artificial Sequence
  Description of Artificial Sequence: Synthetic oligonucleotide
cgaauaauggucacaaacu

SEQ ID NO: 2103858 - RNA, 19 nt, Artificial Sequence
  Description of Artificial Sequence: Synthetic oligonucleotide
uagaggcaguguagcucca

SEQ ID NO: 2103859 - RNA, 19 nt, Artificial Sequence
  Description of Artificial Sequence: Synthetic oligonucleotide
ccaagguaguggcauuggc

SEQ ID NO: 2103860 - RNA, 19 nt, Artificial Sequence
  Description of Artificial Sequence: Synthetic oligonucleotide
gcgugugugcacaaauacc

SEQ ID NO: 2103861 - RNA, 19 nt, Artificial Sequence
  Description of Artificial Sequence: Synthetic oligonucleotide
uuggcggcucugccaggcc

SEQ ID NO: 2103862 - RNA, 19 nt, Artificial Sequence
  Description of Artificial Sequence: Synthetic oligonucleotide
gagucaccaucccugcugu

SEQ ID NO: 2103863 - RNA, 19 nt, Artificial Sequence
  Description of Artificial Sequence: Synthetic oligonucleotide
agcagaucuuugggucacg

SEQ ID NO: 2103864 - RNA, 19 nt, Artificial Sequence
  Description of Artificial Sequence: Synthetic oligonucleotide
augaaggcguggauauacu

SEQ ID NO: 2103865 - RNA, 19 nt, Artificial Sequence
  Description of Artificial Sequence: Synthetic oligonucleotide
cgauuguugucuccugagg

SEQ ID NO: 2103866 - RNA, 19 nt, Artificial Sequence
  Description of Artificial Sequence: Synthetic oligonucleotide
ggcgcacccagugaaauga

SEQ ID NO: 2103867 - RNA, 19 nt, Artificial Sequence
  Description of Artificial Sequence: Synthetic oligonucleotide
uccugaggccaggacgcgc

SEQ ID NO: 2103868 - RNA, 19 nt, Artificial Sequence
  Description of Artificial Sequence: Synthetic oligonucleotide
uaguggcauuggcuaacau

SEQ ID NO: 2103869 - RNA, 19 nt, Artificial Sequence
  Description of Artificial Sequence: Synthetic oligonucleotide
cacaaacuuuuaccgagcu

SEQ ID NO: 2103870 - RNA, 19 nt, Artificial Sequence
  Description of Artificial Sequence: Synthetic oligonucleotide
gguaguggcauuggcuaac

SEQ ID NO: 2103871 - RNA, 19 nt, Artificial Sequence
  Description of Artificial Sequence: Synthetic oligonucleotide
ggaugcgauuguugucucc

SEQ ID NO: 2103872 - RNA, 19 nt, Artificial Sequence
  Description of Artificial Sequence: Synthetic oligonucleotide
cccaauaacagggaugcga

SEQ ID NO: 2103873 - RNA, 19 nt, Artificial Sequence
  Description of Artificial Sequence: Synthetic oligonucleotide
cacgaucaggaaagcucuc

SEQ ID NO: 2103874 - RNA, 19 nt, Artificial Sequence
  Description of Artificial Sequence: Synthetic oligonucleotide
uugucuccugaggccagga

SEQ ID NO: 2103875 - RNA, 19 nt, Artificial Sequence
  Description of Artificial Sequence: Synthetic oligonucleotide
cagagcccaagagaugcuc

SEQ ID NO: 2103876 - RNA, 19 nt, Artificial Sequence
  Description of Artificial Sequence: Synthetic oligonucleotide
ugaccaggugugguuguau

SEQ ID NO: 2103877 - RNA, 19 nt, Artificial Sequence
  Description of Artificial Sequence: Synthetic oligonucleotide
ccagugaaaugaaggcgug

SEQ ID NO: 2103878 - RNA, 19 nt, Artificial Sequence
  Description of Artificial Sequence: Synthetic oligonucleotide
ucagguccacugucccuaa

SEQ ID NO: 2103879 - RNA, 19 nt, Artificial Sequence
  Description of Artificial Sequence: Synthetic oligonucleotide
acagcggaucgcugcugcu

SEQ ID NO: 2103880 - RNA, 19 nt, Artificial Sequence
  Description of Artificial Sequence: Synthetic oligonucleotide
cucagccuauagucagguc

SEQ ID NO: 2103881 - RNA, 19 nt, Artificial Sequence
  Description of Artificial Sequence: Synthetic oligonucleotide
gucagguccacugucccua

SEQ ID NO: 2103882 - RNA, 19 nt, Artificial Sequence
  Description of Artificial Sequence: Synthetic oligonucleotide
guuuggggacuccaaccua

SEQ ID NO: 2103883 - RNA, 19 nt, Artificial Sequence
  Description of Artificial Sequence: Synthetic oligonucleotide
gcccaagagaugcuccaug

SEQ ID NO: 2103884 - RNA, 19 nt, Artificial Sequence
  Description of Artificial Sequence: Synthetic oligonucleotide
ccaucaccaucaccaaagc

SEQ ID NO: 2103885 - RNA, 19 nt, Artificial Sequence
  Description of Artificial Sequence: Synthetic oligonucleotide
ccaucaccaaagcagaucu

SEQ ID NO: 2103886 - RNA, 19 nt, Artificial Sequence
  Description of Artificial Sequence: Synthetic oligonucleotide
uguggcgugugugcacaaa

SEQ ID NO: 2103887 - RNA, 19 nt, Artificial Sequence
  Description of Artificial Sequence: Synthetic oligonucleotide
guaguggcauuggcuaaca

SEQ ID NO: 2103888 - RNA, 19 nt, Artificial Sequence
  Description of Artificial Sequence: Synthetic oligonucleotide
cgugugugcacaaauaccu

SEQ ID NO: 2103889 - RNA, 19 nt, Artificial Sequence
  Description of Artificial Sequence: Synthetic oligonucleotide
ggaucgcugcugcucccgg

SEQ ID NO: 2103890 - RNA, 19 nt, Artificial Sequence
  Description of Artificial Sequence: Synthetic oligonucleotide
cucgaauaauggucacaaa

SEQ ID NO: 2103891 - RNA, 19 nt, Artificial Sequence
  Description of Artificial Sequence: Synthetic oligonucleotide
uaccgagcuuguaggccau

SEQ ID NO: 2103892 - RNA, 19 nt, Artificial Sequence
  Description of Artificial Sequence: Synthetic oligonucleotide
gccaagguaguggcauugg

SEQ ID NO: 2103893 - RNA, 19 nt, Artificial Sequence
  Description of Artificial Sequence: Synthetic oligonucleotide
aacccaagucucagccuau

SEQ ID NO: 2103894 - RNA, 19 nt, Artificial Sequence
  Description of Artificial Sequence: Synthetic oligonucleotide
cuaacccaagucucagccu

SEQ ID NO: 2103895 - RNA, 19 nt, Artificial Sequence
  Description of Artificial Sequence: Synthetic oligonucleotide
cguuucagauaagccaagg

SEQ ID NO: 2103896 - RNA, 19 nt, Artificial Sequence
  Description of Artificial Sequence: Synthetic oligonucleotide
ccucgaauaauggucacaa

SEQ ID NO: 2103897 - RNA, 19 nt, Artificial Sequence
  Description of Artificial Sequence: Synthetic oligonucleotide
cccaagucucagccuauag

SEQ ID NO: 2103898 - RNA, 19 nt, Artificial Sequence
  Description of Artificial Sequence: Synthetic oligonucleotide
gacuccaaccuaacagcua

SEQ ID NO: 2103899 - RNA, 19 nt, Artificial Sequence
  Description of Artificial Sequence: Synthetic oligonucleotide
aggcguggauauacuuguc

SEQ ID NO: 2103900 - RNA, 19 nt, Artificial Sequence
  Description of Artificial Sequence: Synthetic oligonucleotide
cggagaguguaguuaguug

SEQ ID NO: 2103901 - RNA, 19 nt, Artificial Sequence
  Description of Artificial Sequence: Synthetic oligonucleotide
gcguggauauacuuguccu

SEQ ID NO: 2103902 - RNA, 19 nt, Artificial Sequence
  Description of Artificial Sequence: Synthetic oligonucleotide
guaggccaugaaaggguca

SEQ ID NO: 2103903 - RNA, 19 nt, Artificial Sequence
  Description of Artificial Sequence: Synthetic oligonucleotide
guauggcaguagccagcug

SEQ ID NO: 2103904 - RNA, 19 nt, Artificial Sequence
  Description of Artificial Sequence: Synthetic oligonucleotide
gcucgaaaagcacacguuu

SEQ ID NO: 2103905 - RNA, 19 nt, Artificial Sequence
  Description of Artificial Sequence: Synthetic oligonucleotide
agggcgcacccagugaaau

SEQ ID NO: 2103906 - RNA, 19 nt, Artificial Sequence
  Description of Artificial Sequence: Synthetic oligonucleotide
cgaaaagcacacguuucag

SEQ ID NO: 2103907 - RNA, 19 nt, Artificial Sequence
  Description of Artificial Sequence: Synthetic oligonucleotide
accuaacagcuaacccaag

SEQ ID NO: 2103908 - RNA, 19 nt, Artificial Sequence
  Description of Artificial Sequence: Synthetic oligonucleotide
cuaacaagggaagcccagu

SEQ ID NO: 2103909 - RNA, 19 nt, Artificial Sequence
  Description of Artificial Sequence: Synthetic oligonucleotide
cauuggcuaacaucucaau

SEQ ID NO: 2103910 - RNA, 19 nt, Artificial Sequence
  Description of Artificial Sequence: Synthetic oligonucleotide
uuguggcgugugugcacaa

SEQ ID NO: 2103911 - RNA, 19 nt, Artificial Sequence
  Description of Artificial Sequence: Synthetic oligonucleotide
cagucccauagaggcagug

SEQ ID NO: 2103912 - RNA, 19 nt, Artificial Sequence
  Description of Artificial Sequence: Synthetic oligonucleotide
guggcgugugugcacaaau

SEQ ID NO: 2103913 - RNA, 19 nt, Artificial Sequence
  Description of Artificial Sequence: Synthetic oligonucleotide
guaguuaguuguggcgugu

SEQ ID NO: 2103914 - RNA, 19 nt, Artificial Sequence
  Description of Artificial Sequence: Synthetic oligonucleotide
ccaaagcagaucuuugggu

SEQ ID NO: 2103915 - RNA, 19 nt, Artificial Sequence
  Description of Artificial Sequence: Synthetic oligonucleotide
gcauuggcuaacaucucaa

SEQ ID NO: 2103916 - RNA, 19 nt, Artificial Sequence
  Description of Artificial Sequence: Synthetic oligonucleotide
gggucagagcccaagagau

SEQ ID NO: 2103917 - RNA, 19 nt, Artificial Sequence
  Description of Artificial Sequence: Synthetic oligonucleotide
uggugggaaugugccuaac

SEQ ID NO: 2103918 - RNA, 19 nt, Artificial Sequence
  Description of Artificial Sequence: Synthetic oligonucleotide
ccacugucccuaagacagg

SEQ ID NO: 2103919 - RNA, 19 nt, Artificial Sequence
  Description of Artificial Sequence: Synthetic oligonucleotide
guacauaguccagccugaa

SEQ ID NO: 2103920 - RNA, 19 nt, Artificial Sequence
  Description of Artificial Sequence: Synthetic oligonucleotide
agcacacguuucagauaag

SEQ ID NO: 2103921 - RNA, 19 nt, Artificial Sequence
  Description of Artificial Sequence: Synthetic oligonucleotide
agcccaagagaugcuccau

SEQ ID NO: 2103922 - RNA, 19 nt, Artificial Sequence
  Description of Artificial Sequence: Synthetic oligonucleotide
gggcgcacccagugaaaug

SEQ ID NO: 2103923 - RNA, 19 nt, Artificial Sequence
  Description of Artificial Sequence: Synthetic oligonucleotide
guggcccaauaacagggau

SEQ ID NO: 2103924 - RNA, 19 nt, Artificial Sequence
  Description of Artificial Sequence: Synthetic oligonucleotide
cauugugggaaggcagugu

SEQ ID NO: 2103925 - RNA, 19 nt, Artificial Sequence
  Description of Artificial Sequence: Synthetic oligonucleotide
gggaugcgauuguugucuc

SEQ ID NO: 2103926 - RNA, 19 nt, Artificial Sequence
  Description of Artificial Sequence: Synthetic oligonucleotide
cgcacccagugaaaugaag

SEQ ID NO: 2103927 - RNA, 19 nt, Artificial Sequence
  Description of Artificial Sequence: Synthetic oligonucleotide
ggacgcgcagggucuuggc

SEQ ID NO: 2103928 - RNA, 19 nt, Artificial Sequence
  Description of Artificial Sequence: Synthetic oligonucleotide
ggacuccaaccuaacagcu

SEQ ID NO: 2103929 - RNA, 19 nt, Artificial Sequence
  Description of Artificial Sequence: Synthetic oligonucleotide
guucgcuuccuggcagcuc

SEQ ID NO: 2103930 - RNA, 19 nt, Artificial Sequence
  Description of Artificial Sequence: Synthetic oligonucleotide
cagaucuuugggucacgau

SEQ ID NO: 2103931 - RNA, 19 nt, Artificial Sequence
  Description of Artificial Sequence: Synthetic oligonucleotide
accgagcuuguaggccaug

SEQ ID NO: 2103932 - RNA, 19 nt, Artificial Sequence
  Description of Artificial Sequence: Synthetic oligonucleotide
guguagcuccacaccaggu

SEQ ID NO: 2103933 - RNA, 19 nt, Artificial Sequence
  Description of Artificial Sequence: Synthetic oligonucleotide
gaagcccagugagaaucau

SEQ ID NO: 2103934 - RNA, 19 nt, Artificial Sequence
  Description of Artificial Sequence: Synthetic oligonucleotide
gcccaauaacagggaugcg

SEQ ID NO: 2103935 - RNA, 19 nt, Artificial Sequence
  Description of Artificial Sequence: Synthetic oligonucleotide
ggucacgaucaggaaagcu

SEQ ID NO: 2103936 - RNA, 19 nt, Artificial Sequence
  Description of Artificial Sequence: Synthetic oligonucleotide
gggucacgaucaggaaagc

SEQ ID NO: 2103937 - RNA, 19 nt, Artificial Sequence
  Description of Artificial Sequence: Synthetic oligonucleotide
ccggaucuuaaguggccca

SEQ ID NO: 2103938 - RNA, 19 nt, Artificial Sequence
  Description of Artificial Sequence: Synthetic oligonucleotide
ccagggcgcacccagugaa

SEQ ID NO: 2103939 - RNA, 19 nt, Artificial Sequence
  Description of Artificial Sequence: Synthetic oligonucleotide
cagggcgcacccagugaaa

SEQ ID NO: 2103940 - RNA, 19 nt, Artificial Sequence
  Description of Artificial Sequence: Synthetic oligonucleotide
caggacgcgcagggucuug

SEQ ID NO: 2103941 - RNA, 19 nt, Artificial Sequence
  Description of Artificial Sequence: Synthetic oligonucleotide
gggacgccagucccauaga

SEQ ID NO: 2103942 - RNA, 19 nt, Artificial Sequence
  Description of Artificial Sequence: Synthetic oligonucleotide
cagagucaccaucccugcu

SEQ ID NO: 2103943 - RNA, 19 nt, Artificial Sequence
  Description of Artificial Sequence: Synthetic oligonucleotide
ggcuucaaccagcccuucu

SEQ ID NO: 2103944 - RNA, 19 nt, Artificial Sequence
  Description of Artificial Sequence: Synthetic oligonucleotide
cucaugaaccagccaucuu

SEQ ID NO: 2103945 - RNA, 19 nt, Artificial Sequence
  Description of Artificial Sequence: Synthetic oligonucleotide
caucaccaaagcagaucuu

SEQ ID NO: 2103946 - RNA, 19 nt, Artificial Sequence
  Description of Artificial Sequence: Synthetic oligonucleotide
uggggacgccagucccaua

SEQ ID NO: 2103947 - RNA, 19 nt, Artificial Sequence
  Description of Artificial Sequence: Synthetic oligonucleotide
agguggcaucauggcuuca

SEQ ID NO: 2103948 - RNA, 19 nt, Artificial Sequence
  Description of Artificial Sequence: Synthetic oligonucleotide
ggcucgaaaagcacacguu

SEQ ID NO: 2103949 - RNA, 19 nt, Artificial Sequence
  Description of Artificial Sequence: Synthetic oligonucleotide
ggaucuuaaguggcccaau

SEQ ID NO: 2103950 - RNA, 19 nt, Artificial Sequence
  Description of Artificial Sequence: Synthetic oligonucleotide
ccgagcuuguaggccauga

SEQ ID NO: 2103951 - RNA, 19 nt, Artificial Sequence
  Description of Artificial Sequence: Synthetic oligonucleotide
ccuugucaugugaccaggu

SEQ ID NO: 2103952 - RNA, 19 nt, Artificial Sequence
  Description of Artificial Sequence: Synthetic oligonucleotide
guggggacgccagucccau

SEQ ID NO: 2103953 - RNA, 19 nt, Artificial Sequence
  Description of Artificial Sequence: Synthetic oligonucleotide
gccccagguggggaccacc

SEQ ID NO: 2103954 - RNA, 19 nt, Artificial Sequence
  Description of Artificial Sequence: Synthetic oligonucleotide
gcaagacacucuccagguu

SEQ ID NO: 2103955 - RNA, 19 nt, Artificial Sequence
  Description of Artificial Sequence: Synthetic oligonucleotide
gccaggacgcgcagggucu

SEQ ID NO: 2103956 - RNA, 19 nt, Artificial Sequence
  Description of Artificial Sequence: Synthetic oligonucleotide
ccccuaggaccucgaauaa

SEQ ID NO: 2103957 - RNA, 19 nt, Artificial Sequence
  Description of Artificial Sequence: Synthetic oligonucleotide
gccuauagucagguccacu

SEQ ID NO: 2103958 - RNA, 19 nt, Artificial Sequence
  Description of Artificial Sequence: Synthetic oligonucleotide
cgagcuuguaggccaugaa

SEQ ID NO: 2103959 - RNA, 19 nt, Artificial Sequence
  Description of Artificial Sequence: Synthetic oligonucleotide
ggaaggcaguguacauagu

SEQ ID NO: 2103960 - RNA, 19 nt, Artificial Sequence
  Description of Artificial Sequence: Synthetic oligonucleotide
cccugcugucacacagaga

SEQ ID NO: 2103961 - RNA, 19 nt, Artificial Sequence
  Description of Artificial Sequence: Synthetic oligonucleotide
cggaucuuaaguggcccaa

SEQ ID NO: 2103962 - RNA, 19 nt, Artificial Sequence
  Description of Artificial Sequence: Synthetic oligonucleotide
gcgcagggucuuggccacg

SEQ ID NO: 2103963 - RNA, 19 nt, Artificial Sequence
  Description of Artificial Sequence: Synthetic oligonucleotide
cgccagucccauagaggca

SEQ ID NO: 2103964 - RNA, 19 nt, Artificial Sequence
  Description of Artificial Sequence: Synthetic oligonucleotide
gcgcacccagugaaaugaa

SEQ ID NO: 2103965 - RNA, 19 nt, Artificial Sequence
  Description of Artificial Sequence: Synthetic oligonucleotide
gggccccagguggggacca

SEQ ID NO: 2103966 - RNA, 19 nt, Artificial Sequence
  Description of Artificial Sequence: Synthetic oligonucleotide
cgcuuccuggcagcuccug

SEQ ID NO: 2103967 - RNA, 19 nt, Artificial Sequence
  Description of Artificial Sequence: Synthetic oligonucleotide
cccuaggaccucgaauaau

SEQ ID NO: 2103968 - RNA, 19 nt, Artificial Sequence
  Description of Artificial Sequence: Synthetic oligonucleotide
ccagucccauagaggcagu

SEQ ID NO: 2103969 - RNA, 19 nt, Artificial Sequence
  Description of Artificial Sequence: Synthetic oligonucleotide
ccaggacgcgcagggucuu

SEQ ID NO: 2103970 - RNA, 19 nt, Artificial Sequence
  Description of Artificial Sequence: Synthetic oligonucleotide
aaaacagugagggacaccc

SEQ ID NO: 2103971 - RNA, 19 nt, Artificial Sequence
  Description of Artificial Sequence: Synthetic oligonucleotide
gauguaaccauuuugauaa

SEQ ID NO: 2103972 - RNA, 19 nt, Artificial Sequence
  Description of Artificial Sequence: Synthetic oligonucleotide
aaaagcauggguaaucccc

SEQ ID NO: 2103973 - RNA, 19 nt, Artificial Sequence
  Description of Artificial Sequence: Synthetic oligonucleotide
acaugcuaaacauaacucc

SEQ ID NO: 2103974 - RNA, 19 nt, Artificial Sequence
  Description of Artificial Sequence: Synthetic oligonucleotide
uaaguuagcugucaguccg

SEQ ID NO: 2103975 - RNA, 19 nt, Artificial Sequence
  Description of Artificial Sequence: Synthetic oligonucleotide
uucauguaaacuagaaggg

SEQ ID NO: 2103976 - RNA, 19 nt, Artificial Sequence
  Description of Artificial Sequence: Synthetic oligonucleotide
gaagauaaggacuuugagc

SEQ ID NO: 2103977 - RNA, 19 nt, Artificial Sequence
  Description of Artificial Sequence: Synthetic oligonucleotide
acaacaaacuuucuguagg

SEQ ID NO: 2103978 - RNA, 19 nt, Artificial Sequence
  Description of Artificial Sequence: Synthetic oligonucleotide
uuuugaugaggucuguagg

SEQ ID NO: 2103979 - RNA, 19 nt, Artificial Sequence
  Description of Artificial Sequence: Synthetic oligonucleotide
aaaguucuguagcugagag

SEQ ID NO: 2103980 - RNA, 19 nt, Artificial Sequence
  Description of Artificial Sequence: Synthetic oligonucleotide
uaugugacaaucauggaaa

SEQ ID NO: 2103981 - RNA, 19 nt, Artificial Sequence
  Description of Artificial Sequence: Synthetic oligonucleotide
aauauggcccaggucaucc

SEQ ID NO: 2103982 - RNA, 19 nt, Artificial Sequence
  Description of Artificial Sequence: Synthetic oligonucleotide
uuagcugucaguccgcucc

SEQ ID NO: 2103983 - RNA, 19 nt, Artificial Sequence
  Description of Artificial Sequence: Synthetic oligonucleotide
aagacucuggcucacagca

SEQ ID NO: 2103984 - RNA, 19 nt, Artificial Sequence
  Description of Artificial Sequence: Synthetic oligonucleotide
caguuuauaggucaguggg

SEQ ID NO: 2103985 - RNA, 19 nt, Artificial Sequence
  Description of Artificial Sequence: Synthetic oligonucleotide
uucacuaucugccggaagc

SEQ ID NO: 2103986 - RNA, 19 nt, Artificial Sequence
  Description of Artificial Sequence: Synthetic oligonucleotide
aguaaguuagcugucaguc

SEQ ID NO: 2103987 - RNA, 19 nt, Artificial Sequence
  Description of Artificial Sequence: Synthetic oligonucleotide
uauggaacuaccuuuagua

SEQ ID NO: 2103988 - RNA, 19 nt, Artificial Sequence
  Description of Artificial Sequence: Synthetic oligonucleotide
aggacuuugagccugcauc

SEQ ID NO: 2103989 - RNA, 19 nt, Artificial Sequence
  Description of Artificial Sequence: Synthetic oligonucleotide
accuaaaacagugagggac

SEQ ID NO: 2103990 - RNA, 19 nt, Artificial Sequence
  Description of Artificial Sequence: Synthetic oligonucleotide
aaagacucuggcucacagc

SEQ ID NO: 2103991 - RNA, 19 nt, Artificial Sequence
  Description of Artificial Sequence: Synthetic oligonucleotide
ugucaaagggaaaggaaag

SEQ ID NO: 2103992 - RNA, 19 nt, Artificial Sequence
  Description of Artificial Sequence: Synthetic oligonucleotide
cauguaaacuagaagggag

SEQ ID NO: 2103993 - RNA, 19 nt, Artificial Sequence
  Description of Artificial Sequence: Synthetic oligonucleotide
acuaccuuuaguaaguuag

SEQ ID NO: 2103994 - RNA, 19 nt, Artificial Sequence
  Description of Artificial Sequence: Synthetic oligonucleotide
uuuugcacaaucagccggg

SEQ ID NO: 2103995 - RNA, 19 nt, Artificial Sequence
  Description of Artificial Sequence: Synthetic oligonucleotide
auugagacccaacuucucg

SEQ ID NO: 2103996 - RNA, 19 nt, Artificial Sequence
  Description of Artificial Sequence: Synthetic oligonucleotide
ucuacuccuccacaguugg

SEQ ID NO: 2103997 - RNA, 19 nt, Artificial Sequence
  Description of Artificial Sequence: Synthetic oligonucleotide
ggaaauauggcccagguca

SEQ ID NO: 2103998 - RNA, 19 nt, Artificial Sequence
  Description of Artificial Sequence: Synthetic oligonucleotide
ucaguuuauaggucagugg

SEQ ID NO: 2103999 - RNA, 19 nt, Artificial Sequence
  Description of Artificial Sequence: Synthetic oligonucleotide
uggaacuaccuuuaguaag

SEQ ID NO: 2104000 - RNA, 19 nt, Artificial Sequence
  Description of Artificial Sequence: Synthetic oligonucleotide
agcacaacaaacuuucugu

SEQ ID NO: 2104001 - RNA, 19 nt, Artificial Sequence
  Description of Artificial Sequence: Synthetic oligonucleotide
aauggacaucuacuccucc

SEQ ID NO: 2104002 - RNA, 19 nt, Artificial Sequence
  Description of Artificial Sequence: Synthetic oligonucleotide
uccagauucauguaaacua

SEQ ID NO: 2104003 - RNA, 19 nt, Artificial Sequence
  Description of Artificial Sequence: Synthetic oligonucleotide
gagagaaucguucccgggg

SEQ ID NO: 2104004 - RNA, 19 nt, Artificial Sequence
  Description of Artificial Sequence: Synthetic oligonucleotide
aauauggaacuaccuuuag

SEQ ID NO: 2104005 - RNA, 19 nt, Artificial Sequence
  Description of Artificial Sequence: Synthetic oligonucleotide
uuaguaaguuagcugucag

SEQ ID NO: 2104006 - RNA, 19 nt, Artificial Sequence
  Description of Artificial Sequence: Synthetic oligonucleotide
guuuugaugaggucuguag

SEQ ID NO: 2104007 - RNA, 19 nt, Artificial Sequence
  Description of Artificial Sequence: Synthetic oligonucleotide
aauggagugccacugggaa

SEQ ID NO: 2104008 - RNA, 19 nt, Artificial Sequence
  Description of Artificial Sequence: Synthetic oligonucleotide
ucuugcugauaaauaguag

SEQ ID NO: 2104009 - RNA, 19 nt, Artificial Sequence
  Description of Artificial Sequence: Synthetic oligonucleotide
cuugcugauaaauaguaga

SEQ ID NO: 2104010 - RNA, 19 nt, Artificial Sequence
  Description of Artificial Sequence: Synthetic oligonucleotide
cacguagccauugagaccc

SEQ ID NO: 2104011 - RNA, 19 nt, Artificial Sequence
  Description of Artificial Sequence: Synthetic oligonucleotide
auguaaacuagaagggagc

SEQ ID NO: 2104012 - RNA, 19 nt, Artificial Sequence
  Description of Artificial Sequence: Synthetic oligonucleotide
cuuacagaacucaaacaug

SEQ ID NO: 2104013 - RNA, 19 nt, Artificial Sequence
  Description of Artificial Sequence: Synthetic oligonucleotide
aacauaacuccaaaauaug

SEQ ID NO: 2104014 - RNA, 19 nt, Artificial Sequence
  Description of Artificial Sequence: Synthetic oligonucleotide
uugcugauaaauaguagaa

SEQ ID NO: 2104015 - RNA, 19 nt, Artificial Sequence
  Description of Artificial Sequence: Synthetic oligonucleotide
uccacguagccauugagac

SEQ ID NO: 2104016 - RNA, 19 nt, Artificial Sequence
  Description of Artificial Sequence: Synthetic oligonucleotide
acaggauguaaccauuuug

SEQ ID NO: 2104017 - RNA, 19 nt, Artificial Sequence
  Description of Artificial Sequence: Synthetic oligonucleotide
uguaaacuagaagggagcc

SEQ ID NO: 2104018 - RNA, 19 nt, Artificial Sequence
  Description of Artificial Sequence: Synthetic oligonucleotide
ucgauagagggccaggaac

SEQ ID NO: 2104019 - RNA, 19 nt, Artificial Sequence
  Description of Artificial Sequence: Synthetic oligonucleotide
gcaccuaaaacagugaggg

SEQ ID NO: 2104020 - RNA, 19 nt, Artificial Sequence
  Description of Artificial Sequence: Synthetic oligonucleotide
ugaacagcacaacaaacuu

SEQ ID NO: 2104021 - RNA, 19 nt, Artificial Sequence
  Description of Artificial Sequence: Synthetic oligonucleotide
gacaccccucgauagaggg

SEQ ID NO: 2104022 - RNA, 19 nt, Artificial Sequence
  Description of Artificial Sequence: Synthetic oligonucleotide
ucaaacuuugguccacccc

SEQ ID NO: 2104023 - RNA, 19 nt, Artificial Sequence
  Description of Artificial Sequence: Synthetic oligonucleotide
aauucccguaacuccuggg

SEQ ID NO: 2104024 - RNA, 19 nt, Artificial Sequence
  Description of Artificial Sequence: Synthetic oligonucleotide
uccauuccagauuuucucc

SEQ ID NO: 2104025 - RNA, 19 nt, Artificial Sequence
  Description of Artificial Sequence: Synthetic oligonucleotide
ucuuuaauucccguaacuc

SEQ ID NO: 2104026 - RNA, 19 nt, Artificial Sequence
  Description of Artificial Sequence: Synthetic oligonucleotide
acaauggagugccacuggg

SEQ ID NO: 2104027 - RNA, 19 nt, Artificial Sequence
  Description of Artificial Sequence: Synthetic oligonucleotide
ugcacaaucagccggguuu

SEQ ID NO: 2104028 - RNA, 19 nt, Artificial Sequence
  Description of Artificial Sequence: Synthetic oligonucleotide
gauaaggacuuugagccug

SEQ ID NO: 2104029 - RNA, 19 nt, Artificial Sequence
  Description of Artificial Sequence: Synthetic oligonucleotide
uuuaguaaguuagcuguca

SEQ ID NO: 2104030 - RNA, 19 nt, Artificial Sequence
  Description of Artificial Sequence: Synthetic oligonucleotide
cagacuuccggccacaaug

SEQ ID NO: 2104031 - RNA, 19 nt, Artificial Sequence
  Description of Artificial Sequence: Synthetic oligonucleotide
gugacaaucauggaaacca

SEQ ID NO: 2104032 - RNA, 19 nt, Artificial Sequence
  Description of Artificial Sequence: Synthetic oligonucleotide
caccaugccgacuugggcg

SEQ ID NO: 2104033 - RNA, 19 nt, Artificial Sequence
  Description of Artificial Sequence: Synthetic oligonucleotide
accuuuaguaaguuagcug

SEQ ID NO: 2104034 - RNA, 19 nt, Artificial Sequence
  Description of Artificial Sequence: Synthetic oligonucleotide
cuggcugccgguuagccgg

SEQ ID NO: 2104035 - RNA, 19 nt, Artificial Sequence
  Description of Artificial Sequence: Synthetic oligonucleotide
gaaauggacaucuacuccu

SEQ ID NO: 2104036 - RNA, 19 nt, Artificial Sequence
  Description of Artificial Sequence: Synthetic oligonucleotide
acuuucuguaggcagccag

SEQ ID NO: 2104037 - RNA, 19 nt, Artificial Sequence
  Description of Artificial Sequence: Synthetic oligonucleotide
aaauucucuuacagaacuc

SEQ ID NO: 2104038 - RNA, 19 nt, Artificial Sequence
  Description of Artificial Sequence: Synthetic oligonucleotide
agcugagagaaucguuccc

SEQ ID NO: 2104039 - RNA, 19 nt, Artificial Sequence
  Description of Artificial Sequence: Synthetic oligonucleotide
aaccaugccugccagacuu

SEQ ID NO: 2104040 - RNA, 19 nt, Artificial Sequence
  Description of Artificial Sequence: Synthetic oligonucleotide
ucauguaaacuagaaggga

SEQ ID NO: 2104041 - RNA, 19 nt, Artificial Sequence
  Description of Artificial Sequence: Synthetic oligonucleotide
guaugugacaaucauggaa

SEQ ID NO: 2104042 - RNA, 19 nt, Artificial Sequence
  Description of Artificial Sequence: Synthetic oligonucleotide
caugcuaaacauaacucca

SEQ ID NO: 2104043 - RNA, 19 nt, Artificial Sequence
  Description of Artificial Sequence: Synthetic oligonucleotide
uagccauugagacccaacu

SEQ ID NO: 2104044 - RNA, 19 nt, Artificial Sequence
  Description of Artificial Sequence: Synthetic oligonucleotide
uaauucccguaacuccugg

SEQ ID NO: 2104045 - RNA, 19 nt, Artificial Sequence
  Description of Artificial Sequence: Synthetic oligonucleotide
uugagacccaacuucucgc

SEQ ID NO: 2104046 - RNA, 19 nt, Artificial Sequence
  Description of Artificial Sequence: Synthetic oligonucleotide
ugagagaaucguucccggg

SEQ ID NO: 2104047 - RNA, 19 nt, Artificial Sequence
  Description of Artificial Sequence: Synthetic oligonucleotide
uuauaggucaguggggaca

SEQ ID NO: 2104048 - RNA, 19 nt, Artificial Sequence
  Description of Artificial Sequence: Synthetic oligonucleotide
augugacaaucauggaaac

SEQ ID NO: 2104049 - RNA, 19 nt, Artificial Sequence
  Description of Artificial Sequence: Synthetic oligonucleotide
cuaccuuuaguaaguuagc

SEQ ID NO: 2104050 - RNA, 19 nt, Artificial Sequence
  Description of Artificial Sequence: Synthetic oligonucleotide
guaaguuagcugucagucc

SEQ ID NO: 2104051 - RNA, 19 nt, Artificial Sequence
  Description of Artificial Sequence: Synthetic oligonucleotide
aaauggacaucuacuccuc

SEQ ID NO: 2104052 - RNA, 19 nt, Artificial Sequence
  Description of Artificial Sequence: Synthetic oligonucleotide
uggccuugcaccaugccga

SEQ ID NO: 2104053 - RNA, 19 nt, Artificial Sequence
  Description of Artificial Sequence: Synthetic oligonucleotide
uucucuuacagaacucaaa

SEQ ID NO: 2104054 - RNA, 19 nt, Artificial Sequence
  Description of Artificial Sequence: Synthetic oligonucleotide
aacuuugguccaccccugg

SEQ ID NO: 2104055 - RNA, 19 nt, Artificial Sequence
  Description of Artificial Sequence: Synthetic oligonucleotide
caaucauggaaaccaugcc

SEQ ID NO: 2104056 - RNA, 19 nt, Artificial Sequence
  Description of Artificial Sequence: Synthetic oligonucleotide
auauggaacuaccuuuagu

SEQ ID NO: 2104057 - RNA, 19 nt, Artificial Sequence
  Description of Artificial Sequence: Synthetic oligonucleotide
uguaggguaugugacaauc

SEQ ID NO: 2104058 - RNA, 19 nt, Artificial Sequence
  Description of Artificial Sequence: Synthetic oligonucleotide
uggggcuucaaacuuuggu

SEQ ID NO: 2104059 - RNA, 19 nt, Artificial Sequence
  Description of Artificial Sequence: Synthetic oligonucleotide
uauaggucaguggggacag

SEQ ID NO: 2104060 - RNA, 19 nt, Artificial Sequence
  Description of Artificial Sequence: Synthetic oligonucleotide
ugcaccaugccgacuuggg

SEQ ID NO: 2104061 - RNA, 19 nt, Artificial Sequence
  Description of Artificial Sequence: Synthetic oligonucleotide
ugcuaaacauaacuccaaa

SEQ ID NO: 2104062 - RNA, 19 nt, Artificial Sequence
  Description of Artificial Sequence: Synthetic oligonucleotide
aaccgcaccuaaaacagug

SEQ ID NO: 2104063 - RNA, 19 nt, Artificial Sequence
  Description of Artificial Sequence: Synthetic oligonucleotide
aggcaugccacgccauucc

SEQ ID NO: 2104064 - RNA, 19 nt, Artificial Sequence
  Description of Artificial Sequence: Synthetic oligonucleotide
uaggguaugugacaaucau

SEQ ID NO: 2104065 - RNA, 19 nt, Artificial Sequence
  Description of Artificial Sequence: Synthetic oligonucleotide
aaauauggaacuaccuuua

SEQ ID NO: 2104066 - RNA, 19 nt, Artificial Sequence
  Description of Artificial Sequence: Synthetic oligonucleotide
aucauggaaaccaugccug

SEQ ID NO: 2104067 - RNA, 19 nt, Artificial Sequence
  Description of Artificial Sequence: Synthetic oligonucleotide
gucaguccgcuccagagcc

SEQ ID NO: 2104068 - RNA, 19 nt, Artificial Sequence
  Description of Artificial Sequence: Synthetic oligonucleotide
agggaaccgcaccuaaaac

SEQ ID NO: 2104069 - RNA, 19 nt, Artificial Sequence
  Description of Artificial Sequence: Synthetic oligonucleotide
agacccaacuucucgccgg

SEQ ID NO: 2104070 - RNA, 19 nt, Artificial Sequence
  Description of Artificial Sequence: Synthetic oligonucleotide
aguuuauaggucagugggg

SEQ ID NO: 2104071 - RNA, 19 nt, Artificial Sequence
  Description of Artificial Sequence: Synthetic oligonucleotide
ccuggagucaguuuauagg

SEQ ID NO: 2104072 - RNA, 19 nt, Artificial Sequence
  Description of Artificial Sequence: Synthetic oligonucleotide
ugggaaauauggcccaggu

SEQ ID NO: 2104073 - RNA, 19 nt, Artificial Sequence
  Description of Artificial Sequence: Synthetic oligonucleotide
cagaacucaaacaugcuaa

SEQ ID NO: 2104074 - RNA, 19 nt, Artificial Sequence
  Description of Artificial Sequence: Synthetic oligonucleotide
gaacccuucuugcugauaa

SEQ ID NO: 2104075 - RNA, 19 nt, Artificial Sequence
  Description of Artificial Sequence: Synthetic oligonucleotide
aacuagaagggagccagca

SEQ ID NO: 2104076 - RNA, 19 nt, Artificial Sequence
  Description of Artificial Sequence: Synthetic oligonucleotide
guggccuugcaccaugccg

SEQ ID NO: 2104077 - RNA, 19 nt, Artificial Sequence
  Description of Artificial Sequence: Synthetic oligonucleotide
ccagauuuucuccagauuc

SEQ ID NO: 2104078 - RNA, 19 nt, Artificial Sequence
  Description of Artificial Sequence: Synthetic oligonucleotide
auacucggcgucccguggc

SEQ ID NO: 2104079 - RNA, 19 nt, Artificial Sequence
  Description of Artificial Sequence: Synthetic oligonucleotide
uggaaaccaugccugccag

SEQ ID NO: 2104080 - RNA, 19 nt, Artificial Sequence
  Description of Artificial Sequence: Synthetic oligonucleotide
cuuugguccaccccuggag

SEQ ID NO: 2104081 - RNA, 19 nt, Artificial Sequence
  Description of Artificial Sequence: Synthetic oligonucleotide
ugucaguccgcuccagagc

SEQ ID NO: 2104082 - RNA, 19 nt, Artificial Sequence
  Description of Artificial Sequence: Synthetic oligonucleotide
ugagacccaacuucucgcc

SEQ ID NO: 2104083 - RNA, 19 nt, Artificial Sequence
  Description of Artificial Sequence: Synthetic oligonucleotide
acgguggcgagcuccaggg

SEQ ID NO: 2104084 - RNA, 19 nt, Artificial Sequence
  Description of Artificial Sequence: Synthetic oligonucleotide
uucccguaacuccuggggc

SEQ ID NO: 2104085 - RNA, 19 nt, Artificial Sequence
  Description of Artificial Sequence: Synthetic oligonucleotide
cuguaagaugguuucagca

SEQ ID NO: 2104086 - RNA, 19 nt, Artificial Sequence
  Description of Artificial Sequence: Synthetic oligonucleotide
aaguucuguagcugagaga

SEQ ID NO: 2104087 - RNA, 19 nt, Artificial Sequence
  Description of Artificial Sequence: Synthetic oligonucleotide
aguggggacaggauguaac

SEQ ID NO: 2104088 - RNA, 19 nt, Artificial Sequence
  Description of Artificial Sequence: Synthetic oligonucleotide
aguugggaagauaaggacu

SEQ ID NO: 2104089 - RNA, 19 nt, Artificial Sequence
  Description of Artificial Sequence: Synthetic oligonucleotide
cuagaagggagccagcaga

SEQ ID NO: 2104090 - RNA, 19 nt, Artificial Sequence
  Description of Artificial Sequence: Synthetic oligonucleotide
uaguaaguuagcugucagu

SEQ ID NO: 2104091 - RNA, 19 nt, Artificial Sequence
  Description of Artificial Sequence: Synthetic oligonucleotide
gagggacaccccucgauag

SEQ ID NO: 2104092 - RNA, 19 nt, Artificial Sequence
  Description of Artificial Sequence: Synthetic oligonucleotide
auggaaaccaugccugcca

SEQ ID NO: 2104093 - RNA, 19 nt, Artificial Sequence
  Description of Artificial Sequence: Synthetic oligonucleotide
aaguuagcugucaguccgc

SEQ ID NO: 2104094 - RNA, 19 nt, Artificial Sequence
  Description of Artificial Sequence: Synthetic oligonucleotide
cauuggcaaaguucuguag

SEQ ID NO: 2104095 - RNA, 19 nt, Artificial Sequence
  Description of Artificial Sequence: Synthetic oligonucleotide
guagcugagagaaucguuc

SEQ ID NO: 2104096 - RNA, 19 nt, Artificial Sequence
  Description of Artificial Sequence: Synthetic oligonucleotide
guuuauaggucagugggga

SEQ ID NO: 2104097 - RNA, 19 nt, Artificial Sequence
  Description of Artificial Sequence: Synthetic oligonucleotide
cugagagaaucguucccgg

SEQ ID NO: 2104098 - RNA, 19 nt, Artificial Sequence
  Description of Artificial Sequence: Synthetic oligonucleotide
cacggugucaaagggaaag

SEQ ID NO: 2104099 - RNA, 19 nt, Artificial Sequence
  Description of Artificial Sequence: Synthetic oligonucleotide
gucaguuuauaggucagug

SEQ ID NO: 2104100 - RNA, 19 nt, Artificial Sequence
  Description of Artificial Sequence: Synthetic oligonucleotide
agagaaucguucccggggu

SEQ ID NO: 2104101 - RNA, 19 nt, Artificial Sequence
  Description of Artificial Sequence: Synthetic oligonucleotide
ucuggcugccgguuagccg

SEQ ID NO: 2104102 - RNA, 19 nt, Artificial Sequence
  Description of Artificial Sequence: Synthetic oligonucleotide
uuuauaggucaguggggac

SEQ ID NO: 2104103 - RNA, 19 nt, Artificial Sequence
  Description of Artificial Sequence: Synthetic oligonucleotide
aaauauggcccaggucauc

SEQ ID NO: 2104104 - RNA, 19 nt, Artificial Sequence
  Description of Artificial Sequence: Synthetic oligonucleotide
gaaaggaaagacucuggcu

SEQ ID NO: 2104105 - RNA, 19 nt, Artificial Sequence
  Description of Artificial Sequence: Synthetic oligonucleotide
ccagauucauguaaacuag

SEQ ID NO: 2104106 - RNA, 19 nt, Artificial Sequence
  Description of Artificial Sequence: Synthetic oligonucleotide
gggcuucaaacuuuggucc

SEQ ID NO: 2104107 - RNA, 19 nt, Artificial Sequence
  Description of Artificial Sequence: Synthetic oligonucleotide
ggaaccgcaccuaaaacag

SEQ ID NO: 2104108 - RNA, 19 nt, Artificial Sequence
  Description of Artificial Sequence: Synthetic oligonucleotide
cagcacaacaaacuuucug

SEQ ID NO: 2104109 - RNA, 19 nt, Artificial Sequence
  Description of Artificial Sequence: Synthetic oligonucleotide
ugcugauaaauaguagaaa

SEQ ID NO: 2104110 - RNA, 19 nt, Artificial Sequence
  Description of Artificial Sequence: Synthetic oligonucleotide
cuuugagccugcaucuuuc

SEQ ID NO: 2104111 - RNA, 19 nt, Artificial Sequence
  Description of Artificial Sequence: Synthetic oligonucleotide
caugcugcaggggaagagg

SEQ ID NO: 2104112 - RNA, 19 nt, Artificial Sequence
  Description of Artificial Sequence: Synthetic oligonucleotide
auggaacuaccuuuaguaa

SEQ ID NO: 2104113 - RNA, 19 nt, Artificial Sequence
  Description of Artificial Sequence: Synthetic oligonucleotide
acuugggcgagcacggugg

SEQ ID NO: 2104114 - RNA, 19 nt, Artificial Sequence
  Description of Artificial Sequence: Synthetic oligonucleotide
ucuccagauucauguaaac

SEQ ID NO: 2104115 - RNA, 19 nt, Artificial Sequence
  Description of Artificial Sequence: Synthetic oligonucleotide
aacuaccuuuaguaaguua

SEQ ID NO: 2104116 - RNA, 19 nt, Artificial Sequence
  Description of Artificial Sequence: Synthetic oligonucleotide
ggagucaguuuauagguca

SEQ ID NO: 2104117 - RNA, 19 nt, Artificial Sequence
  Description of Artificial Sequence: Synthetic oligonucleotide
ugacaaucauggaaaccau

SEQ ID NO: 2104118 - RNA, 19 nt, Artificial Sequence
  Description of Artificial Sequence: Synthetic oligonucleotide
auaaggacuuugagccugc

SEQ ID NO: 2104119 - RNA, 19 nt, Artificial Sequence
  Description of Artificial Sequence: Synthetic oligonucleotide
uugaugaggucuguagggu

SEQ ID NO: 2104120 - RNA, 19 nt, Artificial Sequence
  Description of Artificial Sequence: Synthetic oligonucleotide
uauccccgccuccacguag

SEQ ID NO: 2104121 - RNA, 19 nt, Artificial Sequence
  Description of Artificial Sequence: Synthetic oligonucleotide
caaacuuugguccaccccu

SEQ ID NO: 2104122 - RNA, 19 nt, Artificial Sequence
  Description of Artificial Sequence: Synthetic oligonucleotide
cacaauggagugccacugg

SEQ ID NO: 2104123 - RNA, 19 nt, Artificial Sequence
  Description of Artificial Sequence: Synthetic oligonucleotide
ugagggacaccccucgaua

SEQ ID NO: 2104124 - RNA, 19 nt, Artificial Sequence
  Description of Artificial Sequence: Synthetic oligonucleotide
uggagucaguuuauagguc

SEQ ID NO: 2104125 - RNA, 19 nt, Artificial Sequence
  Description of Artificial Sequence: Synthetic oligonucleotide
agauucauguaaacuagaa

SEQ ID NO: 2104126 - RNA, 19 nt, Artificial Sequence
  Description of Artificial Sequence: Synthetic oligonucleotide
aggcugaggcugaacaccc

SEQ ID NO: 2104127 - RNA, 19 nt, Artificial Sequence
  Description of Artificial Sequence: Synthetic oligonucleotide
cuggagucaguuuauaggu

SEQ ID NO: 2104128 - RNA, 19 nt, Artificial Sequence
  Description of Artificial Sequence: Synthetic oligonucleotide
caccccucgauagagggcc

SEQ ID NO: 2104129 - RNA, 19 nt, Artificial Sequence
  Description of Artificial Sequence: Synthetic oligonucleotide
agaggcgcaggcaugccac

SEQ ID NO: 2104130 - RNA, 19 nt, Artificial Sequence
  Description of Artificial Sequence: Synthetic oligonucleotide
uuugagccugcaucuuucu

SEQ ID NO: 2104131 - RNA, 19 nt, Artificial Sequence
  Description of Artificial Sequence: Synthetic oligonucleotide
aaaccaugccugccagacu

SEQ ID NO: 2104132 - RNA, 19 nt, Artificial Sequence
  Description of Artificial Sequence: Synthetic oligonucleotide
gccauugagacccaacuuc

SEQ ID NO: 2104133 - RNA, 19 nt, Artificial Sequence
  Description of Artificial Sequence: Synthetic oligonucleotide
ggggcuucaaacuuugguc

SEQ ID NO: 2104134 - RNA, 19 nt, Artificial Sequence
  Description of Artificial Sequence: Synthetic oligonucleotide
ucccguaacuccuggggcu

SEQ ID NO: 2104135 - RNA, 19 nt, Artificial Sequence
  Description of Artificial Sequence: Synthetic oligonucleotide
gagucaguuuauaggucag

SEQ ID NO: 2104136 - RNA, 19 nt, Artificial Sequence
  Description of Artificial Sequence: Synthetic oligonucleotide
uuagccggcuauccccgcc

SEQ ID NO: 2104137 - RNA, 19 nt, Artificial Sequence
  Description of Artificial Sequence: Synthetic oligonucleotide
aaggacuuugagccugcau

SEQ ID NO: 2104138 - RNA, 19 nt, Artificial Sequence
  Description of Artificial Sequence: Synthetic oligonucleotide
ugaugaggucuguagggua

SEQ ID NO: 2104139 - RNA, 19 nt, Artificial Sequence
  Description of Artificial Sequence: Synthetic oligonucleotide
uaaaacagugagggacacc

SEQ ID NO: 2104140 - RNA, 19 nt, Artificial Sequence
  Description of Artificial Sequence: Synthetic oligonucleotide
gacuugggcgagcacggug

SEQ ID NO: 2104141 - RNA, 19 nt, Artificial Sequence
  Description of Artificial Sequence: Synthetic oligonucleotide
cagcauguuuugcacaauc

SEQ ID NO: 2104142 - RNA, 19 nt, Artificial Sequence
  Description of Artificial Sequence: Synthetic oligonucleotide
caaaauauggaacuaccuu

SEQ ID NO: 2104143 - RNA, 19 nt, Artificial Sequence
  Description of Artificial Sequence: Synthetic oligonucleotide
cacaggagccucuggcugc

SEQ ID NO: 2104144 - RNA, 19 nt, Artificial Sequence
  Description of Artificial Sequence: Synthetic oligonucleotide
gggaaccgcaccuaaaaca

SEQ ID NO: 2104145 - RNA, 19 nt, Artificial Sequence
  Description of Artificial Sequence: Synthetic oligonucleotide
agcccuagugccccuuggg

SEQ ID NO: 2104146 - RNA, 19 nt, Artificial Sequence
  Description of Artificial Sequence: Synthetic oligonucleotide
cuucaaacuuugguccacc

SEQ ID NO: 2104147 - RNA, 19 nt, Artificial Sequence
  Description of Artificial Sequence: Synthetic oligonucleotide
ggucuucacuaucugccgg

SEQ ID NO: 2104148 - RNA, 19 nt, Artificial Sequence
  Description of Artificial Sequence: Synthetic oligonucleotide
cauggaaaccaugccugcc

SEQ ID NO: 2104149 - RNA, 19 nt, Artificial Sequence
  Description of Artificial Sequence: Synthetic oligonucleotide
aaacuuugguccaccccug

SEQ ID NO: 2104150 - RNA, 19 nt, Artificial Sequence
  Description of Artificial Sequence: Synthetic oligonucleotide
ggcgcggugaggcugaggc

SEQ ID NO: 2104151 - RNA, 19 nt, Artificial Sequence
  Description of Artificial Sequence: Synthetic oligonucleotide
cauacucggcgucccgugg

SEQ ID NO: 2104152 - RNA, 19 nt, Artificial Sequence
  Description of Artificial Sequence: Synthetic oligonucleotide
acggugucaaagggaaagg

SEQ ID NO: 2104153 - RNA, 19 nt, Artificial Sequence
  Description of Artificial Sequence: Synthetic oligonucleotide
agaagggaaccgcaccuaa

SEQ ID NO: 2104154 - RNA, 19 nt, Artificial Sequence
  Description of Artificial Sequence: Synthetic oligonucleotide
uguggccuugcaccaugcc

SEQ ID NO: 2104155 - RNA, 19 nt, Artificial Sequence
  Description of Artificial Sequence: Synthetic oligonucleotide
cuuggguguggccuugcac

SEQ ID NO: 2104156 - RNA, 19 nt, Artificial Sequence
  Description of Artificial Sequence: Synthetic oligonucleotide
acuuugagccugcaucuuu

SEQ ID NO: 2104157 - RNA, 19 nt, Artificial Sequence
  Description of Artificial Sequence: Synthetic oligonucleotide
ugggcgagcacgguggcga

SEQ ID NO: 2104158 - RNA, 19 nt, Artificial Sequence
  Description of Artificial Sequence: Synthetic oligonucleotide
ggauguaaccauuuugaua

SEQ ID NO: 2104159 - RNA, 19 nt, Artificial Sequence
  Description of Artificial Sequence: Synthetic oligonucleotide
uucccgggguccauuccag

SEQ ID NO: 2104160 - RNA, 19 nt, Artificial Sequence
  Description of Artificial Sequence: Synthetic oligonucleotide
accaugccgacuugggcga

SEQ ID NO: 2104161 - RNA, 19 nt, Artificial Sequence
  Description of Artificial Sequence: Synthetic oligonucleotide
gggucuucacuaucugccg

SEQ ID NO: 2104162 - RNA, 19 nt, Artificial Sequence
  Description of Artificial Sequence: Synthetic oligonucleotide
ucgccggccaccucguggc

SEQ ID NO: 2104163 - RNA, 19 nt, Artificial Sequence
  Description of Artificial Sequence: Synthetic oligonucleotide
cuucacggugucaaaggga

SEQ ID NO: 2104164 - RNA, 19 nt, Artificial Sequence
  Description of Artificial Sequence: Synthetic oligonucleotide
cagauucauguaaacuaga

SEQ ID NO: 2104165 - RNA, 19 nt, Artificial Sequence
  Description of Artificial Sequence: Synthetic oligonucleotide
gucaaagggaaaggaaaga

SEQ ID NO: 2104166 - RNA, 19 nt, Artificial Sequence
  Description of Artificial Sequence: Synthetic oligonucleotide
aggguaugugacaaucaug

SEQ ID NO: 2104167 - RNA, 19 nt, Artificial Sequence
  Description of Artificial Sequence: Synthetic oligonucleotide
cuucacuaucugccggaag

SEQ ID NO: 2104168 - RNA, 19 nt, Artificial Sequence
  Description of Artificial Sequence: Synthetic oligonucleotide
caugccugccagacuuccg

SEQ ID NO: 2104169 - RNA, 19 nt, Artificial Sequence
  Description of Artificial Sequence: Synthetic oligonucleotide
cauugagacccaacuucuc

SEQ ID NO: 2104170 - RNA, 19 nt, Artificial Sequence
  Description of Artificial Sequence: Synthetic oligonucleotide
cgauagagggccaggaacc

SEQ ID NO: 2104171 - RNA, 19 nt, Artificial Sequence
  Description of Artificial Sequence: Synthetic oligonucleotide
cacgccauuccccuuccac

SEQ ID NO: 2104172 - RNA, 19 nt, Artificial Sequence
  Description of Artificial Sequence: Synthetic oligonucleotide
acuuugguccaccccugga

SEQ ID NO: 2104173 - RNA, 19 nt, Artificial Sequence
  Description of Artificial Sequence: Synthetic oligonucleotide
gcuaaacauaacuccaaaa

SEQ ID NO: 2104174 - RNA, 19 nt, Artificial Sequence
  Description of Artificial Sequence: Synthetic oligonucleotide
acuaucugccggaagcagu

SEQ ID NO: 2104175 - RNA, 19 nt, Artificial Sequence
  Description of Artificial Sequence: Synthetic oligonucleotide
cucgccggccaccucgugg

SEQ ID NO: 2104176 - RNA, 19 nt, Artificial Sequence
  Description of Artificial Sequence: Synthetic oligonucleotide
aucugccggaagcagucca

SEQ ID NO: 2104177 - RNA, 19 nt, Artificial Sequence
  Description of Artificial Sequence: Synthetic oligonucleotide
guaaacuagaagggagcca

SEQ ID NO: 2104178 - RNA, 19 nt, Artificial Sequence
  Description of Artificial Sequence: Synthetic oligonucleotide
gagcccuagugccccuugg

SEQ ID NO: 2104179 - RNA, 19 nt, Artificial Sequence
  Description of Artificial Sequence: Synthetic oligonucleotide
cugggaaauauggcccagg

SEQ ID NO: 2104180 - RNA, 19 nt, Artificial Sequence
  Description of Artificial Sequence: Synthetic oligonucleotide
uacucggcgucccguggcc

SEQ ID NO: 2104181 - RNA, 19 nt, Artificial Sequence
  Description of Artificial Sequence: Synthetic oligonucleotide
aacccuucuugcugauaaa

SEQ ID NO: 2104182 - RNA, 19 nt, Artificial Sequence
  Description of Artificial Sequence: Synthetic oligonucleotide
cucggccagccauacucgg

SEQ ID NO: 2104183 - RNA, 19 nt, Artificial Sequence
  Description of Artificial Sequence: Synthetic oligonucleotide
ccuguaagaugguuucagc

SEQ ID NO: 2104184 - RNA, 19 nt, Artificial Sequence
  Description of Artificial Sequence: Synthetic oligonucleotide
cucaaacaugcuaaacaua

SEQ ID NO: 2104185 - RNA, 19 nt, Artificial Sequence
  Description of Artificial Sequence: Synthetic oligonucleotide
gacccaacuucucgccggc

SEQ ID NO: 2104186 - RNA, 19 nt, Artificial Sequence
  Description of Artificial Sequence: Synthetic oligonucleotide
agccaugcagccauuggca

SEQ ID NO: 2104187 - RNA, 19 nt, Artificial Sequence
  Description of Artificial Sequence: Synthetic oligonucleotide
gccgacuugggcgagcacg

SEQ ID NO: 2104188 - RNA, 19 nt, Artificial Sequence
  Description of Artificial Sequence: Synthetic oligonucleotide
cuacuccuccacaguuggg

SEQ ID NO: 2104189 - RNA, 19 nt, Artificial Sequence
  Description of Artificial Sequence: Synthetic oligonucleotide
gaggcgcaggcaugccacg

SEQ ID NO: 2104190 - RNA, 19 nt, Artificial Sequence
  Description of Artificial Sequence: Synthetic oligonucleotide
guaggguaugugacaauca

SEQ ID NO: 2104191 - RNA, 19 nt, Artificial Sequence
  Description of Artificial Sequence: Synthetic oligonucleotide
uaacuccuggggcuucaaa

SEQ ID NO: 2104192 - RNA, 19 nt, Artificial Sequence
  Description of Artificial Sequence: Synthetic oligonucleotide
acaccccucgauagagggc

SEQ ID NO: 2104193 - RNA, 19 nt, Artificial Sequence
  Description of Artificial Sequence: Synthetic oligonucleotide
cagcagagaagggaaccgc

SEQ ID NO: 2104194 - RNA, 19 nt, Artificial Sequence
  Description of Artificial Sequence: Synthetic oligonucleotide
acugggaaauauggcccag

SEQ ID NO: 2104195 - RNA, 19 nt, Artificial Sequence
  Description of Artificial Sequence: Synthetic oligonucleotide
auauggcccaggucaucca

SEQ ID NO: 2104196 - RNA, 19 nt, Artificial Sequence
  Description of Artificial Sequence: Synthetic oligonucleotide
gaggucuguaggguaugug

SEQ ID NO: 2104197 - RNA, 19 nt, Artificial Sequence
  Description of Artificial Sequence: Synthetic oligonucleotide
augcuaaacauaacuccaa

SEQ ID NO: 2104198 - RNA, 19 nt, Artificial Sequence
  Description of Artificial Sequence: Synthetic oligonucleotide
agccauacucggcgucccg

SEQ ID NO: 2104199 - RNA, 19 nt, Artificial Sequence
  Description of Artificial Sequence: Synthetic oligonucleotide
cacuaucugccggaagcag

SEQ ID NO: 2104200 - RNA, 19 nt, Artificial Sequence
  Description of Artificial Sequence: Synthetic oligonucleotide
uucucuucacggugucaaa

SEQ ID NO: 2104201 - RNA, 19 nt, Artificial Sequence
  Description of Artificial Sequence: Synthetic oligonucleotide
gcagccaugcagccauugg

SEQ ID NO: 2104202 - RNA, 19 nt, Artificial Sequence
  Description of Artificial Sequence: Synthetic oligonucleotide
auggagugccacugggaaa

SEQ ID NO: 2104203 - RNA, 19 nt, Artificial Sequence
  Description of Artificial Sequence: Synthetic oligonucleotide
guagccauugagacccaac

SEQ ID NO: 2104204 - RNA, 19 nt, Artificial Sequence
  Description of Artificial Sequence: Synthetic oligonucleotide
guucccgggguccauucca

SEQ ID NO: 2104205 - RNA, 19 nt, Artificial Sequence
  Description of Artificial Sequence: Synthetic oligonucleotide
ggucuguaggguaugugac

SEQ ID NO: 2104206 - RNA, 19 nt, Artificial Sequence
  Description of Artificial Sequence: Synthetic oligonucleotide
ugaggucuguaggguaugu

SEQ ID NO: 2104207 - RNA, 19 nt, Artificial Sequence
  Description of Artificial Sequence: Synthetic oligonucleotide
uuugcacaaucagccgggu

SEQ ID NO: 2104208 - RNA, 19 nt, Artificial Sequence
  Description of Artificial Sequence: Synthetic oligonucleotide
uagccggcuauccccgccu

SEQ ID NO: 2104209 - RNA, 19 nt, Artificial Sequence
  Description of Artificial Sequence: Synthetic oligonucleotide
gagaaucguucccgggguc

SEQ ID NO: 2104210 - RNA, 19 nt, Artificial Sequence
  Description of Artificial Sequence: Synthetic oligonucleotide
ggaagaggcgcaggcaugc

SEQ ID NO: 2104211 - RNA, 19 nt, Artificial Sequence
  Description of Artificial Sequence: Synthetic oligonucleotide
aguuagcugucaguccgcu

SEQ ID NO: 2104212 - RNA, 19 nt, Artificial Sequence
  Description of Artificial Sequence: Synthetic oligonucleotide
cgcaccuaaaacagugagg

SEQ ID NO: 2104213 - RNA, 19 nt, Artificial Sequence
  Description of Artificial Sequence: Synthetic oligonucleotide
agagcccuagugccccuug

SEQ ID NO: 2104214 - RNA, 19 nt, Artificial Sequence
  Description of Artificial Sequence: Synthetic oligonucleotide
caaaguucuguagcugaga

SEQ ID NO: 2104215 - RNA, 19 nt, Artificial Sequence
  Description of Artificial Sequence: Synthetic oligonucleotide
ugcagccauuggcaaaguu

SEQ ID NO: 2104216 - RNA, 19 nt, Artificial Sequence
  Description of Artificial Sequence: Synthetic oligonucleotide
agugagggacaccccucga

SEQ ID NO: 2104217 - RNA, 19 nt, Artificial Sequence
  Description of Artificial Sequence: Synthetic oligonucleotide
cgucccguggcccacagcc

SEQ ID NO: 2104218 - RNA, 19 nt, Artificial Sequence
  Description of Artificial Sequence: Synthetic oligonucleotide
ucacggugucaaagggaaa

SEQ ID NO: 2104219 - RNA, 19 nt, Artificial Sequence
  Description of Artificial Sequence: Synthetic oligonucleotide
gaugaggucuguaggguau

SEQ ID NO: 2104220 - RNA, 19 nt, Artificial Sequence
  Description of Artificial Sequence: Synthetic oligonucleotide
gguaugugacaaucaugga

SEQ ID NO: 2104221 - RNA, 19 nt, Artificial Sequence
  Description of Artificial Sequence: Synthetic oligonucleotide
gggacaccccucgauagag

SEQ ID NO: 2104222 - RNA, 19 nt, Artificial Sequence
  Description of Artificial Sequence: Synthetic oligonucleotide
cuugggcgagcacgguggc

SEQ ID NO: 2104223 - RNA, 19 nt, Artificial Sequence
  Description of Artificial Sequence: Synthetic oligonucleotide
aagaugguuucagcauguu

SEQ ID NO: 2104224 - RNA, 19 nt, Artificial Sequence
  Description of Artificial Sequence: Synthetic oligonucleotide
ccgacuugggcgagcacgg

SEQ ID NO: 2104225 - RNA, 19 nt, Artificial Sequence
  Description of Artificial Sequence: Synthetic oligonucleotide
uugcacaaucagccggguu

SEQ ID NO: 2104226 - RNA, 19 nt, Artificial Sequence
  Description of Artificial Sequence: Synthetic oligonucleotide
augaggucuguaggguaug

SEQ ID NO: 2104227 - RNA, 19 nt, Artificial Sequence
  Description of Artificial Sequence: Synthetic oligonucleotide
uugggcgagcacgguggcg

SEQ ID NO: 2104228 - RNA, 19 nt, Artificial Sequence
  Description of Artificial Sequence: Synthetic oligonucleotide
gaaucguucccggggucca

SEQ ID NO: 2104229 - RNA, 19 nt, Artificial Sequence
  Description of Artificial Sequence: Synthetic oligonucleotide
ccgcaccuaaaacagugag

SEQ ID NO: 2104230 - RNA, 19 nt, Artificial Sequence
  Description of Artificial Sequence: Synthetic oligonucleotide
ggacuuugagccugcaucu

SEQ ID NO: 2104231 - RNA, 19 nt, Artificial Sequence
  Description of Artificial Sequence: Synthetic oligonucleotide
cuugcaccaugccgacuug

SEQ ID NO: 2104232 - RNA, 19 nt, Artificial Sequence
  Description of Artificial Sequence: Synthetic oligonucleotide
ggcuucaaacuuuggucca

SEQ ID NO: 2104233 - RNA, 19 nt, Artificial Sequence
  Description of Artificial Sequence: Synthetic oligonucleotide
caugccacgccauuccccu

SEQ ID NO: 2104234 - RNA, 19 nt, Artificial Sequence
  Description of Artificial Sequence: Synthetic oligonucleotide
gggaaauauggcccagguc

SEQ ID NO: 2104235 - RNA, 19 nt, Artificial Sequence
  Description of Artificial Sequence: Synthetic oligonucleotide
guuagcugucaguccgcuc

SEQ ID NO: 2104236 - RNA, 19 nt, Artificial Sequence
  Description of Artificial Sequence: Synthetic oligonucleotide
uccggccacaauggagugc

SEQ ID NO: 2104237 - RNA, 19 nt, Artificial Sequence
  Description of Artificial Sequence: Synthetic oligonucleotide
gaagaggcgcaggcaugcc

SEQ ID NO: 2104238 - RNA, 19 nt, Artificial Sequence
  Description of Artificial Sequence: Synthetic oligonucleotide
gacuuccggccacaaugga

SEQ ID NO: 2104239 - RNA, 19 nt, Artificial Sequence
  Description of Artificial Sequence: Synthetic oligonucleotide
uucucgccggccaccucgu

SEQ ID NO: 2104240 - RNA, 19 nt, Artificial Sequence
  Description of Artificial Sequence: Synthetic oligonucleotide
gaaauauggcccaggucau

SEQ ID NO: 2104241 - RNA, 19 nt, Artificial Sequence
  Description of Artificial Sequence: Synthetic oligonucleotide
cccucggccagccauacuc

SEQ ID NO: 2104242 - RNA, 19 nt, Artificial Sequence
  Description of Artificial Sequence: Synthetic oligonucleotide
gacaggauguaaccauuuu

SEQ ID NO: 2104243 - RNA, 19 nt, Artificial Sequence
  Description of Artificial Sequence: Synthetic oligonucleotide
uaaggacuuugagccugca

SEQ ID NO: 2104244 - RNA, 19 nt, Artificial Sequence
  Description of Artificial Sequence: Synthetic oligonucleotide
ccacguagccauugagacc

SEQ ID NO: 2104245 - RNA, 19 nt, Artificial Sequence
  Description of Artificial Sequence: Synthetic oligonucleotide
guuagccggcuauccccgc

SEQ ID NO: 2104246 - RNA, 19 nt, Artificial Sequence
  Description of Artificial Sequence: Synthetic oligonucleotide
gaacagcacaacaaacuuu

SEQ ID NO: 2104247 - RNA, 19 nt, Artificial Sequence
  Description of Artificial Sequence: Synthetic oligonucleotide
gaagggaaccgcaccuaaa

SEQ ID NO: 2104248 - RNA, 19 nt, Artificial Sequence
  Description of Artificial Sequence: Synthetic oligonucleotide
cucucggccccucggccag

SEQ ID NO: 2104249 - RNA, 19 nt, Artificial Sequence
  Description of Artificial Sequence: Synthetic oligonucleotide
ucguucccgggguccauuc

SEQ ID NO: 2104250 - RNA, 19 nt, Artificial Sequence
  Description of Artificial Sequence: Synthetic oligonucleotide
caccuaaaacagugaggga

SEQ ID NO: 2104251 - RNA, 19 nt, Artificial Sequence
  Description of Artificial Sequence: Synthetic oligonucleotide
caggcaugccacgccauuc

SEQ ID NO: 2104252 - RNA, 19 nt, Artificial Sequence
  Description of Artificial Sequence: Synthetic oligonucleotide
cuccagauucauguaaacu

SEQ ID NO: 2104253 - RNA, 19 nt, Artificial Sequence
  Description of Artificial Sequence: Synthetic oligonucleotide
cucgauagagggccaggaa

SEQ ID NO: 2104254 - RNA, 19 nt, Artificial Sequence
  Description of Artificial Sequence: Synthetic oligonucleotide
cgguuagccggcuaucccc

SEQ ID NO: 2104255 - RNA, 19 nt, Artificial Sequence
  Description of Artificial Sequence: Synthetic oligonucleotide
cucguggcuggugcuuggg

SEQ ID NO: 2104256 - RNA, 19 nt, Artificial Sequence
  Description of Artificial Sequence: Synthetic oligonucleotide
aggggaagaggcgcaggca

SEQ ID NO: 2104257 - RNA, 19 nt, Artificial Sequence
  Description of Artificial Sequence: Synthetic oligonucleotide
ggcaugccacgccauuccc

SEQ ID NO: 2104258 - RNA, 19 nt, Artificial Sequence
  Description of Artificial Sequence: Synthetic oligonucleotide
accgcaccuaaaacaguga

SEQ ID NO: 2104259 - RNA, 19 nt, Artificial Sequence
  Description of Artificial Sequence: Synthetic oligonucleotide
cacacaggagccucuggcu

SEQ ID NO: 2104260 - RNA, 19 nt, Artificial Sequence
  Description of Artificial Sequence: Synthetic oligonucleotide
cccuagugccccuuggguc

SEQ ID NO: 2104261 - RNA, 19 nt, Artificial Sequence
  Description of Artificial Sequence: Synthetic oligonucleotide
ucccgggguccauuccaga

SEQ ID NO: 2104262 - RNA, 19 nt, Artificial Sequence
  Description of Artificial Sequence: Synthetic oligonucleotide
guccgcuccagagcccuag

SEQ ID NO: 2104263 - RNA, 19 nt, Artificial Sequence
  Description of Artificial Sequence: Synthetic oligonucleotide
accaugccugccagacuuc

SEQ ID NO: 2104264 - RNA, 19 nt, Artificial Sequence
  Description of Artificial Sequence: Synthetic oligonucleotide
uggcugccgguuagccggc

SEQ ID NO: 2104265 - RNA, 19 nt, Artificial Sequence
  Description of Artificial Sequence: Synthetic oligonucleotide
gcuucaaacuuugguccac

SEQ ID NO: 2104266 - RNA, 19 nt, Artificial Sequence
  Description of Artificial Sequence: Synthetic oligonucleotide
cggccagccauacucggcg

SEQ ID NO: 2104267 - RNA, 19 nt, Artificial Sequence
  Description of Artificial Sequence: Synthetic oligonucleotide
cugcacacaggagccucug

SEQ ID NO: 2104268 - RNA, 19 nt, Artificial Sequence
  Description of Artificial Sequence: Synthetic oligonucleotide
ggaaaccaugccugccaga

SEQ ID NO: 2104269 - RNA, 19 nt, Artificial Sequence
  Description of Artificial Sequence: Synthetic oligonucleotide
ccauacucggcgucccgug

SEQ ID NO: 2104270 - RNA, 19 nt, Artificial Sequence
  Description of Artificial Sequence: Synthetic oligonucleotide
ugccagacuuccggccaca

SEQ ID NO: 2104271 - RNA, 19 nt, Artificial Sequence
  Description of Artificial Sequence: Synthetic oligonucleotide
gccccuugggucuucacua

SEQ ID NO: 2104272 - RNA, 19 nt, Artificial Sequence
  Description of Artificial Sequence: Synthetic oligonucleotide
cugcaccaugcugcagggg

SEQ ID NO: 2104273 - RNA, 19 nt, Artificial Sequence
  Description of Artificial Sequence: Synthetic oligonucleotide
ccgguuagccggcuauccc

SEQ ID NO: 2104274 - RNA, 19 nt, Artificial Sequence
  Description of Artificial Sequence: Synthetic oligonucleotide
ccauugagacccaacuucu

SEQ ID NO: 2104275 - RNA, 19 nt, Artificial Sequence
  Description of Artificial Sequence: Synthetic oligonucleotide
guguggccuugcaccaugc

SEQ ID NO: 2104276 - RNA, 19 nt, Artificial Sequence
  Description of Artificial Sequence: Synthetic oligonucleotide
cacaaucagccggguuuug

SEQ ID NO: 2104277 - RNA, 19 nt, Artificial Sequence
  Description of Artificial Sequence: Synthetic oligonucleotide
gccgguuagccggcuaucc

SEQ ID NO: 2104278 - RNA, 19 nt, Artificial Sequence
  Description of Artificial Sequence: Synthetic oligonucleotide
caggggcgcggugaggcug

SEQ ID NO: 2104279 - RNA, 19 nt, Artificial Sequence
  Description of Artificial Sequence: Synthetic oligonucleotide
ugccgguuagccggcuauc

SEQ ID NO: 2104280 - RNA, 19 nt, Artificial Sequence
  Description of Artificial Sequence: Synthetic oligonucleotide
gguccauuccagauuuucu

SEQ ID NO: 2104281 - RNA, 19 nt, Artificial Sequence
  Description of Artificial Sequence: Synthetic oligonucleotide
gaaccgcaccuaaaacagu

SEQ ID NO: 2104282 - RNA, 19 nt, Artificial Sequence
  Description of Artificial Sequence: Synthetic oligonucleotide
ccaugccugccagacuucc

SEQ ID NO: 2104283 - RNA, 19 nt, Artificial Sequence
  Description of Artificial Sequence: Synthetic oligonucleotide
cuguagcugagagaaucgu

SEQ ID NO: 2104284 - RNA, 19 nt, Artificial Sequence
  Description of Artificial Sequence: Synthetic oligonucleotide
gaacuaccuuuaguaaguu

SEQ ID NO: 2104285 - RNA, 19 nt, Artificial Sequence
  Description of Artificial Sequence: Synthetic oligonucleotide
ccgccagcccugcacacag

SEQ ID NO: 2104286 - RNA, 19 nt, Artificial Sequence
  Description of Artificial Sequence: Synthetic oligonucleotide
ccuagugccccuugggucu

SEQ ID NO: 2104287 - RNA, 19 nt, Artificial Sequence
  Description of Artificial Sequence: Synthetic oligonucleotide
gguuuugaugaggucugua

SEQ ID NO: 2104288 - RNA, 19 nt, Artificial Sequence
  Description of Artificial Sequence: Synthetic oligonucleotide
ggaaagacucuggcucaca

SEQ ID NO: 2104289 - RNA, 19 nt, Artificial Sequence
  Description of Artificial Sequence: Synthetic oligonucleotide
agccucuggcugccgguua

SEQ ID NO: 2104290 - RNA, 19 nt, Artificial Sequence
  Description of Artificial Sequence: Synthetic oligonucleotide
cgcggugaggcugaggcug

SEQ ID NO: 2104291 - RNA, 19 nt, Artificial Sequence
  Description of Artificial Sequence: Synthetic oligonucleotide
cacagccccuugggugugg

SEQ ID NO: 2104292 - RNA, 19 nt, Artificial Sequence
  Description of Artificial Sequence: Synthetic oligonucleotide
ggccuugcaccaugccgac

SEQ ID NO: 2104293 - RNA, 19 nt, Artificial Sequence
  Description of Artificial Sequence: Synthetic oligonucleotide
ccucguggcuggugcuugg

SEQ ID NO: 2104294 - RNA, 19 nt, Artificial Sequence
  Description of Artificial Sequence: Synthetic oligonucleotide
accccuggagucaguuuau

SEQ ID NO: 2104295 - RNA, 19 nt, Artificial Sequence
  Description of Artificial Sequence: Synthetic oligonucleotide
cucggccccucggccagcc

SEQ ID NO: 2104296 - RNA, 19 nt, Artificial Sequence
  Description of Artificial Sequence: Synthetic oligonucleotide
gcgagcuccaggggcgcgg

SEQ ID NO: 2104297 - RNA, 19 nt, Artificial Sequence
  Description of Artificial Sequence: Synthetic oligonucleotide
aucguucccgggguccauu

SEQ ID NO: 2104298 - RNA, 19 nt, Artificial Sequence
  Description of Artificial Sequence: Synthetic oligonucleotide
cccucgauagagggccagg

SEQ ID NO: 2104299 - RNA, 19 nt, Artificial Sequence
  Description of Artificial Sequence: Synthetic oligonucleotide
gccagccauacucggcguc

SEQ ID NO: 2104300 - RNA, 19 nt, Artificial Sequence
  Description of Artificial Sequence: Synthetic oligonucleotide
ucggcgucccguggcccac

SEQ ID NO: 2104301 - RNA, 19 nt, Artificial Sequence
  Description of Artificial Sequence: Synthetic oligonucleotide
gugccccuugggucuucac

SEQ ID NO: 2104302 - RNA, 19 nt, Artificial Sequence
  Description of Artificial Sequence: Synthetic oligonucleotide
gcgcaggcaugccacgcca

SEQ ID NO: 2104303 - RNA, 19 nt, Artificial Sequence
  Description of Artificial Sequence: Synthetic oligonucleotide
cccuugggucuucacuauc

SEQ ID NO: 2104304 - RNA, 19 nt, Artificial Sequence
  Description of Artificial Sequence: Synthetic oligonucleotide
gccggcuauccccgccucc

SEQ ID NO: 2104305 - RNA, 19 nt, Artificial Sequence
  Description of Artificial Sequence: Synthetic oligonucleotide
ccuugcaccaugccgacuu

SEQ ID NO: 2104306 - RNA, 19 nt, Artificial Sequence
  Description of Artificial Sequence: Synthetic oligonucleotide
ccucgauagagggccagga

SEQ ID NO: 2104307 - RNA, 19 nt, Artificial Sequence
  Description of Artificial Sequence: Synthetic oligonucleotide
ccgcuccagagcccuagug

SEQ ID NO: 2104308 - RNA, 19 nt, Artificial Sequence
  Description of Artificial Sequence: Synthetic oligonucleotide
gcccuagugccccuugggu

SEQ ID NO: 2104309 - RNA, 19 nt, Artificial Sequence
  Description of Artificial Sequence: Synthetic oligonucleotide
cuguaggguaugugacaau

SEQ ID NO: 2104310 - RNA, 19 nt, Artificial Sequence
  Description of Artificial Sequence: Synthetic oligonucleotide
cuauccccgccuccacgua

SEQ ID NO: 2104311 - RNA, 19 nt, Artificial Sequence
  Description of Artificial Sequence: Synthetic oligonucleotide
cugccgguuagccggcuau

SEQ ID NO: 2104312 - RNA, 19 nt, Artificial Sequence
  Description of Artificial Sequence: Synthetic oligonucleotide
ggcgagcuccaggggcgcg

SEQ ID NO: 2104313 - RNA, 19 nt, Artificial Sequence
  Description of Artificial Sequence: Synthetic oligonucleotide
caguccgcuccagagcccu

SEQ ID NO: 2104314 - RNA, 19 nt, Artificial Sequence
  Description of Artificial Sequence: Synthetic oligonucleotide
gcgagcacgguggcgagcu

SEQ ID NO: 2104315 - RNA, 19 nt, Artificial Sequence
  Description of Artificial Sequence: Synthetic oligonucleotide
gggacaggauguaaccauu

SEQ ID NO: 2104316 - RNA, 19 nt, Artificial Sequence
  Description of Artificial Sequence: Synthetic oligonucleotide
ggcgagcacgguggcgagc

SEQ ID NO: 2104317 - RNA, 19 nt, Artificial Sequence
  Description of Artificial Sequence: Synthetic oligonucleotide
cugccggaagcaguccacu

SEQ ID NO: 2104318 - RNA, 19 nt, Artificial Sequence
  Description of Artificial Sequence: Synthetic oligonucleotide
uagugccccuugggucuuc

SEQ ID NO: 2104319 - RNA, 19 nt, Artificial Sequence
  Description of Artificial Sequence: Synthetic oligonucleotide
acguagccauugagaccca

SEQ ID NO: 2104320 - RNA, 19 nt, Artificial Sequence
  Description of Artificial Sequence: Synthetic oligonucleotide
ccucuggcugccgguuagc

SEQ ID NO: 2104321 - RNA, 19 nt, Artificial Sequence
  Description of Artificial Sequence: Synthetic oligonucleotide
ggaacccuucuugcugaua

SEQ ID NO: 2104322 - RNA, 19 nt, Artificial Sequence
  Description of Artificial Sequence: Synthetic oligonucleotide
ccccucgauagagggccag

SEQ ID NO: 2104323 - RNA, 19 nt, Artificial Sequence
  Description of Artificial Sequence: Synthetic oligonucleotide
ccggcuauccccgccucca

SEQ ID NO: 2104324 - RNA, 19 nt, Artificial Sequence
  Description of Artificial Sequence: Synthetic oligonucleotide
gcuggugcuuggggcucgc

SEQ ID NO: 2104325 - RNA, 19 nt, Artificial Sequence
  Description of Artificial Sequence: Synthetic oligonucleotide
gcacaaucagccggguuuu

SEQ ID NO: 2104326 - RNA, 19 nt, Artificial Sequence
  Description of Artificial Sequence: Synthetic oligonucleotide
gccauacucggcgucccgu

SEQ ID NO: 2104327 - RNA, 19 nt, Artificial Sequence
  Description of Artificial Sequence: Synthetic oligonucleotide
ggguuuugaugaggucugu

SEQ ID NO: 2104328 - RNA, 19 nt, Artificial Sequence
  Description of Artificial Sequence: Synthetic oligonucleotide
cgguggcgagcuccagggg

SEQ ID NO: 2104329 - RNA, 19 nt, Artificial Sequence
  Description of Artificial Sequence: Synthetic oligonucleotide
ccugcacacaggagccucu

SEQ ID NO: 2104330 - RNA, 19 nt, Artificial Sequence
  Description of Artificial Sequence: Synthetic oligonucleotide
gcugccgguuagccggcua

SEQ ID NO: 2104331 - RNA, 19 nt, Artificial Sequence
  Description of Artificial Sequence: Synthetic oligonucleotide
gggcgcggugaggcugagg

SEQ ID NO: 2104332 - RNA, 19 nt, Artificial Sequence
  Description of Artificial Sequence: Synthetic oligonucleotide
gcaggcaugccacgccauu

SEQ ID NO: 2104333 - RNA, 19 nt, Artificial Sequence
  Description of Artificial Sequence: Synthetic oligonucleotide
ggccagccauacucggcgu

SEQ ID NO: 2104334 - RNA, 19 nt, Artificial Sequence
  Description of Artificial Sequence: Synthetic oligonucleotide
ccccuguaagaugguuuca

SEQ ID NO: 2104335 - RNA, 19 nt, Artificial Sequence
  Description of Artificial Sequence: Synthetic oligonucleotide
cccgggguccauuccagau

SEQ ID NO: 2104336 - RNA, 19 nt, Artificial Sequence
  Description of Artificial Sequence: Synthetic oligonucleotide
aguccgcuccagagcccua

SEQ ID NO: 2104337 - RNA, 19 nt, Artificial Sequence
  Description of Artificial Sequence: Synthetic oligonucleotide
gccagacuuccggccacaa

SEQ ID NO: 2104338 - RNA, 19 nt, Artificial Sequence
  Description of Artificial Sequence: Synthetic oligonucleotide
cgggguccauuccagauuu

SEQ ID NO: 2104339 - RNA, 19 nt, Artificial Sequence
  Description of Artificial Sequence: Synthetic oligonucleotide
ccacagccccuugggugug

SEQ ID NO: 2104340 - RNA, 19 nt, Artificial Sequence
  Description of Artificial Sequence: Synthetic oligonucleotide
ggagugccacugggaaaua

SEQ ID NO: 2104341 - RNA, 19 nt, Artificial Sequence
  Description of Artificial Sequence: Synthetic oligonucleotide
ccccuuggguguggccuug

SEQ ID NO: 2104342 - RNA, 19 nt, Artificial Sequence
  Description of Artificial Sequence: Synthetic oligonucleotide
cggcuauccccgccuccac

SEQ ID NO: 2104343 - RNA, 19 nt, Artificial Sequence
  Description of Artificial Sequence: Synthetic oligonucleotide
caccucguggcuggugcuu

SEQ ID NO: 2104344 - RNA, 19 nt, Artificial Sequence
  Description of Artificial Sequence: Synthetic oligonucleotide
gcgcggugaggcugaggcu

SEQ ID NO: 2104345 - RNA, 19 nt, Artificial Sequence
  Description of Artificial Sequence: Synthetic oligonucleotide
ggccccucggccagccaua

SEQ ID NO: 2104346 - RNA, 19 nt, Artificial Sequence
  Description of Artificial Sequence: Synthetic oligonucleotide
ccgggguccauuccagauu

SEQ ID NO: 2104347 - RNA, 19 nt, Artificial Sequence
  Description of Artificial Sequence: Synthetic oligonucleotide
cguagccauugagacccaa

SEQ ID NO: 2104348 - RNA, 19 nt, Artificial Sequence
  Description of Artificial Sequence: Synthetic oligonucleotide
ccacgccauuccccuucca

SEQ ID NO: 2104349 - RNA, 19 nt, Artificial Sequence
  Description of Artificial Sequence: Synthetic oligonucleotide
ccccuggagucaguuuaua

SEQ ID NO: 2104350 - RNA, 19 nt, Artificial Sequence
  Description of Artificial Sequence: Synthetic oligonucleotide
gccuugcaccaugccgacu

SEQ ID NO: 2104351 - RNA, 19 nt, Artificial Sequence
  Description of Artificial Sequence: Synthetic oligonucleotide
gcccugcacacaggagccu

SEQ ID NO: 2104352 - RNA, 19 nt, Artificial Sequence
  Description of Artificial Sequence: Synthetic oligonucleotide
guccaccccuggagucagu

SEQ ID NO: 2104353 - RNA, 19 nt, Artificial Sequence
  Description of Artificial Sequence: Synthetic oligonucleotide
ccaggggcgcggugaggcu

SEQ ID NO: 2104354 - RNA, 19 nt, Artificial Sequence
  Description of Artificial Sequence: Synthetic oligonucleotide
cccguaacuccuggggcuu

SEQ ID NO: 2104355 - RNA, 19 nt, Artificial Sequence
  Description of Artificial Sequence: Synthetic oligonucleotide
cgcaggcaugccacgccau

SEQ ID NO: 2104356 - RNA, 19 nt, Artificial Sequence
  Description of Artificial Sequence: Synthetic oligonucleotide
ggcugccgguuagccggcu

SEQ ID NO: 2104357 - RNA, 19 nt, Artificial Sequence
  Description of Artificial Sequence: Synthetic oligonucleotide
ccccucggccagccauacu

SEQ ID NO: 2104358 - RNA, 19 nt, Artificial Sequence
  Description of Artificial Sequence: Synthetic oligonucleotide
ccgccuccacguagccauu

SEQ ID NO: 2104359 - RNA, 19 nt, Artificial Sequence
  Description of Artificial Sequence: Synthetic oligonucleotide
cggcgucccguggcccaca

SEQ ID NO: 2104360 - RNA, 19 nt, Artificial Sequence
  Description of Artificial Sequence: Synthetic oligonucleotide
auauaaugcauaucgaccc

SEQ ID NO: 2104361 - RNA, 19 nt, Artificial Sequence
  Description of Artificial Sequence: Synthetic oligonucleotide
aaaacagaguaccugacgg

SEQ ID NO: 2104362 - RNA, 19 nt, Artificial Sequence
  Description of Artificial Sequence: Synthetic oligonucleotide
uauacuguaucacugaggc

SEQ ID NO: 2104363 - RNA, 19 nt, Artificial Sequence
  Description of Artificial Sequence: Synthetic oligonucleotide
uucuauauguugcauaacg

SEQ ID NO: 2104364 - RNA, 19 nt, Artificial Sequence
  Description of Artificial Sequence: Synthetic oligonucleotide
uguuguacaacucaagugc

SEQ ID NO: 2104365 - RNA, 19 nt, Artificial Sequence
  Description of Artificial Sequence: Synthetic oligonucleotide
uuacauguaaauaacguug

SEQ ID NO: 2104366 - RNA, 19 nt, Artificial Sequence
  Description of Artificial Sequence: Synthetic oligonucleotide
ucuauuguaacauacauuu

SEQ ID NO: 2104367 - RNA, 19 nt, Artificial Sequence
  Description of Artificial Sequence: Synthetic oligonucleotide
uuugaaugguuucugaucc

SEQ ID NO: 2104368 - RNA, 19 nt, Artificial Sequence
  Description of Artificial Sequence: Synthetic oligonucleotide
auaacguugaaccugcaac

SEQ ID NO: 2104369 - RNA, 19 nt, Artificial Sequence
  Description of Artificial Sequence: Synthetic oligonucleotide
auuauucaucccuagauuc

SEQ ID NO: 2104370 - RNA, 19 nt, Artificial Sequence
  Description of Artificial Sequence: Synthetic oligonucleotide
acauauaaugcauaucgac

SEQ ID NO: 2104371 - RNA, 19 nt, Artificial Sequence
  Description of Artificial Sequence: Synthetic oligonucleotide
uuuacgauuauucaucccu

SEQ ID NO: 2104372 - RNA, 19 nt, Artificial Sequence
  Description of Artificial Sequence: Synthetic oligonucleotide
aauaagaacucggagaucu

SEQ ID NO: 2104373 - RNA, 19 nt, Artificial Sequence
  Description of Artificial Sequence: Synthetic oligonucleotide
ucuauauguugcauaacgg

SEQ ID NO: 2104374 - RNA, 19 nt, Artificial Sequence
  Description of Artificial Sequence: Synthetic oligonucleotide
uauagaguguugaagccgg

SEQ ID NO: 2104375 - RNA, 19 nt, Artificial Sequence
  Description of Artificial Sequence: Synthetic oligonucleotide
uuuaucuuuauacuguauc

SEQ ID NO: 2104376 - RNA, 19 nt, Artificial Sequence
  Description of Artificial Sequence: Synthetic oligonucleotide
uucaguaaagaucugccgc

SEQ ID NO: 2104377 - RNA, 19 nt, Artificial Sequence
  Description of Artificial Sequence: Synthetic oligonucleotide
aaauggcugacggauaccc

SEQ ID NO: 2104378 - RNA, 19 nt, Artificial Sequence
  Description of Artificial Sequence: Synthetic oligonucleotide
uuuugauucacugauggca

SEQ ID NO: 2104379 - RNA, 19 nt, Artificial Sequence
  Description of Artificial Sequence: Synthetic oligonucleotide
uauauguugcauaacggcu

SEQ ID NO: 2104380 - RNA, 19 nt, Artificial Sequence
  Description of Artificial Sequence: Synthetic oligonucleotide
uauuccucugcagagaagg

SEQ ID NO: 2104381 - RNA, 19 nt, Artificial Sequence
  Description of Artificial Sequence: Synthetic oligonucleotide
uguguuaccccgcacuugg

SEQ ID NO: 2104382 - RNA, 19 nt, Artificial Sequence
  Description of Artificial Sequence: Synthetic oligonucleotide
uggaauaagaacucggaga

SEQ ID NO: 2104383 - RNA, 19 nt, Artificial Sequence
  Description of Artificial Sequence: Synthetic oligonucleotide
uaacauuuaccaauggcca

SEQ ID NO: 2104384 - RNA, 19 nt, Artificial Sequence
  Description of Artificial Sequence: Synthetic oligonucleotide
cuauauguugcauaacggc

SEQ ID NO: 2104385 - RNA, 19 nt, Artificial Sequence
  Description of Artificial Sequence: Synthetic oligonucleotide
uguacaaguguucuguugu

SEQ ID NO: 2104386 - RNA, 19 nt, Artificial Sequence
  Description of Artificial Sequence: Synthetic oligonucleotide
caucccuagauucauaggg

SEQ ID NO: 2104387 - RNA, 19 nt, Artificial Sequence
  Description of Artificial Sequence: Synthetic oligonucleotide
uuuucuauauguugcauaa

SEQ ID NO: 2104388 - RNA, 19 nt, Artificial Sequence
  Description of Artificial Sequence: Synthetic oligonucleotide
uuauacuguaucacugagg

SEQ ID NO: 2104389 - RNA, 19 nt, Artificial Sequence
  Description of Artificial Sequence: Synthetic oligonucleotide
agguuugugagcuuccucg

SEQ ID NO: 2104390 - RNA, 19 nt, Artificial Sequence
  Description of Artificial Sequence: Synthetic oligonucleotide
ugauccuuuugaaugagug

SEQ ID NO: 2104391 - RNA, 19 nt, Artificial Sequence
  Description of Artificial Sequence: Synthetic oligonucleotide
uuuugaaugagugccauac

SEQ ID NO: 2104392 - RNA, 19 nt, Artificial Sequence
  Description of Artificial Sequence: Synthetic oligonucleotide
uugaaugagugccauacac

SEQ ID NO: 2104393 - RNA, 19 nt, Artificial Sequence
  Description of Artificial Sequence: Synthetic oligonucleotide
aggucuauguguuacacca

SEQ ID NO: 2104394 - RNA, 19 nt, Artificial Sequence
  Description of Artificial Sequence: Synthetic oligonucleotide
aagugcuaagcuuaucuca

SEQ ID NO: 2104395 - RNA, 19 nt, Artificial Sequence
  Description of Artificial Sequence: Synthetic oligonucleotide
uacaccaaugauaugccug

SEQ ID NO: 2104396 - RNA, 19 nt, Artificial Sequence
  Description of Artificial Sequence: Synthetic oligonucleotide
uacauguaaauaacguuga

SEQ ID NO: 2104397 - RNA, 19 nt, Artificial Sequence
  Description of Artificial Sequence: Synthetic oligonucleotide
ugaaugagugccauacacc

SEQ ID NO: 2104398 - RNA, 19 nt, Artificial Sequence
  Description of Artificial Sequence: Synthetic oligonucleotide
gacacuaucuauuguaaca

SEQ ID NO: 2104399 - RNA, 19 nt, Artificial Sequence
  Description of Artificial Sequence: Synthetic oligonucleotide
uuagccuuaaaaucuauuu

SEQ ID NO: 2104400 - RNA, 19 nt, Artificial Sequence
  Description of Artificial Sequence: Synthetic oligonucleotide
aagguauagaguguugaag

SEQ ID NO: 2104401 - RNA, 19 nt, Artificial Sequence
  Description of Artificial Sequence: Synthetic oligonucleotide
guaaauaacguugaaccug

SEQ ID NO: 2104402 - RNA, 19 nt, Artificial Sequence
  Description of Artificial Sequence: Synthetic oligonucleotide
agagaaguuagccuuaaaa

SEQ ID NO: 2104403 - RNA, 19 nt, Artificial Sequence
  Description of Artificial Sequence: Synthetic oligonucleotide
aaaguaggaguugcuacgg

SEQ ID NO: 2104404 - RNA, 19 nt, Artificial Sequence
  Description of Artificial Sequence: Synthetic oligonucleotide
guaugguccucuuugaaug

SEQ ID NO: 2104405 - RNA, 19 nt, Artificial Sequence
  Description of Artificial Sequence: Synthetic oligonucleotide
acacacggcacauauaaug

SEQ ID NO: 2104406 - RNA, 19 nt, Artificial Sequence
  Description of Artificial Sequence: Synthetic oligonucleotide
ugguuuacgauuauucauc

SEQ ID NO: 2104407 - RNA, 19 nt, Artificial Sequence
  Description of Artificial Sequence: Synthetic oligonucleotide
ugccauacaccaaugauau

SEQ ID NO: 2104408 - RNA, 19 nt, Artificial Sequence
  Description of Artificial Sequence: Synthetic oligonucleotide
aguacucaguaccauaugu

SEQ ID NO: 2104409 - RNA, 19 nt, Artificial Sequence
  Description of Artificial Sequence: Synthetic oligonucleotide
acauuuaccaauggccacc

SEQ ID NO: 2104410 - RNA, 19 nt, Artificial Sequence
  Description of Artificial Sequence: Synthetic oligonucleotide
auguguuacaccaggagac

SEQ ID NO: 2104411 - RNA, 19 nt, Artificial Sequence
  Description of Artificial Sequence: Synthetic oligonucleotide
uauaaugcauaucgacccc

SEQ ID NO: 2104412 - RNA, 19 nt, Artificial Sequence
  Description of Artificial Sequence: Synthetic oligonucleotide
auaacggcugcucucuuuc

SEQ ID NO: 2104413 - RNA, 19 nt, Artificial Sequence
  Description of Artificial Sequence: Synthetic oligonucleotide
ucuuucaguaaagaucugc

SEQ ID NO: 2104414 - RNA, 19 nt, Artificial Sequence
  Description of Artificial Sequence: Synthetic oligonucleotide
ugaggcaauuuaaaaguac

SEQ ID NO: 2104415 - RNA, 19 nt, Artificial Sequence
  Description of Artificial Sequence: Synthetic oligonucleotide
uuugauucacugauggcau

SEQ ID NO: 2104416 - RNA, 19 nt, Artificial Sequence
  Description of Artificial Sequence: Synthetic oligonucleotide
auacuauuccucugcagag

SEQ ID NO: 2104417 - RNA, 19 nt, Artificial Sequence
  Description of Artificial Sequence: Synthetic oligonucleotide
uuaagguauagaguguuga

SEQ ID NO: 2104418 - RNA, 19 nt, Artificial Sequence
  Description of Artificial Sequence: Synthetic oligonucleotide
ugauucacugauggcaucg

SEQ ID NO: 2104419 - RNA, 19 nt, Artificial Sequence
  Description of Artificial Sequence: Synthetic oligonucleotide
uuaaaguagguaugguccu

SEQ ID NO: 2104420 - RNA, 19 nt, Artificial Sequence
  Description of Artificial Sequence: Synthetic oligonucleotide
cccauuaagguauagagug

SEQ ID NO: 2104421 - RNA, 19 nt, Artificial Sequence
  Description of Artificial Sequence: Synthetic oligonucleotide
gauccuuuugaaugagugc

SEQ ID NO: 2104422 - RNA, 19 nt, Artificial Sequence
  Description of Artificial Sequence: Synthetic oligonucleotide
gaguguugaagccggacag

SEQ ID NO: 2104423 - RNA, 19 nt, Artificial Sequence
  Description of Artificial Sequence: Synthetic oligonucleotide
auguuccuaacauuuacca

SEQ ID NO: 2104424 - RNA, 19 nt, Artificial Sequence
  Description of Artificial Sequence: Synthetic oligonucleotide
caaaacagaguaccugacg

SEQ ID NO: 2104425 - RNA, 19 nt, Artificial Sequence
  Description of Artificial Sequence: Synthetic oligonucleotide
caaguuaccaggugagacc

SEQ ID NO: 2104426 - RNA, 19 nt, Artificial Sequence
  Description of Artificial Sequence: Synthetic oligonucleotide
gucuauguguuacaccagg

SEQ ID NO: 2104427 - RNA, 19 nt, Artificial Sequence
  Description of Artificial Sequence: Synthetic oligonucleotide
cuuugaaugguuucugauc

SEQ ID NO: 2104428 - RNA, 19 nt, Artificial Sequence
  Description of Artificial Sequence: Synthetic oligonucleotide
uuccuaacauuuaccaaug

SEQ ID NO: 2104429 - RNA, 19 nt, Artificial Sequence
  Description of Artificial Sequence: Synthetic oligonucleotide
aauaacguugaaccugcaa

SEQ ID NO: 2104430 - RNA, 19 nt, Artificial Sequence
  Description of Artificial Sequence: Synthetic oligonucleotide
uauguugcauaacggcugc

SEQ ID NO: 2104431 - RNA, 19 nt, Artificial Sequence
  Description of Artificial Sequence: Synthetic oligonucleotide
cauacaccaaugauaugcc

SEQ ID NO: 2104432 - RNA, 19 nt, Artificial Sequence
  Description of Artificial Sequence: Synthetic oligonucleotide
ugcuaagcuuaucucagca

SEQ ID NO: 2104433 - RNA, 19 nt, Artificial Sequence
  Description of Artificial Sequence: Synthetic oligonucleotide
uacaacucaagugcuaagc

SEQ ID NO: 2104434 - RNA, 19 nt, Artificial Sequence
  Description of Artificial Sequence: Synthetic oligonucleotide
cacacggcacauauaaugc

SEQ ID NO: 2104435 - RNA, 19 nt, Artificial Sequence
  Description of Artificial Sequence: Synthetic oligonucleotide
aguguucuguuguacaacu

SEQ ID NO: 2104436 - RNA, 19 nt, Artificial Sequence
  Description of Artificial Sequence: Synthetic oligonucleotide
caaacgucuauacauuuuc

SEQ ID NO: 2104437 - RNA, 19 nt, Artificial Sequence
  Description of Artificial Sequence: Synthetic oligonucleotide
acggauacccucccauucc

SEQ ID NO: 2104438 - RNA, 19 nt, Artificial Sequence
  Description of Artificial Sequence: Synthetic oligonucleotide
guauagaguguugaagccg

SEQ ID NO: 2104439 - RNA, 19 nt, Artificial Sequence
  Description of Artificial Sequence: Synthetic oligonucleotide
cuauguguuacaccaggag

SEQ ID NO: 2104440 - RNA, 19 nt, Artificial Sequence
  Description of Artificial Sequence: Synthetic oligonucleotide
ugauaugccugcagguuug

SEQ ID NO: 2104441 - RNA, 19 nt, Artificial Sequence
  Description of Artificial Sequence: Synthetic oligonucleotide
aacgucuauacauuuucua

SEQ ID NO: 2104442 - RNA, 19 nt, Artificial Sequence
  Description of Artificial Sequence: Synthetic oligonucleotide
auggcugacggauacccuc

SEQ ID NO: 2104443 - RNA, 19 nt, Artificial Sequence
  Description of Artificial Sequence: Synthetic oligonucleotide
ucuauguguuacaccagga

SEQ ID NO: 2104444 - RNA, 19 nt, Artificial Sequence
  Description of Artificial Sequence: Synthetic oligonucleotide
agagacgacaggucugcac

SEQ ID NO: 2104445 - RNA, 19 nt, Artificial Sequence
  Description of Artificial Sequence: Synthetic oligonucleotide
uaucacugaggcaauuuaa

SEQ ID NO: 2104446 - RNA, 19 nt, Artificial Sequence
  Description of Artificial Sequence: Synthetic oligonucleotide
ccauacaccaaugauaugc

SEQ ID NO: 2104447 - RNA, 19 nt, Artificial Sequence
  Description of Artificial Sequence: Synthetic oligonucleotide
aaguuaccaggugagacca

SEQ ID NO: 2104448 - RNA, 19 nt, Artificial Sequence
  Description of Artificial Sequence: Synthetic oligonucleotide
uguuaccccgcacuuggag

SEQ ID NO: 2104449 - RNA, 19 nt, Artificial Sequence
  Description of Artificial Sequence: Synthetic oligonucleotide
uacgauuauucaucccuag

SEQ ID NO: 2104450 - RNA, 19 nt, Artificial Sequence
  Description of Artificial Sequence: Synthetic oligonucleotide
aucguguucuugcugcccg

SEQ ID NO: 2104451 - RNA, 19 nt, Artificial Sequence
  Description of Artificial Sequence: Synthetic oligonucleotide
acaacucaagugcuaagcu

SEQ ID NO: 2104452 - RNA, 19 nt, Artificial Sequence
  Description of Artificial Sequence: Synthetic oligonucleotide
gauacccucccauuccuug

SEQ ID NO: 2104453 - RNA, 19 nt, Artificial Sequence
  Description of Artificial Sequence: Synthetic oligonucleotide
uccuaacauuuaccaaugg

SEQ ID NO: 2104454 - RNA, 19 nt, Artificial Sequence
  Description of Artificial Sequence: Synthetic oligonucleotide
uuguacaaguguucuguug

SEQ ID NO: 2104455 - RNA, 19 nt, Artificial Sequence
  Description of Artificial Sequence: Synthetic oligonucleotide
ugacugagccgacugggag

SEQ ID NO: 2104456 - RNA, 19 nt, Artificial Sequence
  Description of Artificial Sequence: Synthetic oligonucleotide
guuaccccgcacuuggagg

SEQ ID NO: 2104457 - RNA, 19 nt, Artificial Sequence
  Description of Artificial Sequence: Synthetic oligonucleotide
ucuuugaaugguuucugau

SEQ ID NO: 2104458 - RNA, 19 nt, Artificial Sequence
  Description of Artificial Sequence: Synthetic oligonucleotide
acaaguguucuguuguaca

SEQ ID NO: 2104459 - RNA, 19 nt, Artificial Sequence
  Description of Artificial Sequence: Synthetic oligonucleotide
acuuuuaacaaaacagagu

SEQ ID NO: 2104460 - RNA, 19 nt, Artificial Sequence
  Description of Artificial Sequence: Synthetic oligonucleotide
ccauauguuguugaaaugg

SEQ ID NO: 2104461 - RNA, 19 nt, Artificial Sequence
  Description of Artificial Sequence: Synthetic oligonucleotide
ucaucccuagauucauagg

SEQ ID NO: 2104462 - RNA, 19 nt, Artificial Sequence
  Description of Artificial Sequence: Synthetic oligonucleotide
acgucuauacauuuucuau

SEQ ID NO: 2104463 - RNA, 19 nt, Artificial Sequence
  Description of Artificial Sequence: Synthetic oligonucleotide
acugauggcaucguguucu

SEQ ID NO: 2104464 - RNA, 19 nt, Artificial Sequence
  Description of Artificial Sequence: Synthetic oligonucleotide
agaguguugaagccggaca

SEQ ID NO: 2104465 - RNA, 19 nt, Artificial Sequence
  Description of Artificial Sequence: Synthetic oligonucleotide
uaagguauagaguguugaa

SEQ ID NO: 2104466 - RNA, 19 nt, Artificial Sequence
  Description of Artificial Sequence: Synthetic oligonucleotide
aaugauaugccugcagguu

SEQ ID NO: 2104467 - RNA, 19 nt, Artificial Sequence
  Description of Artificial Sequence: Synthetic oligonucleotide
agugcuaagcuuaucucag

SEQ ID NO: 2104468 - RNA, 19 nt, Artificial Sequence
  Description of Artificial Sequence: Synthetic oligonucleotide
agugccauacaccaaugau

SEQ ID NO: 2104469 - RNA, 19 nt, Artificial Sequence
  Description of Artificial Sequence: Synthetic oligonucleotide
augagugccauacaccaau

SEQ ID NO: 2104470 - RNA, 19 nt, Artificial Sequence
  Description of Artificial Sequence: Synthetic oligonucleotide
uguuccuaacauuuaccaa

SEQ ID NO: 2104471 - RNA, 19 nt, Artificial Sequence
  Description of Artificial Sequence: Synthetic oligonucleotide
gauguuaggugaccgggca

SEQ ID NO: 2104472 - RNA, 19 nt, Artificial Sequence
  Description of Artificial Sequence: Synthetic oligonucleotide
guucaaguuaccaggugag

SEQ ID NO: 2104473 - RNA, 19 nt, Artificial Sequence
  Description of Artificial Sequence: Synthetic oligonucleotide
ugacacuaucuauuguaac

SEQ ID NO: 2104474 - RNA, 19 nt, Artificial Sequence
  Description of Artificial Sequence: Synthetic oligonucleotide
gguauagaguguugaagcc

SEQ ID NO: 2104475 - RNA, 19 nt, Artificial Sequence
  Description of Artificial Sequence: Synthetic oligonucleotide
uaagcuuaucucagcauuu

SEQ ID NO: 2104476 - RNA, 19 nt, Artificial Sequence
  Description of Artificial Sequence: Synthetic oligonucleotide
aaaccacugggguagccaa

SEQ ID NO: 2104477 - RNA, 19 nt, Artificial Sequence
  Description of Artificial Sequence: Synthetic oligonucleotide
uuuugcaaggggagcacaa

SEQ ID NO: 2104478 - RNA, 19 nt, Artificial Sequence
  Description of Artificial Sequence: Synthetic oligonucleotide
uguccugguaaaguaggag

SEQ ID NO: 2104479 - RNA, 19 nt, Artificial Sequence
  Description of Artificial Sequence: Synthetic oligonucleotide
uuguucaaguuaccaggug

SEQ ID NO: 2104480 - RNA, 19 nt, Artificial Sequence
  Description of Artificial Sequence: Synthetic oligonucleotide
uuacgauuauucaucccua

SEQ ID NO: 2104481 - RNA, 19 nt, Artificial Sequence
  Description of Artificial Sequence: Synthetic oligonucleotide
uuuauccuuuugauucacu

SEQ ID NO: 2104482 - RNA, 19 nt, Artificial Sequence
  Description of Artificial Sequence: Synthetic oligonucleotide
auauccauucccugcgcug

SEQ ID NO: 2104483 - RNA, 19 nt, Artificial Sequence
  Description of Artificial Sequence: Synthetic oligonucleotide
uguuaggugaccgggcaug

SEQ ID NO: 2104484 - RNA, 19 nt, Artificial Sequence
  Description of Artificial Sequence: Synthetic oligonucleotide
uccucgggauguuagguga

SEQ ID NO: 2104485 - RNA, 19 nt, Artificial Sequence
  Description of Artificial Sequence: Synthetic oligonucleotide
guuccuaacauuuaccaau

SEQ ID NO: 2104486 - RNA, 19 nt, Artificial Sequence
  Description of Artificial Sequence: Synthetic oligonucleotide
uaccaggugagaccagcag

SEQ ID NO: 2104487 - RNA, 19 nt, Artificial Sequence
  Description of Artificial Sequence: Synthetic oligonucleotide
uccuuuugucuauuuacau

SEQ ID NO: 2104488 - RNA, 19 nt, Artificial Sequence
  Description of Artificial Sequence: Synthetic oligonucleotide
aguaccauauguuguugaa

SEQ ID NO: 2104489 - RNA, 19 nt, Artificial Sequence
  Description of Artificial Sequence: Synthetic oligonucleotide
ccaaugauaugccugcagg

SEQ ID NO: 2104490 - RNA, 19 nt, Artificial Sequence
  Description of Artificial Sequence: Synthetic oligonucleotide
uccuuuugauucacugaug

SEQ ID NO: 2104491 - RNA, 19 nt, Artificial Sequence
  Description of Artificial Sequence: Synthetic oligonucleotide
gguuuacgauuauucaucc

SEQ ID NO: 2104492 - RNA, 19 nt, Artificial Sequence
  Description of Artificial Sequence: Synthetic oligonucleotide
uaaagaucugccgcuuuug

SEQ ID NO: 2104493 - RNA, 19 nt, Artificial Sequence
  Description of Artificial Sequence: Synthetic oligonucleotide
uaggugaccgggcauguuc

SEQ ID NO: 2104494 - RNA, 19 nt, Artificial Sequence
  Description of Artificial Sequence: Synthetic oligonucleotide
auucuuguucaaguuacca

SEQ ID NO: 2104495 - RNA, 19 nt, Artificial Sequence
  Description of Artificial Sequence: Synthetic oligonucleotide
ugaagagaaguuagccuua

SEQ ID NO: 2104496 - RNA, 19 nt, Artificial Sequence
  Description of Artificial Sequence: Synthetic oligonucleotide
ucugauccuuuugaaugag

SEQ ID NO: 2104497 - RNA, 19 nt, Artificial Sequence
  Description of Artificial Sequence: Synthetic oligonucleotide
caagugcuaagcuuaucuc

SEQ ID NO: 2104498 - RNA, 19 nt, Artificial Sequence
  Description of Artificial Sequence: Synthetic oligonucleotide
uuaccccgcacuuggaggu

SEQ ID NO: 2104499 - RNA, 19 nt, Artificial Sequence
  Description of Artificial Sequence: Synthetic oligonucleotide
guuuacgauuauucauccc

SEQ ID NO: 2104500 - RNA, 19 nt, Artificial Sequence
  Description of Artificial Sequence: Synthetic oligonucleotide
aacagaguaccugacgguu

SEQ ID NO: 2104501 - RNA, 19 nt, Artificial Sequence
  Description of Artificial Sequence: Synthetic oligonucleotide
uuggaggucuauguguuac

SEQ ID NO: 2104502 - RNA, 19 nt, Artificial Sequence
  Description of Artificial Sequence: Synthetic oligonucleotide
acgauuauucaucccuaga

SEQ ID NO: 2104503 - RNA, 19 nt, Artificial Sequence
  Description of Artificial Sequence: Synthetic oligonucleotide
aaacgucuauacauuuucu

SEQ ID NO: 2104504 - RNA, 19 nt, Artificial Sequence
  Description of Artificial Sequence: Synthetic oligonucleotide
uuaccaauggccaccccuu

SEQ ID NO: 2104505 - RNA, 19 nt, Artificial Sequence
  Description of Artificial Sequence: Synthetic oligonucleotide
ucgggauguuaggugaccg

SEQ ID NO: 2104506 - RNA, 19 nt, Artificial Sequence
  Description of Artificial Sequence: Synthetic oligonucleotide
uuaccaggugagaccagca

SEQ ID NO: 2104507 - RNA, 19 nt, Artificial Sequence
  Description of Artificial Sequence: Synthetic oligonucleotide
augauaugccugcagguuu

SEQ ID NO: 2104508 - RNA, 19 nt, Artificial Sequence
  Description of Artificial Sequence: Synthetic oligonucleotide
caaugacugagccgacugg

SEQ ID NO: 2104509 - RNA, 19 nt, Artificial Sequence
  Description of Artificial Sequence: Synthetic oligonucleotide
accaggugagaccagcaga

SEQ ID NO: 2104510 - RNA, 19 nt, Artificial Sequence
  Description of Artificial Sequence: Synthetic oligonucleotide
ggaugugaggucuccaccc

SEQ ID NO: 2104511 - RNA, 19 nt, Artificial Sequence
  Description of Artificial Sequence: Synthetic oligonucleotide
ucugcacuacucaggagua

SEQ ID NO: 2104512 - RNA, 19 nt, Artificial Sequence
  Description of Artificial Sequence: Synthetic oligonucleotide
ugcccgguggaauaagaac

SEQ ID NO: 2104513 - RNA, 19 nt, Artificial Sequence
  Description of Artificial Sequence: Synthetic oligonucleotide
ugggaguuauuuuauccuu

SEQ ID NO: 2104514 - RNA, 19 nt, Artificial Sequence
  Description of Artificial Sequence: Synthetic oligonucleotide
uguuacaccaggagacaua

SEQ ID NO: 2104515 - RNA, 19 nt, Artificial Sequence
  Description of Artificial Sequence: Synthetic oligonucleotide
accuguguuaccccgcacu

SEQ ID NO: 2104516 - RNA, 19 nt, Artificial Sequence
  Description of Artificial Sequence: Synthetic oligonucleotide
gacggauacccucccauuc

SEQ ID NO: 2104517 - RNA, 19 nt, Artificial Sequence
  Description of Artificial Sequence: Synthetic oligonucleotide
aaguaggaguugcuacgga

SEQ ID NO: 2104518 - RNA, 19 nt, Artificial Sequence
  Description of Artificial Sequence: Synthetic oligonucleotide
aagaacucggagaucuggu

SEQ ID NO: 2104519 - RNA, 19 nt, Artificial Sequence
  Description of Artificial Sequence: Synthetic oligonucleotide
ggcaucguguucuugcugc

SEQ ID NO: 2104520 - RNA, 19 nt, Artificial Sequence
  Description of Artificial Sequence: Synthetic oligonucleotide
uguguuacaccaggagaca

SEQ ID NO: 2104521 - RNA, 19 nt, Artificial Sequence
  Description of Artificial Sequence: Synthetic oligonucleotide
auuuaccaauggccacccc

SEQ ID NO: 2104522 - RNA, 19 nt, Artificial Sequence
  Description of Artificial Sequence: Synthetic oligonucleotide
ugcauaacggcugcucucu

SEQ ID NO: 2104523 - RNA, 19 nt, Artificial Sequence
  Description of Artificial Sequence: Synthetic oligonucleotide
uuccucgggauguuaggug

SEQ ID NO: 2104524 - RNA, 19 nt, Artificial Sequence
  Description of Artificial Sequence: Synthetic oligonucleotide
cuuaucucagcauuucugu

SEQ ID NO: 2104525 - RNA, 19 nt, Artificial Sequence
  Description of Artificial Sequence: Synthetic oligonucleotide
uccaaacgucuauacauuu

SEQ ID NO: 2104526 - RNA, 19 nt, Artificial Sequence
  Description of Artificial Sequence: Synthetic oligonucleotide
ugccgcuuuuggcaaaugu

SEQ ID NO: 2104527 - RNA, 19 nt, Artificial Sequence
  Description of Artificial Sequence: Synthetic oligonucleotide
uuuugucuauuuacaugua

SEQ ID NO: 2104528 - RNA, 19 nt, Artificial Sequence
  Description of Artificial Sequence: Synthetic oligonucleotide
uguugaagccggacagaga

SEQ ID NO: 2104529 - RNA, 19 nt, Artificial Sequence
  Description of Artificial Sequence: Synthetic oligonucleotide
uccuuguccugguaaagua

SEQ ID NO: 2104530 - RNA, 19 nt, Artificial Sequence
  Description of Artificial Sequence: Synthetic oligonucleotide
auauguuguugaaauggcu

SEQ ID NO: 2104531 - RNA, 19 nt, Artificial Sequence
  Description of Artificial Sequence: Synthetic oligonucleotide
gguagccaaugacugagcc

SEQ ID NO: 2104532 - RNA, 19 nt, Artificial Sequence
  Description of Artificial Sequence: Synthetic oligonucleotide
auacaccaaugauaugccu

SEQ ID NO: 2104533 - RNA, 19 nt, Artificial Sequence
  Description of Artificial Sequence: Synthetic oligonucleotide
gauuauucaucccuagauu

SEQ ID NO: 2104534 - RNA, 19 nt, Artificial Sequence
  Description of Artificial Sequence: Synthetic oligonucleotide
gcuuuuggcaaauguuucc

SEQ ID NO: 2104535 - RNA, 19 nt, Artificial Sequence
  Description of Artificial Sequence: Synthetic oligonucleotide
guacaacucaagugcuaag

SEQ ID NO: 2104536 - RNA, 19 nt, Artificial Sequence
  Description of Artificial Sequence: Synthetic oligonucleotide
guuaccaggugagaccagc

SEQ ID NO: 2104537 - RNA, 19 nt, Artificial Sequence
  Description of Artificial Sequence: Synthetic oligonucleotide
auuaagguauagaguguug

SEQ ID NO: 2104538 - RNA, 19 nt, Artificial Sequence
  Description of Artificial Sequence: Synthetic oligonucleotide
ggaauaagaacucggagau

SEQ ID NO: 2104539 - RNA, 19 nt, Artificial Sequence
  Description of Artificial Sequence: Synthetic oligonucleotide
gguuugugagcuuccucgg

SEQ ID NO: 2104540 - RNA, 19 nt, Artificial Sequence
  Description of Artificial Sequence: Synthetic oligonucleotide
aacguugaaccugcaacau

SEQ ID NO: 2104541 - RNA, 19 nt, Artificial Sequence
  Description of Artificial Sequence: Synthetic oligonucleotide
uguugcauaacggcugcuc

SEQ ID NO: 2104542 - RNA, 19 nt, Artificial Sequence
  Description of Artificial Sequence: Synthetic oligonucleotide
ccuuuugucuauuuacaug

SEQ ID NO: 2104543 - RNA, 19 nt, Artificial Sequence
  Description of Artificial Sequence: Synthetic oligonucleotide
gagacgacaggucugcacu

SEQ ID NO: 2104544 - RNA, 19 nt, Artificial Sequence
  Description of Artificial Sequence: Synthetic oligonucleotide
gucugcacuacucaggagu

SEQ ID NO: 2104545 - RNA, 19 nt, Artificial Sequence
  Description of Artificial Sequence: Synthetic oligonucleotide
gucuauacauuuucuauau

SEQ ID NO: 2104546 - RNA, 19 nt, Artificial Sequence
  Description of Artificial Sequence: Synthetic oligonucleotide
aagccggacagagacgaca

SEQ ID NO: 2104547 - RNA, 19 nt, Artificial Sequence
  Description of Artificial Sequence: Synthetic oligonucleotide
aggugaccgggcauguucc

SEQ ID NO: 2104548 - RNA, 19 nt, Artificial Sequence
  Description of Artificial Sequence: Synthetic oligonucleotide
guugaaauggcugacggau

SEQ ID NO: 2104549 - RNA, 19 nt, Artificial Sequence
  Description of Artificial Sequence: Synthetic oligonucleotide
ccaggagacauacuauucc

SEQ ID NO: 2104550 - RNA, 19 nt, Artificial Sequence
  Description of Artificial Sequence: Synthetic oligonucleotide
acguugaaccugcaacaug

SEQ ID NO: 2104551 - RNA, 19 nt, Artificial Sequence
  Description of Artificial Sequence: Synthetic oligonucleotide
acccucccauuccuugucc

SEQ ID NO: 2104552 - RNA, 19 nt, Artificial Sequence
  Description of Artificial Sequence: Synthetic oligonucleotide
uugaaauggcugacggaua

SEQ ID NO: 2104553 - RNA, 19 nt, Artificial Sequence
  Description of Artificial Sequence: Synthetic oligonucleotide
uugaaugguuucugauccu

SEQ ID NO: 2104554 - RNA, 19 nt, Artificial Sequence
  Description of Artificial Sequence: Synthetic oligonucleotide
uuucuauauguugcauaac

SEQ ID NO: 2104555 - RNA, 19 nt, Artificial Sequence
  Description of Artificial Sequence: Synthetic oligonucleotide
gaccagcagaccuggugag

SEQ ID NO: 2104556 - RNA, 19 nt, Artificial Sequence
  Description of Artificial Sequence: Synthetic oligonucleotide
gacagagacgacaggucug

SEQ ID NO: 2104557 - RNA, 19 nt, Artificial Sequence
  Description of Artificial Sequence: Synthetic oligonucleotide
uugcauaacggcugcucuc

SEQ ID NO: 2104558 - RNA, 19 nt, Artificial Sequence
  Description of Artificial Sequence: Synthetic oligonucleotide
uucaaguuaccaggugaga

SEQ ID NO: 2104559 - RNA, 19 nt, Artificial Sequence
  Description of Artificial Sequence: Synthetic oligonucleotide
uuccuuguccugguaaagu

SEQ ID NO: 2104560 - RNA, 19 nt, Artificial Sequence
  Description of Artificial Sequence: Synthetic oligonucleotide
gggauguuaggugaccggg

SEQ ID NO: 2104561 - RNA, 19 nt, Artificial Sequence
  Description of Artificial Sequence: Synthetic oligonucleotide
uuugcaaggggagcacaac

SEQ ID NO: 2104562 - RNA, 19 nt, Artificial Sequence
  Description of Artificial Sequence: Synthetic oligonucleotide
aagagaaguuagccuuaaa

SEQ ID NO: 2104563 - RNA, 19 nt, Artificial Sequence
  Description of Artificial Sequence: Synthetic oligonucleotide
gggguugccauauccauuc

SEQ ID NO: 2104564 - RNA, 19 nt, Artificial Sequence
  Description of Artificial Sequence: Synthetic oligonucleotide
ugaaugguuucugauccuu

SEQ ID NO: 2104565 - RNA, 19 nt, Artificial Sequence
  Description of Artificial Sequence: Synthetic oligonucleotide
ucguguucuugcugcccgg

SEQ ID NO: 2104566 - RNA, 19 nt, Artificial Sequence
  Description of Artificial Sequence: Synthetic oligonucleotide
ugaccgggcauguuccuaa

SEQ ID NO: 2104567 - RNA, 19 nt, Artificial Sequence
  Description of Artificial Sequence: Synthetic oligonucleotide
uggaggucuauguguuaca

SEQ ID NO: 2104568 - RNA, 19 nt, Artificial Sequence
  Description of Artificial Sequence: Synthetic oligonucleotide
aaguuagccuuaaaaucua

SEQ ID NO: 2104569 - RNA, 19 nt, Artificial Sequence
  Description of Artificial Sequence: Synthetic oligonucleotide
gacugggaguuauuuuauc

SEQ ID NO: 2104570 - RNA, 19 nt, Artificial Sequence
  Description of Artificial Sequence: Synthetic oligonucleotide
caaguguucuguuguacaa

SEQ ID NO: 2104571 - RNA, 19 nt, Artificial Sequence
  Description of Artificial Sequence: Synthetic oligonucleotide
auacccucccauuccuugu

SEQ ID NO: 2104572 - RNA, 19 nt, Artificial Sequence
  Description of Artificial Sequence: Synthetic oligonucleotide
aggaguacucaguaccaua

SEQ ID NO: 2104573 - RNA, 19 nt, Artificial Sequence
  Description of Artificial Sequence: Synthetic oligonucleotide
aguaaagaucugccgcuuu

SEQ ID NO: 2104574 - RNA, 19 nt, Artificial Sequence
  Description of Artificial Sequence: Synthetic oligonucleotide
aucuauuguaacauacauu

SEQ ID NO: 2104575 - RNA, 19 nt, Artificial Sequence
  Description of Artificial Sequence: Synthetic oligonucleotide
uaccaauggccaccccuug

SEQ ID NO: 2104576 - RNA, 19 nt, Artificial Sequence
  Description of Artificial Sequence: Synthetic oligonucleotide
gcuuaucucagcauuucug

SEQ ID NO: 2104577 - RNA, 19 nt, Artificial Sequence
  Description of Artificial Sequence: Synthetic oligonucleotide
auacuguaucacugaggca

SEQ ID NO: 2104578 - RNA, 19 nt, Artificial Sequence
  Description of Artificial Sequence: Synthetic oligonucleotide
caauggccaccccuugccg

SEQ ID NO: 2104579 - RNA, 19 nt, Artificial Sequence
  Description of Artificial Sequence: Synthetic oligonucleotide
gguugccauauccauuccc

SEQ ID NO: 2104580 - RNA, 19 nt, Artificial Sequence
  Description of Artificial Sequence: Synthetic oligonucleotide
uugauucacugauggcauc

SEQ ID NO: 2104581 - RNA, 19 nt, Artificial Sequence
  Description of Artificial Sequence: Synthetic oligonucleotide
caucagaccaccuguguua

SEQ ID NO: 2104582 - RNA, 19 nt, Artificial Sequence
  Description of Artificial Sequence: Synthetic oligonucleotide
gagugccauacaccaauga

SEQ ID NO: 2104583 - RNA, 19 nt, Artificial Sequence
  Description of Artificial Sequence: Synthetic oligonucleotide
gaaccugcaacaugacacu

SEQ ID NO: 2104584 - RNA, 19 nt, Artificial Sequence
  Description of Artificial Sequence: Synthetic oligonucleotide
cugcucucuuucaguaaag

SEQ ID NO: 2104585 - RNA, 19 nt, Artificial Sequence
  Description of Artificial Sequence: Synthetic oligonucleotide
gggguagccaaugacugag

SEQ ID NO: 2104586 - RNA, 19 nt, Artificial Sequence
  Description of Artificial Sequence: Synthetic oligonucleotide
gugcuaagcuuaucucagc

SEQ ID NO: 2104587 - RNA, 19 nt, Artificial Sequence
  Description of Artificial Sequence: Synthetic oligonucleotide
guuucugauccuuuugaau

SEQ ID NO: 2104588 - RNA, 19 nt, Artificial Sequence
  Description of Artificial Sequence: Synthetic oligonucleotide
aauggcugacggauacccu

SEQ ID NO: 2104589 - RNA, 19 nt, Artificial Sequence
  Description of Artificial Sequence: Synthetic oligonucleotide
cacugggguagccaaugac

SEQ ID NO: 2104590 - RNA, 19 nt, Artificial Sequence
  Description of Artificial Sequence: Synthetic oligonucleotide
gaauaagaacucggagauc

SEQ ID NO: 2104591 - RNA, 19 nt, Artificial Sequence
  Description of Artificial Sequence: Synthetic oligonucleotide
gguggaauaagaacucgga

SEQ ID NO: 2104592 - RNA, 19 nt, Artificial Sequence
  Description of Artificial Sequence: Synthetic oligonucleotide
uggugccugcaccggaugu

SEQ ID NO: 2104593 - RNA, 19 nt, Artificial Sequence
  Description of Artificial Sequence: Synthetic oligonucleotide
guugcauaacggcugcucu

SEQ ID NO: 2104594 - RNA, 19 nt, Artificial Sequence
  Description of Artificial Sequence: Synthetic oligonucleotide
accaccuguguuaccccgc

SEQ ID NO: 2104595 - RNA, 19 nt, Artificial Sequence
  Description of Artificial Sequence: Synthetic oligonucleotide
cugcagagaagggugggac

SEQ ID NO: 2104596 - RNA, 19 nt, Artificial Sequence
  Description of Artificial Sequence: Synthetic oligonucleotide
agguaugguccucuuugaa

SEQ ID NO: 2104597 - RNA, 19 nt, Artificial Sequence
  Description of Artificial Sequence: Synthetic oligonucleotide
gugccauacaccaaugaua

SEQ ID NO: 2104598 - RNA, 19 nt, Artificial Sequence
  Description of Artificial Sequence: Synthetic oligonucleotide
guaggaguugcuacggaaa

SEQ ID NO: 2104599 - RNA, 19 nt, Artificial Sequence
  Description of Artificial Sequence: Synthetic oligonucleotide
guugccauauccauucccu

SEQ ID NO: 2104600 - RNA, 19 nt, Artificial Sequence
  Description of Artificial Sequence: Synthetic oligonucleotide
caaugauaugccugcaggu

SEQ ID NO: 2104601 - RNA, 19 nt, Artificial Sequence
  Description of Artificial Sequence: Synthetic oligonucleotide
cguugaaccugcaacauga

SEQ ID NO: 2104602 - RNA, 19 nt, Artificial Sequence
  Description of Artificial Sequence: Synthetic oligonucleotide
acucggagaucugguuuac

SEQ ID NO: 2104603 - RNA, 19 nt, Artificial Sequence
  Description of Artificial Sequence: Synthetic oligonucleotide
ccaaugacugagccgacug

SEQ ID NO: 2104604 - RNA, 19 nt, Artificial Sequence
  Description of Artificial Sequence: Synthetic oligonucleotide
gagaagggugggaccagug

SEQ ID NO: 2104605 - RNA, 19 nt, Artificial Sequence
  Description of Artificial Sequence: Synthetic oligonucleotide
ugagccgacugggaguuau

SEQ ID NO: 2104606 - RNA, 19 nt, Artificial Sequence
  Description of Artificial Sequence: Synthetic oligonucleotide
agcuuccucgggauguuag

SEQ ID NO: 2104607 - RNA, 19 nt, Artificial Sequence
  Description of Artificial Sequence: Synthetic oligonucleotide
gcuuccucgggauguuagg

SEQ ID NO: 2104608 - RNA, 19 nt, Artificial Sequence
  Description of Artificial Sequence: Synthetic oligonucleotide
aaauaacguugaaccugca

SEQ ID NO: 2104609 - RNA, 19 nt, Artificial Sequence
  Description of Artificial Sequence: Synthetic oligonucleotide
guucuugcugcccggugga

SEQ ID NO: 2104610 - RNA, 19 nt, Artificial Sequence
  Description of Artificial Sequence: Synthetic oligonucleotide
ugacggauacccucccauu

SEQ ID NO: 2104611 - RNA, 19 nt, Artificial Sequence
  Description of Artificial Sequence: Synthetic oligonucleotide
ccaauggccaccccuugcc

SEQ ID NO: 2104612 - RNA, 19 nt, Artificial Sequence
  Description of Artificial Sequence: Synthetic oligonucleotide
gauuuggcuuguauauucu

SEQ ID NO: 2104613 - RNA, 19 nt, Artificial Sequence
  Description of Artificial Sequence: Synthetic oligonucleotide
caucguguucuugcugccc

SEQ ID NO: 2104614 - RNA, 19 nt, Artificial Sequence
  Description of Artificial Sequence: Synthetic oligonucleotide
auaagaacucggagaucug

SEQ ID NO: 2104615 - RNA, 19 nt, Artificial Sequence
  Description of Artificial Sequence: Synthetic oligonucleotide
ccugcaacaugacacuauc

SEQ ID NO: 2104616 - RNA, 19 nt, Artificial Sequence
  Description of Artificial Sequence: Synthetic oligonucleotide
gacgacaggucugcacuac

SEQ ID NO: 2104617 - RNA, 19 nt, Artificial Sequence
  Description of Artificial Sequence: Synthetic oligonucleotide
ggagcacaacagugaagag

SEQ ID NO: 2104618 - RNA, 19 nt, Artificial Sequence
  Description of Artificial Sequence: Synthetic oligonucleotide
aaccugcaacaugacacua

SEQ ID NO: 2104619 - RNA, 19 nt, Artificial Sequence
  Description of Artificial Sequence: Synthetic oligonucleotide
gcacuuggaggucuaugug

SEQ ID NO: 2104620 - RNA, 19 nt, Artificial Sequence
  Description of Artificial Sequence: Synthetic oligonucleotide
ggaggucuauguguuacac

SEQ ID NO: 2104621 - RNA, 19 nt, Artificial Sequence
  Description of Artificial Sequence: Synthetic oligonucleotide
ucuugcugcccgguggaau

SEQ ID NO: 2104622 - RNA, 19 nt, Artificial Sequence
  Description of Artificial Sequence: Synthetic oligonucleotide
cuugcugcccgguggaaua

SEQ ID NO: 2104623 - RNA, 19 nt, Artificial Sequence
  Description of Artificial Sequence: Synthetic oligonucleotide
cgguggaauaagaacucgg

SEQ ID NO: 2104624 - RNA, 19 nt, Artificial Sequence
  Description of Artificial Sequence: Synthetic oligonucleotide
acugagccgacugggaguu

SEQ ID NO: 2104625 - RNA, 19 nt, Artificial Sequence
  Description of Artificial Sequence: Synthetic oligonucleotide
caacagugaagagaaguua

SEQ ID NO: 2104626 - RNA, 19 nt, Artificial Sequence
  Description of Artificial Sequence: Synthetic oligonucleotide
cugcgcuggugccugcacc

SEQ ID NO: 2104627 - RNA, 19 nt, Artificial Sequence
  Description of Artificial Sequence: Synthetic oligonucleotide
ggauguuaggugaccgggc

SEQ ID NO: 2104628 - RNA, 19 nt, Artificial Sequence
  Description of Artificial Sequence: Synthetic oligonucleotide
acaccaggagacauacuau

SEQ ID NO: 2104629 - RNA, 19 nt, Artificial Sequence
  Description of Artificial Sequence: Synthetic oligonucleotide
guacaaguguucuguugua

SEQ ID NO: 2104630 - RNA, 19 nt, Artificial Sequence
  Description of Artificial Sequence: Synthetic oligonucleotide
aguuagccuuaaaaucuau

SEQ ID NO: 2104631 - RNA, 19 nt, Artificial Sequence
  Description of Artificial Sequence: Synthetic oligonucleotide
guaaagaucugccgcuuuu

SEQ ID NO: 2104632 - RNA, 19 nt, Artificial Sequence
  Description of Artificial Sequence: Synthetic oligonucleotide
agagaagggugggaccagu

SEQ ID NO: 2104633 - RNA, 19 nt, Artificial Sequence
  Description of Artificial Sequence: Synthetic oligonucleotide
gguaugguccucuuugaau

SEQ ID NO: 2104634 - RNA, 19 nt, Artificial Sequence
  Description of Artificial Sequence: Synthetic oligonucleotide
cuguguuaccccgcacuug

SEQ ID NO: 2104635 - RNA, 19 nt, Artificial Sequence
  Description of Artificial Sequence: Synthetic oligonucleotide
agacgacaggucugcacua

SEQ ID NO: 2104636 - RNA, 19 nt, Artificial Sequence
  Description of Artificial Sequence: Synthetic oligonucleotide
cauuaagguauagaguguu

SEQ ID NO: 2104637 - RNA, 19 nt, Artificial Sequence
  Description of Artificial Sequence: Synthetic oligonucleotide
uccauucccugcgcuggug

SEQ ID NO: 2104638 - RNA, 19 nt, Artificial Sequence
  Description of Artificial Sequence: Synthetic oligonucleotide
ggagaucugguuuacgauu

SEQ ID NO: 2104639 - RNA, 19 nt, Artificial Sequence
  Description of Artificial Sequence: Synthetic oligonucleotide
cuacucaggaguacucagu

SEQ ID NO: 2104640 - RNA, 19 nt, Artificial Sequence
  Description of Artificial Sequence: Synthetic oligonucleotide
gaguugcuacggaaaccac

SEQ ID NO: 2104641 - RNA, 19 nt, Artificial Sequence
  Description of Artificial Sequence: Synthetic oligonucleotide
ggucuauguguuacaccag

SEQ ID NO: 2104642 - RNA, 19 nt, Artificial Sequence
  Description of Artificial Sequence: Synthetic oligonucleotide
auaugccugcagguuugug

SEQ ID NO: 2104643 - RNA, 19 nt, Artificial Sequence
  Description of Artificial Sequence: Synthetic oligonucleotide
ugcugcccgguggaauaag

SEQ ID NO: 2104644 - RNA, 19 nt, Artificial Sequence
  Description of Artificial Sequence: Synthetic oligonucleotide
ccugguaaaguaggaguug

SEQ ID NO: 2104645 - RNA, 19 nt, Artificial Sequence
  Description of Artificial Sequence: Synthetic oligonucleotide
cacggcacauauaaugcau

SEQ ID NO: 2104646 - RNA, 19 nt, Artificial Sequence
  Description of Artificial Sequence: Synthetic oligonucleotide
acagaguaccugacgguuu

SEQ ID NO: 2104647 - RNA, 19 nt, Artificial Sequence
  Description of Artificial Sequence: Synthetic oligonucleotide
cauauccauucccugcgcu

SEQ ID NO: 2104648 - RNA, 19 nt, Artificial Sequence
  Description of Artificial Sequence: Synthetic oligonucleotide
cucaagugcuaagcuuauc

SEQ ID NO: 2104649 - RNA, 19 nt, Artificial Sequence
  Description of Artificial Sequence: Synthetic oligonucleotide
uugccgggucuguccaaac

SEQ ID NO: 2104650 - RNA, 19 nt, Artificial Sequence
  Description of Artificial Sequence: Synthetic oligonucleotide
ccgacugggaguuauuuua

SEQ ID NO: 2104651 - RNA, 19 nt, Artificial Sequence
  Description of Artificial Sequence: Synthetic oligonucleotide
cccgguggaauaagaacuc

SEQ ID NO: 2104652 - RNA, 19 nt, Artificial Sequence
  Description of Artificial Sequence: Synthetic oligonucleotide
aguuaccaggugagaccag

SEQ ID NO: 2104653 - RNA, 19 nt, Artificial Sequence
  Description of Artificial Sequence: Synthetic oligonucleotide
acggcacauauaaugcaua

SEQ ID NO: 2104654 - RNA, 19 nt, Artificial Sequence
  Description of Artificial Sequence: Synthetic oligonucleotide
gcaucguguucuugcugcc

SEQ ID NO: 2104655 - RNA, 19 nt, Artificial Sequence
  Description of Artificial Sequence: Synthetic oligonucleotide
ccggaugugaggucuccac

SEQ ID NO: 2104656 - RNA, 19 nt, Artificial Sequence
  Description of Artificial Sequence: Synthetic oligonucleotide
ccauucccugcgcuggugc

SEQ ID NO: 2104657 - RNA, 19 nt, Artificial Sequence
  Description of Artificial Sequence: Synthetic oligonucleotide
cugcccgguggaauaagaa

SEQ ID NO: 2104658 - RNA, 19 nt, Artificial Sequence
  Description of Artificial Sequence: Synthetic oligonucleotide
gauucacugauggcaucgu

SEQ ID NO: 2104659 - RNA, 19 nt, Artificial Sequence
  Description of Artificial Sequence: Synthetic oligonucleotide
cugcacuacucaggaguac

SEQ ID NO: 2104660 - RNA, 19 nt, Artificial Sequence
  Description of Artificial Sequence: Synthetic oligonucleotide
auagaguguugaagccgga

SEQ ID NO: 2104661 - RNA, 19 nt, Artificial Sequence
  Description of Artificial Sequence: Synthetic oligonucleotide
guuagccuuaaaaucuauu

SEQ ID NO: 2104662 - RNA, 19 nt, Artificial Sequence
  Description of Artificial Sequence: Synthetic oligonucleotide
ggaguacucaguaccauau

SEQ ID NO: 2104663 - RNA, 19 nt, Artificial Sequence
  Description of Artificial Sequence: Synthetic oligonucleotide
aaccacugggguagccaau

SEQ ID NO: 2104664 - RNA, 19 nt, Artificial Sequence
  Description of Artificial Sequence: Synthetic oligonucleotide
caccggaugugaggucucc

SEQ ID NO: 2104665 - RNA, 19 nt, Artificial Sequence
  Description of Artificial Sequence: Synthetic oligonucleotide
agccgacugggaguuauuu

SEQ ID NO: 2104666 - RNA, 19 nt, Artificial Sequence
  Description of Artificial Sequence: Synthetic oligonucleotide
ggugccugcaccggaugug

SEQ ID NO: 2104667 - RNA, 19 nt, Artificial Sequence
  Description of Artificial Sequence: Synthetic oligonucleotide
cgucuauacauuuucuaua

SEQ ID NO: 2104668 - RNA, 19 nt, Artificial Sequence
  Description of Artificial Sequence: Synthetic oligonucleotide
caccaggagacauacuauu

SEQ ID NO: 2104669 - RNA, 19 nt, Artificial Sequence
  Description of Artificial Sequence: Synthetic oligonucleotide
cugcaacaugacacuaucu

SEQ ID NO: 2104670 - RNA, 19 nt, Artificial Sequence
  Description of Artificial Sequence: Synthetic oligonucleotide
accccuugccgggucuguc

SEQ ID NO: 2104671 - RNA, 19 nt, Artificial Sequence
  Description of Artificial Sequence: Synthetic oligonucleotide
gcagaccuggugaguuucg

SEQ ID NO: 2104672 - RNA, 19 nt, Artificial Sequence
  Description of Artificial Sequence: Synthetic oligonucleotide
cgggauguuaggugaccgg

SEQ ID NO: 2104673 - RNA, 19 nt, Artificial Sequence
  Description of Artificial Sequence: Synthetic oligonucleotide
gaagccggacagagacgac

SEQ ID NO: 2104674 - RNA, 19 nt, Artificial Sequence
  Description of Artificial Sequence: Synthetic oligonucleotide
accggaugugaggucucca

SEQ ID NO: 2104675 - RNA, 19 nt, Artificial Sequence
  Description of Artificial Sequence: Synthetic oligonucleotide
uuaggugaccgggcauguu

SEQ ID NO: 2104676 - RNA, 19 nt, Artificial Sequence
  Description of Artificial Sequence: Synthetic oligonucleotide
ggggagcacaacagugaag

SEQ ID NO: 2104677 - RNA, 19 nt, Artificial Sequence
  Description of Artificial Sequence: Synthetic oligonucleotide
auguugcauaacggcugcu

SEQ ID NO: 2104678 - RNA, 19 nt, Artificial Sequence
  Description of Artificial Sequence: Synthetic oligonucleotide
aucugccgcuuuuggcaaa

SEQ ID NO: 2104679 - RNA, 19 nt, Artificial Sequence
  Description of Artificial Sequence: Synthetic oligonucleotide
ggaaaccacugggguagcc

SEQ ID NO: 2104680 - RNA, 19 nt, Artificial Sequence
  Description of Artificial Sequence: Synthetic oligonucleotide
gccauacaccaaugauaug

SEQ ID NO: 2104681 - RNA, 19 nt, Artificial Sequence
  Description of Artificial Sequence: Synthetic oligonucleotide
cgauuauucaucccuagau

SEQ ID NO: 2104682 - RNA, 19 nt, Artificial Sequence
  Description of Artificial Sequence: Synthetic oligonucleotide
ggcugacggauacccuccc

SEQ ID NO: 2104683 - RNA, 19 nt, Artificial Sequence
  Description of Artificial Sequence: Synthetic oligonucleotide
caccuguguuaccccgcac

SEQ ID NO: 2104684 - RNA, 19 nt, Artificial Sequence
  Description of Artificial Sequence: Synthetic oligonucleotide
gcuaagcuuaucucagcau

SEQ ID NO: 2104685 - RNA, 19 nt, Artificial Sequence
  Description of Artificial Sequence: Synthetic oligonucleotide
uucuugcugcccgguggaa

SEQ ID NO: 2104686 - RNA, 19 nt, Artificial Sequence
  Description of Artificial Sequence: Synthetic oligonucleotide
guccaaacgucuauacauu

SEQ ID NO: 2104687 - RNA, 19 nt, Artificial Sequence
  Description of Artificial Sequence: Synthetic oligonucleotide
gauaugccugcagguuugu

SEQ ID NO: 2104688 - RNA, 19 nt, Artificial Sequence
  Description of Artificial Sequence: Synthetic oligonucleotide
cugcaccggaugugagguc

SEQ ID NO: 2104689 - RNA, 19 nt, Artificial Sequence
  Description of Artificial Sequence: Synthetic oligonucleotide
cuugccgggucuguccaaa

SEQ ID NO: 2104690 - RNA, 19 nt, Artificial Sequence
  Description of Artificial Sequence: Synthetic oligonucleotide
cauaacggcugcucucuuu

SEQ ID NO: 2104691 - RNA, 19 nt, Artificial Sequence
  Description of Artificial Sequence: Synthetic oligonucleotide
gggcauguuccuaacauuu

SEQ ID NO: 2104692 - RNA, 19 nt, Artificial Sequence
  Description of Artificial Sequence: Synthetic oligonucleotide
ccgggucuguccaaacguc

SEQ ID NO: 2104693 - RNA, 19 nt, Artificial Sequence
  Description of Artificial Sequence: Synthetic oligonucleotide
guguuacaccaggagacau

SEQ ID NO: 2104694 - RNA, 19 nt, Artificial Sequence
  Description of Artificial Sequence: Synthetic oligonucleotide
cagaguaccugacgguuuu

SEQ ID NO: 2104695 - RNA, 19 nt, Artificial Sequence
  Description of Artificial Sequence: Synthetic oligonucleotide
ggguagccaaugacugagc

SEQ ID NO: 2104696 - RNA, 19 nt, Artificial Sequence
  Description of Artificial Sequence: Synthetic oligonucleotide
gccgggucuguccaaacgu

SEQ ID NO: 2104697 - RNA, 19 nt, Artificial Sequence
  Description of Artificial Sequence: Synthetic oligonucleotide
cgacaggucugcacuacuc

SEQ ID NO: 2104698 - RNA, 19 nt, Artificial Sequence
  Description of Artificial Sequence: Synthetic oligonucleotide
ccauuaagguauagagugu

SEQ ID NO: 2104699 - RNA, 19 nt, Artificial Sequence
  Description of Artificial Sequence: Synthetic oligonucleotide
ccccauuaagguauagagu

SEQ ID NO: 2104700 - RNA, 19 nt, Artificial Sequence
  Description of Artificial Sequence: Synthetic oligonucleotide
gcugacggauacccuccca

SEQ ID NO: 2104701 - RNA, 19 nt, Artificial Sequence
  Description of Artificial Sequence: Synthetic oligonucleotide
cacacacggcacauauaau

SEQ ID NO: 2104702 - RNA, 19 nt, Artificial Sequence
  Description of Artificial Sequence: Synthetic oligonucleotide
guguuaccccgcacuugga

SEQ ID NO: 2104703 - RNA, 19 nt, Artificial Sequence
  Description of Artificial Sequence: Synthetic oligonucleotide
gggucuguccaaacgucua

SEQ ID NO: 2104704 - RNA, 19 nt, Artificial Sequence
  Description of Artificial Sequence: Synthetic oligonucleotide
ggaccaguggcagaagguu

SEQ ID NO: 2104705 - RNA, 19 nt, Artificial Sequence
  Description of Artificial Sequence: Synthetic oligonucleotide
gugaccgggcauguuccua

SEQ ID NO: 2104706 - RNA, 19 nt, Artificial Sequence
  Description of Artificial Sequence: Synthetic oligonucleotide
gcugcccgguggaauaaga

SEQ ID NO: 2104707 - RNA, 19 nt, Artificial Sequence
  Description of Artificial Sequence: Synthetic oligonucleotide
gccgcuuuuggcaaauguu

SEQ ID NO: 2104708 - RNA, 19 nt, Artificial Sequence
  Description of Artificial Sequence: Synthetic oligonucleotide
ccaccuguguuaccccgca

SEQ ID NO: 2104709 - RNA, 19 nt, Artificial Sequence
  Description of Artificial Sequence: Synthetic oligonucleotide
cagagacgacaggucugca

SEQ ID NO: 2104710 - RNA, 19 nt, Artificial Sequence
  Description of Artificial Sequence: Synthetic oligonucleotide
ccgcacuuggaggucuaug

SEQ ID NO: 2104711 - RNA, 19 nt, Artificial Sequence
  Description of Artificial Sequence: Synthetic oligonucleotide
gguccucuuugaaugguuu

SEQ ID NO: 2104712 - RNA, 19 nt, Artificial Sequence
  Description of Artificial Sequence: Synthetic oligonucleotide
caguaaagaucugccgcuu

SEQ ID NO: 2104713 - RNA, 19 nt, Artificial Sequence
  Description of Artificial Sequence: Synthetic oligonucleotide
gcgcuggugccugcaccgg

SEQ ID NO: 2104714 - RNA, 19 nt, Artificial Sequence
  Description of Artificial Sequence: Synthetic oligonucleotide
ggugaccgggcauguuccu

SEQ ID NO: 2104715 - RNA, 19 nt, Artificial Sequence
  Description of Artificial Sequence: Synthetic oligonucleotide
gccgacugggaguuauuuu

SEQ ID NO: 2104716 - RNA, 19 nt, Artificial Sequence
  Description of Artificial Sequence: Synthetic oligonucleotide
cccaucagaccaccugugu

SEQ ID NO: 2104717 - RNA, 19 nt, Artificial Sequence
  Description of Artificial Sequence: Synthetic oligonucleotide
cagcagaccuggugaguuu

SEQ ID NO: 2104718 - RNA, 19 nt, Artificial Sequence
  Description of Artificial Sequence: Synthetic oligonucleotide
ccuguguuaccccgcacuu

SEQ ID NO: 2104719 - RNA, 19 nt, Artificial Sequence
  Description of Artificial Sequence: Synthetic oligonucleotide
cggcacauauaaugcauau

SEQ ID NO: 2104720 - RNA, 19 nt, Artificial Sequence
  Description of Artificial Sequence: Synthetic oligonucleotide
gcaccggaugugaggucuc

SEQ ID NO: 2104721 - RNA, 19 nt, Artificial Sequence
  Description of Artificial Sequence: Synthetic oligonucleotide
ccagcagaccuggugaguu

SEQ ID NO: 2104722 - RNA, 19 nt, Artificial Sequence
  Description of Artificial Sequence: Synthetic oligonucleotide
gcuggugccugcaccggau

SEQ ID NO: 2104723 - RNA, 19 nt, Artificial Sequence
  Description of Artificial Sequence: Synthetic oligonucleotide
gagccgacugggaguuauu

SEQ ID NO: 2104724 - RNA, 19 nt, Artificial Sequence
  Description of Artificial Sequence: Synthetic oligonucleotide
ggauacccucccauuccuu

SEQ ID NO: 2104725 - RNA, 19 nt, Artificial Sequence
  Description of Artificial Sequence: Synthetic oligonucleotide
gcauaacggcugcucucuu

SEQ ID NO: 2104726 - RNA, 19 nt, Artificial Sequence
  Description of Artificial Sequence: Synthetic oligonucleotide
ccuugccgggucuguccaa

SEQ ID NO: 2104727 - RNA, 19 nt, Artificial Sequence
  Description of Artificial Sequence: Synthetic oligonucleotide
cgcuggugccugcaccgga

SEQ ID NO: 2104728 - RNA, 19 nt, Artificial Sequence
  Description of Artificial Sequence: Synthetic oligonucleotide
cugagccgacugggaguua

SEQ ID NO: 2104729 - RNA, 19 nt, Artificial Sequence
  Description of Artificial Sequence: Synthetic oligonucleotide
cguguucuugcugcccggu

SEQ ID NO: 2104730 - RNA, 19 nt, Artificial Sequence
  Description of Artificial Sequence: Synthetic oligonucleotide
ccaccccaucagaccaccu

SEQ ID NO: 2104731 - RNA, 19 nt, Artificial Sequence
  Description of Artificial Sequence: Synthetic oligonucleotide
ccccgcacuuggaggucua

SEQ ID NO: 2104732 - RNA, 19 nt, Artificial Sequence
  Description of Artificial Sequence: Synthetic oligonucleotide
cccgcacuuggaggucuau

SEQ ID NO: 2104733 - RNA, 19 nt, Artificial Sequence
  Description of Artificial Sequence: Synthetic oligonucleotide
ucaauuaaccguaaguccg

SEQ ID NO: 2104734 - RNA, 19 nt, Artificial Sequence
  Description of Artificial Sequence: Synthetic oligonucleotide
uucaaggacacuaaguugg

SEQ ID NO: 2104735 - RNA, 19 nt, Artificial Sequence
  Description of Artificial Sequence: Synthetic oligonucleotide
aaugccauagccugugucg

SEQ ID NO: 2104736 - RNA, 19 nt, Artificial Sequence
  Description of Artificial Sequence: Synthetic oligonucleotide
ucagacaucgacuccaugg

SEQ ID NO: 2104737 - RNA, 19 nt, Artificial Sequence
  Description of Artificial Sequence: Synthetic oligonucleotide
cauuccacaguucauaggg

SEQ ID NO: 2104738 - RNA, 19 nt, Artificial Sequence
  Description of Artificial Sequence: Synthetic oligonucleotide
uucaauuaaccguaagucc

SEQ ID NO: 2104739 - RNA, 19 nt, Artificial Sequence
  Description of Artificial Sequence: Synthetic oligonucleotide
aagguaggagaccggaagc

SEQ ID NO: 2104740 - RNA, 19 nt, Artificial Sequence
  Description of Artificial Sequence: Synthetic oligonucleotide
ugaacaacagccaucucgc

SEQ ID NO: 2104741 - RNA, 19 nt, Artificial Sequence
  Description of Artificial Sequence: Synthetic oligonucleotide
ucaaaagcugacuuaagcu

SEQ ID NO: 2104742 - RNA, 19 nt, Artificial Sequence
  Description of Artificial Sequence: Synthetic oligonucleotide
agugacuucaauuaaccgu

SEQ ID NO: 2104743 - RNA, 19 nt, Artificial Sequence
  Description of Artificial Sequence: Synthetic oligonucleotide
acaacagccaucucgcugg

SEQ ID NO: 2104744 - RNA, 19 nt, Artificial Sequence
  Description of Artificial Sequence: Synthetic oligonucleotide
ucagugacuucaauuaacc

SEQ ID NO: 2104745 - RNA, 19 nt, Artificial Sequence
  Description of Artificial Sequence: Synthetic oligonucleotide
uuaaccguaaguccgacuu

SEQ ID NO: 2104746 - RNA, 19 nt, Artificial Sequence
  Description of Artificial Sequence: Synthetic oligonucleotide
cacacuucgcauuugcugg

SEQ ID NO: 2104747 - RNA, 19 nt, Artificial Sequence
  Description of Artificial Sequence: Synthetic oligonucleotide
cuugcuguugcucaagggc

SEQ ID NO: 2104748 - RNA, 19 nt, Artificial Sequence
  Description of Artificial Sequence: Synthetic oligonucleotide
ucaaucaccucuucaaacu

SEQ ID NO: 2104749 - RNA, 19 nt, Artificial Sequence
  Description of Artificial Sequence: Synthetic oligonucleotide
aaacuccuccaccagcacg

SEQ ID NO: 2104750 - RNA, 19 nt, Artificial Sequence
  Description of Artificial Sequence: Synthetic oligonucleotide
aauucagucaggucuuccu

SEQ ID NO: 2104751 - RNA, 19 nt, Artificial Sequence
  Description of Artificial Sequence: Synthetic oligonucleotide
gauccagaaugccauagcc

SEQ ID NO: 2104752 - RNA, 19 nt, Artificial Sequence
  Description of Artificial Sequence: Synthetic oligonucleotide
uccuagagaggcaaugucc

SEQ ID NO: 2104753 - RNA, 19 nt, Artificial Sequence
  Description of Artificial Sequence: Synthetic oligonucleotide
auaggggauguccaucacc

SEQ ID NO: 2104754 - RNA, 19 nt, Artificial Sequence
  Description of Artificial Sequence: Synthetic oligonucleotide
gugucgaucacuuccuugg

SEQ ID NO: 2104755 - RNA, 19 nt, Artificial Sequence
  Description of Artificial Sequence: Synthetic oligonucleotide
cuucaauuaaccguaaguc

SEQ ID NO: 2104756 - RNA, 19 nt, Artificial Sequence
  Description of Artificial Sequence: Synthetic oligonucleotide
agaagccucuugcaaaugg

SEQ ID NO: 2104757 - RNA, 19 nt, Artificial Sequence
  Description of Artificial Sequence: Synthetic oligonucleotide
caaaagcugacuuaagcuc

SEQ ID NO: 2104758 - RNA, 19 nt, Artificial Sequence
  Description of Artificial Sequence: Synthetic oligonucleotide
acuugguguacuugacucc

SEQ ID NO: 2104759 - RNA, 19 nt, Artificial Sequence
  Description of Artificial Sequence: Synthetic oligonucleotide
acuuaagcuccacugcaac

SEQ ID NO: 2104760 - RNA, 19 nt, Artificial Sequence
  Description of Artificial Sequence: Synthetic oligonucleotide
acugcaacauacuugcaca

SEQ ID NO: 2104761 - RNA, 19 nt, Artificial Sequence
  Description of Artificial Sequence: Synthetic oligonucleotide
uugauucaaggacacuaag

SEQ ID NO: 2104762 - RNA, 19 nt, Artificial Sequence
  Description of Artificial Sequence: Synthetic oligonucleotide
ugacuuaagcuccacugca

SEQ ID NO: 2104763 - RNA, 19 nt, Artificial Sequence
  Description of Artificial Sequence: Synthetic oligonucleotide
uggauuucuucccuccuag

SEQ ID NO: 2104764 - RNA, 19 nt, Artificial Sequence
  Description of Artificial Sequence: Synthetic oligonucleotide
ucgaucacuuccuuggucu

SEQ ID NO: 2104765 - RNA, 19 nt, Artificial Sequence
  Description of Artificial Sequence: Synthetic oligonucleotide
uggacuagguugugcagcg

SEQ ID NO: 2104766 - RNA, 19 nt, Artificial Sequence
  Description of Artificial Sequence: Synthetic oligonucleotide
ucaaggacacuaaguuggg

SEQ ID NO: 2104767 - RNA, 19 nt, Artificial Sequence
  Description of Artificial Sequence: Synthetic oligonucleotide
uuucuucaaaagcugacuu

SEQ ID NO: 2104768 - RNA, 19 nt, Artificial Sequence
  Description of Artificial Sequence: Synthetic oligonucleotide
uguaccaguccucaaucac

SEQ ID NO: 2104769 - RNA, 19 nt, Artificial Sequence
  Description of Artificial Sequence: Synthetic oligonucleotide
agacucgccagcuccuucc

SEQ ID NO: 2104770 - RNA, 19 nt, Artificial Sequence
  Description of Artificial Sequence: Synthetic oligonucleotide
aaguugggcucacaguuca

SEQ ID NO: 2104771 - RNA, 19 nt, Artificial Sequence
  Description of Artificial Sequence: Synthetic oligonucleotide
acgugguuggcacagagga

SEQ ID NO: 2104772 - RNA, 19 nt, Artificial Sequence
  Description of Artificial Sequence: Synthetic oligonucleotide
aauuaaccguaaguccgac

SEQ ID NO: 2104773 - RNA, 19 nt, Artificial Sequence
  Description of Artificial Sequence: Synthetic oligonucleotide
ucauaggggauguccauca

SEQ ID NO: 2104774 - RNA, 19 nt, Artificial Sequence
  Description of Artificial Sequence: Synthetic oligonucleotide
agacaucgacuccauggcc

SEQ ID NO: 2104775 - RNA, 19 nt, Artificial Sequence
  Description of Artificial Sequence: Synthetic oligonucleotide
gaagagggcacagccaagg

SEQ ID NO: 2104776 - RNA, 19 nt, Artificial Sequence
  Description of Artificial Sequence: Synthetic oligonucleotide
guauccuugcccuucagca

SEQ ID NO: 2104777 - RNA, 19 nt, Artificial Sequence
  Description of Artificial Sequence: Synthetic oligonucleotide
agucaggucuuccuccugg

SEQ ID NO: 2104778 - RNA, 19 nt, Artificial Sequence
  Description of Artificial Sequence: Synthetic oligonucleotide
cauacuugcacacuucgca

SEQ ID NO: 2104779 - RNA, 19 nt, Artificial Sequence
  Description of Artificial Sequence: Synthetic oligonucleotide
cuugguguacuugacuccg

SEQ ID NO: 2104780 - RNA, 19 nt, Artificial Sequence
  Description of Artificial Sequence: Synthetic oligonucleotide
ucccgguuucuucaaaagc

SEQ ID NO: 2104781 - RNA, 19 nt, Artificial Sequence
  Description of Artificial Sequence: Synthetic oligonucleotide
uccgacuugguguacuuga

SEQ ID NO: 2104782 - RNA, 19 nt, Artificial Sequence
  Description of Artificial Sequence: Synthetic oligonucleotide
cugacuuaagcuccacugc

SEQ ID NO: 2104783 - RNA, 19 nt, Artificial Sequence
  Description of Artificial Sequence: Synthetic oligonucleotide
cucagugacuucaauuaac

SEQ ID NO: 2104784 - RNA, 19 nt, Artificial Sequence
  Description of Artificial Sequence: Synthetic oligonucleotide
ugggcaaucgcacccaguc

SEQ ID NO: 2104785 - RNA, 19 nt, Artificial Sequence
  Description of Artificial Sequence: Synthetic oligonucleotide
agaggaauucagucagguc

SEQ ID NO: 2104786 - RNA, 19 nt, Artificial Sequence
  Description of Artificial Sequence: Synthetic oligonucleotide
aaccgguugcugccagucc

SEQ ID NO: 2104787 - RNA, 19 nt, Artificial Sequence
  Description of Artificial Sequence: Synthetic oligonucleotide
aaaccgguugcugccaguc

SEQ ID NO: 2104788 - RNA, 19 nt, Artificial Sequence
  Description of Artificial Sequence: Synthetic oligonucleotide
ggaagcaggaggcagcggg

SEQ ID NO: 2104789 - RNA, 19 nt, Artificial Sequence
  Description of Artificial Sequence: Synthetic oligonucleotide
uuaagcuccacugcaacau

SEQ ID NO: 2104790 - RNA, 19 nt, Artificial Sequence
  Description of Artificial Sequence: Synthetic oligonucleotide
acuaaguugggcucacagu

SEQ ID NO: 2104791 - RNA, 19 nt, Artificial Sequence
  Description of Artificial Sequence: Synthetic oligonucleotide
ucaucaggagggcugugug

SEQ ID NO: 2104792 - RNA, 19 nt, Artificial Sequence
  Description of Artificial Sequence: Synthetic oligonucleotide
cagaccaccgcucugccag

SEQ ID NO: 2104793 - RNA, 19 nt, Artificial Sequence
  Description of Artificial Sequence: Synthetic oligonucleotide
aaucgcacccagucggugu

SEQ ID NO: 2104794 - RNA, 19 nt, Artificial Sequence
  Description of Artificial Sequence: Synthetic oligonucleotide
gggaucuugauucaaggac

SEQ ID NO: 2104795 - RNA, 19 nt, Artificial Sequence
  Description of Artificial Sequence: Synthetic oligonucleotide
cagugacuucaauuaaccg

SEQ ID NO: 2104796 - RNA, 19 nt, Artificial Sequence
  Description of Artificial Sequence: Synthetic oligonucleotide
gacaucgacuccauggccc

SEQ ID NO: 2104797 - RNA, 19 nt, Artificial Sequence
  Description of Artificial Sequence: Synthetic oligonucleotide
aggccuuuugcacacccuc

SEQ ID NO: 2104798 - RNA, 19 nt, Artificial Sequence
  Description of Artificial Sequence: Synthetic oligonucleotide
ggcaaucgcacccagucgg

SEQ ID NO: 2104799 - RNA, 19 nt, Artificial Sequence
  Description of Artificial Sequence: Synthetic oligonucleotide
cagacaucgacuccauggc

SEQ ID NO: 2104800 - RNA, 19 nt, Artificial Sequence
  Description of Artificial Sequence: Synthetic oligonucleotide
aagcuccacugcaacauac

SEQ ID NO: 2104801 - RNA, 19 nt, Artificial Sequence
  Description of Artificial Sequence: Synthetic oligonucleotide
ugggaucuugauucaagga

SEQ ID NO: 2104802 - RNA, 19 nt, Artificial Sequence
  Description of Artificial Sequence: Synthetic oligonucleotide
auuugcugggcaaucgcac

SEQ ID NO: 2104803 - RNA, 19 nt, Artificial Sequence
  Description of Artificial Sequence: Synthetic oligonucleotide
cacuaaguugggcucacag

SEQ ID NO: 2104804 - RNA, 19 nt, Artificial Sequence
  Description of Artificial Sequence: Synthetic oligonucleotide
uucagcacgugguuggcac

SEQ ID NO: 2104805 - RNA, 19 nt, Artificial Sequence
  Description of Artificial Sequence: Synthetic oligonucleotide
uuccgauccagaaugccau

SEQ ID NO: 2104806 - RNA, 19 nt, Artificial Sequence
  Description of Artificial Sequence: Synthetic oligonucleotide
aagccucuugcaaaugguc

SEQ ID NO: 2104807 - RNA, 19 nt, Artificial Sequence
  Description of Artificial Sequence: Synthetic oligonucleotide
ucccaugcucuugaguugg

SEQ ID NO: 2104808 - RNA, 19 nt, Artificial Sequence
  Description of Artificial Sequence: Synthetic oligonucleotide
accuugaccccuuugugga

SEQ ID NO: 2104809 - RNA, 19 nt, Artificial Sequence
  Description of Artificial Sequence: Synthetic oligonucleotide
cugcuggagcccuugaccc

SEQ ID NO: 2104810 - RNA, 19 nt, Artificial Sequence
  Description of Artificial Sequence: Synthetic oligonucleotide
uccggaggccuuccgaucc

SEQ ID NO: 2104811 - RNA, 19 nt, Artificial Sequence
  Description of Artificial Sequence: Synthetic oligonucleotide
gucucagugacuucaauua

SEQ ID NO: 2104812 - RNA, 19 nt, Artificial Sequence
  Description of Artificial Sequence: Synthetic oligonucleotide
gacccuaccacgcuucuuc

SEQ ID NO: 2104813 - RNA, 19 nt, Artificial Sequence
  Description of Artificial Sequence: Synthetic oligonucleotide
gucucugacaugcccuugg

SEQ ID NO: 2104814 - RNA, 19 nt, Artificial Sequence
  Description of Artificial Sequence: Synthetic oligonucleotide
uguggacuagguugugcag

SEQ ID NO: 2104815 - RNA, 19 nt, Artificial Sequence
  Description of Artificial Sequence: Synthetic oligonucleotide
agcugaacaacagccaucu

SEQ ID NO: 2104816 - RNA, 19 nt, Artificial Sequence
  Description of Artificial Sequence: Synthetic oligonucleotide
aagcugaacaacagccauc

SEQ ID NO: 2104817 - RNA, 19 nt, Artificial Sequence
  Description of Artificial Sequence: Synthetic oligonucleotide
caugcccuuggcaaaccgg

SEQ ID NO: 2104818 - RNA, 19 nt, Artificial Sequence
  Description of Artificial Sequence: Synthetic oligonucleotide
caguucauaggggaugucc

SEQ ID NO: 2104819 - RNA, 19 nt, Artificial Sequence
  Description of Artificial Sequence: Synthetic oligonucleotide
aggcaacugguauccuugc

SEQ ID NO: 2104820 - RNA, 19 nt, Artificial Sequence
  Description of Artificial Sequence: Synthetic oligonucleotide
ugcucuugaguugggaucu

SEQ ID NO: 2104821 - RNA, 19 nt, Artificial Sequence
  Description of Artificial Sequence: Synthetic oligonucleotide
uuuguggacuagguugugc

SEQ ID NO: 2104822 - RNA, 19 nt, Artificial Sequence
  Description of Artificial Sequence: Synthetic oligonucleotide
guugugcagcgucucaaag

SEQ ID NO: 2104823 - RNA, 19 nt, Artificial Sequence
  Description of Artificial Sequence: Synthetic oligonucleotide
uaaccguaaguccgacuug

SEQ ID NO: 2104824 - RNA, 19 nt, Artificial Sequence
  Description of Artificial Sequence: Synthetic oligonucleotide
uugaggucggcuaccucug

SEQ ID NO: 2104825 - RNA, 19 nt, Artificial Sequence
  Description of Artificial Sequence: Synthetic oligonucleotide
uaaguugggcucacaguuc

SEQ ID NO: 2104826 - RNA, 19 nt, Artificial Sequence
  Description of Artificial Sequence: Synthetic oligonucleotide
ucucauuccacaguucaua

SEQ ID NO: 2104827 - RNA, 19 nt, Artificial Sequence
  Description of Artificial Sequence: Synthetic oligonucleotide
gagcccuugacccuaccac

SEQ ID NO: 2104828 - RNA, 19 nt, Artificial Sequence
  Description of Artificial Sequence: Synthetic oligonucleotide
uccuggugguuccuguacc

SEQ ID NO: 2104829 - RNA, 19 nt, Artificial Sequence
  Description of Artificial Sequence: Synthetic oligonucleotide
acacuucgcauuugcuggg

SEQ ID NO: 2104830 - RNA, 19 nt, Artificial Sequence
  Description of Artificial Sequence: Synthetic oligonucleotide
gcaacugguauccuugccc

SEQ ID NO: 2104831 - RNA, 19 nt, Artificial Sequence
  Description of Artificial Sequence: Synthetic oligonucleotide
uauccuugcccuucagcac

SEQ ID NO: 2104832 - RNA, 19 nt, Artificial Sequence
  Description of Artificial Sequence: Synthetic oligonucleotide
agaccggaagcugaacaac

SEQ ID NO: 2104833 - RNA, 19 nt, Artificial Sequence
  Description of Artificial Sequence: Synthetic oligonucleotide
uugguguacuugacuccgg

SEQ ID NO: 2104834 - RNA, 19 nt, Artificial Sequence
  Description of Artificial Sequence: Synthetic oligonucleotide
gacuagguugugcagcguc

SEQ ID NO: 2104835 - RNA, 19 nt, Artificial Sequence
  Description of Artificial Sequence: Synthetic oligonucleotide
ugguguacuugacuccgga

SEQ ID NO: 2104836 - RNA, 19 nt, Artificial Sequence
  Description of Artificial Sequence: Synthetic oligonucleotide
auacuugcacacuucgcau

SEQ ID NO: 2104837 - RNA, 19 nt, Artificial Sequence
  Description of Artificial Sequence: Synthetic oligonucleotide
ucggcuaccucugcagagg

SEQ ID NO: 2104838 - RNA, 19 nt, Artificial Sequence
  Description of Artificial Sequence: Synthetic oligonucleotide
cagcacgucacacugcuuc

SEQ ID NO: 2104839 - RNA, 19 nt, Artificial Sequence
  Description of Artificial Sequence: Synthetic oligonucleotide
guaccaguccucaaucacc

SEQ ID NO: 2104840 - RNA, 19 nt, Artificial Sequence
  Description of Artificial Sequence: Synthetic oligonucleotide
cagccaagguaggagaccg

SEQ ID NO: 2104841 - RNA, 19 nt, Artificial Sequence
  Description of Artificial Sequence: Synthetic oligonucleotide
ucucugacaugcccuuggc

SEQ ID NO: 2104842 - RNA, 19 nt, Artificial Sequence
  Description of Artificial Sequence: Synthetic oligonucleotide
uggcaaaccgguugcugcc

SEQ ID NO: 2104843 - RNA, 19 nt, Artificial Sequence
  Description of Artificial Sequence: Synthetic oligonucleotide
acaugcccuuggcaaaccg

SEQ ID NO: 2104844 - RNA, 19 nt, Artificial Sequence
  Description of Artificial Sequence: Synthetic oligonucleotide
cuaccacgcuucuucuugg

SEQ ID NO: 2104845 - RNA, 19 nt, Artificial Sequence
  Description of Artificial Sequence: Synthetic oligonucleotide
ggcacagaggaauucaguc

SEQ ID NO: 2104846 - RNA, 19 nt, Artificial Sequence
  Description of Artificial Sequence: Synthetic oligonucleotide
ugguuccuguaccaguccu

SEQ ID NO: 2104847 - RNA, 19 nt, Artificial Sequence
  Description of Artificial Sequence: Synthetic oligonucleotide
uccacaguucauaggggau

SEQ ID NO: 2104848 - RNA, 19 nt, Artificial Sequence
  Description of Artificial Sequence: Synthetic oligonucleotide
caaucaccucuucaaacuc

SEQ ID NO: 2104849 - RNA, 19 nt, Artificial Sequence
  Description of Artificial Sequence: Synthetic oligonucleotide
aguucauaggggaugucca

SEQ ID NO: 2104850 - RNA, 19 nt, Artificial Sequence
  Description of Artificial Sequence: Synthetic oligonucleotide
auuaaccguaaguccgacu

SEQ ID NO: 2104851 - RNA, 19 nt, Artificial Sequence
  Description of Artificial Sequence: Synthetic oligonucleotide
uuggauuucuucccuccua

SEQ ID NO: 2104852 - RNA, 19 nt, Artificial Sequence
  Description of Artificial Sequence: Synthetic oligonucleotide
gugacuucaauuaaccgua

SEQ ID NO: 2104853 - RNA, 19 nt, Artificial Sequence
  Description of Artificial Sequence: Synthetic oligonucleotide
aucgcacccagucgguguc

SEQ ID NO: 2104854 - RNA, 19 nt, Artificial Sequence
  Description of Artificial Sequence: Synthetic oligonucleotide
cuuccgauccagaaugcca

SEQ ID NO: 2104855 - RNA, 19 nt, Artificial Sequence
  Description of Artificial Sequence: Synthetic oligonucleotide
cuugacccuaccacgcuuc

SEQ ID NO: 2104856 - RNA, 19 nt, Artificial Sequence
  Description of Artificial Sequence: Synthetic oligonucleotide
cagccaucucgcuggagcg

SEQ ID NO: 2104857 - RNA, 19 nt, Artificial Sequence
  Description of Artificial Sequence: Synthetic oligonucleotide
aggucggcuaccucugcag

SEQ ID NO: 2104858 - RNA, 19 nt, Artificial Sequence
  Description of Artificial Sequence: Synthetic oligonucleotide
caacauacuugcacacuuc

SEQ ID NO: 2104859 - RNA, 19 nt, Artificial Sequence
  Description of Artificial Sequence: Synthetic oligonucleotide
aucgacuccauggcccagc

SEQ ID NO: 2104860 - RNA, 19 nt, Artificial Sequence
  Description of Artificial Sequence: Synthetic oligonucleotide
caauuaaccguaaguccga

SEQ ID NO: 2104861 - RNA, 19 nt, Artificial Sequence
  Description of Artificial Sequence: Synthetic oligonucleotide
ugcaacauacuugcacacu

SEQ ID NO: 2104862 - RNA, 19 nt, Artificial Sequence
  Description of Artificial Sequence: Synthetic oligonucleotide
accgguugcugccaguccu

SEQ ID NO: 2104863 - RNA, 19 nt, Artificial Sequence
  Description of Artificial Sequence: Synthetic oligonucleotide
ggggauguccaucaccacc

SEQ ID NO: 2104864 - RNA, 19 nt, Artificial Sequence
  Description of Artificial Sequence: Synthetic oligonucleotide
cacgugguuggcacagagg

SEQ ID NO: 2104865 - RNA, 19 nt, Artificial Sequence
  Description of Artificial Sequence: Synthetic oligonucleotide
gcacacuucgcauuugcug

SEQ ID NO: 2104866 - RNA, 19 nt, Artificial Sequence
  Description of Artificial Sequence: Synthetic oligonucleotide
cuugaggucggcuaccucu

SEQ ID NO: 2104867 - RNA, 19 nt, Artificial Sequence
  Description of Artificial Sequence: Synthetic oligonucleotide
guggacuagguugugcagc

SEQ ID NO: 2104868 - RNA, 19 nt, Artificial Sequence
  Description of Artificial Sequence: Synthetic oligonucleotide
cuaaguugggcucacaguu

SEQ ID NO: 2104869 - RNA, 19 nt, Artificial Sequence
  Description of Artificial Sequence: Synthetic oligonucleotide
gagaccggaagcugaacaa

SEQ ID NO: 2104870 - RNA, 19 nt, Artificial Sequence
  Description of Artificial Sequence: Synthetic oligonucleotide
acuugcacacuucgcauuu

SEQ ID NO: 2104871 - RNA, 19 nt, Artificial Sequence
  Description of Artificial Sequence: Synthetic oligonucleotide
ugucgaucacuuccuuggu

SEQ ID NO: 2104872 - RNA, 19 nt, Artificial Sequence
  Description of Artificial Sequence: Synthetic oligonucleotide
ggaucuugauucaaggaca

SEQ ID NO: 2104873 - RNA, 19 nt, Artificial Sequence
  Description of Artificial Sequence: Synthetic oligonucleotide
uacuugacuccggaggccu

SEQ ID NO: 2104874 - RNA, 19 nt, Artificial Sequence
  Description of Artificial Sequence: Synthetic oligonucleotide
ggcgcgagcucagacaucg

SEQ ID NO: 2104875 - RNA, 19 nt, Artificial Sequence
  Description of Artificial Sequence: Synthetic oligonucleotide
gucggcuaccucugcagag

SEQ ID NO: 2104876 - RNA, 19 nt, Artificial Sequence
  Description of Artificial Sequence: Synthetic oligonucleotide
uucuucccuccuagagagg

SEQ ID NO: 2104877 - RNA, 19 nt, Artificial Sequence
  Description of Artificial Sequence: Synthetic oligonucleotide
uagguugugcagcgucuca

SEQ ID NO: 2104878 - RNA, 19 nt, Artificial Sequence
  Description of Artificial Sequence: Synthetic oligonucleotide
cauuugcugggcaaucgca

SEQ ID NO: 2104879 - RNA, 19 nt, Artificial Sequence
  Description of Artificial Sequence: Synthetic oligonucleotide
gaccccuuuguggacuagg

SEQ ID NO: 2104880 - RNA, 19 nt, Artificial Sequence
  Description of Artificial Sequence: Synthetic oligonucleotide
acaucgacuccauggccca

SEQ ID NO: 2104881 - RNA, 19 nt, Artificial Sequence
  Description of Artificial Sequence: Synthetic oligonucleotide
uuuugcacacccuccucuu

SEQ ID NO: 2104882 - RNA, 19 nt, Artificial Sequence
  Description of Artificial Sequence: Synthetic oligonucleotide
agggaagcaggaggcagcg

SEQ ID NO: 2104883 - RNA, 19 nt, Artificial Sequence
  Description of Artificial Sequence: Synthetic oligonucleotide
caaaggucucugacaugcc

SEQ ID NO: 2104884 - RNA, 19 nt, Artificial Sequence
  Description of Artificial Sequence: Synthetic oligonucleotide
cacuuccuuggucuucccg

SEQ ID NO: 2104885 - RNA, 19 nt, Artificial Sequence
  Description of Artificial Sequence: Synthetic oligonucleotide
ugacuucaauuaaccguaa

SEQ ID NO: 2104886 - RNA, 19 nt, Artificial Sequence
  Description of Artificial Sequence: Synthetic oligonucleotide
uaggagaccggaagcugaa

SEQ ID NO: 2104887 - RNA, 19 nt, Artificial Sequence
  Description of Artificial Sequence: Synthetic oligonucleotide
ugccagaccaccgcucugc

SEQ ID NO: 2104888 - RNA, 19 nt, Artificial Sequence
  Description of Artificial Sequence: Synthetic oligonucleotide
gguauccuugcccuucagc

SEQ ID NO: 2104889 - RNA, 19 nt, Artificial Sequence
  Description of Artificial Sequence: Synthetic oligonucleotide
guaaguccgacuuggugua

SEQ ID NO: 2104890 - RNA, 19 nt, Artificial Sequence
  Description of Artificial Sequence: Synthetic oligonucleotide
cuccuagagaggcaauguc

SEQ ID NO: 2104891 - RNA, 19 nt, Artificial Sequence
  Description of Artificial Sequence: Synthetic oligonucleotide
gacucgccagcuccuuccg

SEQ ID NO: 2104892 - RNA, 19 nt, Artificial Sequence
  Description of Artificial Sequence: Synthetic oligonucleotide
acucgccagcuccuuccgc

SEQ ID NO: 2104893 - RNA, 19 nt, Artificial Sequence
  Description of Artificial Sequence: Synthetic oligonucleotide
uaagcuccacugcaacaua

SEQ ID NO: 2104894 - RNA, 19 nt, Artificial Sequence
  Description of Artificial Sequence: Synthetic oligonucleotide
uacuugcacacuucgcauu

SEQ ID NO: 2104895 - RNA, 19 nt, Artificial Sequence
  Description of Artificial Sequence: Synthetic oligonucleotide
ugacaugcccuuggcaaac

SEQ ID NO: 2104896 - RNA, 19 nt, Artificial Sequence
  Description of Artificial Sequence: Synthetic oligonucleotide
agucgguguccuccgcccg

SEQ ID NO: 2104897 - RNA, 19 nt, Artificial Sequence
  Description of Artificial Sequence: Synthetic oligonucleotide
agcugacuuaagcuccacu

SEQ ID NO: 2104898 - RNA, 19 nt, Artificial Sequence
  Description of Artificial Sequence: Synthetic oligonucleotide
gguguacuugacuccggag

SEQ ID NO: 2104899 - RNA, 19 nt, Artificial Sequence
  Description of Artificial Sequence: Synthetic oligonucleotide
agcacgucacacugcuucu

SEQ ID NO: 2104900 - RNA, 19 nt, Artificial Sequence
  Description of Artificial Sequence: Synthetic oligonucleotide
aucaccucuucaaacuccu

SEQ ID NO: 2104901 - RNA, 19 nt, Artificial Sequence
  Description of Artificial Sequence: Synthetic oligonucleotide
cagucgguguccuccgccc

SEQ ID NO: 2104902 - RNA, 19 nt, Artificial Sequence
  Description of Artificial Sequence: Synthetic oligonucleotide
gaccggaagcugaacaaca

SEQ ID NO: 2104903 - RNA, 19 nt, Artificial Sequence
  Description of Artificial Sequence: Synthetic oligonucleotide
cacgucacacugcuucuug

SEQ ID NO: 2104904 - RNA, 19 nt, Artificial Sequence
  Description of Artificial Sequence: Synthetic oligonucleotide
agguaggagaccggaagcu

SEQ ID NO: 2104905 - RNA, 19 nt, Artificial Sequence
  Description of Artificial Sequence: Synthetic oligonucleotide
gagcucagacaucgacucc

SEQ ID NO: 2104906 - RNA, 19 nt, Artificial Sequence
  Description of Artificial Sequence: Synthetic oligonucleotide
gucgggcccagccucgggg

SEQ ID NO: 2104907 - RNA, 19 nt, Artificial Sequence
  Description of Artificial Sequence: Synthetic oligonucleotide
ucagcacgugguuggcaca

SEQ ID NO: 2104908 - RNA, 19 nt, Artificial Sequence
  Description of Artificial Sequence: Synthetic oligonucleotide
uucgcauuugcugggcaau

SEQ ID NO: 2104909 - RNA, 19 nt, Artificial Sequence
  Description of Artificial Sequence: Synthetic oligonucleotide
cacccagucgguguccucc

SEQ ID NO: 2104910 - RNA, 19 nt, Artificial Sequence
  Description of Artificial Sequence: Synthetic oligonucleotide
acuccggaggccuuccgau

SEQ ID NO: 2104911 - RNA, 19 nt, Artificial Sequence
  Description of Artificial Sequence: Synthetic oligonucleotide
uugacccuaccacgcuucu

SEQ ID NO: 2104912 - RNA, 19 nt, Artificial Sequence
  Description of Artificial Sequence: Synthetic oligonucleotide
ggagaccggaagcugaaca

SEQ ID NO: 2104913 - RNA, 19 nt, Artificial Sequence
  Description of Artificial Sequence: Synthetic oligonucleotide
cucaaaggucucugacaug

SEQ ID NO: 2104914 - RNA, 19 nt, Artificial Sequence
  Description of Artificial Sequence: Synthetic oligonucleotide
ugacuccggaggccuuccg

SEQ ID NO: 2104915 - RNA, 19 nt, Artificial Sequence
  Description of Artificial Sequence: Synthetic oligonucleotide
ugaggucggcuaccucugc

SEQ ID NO: 2104916 - RNA, 19 nt, Artificial Sequence
  Description of Artificial Sequence: Synthetic oligonucleotide
caaggacacuaaguugggc

SEQ ID NO: 2104917 - RNA, 19 nt, Artificial Sequence
  Description of Artificial Sequence: Synthetic oligonucleotide
accggaagcugaacaacag

SEQ ID NO: 2104918 - RNA, 19 nt, Artificial Sequence
  Description of Artificial Sequence: Synthetic oligonucleotide
ccuaccacgcuucuucuug

SEQ ID NO: 2104919 - RNA, 19 nt, Artificial Sequence
  Description of Artificial Sequence: Synthetic oligonucleotide
gucccaugcucuugaguug

SEQ ID NO: 2104920 - RNA, 19 nt, Artificial Sequence
  Description of Artificial Sequence: Synthetic oligonucleotide
ugguauccuugcccuucag

SEQ ID NO: 2104921 - RNA, 19 nt, Artificial Sequence
  Description of Artificial Sequence: Synthetic oligonucleotide
acccagucgguguccuccg

SEQ ID NO: 2104922 - RNA, 19 nt, Artificial Sequence
  Description of Artificial Sequence: Synthetic oligonucleotide
acuagguugugcagcgucu

SEQ ID NO: 2104923 - RNA, 19 nt, Artificial Sequence
  Description of Artificial Sequence: Synthetic oligonucleotide
agcgucucaaaggucucug

SEQ ID NO: 2104924 - RNA, 19 nt, Artificial Sequence
  Description of Artificial Sequence: Synthetic oligonucleotide
gucgaucacuuccuugguc

SEQ ID NO: 2104925 - RNA, 19 nt, Artificial Sequence
  Description of Artificial Sequence: Synthetic oligonucleotide
gucgguguccuccgcccgg

SEQ ID NO: 2104926 - RNA, 19 nt, Artificial Sequence
  Description of Artificial Sequence: Synthetic oligonucleotide
gugguuccuguaccagucc

SEQ ID NO: 2104927 - RNA, 19 nt, Artificial Sequence
  Description of Artificial Sequence: Synthetic oligonucleotide
ggcgcuuccuccagcagcg

SEQ ID NO: 2104928 - RNA, 19 nt, Artificial Sequence
  Description of Artificial Sequence: Synthetic oligonucleotide
gaggucucauuccacaguu

SEQ ID NO: 2104929 - RNA, 19 nt, Artificial Sequence
  Description of Artificial Sequence: Synthetic oligonucleotide
augcccuuggcaaaccggu

SEQ ID NO: 2104930 - RNA, 19 nt, Artificial Sequence
  Description of Artificial Sequence: Synthetic oligonucleotide
acaguucaucaggagggcu

SEQ ID NO: 2104931 - RNA, 19 nt, Artificial Sequence
  Description of Artificial Sequence: Synthetic oligonucleotide
gacacuaaguugggcucac

SEQ ID NO: 2104932 - RNA, 19 nt, Artificial Sequence
  Description of Artificial Sequence: Synthetic oligonucleotide
cauaggggauguccaucac

SEQ ID NO: 2104933 - RNA, 19 nt, Artificial Sequence
  Description of Artificial Sequence: Synthetic oligonucleotide
aacugguauccuugcccuu

SEQ ID NO: 2104934 - RNA, 19 nt, Artificial Sequence
  Description of Artificial Sequence: Synthetic oligonucleotide
cuguaccaguccucaauca

SEQ ID NO: 2104935 - RNA, 19 nt, Artificial Sequence
  Description of Artificial Sequence: Synthetic oligonucleotide
ucuugaggucggcuaccuc

SEQ ID NO: 2104936 - RNA, 19 nt, Artificial Sequence
  Description of Artificial Sequence: Synthetic oligonucleotide
cuucccgguuucuucaaaa

SEQ ID NO: 2104937 - RNA, 19 nt, Artificial Sequence
  Description of Artificial Sequence: Synthetic oligonucleotide
cuuuugcacacccuccucu

SEQ ID NO: 2104938 - RNA, 19 nt, Artificial Sequence
  Description of Artificial Sequence: Synthetic oligonucleotide
aggaauucagucaggucuu

SEQ ID NO: 2104939 - RNA, 19 nt, Artificial Sequence
  Description of Artificial Sequence: Synthetic oligonucleotide
ggaggccuuuugcacaccc

SEQ ID NO: 2104940 - RNA, 19 nt, Artificial Sequence
  Description of Artificial Sequence: Synthetic oligonucleotide
uggucucagugacuucaau

SEQ ID NO: 2104941 - RNA, 19 nt, Artificial Sequence
  Description of Artificial Sequence: Synthetic oligonucleotide
aggccuuccgauccagaau

SEQ ID NO: 2104942 - RNA, 19 nt, Artificial Sequence
  Description of Artificial Sequence: Synthetic oligonucleotide
gaggucggcuaccucugca

SEQ ID NO: 2104943 - RNA, 19 nt, Artificial Sequence
  Description of Artificial Sequence: Synthetic oligonucleotide
ugguuggcacagaggaauu

SEQ ID NO: 2104944 - RNA, 19 nt, Artificial Sequence
  Description of Artificial Sequence: Synthetic oligonucleotide
gggcaaucgcacccagucg

SEQ ID NO: 2104945 - RNA, 19 nt, Artificial Sequence
  Description of Artificial Sequence: Synthetic oligonucleotide
ugcuggagcccuugacccu

SEQ ID NO: 2104946 - RNA, 19 nt, Artificial Sequence
  Description of Artificial Sequence: Synthetic oligonucleotide
agaccaccgcucugccagg

SEQ ID NO: 2104947 - RNA, 19 nt, Artificial Sequence
  Description of Artificial Sequence: Synthetic oligonucleotide
gacuccggaggccuuccga

SEQ ID NO: 2104948 - RNA, 19 nt, Artificial Sequence
  Description of Artificial Sequence: Synthetic oligonucleotide
ccgguuucuucaaaagcug

SEQ ID NO: 2104949 - RNA, 19 nt, Artificial Sequence
  Description of Artificial Sequence: Synthetic oligonucleotide
cuagguugugcagcgucuc

SEQ ID NO: 2104950 - RNA, 19 nt, Artificial Sequence
  Description of Artificial Sequence: Synthetic oligonucleotide
caacugguauccuugcccu

SEQ ID NO: 2104951 - RNA, 19 nt, Artificial Sequence
  Description of Artificial Sequence: Synthetic oligonucleotide
aggagaccggaagcugaac

SEQ ID NO: 2104952 - RNA, 19 nt, Artificial Sequence
  Description of Artificial Sequence: Synthetic oligonucleotide
gagcgucccaugcucuuga

SEQ ID NO: 2104953 - RNA, 19 nt, Artificial Sequence
  Description of Artificial Sequence: Synthetic oligonucleotide
uugacuccggaggccuucc

SEQ ID NO: 2104954 - RNA, 19 nt, Artificial Sequence
  Description of Artificial Sequence: Synthetic oligonucleotide
ggucuucccgguuucuuca

SEQ ID NO: 2104955 - RNA, 19 nt, Artificial Sequence
  Description of Artificial Sequence: Synthetic oligonucleotide
cucgcuggagcgucccaug

SEQ ID NO: 2104956 - RNA, 19 nt, Artificial Sequence
  Description of Artificial Sequence: Synthetic oligonucleotide
accacgcuucuucuuggau

SEQ ID NO: 2104957 - RNA, 19 nt, Artificial Sequence
  Description of Artificial Sequence: Synthetic oligonucleotide
cucuugcaaauggucucag

SEQ ID NO: 2104958 - RNA, 19 nt, Artificial Sequence
  Description of Artificial Sequence: Synthetic oligonucleotide
gacaugcccuuggcaaacc

SEQ ID NO: 2104959 - RNA, 19 nt, Artificial Sequence
  Description of Artificial Sequence: Synthetic oligonucleotide
gguaggagaccggaagcug

SEQ ID NO: 2104960 - RNA, 19 nt, Artificial Sequence
  Description of Artificial Sequence: Synthetic oligonucleotide
cugacaugcccuuggcaaa

SEQ ID NO: 2104961 - RNA, 19 nt, Artificial Sequence
  Description of Artificial Sequence: Synthetic oligonucleotide
ggcaacugguauccuugcc

SEQ ID NO: 2104962 - RNA, 19 nt, Artificial Sequence
  Description of Artificial Sequence: Synthetic oligonucleotide
gaagccucuugcaaauggu

SEQ ID NO: 2104963 - RNA, 19 nt, Artificial Sequence
  Description of Artificial Sequence: Synthetic oligonucleotide
ucgguguccuccgcccggg

SEQ ID NO: 2104964 - RNA, 19 nt, Artificial Sequence
  Description of Artificial Sequence: Synthetic oligonucleotide
cauagccugugucgaucac

SEQ ID NO: 2104965 - RNA, 19 nt, Artificial Sequence
  Description of Artificial Sequence: Synthetic oligonucleotide
cagcacgugguuggcacag

SEQ ID NO: 2104966 - RNA, 19 nt, Artificial Sequence
  Description of Artificial Sequence: Synthetic oligonucleotide
ggugguuccuguaccaguc

SEQ ID NO: 2104967 - RNA, 19 nt, Artificial Sequence
  Description of Artificial Sequence: Synthetic oligonucleotide
acccuaccacgcuucuucu

SEQ ID NO: 2104968 - RNA, 19 nt, Artificial Sequence
  Description of Artificial Sequence: Synthetic oligonucleotide
cucagacaucgacuccaug

SEQ ID NO: 2104969 - RNA, 19 nt, Artificial Sequence
  Description of Artificial Sequence: Synthetic oligonucleotide
gugguuggcacagaggaau

SEQ ID NO: 2104970 - RNA, 19 nt, Artificial Sequence
  Description of Artificial Sequence: Synthetic oligonucleotide
gcacgugguuggcacagag

SEQ ID NO: 2104971 - RNA, 19 nt, Artificial Sequence
  Description of Artificial Sequence: Synthetic oligonucleotide
cagagcggagcggacccgg

SEQ ID NO: 2104972 - RNA, 19 nt, Artificial Sequence
  Description of Artificial Sequence: Synthetic oligonucleotide
gagcggagcggacccggug

SEQ ID NO: 2104973 - RNA, 19 nt, Artificial Sequence
  Description of Artificial Sequence: Synthetic oligonucleotide
aguccgacuugguguacuu

SEQ ID NO: 2104974 - RNA, 19 nt, Artificial Sequence
  Description of Artificial Sequence: Synthetic oligonucleotide
ccggaagcugaacaacagc

SEQ ID NO: 2104975 - RNA, 19 nt, Artificial Sequence
  Description of Artificial Sequence: Synthetic oligonucleotide
agcgucccaugcucuugag

SEQ ID NO: 2104976 - RNA, 19 nt, Artificial Sequence
  Description of Artificial Sequence: Synthetic oligonucleotide
ucucgcuggagcgucccau

SEQ ID NO: 2104977 - RNA, 19 nt, Artificial Sequence
  Description of Artificial Sequence: Synthetic oligonucleotide
cucggggcgggcaggagca

SEQ ID NO: 2104978 - RNA, 19 nt, Artificial Sequence
  Description of Artificial Sequence: Synthetic oligonucleotide
cucugacaugcccuuggca

SEQ ID NO: 2104979 - RNA, 19 nt, Artificial Sequence
  Description of Artificial Sequence: Synthetic oligonucleotide
gcgggcaggagcagcaacg

SEQ ID NO: 2104980 - RNA, 19 nt, Artificial Sequence
  Description of Artificial Sequence: Synthetic oligonucleotide
uccgcugcuugcugccgcu

SEQ ID NO: 2104981 - RNA, 19 nt, Artificial Sequence
  Description of Artificial Sequence: Synthetic oligonucleotide
ucgcauuugcugggcaauc

SEQ ID NO: 2104982 - RNA, 19 nt, Artificial Sequence
  Description of Artificial Sequence: Synthetic oligonucleotide
cacuucgcauuugcugggc

SEQ ID NO: 2104983 - RNA, 19 nt, Artificial Sequence
  Description of Artificial Sequence: Synthetic oligonucleotide
gcuggagcgucccaugcuc

SEQ ID NO: 2104984 - RNA, 19 nt, Artificial Sequence
  Description of Artificial Sequence: Synthetic oligonucleotide
cuuuguggacuagguugug

SEQ ID NO: 2104985 - RNA, 19 nt, Artificial Sequence
  Description of Artificial Sequence: Synthetic oligonucleotide
agcuccacugcaacauacu

SEQ ID NO: 2104986 - RNA, 19 nt, Artificial Sequence
  Description of Artificial Sequence: Synthetic oligonucleotide
ugccauagccugugucgau

SEQ ID NO: 2104987 - RNA, 19 nt, Artificial Sequence
  Description of Artificial Sequence: Synthetic oligonucleotide
accccuuuguggacuaggu

SEQ ID NO: 2104988 - RNA, 19 nt, Artificial Sequence
  Description of Artificial Sequence: Synthetic oligonucleotide
cacgcuucuucuuggauuu

SEQ ID NO: 2104989 - RNA, 19 nt, Artificial Sequence
  Description of Artificial Sequence: Synthetic oligonucleotide
caaucgcacccagucggug

SEQ ID NO: 2104990 - RNA, 19 nt, Artificial Sequence
  Description of Artificial Sequence: Synthetic oligonucleotide
cccgguuucuucaaaagcu

SEQ ID NO: 2104991 - RNA, 19 nt, Artificial Sequence
  Description of Artificial Sequence: Synthetic oligonucleotide
caccgcucugccaggcaac

SEQ ID NO: 2104992 - RNA, 19 nt, Artificial Sequence
  Description of Artificial Sequence: Synthetic oligonucleotide
cguaaguccgacuuggugu

SEQ ID NO: 2104993 - RNA, 19 nt, Artificial Sequence
  Description of Artificial Sequence: Synthetic oligonucleotide
gcaacauacuugcacacuu

SEQ ID NO: 2104994 - RNA, 19 nt, Artificial Sequence
  Description of Artificial Sequence: Synthetic oligonucleotide
uaaguccgacuugguguac

SEQ ID NO: 2104995 - RNA, 19 nt, Artificial Sequence
  Description of Artificial Sequence: Synthetic oligonucleotide
gguggcgcuuccuccagca

SEQ ID NO: 2104996 - RNA, 19 nt, Artificial Sequence
  Description of Artificial Sequence: Synthetic oligonucleotide
ccguaaguccgacuuggug

SEQ ID NO: 2104997 - RNA, 19 nt, Artificial Sequence
  Description of Artificial Sequence: Synthetic oligonucleotide
guucauaggggauguccau

SEQ ID NO: 2104998 - RNA, 19 nt, Artificial Sequence
  Description of Artificial Sequence: Synthetic oligonucleotide
cuugccagaccaccgcucu

SEQ ID NO: 2104999 - RNA, 19 nt, Artificial Sequence
  Description of Artificial Sequence: Synthetic oligonucleotide
gcaaaccgguugcugccag

SEQ ID NO: 2105000 - RNA, 19 nt, Artificial Sequence
  Description of Artificial Sequence: Synthetic oligonucleotide
uggagcgucccaugcucuu

SEQ ID NO: 2105001 - RNA, 19 nt, Artificial Sequence
  Description of Artificial Sequence: Synthetic oligonucleotide
ccacaguucauaggggaug

SEQ ID NO: 2105002 - RNA, 19 nt, Artificial Sequence
  Description of Artificial Sequence: Synthetic oligonucleotide
cuccggaggccuuccgauc

SEQ ID NO: 2105003 - RNA, 19 nt, Artificial Sequence
  Description of Artificial Sequence: Synthetic oligonucleotide
cuuggauuucuucccuccu

SEQ ID NO: 2105004 - RNA, 19 nt, Artificial Sequence
  Description of Artificial Sequence: Synthetic oligonucleotide
ggucucagugacuucaauu

SEQ ID NO: 2105005 - RNA, 19 nt, Artificial Sequence
  Description of Artificial Sequence: Synthetic oligonucleotide
cagacucgccagcuccuuc

SEQ ID NO: 2105006 - RNA, 19 nt, Artificial Sequence
  Description of Artificial Sequence: Synthetic oligonucleotide
gcuguugcucaagggcagg

SEQ ID NO: 2105007 - RNA, 19 nt, Artificial Sequence
  Description of Artificial Sequence: Synthetic oligonucleotide
cagaggaauucagucaggu

SEQ ID NO: 2105008 - RNA, 19 nt, Artificial Sequence
  Description of Artificial Sequence: Synthetic oligonucleotide
agccaagguaggagaccgg

SEQ ID NO: 2105009 - RNA, 19 nt, Artificial Sequence
  Description of Artificial Sequence: Synthetic oligonucleotide
caggaggcagcggggcgcg

SEQ ID NO: 2105010 - RNA, 19 nt, Artificial Sequence
  Description of Artificial Sequence: Synthetic oligonucleotide
ugaccccuuuguggacuag

SEQ ID NO: 2105011 - RNA, 19 nt, Artificial Sequence
  Description of Artificial Sequence: Synthetic oligonucleotide
ccaccuugaccccuuugug

SEQ ID NO: 2105012 - RNA, 19 nt, Artificial Sequence
  Description of Artificial Sequence: Synthetic oligonucleotide
gguugugcagcgucucaaa

SEQ ID NO: 2105013 - RNA, 19 nt, Artificial Sequence
  Description of Artificial Sequence: Synthetic oligonucleotide
ccagucgguguccuccgcc

SEQ ID NO: 2105014 - RNA, 19 nt, Artificial Sequence
  Description of Artificial Sequence: Synthetic oligonucleotide
ccuuccgauccagaaugcc

SEQ ID NO: 2105015 - RNA, 19 nt, Artificial Sequence
  Description of Artificial Sequence: Synthetic oligonucleotide
ggacacuaaguugggcuca

SEQ ID NO: 2105016 - RNA, 19 nt, Artificial Sequence
  Description of Artificial Sequence: Synthetic oligonucleotide
ucccuccuagagaggcaau

SEQ ID NO: 2105017 - RNA, 19 nt, Artificial Sequence
  Description of Artificial Sequence: Synthetic oligonucleotide
cccuucuugccagaccacc

SEQ ID NO: 2105018 - RNA, 19 nt, Artificial Sequence
  Description of Artificial Sequence: Synthetic oligonucleotide
aucucgcuggagcguccca

SEQ ID NO: 2105019 - RNA, 19 nt, Artificial Sequence
  Description of Artificial Sequence: Synthetic oligonucleotide
ccgacuugguguacuugac

SEQ ID NO: 2105020 - RNA, 19 nt, Artificial Sequence
  Description of Artificial Sequence: Synthetic oligonucleotide
ggagcggacccgguggcgc

SEQ ID NO: 2105021 - RNA, 19 nt, Artificial Sequence
  Description of Artificial Sequence: Synthetic oligonucleotide
gccaagguaggagaccgga

SEQ ID NO: 2105022 - RNA, 19 nt, Artificial Sequence
  Description of Artificial Sequence: Synthetic oligonucleotide
agccaucucgcuggagcgu

SEQ ID NO: 2105023 - RNA, 19 nt, Artificial Sequence
  Description of Artificial Sequence: Synthetic oligonucleotide
cuggagcccuugacccuac

SEQ ID NO: 2105024 - RNA, 19 nt, Artificial Sequence
  Description of Artificial Sequence: Synthetic oligonucleotide
ggucggcuaccucugcaga

SEQ ID NO: 2105025 - RNA, 19 nt, Artificial Sequence
  Description of Artificial Sequence: Synthetic oligonucleotide
gcacgggucgggcccagcc

SEQ ID NO: 2105026 - RNA, 19 nt, Artificial Sequence
  Description of Artificial Sequence: Synthetic oligonucleotide
gguuccuguaccaguccuc

SEQ ID NO: 2105027 - RNA, 19 nt, Artificial Sequence
  Description of Artificial Sequence: Synthetic oligonucleotide
cuugaccccuuuguggacu

SEQ ID NO: 2105028 - RNA, 19 nt, Artificial Sequence
  Description of Artificial Sequence: Synthetic oligonucleotide
gcugggcaaucgcacccag

SEQ ID NO: 2105029 - RNA, 19 nt, Artificial Sequence
  Description of Artificial Sequence: Synthetic oligonucleotide
ucgcacccagucggugucc

SEQ ID NO: 2105030 - RNA, 19 nt, Artificial Sequence
  Description of Artificial Sequence: Synthetic oligonucleotide
cgcauuugcugggcaaucg

SEQ ID NO: 2105031 - RNA, 19 nt, Artificial Sequence
  Description of Artificial Sequence: Synthetic oligonucleotide
acacuaaguugggcucaca

SEQ ID NO: 2105032 - RNA, 19 nt, Artificial Sequence
  Description of Artificial Sequence: Synthetic oligonucleotide
ggacccagagcggagcgga

SEQ ID NO: 2105033 - RNA, 19 nt, Artificial Sequence
  Description of Artificial Sequence: Synthetic oligonucleotide
ggagcgucccaugcucuug

SEQ ID NO: 2105034 - RNA, 19 nt, Artificial Sequence
  Description of Artificial Sequence: Synthetic oligonucleotide
ccauagccugugucgauca

SEQ ID NO: 2105035 - RNA, 19 nt, Artificial Sequence
  Description of Artificial Sequence: Synthetic oligonucleotide
cuucagcacgugguuggca

SEQ ID NO: 2105036 - RNA, 19 nt, Artificial Sequence
  Description of Artificial Sequence: Synthetic oligonucleotide
gucuucccgguuucuucaa

SEQ ID NO: 2105037 - RNA, 19 nt, Artificial Sequence
  Description of Artificial Sequence: Synthetic oligonucleotide
caucgacuccauggcccag

SEQ ID NO: 2105038 - RNA, 19 nt, Artificial Sequence
  Description of Artificial Sequence: Synthetic oligonucleotide
accguaaguccgacuuggu

SEQ ID NO: 2105039 - RNA, 19 nt, Artificial Sequence
  Description of Artificial Sequence: Synthetic oligonucleotide
ucaccaccuugaccccuuu

SEQ ID NO: 2105040 - RNA, 19 nt, Artificial Sequence
  Description of Artificial Sequence: Synthetic oligonucleotide
ccagccggacccagagcgg

SEQ ID NO: 2105041 - RNA, 19 nt, Artificial Sequence
  Description of Artificial Sequence: Synthetic oligonucleotide
ccuggugguuccuguacca

SEQ ID NO: 2105042 - RNA, 19 nt, Artificial Sequence
  Description of Artificial Sequence: Synthetic oligonucleotide
gccauagccugugucgauc

SEQ ID NO: 2105043 - RNA, 19 nt, Artificial Sequence
  Description of Artificial Sequence: Synthetic oligonucleotide
acuccauggcccagccgga

SEQ ID NO: 2105044 - RNA, 19 nt, Artificial Sequence
  Description of Artificial Sequence: Synthetic oligonucleotide
ugacccuaccacgcuucuu

SEQ ID NO: 2105045 - RNA, 19 nt, Artificial Sequence
  Description of Artificial Sequence: Synthetic oligonucleotide
cgcgagcucagacaucgac

SEQ ID NO: 2105046 - RNA, 19 nt, Artificial Sequence
  Description of Artificial Sequence: Synthetic oligonucleotide
ggaauucagucaggucuuc

SEQ ID NO: 2105047 - RNA, 19 nt, Artificial Sequence
  Description of Artificial Sequence: Synthetic oligonucleotide
cccuccuagagaggcaaug

SEQ ID NO: 2105048 - RNA, 19 nt, Artificial Sequence
  Description of Artificial Sequence: Synthetic oligonucleotide
ccuugaccccuuuguggac

SEQ ID NO: 2105049 - RNA, 19 nt, Artificial Sequence
  Description of Artificial Sequence: Synthetic oligonucleotide
ggcgggcaggagcagcaac

SEQ ID NO: 2105050 - RNA, 19 nt, Artificial Sequence
  Description of Artificial Sequence: Synthetic oligonucleotide
gccagaccaccgcucugcc

SEQ ID NO: 2105051 - RNA, 19 nt, Artificial Sequence
  Description of Artificial Sequence: Synthetic oligonucleotide
gcgucucaaaggucucuga

SEQ ID NO: 2105052 - RNA, 19 nt, Artificial Sequence
  Description of Artificial Sequence: Synthetic oligonucleotide
gggcaggagcagcaacgac

SEQ ID NO: 2105053 - RNA, 19 nt, Artificial Sequence
  Description of Artificial Sequence: Synthetic oligonucleotide
gacccagagcggagcggac

SEQ ID NO: 2105054 - RNA, 19 nt, Artificial Sequence
  Description of Artificial Sequence: Synthetic oligonucleotide
agcacgugguuggcacaga

SEQ ID NO: 2105055 - RNA, 19 nt, Artificial Sequence
  Description of Artificial Sequence: Synthetic oligonucleotide
cuccgcccgggcacggguc

SEQ ID NO: 2105056 - RNA, 19 nt, Artificial Sequence
  Description of Artificial Sequence: Synthetic oligonucleotide
gaggccuuuugcacacccu

SEQ ID NO: 2105057 - RNA, 19 nt, Artificial Sequence
  Description of Artificial Sequence: Synthetic oligonucleotide
ccucuugcaaauggucuca

SEQ ID NO: 2105058 - RNA, 19 nt, Artificial Sequence
  Description of Artificial Sequence: Synthetic oligonucleotide
cagccggacccagagcgga

SEQ ID NO: 2105059 - RNA, 19 nt, Artificial Sequence
  Description of Artificial Sequence: Synthetic oligonucleotide
cuggagcgucccaugcucu

SEQ ID NO: 2105060 - RNA, 19 nt, Artificial Sequence
  Description of Artificial Sequence: Synthetic oligonucleotide
ccugugucgaucacuuccu

SEQ ID NO: 2105061 - RNA, 19 nt, Artificial Sequence
  Description of Artificial Sequence: Synthetic oligonucleotide
caacagccaucucgcugga

SEQ ID NO: 2105062 - RNA, 19 nt, Artificial Sequence
  Description of Artificial Sequence: Synthetic oligonucleotide
cagcggggcgcgagcucag

SEQ ID NO: 2105063 - RNA, 19 nt, Artificial Sequence
  Description of Artificial Sequence: Synthetic oligonucleotide
ggcaaaccgguugcugcca

SEQ ID NO: 2105064 - RNA, 19 nt, Artificial Sequence
  Description of Artificial Sequence: Synthetic oligonucleotide
ggggcgcgagcucagacau

SEQ ID NO: 2105065 - RNA, 19 nt, Artificial Sequence
  Description of Artificial Sequence: Synthetic oligonucleotide
gugcagcgucucaaagguc

SEQ ID NO: 2105066 - RNA, 19 nt, Artificial Sequence
  Description of Artificial Sequence: Synthetic oligonucleotide
cucugccaggcaacuggua

SEQ ID NO: 2105067 - RNA, 19 nt, Artificial Sequence
  Description of Artificial Sequence: Synthetic oligonucleotide
gcugccgcugcuggagccc

SEQ ID NO: 2105068 - RNA, 19 nt, Artificial Sequence
  Description of Artificial Sequence: Synthetic oligonucleotide
ccaagguaggagaccggaa

SEQ ID NO: 2105069 - RNA, 19 nt, Artificial Sequence
  Description of Artificial Sequence: Synthetic oligonucleotide
caaaccgguugcugccagu

SEQ ID NO: 2105070 - RNA, 19 nt, Artificial Sequence
  Description of Artificial Sequence: Synthetic oligonucleotide
cgucccaugcucuugaguu

SEQ ID NO: 2105071 - RNA, 19 nt, Artificial Sequence
  Description of Artificial Sequence: Synthetic oligonucleotide
ccagaagccucuugcaaau

SEQ ID NO: 2105072 - RNA, 19 nt, Artificial Sequence
  Description of Artificial Sequence: Synthetic oligonucleotide
gcgagcucagacaucgacu

SEQ ID NO: 2105073 - RNA, 19 nt, Artificial Sequence
  Description of Artificial Sequence: Synthetic oligonucleotide
gcagcggggcgcgagcuca

SEQ ID NO: 2105074 - RNA, 19 nt, Artificial Sequence
  Description of Artificial Sequence: Synthetic oligonucleotide
gagcggacccgguggcgcu

SEQ ID NO: 2105075 - RNA, 19 nt, Artificial Sequence
  Description of Artificial Sequence: Synthetic oligonucleotide
cagcagcgcgcgcggagca

SEQ ID NO: 2105076 - RNA, 19 nt, Artificial Sequence
  Description of Artificial Sequence: Synthetic oligonucleotide
ccgguugcugccaguccuc

SEQ ID NO: 2105077 - RNA, 19 nt, Artificial Sequence
  Description of Artificial Sequence: Synthetic oligonucleotide
cugggcaaucgcacccagu

SEQ ID NO: 2105078 - RNA, 19 nt, Artificial Sequence
  Description of Artificial Sequence: Synthetic oligonucleotide
gcggggcgcgagcucagac

SEQ ID NO: 2105079 - RNA, 19 nt, Artificial Sequence
  Description of Artificial Sequence: Synthetic oligonucleotide
ccccuucuugccagaccac

SEQ ID NO: 2105080 - RNA, 19 nt, Artificial Sequence
  Description of Artificial Sequence: Synthetic oligonucleotide
ccacgcuucuucuuggauu

SEQ ID NO: 2105081 - RNA, 19 nt, Artificial Sequence
  Description of Artificial Sequence: Synthetic oligonucleotide
ccagagcggagcggacccg

SEQ ID NO: 2105082 - RNA, 19 nt, Artificial Sequence
  Description of Artificial Sequence: Synthetic oligonucleotide
cacgggucgggcccagccu

SEQ ID NO: 2105083 - RNA, 19 nt, Artificial Sequence
  Description of Artificial Sequence: Synthetic oligonucleotide
gggucgggcccagccucgg

SEQ ID NO: 2105084 - RNA, 19 nt, Artificial Sequence
  Description of Artificial Sequence: Synthetic oligonucleotide
agcggggcgcgagcucaga

SEQ ID NO: 2105085 - RNA, 19 nt, Artificial Sequence
  Description of Artificial Sequence: Synthetic oligonucleotide
ggcuaccucugcagagguc

SEQ ID NO: 2105086 - RNA, 19 nt, Artificial Sequence
  Description of Artificial Sequence: Synthetic oligonucleotide
ccaccgcucugccaggcaa

SEQ ID NO: 2105087 - RNA, 19 nt, Artificial Sequence
  Description of Artificial Sequence: Synthetic oligonucleotide
ccuccuagagaggcaaugu

SEQ ID NO: 2105088 - RNA, 19 nt, Artificial Sequence
  Description of Artificial Sequence: Synthetic oligonucleotide
ccagaccaccgcucugcca

SEQ ID NO: 2105089 - RNA, 19 nt, Artificial Sequence
  Description of Artificial Sequence: Synthetic oligonucleotide
gggaggccuuuugcacacc

SEQ ID NO: 2105090 - RNA, 19 nt, Artificial Sequence
  Description of Artificial Sequence: Synthetic oligonucleotide
gcgucccaugcucuugagu

SEQ ID NO: 2105091 - RNA, 19 nt, Artificial Sequence
  Description of Artificial Sequence: Synthetic oligonucleotide
cugugucgaucacuuccuu

SEQ ID NO: 2105092 - RNA, 19 nt, Artificial Sequence
  Description of Artificial Sequence: Synthetic oligonucleotide
gcaaucgcacccagucggu

SEQ ID NO: 2105093 - RNA, 19 nt, Artificial Sequence
  Description of Artificial Sequence: Synthetic oligonucleotide
ccaggcaacugguauccuu

SEQ ID NO: 2105094 - RNA, 19 nt, Artificial Sequence
  Description of Artificial Sequence: Synthetic oligonucleotide
agcggacccgguggcgcuu

SEQ ID NO: 2105095 - RNA, 19 nt, Artificial Sequence
  Description of Artificial Sequence: Synthetic oligonucleotide
ccuccuggugguuccugua

SEQ ID NO: 2105096 - RNA, 19 nt, Artificial Sequence
  Description of Artificial Sequence: Synthetic oligonucleotide
cggacccagagcggagcgg

SEQ ID NO: 2105097 - RNA, 19 nt, Artificial Sequence
  Description of Artificial Sequence: Synthetic oligonucleotide
cggggcgcgagcucagaca

SEQ ID NO: 2105098 - RNA, 19 nt, Artificial Sequence
  Description of Artificial Sequence: Synthetic oligonucleotide
cuccagcagcgcgcgcgga

SEQ ID NO: 2105099 - RNA, 19 nt, Artificial Sequence
  Description of Artificial Sequence: Synthetic oligonucleotide
cgguggcgcuuccuccagc

SEQ ID NO: 2105100 - RNA, 19 nt, Artificial Sequence
  Description of Artificial Sequence: Synthetic oligonucleotide
ccuugacccuaccacgcuu

SEQ ID NO: 2105101 - RNA, 19 nt, Artificial Sequence
  Description of Artificial Sequence: Synthetic oligonucleotide
ccggaggccuuccgaucca

SEQ ID NO: 2105102 - RNA, 19 nt, Artificial Sequence
  Description of Artificial Sequence: Synthetic oligonucleotide
ggcacgggucgggcccagc

SEQ ID NO: 2105103 - RNA, 19 nt, Artificial Sequence
  Description of Artificial Sequence: Synthetic oligonucleotide
cccuugacccuaccacgcu

SEQ ID NO: 2105104 - RNA, 19 nt, Artificial Sequence
  Description of Artificial Sequence: Synthetic oligonucleotide
ccgcucugccaggcaacug

SEQ ID NO: 2105105 - RNA, 19 nt, Artificial Sequence
  Description of Artificial Sequence: Synthetic oligonucleotide
gcgcuuccuccagcagcgc

SEQ ID NO: 2105106 - RNA, 19 nt, Artificial Sequence
  Description of Artificial Sequence: Synthetic oligonucleotide
cgggcaggagcagcaacga

SEQ ID NO: 2105107 - RNA, 19 nt, Artificial Sequence
  Description of Artificial Sequence: Synthetic oligonucleotide
gcccgggcacgggucgggc

SEQ ID NO: 2105108 - RNA, 19 nt, Artificial Sequence
  Description of Artificial Sequence: Synthetic oligonucleotide
ccccuuuguggacuagguu

SEQ ID NO: 2105109 - RNA, 19 nt, Artificial Sequence
  Description of Artificial Sequence: Synthetic oligonucleotide
gcggacccgguggcgcuuc

SEQ ID NO: 2105110 - RNA, 19 nt, Artificial Sequence
  Description of Artificial Sequence: Synthetic oligonucleotide
cgguguccuccgcccgggc

SEQ ID NO: 2105111 - RNA, 19 nt, Artificial Sequence
  Description of Artificial Sequence: Synthetic oligonucleotide
gggcgggcaggagcagcaa

SEQ ID NO: 2105112 - RNA, 19 nt, Artificial Sequence
  Description of Artificial Sequence: Synthetic oligonucleotide
cggcuaccucugcagaggu

SEQ ID NO: 2105113 - RNA, 19 nt, Artificial Sequence
  Description of Artificial Sequence: Synthetic oligonucleotide
cggacccgguggcgcuucc

SEQ ID NO: 2105114 - RNA, 19 nt, Artificial Sequence
  Description of Artificial Sequence: Synthetic oligonucleotide
gcgcgagcucagacaucga

SEQ ID NO: 2105115 - RNA, 19 nt, Artificial Sequence
  Description of Artificial Sequence: Synthetic oligonucleotide
ggacccgguggcgcuuccu

SEQ ID NO: 2105116 - RNA, 19 nt, Artificial Sequence
  Description of Artificial Sequence: Synthetic oligonucleotide
gccaggcaacugguauccu

SEQ ID NO: 2105117 - RNA, 19 nt, Artificial Sequence
  Description of Artificial Sequence: Synthetic oligonucleotide
cgcuggagcgucccaugcu

SEQ ID NO: 2105118 - RNA, 19 nt, Artificial Sequence
  Description of Artificial Sequence: Synthetic oligonucleotide
ccuccgcccgggcacgggu

SEQ ID NO: 2105119 - RNA, 19 nt, Artificial Sequence
  Description of Artificial Sequence: Synthetic oligonucleotide
ccagcacgucacacugcuu

SEQ ID NO: 2105120 - RNA, 19 nt, Artificial Sequence
  Description of Artificial Sequence: Synthetic oligonucleotide
ccagacucgccagcuccuu

SEQ ID NO: 2105121 - RNA, 19 nt, Artificial Sequence
  Description of Artificial Sequence: Synthetic oligonucleotide
cgguugcugccaguccucu

SEQ ID NO: 2105122 - RNA, 19 nt, Artificial Sequence
  Description of Artificial Sequence: Synthetic oligonucleotide
cgcacccagucgguguccu

SEQ ID NO: 2105123 - RNA, 19 nt, Artificial Sequence
  Description of Artificial Sequence: Synthetic oligonucleotide
aauggaaacacaaagacug

SEQ ID NO: 2105124 - RNA, 19 nt, Artificial Sequence
  Description of Artificial Sequence: Synthetic oligonucleotide
aaacaauggaaacacaaag

SEQ ID NO: 2105125 - RNA, 19 nt, Artificial Sequence
  Description of Artificial Sequence: Synthetic oligonucleotide
aacacaaagacugaucccc

SEQ ID NO: 2105126 - RNA, 19 nt, Artificial Sequence
  Description of Artificial Sequence: Synthetic oligonucleotide
acaauggaaacacaaagac

SEQ ID NO: 2105127 - RNA, 19 nt, Artificial Sequence
  Description of Artificial Sequence: Synthetic oligonucleotide
gaaacacaaagacugaucc

SEQ ID NO: 2105128 - RNA, 19 nt, Artificial Sequence
  Description of Artificial Sequence: Synthetic oligonucleotide
aaacacaaagacugauccc

SEQ ID NO: 2105129 - RNA, 19 nt, Artificial Sequence
  Description of Artificial Sequence: Synthetic oligonucleotide
aaaggagucucucuuugag

SEQ ID NO: 2105130 - RNA, 19 nt, Artificial Sequence
  Description of Artificial Sequence: Synthetic oligonucleotide
aaggagucucucuuugagg

SEQ ID NO: 2105131 - RNA, 19 nt, Artificial Sequence
  Description of Artificial Sequence: Synthetic oligonucleotide
aacaauggaaacacaaaga

SEQ ID NO: 2105132 - RNA, 19 nt, Artificial Sequence
  Description of Artificial Sequence: Synthetic oligonucleotide
cucucuuugaggaguaggg

SEQ ID NO: 2105133 - RNA, 19 nt, Artificial Sequence
  Description of Artificial Sequence: Synthetic oligonucleotide
acaaagacugauccccagg

SEQ ID NO: 2105134 - RNA, 19 nt, Artificial Sequence
  Description of Artificial Sequence: Synthetic oligonucleotide
aggagucucucuuugagga

SEQ ID NO: 2105135 - RNA, 19 nt, Artificial Sequence
  Description of Artificial Sequence: Synthetic oligonucleotide
ucucucuuugaggaguagg

SEQ ID NO: 2105136 - RNA, 19 nt, Artificial Sequence
  Description of Artificial Sequence: Synthetic oligonucleotide
uuuguccaucccuuuagcu

SEQ ID NO: 2105137 - RNA, 19 nt, Artificial Sequence
  Description of Artificial Sequence: Synthetic oligonucleotide
uguccaucccuuuagcuua

SEQ ID NO: 2105138 - RNA, 19 nt, Artificial Sequence
  Description of Artificial Sequence: Synthetic oligonucleotide
caucccuuuagcuuaccac

SEQ ID NO: 2105139 - RNA, 19 nt, Artificial Sequence
  Description of Artificial Sequence: Synthetic oligonucleotide
caggugaaaagagacuggg

SEQ ID NO: 2105140 - RNA, 19 nt, Artificial Sequence
  Description of Artificial Sequence: Synthetic oligonucleotide
agcuguuuuguccaucccu

SEQ ID NO: 2105141 - RNA, 19 nt, Artificial Sequence
  Description of Artificial Sequence: Synthetic oligonucleotide
uuguccaucccuuuagcuu

SEQ ID NO: 2105142 - RNA, 19 nt, Artificial Sequence
  Description of Artificial Sequence: Synthetic oligonucleotide
ggcaggugaaaagagacug

SEQ ID NO: 2105143 - RNA, 19 nt, Artificial Sequence
  Description of Artificial Sequence: Synthetic oligonucleotide
ucucuuugaggaguaggga

SEQ ID NO: 2105144 - RNA, 19 nt, Artificial Sequence
  Description of Artificial Sequence: Synthetic oligonucleotide
cacaaagacugauccccag

SEQ ID NO: 2105145 - RNA, 19 nt, Artificial Sequence
  Description of Artificial Sequence: Synthetic oligonucleotide
uccccaggcaggugaaaag

SEQ ID NO: 2105146 - RNA, 19 nt, Artificial Sequence
  Description of Artificial Sequence: Synthetic oligonucleotide
uggaaacacaaagacugau

SEQ ID NO: 2105147 - RNA, 19 nt, Artificial Sequence
  Description of Artificial Sequence: Synthetic oligonucleotide
augcaaaggagucucucuu

SEQ ID NO: 2105148 - RNA, 19 nt, Artificial Sequence
  Description of Artificial Sequence: Synthetic oligonucleotide
ugcaaaggagucucucuuu

SEQ ID NO: 2105149 - RNA, 19 nt, Artificial Sequence
  Description of Artificial Sequence: Synthetic oligonucleotide
caauggaaacacaaagacu

SEQ ID NO: 2105150 - RNA, 19 nt, Artificial Sequence
  Description of Artificial Sequence: Synthetic oligonucleotide
ggaaacacaaagacugauc

SEQ ID NO: 2105151 - RNA, 19 nt, Artificial Sequence
  Description of Artificial Sequence: Synthetic oligonucleotide
cugauccccaggcagguga

SEQ ID NO: 2105152 - RNA, 19 nt, Artificial Sequence
  Description of Artificial Sequence: Synthetic oligonucleotide
gagcuguuuuguccauccc

SEQ ID NO: 2105153 - RNA, 19 nt, Artificial Sequence
  Description of Artificial Sequence: Synthetic oligonucleotide
caaaggagucucucuuuga

SEQ ID NO: 2105154 - RNA, 19 nt, Artificial Sequence
  Description of Artificial Sequence: Synthetic oligonucleotide
auggaaacacaaagacuga

SEQ ID NO: 2105155 - RNA, 19 nt, Artificial Sequence
  Description of Artificial Sequence: Synthetic oligonucleotide
gcaggugaaaagagacugg

SEQ ID NO: 2105156 - RNA, 19 nt, Artificial Sequence
  Description of Artificial Sequence: Synthetic oligonucleotide
ugauccccaggcaggugaa

SEQ ID NO: 2105157 - RNA, 19 nt, Artificial Sequence
  Description of Artificial Sequence: Synthetic oligonucleotide
ggagucucucuuugaggag

SEQ ID NO: 2105158 - RNA, 19 nt, Artificial Sequence
  Description of Artificial Sequence: Synthetic oligonucleotide
acacaaagacugaucccca

SEQ ID NO: 2105159 - RNA, 19 nt, Artificial Sequence
  Description of Artificial Sequence: Synthetic oligonucleotide
gagucucucuuugaggagu

SEQ ID NO: 2105160 - RNA, 19 nt, Artificial Sequence
  Description of Artificial Sequence: Synthetic oligonucleotide
aggugaaaagagacugggu

SEQ ID NO: 2105161 - RNA, 19 nt, Artificial Sequence
  Description of Artificial Sequence: Synthetic oligonucleotide
auccccaggcaggugaaaa

SEQ ID NO: 2105162 - RNA, 19 nt, Artificial Sequence
  Description of Artificial Sequence: Synthetic oligonucleotide
gucucucuuugaggaguag

SEQ ID NO: 2105163 - RNA, 19 nt, Artificial Sequence
  Description of Artificial Sequence: Synthetic oligonucleotide
uccaucccuuuagcuuacc

SEQ ID NO: 2105164 - RNA, 19 nt, Artificial Sequence
  Description of Artificial Sequence: Synthetic oligonucleotide
agucucucuuugaggagua

SEQ ID NO: 2105165 - RNA, 19 nt, Artificial Sequence
  Description of Artificial Sequence: Synthetic oligonucleotide
guccaucccuuuagcuuac

SEQ ID NO: 2105166 - RNA, 19 nt, Artificial Sequence
  Description of Artificial Sequence: Synthetic oligonucleotide
gcuguuuuguccaucccuu

SEQ ID NO: 2105167 - RNA, 19 nt, Artificial Sequence
  Description of Artificial Sequence: Synthetic oligonucleotide
ccaucccuuuagcuuacca

SEQ ID NO: 2105168 - RNA, 19 nt, Artificial Sequence
  Description of Artificial Sequence: Synthetic oligonucleotide
gauccccaggcaggugaaa

SEQ ID NO: 2105169 - RNA, 19 nt, Artificial Sequence
  Description of Artificial Sequence: Synthetic oligonucleotide
ccccaggcaggugaaaaga

SEQ ID NO: 2105170 - RNA, 19 nt, Artificial Sequence
  Description of Artificial Sequence: Synthetic oligonucleotide
uuuagaauuaagaagagaa

SEQ ID NO: 2105171 - RNA, 19 nt, Artificial Sequence
  Description of Artificial Sequence: Synthetic oligonucleotide
ucaucuaucacacccaccg

SEQ ID NO: 2105172 - RNA, 19 nt, Artificial Sequence
  Description of Artificial Sequence: Synthetic oligonucleotide
cuaaaucugauuuugaaug

SEQ ID NO: 2105173 - RNA, 19 nt, Artificial Sequence
  Description of Artificial Sequence: Synthetic oligonucleotide
ugaguaaugcucuagguag

SEQ ID NO: 2105174 - RNA, 19 nt, Artificial Sequence
  Description of Artificial Sequence: Synthetic oligonucleotide
gaaagagcaacuuuuguag

SEQ ID NO: 2105175 - RNA, 19 nt, Artificial Sequence
  Description of Artificial Sequence: Synthetic oligonucleotide
uguuucuuuaacaugcuag

SEQ ID NO: 2105176 - RNA, 19 nt, Artificial Sequence
  Description of Artificial Sequence: Synthetic oligonucleotide
uuucuggucacucugaggc

SEQ ID NO: 2105177 - RNA, 19 nt, Artificial Sequence
  Description of Artificial Sequence: Synthetic oligonucleotide
aagagcaacuuuuguaggc

SEQ ID NO: 2105178 - RNA, 19 nt, Artificial Sequence
  Description of Artificial Sequence: Synthetic oligonucleotide
aauuaagaagagaaagagc

SEQ ID NO: 2105179 - RNA, 19 nt, Artificial Sequence
  Description of Artificial Sequence: Synthetic oligonucleotide
aauacagcgacuuuccagu

SEQ ID NO: 2105180 - RNA, 19 nt, Artificial Sequence
  Description of Artificial Sequence: Synthetic oligonucleotide
auugcuuggcaauacagcg

SEQ ID NO: 2105181 - RNA, 19 nt, Artificial Sequence
  Description of Artificial Sequence: Synthetic oligonucleotide
gaauuaagaagagaaagag

SEQ ID NO: 2105182 - RNA, 19 nt, Artificial Sequence
  Description of Artificial Sequence: Synthetic oligonucleotide
auccagaccgcucauaacc

SEQ ID NO: 2105183 - RNA, 19 nt, Artificial Sequence
  Description of Artificial Sequence: Synthetic oligonucleotide
aggacuuuugauuaccuac

SEQ ID NO: 2105184 - RNA, 19 nt, Artificial Sequence
  Description of Artificial Sequence: Synthetic oligonucleotide
ugaauagaccacuaaaucu

SEQ ID NO: 2105185 - RNA, 19 nt, Artificial Sequence
  Description of Artificial Sequence: Synthetic oligonucleotide
auguguuucuuuaacaugc

SEQ ID NO: 2105186 - RNA, 19 nt, Artificial Sequence
  Description of Artificial Sequence: Synthetic oligonucleotide
uaaugcucuagguagaaug

SEQ ID NO: 2105187 - RNA, 19 nt, Artificial Sequence
  Description of Artificial Sequence: Synthetic oligonucleotide
ugcuagguuucuuacaacg

SEQ ID NO: 2105188 - RNA, 19 nt, Artificial Sequence
  Description of Artificial Sequence: Synthetic oligonucleotide
aacaugcuagguuucuuac

SEQ ID NO: 2105189 - RNA, 19 nt, Artificial Sequence
  Description of Artificial Sequence: Synthetic oligonucleotide
uuugauuaccuacugcucu

SEQ ID NO: 2105190 - RNA, 19 nt, Artificial Sequence
  Description of Artificial Sequence: Synthetic oligonucleotide
aacuuuuguaggcaaacca

SEQ ID NO: 2105191 - RNA, 19 nt, Artificial Sequence
  Description of Artificial Sequence: Synthetic oligonucleotide
uacaugaggaacuaucuca

SEQ ID NO: 2105192 - RNA, 19 nt, Artificial Sequence
  Description of Artificial Sequence: Synthetic oligonucleotide
cugaauucaacuacugagg

SEQ ID NO: 2105193 - RNA, 19 nt, Artificial Sequence
  Description of Artificial Sequence: Synthetic oligonucleotide
uauacauaauccucguuug

SEQ ID NO: 2105194 - RNA, 19 nt, Artificial Sequence
  Description of Artificial Sequence: Synthetic oligonucleotide
gaauagaccacuaaaucug

SEQ ID NO: 2105195 - RNA, 19 nt, Artificial Sequence
  Description of Artificial Sequence: Synthetic oligonucleotide
uuuaauucuucuugguuca

SEQ ID NO: 2105196 - RNA, 19 nt, Artificial Sequence
  Description of Artificial Sequence: Synthetic oligonucleotide
uuauugcuuggcaauacag

SEQ ID NO: 2105197 - RNA, 19 nt, Artificial Sequence
  Description of Artificial Sequence: Synthetic oligonucleotide
auaggcugaaguuuucugg

SEQ ID NO: 2105198 - RNA, 19 nt, Artificial Sequence
  Description of Artificial Sequence: Synthetic oligonucleotide
uucaggaucauauccagac

SEQ ID NO: 2105199 - RNA, 19 nt, Artificial Sequence
  Description of Artificial Sequence: Synthetic oligonucleotide
acuuuugauuaccuacugc

SEQ ID NO: 2105200 - RNA, 19 nt, Artificial Sequence
  Description of Artificial Sequence: Synthetic oligonucleotide
aucacacccaccgagacgc

SEQ ID NO: 2105201 - RNA, 19 nt, Artificial Sequence
  Description of Artificial Sequence: Synthetic oligonucleotide
ugaauucaacuacugagga

SEQ ID NO: 2105202 - RNA, 19 nt, Artificial Sequence
  Description of Artificial Sequence: Synthetic oligonucleotide
uugaauagaccacuaaauc

SEQ ID NO: 2105203 - RNA, 19 nt, Artificial Sequence
  Description of Artificial Sequence: Synthetic oligonucleotide
ugugcaaugguagggacgg

SEQ ID NO: 2105204 - RNA, 19 nt, Artificial Sequence
  Description of Artificial Sequence: Synthetic oligonucleotide
gacguauacauaauccucg

SEQ ID NO: 2105205 - RNA, 19 nt, Artificial Sequence
  Description of Artificial Sequence: Synthetic oligonucleotide
cuagguagaauguccauag

SEQ ID NO: 2105206 - RNA, 19 nt, Artificial Sequence
  Description of Artificial Sequence: Synthetic oligonucleotide
aaaucugauuuugaauggg

SEQ ID NO: 2105207 - RNA, 19 nt, Artificial Sequence
  Description of Artificial Sequence: Synthetic oligonucleotide
uuaccuacugcucucuugc

SEQ ID NO: 2105208 - RNA, 19 nt, Artificial Sequence
  Description of Artificial Sequence: Synthetic oligonucleotide
uauugcuuggcaauacagc

SEQ ID NO: 2105209 - RNA, 19 nt, Artificial Sequence
  Description of Artificial Sequence: Synthetic oligonucleotide
uuguccauccaguauaggc

SEQ ID NO: 2105210 - RNA, 19 nt, Artificial Sequence
  Description of Artificial Sequence: Synthetic oligonucleotide
ucuacaugaggaacuaucu

SEQ ID NO: 2105211 - RNA, 19 nt, Artificial Sequence
  Description of Artificial Sequence: Synthetic oligonucleotide
aacggcaaugacuucuguc

SEQ ID NO: 2105212 - RNA, 19 nt, Artificial Sequence
  Description of Artificial Sequence: Synthetic oligonucleotide
uguaggcaaaccaagugga

SEQ ID NO: 2105213 - RNA, 19 nt, Artificial Sequence
  Description of Artificial Sequence: Synthetic oligonucleotide
ucggacguauacauaaucc

SEQ ID NO: 2105214 - RNA, 19 nt, Artificial Sequence
  Description of Artificial Sequence: Synthetic oligonucleotide
ucuuuaacaugcuagguuu

SEQ ID NO: 2105215 - RNA, 19 nt, Artificial Sequence
  Description of Artificial Sequence: Synthetic oligonucleotide
aaguugcuuuuccacuugc

SEQ ID NO: 2105216 - RNA, 19 nt, Artificial Sequence
  Description of Artificial Sequence: Synthetic oligonucleotide
gcugaauucaacuacugag

SEQ ID NO: 2105217 - RNA, 19 nt, Artificial Sequence
  Description of Artificial Sequence: Synthetic oligonucleotide
uauguguuucuuuaacaug

SEQ ID NO: 2105218 - RNA, 19 nt, Artificial Sequence
  Description of Artificial Sequence: Synthetic oligonucleotide
aacugggaacucuaagguc

SEQ ID NO: 2105219 - RNA, 19 nt, Artificial Sequence
  Description of Artificial Sequence: Synthetic oligonucleotide
gacgccuaaauccacacac

SEQ ID NO: 2105220 - RNA, 19 nt, Artificial Sequence
  Description of Artificial Sequence: Synthetic oligonucleotide
gagaaguugcaguaugugc

SEQ ID NO: 2105221 - RNA, 19 nt, Artificial Sequence
  Description of Artificial Sequence: Synthetic oligonucleotide
uguccauccaguauaggcu

SEQ ID NO: 2105222 - RNA, 19 nt, Artificial Sequence
  Description of Artificial Sequence: Synthetic oligonucleotide
aaggagaaguugcaguaug

SEQ ID NO: 2105223 - RNA, 19 nt, Artificial Sequence
  Description of Artificial Sequence: Synthetic oligonucleotide
ucuuacaacggauuccaca

SEQ ID NO: 2105224 - RNA, 19 nt, Artificial Sequence
  Description of Artificial Sequence: Synthetic oligonucleotide
ucagagucaucuuuauugc

SEQ ID NO: 2105225 - RNA, 19 nt, Artificial Sequence
  Description of Artificial Sequence: Synthetic oligonucleotide
cuuuuguaggcaaaccaag

SEQ ID NO: 2105226 - RNA, 19 nt, Artificial Sequence
  Description of Artificial Sequence: Synthetic oligonucleotide
auaaccaaaucuuugcuuu

SEQ ID NO: 2105227 - RNA, 19 nt, Artificial Sequence
  Description of Artificial Sequence: Synthetic oligonucleotide
uuaucuugcucacuguuaa

SEQ ID NO: 2105228 - RNA, 19 nt, Artificial Sequence
  Description of Artificial Sequence: Synthetic oligonucleotide
aaaccaaguggauuugggu

SEQ ID NO: 2105229 - RNA, 19 nt, Artificial Sequence
  Description of Artificial Sequence: Synthetic oligonucleotide
uguaagaauuuccuuuagu

SEQ ID NO: 2105230 - RNA, 19 nt, Artificial Sequence
  Description of Artificial Sequence: Synthetic oligonucleotide
acuaaaucugauuuugaau

SEQ ID NO: 2105231 - RNA, 19 nt, Artificial Sequence
  Description of Artificial Sequence: Synthetic oligonucleotide
uagaauguccauagggucu

SEQ ID NO: 2105232 - RNA, 19 nt, Artificial Sequence
  Description of Artificial Sequence: Synthetic oligonucleotide
ucucauguuccucuuuugc

SEQ ID NO: 2105233 - RNA, 19 nt, Artificial Sequence
  Description of Artificial Sequence: Synthetic oligonucleotide
uuugaaugggugguuauug

SEQ ID NO: 2105234 - RNA, 19 nt, Artificial Sequence
  Description of Artificial Sequence: Synthetic oligonucleotide
uccuccaucaaauauuuua

SEQ ID NO: 2105235 - RNA, 19 nt, Artificial Sequence
  Description of Artificial Sequence: Synthetic oligonucleotide
ugaggcaacggcaaugacu

SEQ ID NO: 2105236 - RNA, 19 nt, Artificial Sequence
  Description of Artificial Sequence: Synthetic oligonucleotide
ugcucuagguagaaugucc

SEQ ID NO: 2105237 - RNA, 19 nt, Artificial Sequence
  Description of Artificial Sequence: Synthetic oligonucleotide
ucauaaccaaaucuuugcu

SEQ ID NO: 2105238 - RNA, 19 nt, Artificial Sequence
  Description of Artificial Sequence: Synthetic oligonucleotide
ugacuuguauccuccauca

SEQ ID NO: 2105239 - RNA, 19 nt, Artificial Sequence
  Description of Artificial Sequence: Synthetic oligonucleotide
uccacuugcuugaauagac

SEQ ID NO: 2105240 - RNA, 19 nt, Artificial Sequence
  Description of Artificial Sequence: Synthetic oligonucleotide
aaccaaguggauuuggguu

SEQ ID NO: 2105241 - RNA, 19 nt, Artificial Sequence
  Description of Artificial Sequence: Synthetic oligonucleotide
ucuuuugcaguauggugcc

SEQ ID NO: 2105242 - RNA, 19 nt, Artificial Sequence
  Description of Artificial Sequence: Synthetic oligonucleotide
aucuaucacacccaccgag

SEQ ID NO: 2105243 - RNA, 19 nt, Artificial Sequence
  Description of Artificial Sequence: Synthetic oligonucleotide
ucuaagguccuccucuaca

SEQ ID NO: 2105244 - RNA, 19 nt, Artificial Sequence
  Description of Artificial Sequence: Synthetic oligonucleotide
cuugcuaugugccuuggac

SEQ ID NO: 2105245 - RNA, 19 nt, Artificial Sequence
  Description of Artificial Sequence: Synthetic oligonucleotide
gguaagucuguccuguugg

SEQ ID NO: 2105246 - RNA, 19 nt, Artificial Sequence
  Description of Artificial Sequence: Synthetic oligonucleotide
caauacagcgacuuuccag

SEQ ID NO: 2105247 - RNA, 19 nt, Artificial Sequence
  Description of Artificial Sequence: Synthetic oligonucleotide
gauuccacauucuucacaa

SEQ ID NO: 2105248 - RNA, 19 nt, Artificial Sequence
  Description of Artificial Sequence: Synthetic oligonucleotide
uccaucaaauauuuuaauu

SEQ ID NO: 2105249 - RNA, 19 nt, Artificial Sequence
  Description of Artificial Sequence: Synthetic oligonucleotide
ugcucucuugcuuaaguug

SEQ ID NO: 2105250 - RNA, 19 nt, Artificial Sequence
  Description of Artificial Sequence: Synthetic oligonucleotide
aucauauccagaccgcuca

SEQ ID NO: 2105251 - RNA, 19 nt, Artificial Sequence
  Description of Artificial Sequence: Synthetic oligonucleotide
aacggauuccacauucuuc

SEQ ID NO: 2105252 - RNA, 19 nt, Artificial Sequence
  Description of Artificial Sequence: Synthetic oligonucleotide
agaauuaagaagagaaaga

SEQ ID NO: 2105253 - RNA, 19 nt, Artificial Sequence
  Description of Artificial Sequence: Synthetic oligonucleotide
agaccacuaaaucugauuu

SEQ ID NO: 2105254 - RNA, 19 nt, Artificial Sequence
  Description of Artificial Sequence: Synthetic oligonucleotide
uugcucacuguuaauuuca

SEQ ID NO: 2105255 - RNA, 19 nt, Artificial Sequence
  Description of Artificial Sequence: Synthetic oligonucleotide
aggaacuaucucauguucc

SEQ ID NO: 2105256 - RNA, 19 nt, Artificial Sequence
  Description of Artificial Sequence: Synthetic oligonucleotide
uuacuggagcacauugucc

SEQ ID NO: 2105257 - RNA, 19 nt, Artificial Sequence
  Description of Artificial Sequence: Synthetic oligonucleotide
uuuugauuaccuacugcuc

SEQ ID NO: 2105258 - RNA, 19 nt, Artificial Sequence
  Description of Artificial Sequence: Synthetic oligonucleotide
aacuacugaggacuuuuga

SEQ ID NO: 2105259 - RNA, 19 nt, Artificial Sequence
  Description of Artificial Sequence: Synthetic oligonucleotide
uaucacacccaccgagacg

SEQ ID NO: 2105260 - RNA, 19 nt, Artificial Sequence
  Description of Artificial Sequence: Synthetic oligonucleotide
ugcaguauggugccuggcc

SEQ ID NO: 2105261 - RNA, 19 nt, Artificial Sequence
  Description of Artificial Sequence: Synthetic oligonucleotide
cuuuauugcugaauucaac

SEQ ID NO: 2105262 - RNA, 19 nt, Artificial Sequence
  Description of Artificial Sequence: Synthetic oligonucleotide
uugcuuaaguugcuuuucc

SEQ ID NO: 2105263 - RNA, 19 nt, Artificial Sequence
  Description of Artificial Sequence: Synthetic oligonucleotide
aucuuggugaguaaugcuc

SEQ ID NO: 2105264 - RNA, 19 nt, Artificial Sequence
  Description of Artificial Sequence: Synthetic oligonucleotide
ugaaggagaaguugcagua

SEQ ID NO: 2105265 - RNA, 19 nt, Artificial Sequence
  Description of Artificial Sequence: Synthetic oligonucleotide
acuacugaggacuuuugau

SEQ ID NO: 2105266 - RNA, 19 nt, Artificial Sequence
  Description of Artificial Sequence: Synthetic oligonucleotide
uuugcaguauggugccugg

SEQ ID NO: 2105267 - RNA, 19 nt, Artificial Sequence
  Description of Artificial Sequence: Synthetic oligonucleotide
gagcacauuguccauccag

SEQ ID NO: 2105268 - RNA, 19 nt, Artificial Sequence
  Description of Artificial Sequence: Synthetic oligonucleotide
guguguaccccugagaagc

SEQ ID NO: 2105269 - RNA, 19 nt, Artificial Sequence
  Description of Artificial Sequence: Synthetic oligonucleotide
uguguuuuguaagaauuuc

SEQ ID NO: 2105270 - RNA, 19 nt, Artificial Sequence
  Description of Artificial Sequence: Synthetic oligonucleotide
acauuguccauccaguaua

SEQ ID NO: 2105271 - RNA, 19 nt, Artificial Sequence
  Description of Artificial Sequence: Synthetic oligonucleotide
guugcaguaugugcaaugg

SEQ ID NO: 2105272 - RNA, 19 nt, Artificial Sequence
  Description of Artificial Sequence: Synthetic oligonucleotide
acugaggacuuuugauuac

SEQ ID NO: 2105273 - RNA, 19 nt, Artificial Sequence
  Description of Artificial Sequence: Synthetic oligonucleotide
acauaauccucguuugacu

SEQ ID NO: 2105274 - RNA, 19 nt, Artificial Sequence
  Description of Artificial Sequence: Synthetic oligonucleotide
aaugcucuagguagaaugu

SEQ ID NO: 2105275 - RNA, 19 nt, Artificial Sequence
  Description of Artificial Sequence: Synthetic oligonucleotide
cuuuugauuaccuacugcu

SEQ ID NO: 2105276 - RNA, 19 nt, Artificial Sequence
  Description of Artificial Sequence: Synthetic oligonucleotide
guagaauguccauaggguc

SEQ ID NO: 2105277 - RNA, 19 nt, Artificial Sequence
  Description of Artificial Sequence: Synthetic oligonucleotide
uugaaugggugguuauugc

SEQ ID NO: 2105278 - RNA, 19 nt, Artificial Sequence
  Description of Artificial Sequence: Synthetic oligonucleotide
gaauucaacuacugaggac

SEQ ID NO: 2105279 - RNA, 19 nt, Artificial Sequence
  Description of Artificial Sequence: Synthetic oligonucleotide
uacugaggacuuuugauua

SEQ ID NO: 2105280 - RNA, 19 nt, Artificial Sequence
  Description of Artificial Sequence: Synthetic oligonucleotide
guuacuggagcacauuguc

SEQ ID NO: 2105281 - RNA, 19 nt, Artificial Sequence
  Description of Artificial Sequence: Synthetic oligonucleotide
ucauugucguccucgucag

SEQ ID NO: 2105282 - RNA, 19 nt, Artificial Sequence
  Description of Artificial Sequence: Synthetic oligonucleotide
cuaagguccuccucuacac

SEQ ID NO: 2105283 - RNA, 19 nt, Artificial Sequence
  Description of Artificial Sequence: Synthetic oligonucleotide
cuccucuacacucccaggg

SEQ ID NO: 2105284 - RNA, 19 nt, Artificial Sequence
  Description of Artificial Sequence: Synthetic oligonucleotide
uuccuuuagucuugaagga

SEQ ID NO: 2105285 - RNA, 19 nt, Artificial Sequence
  Description of Artificial Sequence: Synthetic oligonucleotide
uaggcugaaguuuucuggu

SEQ ID NO: 2105286 - RNA, 19 nt, Artificial Sequence
  Description of Artificial Sequence: Synthetic oligonucleotide
aguugcaguaugugcaaug

SEQ ID NO: 2105287 - RNA, 19 nt, Artificial Sequence
  Description of Artificial Sequence: Synthetic oligonucleotide
uggagcacauuguccaucc

SEQ ID NO: 2105288 - RNA, 19 nt, Artificial Sequence
  Description of Artificial Sequence: Synthetic oligonucleotide
gacuucauguguuuuguaa

SEQ ID NO: 2105289 - RNA, 19 nt, Artificial Sequence
  Description of Artificial Sequence: Synthetic oligonucleotide
guuucuuacaacggauucc

SEQ ID NO: 2105290 - RNA, 19 nt, Artificial Sequence
  Description of Artificial Sequence: Synthetic oligonucleotide
uugcuaugugccuuggacu

SEQ ID NO: 2105291 - RNA, 19 nt, Artificial Sequence
  Description of Artificial Sequence: Synthetic oligonucleotide
uccuuuagucuugaaggag

SEQ ID NO: 2105292 - RNA, 19 nt, Artificial Sequence
  Description of Artificial Sequence: Synthetic oligonucleotide
aauagaccacuaaaucuga

SEQ ID NO: 2105293 - RNA, 19 nt, Artificial Sequence
  Description of Artificial Sequence: Synthetic oligonucleotide
uagguuucuuacaacggau

SEQ ID NO: 2105294 - RNA, 19 nt, Artificial Sequence
  Description of Artificial Sequence: Synthetic oligonucleotide
agcaacugggaacucuaag

SEQ ID NO: 2105295 - RNA, 19 nt, Artificial Sequence
  Description of Artificial Sequence: Synthetic oligonucleotide
auaauccucguuugacuug

SEQ ID NO: 2105296 - RNA, 19 nt, Artificial Sequence
  Description of Artificial Sequence: Synthetic oligonucleotide
uguguguaccccugagaag

SEQ ID NO: 2105297 - RNA, 19 nt, Artificial Sequence
  Description of Artificial Sequence: Synthetic oligonucleotide
ugguaagucuguccuguug

SEQ ID NO: 2105298 - RNA, 19 nt, Artificial Sequence
  Description of Artificial Sequence: Synthetic oligonucleotide
uaucucauguuccucuuuu

SEQ ID NO: 2105299 - RNA, 19 nt, Artificial Sequence
  Description of Artificial Sequence: Synthetic oligonucleotide
auauccagaccgcucauaa

SEQ ID NO: 2105300 - RNA, 19 nt, Artificial Sequence
  Description of Artificial Sequence: Synthetic oligonucleotide
uaagucuguccuguugggg

SEQ ID NO: 2105301 - RNA, 19 nt, Artificial Sequence
  Description of Artificial Sequence: Synthetic oligonucleotide
uugaaggccacuucuggau

SEQ ID NO: 2105302 - RNA, 19 nt, Artificial Sequence
  Description of Artificial Sequence: Synthetic oligonucleotide
gaggaacuaucucauguuc

SEQ ID NO: 2105303 - RNA, 19 nt, Artificial Sequence
  Description of Artificial Sequence: Synthetic oligonucleotide
uccucguuugacuuguauc

SEQ ID NO: 2105304 - RNA, 19 nt, Artificial Sequence
  Description of Artificial Sequence: Synthetic oligonucleotide
ugacugagggugcugcuga

SEQ ID NO: 2105305 - RNA, 19 nt, Artificial Sequence
  Description of Artificial Sequence: Synthetic oligonucleotide
ugaggacuuuugauuaccu

SEQ ID NO: 2105306 - RNA, 19 nt, Artificial Sequence
  Description of Artificial Sequence: Synthetic oligonucleotide
cauuguccauccaguauag

SEQ ID NO: 2105307 - RNA, 19 nt, Artificial Sequence
  Description of Artificial Sequence: Synthetic oligonucleotide
uaacaugcuagguuucuua

SEQ ID NO: 2105308 - RNA, 19 nt, Artificial Sequence
  Description of Artificial Sequence: Synthetic oligonucleotide
uuugacuuguauccuccau

SEQ ID NO: 2105309 - RNA, 19 nt, Artificial Sequence
  Description of Artificial Sequence: Synthetic oligonucleotide
uaugugcaaugguagggac

SEQ ID NO: 2105310 - RNA, 19 nt, Artificial Sequence
  Description of Artificial Sequence: Synthetic oligonucleotide
ugaaguuuucuggucacuc

SEQ ID NO: 2105311 - RNA, 19 nt, Artificial Sequence
  Description of Artificial Sequence: Synthetic oligonucleotide
cauagggucuguguguacc

SEQ ID NO: 2105312 - RNA, 19 nt, Artificial Sequence
  Description of Artificial Sequence: Synthetic oligonucleotide
guuuucuggucacucugag

SEQ ID NO: 2105313 - RNA, 19 nt, Artificial Sequence
  Description of Artificial Sequence: Synthetic oligonucleotide
ucaucugauucuucugggu

SEQ ID NO: 2105314 - RNA, 19 nt, Artificial Sequence
  Description of Artificial Sequence: Synthetic oligonucleotide
auacauaauccucguuuga

SEQ ID NO: 2105315 - RNA, 19 nt, Artificial Sequence
  Description of Artificial Sequence: Synthetic oligonucleotide
uguaccccugagaagcaac

SEQ ID NO: 2105316 - RNA, 19 nt, Artificial Sequence
  Description of Artificial Sequence: Synthetic oligonucleotide
aggcaaaccaaguggauuu

SEQ ID NO: 2105317 - RNA, 19 nt, Artificial Sequence
  Description of Artificial Sequence: Synthetic oligonucleotide
ugcuaugugccuuggacuu

SEQ ID NO: 2105318 - RNA, 19 nt, Artificial Sequence
  Description of Artificial Sequence: Synthetic oligonucleotide
uccagaccgcucauaacca

SEQ ID NO: 2105319 - RNA, 19 nt, Artificial Sequence
  Description of Artificial Sequence: Synthetic oligonucleotide
ucuugcuuaaguugcuuuu

SEQ ID NO: 2105320 - RNA, 19 nt, Artificial Sequence
  Description of Artificial Sequence: Synthetic oligonucleotide
uugauuaccuacugcucuc

SEQ ID NO: 2105321 - RNA, 19 nt, Artificial Sequence
  Description of Artificial Sequence: Synthetic oligonucleotide
ucugaggcaacggcaauga

SEQ ID NO: 2105322 - RNA, 19 nt, Artificial Sequence
  Description of Artificial Sequence: Synthetic oligonucleotide
cuucauguguuuuguaaga

SEQ ID NO: 2105323 - RNA, 19 nt, Artificial Sequence
  Description of Artificial Sequence: Synthetic oligonucleotide
uugcuuaaggaauuuucuu

SEQ ID NO: 2105324 - RNA, 19 nt, Artificial Sequence
  Description of Artificial Sequence: Synthetic oligonucleotide
agugucuacaugaggaacu

SEQ ID NO: 2105325 - RNA, 19 nt, Artificial Sequence
  Description of Artificial Sequence: Synthetic oligonucleotide
cuagguuucuuacaacgga

SEQ ID NO: 2105326 - RNA, 19 nt, Artificial Sequence
  Description of Artificial Sequence: Synthetic oligonucleotide
uaauccucguuugacuugu

SEQ ID NO: 2105327 - RNA, 19 nt, Artificial Sequence
  Description of Artificial Sequence: Synthetic oligonucleotide
caugcuagguuucuuacaa

SEQ ID NO: 2105328 - RNA, 19 nt, Artificial Sequence
  Description of Artificial Sequence: Synthetic oligonucleotide
uuuagucuugaaggagaag

SEQ ID NO: 2105329 - RNA, 19 nt, Artificial Sequence
  Description of Artificial Sequence: Synthetic oligonucleotide
ucuagguagaauguccaua

SEQ ID NO: 2105330 - RNA, 19 nt, Artificial Sequence
  Description of Artificial Sequence: Synthetic oligonucleotide
augguagggacggacaucu

SEQ ID NO: 2105331 - RNA, 19 nt, Artificial Sequence
  Description of Artificial Sequence: Synthetic oligonucleotide
augcuagguuucuuacaac

SEQ ID NO: 2105332 - RNA, 19 nt, Artificial Sequence
  Description of Artificial Sequence: Synthetic oligonucleotide
acaaauguacuuuccucuu

SEQ ID NO: 2105333 - RNA, 19 nt, Artificial Sequence
  Description of Artificial Sequence: Synthetic oligonucleotide
uagaccacuaaaucugauu

SEQ ID NO: 2105334 - RNA, 19 nt, Artificial Sequence
  Description of Artificial Sequence: Synthetic oligonucleotide
cuuuaacaugcuagguuuc

SEQ ID NO: 2105335 - RNA, 19 nt, Artificial Sequence
  Description of Artificial Sequence: Synthetic oligonucleotide
ucaacuacugaggacuuuu

SEQ ID NO: 2105336 - RNA, 19 nt, Artificial Sequence
  Description of Artificial Sequence: Synthetic oligonucleotide
ugcuugaauagaccacuaa

SEQ ID NO: 2105337 - RNA, 19 nt, Artificial Sequence
  Description of Artificial Sequence: Synthetic oligonucleotide
cacuugcuugaauagacca

SEQ ID NO: 2105338 - RNA, 19 nt, Artificial Sequence
  Description of Artificial Sequence: Synthetic oligonucleotide
uuggugaguaaugcucuag

SEQ ID NO: 2105339 - RNA, 19 nt, Artificial Sequence
  Description of Artificial Sequence: Synthetic oligonucleotide
cuacaugaggaacuaucuc

SEQ ID NO: 2105340 - RNA, 19 nt, Artificial Sequence
  Description of Artificial Sequence: Synthetic oligonucleotide
agaauguccauagggucug

SEQ ID NO: 2105341 - RNA, 19 nt, Artificial Sequence
  Description of Artificial Sequence: Synthetic oligonucleotide
accaaguggauuuggguua

SEQ ID NO: 2105342 - RNA, 19 nt, Artificial Sequence
  Description of Artificial Sequence: Synthetic oligonucleotide
guuauugcuuggcaauaca

SEQ ID NO: 2105343 - RNA, 19 nt, Artificial Sequence
  Description of Artificial Sequence: Synthetic oligonucleotide
cuuacaacggauuccacau

SEQ ID NO: 2105344 - RNA, 19 nt, Artificial Sequence
  Description of Artificial Sequence: Synthetic oligonucleotide
acaugcuagguuucuuaca

SEQ ID NO: 2105345 - RNA, 19 nt, Artificial Sequence
  Description of Artificial Sequence: Synthetic oligonucleotide
guucguauguguuucuuua

SEQ ID NO: 2105346 - RNA, 19 nt, Artificial Sequence
  Description of Artificial Sequence: Synthetic oligonucleotide
uccucuacacucccagggu

SEQ ID NO: 2105347 - RNA, 19 nt, Artificial Sequence
  Description of Artificial Sequence: Synthetic oligonucleotide
gucuacaugaggaacuauc

SEQ ID NO: 2105348 - RNA, 19 nt, Artificial Sequence
  Description of Artificial Sequence: Synthetic oligonucleotide
uacagcgacuuuccagucu

SEQ ID NO: 2105349 - RNA, 19 nt, Artificial Sequence
  Description of Artificial Sequence: Synthetic oligonucleotide
gauguugugggcuggcugu

SEQ ID NO: 2105350 - RNA, 19 nt, Artificial Sequence
  Description of Artificial Sequence: Synthetic oligonucleotide
gagacgccuaaauccacac

SEQ ID NO: 2105351 - RNA, 19 nt, Artificial Sequence
  Description of Artificial Sequence: Synthetic oligonucleotide
cuaucacacccaccgagac

SEQ ID NO: 2105352 - RNA, 19 nt, Artificial Sequence
  Description of Artificial Sequence: Synthetic oligonucleotide
uucguauguguuucuuuaa

SEQ ID NO: 2105353 - RNA, 19 nt, Artificial Sequence
  Description of Artificial Sequence: Synthetic oligonucleotide
guuuagaauuaagaagaga

SEQ ID NO: 2105354 - RNA, 19 nt, Artificial Sequence
  Description of Artificial Sequence: Synthetic oligonucleotide
aggcugaaguuuucugguc

SEQ ID NO: 2105355 - RNA, 19 nt, Artificial Sequence
  Description of Artificial Sequence: Synthetic oligonucleotide
cacuaaaucugauuuugaa

SEQ ID NO: 2105356 - RNA, 19 nt, Artificial Sequence
  Description of Artificial Sequence: Synthetic oligonucleotide
caacuuuuguaggcaaacc

SEQ ID NO: 2105357 - RNA, 19 nt, Artificial Sequence
  Description of Artificial Sequence: Synthetic oligonucleotide
cuuaaguugcuuuuccacu

SEQ ID NO: 2105358 - RNA, 19 nt, Artificial Sequence
  Description of Artificial Sequence: Synthetic oligonucleotide
ugcaaugguagggacggac

SEQ ID NO: 2105359 - RNA, 19 nt, Artificial Sequence
  Description of Artificial Sequence: Synthetic oligonucleotide
ugugcucagaacagucauc

SEQ ID NO: 2105360 - RNA, 19 nt, Artificial Sequence
  Description of Artificial Sequence: Synthetic oligonucleotide
uccucuuuugcaguauggu

SEQ ID NO: 2105361 - RNA, 19 nt, Artificial Sequence
  Description of Artificial Sequence: Synthetic oligonucleotide
uggcaauacagcgacuuuc

SEQ ID NO: 2105362 - RNA, 19 nt, Artificial Sequence
  Description of Artificial Sequence: Synthetic oligonucleotide
cacaaauguacuuuccucu

SEQ ID NO: 2105363 - RNA, 19 nt, Artificial Sequence
  Description of Artificial Sequence: Synthetic oligonucleotide
caaauguacuuuccucuuc

SEQ ID NO: 2105364 - RNA, 19 nt, Artificial Sequence
  Description of Artificial Sequence: Synthetic oligonucleotide
gugaguaaugcucuaggua

SEQ ID NO: 2105365 - RNA, 19 nt, Artificial Sequence
  Description of Artificial Sequence: Synthetic oligonucleotide
uaagguccuccucuacacu

SEQ ID NO: 2105366 - RNA, 19 nt, Artificial Sequence
  Description of Artificial Sequence: Synthetic oligonucleotide
uugcaguaugugcaauggu

SEQ ID NO: 2105367 - RNA, 19 nt, Artificial Sequence
  Description of Artificial Sequence: Synthetic oligonucleotide
gguuucuuacaacggauuc

SEQ ID NO: 2105368 - RNA, 19 nt, Artificial Sequence
  Description of Artificial Sequence: Synthetic oligonucleotide
aucucauguuccucuuuug

SEQ ID NO: 2105369 - RNA, 19 nt, Artificial Sequence
  Description of Artificial Sequence: Synthetic oligonucleotide
ucguuugacuuguauccuc

SEQ ID NO: 2105370 - RNA, 19 nt, Artificial Sequence
  Description of Artificial Sequence: Synthetic oligonucleotide
uguggguucguauguguuu

SEQ ID NO: 2105371 - RNA, 19 nt, Artificial Sequence
  Description of Artificial Sequence: Synthetic oligonucleotide
ugggucuugcucaucuauc

SEQ ID NO: 2105372 - RNA, 19 nt, Artificial Sequence
  Description of Artificial Sequence: Synthetic oligonucleotide
acagucaucuuggugagua

SEQ ID NO: 2105373 - RNA, 19 nt, Artificial Sequence
  Description of Artificial Sequence: Synthetic oligonucleotide
cuguguguaccccugagaa

SEQ ID NO: 2105374 - RNA, 19 nt, Artificial Sequence
  Description of Artificial Sequence: Synthetic oligonucleotide
augugcaaugguagggacg

SEQ ID NO: 2105375 - RNA, 19 nt, Artificial Sequence
  Description of Artificial Sequence: Synthetic oligonucleotide
cucggacguauacauaauc

SEQ ID NO: 2105376 - RNA, 19 nt, Artificial Sequence
  Description of Artificial Sequence: Synthetic oligonucleotide
cucaucuaucacacccacc

SEQ ID NO: 2105377 - RNA, 19 nt, Artificial Sequence
  Description of Artificial Sequence: Synthetic oligonucleotide
gagugucuacaugaggaac

SEQ ID NO: 2105378 - RNA, 19 nt, Artificial Sequence
  Description of Artificial Sequence: Synthetic oligonucleotide
uguguaccccugagaagca

SEQ ID NO: 2105379 - RNA, 19 nt, Artificial Sequence
  Description of Artificial Sequence: Synthetic oligonucleotide
uuccacuugcuugaauaga

SEQ ID NO: 2105380 - RNA, 19 nt, Artificial Sequence
  Description of Artificial Sequence: Synthetic oligonucleotide
cuuguauccuccaucaaau

SEQ ID NO: 2105381 - RNA, 19 nt, Artificial Sequence
  Description of Artificial Sequence: Synthetic oligonucleotide
agaagcaacugggaacucu

SEQ ID NO: 2105382 - RNA, 19 nt, Artificial Sequence
  Description of Artificial Sequence: Synthetic oligonucleotide
gaucauauccagaccgcuc

SEQ ID NO: 2105383 - RNA, 19 nt, Artificial Sequence
  Description of Artificial Sequence: Synthetic oligonucleotide
aguauaggcugaaguuuuc

SEQ ID NO: 2105384 - RNA, 19 nt, Artificial Sequence
  Description of Artificial Sequence: Synthetic oligonucleotide
cugggagugucuacaugag

SEQ ID NO: 2105385 - RNA, 19 nt, Artificial Sequence
  Description of Artificial Sequence: Synthetic oligonucleotide
caagcuguacugugcucag

SEQ ID NO: 2105386 - RNA, 19 nt, Artificial Sequence
  Description of Artificial Sequence: Synthetic oligonucleotide
augcucuagguagaauguc

SEQ ID NO: 2105387 - RNA, 19 nt, Artificial Sequence
  Description of Artificial Sequence: Synthetic oligonucleotide
gcuagguuucuuacaacgg

SEQ ID NO: 2105388 - RNA, 19 nt, Artificial Sequence
  Description of Artificial Sequence: Synthetic oligonucleotide
agggacggacaucugugug

SEQ ID NO: 2105389 - RNA, 19 nt, Artificial Sequence
  Description of Artificial Sequence: Synthetic oligonucleotide
ucuugcuaugugccuugga

SEQ ID NO: 2105390 - RNA, 19 nt, Artificial Sequence
  Description of Artificial Sequence: Synthetic oligonucleotide
uuuugaaugggugguuauu

SEQ ID NO: 2105391 - RNA, 19 nt, Artificial Sequence
  Description of Artificial Sequence: Synthetic oligonucleotide
uauccagaccgcucauaac

SEQ ID NO: 2105392 - RNA, 19 nt, Artificial Sequence
  Description of Artificial Sequence: Synthetic oligonucleotide
cuuuagucuugaaggagaa

SEQ ID NO: 2105393 - RNA, 19 nt, Artificial Sequence
  Description of Artificial Sequence: Synthetic oligonucleotide
ucagaacagucaucuuggu

SEQ ID NO: 2105394 - RNA, 19 nt, Artificial Sequence
  Description of Artificial Sequence: Synthetic oligonucleotide
gauuuugaaugggugguua

SEQ ID NO: 2105395 - RNA, 19 nt, Artificial Sequence
  Description of Artificial Sequence: Synthetic oligonucleotide
ggguuacuggagcacauug

SEQ ID NO: 2105396 - RNA, 19 nt, Artificial Sequence
  Description of Artificial Sequence: Synthetic oligonucleotide
uaggcaaaccaaguggauu

SEQ ID NO: 2105397 - RNA, 19 nt, Artificial Sequence
  Description of Artificial Sequence: Synthetic oligonucleotide
gaagauguugugggcuggc

SEQ ID NO: 2105398 - RNA, 19 nt, Artificial Sequence
  Description of Artificial Sequence: Synthetic oligonucleotide
gggagugucuacaugagga

SEQ ID NO: 2105399 - RNA, 19 nt, Artificial Sequence
  Description of Artificial Sequence: Synthetic oligonucleotide
cagucuucuguuuagaauu

SEQ ID NO: 2105400 - RNA, 19 nt, Artificial Sequence
  Description of Artificial Sequence: Synthetic oligonucleotide
uaaccaaaucuuugcuuuu

SEQ ID NO: 2105401 - RNA, 19 nt, Artificial Sequence
  Description of Artificial Sequence: Synthetic oligonucleotide
guaugugcaaugguaggga

SEQ ID NO: 2105402 - RNA, 19 nt, Artificial Sequence
  Description of Artificial Sequence: Synthetic oligonucleotide
aucuugcucacuguuaauu

SEQ ID NO: 2105403 - RNA, 19 nt, Artificial Sequence
  Description of Artificial Sequence: Synthetic oligonucleotide
uugucguccucgucagggc

SEQ ID NO: 2105404 - RNA, 19 nt, Artificial Sequence
  Description of Artificial Sequence: Synthetic oligonucleotide
ugauuaccuacugcucucu

SEQ ID NO: 2105405 - RNA, 19 nt, Artificial Sequence
  Description of Artificial Sequence: Synthetic oligonucleotide
caacuacugaggacuuuug

SEQ ID NO: 2105406 - RNA, 19 nt, Artificial Sequence
  Description of Artificial Sequence: Synthetic oligonucleotide
uagggacggacaucugugu

SEQ ID NO: 2105407 - RNA, 19 nt, Artificial Sequence
  Description of Artificial Sequence: Synthetic oligonucleotide
auuguccauccaguauagg

SEQ ID NO: 2105408 - RNA, 19 nt, Artificial Sequence
  Description of Artificial Sequence: Synthetic oligonucleotide
acuaucucauguuccucuu

SEQ ID NO: 2105409 - RNA, 19 nt, Artificial Sequence
  Description of Artificial Sequence: Synthetic oligonucleotide
aguaaugcucuagguagaa

SEQ ID NO: 2105410 - RNA, 19 nt, Artificial Sequence
  Description of Artificial Sequence: Synthetic oligonucleotide
gaggcaacggcaaugacuu

SEQ ID NO: 2105411 - RNA, 19 nt, Artificial Sequence
  Description of Artificial Sequence: Synthetic oligonucleotide
uugcuugaauagaccacua

SEQ ID NO: 2105412 - RNA, 19 nt, Artificial Sequence
  Description of Artificial Sequence: Synthetic oligonucleotide
ugugacugagggugcugcu

SEQ ID NO: 2105413 - RNA, 19 nt, Artificial Sequence
  Description of Artificial Sequence: Synthetic oligonucleotide
cuuuguugguaagucuguc

SEQ ID NO: 2105414 - RNA, 19 nt, Artificial Sequence
  Description of Artificial Sequence: Synthetic oligonucleotide
uucuugcuaugugccuugg

SEQ ID NO: 2105415 - RNA, 19 nt, Artificial Sequence
  Description of Artificial Sequence: Synthetic oligonucleotide
uuaacaugcuagguuucuu

SEQ ID NO: 2105416 - RNA, 19 nt, Artificial Sequence
  Description of Artificial Sequence: Synthetic oligonucleotide
uuggcaauacagcgacuuu

SEQ ID NO: 2105417 - RNA, 19 nt, Artificial Sequence
  Description of Artificial Sequence: Synthetic oligonucleotide
ggagaaguugcaguaugug

SEQ ID NO: 2105418 - RNA, 19 nt, Artificial Sequence
  Description of Artificial Sequence: Synthetic oligonucleotide
gaagcaacugggaacucua

SEQ ID NO: 2105419 - RNA, 19 nt, Artificial Sequence
  Description of Artificial Sequence: Synthetic oligonucleotide
ggugguuauugcuuggcaa

SEQ ID NO: 2105420 - RNA, 19 nt, Artificial Sequence
  Description of Artificial Sequence: Synthetic oligonucleotide
accgagacgccuaaaucca

SEQ ID NO: 2105421 - RNA, 19 nt, Artificial Sequence
  Description of Artificial Sequence: Synthetic oligonucleotide
gccuuuguugguaagucug

SEQ ID NO: 2105422 - RNA, 19 nt, Artificial Sequence
  Description of Artificial Sequence: Synthetic oligonucleotide
ccuaaauccacacacuucu

SEQ ID NO: 2105423 - RNA, 19 nt, Artificial Sequence
  Description of Artificial Sequence: Synthetic oligonucleotide
ggacguauacauaauccuc

SEQ ID NO: 2105424 - RNA, 19 nt, Artificial Sequence
  Description of Artificial Sequence: Synthetic oligonucleotide
auguguuuuguaagaauuu

SEQ ID NO: 2105425 - RNA, 19 nt, Artificial Sequence
  Description of Artificial Sequence: Synthetic oligonucleotide
agacgccuaaauccacaca

SEQ ID NO: 2105426 - RNA, 19 nt, Artificial Sequence
  Description of Artificial Sequence: Synthetic oligonucleotide
gaguaaugcucuagguaga

SEQ ID NO: 2105427 - RNA, 19 nt, Artificial Sequence
  Description of Artificial Sequence: Synthetic oligonucleotide
uccauagggucugugugua

SEQ ID NO: 2105428 - RNA, 19 nt, Artificial Sequence
  Description of Artificial Sequence: Synthetic oligonucleotide
gaggacuuuugauuaccua

SEQ ID NO: 2105429 - RNA, 19 nt, Artificial Sequence
  Description of Artificial Sequence: Synthetic oligonucleotide
uaucuugcucacuguuaau

SEQ ID NO: 2105430 - RNA, 19 nt, Artificial Sequence
  Description of Artificial Sequence: Synthetic oligonucleotide
agggucuguguguaccccu

SEQ ID NO: 2105431 - RNA, 19 nt, Artificial Sequence
  Description of Artificial Sequence: Synthetic oligonucleotide
uugguucacuuuugcuuaa

SEQ ID NO: 2105432 - RNA, 19 nt, Artificial Sequence
  Description of Artificial Sequence: Synthetic oligonucleotide
ugauuuugaaugggugguu

SEQ ID NO: 2105433 - RNA, 19 nt, Artificial Sequence
  Description of Artificial Sequence: Synthetic oligonucleotide
ccugggagugucuacauga

SEQ ID NO: 2105434 - RNA, 19 nt, Artificial Sequence
  Description of Artificial Sequence: Synthetic oligonucleotide
gacugagggugcugcugag

SEQ ID NO: 2105435 - RNA, 19 nt, Artificial Sequence
  Description of Artificial Sequence: Synthetic oligonucleotide
cauaauccucguuugacuu

SEQ ID NO: 2105436 - RNA, 19 nt, Artificial Sequence
  Description of Artificial Sequence: Synthetic oligonucleotide
guugugggcuggcugugac

SEQ ID NO: 2105437 - RNA, 19 nt, Artificial Sequence
  Description of Artificial Sequence: Synthetic oligonucleotide
ugguuauugcuuggcaaua

SEQ ID NO: 2105438 - RNA, 19 nt, Artificial Sequence
  Description of Artificial Sequence: Synthetic oligonucleotide
guggguucguauguguuuc

SEQ ID NO: 2105439 - RNA, 19 nt, Artificial Sequence
  Description of Artificial Sequence: Synthetic oligonucleotide
uuccagucuucuguuuaga

SEQ ID NO: 2105440 - RNA, 19 nt, Artificial Sequence
  Description of Artificial Sequence: Synthetic oligonucleotide
ggaacuaucucauguuccu

SEQ ID NO: 2105441 - RNA, 19 nt, Artificial Sequence
  Description of Artificial Sequence: Synthetic oligonucleotide
augugccuuggacuucaug

SEQ ID NO: 2105442 - RNA, 19 nt, Artificial Sequence
  Description of Artificial Sequence: Synthetic oligonucleotide
agcgacuuuccagucuucu

SEQ ID NO: 2105443 - RNA, 19 nt, Artificial Sequence
  Description of Artificial Sequence: Synthetic oligonucleotide
gaccgcucauaaccaaauc

SEQ ID NO: 2105444 - RNA, 19 nt, Artificial Sequence
  Description of Artificial Sequence: Synthetic oligonucleotide
cuacugaggacuuuugauu

SEQ ID NO: 2105445 - RNA, 19 nt, Artificial Sequence
  Description of Artificial Sequence: Synthetic oligonucleotide
acggacaucuguguggguu

SEQ ID NO: 2105446 - RNA, 19 nt, Artificial Sequence
  Description of Artificial Sequence: Synthetic oligonucleotide
gcugaaguuuucuggucac

SEQ ID NO: 2105447 - RNA, 19 nt, Artificial Sequence
  Description of Artificial Sequence: Synthetic oligonucleotide
accuacugcucucuugcuu

SEQ ID NO: 2105448 - RNA, 19 nt, Artificial Sequence
  Description of Artificial Sequence: Synthetic oligonucleotide
aaguugcaguaugugcaau

SEQ ID NO: 2105449 - RNA, 19 nt, Artificial Sequence
  Description of Artificial Sequence: Synthetic oligonucleotide
cugauuuugaauggguggu

SEQ ID NO: 2105450 - RNA, 19 nt, Artificial Sequence
  Description of Artificial Sequence: Synthetic oligonucleotide
cucuaagguccuccucuac

SEQ ID NO: 2105451 - RNA, 19 nt, Artificial Sequence
  Description of Artificial Sequence: Synthetic oligonucleotide
gguuauugcuuggcaauac

SEQ ID NO: 2105452 - RNA, 19 nt, Artificial Sequence
  Description of Artificial Sequence: Synthetic oligonucleotide
ggggucaagcuguacugug

SEQ ID NO: 2105453 - RNA, 19 nt, Artificial Sequence
  Description of Artificial Sequence: Synthetic oligonucleotide
gccucggacguauacauaa

SEQ ID NO: 2105454 - RNA, 19 nt, Artificial Sequence
  Description of Artificial Sequence: Synthetic oligonucleotide
ggaagauguugugggcugg

SEQ ID NO: 2105455 - RNA, 19 nt, Artificial Sequence
  Description of Artificial Sequence: Synthetic oligonucleotide
cacucugaggcaacggcaa

SEQ ID NO: 2105456 - RNA, 19 nt, Artificial Sequence
  Description of Artificial Sequence: Synthetic oligonucleotide
gggaacucuaagguccucc

SEQ ID NO: 2105457 - RNA, 19 nt, Artificial Sequence
  Description of Artificial Sequence: Synthetic oligonucleotide
uggguucguauguguuucu

SEQ ID NO: 2105458 - RNA, 19 nt, Artificial Sequence
  Description of Artificial Sequence: Synthetic oligonucleotide
uaccuacugcucucuugcu

SEQ ID NO: 2105459 - RNA, 19 nt, Artificial Sequence
  Description of Artificial Sequence: Synthetic oligonucleotide
cuaugugccuuggacuuca

SEQ ID NO: 2105460 - RNA, 19 nt, Artificial Sequence
  Description of Artificial Sequence: Synthetic oligonucleotide
ccacuugcuugaauagacc

SEQ ID NO: 2105461 - RNA, 19 nt, Artificial Sequence
  Description of Artificial Sequence: Synthetic oligonucleotide
guauccuccaucaaauauu

SEQ ID NO: 2105462 - RNA, 19 nt, Artificial Sequence
  Description of Artificial Sequence: Synthetic oligonucleotide
acaacggauuccacauucu

SEQ ID NO: 2105463 - RNA, 19 nt, Artificial Sequence
  Description of Artificial Sequence: Synthetic oligonucleotide
cauugucguccucgucagg

SEQ ID NO: 2105464 - RNA, 19 nt, Artificial Sequence
  Description of Artificial Sequence: Synthetic oligonucleotide
ggucuugcucaucuaucac

SEQ ID NO: 2105465 - RNA, 19 nt, Artificial Sequence
  Description of Artificial Sequence: Synthetic oligonucleotide
uugcaguauggugccuggc

SEQ ID NO: 2105466 - RNA, 19 nt, Artificial Sequence
  Description of Artificial Sequence: Synthetic oligonucleotide
agaccgcucauaaccaaau

SEQ ID NO: 2105467 - RNA, 19 nt, Artificial Sequence
  Description of Artificial Sequence: Synthetic oligonucleotide
ucugggucuugcucaucua

SEQ ID NO: 2105468 - RNA, 19 nt, Artificial Sequence
  Description of Artificial Sequence: Synthetic oligonucleotide
ugucuacaugaggaacuau

SEQ ID NO: 2105469 - RNA, 19 nt, Artificial Sequence
  Description of Artificial Sequence: Synthetic oligonucleotide
ggugaguaaugcucuaggu

SEQ ID NO: 2105470 - RNA, 19 nt, Artificial Sequence
  Description of Artificial Sequence: Synthetic oligonucleotide
agguuucuuacaacggauu

SEQ ID NO: 2105471 - RNA, 19 nt, Artificial Sequence
  Description of Artificial Sequence: Synthetic oligonucleotide
cauguuccucuuuugcagu

SEQ ID NO: 2105472 - RNA, 19 nt, Artificial Sequence
  Description of Artificial Sequence: Synthetic oligonucleotide
gacuuguauccuccaucaa

SEQ ID NO: 2105473 - RNA, 19 nt, Artificial Sequence
  Description of Artificial Sequence: Synthetic oligonucleotide
ggacaucuguguggguucg

SEQ ID NO: 2105474 - RNA, 19 nt, Artificial Sequence
  Description of Artificial Sequence: Synthetic oligonucleotide
uugguaagucuguccuguu

SEQ ID NO: 2105475 - RNA, 19 nt, Artificial Sequence
  Description of Artificial Sequence: Synthetic oligonucleotide
auagaccacuaaaucugau

SEQ ID NO: 2105476 - RNA, 19 nt, Artificial Sequence
  Description of Artificial Sequence: Synthetic oligonucleotide
caucuuggugaguaaugcu

SEQ ID NO: 2105477 - RNA, 19 nt, Artificial Sequence
  Description of Artificial Sequence: Synthetic oligonucleotide
ggucacucugaggcaacgg

SEQ ID NO: 2105478 - RNA, 19 nt, Artificial Sequence
  Description of Artificial Sequence: Synthetic oligonucleotide
caguauaggcugaaguuuu

SEQ ID NO: 2105479 - RNA, 19 nt, Artificial Sequence
  Description of Artificial Sequence: Synthetic oligonucleotide
gaccacuaaaucugauuuu

SEQ ID NO: 2105480 - RNA, 19 nt, Artificial Sequence
  Description of Artificial Sequence: Synthetic oligonucleotide
uucaacuacugaggacuuu

SEQ ID NO: 2105481 - RNA, 19 nt, Artificial Sequence
  Description of Artificial Sequence: Synthetic oligonucleotide
aggcaacggcaaugacuuc

SEQ ID NO: 2105482 - RNA, 19 nt, Artificial Sequence
  Description of Artificial Sequence: Synthetic oligonucleotide
ucuacacucccagggucuu

SEQ ID NO: 2105483 - RNA, 19 nt, Artificial Sequence
  Description of Artificial Sequence: Synthetic oligonucleotide
caucuaucacacccaccga

SEQ ID NO: 2105484 - RNA, 19 nt, Artificial Sequence
  Description of Artificial Sequence: Synthetic oligonucleotide
gggucaagcuguacugugc

SEQ ID NO: 2105485 - RNA, 19 nt, Artificial Sequence
  Description of Artificial Sequence: Synthetic oligonucleotide
guauaggcugaaguuuucu

SEQ ID NO: 2105486 - RNA, 19 nt, Artificial Sequence
  Description of Artificial Sequence: Synthetic oligonucleotide
cuuggcaauacagcgacuu

SEQ ID NO: 2105487 - RNA, 19 nt, Artificial Sequence
  Description of Artificial Sequence: Synthetic oligonucleotide
acgccuaaauccacacacu

SEQ ID NO: 2105488 - RNA, 19 nt, Artificial Sequence
  Description of Artificial Sequence: Synthetic oligonucleotide
gaaggagaaguugcaguau

SEQ ID NO: 2105489 - RNA, 19 nt, Artificial Sequence
  Description of Artificial Sequence: Synthetic oligonucleotide
uguuggggucaagcuguac

SEQ ID NO: 2105490 - RNA, 19 nt, Artificial Sequence
  Description of Artificial Sequence: Synthetic oligonucleotide
ugccucggacguauacaua

SEQ ID NO: 2105491 - RNA, 19 nt, Artificial Sequence
  Description of Artificial Sequence: Synthetic oligonucleotide
cugaggcaacggcaaugac

SEQ ID NO: 2105492 - RNA, 19 nt, Artificial Sequence
  Description of Artificial Sequence: Synthetic oligonucleotide
cgucagggccaucagauuc

SEQ ID NO: 2105493 - RNA, 19 nt, Artificial Sequence
  Description of Artificial Sequence: Synthetic oligonucleotide
auucaacuacugaggacuu

SEQ ID NO: 2105494 - RNA, 19 nt, Artificial Sequence
  Description of Artificial Sequence: Synthetic oligonucleotide
ucacacccaccgagacgcc

SEQ ID NO: 2105495 - RNA, 19 nt, Artificial Sequence
  Description of Artificial Sequence: Synthetic oligonucleotide
aguauggugccuggccuuu

SEQ ID NO: 2105496 - RNA, 19 nt, Artificial Sequence
  Description of Artificial Sequence: Synthetic oligonucleotide
ggacuuuugauuaccuacu

SEQ ID NO: 2105497 - RNA, 19 nt, Artificial Sequence
  Description of Artificial Sequence: Synthetic oligonucleotide
cuccaucaaauauuuuaau

SEQ ID NO: 2105498 - RNA, 19 nt, Artificial Sequence
  Description of Artificial Sequence: Synthetic oligonucleotide
ugcucagaacagucaucuu

SEQ ID NO: 2105499 - RNA, 19 nt, Artificial Sequence
  Description of Artificial Sequence: Synthetic oligonucleotide
ucgucagggccaucagauu

SEQ ID NO: 2105500 - RNA, 19 nt, Artificial Sequence
  Description of Artificial Sequence: Synthetic oligonucleotide
gcucuagguagaaugucca

SEQ ID NO: 2105501 - RNA, 19 nt, Artificial Sequence
  Description of Artificial Sequence: Synthetic oligonucleotide
cacauuguccauccaguau

SEQ ID NO: 2105502 - RNA, 19 nt, Artificial Sequence
  Description of Artificial Sequence: Synthetic oligonucleotide
cagagucaucuuuauugcu

SEQ ID NO: 2105503 - RNA, 19 nt, Artificial Sequence
  Description of Artificial Sequence: Synthetic oligonucleotide
uggguuacuggagcacauu

SEQ ID NO: 2105504 - RNA, 19 nt, Artificial Sequence
  Description of Artificial Sequence: Synthetic oligonucleotide
cacuuuugcuuaaggaauu

SEQ ID NO: 2105505 - RNA, 19 nt, Artificial Sequence
  Description of Artificial Sequence: Synthetic oligonucleotide
gccuaaauccacacacuuc

SEQ ID NO: 2105506 - RNA, 19 nt, Artificial Sequence
  Description of Artificial Sequence: Synthetic oligonucleotide
ggcaaaccaaguggauuug

SEQ ID NO: 2105507 - RNA, 19 nt, Artificial Sequence
  Description of Artificial Sequence: Synthetic oligonucleotide
gcaacggcaaugacuucug

SEQ ID NO: 2105508 - RNA, 19 nt, Artificial Sequence
  Description of Artificial Sequence: Synthetic oligonucleotide
ccucuacacucccaggguc

SEQ ID NO: 2105509 - RNA, 19 nt, Artificial Sequence
  Description of Artificial Sequence: Synthetic oligonucleotide
uaugugccuuggacuucau

SEQ ID NO: 2105510 - RNA, 19 nt, Artificial Sequence
  Description of Artificial Sequence: Synthetic oligonucleotide
gucuucuguuuagaauuaa

SEQ ID NO: 2105511 - RNA, 19 nt, Artificial Sequence
  Description of Artificial Sequence: Synthetic oligonucleotide
ccaccgagacgccuaaauc

SEQ ID NO: 2105512 - RNA, 19 nt, Artificial Sequence
  Description of Artificial Sequence: Synthetic oligonucleotide
ggcaacggcaaugacuucu

SEQ ID NO: 2105513 - RNA, 19 nt, Artificial Sequence
  Description of Artificial Sequence: Synthetic oligonucleotide
ggaccugggagugucuaca

SEQ ID NO: 2105514 - RNA, 19 nt, Artificial Sequence
  Description of Artificial Sequence: Synthetic oligonucleotide
ccacuaaaucugauuuuga

SEQ ID NO: 2105515 - RNA, 19 nt, Artificial Sequence
  Description of Artificial Sequence: Synthetic oligonucleotide
cugccucggacguauacau

SEQ ID NO: 2105516 - RNA, 19 nt, Artificial Sequence
  Description of Artificial Sequence: Synthetic oligonucleotide
gauuaccuacugcucucuu

SEQ ID NO: 2105517 - RNA, 19 nt, Artificial Sequence
  Description of Artificial Sequence: Synthetic oligonucleotide
gcaguauggugccuggccu

SEQ ID NO: 2105518 - RNA, 19 nt, Artificial Sequence
  Description of Artificial Sequence: Synthetic oligonucleotide
gagaagcaacugggaacuc

SEQ ID NO: 2105519 - RNA, 19 nt, Artificial Sequence
  Description of Artificial Sequence: Synthetic oligonucleotide
guauggugccuggccuuug

SEQ ID NO: 2105520 - RNA, 19 nt, Artificial Sequence
  Description of Artificial Sequence: Synthetic oligonucleotide
cuacacucccagggucuug

SEQ ID NO: 2105521 - RNA, 19 nt, Artificial Sequence
  Description of Artificial Sequence: Synthetic oligonucleotide
gucguccucgucagggcca

SEQ ID NO: 2105522 - RNA, 19 nt, Artificial Sequence
  Description of Artificial Sequence: Synthetic oligonucleotide
guaccccugagaagcaacu

SEQ ID NO: 2105523 - RNA, 19 nt, Artificial Sequence
  Description of Artificial Sequence: Synthetic oligonucleotide
cauauccagaccgcucaua

SEQ ID NO: 2105524 - RNA, 19 nt, Artificial Sequence
  Description of Artificial Sequence: Synthetic oligonucleotide
cuaaauccacacacuucuu

SEQ ID NO: 2105525 - RNA, 19 nt, Artificial Sequence
  Description of Artificial Sequence: Synthetic oligonucleotide
cucuagguagaauguccau

SEQ ID NO: 2105526 - RNA, 19 nt, Artificial Sequence
  Description of Artificial Sequence: Synthetic oligonucleotide
ugggaacucuaagguccuc

SEQ ID NO: 2105527 - RNA, 19 nt, Artificial Sequence
  Description of Artificial Sequence: Synthetic oligonucleotide
ggaucauauccagaccgcu

SEQ ID NO: 2105528 - RNA, 19 nt, Artificial Sequence
  Description of Artificial Sequence: Synthetic oligonucleotide
guacugugcucagaacagu

SEQ ID NO: 2105529 - RNA, 19 nt, Artificial Sequence
  Description of Artificial Sequence: Synthetic oligonucleotide
gguucguauguguuucuuu

SEQ ID NO: 2105530 - RNA, 19 nt, Artificial Sequence
  Description of Artificial Sequence: Synthetic oligonucleotide
caucuguguggguucguau

SEQ ID NO: 2105531 - RNA, 19 nt, Artificial Sequence
  Description of Artificial Sequence: Synthetic oligonucleotide
gaccugggagugucuacau

SEQ ID NO: 2105532 - RNA, 19 nt, Artificial Sequence
  Description of Artificial Sequence: Synthetic oligonucleotide
guaggcaaaccaaguggau

SEQ ID NO: 2105533 - RNA, 19 nt, Artificial Sequence
  Description of Artificial Sequence: Synthetic oligonucleotide
ggccuuuguugguaagucu

SEQ ID NO: 2105534 - RNA, 19 nt, Artificial Sequence
  Description of Artificial Sequence: Synthetic oligonucleotide
ccgagacgccuaaauccac

SEQ ID NO: 2105535 - RNA, 19 nt, Artificial Sequence
  Description of Artificial Sequence: Synthetic oligonucleotide
guaaugcucuagguagaau

SEQ ID NO: 2105536 - RNA, 19 nt, Artificial Sequence
  Description of Artificial Sequence: Synthetic oligonucleotide
aauccucguuugacuugua

SEQ ID NO: 2105537 - RNA, 19 nt, Artificial Sequence
  Description of Artificial Sequence: Synthetic oligonucleotide
ggacuucauguguuuugua

SEQ ID NO: 2105538 - RNA, 19 nt, Artificial Sequence
  Description of Artificial Sequence: Synthetic oligonucleotide
cuuccccugccucggacgu

SEQ ID NO: 2105539 - RNA, 19 nt, Artificial Sequence
  Description of Artificial Sequence: Synthetic oligonucleotide
cggacguauacauaauccu

SEQ ID NO: 2105540 - RNA, 19 nt, Artificial Sequence
  Description of Artificial Sequence: Synthetic oligonucleotide
guguaccccugagaagcaa

SEQ ID NO: 2105541 - RNA, 19 nt, Artificial Sequence
  Description of Artificial Sequence: Synthetic oligonucleotide
gcuaugugccuuggacuuc

SEQ ID NO: 2105542 - RNA, 19 nt, Artificial Sequence
  Description of Artificial Sequence: Synthetic oligonucleotide
cgagacgccuaaauccaca

SEQ ID NO: 2105543 - RNA, 19 nt, Artificial Sequence
  Description of Artificial Sequence: Synthetic oligonucleotide
ccgcucauaaccaaaucuu

SEQ ID NO: 2105544 - RNA, 19 nt, Artificial Sequence
  Description of Artificial Sequence: Synthetic oligonucleotide
cccugccucggacguauac

SEQ ID NO: 2105545 - RNA, 19 nt, Artificial Sequence
  Description of Artificial Sequence: Synthetic oligonucleotide
ccugccucggacguauaca

SEQ ID NO: 2105546 - RNA, 19 nt, Artificial Sequence
  Description of Artificial Sequence: Synthetic oligonucleotide
cuguccuguuggggucaag

SEQ ID NO: 2105547 - RNA, 19 nt, Artificial Sequence
  Description of Artificial Sequence: Synthetic oligonucleotide
cuguuggggucaagcugua

SEQ ID NO: 2105548 - RNA, 19 nt, Artificial Sequence
  Description of Artificial Sequence: Synthetic oligonucleotide
guguggguucguauguguu

SEQ ID NO: 2105549 - RNA, 19 nt, Artificial Sequence
  Description of Artificial Sequence: Synthetic oligonucleotide
ccucgucagggccaucaga

SEQ ID NO: 2105550 - RNA, 19 nt, Artificial Sequence
  Description of Artificial Sequence: Synthetic oligonucleotide
gacggacaucugugugggu

SEQ ID NO: 2105551 - RNA, 19 nt, Artificial Sequence
  Description of Artificial Sequence: Synthetic oligonucleotide
caacggcaaugacuucugu

SEQ ID NO: 2105552 - RNA, 19 nt, Artificial Sequence
  Description of Artificial Sequence: Synthetic oligonucleotide
ccagaccgcucauaaccaa

SEQ ID NO: 2105553 - RNA, 19 nt, Artificial Sequence
  Description of Artificial Sequence: Synthetic oligonucleotide
cacccaccgagacgccuaa

SEQ ID NO: 2105554 - RNA, 19 nt, Artificial Sequence
  Description of Artificial Sequence: Synthetic oligonucleotide
uuccccugccucggacgua

SEQ ID NO: 2105555 - RNA, 19 nt, Artificial Sequence
  Description of Artificial Sequence: Synthetic oligonucleotide
cuuuugcaguauggugccu

SEQ ID NO: 2105556 - RNA, 19 nt, Artificial Sequence
  Description of Artificial Sequence: Synthetic oligonucleotide
gugcaaugguagggacgga

SEQ ID NO: 2105557 - RNA, 19 nt, Artificial Sequence
  Description of Artificial Sequence: Synthetic oligonucleotide
ggggaccugggagugucua

SEQ ID NO: 2105558 - RNA, 19 nt, Artificial Sequence
  Description of Artificial Sequence: Synthetic oligonucleotide
ccauccaguauaggcugaa

SEQ ID NO: 2105559 - RNA, 19 nt, Artificial Sequence
  Description of Artificial Sequence: Synthetic oligonucleotide
cccaccgagacgccuaaau

SEQ ID NO: 2105560 - RNA, 19 nt, Artificial Sequence
  Description of Artificial Sequence: Synthetic oligonucleotide
acccaccgagacgccuaaa

SEQ ID NO: 2105561 - RNA, 19 nt, Artificial Sequence
  Description of Artificial Sequence: Synthetic oligonucleotide
gccuuggacuucauguguu

SEQ ID NO: 2105562 - RNA, 19 nt, Artificial Sequence
  Description of Artificial Sequence: Synthetic oligonucleotide
cgccuaaauccacacacuu

SEQ ID NO: 2105563 - RNA, 19 nt, Artificial Sequence
  Description of Artificial Sequence: Synthetic oligonucleotide
ccucggacguauacauaau

SEQ ID NO: 2105564 - RNA, 19 nt, Artificial Sequence
  Description of Artificial Sequence: Synthetic oligonucleotide
cagggucuugaaggccacu

SEQ ID NO: 2105565 - RNA, 19 nt, Artificial Sequence
  Description of Artificial Sequence: Synthetic oligonucleotide
gcuuggcaauacagcgacu

SEQ ID NO: 2105566 - RNA, 19 nt, Artificial Sequence
  Description of Artificial Sequence: Synthetic oligonucleotide
ccccugccucggacguaua

SEQ ID NO: 2105567 - RNA, 19 nt, Artificial Sequence
  Description of Artificial Sequence: Synthetic oligonucleotide
aauuuugagacauuuuggc

SEQ ID NO: 2105568 - RNA, 19 nt, Artificial Sequence
  Description of Artificial Sequence: Synthetic oligonucleotide
gaugcaaucaaauuuaucc

SEQ ID NO: 2105569 - RNA, 19 nt, Artificial Sequence
  Description of Artificial Sequence: Synthetic oligonucleotide
aauuuauccuuauucauuc

SEQ ID NO: 2105570 - RNA, 19 nt, Artificial Sequence
  Description of Artificial Sequence: Synthetic oligonucleotide
uguuuuaugcuauugagcc

SEQ ID NO: 2105571 - RNA, 19 nt, Artificial Sequence
  Description of Artificial Sequence: Synthetic oligonucleotide
uucuauguaaaguauaucc

SEQ ID NO: 2105572 - RNA, 19 nt, Artificial Sequence
  Description of Artificial Sequence: Synthetic oligonucleotide
aauagauuuggguuacccc

SEQ ID NO: 2105573 - RNA, 19 nt, Artificial Sequence
  Description of Artificial Sequence: Synthetic oligonucleotide
aaugagaaauuauuucaac

SEQ ID NO: 2105574 - RNA, 19 nt, Artificial Sequence
  Description of Artificial Sequence: Synthetic oligonucleotide
ucauucuuccuuaaaaggg

SEQ ID NO: 2105575 - RNA, 19 nt, Artificial Sequence
  Description of Artificial Sequence: Synthetic oligonucleotide
uuagaaaucguaaaugaga

SEQ ID NO: 2105576 - RNA, 19 nt, Artificial Sequence
  Description of Artificial Sequence: Synthetic oligonucleotide
uauauaaacaauccgugca

SEQ ID NO: 2105577 - RNA, 19 nt, Artificial Sequence
  Description of Artificial Sequence: Synthetic oligonucleotide
gaaucugaaauaaugaugc

SEQ ID NO: 2105578 - RNA, 19 nt, Artificial Sequence
  Description of Artificial Sequence: Synthetic oligonucleotide
uuuaucuacaaaaucuagc

SEQ ID NO: 2105579 - RNA, 19 nt, Artificial Sequence
  Description of Artificial Sequence: Synthetic oligonucleotide
aaaguauauccuuugcgag

SEQ ID NO: 2105580 - RNA, 19 nt, Artificial Sequence
  Description of Artificial Sequence: Synthetic oligonucleotide
uagguacuaaauaucaggg

SEQ ID NO: 2105581 - RNA, 19 nt, Artificial Sequence
  Description of Artificial Sequence: Synthetic oligonucleotide
uuauagguacuaaauauca

SEQ ID NO: 2105582 - RNA, 19 nt, Artificial Sequence
  Description of Artificial Sequence: Synthetic oligonucleotide
ugaaucugaaauaaugaug

SEQ ID NO: 2105583 - RNA, 19 nt, Artificial Sequence
  Description of Artificial Sequence: Synthetic oligonucleotide
auggaaacuucuuaacucc

SEQ ID NO: 2105584 - RNA, 19 nt, Artificial Sequence
  Description of Artificial Sequence: Synthetic oligonucleotide
aaauagauuuggguuaccc

SEQ ID NO: 2105585 - RNA, 19 nt, Artificial Sequence
  Description of Artificial Sequence: Synthetic oligonucleotide
ucuuagaaaguugagaagc

SEQ ID NO: 2105586 - RNA, 19 nt, Artificial Sequence
  Description of Artificial Sequence: Synthetic oligonucleotide
aaaguugagaagcucuauc

SEQ ID NO: 2105587 - RNA, 19 nt, Artificial Sequence
  Description of Artificial Sequence: Synthetic oligonucleotide
aaggcauugaugucacugc

SEQ ID NO: 2105588 - RNA, 19 nt, Artificial Sequence
  Description of Artificial Sequence: Synthetic oligonucleotide
uaaaguauauccuuugcga

SEQ ID NO: 2105589 - RNA, 19 nt, Artificial Sequence
  Description of Artificial Sequence: Synthetic oligonucleotide
uacacauuucaauuguugg

SEQ ID NO: 2105590 - RNA, 19 nt, Artificial Sequence
  Description of Artificial Sequence: Synthetic oligonucleotide
aaguauauccuuugcgagg

SEQ ID NO: 2105591 - RNA, 19 nt, Artificial Sequence
  Description of Artificial Sequence: Synthetic oligonucleotide
uugagaagcucuaucaucc

SEQ ID NO: 2105592 - RNA, 19 nt, Artificial Sequence
  Description of Artificial Sequence: Synthetic oligonucleotide
aaacaauccgugcauaucu

SEQ ID NO: 2105593 - RNA, 19 nt, Artificial Sequence
  Description of Artificial Sequence: Synthetic oligonucleotide
ugucuuuaaacauuacucc

SEQ ID NO: 2105594 - RNA, 19 nt, Artificial Sequence
  Description of Artificial Sequence: Synthetic oligonucleotide
agcaaaacugcacuuuugc

SEQ ID NO: 2105595 - RNA, 19 nt, Artificial Sequence
  Description of Artificial Sequence: Synthetic oligonucleotide
aaauuuugagacauuuugg

SEQ ID NO: 2105596 - RNA, 19 nt, Artificial Sequence
  Description of Artificial Sequence: Synthetic oligonucleotide
aacaaaacuuucaugguuc

SEQ ID NO: 2105597 - RNA, 19 nt, Artificial Sequence
  Description of Artificial Sequence: Synthetic oligonucleotide
uuuguaacuguuuaucuac

SEQ ID NO: 2105598 - RNA, 19 nt, Artificial Sequence
  Description of Artificial Sequence: Synthetic oligonucleotide
aucauucuuccuuaaaagg

SEQ ID NO: 2105599 - RNA, 19 nt, Artificial Sequence
  Description of Artificial Sequence: Synthetic oligonucleotide
uaaaacccaaucuaugaag

SEQ ID NO: 2105600 - RNA, 19 nt, Artificial Sequence
  Description of Artificial Sequence: Synthetic oligonucleotide
uugauaagaaucuuguagu

SEQ ID NO: 2105601 - RNA, 19 nt, Artificial Sequence
  Description of Artificial Sequence: Synthetic oligonucleotide
aaaucuagcaaaacugcac

SEQ ID NO: 2105602 - RNA, 19 nt, Artificial Sequence
  Description of Artificial Sequence: Synthetic oligonucleotide
guaaaguauauccuuugcg

SEQ ID NO: 2105603 - RNA, 19 nt, Artificial Sequence
  Description of Artificial Sequence: Synthetic oligonucleotide
uccuuauucauucuuagaa

SEQ ID NO: 2105604 - RNA, 19 nt, Artificial Sequence
  Description of Artificial Sequence: Synthetic oligonucleotide
uuuggguuaccccaaagug

SEQ ID NO: 2105605 - RNA, 19 nt, Artificial Sequence
  Description of Artificial Sequence: Synthetic oligonucleotide
aaucuuguaguuccauagg

SEQ ID NO: 2105606 - RNA, 19 nt, Artificial Sequence
  Description of Artificial Sequence: Synthetic oligonucleotide
uccagcauuauuacagugg

SEQ ID NO: 2105607 - RNA, 19 nt, Artificial Sequence
  Description of Artificial Sequence: Synthetic oligonucleotide
ucuaugaagacugaauuug

SEQ ID NO: 2105608 - RNA, 19 nt, Artificial Sequence
  Description of Artificial Sequence: Synthetic oligonucleotide
ucuaugauuguauugucga

SEQ ID NO: 2105609 - RNA, 19 nt, Artificial Sequence
  Description of Artificial Sequence: Synthetic oligonucleotide
auuucaacaccugaagacc

SEQ ID NO: 2105610 - RNA, 19 nt, Artificial Sequence
  Description of Artificial Sequence: Synthetic oligonucleotide
aaucuagcaaaacugcacu

SEQ ID NO: 2105611 - RNA, 19 nt, Artificial Sequence
  Description of Artificial Sequence: Synthetic oligonucleotide
uccaccaucgccuauauaa

SEQ ID NO: 2105612 - RNA, 19 nt, Artificial Sequence
  Description of Artificial Sequence: Synthetic oligonucleotide
agagagauuucucugaugu

SEQ ID NO: 2105613 - RNA, 19 nt, Artificial Sequence
  Description of Artificial Sequence: Synthetic oligonucleotide
aaucuaugaagacugaauu

SEQ ID NO: 2105614 - RNA, 19 nt, Artificial Sequence
  Description of Artificial Sequence: Synthetic oligonucleotide
uuauuagaaaucguaaaug

SEQ ID NO: 2105615 - RNA, 19 nt, Artificial Sequence
  Description of Artificial Sequence: Synthetic oligonucleotide
ucuuuaauuugccagcugu

SEQ ID NO: 2105616 - RNA, 19 nt, Artificial Sequence
  Description of Artificial Sequence: Synthetic oligonucleotide
auucuuagaaaguugagaa

SEQ ID NO: 2105617 - RNA, 19 nt, Artificial Sequence
  Description of Artificial Sequence: Synthetic oligonucleotide
ucuauguaaaguauauccu

SEQ ID NO: 2105618 - RNA, 19 nt, Artificial Sequence
  Description of Artificial Sequence: Synthetic oligonucleotide
caaaaucuagcaaaacugc

SEQ ID NO: 2105619 - RNA, 19 nt, Artificial Sequence
  Description of Artificial Sequence: Synthetic oligonucleotide
cuauugucaucuaugauug

SEQ ID NO: 2105620 - RNA, 19 nt, Artificial Sequence
  Description of Artificial Sequence: Synthetic oligonucleotide
uuggguuaccccaaagugg

SEQ ID NO: 2105621 - RNA, 19 nt, Artificial Sequence
  Description of Artificial Sequence: Synthetic oligonucleotide
aaagacucugcccauaaau

SEQ ID NO: 2105622 - RNA, 19 nt, Artificial Sequence
  Description of Artificial Sequence: Synthetic oligonucleotide
uuuggcaagaguucuaugu

SEQ ID NO: 2105623 - RNA, 19 nt, Artificial Sequence
  Description of Artificial Sequence: Synthetic oligonucleotide
aguauauccuuugcgaggc

SEQ ID NO: 2105624 - RNA, 19 nt, Artificial Sequence
  Description of Artificial Sequence: Synthetic oligonucleotide
aacauuacuccauuucugu

SEQ ID NO: 2105625 - RNA, 19 nt, Artificial Sequence
  Description of Artificial Sequence: Synthetic oligonucleotide
acuauugucaucuaugauu

SEQ ID NO: 2105626 - RNA, 19 nt, Artificial Sequence
  Description of Artificial Sequence: Synthetic oligonucleotide
cucccaaauacuuaaagac

SEQ ID NO: 2105627 - RNA, 19 nt, Artificial Sequence
  Description of Artificial Sequence: Synthetic oligonucleotide
auagauuuggguuacccca

SEQ ID NO: 2105628 - RNA, 19 nt, Artificial Sequence
  Description of Artificial Sequence: Synthetic oligonucleotide
ugaaauaaugaugcaauca

SEQ ID NO: 2105629 - RNA, 19 nt, Artificial Sequence
  Description of Artificial Sequence: Synthetic oligonucleotide
cuuuguuuggagcacauug

SEQ ID NO: 2105630 - RNA, 19 nt, Artificial Sequence
  Description of Artificial Sequence: Synthetic oligonucleotide
uuaaaaggguuacuggaca

SEQ ID NO: 2105631 - RNA, 19 nt, Artificial Sequence
  Description of Artificial Sequence: Synthetic oligonucleotide
aaacccaaucuaugaagac

SEQ ID NO: 2105632 - RNA, 19 nt, Artificial Sequence
  Description of Artificial Sequence: Synthetic oligonucleotide
uucuuuuaccccuucaucu

SEQ ID NO: 2105633 - RNA, 19 nt, Artificial Sequence
  Description of Artificial Sequence: Synthetic oligonucleotide
aauuguuggcacauuacuc

SEQ ID NO: 2105634 - RNA, 19 nt, Artificial Sequence
  Description of Artificial Sequence: Synthetic oligonucleotide
uauugcaagaaugagcaug

SEQ ID NO: 2105635 - RNA, 19 nt, Artificial Sequence
  Description of Artificial Sequence: Synthetic oligonucleotide
uuguuuuaugcuauugagc

SEQ ID NO: 2105636 - RNA, 19 nt, Artificial Sequence
  Description of Artificial Sequence: Synthetic oligonucleotide
cuuguaguuccauaggaag

SEQ ID NO: 2105637 - RNA, 19 nt, Artificial Sequence
  Description of Artificial Sequence: Synthetic oligonucleotide
uuuuaugcuauugagccca

SEQ ID NO: 2105638 - RNA, 19 nt, Artificial Sequence
  Description of Artificial Sequence: Synthetic oligonucleotide
uggauuuguaaacacauua

SEQ ID NO: 2105639 - RNA, 19 nt, Artificial Sequence
  Description of Artificial Sequence: Synthetic oligonucleotide
acuccuuuauuagaaaucg

SEQ ID NO: 2105640 - RNA, 19 nt, Artificial Sequence
  Description of Artificial Sequence: Synthetic oligonucleotide
acuauugcaagaaugagca

SEQ ID NO: 2105641 - RNA, 19 nt, Artificial Sequence
  Description of Artificial Sequence: Synthetic oligonucleotide
auuaucaaagacaucauga

SEQ ID NO: 2105642 - RNA, 19 nt, Artificial Sequence
  Description of Artificial Sequence: Synthetic oligonucleotide
uugucgaagucaaauacca

SEQ ID NO: 2105643 - RNA, 19 nt, Artificial Sequence
  Description of Artificial Sequence: Synthetic oligonucleotide
aagucaaauaccaacaaaa

SEQ ID NO: 2105644 - RNA, 19 nt, Artificial Sequence
  Description of Artificial Sequence: Synthetic oligonucleotide
auaggaagcucuuuguuug

SEQ ID NO: 2105645 - RNA, 19 nt, Artificial Sequence
  Description of Artificial Sequence: Synthetic oligonucleotide
uagaaaguugagaagcucu

SEQ ID NO: 2105646 - RNA, 19 nt, Artificial Sequence
  Description of Artificial Sequence: Synthetic oligonucleotide
cauuguuaucaaaagcugc

SEQ ID NO: 2105647 - RNA, 19 nt, Artificial Sequence
  Description of Artificial Sequence: Synthetic oligonucleotide
uaugauuguauugucgaag

SEQ ID NO: 2105648 - RNA, 19 nt, Artificial Sequence
  Description of Artificial Sequence: Synthetic oligonucleotide
aucuacaaaaucuagcaaa

SEQ ID NO: 2105649 - RNA, 19 nt, Artificial Sequence
  Description of Artificial Sequence: Synthetic oligonucleotide
ucuacaaaaucuagcaaaa

SEQ ID NO: 2105650 - RNA, 19 nt, Artificial Sequence
  Description of Artificial Sequence: Synthetic oligonucleotide
aauaccaacaaaacuuuca

SEQ ID NO: 2105651 - RNA, 19 nt, Artificial Sequence
  Description of Artificial Sequence: Synthetic oligonucleotide
uccuuaaaaggguuacugg

SEQ ID NO: 2105652 - RNA, 19 nt, Artificial Sequence
  Description of Artificial Sequence: Synthetic oligonucleotide
uaugcagagagauuucucu

SEQ ID NO: 2105653 - RNA, 19 nt, Artificial Sequence
  Description of Artificial Sequence: Synthetic oligonucleotide
caucauucuuccuuaaaag

SEQ ID NO: 2105654 - RNA, 19 nt, Artificial Sequence
  Description of Artificial Sequence: Synthetic oligonucleotide
uggguuaccccaaaguggc

SEQ ID NO: 2105655 - RNA, 19 nt, Artificial Sequence
  Description of Artificial Sequence: Synthetic oligonucleotide
ugaauuugaaucugaaaua

SEQ ID NO: 2105656 - RNA, 19 nt, Artificial Sequence
  Description of Artificial Sequence: Synthetic oligonucleotide
uuaucaaagacaucaugaa

SEQ ID NO: 2105657 - RNA, 19 nt, Artificial Sequence
  Description of Artificial Sequence: Synthetic oligonucleotide
gagaagaccauuguuauca

SEQ ID NO: 2105658 - RNA, 19 nt, Artificial Sequence
  Description of Artificial Sequence: Synthetic oligonucleotide
uguuuaucuacaaaaucua

SEQ ID NO: 2105659 - RNA, 19 nt, Artificial Sequence
  Description of Artificial Sequence: Synthetic oligonucleotide
cuuaaaaggguuacuggac

SEQ ID NO: 2105660 - RNA, 19 nt, Artificial Sequence
  Description of Artificial Sequence: Synthetic oligonucleotide
uccuuuauuagaaaucgua

SEQ ID NO: 2105661 - RNA, 19 nt, Artificial Sequence
  Description of Artificial Sequence: Synthetic oligonucleotide
uccagaaauagauuugggu

SEQ ID NO: 2105662 - RNA, 19 nt, Artificial Sequence
  Description of Artificial Sequence: Synthetic oligonucleotide
aacaccugaagaccaaacu

SEQ ID NO: 2105663 - RNA, 19 nt, Artificial Sequence
  Description of Artificial Sequence: Synthetic oligonucleotide
ucgccuauauaaacaaucc

SEQ ID NO: 2105664 - RNA, 19 nt, Artificial Sequence
  Description of Artificial Sequence: Synthetic oligonucleotide
ucguaaaugagaaauuauu

SEQ ID NO: 2105665 - RNA, 19 nt, Artificial Sequence
  Description of Artificial Sequence: Synthetic oligonucleotide
cacauuacuccuuuauuag

SEQ ID NO: 2105666 - RNA, 19 nt, Artificial Sequence
  Description of Artificial Sequence: Synthetic oligonucleotide
uugaaucugaaauaaugau

SEQ ID NO: 2105667 - RNA, 19 nt, Artificial Sequence
  Description of Artificial Sequence: Synthetic oligonucleotide
ucccaaauacuuaaagacu

SEQ ID NO: 2105668 - RNA, 19 nt, Artificial Sequence
  Description of Artificial Sequence: Synthetic oligonucleotide
aaagcugcuggauuuguaa

SEQ ID NO: 2105669 - RNA, 19 nt, Artificial Sequence
  Description of Artificial Sequence: Synthetic oligonucleotide
uggacagacaucauuucca

SEQ ID NO: 2105670 - RNA, 19 nt, Artificial Sequence
  Description of Artificial Sequence: Synthetic oligonucleotide
aagaccaaacuacaacaga

SEQ ID NO: 2105671 - RNA, 19 nt, Artificial Sequence
  Description of Artificial Sequence: Synthetic oligonucleotide
agcucuaucauccccgaag

SEQ ID NO: 2105672 - RNA, 19 nt, Artificial Sequence
  Description of Artificial Sequence: Synthetic oligonucleotide
auugcaagaaugagcaugg

SEQ ID NO: 2105673 - RNA, 19 nt, Artificial Sequence
  Description of Artificial Sequence: Synthetic oligonucleotide
agaaauuauuucaacaccu

SEQ ID NO: 2105674 - RNA, 19 nt, Artificial Sequence
  Description of Artificial Sequence: Synthetic oligonucleotide
uuaacuccagcauuauuac

SEQ ID NO: 2105675 - RNA, 19 nt, Artificial Sequence
  Description of Artificial Sequence: Synthetic oligonucleotide
gaaacuucuuaacuccagc

SEQ ID NO: 2105676 - RNA, 19 nt, Artificial Sequence
  Description of Artificial Sequence: Synthetic oligonucleotide
uguauugucgaagucaaau

SEQ ID NO: 2105677 - RNA, 19 nt, Artificial Sequence
  Description of Artificial Sequence: Synthetic oligonucleotide
uaugcuauugagcccaauc

SEQ ID NO: 2105678 - RNA, 19 nt, Artificial Sequence
  Description of Artificial Sequence: Synthetic oligonucleotide
agaaauagauuuggguuac

SEQ ID NO: 2105679 - RNA, 19 nt, Artificial Sequence
  Description of Artificial Sequence: Synthetic oligonucleotide
cuuaacuccagcauuauua

SEQ ID NO: 2105680 - RNA, 19 nt, Artificial Sequence
  Description of Artificial Sequence: Synthetic oligonucleotide
uccaaaaucccuuuugaua

SEQ ID NO: 2105681 - RNA, 19 nt, Artificial Sequence
  Description of Artificial Sequence: Synthetic oligonucleotide
ucuguaugcagagagauuu

SEQ ID NO: 2105682 - RNA, 19 nt, Artificial Sequence
  Description of Artificial Sequence: Synthetic oligonucleotide
ucacuauugucaucuauga

SEQ ID NO: 2105683 - RNA, 19 nt, Artificial Sequence
  Description of Artificial Sequence: Synthetic oligonucleotide
uuccauaggaagcucuuug

SEQ ID NO: 2105684 - RNA, 19 nt, Artificial Sequence
  Description of Artificial Sequence: Synthetic oligonucleotide
auuuugagacauuuuggca

SEQ ID NO: 2105685 - RNA, 19 nt, Artificial Sequence
  Description of Artificial Sequence: Synthetic oligonucleotide
aaaacccaaucuaugaaga

SEQ ID NO: 2105686 - RNA, 19 nt, Artificial Sequence
  Description of Artificial Sequence: Synthetic oligonucleotide
aagcucuuuguuuggagca

SEQ ID NO: 2105687 - RNA, 19 nt, Artificial Sequence
  Description of Artificial Sequence: Synthetic oligonucleotide
gaagcucuuuguuuggagc

SEQ ID NO: 2105688 - RNA, 19 nt, Artificial Sequence
  Description of Artificial Sequence: Synthetic oligonucleotide
acauuucaauuguuggcac

SEQ ID NO: 2105689 - RNA, 19 nt, Artificial Sequence
  Description of Artificial Sequence: Synthetic oligonucleotide
ugcaagaaugagcauggca

SEQ ID NO: 2105690 - RNA, 19 nt, Artificial Sequence
  Description of Artificial Sequence: Synthetic oligonucleotide
auaucagggauuuuguuuu

SEQ ID NO: 2105691 - RNA, 19 nt, Artificial Sequence
  Description of Artificial Sequence: Synthetic oligonucleotide
auuagaaaucguaaaugag

SEQ ID NO: 2105692 - RNA, 19 nt, Artificial Sequence
  Description of Artificial Sequence: Synthetic oligonucleotide
agcuuaggucacuaaaauc

SEQ ID NO: 2105693 - RNA, 19 nt, Artificial Sequence
  Description of Artificial Sequence: Synthetic oligonucleotide
ucaauuguuggcacauuac

SEQ ID NO: 2105694 - RNA, 19 nt, Artificial Sequence
  Description of Artificial Sequence: Synthetic oligonucleotide
aacuucuuaacuccagcau

SEQ ID NO: 2105695 - RNA, 19 nt, Artificial Sequence
  Description of Artificial Sequence: Synthetic oligonucleotide
gaaaucguaaaugagaaau

SEQ ID NO: 2105696 - RNA, 19 nt, Artificial Sequence
  Description of Artificial Sequence: Synthetic oligonucleotide
aucgccuauauaaacaauc

SEQ ID NO: 2105697 - RNA, 19 nt, Artificial Sequence
  Description of Artificial Sequence: Synthetic oligonucleotide
aaaaucuagcaaaacugca

SEQ ID NO: 2105698 - RNA, 19 nt, Artificial Sequence
  Description of Artificial Sequence: Synthetic oligonucleotide
acaucauucuuccuuaaaa

SEQ ID NO: 2105699 - RNA, 19 nt, Artificial Sequence
  Description of Artificial Sequence: Synthetic oligonucleotide
uuuuguaacuguuuaucua

SEQ ID NO: 2105700 - RNA, 19 nt, Artificial Sequence
  Description of Artificial Sequence: Synthetic oligonucleotide
uuccagaaauagauuuggg

SEQ ID NO: 2105701 - RNA, 19 nt, Artificial Sequence
  Description of Artificial Sequence: Synthetic oligonucleotide
augauuguauugucgaagu

SEQ ID NO: 2105702 - RNA, 19 nt, Artificial Sequence
  Description of Artificial Sequence: Synthetic oligonucleotide
uuccuuaaaaggguuacug

SEQ ID NO: 2105703 - RNA, 19 nt, Artificial Sequence
  Description of Artificial Sequence: Synthetic oligonucleotide
aagacaucaugaaaaucag

SEQ ID NO: 2105704 - RNA, 19 nt, Artificial Sequence
  Description of Artificial Sequence: Synthetic oligonucleotide
cagaagauuccauaggcuc

SEQ ID NO: 2105705 - RNA, 19 nt, Artificial Sequence
  Description of Artificial Sequence: Synthetic oligonucleotide
augcaaucaaauuuauccu

SEQ ID NO: 2105706 - RNA, 19 nt, Artificial Sequence
  Description of Artificial Sequence: Synthetic oligonucleotide
ucaucucccaaauacuuaa

SEQ ID NO: 2105707 - RNA, 19 nt, Artificial Sequence
  Description of Artificial Sequence: Synthetic oligonucleotide
aaacauuacuccauuucug

SEQ ID NO: 2105708 - RNA, 19 nt, Artificial Sequence
  Description of Artificial Sequence: Synthetic oligonucleotide
auaaugaugcaaucaaauu

SEQ ID NO: 2105709 - RNA, 19 nt, Artificial Sequence
  Description of Artificial Sequence: Synthetic oligonucleotide
uuccauaggcucaaaauuu

SEQ ID NO: 2105710 - RNA, 19 nt, Artificial Sequence
  Description of Artificial Sequence: Synthetic oligonucleotide
auguaaaguauauccuuug

SEQ ID NO: 2105711 - RNA, 19 nt, Artificial Sequence
  Description of Artificial Sequence: Synthetic oligonucleotide
uauucauucuuagaaaguu

SEQ ID NO: 2105712 - RNA, 19 nt, Artificial Sequence
  Description of Artificial Sequence: Synthetic oligonucleotide
auuuggguuaccccaaagu

SEQ ID NO: 2105713 - RNA, 19 nt, Artificial Sequence
  Description of Artificial Sequence: Synthetic oligonucleotide
uacuccuuuauuagaaauc

SEQ ID NO: 2105714 - RNA, 19 nt, Artificial Sequence
  Description of Artificial Sequence: Synthetic oligonucleotide
aggguuacuggacagacau

SEQ ID NO: 2105715 - RNA, 19 nt, Artificial Sequence
  Description of Artificial Sequence: Synthetic oligonucleotide
cugaauuugaaucugaaau

SEQ ID NO: 2105716 - RNA, 19 nt, Artificial Sequence
  Description of Artificial Sequence: Synthetic oligonucleotide
uucaauuguuggcacauua

SEQ ID NO: 2105717 - RNA, 19 nt, Artificial Sequence
  Description of Artificial Sequence: Synthetic oligonucleotide
augcuauugagcccaaucu

SEQ ID NO: 2105718 - RNA, 19 nt, Artificial Sequence
  Description of Artificial Sequence: Synthetic oligonucleotide
uaugaagacugaauuugaa

SEQ ID NO: 2105719 - RNA, 19 nt, Artificial Sequence
  Description of Artificial Sequence: Synthetic oligonucleotide
aucuuguaguuccauagga

SEQ ID NO: 2105720 - RNA, 19 nt, Artificial Sequence
  Description of Artificial Sequence: Synthetic oligonucleotide
cauuguacaauccaggugu

SEQ ID NO: 2105721 - RNA, 19 nt, Artificial Sequence
  Description of Artificial Sequence: Synthetic oligonucleotide
cuguuuaucuacaaaaucu

SEQ ID NO: 2105722 - RNA, 19 nt, Artificial Sequence
  Description of Artificial Sequence: Synthetic oligonucleotide
uguuuggagcacauuguac

SEQ ID NO: 2105723 - RNA, 19 nt, Artificial Sequence
  Description of Artificial Sequence: Synthetic oligonucleotide
uacuggacagacaucauuu

SEQ ID NO: 2105724 - RNA, 19 nt, Artificial Sequence
  Description of Artificial Sequence: Synthetic oligonucleotide
uccuuugcgaggcauggca

SEQ ID NO: 2105725 - RNA, 19 nt, Artificial Sequence
  Description of Artificial Sequence: Synthetic oligonucleotide
caccugaagaccaaacuac

SEQ ID NO: 2105726 - RNA, 19 nt, Artificial Sequence
  Description of Artificial Sequence: Synthetic oligonucleotide
uagagcuuaggucacuaaa

SEQ ID NO: 2105727 - RNA, 19 nt, Artificial Sequence
  Description of Artificial Sequence: Synthetic oligonucleotide
uuacuccuuuauuagaaau

SEQ ID NO: 2105728 - RNA, 19 nt, Artificial Sequence
  Description of Artificial Sequence: Synthetic oligonucleotide
caugaaaaucagcagcuuc

SEQ ID NO: 2105729 - RNA, 19 nt, Artificial Sequence
  Description of Artificial Sequence: Synthetic oligonucleotide
gauaagaaucuuguaguuc

SEQ ID NO: 2105730 - RNA, 19 nt, Artificial Sequence
  Description of Artificial Sequence: Synthetic oligonucleotide
aaaaucccuuuugauaaga

SEQ ID NO: 2105731 - RNA, 19 nt, Artificial Sequence
  Description of Artificial Sequence: Synthetic oligonucleotide
aucuaugauuguauugucg

SEQ ID NO: 2105732 - RNA, 19 nt, Artificial Sequence
  Description of Artificial Sequence: Synthetic oligonucleotide
ugcaaucaaauuuauccuu

SEQ ID NO: 2105733 - RNA, 19 nt, Artificial Sequence
  Description of Artificial Sequence: Synthetic oligonucleotide
acuccauuucuguaugcag

SEQ ID NO: 2105734 - RNA, 19 nt, Artificial Sequence
  Description of Artificial Sequence: Synthetic oligonucleotide
aucaaaagcugcuggauuu

SEQ ID NO: 2105735 - RNA, 19 nt, Artificial Sequence
  Description of Artificial Sequence: Synthetic oligonucleotide
gucacuauugucaucuaug

SEQ ID NO: 2105736 - RNA, 19 nt, Artificial Sequence
  Description of Artificial Sequence: Synthetic oligonucleotide
guuaucaaaagcugcugga

SEQ ID NO: 2105737 - RNA, 19 nt, Artificial Sequence
  Description of Artificial Sequence: Synthetic oligonucleotide
auaaacaauccgugcauau

SEQ ID NO: 2105738 - RNA, 19 nt, Artificial Sequence
  Description of Artificial Sequence: Synthetic oligonucleotide
auugagcccaaucuuaaua

SEQ ID NO: 2105739 - RNA, 19 nt, Artificial Sequence
  Description of Artificial Sequence: Synthetic oligonucleotide
acuggacagacaucauuuc

SEQ ID NO: 2105740 - RNA, 19 nt, Artificial Sequence
  Description of Artificial Sequence: Synthetic oligonucleotide
uggagcacauuguacaauc

SEQ ID NO: 2105741 - RNA, 19 nt, Artificial Sequence
  Description of Artificial Sequence: Synthetic oligonucleotide
cuuuuaccccuucaucucc

SEQ ID NO: 2105742 - RNA, 19 nt, Artificial Sequence
  Description of Artificial Sequence: Synthetic oligonucleotide
ucauccccgaagugaaagg

SEQ ID NO: 2105743 - RNA, 19 nt, Artificial Sequence
  Description of Artificial Sequence: Synthetic oligonucleotide
uuguaacuguuuaucuaca

SEQ ID NO: 2105744 - RNA, 19 nt, Artificial Sequence
  Description of Artificial Sequence: Synthetic oligonucleotide
aaauaaugaugcaaucaaa

SEQ ID NO: 2105745 - RNA, 19 nt, Artificial Sequence
  Description of Artificial Sequence: Synthetic oligonucleotide
ucuuccuuaaaaggguuac

SEQ ID NO: 2105746 - RNA, 19 nt, Artificial Sequence
  Description of Artificial Sequence: Synthetic oligonucleotide
uguaacuguuuaucuacaa

SEQ ID NO: 2105747 - RNA, 19 nt, Artificial Sequence
  Description of Artificial Sequence: Synthetic oligonucleotide
uugcaguccaauuaauuuu

SEQ ID NO: 2105748 - RNA, 19 nt, Artificial Sequence
  Description of Artificial Sequence: Synthetic oligonucleotide
uagguauggaaacuucuua

SEQ ID NO: 2105749 - RNA, 19 nt, Artificial Sequence
  Description of Artificial Sequence: Synthetic oligonucleotide
gaagucaaauaccaacaaa

SEQ ID NO: 2105750 - RNA, 19 nt, Artificial Sequence
  Description of Artificial Sequence: Synthetic oligonucleotide
aacaucauucuuccuuaaa

SEQ ID NO: 2105751 - RNA, 19 nt, Artificial Sequence
  Description of Artificial Sequence: Synthetic oligonucleotide
acuucuuaacuccagcauu

SEQ ID NO: 2105752 - RNA, 19 nt, Artificial Sequence
  Description of Artificial Sequence: Synthetic oligonucleotide
ugauaagaaucuuguaguu

SEQ ID NO: 2105753 - RNA, 19 nt, Artificial Sequence
  Description of Artificial Sequence: Synthetic oligonucleotide
guuuuaugcuauugagccc

SEQ ID NO: 2105754 - RNA, 19 nt, Artificial Sequence
  Description of Artificial Sequence: Synthetic oligonucleotide
uuugccagcugucuuuaaa

SEQ ID NO: 2105755 - RNA, 19 nt, Artificial Sequence
  Description of Artificial Sequence: Synthetic oligonucleotide
gaccaaacuacaacagaag

SEQ ID NO: 2105756 - RNA, 19 nt, Artificial Sequence
  Description of Artificial Sequence: Synthetic oligonucleotide
uugccagcugucuuuaaac

SEQ ID NO: 2105757 - RNA, 19 nt, Artificial Sequence
  Description of Artificial Sequence: Synthetic oligonucleotide
gauuuggguuaccccaaag

SEQ ID NO: 2105758 - RNA, 19 nt, Artificial Sequence
  Description of Artificial Sequence: Synthetic oligonucleotide
ugagacauuuuggcaagag

SEQ ID NO: 2105759 - RNA, 19 nt, Artificial Sequence
  Description of Artificial Sequence: Synthetic oligonucleotide
aucuaugaagacugaauuu

SEQ ID NO: 2105760 - RNA, 19 nt, Artificial Sequence
  Description of Artificial Sequence: Synthetic oligonucleotide
uacuaaauaucagggauuu

SEQ ID NO: 2105761 - RNA, 19 nt, Artificial Sequence
  Description of Artificial Sequence: Synthetic oligonucleotide
uucacugugagaagaccau

SEQ ID NO: 2105762 - RNA, 19 nt, Artificial Sequence
  Description of Artificial Sequence: Synthetic oligonucleotide
cacugugagaagaccauug

SEQ ID NO: 2105763 - RNA, 19 nt, Artificial Sequence
  Description of Artificial Sequence: Synthetic oligonucleotide
uguaugcagagagauuucu

SEQ ID NO: 2105764 - RNA, 19 nt, Artificial Sequence
  Description of Artificial Sequence: Synthetic oligonucleotide
uccauaggaagcucuuugu

SEQ ID NO: 2105765 - RNA, 19 nt, Artificial Sequence
  Description of Artificial Sequence: Synthetic oligonucleotide
uugggcaacuauugcaaga

SEQ ID NO: 2105766 - RNA, 19 nt, Artificial Sequence
  Description of Artificial Sequence: Synthetic oligonucleotide
acaccugaagaccaaacua

SEQ ID NO: 2105767 - RNA, 19 nt, Artificial Sequence
  Description of Artificial Sequence: Synthetic oligonucleotide
uaggaagcucuuuguuugg

SEQ ID NO: 2105768 - RNA, 19 nt, Artificial Sequence
  Description of Artificial Sequence: Synthetic oligonucleotide
aacaauccgugcauaucuc

SEQ ID NO: 2105769 - RNA, 19 nt, Artificial Sequence
  Description of Artificial Sequence: Synthetic oligonucleotide
caaauacuuaaagacucug

SEQ ID NO: 2105770 - RNA, 19 nt, Artificial Sequence
  Description of Artificial Sequence: Synthetic oligonucleotide
uuggcaagaguucuaugua

SEQ ID NO: 2105771 - RNA, 19 nt, Artificial Sequence
  Description of Artificial Sequence: Synthetic oligonucleotide
ugaugcaaucaaauuuauc

SEQ ID NO: 2105772 - RNA, 19 nt, Artificial Sequence
  Description of Artificial Sequence: Synthetic oligonucleotide
caaucuuaauacacauuuc

SEQ ID NO: 2105773 - RNA, 19 nt, Artificial Sequence
  Description of Artificial Sequence: Synthetic oligonucleotide
aguucuauguaaaguauau

SEQ ID NO: 2105774 - RNA, 19 nt, Artificial Sequence
  Description of Artificial Sequence: Synthetic oligonucleotide
uuguuuggagcacauugua

SEQ ID NO: 2105775 - RNA, 19 nt, Artificial Sequence
  Description of Artificial Sequence: Synthetic oligonucleotide
auucuuugggcaacuauug

SEQ ID NO: 2105776 - RNA, 19 nt, Artificial Sequence
  Description of Artificial Sequence: Synthetic oligonucleotide
uaauuugccagcugucuuu

SEQ ID NO: 2105777 - RNA, 19 nt, Artificial Sequence
  Description of Artificial Sequence: Synthetic oligonucleotide
ucccuuuuguaacuguuua

SEQ ID NO: 2105778 - RNA, 19 nt, Artificial Sequence
  Description of Artificial Sequence: Synthetic oligonucleotide
uuaucaaaagcugcuggau

SEQ ID NO: 2105779 - RNA, 19 nt, Artificial Sequence
  Description of Artificial Sequence: Synthetic oligonucleotide
acugugagaagaccauugu

SEQ ID NO: 2105780 - RNA, 19 nt, Artificial Sequence
  Description of Artificial Sequence: Synthetic oligonucleotide
cauaggcucaaaauuuuga

SEQ ID NO: 2105781 - RNA, 19 nt, Artificial Sequence
  Description of Artificial Sequence: Synthetic oligonucleotide
cccaaauacuuaaagacuc

SEQ ID NO: 2105782 - RNA, 19 nt, Artificial Sequence
  Description of Artificial Sequence: Synthetic oligonucleotide
ugcuauugagcccaaucuu

SEQ ID NO: 2105783 - RNA, 19 nt, Artificial Sequence
  Description of Artificial Sequence: Synthetic oligonucleotide
aguugagaagcucuaucau

SEQ ID NO: 2105784 - RNA, 19 nt, Artificial Sequence
  Description of Artificial Sequence: Synthetic oligonucleotide
uucaucucccaaauacuua

SEQ ID NO: 2105785 - RNA, 19 nt, Artificial Sequence
  Description of Artificial Sequence: Synthetic oligonucleotide
uuagaaaguugagaagcuc

SEQ ID NO: 2105786 - RNA, 19 nt, Artificial Sequence
  Description of Artificial Sequence: Synthetic oligonucleotide
aucauccccgaagugaaag

SEQ ID NO: 2105787 - RNA, 19 nt, Artificial Sequence
  Description of Artificial Sequence: Synthetic oligonucleotide
cagaaauagauuuggguua

SEQ ID NO: 2105788 - RNA, 19 nt, Artificial Sequence
  Description of Artificial Sequence: Synthetic oligonucleotide
cacauuucaauuguuggca

SEQ ID NO: 2105789 - RNA, 19 nt, Artificial Sequence
  Description of Artificial Sequence: Synthetic oligonucleotide
uuaggucacuaaaaucuuu

SEQ ID NO: 2105790 - RNA, 19 nt, Artificial Sequence
  Description of Artificial Sequence: Synthetic oligonucleotide
caauccgugcauaucucac

SEQ ID NO: 2105791 - RNA, 19 nt, Artificial Sequence
  Description of Artificial Sequence: Synthetic oligonucleotide
auuuauccuuauucauucu

SEQ ID NO: 2105792 - RNA, 19 nt, Artificial Sequence
  Description of Artificial Sequence: Synthetic oligonucleotide
ugauuguauugucgaaguc

SEQ ID NO: 2105793 - RNA, 19 nt, Artificial Sequence
  Description of Artificial Sequence: Synthetic oligonucleotide
uccauaggcucaaaauuuu

SEQ ID NO: 2105794 - RNA, 19 nt, Artificial Sequence
  Description of Artificial Sequence: Synthetic oligonucleotide
ugagaagcucuaucauccc

SEQ ID NO: 2105795 - RNA, 19 nt, Artificial Sequence
  Description of Artificial Sequence: Synthetic oligonucleotide
ugccagcugucuuuaaaca

SEQ ID NO: 2105796 - RNA, 19 nt, Artificial Sequence
  Description of Artificial Sequence: Synthetic oligonucleotide
acaauccgugcauaucuca

SEQ ID NO: 2105797 - RNA, 19 nt, Artificial Sequence
  Description of Artificial Sequence: Synthetic oligonucleotide
uggcacauuacuccuuuau

SEQ ID NO: 2105798 - RNA, 19 nt, Artificial Sequence
  Description of Artificial Sequence: Synthetic oligonucleotide
cuaugaagacugaauuuga

SEQ ID NO: 2105799 - RNA, 19 nt, Artificial Sequence
  Description of Artificial Sequence: Synthetic oligonucleotide
gguuacuggacagacauca

SEQ ID NO: 2105800 - RNA, 19 nt, Artificial Sequence
  Description of Artificial Sequence: Synthetic oligonucleotide
ccaaaaucccuuuugauaa

SEQ ID NO: 2105801 - RNA, 19 nt, Artificial Sequence
  Description of Artificial Sequence: Synthetic oligonucleotide
cuaaaacccaaucuaugaa

SEQ ID NO: 2105802 - RNA, 19 nt, Artificial Sequence
  Description of Artificial Sequence: Synthetic oligonucleotide
auccuuauucauucuuaga

SEQ ID NO: 2105803 - RNA, 19 nt, Artificial Sequence
  Description of Artificial Sequence: Synthetic oligonucleotide
guauggaaacuucuuaacu

SEQ ID NO: 2105804 - RNA, 19 nt, Artificial Sequence
  Description of Artificial Sequence: Synthetic oligonucleotide
gagcccaaucuuaauacac

SEQ ID NO: 2105805 - RNA, 19 nt, Artificial Sequence
  Description of Artificial Sequence: Synthetic oligonucleotide
gguacuaaauaucagggau

SEQ ID NO: 2105806 - RNA, 19 nt, Artificial Sequence
  Description of Artificial Sequence: Synthetic oligonucleotide
agaaucuuguaguuccaua

SEQ ID NO: 2105807 - RNA, 19 nt, Artificial Sequence
  Description of Artificial Sequence: Synthetic oligonucleotide
ggcaacuauugcaagaaug

SEQ ID NO: 2105808 - RNA, 19 nt, Artificial Sequence
  Description of Artificial Sequence: Synthetic oligonucleotide
aucuuuaauuugccagcug

SEQ ID NO: 2105809 - RNA, 19 nt, Artificial Sequence
  Description of Artificial Sequence: Synthetic oligonucleotide
cauaucucacucccuuuug

SEQ ID NO: 2105810 - RNA, 19 nt, Artificial Sequence
  Description of Artificial Sequence: Synthetic oligonucleotide
agaaaucguaaaugagaaa

SEQ ID NO: 2105811 - RNA, 19 nt, Artificial Sequence
  Description of Artificial Sequence: Synthetic oligonucleotide
uaucucacucccuuuugua

SEQ ID NO: 2105812 - RNA, 19 nt, Artificial Sequence
  Description of Artificial Sequence: Synthetic oligonucleotide
gcuucuaaaacccaaucua

SEQ ID NO: 2105813 - RNA, 19 nt, Artificial Sequence
  Description of Artificial Sequence: Synthetic oligonucleotide
aauacacauuucaauuguu

SEQ ID NO: 2105814 - RNA, 19 nt, Artificial Sequence
  Description of Artificial Sequence: Synthetic oligonucleotide
gcuuaggucacuaaaaucu

SEQ ID NO: 2105815 - RNA, 19 nt, Artificial Sequence
  Description of Artificial Sequence: Synthetic oligonucleotide
cccuucaucucccaaauac

SEQ ID NO: 2105816 - RNA, 19 nt, Artificial Sequence
  Description of Artificial Sequence: Synthetic oligonucleotide
acugcacuuuugcaaagau

SEQ ID NO: 2105817 - RNA, 19 nt, Artificial Sequence
  Description of Artificial Sequence: Synthetic oligonucleotide
ugucgaagucaaauaccaa

SEQ ID NO: 2105818 - RNA, 19 nt, Artificial Sequence
  Description of Artificial Sequence: Synthetic oligonucleotide
uuugcgaggcauggcaaca

SEQ ID NO: 2105819 - RNA, 19 nt, Artificial Sequence
  Description of Artificial Sequence: Synthetic oligonucleotide
caacaccugaagaccaaac

SEQ ID NO: 2105820 - RNA, 19 nt, Artificial Sequence
  Description of Artificial Sequence: Synthetic oligonucleotide
cuuugcgaggcauggcaac

SEQ ID NO: 2105821 - RNA, 19 nt, Artificial Sequence
  Description of Artificial Sequence: Synthetic oligonucleotide
aacugcacuuuugcaaaga

SEQ ID NO: 2105822 - RNA, 19 nt, Artificial Sequence
  Description of Artificial Sequence: Synthetic oligonucleotide
guauugucgaagucaaaua

SEQ ID NO: 2105823 - RNA, 19 nt, Artificial Sequence
  Description of Artificial Sequence: Synthetic oligonucleotide
cuaucauccccgaagugaa

SEQ ID NO: 2105824 - RNA, 19 nt, Artificial Sequence
  Description of Artificial Sequence: Synthetic oligonucleotide
ucuuaacuccagcauuauu

SEQ ID NO: 2105825 - RNA, 19 nt, Artificial Sequence
  Description of Artificial Sequence: Synthetic oligonucleotide
caccaucgccuauauaaac

SEQ ID NO: 2105826 - RNA, 19 nt, Artificial Sequence
  Description of Artificial Sequence: Synthetic oligonucleotide
aucuuaauacacauuucaa

SEQ ID NO: 2105827 - RNA, 19 nt, Artificial Sequence
  Description of Artificial Sequence: Synthetic oligonucleotide
gcaacuauugcaagaauga

SEQ ID NO: 2105828 - RNA, 19 nt, Artificial Sequence
  Description of Artificial Sequence: Synthetic oligonucleotide
cauccccgaagugaaaggc

SEQ ID NO: 2105829 - RNA, 19 nt, Artificial Sequence
  Description of Artificial Sequence: Synthetic oligonucleotide
agcauagagcuuaggucac

SEQ ID NO: 2105830 - RNA, 19 nt, Artificial Sequence
  Description of Artificial Sequence: Synthetic oligonucleotide
gagauuucucugaugugca

SEQ ID NO: 2105831 - RNA, 19 nt, Artificial Sequence
  Description of Artificial Sequence: Synthetic oligonucleotide
ccauuguuaucaaaagcug

SEQ ID NO: 2105832 - RNA, 19 nt, Artificial Sequence
  Description of Artificial Sequence: Synthetic oligonucleotide
agaaugagcauggcaauuu

SEQ ID NO: 2105833 - RNA, 19 nt, Artificial Sequence
  Description of Artificial Sequence: Synthetic oligonucleotide
accaucgccuauauaaaca

SEQ ID NO: 2105834 - RNA, 19 nt, Artificial Sequence
  Description of Artificial Sequence: Synthetic oligonucleotide
uaaagacucugcccauaaa

SEQ ID NO: 2105835 - RNA, 19 nt, Artificial Sequence
  Description of Artificial Sequence: Synthetic oligonucleotide
cuuucaugguuccagaaau

SEQ ID NO: 2105836 - RNA, 19 nt, Artificial Sequence
  Description of Artificial Sequence: Synthetic oligonucleotide
uaccccuucaucucccaaa

SEQ ID NO: 2105837 - RNA, 19 nt, Artificial Sequence
  Description of Artificial Sequence: Synthetic oligonucleotide
agaguucuauguaaaguau

SEQ ID NO: 2105838 - RNA, 19 nt, Artificial Sequence
  Description of Artificial Sequence: Synthetic oligonucleotide
acagaagauuccauaggcu

SEQ ID NO: 2105839 - RNA, 19 nt, Artificial Sequence
  Description of Artificial Sequence: Synthetic oligonucleotide
uauugagcccaaucuuaau

SEQ ID NO: 2105840 - RNA, 19 nt, Artificial Sequence
  Description of Artificial Sequence: Synthetic oligonucleotide
aucguaaaugagaaauuau

SEQ ID NO: 2105841 - RNA, 19 nt, Artificial Sequence
  Description of Artificial Sequence: Synthetic oligonucleotide
acuuaaagacucugcccau

SEQ ID NO: 2105842 - RNA, 19 nt, Artificial Sequence
  Description of Artificial Sequence: Synthetic oligonucleotide
cuauugagcccaaucuuaa

SEQ ID NO: 2105843 - RNA, 19 nt, Artificial Sequence
  Description of Artificial Sequence: Synthetic oligonucleotide
aggucacuaaaaucuuuaa

SEQ ID NO: 2105844 - RNA, 19 nt, Artificial Sequence
  Description of Artificial Sequence: Synthetic oligonucleotide
acauuacuccauuucugua

SEQ ID NO: 2105845 - RNA, 19 nt, Artificial Sequence
  Description of Artificial Sequence: Synthetic oligonucleotide
uccgugcauaucucacucc

SEQ ID NO: 2105846 - RNA, 19 nt, Artificial Sequence
  Description of Artificial Sequence: Synthetic oligonucleotide
auuguacaauccagguguc

SEQ ID NO: 2105847 - RNA, 19 nt, Artificial Sequence
  Description of Artificial Sequence: Synthetic oligonucleotide
cuugcaguccaauuaauuu

SEQ ID NO: 2105848 - RNA, 19 nt, Artificial Sequence
  Description of Artificial Sequence: Synthetic oligonucleotide
cugcuggauuuguaaacac

SEQ ID NO: 2105849 - RNA, 19 nt, Artificial Sequence
  Description of Artificial Sequence: Synthetic oligonucleotide
ggaagcucuuuguuuggag

SEQ ID NO: 2105850 - RNA, 19 nt, Artificial Sequence
  Description of Artificial Sequence: Synthetic oligonucleotide
gauucuuugggcaacuauu

SEQ ID NO: 2105851 - RNA, 19 nt, Artificial Sequence
  Description of Artificial Sequence: Synthetic oligonucleotide
cuuagaaaguugagaagcu

SEQ ID NO: 2105852 - RNA, 19 nt, Artificial Sequence
  Description of Artificial Sequence: Synthetic oligonucleotide
ggaacaucugauagaaaac

SEQ ID NO: 2105853 - RNA, 19 nt, Artificial Sequence
  Description of Artificial Sequence: Synthetic oligonucleotide
cauagguauggaaacuucu

SEQ ID NO: 2105854 - RNA, 19 nt, Artificial Sequence
  Description of Artificial Sequence: Synthetic oligonucleotide
gaagcucuaucauccccga

SEQ ID NO: 2105855 - RNA, 19 nt, Artificial Sequence
  Description of Artificial Sequence: Synthetic oligonucleotide
uauugucaucuaugauugu

SEQ ID NO: 2105856 - RNA, 19 nt, Artificial Sequence
  Description of Artificial Sequence: Synthetic oligonucleotide
gaaauagauuuggguuacc

SEQ ID NO: 2105857 - RNA, 19 nt, Artificial Sequence
  Description of Artificial Sequence: Synthetic oligonucleotide
caauuguuggcacauuacu

SEQ ID NO: 2105858 - RNA, 19 nt, Artificial Sequence
  Description of Artificial Sequence: Synthetic oligonucleotide
cuucuaaaacccaaucuau

SEQ ID NO: 2105859 - RNA, 19 nt, Artificial Sequence
  Description of Artificial Sequence: Synthetic oligonucleotide
caaucuaugaagacugaau

SEQ ID NO: 2105860 - RNA, 19 nt, Artificial Sequence
  Description of Artificial Sequence: Synthetic oligonucleotide
aucuagcaaaacugcacuu

SEQ ID NO: 2105861 - RNA, 19 nt, Artificial Sequence
  Description of Artificial Sequence: Synthetic oligonucleotide
gaagaccauuguuaucaaa

SEQ ID NO: 2105862 - RNA, 19 nt, Artificial Sequence
  Description of Artificial Sequence: Synthetic oligonucleotide
guucuauguaaaguauauc

SEQ ID NO: 2105863 - RNA, 19 nt, Artificial Sequence
  Description of Artificial Sequence: Synthetic oligonucleotide
auagguauggaaacuucuu

SEQ ID NO: 2105864 - RNA, 19 nt, Artificial Sequence
  Description of Artificial Sequence: Synthetic oligonucleotide
ugugcagcauagguaugga

SEQ ID NO: 2105865 - RNA, 19 nt, Artificial Sequence
  Description of Artificial Sequence: Synthetic oligonucleotide
cugaugugcagcauaggua

SEQ ID NO: 2105866 - RNA, 19 nt, Artificial Sequence
  Description of Artificial Sequence: Synthetic oligonucleotide
gaguucuauguaaaguaua

SEQ ID NO: 2105867 - RNA, 19 nt, Artificial Sequence
  Description of Artificial Sequence: Synthetic oligonucleotide
uuuaugcuauugagcccaa

SEQ ID NO: 2105868 - RNA, 19 nt, Artificial Sequence
  Description of Artificial Sequence: Synthetic oligonucleotide
auagagcuuaggucacuaa

SEQ ID NO: 2105869 - RNA, 19 nt, Artificial Sequence
  Description of Artificial Sequence: Synthetic oligonucleotide
cuaugauuguauugucgaa

SEQ ID NO: 2105870 - RNA, 19 nt, Artificial Sequence
  Description of Artificial Sequence: Synthetic oligonucleotide
ucaacaccugaagaccaaa

SEQ ID NO: 2105871 - RNA, 19 nt, Artificial Sequence
  Description of Artificial Sequence: Synthetic oligonucleotide
cuguaugcagagagauuuc

SEQ ID NO: 2105872 - RNA, 19 nt, Artificial Sequence
  Description of Artificial Sequence: Synthetic oligonucleotide
gugagaagaccauuguuau

SEQ ID NO: 2105873 - RNA, 19 nt, Artificial Sequence
  Description of Artificial Sequence: Synthetic oligonucleotide
agcccaaucuuaauacaca

SEQ ID NO: 2105874 - RNA, 19 nt, Artificial Sequence
  Description of Artificial Sequence: Synthetic oligonucleotide
ggugucacuauugucaucu

SEQ ID NO: 2105875 - RNA, 19 nt, Artificial Sequence
  Description of Artificial Sequence: Synthetic oligonucleotide
gagcuuaggucacuaaaau

SEQ ID NO: 2105876 - RNA, 19 nt, Artificial Sequence
  Description of Artificial Sequence: Synthetic oligonucleotide
agaagaccauuguuaucaa

SEQ ID NO: 2105877 - RNA, 19 nt, Artificial Sequence
  Description of Artificial Sequence: Synthetic oligonucleotide
uuguauugucgaagucaaa

SEQ ID NO: 2105878 - RNA, 19 nt, Artificial Sequence
  Description of Artificial Sequence: Synthetic oligonucleotide
ugcauaucucacucccuuu

SEQ ID NO: 2105879 - RNA, 19 nt, Artificial Sequence
  Description of Artificial Sequence: Synthetic oligonucleotide
accugaagaccaaacuaca

SEQ ID NO: 2105880 - RNA, 19 nt, Artificial Sequence
  Description of Artificial Sequence: Synthetic oligonucleotide
caguggaacaucugauaga

SEQ ID NO: 2105881 - RNA, 19 nt, Artificial Sequence
  Description of Artificial Sequence: Synthetic oligonucleotide
accccuucaucucccaaau

SEQ ID NO: 2105882 - RNA, 19 nt, Artificial Sequence
  Description of Artificial Sequence: Synthetic oligonucleotide
gccuauauaaacaauccgu

SEQ ID NO: 2105883 - RNA, 19 nt, Artificial Sequence
  Description of Artificial Sequence: Synthetic oligonucleotide
aaggguuacuggacagaca

SEQ ID NO: 2105884 - RNA, 19 nt, Artificial Sequence
  Description of Artificial Sequence: Synthetic oligonucleotide
uaucagggauuuuguuuua

SEQ ID NO: 2105885 - RNA, 19 nt, Artificial Sequence
  Description of Artificial Sequence: Synthetic oligonucleotide
ucacucccuuuuguaacug

SEQ ID NO: 2105886 - RNA, 19 nt, Artificial Sequence
  Description of Artificial Sequence: Synthetic oligonucleotide
uaucauccccgaagugaaa

SEQ ID NO: 2105887 - RNA, 19 nt, Artificial Sequence
  Description of Artificial Sequence: Synthetic oligonucleotide
guaugcagagagauuucuc

SEQ ID NO: 2105888 - RNA, 19 nt, Artificial Sequence
  Description of Artificial Sequence: Synthetic oligonucleotide
ccaaucuuaauacacauuu

SEQ ID NO: 2105889 - RNA, 19 nt, Artificial Sequence
  Description of Artificial Sequence: Synthetic oligonucleotide
cauaggaagcucuuuguuu

SEQ ID NO: 2105890 - RNA, 19 nt, Artificial Sequence
  Description of Artificial Sequence: Synthetic oligonucleotide
ugcgaggcauggcaacauc

SEQ ID NO: 2105891 - RNA, 19 nt, Artificial Sequence
  Description of Artificial Sequence: Synthetic oligonucleotide
agauuuggguuaccccaaa

SEQ ID NO: 2105892 - RNA, 19 nt, Artificial Sequence
  Description of Artificial Sequence: Synthetic oligonucleotide
uucuuaacuccagcauuau

SEQ ID NO: 2105893 - RNA, 19 nt, Artificial Sequence
  Description of Artificial Sequence: Synthetic oligonucleotide
ccgugcauaucucacuccc

SEQ ID NO: 2105894 - RNA, 19 nt, Artificial Sequence
  Description of Artificial Sequence: Synthetic oligonucleotide
cgccuauauaaacaauccg

SEQ ID NO: 2105895 - RNA, 19 nt, Artificial Sequence
  Description of Artificial Sequence: Synthetic oligonucleotide
ggcucaaaauuuugagaca

SEQ ID NO: 2105896 - RNA, 19 nt, Artificial Sequence
  Description of Artificial Sequence: Synthetic oligonucleotide
ccuuauucauucuuagaaa

SEQ ID NO: 2105897 - RNA, 19 nt, Artificial Sequence
  Description of Artificial Sequence: Synthetic oligonucleotide
aagcucuaucauccccgaa

SEQ ID NO: 2105898 - RNA, 19 nt, Artificial Sequence
  Description of Artificial Sequence: Synthetic oligonucleotide
ccauaggcucaaaauuuug

SEQ ID NO: 2105899 - RNA, 19 nt, Artificial Sequence
  Description of Artificial Sequence: Synthetic oligonucleotide
gguuaccccaaaguggcac

SEQ ID NO: 2105900 - RNA, 19 nt, Artificial Sequence
  Description of Artificial Sequence: Synthetic oligonucleotide
ccagaaauagauuuggguu

SEQ ID NO: 2105901 - RNA, 19 nt, Artificial Sequence
  Description of Artificial Sequence: Synthetic oligonucleotide
acaauccaggugucacuau

SEQ ID NO: 2105902 - RNA, 19 nt, Artificial Sequence
  Description of Artificial Sequence: Synthetic oligonucleotide
ggcaacaucauucuuccuu

SEQ ID NO: 2105903 - RNA, 19 nt, Artificial Sequence
  Description of Artificial Sequence: Synthetic oligonucleotide
uugcaagaaugagcauggc

SEQ ID NO: 2105904 - RNA, 19 nt, Artificial Sequence
  Description of Artificial Sequence: Synthetic oligonucleotide
uggcacuugcaguccaauu

SEQ ID NO: 2105905 - RNA, 19 nt, Artificial Sequence
  Description of Artificial Sequence: Synthetic oligonucleotide
aggaagcucuuuguuugga

SEQ ID NO: 2105906 - RNA, 19 nt, Artificial Sequence
  Description of Artificial Sequence: Synthetic oligonucleotide
ggagcacauuguacaaucc

SEQ ID NO: 2105907 - RNA, 19 nt, Artificial Sequence
  Description of Artificial Sequence: Synthetic oligonucleotide
gaaugagcauggcaauuuu

SEQ ID NO: 2105908 - RNA, 19 nt, Artificial Sequence
  Description of Artificial Sequence: Synthetic oligonucleotide
aucagggauuuuguuuuau

SEQ ID NO: 2105909 - RNA, 19 nt, Artificial Sequence
  Description of Artificial Sequence: Synthetic oligonucleotide
aguuccauaggaagcucuu

SEQ ID NO: 2105910 - RNA, 19 nt, Artificial Sequence
  Description of Artificial Sequence: Synthetic oligonucleotide
auccccgaagugaaaggca

SEQ ID NO: 2105911 - RNA, 19 nt, Artificial Sequence
  Description of Artificial Sequence: Synthetic oligonucleotide
guaguuccauaggaagcuc

SEQ ID NO: 2105912 - RNA, 19 nt, Artificial Sequence
  Description of Artificial Sequence: Synthetic oligonucleotide
gcuauugagcccaaucuua

SEQ ID NO: 2105913 - RNA, 19 nt, Artificial Sequence
  Description of Artificial Sequence: Synthetic oligonucleotide
guuaccccaaaguggcacu

SEQ ID NO: 2105914 - RNA, 19 nt, Artificial Sequence
  Description of Artificial Sequence: Synthetic oligonucleotide
cccgaagugaaaggcauug

SEQ ID NO: 2105915 - RNA, 19 nt, Artificial Sequence
  Description of Artificial Sequence: Synthetic oligonucleotide
guacuaaauaucagggauu

SEQ ID NO: 2105916 - RNA, 19 nt, Artificial Sequence
  Description of Artificial Sequence: Synthetic oligonucleotide
acucccuuuuguaacuguu

SEQ ID NO: 2105917 - RNA, 19 nt, Artificial Sequence
  Description of Artificial Sequence: Synthetic oligonucleotide
ggauuuguaaacacauuau

SEQ ID NO: 2105918 - RNA, 19 nt, Artificial Sequence
  Description of Artificial Sequence: Synthetic oligonucleotide
cuuaaagacucugcccaua

SEQ ID NO: 2105919 - RNA, 19 nt, Artificial Sequence
  Description of Artificial Sequence: Synthetic oligonucleotide
ggcaagaguucuauguaaa

SEQ ID NO: 2105920 - RNA, 19 nt, Artificial Sequence
  Description of Artificial Sequence: Synthetic oligonucleotide
cucacucccuuuuguaacu

SEQ ID NO: 2105921 - RNA, 19 nt, Artificial Sequence
  Description of Artificial Sequence: Synthetic oligonucleotide
auuugccagcugucuuuaa

SEQ ID NO: 2105922 - RNA, 19 nt, Artificial Sequence
  Description of Artificial Sequence: Synthetic oligonucleotide
uuaugcuauugagcccaau

SEQ ID NO: 2105923 - RNA, 19 nt, Artificial Sequence
  Description of Artificial Sequence: Synthetic oligonucleotide
aagauuccauaggcucaaa

SEQ ID NO: 2105924 - RNA, 19 nt, Artificial Sequence
  Description of Artificial Sequence: Synthetic oligonucleotide
uugcgaggcauggcaacau

SEQ ID NO: 2105925 - RNA, 19 nt, Artificial Sequence
  Description of Artificial Sequence: Synthetic oligonucleotide
ccaaacuacaacagaagau

SEQ ID NO: 2105926 - RNA, 19 nt, Artificial Sequence
  Description of Artificial Sequence: Synthetic oligonucleotide
cauagagcuuaggucacua

SEQ ID NO: 2105927 - RNA, 19 nt, Artificial Sequence
  Description of Artificial Sequence: Synthetic oligonucleotide
guauauccuuugcgaggca

SEQ ID NO: 2105928 - RNA, 19 nt, Artificial Sequence
  Description of Artificial Sequence: Synthetic oligonucleotide
gcauagguauggaaacuuc

SEQ ID NO: 2105929 - RNA, 19 nt, Artificial Sequence
  Description of Artificial Sequence: Synthetic oligonucleotide
gugcagcauagguauggaa

SEQ ID NO: 2105930 - RNA, 19 nt, Artificial Sequence
  Description of Artificial Sequence: Synthetic oligonucleotide
cguaaaugagaaauuauuu

SEQ ID NO: 2105931 - RNA, 19 nt, Artificial Sequence
  Description of Artificial Sequence: Synthetic oligonucleotide
gcucuaucauccccgaagu

SEQ ID NO: 2105932 - RNA, 19 nt, Artificial Sequence
  Description of Artificial Sequence: Synthetic oligonucleotide
cuucucaucucaucuucuu

SEQ ID NO: 2105933 - RNA, 19 nt, Artificial Sequence
  Description of Artificial Sequence: Synthetic oligonucleotide
cacuuuugcaaagauucuu

SEQ ID NO: 2105934 - RNA, 19 nt, Artificial Sequence
  Description of Artificial Sequence: Synthetic oligonucleotide
caggugucacuauugucau

SEQ ID NO: 2105935 - RNA, 19 nt, Artificial Sequence
  Description of Artificial Sequence: Synthetic oligonucleotide
cuggauuuguaaacacauu

SEQ ID NO: 2105936 - RNA, 19 nt, Artificial Sequence
  Description of Artificial Sequence: Synthetic oligonucleotide
cugugagaagaccauuguu

SEQ ID NO: 2105937 - RNA, 19 nt, Artificial Sequence
  Description of Artificial Sequence: Synthetic oligonucleotide
caauccaggugucacuauu

SEQ ID NO: 2105938 - RNA, 19 nt, Artificial Sequence
  Description of Artificial Sequence: Synthetic oligonucleotide
cacuauugucaucuaugau

SEQ ID NO: 2105939 - RNA, 19 nt, Artificial Sequence
  Description of Artificial Sequence: Synthetic oligonucleotide
caguccaauuaauuuuauu

SEQ ID NO: 2105940 - RNA, 19 nt, Artificial Sequence
  Description of Artificial Sequence: Synthetic oligonucleotide
gcgaggcauggcaacauca

SEQ ID NO: 2105941 - RNA, 19 nt, Artificial Sequence
  Description of Artificial Sequence: Synthetic oligonucleotide
caucgccuauauaaacaau

SEQ ID NO: 2105942 - RNA, 19 nt, Artificial Sequence
  Description of Artificial Sequence: Synthetic oligonucleotide
caaaagcugcuggauuugu

SEQ ID NO: 2105943 - RNA, 19 nt, Artificial Sequence
  Description of Artificial Sequence: Synthetic oligonucleotide
aguggcacuugcaguccaa

SEQ ID NO: 2105944 - RNA, 19 nt, Artificial Sequence
  Description of Artificial Sequence: Synthetic oligonucleotide
gccagcugucuuuaaacau

SEQ ID NO: 2105945 - RNA, 19 nt, Artificial Sequence
  Description of Artificial Sequence: Synthetic oligonucleotide
ccaaucuaugaagacugaa

SEQ ID NO: 2105946 - RNA, 19 nt, Artificial Sequence
  Description of Artificial Sequence: Synthetic oligonucleotide
gcccauaaauucuguccaa

SEQ ID NO: 2105947 - RNA, 19 nt, Artificial Sequence
  Description of Artificial Sequence: Synthetic oligonucleotide
cuauugcaagaaugagcau

SEQ ID NO: 2105948 - RNA, 19 nt, Artificial Sequence
  Description of Artificial Sequence: Synthetic oligonucleotide
ccaccaucgccuauauaaa

SEQ ID NO: 2105949 - RNA, 19 nt, Artificial Sequence
  Description of Artificial Sequence: Synthetic oligonucleotide
cacucccuuuuguaacugu

SEQ ID NO: 2105950 - RNA, 19 nt, Artificial Sequence
  Description of Artificial Sequence: Synthetic oligonucleotide
cucugcccauaaauucugu

SEQ ID NO: 2105951 - RNA, 19 nt, Artificial Sequence
  Description of Artificial Sequence: Synthetic oligonucleotide
cacuugcaguccaauuaau

SEQ ID NO: 2105952 - RNA, 19 nt, Artificial Sequence
  Description of Artificial Sequence: Synthetic oligonucleotide
guuacuggacagacaucau

SEQ ID NO: 2105953 - RNA, 19 nt, Artificial Sequence
  Description of Artificial Sequence: Synthetic oligonucleotide
cccaaucuaugaagacuga

SEQ ID NO: 2105954 - RNA, 19 nt, Artificial Sequence
  Description of Artificial Sequence: Synthetic oligonucleotide
ccuuugcgaggcauggcaa

SEQ ID NO: 2105955 - RNA, 19 nt, Artificial Sequence
  Description of Artificial Sequence: Synthetic oligonucleotide
gcacuuuugcaaagauucu

SEQ ID NO: 2105956 - RNA, 19 nt, Artificial Sequence
  Description of Artificial Sequence: Synthetic oligonucleotide
ggguuacuggacagacauc

SEQ ID NO: 2105957 - RNA, 19 nt, Artificial Sequence
  Description of Artificial Sequence: Synthetic oligonucleotide
ccauaggaagcucuuuguu

SEQ ID NO: 2105958 - RNA, 19 nt, Artificial Sequence
  Description of Artificial Sequence: Synthetic oligonucleotide
cccuuuuguaacuguuuau

SEQ ID NO: 2105959 - RNA, 19 nt, Artificial Sequence
  Description of Artificial Sequence: Synthetic oligonucleotide
ccgaagugaaaggcauuga

SEQ ID NO: 2105960 - RNA, 19 nt, Artificial Sequence
  Description of Artificial Sequence: Synthetic oligonucleotide
gggcaacuauugcaagaau

SEQ ID NO: 2105961 - RNA, 19 nt, Artificial Sequence
  Description of Artificial Sequence: Synthetic oligonucleotide
ggguuaccccaaaguggca

SEQ ID NO: 2105962 - RNA, 19 nt, Artificial Sequence
  Description of Artificial Sequence: Synthetic oligonucleotide
gcaguccaauuaauuuuau

SEQ ID NO: 2105963 - RNA, 19 nt, Artificial Sequence
  Description of Artificial Sequence: Synthetic oligonucleotide
gcauagagcuuaggucacu

SEQ ID NO: 2105964 - RNA, 19 nt, Artificial Sequence
  Description of Artificial Sequence: Synthetic oligonucleotide
cgugcauaucucacucccu

SEQ ID NO: 2105965 - RNA, 19 nt, Artificial Sequence
  Description of Artificial Sequence: Synthetic oligonucleotide
ccccgaagugaaaggcauu

SEQ ID NO: 2105966 - RNA, 19 nt, Artificial Sequence
  Description of Artificial Sequence: Synthetic oligonucleotide
aauauagcgggccagaggc

SEQ ID NO: 2105967 - RNA, 19 nt, Artificial Sequence
  Description of Artificial Sequence: Synthetic oligonucleotide
aacgcuucuguucaaagcc

SEQ ID NO: 2105968 - RNA, 19 nt, Artificial Sequence
  Description of Artificial Sequence: Synthetic oligonucleotide
uguucuuggagacugacgg

SEQ ID NO: 2105969 - RNA, 19 nt, Artificial Sequence
  Description of Artificial Sequence: Synthetic oligonucleotide
agauauugaaucuauuggg

SEQ ID NO: 2105970 - RNA, 19 nt, Artificial Sequence
  Description of Artificial Sequence: Synthetic oligonucleotide
aaugaaguuggccauuggg

SEQ ID NO: 2105971 - RNA, 19 nt, Artificial Sequence
  Description of Artificial Sequence: Synthetic oligonucleotide
ucggaauacaguuucagcg

SEQ ID NO: 2105972 - RNA, 19 nt, Artificial Sequence
  Description of Artificial Sequence: Synthetic oligonucleotide
aaaucaggggaucauggac

SEQ ID NO: 2105973 - RNA, 19 nt, Artificial Sequence
  Description of Artificial Sequence: Synthetic oligonucleotide
ucaaauuccucuuacgacc

SEQ ID NO: 2105974 - RNA, 19 nt, Artificial Sequence
  Description of Artificial Sequence: Synthetic oligonucleotide
aguuucagcgaauucaaac

SEQ ID NO: 2105975 - RNA, 19 nt, Artificial Sequence
  Description of Artificial Sequence: Synthetic oligonucleotide
uauugaaucuauugggagg

SEQ ID NO: 2105976 - RNA, 19 nt, Artificial Sequence
  Description of Artificial Sequence: Synthetic oligonucleotide
auuacaggauucuuucugc

SEQ ID NO: 2105977 - RNA, 19 nt, Artificial Sequence
  Description of Artificial Sequence: Synthetic oligonucleotide
cagauauugaaucuauugg

SEQ ID NO: 2105978 - RNA, 19 nt, Artificial Sequence
  Description of Artificial Sequence: Synthetic oligonucleotide
ugacagaucugaaucagag

SEQ ID NO: 2105979 - RNA, 19 nt, Artificial Sequence
  Description of Artificial Sequence: Synthetic oligonucleotide
ucaaacugggcuccaaggg

SEQ ID NO: 2105980 - RNA, 19 nt, Artificial Sequence
  Description of Artificial Sequence: Synthetic oligonucleotide
ugaaucagaguccuggugu

SEQ ID NO: 2105981 - RNA, 19 nt, Artificial Sequence
  Description of Artificial Sequence: Synthetic oligonucleotide
uuuccguggagaaagguca

SEQ ID NO: 2105982 - RNA, 19 nt, Artificial Sequence
  Description of Artificial Sequence: Synthetic oligonucleotide
ucagcgaauucaaacuggg

SEQ ID NO: 2105983 - RNA, 19 nt, Artificial Sequence
  Description of Artificial Sequence: Synthetic oligonucleotide
uccaacaugagcuuuugcu

SEQ ID NO: 2105984 - RNA, 19 nt, Artificial Sequence
  Description of Artificial Sequence: Synthetic oligonucleotide
agcgaauucaaacugggcu

SEQ ID NO: 2105985 - RNA, 19 nt, Artificial Sequence
  Description of Artificial Sequence: Synthetic oligonucleotide
aaaacgcuucuguucaaag

SEQ ID NO: 2105986 - RNA, 19 nt, Artificial Sequence
  Description of Artificial Sequence: Synthetic oligonucleotide
uucagcgaauucaaacugg

SEQ ID NO: 2105987 - RNA, 19 nt, Artificial Sequence
  Description of Artificial Sequence: Synthetic oligonucleotide
uuugcuccggaauacaugu

SEQ ID NO: 2105988 - RNA, 19 nt, Artificial Sequence
  Description of Artificial Sequence: Synthetic oligonucleotide
uuucagcgaauucaaacug

SEQ ID NO: 2105989 - RNA, 19 nt, Artificial Sequence
  Description of Artificial Sequence: Synthetic oligonucleotide
uucaaacugggcuccaagg

SEQ ID NO: 2105990 - RNA, 19 nt, Artificial Sequence
  Description of Artificial Sequence: Synthetic oligonucleotide
agagaggucagagucagcg

SEQ ID NO: 2105991 - RNA, 19 nt, Artificial Sequence
  Description of Artificial Sequence: Synthetic oligonucleotide
aucaucaauauagcgggcc

SEQ ID NO: 2105992 - RNA, 19 nt, Artificial Sequence
  Description of Artificial Sequence: Synthetic oligonucleotide
cuuguaagcaagcuccucc

SEQ ID NO: 2105993 - RNA, 19 nt, Artificial Sequence
  Description of Artificial Sequence: Synthetic oligonucleotide
uuugccguggaggagagag

SEQ ID NO: 2105994 - RNA, 19 nt, Artificial Sequence
  Description of Artificial Sequence: Synthetic oligonucleotide
uuuggcagacaccuuuagg

SEQ ID NO: 2105995 - RNA, 19 nt, Artificial Sequence
  Description of Artificial Sequence: Synthetic oligonucleotide
uucuccuuagccuuguucu

SEQ ID NO: 2105996 - RNA, 19 nt, Artificial Sequence
  Description of Artificial Sequence: Synthetic oligonucleotide
uucaaauuccucuuacgac

SEQ ID NO: 2105997 - RNA, 19 nt, Artificial Sequence
  Description of Artificial Sequence: Synthetic oligonucleotide
ucaacacuccacuuguaag

SEQ ID NO: 2105998 - RNA, 19 nt, Artificial Sequence
  Description of Artificial Sequence: Synthetic oligonucleotide
uuuaggauccagcugcuuc

SEQ ID NO: 2105999 - RNA, 19 nt, Artificial Sequence
  Description of Artificial Sequence: Synthetic oligonucleotide
uugcuugccauuuccgugg

SEQ ID NO: 2106000 - RNA, 19 nt, Artificial Sequence
  Description of Artificial Sequence: Synthetic oligonucleotide
aucugaaucagaguccugg

SEQ ID NO: 2106001 - RNA, 19 nt, Artificial Sequence
  Description of Artificial Sequence: Synthetic oligonucleotide
uccucuuacgaccagacuu

SEQ ID NO: 2106002 - RNA, 19 nt, Artificial Sequence
  Description of Artificial Sequence: Synthetic oligonucleotide
ucgaggaggagagagauca

SEQ ID NO: 2106003 - RNA, 19 nt, Artificial Sequence
  Description of Artificial Sequence: Synthetic oligonucleotide
ucuuauuacaggauucuuu

SEQ ID NO: 2106004 - RNA, 19 nt, Artificial Sequence
  Description of Artificial Sequence: Synthetic oligonucleotide
agacugacgggugagaggg

SEQ ID NO: 2106005 - RNA, 19 nt, Artificial Sequence
  Description of Artificial Sequence: Synthetic oligonucleotide
uuuugcuuauucuccuuag

SEQ ID NO: 2106006 - RNA, 19 nt, Artificial Sequence
  Description of Artificial Sequence: Synthetic oligonucleotide
uuugcuugccauuuccgug

SEQ ID NO: 2106007 - RNA, 19 nt, Artificial Sequence
  Description of Artificial Sequence: Synthetic oligonucleotide
uauuccgugguggugacag

SEQ ID NO: 2106008 - RNA, 19 nt, Artificial Sequence
  Description of Artificial Sequence: Synthetic oligonucleotide
agcuucaaauuccucuuac

SEQ ID NO: 2106009 - RNA, 19 nt, Artificial Sequence
  Description of Artificial Sequence: Synthetic oligonucleotide
ucugucuauuccguggugg

SEQ ID NO: 2106010 - RNA, 19 nt, Artificial Sequence
  Description of Artificial Sequence: Synthetic oligonucleotide
aacaucaguuaccaaccca

SEQ ID NO: 2106011 - RNA, 19 nt, Artificial Sequence
  Description of Artificial Sequence: Synthetic oligonucleotide
guggagaaaggucagaguc

SEQ ID NO: 2106012 - RNA, 19 nt, Artificial Sequence
  Description of Artificial Sequence: Synthetic oligonucleotide
uuugcuuauucuccuuagc

SEQ ID NO: 2106013 - RNA, 19 nt, Artificial Sequence
  Description of Artificial Sequence: Synthetic oligonucleotide
ugugcagccuucuucccgg

SEQ ID NO: 2106014 - RNA, 19 nt, Artificial Sequence
  Description of Artificial Sequence: Synthetic oligonucleotide
ucaguuaccaacccaguuu

SEQ ID NO: 2106015 - RNA, 19 nt, Artificial Sequence
  Description of Artificial Sequence: Synthetic oligonucleotide
gauauugaaucuauuggga

SEQ ID NO: 2106016 - RNA, 19 nt, Artificial Sequence
  Description of Artificial Sequence: Synthetic oligonucleotide
uucucucaacauccgaucc

SEQ ID NO: 2106017 - RNA, 19 nt, Artificial Sequence
  Description of Artificial Sequence: Synthetic oligonucleotide
ugguccuuugucuucuccg

SEQ ID NO: 2106018 - RNA, 19 nt, Artificial Sequence
  Description of Artificial Sequence: Synthetic oligonucleotide
ugggcaguuccaaaucagg

SEQ ID NO: 2106019 - RNA, 19 nt, Artificial Sequence
  Description of Artificial Sequence: Synthetic oligonucleotide
cuuagcuccaacaugagcu

SEQ ID NO: 2106020 - RNA, 19 nt, Artificial Sequence
  Description of Artificial Sequence: Synthetic oligonucleotide
auugaaucuauugggagga

SEQ ID NO: 2106021 - RNA, 19 nt, Artificial Sequence
  Description of Artificial Sequence: Synthetic oligonucleotide
aucccagcgguauccaggc

SEQ ID NO: 2106022 - RNA, 19 nt, Artificial Sequence
  Description of Artificial Sequence: Synthetic oligonucleotide
caacaugagcuuuugcuug

SEQ ID NO: 2106023 - RNA, 19 nt, Artificial Sequence
  Description of Artificial Sequence: Synthetic oligonucleotide
uggagaaaggucagaguca

SEQ ID NO: 2106024 - RNA, 19 nt, Artificial Sequence
  Description of Artificial Sequence: Synthetic oligonucleotide
acaucaguuaccaacccag

SEQ ID NO: 2106025 - RNA, 19 nt, Artificial Sequence
  Description of Artificial Sequence: Synthetic oligonucleotide
uuaggauccagcugcuucu

SEQ ID NO: 2106026 - RNA, 19 nt, Artificial Sequence
  Description of Artificial Sequence: Synthetic oligonucleotide
ucuuaaugaaguuggccau

SEQ ID NO: 2106027 - RNA, 19 nt, Artificial Sequence
  Description of Artificial Sequence: Synthetic oligonucleotide
uuaaugaaguuggccauug

SEQ ID NO: 2106028 - RNA, 19 nt, Artificial Sequence
  Description of Artificial Sequence: Synthetic oligonucleotide
cuucaaauuccucuuacga

SEQ ID NO: 2106029 - RNA, 19 nt, Artificial Sequence
  Description of Artificial Sequence: Synthetic oligonucleotide
acaccuuuaggauccagcu

SEQ ID NO: 2106030 - RNA, 19 nt, Artificial Sequence
  Description of Artificial Sequence: Synthetic oligonucleotide
uuuugcuugccauuuccgu

SEQ ID NO: 2106031 - RNA, 19 nt, Artificial Sequence
  Description of Artificial Sequence: Synthetic oligonucleotide
uguccacuccaucccagcg

SEQ ID NO: 2106032 - RNA, 19 nt, Artificial Sequence
  Description of Artificial Sequence: Synthetic oligonucleotide
ccacuuguaagcaagcucc

SEQ ID NO: 2106033 - RNA, 19 nt, Artificial Sequence
  Description of Artificial Sequence: Synthetic oligonucleotide
aggucucacuuucuuuugc

SEQ ID NO: 2106034 - RNA, 19 nt, Artificial Sequence
  Description of Artificial Sequence: Synthetic oligonucleotide
uccucaacacuccacuugu

SEQ ID NO: 2106035 - RNA, 19 nt, Artificial Sequence
  Description of Artificial Sequence: Synthetic oligonucleotide
auuggaucuguccacucca

SEQ ID NO: 2106036 - RNA, 19 nt, Artificial Sequence
  Description of Artificial Sequence: Synthetic oligonucleotide
uccacuuguaagcaagcuc

SEQ ID NO: 2106037 - RNA, 19 nt, Artificial Sequence
  Description of Artificial Sequence: Synthetic oligonucleotide
uuugucuucuccggggcgg

SEQ ID NO: 2106038 - RNA, 19 nt, Artificial Sequence
  Description of Artificial Sequence: Synthetic oligonucleotide
uaaugaaguuggccauugg

SEQ ID NO: 2106039 - RNA, 19 nt, Artificial Sequence
  Description of Artificial Sequence: Synthetic oligonucleotide
ugcuccggaauacaugugu

SEQ ID NO: 2106040 - RNA, 19 nt, Artificial Sequence
  Description of Artificial Sequence: Synthetic oligonucleotide
acagcuuucuugcuggcga

SEQ ID NO: 2106041 - RNA, 19 nt, Artificial Sequence
  Description of Artificial Sequence: Synthetic oligonucleotide
gaucuguccacuccauccc

SEQ ID NO: 2106042 - RNA, 19 nt, Artificial Sequence
  Description of Artificial Sequence: Synthetic oligonucleotide
aucaggggaucauggacgg

SEQ ID NO: 2106043 - RNA, 19 nt, Artificial Sequence
  Description of Artificial Sequence: Synthetic oligonucleotide
auauagcucaucucucucu

SEQ ID NO: 2106044 - RNA, 19 nt, Artificial Sequence
  Description of Artificial Sequence: Synthetic oligonucleotide
cagaucugaaucagagucc

SEQ ID NO: 2106045 - RNA, 19 nt, Artificial Sequence
  Description of Artificial Sequence: Synthetic oligonucleotide
aggaccacuguaucgaggu

SEQ ID NO: 2106046 - RNA, 19 nt, Artificial Sequence
  Description of Artificial Sequence: Synthetic oligonucleotide
uacgaccagacuugucucg

SEQ ID NO: 2106047 - RNA, 19 nt, Artificial Sequence
  Description of Artificial Sequence: Synthetic oligonucleotide
agaagauuugguccuuugu

SEQ ID NO: 2106048 - RNA, 19 nt, Artificial Sequence
  Description of Artificial Sequence: Synthetic oligonucleotide
auuuccguggagaaagguc

SEQ ID NO: 2106049 - RNA, 19 nt, Artificial Sequence
  Description of Artificial Sequence: Synthetic oligonucleotide
ucucucaacauccgaucca

SEQ ID NO: 2106050 - RNA, 19 nt, Artificial Sequence
  Description of Artificial Sequence: Synthetic oligonucleotide
cucggaauacaguuucagc

SEQ ID NO: 2106051 - RNA, 19 nt, Artificial Sequence
  Description of Artificial Sequence: Synthetic oligonucleotide
cuuguucucucaacauccg

SEQ ID NO: 2106052 - RNA, 19 nt, Artificial Sequence
  Description of Artificial Sequence: Synthetic oligonucleotide
caauauagcgggccagagg

SEQ ID NO: 2106053 - RNA, 19 nt, Artificial Sequence
  Description of Artificial Sequence: Synthetic oligonucleotide
uuguaagcaagcuccucca

SEQ ID NO: 2106054 - RNA, 19 nt, Artificial Sequence
  Description of Artificial Sequence: Synthetic oligonucleotide
acagucuuauuacaggauu

SEQ ID NO: 2106055 - RNA, 19 nt, Artificial Sequence
  Description of Artificial Sequence: Synthetic oligonucleotide
guacagucuuauuacagga

SEQ ID NO: 2106056 - RNA, 19 nt, Artificial Sequence
  Description of Artificial Sequence: Synthetic oligonucleotide
aaggucagagucacgcccg

SEQ ID NO: 2106057 - RNA, 19 nt, Artificial Sequence
  Description of Artificial Sequence: Synthetic oligonucleotide
cacuccacuuguaagcaag

SEQ ID NO: 2106058 - RNA, 19 nt, Artificial Sequence
  Description of Artificial Sequence: Synthetic oligonucleotide
gagacugacgggugagagg

SEQ ID NO: 2106059 - RNA, 19 nt, Artificial Sequence
  Description of Artificial Sequence: Synthetic oligonucleotide
uuacaggauucuuucugca

SEQ ID NO: 2106060 - RNA, 19 nt, Artificial Sequence
  Description of Artificial Sequence: Synthetic oligonucleotide
ggaucuguccacuccaucc

SEQ ID NO: 2106061 - RNA, 19 nt, Artificial Sequence
  Description of Artificial Sequence: Synthetic oligonucleotide
ucucacuuucuuuugcuua

SEQ ID NO: 2106062 - RNA, 19 nt, Artificial Sequence
  Description of Artificial Sequence: Synthetic oligonucleotide
uggcgagccuggcaaaacg

SEQ ID NO: 2106063 - RNA, 19 nt, Artificial Sequence
  Description of Artificial Sequence: Synthetic oligonucleotide
gacggggacuccuucgagg

SEQ ID NO: 2106064 - RNA, 19 nt, Artificial Sequence
  Description of Artificial Sequence: Synthetic oligonucleotide
ucucggaauacaguuucag

SEQ ID NO: 2106065 - RNA, 19 nt, Artificial Sequence
  Description of Artificial Sequence: Synthetic oligonucleotide
agagucagcgcuccggugu

SEQ ID NO: 2106066 - RNA, 19 nt, Artificial Sequence
  Description of Artificial Sequence: Synthetic oligonucleotide
uccggaauacaugugugca

SEQ ID NO: 2106067 - RNA, 19 nt, Artificial Sequence
  Description of Artificial Sequence: Synthetic oligonucleotide
auguccucaacacuccacu

SEQ ID NO: 2106068 - RNA, 19 nt, Artificial Sequence
  Description of Artificial Sequence: Synthetic oligonucleotide
guuucagcgaauucaaacu

SEQ ID NO: 2106069 - RNA, 19 nt, Artificial Sequence
  Description of Artificial Sequence: Synthetic oligonucleotide
gaacaucaguuaccaaccc

SEQ ID NO: 2106070 - RNA, 19 nt, Artificial Sequence
  Description of Artificial Sequence: Synthetic oligonucleotide
ucuucuccggggcggagag

SEQ ID NO: 2106071 - RNA, 19 nt, Artificial Sequence
  Description of Artificial Sequence: Synthetic oligonucleotide
gacaccuuuaggauccagc

SEQ ID NO: 2106072 - RNA, 19 nt, Artificial Sequence
  Description of Artificial Sequence: Synthetic oligonucleotide
agcaagcuccuccacagcu

SEQ ID NO: 2106073 - RNA, 19 nt, Artificial Sequence
  Description of Artificial Sequence: Synthetic oligonucleotide
uuucuugcuggcgagccug

SEQ ID NO: 2106074 - RNA, 19 nt, Artificial Sequence
  Description of Artificial Sequence: Synthetic oligonucleotide
cagucuuauuacaggauuc

SEQ ID NO: 2106075 - RNA, 19 nt, Artificial Sequence
  Description of Artificial Sequence: Synthetic oligonucleotide
uacagucuuauuacaggau

SEQ ID NO: 2106076 - RNA, 19 nt, Artificial Sequence
  Description of Artificial Sequence: Synthetic oligonucleotide
uggcaaaacgcuucuguuc

SEQ ID NO: 2106077 - RNA, 19 nt, Artificial Sequence
  Description of Artificial Sequence: Synthetic oligonucleotide
gugagaggguucuuggccc

SEQ ID NO: 2106078 - RNA, 19 nt, Artificial Sequence
  Description of Artificial Sequence: Synthetic oligonucleotide
ucugaaucagaguccuggu

SEQ ID NO: 2106079 - RNA, 19 nt, Artificial Sequence
  Description of Artificial Sequence: Synthetic oligonucleotide
cuguucuuggagacugacg

SEQ ID NO: 2106080 - RNA, 19 nt, Artificial Sequence
  Description of Artificial Sequence: Synthetic oligonucleotide
cuuauucuccuuagccuug

SEQ ID NO: 2106081 - RNA, 19 nt, Artificial Sequence
  Description of Artificial Sequence: Synthetic oligonucleotide
agaucugaaucagaguccu

SEQ ID NO: 2106082 - RNA, 19 nt, Artificial Sequence
  Description of Artificial Sequence: Synthetic oligonucleotide
uucuccggggcggagagag

SEQ ID NO: 2106083 - RNA, 19 nt, Artificial Sequence
  Description of Artificial Sequence: Synthetic oligonucleotide
uccgcuuuucuccucugcu

SEQ ID NO: 2106084 - RNA, 19 nt, Artificial Sequence
  Description of Artificial Sequence: Synthetic oligonucleotide
augaaguuggccauugggu

SEQ ID NO: 2106085 - RNA, 19 nt, Artificial Sequence
  Description of Artificial Sequence: Synthetic oligonucleotide
uccacuccaucccagcggu

SEQ ID NO: 2106086 - RNA, 19 nt, Artificial Sequence
  Description of Artificial Sequence: Synthetic oligonucleotide
cuuacgaccagacuugucu

SEQ ID NO: 2106087 - RNA, 19 nt, Artificial Sequence
  Description of Artificial Sequence: Synthetic oligonucleotide
agucuuauuacaggauucu

SEQ ID NO: 2106088 - RNA, 19 nt, Artificial Sequence
  Description of Artificial Sequence: Synthetic oligonucleotide
acuguaucgaggucucacu

SEQ ID NO: 2106089 - RNA, 19 nt, Artificial Sequence
  Description of Artificial Sequence: Synthetic oligonucleotide
guaucgaggucucacuuuc

SEQ ID NO: 2106090 - RNA, 19 nt, Artificial Sequence
  Description of Artificial Sequence: Synthetic oligonucleotide
caggggaucauggacgggg

SEQ ID NO: 2106091 - RNA, 19 nt, Artificial Sequence
  Description of Artificial Sequence: Synthetic oligonucleotide
uccaaaucaggggaucaug

SEQ ID NO: 2106092 - RNA, 19 nt, Artificial Sequence
  Description of Artificial Sequence: Synthetic oligonucleotide
gaaucagaguccugguguc

SEQ ID NO: 2106093 - RNA, 19 nt, Artificial Sequence
  Description of Artificial Sequence: Synthetic oligonucleotide
gacuugucucggaauacag

SEQ ID NO: 2106094 - RNA, 19 nt, Artificial Sequence
  Description of Artificial Sequence: Synthetic oligonucleotide
cuccggaauacaugugugc

SEQ ID NO: 2106095 - RNA, 19 nt, Artificial Sequence
  Description of Artificial Sequence: Synthetic oligonucleotide
acuccuucgaggaggagag

SEQ ID NO: 2106096 - RNA, 19 nt, Artificial Sequence
  Description of Artificial Sequence: Synthetic oligonucleotide
uuuggucugggcaguucca

SEQ ID NO: 2106097 - RNA, 19 nt, Artificial Sequence
  Description of Artificial Sequence: Synthetic oligonucleotide
cauauagcucaucucucuc

SEQ ID NO: 2106098 - RNA, 19 nt, Artificial Sequence
  Description of Artificial Sequence: Synthetic oligonucleotide
caacauccgauccagaucu

SEQ ID NO: 2106099 - RNA, 19 nt, Artificial Sequence
  Description of Artificial Sequence: Synthetic oligonucleotide
ggcaaaacgcuucuguuca

SEQ ID NO: 2106100 - RNA, 19 nt, Artificial Sequence
  Description of Artificial Sequence: Synthetic oligonucleotide
cuuugucuucuccggggcg

SEQ ID NO: 2106101 - RNA, 19 nt, Artificial Sequence
  Description of Artificial Sequence: Synthetic oligonucleotide
cucucaacauccgauccag

SEQ ID NO: 2106102 - RNA, 19 nt, Artificial Sequence
  Description of Artificial Sequence: Synthetic oligonucleotide
guccucaacacuccacuug

SEQ ID NO: 2106103 - RNA, 19 nt, Artificial Sequence
  Description of Artificial Sequence: Synthetic oligonucleotide
ucagagucacgcccguacu

SEQ ID NO: 2106104 - RNA, 19 nt, Artificial Sequence
  Description of Artificial Sequence: Synthetic oligonucleotide
augagcuuuugcuugccau

SEQ ID NO: 2106105 - RNA, 19 nt, Artificial Sequence
  Description of Artificial Sequence: Synthetic oligonucleotide
uuacgaccagacuugucuc

SEQ ID NO: 2106106 - RNA, 19 nt, Artificial Sequence
  Description of Artificial Sequence: Synthetic oligonucleotide
gucagagucacgcccguac

SEQ ID NO: 2106107 - RNA, 19 nt, Artificial Sequence
  Description of Artificial Sequence: Synthetic oligonucleotide
uguaucgaggucucacuuu

SEQ ID NO: 2106108 - RNA, 19 nt, Artificial Sequence
  Description of Artificial Sequence: Synthetic oligonucleotide
uuccguggagaaaggucag

SEQ ID NO: 2106109 - RNA, 19 nt, Artificial Sequence
  Description of Artificial Sequence: Synthetic oligonucleotide
guucucucaacauccgauc

SEQ ID NO: 2106110 - RNA, 19 nt, Artificial Sequence
  Description of Artificial Sequence: Synthetic oligonucleotide
uccucuacauucugcugcu

SEQ ID NO: 2106111 - RNA, 19 nt, Artificial Sequence
  Description of Artificial Sequence: Synthetic oligonucleotide
auccaggccagauauugaa

SEQ ID NO: 2106112 - RNA, 19 nt, Artificial Sequence
  Description of Artificial Sequence: Synthetic oligonucleotide
cugguguacagucuuauua

SEQ ID NO: 2106113 - RNA, 19 nt, Artificial Sequence
  Description of Artificial Sequence: Synthetic oligonucleotide
cauguccucaacacuccac

SEQ ID NO: 2106114 - RNA, 19 nt, Artificial Sequence
  Description of Artificial Sequence: Synthetic oligonucleotide
aucaguuaccaacccaguu

SEQ ID NO: 2106115 - RNA, 19 nt, Artificial Sequence
  Description of Artificial Sequence: Synthetic oligonucleotide
ggucguggugucuuggucc

SEQ ID NO: 2106116 - RNA, 19 nt, Artificial Sequence
  Description of Artificial Sequence: Synthetic oligonucleotide
uucuccgcuuuucuccucu

SEQ ID NO: 2106117 - RNA, 19 nt, Artificial Sequence
  Description of Artificial Sequence: Synthetic oligonucleotide
acuccacuuguaagcaagc

SEQ ID NO: 2106118 - RNA, 19 nt, Artificial Sequence
  Description of Artificial Sequence: Synthetic oligonucleotide
uggaggagagagaucugaa

SEQ ID NO: 2106119 - RNA, 19 nt, Artificial Sequence
  Description of Artificial Sequence: Synthetic oligonucleotide
ucugaauccuucuccgcuu

SEQ ID NO: 2106120 - RNA, 19 nt, Artificial Sequence
  Description of Artificial Sequence: Synthetic oligonucleotide
caucaucaauauagcgggc

SEQ ID NO: 2106121 - RNA, 19 nt, Artificial Sequence
  Description of Artificial Sequence: Synthetic oligonucleotide
acuuguaagcaagcuccuc

SEQ ID NO: 2106122 - RNA, 19 nt, Artificial Sequence
  Description of Artificial Sequence: Synthetic oligonucleotide
aacugggcuccaagggucg

SEQ ID NO: 2106123 - RNA, 19 nt, Artificial Sequence
  Description of Artificial Sequence: Synthetic oligonucleotide
gcuuuugcuugccauuucc

SEQ ID NO: 2106124 - RNA, 19 nt, Artificial Sequence
  Description of Artificial Sequence: Synthetic oligonucleotide
uggcagacaccuuuaggau

SEQ ID NO: 2106125 - RNA, 19 nt, Artificial Sequence
  Description of Artificial Sequence: Synthetic oligonucleotide
acaugagcuuuugcuugcc

SEQ ID NO: 2106126 - RNA, 19 nt, Artificial Sequence
  Description of Artificial Sequence: Synthetic oligonucleotide
gacuccuucgaggaggaga

SEQ ID NO: 2106127 - RNA, 19 nt, Artificial Sequence
  Description of Artificial Sequence: Synthetic oligonucleotide
uuggagacugacgggugag

SEQ ID NO: 2106128 - RNA, 19 nt, Artificial Sequence
  Description of Artificial Sequence: Synthetic oligonucleotide
acauccgauccagaucuuc

SEQ ID NO: 2106129 - RNA, 19 nt, Artificial Sequence
  Description of Artificial Sequence: Synthetic oligonucleotide
caucaauauagcgggccag

SEQ ID NO: 2106130 - RNA, 19 nt, Artificial Sequence
  Description of Artificial Sequence: Synthetic oligonucleotide
acggggacuccuucgagga

SEQ ID NO: 2106131 - RNA, 19 nt, Artificial Sequence
  Description of Artificial Sequence: Synthetic oligonucleotide
aucaauauagcgggccaga

SEQ ID NO: 2106132 - RNA, 19 nt, Artificial Sequence
  Description of Artificial Sequence: Synthetic oligonucleotide
ugggcuccaagggucgugg

SEQ ID NO: 2106133 - RNA, 19 nt, Artificial Sequence
  Description of Artificial Sequence: Synthetic oligonucleotide
agagucacgcccguacuug

SEQ ID NO: 2106134 - RNA, 19 nt, Artificial Sequence
  Description of Artificial Sequence: Synthetic oligonucleotide
cuugccauuuccguggaga

SEQ ID NO: 2106135 - RNA, 19 nt, Artificial Sequence
  Description of Artificial Sequence: Synthetic oligonucleotide
auacaugugugcagccuuc

SEQ ID NO: 2106136 - RNA, 19 nt, Artificial Sequence
  Description of Artificial Sequence: Synthetic oligonucleotide
gcgaauucaaacugggcuc

SEQ ID NO: 2106137 - RNA, 19 nt, Artificial Sequence
  Description of Artificial Sequence: Synthetic oligonucleotide
cagcgaauucaaacugggc

SEQ ID NO: 2106138 - RNA, 19 nt, Artificial Sequence
  Description of Artificial Sequence: Synthetic oligonucleotide
uugucucggaauacaguuu

SEQ ID NO: 2106139 - RNA, 19 nt, Artificial Sequence
  Description of Artificial Sequence: Synthetic oligonucleotide
gucuauuccguggugguga

SEQ ID NO: 2106140 - RNA, 19 nt, Artificial Sequence
  Description of Artificial Sequence: Synthetic oligonucleotide
acgaccagacuugucucgg

SEQ ID NO: 2106141 - RNA, 19 nt, Artificial Sequence
  Description of Artificial Sequence: Synthetic oligonucleotide
ucuauuccgugguggugac

SEQ ID NO: 2106142 - RNA, 19 nt, Artificial Sequence
  Description of Artificial Sequence: Synthetic oligonucleotide
cuugucucggaauacaguu

SEQ ID NO: 2106143 - RNA, 19 nt, Artificial Sequence
  Description of Artificial Sequence: Synthetic oligonucleotide
ugugugcagccuucuuccc

SEQ ID NO: 2106144 - RNA, 19 nt, Artificial Sequence
  Description of Artificial Sequence: Synthetic oligonucleotide
gagucacgcccguacuugc

SEQ ID NO: 2106145 - RNA, 19 nt, Artificial Sequence
  Description of Artificial Sequence: Synthetic oligonucleotide
ucauggacggggccuccug

SEQ ID NO: 2106146 - RNA, 19 nt, Artificial Sequence
  Description of Artificial Sequence: Synthetic oligonucleotide
agcuuucuugcuggcgagc

SEQ ID NO: 2106147 - RNA, 19 nt, Artificial Sequence
  Description of Artificial Sequence: Synthetic oligonucleotide
cacuguaucgaggucucac

SEQ ID NO: 2106148 - RNA, 19 nt, Artificial Sequence
  Description of Artificial Sequence: Synthetic oligonucleotide
ugucuauuccgugguggug

SEQ ID NO: 2106149 - RNA, 19 nt, Artificial Sequence
  Description of Artificial Sequence: Synthetic oligonucleotide
uccaggccagauauugaau

SEQ ID NO: 2106150 - RNA, 19 nt, Artificial Sequence
  Description of Artificial Sequence: Synthetic oligonucleotide
ggagagaggucagagucag

SEQ ID NO: 2106151 - RNA, 19 nt, Artificial Sequence
  Description of Artificial Sequence: Synthetic oligonucleotide
cuccacagcuuucuugcug

SEQ ID NO: 2106152 - RNA, 19 nt, Artificial Sequence
  Description of Artificial Sequence: Synthetic oligonucleotide
cauccucuacauucugcug

SEQ ID NO: 2106153 - RNA, 19 nt, Artificial Sequence
  Description of Artificial Sequence: Synthetic oligonucleotide
ggaauacaugugugcagcc

SEQ ID NO: 2106154 - RNA, 19 nt, Artificial Sequence
  Description of Artificial Sequence: Synthetic oligonucleotide
ucuugaugcucccgcugaa

SEQ ID NO: 2106155 - RNA, 19 nt, Artificial Sequence
  Description of Artificial Sequence: Synthetic oligonucleotide
uugaaucuauugggaggag

SEQ ID NO: 2106156 - RNA, 19 nt, Artificial Sequence
  Description of Artificial Sequence: Synthetic oligonucleotide
agacuugucucggaauaca

SEQ ID NO: 2106157 - RNA, 19 nt, Artificial Sequence
  Description of Artificial Sequence: Synthetic oligonucleotide
auggacggggccuccugag

SEQ ID NO: 2106158 - RNA, 19 nt, Artificial Sequence
  Description of Artificial Sequence: Synthetic oligonucleotide
gaggaggagagagaucaga

SEQ ID NO: 2106159 - RNA, 19 nt, Artificial Sequence
  Description of Artificial Sequence: Synthetic oligonucleotide
ucuuacgaccagacuuguc

SEQ ID NO: 2106160 - RNA, 19 nt, Artificial Sequence
  Description of Artificial Sequence: Synthetic oligonucleotide
ucucaacauccgauccaga

SEQ ID NO: 2106161 - RNA, 19 nt, Artificial Sequence
  Description of Artificial Sequence: Synthetic oligonucleotide
uggaucuguccacuccauc

SEQ ID NO: 2106162 - RNA, 19 nt, Artificial Sequence
  Description of Artificial Sequence: Synthetic oligonucleotide
ggguucuuggccccucugg

SEQ ID NO: 2106163 - RNA, 19 nt, Artificial Sequence
  Description of Artificial Sequence: Synthetic oligonucleotide
uacugucuuuuggucuggg

SEQ ID NO: 2106164 - RNA, 19 nt, Artificial Sequence
  Description of Artificial Sequence: Synthetic oligonucleotide
ccucuuacgaccagacuug

SEQ ID NO: 2106165 - RNA, 19 nt, Artificial Sequence
  Description of Artificial Sequence: Synthetic oligonucleotide
ugccguggaggagagagau

SEQ ID NO: 2106166 - RNA, 19 nt, Artificial Sequence
  Description of Artificial Sequence: Synthetic oligonucleotide
ccaggccagauauugaauc

SEQ ID NO: 2106167 - RNA, 19 nt, Artificial Sequence
  Description of Artificial Sequence: Synthetic oligonucleotide
aucgaggucucacuuucuu

SEQ ID NO: 2106168 - RNA, 19 nt, Artificial Sequence
  Description of Artificial Sequence: Synthetic oligonucleotide
aggggaucauggacggggc

SEQ ID NO: 2106169 - RNA, 19 nt, Artificial Sequence
  Description of Artificial Sequence: Synthetic oligonucleotide
accagacuugucucggaau

SEQ ID NO: 2106170 - RNA, 19 nt, Artificial Sequence
  Description of Artificial Sequence: Synthetic oligonucleotide
gagaaaggucagagucacg

SEQ ID NO: 2106171 - RNA, 19 nt, Artificial Sequence
  Description of Artificial Sequence: Synthetic oligonucleotide
ucugguguacagucuuauu

SEQ ID NO: 2106172 - RNA, 19 nt, Artificial Sequence
  Description of Artificial Sequence: Synthetic oligonucleotide
ggggacuccuucgaggagg

SEQ ID NO: 2106173 - RNA, 19 nt, Artificial Sequence
  Description of Artificial Sequence: Synthetic oligonucleotide
uugcuccggaauacaugug

SEQ ID NO: 2106174 - RNA, 19 nt, Artificial Sequence
  Description of Artificial Sequence: Synthetic oligonucleotide
ucacgcccguacuugcugu

SEQ ID NO: 2106175 - RNA, 19 nt, Artificial Sequence
  Description of Artificial Sequence: Synthetic oligonucleotide
ggaauacaguuucagcgaa

SEQ ID NO: 2106176 - RNA, 19 nt, Artificial Sequence
  Description of Artificial Sequence: Synthetic oligonucleotide
ccugguguccugaauuuug

SEQ ID NO: 2106177 - RNA, 19 nt, Artificial Sequence
  Description of Artificial Sequence: Synthetic oligonucleotide
uucgaggaggagagagauc

SEQ ID NO: 2106178 - RNA, 19 nt, Artificial Sequence
  Description of Artificial Sequence: Synthetic oligonucleotide
ucgaggucucacuuucuuu

SEQ ID NO: 2106179 - RNA, 19 nt, Artificial Sequence
  Description of Artificial Sequence: Synthetic oligonucleotide
gucacgcccguacuugcug

SEQ ID NO: 2106180 - RNA, 19 nt, Artificial Sequence
  Description of Artificial Sequence: Synthetic oligonucleotide
gaccacuguaucgaggucu

SEQ ID NO: 2106181 - RNA, 19 nt, Artificial Sequence
  Description of Artificial Sequence: Synthetic oligonucleotide
guuccaaaucaggggauca

SEQ ID NO: 2106182 - RNA, 19 nt, Artificial Sequence
  Description of Artificial Sequence: Synthetic oligonucleotide
cagcuuucuugcuggcgag

SEQ ID NO: 2106183 - RNA, 19 nt, Artificial Sequence
  Description of Artificial Sequence: Synthetic oligonucleotide
gucugggcaguuccaaauc

SEQ ID NO: 2106184 - RNA, 19 nt, Artificial Sequence
  Description of Artificial Sequence: Synthetic oligonucleotide
uguccucaacacuccacuu

SEQ ID NO: 2106185 - RNA, 19 nt, Artificial Sequence
  Description of Artificial Sequence: Synthetic oligonucleotide
ggcagacaccuuuaggauc

SEQ ID NO: 2106186 - RNA, 19 nt, Artificial Sequence
  Description of Artificial Sequence: Synthetic oligonucleotide
cagacuugucucggaauac

SEQ ID NO: 2106187 - RNA, 19 nt, Artificial Sequence
  Description of Artificial Sequence: Synthetic oligonucleotide
uuccaaaucaggggaucau

SEQ ID NO: 2106188 - RNA, 19 nt, Artificial Sequence
  Description of Artificial Sequence: Synthetic oligonucleotide
uccgugguggugacagauc

SEQ ID NO: 2106189 - RNA, 19 nt, Artificial Sequence
  Description of Artificial Sequence: Synthetic oligonucleotide
ugcuguucuuggagacuga

SEQ ID NO: 2106190 - RNA, 19 nt, Artificial Sequence
  Description of Artificial Sequence: Synthetic oligonucleotide
cuuggagacugacggguga

SEQ ID NO: 2106191 - RNA, 19 nt, Artificial Sequence
  Description of Artificial Sequence: Synthetic oligonucleotide
gaccagacuugucucggaa

SEQ ID NO: 2106192 - RNA, 19 nt, Artificial Sequence
  Description of Artificial Sequence: Synthetic oligonucleotide
gaauacaugugugcagccu

SEQ ID NO: 2106193 - RNA, 19 nt, Artificial Sequence
  Description of Artificial Sequence: Synthetic oligonucleotide
ucccgcugaacaucaguua

SEQ ID NO: 2106194 - RNA, 19 nt, Artificial Sequence
  Description of Artificial Sequence: Synthetic oligonucleotide
uggacggggccuccugaga

SEQ ID NO: 2106195 - RNA, 19 nt, Artificial Sequence
  Description of Artificial Sequence: Synthetic oligonucleotide
uuggccauuggguccccuc

SEQ ID NO: 2106196 - RNA, 19 nt, Artificial Sequence
  Description of Artificial Sequence: Synthetic oligonucleotide
cuguucaaagccauuggau

SEQ ID NO: 2106197 - RNA, 19 nt, Artificial Sequence
  Description of Artificial Sequence: Synthetic oligonucleotide
acgggugagaggguucuug

SEQ ID NO: 2106198 - RNA, 19 nt, Artificial Sequence
  Description of Artificial Sequence: Synthetic oligonucleotide
cccgcugaacaucaguuac

SEQ ID NO: 2106199 - RNA, 19 nt, Artificial Sequence
  Description of Artificial Sequence: Synthetic oligonucleotide
cuccgcuuuucuccucugc

SEQ ID NO: 2106200 - RNA, 19 nt, Artificial Sequence
  Description of Artificial Sequence: Synthetic oligonucleotide
cugggcauauagcucaucu

SEQ ID NO: 2106201 - RNA, 19 nt, Artificial Sequence
  Description of Artificial Sequence: Synthetic oligonucleotide
caaacugggcuccaagggu

SEQ ID NO: 2106202 - RNA, 19 nt, Artificial Sequence
  Description of Artificial Sequence: Synthetic oligonucleotide
ggugcaggaccacuguauc

SEQ ID NO: 2106203 - RNA, 19 nt, Artificial Sequence
  Description of Artificial Sequence: Synthetic oligonucleotide
ucaggggaucauggacggg

SEQ ID NO: 2106204 - RNA, 19 nt, Artificial Sequence
  Description of Artificial Sequence: Synthetic oligonucleotide
cagaaucagaagauuuggu

SEQ ID NO: 2106205 - RNA, 19 nt, Artificial Sequence
  Description of Artificial Sequence: Synthetic oligonucleotide
cucugaauccuucuccgcu

SEQ ID NO: 2106206 - RNA, 19 nt, Artificial Sequence
  Description of Artificial Sequence: Synthetic oligonucleotide
ugguggugacagaucugaa

SEQ ID NO: 2106207 - RNA, 19 nt, Artificial Sequence
  Description of Artificial Sequence: Synthetic oligonucleotide
ccuucauugcauccucuac

SEQ ID NO: 2106208 - RNA, 19 nt, Artificial Sequence
  Description of Artificial Sequence: Synthetic oligonucleotide
gcuuucuugcuggcgagcc

SEQ ID NO: 2106209 - RNA, 19 nt, Artificial Sequence
  Description of Artificial Sequence: Synthetic oligonucleotide
gaucugaaucagaguccug

SEQ ID NO: 2106210 - RNA, 19 nt, Artificial Sequence
  Description of Artificial Sequence: Synthetic oligonucleotide
ugguguccugaauuuuguu

SEQ ID NO: 2106211 - RNA, 19 nt, Artificial Sequence
  Description of Artificial Sequence: Synthetic oligonucleotide
ucuccgcuuuucuccucug

SEQ ID NO: 2106212 - RNA, 19 nt, Artificial Sequence
  Description of Artificial Sequence: Synthetic oligonucleotide
ccggaauacaugugugcag

SEQ ID NO: 2106213 - RNA, 19 nt, Artificial Sequence
  Description of Artificial Sequence: Synthetic oligonucleotide
ccacugggcauauagcuca

SEQ ID NO: 2106214 - RNA, 19 nt, Artificial Sequence
  Description of Artificial Sequence: Synthetic oligonucleotide
gagucagcgcuccgguguc

SEQ ID NO: 2106215 - RNA, 19 nt, Artificial Sequence
  Description of Artificial Sequence: Synthetic oligonucleotide
cucugucuauuccguggug

SEQ ID NO: 2106216 - RNA, 19 nt, Artificial Sequence
  Description of Artificial Sequence: Synthetic oligonucleotide
uccguggagaaaggucaga

SEQ ID NO: 2106217 - RNA, 19 nt, Artificial Sequence
  Description of Artificial Sequence: Synthetic oligonucleotide
cugacgggugagaggguuc

SEQ ID NO: 2106218 - RNA, 19 nt, Artificial Sequence
  Description of Artificial Sequence: Synthetic oligonucleotide
uggagacugacgggugaga

SEQ ID NO: 2106219 - RNA, 19 nt, Artificial Sequence
  Description of Artificial Sequence: Synthetic oligonucleotide
acugggcauauagcucauc

SEQ ID NO: 2106220 - RNA, 19 nt, Artificial Sequence
  Description of Artificial Sequence: Synthetic oligonucleotide
cuguugccggcucugggca

SEQ ID NO: 2106221 - RNA, 19 nt, Artificial Sequence
  Description of Artificial Sequence: Synthetic oligonucleotide
agcgguauccaggccagau

SEQ ID NO: 2106222 - RNA, 19 nt, Artificial Sequence
  Description of Artificial Sequence: Synthetic oligonucleotide
gaggucagagucagcgcuc

SEQ ID NO: 2106223 - RNA, 19 nt, Artificial Sequence
  Description of Artificial Sequence: Synthetic oligonucleotide
auagcgggccagaggcuuc

SEQ ID NO: 2106224 - RNA, 19 nt, Artificial Sequence
  Description of Artificial Sequence: Synthetic oligonucleotide
acugacgggugagaggguu

SEQ ID NO: 2106225 - RNA, 19 nt, Artificial Sequence
  Description of Artificial Sequence: Synthetic oligonucleotide
ugccauuuccguggagaaa

SEQ ID NO: 2106226 - RNA, 19 nt, Artificial Sequence
  Description of Artificial Sequence: Synthetic oligonucleotide
cagagucagcgcuccggug

SEQ ID NO: 2106227 - RNA, 19 nt, Artificial Sequence
  Description of Artificial Sequence: Synthetic oligonucleotide
agacaccuuuaggauccag

SEQ ID NO: 2106228 - RNA, 19 nt, Artificial Sequence
  Description of Artificial Sequence: Synthetic oligonucleotide
caggccagauauugaaucu

SEQ ID NO: 2106229 - RNA, 19 nt, Artificial Sequence
  Description of Artificial Sequence: Synthetic oligonucleotide
aggccagauauugaaucua

SEQ ID NO: 2106230 - RNA, 19 nt, Artificial Sequence
  Description of Artificial Sequence: Synthetic oligonucleotide
ccgcugaacaucaguuacc

SEQ ID NO: 2106231 - RNA, 19 nt, Artificial Sequence
  Description of Artificial Sequence: Synthetic oligonucleotide
uccaucccagcgguaucca

SEQ ID NO: 2106232 - RNA, 19 nt, Artificial Sequence
  Description of Artificial Sequence: Synthetic oligonucleotide
gaucauggacggggccucc

SEQ ID NO: 2106233 - RNA, 19 nt, Artificial Sequence
  Description of Artificial Sequence: Synthetic oligonucleotide
gcauauagcucaucucucu

SEQ ID NO: 2106234 - RNA, 19 nt, Artificial Sequence
  Description of Artificial Sequence: Synthetic oligonucleotide
cuucccgggacggggacuc

SEQ ID NO: 2106235 - RNA, 19 nt, Artificial Sequence
  Description of Artificial Sequence: Synthetic oligonucleotide
ccauuuccguggagaaagg

SEQ ID NO: 2106236 - RNA, 19 nt, Artificial Sequence
  Description of Artificial Sequence: Synthetic oligonucleotide
cuucuucccgggacgggga

SEQ ID NO: 2106237 - RNA, 19 nt, Artificial Sequence
  Description of Artificial Sequence: Synthetic oligonucleotide
gagaucugaaucagaggau

SEQ ID NO: 2106238 - RNA, 19 nt, Artificial Sequence
  Description of Artificial Sequence: Synthetic oligonucleotide
caguuaccaacccaguuuu

SEQ ID NO: 2106239 - RNA, 19 nt, Artificial Sequence
  Description of Artificial Sequence: Synthetic oligonucleotide
ccguggagaaaggucagag

SEQ ID NO: 2106240 - RNA, 19 nt, Artificial Sequence
  Description of Artificial Sequence: Synthetic oligonucleotide
ucccagcgguauccaggcc

SEQ ID NO: 2106241 - RNA, 19 nt, Artificial Sequence
  Description of Artificial Sequence: Synthetic oligonucleotide
acgcccguacuugcuguuc

SEQ ID NO: 2106242 - RNA, 19 nt, Artificial Sequence
  Description of Artificial Sequence: Synthetic oligonucleotide
ggcgagccuggcaaaacgc

SEQ ID NO: 2106243 - RNA, 19 nt, Artificial Sequence
  Description of Artificial Sequence: Synthetic oligonucleotide
cugucuauuccgugguggu

SEQ ID NO: 2106244 - RNA, 19 nt, Artificial Sequence
  Description of Artificial Sequence: Synthetic oligonucleotide
gcuccggaauacaugugug

SEQ ID NO: 2106245 - RNA, 19 nt, Artificial Sequence
  Description of Artificial Sequence: Synthetic oligonucleotide
ccagcgguauccaggccag

SEQ ID NO: 2106246 - RNA, 19 nt, Artificial Sequence
  Description of Artificial Sequence: Synthetic oligonucleotide
auauagcgggccagaggcu

SEQ ID NO: 2106247 - RNA, 19 nt, Artificial Sequence
  Description of Artificial Sequence: Synthetic oligonucleotide
uggguccccucucuuucuu

SEQ ID NO: 2106248 - RNA, 19 nt, Artificial Sequence
  Description of Artificial Sequence: Synthetic oligonucleotide
cggaauacaguuucagcga

SEQ ID NO: 2106249 - RNA, 19 nt, Artificial Sequence
  Description of Artificial Sequence: Synthetic oligonucleotide
cuucgaggaggagagagau

SEQ ID NO: 2106250 - RNA, 19 nt, Artificial Sequence
  Description of Artificial Sequence: Synthetic oligonucleotide
cccacugggcauauagcuc

SEQ ID NO: 2106251 - RNA, 19 nt, Artificial Sequence
  Description of Artificial Sequence: Synthetic oligonucleotide
ucuucccgggacggggacu

SEQ ID NO: 2106252 - RNA, 19 nt, Artificial Sequence
  Description of Artificial Sequence: Synthetic oligonucleotide
gguggugacagaucugaau

SEQ ID NO: 2106253 - RNA, 19 nt, Artificial Sequence
  Description of Artificial Sequence: Synthetic oligonucleotide
cugguguccugaauuuugu

SEQ ID NO: 2106254 - RNA, 19 nt, Artificial Sequence
  Description of Artificial Sequence: Synthetic oligonucleotide
uccugguguccugaauuuu

SEQ ID NO: 2106255 - RNA, 19 nt, Artificial Sequence
  Description of Artificial Sequence: Synthetic oligonucleotide
cuccaagggucgugguguc

SEQ ID NO: 2106256 - RNA, 19 nt, Artificial Sequence
  Description of Artificial Sequence: Synthetic oligonucleotide
agcuccaacaugagcuuuu

SEQ ID NO: 2106257 - RNA, 19 nt, Artificial Sequence
  Description of Artificial Sequence: Synthetic oligonucleotide
gcuguucuuggagacugac

SEQ ID NO: 2106258 - RNA, 19 nt, Artificial Sequence
  Description of Artificial Sequence: Synthetic oligonucleotide
gucguggugucuugguccu

SEQ ID NO: 2106259 - RNA, 19 nt, Artificial Sequence
  Description of Artificial Sequence: Synthetic oligonucleotide
cuggcgagccuggcaaaac

SEQ ID NO: 2106260 - RNA, 19 nt, Artificial Sequence
  Description of Artificial Sequence: Synthetic oligonucleotide
caucaguuaccaacccagu

SEQ ID NO: 2106261 - RNA, 19 nt, Artificial Sequence
  Description of Artificial Sequence: Synthetic oligonucleotide
ggggaucauggacggggcc

SEQ ID NO: 2106262 - RNA, 19 nt, Artificial Sequence
  Description of Artificial Sequence: Synthetic oligonucleotide
gaauacaguuucagcgaau

SEQ ID NO: 2106263 - RNA, 19 nt, Artificial Sequence
  Description of Artificial Sequence: Synthetic oligonucleotide
ggacggggacuccuucgag

SEQ ID NO: 2106264 - RNA, 19 nt, Artificial Sequence
  Description of Artificial Sequence: Synthetic oligonucleotide
ugcuggcgagccuggcaaa

SEQ ID NO: 2106265 - RNA, 19 nt, Artificial Sequence
  Description of Artificial Sequence: Synthetic oligonucleotide
gagcuuuugcuugccauuu

SEQ ID NO: 2106266 - RNA, 19 nt, Artificial Sequence
  Description of Artificial Sequence: Synthetic oligonucleotide
agucacgcccguacuugcu

SEQ ID NO: 2106267 - RNA, 19 nt, Artificial Sequence
  Description of Artificial Sequence: Synthetic oligonucleotide
gucucggaauacaguuuca

SEQ ID NO: 2106268 - RNA, 19 nt, Artificial Sequence
  Description of Artificial Sequence: Synthetic oligonucleotide
aucauggacggggccuccu

SEQ ID NO: 2106269 - RNA, 19 nt, Artificial Sequence
  Description of Artificial Sequence: Synthetic oligonucleotide
gggcggagagaggucagag

SEQ ID NO: 2106270 - RNA, 19 nt, Artificial Sequence
  Description of Artificial Sequence: Synthetic oligonucleotide
ccagacuugucucggaaua

SEQ ID NO: 2106271 - RNA, 19 nt, Artificial Sequence
  Description of Artificial Sequence: Synthetic oligonucleotide
uagcgggccagaggcuucu

SEQ ID NO: 2106272 - RNA, 19 nt, Artificial Sequence
  Description of Artificial Sequence: Synthetic oligonucleotide
cccagcgguauccaggcca

SEQ ID NO: 2106273 - RNA, 19 nt, Artificial Sequence
  Description of Artificial Sequence: Synthetic oligonucleotide
cucccgcugaacaucaguu

SEQ ID NO: 2106274 - RNA, 19 nt, Artificial Sequence
  Description of Artificial Sequence: Synthetic oligonucleotide
cuuggccccucugguguac

SEQ ID NO: 2106275 - RNA, 19 nt, Artificial Sequence
  Description of Artificial Sequence: Synthetic oligonucleotide
gucucacuuucuuuugcuu

SEQ ID NO: 2106276 - RNA, 19 nt, Artificial Sequence
  Description of Artificial Sequence: Synthetic oligonucleotide
cacuuguaagcaagcuccu

SEQ ID NO: 2106277 - RNA, 19 nt, Artificial Sequence
  Description of Artificial Sequence: Synthetic oligonucleotide
uuggccccucugguguaca

SEQ ID NO: 2106278 - RNA, 19 nt, Artificial Sequence
  Description of Artificial Sequence: Synthetic oligonucleotide
gggacggggacuccuucga

SEQ ID NO: 2106279 - RNA, 19 nt, Artificial Sequence
  Description of Artificial Sequence: Synthetic oligonucleotide
cuuaaugaaguuggccauu

SEQ ID NO: 2106280 - RNA, 19 nt, Artificial Sequence
  Description of Artificial Sequence: Synthetic oligonucleotide
ggucugggcaguuccaaau

SEQ ID NO: 2106281 - RNA, 19 nt, Artificial Sequence
  Description of Artificial Sequence: Synthetic oligonucleotide
cugggcuccaagggucgug

SEQ ID NO: 2106282 - RNA, 19 nt, Artificial Sequence
  Description of Artificial Sequence: Synthetic oligonucleotide
ggaucauggacggggccuc

SEQ ID NO: 2106283 - RNA, 19 nt, Artificial Sequence
  Description of Artificial Sequence: Synthetic oligonucleotide
cuguaucgaggucucacuu

SEQ ID NO: 2106284 - RNA, 19 nt, Artificial Sequence
  Description of Artificial Sequence: Synthetic oligonucleotide
ccauuggaucuguccacuc

SEQ ID NO: 2106285 - RNA, 19 nt, Artificial Sequence
  Description of Artificial Sequence: Synthetic oligonucleotide
ggguccccucucuuucuug

SEQ ID NO: 2106286 - RNA, 19 nt, Artificial Sequence
  Description of Artificial Sequence: Synthetic oligonucleotide
cauuuccguggagaaaggu

SEQ ID NO: 2106287 - RNA, 19 nt, Artificial Sequence
  Description of Artificial Sequence: Synthetic oligonucleotide
aacauccgauccagaucuu

SEQ ID NO: 2106288 - RNA, 19 nt, Artificial Sequence
  Description of Artificial Sequence: Synthetic oligonucleotide
ucccgggacggggacuccu

SEQ ID NO: 2106289 - RNA, 19 nt, Artificial Sequence
  Description of Artificial Sequence: Synthetic oligonucleotide
caagcuccuccacagcuuu

SEQ ID NO: 2106290 - RNA, 19 nt, Artificial Sequence
  Description of Artificial Sequence: Synthetic oligonucleotide
cuuucuugcuggcgagccu

SEQ ID NO: 2106291 - RNA, 19 nt, Artificial Sequence
  Description of Artificial Sequence: Synthetic oligonucleotide
ccuucgaggaggagagaga

SEQ ID NO: 2106292 - RNA, 19 nt, Artificial Sequence
  Description of Artificial Sequence: Synthetic oligonucleotide
caguuccaaaucaggggau

SEQ ID NO: 2106293 - RNA, 19 nt, Artificial Sequence
  Description of Artificial Sequence: Synthetic oligonucleotide
gaggguucuuggccccucu

SEQ ID NO: 2106294 - RNA, 19 nt, Artificial Sequence
  Description of Artificial Sequence: Synthetic oligonucleotide
ucguggugucuugguccug

SEQ ID NO: 2106295 - RNA, 19 nt, Artificial Sequence
  Description of Artificial Sequence: Synthetic oligonucleotide
cauuggguccccucucuuu

SEQ ID NO: 2106296 - RNA, 19 nt, Artificial Sequence
  Description of Artificial Sequence: Synthetic oligonucleotide
ccguggaggagagagaucu

SEQ ID NO: 2106297 - RNA, 19 nt, Artificial Sequence
  Description of Artificial Sequence: Synthetic oligonucleotide
ggaccacuguaucgagguc

SEQ ID NO: 2106298 - RNA, 19 nt, Artificial Sequence
  Description of Artificial Sequence: Synthetic oligonucleotide
gucuuuuggucugggcagu

SEQ ID NO: 2106299 - RNA, 19 nt, Artificial Sequence
  Description of Artificial Sequence: Synthetic oligonucleotide
gcuugccauuuccguggag

SEQ ID NO: 2106300 - RNA, 19 nt, Artificial Sequence
  Description of Artificial Sequence: Synthetic oligonucleotide
gggaucauggacggggccu

SEQ ID NO: 2106301 - RNA, 19 nt, Artificial Sequence
  Description of Artificial Sequence: Synthetic oligonucleotide
cgggacggggacuccuucg

SEQ ID NO: 2106302 - RNA, 19 nt, Artificial Sequence
  Description of Artificial Sequence: Synthetic oligonucleotide
agucagcgcuccggugucu

SEQ ID NO: 2106303 - RNA, 19 nt, Artificial Sequence
  Description of Artificial Sequence: Synthetic oligonucleotide
caucucucucugaauccuu

SEQ ID NO: 2106304 - RNA, 19 nt, Artificial Sequence
  Description of Artificial Sequence: Synthetic oligonucleotide
cuccggggcggagagaggu

SEQ ID NO: 2106305 - RNA, 19 nt, Artificial Sequence
  Description of Artificial Sequence: Synthetic oligonucleotide
ggcggagagaggucagagu

SEQ ID NO: 2106306 - RNA, 19 nt, Artificial Sequence
  Description of Artificial Sequence: Synthetic oligonucleotide
gggacuccuucgaggagga

SEQ ID NO: 2106307 - RNA, 19 nt, Artificial Sequence
  Description of Artificial Sequence: Synthetic oligonucleotide
ggccagauauugaaucuau

SEQ ID NO: 2106308 - RNA, 19 nt, Artificial Sequence
  Description of Artificial Sequence: Synthetic oligonucleotide
ggacggggccuccugagau

SEQ ID NO: 2106309 - RNA, 19 nt, Artificial Sequence
  Description of Artificial Sequence: Synthetic oligonucleotide
cuauuccgugguggugaca

SEQ ID NO: 2106310 - RNA, 19 nt, Artificial Sequence
  Description of Artificial Sequence: Synthetic oligonucleotide
gcgguauccaggccagaua

SEQ ID NO: 2106311 - RNA, 19 nt, Artificial Sequence
  Description of Artificial Sequence: Synthetic oligonucleotide
uucccgggacggggacucc

SEQ ID NO: 2106312 - RNA, 19 nt, Artificial Sequence
  Description of Artificial Sequence: Synthetic oligonucleotide
ccgugguggugacagaucu

SEQ ID NO: 2106313 - RNA, 19 nt, Artificial Sequence
  Description of Artificial Sequence: Synthetic oligonucleotide
cagagucacgcccguacuu

SEQ ID NO: 2106314 - RNA, 19 nt, Artificial Sequence
  Description of Artificial Sequence: Synthetic oligonucleotide
cucuuacgaccagacuugu

SEQ ID NO: 2106315 - RNA, 19 nt, Artificial Sequence
  Description of Artificial Sequence: Synthetic oligonucleotide
ggcgcuccagcuucaaauu

SEQ ID NO: 2106316 - RNA, 19 nt, Artificial Sequence
  Description of Artificial Sequence: Synthetic oligonucleotide
gagaggguucuuggccccu

SEQ ID NO: 2106317 - RNA, 19 nt, Artificial Sequence
  Description of Artificial Sequence: Synthetic oligonucleotide
gccauuggaucuguccacu

SEQ ID NO: 2106318 - RNA, 19 nt, Artificial Sequence
  Description of Artificial Sequence: Synthetic oligonucleotide
ccuucuccgcuuuucuccu

SEQ ID NO: 2106319 - RNA, 19 nt, Artificial Sequence
  Description of Artificial Sequence: Synthetic oligonucleotide
ccggcucugggcaagcccu

SEQ ID NO: 2106320 - RNA, 19 nt, Artificial Sequence
  Description of Artificial Sequence: Synthetic oligonucleotide
gccuggcaaaacgcuucug

SEQ ID NO: 2106321 - RNA, 19 nt, Artificial Sequence
  Description of Artificial Sequence: Synthetic oligonucleotide
cagacaccuuuaggaucca

SEQ ID NO: 2106322 - RNA, 19 nt, Artificial Sequence
  Description of Artificial Sequence: Synthetic oligonucleotide
agcgggccagaggcuucug

SEQ ID NO: 2106323 - RNA, 19 nt, Artificial Sequence
  Description of Artificial Sequence: Synthetic oligonucleotide
ccuuuaggauccagcugcu

SEQ ID NO: 2106324 - RNA, 19 nt, Artificial Sequence
  Description of Artificial Sequence: Synthetic oligonucleotide
cuuuaggauccagcugcuu

SEQ ID NO: 2106325 - RNA, 19 nt, Artificial Sequence
  Description of Artificial Sequence: Synthetic oligonucleotide
cguggagaaaggucagagu

SEQ ID NO: 2106326 - RNA, 19 nt, Artificial Sequence
  Description of Artificial Sequence: Synthetic oligonucleotide
cacugggcauauagcucau

SEQ ID NO: 2106327 - RNA, 19 nt, Artificial Sequence
  Description of Artificial Sequence: Synthetic oligonucleotide
gacugacgggugagagggu

SEQ ID NO: 2106328 - RNA, 19 nt, Artificial Sequence
  Description of Artificial Sequence: Synthetic oligonucleotide
guccccucucuuucuuguu

SEQ ID NO: 2106329 - RNA, 19 nt, Artificial Sequence
  Description of Artificial Sequence: Synthetic oligonucleotide
cuucuccggggcggagaga

SEQ ID NO: 2106330 - RNA, 19 nt, Artificial Sequence
  Description of Artificial Sequence: Synthetic oligonucleotide
ccgggacggggacuccuuc

SEQ ID NO: 2106331 - RNA, 19 nt, Artificial Sequence
  Description of Artificial Sequence: Synthetic oligonucleotide
gccguggaggagagagauc

SEQ ID NO: 2106332 - RNA, 19 nt, Artificial Sequence
  Description of Artificial Sequence: Synthetic oligonucleotide
cggggacuccuucgaggag

SEQ ID NO: 2106333 - RNA, 19 nt, Artificial Sequence
  Description of Artificial Sequence: Synthetic oligonucleotide
guuggccauuggguccccu

SEQ ID NO: 2106334 - RNA, 19 nt, Artificial Sequence
  Description of Artificial Sequence: Synthetic oligonucleotide
gcaagcuccuccacagcuu

SEQ ID NO: 2106335 - RNA, 19 nt, Artificial Sequence
  Description of Artificial Sequence: Synthetic oligonucleotide
cacgcccguacuugcuguu

SEQ ID NO: 2106336 - RNA, 19 nt, Artificial Sequence
  Description of Artificial Sequence: Synthetic oligonucleotide
cuccggugucucugucuau

SEQ ID NO: 2106337 - RNA, 19 nt, Artificial Sequence
  Description of Artificial Sequence: Synthetic oligonucleotide
cagcgguauccaggccaga

SEQ ID NO: 2106338 - RNA, 19 nt, Artificial Sequence
  Description of Artificial Sequence: Synthetic oligonucleotide
gggcuccaagggucguggu

SEQ ID NO: 2106339 - RNA, 19 nt, Artificial Sequence
  Description of Artificial Sequence: Synthetic oligonucleotide
ccccucugguguacagucu

SEQ ID NO: 2106340 - RNA, 19 nt, Artificial Sequence
  Description of Artificial Sequence: Synthetic oligonucleotide
cgcccguacuugcuguucu

SEQ ID NO: 2106341 - RNA, 19 nt, Artificial Sequence
  Description of Artificial Sequence: Synthetic oligonucleotide
ggcucugggcaagcccuuu

SEQ ID NO: 2106342 - RNA, 19 nt, Artificial Sequence
  Description of Artificial Sequence: Synthetic oligonucleotide
cccgggacggggacuccuu

SEQ ID NO: 2106343 - RNA, 19 nt, Artificial Sequence
  Description of Artificial Sequence: Synthetic oligonucleotide
cggggccuccugagaugcu

SEQ ID NO: 2106344 - RNA, 19 nt, Artificial Sequence
  Description of Artificial Sequence: Synthetic oligonucleotide
aauacgaccgaagagcugc

SEQ ID NO: 2106345 - RNA, 19 nt, Artificial Sequence
  Description of Artificial Sequence: Synthetic oligonucleotide
aaagccgccuacucgaucc

SEQ ID NO: 2106346 - RNA, 19 nt, Artificial Sequence
  Description of Artificial Sequence: Synthetic oligonucleotide
gaaggagugaucuaacacg

SEQ ID NO: 2106347 - RNA, 19 nt, Artificial Sequence
  Description of Artificial Sequence: Synthetic oligonucleotide
uccucuagcgaccagaagc

SEQ ID NO: 2106348 - RNA, 19 nt, Artificial Sequence
  Description of Artificial Sequence: Synthetic oligonucleotide
uucgguaaggcgcaggccg

SEQ ID NO: 2106349 - RNA, 19 nt, Artificial Sequence
  Description of Artificial Sequence: Synthetic oligonucleotide
cuugggacaauaaagauga

SEQ ID NO: 2106350 - RNA, 19 nt, Artificial Sequence
  Description of Artificial Sequence: Synthetic oligonucleotide
cuaagggagggcaagaacc

SEQ ID NO: 2106351 - RNA, 19 nt, Artificial Sequence
  Description of Artificial Sequence: Synthetic oligonucleotide
auauagaugugccaccacg

SEQ ID NO: 2106352 - RNA, 19 nt, Artificial Sequence
  Description of Artificial Sequence: Synthetic oligonucleotide
agcacugaaaaucgcaugg

SEQ ID NO: 2106353 - RNA, 19 nt, Artificial Sequence
  Description of Artificial Sequence: Synthetic oligonucleotide
uaccuuaagggcaaauagg

SEQ ID NO: 2106354 - RNA, 19 nt, Artificial Sequence
  Description of Artificial Sequence: Synthetic oligonucleotide
aucgcaugggaauacgacc

SEQ ID NO: 2106355 - RNA, 19 nt, Artificial Sequence
  Description of Artificial Sequence: Synthetic oligonucleotide
aaccauguaccaucaaguc

SEQ ID NO: 2106356 - RNA, 19 nt, Artificial Sequence
  Description of Artificial Sequence: Synthetic oligonucleotide
uguugaguaccuuaagggc

SEQ ID NO: 2106357 - RNA, 19 nt, Artificial Sequence
  Description of Artificial Sequence: Synthetic oligonucleotide
ucgcaugggaauacgaccg

SEQ ID NO: 2106358 - RNA, 19 nt, Artificial Sequence
  Description of Artificial Sequence: Synthetic oligonucleotide
uuuuccgagggcaucaugu

SEQ ID NO: 2106359 - RNA, 19 nt, Artificial Sequence
  Description of Artificial Sequence: Synthetic oligonucleotide
uuuagcucuggaaccgucg

SEQ ID NO: 2106360 - RNA, 19 nt, Artificial Sequence
  Description of Artificial Sequence: Synthetic oligonucleotide
aaggagugaucuaacacgg

SEQ ID NO: 2106361 - RNA, 19 nt, Artificial Sequence
  Description of Artificial Sequence: Synthetic oligonucleotide
accauguaccaucaagucg

SEQ ID NO: 2106362 - RNA, 19 nt, Artificial Sequence
  Description of Artificial Sequence: Synthetic oligonucleotide
guaccuuaagggcaaauag

SEQ ID NO: 2106363 - RNA, 19 nt, Artificial Sequence
  Description of Artificial Sequence: Synthetic oligonucleotide
aagggugcaaaaccaaaca

SEQ ID NO: 2106364 - RNA, 19 nt, Artificial Sequence
  Description of Artificial Sequence: Synthetic oligonucleotide
cuagaaggcacgcuucucg

SEQ ID NO: 2106365 - RNA, 19 nt, Artificial Sequence
  Description of Artificial Sequence: Synthetic oligonucleotide
agcucagguagucagcuuc

SEQ ID NO: 2106366 - RNA, 19 nt, Artificial Sequence
  Description of Artificial Sequence: Synthetic oligonucleotide
ugaacaaccugagagagua

SEQ ID NO: 2106367 - RNA, 19 nt, Artificial Sequence
  Description of Artificial Sequence: Synthetic oligonucleotide
ugcaucagcacugaaaauc

SEQ ID NO: 2106368 - RNA, 19 nt, Artificial Sequence
  Description of Artificial Sequence: Synthetic oligonucleotide
gaaaagugggcucuaccug

SEQ ID NO: 2106369 - RNA, 19 nt, Artificial Sequence
  Description of Artificial Sequence: Synthetic oligonucleotide
ugggaauacgaccgaagag

SEQ ID NO: 2106370 - RNA, 19 nt, Artificial Sequence
  Description of Artificial Sequence: Synthetic oligonucleotide
aaaaucgcaugggaauacg

SEQ ID NO: 2106371 - RNA, 19 nt, Artificial Sequence
  Description of Artificial Sequence: Synthetic oligonucleotide
cagaugugagcucagguag

SEQ ID NO: 2106372 - RNA, 19 nt, Artificial Sequence
  Description of Artificial Sequence: Synthetic oligonucleotide
ucuggaaccgucgcggucg

SEQ ID NO: 2106373 - RNA, 19 nt, Artificial Sequence
  Description of Artificial Sequence: Synthetic oligonucleotide
auagaugugccaccacgcg

SEQ ID NO: 2106374 - RNA, 19 nt, Artificial Sequence
  Description of Artificial Sequence: Synthetic oligonucleotide
aacaagcuagaaggcacgc

SEQ ID NO: 2106375 - RNA, 19 nt, Artificial Sequence
  Description of Artificial Sequence: Synthetic oligonucleotide
agugaucuaacacggguca

SEQ ID NO: 2106376 - RNA, 19 nt, Artificial Sequence
  Description of Artificial Sequence: Synthetic oligonucleotide
cucaggaugaggcugggag

SEQ ID NO: 2106377 - RNA, 19 nt, Artificial Sequence
  Description of Artificial Sequence: Synthetic oligonucleotide
aguuaggaaagccgccuac

SEQ ID NO: 2106378 - RNA, 19 nt, Artificial Sequence
  Description of Artificial Sequence: Synthetic oligonucleotide
ucuagcgaccagaagcgcc

SEQ ID NO: 2106379 - RNA, 19 nt, Artificial Sequence
  Description of Artificial Sequence: Synthetic oligonucleotide
aaacaagcuagaaggcacg

SEQ ID NO: 2106380 - RNA, 19 nt, Artificial Sequence
  Description of Artificial Sequence: Synthetic oligonucleotide
aaaagucaggcccaagcua

SEQ ID NO: 2106381 - RNA, 19 nt, Artificial Sequence
  Description of Artificial Sequence: Synthetic oligonucleotide
guagcuaggucccagggac

SEQ ID NO: 2106382 - RNA, 19 nt, Artificial Sequence
  Description of Artificial Sequence: Synthetic oligonucleotide
cuagcgaccagaagcgccg

SEQ ID NO: 2106383 - RNA, 19 nt, Artificial Sequence
  Description of Artificial Sequence: Synthetic oligonucleotide
uucaagccguccucuagcg

SEQ ID NO: 2106384 - RNA, 19 nt, Artificial Sequence
  Description of Artificial Sequence: Synthetic oligonucleotide
ucauguugaguaccuuaag

SEQ ID NO: 2106385 - RNA, 19 nt, Artificial Sequence
  Description of Artificial Sequence: Synthetic oligonucleotide
guuguggacccucagucag

SEQ ID NO: 2106386 - RNA, 19 nt, Artificial Sequence
  Description of Artificial Sequence: Synthetic oligonucleotide
uguacagugggacgcguac

SEQ ID NO: 2106387 - RNA, 19 nt, Artificial Sequence
  Description of Artificial Sequence: Synthetic oligonucleotide
ucucgggaaucccagggcc

SEQ ID NO: 2106388 - RNA, 19 nt, Artificial Sequence
  Description of Artificial Sequence: Synthetic oligonucleotide
agcgccgguccacaaaacc

SEQ ID NO: 2106389 - RNA, 19 nt, Artificial Sequence
  Description of Artificial Sequence: Synthetic oligonucleotide
acacgggucaccuccauug

SEQ ID NO: 2106390 - RNA, 19 nt, Artificial Sequence
  Description of Artificial Sequence: Synthetic oligonucleotide
uucgcggcauacagcaugg

SEQ ID NO: 2106391 - RNA, 19 nt, Artificial Sequence
  Description of Artificial Sequence: Synthetic oligonucleotide
acgaccgaagagcugcccc

SEQ ID NO: 2106392 - RNA, 19 nt, Artificial Sequence
  Description of Artificial Sequence: Synthetic oligonucleotide
ucagaugugagcucaggua

SEQ ID NO: 2106393 - RNA, 19 nt, Artificial Sequence
  Description of Artificial Sequence: Synthetic oligonucleotide
uuagcucuggaaccgucgc

SEQ ID NO: 2106394 - RNA, 19 nt, Artificial Sequence
  Description of Artificial Sequence: Synthetic oligonucleotide
ugcauauagaugugccacc

SEQ ID NO: 2106395 - RNA, 19 nt, Artificial Sequence
  Description of Artificial Sequence: Synthetic oligonucleotide
gaaugaaaucccugaccag

SEQ ID NO: 2106396 - RNA, 19 nt, Artificial Sequence
  Description of Artificial Sequence: Synthetic oligonucleotide
ucagcuucgguaaggcgca

SEQ ID NO: 2106397 - RNA, 19 nt, Artificial Sequence
  Description of Artificial Sequence: Synthetic oligonucleotide
ugacggcauacucagcuug

SEQ ID NO: 2106398 - RNA, 19 nt, Artificial Sequence
  Description of Artificial Sequence: Synthetic oligonucleotide
ugggacgcguacaaggccc

SEQ ID NO: 2106399 - RNA, 19 nt, Artificial Sequence
  Description of Artificial Sequence: Synthetic oligonucleotide
aggaaagccgccuacucga

SEQ ID NO: 2106400 - RNA, 19 nt, Artificial Sequence
  Description of Artificial Sequence: Synthetic oligonucleotide
ugaaaucccugaccagucc

SEQ ID NO: 2106401 - RNA, 19 nt, Artificial Sequence
  Description of Artificial Sequence: Synthetic oligonucleotide
augggaauacgaccgaaga

SEQ ID NO: 2106402 - RNA, 19 nt, Artificial Sequence
  Description of Artificial Sequence: Synthetic oligonucleotide
uugaguaccuuaagggcaa

SEQ ID NO: 2106403 - RNA, 19 nt, Artificial Sequence
  Description of Artificial Sequence: Synthetic oligonucleotide
ugggacaauaaagaugaac

SEQ ID NO: 2106404 - RNA, 19 nt, Artificial Sequence
  Description of Artificial Sequence: Synthetic oligonucleotide
accaaacaagcuagaaggc

SEQ ID NO: 2106405 - RNA, 19 nt, Artificial Sequence
  Description of Artificial Sequence: Synthetic oligonucleotide
auacucagcuugaaaaguc

SEQ ID NO: 2106406 - RNA, 19 nt, Artificial Sequence
  Description of Artificial Sequence: Synthetic oligonucleotide
gcaagaaccgcacaggaac

SEQ ID NO: 2106407 - RNA, 19 nt, Artificial Sequence
  Description of Artificial Sequence: Synthetic oligonucleotide
gggaauacgaccgaagagc

SEQ ID NO: 2106408 - RNA, 19 nt, Artificial Sequence
  Description of Artificial Sequence: Synthetic oligonucleotide
uuaggaaagccgccuacuc

SEQ ID NO: 2106409 - RNA, 19 nt, Artificial Sequence
  Description of Artificial Sequence: Synthetic oligonucleotide
ugaucuaacacgggucacc

SEQ ID NO: 2106410 - RNA, 19 nt, Artificial Sequence
  Description of Artificial Sequence: Synthetic oligonucleotide
agugggacgcguacaaggc

SEQ ID NO: 2106411 - RNA, 19 nt, Artificial Sequence
  Description of Artificial Sequence: Synthetic oligonucleotide
guugaguaccuuaagggca

SEQ ID NO: 2106412 - RNA, 19 nt, Artificial Sequence
  Description of Artificial Sequence: Synthetic oligonucleotide
aagggagggcaagaaccgc

SEQ ID NO: 2106413 - RNA, 19 nt, Artificial Sequence
  Description of Artificial Sequence: Synthetic oligonucleotide
gagagaguagcuagguccc

SEQ ID NO: 2106414 - RNA, 19 nt, Artificial Sequence
  Description of Artificial Sequence: Synthetic oligonucleotide
uagaugugccaccacgcgu

SEQ ID NO: 2106415 - RNA, 19 nt, Artificial Sequence
  Description of Artificial Sequence: Synthetic oligonucleotide
guucaagccguccucuagc

SEQ ID NO: 2106416 - RNA, 19 nt, Artificial Sequence
  Description of Artificial Sequence: Synthetic oligonucleotide
ugaaaaucgcaugggaaua

SEQ ID NO: 2106417 - RNA, 19 nt, Artificial Sequence
  Description of Artificial Sequence: Synthetic oligonucleotide
aagcgcaucugcaucagca

SEQ ID NO: 2106418 - RNA, 19 nt, Artificial Sequence
  Description of Artificial Sequence: Synthetic oligonucleotide
gaaaaucgcaugggaauac

SEQ ID NO: 2106419 - RNA, 19 nt, Artificial Sequence
  Description of Artificial Sequence: Synthetic oligonucleotide
ucgaagcgcaucugcauca

SEQ ID NO: 2106420 - RNA, 19 nt, Artificial Sequence
  Description of Artificial Sequence: Synthetic oligonucleotide
agacucacacaggacaguc

SEQ ID NO: 2106421 - RNA, 19 nt, Artificial Sequence
  Description of Artificial Sequence: Synthetic oligonucleotide
guucgcggcauacagcaug

SEQ ID NO: 2106422 - RNA, 19 nt, Artificial Sequence
  Description of Artificial Sequence: Synthetic oligonucleotide
gagugcacugcacugaucu

SEQ ID NO: 2106423 - RNA, 19 nt, Artificial Sequence
  Description of Artificial Sequence: Synthetic oligonucleotide
aaauaggagcugguacuug

SEQ ID NO: 2106424 - RNA, 19 nt, Artificial Sequence
  Description of Artificial Sequence: Synthetic oligonucleotide
uacagugggacgcguacaa

SEQ ID NO: 2106425 - RNA, 19 nt, Artificial Sequence
  Description of Artificial Sequence: Synthetic oligonucleotide
ucgacaucuugauacgcuc

SEQ ID NO: 2106426 - RNA, 19 nt, Artificial Sequence
  Description of Artificial Sequence: Synthetic oligonucleotide
gugcauauagaugugccac

SEQ ID NO: 2106427 - RNA, 19 nt, Artificial Sequence
  Description of Artificial Sequence: Synthetic oligonucleotide
agcgcauugcuuccucccg

SEQ ID NO: 2106428 - RNA, 19 nt, Artificial Sequence
  Description of Artificial Sequence: Synthetic oligonucleotide
ugcuugggacaauaaagau

SEQ ID NO: 2106429 - RNA, 19 nt, Artificial Sequence
  Description of Artificial Sequence: Synthetic oligonucleotide
ggcaaauaggagcugguac

SEQ ID NO: 2106430 - RNA, 19 nt, Artificial Sequence
  Description of Artificial Sequence: Synthetic oligonucleotide
cuuggcagugcugacgaag

SEQ ID NO: 2106431 - RNA, 19 nt, Artificial Sequence
  Description of Artificial Sequence: Synthetic oligonucleotide
aguagcuaggucccaggga

SEQ ID NO: 2106432 - RNA, 19 nt, Artificial Sequence
  Description of Artificial Sequence: Synthetic oligonucleotide
agggugcaaaaccaaacaa

SEQ ID NO: 2106433 - RNA, 19 nt, Artificial Sequence
  Description of Artificial Sequence: Synthetic oligonucleotide
gcaucagcacugaaaaucg

SEQ ID NO: 2106434 - RNA, 19 nt, Artificial Sequence
  Description of Artificial Sequence: Synthetic oligonucleotide
agguagucagcuucgguaa

SEQ ID NO: 2106435 - RNA, 19 nt, Artificial Sequence
  Description of Artificial Sequence: Synthetic oligonucleotide
gaaggcacgcuucucggga

SEQ ID NO: 2106436 - RNA, 19 nt, Artificial Sequence
  Description of Artificial Sequence: Synthetic oligonucleotide
aaaucgcaugggaauacga

SEQ ID NO: 2106437 - RNA, 19 nt, Artificial Sequence
  Description of Artificial Sequence: Synthetic oligonucleotide
acaaacagacucacacagg

SEQ ID NO: 2106438 - RNA, 19 nt, Artificial Sequence
  Description of Artificial Sequence: Synthetic oligonucleotide
guagucagcuucgguaagg

SEQ ID NO: 2106439 - RNA, 19 nt, Artificial Sequence
  Description of Artificial Sequence: Synthetic oligonucleotide
acugaaaaucgcaugggaa

SEQ ID NO: 2106440 - RNA, 19 nt, Artificial Sequence
  Description of Artificial Sequence: Synthetic oligonucleotide
caagucguugccuuggaaa

SEQ ID NO: 2106441 - RNA, 19 nt, Artificial Sequence
  Description of Artificial Sequence: Synthetic oligonucleotide
cacgaguggcuccagccgg

SEQ ID NO: 2106442 - RNA, 19 nt, Artificial Sequence
  Description of Artificial Sequence: Synthetic oligonucleotide
gucagaaagggugcaaaac

SEQ ID NO: 2106443 - RNA, 19 nt, Artificial Sequence
  Description of Artificial Sequence: Synthetic oligonucleotide
aaguuaggaaagccgccua

SEQ ID NO: 2106444 - RNA, 19 nt, Artificial Sequence
  Description of Artificial Sequence: Synthetic oligonucleotide
ugacgaaggcauugcucag

SEQ ID NO: 2106445 - RNA, 19 nt, Artificial Sequence
  Description of Artificial Sequence: Synthetic oligonucleotide
agucagaaagggugcaaaa

SEQ ID NO: 2106446 - RNA, 19 nt, Artificial Sequence
  Description of Artificial Sequence: Synthetic oligonucleotide
ccucuagcgaccagaagcg

SEQ ID NO: 2106447 - RNA, 19 nt, Artificial Sequence
  Description of Artificial Sequence: Synthetic oligonucleotide
gcguacaaggcccagcacc

SEQ ID NO: 2106448 - RNA, 19 nt, Artificial Sequence
  Description of Artificial Sequence: Synthetic oligonucleotide
cauugcuuccucccggcug

SEQ ID NO: 2106449 - RNA, 19 nt, Artificial Sequence
  Description of Artificial Sequence: Synthetic oligonucleotide
gagugaucuaacacggguc

SEQ ID NO: 2106450 - RNA, 19 nt, Artificial Sequence
  Description of Artificial Sequence: Synthetic oligonucleotide
aagaaccgcacaggaaccu

SEQ ID NO: 2106451 - RNA, 19 nt, Artificial Sequence
  Description of Artificial Sequence: Synthetic oligonucleotide
agcuagaaggcacgcuucu

SEQ ID NO: 2106452 - RNA, 19 nt, Artificial Sequence
  Description of Artificial Sequence: Synthetic oligonucleotide
gaagcgccgguccacaaaa

SEQ ID NO: 2106453 - RNA, 19 nt, Artificial Sequence
  Description of Artificial Sequence: Synthetic oligonucleotide
uagucagcuucgguaaggc

SEQ ID NO: 2106454 - RNA, 19 nt, Artificial Sequence
  Description of Artificial Sequence: Synthetic oligonucleotide
gacugcuugggacaauaaa

SEQ ID NO: 2106455 - RNA, 19 nt, Artificial Sequence
  Description of Artificial Sequence: Synthetic oligonucleotide
acgcguacaaggcccagca

SEQ ID NO: 2106456 - RNA, 19 nt, Artificial Sequence
  Description of Artificial Sequence: Synthetic oligonucleotide
ucuagggccuucuucuguu

SEQ ID NO: 2106457 - RNA, 19 nt, Artificial Sequence
  Description of Artificial Sequence: Synthetic oligonucleotide
aucauguugaguaccuuaa

SEQ ID NO: 2106458 - RNA, 19 nt, Artificial Sequence
  Description of Artificial Sequence: Synthetic oligonucleotide
cauauagaugugccaccac

SEQ ID NO: 2106459 - RNA, 19 nt, Artificial Sequence
  Description of Artificial Sequence: Synthetic oligonucleotide
agucagaugugagcucagg

SEQ ID NO: 2106460 - RNA, 19 nt, Artificial Sequence
  Description of Artificial Sequence: Synthetic oligonucleotide
ccuagcacccgguucaagc

SEQ ID NO: 2106461 - RNA, 19 nt, Artificial Sequence
  Description of Artificial Sequence: Synthetic oligonucleotide
ucaagucguugccuuggaa

SEQ ID NO: 2106462 - RNA, 19 nt, Artificial Sequence
  Description of Artificial Sequence: Synthetic oligonucleotide
ucgguaaggcgcaggccgc

SEQ ID NO: 2106463 - RNA, 19 nt, Artificial Sequence
  Description of Artificial Sequence: Synthetic oligonucleotide
accguggucccgcgagugc

SEQ ID NO: 2106464 - RNA, 19 nt, Artificial Sequence
  Description of Artificial Sequence: Synthetic oligonucleotide
uugauacgcuccaggccca

SEQ ID NO: 2106465 - RNA, 19 nt, Artificial Sequence
  Description of Artificial Sequence: Synthetic oligonucleotide
caucauguugaguaccuua

SEQ ID NO: 2106466 - RNA, 19 nt, Artificial Sequence
  Description of Artificial Sequence: Synthetic oligonucleotide
cagguagucagcuucggua

SEQ ID NO: 2106467 - RNA, 19 nt, Artificial Sequence
  Description of Artificial Sequence: Synthetic oligonucleotide
aucuaacacgggucaccuc

SEQ ID NO: 2106468 - RNA, 19 nt, Artificial Sequence
  Description of Artificial Sequence: Synthetic oligonucleotide
cacugaaaaucgcauggga

SEQ ID NO: 2106469 - RNA, 19 nt, Artificial Sequence
  Description of Artificial Sequence: Synthetic oligonucleotide
accgucgcggucgacaucu

SEQ ID NO: 2106470 - RNA, 19 nt, Artificial Sequence
  Description of Artificial Sequence: Synthetic oligonucleotide
uuguggacccucagucaga

SEQ ID NO: 2106471 - RNA, 19 nt, Artificial Sequence
  Description of Artificial Sequence: Synthetic oligonucleotide
gcauugcucaggaaguuag

SEQ ID NO: 2106472 - RNA, 19 nt, Artificial Sequence
  Description of Artificial Sequence: Synthetic oligonucleotide
gguucaagccguccucuag

SEQ ID NO: 2106473 - RNA, 19 nt, Artificial Sequence
  Description of Artificial Sequence: Synthetic oligonucleotide
gucaccuccauugaaugaa

SEQ ID NO: 2106474 - RNA, 19 nt, Artificial Sequence
  Description of Artificial Sequence: Synthetic oligonucleotide
ggguucgcggcauacagca

SEQ ID NO: 2106475 - RNA, 19 nt, Artificial Sequence
  Description of Artificial Sequence: Synthetic oligonucleotide
aggccgcccaagcccaggc

SEQ ID NO: 2106476 - RNA, 19 nt, Artificial Sequence
  Description of Artificial Sequence: Synthetic oligonucleotide
gaagcgcaucugcaucagc

SEQ ID NO: 2106477 - RNA, 19 nt, Artificial Sequence
  Description of Artificial Sequence: Synthetic oligonucleotide
gaauacgaccgaagagcug

SEQ ID NO: 2106478 - RNA, 19 nt, Artificial Sequence
  Description of Artificial Sequence: Synthetic oligonucleotide
gugggacgcguacaaggcc

SEQ ID NO: 2106479 - RNA, 19 nt, Artificial Sequence
  Description of Artificial Sequence: Synthetic oligonucleotide
agcuuuuccgagggcauca

SEQ ID NO: 2106480 - RNA, 19 nt, Artificial Sequence
  Description of Artificial Sequence: Synthetic oligonucleotide
ugccgugcauauagaugug

SEQ ID NO: 2106481 - RNA, 19 nt, Artificial Sequence
  Description of Artificial Sequence: Synthetic oligonucleotide
agcccgucgaagcgcaucu

SEQ ID NO: 2106482 - RNA, 19 nt, Artificial Sequence
  Description of Artificial Sequence: Synthetic oligonucleotide
uugucccuugcagucagaa

SEQ ID NO: 2106483 - RNA, 19 nt, Artificial Sequence
  Description of Artificial Sequence: Synthetic oligonucleotide
ccauguaccaucaagucgu

SEQ ID NO: 2106484 - RNA, 19 nt, Artificial Sequence
  Description of Artificial Sequence: Synthetic oligonucleotide
aaccgucgcggucgacauc

SEQ ID NO: 2106485 - RNA, 19 nt, Artificial Sequence
  Description of Artificial Sequence: Synthetic oligonucleotide
gaugugccaccacgcguug

SEQ ID NO: 2106486 - RNA, 19 nt, Artificial Sequence
  Description of Artificial Sequence: Synthetic oligonucleotide
ugucccuugcagucagaaa

SEQ ID NO: 2106487 - RNA, 19 nt, Artificial Sequence
  Description of Artificial Sequence: Synthetic oligonucleotide
caccacgcguuguggaccc

SEQ ID NO: 2106488 - RNA, 19 nt, Artificial Sequence
  Description of Artificial Sequence: Synthetic oligonucleotide
auacgaccgaagagcugcc

SEQ ID NO: 2106489 - RNA, 19 nt, Artificial Sequence
  Description of Artificial Sequence: Synthetic oligonucleotide
ggugacggcauacucagcu

SEQ ID NO: 2106490 - RNA, 19 nt, Artificial Sequence
  Description of Artificial Sequence: Synthetic oligonucleotide
gaaagccgccuacucgauc

SEQ ID NO: 2106491 - RNA, 19 nt, Artificial Sequence
  Description of Artificial Sequence: Synthetic oligonucleotide
uuggaaaagugggcucuac

SEQ ID NO: 2106492 - RNA, 19 nt, Artificial Sequence
  Description of Artificial Sequence: Synthetic oligonucleotide
cuuuuccgagggcaucaug

SEQ ID NO: 2106493 - RNA, 19 nt, Artificial Sequence
  Description of Artificial Sequence: Synthetic oligonucleotide
ccgugcauauagaugugcc

SEQ ID NO: 2106494 - RNA, 19 nt, Artificial Sequence
  Description of Artificial Sequence: Synthetic oligonucleotide
agaugugccaccacgcguu

SEQ ID NO: 2106495 - RNA, 19 nt, Artificial Sequence
  Description of Artificial Sequence: Synthetic oligonucleotide
accgaagagcugccccggg

SEQ ID NO: 2106496 - RNA, 19 nt, Artificial Sequence
  Description of Artificial Sequence: Synthetic oligonucleotide
gguagucagcuucgguaag

SEQ ID NO: 2106497 - RNA, 19 nt, Artificial Sequence
  Description of Artificial Sequence: Synthetic oligonucleotide
aggagugaucuaacacggg

SEQ ID NO: 2106498 - RNA, 19 nt, Artificial Sequence
  Description of Artificial Sequence: Synthetic oligonucleotide
gaucuaacacgggucaccu

SEQ ID NO: 2106499 - RNA, 19 nt, Artificial Sequence
  Description of Artificial Sequence: Synthetic oligonucleotide
ggagugaucuaacacgggu

SEQ ID NO: 2106500 - RNA, 19 nt, Artificial Sequence
  Description of Artificial Sequence: Synthetic oligonucleotide
acccgguucaagccguccu

SEQ ID NO: 2106501 - RNA, 19 nt, Artificial Sequence
  Description of Artificial Sequence: Synthetic oligonucleotide
gcuaagggagggcaagaac

SEQ ID NO: 2106502 - RNA, 19 nt, Artificial Sequence
  Description of Artificial Sequence: Synthetic oligonucleotide
gcguuguggacccucaguc

SEQ ID NO: 2106503 - RNA, 19 nt, Artificial Sequence
  Description of Artificial Sequence: Synthetic oligonucleotide
agagcugccccggguucgc

SEQ ID NO: 2106504 - RNA, 19 nt, Artificial Sequence
  Description of Artificial Sequence: Synthetic oligonucleotide
agcugccccggguucgcgg

SEQ ID NO: 2106505 - RNA, 19 nt, Artificial Sequence
  Description of Artificial Sequence: Synthetic oligonucleotide
uccagaccguggucccgcg

SEQ ID NO: 2106506 - RNA, 19 nt, Artificial Sequence
  Description of Artificial Sequence: Synthetic oligonucleotide
gacgcguacaaggcccagc

SEQ ID NO: 2106507 - RNA, 19 nt, Artificial Sequence
  Description of Artificial Sequence: Synthetic oligonucleotide
cuucgguaaggcgcaggcc

SEQ ID NO: 2106508 - RNA, 19 nt, Artificial Sequence
  Description of Artificial Sequence: Synthetic oligonucleotide
aagcgccgguccacaaaac

SEQ ID NO: 2106509 - RNA, 19 nt, Artificial Sequence
  Description of Artificial Sequence: Synthetic oligonucleotide
aagccgccuacucgauccu

SEQ ID NO: 2106510 - RNA, 19 nt, Artificial Sequence
  Description of Artificial Sequence: Synthetic oligonucleotide
uggcacgaguggcuccagc

SEQ ID NO: 2106511 - RNA, 19 nt, Artificial Sequence
  Description of Artificial Sequence: Synthetic oligonucleotide
agcuucgguaaggcgcagg

SEQ ID NO: 2106512 - RNA, 19 nt, Artificial Sequence
  Description of Artificial Sequence: Synthetic oligonucleotide
cagucagaugugagcucag

SEQ ID NO: 2106513 - RNA, 19 nt, Artificial Sequence
  Description of Artificial Sequence: Synthetic oligonucleotide
uaaggcgcaggccgcccaa

SEQ ID NO: 2106514 - RNA, 19 nt, Artificial Sequence
  Description of Artificial Sequence: Synthetic oligonucleotide
gacggcauacucagcuuga

SEQ ID NO: 2106515 - RNA, 19 nt, Artificial Sequence
  Description of Artificial Sequence: Synthetic oligonucleotide
ucgcggucgacaucuugau

SEQ ID NO: 2106516 - RNA, 19 nt, Artificial Sequence
  Description of Artificial Sequence: Synthetic oligonucleotide
acagugggacgcguacaag

SEQ ID NO: 2106517 - RNA, 19 nt, Artificial Sequence
  Description of Artificial Sequence: Synthetic oligonucleotide
cacgcuucucgggaauccc

SEQ ID NO: 2106518 - RNA, 19 nt, Artificial Sequence
  Description of Artificial Sequence: Synthetic oligonucleotide
accaguccaggaaccaugu

SEQ ID NO: 2106519 - RNA, 19 nt, Artificial Sequence
  Description of Artificial Sequence: Synthetic oligonucleotide
gccccaagcgcauugcuuc

SEQ ID NO: 2106520 - RNA, 19 nt, Artificial Sequence
  Description of Artificial Sequence: Synthetic oligonucleotide
gcucagguagucagcuucg

SEQ ID NO: 2106521 - RNA, 19 nt, Artificial Sequence
  Description of Artificial Sequence: Synthetic oligonucleotide
uacgaccgaagagcugccc

SEQ ID NO: 2106522 - RNA, 19 nt, Artificial Sequence
  Description of Artificial Sequence: Synthetic oligonucleotide
cuguggccgaggccaaggc

SEQ ID NO: 2106523 - RNA, 19 nt, Artificial Sequence
  Description of Artificial Sequence: Synthetic oligonucleotide
guccucuagcgaccagaag

SEQ ID NO: 2106524 - RNA, 19 nt, Artificial Sequence
  Description of Artificial Sequence: Synthetic oligonucleotide
gcauacagcauggcguggc

SEQ ID NO: 2106525 - RNA, 19 nt, Artificial Sequence
  Description of Artificial Sequence: Synthetic oligonucleotide
gacccucagucagauguga

SEQ ID NO: 2106526 - RNA, 19 nt, Artificial Sequence
  Description of Artificial Sequence: Synthetic oligonucleotide
cauacagcauggcguggca

SEQ ID NO: 2106527 - RNA, 19 nt, Artificial Sequence
  Description of Artificial Sequence: Synthetic oligonucleotide
gcgcauugcuuccucccgg

SEQ ID NO: 2106528 - RNA, 19 nt, Artificial Sequence
  Description of Artificial Sequence: Synthetic oligonucleotide
gaccguggucccgcgagug

SEQ ID NO: 2106529 - RNA, 19 nt, Artificial Sequence
  Description of Artificial Sequence: Synthetic oligonucleotide
cucuagcgaccagaagcgc

SEQ ID NO: 2106530 - RNA, 19 nt, Artificial Sequence
  Description of Artificial Sequence: Synthetic oligonucleotide
uagcgaccagaagcgccgg

SEQ ID NO: 2106531 - RNA, 19 nt, Artificial Sequence
  Description of Artificial Sequence: Synthetic oligonucleotide
acgggucaccuccauugaa

SEQ ID NO: 2106532 - RNA, 19 nt, Artificial Sequence
  Description of Artificial Sequence: Synthetic oligonucleotide
gugaucuaacacgggucac

SEQ ID NO: 2106533 - RNA, 19 nt, Artificial Sequence
  Description of Artificial Sequence: Synthetic oligonucleotide
guuaggaaagccgccuacu

SEQ ID NO: 2106534 - RNA, 19 nt, Artificial Sequence
  Description of Artificial Sequence: Synthetic oligonucleotide
ggucgacaucuugauacgc

SEQ ID NO: 2106535 - RNA, 19 nt, Artificial Sequence
  Description of Artificial Sequence: Synthetic oligonucleotide
acgaguggcuccagccggg

SEQ ID NO: 2106536 - RNA, 19 nt, Artificial Sequence
  Description of Artificial Sequence: Synthetic oligonucleotide
augugagcucagguaguca

SEQ ID NO: 2106537 - RNA, 19 nt, Artificial Sequence
  Description of Artificial Sequence: Synthetic oligonucleotide
uggucccgcgagugcacug

SEQ ID NO: 2106538 - RNA, 19 nt, Artificial Sequence
  Description of Artificial Sequence: Synthetic oligonucleotide
acgcguuguggacccucag

SEQ ID NO: 2106539 - RNA, 19 nt, Artificial Sequence
  Description of Artificial Sequence: Synthetic oligonucleotide
agggcaaauaggagcuggu

SEQ ID NO: 2106540 - RNA, 19 nt, Artificial Sequence
  Description of Artificial Sequence: Synthetic oligonucleotide
cucuggaaccgucgcgguc

SEQ ID NO: 2106541 - RNA, 19 nt, Artificial Sequence
  Description of Artificial Sequence: Synthetic oligonucleotide
aaggcgcaggccgcccaag

SEQ ID NO: 2106542 - RNA, 19 nt, Artificial Sequence
  Description of Artificial Sequence: Synthetic oligonucleotide
gucguugccuuggaaaagu

SEQ ID NO: 2106543 - RNA, 19 nt, Artificial Sequence
  Description of Artificial Sequence: Synthetic oligonucleotide
agaccguggucccgcgagu

SEQ ID NO: 2106544 - RNA, 19 nt, Artificial Sequence
  Description of Artificial Sequence: Synthetic oligonucleotide
ggaauacgaccgaagagcu

SEQ ID NO: 2106545 - RNA, 19 nt, Artificial Sequence
  Description of Artificial Sequence: Synthetic oligonucleotide
gucgacaucuugauacgcu

SEQ ID NO: 2106546 - RNA, 19 nt, Artificial Sequence
  Description of Artificial Sequence: Synthetic oligonucleotide
cagucagaaagggugcaaa

SEQ ID NO: 2106547 - RNA, 19 nt, Artificial Sequence
  Description of Artificial Sequence: Synthetic oligonucleotide
ggaaccgucgcggucgaca

SEQ ID NO: 2106548 - RNA, 19 nt, Artificial Sequence
  Description of Artificial Sequence: Synthetic oligonucleotide
guacagugggacgcguaca

SEQ ID NO: 2106549 - RNA, 19 nt, Artificial Sequence
  Description of Artificial Sequence: Synthetic oligonucleotide
ccggguucgcggcauacag

SEQ ID NO: 2106550 - RNA, 19 nt, Artificial Sequence
  Description of Artificial Sequence: Synthetic oligonucleotide
ggaaccuccucaggaugag

SEQ ID NO: 2106551 - RNA, 19 nt, Artificial Sequence
  Description of Artificial Sequence: Synthetic oligonucleotide
cgcggcauacagcauggcg

SEQ ID NO: 2106552 - RNA, 19 nt, Artificial Sequence
  Description of Artificial Sequence: Synthetic oligonucleotide
cccgucgaagcgcaucugc

SEQ ID NO: 2106553 - RNA, 19 nt, Artificial Sequence
  Description of Artificial Sequence: Synthetic oligonucleotide
gaaccgucgcggucgacau

SEQ ID NO: 2106554 - RNA, 19 nt, Artificial Sequence
  Description of Artificial Sequence: Synthetic oligonucleotide
agcacccgguucaagccgu

SEQ ID NO: 2106555 - RNA, 19 nt, Artificial Sequence
  Description of Artificial Sequence: Synthetic oligonucleotide
gccgugcauauagaugugc

SEQ ID NO: 2106556 - RNA, 19 nt, Artificial Sequence
  Description of Artificial Sequence: Synthetic oligonucleotide
ugaguaccuuaagggcaaa

SEQ ID NO: 2106557 - RNA, 19 nt, Artificial Sequence
  Description of Artificial Sequence: Synthetic oligonucleotide
ucccggcugaucugcuuua

SEQ ID NO: 2106558 - RNA, 19 nt, Artificial Sequence
  Description of Artificial Sequence: Synthetic oligonucleotide
cugaacaaccugagagagu

SEQ ID NO: 2106559 - RNA, 19 nt, Artificial Sequence
  Description of Artificial Sequence: Synthetic oligonucleotide
aggcacgcuucucgggaau

SEQ ID NO: 2106560 - RNA, 19 nt, Artificial Sequence
  Description of Artificial Sequence: Synthetic oligonucleotide
acgcuucucgggaauccca

SEQ ID NO: 2106561 - RNA, 19 nt, Artificial Sequence
  Description of Artificial Sequence: Synthetic oligonucleotide
cggucgacaucuugauacg

SEQ ID NO: 2106562 - RNA, 19 nt, Artificial Sequence
  Description of Artificial Sequence: Synthetic oligonucleotide
gccaccacgcguuguggac

SEQ ID NO: 2106563 - RNA, 19 nt, Artificial Sequence
  Description of Artificial Sequence: Synthetic oligonucleotide
cacgcguuguggacccuca

SEQ ID NO: 2106564 - RNA, 19 nt, Artificial Sequence
  Description of Artificial Sequence: Synthetic oligonucleotide
ccagccgggccccaagcgc

SEQ ID NO: 2106565 - RNA, 19 nt, Artificial Sequence
  Description of Artificial Sequence: Synthetic oligonucleotide
cacgggucaccuccauuga

SEQ ID NO: 2106566 - RNA, 19 nt, Artificial Sequence
  Description of Artificial Sequence: Synthetic oligonucleotide
gcggcauacagcauggcgu

SEQ ID NO: 2106567 - RNA, 19 nt, Artificial Sequence
  Description of Artificial Sequence: Synthetic oligonucleotide
cacccgguucaagccgucc

SEQ ID NO: 2106568 - RNA, 19 nt, Artificial Sequence
  Description of Artificial Sequence: Synthetic oligonucleotide
acggcauacucagcuugaa

SEQ ID NO: 2106569 - RNA, 19 nt, Artificial Sequence
  Description of Artificial Sequence: Synthetic oligonucleotide
cgaccagaagcgccggucc

SEQ ID NO: 2106570 - RNA, 19 nt, Artificial Sequence
  Description of Artificial Sequence: Synthetic oligonucleotide
guggacccucagucagaug

SEQ ID NO: 2106571 - RNA, 19 nt, Artificial Sequence
  Description of Artificial Sequence: Synthetic oligonucleotide
cuacucgauccuucugggu

SEQ ID NO: 2106572 - RNA, 19 nt, Artificial Sequence
  Description of Artificial Sequence: Synthetic oligonucleotide
ccccaagcgcauugcuucc

SEQ ID NO: 2106573 - RNA, 19 nt, Artificial Sequence
  Description of Artificial Sequence: Synthetic oligonucleotide
cgcauugcuuccucccggc

SEQ ID NO: 2106574 - RNA, 19 nt, Artificial Sequence
  Description of Artificial Sequence: Synthetic oligonucleotide
ucgauccuucuggguguac

SEQ ID NO: 2106575 - RNA, 19 nt, Artificial Sequence
  Description of Artificial Sequence: Synthetic oligonucleotide
ucgcggcauacagcauggc

SEQ ID NO: 2106576 - RNA, 19 nt, Artificial Sequence
  Description of Artificial Sequence: Synthetic oligonucleotide
cuugucccuugcagucaga

SEQ ID NO: 2106577 - RNA, 19 nt, Artificial Sequence
  Description of Artificial Sequence: Synthetic oligonucleotide
cagcccgucgaagcgcauc

SEQ ID NO: 2106578 - RNA, 19 nt, Artificial Sequence
  Description of Artificial Sequence: Synthetic oligonucleotide
guacaaggcccagcaccuc

SEQ ID NO: 2106579 - RNA, 19 nt, Artificial Sequence
  Description of Artificial Sequence: Synthetic oligonucleotide
ccgagggcaucauguugag

SEQ ID NO: 2106580 - RNA, 19 nt, Artificial Sequence
  Description of Artificial Sequence: Synthetic oligonucleotide
cuaccccacugaacaaccu

SEQ ID NO: 2106581 - RNA, 19 nt, Artificial Sequence
  Description of Artificial Sequence: Synthetic oligonucleotide
gaguaccuuaagggcaaau

SEQ ID NO: 2106582 - RNA, 19 nt, Artificial Sequence
  Description of Artificial Sequence: Synthetic oligonucleotide
gggacugcuugggacaaua

SEQ ID NO: 2106583 - RNA, 19 nt, Artificial Sequence
  Description of Artificial Sequence: Synthetic oligonucleotide
gcauggcguggcacgagug

SEQ ID NO: 2106584 - RNA, 19 nt, Artificial Sequence
  Description of Artificial Sequence: Synthetic oligonucleotide
gugacggcauacucagcuu

SEQ ID NO: 2106585 - RNA, 19 nt, Artificial Sequence
  Description of Artificial Sequence: Synthetic oligonucleotide
guguacagugggacgcgua

SEQ ID NO: 2106586 - RNA, 19 nt, Artificial Sequence
  Description of Artificial Sequence: Synthetic oligonucleotide
cagcugccgugcauauaga

SEQ ID NO: 2106587 - RNA, 19 nt, Artificial Sequence
  Description of Artificial Sequence: Synthetic oligonucleotide
gcgaccagaagcgccgguc

SEQ ID NO: 2106588 - RNA, 19 nt, Artificial Sequence
  Description of Artificial Sequence: Synthetic oligonucleotide
cguuguggacccucaguca

SEQ ID NO: 2106589 - RNA, 19 nt, Artificial Sequence
  Description of Artificial Sequence: Synthetic oligonucleotide
gcgcaucugcaucagcacu

SEQ ID NO: 2106590 - RNA, 19 nt, Artificial Sequence
  Description of Artificial Sequence: Synthetic oligonucleotide
cggguucgcggcauacagc

SEQ ID NO: 2106591 - RNA, 19 nt, Artificial Sequence
  Description of Artificial Sequence: Synthetic oligonucleotide
gggcaaauaggagcuggua

SEQ ID NO: 2106592 - RNA, 19 nt, Artificial Sequence
  Description of Artificial Sequence: Synthetic oligonucleotide
cguacaaggcccagcaccu

SEQ ID NO: 2106593 - RNA, 19 nt, Artificial Sequence
  Description of Artificial Sequence: Synthetic oligonucleotide
cuggaaccgucgcggucga

SEQ ID NO: 2106594 - RNA, 19 nt, Artificial Sequence
  Description of Artificial Sequence: Synthetic oligonucleotide
ccuuggaaaagugggcucu

SEQ ID NO: 2106595 - RNA, 19 nt, Artificial Sequence
  Description of Artificial Sequence: Synthetic oligonucleotide
ggcacgcuucucgggaauc

SEQ ID NO: 2106596 - RNA, 19 nt, Artificial Sequence
  Description of Artificial Sequence: Synthetic oligonucleotide
cagacucacacaggacagu

SEQ ID NO: 2106597 - RNA, 19 nt, Artificial Sequence
  Description of Artificial Sequence: Synthetic oligonucleotide
gccgccuacucgauccuuc

SEQ ID NO: 2106598 - RNA, 19 nt, Artificial Sequence
  Description of Artificial Sequence: Synthetic oligonucleotide
ggacgcguacaaggcccag

SEQ ID NO: 2106599 - RNA, 19 nt, Artificial Sequence
  Description of Artificial Sequence: Synthetic oligonucleotide
cucccggcugaucugcuuu

SEQ ID NO: 2106600 - RNA, 19 nt, Artificial Sequence
  Description of Artificial Sequence: Synthetic oligonucleotide
ugccccggguucgcggcau

SEQ ID NO: 2106601 - RNA, 19 nt, Artificial Sequence
  Description of Artificial Sequence: Synthetic oligonucleotide
ccuugcagucagaaagggu

SEQ ID NO: 2106602 - RNA, 19 nt, Artificial Sequence
  Description of Artificial Sequence: Synthetic oligonucleotide
cagcuucgguaaggcgcag

SEQ ID NO: 2106603 - RNA, 19 nt, Artificial Sequence
  Description of Artificial Sequence: Synthetic oligonucleotide
cauguaccaucaagucguu

SEQ ID NO: 2106604 - RNA, 19 nt, Artificial Sequence
  Description of Artificial Sequence: Synthetic oligonucleotide
gccgcccaagcccaggccu

SEQ ID NO: 2106605 - RNA, 19 nt, Artificial Sequence
  Description of Artificial Sequence: Synthetic oligonucleotide
uggaaccgucgcggucgac

SEQ ID NO: 2106606 - RNA, 19 nt, Artificial Sequence
  Description of Artificial Sequence: Synthetic oligonucleotide
ggaugggugacggcauacu

SEQ ID NO: 2106607 - RNA, 19 nt, Artificial Sequence
  Description of Artificial Sequence: Synthetic oligonucleotide
cuagggccuucuucuguuu

SEQ ID NO: 2106608 - RNA, 19 nt, Artificial Sequence
  Description of Artificial Sequence: Synthetic oligonucleotide
ccguccucuagcgaccaga

SEQ ID NO: 2106609 - RNA, 19 nt, Artificial Sequence
  Description of Artificial Sequence: Synthetic oligonucleotide
gggacgcguacaaggccca

SEQ ID NO: 2106610 - RNA, 19 nt, Artificial Sequence
  Description of Artificial Sequence: Synthetic oligonucleotide
agccgccuacucgauccuu

SEQ ID NO: 2106611 - RNA, 19 nt, Artificial Sequence
  Description of Artificial Sequence: Synthetic oligonucleotide
ccgggccccaagcgcauug

SEQ ID NO: 2106612 - RNA, 19 nt, Artificial Sequence
  Description of Artificial Sequence: Synthetic oligonucleotide
cucgauccuucugggugua

SEQ ID NO: 2106613 - RNA, 19 nt, Artificial Sequence
  Description of Artificial Sequence: Synthetic oligonucleotide
gcgagugcacugcacugau

SEQ ID NO: 2106614 - RNA, 19 nt, Artificial Sequence
  Description of Artificial Sequence: Synthetic oligonucleotide
gccguccucuagcgaccag

SEQ ID NO: 2106615 - RNA, 19 nt, Artificial Sequence
  Description of Artificial Sequence: Synthetic oligonucleotide
cguggucccgcgagugcac

SEQ ID NO: 2106616 - RNA, 19 nt, Artificial Sequence
  Description of Artificial Sequence: Synthetic oligonucleotide
gcauugcuuccucccggcu

SEQ ID NO: 2106617 - RNA, 19 nt, Artificial Sequence
  Description of Artificial Sequence: Synthetic oligonucleotide
gcucuggaaccgucgcggu

SEQ ID NO: 2106618 - RNA, 19 nt, Artificial Sequence
  Description of Artificial Sequence: Synthetic oligonucleotide
cccgcgagugcacugcacu

SEQ ID NO: 2106619 - RNA, 19 nt, Artificial Sequence
  Description of Artificial Sequence: Synthetic oligonucleotide
ccacgcguuguggacccuc

SEQ ID NO: 2106620 - RNA, 19 nt, Artificial Sequence
  Description of Artificial Sequence: Synthetic oligonucleotide
accacgcguuguggacccu

SEQ ID NO: 2106621 - RNA, 19 nt, Artificial Sequence
  Description of Artificial Sequence: Synthetic oligonucleotide
cgccuacucgauccuucug

SEQ ID NO: 2106622 - RNA, 19 nt, Artificial Sequence
  Description of Artificial Sequence: Synthetic oligonucleotide
cgcguacaaggcccagcac

SEQ ID NO: 2106623 - RNA, 19 nt, Artificial Sequence
  Description of Artificial Sequence: Synthetic oligonucleotide
cugccccggguucgcggca

SEQ ID NO: 2106624 - RNA, 19 nt, Artificial Sequence
  Description of Artificial Sequence: Synthetic oligonucleotide
ccguggucccgcgagugca

SEQ ID NO: 2106625 - RNA, 19 nt, Artificial Sequence
  Description of Artificial Sequence: Synthetic oligonucleotide
guggucccgcgagugcacu

SEQ ID NO: 2106626 - RNA, 19 nt, Artificial Sequence
  Description of Artificial Sequence: Synthetic oligonucleotide
cgcaugggaauacgaccga

SEQ ID NO: 2106627 - RNA, 19 nt, Artificial Sequence
  Description of Artificial Sequence: Synthetic oligonucleotide
cguggcacgaguggcucca

SEQ ID NO: 2106628 - RNA, 19 nt, Artificial Sequence
  Description of Artificial Sequence: Synthetic oligonucleotide
cgguaaggcgcaggccgcc

SEQ ID NO: 2106629 - RNA, 19 nt, Artificial Sequence
  Description of Artificial Sequence: Synthetic oligonucleotide
agccgggccccaagcgcau

SEQ ID NO: 2106630 - RNA, 19 nt, Artificial Sequence
  Description of Artificial Sequence: Synthetic oligonucleotide
cgcgagugcacugcacuga

SEQ ID NO: 2106631 - RNA, 19 nt, Artificial Sequence
  Description of Artificial Sequence: Synthetic oligonucleotide
ggaaagccgccuacucgau

SEQ ID NO: 2106632 - RNA, 19 nt, Artificial Sequence
  Description of Artificial Sequence: Synthetic oligonucleotide
gcccgucgaagcgcaucug

SEQ ID NO: 2106633 - RNA, 19 nt, Artificial Sequence
  Description of Artificial Sequence: Synthetic oligonucleotide
cgucgaagcgcaucugcau

SEQ ID NO: 2106634 - RNA, 19 nt, Artificial Sequence
  Description of Artificial Sequence: Synthetic oligonucleotide
gcaucauguugaguaccuu

SEQ ID NO: 2106635 - RNA, 19 nt, Artificial Sequence
  Description of Artificial Sequence: Synthetic oligonucleotide
ccgccuacucgauccuucu

SEQ ID NO: 2106636 - RNA, 19 nt, Artificial Sequence
  Description of Artificial Sequence: Synthetic oligonucleotide
ccccggguucgcggcauac

SEQ ID NO: 2106637 - RNA, 19 nt, Artificial Sequence
  Description of Artificial Sequence: Synthetic oligonucleotide
ccagaccguggucccgcga

SEQ ID NO: 2106638 - RNA, 19 nt, Artificial Sequence
  Description of Artificial Sequence: Synthetic oligonucleotide
cgcguuguggacccucagu

SEQ ID NO: 2106639 - RNA, 19 nt, Artificial Sequence
  Description of Artificial Sequence: Synthetic oligonucleotide
cccggguucgcggcauaca

SEQ ID NO: 2106640 - RNA, 19 nt, Artificial Sequence
  Description of Artificial Sequence: Synthetic oligonucleotide
gcacccgguucaagccguc

SEQ ID NO: 2106641 - RNA, 19 nt, Artificial Sequence
  Description of Artificial Sequence: Synthetic oligonucleotide
ccgcccaagcccaggccua

SEQ ID NO: 2106642 - RNA, 19 nt, Artificial Sequence
  Description of Artificial Sequence: Synthetic oligonucleotide
gguucgcggcauacagcau

SEQ ID NO: 2106643 - RNA, 19 nt, Artificial Sequence
  Description of Artificial Sequence: Synthetic oligonucleotide
cgcggucgacaucuugaua

SEQ ID NO: 2106644 - RNA, 19 nt, Artificial Sequence
  Description of Artificial Sequence: Synthetic oligonucleotide
gccccggguucgcggcaua

SEQ ID NO: 2106645 - RNA, 19 nt, Artificial Sequence
  Description of Artificial Sequence: Synthetic oligonucleotide
cgagggcaucauguugagu

SEQ ID NO: 2106646 - RNA, 19 nt, Artificial Sequence
  Description of Artificial Sequence: Synthetic oligonucleotide
gcagcccgucgaagcgcau

SEQ ID NO: 2106647 - RNA, 19 nt, Artificial Sequence
  Description of Artificial Sequence: Synthetic oligonucleotide
gccgggccccaagcgcauu

SEQ ID NO: 2106648 - RNA, 19 nt, Artificial Sequence
  Description of Artificial Sequence: Synthetic oligonucleotide
ccgucgcggucgacaucuu

SEQ ID NO: 2106649 - RNA, 19 nt, Artificial Sequence
  Description of Artificial Sequence: Synthetic oligonucleotide
aucauaacaagucagcucc

SEQ ID NO: 2106650 - RNA, 19 nt, Artificial Sequence
  Description of Artificial Sequence: Synthetic oligonucleotide
aaggcaaucaguucucucc

SEQ ID NO: 2106651 - RNA, 19 nt, Artificial Sequence
  Description of Artificial Sequence: Synthetic oligonucleotide
aacacuggaaauucaaagg

SEQ ID NO: 2106652 - RNA, 19 nt, Artificial Sequence
  Description of Artificial Sequence: Synthetic oligonucleotide
uuuagcacaauaaacgcgc

SEQ ID NO: 2106653 - RNA, 19 nt, Artificial Sequence
  Description of Artificial Sequence: Synthetic oligonucleotide
ucaaaguagacaaaggcca

SEQ ID NO: 2106654 - RNA, 19 nt, Artificial Sequence
  Description of Artificial Sequence: Synthetic oligonucleotide
acauauauguauuuagcac

SEQ ID NO: 2106655 - RNA, 19 nt, Artificial Sequence
  Description of Artificial Sequence: Synthetic oligonucleotide
agagaugucacucuggauc

SEQ ID NO: 2106656 - RNA, 19 nt, Artificial Sequence
  Description of Artificial Sequence: Synthetic oligonucleotide
ucuaacauagagcacagga

SEQ ID NO: 2106657 - RNA, 19 nt, Artificial Sequence
  Description of Artificial Sequence: Synthetic oligonucleotide
cuaacaaucaacuuaacca

SEQ ID NO: 2106658 - RNA, 19 nt, Artificial Sequence
  Description of Artificial Sequence: Synthetic oligonucleotide
aaucauaacaagucagcuc

SEQ ID NO: 2106659 - RNA, 19 nt, Artificial Sequence
  Description of Artificial Sequence: Synthetic oligonucleotide
uguauuuagcacaauaaac

SEQ ID NO: 2106660 - RNA, 19 nt, Artificial Sequence
  Description of Artificial Sequence: Synthetic oligonucleotide
uguaguuugucccagcugc

SEQ ID NO: 2106661 - RNA, 19 nt, Artificial Sequence
  Description of Artificial Sequence: Synthetic oligonucleotide
uguacuaacaaucaacuua

SEQ ID NO: 2106662 - RNA, 19 nt, Artificial Sequence
  Description of Artificial Sequence: Synthetic oligonucleotide
acacuggaaauucaaaggc

SEQ ID NO: 2106663 - RNA, 19 nt, Artificial Sequence
  Description of Artificial Sequence: Synthetic oligonucleotide
ugcacucuaacauagagca

SEQ ID NO: 2106664 - RNA, 19 nt, Artificial Sequence
  Description of Artificial Sequence: Synthetic oligonucleotide
uagaggguuaaauagaagc

SEQ ID NO: 2106665 - RNA, 19 nt, Artificial Sequence
  Description of Artificial Sequence: Synthetic oligonucleotide
aaaguuauaccuguauaac

SEQ ID NO: 2106666 - RNA, 19 nt, Artificial Sequence
  Description of Artificial Sequence: Synthetic oligonucleotide
uuuuguacuaacaaucaac

SEQ ID NO: 2106667 - RNA, 19 nt, Artificial Sequence
  Description of Artificial Sequence: Synthetic oligonucleotide
uuuguacuaacaaucaacu

SEQ ID NO: 2106668 - RNA, 19 nt, Artificial Sequence
  Description of Artificial Sequence: Synthetic oligonucleotide
aaucaacuuaaccacagcu

SEQ ID NO: 2106669 - RNA, 19 nt, Artificial Sequence
  Description of Artificial Sequence: Synthetic oligonucleotide
agaacuguugccucugucc

SEQ ID NO: 2106670 - RNA, 19 nt, Artificial Sequence
  Description of Artificial Sequence: Synthetic oligonucleotide
ucaacuuaaccacagcuug

SEQ ID NO: 2106671 - RNA, 19 nt, Artificial Sequence
  Description of Artificial Sequence: Synthetic oligonucleotide
auuggcacgcucuugacac

SEQ ID NO: 2106672 - RNA, 19 nt, Artificial Sequence
  Description of Artificial Sequence: Synthetic oligonucleotide
uauuuagcacaauaaacgc

SEQ ID NO: 2106673 - RNA, 19 nt, Artificial Sequence
  Description of Artificial Sequence: Synthetic oligonucleotide
uaacaagucagcuccauag

SEQ ID NO: 2106674 - RNA, 19 nt, Artificial Sequence
  Description of Artificial Sequence: Synthetic oligonucleotide
auaacuaccaggugacagc

SEQ ID NO: 2106675 - RNA, 19 nt, Artificial Sequence
  Description of Artificial Sequence: Synthetic oligonucleotide
uuaaauagaagcccguggu

SEQ ID NO: 2106676 - RNA, 19 nt, Artificial Sequence
  Description of Artificial Sequence: Synthetic oligonucleotide
ugcaaaagccacaagacac

SEQ ID NO: 2106677 - RNA, 19 nt, Artificial Sequence
  Description of Artificial Sequence: Synthetic oligonucleotide
uugaaauguaguuuguccc

SEQ ID NO: 2106678 - RNA, 19 nt, Artificial Sequence
  Description of Artificial Sequence: Synthetic oligonucleotide
uauguauuuagcacaauaa

SEQ ID NO: 2106679 - RNA, 19 nt, Artificial Sequence
  Description of Artificial Sequence: Synthetic oligonucleotide
agagcacaggaauacacgc

SEQ ID NO: 2106680 - RNA, 19 nt, Artificial Sequence
  Description of Artificial Sequence: Synthetic oligonucleotide
gaaagugcacuuccgaagg

SEQ ID NO: 2106681 - RNA, 19 nt, Artificial Sequence
  Description of Artificial Sequence: Synthetic oligonucleotide
uaugcacucuaacauagag

SEQ ID NO: 2106682 - RNA, 19 nt, Artificial Sequence
  Description of Artificial Sequence: Synthetic oligonucleotide
uuaaccacagcuugaaaug

SEQ ID NO: 2106683 - RNA, 19 nt, Artificial Sequence
  Description of Artificial Sequence: Synthetic oligonucleotide
uucaguaaaguuauaccug

SEQ ID NO: 2106684 - RNA, 19 nt, Artificial Sequence
  Description of Artificial Sequence: Synthetic oligonucleotide
aauaaacgcgcucauuaug

SEQ ID NO: 2106685 - RNA, 19 nt, Artificial Sequence
  Description of Artificial Sequence: Synthetic oligonucleotide
uccaaggccaccaacacug

SEQ ID NO: 2106686 - RNA, 19 nt, Artificial Sequence
  Description of Artificial Sequence: Synthetic oligonucleotide
uaacaaucaacuuaaccac

SEQ ID NO: 2106687 - RNA, 19 nt, Artificial Sequence
  Description of Artificial Sequence: Synthetic oligonucleotide
uguauaacuaccaggugac

SEQ ID NO: 2106688 - RNA, 19 nt, Artificial Sequence
  Description of Artificial Sequence: Synthetic oligonucleotide
ucuucaguaaaguuauacc

SEQ ID NO: 2106689 - RNA, 19 nt, Artificial Sequence
  Description of Artificial Sequence: Synthetic oligonucleotide
aaguuauaccuguauaacu

SEQ ID NO: 2106690 - RNA, 19 nt, Artificial Sequence
  Description of Artificial Sequence: Synthetic oligonucleotide
acaggucacaauuuuguac

SEQ ID NO: 2106691 - RNA, 19 nt, Artificial Sequence
  Description of Artificial Sequence: Synthetic oligonucleotide
uuaucaaucagaugcuuga

SEQ ID NO: 2106692 - RNA, 19 nt, Artificial Sequence
  Description of Artificial Sequence: Synthetic oligonucleotide
agugcuauuuccgaagagc

SEQ ID NO: 2106693 - RNA, 19 nt, Artificial Sequence
  Description of Artificial Sequence: Synthetic oligonucleotide
uuugaggucacuuccgacc

SEQ ID NO: 2106694 - RNA, 19 nt, Artificial Sequence
  Description of Artificial Sequence: Synthetic oligonucleotide
auaaacgcgcucauuaugc

SEQ ID NO: 2106695 - RNA, 19 nt, Artificial Sequence
  Description of Artificial Sequence: Synthetic oligonucleotide
agaaaaucauaacaaguca

SEQ ID NO: 2106696 - RNA, 19 nt, Artificial Sequence
  Description of Artificial Sequence: Synthetic oligonucleotide
ucaaucagaugcuugacgu

SEQ ID NO: 2106697 - RNA, 19 nt, Artificial Sequence
  Description of Artificial Sequence: Synthetic oligonucleotide
ugacuuauccuacuguuga

SEQ ID NO: 2106698 - RNA, 19 nt, Artificial Sequence
  Description of Artificial Sequence: Synthetic oligonucleotide
uauaccuguauaacuacca

SEQ ID NO: 2106699 - RNA, 19 nt, Artificial Sequence
  Description of Artificial Sequence: Synthetic oligonucleotide
gagcuagaggguuaaauag

SEQ ID NO: 2106700 - RNA, 19 nt, Artificial Sequence
  Description of Artificial Sequence: Synthetic oligonucleotide
cacaagacaccaaucaugc

SEQ ID NO: 2106701 - RNA, 19 nt, Artificial Sequence
  Description of Artificial Sequence: Synthetic oligonucleotide
cauauauguauuuagcaca

SEQ ID NO: 2106702 - RNA, 19 nt, Artificial Sequence
  Description of Artificial Sequence: Synthetic oligonucleotide
gguacagucucauaaacag

SEQ ID NO: 2106703 - RNA, 19 nt, Artificial Sequence
  Description of Artificial Sequence: Synthetic oligonucleotide
uauccuacuguugagaacu

SEQ ID NO: 2106704 - RNA, 19 nt, Artificial Sequence
  Description of Artificial Sequence: Synthetic oligonucleotide
agaggguuaaauagaagcc

SEQ ID NO: 2106705 - RNA, 19 nt, Artificial Sequence
  Description of Artificial Sequence: Synthetic oligonucleotide
uauaacuaccaggugacag

SEQ ID NO: 2106706 - RNA, 19 nt, Artificial Sequence
  Description of Artificial Sequence: Synthetic oligonucleotide
aaagugcacuuccgaaggc

SEQ ID NO: 2106707 - RNA, 19 nt, Artificial Sequence
  Description of Artificial Sequence: Synthetic oligonucleotide
gaauacacgcuauggagug

SEQ ID NO: 2106708 - RNA, 19 nt, Artificial Sequence
  Description of Artificial Sequence: Synthetic oligonucleotide
caacacuggaaauucaaag

SEQ ID NO: 2106709 - RNA, 19 nt, Artificial Sequence
  Description of Artificial Sequence: Synthetic oligonucleotide
aaacgcgcucauuaugcac

SEQ ID NO: 2106710 - RNA, 19 nt, Artificial Sequence
  Description of Artificial Sequence: Synthetic oligonucleotide
uaccuguauaacuaccagg

SEQ ID NO: 2106711 - RNA, 19 nt, Artificial Sequence
  Description of Artificial Sequence: Synthetic oligonucleotide
acacccacacccuuagugc

SEQ ID NO: 2106712 - RNA, 19 nt, Artificial Sequence
  Description of Artificial Sequence: Synthetic oligonucleotide
augaagugcaaauuccaag

SEQ ID NO: 2106713 - RNA, 19 nt, Artificial Sequence
  Description of Artificial Sequence: Synthetic oligonucleotide
aaauagaagcccguggugu

SEQ ID NO: 2106714 - RNA, 19 nt, Artificial Sequence
  Description of Artificial Sequence: Synthetic oligonucleotide
uuauaccuguauaacuacc

SEQ ID NO: 2106715 - RNA, 19 nt, Artificial Sequence
  Description of Artificial Sequence: Synthetic oligonucleotide
ugugacggcaggaaguuca

SEQ ID NO: 2106716 - RNA, 19 nt, Artificial Sequence
  Description of Artificial Sequence: Synthetic oligonucleotide
aaaggcaaucaguucucuc

SEQ ID NO: 2106717 - RNA, 19 nt, Artificial Sequence
  Description of Artificial Sequence: Synthetic oligonucleotide
cauaaacagugcuauuucc

SEQ ID NO: 2106718 - RNA, 19 nt, Artificial Sequence
  Description of Artificial Sequence: Synthetic oligonucleotide
aauagaagcccguggugug

SEQ ID NO: 2106719 - RNA, 19 nt, Artificial Sequence
  Description of Artificial Sequence: Synthetic oligonucleotide
auaaacagugcuauuuccg

SEQ ID NO: 2106720 - RNA, 19 nt, Artificial Sequence
  Description of Artificial Sequence: Synthetic oligonucleotide
ugacaggucacaauuuugu

SEQ ID NO: 2106721 - RNA, 19 nt, Artificial Sequence
  Description of Artificial Sequence: Synthetic oligonucleotide
uaaacagugcuauuuccga

SEQ ID NO: 2106722 - RNA, 19 nt, Artificial Sequence
  Description of Artificial Sequence: Synthetic oligonucleotide
guaacagugccucucagac

SEQ ID NO: 2106723 - RNA, 19 nt, Artificial Sequence
  Description of Artificial Sequence: Synthetic oligonucleotide
uaaauagaagcccguggug

SEQ ID NO: 2106724 - RNA, 19 nt, Artificial Sequence
  Description of Artificial Sequence: Synthetic oligonucleotide
agcugcaaaagccacaaga

SEQ ID NO: 2106725 - RNA, 19 nt, Artificial Sequence
  Description of Artificial Sequence: Synthetic oligonucleotide
acauagagcacaggaauac

SEQ ID NO: 2106726 - RNA, 19 nt, Artificial Sequence
  Description of Artificial Sequence: Synthetic oligonucleotide
uccgaaggcagauauaaaa

SEQ ID NO: 2106727 - RNA, 19 nt, Artificial Sequence
  Description of Artificial Sequence: Synthetic oligonucleotide
auuuagcacaauaaacgcg

SEQ ID NO: 2106728 - RNA, 19 nt, Artificial Sequence
  Description of Artificial Sequence: Synthetic oligonucleotide
aguaaaguuauaccuguau

SEQ ID NO: 2106729 - RNA, 19 nt, Artificial Sequence
  Description of Artificial Sequence: Synthetic oligonucleotide
aauuccaaggccaccaaca

SEQ ID NO: 2106730 - RNA, 19 nt, Artificial Sequence
  Description of Artificial Sequence: Synthetic oligonucleotide
acgcucuugacacagggag

SEQ ID NO: 2106731 - RNA, 19 nt, Artificial Sequence
  Description of Artificial Sequence: Synthetic oligonucleotide
ucacaauuuuguacuaaca

SEQ ID NO: 2106732 - RNA, 19 nt, Artificial Sequence
  Description of Artificial Sequence: Synthetic oligonucleotide
aaauagauuggcacgcucu

SEQ ID NO: 2106733 - RNA, 19 nt, Artificial Sequence
  Description of Artificial Sequence: Synthetic oligonucleotide
ucaaguguaacagugccuc

SEQ ID NO: 2106734 - RNA, 19 nt, Artificial Sequence
  Description of Artificial Sequence: Synthetic oligonucleotide
auuuccgaagagcagagau

SEQ ID NO: 2106735 - RNA, 19 nt, Artificial Sequence
  Description of Artificial Sequence: Synthetic oligonucleotide
uuggcugccaacagcacgc

SEQ ID NO: 2106736 - RNA, 19 nt, Artificial Sequence
  Description of Artificial Sequence: Synthetic oligonucleotide
uagauuggcacgcucuuga

SEQ ID NO: 2106737 - RNA, 19 nt, Artificial Sequence
  Description of Artificial Sequence: Synthetic oligonucleotide
gaagugcaaauuccaaggc

SEQ ID NO: 2106738 - RNA, 19 nt, Artificial Sequence
  Description of Artificial Sequence: Synthetic oligonucleotide
caaucaugcgucuuacccc

SEQ ID NO: 2106739 - RNA, 19 nt, Artificial Sequence
  Description of Artificial Sequence: Synthetic oligonucleotide
aaguguaacagugccucuc

SEQ ID NO: 2106740 - RNA, 19 nt, Artificial Sequence
  Description of Artificial Sequence: Synthetic oligonucleotide
ucacuuccgaccuuggcug

SEQ ID NO: 2106741 - RNA, 19 nt, Artificial Sequence
  Description of Artificial Sequence: Synthetic oligonucleotide
uuuccgaagagcagagaug

SEQ ID NO: 2106742 - RNA, 19 nt, Artificial Sequence
  Description of Artificial Sequence: Synthetic oligonucleotide
uugugcuugccacaaggcc

SEQ ID NO: 2106743 - RNA, 19 nt, Artificial Sequence
  Description of Artificial Sequence: Synthetic oligonucleotide
aggaaguucagagcgcgcc

SEQ ID NO: 2106744 - RNA, 19 nt, Artificial Sequence
  Description of Artificial Sequence: Synthetic oligonucleotide
ugacuucaugcucuggcag

SEQ ID NO: 2106745 - RNA, 19 nt, Artificial Sequence
  Description of Artificial Sequence: Synthetic oligonucleotide
aauacacgcuauggagugc

SEQ ID NO: 2106746 - RNA, 19 nt, Artificial Sequence
  Description of Artificial Sequence: Synthetic oligonucleotide
aacaagucagcuccauaga

SEQ ID NO: 2106747 - RNA, 19 nt, Artificial Sequence
  Description of Artificial Sequence: Synthetic oligonucleotide
acuaccaggugacagcaug

SEQ ID NO: 2106748 - RNA, 19 nt, Artificial Sequence
  Description of Artificial Sequence: Synthetic oligonucleotide
cuguauaacuaccagguga

SEQ ID NO: 2106749 - RNA, 19 nt, Artificial Sequence
  Description of Artificial Sequence: Synthetic oligonucleotide
cugagucuuaccuagaaaa

SEQ ID NO: 2106750 - RNA, 19 nt, Artificial Sequence
  Description of Artificial Sequence: Synthetic oligonucleotide
auaccuguauaacuaccag

SEQ ID NO: 2106751 - RNA, 19 nt, Artificial Sequence
  Description of Artificial Sequence: Synthetic oligonucleotide
uuccgaagagcagagaugu

SEQ ID NO: 2106752 - RNA, 19 nt, Artificial Sequence
  Description of Artificial Sequence: Synthetic oligonucleotide
aaugcugacaggucacaau

SEQ ID NO: 2106753 - RNA, 19 nt, Artificial Sequence
  Description of Artificial Sequence: Synthetic oligonucleotide
gcaugguuaaugcugacag

SEQ ID NO: 2106754 - RNA, 19 nt, Artificial Sequence
  Description of Artificial Sequence: Synthetic oligonucleotide
cacgcuauggagugcagcc

SEQ ID NO: 2106755 - RNA, 19 nt, Artificial Sequence
  Description of Artificial Sequence: Synthetic oligonucleotide
aauagauuggcacgcucuu

SEQ ID NO: 2106756 - RNA, 19 nt, Artificial Sequence
  Description of Artificial Sequence: Synthetic oligonucleotide
acggcaggaaguucagagc

SEQ ID NO: 2106757 - RNA, 19 nt, Artificial Sequence
  Description of Artificial Sequence: Synthetic oligonucleotide
cucuucaggggaaagucag

SEQ ID NO: 2106758 - RNA, 19 nt, Artificial Sequence
  Description of Artificial Sequence: Synthetic oligonucleotide
cucucagacacuugcacac

SEQ ID NO: 2106759 - RNA, 19 nt, Artificial Sequence
  Description of Artificial Sequence: Synthetic oligonucleotide
guuauaccuguauaacuac

SEQ ID NO: 2106760 - RNA, 19 nt, Artificial Sequence
  Description of Artificial Sequence: Synthetic oligonucleotide
agucaggacccgcuugugc

SEQ ID NO: 2106761 - RNA, 19 nt, Artificial Sequence
  Description of Artificial Sequence: Synthetic oligonucleotide
uguaacagugccucucaga

SEQ ID NO: 2106762 - RNA, 19 nt, Artificial Sequence
  Description of Artificial Sequence: Synthetic oligonucleotide
aggguuaaauagaagcccg

SEQ ID NO: 2106763 - RNA, 19 nt, Artificial Sequence
  Description of Artificial Sequence: Synthetic oligonucleotide
ugcuauuuccgaagagcag

SEQ ID NO: 2106764 - RNA, 19 nt, Artificial Sequence
  Description of Artificial Sequence: Synthetic oligonucleotide
accuguauaacuaccaggu

SEQ ID NO: 2106765 - RNA, 19 nt, Artificial Sequence
  Description of Artificial Sequence: Synthetic oligonucleotide
cuuggcugccaacagcacg

SEQ ID NO: 2106766 - RNA, 19 nt, Artificial Sequence
  Description of Artificial Sequence: Synthetic oligonucleotide
ugagucuuaccuagaaaau

SEQ ID NO: 2106767 - RNA, 19 nt, Artificial Sequence
  Description of Artificial Sequence: Synthetic oligonucleotide
ggaucugagucuuaccuag

SEQ ID NO: 2106768 - RNA, 19 nt, Artificial Sequence
  Description of Artificial Sequence: Synthetic oligonucleotide
uccagugaguggcagguac

SEQ ID NO: 2106769 - RNA, 19 nt, Artificial Sequence
  Description of Artificial Sequence: Synthetic oligonucleotide
uuccgcaucucucucuuca

SEQ ID NO: 2106770 - RNA, 19 nt, Artificial Sequence
  Description of Artificial Sequence: Synthetic oligonucleotide
gagcgcgccacucugcacg

SEQ ID NO: 2106771 - RNA, 19 nt, Artificial Sequence
  Description of Artificial Sequence: Synthetic oligonucleotide
cuauuuccgaagagcagag

SEQ ID NO: 2106772 - RNA, 19 nt, Artificial Sequence
  Description of Artificial Sequence: Synthetic oligonucleotide
agaugcuugacgucgugcu

SEQ ID NO: 2106773 - RNA, 19 nt, Artificial Sequence
  Description of Artificial Sequence: Synthetic oligonucleotide
ggaaagugcacuuccgaag

SEQ ID NO: 2106774 - RNA, 19 nt, Artificial Sequence
  Description of Artificial Sequence: Synthetic oligonucleotide
caggggaaagucaggaccc

SEQ ID NO: 2106775 - RNA, 19 nt, Artificial Sequence
  Description of Artificial Sequence: Synthetic oligonucleotide
ugcuaggaacucuggauca

SEQ ID NO: 2106776 - RNA, 19 nt, Artificial Sequence
  Description of Artificial Sequence: Synthetic oligonucleotide
auuuuguacuaacaaucaa

SEQ ID NO: 2106777 - RNA, 19 nt, Artificial Sequence
  Description of Artificial Sequence: Synthetic oligonucleotide
gugaguggcagguacaguc

SEQ ID NO: 2106778 - RNA, 19 nt, Artificial Sequence
  Description of Artificial Sequence: Synthetic oligonucleotide
aguuauaccuguauaacua

SEQ ID NO: 2106779 - RNA, 19 nt, Artificial Sequence
  Description of Artificial Sequence: Synthetic oligonucleotide
aacaaucaacuuaaccaca

SEQ ID NO: 2106780 - RNA, 19 nt, Artificial Sequence
  Description of Artificial Sequence: Synthetic oligonucleotide
ucuuaccuagaaaaucaua

SEQ ID NO: 2106781 - RNA, 19 nt, Artificial Sequence
  Description of Artificial Sequence: Synthetic oligonucleotide
acacccuuagugcccaggg

SEQ ID NO: 2106782 - RNA, 19 nt, Artificial Sequence
  Description of Artificial Sequence: Synthetic oligonucleotide
ccaaucaugcgucuuaccc

SEQ ID NO: 2106783 - RNA, 19 nt, Artificial Sequence
  Description of Artificial Sequence: Synthetic oligonucleotide
aagagcuagaggguuaaau

SEQ ID NO: 2106784 - RNA, 19 nt, Artificial Sequence
  Description of Artificial Sequence: Synthetic oligonucleotide
cuaccaggugacagcaugg

SEQ ID NO: 2106785 - RNA, 19 nt, Artificial Sequence
  Description of Artificial Sequence: Synthetic oligonucleotide
guacuaacaaucaacuuaa

SEQ ID NO: 2106786 - RNA, 19 nt, Artificial Sequence
  Description of Artificial Sequence: Synthetic oligonucleotide
uuauucaguuuccccuuga

SEQ ID NO: 2106787 - RNA, 19 nt, Artificial Sequence
  Description of Artificial Sequence: Synthetic oligonucleotide
ucugagucuuaccuagaaa

SEQ ID NO: 2106788 - RNA, 19 nt, Artificial Sequence
  Description of Artificial Sequence: Synthetic oligonucleotide
guaaaguuauaccuguaua

SEQ ID NO: 2106789 - RNA, 19 nt, Artificial Sequence
  Description of Artificial Sequence: Synthetic oligonucleotide
gacuuauccuacuguugag

SEQ ID NO: 2106790 - RNA, 19 nt, Artificial Sequence
  Description of Artificial Sequence: Synthetic oligonucleotide
aacuguugccucuguccag

SEQ ID NO: 2106791 - RNA, 19 nt, Artificial Sequence
  Description of Artificial Sequence: Synthetic oligonucleotide
acaagucagcuccauagaa

SEQ ID NO: 2106792 - RNA, 19 nt, Artificial Sequence
  Description of Artificial Sequence: Synthetic oligonucleotide
ggucaaguguaacagugcc

SEQ ID NO: 2106793 - RNA, 19 nt, Artificial Sequence
  Description of Artificial Sequence: Synthetic oligonucleotide
uccggcacagagcuuccgg

SEQ ID NO: 2106794 - RNA, 19 nt, Artificial Sequence
  Description of Artificial Sequence: Synthetic oligonucleotide
gagggcgagcuucucaaag

SEQ ID NO: 2106795 - RNA, 19 nt, Artificial Sequence
  Description of Artificial Sequence: Synthetic oligonucleotide
uucagagcgcgccacucug

SEQ ID NO: 2106796 - RNA, 19 nt, Artificial Sequence
  Description of Artificial Sequence: Synthetic oligonucleotide
uggugugacggcaggaagu

SEQ ID NO: 2106797 - RNA, 19 nt, Artificial Sequence
  Description of Artificial Sequence: Synthetic oligonucleotide
aacgcgcucauuaugcacu

SEQ ID NO: 2106798 - RNA, 19 nt, Artificial Sequence
  Description of Artificial Sequence: Synthetic oligonucleotide
cuagaggguuaaauagaag

SEQ ID NO: 2106799 - RNA, 19 nt, Artificial Sequence
  Description of Artificial Sequence: Synthetic oligonucleotide
cacucuaacauagagcaca

SEQ ID NO: 2106800 - RNA, 19 nt, Artificial Sequence
  Description of Artificial Sequence: Synthetic oligonucleotide
gagucuuaccuagaaaauc

SEQ ID NO: 2106801 - RNA, 19 nt, Artificial Sequence
  Description of Artificial Sequence: Synthetic oligonucleotide
aacuuaaccacagcuugaa

SEQ ID NO: 2106802 - RNA, 19 nt, Artificial Sequence
  Description of Artificial Sequence: Synthetic oligonucleotide
acggugggcuccucaaagc

SEQ ID NO: 2106803 - RNA, 19 nt, Artificial Sequence
  Description of Artificial Sequence: Synthetic oligonucleotide
acagucucauaaacagugc

SEQ ID NO: 2106804 - RNA, 19 nt, Artificial Sequence
  Description of Artificial Sequence: Synthetic oligonucleotide
aaacacauacauauaugua

SEQ ID NO: 2106805 - RNA, 19 nt, Artificial Sequence
  Description of Artificial Sequence: Synthetic oligonucleotide
cuaacauagagcacaggaa

SEQ ID NO: 2106806 - RNA, 19 nt, Artificial Sequence
  Description of Artificial Sequence: Synthetic oligonucleotide
uuauccuacuguugagaac

SEQ ID NO: 2106807 - RNA, 19 nt, Artificial Sequence
  Description of Artificial Sequence: Synthetic oligonucleotide
uaacuaccaggugacagca

SEQ ID NO: 2106808 - RNA, 19 nt, Artificial Sequence
  Description of Artificial Sequence: Synthetic oligonucleotide
acaagacaccaaucaugcg

SEQ ID NO: 2106809 - RNA, 19 nt, Artificial Sequence
  Description of Artificial Sequence: Synthetic oligonucleotide
ugcacgugacuuauccuac

SEQ ID NO: 2106810 - RNA, 19 nt, Artificial Sequence
  Description of Artificial Sequence: Synthetic oligonucleotide
augacuucaugcucuggca

SEQ ID NO: 2106811 - RNA, 19 nt, Artificial Sequence
  Description of Artificial Sequence: Synthetic oligonucleotide
uuaugcacucuaacauaga

SEQ ID NO: 2106812 - RNA, 19 nt, Artificial Sequence
  Description of Artificial Sequence: Synthetic oligonucleotide
agauuggcacgcucuugac

SEQ ID NO: 2106813 - RNA, 19 nt, Artificial Sequence
  Description of Artificial Sequence: Synthetic oligonucleotide
cuuaaccacagcuugaaau

SEQ ID NO: 2106814 - RNA, 19 nt, Artificial Sequence
  Description of Artificial Sequence: Synthetic oligonucleotide
uuagcacaauaaacgcgcu

SEQ ID NO: 2106815 - RNA, 19 nt, Artificial Sequence
  Description of Artificial Sequence: Synthetic oligonucleotide
aagcuuccgcaucucucuc

SEQ ID NO: 2106816 - RNA, 19 nt, Artificial Sequence
  Description of Artificial Sequence: Synthetic oligonucleotide
uaaacgcgcucauuaugca

SEQ ID NO: 2106817 - RNA, 19 nt, Artificial Sequence
  Description of Artificial Sequence: Synthetic oligonucleotide
ucugaacuucucuuccagu

SEQ ID NO: 2106818 - RNA, 19 nt, Artificial Sequence
  Description of Artificial Sequence: Synthetic oligonucleotide
caugcucuggcagaugaag

SEQ ID NO: 2106819 - RNA, 19 nt, Artificial Sequence
  Description of Artificial Sequence: Synthetic oligonucleotide
cucagacacuugcacaccc

SEQ ID NO: 2106820 - RNA, 19 nt, Artificial Sequence
  Description of Artificial Sequence: Synthetic oligonucleotide
gaagcccguggugugacgg

SEQ ID NO: 2106821 - RNA, 19 nt, Artificial Sequence
  Description of Artificial Sequence: Synthetic oligonucleotide
cuuauccuacuguugagaa

SEQ ID NO: 2106822 - RNA, 19 nt, Artificial Sequence
  Description of Artificial Sequence: Synthetic oligonucleotide
uugagggcgagcuucucaa

SEQ ID NO: 2106823 - RNA, 19 nt, Artificial Sequence
  Description of Artificial Sequence: Synthetic oligonucleotide
augcugacaggucacaauu

SEQ ID NO: 2106824 - RNA, 19 nt, Artificial Sequence
  Description of Artificial Sequence: Synthetic oligonucleotide
caagacaccaaucaugcgu

SEQ ID NO: 2106825 - RNA, 19 nt, Artificial Sequence
  Description of Artificial Sequence: Synthetic oligonucleotide
cagguacagucucauaaac

SEQ ID NO: 2106826 - RNA, 19 nt, Artificial Sequence
  Description of Artificial Sequence: Synthetic oligonucleotide
acuggaaauucaaaggcaa

SEQ ID NO: 2106827 - RNA, 19 nt, Artificial Sequence
  Description of Artificial Sequence: Synthetic oligonucleotide
agaugaagugcaaauucca

SEQ ID NO: 2106828 - RNA, 19 nt, Artificial Sequence
  Description of Artificial Sequence: Synthetic oligonucleotide
uggcagaugaagugcaaau

SEQ ID NO: 2106829 - RNA, 19 nt, Artificial Sequence
  Description of Artificial Sequence: Synthetic oligonucleotide
auguaguuugucccagcug

SEQ ID NO: 2106830 - RNA, 19 nt, Artificial Sequence
  Description of Artificial Sequence: Synthetic oligonucleotide
aagugcacuuccgaaggca

SEQ ID NO: 2106831 - RNA, 19 nt, Artificial Sequence
  Description of Artificial Sequence: Synthetic oligonucleotide
ucagacacuugcacaccca

SEQ ID NO: 2106832 - RNA, 19 nt, Artificial Sequence
  Description of Artificial Sequence: Synthetic oligonucleotide
uccugggcaagcuuccgca

SEQ ID NO: 2106833 - RNA, 19 nt, Artificial Sequence
  Description of Artificial Sequence: Synthetic oligonucleotide
acccuuagugcccagggaa

SEQ ID NO: 2106834 - RNA, 19 nt, Artificial Sequence
  Description of Artificial Sequence: Synthetic oligonucleotide
acagcuugaaauguaguuu

SEQ ID NO: 2106835 - RNA, 19 nt, Artificial Sequence
  Description of Artificial Sequence: Synthetic oligonucleotide
aacauagagcacaggaaua

SEQ ID NO: 2106836 - RNA, 19 nt, Artificial Sequence
  Description of Artificial Sequence: Synthetic oligonucleotide
acuuauccuacuguugaga

SEQ ID NO: 2106837 - RNA, 19 nt, Artificial Sequence
  Description of Artificial Sequence: Synthetic oligonucleotide
agggaaagugcacuuccga

SEQ ID NO: 2106838 - RNA, 19 nt, Artificial Sequence
  Description of Artificial Sequence: Synthetic oligonucleotide
cuaggaacucuggaucagg

SEQ ID NO: 2106839 - RNA, 19 nt, Artificial Sequence
  Description of Artificial Sequence: Synthetic oligonucleotide
cuuauucaguuuccccuug

SEQ ID NO: 2106840 - RNA, 19 nt, Artificial Sequence
  Description of Artificial Sequence: Synthetic oligonucleotide
gugcuaggaacucuggauc

SEQ ID NO: 2106841 - RNA, 19 nt, Artificial Sequence
  Description of Artificial Sequence: Synthetic oligonucleotide
gauuggcacgcucuugaca

SEQ ID NO: 2106842 - RNA, 19 nt, Artificial Sequence
  Description of Artificial Sequence: Synthetic oligonucleotide
acacgcuauggagugcagc

SEQ ID NO: 2106843 - RNA, 19 nt, Artificial Sequence
  Description of Artificial Sequence: Synthetic oligonucleotide
uuguacuaacaaucaacuu

SEQ ID NO: 2106844 - RNA, 19 nt, Artificial Sequence
  Description of Artificial Sequence: Synthetic oligonucleotide
cagggaaagugcacuuccg

SEQ ID NO: 2106845 - RNA, 19 nt, Artificial Sequence
  Description of Artificial Sequence: Synthetic oligonucleotide
ugguuaaugcugacagguc

SEQ ID NO: 2106846 - RNA, 19 nt, Artificial Sequence
  Description of Artificial Sequence: Synthetic oligonucleotide
gaugaagugcaaauuccaa

SEQ ID NO: 2106847 - RNA, 19 nt, Artificial Sequence
  Description of Artificial Sequence: Synthetic oligonucleotide
cacuggaaauucaaaggca

SEQ ID NO: 2106848 - RNA, 19 nt, Artificial Sequence
  Description of Artificial Sequence: Synthetic oligonucleotide
aagccacaagacaccaauc

SEQ ID NO: 2106849 - RNA, 19 nt, Artificial Sequence
  Description of Artificial Sequence: Synthetic oligonucleotide
agucugaacuucucuucca

SEQ ID NO: 2106850 - RNA, 19 nt, Artificial Sequence
  Description of Artificial Sequence: Synthetic oligonucleotide
uucaggggaaagucaggac

SEQ ID NO: 2106851 - RNA, 19 nt, Artificial Sequence
  Description of Artificial Sequence: Synthetic oligonucleotide
caggucacaauuuuguacu

SEQ ID NO: 2106852 - RNA, 19 nt, Artificial Sequence
  Description of Artificial Sequence: Synthetic oligonucleotide
cacccacacccuuagugcc

SEQ ID NO: 2106853 - RNA, 19 nt, Artificial Sequence
  Description of Artificial Sequence: Synthetic oligonucleotide
agcacgcaugcuccggcac

SEQ ID NO: 2106854 - RNA, 19 nt, Artificial Sequence
  Description of Artificial Sequence: Synthetic oligonucleotide
cauuaugcacucuaacaua

SEQ ID NO: 2106855 - RNA, 19 nt, Artificial Sequence
  Description of Artificial Sequence: Synthetic oligonucleotide
ugcaaauuccaaggccacc

SEQ ID NO: 2106856 - RNA, 19 nt, Artificial Sequence
  Description of Artificial Sequence: Synthetic oligonucleotide
uggaucugagucuuaccua

SEQ ID NO: 2106857 - RNA, 19 nt, Artificial Sequence
  Description of Artificial Sequence: Synthetic oligonucleotide
cuccuguucagucugaacu

SEQ ID NO: 2106858 - RNA, 19 nt, Artificial Sequence
  Description of Artificial Sequence: Synthetic oligonucleotide
ccacaagacaccaaucaug

SEQ ID NO: 2106859 - RNA, 19 nt, Artificial Sequence
  Description of Artificial Sequence: Synthetic oligonucleotide
acgugacuuauccuacugu

SEQ ID NO: 2106860 - RNA, 19 nt, Artificial Sequence
  Description of Artificial Sequence: Synthetic oligonucleotide
auaacaagucagcuccaua

SEQ ID NO: 2106861 - RNA, 19 nt, Artificial Sequence
  Description of Artificial Sequence: Synthetic oligonucleotide
auacacgcuauggagugca

SEQ ID NO: 2106862 - RNA, 19 nt, Artificial Sequence
  Description of Artificial Sequence: Synthetic oligonucleotide
uacuaacaaucaacuuaac

SEQ ID NO: 2106863 - RNA, 19 nt, Artificial Sequence
  Description of Artificial Sequence: Synthetic oligonucleotide
gugcuauuuccgaagagca

SEQ ID NO: 2106864 - RNA, 19 nt, Artificial Sequence
  Description of Artificial Sequence: Synthetic oligonucleotide
agcuagaggguuaaauaga

SEQ ID NO: 2106865 - RNA, 19 nt, Artificial Sequence
  Description of Artificial Sequence: Synthetic oligonucleotide
cucauguuuccacaggcaa

SEQ ID NO: 2106866 - RNA, 19 nt, Artificial Sequence
  Description of Artificial Sequence: Synthetic oligonucleotide
aucaacuuaaccacagcuu

SEQ ID NO: 2106867 - RNA, 19 nt, Artificial Sequence
  Description of Artificial Sequence: Synthetic oligonucleotide
uguugccucuguccaguga

SEQ ID NO: 2106868 - RNA, 19 nt, Artificial Sequence
  Description of Artificial Sequence: Synthetic oligonucleotide
cuuccgguucugcuuauuc

SEQ ID NO: 2106869 - RNA, 19 nt, Artificial Sequence
  Description of Artificial Sequence: Synthetic oligonucleotide
agugcacuuccgaaggcag

SEQ ID NO: 2106870 - RNA, 19 nt, Artificial Sequence
  Description of Artificial Sequence: Synthetic oligonucleotide
agggcgagcuucucaaagu

SEQ ID NO: 2106871 - RNA, 19 nt, Artificial Sequence
  Description of Artificial Sequence: Synthetic oligonucleotide
cacgugacuuauccuacug

SEQ ID NO: 2106872 - RNA, 19 nt, Artificial Sequence
  Description of Artificial Sequence: Synthetic oligonucleotide
acgcuauggagugcagccc

SEQ ID NO: 2106873 - RNA, 19 nt, Artificial Sequence
  Description of Artificial Sequence: Synthetic oligonucleotide
uuccccuugagggcgagcu

SEQ ID NO: 2106874 - RNA, 19 nt, Artificial Sequence
  Description of Artificial Sequence: Synthetic oligonucleotide
ugcuccggcacagagcuuc

SEQ ID NO: 2106875 - RNA, 19 nt, Artificial Sequence
  Description of Artificial Sequence: Synthetic oligonucleotide
cagacacuugcacacccac

SEQ ID NO: 2106876 - RNA, 19 nt, Artificial Sequence
  Description of Artificial Sequence: Synthetic oligonucleotide
acaccaaucaugcgucuua

SEQ ID NO: 2106877 - RNA, 19 nt, Artificial Sequence
  Description of Artificial Sequence: Synthetic oligonucleotide
aucaggcgucuguaugggg

SEQ ID NO: 2106878 - RNA, 19 nt, Artificial Sequence
  Description of Artificial Sequence: Synthetic oligonucleotide
gcuauuuccgaagagcaga

SEQ ID NO: 2106879 - RNA, 19 nt, Artificial Sequence
  Description of Artificial Sequence: Synthetic oligonucleotide
gucacuuccgaccuuggcu

SEQ ID NO: 2106880 - RNA, 19 nt, Artificial Sequence
  Description of Artificial Sequence: Synthetic oligonucleotide
agguacagucucauaaaca

SEQ ID NO: 2106881 - RNA, 19 nt, Artificial Sequence
  Description of Artificial Sequence: Synthetic oligonucleotide
ucuccuguucagucugaac

SEQ ID NO: 2106882 - RNA, 19 nt, Artificial Sequence
  Description of Artificial Sequence: Synthetic oligonucleotide
ggggucaaguguaacagug

SEQ ID NO: 2106883 - RNA, 19 nt, Artificial Sequence
  Description of Artificial Sequence: Synthetic oligonucleotide
agcaugguuaaugcugaca

SEQ ID NO: 2106884 - RNA, 19 nt, Artificial Sequence
  Description of Artificial Sequence: Synthetic oligonucleotide
gaaguucagagcgcgccac

SEQ ID NO: 2106885 - RNA, 19 nt, Artificial Sequence
  Description of Artificial Sequence: Synthetic oligonucleotide
gaugucacucuggaucuga

SEQ ID NO: 2106886 - RNA, 19 nt, Artificial Sequence
  Description of Artificial Sequence: Synthetic oligonucleotide
uggcacgcucuugacacag

SEQ ID NO: 2106887 - RNA, 19 nt, Artificial Sequence
  Description of Artificial Sequence: Synthetic oligonucleotide
caugcuccggcacagagcu

SEQ ID NO: 2106888 - RNA, 19 nt, Artificial Sequence
  Description of Artificial Sequence: Synthetic oligonucleotide
gagaacuguugccucuguc

SEQ ID NO: 2106889 - RNA, 19 nt, Artificial Sequence
  Description of Artificial Sequence: Synthetic oligonucleotide
caacuuaaccacagcuuga

SEQ ID NO: 2106890 - RNA, 19 nt, Artificial Sequence
  Description of Artificial Sequence: Synthetic oligonucleotide
acuuccgaccuuggcugcc

SEQ ID NO: 2106891 - RNA, 19 nt, Artificial Sequence
  Description of Artificial Sequence: Synthetic oligonucleotide
gcaggaaguucagagcgcg

SEQ ID NO: 2106892 - RNA, 19 nt, Artificial Sequence
  Description of Artificial Sequence: Synthetic oligonucleotide
ucucauaaacagugcuauu

SEQ ID NO: 2106893 - RNA, 19 nt, Artificial Sequence
  Description of Artificial Sequence: Synthetic oligonucleotide
gcaaaagccacaagacacc

SEQ ID NO: 2106894 - RNA, 19 nt, Artificial Sequence
  Description of Artificial Sequence: Synthetic oligonucleotide
cucuggaucugagucuuac

SEQ ID NO: 2106895 - RNA, 19 nt, Artificial Sequence
  Description of Artificial Sequence: Synthetic oligonucleotide
ugcugacaggucacaauuu

SEQ ID NO: 2106896 - RNA, 19 nt, Artificial Sequence
  Description of Artificial Sequence: Synthetic oligonucleotide
uacacgcuauggagugcag

SEQ ID NO: 2106897 - RNA, 19 nt, Artificial Sequence
  Description of Artificial Sequence: Synthetic oligonucleotide
acgcgcucauuaugcacuc

SEQ ID NO: 2106898 - RNA, 19 nt, Artificial Sequence
  Description of Artificial Sequence: Synthetic oligonucleotide
gcacgcucuugacacaggg

SEQ ID NO: 2106899 - RNA, 19 nt, Artificial Sequence
  Description of Artificial Sequence: Synthetic oligonucleotide
cugcacgugacuuauccua

SEQ ID NO: 2106900 - RNA, 19 nt, Artificial Sequence
  Description of Artificial Sequence: Synthetic oligonucleotide
ggaacucuggaucaggcgu

SEQ ID NO: 2106901 - RNA, 19 nt, Artificial Sequence
  Description of Artificial Sequence: Synthetic oligonucleotide
gcucauuaugcacucuaac

SEQ ID NO: 2106902 - RNA, 19 nt, Artificial Sequence
  Description of Artificial Sequence: Synthetic oligonucleotide
ccagggaaagugcacuucc

SEQ ID NO: 2106903 - RNA, 19 nt, Artificial Sequence
  Description of Artificial Sequence: Synthetic oligonucleotide
cagugcuauuuccgaagag

SEQ ID NO: 2106904 - RNA, 19 nt, Artificial Sequence
  Description of Artificial Sequence: Synthetic oligonucleotide
gaacucuggaucaggcguc

SEQ ID NO: 2106905 - RNA, 19 nt, Artificial Sequence
  Description of Artificial Sequence: Synthetic oligonucleotide
gugggcuccucaaagccgc

SEQ ID NO: 2106906 - RNA, 19 nt, Artificial Sequence
  Description of Artificial Sequence: Synthetic oligonucleotide
uauggagugcagcccucau

SEQ ID NO: 2106907 - RNA, 19 nt, Artificial Sequence
  Description of Artificial Sequence: Synthetic oligonucleotide
ucaugcucuggcagaugaa

SEQ ID NO: 2106908 - RNA, 19 nt, Artificial Sequence
  Description of Artificial Sequence: Synthetic oligonucleotide
cagaugcuugacgucgugc

SEQ ID NO: 2106909 - RNA, 19 nt, Artificial Sequence
  Description of Artificial Sequence: Synthetic oligonucleotide
cagugaguggcagguacag

SEQ ID NO: 2106910 - RNA, 19 nt, Artificial Sequence
  Description of Artificial Sequence: Synthetic oligonucleotide
caacagcacgcaugcuccg

SEQ ID NO: 2106911 - RNA, 19 nt, Artificial Sequence
  Description of Artificial Sequence: Synthetic oligonucleotide
uauuuccgaagagcagaga

SEQ ID NO: 2106912 - RNA, 19 nt, Artificial Sequence
  Description of Artificial Sequence: Synthetic oligonucleotide
agagcgcgccacucugcac

SEQ ID NO: 2106913 - RNA, 19 nt, Artificial Sequence
  Description of Artificial Sequence: Synthetic oligonucleotide
ucucuccuguucagucuga

SEQ ID NO: 2106914 - RNA, 19 nt, Artificial Sequence
  Description of Artificial Sequence: Synthetic oligonucleotide
cucuaacauagagcacagg

SEQ ID NO: 2106915 - RNA, 19 nt, Artificial Sequence
  Description of Artificial Sequence: Synthetic oligonucleotide
gucucauaaacagugcuau

SEQ ID NO: 2106916 - RNA, 19 nt, Artificial Sequence
  Description of Artificial Sequence: Synthetic oligonucleotide
caggaaguucagagcgcgc

SEQ ID NO: 2106917 - RNA, 19 nt, Artificial Sequence
  Description of Artificial Sequence: Synthetic oligonucleotide
gcugccaacagcacgcaug

SEQ ID NO: 2106918 - RNA, 19 nt, Artificial Sequence
  Description of Artificial Sequence: Synthetic oligonucleotide
uccuacuguugagaacugu

SEQ ID NO: 2106919 - RNA, 19 nt, Artificial Sequence
  Description of Artificial Sequence: Synthetic oligonucleotide
auagaagcccgugguguga

SEQ ID NO: 2106920 - RNA, 19 nt, Artificial Sequence
  Description of Artificial Sequence: Synthetic oligonucleotide
aggggaaagucaggacccg

SEQ ID NO: 2106921 - RNA, 19 nt, Artificial Sequence
  Description of Artificial Sequence: Synthetic oligonucleotide
ggugggcuccucaaagccg

SEQ ID NO: 2106922 - RNA, 19 nt, Artificial Sequence
  Description of Artificial Sequence: Synthetic oligonucleotide
caggugacagcaugguuaa

SEQ ID NO: 2106923 - RNA, 19 nt, Artificial Sequence
  Description of Artificial Sequence: Synthetic oligonucleotide
agacaccaaucaugcgucu

SEQ ID NO: 2106924 - RNA, 19 nt, Artificial Sequence
  Description of Artificial Sequence: Synthetic oligonucleotide
aggggugcuaggaacucug

SEQ ID NO: 2106925 - RNA, 19 nt, Artificial Sequence
  Description of Artificial Sequence: Synthetic oligonucleotide
cauagagcacaggaauaca

SEQ ID NO: 2106926 - RNA, 19 nt, Artificial Sequence
  Description of Artificial Sequence: Synthetic oligonucleotide
caccaaucaugcgucuuac

SEQ ID NO: 2106927 - RNA, 19 nt, Artificial Sequence
  Description of Artificial Sequence: Synthetic oligonucleotide
cugaacuucucuuccaguu

SEQ ID NO: 2106928 - RNA, 19 nt, Artificial Sequence
  Description of Artificial Sequence: Synthetic oligonucleotide
caaagccgcaguccuccug

SEQ ID NO: 2106929 - RNA, 19 nt, Artificial Sequence
  Description of Artificial Sequence: Synthetic oligonucleotide
cacagcuugaaauguaguu

SEQ ID NO: 2106930 - RNA, 19 nt, Artificial Sequence
  Description of Artificial Sequence: Synthetic oligonucleotide
augcuugacgucgugcuuu

SEQ ID NO: 2106931 - RNA, 19 nt, Artificial Sequence
  Description of Artificial Sequence: Synthetic oligonucleotide
gugcaaauuccaaggccac

SEQ ID NO: 2106932 - RNA, 19 nt, Artificial Sequence
  Description of Artificial Sequence: Synthetic oligonucleotide
cacuuccgaccuuggcugc

SEQ ID NO: 2106933 - RNA, 19 nt, Artificial Sequence
  Description of Artificial Sequence: Synthetic oligonucleotide
cacacccuuagugcccagg

SEQ ID NO: 2106934 - RNA, 19 nt, Artificial Sequence
  Description of Artificial Sequence: Synthetic oligonucleotide
cugggcaagcuuccgcauc

SEQ ID NO: 2106935 - RNA, 19 nt, Artificial Sequence
  Description of Artificial Sequence: Synthetic oligonucleotide
gugcuugccacaaggccac

SEQ ID NO: 2106936 - RNA, 19 nt, Artificial Sequence
  Description of Artificial Sequence: Synthetic oligonucleotide
aggucacaauuuuguacua

SEQ ID NO: 2106937 - RNA, 19 nt, Artificial Sequence
  Description of Artificial Sequence: Synthetic oligonucleotide
agcuugaaauguaguuugu

SEQ ID NO: 2106938 - RNA, 19 nt, Artificial Sequence
  Description of Artificial Sequence: Synthetic oligonucleotide
uuggcacgcucuugacaca

SEQ ID NO: 2106939 - RNA, 19 nt, Artificial Sequence
  Description of Artificial Sequence: Synthetic oligonucleotide
uccgaagagcagagauguc

SEQ ID NO: 2106940 - RNA, 19 nt, Artificial Sequence
  Description of Artificial Sequence: Synthetic oligonucleotide
caauaaacgcgcucauuau

SEQ ID NO: 2106941 - RNA, 19 nt, Artificial Sequence
  Description of Artificial Sequence: Synthetic oligonucleotide
cacgcaugcuccggcacag

SEQ ID NO: 2106942 - RNA, 19 nt, Artificial Sequence
  Description of Artificial Sequence: Synthetic oligonucleotide
acuugcacacccacacccu

SEQ ID NO: 2106943 - RNA, 19 nt, Artificial Sequence
  Description of Artificial Sequence: Synthetic oligonucleotide
gaucugagucuuaccuaga

SEQ ID NO: 2106944 - RNA, 19 nt, Artificial Sequence
  Description of Artificial Sequence: Synthetic oligonucleotide
ggucacuuccgaccuuggc

SEQ ID NO: 2106945 - RNA, 19 nt, Artificial Sequence
  Description of Artificial Sequence: Synthetic oligonucleotide
ggaauacacgcuauggagu

SEQ ID NO: 2106946 - RNA, 19 nt, Artificial Sequence
  Description of Artificial Sequence: Synthetic oligonucleotide
gcuugaaauguaguuuguc

SEQ ID NO: 2106947 - RNA, 19 nt, Artificial Sequence
  Description of Artificial Sequence: Synthetic oligonucleotide
ugagggcgagcuucucaaa

SEQ ID NO: 2106948 - RNA, 19 nt, Artificial Sequence
  Description of Artificial Sequence: Synthetic oligonucleotide
gggucaaguguaacagugc

SEQ ID NO: 2106949 - RNA, 19 nt, Artificial Sequence
  Description of Artificial Sequence: Synthetic oligonucleotide
ggaaguucagagcgcgcca

SEQ ID NO: 2106950 - RNA, 19 nt, Artificial Sequence
  Description of Artificial Sequence: Synthetic oligonucleotide
ugcuugacgucgugcuuuu

SEQ ID NO: 2106951 - RNA, 19 nt, Artificial Sequence
  Description of Artificial Sequence: Synthetic oligonucleotide
agugaguggcagguacagu

SEQ ID NO: 2106952 - RNA, 19 nt, Artificial Sequence
  Description of Artificial Sequence: Synthetic oligonucleotide
gcagcccucauguuuccac

SEQ ID NO: 2106953 - RNA, 19 nt, Artificial Sequence
  Description of Artificial Sequence: Synthetic oligonucleotide
ccuguauaacuaccaggug

SEQ ID NO: 2106954 - RNA, 19 nt, Artificial Sequence
  Description of Artificial Sequence: Synthetic oligonucleotide
aucagaugcuugacgucgu

SEQ ID NO: 2106955 - RNA, 19 nt, Artificial Sequence
  Description of Artificial Sequence: Synthetic oligonucleotide
gcgagcuucucaaaguaga

SEQ ID NO: 2106956 - RNA, 19 nt, Artificial Sequence
  Description of Artificial Sequence: Synthetic oligonucleotide
ggcgagcuucucaaaguag

SEQ ID NO: 2106957 - RNA, 19 nt, Artificial Sequence
  Description of Artificial Sequence: Synthetic oligonucleotide
guauaacuaccaggugaca

SEQ ID NO: 2106958 - RNA, 19 nt, Artificial Sequence
  Description of Artificial Sequence: Synthetic oligonucleotide
guaguuugucccagcugca

SEQ ID NO: 2106959 - RNA, 19 nt, Artificial Sequence
  Description of Artificial Sequence: Synthetic oligonucleotide
gcuaggaacucuggaucag

SEQ ID NO: 2106960 - RNA, 19 nt, Artificial Sequence
  Description of Artificial Sequence: Synthetic oligonucleotide
cauggccacggugggcucc

SEQ ID NO: 2106961 - RNA, 19 nt, Artificial Sequence
  Description of Artificial Sequence: Synthetic oligonucleotide
cacgcucuugacacaggga

SEQ ID NO: 2106962 - RNA, 19 nt, Artificial Sequence
  Description of Artificial Sequence: Synthetic oligonucleotide
aggcaagagcuagaggguu

SEQ ID NO: 2106963 - RNA, 19 nt, Artificial Sequence
  Description of Artificial Sequence: Synthetic oligonucleotide
uccgaccuuggcugccaac

SEQ ID NO: 2106964 - RNA, 19 nt, Artificial Sequence
  Description of Artificial Sequence: Synthetic oligonucleotide
ugacggcaggaaguucaga

SEQ ID NO: 2106965 - RNA, 19 nt, Artificial Sequence
  Description of Artificial Sequence: Synthetic oligonucleotide
gagcacaggaauacacgcu

SEQ ID NO: 2106966 - RNA, 19 nt, Artificial Sequence
  Description of Artificial Sequence: Synthetic oligonucleotide
agugccucucagacacuug

SEQ ID NO: 2106967 - RNA, 19 nt, Artificial Sequence
  Description of Artificial Sequence: Synthetic oligonucleotide
ccucucagacacuugcaca

SEQ ID NO: 2106968 - RNA, 19 nt, Artificial Sequence
  Description of Artificial Sequence: Synthetic oligonucleotide
agcgcgccacucugcacgu

SEQ ID NO: 2106969 - RNA, 19 nt, Artificial Sequence
  Description of Artificial Sequence: Synthetic oligonucleotide
ccgcaucucucucuucagg

SEQ ID NO: 2106970 - RNA, 19 nt, Artificial Sequence
  Description of Artificial Sequence: Synthetic oligonucleotide
aacuaccaggugacagcau

SEQ ID NO: 2106971 - RNA, 19 nt, Artificial Sequence
  Description of Artificial Sequence: Synthetic oligonucleotide
caggcaagagcuagagggu

SEQ ID NO: 2106972 - RNA, 19 nt, Artificial Sequence
  Description of Artificial Sequence: Synthetic oligonucleotide
cuauggagugcagcccuca

SEQ ID NO: 2106973 - RNA, 19 nt, Artificial Sequence
  Description of Artificial Sequence: Synthetic oligonucleotide
gaugcuugacgucgugcuu

SEQ ID NO: 2106974 - RNA, 19 nt, Artificial Sequence
  Description of Artificial Sequence: Synthetic oligonucleotide
cuuccgcaucucucucuuc

SEQ ID NO: 2106975 - RNA, 19 nt, Artificial Sequence
  Description of Artificial Sequence: Synthetic oligonucleotide
auccuacuguugagaacug

SEQ ID NO: 2106976 - RNA, 19 nt, Artificial Sequence
  Description of Artificial Sequence: Synthetic oligonucleotide
uuuccccuugagggcgagc

SEQ ID NO: 2106977 - RNA, 19 nt, Artificial Sequence
  Description of Artificial Sequence: Synthetic oligonucleotide
cagagcgcgccacucugca

SEQ ID NO: 2106978 - RNA, 19 nt, Artificial Sequence
  Description of Artificial Sequence: Synthetic oligonucleotide
uuccgaccuuggcugccaa

SEQ ID NO: 2106979 - RNA, 19 nt, Artificial Sequence
  Description of Artificial Sequence: Synthetic oligonucleotide
cacccuuagugcccaggga

SEQ ID NO: 2106980 - RNA, 19 nt, Artificial Sequence
  Description of Artificial Sequence: Synthetic oligonucleotide
ggggaaagucaggacccgc

SEQ ID NO: 2106981 - RNA, 19 nt, Artificial Sequence
  Description of Artificial Sequence: Synthetic oligonucleotide
caaguguaacagugccucu

SEQ ID NO: 2106982 - RNA, 19 nt, Artificial Sequence
  Description of Artificial Sequence: Synthetic oligonucleotide
acuuccgaaggcagauaua

SEQ ID NO: 2106983 - RNA, 19 nt, Artificial Sequence
  Description of Artificial Sequence: Synthetic oligonucleotide
uggcugccaacagcacgca

SEQ ID NO: 2106984 - RNA, 19 nt, Artificial Sequence
  Description of Artificial Sequence: Synthetic oligonucleotide
guuuccccuugagggcgag

SEQ ID NO: 2106985 - RNA, 19 nt, Artificial Sequence
  Description of Artificial Sequence: Synthetic oligonucleotide
gggcgagcuucucaaagua

SEQ ID NO: 2106986 - RNA, 19 nt, Artificial Sequence
  Description of Artificial Sequence: Synthetic oligonucleotide
cuccggcacagagcuuccg

SEQ ID NO: 2106987 - RNA, 19 nt, Artificial Sequence
  Description of Artificial Sequence: Synthetic oligonucleotide
gucuuaccuagaaaaucau

SEQ ID NO: 2106988 - RNA, 19 nt, Artificial Sequence
  Description of Artificial Sequence: Synthetic oligonucleotide
aguuuccccuugagggcga

SEQ ID NO: 2106989 - RNA, 19 nt, Artificial Sequence
  Description of Artificial Sequence: Synthetic oligonucleotide
gcgcucauuaugcacucua

SEQ ID NO: 2106990 - RNA, 19 nt, Artificial Sequence
  Description of Artificial Sequence: Synthetic oligonucleotide
gcaagagcuagaggguuaa

SEQ ID NO: 2106991 - RNA, 19 nt, Artificial Sequence
  Description of Artificial Sequence: Synthetic oligonucleotide
gggagaggggugcuaggaa

SEQ ID NO: 2106992 - RNA, 19 nt, Artificial Sequence
  Description of Artificial Sequence: Synthetic oligonucleotide
cagcacgcaugcuccggca

SEQ ID NO: 2106993 - RNA, 19 nt, Artificial Sequence
  Description of Artificial Sequence: Synthetic oligonucleotide
gacaccaaucaugcgucuu

SEQ ID NO: 2106994 - RNA, 19 nt, Artificial Sequence
  Description of Artificial Sequence: Synthetic oligonucleotide
ugccaacagcacgcaugcu

SEQ ID NO: 2106995 - RNA, 19 nt, Artificial Sequence
  Description of Artificial Sequence: Synthetic oligonucleotide
cuuccgaccuuggcugcca

SEQ ID NO: 2106996 - RNA, 19 nt, Artificial Sequence
  Description of Artificial Sequence: Synthetic oligonucleotide
cccguggugugacggcagg

SEQ ID NO: 2106997 - RNA, 19 nt, Artificial Sequence
  Description of Artificial Sequence: Synthetic oligonucleotide
ggcacgcucuugacacagg

SEQ ID NO: 2106998 - RNA, 19 nt, Artificial Sequence
  Description of Artificial Sequence: Synthetic oligonucleotide
gaggggugcuaggaacucu

SEQ ID NO: 2106999 - RNA, 19 nt, Artificial Sequence
  Description of Artificial Sequence: Synthetic oligonucleotide
gcacucuaacauagagcac

SEQ ID NO: 2107000 - RNA, 19 nt, Artificial Sequence
  Description of Artificial Sequence: Synthetic oligonucleotide
ccgaccuuggcugccaaca

SEQ ID NO: 2107001 - RNA, 19 nt, Artificial Sequence
  Description of Artificial Sequence: Synthetic oligonucleotide
gggaaagucaggacccgcu

SEQ ID NO: 2107002 - RNA, 19 nt, Artificial Sequence
  Description of Artificial Sequence: Synthetic oligonucleotide
gugugacggcaggaaguuc

SEQ ID NO: 2107003 - RNA, 19 nt, Artificial Sequence
  Description of Artificial Sequence: Synthetic oligonucleotide
cuugcacacccacacccuu

SEQ ID NO: 2107004 - RNA, 19 nt, Artificial Sequence
  Description of Artificial Sequence: Synthetic oligonucleotide
cacucugcacgugacuuau

SEQ ID NO: 2107005 - RNA, 19 nt, Artificial Sequence
  Description of Artificial Sequence: Synthetic oligonucleotide
ggcaagagcuagaggguua

SEQ ID NO: 2107006 - RNA, 19 nt, Artificial Sequence
  Description of Artificial Sequence: Synthetic oligonucleotide
guggcagguacagucucau

SEQ ID NO: 2107007 - RNA, 19 nt, Artificial Sequence
  Description of Artificial Sequence: Synthetic oligonucleotide
ggcaagcuuccgcaucucu

SEQ ID NO: 2107008 - RNA, 19 nt, Artificial Sequence
  Description of Artificial Sequence: Synthetic oligonucleotide
gccacggugggcuccucaa

SEQ ID NO: 2107009 - RNA, 19 nt, Artificial Sequence
  Description of Artificial Sequence: Synthetic oligonucleotide
cccuuagugcccagggaaa

SEQ ID NO: 2107010 - RNA, 19 nt, Artificial Sequence
  Description of Artificial Sequence: Synthetic oligonucleotide
ugcuugccacaaggccacu

SEQ ID NO: 2107011 - RNA, 19 nt, Artificial Sequence
  Description of Artificial Sequence: Synthetic oligonucleotide
cccagggaaagugcacuuc

SEQ ID NO: 2107012 - RNA, 19 nt, Artificial Sequence
  Description of Artificial Sequence: Synthetic oligonucleotide
gcuauggagugcagcccuc

SEQ ID NO: 2107013 - RNA, 19 nt, Artificial Sequence
  Description of Artificial Sequence: Synthetic oligonucleotide
ggugugacggcaggaaguu

SEQ ID NO: 2107014 - RNA, 19 nt, Artificial Sequence
  Description of Artificial Sequence: Synthetic oligonucleotide
ccccaauacagacuuuuau

SEQ ID NO: 2107015 - RNA, 19 nt, Artificial Sequence
  Description of Artificial Sequence: Synthetic oligonucleotide
gcacgugacuuauccuacu

SEQ ID NO: 2107016 - RNA, 19 nt, Artificial Sequence
  Description of Artificial Sequence: Synthetic oligonucleotide
ccacagcuugaaauguagu

SEQ ID NO: 2107017 - RNA, 19 nt, Artificial Sequence
  Description of Artificial Sequence: Synthetic oligonucleotide
acgcaugcuccggcacaga

SEQ ID NO: 2107018 - RNA, 19 nt, Artificial Sequence
  Description of Artificial Sequence: Synthetic oligonucleotide
aggugacagcaugguuaau

SEQ ID NO: 2107019 - RNA, 19 nt, Artificial Sequence
  Description of Artificial Sequence: Synthetic oligonucleotide
cgcucauuaugcacucuaa

SEQ ID NO: 2107020 - RNA, 19 nt, Artificial Sequence
  Description of Artificial Sequence: Synthetic oligonucleotide
ggccacggugggcuccuca

SEQ ID NO: 2107021 - RNA, 19 nt, Artificial Sequence
  Description of Artificial Sequence: Synthetic oligonucleotide
gcuccggcacagagcuucc

SEQ ID NO: 2107022 - RNA, 19 nt, Artificial Sequence
  Description of Artificial Sequence: Synthetic oligonucleotide
cacagggagaggggugcua

SEQ ID NO: 2107023 - RNA, 19 nt, Artificial Sequence
  Description of Artificial Sequence: Synthetic oligonucleotide
cagugccucucagacacuu

SEQ ID NO: 2107024 - RNA, 19 nt, Artificial Sequence
  Description of Artificial Sequence: Synthetic oligonucleotide
cgcgccacucugcacguga

SEQ ID NO: 2107025 - RNA, 19 nt, Artificial Sequence
  Description of Artificial Sequence: Synthetic oligonucleotide
cgcuauggagugcagcccu

SEQ ID NO: 2107026 - RNA, 19 nt, Artificial Sequence
  Description of Artificial Sequence: Synthetic oligonucleotide
cguggugugacggcaggaa

SEQ ID NO: 2107027 - RNA, 19 nt, Artificial Sequence
  Description of Artificial Sequence: Synthetic oligonucleotide
ccggcacagagcuuccggu

SEQ ID NO: 2107028 - RNA, 19 nt, Artificial Sequence
  Description of Artificial Sequence: Synthetic oligonucleotide
caaaggccauggccacggu

SEQ ID NO: 2107029 - RNA, 19 nt, Artificial Sequence
  Description of Artificial Sequence: Synthetic oligonucleotide
ccacacccuuagugcccag

SEQ ID NO: 2107030 - RNA, 19 nt, Artificial Sequence
  Description of Artificial Sequence: Synthetic oligonucleotide
ccauggccacggugggcuc

SEQ ID NO: 2107031 - RNA, 19 nt, Artificial Sequence
  Description of Artificial Sequence: Synthetic oligonucleotide
ccacggugggcuccucaaa

SEQ ID NO: 2107032 - RNA, 19 nt, Artificial Sequence
  Description of Artificial Sequence: Synthetic oligonucleotide
ggcugccaacagcacgcau

SEQ ID NO: 2107033 - RNA, 19 nt, Artificial Sequence
  Description of Artificial Sequence: Synthetic oligonucleotide
augcuccggcacagagcuu

SEQ ID NO: 2107034 - RNA, 19 nt, Artificial Sequence
  Description of Artificial Sequence: Synthetic oligonucleotide
ccguggugugacggcagga

SEQ ID NO: 2107035 - RNA, 19 nt, Artificial Sequence
  Description of Artificial Sequence: Synthetic oligonucleotide
gcgcgccacucugcacgug

SEQ ID NO: 2107036 - RNA, 19 nt, Artificial Sequence
  Description of Artificial Sequence: Synthetic oligonucleotide
cgcgcucauuaugcacucu

SEQ ID NO: 2107037 - RNA, 19 nt, Artificial Sequence
  Description of Artificial Sequence: Synthetic oligonucleotide
aaagugaugaugcugacgu

SEQ ID NO: 2107038 - RNA, 19 nt, Artificial Sequence
  Description of Artificial Sequence: Synthetic oligonucleotide
aaggggauguaccacaugg

SEQ ID NO: 2107039 - RNA, 19 nt, Artificial Sequence
  Description of Artificial Sequence: Synthetic oligonucleotide
ugacguagauuauagaccg

SEQ ID NO: 2107040 - RNA, 19 nt, Artificial Sequence
  Description of Artificial Sequence: Synthetic oligonucleotide
aaaggaauagaagaggaag

SEQ ID NO: 2107041 - RNA, 19 nt, Artificial Sequence
  Description of Artificial Sequence: Synthetic oligonucleotide
aagagaaugaagaucuggc

SEQ ID NO: 2107042 - RNA, 19 nt, Artificial Sequence
  Description of Artificial Sequence: Synthetic oligonucleotide
gaauagaagaggaagaggc

SEQ ID NO: 2107043 - RNA, 19 nt, Artificial Sequence
  Description of Artificial Sequence: Synthetic oligonucleotide
agaaucacccaccaggugg

SEQ ID NO: 2107044 - RNA, 19 nt, Artificial Sequence
  Description of Artificial Sequence: Synthetic oligonucleotide
augaugaaagugaugaugc

SEQ ID NO: 2107045 - RNA, 19 nt, Artificial Sequence
  Description of Artificial Sequence: Synthetic oligonucleotide
guagauuauagaccgaggc

SEQ ID NO: 2107046 - RNA, 19 nt, Artificial Sequence
  Description of Artificial Sequence: Synthetic oligonucleotide
aauguccauggccuauugc

SEQ ID NO: 2107047 - RNA, 19 nt, Artificial Sequence
  Description of Artificial Sequence: Synthetic oligonucleotide
agauuauagaccgaggcag

SEQ ID NO: 2107048 - RNA, 19 nt, Artificial Sequence
  Description of Artificial Sequence: Synthetic oligonucleotide
augggguucucucugacgg

SEQ ID NO: 2107049 - RNA, 19 nt, Artificial Sequence
  Description of Artificial Sequence: Synthetic oligonucleotide
cugacguagauuauagacc

SEQ ID NO: 2107050 - RNA, 19 nt, Artificial Sequence
  Description of Artificial Sequence: Synthetic oligonucleotide
accacgggugcacauaugc

SEQ ID NO: 2107051 - RNA, 19 nt, Artificial Sequence
  Description of Artificial Sequence: Synthetic oligonucleotide
uagauuauagaccgaggca

SEQ ID NO: 2107052 - RNA, 19 nt, Artificial Sequence
  Description of Artificial Sequence: Synthetic oligonucleotide
uggcauguggcucucagcc

SEQ ID NO: 2107053 - RNA, 19 nt, Artificial Sequence
  Description of Artificial Sequence: Synthetic oligonucleotide
uacaggaucauuccacagc

SEQ ID NO: 2107054 - RNA, 19 nt, Artificial Sequence
  Description of Artificial Sequence: Synthetic oligonucleotide
ugagaggaaaccacuggag

SEQ ID NO: 2107055 - RNA, 19 nt, Artificial Sequence
  Description of Artificial Sequence: Synthetic oligonucleotide
aaguacaugaagaggauga

SEQ ID NO: 2107056 - RNA, 19 nt, Artificial Sequence
  Description of Artificial Sequence: Synthetic oligonucleotide
ucggccaaaguccaggacc

SEQ ID NO: 2107057 - RNA, 19 nt, Artificial Sequence
  Description of Artificial Sequence: Synthetic oligonucleotide
ucaacaaugcgcucugccc

SEQ ID NO: 2107058 - RNA, 19 nt, Artificial Sequence
  Description of Artificial Sequence: Synthetic oligonucleotide
aguggaagggagcugugcg

SEQ ID NO: 2107059 - RNA, 19 nt, Artificial Sequence
  Description of Artificial Sequence: Synthetic oligonucleotide
aguacagaccacugggcac

SEQ ID NO: 2107060 - RNA, 19 nt, Artificial Sequence
  Description of Artificial Sequence: Synthetic oligonucleotide
cucucugacggacaggugg

SEQ ID NO: 2107061 - RNA, 19 nt, Artificial Sequence
  Description of Artificial Sequence: Synthetic oligonucleotide
ggcgugaugacauuguagg

SEQ ID NO: 2107062 - RNA, 19 nt, Artificial Sequence
  Description of Artificial Sequence: Synthetic oligonucleotide
uugagaggaaaccacugga

SEQ ID NO: 2107063 - RNA, 19 nt, Artificial Sequence
  Description of Artificial Sequence: Synthetic oligonucleotide
cacccuugcacaaaugucc

SEQ ID NO: 2107064 - RNA, 19 nt, Artificial Sequence
  Description of Artificial Sequence: Synthetic oligonucleotide
ggauguaccacauggagug

SEQ ID NO: 2107065 - RNA, 19 nt, Artificial Sequence
  Description of Artificial Sequence: Synthetic oligonucleotide
uucuggugcaagacgagag

SEQ ID NO: 2107066 - RNA, 19 nt, Artificial Sequence
  Description of Artificial Sequence: Synthetic oligonucleotide
auaguaguacagcagcuca

SEQ ID NO: 2107067 - RNA, 19 nt, Artificial Sequence
  Description of Artificial Sequence: Synthetic oligonucleotide
guaccaguaguacagacca

SEQ ID NO: 2107068 - RNA, 19 nt, Artificial Sequence
  Description of Artificial Sequence: Synthetic oligonucleotide
gaucauuccacagccaagc

SEQ ID NO: 2107069 - RNA, 19 nt, Artificial Sequence
  Description of Artificial Sequence: Synthetic oligonucleotide
acauagaugacaccagggu

SEQ ID NO: 2107070 - RNA, 19 nt, Artificial Sequence
  Description of Artificial Sequence: Synthetic oligonucleotide
gaggaaaccacuggagugg

SEQ ID NO: 2107071 - RNA, 19 nt, Artificial Sequence
  Description of Artificial Sequence: Synthetic oligonucleotide
agugaugaugcugacguag

SEQ ID NO: 2107072 - RNA, 19 nt, Artificial Sequence
  Description of Artificial Sequence: Synthetic oligonucleotide
uccacauuaccacgggugc

SEQ ID NO: 2107073 - RNA, 19 nt, Artificial Sequence
  Description of Artificial Sequence: Synthetic oligonucleotide
ucgucauaguaguacagca

SEQ ID NO: 2107074 - RNA, 19 nt, Artificial Sequence
  Description of Artificial Sequence: Synthetic oligonucleotide
caacaaugcgcucugcccg

SEQ ID NO: 2107075 - RNA, 19 nt, Artificial Sequence
  Description of Artificial Sequence: Synthetic oligonucleotide
uggagugggaacaccaaca

SEQ ID NO: 2107076 - RNA, 19 nt, Artificial Sequence
  Description of Artificial Sequence: Synthetic oligonucleotide
ucuuucaacaaugcgcucu

SEQ ID NO: 2107077 - RNA, 19 nt, Artificial Sequence
  Description of Artificial Sequence: Synthetic oligonucleotide
agugucucuggcuugagau

SEQ ID NO: 2107078 - RNA, 19 nt, Artificial Sequence
  Description of Artificial Sequence: Synthetic oligonucleotide
gaaagugaugaugcugacg

SEQ ID NO: 2107079 - RNA, 19 nt, Artificial Sequence
  Description of Artificial Sequence: Synthetic oligonucleotide
ugagauucuugaugauggg

SEQ ID NO: 2107080 - RNA, 19 nt, Artificial Sequence
  Description of Artificial Sequence: Synthetic oligonucleotide
gagucaaucagugucucug

SEQ ID NO: 2107081 - RNA, 19 nt, Artificial Sequence
  Description of Artificial Sequence: Synthetic oligonucleotide
cacugaaguacaugaagag

SEQ ID NO: 2107082 - RNA, 19 nt, Artificial Sequence
  Description of Artificial Sequence: Synthetic oligonucleotide
aggaauagaagaggaagag

SEQ ID NO: 2107083 - RNA, 19 nt, Artificial Sequence
  Description of Artificial Sequence: Synthetic oligonucleotide
ucauaguaguacagcagcu

SEQ ID NO: 2107084 - RNA, 19 nt, Artificial Sequence
  Description of Artificial Sequence: Synthetic oligonucleotide
gcugacguagauuauagac

SEQ ID NO: 2107085 - RNA, 19 nt, Artificial Sequence
  Description of Artificial Sequence: Synthetic oligonucleotide
agucaaucagugucucugg

SEQ ID NO: 2107086 - RNA, 19 nt, Artificial Sequence
  Description of Artificial Sequence: Synthetic oligonucleotide
ugugcacaugcacagucca

SEQ ID NO: 2107087 - RNA, 19 nt, Artificial Sequence
  Description of Artificial Sequence: Synthetic oligonucleotide
ugacugcugacauggagug

SEQ ID NO: 2107088 - RNA, 19 nt, Artificial Sequence
  Description of Artificial Sequence: Synthetic oligonucleotide
augaaagugaugaugcuga

SEQ ID NO: 2107089 - RNA, 19 nt, Artificial Sequence
  Description of Artificial Sequence: Synthetic oligonucleotide
agcucaaaggagucaauca

SEQ ID NO: 2107090 - RNA, 19 nt, Artificial Sequence
  Description of Artificial Sequence: Synthetic oligonucleotide
acugggcaccaccaggagc

SEQ ID NO: 2107091 - RNA, 19 nt, Artificial Sequence
  Description of Artificial Sequence: Synthetic oligonucleotide
ucuggugcaagacgagagc

SEQ ID NO: 2107092 - RNA, 19 nt, Artificial Sequence
  Description of Artificial Sequence: Synthetic oligonucleotide
cauggaguguguagaaggc

SEQ ID NO: 2107093 - RNA, 19 nt, Artificial Sequence
  Description of Artificial Sequence: Synthetic oligonucleotide
guguguagaaggcccaggg

SEQ ID NO: 2107094 - RNA, 19 nt, Artificial Sequence
  Description of Artificial Sequence: Synthetic oligonucleotide
auuauagaccgaggcagcg

SEQ ID NO: 2107095 - RNA, 19 nt, Artificial Sequence
  Description of Artificial Sequence: Synthetic oligonucleotide
uguguagaaggcccagggc

SEQ ID NO: 2107096 - RNA, 19 nt, Artificial Sequence
  Description of Artificial Sequence: Synthetic oligonucleotide
aguacaggaucauuccaca

SEQ ID NO: 2107097 - RNA, 19 nt, Artificial Sequence
  Description of Artificial Sequence: Synthetic oligonucleotide
ucaaucagugucucuggcu

SEQ ID NO: 2107098 - RNA, 19 nt, Artificial Sequence
  Description of Artificial Sequence: Synthetic oligonucleotide
ugcacauaugcacccuugc

SEQ ID NO: 2107099 - RNA, 19 nt, Artificial Sequence
  Description of Artificial Sequence: Synthetic oligonucleotide
agauucuugaugauggggu

SEQ ID NO: 2107100 - RNA, 19 nt, Artificial Sequence
  Description of Artificial Sequence: Synthetic oligonucleotide
acgaacguggcgccggggc

SEQ ID NO: 2107101 - RNA, 19 nt, Artificial Sequence
  Description of Artificial Sequence: Synthetic oligonucleotide
ugugcggucugucuccuca

SEQ ID NO: 2107102 - RNA, 19 nt, Artificial Sequence
  Description of Artificial Sequence: Synthetic oligonucleotide
agguaccaguaguacagac

SEQ ID NO: 2107103 - RNA, 19 nt, Artificial Sequence
  Description of Artificial Sequence: Synthetic oligonucleotide
acguagauuauagaccgag

SEQ ID NO: 2107104 - RNA, 19 nt, Artificial Sequence
  Description of Artificial Sequence: Synthetic oligonucleotide
uaggccauguggaaguagu

SEQ ID NO: 2107105 - RNA, 19 nt, Artificial Sequence
  Description of Artificial Sequence: Synthetic oligonucleotide
agcuugagcagaaggaagg

SEQ ID NO: 2107106 - RNA, 19 nt, Artificial Sequence
  Description of Artificial Sequence: Synthetic oligonucleotide
uacucgucauaguaguaca

SEQ ID NO: 2107107 - RNA, 19 nt, Artificial Sequence
  Description of Artificial Sequence: Synthetic oligonucleotide
aacauggcaaugggucggc

SEQ ID NO: 2107108 - RNA, 19 nt, Artificial Sequence
  Description of Artificial Sequence: Synthetic oligonucleotide
caaugggucggccaaaguc

SEQ ID NO: 2107109 - RNA, 19 nt, Artificial Sequence
  Description of Artificial Sequence: Synthetic oligonucleotide
ucggggacauagaugacac

SEQ ID NO: 2107110 - RNA, 19 nt, Artificial Sequence
  Description of Artificial Sequence: Synthetic oligonucleotide
auguaccacauggaguggc

SEQ ID NO: 2107111 - RNA, 19 nt, Artificial Sequence
  Description of Artificial Sequence: Synthetic oligonucleotide
acagccaagcaacccacag

SEQ ID NO: 2107112 - RNA, 19 nt, Artificial Sequence
  Description of Artificial Sequence: Synthetic oligonucleotide
uguggaaguaguccccgac

SEQ ID NO: 2107113 - RNA, 19 nt, Artificial Sequence
  Description of Artificial Sequence: Synthetic oligonucleotide
auuguaggccauguggaag

SEQ ID NO: 2107114 - RNA, 19 nt, Artificial Sequence
  Description of Artificial Sequence: Synthetic oligonucleotide
uacuucuuucugaguacag

SEQ ID NO: 2107115 - RNA, 19 nt, Artificial Sequence
  Description of Artificial Sequence: Synthetic oligonucleotide
cacaguccacauuaccacg

SEQ ID NO: 2107116 - RNA, 19 nt, Artificial Sequence
  Description of Artificial Sequence: Synthetic oligonucleotide
agguacucgucauaguagu

SEQ ID NO: 2107117 - RNA, 19 nt, Artificial Sequence
  Description of Artificial Sequence: Synthetic oligonucleotide
gaaguacaugaagaggaug

SEQ ID NO: 2107118 - RNA, 19 nt, Artificial Sequence
  Description of Artificial Sequence: Synthetic oligonucleotide
gaaggugaagaugaagaga

SEQ ID NO: 2107119 - RNA, 19 nt, Artificial Sequence
  Description of Artificial Sequence: Synthetic oligonucleotide
uauagaccgaggcagcguu

SEQ ID NO: 2107120 - RNA, 19 nt, Artificial Sequence
  Description of Artificial Sequence: Synthetic oligonucleotide
gauuauagaccgaggcagc

SEQ ID NO: 2107121 - RNA, 19 nt, Artificial Sequence
  Description of Artificial Sequence: Synthetic oligonucleotide
augaagaucuggcccucgg

SEQ ID NO: 2107122 - RNA, 19 nt, Artificial Sequence
  Description of Artificial Sequence: Synthetic oligonucleotide
accacugggcaccaccagg

SEQ ID NO: 2107123 - RNA, 19 nt, Artificial Sequence
  Description of Artificial Sequence: Synthetic oligonucleotide
aggaucauuccacagccaa

SEQ ID NO: 2107124 - RNA, 19 nt, Artificial Sequence
  Description of Artificial Sequence: Synthetic oligonucleotide
aacaaugcgcucugcccgu

SEQ ID NO: 2107125 - RNA, 19 nt, Artificial Sequence
  Description of Artificial Sequence: Synthetic oligonucleotide
gagggcaaaggaauagaag

SEQ ID NO: 2107126 - RNA, 19 nt, Artificial Sequence
  Description of Artificial Sequence: Synthetic oligonucleotide
cacgggugcacauaugcac

SEQ ID NO: 2107127 - RNA, 19 nt, Artificial Sequence
  Description of Artificial Sequence: Synthetic oligonucleotide
ugagcagaaggaagggcgu

SEQ ID NO: 2107128 - RNA, 19 nt, Artificial Sequence
  Description of Artificial Sequence: Synthetic oligonucleotide
ugccuggccugcacgaacg

SEQ ID NO: 2107129 - RNA, 19 nt, Artificial Sequence
  Description of Artificial Sequence: Synthetic oligonucleotide
guugacagaaucacccacc

SEQ ID NO: 2107130 - RNA, 19 nt, Artificial Sequence
  Description of Artificial Sequence: Synthetic oligonucleotide
acaccaggguacuucuuuc

SEQ ID NO: 2107131 - RNA, 19 nt, Artificial Sequence
  Description of Artificial Sequence: Synthetic oligonucleotide
ugguacccacugaagagca

SEQ ID NO: 2107132 - RNA, 19 nt, Artificial Sequence
  Description of Artificial Sequence: Synthetic oligonucleotide
ucggugaccagguaccagu

SEQ ID NO: 2107133 - RNA, 19 nt, Artificial Sequence
  Description of Artificial Sequence: Synthetic oligonucleotide
cuuucaacaaugcgcucug

SEQ ID NO: 2107134 - RNA, 19 nt, Artificial Sequence
  Description of Artificial Sequence: Synthetic oligonucleotide
guacccacugaagagcagg

SEQ ID NO: 2107135 - RNA, 19 nt, Artificial Sequence
  Description of Artificial Sequence: Synthetic oligonucleotide
ucccugugcacaugcacag

SEQ ID NO: 2107136 - RNA, 19 nt, Artificial Sequence
  Description of Artificial Sequence: Synthetic oligonucleotide
gaugacaccaggguacuuc

SEQ ID NO: 2107137 - RNA, 19 nt, Artificial Sequence
  Description of Artificial Sequence: Synthetic oligonucleotide
aguacaugaagaggaugag

SEQ ID NO: 2107138 - RNA, 19 nt, Artificial Sequence
  Description of Artificial Sequence: Synthetic oligonucleotide
ucagccuucauggagccau

SEQ ID NO: 2107139 - RNA, 19 nt, Artificial Sequence
  Description of Artificial Sequence: Synthetic oligonucleotide
aggaagaggccguugcugu

SEQ ID NO: 2107140 - RNA, 19 nt, Artificial Sequence
  Description of Artificial Sequence: Synthetic oligonucleotide
acgggugcacauaugcacc

SEQ ID NO: 2107141 - RNA, 19 nt, Artificial Sequence
  Description of Artificial Sequence: Synthetic oligonucleotide
ucucucgaugagcuugagc

SEQ ID NO: 2107142 - RNA, 19 nt, Artificial Sequence
  Description of Artificial Sequence: Synthetic oligonucleotide
ucucugacggacagguggu

SEQ ID NO: 2107143 - RNA, 19 nt, Artificial Sequence
  Description of Artificial Sequence: Synthetic oligonucleotide
cucgucauaguaguacagc

SEQ ID NO: 2107144 - RNA, 19 nt, Artificial Sequence
  Description of Artificial Sequence: Synthetic oligonucleotide
acaguccacauuaccacgg

SEQ ID NO: 2107145 - RNA, 19 nt, Artificial Sequence
  Description of Artificial Sequence: Synthetic oligonucleotide
gugugaaguagaaccagag

SEQ ID NO: 2107146 - RNA, 19 nt, Artificial Sequence
  Description of Artificial Sequence: Synthetic oligonucleotide
aaccacuggagugggaaca

SEQ ID NO: 2107147 - RNA, 19 nt, Artificial Sequence
  Description of Artificial Sequence: Synthetic oligonucleotide
aggucaaaguggaagggag

SEQ ID NO: 2107148 - RNA, 19 nt, Artificial Sequence
  Description of Artificial Sequence: Synthetic oligonucleotide
guuuguugagaggaaacca

SEQ ID NO: 2107149 - RNA, 19 nt, Artificial Sequence
  Description of Artificial Sequence: Synthetic oligonucleotide
accagguaccaguaguaca

SEQ ID NO: 2107150 - RNA, 19 nt, Artificial Sequence
  Description of Artificial Sequence: Synthetic oligonucleotide
ggcucggggacauagauga

SEQ ID NO: 2107151 - RNA, 19 nt, Artificial Sequence
  Description of Artificial Sequence: Synthetic oligonucleotide
ugggaacaccaacauggca

SEQ ID NO: 2107152 - RNA, 19 nt, Artificial Sequence
  Description of Artificial Sequence: Synthetic oligonucleotide
guacaggaucauuccacag

SEQ ID NO: 2107153 - RNA, 19 nt, Artificial Sequence
  Description of Artificial Sequence: Synthetic oligonucleotide
guacucgucauaguaguac

SEQ ID NO: 2107154 - RNA, 19 nt, Artificial Sequence
  Description of Artificial Sequence: Synthetic oligonucleotide
uuaccacgggugcacauau

SEQ ID NO: 2107155 - RNA, 19 nt, Artificial Sequence
  Description of Artificial Sequence: Synthetic oligonucleotide
cuggugcaagacgagagcc

SEQ ID NO: 2107156 - RNA, 19 nt, Artificial Sequence
  Description of Artificial Sequence: Synthetic oligonucleotide
aggggaucucucgaugagc

SEQ ID NO: 2107157 - RNA, 19 nt, Artificial Sequence
  Description of Artificial Sequence: Synthetic oligonucleotide
uaguaguacagcagcucaa

SEQ ID NO: 2107158 - RNA, 19 nt, Artificial Sequence
  Description of Artificial Sequence: Synthetic oligonucleotide
cauguggaaguaguccccg

SEQ ID NO: 2107159 - RNA, 19 nt, Artificial Sequence
  Description of Artificial Sequence: Synthetic oligonucleotide
gacauggaguguguagaag

SEQ ID NO: 2107160 - RNA, 19 nt, Artificial Sequence
  Description of Artificial Sequence: Synthetic oligonucleotide
cauaguaguacagcagcuc

SEQ ID NO: 2107161 - RNA, 19 nt, Artificial Sequence
  Description of Artificial Sequence: Synthetic oligonucleotide
gaggggaucucucgaugag

SEQ ID NO: 2107162 - RNA, 19 nt, Artificial Sequence
  Description of Artificial Sequence: Synthetic oligonucleotide
guccacauuaccacgggug

SEQ ID NO: 2107163 - RNA, 19 nt, Artificial Sequence
  Description of Artificial Sequence: Synthetic oligonucleotide
caacauggcaaugggucgg

SEQ ID NO: 2107164 - RNA, 19 nt, Artificial Sequence
  Description of Artificial Sequence: Synthetic oligonucleotide
ucgaggggaucucucgaug

SEQ ID NO: 2107165 - RNA, 19 nt, Artificial Sequence
  Description of Artificial Sequence: Synthetic oligonucleotide
ggagccucagugcugacug

SEQ ID NO: 2107166 - RNA, 19 nt, Artificial Sequence
  Description of Artificial Sequence: Synthetic oligonucleotide
cugguacccacugaagagc

SEQ ID NO: 2107167 - RNA, 19 nt, Artificial Sequence
  Description of Artificial Sequence: Synthetic oligonucleotide
guacagaccacugggcacc

SEQ ID NO: 2107168 - RNA, 19 nt, Artificial Sequence
  Description of Artificial Sequence: Synthetic oligonucleotide
augagcuugagcagaagga

SEQ ID NO: 2107169 - RNA, 19 nt, Artificial Sequence
  Description of Artificial Sequence: Synthetic oligonucleotide
gccauguggaaguaguccc

SEQ ID NO: 2107170 - RNA, 19 nt, Artificial Sequence
  Description of Artificial Sequence: Synthetic oligonucleotide
aggaagaggcgccugcgcu

SEQ ID NO: 2107171 - RNA, 19 nt, Artificial Sequence
  Description of Artificial Sequence: Synthetic oligonucleotide
gucaaucagugucucuggc

SEQ ID NO: 2107172 - RNA, 19 nt, Artificial Sequence
  Description of Artificial Sequence: Synthetic oligonucleotide
cugugcacaugcacagucc

SEQ ID NO: 2107173 - RNA, 19 nt, Artificial Sequence
  Description of Artificial Sequence: Synthetic oligonucleotide
ugaugaugcugacguagau

SEQ ID NO: 2107174 - RNA, 19 nt, Artificial Sequence
  Description of Artificial Sequence: Synthetic oligonucleotide
augcugacguagauuauag

SEQ ID NO: 2107175 - RNA, 19 nt, Artificial Sequence
  Description of Artificial Sequence: Synthetic oligonucleotide
aguucugcagugugaagua

SEQ ID NO: 2107176 - RNA, 19 nt, Artificial Sequence
  Description of Artificial Sequence: Synthetic oligonucleotide
auuccacagccaagcaacc

SEQ ID NO: 2107177 - RNA, 19 nt, Artificial Sequence
  Description of Artificial Sequence: Synthetic oligonucleotide
cauagaugacaccagggua

SEQ ID NO: 2107178 - RNA, 19 nt, Artificial Sequence
  Description of Artificial Sequence: Synthetic oligonucleotide
gcugacauggaguguguag

SEQ ID NO: 2107179 - RNA, 19 nt, Artificial Sequence
  Description of Artificial Sequence: Synthetic oligonucleotide
cagccacugaaguacauga

SEQ ID NO: 2107180 - RNA, 19 nt, Artificial Sequence
  Description of Artificial Sequence: Synthetic oligonucleotide
gauguaccacauggagugg

SEQ ID NO: 2107181 - RNA, 19 nt, Artificial Sequence
  Description of Artificial Sequence: Synthetic oligonucleotide
gagaggaaaccacuggagu

SEQ ID NO: 2107182 - RNA, 19 nt, Artificial Sequence
  Description of Artificial Sequence: Synthetic oligonucleotide
uugguuuguugagaggaaa

SEQ ID NO: 2107183 - RNA, 19 nt, Artificial Sequence
  Description of Artificial Sequence: Synthetic oligonucleotide
ccaacauggcaaugggucg

SEQ ID NO: 2107184 - RNA, 19 nt, Artificial Sequence
  Description of Artificial Sequence: Synthetic oligonucleotide
ugaugggguucucucugac

SEQ ID NO: 2107185 - RNA, 19 nt, Artificial Sequence
  Description of Artificial Sequence: Synthetic oligonucleotide
guccccgacacuugguuug

SEQ ID NO: 2107186 - RNA, 19 nt, Artificial Sequence
  Description of Artificial Sequence: Synthetic oligonucleotide
gacacuugguuuguugaga

SEQ ID NO: 2107187 - RNA, 19 nt, Artificial Sequence
  Description of Artificial Sequence: Synthetic oligonucleotide
augacauuguaggccaugu

SEQ ID NO: 2107188 - RNA, 19 nt, Artificial Sequence
  Description of Artificial Sequence: Synthetic oligonucleotide
ggaucucucgaugagcuug

SEQ ID NO: 2107189 - RNA, 19 nt, Artificial Sequence
  Description of Artificial Sequence: Synthetic oligonucleotide
uuauagaccgaggcagcgu

SEQ ID NO: 2107190 - RNA, 19 nt, Artificial Sequence
  Description of Artificial Sequence: Synthetic oligonucleotide
ucgaugagcuugagcagaa

SEQ ID NO: 2107191 - RNA, 19 nt, Artificial Sequence
  Description of Artificial Sequence: Synthetic oligonucleotide
gguaccaguaguacagacc

SEQ ID NO: 2107192 - RNA, 19 nt, Artificial Sequence
  Description of Artificial Sequence: Synthetic oligonucleotide
gaugcugacguagauuaua

SEQ ID NO: 2107193 - RNA, 19 nt, Artificial Sequence
  Description of Artificial Sequence: Synthetic oligonucleotide
caaaggaauagaagaggaa

SEQ ID NO: 2107194 - RNA, 19 nt, Artificial Sequence
  Description of Artificial Sequence: Synthetic oligonucleotide
cacauuaccacgggugcac

SEQ ID NO: 2107195 - RNA, 19 nt, Artificial Sequence
  Description of Artificial Sequence: Synthetic oligonucleotide
ugcugacguagauuauaga

SEQ ID NO: 2107196 - RNA, 19 nt, Artificial Sequence
  Description of Artificial Sequence: Synthetic oligonucleotide
gguugacagaaucacccac

SEQ ID NO: 2107197 - RNA, 19 nt, Artificial Sequence
  Description of Artificial Sequence: Synthetic oligonucleotide
auggccuauugcucccagg

SEQ ID NO: 2107198 - RNA, 19 nt, Artificial Sequence
  Description of Artificial Sequence: Synthetic oligonucleotide
ggggacauagaugacacca

SEQ ID NO: 2107199 - RNA, 19 nt, Artificial Sequence
  Description of Artificial Sequence: Synthetic oligonucleotide
ggugguaaagcagccacug

SEQ ID NO: 2107200 - RNA, 19 nt, Artificial Sequence
  Description of Artificial Sequence: Synthetic oligonucleotide
agugugaaguagaaccaga

SEQ ID NO: 2107201 - RNA, 19 nt, Artificial Sequence
  Description of Artificial Sequence: Synthetic oligonucleotide
agcaggcggugguugacag

SEQ ID NO: 2107202 - RNA, 19 nt, Artificial Sequence
  Description of Artificial Sequence: Synthetic oligonucleotide
guagaaggcccagggcucg

SEQ ID NO: 2107203 - RNA, 19 nt, Artificial Sequence
  Description of Artificial Sequence: Synthetic oligonucleotide
gccguugcuguccaggaag

SEQ ID NO: 2107204 - RNA, 19 nt, Artificial Sequence
  Description of Artificial Sequence: Synthetic oligonucleotide
cugacauggaguguguaga

SEQ ID NO: 2107205 - RNA, 19 nt, Artificial Sequence
  Description of Artificial Sequence: Synthetic oligonucleotide
cuauugcucccagggagcc

SEQ ID NO: 2107206 - RNA, 19 nt, Artificial Sequence
  Description of Artificial Sequence: Synthetic oligonucleotide
aagaggccguugcugucca

SEQ ID NO: 2107207 - RNA, 19 nt, Artificial Sequence
  Description of Artificial Sequence: Synthetic oligonucleotide
aggagucaaucagugucuc

SEQ ID NO: 2107208 - RNA, 19 nt, Artificial Sequence
  Description of Artificial Sequence: Synthetic oligonucleotide
gaacguggcgccggggccg

SEQ ID NO: 2107209 - RNA, 19 nt, Artificial Sequence
  Description of Artificial Sequence: Synthetic oligonucleotide
gaaucacccaccaggugga

SEQ ID NO: 2107210 - RNA, 19 nt, Artificial Sequence
  Description of Artificial Sequence: Synthetic oligonucleotide
gacggacagguggugcugg

SEQ ID NO: 2107211 - RNA, 19 nt, Artificial Sequence
  Description of Artificial Sequence: Synthetic oligonucleotide
uucgaggggaucucucgau

SEQ ID NO: 2107212 - RNA, 19 nt, Artificial Sequence
  Description of Artificial Sequence: Synthetic oligonucleotide
gcacaguccacauuaccac

SEQ ID NO: 2107213 - RNA, 19 nt, Artificial Sequence
  Description of Artificial Sequence: Synthetic oligonucleotide
guggaaguaguccccgaca

SEQ ID NO: 2107214 - RNA, 19 nt, Artificial Sequence
  Description of Artificial Sequence: Synthetic oligonucleotide
cgugaugacauuguaggcc

SEQ ID NO: 2107215 - RNA, 19 nt, Artificial Sequence
  Description of Artificial Sequence: Synthetic oligonucleotide
ggguacuucuuucugagua

SEQ ID NO: 2107216 - RNA, 19 nt, Artificial Sequence
  Description of Artificial Sequence: Synthetic oligonucleotide
acucgucauaguaguacag

SEQ ID NO: 2107217 - RNA, 19 nt, Artificial Sequence
  Description of Artificial Sequence: Synthetic oligonucleotide
ugcggucugucuccucagc

SEQ ID NO: 2107218 - RNA, 19 nt, Artificial Sequence
  Description of Artificial Sequence: Synthetic oligonucleotide
uaguccccgacacuugguu

SEQ ID NO: 2107219 - RNA, 19 nt, Artificial Sequence
  Description of Artificial Sequence: Synthetic oligonucleotide
gcugcggacuccauggccg

SEQ ID NO: 2107220 - RNA, 19 nt, Artificial Sequence
  Description of Artificial Sequence: Synthetic oligonucleotide
gagcugugcggucugucuc

SEQ ID NO: 2107221 - RNA, 19 nt, Artificial Sequence
  Description of Artificial Sequence: Synthetic oligonucleotide
guacuucuuucugaguaca

SEQ ID NO: 2107222 - RNA, 19 nt, Artificial Sequence
  Description of Artificial Sequence: Synthetic oligonucleotide
guucccgcgagcugccgcc

SEQ ID NO: 2107223 - RNA, 19 nt, Artificial Sequence
  Description of Artificial Sequence: Synthetic oligonucleotide
gcucccaugaugaaaguga

SEQ ID NO: 2107224 - RNA, 19 nt, Artificial Sequence
  Description of Artificial Sequence: Synthetic oligonucleotide
uuucaacaaugcgcucugc

SEQ ID NO: 2107225 - RNA, 19 nt, Artificial Sequence
  Description of Artificial Sequence: Synthetic oligonucleotide
gucaaaguggaagggagcu

SEQ ID NO: 2107226 - RNA, 19 nt, Artificial Sequence
  Description of Artificial Sequence: Synthetic oligonucleotide
cguagauuauagaccgagg

SEQ ID NO: 2107227 - RNA, 19 nt, Artificial Sequence
  Description of Artificial Sequence: Synthetic oligonucleotide
guucgaggggaucucucga

SEQ ID NO: 2107228 - RNA, 19 nt, Artificial Sequence
  Description of Artificial Sequence: Synthetic oligonucleotide
ggugguugacagaaucacc

SEQ ID NO: 2107229 - RNA, 19 nt, Artificial Sequence
  Description of Artificial Sequence: Synthetic oligonucleotide
gaucucucgaugagcuuga

SEQ ID NO: 2107230 - RNA, 19 nt, Artificial Sequence
  Description of Artificial Sequence: Synthetic oligonucleotide
uuucugaguacaggaucau

SEQ ID NO: 2107231 - RNA, 19 nt, Artificial Sequence
  Description of Artificial Sequence: Synthetic oligonucleotide
auuaccacgggugcacaua

SEQ ID NO: 2107232 - RNA, 19 nt, Artificial Sequence
  Description of Artificial Sequence: Synthetic oligonucleotide
ugggguucucucugacgga

SEQ ID NO: 2107233 - RNA, 19 nt, Artificial Sequence
  Description of Artificial Sequence: Synthetic oligonucleotide
aggguacuucuuucugagu

SEQ ID NO: 2107234 - RNA, 19 nt, Artificial Sequence
  Description of Artificial Sequence: Synthetic oligonucleotide
cauggccuauugcucccag

SEQ ID NO: 2107235 - RNA, 19 nt, Artificial Sequence
  Description of Artificial Sequence: Synthetic oligonucleotide
cucggggacauagaugaca

SEQ ID NO: 2107236 - RNA, 19 nt, Artificial Sequence
  Description of Artificial Sequence: Synthetic oligonucleotide
guaggccauguggaaguag

SEQ ID NO: 2107237 - RNA, 19 nt, Artificial Sequence
  Description of Artificial Sequence: Synthetic oligonucleotide
ggaucauuccacagccaag

SEQ ID NO: 2107238 - RNA, 19 nt, Artificial Sequence
  Description of Artificial Sequence: Synthetic oligonucleotide
gaagaggcgccugcgcuuc

SEQ ID NO: 2107239 - RNA, 19 nt, Artificial Sequence
  Description of Artificial Sequence: Synthetic oligonucleotide
ugaugacauuguaggccau

SEQ ID NO: 2107240 - RNA, 19 nt, Artificial Sequence
  Description of Artificial Sequence: Synthetic oligonucleotide
ccauguggaaguagucccc

SEQ ID NO: 2107241 - RNA, 19 nt, Artificial Sequence
  Description of Artificial Sequence: Synthetic oligonucleotide
gggacauagaugacaccag

SEQ ID NO: 2107242 - RNA, 19 nt, Artificial Sequence
  Description of Artificial Sequence: Synthetic oligonucleotide
auguggaaguaguccccga

SEQ ID NO: 2107243 - RNA, 19 nt, Artificial Sequence
  Description of Artificial Sequence: Synthetic oligonucleotide
ggucaaaguggaagggagc

SEQ ID NO: 2107244 - RNA, 19 nt, Artificial Sequence
  Description of Artificial Sequence: Synthetic oligonucleotide
ccuugcacaaauguccaug

SEQ ID NO: 2107245 - RNA, 19 nt, Artificial Sequence
  Description of Artificial Sequence: Synthetic oligonucleotide
ggcggugguugacagaauc

SEQ ID NO: 2107246 - RNA, 19 nt, Artificial Sequence
  Description of Artificial Sequence: Synthetic oligonucleotide
gucccugugcacaugcaca

SEQ ID NO: 2107247 - RNA, 19 nt, Artificial Sequence
  Description of Artificial Sequence: Synthetic oligonucleotide
auagaccgaggcagcguuc

SEQ ID NO: 2107248 - RNA, 19 nt, Artificial Sequence
  Description of Artificial Sequence: Synthetic oligonucleotide
ugggucggccaaaguccag

SEQ ID NO: 2107249 - RNA, 19 nt, Artificial Sequence
  Description of Artificial Sequence: Synthetic oligonucleotide
uaccacgggugcacauaug

SEQ ID NO: 2107250 - RNA, 19 nt, Artificial Sequence
  Description of Artificial Sequence: Synthetic oligonucleotide
aggccguugcuguccagga

SEQ ID NO: 2107251 - RNA, 19 nt, Artificial Sequence
  Description of Artificial Sequence: Synthetic oligonucleotide
gcgugaugacauuguaggc

SEQ ID NO: 2107252 - RNA, 19 nt, Artificial Sequence
  Description of Artificial Sequence: Synthetic oligonucleotide
aggccauguggaaguaguc

SEQ ID NO: 2107253 - RNA, 19 nt, Artificial Sequence
  Description of Artificial Sequence: Synthetic oligonucleotide
gugguaaagcagccacuga

SEQ ID NO: 2107254 - RNA, 19 nt, Artificial Sequence
  Description of Artificial Sequence: Synthetic oligonucleotide
aguccccgacacuugguuu

SEQ ID NO: 2107255 - RNA, 19 nt, Artificial Sequence
  Description of Artificial Sequence: Synthetic oligonucleotide
gcgcuucuggugcaagacg

SEQ ID NO: 2107256 - RNA, 19 nt, Artificial Sequence
  Description of Artificial Sequence: Synthetic oligonucleotide
uagaaggcccagggcucgg

SEQ ID NO: 2107257 - RNA, 19 nt, Artificial Sequence
  Description of Artificial Sequence: Synthetic oligonucleotide
caaugcgcucugcccgucc

SEQ ID NO: 2107258 - RNA, 19 nt, Artificial Sequence
  Description of Artificial Sequence: Synthetic oligonucleotide
caggcggugguugacagaa

SEQ ID NO: 2107259 - RNA, 19 nt, Artificial Sequence
  Description of Artificial Sequence: Synthetic oligonucleotide
gggucggccaaaguccagg

SEQ ID NO: 2107260 - RNA, 19 nt, Artificial Sequence
  Description of Artificial Sequence: Synthetic oligonucleotide
cuucuggugcaagacgaga

SEQ ID NO: 2107261 - RNA, 19 nt, Artificial Sequence
  Description of Artificial Sequence: Synthetic oligonucleotide
gagccucagugcugacugc

SEQ ID NO: 2107262 - RNA, 19 nt, Artificial Sequence
  Description of Artificial Sequence: Synthetic oligonucleotide
cugcggacuccauggccgc

SEQ ID NO: 2107263 - RNA, 19 nt, Artificial Sequence
  Description of Artificial Sequence: Synthetic oligonucleotide
gggcgugaugacauuguag

SEQ ID NO: 2107264 - RNA, 19 nt, Artificial Sequence
  Description of Artificial Sequence: Synthetic oligonucleotide
cgcgcugcggacuccaugg

SEQ ID NO: 2107265 - RNA, 19 nt, Artificial Sequence
  Description of Artificial Sequence: Synthetic oligonucleotide
cguucgaggggaucucucg

SEQ ID NO: 2107266 - RNA, 19 nt, Artificial Sequence
  Description of Artificial Sequence: Synthetic oligonucleotide
agaaggggauguaccacau

SEQ ID NO: 2107267 - RNA, 19 nt, Artificial Sequence
  Description of Artificial Sequence: Synthetic oligonucleotide
ugcgcucugcccgucccug

SEQ ID NO: 2107268 - RNA, 19 nt, Artificial Sequence
  Description of Artificial Sequence: Synthetic oligonucleotide
auaugcacccuugcacaaa

SEQ ID NO: 2107269 - RNA, 19 nt, Artificial Sequence
  Description of Artificial Sequence: Synthetic oligonucleotide
gccaugccuggccugcacg

SEQ ID NO: 2107270 - RNA, 19 nt, Artificial Sequence
  Description of Artificial Sequence: Synthetic oligonucleotide
gucggccaaaguccaggac

SEQ ID NO: 2107271 - RNA, 19 nt, Artificial Sequence
  Description of Artificial Sequence: Synthetic oligonucleotide
caaaggagucaaucagugu

SEQ ID NO: 2107272 - RNA, 19 nt, Artificial Sequence
  Description of Artificial Sequence: Synthetic oligonucleotide
guggcccagguacucguca

SEQ ID NO: 2107273 - RNA, 19 nt, Artificial Sequence
  Description of Artificial Sequence: Synthetic oligonucleotide
gcggucugucuccucagcc

SEQ ID NO: 2107274 - RNA, 19 nt, Artificial Sequence
  Description of Artificial Sequence: Synthetic oligonucleotide
gcgccugcgcuucuggugc

SEQ ID NO: 2107275 - RNA, 19 nt, Artificial Sequence
  Description of Artificial Sequence: Synthetic oligonucleotide
uauugcucccagggagccu

SEQ ID NO: 2107276 - RNA, 19 nt, Artificial Sequence
  Description of Artificial Sequence: Synthetic oligonucleotide
cucggugaccagguaccag

SEQ ID NO: 2107277 - RNA, 19 nt, Artificial Sequence
  Description of Artificial Sequence: Synthetic oligonucleotide
gugcugguacccacugaag

SEQ ID NO: 2107278 - RNA, 19 nt, Artificial Sequence
  Description of Artificial Sequence: Synthetic oligonucleotide
gucuuucaacaaugcgcuc

SEQ ID NO: 2107279 - RNA, 19 nt, Artificial Sequence
  Description of Artificial Sequence: Synthetic oligonucleotide
gacguagauuauagaccga

SEQ ID NO: 2107280 - RNA, 19 nt, Artificial Sequence
  Description of Artificial Sequence: Synthetic oligonucleotide
gcccagguacucgucauag

SEQ ID NO: 2107281 - RNA, 19 nt, Artificial Sequence
  Description of Artificial Sequence: Synthetic oligonucleotide
augggucggccaaagucca

SEQ ID NO: 2107282 - RNA, 19 nt, Artificial Sequence
  Description of Artificial Sequence: Synthetic oligonucleotide
acauuaccacgggugcaca

SEQ ID NO: 2107283 - RNA, 19 nt, Artificial Sequence
  Description of Artificial Sequence: Synthetic oligonucleotide
ucgccguucccgcgagcug

SEQ ID NO: 2107284 - RNA, 19 nt, Artificial Sequence
  Description of Artificial Sequence: Synthetic oligonucleotide
gaagggagcugugcggucu

SEQ ID NO: 2107285 - RNA, 19 nt, Artificial Sequence
  Description of Artificial Sequence: Synthetic oligonucleotide
ccaggacccaguucugcag

SEQ ID NO: 2107286 - RNA, 19 nt, Artificial Sequence
  Description of Artificial Sequence: Synthetic oligonucleotide
acaaugcgcucugcccguc

SEQ ID NO: 2107287 - RNA, 19 nt, Artificial Sequence
  Description of Artificial Sequence: Synthetic oligonucleotide
ggcucccaugaugaaagug

SEQ ID NO: 2107288 - RNA, 19 nt, Artificial Sequence
  Description of Artificial Sequence: Synthetic oligonucleotide
acuggagugggaacaccaa

SEQ ID NO: 2107289 - RNA, 19 nt, Artificial Sequence
  Description of Artificial Sequence: Synthetic oligonucleotide
aguggcccagguacucguc

SEQ ID NO: 2107290 - RNA, 19 nt, Artificial Sequence
  Description of Artificial Sequence: Synthetic oligonucleotide
ggcaaugggucggccaaag

SEQ ID NO: 2107291 - RNA, 19 nt, Artificial Sequence
  Description of Artificial Sequence: Synthetic oligonucleotide
ggcgccugcgcuucuggug

SEQ ID NO: 2107292 - RNA, 19 nt, Artificial Sequence
  Description of Artificial Sequence: Synthetic oligonucleotide
ccuggcauguggcucucag

SEQ ID NO: 2107293 - RNA, 19 nt, Artificial Sequence
  Description of Artificial Sequence: Synthetic oligonucleotide
aagaggcgccugcgcuucu

SEQ ID NO: 2107294 - RNA, 19 nt, Artificial Sequence
  Description of Artificial Sequence: Synthetic oligonucleotide
cccgacacuugguuuguug

SEQ ID NO: 2107295 - RNA, 19 nt, Artificial Sequence
  Description of Artificial Sequence: Synthetic oligonucleotide
cgacacuugguuuguugag

SEQ ID NO: 2107296 - RNA, 19 nt, Artificial Sequence
  Description of Artificial Sequence: Synthetic oligonucleotide
ccgacacuugguuuguuga

SEQ ID NO: 2107297 - RNA, 19 nt, Artificial Sequence
  Description of Artificial Sequence: Synthetic oligonucleotide
agcguucgaggggaucucu

SEQ ID NO: 2107298 - RNA, 19 nt, Artificial Sequence
  Description of Artificial Sequence: Synthetic oligonucleotide
caggaucauuccacagcca

SEQ ID NO: 2107299 - RNA, 19 nt, Artificial Sequence
  Description of Artificial Sequence: Synthetic oligonucleotide
ccgaggcagcguucgaggg

SEQ ID NO: 2107300 - RNA, 19 nt, Artificial Sequence
  Description of Artificial Sequence: Synthetic oligonucleotide
auggaguggcccagguacu

SEQ ID NO: 2107301 - RNA, 19 nt, Artificial Sequence
  Description of Artificial Sequence: Synthetic oligonucleotide
agggagccucagugcugac

SEQ ID NO: 2107302 - RNA, 19 nt, Artificial Sequence
  Description of Artificial Sequence: Synthetic oligonucleotide
acggacagguggugcuggu

SEQ ID NO: 2107303 - RNA, 19 nt, Artificial Sequence
  Description of Artificial Sequence: Synthetic oligonucleotide
gaguggcccagguacucgu

SEQ ID NO: 2107304 - RNA, 19 nt, Artificial Sequence
  Description of Artificial Sequence: Synthetic oligonucleotide
cucccaugaugaaagugau

SEQ ID NO: 2107305 - RNA, 19 nt, Artificial Sequence
  Description of Artificial Sequence: Synthetic oligonucleotide
ugcuggcucccaugaugaa

SEQ ID NO: 2107306 - RNA, 19 nt, Artificial Sequence
  Description of Artificial Sequence: Synthetic oligonucleotide
uccccgacacuugguuugu

SEQ ID NO: 2107307 - RNA, 19 nt, Artificial Sequence
  Description of Artificial Sequence: Synthetic oligonucleotide
ccuucauggagccaugccu

SEQ ID NO: 2107308 - RNA, 19 nt, Artificial Sequence
  Description of Artificial Sequence: Synthetic oligonucleotide
agaggccguugcuguccag

SEQ ID NO: 2107309 - RNA, 19 nt, Artificial Sequence
  Description of Artificial Sequence: Synthetic oligonucleotide
gugcaagacgagagccagc

SEQ ID NO: 2107310 - RNA, 19 nt, Artificial Sequence
  Description of Artificial Sequence: Synthetic oligonucleotide
agaccgaggcagcguucga

SEQ ID NO: 2107311 - RNA, 19 nt, Artificial Sequence
  Description of Artificial Sequence: Synthetic oligonucleotide
uugcucccagggagccuca

SEQ ID NO: 2107312 - RNA, 19 nt, Artificial Sequence
  Description of Artificial Sequence: Synthetic oligonucleotide
cagugucucuggcuugaga

SEQ ID NO: 2107313 - RNA, 19 nt, Artificial Sequence
  Description of Artificial Sequence: Synthetic oligonucleotide
gcacccuugcacaaauguc

SEQ ID NO: 2107314 - RNA, 19 nt, Artificial Sequence
  Description of Artificial Sequence: Synthetic oligonucleotide
acagaccacugggcaccac

SEQ ID NO: 2107315 - RNA, 19 nt, Artificial Sequence
  Description of Artificial Sequence: Synthetic oligonucleotide
ggagugggaacaccaacau

SEQ ID NO: 2107316 - RNA, 19 nt, Artificial Sequence
  Description of Artificial Sequence: Synthetic oligonucleotide
cuggcuugagauucuugau

SEQ ID NO: 2107317 - RNA, 19 nt, Artificial Sequence
  Description of Artificial Sequence: Synthetic oligonucleotide
ugcggacuccauggccgcc

SEQ ID NO: 2107318 - RNA, 19 nt, Artificial Sequence
  Description of Artificial Sequence: Synthetic oligonucleotide
cccgucccugugcacaugc

SEQ ID NO: 2107319 - RNA, 19 nt, Artificial Sequence
  Description of Artificial Sequence: Synthetic oligonucleotide
ggucggccaaaguccagga

SEQ ID NO: 2107320 - RNA, 19 nt, Artificial Sequence
  Description of Artificial Sequence: Synthetic oligonucleotide
gggauguaccacauggagu

SEQ ID NO: 2107321 - RNA, 19 nt, Artificial Sequence
  Description of Artificial Sequence: Synthetic oligonucleotide
gguacccacugaagagcag

SEQ ID NO: 2107322 - RNA, 19 nt, Artificial Sequence
  Description of Artificial Sequence: Synthetic oligonucleotide
cgaggcagcguucgagggg

SEQ ID NO: 2107323 - RNA, 19 nt, Artificial Sequence
  Description of Artificial Sequence: Synthetic oligonucleotide
cgcuucuggugcaagacga

SEQ ID NO: 2107324 - RNA, 19 nt, Artificial Sequence
  Description of Artificial Sequence: Synthetic oligonucleotide
ggccuauugcucccaggga

SEQ ID NO: 2107325 - RNA, 19 nt, Artificial Sequence
  Description of Artificial Sequence: Synthetic oligonucleotide
cacgaacguggcgccgggg

SEQ ID NO: 2107326 - RNA, 19 nt, Artificial Sequence
  Description of Artificial Sequence: Synthetic oligonucleotide
caccaggguacuucuuucu

SEQ ID NO: 2107327 - RNA, 19 nt, Artificial Sequence
  Description of Artificial Sequence: Synthetic oligonucleotide
cggugguugacagaaucac

SEQ ID NO: 2107328 - RNA, 19 nt, Artificial Sequence
  Description of Artificial Sequence: Synthetic oligonucleotide
gcacgaacguggcgccggg

SEQ ID NO: 2107329 - RNA, 19 nt, Artificial Sequence
  Description of Artificial Sequence: Synthetic oligonucleotide
augcacccuugcacaaaug

SEQ ID NO: 2107330 - RNA, 19 nt, Artificial Sequence
  Description of Artificial Sequence: Synthetic oligonucleotide
caaaguccaggacccaguu

SEQ ID NO: 2107331 - RNA, 19 nt, Artificial Sequence
  Description of Artificial Sequence: Synthetic oligonucleotide
gcggugguugacagaauca

SEQ ID NO: 2107332 - RNA, 19 nt, Artificial Sequence
  Description of Artificial Sequence: Synthetic oligonucleotide
ggaagggagcugugcgguc

SEQ ID NO: 2107333 - RNA, 19 nt, Artificial Sequence
  Description of Artificial Sequence: Synthetic oligonucleotide
ggccugcacgaacguggcg

SEQ ID NO: 2107334 - RNA, 19 nt, Artificial Sequence
  Description of Artificial Sequence: Synthetic oligonucleotide
caggacccaguucugcagu

SEQ ID NO: 2107335 - RNA, 19 nt, Artificial Sequence
  Description of Artificial Sequence: Synthetic oligonucleotide
cgucccugugcacaugcac

SEQ ID NO: 2107336 - RNA, 19 nt, Artificial Sequence
  Description of Artificial Sequence: Synthetic oligonucleotide
ggagucaaucagugucucu

SEQ ID NO: 2107337 - RNA, 19 nt, Artificial Sequence
  Description of Artificial Sequence: Synthetic oligonucleotide
cauuaccacgggugcacau

SEQ ID NO: 2107338 - RNA, 19 nt, Artificial Sequence
  Description of Artificial Sequence: Synthetic oligonucleotide
cagggcucggggacauaga

SEQ ID NO: 2107339 - RNA, 19 nt, Artificial Sequence
  Description of Artificial Sequence: Synthetic oligonucleotide
ugccgccuccgcgcugcgg

SEQ ID NO: 2107340 - RNA, 19 nt, Artificial Sequence
  Description of Artificial Sequence: Synthetic oligonucleotide
gcugccgccuccgcgcugc

SEQ ID NO: 2107341 - RNA, 19 nt, Artificial Sequence
  Description of Artificial Sequence: Synthetic oligonucleotide
gcauguggcucucagccuu

SEQ ID NO: 2107342 - RNA, 19 nt, Artificial Sequence
  Description of Artificial Sequence: Synthetic oligonucleotide
gcagcguucgaggggaucu

SEQ ID NO: 2107343 - RNA, 19 nt, Artificial Sequence
  Description of Artificial Sequence: Synthetic oligonucleotide
gccgccuccgcgcugcgga

SEQ ID NO: 2107344 - RNA, 19 nt, Artificial Sequence
  Description of Artificial Sequence: Synthetic oligonucleotide
ucccgcgagcugccgccuc

SEQ ID NO: 2107345 - RNA, 19 nt, Artificial Sequence
  Description of Artificial Sequence: Synthetic oligonucleotide
cgaggggaucucucgauga

SEQ ID NO: 2107346 - RNA, 19 nt, Artificial Sequence
  Description of Artificial Sequence: Synthetic oligonucleotide
accagaggucaaaguggaa

SEQ ID NO: 2107347 - RNA, 19 nt, Artificial Sequence
  Description of Artificial Sequence: Synthetic oligonucleotide
cgaacguggcgccggggcc

SEQ ID NO: 2107348 - RNA, 19 nt, Artificial Sequence
  Description of Artificial Sequence: Synthetic oligonucleotide
gguacucgucauaguagua

SEQ ID NO: 2107349 - RNA, 19 nt, Artificial Sequence
  Description of Artificial Sequence: Synthetic oligonucleotide
ccacgggugcacauaugca

SEQ ID NO: 2107350 - RNA, 19 nt, Artificial Sequence
  Description of Artificial Sequence: Synthetic oligonucleotide
gccgcucgccguucccgcg

SEQ ID NO: 2107351 - RNA, 19 nt, Artificial Sequence
  Description of Artificial Sequence: Synthetic oligonucleotide
cagcguucgaggggaucuc

SEQ ID NO: 2107352 - RNA, 19 nt, Artificial Sequence
  Description of Artificial Sequence: Synthetic oligonucleotide
cugugcggucugucuccuc

SEQ ID NO: 2107353 - RNA, 19 nt, Artificial Sequence
  Description of Artificial Sequence: Synthetic oligonucleotide
gacugcugacauggagugu

SEQ ID NO: 2107354 - RNA, 19 nt, Artificial Sequence
  Description of Artificial Sequence: Synthetic oligonucleotide
uucccgcgagcugccgccu

SEQ ID NO: 2107355 - RNA, 19 nt, Artificial Sequence
  Description of Artificial Sequence: Synthetic oligonucleotide
uccgcgcugcggacuccau

SEQ ID NO: 2107356 - RNA, 19 nt, Artificial Sequence
  Description of Artificial Sequence: Synthetic oligonucleotide
cgcugcggacuccauggcc

SEQ ID NO: 2107357 - RNA, 19 nt, Artificial Sequence
  Description of Artificial Sequence: Synthetic oligonucleotide
cucgccguucccgcgagcu

SEQ ID NO: 2107358 - RNA, 19 nt, Artificial Sequence
  Description of Artificial Sequence: Synthetic oligonucleotide
guaguccccgacacuuggu

SEQ ID NO: 2107359 - RNA, 19 nt, Artificial Sequence
  Description of Artificial Sequence: Synthetic oligonucleotide
gagccaugccuggccugca

SEQ ID NO: 2107360 - RNA, 19 nt, Artificial Sequence
  Description of Artificial Sequence: Synthetic oligonucleotide
cgccguucccgcgagcugc

SEQ ID NO: 2107361 - RNA, 19 nt, Artificial Sequence
  Description of Artificial Sequence: Synthetic oligonucleotide
cguucccgcgagcugccgc

SEQ ID NO: 2107362 - RNA, 19 nt, Artificial Sequence
  Description of Artificial Sequence: Synthetic oligonucleotide
ccacauuaccacgggugca

SEQ ID NO: 2107363 - RNA, 19 nt, Artificial Sequence
  Description of Artificial Sequence: Synthetic oligonucleotide
cccgcgagcugccgccucc

SEQ ID NO: 2107364 - RNA, 19 nt, Artificial Sequence
  Description of Artificial Sequence: Synthetic oligonucleotide
gcgcugcggacuccauggc

SEQ ID NO: 2107365 - RNA, 19 nt, Artificial Sequence
  Description of Artificial Sequence: Synthetic oligonucleotide
gccuccgcgcugcggacuc

SEQ ID NO: 2107366 - RNA, 19 nt, Artificial Sequence
  Description of Artificial Sequence: Synthetic oligonucleotide
cuccgcgcugcggacucca

SEQ ID NO: 2107367 - RNA, 19 nt, Artificial Sequence
  Description of Artificial Sequence: Synthetic oligonucleotide
ggcagcguucgaggggauc

SEQ ID NO: 2107368 - RNA, 19 nt, Artificial Sequence
  Description of Artificial Sequence: Synthetic oligonucleotide
gcguucgaggggaucucuc

SEQ ID NO: 2107369 - RNA, 19 nt, Artificial Sequence
  Description of Artificial Sequence: Synthetic oligonucleotide
cgaugagcuugagcagaag

SEQ ID NO: 2107370 - RNA, 19 nt, Artificial Sequence
  Description of Artificial Sequence: Synthetic oligonucleotide
ccgcgcugcggacuccaug

SEQ ID NO: 2107371 - RNA, 19 nt, Artificial Sequence
  Description of Artificial Sequence: Synthetic oligonucleotide
gcucggggacauagaugac

SEQ ID NO: 2107372 - RNA, 19 nt, Artificial Sequence
  Description of Artificial Sequence: Synthetic oligonucleotide
aggcggugguugacagaau

SEQ ID NO: 2107373 - RNA, 19 nt, Artificial Sequence
  Description of Artificial Sequence: Synthetic oligonucleotide
gagccaccagugagagggu

SEQ ID NO: 2107374 - RNA, 19 nt, Artificial Sequence
  Description of Artificial Sequence: Synthetic oligonucleotide
ggaagggcgugaugacauu

SEQ ID NO: 2107375 - RNA, 19 nt, Artificial Sequence
  Description of Artificial Sequence: Synthetic oligonucleotide
gggaucucucgaugagcuu

SEQ ID NO: 2107376 - RNA, 19 nt, Artificial Sequence
  Description of Artificial Sequence: Synthetic oligonucleotide
gggugcacauaugcacccu

SEQ ID NO: 2107377 - RNA, 19 nt, Artificial Sequence
  Description of Artificial Sequence: Synthetic oligonucleotide
gcucgccguucccgcgagc

SEQ ID NO: 2107378 - RNA, 19 nt, Artificial Sequence
  Description of Artificial Sequence: Synthetic oligonucleotide
ccgcgagcugccgccuccg

SEQ ID NO: 2107379 - RNA, 19 nt, Artificial Sequence
  Description of Artificial Sequence: Synthetic oligonucleotide
ccucggugaccagguacca

SEQ ID NO: 2107380 - RNA, 19 nt, Artificial Sequence
  Description of Artificial Sequence: Synthetic oligonucleotide
ccgucccugugcacaugca

SEQ ID NO: 2107381 - RNA, 19 nt, Artificial Sequence
  Description of Artificial Sequence: Synthetic oligonucleotide
aggcagcguucgaggggau

SEQ ID NO: 2107382 - RNA, 19 nt, Artificial Sequence
  Description of Artificial Sequence: Synthetic oligonucleotide
cgcucgccguucccgcgag

SEQ ID NO: 2107383 - RNA, 19 nt, Artificial Sequence
  Description of Artificial Sequence: Synthetic oligonucleotide
ccguucccgcgagcugccg

SEQ ID NO: 2107384 - RNA, 19 nt, Artificial Sequence
  Description of Artificial Sequence: Synthetic oligonucleotide
cggugaccagguaccagua

SEQ ID NO: 2107385 - RNA, 19 nt, Artificial Sequence
  Description of Artificial Sequence: Synthetic oligonucleotide
ccgcucgccguucccgcga

SEQ ID NO: 2107386 - RNA, 19 nt, Artificial Sequence
  Description of Artificial Sequence: Synthetic oligonucleotide
cccuugcacaaauguccau

SEQ ID NO: 2107387 - RNA, 19 nt, Artificial Sequence
  Description of Artificial Sequence: Synthetic oligonucleotide
ccuccgcgcugcggacucc

SEQ ID NO: 2107388 - RNA, 19 nt, Artificial Sequence
  Description of Artificial Sequence: Synthetic oligonucleotide
gccugcgcuucuggugcaa

SEQ ID NO: 2107389 - RNA, 19 nt, Artificial Sequence
  Description of Artificial Sequence: Synthetic oligonucleotide
gcgcucugcccgucccugu

SEQ ID NO: 2107390 - RNA, 19 nt, Artificial Sequence
  Description of Artificial Sequence: Synthetic oligonucleotide
gcccuggcauguggcucuc

SEQ ID NO: 2107391 - RNA, 19 nt, Artificial Sequence
  Description of Artificial Sequence: Synthetic oligonucleotide
cgccugcgcuucuggugca

SEQ ID NO: 2107392 - RNA, 19 nt, Artificial Sequence
  Description of Artificial Sequence: Synthetic oligonucleotide
cccagggcucggggacaua

SEQ ID NO: 2107393 - RNA, 19 nt, Artificial Sequence
  Description of Artificial Sequence: Synthetic oligonucleotide
cgccggggccgcucgccgu

SEQ ID NO: 2107394 - RNA, 19 nt, Artificial Sequence
  Description of Artificial Sequence: Synthetic oligonucleotide
ccccgacacuugguuuguu

SEQ ID NO: 2107395 - RNA, 19 nt, Artificial Sequence
  Description of Artificial Sequence: Synthetic oligonucleotide
aaaacuaauauaguguugg

SEQ ID NO: 2107396 - RNA, 19 nt, Artificial Sequence
  Description of Artificial Sequence: Synthetic oligonucleotide
aaaagcuggaccaugaggc

SEQ ID NO: 2107397 - RNA, 19 nt, Artificial Sequence
  Description of Artificial Sequence: Synthetic oligonucleotide
ucuuccagcagacauaucg

SEQ ID NO: 2107398 - RNA, 19 nt, Artificial Sequence
  Description of Artificial Sequence: Synthetic oligonucleotide
aguucuaggaauucgaguc

SEQ ID NO: 2107399 - RNA, 19 nt, Artificial Sequence
  Description of Artificial Sequence: Synthetic oligonucleotide
uuaaucaccuucaaaagcu

SEQ ID NO: 2107400 - RNA, 19 nt, Artificial Sequence
  Description of Artificial Sequence: Synthetic oligonucleotide
gauauaaaccuguagcaag

SEQ ID NO: 2107401 - RNA, 19 nt, Artificial Sequence
  Description of Artificial Sequence: Synthetic oligonucleotide
uacucuaccaucuugguac

SEQ ID NO: 2107402 - RNA, 19 nt, Artificial Sequence
  Description of Artificial Sequence: Synthetic oligonucleotide
aaacuaauauaguguuggc

SEQ ID NO: 2107403 - RNA, 19 nt, Artificial Sequence
  Description of Artificial Sequence: Synthetic oligonucleotide
cuuaaguuagaccaccgcg

SEQ ID NO: 2107404 - RNA, 19 nt, Artificial Sequence
  Description of Artificial Sequence: Synthetic oligonucleotide
cacgaaaacaauugggucg

SEQ ID NO: 2107405 - RNA, 19 nt, Artificial Sequence
  Description of Artificial Sequence: Synthetic oligonucleotide
uuaaguuagaccaccgcgc

SEQ ID NO: 2107406 - RNA, 19 nt, Artificial Sequence
  Description of Artificial Sequence: Synthetic oligonucleotide
guggauauaaaccuguagc

SEQ ID NO: 2107407 - RNA, 19 nt, Artificial Sequence
  Description of Artificial Sequence: Synthetic oligonucleotide
gagucaacagaccaaaagc

SEQ ID NO: 2107408 - RNA, 19 nt, Artificial Sequence
  Description of Artificial Sequence: Synthetic oligonucleotide
acguccuuaaguuagacca

SEQ ID NO: 2107409 - RNA, 19 nt, Artificial Sequence
  Description of Artificial Sequence: Synthetic oligonucleotide
aaugucuggucugacuucc

SEQ ID NO: 2107410 - RNA, 19 nt, Artificial Sequence
  Description of Artificial Sequence: Synthetic oligonucleotide
ucuuaaucaccuucaaaag

SEQ ID NO: 2107411 - RNA, 19 nt, Artificial Sequence
  Description of Artificial Sequence: Synthetic oligonucleotide
uuguguaaaagcuggacca

SEQ ID NO: 2107412 - RNA, 19 nt, Artificial Sequence
  Description of Artificial Sequence: Synthetic oligonucleotide
agaccaaaagccaagaguc

SEQ ID NO: 2107413 - RNA, 19 nt, Artificial Sequence
  Description of Artificial Sequence: Synthetic oligonucleotide
cuuaaucaccuucaaaagc

SEQ ID NO: 2107414 - RNA, 19 nt, Artificial Sequence
  Description of Artificial Sequence: Synthetic oligonucleotide
agucaacagaccaaaagcc

SEQ ID NO: 2107415 - RNA, 19 nt, Artificial Sequence
  Description of Artificial Sequence: Synthetic oligonucleotide
agugccaauuuucauacag

SEQ ID NO: 2107416 - RNA, 19 nt, Artificial Sequence
  Description of Artificial Sequence: Synthetic oligonucleotide
aaaggaagugccaauuuuc

SEQ ID NO: 2107417 - RNA, 19 nt, Artificial Sequence
  Description of Artificial Sequence: Synthetic oligonucleotide
uggauauaaaccuguagca

SEQ ID NO: 2107418 - RNA, 19 nt, Artificial Sequence
  Description of Artificial Sequence: Synthetic oligonucleotide
uccuacucuaccaucuugg

SEQ ID NO: 2107419 - RNA, 19 nt, Artificial Sequence
  Description of Artificial Sequence: Synthetic oligonucleotide
cuguguguggauauaaacc

SEQ ID NO: 2107420 - RNA, 19 nt, Artificial Sequence
  Description of Artificial Sequence: Synthetic oligonucleotide
auaguguuggcuccuacuc

SEQ ID NO: 2107421 - RNA, 19 nt, Artificial Sequence
  Description of Artificial Sequence: Synthetic oligonucleotide
uaucguaggagucaacaga

SEQ ID NO: 2107422 - RNA, 19 nt, Artificial Sequence
  Description of Artificial Sequence: Synthetic oligonucleotide
gaagugccaauuuucauac

SEQ ID NO: 2107423 - RNA, 19 nt, Artificial Sequence
  Description of Artificial Sequence: Synthetic oligonucleotide
auauaaaccuguagcaagc

SEQ ID NO: 2107424 - RNA, 19 nt, Artificial Sequence
  Description of Artificial Sequence: Synthetic oligonucleotide
aagacacagucuuuauuag

SEQ ID NO: 2107425 - RNA, 19 nt, Artificial Sequence
  Description of Artificial Sequence: Synthetic oligonucleotide
uguaaaagcuggaccauga

SEQ ID NO: 2107426 - RNA, 19 nt, Artificial Sequence
  Description of Artificial Sequence: Synthetic oligonucleotide
guaaguuuggcacagguaa

SEQ ID NO: 2107427 - RNA, 19 nt, Artificial Sequence
  Description of Artificial Sequence: Synthetic oligonucleotide
uucuucaacaacauggauu

SEQ ID NO: 2107428 - RNA, 19 nt, Artificial Sequence
  Description of Artificial Sequence: Synthetic oligonucleotide
uguguggauauaaaccugu

SEQ ID NO: 2107429 - RNA, 19 nt, Artificial Sequence
  Description of Artificial Sequence: Synthetic oligonucleotide
acgaaaacaauugggucgc

SEQ ID NO: 2107430 - RNA, 19 nt, Artificial Sequence
  Description of Artificial Sequence: Synthetic oligonucleotide
uugacugucuccagacugg

SEQ ID NO: 2107431 - RNA, 19 nt, Artificial Sequence
  Description of Artificial Sequence: Synthetic oligonucleotide
aaaaguucuaggaauucga

SEQ ID NO: 2107432 - RNA, 19 nt, Artificial Sequence
  Description of Artificial Sequence: Synthetic oligonucleotide
ucuguguguggauauaaac

SEQ ID NO: 2107433 - RNA, 19 nt, Artificial Sequence
  Description of Artificial Sequence: Synthetic oligonucleotide
aguuagaccaccgcgcucg

SEQ ID NO: 2107434 - RNA, 19 nt, Artificial Sequence
  Description of Artificial Sequence: Synthetic oligonucleotide
ucugacuuccccugggucc

SEQ ID NO: 2107435 - RNA, 19 nt, Artificial Sequence
  Description of Artificial Sequence: Synthetic oligonucleotide
gccauuuugaaagagggcg

SEQ ID NO: 2107436 - RNA, 19 nt, Artificial Sequence
  Description of Artificial Sequence: Synthetic oligonucleotide
aaaacgccgugcacgaggc

SEQ ID NO: 2107437 - RNA, 19 nt, Artificial Sequence
  Description of Artificial Sequence: Synthetic oligonucleotide
uggauucuuaaucaccuuc

SEQ ID NO: 2107438 - RNA, 19 nt, Artificial Sequence
  Description of Artificial Sequence: Synthetic oligonucleotide
aaaccuguagcaagccagc

SEQ ID NO: 2107439 - RNA, 19 nt, Artificial Sequence
  Description of Artificial Sequence: Synthetic oligonucleotide
caaaaguucuaggaauucg

SEQ ID NO: 2107440 - RNA, 19 nt, Artificial Sequence
  Description of Artificial Sequence: Synthetic oligonucleotide
uaaguuuggcacagguaag

SEQ ID NO: 2107441 - RNA, 19 nt, Artificial Sequence
  Description of Artificial Sequence: Synthetic oligonucleotide
auaucguaggagucaacag

SEQ ID NO: 2107442 - RNA, 19 nt, Artificial Sequence
  Description of Artificial Sequence: Synthetic oligonucleotide
aucguaggagucaacagac

SEQ ID NO: 2107443 - RNA, 19 nt, Artificial Sequence
  Description of Artificial Sequence: Synthetic oligonucleotide
uagaccaccgcgcucgucc

SEQ ID NO: 2107444 - RNA, 19 nt, Artificial Sequence
  Description of Artificial Sequence: Synthetic oligonucleotide
ugucugagaacuaggcucu

SEQ ID NO: 2107445 - RNA, 19 nt, Artificial Sequence
  Description of Artificial Sequence: Synthetic oligonucleotide
aaacaauugggucgcugcu

SEQ ID NO: 2107446 - RNA, 19 nt, Artificial Sequence
  Description of Artificial Sequence: Synthetic oligonucleotide
ccaucuugcaagcagaccg

SEQ ID NO: 2107447 - RNA, 19 nt, Artificial Sequence
  Description of Artificial Sequence: Synthetic oligonucleotide
ugcgcugacguccuuaagu

SEQ ID NO: 2107448 - RNA, 19 nt, Artificial Sequence
  Description of Artificial Sequence: Synthetic oligonucleotide
uccuuaaguuagaccaccg

SEQ ID NO: 2107449 - RNA, 19 nt, Artificial Sequence
  Description of Artificial Sequence: Synthetic oligonucleotide
aaaggcugugguaaguuug

SEQ ID NO: 2107450 - RNA, 19 nt, Artificial Sequence
  Description of Artificial Sequence: Synthetic oligonucleotide
ucuaggaauucgagucugg

SEQ ID NO: 2107451 - RNA, 19 nt, Artificial Sequence
  Description of Artificial Sequence: Synthetic oligonucleotide
uaaguuagaccaccgcgcu

SEQ ID NO: 2107452 - RNA, 19 nt, Artificial Sequence
  Description of Artificial Sequence: Synthetic oligonucleotide
ucauacagccaacugggaa

SEQ ID NO: 2107453 - RNA, 19 nt, Artificial Sequence
  Description of Artificial Sequence: Synthetic oligonucleotide
caaaacgccgugcacgagg

SEQ ID NO: 2107454 - RNA, 19 nt, Artificial Sequence
  Description of Artificial Sequence: Synthetic oligonucleotide
agcaguucguaaguuuucc

SEQ ID NO: 2107455 - RNA, 19 nt, Artificial Sequence
  Description of Artificial Sequence: Synthetic oligonucleotide
uauaguguuggcuccuacu

SEQ ID NO: 2107456 - RNA, 19 nt, Artificial Sequence
  Description of Artificial Sequence: Synthetic oligonucleotide
uccugucugagaacuaggc

SEQ ID NO: 2107457 - RNA, 19 nt, Artificial Sequence
  Description of Artificial Sequence: Synthetic oligonucleotide
acgucugccauggaaaagg

SEQ ID NO: 2107458 - RNA, 19 nt, Artificial Sequence
  Description of Artificial Sequence: Synthetic oligonucleotide
ugugguaaguuuggcacag

SEQ ID NO: 2107459 - RNA, 19 nt, Artificial Sequence
  Description of Artificial Sequence: Synthetic oligonucleotide
ugagcaguucguaaguuuu

SEQ ID NO: 2107460 - RNA, 19 nt, Artificial Sequence
  Description of Artificial Sequence: Synthetic oligonucleotide
ugguaaguuuggcacaggu

SEQ ID NO: 2107461 - RNA, 19 nt, Artificial Sequence
  Description of Artificial Sequence: Synthetic oligonucleotide
cucgcaaacuuccuucggg

SEQ ID NO: 2107462 - RNA, 19 nt, Artificial Sequence
  Description of Artificial Sequence: Synthetic oligonucleotide
aaaagcggucaaaaguucu

SEQ ID NO: 2107463 - RNA, 19 nt, Artificial Sequence
  Description of Artificial Sequence: Synthetic oligonucleotide
uauaaaccuguagcaagcc

SEQ ID NO: 2107464 - RNA, 19 nt, Artificial Sequence
  Description of Artificial Sequence: Synthetic oligonucleotide
ucucacacgacaccccaca

SEQ ID NO: 2107465 - RNA, 19 nt, Artificial Sequence
  Description of Artificial Sequence: Synthetic oligonucleotide
cugagaacuaggcucugcc

SEQ ID NO: 2107466 - RNA, 19 nt, Artificial Sequence
  Description of Artificial Sequence: Synthetic oligonucleotide
caguugagcaguucguaag

SEQ ID NO: 2107467 - RNA, 19 nt, Artificial Sequence
  Description of Artificial Sequence: Synthetic oligonucleotide
aaguuagaccaccgcgcuc

SEQ ID NO: 2107468 - RNA, 19 nt, Artificial Sequence
  Description of Artificial Sequence: Synthetic oligonucleotide
gaaaccaacacugggcgca

SEQ ID NO: 2107469 - RNA, 19 nt, Artificial Sequence
  Description of Artificial Sequence: Synthetic oligonucleotide
uccucgcaaacuuccuucg

SEQ ID NO: 2107470 - RNA, 19 nt, Artificial Sequence
  Description of Artificial Sequence: Synthetic oligonucleotide
agcggucaaaaguucuagg

SEQ ID NO: 2107471 - RNA, 19 nt, Artificial Sequence
  Description of Artificial Sequence: Synthetic oligonucleotide
ucgcaaacuuccuucgggc

SEQ ID NO: 2107472 - RNA, 19 nt, Artificial Sequence
  Description of Artificial Sequence: Synthetic oligonucleotide
cugcaaaacgccgugcacg

SEQ ID NO: 2107473 - RNA, 19 nt, Artificial Sequence
  Description of Artificial Sequence: Synthetic oligonucleotide
ugccauuuugaaagagggc

SEQ ID NO: 2107474 - RNA, 19 nt, Artificial Sequence
  Description of Artificial Sequence: Synthetic oligonucleotide
ugcaaaacgccgugcacga

SEQ ID NO: 2107475 - RNA, 19 nt, Artificial Sequence
  Description of Artificial Sequence: Synthetic oligonucleotide
acaaaagcggucaaaaguu

SEQ ID NO: 2107476 - RNA, 19 nt, Artificial Sequence
  Description of Artificial Sequence: Synthetic oligonucleotide
aguugagcaguucguaagu

SEQ ID NO: 2107477 - RNA, 19 nt, Artificial Sequence
  Description of Artificial Sequence: Synthetic oligonucleotide
aacaauugggucgcugcug

SEQ ID NO: 2107478 - RNA, 19 nt, Artificial Sequence
  Description of Artificial Sequence: Synthetic oligonucleotide
ucuguguacuccacacuga

SEQ ID NO: 2107479 - RNA, 19 nt, Artificial Sequence
  Description of Artificial Sequence: Synthetic oligonucleotide
aagcggucaaaaguucuag

SEQ ID NO: 2107480 - RNA, 19 nt, Artificial Sequence
  Description of Artificial Sequence: Synthetic oligonucleotide
ucguaaguuuucccuaccu

SEQ ID NO: 2107481 - RNA, 19 nt, Artificial Sequence
  Description of Artificial Sequence: Synthetic oligonucleotide
caacagaccaaaagccaag

SEQ ID NO: 2107482 - RNA, 19 nt, Artificial Sequence
  Description of Artificial Sequence: Synthetic oligonucleotide
uucguaaguuuucccuacc

SEQ ID NO: 2107483 - RNA, 19 nt, Artificial Sequence
  Description of Artificial Sequence: Synthetic oligonucleotide
gcugugguaaguuuggcac

SEQ ID NO: 2107484 - RNA, 19 nt, Artificial Sequence
  Description of Artificial Sequence: Synthetic oligonucleotide
guaaaagcuggaccaugag

SEQ ID NO: 2107485 - RNA, 19 nt, Artificial Sequence
  Description of Artificial Sequence: Synthetic oligonucleotide
aaguggauaguugcugaug

SEQ ID NO: 2107486 - RNA, 19 nt, Artificial Sequence
  Description of Artificial Sequence: Synthetic oligonucleotide
cugaguuuguguaaaagcu

SEQ ID NO: 2107487 - RNA, 19 nt, Artificial Sequence
  Description of Artificial Sequence: Synthetic oligonucleotide
ucuuaggcggcgcaugguc

SEQ ID NO: 2107488 - RNA, 19 nt, Artificial Sequence
  Description of Artificial Sequence: Synthetic oligonucleotide
accuguagcaagccagcuc

SEQ ID NO: 2107489 - RNA, 19 nt, Artificial Sequence
  Description of Artificial Sequence: Synthetic oligonucleotide
aguuuggcacagguaaggg

SEQ ID NO: 2107490 - RNA, 19 nt, Artificial Sequence
  Description of Artificial Sequence: Synthetic oligonucleotide
uucuaggaauucgagucug

SEQ ID NO: 2107491 - RNA, 19 nt, Artificial Sequence
  Description of Artificial Sequence: Synthetic oligonucleotide
gaaaacaauugggucgcug

SEQ ID NO: 2107492 - RNA, 19 nt, Artificial Sequence
  Description of Artificial Sequence: Synthetic oligonucleotide
aacagaccaaaagccaaga

SEQ ID NO: 2107493 - RNA, 19 nt, Artificial Sequence
  Description of Artificial Sequence: Synthetic oligonucleotide
uggucugacuuccccuggg

SEQ ID NO: 2107494 - RNA, 19 nt, Artificial Sequence
  Description of Artificial Sequence: Synthetic oligonucleotide
aacgccgugcacgaggcug

SEQ ID NO: 2107495 - RNA, 19 nt, Artificial Sequence
  Description of Artificial Sequence: Synthetic oligonucleotide
uagcaagccagcucgguuc

SEQ ID NO: 2107496 - RNA, 19 nt, Artificial Sequence
  Description of Artificial Sequence: Synthetic oligonucleotide
aguuuucccuaccuugacu

SEQ ID NO: 2107497 - RNA, 19 nt, Artificial Sequence
  Description of Artificial Sequence: Synthetic oligonucleotide
uaguguuggcuccuacucu

SEQ ID NO: 2107498 - RNA, 19 nt, Artificial Sequence
  Description of Artificial Sequence: Synthetic oligonucleotide
cuuaggcggcgcauggucc

SEQ ID NO: 2107499 - RNA, 19 nt, Artificial Sequence
  Description of Artificial Sequence: Synthetic oligonucleotide
aguucguaaguuuucccua

SEQ ID NO: 2107500 - RNA, 19 nt, Artificial Sequence
  Description of Artificial Sequence: Synthetic oligonucleotide
cacacugaccuugccaugg

SEQ ID NO: 2107501 - RNA, 19 nt, Artificial Sequence
  Description of Artificial Sequence: Synthetic oligonucleotide
ugcccggacacugaguuug

SEQ ID NO: 2107502 - RNA, 19 nt, Artificial Sequence
  Description of Artificial Sequence: Synthetic oligonucleotide
agcucugguggguaauguc

SEQ ID NO: 2107503 - RNA, 19 nt, Artificial Sequence
  Description of Artificial Sequence: Synthetic oligonucleotide
guucguaaguuuucccuac

SEQ ID NO: 2107504 - RNA, 19 nt, Artificial Sequence
  Description of Artificial Sequence: Synthetic oligonucleotide
ucgcacgucacugacgucu

SEQ ID NO: 2107505 - RNA, 19 nt, Artificial Sequence
  Description of Artificial Sequence: Synthetic oligonucleotide
acugacgucugccauggaa

SEQ ID NO: 2107506 - RNA, 19 nt, Artificial Sequence
  Description of Artificial Sequence: Synthetic oligonucleotide
acaaugagccgacggccuc

SEQ ID NO: 2107507 - RNA, 19 nt, Artificial Sequence
  Description of Artificial Sequence: Synthetic oligonucleotide
aaaggccccgaccacgaaa

SEQ ID NO: 2107508 - RNA, 19 nt, Artificial Sequence
  Description of Artificial Sequence: Synthetic oligonucleotide
cauaucguaggagucaaca

SEQ ID NO: 2107509 - RNA, 19 nt, Artificial Sequence
  Description of Artificial Sequence: Synthetic oligonucleotide
guaagggcagcggaaagug

SEQ ID NO: 2107510 - RNA, 19 nt, Artificial Sequence
  Description of Artificial Sequence: Synthetic oligonucleotide
aguccugucugagaacuag

SEQ ID NO: 2107511 - RNA, 19 nt, Artificial Sequence
  Description of Artificial Sequence: Synthetic oligonucleotide
cacuucaaucagcacauuc

SEQ ID NO: 2107512 - RNA, 19 nt, Artificial Sequence
  Description of Artificial Sequence: Synthetic oligonucleotide
caaaagcggucaaaaguuc

SEQ ID NO: 2107513 - RNA, 19 nt, Artificial Sequence
  Description of Artificial Sequence: Synthetic oligonucleotide
caccacaaugagccgacgg

SEQ ID NO: 2107514 - RNA, 19 nt, Artificial Sequence
  Description of Artificial Sequence: Synthetic oligonucleotide
agacauaucguaggaguca

SEQ ID NO: 2107515 - RNA, 19 nt, Artificial Sequence
  Description of Artificial Sequence: Synthetic oligonucleotide
aaagcuucugagggccauc

SEQ ID NO: 2107516 - RNA, 19 nt, Artificial Sequence
  Description of Artificial Sequence: Synthetic oligonucleotide
uuaggcggcgcaugguccc

SEQ ID NO: 2107517 - RNA, 19 nt, Artificial Sequence
  Description of Artificial Sequence: Synthetic oligonucleotide
uaauauaguguuggcuccu

SEQ ID NO: 2107518 - RNA, 19 nt, Artificial Sequence
  Description of Artificial Sequence: Synthetic oligonucleotide
caagaguccugucugagaa

SEQ ID NO: 2107519 - RNA, 19 nt, Artificial Sequence
  Description of Artificial Sequence: Synthetic oligonucleotide
gcggaaaguggauaguugc

SEQ ID NO: 2107520 - RNA, 19 nt, Artificial Sequence
  Description of Artificial Sequence: Synthetic oligonucleotide
cuguguacuccacacugac

SEQ ID NO: 2107521 - RNA, 19 nt, Artificial Sequence
  Description of Artificial Sequence: Synthetic oligonucleotide
ccagcagacauaucguagg

SEQ ID NO: 2107522 - RNA, 19 nt, Artificial Sequence
  Description of Artificial Sequence: Synthetic oligonucleotide
cauggauuugugcuuguca

SEQ ID NO: 2107523 - RNA, 19 nt, Artificial Sequence
  Description of Artificial Sequence: Synthetic oligonucleotide
uggaccaugaggccacaaa

SEQ ID NO: 2107524 - RNA, 19 nt, Artificial Sequence
  Description of Artificial Sequence: Synthetic oligonucleotide
uucccuaccuugacugucu

SEQ ID NO: 2107525 - RNA, 19 nt, Artificial Sequence
  Description of Artificial Sequence: Synthetic oligonucleotide
gcugacguccuuaaguuag

SEQ ID NO: 2107526 - RNA, 19 nt, Artificial Sequence
  Description of Artificial Sequence: Synthetic oligonucleotide
aaugagccgacggccuccg

SEQ ID NO: 2107527 - RNA, 19 nt, Artificial Sequence
  Description of Artificial Sequence: Synthetic oligonucleotide
ucguaggagucaacagacc

SEQ ID NO: 2107528 - RNA, 19 nt, Artificial Sequence
  Description of Artificial Sequence: Synthetic oligonucleotide
ugagccgacggccuccgcu

SEQ ID NO: 2107529 - RNA, 19 nt, Artificial Sequence
  Description of Artificial Sequence: Synthetic oligonucleotide
ugucucgcacgucacugac

SEQ ID NO: 2107530 - RNA, 19 nt, Artificial Sequence
  Description of Artificial Sequence: Synthetic oligonucleotide
aagcagaccggaaguugcg

SEQ ID NO: 2107531 - RNA, 19 nt, Artificial Sequence
  Description of Artificial Sequence: Synthetic oligonucleotide
uaaucaccuucaaaagcuu

SEQ ID NO: 2107532 - RNA, 19 nt, Artificial Sequence
  Description of Artificial Sequence: Synthetic oligonucleotide
ugccguucucacacgacac

SEQ ID NO: 2107533 - RNA, 19 nt, Artificial Sequence
  Description of Artificial Sequence: Synthetic oligonucleotide
ugcacgaggcuggaaacca

SEQ ID NO: 2107534 - RNA, 19 nt, Artificial Sequence
  Description of Artificial Sequence: Synthetic oligonucleotide
aguggucggacacuggauu

SEQ ID NO: 2107535 - RNA, 19 nt, Artificial Sequence
  Description of Artificial Sequence: Synthetic oligonucleotide
guuggcuccuacucuacca

SEQ ID NO: 2107536 - RNA, 19 nt, Artificial Sequence
  Description of Artificial Sequence: Synthetic oligonucleotide
uuuucccuaccuugacugu

SEQ ID NO: 2107537 - RNA, 19 nt, Artificial Sequence
  Description of Artificial Sequence: Synthetic oligonucleotide
uuggcuccuacucuaccau

SEQ ID NO: 2107538 - RNA, 19 nt, Artificial Sequence
  Description of Artificial Sequence: Synthetic oligonucleotide
gaggccacaaaagcgguca

SEQ ID NO: 2107539 - RNA, 19 nt, Artificial Sequence
  Description of Artificial Sequence: Synthetic oligonucleotide
agcagaccggaaguugcgc

SEQ ID NO: 2107540 - RNA, 19 nt, Artificial Sequence
  Description of Artificial Sequence: Synthetic oligonucleotide
ggcagcggaaaguggauag

SEQ ID NO: 2107541 - RNA, 19 nt, Artificial Sequence
  Description of Artificial Sequence: Synthetic oligonucleotide
ggaagugccaauuuucaua

SEQ ID NO: 2107542 - RNA, 19 nt, Artificial Sequence
  Description of Artificial Sequence: Synthetic oligonucleotide
ggcgcauggucccaguccg

SEQ ID NO: 2107543 - RNA, 19 nt, Artificial Sequence
  Description of Artificial Sequence: Synthetic oligonucleotide
cuccugcacugcaaaacgc

SEQ ID NO: 2107544 - RNA, 19 nt, Artificial Sequence
  Description of Artificial Sequence: Synthetic oligonucleotide
caagccggggccucuuagg

SEQ ID NO: 2107545 - RNA, 19 nt, Artificial Sequence
  Description of Artificial Sequence: Synthetic oligonucleotide
ccgaccacgaaaacaauug

SEQ ID NO: 2107546 - RNA, 19 nt, Artificial Sequence
  Description of Artificial Sequence: Synthetic oligonucleotide
agguaagggcagcggaaag

SEQ ID NO: 2107547 - RNA, 19 nt, Artificial Sequence
  Description of Artificial Sequence: Synthetic oligonucleotide
uguguaaaagcuggaccau

SEQ ID NO: 2107548 - RNA, 19 nt, Artificial Sequence
  Description of Artificial Sequence: Synthetic oligonucleotide
agcaccacaaugagccgac

SEQ ID NO: 2107549 - RNA, 19 nt, Artificial Sequence
  Description of Artificial Sequence: Synthetic oligonucleotide
agcagacauaucguaggag

SEQ ID NO: 2107550 - RNA, 19 nt, Artificial Sequence
  Description of Artificial Sequence: Synthetic oligonucleotide
ugacgucugccauggaaaa

SEQ ID NO: 2107551 - RNA, 19 nt, Artificial Sequence
  Description of Artificial Sequence: Synthetic oligonucleotide
guaaugucuggucugacuu

SEQ ID NO: 2107552 - RNA, 19 nt, Artificial Sequence
  Description of Artificial Sequence: Synthetic oligonucleotide
aaaagcuucugagggccau

SEQ ID NO: 2107553 - RNA, 19 nt, Artificial Sequence
  Description of Artificial Sequence: Synthetic oligonucleotide
cacagucuuuauuaggaaa

SEQ ID NO: 2107554 - RNA, 19 nt, Artificial Sequence
  Description of Artificial Sequence: Synthetic oligonucleotide
uaagcucugguggguaaug

SEQ ID NO: 2107555 - RNA, 19 nt, Artificial Sequence
  Description of Artificial Sequence: Synthetic oligonucleotide
gcugccauuuugaaagagg

SEQ ID NO: 2107556 - RNA, 19 nt, Artificial Sequence
  Description of Artificial Sequence: Synthetic oligonucleotide
uucaaaggcugugguaagu

SEQ ID NO: 2107557 - RNA, 19 nt, Artificial Sequence
  Description of Artificial Sequence: Synthetic oligonucleotide
agacuggccccuuccagca

SEQ ID NO: 2107558 - RNA, 19 nt, Artificial Sequence
  Description of Artificial Sequence: Synthetic oligonucleotide
uuccagcagacauaucgua

SEQ ID NO: 2107559 - RNA, 19 nt, Artificial Sequence
  Description of Artificial Sequence: Synthetic oligonucleotide
aaagcggucaaaaguucua

SEQ ID NO: 2107560 - RNA, 19 nt, Artificial Sequence
  Description of Artificial Sequence: Synthetic oligonucleotide
ucguccuccucgcaaacuu

SEQ ID NO: 2107561 - RNA, 19 nt, Artificial Sequence
  Description of Artificial Sequence: Synthetic oligonucleotide
gacacugaguuuguguaaa

SEQ ID NO: 2107562 - RNA, 19 nt, Artificial Sequence
  Description of Artificial Sequence: Synthetic oligonucleotide
uggguaaugucuggucuga

SEQ ID NO: 2107563 - RNA, 19 nt, Artificial Sequence
  Description of Artificial Sequence: Synthetic oligonucleotide
ucaaaggcugugguaaguu

SEQ ID NO: 2107564 - RNA, 19 nt, Artificial Sequence
  Description of Artificial Sequence: Synthetic oligonucleotide
ggcucugccguucucacac

SEQ ID NO: 2107565 - RNA, 19 nt, Artificial Sequence
  Description of Artificial Sequence: Synthetic oligonucleotide
cagaccaaaagccaagagu

SEQ ID NO: 2107566 - RNA, 19 nt, Artificial Sequence
  Description of Artificial Sequence: Synthetic oligonucleotide
gugccaauuuucauacagc

SEQ ID NO: 2107567 - RNA, 19 nt, Artificial Sequence
  Description of Artificial Sequence: Synthetic oligonucleotide
cugacgucugccauggaaa

SEQ ID NO: 2107568 - RNA, 19 nt, Artificial Sequence
  Description of Artificial Sequence: Synthetic oligonucleotide
cugauggacaccaucuucu

SEQ ID NO: 2107569 - RNA, 19 nt, Artificial Sequence
  Description of Artificial Sequence: Synthetic oligonucleotide
uuucccuaccuugacuguc

SEQ ID NO: 2107570 - RNA, 19 nt, Artificial Sequence
  Description of Artificial Sequence: Synthetic oligonucleotide
aagugccaauuuucauaca

SEQ ID NO: 2107571 - RNA, 19 nt, Artificial Sequence
  Description of Artificial Sequence: Synthetic oligonucleotide
aauauaguguuggcuccua

SEQ ID NO: 2107572 - RNA, 19 nt, Artificial Sequence
  Description of Artificial Sequence: Synthetic oligonucleotide
cacgaggcuggaaaccaac

SEQ ID NO: 2107573 - RNA, 19 nt, Artificial Sequence
  Description of Artificial Sequence: Synthetic oligonucleotide
auacagccaacugggaagu

SEQ ID NO: 2107574 - RNA, 19 nt, Artificial Sequence
  Description of Artificial Sequence: Synthetic oligonucleotide
acauggauuugugcuuguc

SEQ ID NO: 2107575 - RNA, 19 nt, Artificial Sequence
  Description of Artificial Sequence: Synthetic oligonucleotide
ccaacugggaaguggucgg

SEQ ID NO: 2107576 - RNA, 19 nt, Artificial Sequence
  Description of Artificial Sequence: Synthetic oligonucleotide
ugguggguaaugucugguc

SEQ ID NO: 2107577 - RNA, 19 nt, Artificial Sequence
  Description of Artificial Sequence: Synthetic oligonucleotide
guguaaaagcuggaccaug

SEQ ID NO: 2107578 - RNA, 19 nt, Artificial Sequence
  Description of Artificial Sequence: Synthetic oligonucleotide
gacauaucguaggagucaa

SEQ ID NO: 2107579 - RNA, 19 nt, Artificial Sequence
  Description of Artificial Sequence: Synthetic oligonucleotide
cuccuacucuaccaucuug

SEQ ID NO: 2107580 - RNA, 19 nt, Artificial Sequence
  Description of Artificial Sequence: Synthetic oligonucleotide
gaaaaggaagugccaauuu

SEQ ID NO: 2107581 - RNA, 19 nt, Artificial Sequence
  Description of Artificial Sequence: Synthetic oligonucleotide
ugacugucuccagacuggc

SEQ ID NO: 2107582 - RNA, 19 nt, Artificial Sequence
  Description of Artificial Sequence: Synthetic oligonucleotide
gcggucaaaaguucuagga

SEQ ID NO: 2107583 - RNA, 19 nt, Artificial Sequence
  Description of Artificial Sequence: Synthetic oligonucleotide
aaggccccgaccacgaaaa

SEQ ID NO: 2107584 - RNA, 19 nt, Artificial Sequence
  Description of Artificial Sequence: Synthetic oligonucleotide
ggucaaaaguucuaggaau

SEQ ID NO: 2107585 - RNA, 19 nt, Artificial Sequence
  Description of Artificial Sequence: Synthetic oligonucleotide
uucucacacgacaccccac

SEQ ID NO: 2107586 - RNA, 19 nt, Artificial Sequence
  Description of Artificial Sequence: Synthetic oligonucleotide
cagaccggaaguugcgcug

SEQ ID NO: 2107587 - RNA, 19 nt, Artificial Sequence
  Description of Artificial Sequence: Synthetic oligonucleotide
ggauucuuaaucaccuuca

SEQ ID NO: 2107588 - RNA, 19 nt, Artificial Sequence
  Description of Artificial Sequence: Synthetic oligonucleotide
uggacaccaucuucucugu

SEQ ID NO: 2107589 - RNA, 19 nt, Artificial Sequence
  Description of Artificial Sequence: Synthetic oligonucleotide
uguagcaagccagcucggu

SEQ ID NO: 2107590 - RNA, 19 nt, Artificial Sequence
  Description of Artificial Sequence: Synthetic oligonucleotide
gacgucugccauggaaaag

SEQ ID NO: 2107591 - RNA, 19 nt, Artificial Sequence
  Description of Artificial Sequence: Synthetic oligonucleotide
agccggggccucuuaggcg

SEQ ID NO: 2107592 - RNA, 19 nt, Artificial Sequence
  Description of Artificial Sequence: Synthetic oligonucleotide
agcggaaaguggauaguug

SEQ ID NO: 2107593 - RNA, 19 nt, Artificial Sequence
  Description of Artificial Sequence: Synthetic oligonucleotide
ugccaugggcaaaggcccc

SEQ ID NO: 2107594 - RNA, 19 nt, Artificial Sequence
  Description of Artificial Sequence: Synthetic oligonucleotide
cuaccuugacugucuccag

SEQ ID NO: 2107595 - RNA, 19 nt, Artificial Sequence
  Description of Artificial Sequence: Synthetic oligonucleotide
ucgggcugccauuuugaaa

SEQ ID NO: 2107596 - RNA, 19 nt, Artificial Sequence
  Description of Artificial Sequence: Synthetic oligonucleotide
acuaggcucugccguucuc

SEQ ID NO: 2107597 - RNA, 19 nt, Artificial Sequence
  Description of Artificial Sequence: Synthetic oligonucleotide
ccuuaaguuagaccaccgc

SEQ ID NO: 2107598 - RNA, 19 nt, Artificial Sequence
  Description of Artificial Sequence: Synthetic oligonucleotide
acucuaccaucuugguaca

SEQ ID NO: 2107599 - RNA, 19 nt, Artificial Sequence
  Description of Artificial Sequence: Synthetic oligonucleotide
guccugucugagaacuagg

SEQ ID NO: 2107600 - RNA, 19 nt, Artificial Sequence
  Description of Artificial Sequence: Synthetic oligonucleotide
ccacgaaaacaauuggguc

SEQ ID NO: 2107601 - RNA, 19 nt, Artificial Sequence
  Description of Artificial Sequence: Synthetic oligonucleotide
cacacgacaccccacaccu

SEQ ID NO: 2107602 - RNA, 19 nt, Artificial Sequence
  Description of Artificial Sequence: Synthetic oligonucleotide
cuguagcaagccagcucgg

SEQ ID NO: 2107603 - RNA, 19 nt, Artificial Sequence
  Description of Artificial Sequence: Synthetic oligonucleotide
caguucguaaguuuucccu

SEQ ID NO: 2107604 - RNA, 19 nt, Artificial Sequence
  Description of Artificial Sequence: Synthetic oligonucleotide
guggucggacacuggauuc

SEQ ID NO: 2107605 - RNA, 19 nt, Artificial Sequence
  Description of Artificial Sequence: Synthetic oligonucleotide
ugggcaccaugucucgcac

SEQ ID NO: 2107606 - RNA, 19 nt, Artificial Sequence
  Description of Artificial Sequence: Synthetic oligonucleotide
gauggacaccaucuucucu

SEQ ID NO: 2107607 - RNA, 19 nt, Artificial Sequence
  Description of Artificial Sequence: Synthetic oligonucleotide
accaugucucgcacgucac

SEQ ID NO: 2107608 - RNA, 19 nt, Artificial Sequence
  Description of Artificial Sequence: Synthetic oligonucleotide
ucgcugcugggcaccaugu

SEQ ID NO: 2107609 - RNA, 19 nt, Artificial Sequence
  Description of Artificial Sequence: Synthetic oligonucleotide
gcugauggacaccaucuuc

SEQ ID NO: 2107610 - RNA, 19 nt, Artificial Sequence
  Description of Artificial Sequence: Synthetic oligonucleotide
ggaaaccaacacugggcgc

SEQ ID NO: 2107611 - RNA, 19 nt, Artificial Sequence
  Description of Artificial Sequence: Synthetic oligonucleotide
uggucggacacuggauucu

SEQ ID NO: 2107612 - RNA, 19 nt, Artificial Sequence
  Description of Artificial Sequence: Synthetic oligonucleotide
caaugagccgacggccucc

SEQ ID NO: 2107613 - RNA, 19 nt, Artificial Sequence
  Description of Artificial Sequence: Synthetic oligonucleotide
uucgggcugccauuuugaa

SEQ ID NO: 2107614 - RNA, 19 nt, Artificial Sequence
  Description of Artificial Sequence: Synthetic oligonucleotide
acauaucguaggagucaac

SEQ ID NO: 2107615 - RNA, 19 nt, Artificial Sequence
  Description of Artificial Sequence: Synthetic oligonucleotide
cacugaccuugccaugggc

SEQ ID NO: 2107616 - RNA, 19 nt, Artificial Sequence
  Description of Artificial Sequence: Synthetic oligonucleotide
gagggccaucagcugcccg

SEQ ID NO: 2107617 - RNA, 19 nt, Artificial Sequence
  Description of Artificial Sequence: Synthetic oligonucleotide
cugccguucucacacgaca

SEQ ID NO: 2107618 - RNA, 19 nt, Artificial Sequence
  Description of Artificial Sequence: Synthetic oligonucleotide
cguccauucuucaacaaca

SEQ ID NO: 2107619 - RNA, 19 nt, Artificial Sequence
  Description of Artificial Sequence: Synthetic oligonucleotide
aguccggcuccugcacugc

SEQ ID NO: 2107620 - RNA, 19 nt, Artificial Sequence
  Description of Artificial Sequence: Synthetic oligonucleotide
aaguggucggacacuggau

SEQ ID NO: 2107621 - RNA, 19 nt, Artificial Sequence
  Description of Artificial Sequence: Synthetic oligonucleotide
gagcaguucguaaguuuuc

SEQ ID NO: 2107622 - RNA, 19 nt, Artificial Sequence
  Description of Artificial Sequence: Synthetic oligonucleotide
acggccuccgcucuugcuu

SEQ ID NO: 2107623 - RNA, 19 nt, Artificial Sequence
  Description of Artificial Sequence: Synthetic oligonucleotide
guggauaguugcugaugga

SEQ ID NO: 2107624 - RNA, 19 nt, Artificial Sequence
  Description of Artificial Sequence: Synthetic oligonucleotide
ugggaaguggucggacacu

SEQ ID NO: 2107625 - RNA, 19 nt, Artificial Sequence
  Description of Artificial Sequence: Synthetic oligonucleotide
ugggucccguccauucuuc

SEQ ID NO: 2107626 - RNA, 19 nt, Artificial Sequence
  Description of Artificial Sequence: Synthetic oligonucleotide
gagccgacggccuccgcuc

SEQ ID NO: 2107627 - RNA, 19 nt, Artificial Sequence
  Description of Artificial Sequence: Synthetic oligonucleotide
guugcgcugacguccuuaa

SEQ ID NO: 2107628 - RNA, 19 nt, Artificial Sequence
  Description of Artificial Sequence: Synthetic oligonucleotide
cuuccagcagacauaucgu

SEQ ID NO: 2107629 - RNA, 19 nt, Artificial Sequence
  Description of Artificial Sequence: Synthetic oligonucleotide
caguccggcuccugcacug

SEQ ID NO: 2107630 - RNA, 19 nt, Artificial Sequence
  Description of Artificial Sequence: Synthetic oligonucleotide
ugcaagcagaccggaaguu

SEQ ID NO: 2107631 - RNA, 19 nt, Artificial Sequence
  Description of Artificial Sequence: Synthetic oligonucleotide
cugggcaccaugucucgca

SEQ ID NO: 2107632 - RNA, 19 nt, Artificial Sequence
  Description of Artificial Sequence: Synthetic oligonucleotide
uggcuccuacucuaccauc

SEQ ID NO: 2107633 - RNA, 19 nt, Artificial Sequence
  Description of Artificial Sequence: Synthetic oligonucleotide
gucucgcacgucacugacg

SEQ ID NO: 2107634 - RNA, 19 nt, Artificial Sequence
  Description of Artificial Sequence: Synthetic oligonucleotide
cuucuguguguggauauaa

SEQ ID NO: 2107635 - RNA, 19 nt, Artificial Sequence
  Description of Artificial Sequence: Synthetic oligonucleotide
aaacgccgugcacgaggcu

SEQ ID NO: 2107636 - RNA, 19 nt, Artificial Sequence
  Description of Artificial Sequence: Synthetic oligonucleotide
accggaaguugcgcugacg

SEQ ID NO: 2107637 - RNA, 19 nt, Artificial Sequence
  Description of Artificial Sequence: Synthetic oligonucleotide
cagcagacauaucguagga

SEQ ID NO: 2107638 - RNA, 19 nt, Artificial Sequence
  Description of Artificial Sequence: Synthetic oligonucleotide
gguggguaaugucuggucu

SEQ ID NO: 2107639 - RNA, 19 nt, Artificial Sequence
  Description of Artificial Sequence: Synthetic oligonucleotide
gguaaugucuggucugacu

SEQ ID NO: 2107640 - RNA, 19 nt, Artificial Sequence
  Description of Artificial Sequence: Synthetic oligonucleotide
agaccggaaguugcgcuga

SEQ ID NO: 2107641 - RNA, 19 nt, Artificial Sequence
  Description of Artificial Sequence: Synthetic oligonucleotide
caaaagcuucugagggcca

SEQ ID NO: 2107642 - RNA, 19 nt, Artificial Sequence
  Description of Artificial Sequence: Synthetic oligonucleotide
uccggcuccugcacugcaa

SEQ ID NO: 2107643 - RNA, 19 nt, Artificial Sequence
  Description of Artificial Sequence: Synthetic oligonucleotide
cgaccacgaaaacaauugg

SEQ ID NO: 2107644 - RNA, 19 nt, Artificial Sequence
  Description of Artificial Sequence: Synthetic oligonucleotide
uugggucgcugcugggcac

SEQ ID NO: 2107645 - RNA, 19 nt, Artificial Sequence
  Description of Artificial Sequence: Synthetic oligonucleotide
gugguaaguuuggcacagg

SEQ ID NO: 2107646 - RNA, 19 nt, Artificial Sequence
  Description of Artificial Sequence: Synthetic oligonucleotide
gggcuauccaucagcauca

SEQ ID NO: 2107647 - RNA, 19 nt, Artificial Sequence
  Description of Artificial Sequence: Synthetic oligonucleotide
ucccuaccuugacugucuc

SEQ ID NO: 2107648 - RNA, 19 nt, Artificial Sequence
  Description of Artificial Sequence: Synthetic oligonucleotide
cugacguccuuaaguuaga

SEQ ID NO: 2107649 - RNA, 19 nt, Artificial Sequence
  Description of Artificial Sequence: Synthetic oligonucleotide
ccucuuaggcggcgcaugg

SEQ ID NO: 2107650 - RNA, 19 nt, Artificial Sequence
  Description of Artificial Sequence: Synthetic oligonucleotide
ccguccauucuucaacaac

SEQ ID NO: 2107651 - RNA, 19 nt, Artificial Sequence
  Description of Artificial Sequence: Synthetic oligonucleotide
acgaggcuggaaaccaaca

SEQ ID NO: 2107652 - RNA, 19 nt, Artificial Sequence
  Description of Artificial Sequence: Synthetic oligonucleotide
aggccccgaccacgaaaac

SEQ ID NO: 2107653 - RNA, 19 nt, Artificial Sequence
  Description of Artificial Sequence: Synthetic oligonucleotide
acgccgugcacgaggcugg

SEQ ID NO: 2107654 - RNA, 19 nt, Artificial Sequence
  Description of Artificial Sequence: Synthetic oligonucleotide
cacgacaccccacaccucu

SEQ ID NO: 2107655 - RNA, 19 nt, Artificial Sequence
  Description of Artificial Sequence: Synthetic oligonucleotide
augagccgacggccuccgc

SEQ ID NO: 2107656 - RNA, 19 nt, Artificial Sequence
  Description of Artificial Sequence: Synthetic oligonucleotide
gccaauuuucauacagcca

SEQ ID NO: 2107657 - RNA, 19 nt, Artificial Sequence
  Description of Artificial Sequence: Synthetic oligonucleotide
gggguucacuucaaucagc

SEQ ID NO: 2107658 - RNA, 19 nt, Artificial Sequence
  Description of Artificial Sequence: Synthetic oligonucleotide
caugggcaaaggccccgac

SEQ ID NO: 2107659 - RNA, 19 nt, Artificial Sequence
  Description of Artificial Sequence: Synthetic oligonucleotide
aguugcgcugacguccuua

SEQ ID NO: 2107660 - RNA, 19 nt, Artificial Sequence
  Description of Artificial Sequence: Synthetic oligonucleotide
ugucuccagacuggccccu

SEQ ID NO: 2107661 - RNA, 19 nt, Artificial Sequence
  Description of Artificial Sequence: Synthetic oligonucleotide
gccaagaguccugucugag

SEQ ID NO: 2107662 - RNA, 19 nt, Artificial Sequence
  Description of Artificial Sequence: Synthetic oligonucleotide
gaaguugcgcugacguccu

SEQ ID NO: 2107663 - RNA, 19 nt, Artificial Sequence
  Description of Artificial Sequence: Synthetic oligonucleotide
gguaaguuuggcacaggua

SEQ ID NO: 2107664 - RNA, 19 nt, Artificial Sequence
  Description of Artificial Sequence: Synthetic oligonucleotide
ugagggccaucagcugccc

SEQ ID NO: 2107665 - RNA, 19 nt, Artificial Sequence
  Description of Artificial Sequence: Synthetic oligonucleotide
ccucgcaaacuuccuucgg

SEQ ID NO: 2107666 - RNA, 19 nt, Artificial Sequence
  Description of Artificial Sequence: Synthetic oligonucleotide
cagcaccacaaugagccga

SEQ ID NO: 2107667 - RNA, 19 nt, Artificial Sequence
  Description of Artificial Sequence: Synthetic oligonucleotide
ccuucgggcugccauuuug

SEQ ID NO: 2107668 - RNA, 19 nt, Artificial Sequence
  Description of Artificial Sequence: Synthetic oligonucleotide
ggcaccaugucucgcacgu

SEQ ID NO: 2107669 - RNA, 19 nt, Artificial Sequence
  Description of Artificial Sequence: Synthetic oligonucleotide
gggcaccaugucucgcacg

SEQ ID NO: 2107670 - RNA, 19 nt, Artificial Sequence
  Description of Artificial Sequence: Synthetic oligonucleotide
accuugccaugggcaaagg

SEQ ID NO: 2107671 - RNA, 19 nt, Artificial Sequence
  Description of Artificial Sequence: Synthetic oligonucleotide
guagcaagccagcucgguu

SEQ ID NO: 2107672 - RNA, 19 nt, Artificial Sequence
  Description of Artificial Sequence: Synthetic oligonucleotide
cguucucacacgacacccc

SEQ ID NO: 2107673 - RNA, 19 nt, Artificial Sequence
  Description of Artificial Sequence: Synthetic oligonucleotide
gacuggccccuuccagcac

SEQ ID NO: 2107674 - RNA, 19 nt, Artificial Sequence
  Description of Artificial Sequence: Synthetic oligonucleotide
gccccgaccacgaaaacaa

SEQ ID NO: 2107675 - RNA, 19 nt, Artificial Sequence
  Description of Artificial Sequence: Synthetic oligonucleotide
guguuggcuccuacucuac

SEQ ID NO: 2107676 - RNA, 19 nt, Artificial Sequence
  Description of Artificial Sequence: Synthetic oligonucleotide
gccaucuugcaagcagacc

SEQ ID NO: 2107677 - RNA, 19 nt, Artificial Sequence
  Description of Artificial Sequence: Synthetic oligonucleotide
uuagaccaccgcgcucguc

SEQ ID NO: 2107678 - RNA, 19 nt, Artificial Sequence
  Description of Artificial Sequence: Synthetic oligonucleotide
acacgacaccccacaccuc

SEQ ID NO: 2107679 - RNA, 19 nt, Artificial Sequence
  Description of Artificial Sequence: Synthetic oligonucleotide
guguggauauaaaccugua

SEQ ID NO: 2107680 - RNA, 19 nt, Artificial Sequence
  Description of Artificial Sequence: Synthetic oligonucleotide
gguaagggcagcggaaagu

SEQ ID NO: 2107681 - RNA, 19 nt, Artificial Sequence
  Description of Artificial Sequence: Synthetic oligonucleotide
caaaggcugugguaaguuu

SEQ ID NO: 2107682 - RNA, 19 nt, Artificial Sequence
  Description of Artificial Sequence: Synthetic oligonucleotide
gcucugguggguaaugucu

SEQ ID NO: 2107683 - RNA, 19 nt, Artificial Sequence
  Description of Artificial Sequence: Synthetic oligonucleotide
gcucugccguucucacacg

SEQ ID NO: 2107684 - RNA, 19 nt, Artificial Sequence
  Description of Artificial Sequence: Synthetic oligonucleotide
cccuaccuugacugucucc

SEQ ID NO: 2107685 - RNA, 19 nt, Artificial Sequence
  Description of Artificial Sequence: Synthetic oligonucleotide
ccaagaguccugucugaga

SEQ ID NO: 2107686 - RNA, 19 nt, Artificial Sequence
  Description of Artificial Sequence: Synthetic oligonucleotide
ccaagccggggccucuuag

SEQ ID NO: 2107687 - RNA, 19 nt, Artificial Sequence
  Description of Artificial Sequence: Synthetic oligonucleotide
uccuucgggcugccauuuu

SEQ ID NO: 2107688 - RNA, 19 nt, Artificial Sequence
  Description of Artificial Sequence: Synthetic oligonucleotide
agccgacggccuccgcucu

SEQ ID NO: 2107689 - RNA, 19 nt, Artificial Sequence
  Description of Artificial Sequence: Synthetic oligonucleotide
uaggcggcgcaugguccca

SEQ ID NO: 2107690 - RNA, 19 nt, Artificial Sequence
  Description of Artificial Sequence: Synthetic oligonucleotide
aaguugcgcugacguccuu

SEQ ID NO: 2107691 - RNA, 19 nt, Artificial Sequence
  Description of Artificial Sequence: Synthetic oligonucleotide
guugagcaguucguaaguu

SEQ ID NO: 2107692 - RNA, 19 nt, Artificial Sequence
  Description of Artificial Sequence: Synthetic oligonucleotide
ggucccguccauucuucaa

SEQ ID NO: 2107693 - RNA, 19 nt, Artificial Sequence
  Description of Artificial Sequence: Synthetic oligonucleotide
ggccccgaccacgaaaaca

SEQ ID NO: 2107694 - RNA, 19 nt, Artificial Sequence
  Description of Artificial Sequence: Synthetic oligonucleotide
gcacugcaaaacgccgugc

SEQ ID NO: 2107695 - RNA, 19 nt, Artificial Sequence
  Description of Artificial Sequence: Synthetic oligonucleotide
ggcuccuacucuaccaucu

SEQ ID NO: 2107696 - RNA, 19 nt, Artificial Sequence
  Description of Artificial Sequence: Synthetic oligonucleotide
gccucuuaggcggcgcaug

SEQ ID NO: 2107697 - RNA, 19 nt, Artificial Sequence
  Description of Artificial Sequence: Synthetic oligonucleotide
gcagaccggaaguugcgcu

SEQ ID NO: 2107698 - RNA, 19 nt, Artificial Sequence
  Description of Artificial Sequence: Synthetic oligonucleotide
ggcuauccaucagcaucag

SEQ ID NO: 2107699 - RNA, 19 nt, Artificial Sequence
  Description of Artificial Sequence: Synthetic oligonucleotide
guaagcucugguggguaau

SEQ ID NO: 2107700 - RNA, 19 nt, Artificial Sequence
  Description of Artificial Sequence: Synthetic oligonucleotide
gaccaccgcgcucguccuc

SEQ ID NO: 2107701 - RNA, 19 nt, Artificial Sequence
  Description of Artificial Sequence: Synthetic oligonucleotide
ccggaaguugcgcugacgu

SEQ ID NO: 2107702 - RNA, 19 nt, Artificial Sequence
  Description of Artificial Sequence: Synthetic oligonucleotide
gcaaaacgccgugcacgag

SEQ ID NO: 2107703 - RNA, 19 nt, Artificial Sequence
  Description of Artificial Sequence: Synthetic oligonucleotide
caguaagcucuggugggua

SEQ ID NO: 2107704 - RNA, 19 nt, Artificial Sequence
  Description of Artificial Sequence: Synthetic oligonucleotide
cggcgcauggucccagucc

SEQ ID NO: 2107705 - RNA, 19 nt, Artificial Sequence
  Description of Artificial Sequence: Synthetic oligonucleotide
gcucguccuccucgcaaac

SEQ ID NO: 2107706 - RNA, 19 nt, Artificial Sequence
  Description of Artificial Sequence: Synthetic oligonucleotide
ccgugcacgaggcuggaaa

SEQ ID NO: 2107707 - RNA, 19 nt, Artificial Sequence
  Description of Artificial Sequence: Synthetic oligonucleotide
gaguccugucugagaacua

SEQ ID NO: 2107708 - RNA, 19 nt, Artificial Sequence
  Description of Artificial Sequence: Synthetic oligonucleotide
gacggccuccgcucuugcu

SEQ ID NO: 2107709 - RNA, 19 nt, Artificial Sequence
  Description of Artificial Sequence: Synthetic oligonucleotide
agcugcccggacacugagu

SEQ ID NO: 2107710 - RNA, 19 nt, Artificial Sequence
  Description of Artificial Sequence: Synthetic oligonucleotide
cccaguccggcuccugcac

SEQ ID NO: 2107711 - RNA, 19 nt, Artificial Sequence
  Description of Artificial Sequence: Synthetic oligonucleotide
ggucugacuuccccugggu

SEQ ID NO: 2107712 - RNA, 19 nt, Artificial Sequence
  Description of Artificial Sequence: Synthetic oligonucleotide
gcgcugacguccuuaaguu

SEQ ID NO: 2107713 - RNA, 19 nt, Artificial Sequence
  Description of Artificial Sequence: Synthetic oligonucleotide
aggcggcgcauggucccag

SEQ ID NO: 2107714 - RNA, 19 nt, Artificial Sequence
  Description of Artificial Sequence: Synthetic oligonucleotide
guuagaccaccgcgcucgu

SEQ ID NO: 2107715 - RNA, 19 nt, Artificial Sequence
  Description of Artificial Sequence: Synthetic oligonucleotide
cagcggaaaguggauaguu

SEQ ID NO: 2107716 - RNA, 19 nt, Artificial Sequence
  Description of Artificial Sequence: Synthetic oligonucleotide
ccggacacugaguuugugu

SEQ ID NO: 2107717 - RNA, 19 nt, Artificial Sequence
  Description of Artificial Sequence: Synthetic oligonucleotide
cggaaguugcgcugacguc

SEQ ID NO: 2107718 - RNA, 19 nt, Artificial Sequence
  Description of Artificial Sequence: Synthetic oligonucleotide
caaaggccccgaccacgaa

SEQ ID NO: 2107719 - RNA, 19 nt, Artificial Sequence
  Description of Artificial Sequence: Synthetic oligonucleotide
gcuauccaucagcaucagu

SEQ ID NO: 2107720 - RNA, 19 nt, Artificial Sequence
  Description of Artificial Sequence: Synthetic oligonucleotide
gucggacacuggauucuua

SEQ ID NO: 2107721 - RNA, 19 nt, Artificial Sequence
  Description of Artificial Sequence: Synthetic oligonucleotide
cugggucccguccauucuu

SEQ ID NO: 2107722 - RNA, 19 nt, Artificial Sequence
  Description of Artificial Sequence: Synthetic oligonucleotide
gcgcauggucccaguccgg

SEQ ID NO: 2107723 - RNA, 19 nt, Artificial Sequence
  Description of Artificial Sequence: Synthetic oligonucleotide
gcgcucguccuccucgcaa

SEQ ID NO: 2107724 - RNA, 19 nt, Artificial Sequence
  Description of Artificial Sequence: Synthetic oligonucleotide
ggggccucuuaggcggcgc

SEQ ID NO: 2107725 - RNA, 19 nt, Artificial Sequence
  Description of Artificial Sequence: Synthetic oligonucleotide
cucguccuccucgcaaacu

SEQ ID NO: 2107726 - RNA, 19 nt, Artificial Sequence
  Description of Artificial Sequence: Synthetic oligonucleotide
acgacaccccacaccucuu

SEQ ID NO: 2107727 - RNA, 19 nt, Artificial Sequence
  Description of Artificial Sequence: Synthetic oligonucleotide
ccgcgcucguccuccucgc

SEQ ID NO: 2107728 - RNA, 19 nt, Artificial Sequence
  Description of Artificial Sequence: Synthetic oligonucleotide
caccgcgcucguccuccuc

SEQ ID NO: 2107729 - RNA, 19 nt, Artificial Sequence
  Description of Artificial Sequence: Synthetic oligonucleotide
gcggcgcauggucccaguc

SEQ ID NO: 2107730 - RNA, 19 nt, Artificial Sequence
  Description of Artificial Sequence: Synthetic oligonucleotide
gggccaucagcugcccgga

SEQ ID NO: 2107731 - RNA, 19 nt, Artificial Sequence
  Description of Artificial Sequence: Synthetic oligonucleotide
ccaacacugggcgcagcca

SEQ ID NO: 2107732 - RNA, 19 nt, Artificial Sequence
  Description of Artificial Sequence: Synthetic oligonucleotide
cuggaccaugaggccacaa

SEQ ID NO: 2107733 - RNA, 19 nt, Artificial Sequence
  Description of Artificial Sequence: Synthetic oligonucleotide
cucuuaggcggcgcauggu

SEQ ID NO: 2107734 - RNA, 19 nt, Artificial Sequence
  Description of Artificial Sequence: Synthetic oligonucleotide
cccgaccacgaaaacaauu

SEQ ID NO: 2107735 - RNA, 19 nt, Artificial Sequence
  Description of Artificial Sequence: Synthetic oligonucleotide
cggccuccgcucuugcuuc

SEQ ID NO: 2107736 - RNA, 19 nt, Artificial Sequence
  Description of Artificial Sequence: Synthetic oligonucleotide
gcagcggaaaguggauagu

SEQ ID NO: 2107737 - RNA, 19 nt, Artificial Sequence
  Description of Artificial Sequence: Synthetic oligonucleotide
gggcagcggaaaguggaua

SEQ ID NO: 2107738 - RNA, 19 nt, Artificial Sequence
  Description of Artificial Sequence: Synthetic oligonucleotide
cccguccauucuucaacaa

SEQ ID NO: 2107739 - RNA, 19 nt, Artificial Sequence
  Description of Artificial Sequence: Synthetic oligonucleotide
ccgacggccuccgcucuug

SEQ ID NO: 2107740 - RNA, 19 nt, Artificial Sequence
  Description of Artificial Sequence: Synthetic oligonucleotide
gcacgaggcuggaaaccaa

SEQ ID NO: 2107741 - RNA, 19 nt, Artificial Sequence
  Description of Artificial Sequence: Synthetic oligonucleotide
cacugacgucugccaugga

SEQ ID NO: 2107742 - RNA, 19 nt, Artificial Sequence
  Description of Artificial Sequence: Synthetic oligonucleotide
cucuugcuuccugccccaa

SEQ ID NO: 2107743 - RNA, 19 nt, Artificial Sequence
  Description of Artificial Sequence: Synthetic oligonucleotide
cccggacacugaguuugug

SEQ ID NO: 2107744 - RNA, 19 nt, Artificial Sequence
  Description of Artificial Sequence: Synthetic oligonucleotide
gacuuccccugggucccgu

SEQ ID NO: 2107745 - RNA, 19 nt, Artificial Sequence
  Description of Artificial Sequence: Synthetic oligonucleotide
ccaugucucgcacgucacu

SEQ ID NO: 2107746 - RNA, 19 nt, Artificial Sequence
  Description of Artificial Sequence: Synthetic oligonucleotide
cgcucguccuccucgcaaa

SEQ ID NO: 2107747 - RNA, 19 nt, Artificial Sequence
  Description of Artificial Sequence: Synthetic oligonucleotide
ccaugggcaaaggccccga

SEQ ID NO: 2107748 - RNA, 19 nt, Artificial Sequence
  Description of Artificial Sequence: Synthetic oligonucleotide
ggucggacacuggauucuu

SEQ ID NO: 2107749 - RNA, 19 nt, Artificial Sequence
  Description of Artificial Sequence: Synthetic oligonucleotide
cgcugacguccuuaaguua

SEQ ID NO: 2107750 - RNA, 19 nt, Artificial Sequence
  Description of Artificial Sequence: Synthetic oligonucleotide
caucagcugcccggacacu

SEQ ID NO: 2107751 - RNA, 19 nt, Artificial Sequence
  Description of Artificial Sequence: Synthetic oligonucleotide
ccuccucgcaaacuuccuu

SEQ ID NO: 2107752 - RNA, 19 nt, Artificial Sequence
  Description of Artificial Sequence: Synthetic oligonucleotide
ccaguccggcuccugcacu

SEQ ID NO: 2107753 - RNA, 19 nt, Artificial Sequence
  Description of Artificial Sequence: Synthetic oligonucleotide
ggcggcgcauggucccagu

SEQ ID NO: 2107754 - RNA, 19 nt, Artificial Sequence
  Description of Artificial Sequence: Synthetic oligonucleotide
gccgugcacgaggcuggaa

SEQ ID NO: 2107755 - RNA, 19 nt, Artificial Sequence
  Description of Artificial Sequence: Synthetic oligonucleotide
cccaagccggggccucuua

SEQ ID NO: 2107756 - RNA, 19 nt, Artificial Sequence
  Description of Artificial Sequence: Synthetic oligonucleotide
cgcgcucguccuccucgca

SEQ ID NO: 2107757 - RNA, 19 nt, Artificial Sequence
  Description of Artificial Sequence: Synthetic oligonucleotide
gccgacggccuccgcucuu

SEQ ID NO: 2107758 - RNA, 19 nt, Artificial Sequence
  Description of Artificial Sequence: Synthetic oligonucleotide
gccccaagccggggccucu

SEQ ID NO: 2107759 - RNA, 19 nt, Artificial Sequence
  Description of Artificial Sequence: Synthetic oligonucleotide
ggucgcugcugggcaccau

SEQ ID NO: 2107760 - RNA, 19 nt, Artificial Sequence
  Description of Artificial Sequence: Synthetic oligonucleotide
ccaccgcgcucguccuccu

SEQ ID NO: 2107761 - RNA, 19 nt, Artificial Sequence
  Description of Artificial Sequence: Synthetic oligonucleotide
cgccgugcacgaggcugga

SEQ ID NO: 2107762 - RNA, 19 nt, Artificial Sequence
  Description of Artificial Sequence: Synthetic oligonucleotide
uauucaaacagucaggcag

SEQ ID NO: 2107763 - RNA, 19 nt, Artificial Sequence
  Description of Artificial Sequence: Synthetic oligonucleotide
uuugccaauauucaaacag

SEQ ID NO: 2107764 - RNA, 19 nt, Artificial Sequence
  Description of Artificial Sequence: Synthetic oligonucleotide
uguauaguagcacugaucu

SEQ ID NO: 2107765 - RNA, 19 nt, Artificial Sequence
  Description of Artificial Sequence: Synthetic oligonucleotide
uuugugaugggguugaagg

SEQ ID NO: 2107766 - RNA, 19 nt, Artificial Sequence
  Description of Artificial Sequence: Synthetic oligonucleotide
aaucccgccaaucaagacc

SEQ ID NO: 2107767 - RNA, 19 nt, Artificial Sequence
  Description of Artificial Sequence: Synthetic oligonucleotide
acaaggacauugcagaggc

SEQ ID NO: 2107768 - RNA, 19 nt, Artificial Sequence
  Description of Artificial Sequence: Synthetic oligonucleotide
aacuaaucuuuccuuuucc

SEQ ID NO: 2107769 - RNA, 19 nt, Artificial Sequence
  Description of Artificial Sequence: Synthetic oligonucleotide
ugaaacaaggacauugcag

SEQ ID NO: 2107770 - RNA, 19 nt, Artificial Sequence
  Description of Artificial Sequence: Synthetic oligonucleotide
aguagcacugaucucauuc

SEQ ID NO: 2107771 - RNA, 19 nt, Artificial Sequence
  Description of Artificial Sequence: Synthetic oligonucleotide
gucauaaacauucaaaaga

SEQ ID NO: 2107772 - RNA, 19 nt, Artificial Sequence
  Description of Artificial Sequence: Synthetic oligonucleotide
uauaguagcacugaucuca

SEQ ID NO: 2107773 - RNA, 19 nt, Artificial Sequence
  Description of Artificial Sequence: Synthetic oligonucleotide
auuauuguuugaaacaagg

SEQ ID NO: 2107774 - RNA, 19 nt, Artificial Sequence
  Description of Artificial Sequence: Synthetic oligonucleotide
uuugaaacaaggacauugc

SEQ ID NO: 2107775 - RNA, 19 nt, Artificial Sequence
  Description of Artificial Sequence: Synthetic oligonucleotide
caaaagaucuucuaaaaca

SEQ ID NO: 2107776 - RNA, 19 nt, Artificial Sequence
  Description of Artificial Sequence: Synthetic oligonucleotide
uagaagucaggauauuggg

SEQ ID NO: 2107777 - RNA, 19 nt, Artificial Sequence
  Description of Artificial Sequence: Synthetic oligonucleotide
cuaguagaggccauggucc

SEQ ID NO: 2107778 - RNA, 19 nt, Artificial Sequence
  Description of Artificial Sequence: Synthetic oligonucleotide
guacauuccuguuuggugg

SEQ ID NO: 2107779 - RNA, 19 nt, Artificial Sequence
  Description of Artificial Sequence: Synthetic oligonucleotide
aagaccagcgcccucuaac

SEQ ID NO: 2107780 - RNA, 19 nt, Artificial Sequence
  Description of Artificial Sequence: Synthetic oligonucleotide
agucauaaacauucaaaag

SEQ ID NO: 2107781 - RNA, 19 nt, Artificial Sequence
  Description of Artificial Sequence: Synthetic oligonucleotide
ucaaaagaucuucuaaaac

SEQ ID NO: 2107782 - RNA, 19 nt, Artificial Sequence
  Description of Artificial Sequence: Synthetic oligonucleotide
uguucaguaaucagcaccu

SEQ ID NO: 2107783 - RNA, 19 nt, Artificial Sequence
  Description of Artificial Sequence: Synthetic oligonucleotide
ucaaaucccgccaaucaag

SEQ ID NO: 2107784 - RNA, 19 nt, Artificial Sequence
  Description of Artificial Sequence: Synthetic oligonucleotide
ugguguuuagaguauagca

SEQ ID NO: 2107785 - RNA, 19 nt, Artificial Sequence
  Description of Artificial Sequence: Synthetic oligonucleotide
ucuucuaaaacagucggca

SEQ ID NO: 2107786 - RNA, 19 nt, Artificial Sequence
  Description of Artificial Sequence: Synthetic oligonucleotide
caauauucaaacagucagg

SEQ ID NO: 2107787 - RNA, 19 nt, Artificial Sequence
  Description of Artificial Sequence: Synthetic oligonucleotide
ugguauuauuguuugaaac

SEQ ID NO: 2107788 - RNA, 19 nt, Artificial Sequence
  Description of Artificial Sequence: Synthetic oligonucleotide
acagaggaguuucagcucg

SEQ ID NO: 2107789 - RNA, 19 nt, Artificial Sequence
  Description of Artificial Sequence: Synthetic oligonucleotide
agauacuucacacuuccug

SEQ ID NO: 2107790 - RNA, 19 nt, Artificial Sequence
  Description of Artificial Sequence: Synthetic oligonucleotide
caagauguacccuuucggg

SEQ ID NO: 2107791 - RNA, 19 nt, Artificial Sequence
  Description of Artificial Sequence: Synthetic oligonucleotide
uucugaauggguucccugg

SEQ ID NO: 2107792 - RNA, 19 nt, Artificial Sequence
  Description of Artificial Sequence: Synthetic oligonucleotide
auacuucacacuuccugcc

SEQ ID NO: 2107793 - RNA, 19 nt, Artificial Sequence
  Description of Artificial Sequence: Synthetic oligonucleotide
ugagauaaugcccucgauc

SEQ ID NO: 2107794 - RNA, 19 nt, Artificial Sequence
  Description of Artificial Sequence: Synthetic oligonucleotide
agauguacccuuucggguc

SEQ ID NO: 2107795 - RNA, 19 nt, Artificial Sequence
  Description of Artificial Sequence: Synthetic oligonucleotide
gauauugggaacccuggug

SEQ ID NO: 2107796 - RNA, 19 nt, Artificial Sequence
  Description of Artificial Sequence: Synthetic oligonucleotide
uuguuugaaacaaggacau

SEQ ID NO: 2107797 - RNA, 19 nt, Artificial Sequence
  Description of Artificial Sequence: Synthetic oligonucleotide
aauacuugcuguaucaaaa

SEQ ID NO: 2107798 - RNA, 19 nt, Artificial Sequence
  Description of Artificial Sequence: Synthetic oligonucleotide
aggugcauauuugugaugg

SEQ ID NO: 2107799 - RNA, 19 nt, Artificial Sequence
  Description of Artificial Sequence: Synthetic oligonucleotide
uuugcuggggucuggaucu

SEQ ID NO: 2107800 - RNA, 19 nt, Artificial Sequence
  Description of Artificial Sequence: Synthetic oligonucleotide
ugcauauuugugauggggu

SEQ ID NO: 2107801 - RNA, 19 nt, Artificial Sequence
  Description of Artificial Sequence: Synthetic oligonucleotide
acccuuucgggucaugacc

SEQ ID NO: 2107802 - RNA, 19 nt, Artificial Sequence
  Description of Artificial Sequence: Synthetic oligonucleotide
aaauacuugcuguaucaaa

SEQ ID NO: 2107803 - RNA, 19 nt, Artificial Sequence
  Description of Artificial Sequence: Synthetic oligonucleotide
uuuagaguauagcagugua

SEQ ID NO: 2107804 - RNA, 19 nt, Artificial Sequence
  Description of Artificial Sequence: Synthetic oligonucleotide
uguuuagaguauagcagug

SEQ ID NO: 2107805 - RNA, 19 nt, Artificial Sequence
  Description of Artificial Sequence: Synthetic oligonucleotide
cuguucaguaaucagcacc

SEQ ID NO: 2107806 - RNA, 19 nt, Artificial Sequence
  Description of Artificial Sequence: Synthetic oligonucleotide
cuuuugccaauauucaaac

SEQ ID NO: 2107807 - RNA, 19 nt, Artificial Sequence
  Description of Artificial Sequence: Synthetic oligonucleotide
ccaauauucaaacagucag

SEQ ID NO: 2107808 - RNA, 19 nt, Artificial Sequence
  Description of Artificial Sequence: Synthetic oligonucleotide
uucaguaaucagcaccuug

SEQ ID NO: 2107809 - RNA, 19 nt, Artificial Sequence
  Description of Artificial Sequence: Synthetic oligonucleotide
ucagcaccuugucaaaucc

SEQ ID NO: 2107810 - RNA, 19 nt, Artificial Sequence
  Description of Artificial Sequence: Synthetic oligonucleotide
aggaguuucagcucgggca

SEQ ID NO: 2107811 - RNA, 19 nt, Artificial Sequence
  Description of Artificial Sequence: Synthetic oligonucleotide
uggaucuuccaucugggcu

SEQ ID NO: 2107812 - RNA, 19 nt, Artificial Sequence
  Description of Artificial Sequence: Synthetic oligonucleotide
guaaucagcaccuugucaa

SEQ ID NO: 2107813 - RNA, 19 nt, Artificial Sequence
  Description of Artificial Sequence: Synthetic oligonucleotide
agucaggauauugggaacc

SEQ ID NO: 2107814 - RNA, 19 nt, Artificial Sequence
  Description of Artificial Sequence: Synthetic oligonucleotide
aacccugguguuuagagua

SEQ ID NO: 2107815 - RNA, 19 nt, Artificial Sequence
  Description of Artificial Sequence: Synthetic oligonucleotide
ucuucaggacgucugcucc

SEQ ID NO: 2107816 - RNA, 19 nt, Artificial Sequence
  Description of Artificial Sequence: Synthetic oligonucleotide
gauaaugcccucgaucacc

SEQ ID NO: 2107817 - RNA, 19 nt, Artificial Sequence
  Description of Artificial Sequence: Synthetic oligonucleotide
uccucacuugguauuauug

SEQ ID NO: 2107818 - RNA, 19 nt, Artificial Sequence
  Description of Artificial Sequence: Synthetic oligonucleotide
accguuuccauccacugug

SEQ ID NO: 2107819 - RNA, 19 nt, Artificial Sequence
  Description of Artificial Sequence: Synthetic oligonucleotide
uuuccagauuucugaaucc

SEQ ID NO: 2107820 - RNA, 19 nt, Artificial Sequence
  Description of Artificial Sequence: Synthetic oligonucleotide
ucuaacuaaucuuuccuuu

SEQ ID NO: 2107821 - RNA, 19 nt, Artificial Sequence
  Description of Artificial Sequence: Synthetic oligonucleotide
cuuuccugauguauaguag

SEQ ID NO: 2107822 - RNA, 19 nt, Artificial Sequence
  Description of Artificial Sequence: Synthetic oligonucleotide
aggucuuucuucccauagc

SEQ ID NO: 2107823 - RNA, 19 nt, Artificial Sequence
  Description of Artificial Sequence: Synthetic oligonucleotide
uuagaguauagcaguguaa

SEQ ID NO: 2107824 - RNA, 19 nt, Artificial Sequence
  Description of Artificial Sequence: Synthetic oligonucleotide
agauguacuguuuccagau

SEQ ID NO: 2107825 - RNA, 19 nt, Artificial Sequence
  Description of Artificial Sequence: Synthetic oligonucleotide
uaacuaaucuuuccuuuuc

SEQ ID NO: 2107826 - RNA, 19 nt, Artificial Sequence
  Description of Artificial Sequence: Synthetic oligonucleotide
ucgaucaccugguacauuc

SEQ ID NO: 2107827 - RNA, 19 nt, Artificial Sequence
  Description of Artificial Sequence: Synthetic oligonucleotide
cagucaggcagucauaaac

SEQ ID NO: 2107828 - RNA, 19 nt, Artificial Sequence
  Description of Artificial Sequence: Synthetic oligonucleotide
ugccaauauucaaacaguc

SEQ ID NO: 2107829 - RNA, 19 nt, Artificial Sequence
  Description of Artificial Sequence: Synthetic oligonucleotide
ucaaacaaucgcaggugca

SEQ ID NO: 2107830 - RNA, 19 nt, Artificial Sequence
  Description of Artificial Sequence: Synthetic oligonucleotide
acuaaucuuuccuuuuccu

SEQ ID NO: 2107831 - RNA, 19 nt, Artificial Sequence
  Description of Artificial Sequence: Synthetic oligonucleotide
aucagcaccuugucaaauc

SEQ ID NO: 2107832 - RNA, 19 nt, Artificial Sequence
  Description of Artificial Sequence: Synthetic oligonucleotide
auugacaggugagauaaug

SEQ ID NO: 2107833 - RNA, 19 nt, Artificial Sequence
  Description of Artificial Sequence: Synthetic oligonucleotide
ugaauggguucccuggcca

SEQ ID NO: 2107834 - RNA, 19 nt, Artificial Sequence
  Description of Artificial Sequence: Synthetic oligonucleotide
gguguuuagaguauagcag

SEQ ID NO: 2107835 - RNA, 19 nt, Artificial Sequence
  Description of Artificial Sequence: Synthetic oligonucleotide
ggagauacuucacacuucc

SEQ ID NO: 2107836 - RNA, 19 nt, Artificial Sequence
  Description of Artificial Sequence: Synthetic oligonucleotide
aacaaucgcaggugcauau

SEQ ID NO: 2107837 - RNA, 19 nt, Artificial Sequence
  Description of Artificial Sequence: Synthetic oligonucleotide
cucaaacaaucgcaggugc

SEQ ID NO: 2107838 - RNA, 19 nt, Artificial Sequence
  Description of Artificial Sequence: Synthetic oligonucleotide
uggaaggucuucaggacgu

SEQ ID NO: 2107839 - RNA, 19 nt, Artificial Sequence
  Description of Artificial Sequence: Synthetic oligonucleotide
cugauguauaguagcacug

SEQ ID NO: 2107840 - RNA, 19 nt, Artificial Sequence
  Description of Artificial Sequence: Synthetic oligonucleotide
ugauguauaguagcacuga

SEQ ID NO: 2107841 - RNA, 19 nt, Artificial Sequence
  Description of Artificial Sequence: Synthetic oligonucleotide
uugguauuauuguuugaaa

SEQ ID NO: 2107842 - RNA, 19 nt, Artificial Sequence
  Description of Artificial Sequence: Synthetic oligonucleotide
agucagaugucugcagggc

SEQ ID NO: 2107843 - RNA, 19 nt, Artificial Sequence
  Description of Artificial Sequence: Synthetic oligonucleotide
uccacagaggaguuucagc

SEQ ID NO: 2107844 - RNA, 19 nt, Artificial Sequence
  Description of Artificial Sequence: Synthetic oligonucleotide
aacugucggaggaugggcg

SEQ ID NO: 2107845 - RNA, 19 nt, Artificial Sequence
  Description of Artificial Sequence: Synthetic oligonucleotide
uuuugccaauauucaaaca

SEQ ID NO: 2107846 - RNA, 19 nt, Artificial Sequence
  Description of Artificial Sequence: Synthetic oligonucleotide
uaauuacuguucaguaauc

SEQ ID NO: 2107847 - RNA, 19 nt, Artificial Sequence
  Description of Artificial Sequence: Synthetic oligonucleotide
agauuucugaauccucacu

SEQ ID NO: 2107848 - RNA, 19 nt, Artificial Sequence
  Description of Artificial Sequence: Synthetic oligonucleotide
caccaagccaaacuucucc

SEQ ID NO: 2107849 - RNA, 19 nt, Artificial Sequence
  Description of Artificial Sequence: Synthetic oligonucleotide
guauuauuguuugaaacaa

SEQ ID NO: 2107850 - RNA, 19 nt, Artificial Sequence
  Description of Artificial Sequence: Synthetic oligonucleotide
uucugaauccucacuuggu

SEQ ID NO: 2107851 - RNA, 19 nt, Artificial Sequence
  Description of Artificial Sequence: Synthetic oligonucleotide
uacuucacacuuccugccc

SEQ ID NO: 2107852 - RNA, 19 nt, Artificial Sequence
  Description of Artificial Sequence: Synthetic oligonucleotide
agcaccuugucaaaucccg

SEQ ID NO: 2107853 - RNA, 19 nt, Artificial Sequence
  Description of Artificial Sequence: Synthetic oligonucleotide
ucccauagcugucauugac

SEQ ID NO: 2107854 - RNA, 19 nt, Artificial Sequence
  Description of Artificial Sequence: Synthetic oligonucleotide
acgucugcuccacagagga

SEQ ID NO: 2107855 - RNA, 19 nt, Artificial Sequence
  Description of Artificial Sequence: Synthetic oligonucleotide
gguacauuccuguuuggug

SEQ ID NO: 2107856 - RNA, 19 nt, Artificial Sequence
  Description of Artificial Sequence: Synthetic oligonucleotide
auguauaguagcacugauc

SEQ ID NO: 2107857 - RNA, 19 nt, Artificial Sequence
  Description of Artificial Sequence: Synthetic oligonucleotide
aaacagucggcaucuguuu

SEQ ID NO: 2107858 - RNA, 19 nt, Artificial Sequence
  Description of Artificial Sequence: Synthetic oligonucleotide
auguacuguuuccagauuu

SEQ ID NO: 2107859 - RNA, 19 nt, Artificial Sequence
  Description of Artificial Sequence: Synthetic oligonucleotide
gaggcuaauuacuguucag

SEQ ID NO: 2107860 - RNA, 19 nt, Artificial Sequence
  Description of Artificial Sequence: Synthetic oligonucleotide
gaugggguugaaggaaccg

SEQ ID NO: 2107861 - RNA, 19 nt, Artificial Sequence
  Description of Artificial Sequence: Synthetic oligonucleotide
cagucagaugucugcaggg

SEQ ID NO: 2107862 - RNA, 19 nt, Artificial Sequence
  Description of Artificial Sequence: Synthetic oligonucleotide
uuccuuuuccuguccagga

SEQ ID NO: 2107863 - RNA, 19 nt, Artificial Sequence
  Description of Artificial Sequence: Synthetic oligonucleotide
gguugaaggaaccgcaggc

SEQ ID NO: 2107864 - RNA, 19 nt, Artificial Sequence
  Description of Artificial Sequence: Synthetic oligonucleotide
aauggguucccuggccagg

SEQ ID NO: 2107865 - RNA, 19 nt, Artificial Sequence
  Description of Artificial Sequence: Synthetic oligonucleotide
aucgcaggugcauauuugu

SEQ ID NO: 2107866 - RNA, 19 nt, Artificial Sequence
  Description of Artificial Sequence: Synthetic oligonucleotide
aggcuuuccugauguauag

SEQ ID NO: 2107867 - RNA, 19 nt, Artificial Sequence
  Description of Artificial Sequence: Synthetic oligonucleotide
cauauuugugaugggguug

SEQ ID NO: 2107868 - RNA, 19 nt, Artificial Sequence
  Description of Artificial Sequence: Synthetic oligonucleotide
acaggugagauaaugcccu

SEQ ID NO: 2107869 - RNA, 19 nt, Artificial Sequence
  Description of Artificial Sequence: Synthetic oligonucleotide
ugguagguggucucuggcc

SEQ ID NO: 2107870 - RNA, 19 nt, Artificial Sequence
  Description of Artificial Sequence: Synthetic oligonucleotide
ugugcucgucuuuccagag

SEQ ID NO: 2107871 - RNA, 19 nt, Artificial Sequence
  Description of Artificial Sequence: Synthetic oligonucleotide
auauuugugaugggguuga

SEQ ID NO: 2107872 - RNA, 19 nt, Artificial Sequence
  Description of Artificial Sequence: Synthetic oligonucleotide
uagcacugaucucauucug

SEQ ID NO: 2107873 - RNA, 19 nt, Artificial Sequence
  Description of Artificial Sequence: Synthetic oligonucleotide
ugauggugccucagcaccc

SEQ ID NO: 2107874 - RNA, 19 nt, Artificial Sequence
  Description of Artificial Sequence: Synthetic oligonucleotide
gagauguacuguuuccaga

SEQ ID NO: 2107875 - RNA, 19 nt, Artificial Sequence
  Description of Artificial Sequence: Synthetic oligonucleotide
gauuucugaauccucacuu

SEQ ID NO: 2107876 - RNA, 19 nt, Artificial Sequence
  Description of Artificial Sequence: Synthetic oligonucleotide
cuugguauuauuguuugaa

SEQ ID NO: 2107877 - RNA, 19 nt, Artificial Sequence
  Description of Artificial Sequence: Synthetic oligonucleotide
uccagauuucugaauccuc

SEQ ID NO: 2107878 - RNA, 19 nt, Artificial Sequence
  Description of Artificial Sequence: Synthetic oligonucleotide
gaauggguucccuggccag

SEQ ID NO: 2107879 - RNA, 19 nt, Artificial Sequence
  Description of Artificial Sequence: Synthetic oligonucleotide
ugcagaggcuaauuacugu

SEQ ID NO: 2107880 - RNA, 19 nt, Artificial Sequence
  Description of Artificial Sequence: Synthetic oligonucleotide
aaucgcaggugcauauuug

SEQ ID NO: 2107881 - RNA, 19 nt, Artificial Sequence
  Description of Artificial Sequence: Synthetic oligonucleotide
guguuuagaguauagcagu

SEQ ID NO: 2107882 - RNA, 19 nt, Artificial Sequence
  Description of Artificial Sequence: Synthetic oligonucleotide
guugugauggugccucagc

SEQ ID NO: 2107883 - RNA, 19 nt, Artificial Sequence
  Description of Artificial Sequence: Synthetic oligonucleotide
accaagccaaacuucucca

SEQ ID NO: 2107884 - RNA, 19 nt, Artificial Sequence
  Description of Artificial Sequence: Synthetic oligonucleotide
gucagaugucugcagggcc

SEQ ID NO: 2107885 - RNA, 19 nt, Artificial Sequence
  Description of Artificial Sequence: Synthetic oligonucleotide
agggaggagauacuucaca

SEQ ID NO: 2107886 - RNA, 19 nt, Artificial Sequence
  Description of Artificial Sequence: Synthetic oligonucleotide
guugaaggaaccgcaggcc

SEQ ID NO: 2107887 - RNA, 19 nt, Artificial Sequence
  Description of Artificial Sequence: Synthetic oligonucleotide
ucggugaugggaagccacc

SEQ ID NO: 2107888 - RNA, 19 nt, Artificial Sequence
  Description of Artificial Sequence: Synthetic oligonucleotide
aacagucggcaucuguuuu

SEQ ID NO: 2107889 - RNA, 19 nt, Artificial Sequence
  Description of Artificial Sequence: Synthetic oligonucleotide
uggucccugauguaggcaa

SEQ ID NO: 2107890 - RNA, 19 nt, Artificial Sequence
  Description of Artificial Sequence: Synthetic oligonucleotide
ggagagauguacuguuucc

SEQ ID NO: 2107891 - RNA, 19 nt, Artificial Sequence
  Description of Artificial Sequence: Synthetic oligonucleotide
cagauuucugaauccucac

SEQ ID NO: 2107892 - RNA, 19 nt, Artificial Sequence
  Description of Artificial Sequence: Synthetic oligonucleotide
gaugggcgaguccaagaug

SEQ ID NO: 2107893 - RNA, 19 nt, Artificial Sequence
  Description of Artificial Sequence: Synthetic oligonucleotide
ugucauugacaggugagau

SEQ ID NO: 2107894 - RNA, 19 nt, Artificial Sequence
  Description of Artificial Sequence: Synthetic oligonucleotide
caccucaaacaaucgcagg

SEQ ID NO: 2107895 - RNA, 19 nt, Artificial Sequence
  Description of Artificial Sequence: Synthetic oligonucleotide
ugggccauggcuacucggu

SEQ ID NO: 2107896 - RNA, 19 nt, Artificial Sequence
  Description of Artificial Sequence: Synthetic oligonucleotide
caggucuuucuucccauag

SEQ ID NO: 2107897 - RNA, 19 nt, Artificial Sequence
  Description of Artificial Sequence: Synthetic oligonucleotide
ucgcaggugcauauuugug

SEQ ID NO: 2107898 - RNA, 19 nt, Artificial Sequence
  Description of Artificial Sequence: Synthetic oligonucleotide
ccaaucaagaccagcgccc

SEQ ID NO: 2107899 - RNA, 19 nt, Artificial Sequence
  Description of Artificial Sequence: Synthetic oligonucleotide
gaggaguuucagcucgggc

SEQ ID NO: 2107900 - RNA, 19 nt, Artificial Sequence
  Description of Artificial Sequence: Synthetic oligonucleotide
agaguauagcaguguaaaa

SEQ ID NO: 2107901 - RNA, 19 nt, Artificial Sequence
  Description of Artificial Sequence: Synthetic oligonucleotide
caaugacggugucagggag

SEQ ID NO: 2107902 - RNA, 19 nt, Artificial Sequence
  Description of Artificial Sequence: Synthetic oligonucleotide
cugguguuuagaguauagc

SEQ ID NO: 2107903 - RNA, 19 nt, Artificial Sequence
  Description of Artificial Sequence: Synthetic oligonucleotide
aggcuaauuacuguucagu

SEQ ID NO: 2107904 - RNA, 19 nt, Artificial Sequence
  Description of Artificial Sequence: Synthetic oligonucleotide
ccaagauguacccuuucgg

SEQ ID NO: 2107905 - RNA, 19 nt, Artificial Sequence
  Description of Artificial Sequence: Synthetic oligonucleotide
ugauguaggcaaugacggu

SEQ ID NO: 2107906 - RNA, 19 nt, Artificial Sequence
  Description of Artificial Sequence: Synthetic oligonucleotide
augggcgaguccaagaugu

SEQ ID NO: 2107907 - RNA, 19 nt, Artificial Sequence
  Description of Artificial Sequence: Synthetic oligonucleotide
uacucggugaugggaagcc

SEQ ID NO: 2107908 - RNA, 19 nt, Artificial Sequence
  Description of Artificial Sequence: Synthetic oligonucleotide
gagagauguacuguuucca

SEQ ID NO: 2107909 - RNA, 19 nt, Artificial Sequence
  Description of Artificial Sequence: Synthetic oligonucleotide
gcuaguagaggccaugguc

SEQ ID NO: 2107910 - RNA, 19 nt, Artificial Sequence
  Description of Artificial Sequence: Synthetic oligonucleotide
cucgucuuuccagagguug

SEQ ID NO: 2107911 - RNA, 19 nt, Artificial Sequence
  Description of Artificial Sequence: Synthetic oligonucleotide
caggacgucugcuccacag

SEQ ID NO: 2107912 - RNA, 19 nt, Artificial Sequence
  Description of Artificial Sequence: Synthetic oligonucleotide
gaggagauacuucacacuu

SEQ ID NO: 2107913 - RNA, 19 nt, Artificial Sequence
  Description of Artificial Sequence: Synthetic oligonucleotide
agcgcccucuaacuaaucu

SEQ ID NO: 2107914 - RNA, 19 nt, Artificial Sequence
  Description of Artificial Sequence: Synthetic oligonucleotide
uggccaccucaaacaaucg

SEQ ID NO: 2107915 - RNA, 19 nt, Artificial Sequence
  Description of Artificial Sequence: Synthetic oligonucleotide
cauggucccugauguaggc

SEQ ID NO: 2107916 - RNA, 19 nt, Artificial Sequence
  Description of Artificial Sequence: Synthetic oligonucleotide
ccauagcugucauugacag

SEQ ID NO: 2107917 - RNA, 19 nt, Artificial Sequence
  Description of Artificial Sequence: Synthetic oligonucleotide
agaccagcgcccucuaacu

SEQ ID NO: 2107918 - RNA, 19 nt, Artificial Sequence
  Description of Artificial Sequence: Synthetic oligonucleotide
uuuggugguagguggucuc

SEQ ID NO: 2107919 - RNA, 19 nt, Artificial Sequence
  Description of Artificial Sequence: Synthetic oligonucleotide
agaagucaggauauuggga

SEQ ID NO: 2107920 - RNA, 19 nt, Artificial Sequence
  Description of Artificial Sequence: Synthetic oligonucleotide
cucggugaugggaagccac

SEQ ID NO: 2107921 - RNA, 19 nt, Artificial Sequence
  Description of Artificial Sequence: Synthetic oligonucleotide
acauugcagaggcuaauua

SEQ ID NO: 2107922 - RNA, 19 nt, Artificial Sequence
  Description of Artificial Sequence: Synthetic oligonucleotide
gaacugucggaggaugggc

SEQ ID NO: 2107923 - RNA, 19 nt, Artificial Sequence
  Description of Artificial Sequence: Synthetic oligonucleotide
gauguacccuuucggguca

SEQ ID NO: 2107924 - RNA, 19 nt, Artificial Sequence
  Description of Artificial Sequence: Synthetic oligonucleotide
auggcuacucggugauggg

SEQ ID NO: 2107925 - RNA, 19 nt, Artificial Sequence
  Description of Artificial Sequence: Synthetic oligonucleotide
gccaaucaagaccagcgcc

SEQ ID NO: 2107926 - RNA, 19 nt, Artificial Sequence
  Description of Artificial Sequence: Synthetic oligonucleotide
uggaugugcucgucuuucc

SEQ ID NO: 2107927 - RNA, 19 nt, Artificial Sequence
  Description of Artificial Sequence: Synthetic oligonucleotide
ugguacauuccuguuuggu

SEQ ID NO: 2107928 - RNA, 19 nt, Artificial Sequence
  Description of Artificial Sequence: Synthetic oligonucleotide
cagaggcuaauuacuguuc

SEQ ID NO: 2107929 - RNA, 19 nt, Artificial Sequence
  Description of Artificial Sequence: Synthetic oligonucleotide
aaggcuuuccugauguaua

SEQ ID NO: 2107930 - RNA, 19 nt, Artificial Sequence
  Description of Artificial Sequence: Synthetic oligonucleotide
uccugauguauaguagcac

SEQ ID NO: 2107931 - RNA, 19 nt, Artificial Sequence
  Description of Artificial Sequence: Synthetic oligonucleotide
agcacccuucaccguuucc

SEQ ID NO: 2107932 - RNA, 19 nt, Artificial Sequence
  Description of Artificial Sequence: Synthetic oligonucleotide
ugcuaguagaggccauggu

SEQ ID NO: 2107933 - RNA, 19 nt, Artificial Sequence
  Description of Artificial Sequence: Synthetic oligonucleotide
agcugucauugacagguga

SEQ ID NO: 2107934 - RNA, 19 nt, Artificial Sequence
  Description of Artificial Sequence: Synthetic oligonucleotide
ccgccaaucaagaccagcg

SEQ ID NO: 2107935 - RNA, 19 nt, Artificial Sequence
  Description of Artificial Sequence: Synthetic oligonucleotide
acuugguauuauuguuuga

SEQ ID NO: 2107936 - RNA, 19 nt, Artificial Sequence
  Description of Artificial Sequence: Synthetic oligonucleotide
aaucagcaccuugucaaau

SEQ ID NO: 2107937 - RNA, 19 nt, Artificial Sequence
  Description of Artificial Sequence: Synthetic oligonucleotide
ccugguacauuccuguuug

SEQ ID NO: 2107938 - RNA, 19 nt, Artificial Sequence
  Description of Artificial Sequence: Synthetic oligonucleotide
caaaucccgccaaucaaga

SEQ ID NO: 2107939 - RNA, 19 nt, Artificial Sequence
  Description of Artificial Sequence: Synthetic oligonucleotide
gggaggagauacuucacac

SEQ ID NO: 2107940 - RNA, 19 nt, Artificial Sequence
  Description of Artificial Sequence: Synthetic oligonucleotide
accgcaggccagaagcacc

SEQ ID NO: 2107941 - RNA, 19 nt, Artificial Sequence
  Description of Artificial Sequence: Synthetic oligonucleotide
aucccgccaaucaagacca

SEQ ID NO: 2107942 - RNA, 19 nt, Artificial Sequence
  Description of Artificial Sequence: Synthetic oligonucleotide
uccaucugggcugaggauu

SEQ ID NO: 2107943 - RNA, 19 nt, Artificial Sequence
  Description of Artificial Sequence: Synthetic oligonucleotide
uuucgggucaugaccccuc

SEQ ID NO: 2107944 - RNA, 19 nt, Artificial Sequence
  Description of Artificial Sequence: Synthetic oligonucleotide
acuaucuccuggaugugcu

SEQ ID NO: 2107945 - RNA, 19 nt, Artificial Sequence
  Description of Artificial Sequence: Synthetic oligonucleotide
cugcuaguagaggccaugg

SEQ ID NO: 2107946 - RNA, 19 nt, Artificial Sequence
  Description of Artificial Sequence: Synthetic oligonucleotide
aggagauacuucacacuuc

SEQ ID NO: 2107947 - RNA, 19 nt, Artificial Sequence
  Description of Artificial Sequence: Synthetic oligonucleotide
gucaaaucccgccaaucaa

SEQ ID NO: 2107948 - RNA, 19 nt, Artificial Sequence
  Description of Artificial Sequence: Synthetic oligonucleotide
uacccuuucgggucaugac

SEQ ID NO: 2107949 - RNA, 19 nt, Artificial Sequence
  Description of Artificial Sequence: Synthetic oligonucleotide
caaacagucaggcagucau

SEQ ID NO: 2107950 - RNA, 19 nt, Artificial Sequence
  Description of Artificial Sequence: Synthetic oligonucleotide
accgucacugcuaguagag

SEQ ID NO: 2107951 - RNA, 19 nt, Artificial Sequence
  Description of Artificial Sequence: Synthetic oligonucleotide
caggaaccgucacugcuag

SEQ ID NO: 2107952 - RNA, 19 nt, Artificial Sequence
  Description of Artificial Sequence: Synthetic oligonucleotide
uugucaaaucccgccaauc

SEQ ID NO: 2107953 - RNA, 19 nt, Artificial Sequence
  Description of Artificial Sequence: Synthetic oligonucleotide
cuggaucuuccaucugggc

SEQ ID NO: 2107954 - RNA, 19 nt, Artificial Sequence
  Description of Artificial Sequence: Synthetic oligonucleotide
uucgggucaugaccccucc

SEQ ID NO: 2107955 - RNA, 19 nt, Artificial Sequence
  Description of Artificial Sequence: Synthetic oligonucleotide
gacgucugcuccacagagg

SEQ ID NO: 2107956 - RNA, 19 nt, Artificial Sequence
  Description of Artificial Sequence: Synthetic oligonucleotide
cauuccuguuuggugguag

SEQ ID NO: 2107957 - RNA, 19 nt, Artificial Sequence
  Description of Artificial Sequence: Synthetic oligonucleotide
aaacaaucgcaggugcaua

SEQ ID NO: 2107958 - RNA, 19 nt, Artificial Sequence
  Description of Artificial Sequence: Synthetic oligonucleotide
gauguauaguagcacugau

SEQ ID NO: 2107959 - RNA, 19 nt, Artificial Sequence
  Description of Artificial Sequence: Synthetic oligonucleotide
ucaaacagucaggcaguca

SEQ ID NO: 2107960 - RNA, 19 nt, Artificial Sequence
  Description of Artificial Sequence: Synthetic oligonucleotide
cacuaucuccuggaugugc

SEQ ID NO: 2107961 - RNA, 19 nt, Artificial Sequence
  Description of Artificial Sequence: Synthetic oligonucleotide
cacagaggaguuucagcuc

SEQ ID NO: 2107962 - RNA, 19 nt, Artificial Sequence
  Description of Artificial Sequence: Synthetic oligonucleotide
cugcucacucgucccaggg

SEQ ID NO: 2107963 - RNA, 19 nt, Artificial Sequence
  Description of Artificial Sequence: Synthetic oligonucleotide
acugucggaggaugggcga

SEQ ID NO: 2107964 - RNA, 19 nt, Artificial Sequence
  Description of Artificial Sequence: Synthetic oligonucleotide
auaaugcccucgaucaccu

SEQ ID NO: 2107965 - RNA, 19 nt, Artificial Sequence
  Description of Artificial Sequence: Synthetic oligonucleotide
gucaggauauugggaaccc

SEQ ID NO: 2107966 - RNA, 19 nt, Artificial Sequence
  Description of Artificial Sequence: Synthetic oligonucleotide
ucgggucaugaccccuccg

SEQ ID NO: 2107967 - RNA, 19 nt, Artificial Sequence
  Description of Artificial Sequence: Synthetic oligonucleotide
caguaaucagcaccuuguc

SEQ ID NO: 2107968 - RNA, 19 nt, Artificial Sequence
  Description of Artificial Sequence: Synthetic oligonucleotide
gugguagguggucucuggc

SEQ ID NO: 2107969 - RNA, 19 nt, Artificial Sequence
  Description of Artificial Sequence: Synthetic oligonucleotide
gugcucgucuuuccagagg

SEQ ID NO: 2107970 - RNA, 19 nt, Artificial Sequence
  Description of Artificial Sequence: Synthetic oligonucleotide
uggggucuggaucuuccau

SEQ ID NO: 2107971 - RNA, 19 nt, Artificial Sequence
  Description of Artificial Sequence: Synthetic oligonucleotide
uauugggaacccugguguu

SEQ ID NO: 2107972 - RNA, 19 nt, Artificial Sequence
  Description of Artificial Sequence: Synthetic oligonucleotide
ggugagauaaugcccucga

SEQ ID NO: 2107973 - RNA, 19 nt, Artificial Sequence
  Description of Artificial Sequence: Synthetic oligonucleotide
ggcgaguccaagauguacc

SEQ ID NO: 2107974 - RNA, 19 nt, Artificial Sequence
  Description of Artificial Sequence: Synthetic oligonucleotide
acccgaauccagucagaug

SEQ ID NO: 2107975 - RNA, 19 nt, Artificial Sequence
  Description of Artificial Sequence: Synthetic oligonucleotide
auguaggcaaugacggugu

SEQ ID NO: 2107976 - RNA, 19 nt, Artificial Sequence
  Description of Artificial Sequence: Synthetic oligonucleotide
augacggugucagggagga

SEQ ID NO: 2107977 - RNA, 19 nt, Artificial Sequence
  Description of Artificial Sequence: Synthetic oligonucleotide
ggaacugucggaggauggg

SEQ ID NO: 2107978 - RNA, 19 nt, Artificial Sequence
  Description of Artificial Sequence: Synthetic oligonucleotide
cagaggaguuucagcucgg

SEQ ID NO: 2107979 - RNA, 19 nt, Artificial Sequence
  Description of Artificial Sequence: Synthetic oligonucleotide
cccucuaacuaaucuuucc

SEQ ID NO: 2107980 - RNA, 19 nt, Artificial Sequence
  Description of Artificial Sequence: Synthetic oligonucleotide
guagcacugaucucauucu

SEQ ID NO: 2107981 - RNA, 19 nt, Artificial Sequence
  Description of Artificial Sequence: Synthetic oligonucleotide
cccuuucgggucaugaccc

SEQ ID NO: 2107982 - RNA, 19 nt, Artificial Sequence
  Description of Artificial Sequence: Synthetic oligonucleotide
cuacucggugaugggaagc

SEQ ID NO: 2107983 - RNA, 19 nt, Artificial Sequence
  Description of Artificial Sequence: Synthetic oligonucleotide
cugggccauggcuacucgg

SEQ ID NO: 2107984 - RNA, 19 nt, Artificial Sequence
  Description of Artificial Sequence: Synthetic oligonucleotide
ucaggauauugggaacccu

SEQ ID NO: 2107985 - RNA, 19 nt, Artificial Sequence
  Description of Artificial Sequence: Synthetic oligonucleotide
cacaccaagccaaacuucu

SEQ ID NO: 2107986 - RNA, 19 nt, Artificial Sequence
  Description of Artificial Sequence: Synthetic oligonucleotide
acagucggcaucuguuuua

SEQ ID NO: 2107987 - RNA, 19 nt, Artificial Sequence
  Description of Artificial Sequence: Synthetic oligonucleotide
ucccugauguaggcaauga

SEQ ID NO: 2107988 - RNA, 19 nt, Artificial Sequence
  Description of Artificial Sequence: Synthetic oligonucleotide
uuuuagaagucaggauauu

SEQ ID NO: 2107989 - RNA, 19 nt, Artificial Sequence
  Description of Artificial Sequence: Synthetic oligonucleotide
gauguugugcuggaacugu

SEQ ID NO: 2107990 - RNA, 19 nt, Artificial Sequence
  Description of Artificial Sequence: Synthetic oligonucleotide
cuggaugugcucgucuuuc

SEQ ID NO: 2107991 - RNA, 19 nt, Artificial Sequence
  Description of Artificial Sequence: Synthetic oligonucleotide
aguuucagcucgggcagug

SEQ ID NO: 2107992 - RNA, 19 nt, Artificial Sequence
  Description of Artificial Sequence: Synthetic oligonucleotide
cuccggcucacacacacca

SEQ ID NO: 2107993 - RNA, 19 nt, Artificial Sequence
  Description of Artificial Sequence: Synthetic oligonucleotide
ggcuaauuacuguucagua

SEQ ID NO: 2107994 - RNA, 19 nt, Artificial Sequence
  Description of Artificial Sequence: Synthetic oligonucleotide
ccagauuucugaauccuca

SEQ ID NO: 2107995 - RNA, 19 nt, Artificial Sequence
  Description of Artificial Sequence: Synthetic oligonucleotide
gaguccaagauguacccuu

SEQ ID NO: 2107996 - RNA, 19 nt, Artificial Sequence
  Description of Artificial Sequence: Synthetic oligonucleotide
ucgggcagugcugcagagg

SEQ ID NO: 2107997 - RNA, 19 nt, Artificial Sequence
  Description of Artificial Sequence: Synthetic oligonucleotide
ggucuuucuucccauagcu

SEQ ID NO: 2107998 - RNA, 19 nt, Artificial Sequence
  Description of Artificial Sequence: Synthetic oligonucleotide
uguuuggugguaggugguc

SEQ ID NO: 2107999 - RNA, 19 nt, Artificial Sequence
  Description of Artificial Sequence: Synthetic oligonucleotide
aggacgucugcuccacaga

SEQ ID NO: 2108000 - RNA, 19 nt, Artificial Sequence
  Description of Artificial Sequence: Synthetic oligonucleotide
uggcuacucggugauggga

SEQ ID NO: 2108001 - RNA, 19 nt, Artificial Sequence
  Description of Artificial Sequence: Synthetic oligonucleotide
gucauugacaggugagaua

SEQ ID NO: 2108002 - RNA, 19 nt, Artificial Sequence
  Description of Artificial Sequence: Synthetic oligonucleotide
ggguucccuggccaggugg

SEQ ID NO: 2108003 - RNA, 19 nt, Artificial Sequence
  Description of Artificial Sequence: Synthetic oligonucleotide
ccuuuugccaauauucaaa

SEQ ID NO: 2108004 - RNA, 19 nt, Artificial Sequence
  Description of Artificial Sequence: Synthetic oligonucleotide
ccugguguuuagaguauag

SEQ ID NO: 2108005 - RNA, 19 nt, Artificial Sequence
  Description of Artificial Sequence: Synthetic oligonucleotide
aauccucacuugguauuau

SEQ ID NO: 2108006 - RNA, 19 nt, Artificial Sequence
  Description of Artificial Sequence: Synthetic oligonucleotide
ucggaggaugggcgagucc

SEQ ID NO: 2108007 - RNA, 19 nt, Artificial Sequence
  Description of Artificial Sequence: Synthetic oligonucleotide
agcugggccauggcuacuc

SEQ ID NO: 2108008 - RNA, 19 nt, Artificial Sequence
  Description of Artificial Sequence: Synthetic oligonucleotide
gcgaguccaagauguaccc

SEQ ID NO: 2108009 - RNA, 19 nt, Artificial Sequence
  Description of Artificial Sequence: Synthetic oligonucleotide
uucaggacgucugcuccac

SEQ ID NO: 2108010 - RNA, 19 nt, Artificial Sequence
  Description of Artificial Sequence: Synthetic oligonucleotide
accaggucuuucuucccau

SEQ ID NO: 2108011 - RNA, 19 nt, Artificial Sequence
  Description of Artificial Sequence: Synthetic oligonucleotide
cagggaggagauacuucac

SEQ ID NO: 2108012 - RNA, 19 nt, Artificial Sequence
  Description of Artificial Sequence: Synthetic oligonucleotide
gucggcaucuguuuuacuu

SEQ ID NO: 2108013 - RNA, 19 nt, Artificial Sequence
  Description of Artificial Sequence: Synthetic oligonucleotide
cuccacagaggaguuucag

SEQ ID NO: 2108014 - RNA, 19 nt, Artificial Sequence
  Description of Artificial Sequence: Synthetic oligonucleotide
cuguuuccagauuucugaa

SEQ ID NO: 2108015 - RNA, 19 nt, Artificial Sequence
  Description of Artificial Sequence: Synthetic oligonucleotide
cuaacuaaucuuuccuuuu

SEQ ID NO: 2108016 - RNA, 19 nt, Artificial Sequence
  Description of Artificial Sequence: Synthetic oligonucleotide
gaacccugguguuuagagu

SEQ ID NO: 2108017 - RNA, 19 nt, Artificial Sequence
  Description of Artificial Sequence: Synthetic oligonucleotide
uggugccucagcacccuuc

SEQ ID NO: 2108018 - RNA, 19 nt, Artificial Sequence
  Description of Artificial Sequence: Synthetic oligonucleotide
cuuccugccccuuggccca

SEQ ID NO: 2108019 - RNA, 19 nt, Artificial Sequence
  Description of Artificial Sequence: Synthetic oligonucleotide
guuuagaguauagcagugu

SEQ ID NO: 2108020 - RNA, 19 nt, Artificial Sequence
  Description of Artificial Sequence: Synthetic oligonucleotide
ucagcacccuucaccguuu

SEQ ID NO: 2108021 - RNA, 19 nt, Artificial Sequence
  Description of Artificial Sequence: Synthetic oligonucleotide
gcucacacacaccaagcca

SEQ ID NO: 2108022 - RNA, 19 nt, Artificial Sequence
  Description of Artificial Sequence: Synthetic oligonucleotide
gccaccucaaacaaucgca

SEQ ID NO: 2108023 - RNA, 19 nt, Artificial Sequence
  Description of Artificial Sequence: Synthetic oligonucleotide
ugggaacccugguguuuag

SEQ ID NO: 2108024 - RNA, 19 nt, Artificial Sequence
  Description of Artificial Sequence: Synthetic oligonucleotide
gucugcuccacagaggagu

SEQ ID NO: 2108025 - RNA, 19 nt, Artificial Sequence
  Description of Artificial Sequence: Synthetic oligonucleotide
auccucacuugguauuauu

SEQ ID NO: 2108026 - RNA, 19 nt, Artificial Sequence
  Description of Artificial Sequence: Synthetic oligonucleotide
ggauguugugcuggaacug

SEQ ID NO: 2108027 - RNA, 19 nt, Artificial Sequence
  Description of Artificial Sequence: Synthetic oligonucleotide
cucacuugguauuauuguu

SEQ ID NO: 2108028 - RNA, 19 nt, Artificial Sequence
  Description of Artificial Sequence: Synthetic oligonucleotide
auaguagcacugaucucau

SEQ ID NO: 2108029 - RNA, 19 nt, Artificial Sequence
  Description of Artificial Sequence: Synthetic oligonucleotide
aaacagucaggcagucaua

SEQ ID NO: 2108030 - RNA, 19 nt, Artificial Sequence
  Description of Artificial Sequence: Synthetic oligonucleotide
cuucaggacgucugcucca

SEQ ID NO: 2108031 - RNA, 19 nt, Artificial Sequence
  Description of Artificial Sequence: Synthetic oligonucleotide
ggggucuggaucuuccauc

SEQ ID NO: 2108032 - RNA, 19 nt, Artificial Sequence
  Description of Artificial Sequence: Synthetic oligonucleotide
ucaggacgucugcuccaca

SEQ ID NO: 2108033 - RNA, 19 nt, Artificial Sequence
  Description of Artificial Sequence: Synthetic oligonucleotide
cagucggcaucuguuuuac

SEQ ID NO: 2108034 - RNA, 19 nt, Artificial Sequence
  Description of Artificial Sequence: Synthetic oligonucleotide
cuucaccguuuccauccac

SEQ ID NO: 2108035 - RNA, 19 nt, Artificial Sequence
  Description of Artificial Sequence: Synthetic oligonucleotide
gcuacucggugaugggaag

SEQ ID NO: 2108036 - RNA, 19 nt, Artificial Sequence
  Description of Artificial Sequence: Synthetic oligonucleotide
uguuugaaacaaggacauu

SEQ ID NO: 2108037 - RNA, 19 nt, Artificial Sequence
  Description of Artificial Sequence: Synthetic oligonucleotide
gcaaugacggugucaggga

SEQ ID NO: 2108038 - RNA, 19 nt, Artificial Sequence
  Description of Artificial Sequence: Synthetic oligonucleotide
guacccuuucgggucauga

SEQ ID NO: 2108039 - RNA, 19 nt, Artificial Sequence
  Description of Artificial Sequence: Synthetic oligonucleotide
uaaugcccucgaucaccug

SEQ ID NO: 2108040 - RNA, 19 nt, Artificial Sequence
  Description of Artificial Sequence: Synthetic oligonucleotide
cucuaacuaaucuuuccuu

SEQ ID NO: 2108041 - RNA, 19 nt, Artificial Sequence
  Description of Artificial Sequence: Synthetic oligonucleotide
ccucaaacaaucgcaggug

SEQ ID NO: 2108042 - RNA, 19 nt, Artificial Sequence
  Description of Artificial Sequence: Synthetic oligonucleotide
ggcagucauaaacauucaa

SEQ ID NO: 2108043 - RNA, 19 nt, Artificial Sequence
  Description of Artificial Sequence: Synthetic oligonucleotide
cucgggcagugcugcagag

SEQ ID NO: 2108044 - RNA, 19 nt, Artificial Sequence
  Description of Artificial Sequence: Synthetic oligonucleotide
uccggcucacacacaccaa

SEQ ID NO: 2108045 - RNA, 19 nt, Artificial Sequence
  Description of Artificial Sequence: Synthetic oligonucleotide
cugaauccucacuugguau

SEQ ID NO: 2108046 - RNA, 19 nt, Artificial Sequence
  Description of Artificial Sequence: Synthetic oligonucleotide
gaccccuccggcucacaca

SEQ ID NO: 2108047 - RNA, 19 nt, Artificial Sequence
  Description of Artificial Sequence: Synthetic oligonucleotide
caggugagauaaugcccuc

SEQ ID NO: 2108048 - RNA, 19 nt, Artificial Sequence
  Description of Artificial Sequence: Synthetic oligonucleotide
cuaaaacagucggcaucug

SEQ ID NO: 2108049 - RNA, 19 nt, Artificial Sequence
  Description of Artificial Sequence: Synthetic oligonucleotide
cucacucgucccagggguc

SEQ ID NO: 2108050 - RNA, 19 nt, Artificial Sequence
  Description of Artificial Sequence: Synthetic oligonucleotide
gaaccgcaggccagaagca

SEQ ID NO: 2108051 - RNA, 19 nt, Artificial Sequence
  Description of Artificial Sequence: Synthetic oligonucleotide
cccucgaucaccugguaca

SEQ ID NO: 2108052 - RNA, 19 nt, Artificial Sequence
  Description of Artificial Sequence: Synthetic oligonucleotide
aggacauugcagaggcuaa

SEQ ID NO: 2108053 - RNA, 19 nt, Artificial Sequence
  Description of Artificial Sequence: Synthetic oligonucleotide
ccggcucacacacaccaag

SEQ ID NO: 2108054 - RNA, 19 nt, Artificial Sequence
  Description of Artificial Sequence: Synthetic oligonucleotide
ccaagccaaacuucuccac

SEQ ID NO: 2108055 - RNA, 19 nt, Artificial Sequence
  Description of Artificial Sequence: Synthetic oligonucleotide
ugucggaggaugggcgagu

SEQ ID NO: 2108056 - RNA, 19 nt, Artificial Sequence
  Description of Artificial Sequence: Synthetic oligonucleotide
cugucggaggaugggcgag

SEQ ID NO: 2108057 - RNA, 19 nt, Artificial Sequence
  Description of Artificial Sequence: Synthetic oligonucleotide
cgggcagugcugcagaggc

SEQ ID NO: 2108058 - RNA, 19 nt, Artificial Sequence
  Description of Artificial Sequence: Synthetic oligonucleotide
guuucagcucgggcagugc

SEQ ID NO: 2108059 - RNA, 19 nt, Artificial Sequence
  Description of Artificial Sequence: Synthetic oligonucleotide
guccacccgaauccaguca

SEQ ID NO: 2108060 - RNA, 19 nt, Artificial Sequence
  Description of Artificial Sequence: Synthetic oligonucleotide
guacuguuuccagauuucu

SEQ ID NO: 2108061 - RNA, 19 nt, Artificial Sequence
  Description of Artificial Sequence: Synthetic oligonucleotide
ggaggagauacuucacacu

SEQ ID NO: 2108062 - RNA, 19 nt, Artificial Sequence
  Description of Artificial Sequence: Synthetic oligonucleotide
auggguucccuggccaggu

SEQ ID NO: 2108063 - RNA, 19 nt, Artificial Sequence
  Description of Artificial Sequence: Synthetic oligonucleotide
gucccagggguccacccga

SEQ ID NO: 2108064 - RNA, 19 nt, Artificial Sequence
  Description of Artificial Sequence: Synthetic oligonucleotide
gauguacuguuuccagauu

SEQ ID NO: 2108065 - RNA, 19 nt, Artificial Sequence
  Description of Artificial Sequence: Synthetic oligonucleotide
agucggcaucuguuuuacu

SEQ ID NO: 2108066 - RNA, 19 nt, Artificial Sequence
  Description of Artificial Sequence: Synthetic oligonucleotide
gguugugauggugccucag

SEQ ID NO: 2108067 - RNA, 19 nt, Artificial Sequence
  Description of Artificial Sequence: Synthetic oligonucleotide
gguccacccgaauccaguc

SEQ ID NO: 2108068 - RNA, 19 nt, Artificial Sequence
  Description of Artificial Sequence: Synthetic oligonucleotide
uauuugugaugggguugaa

SEQ ID NO: 2108069 - RNA, 19 nt, Artificial Sequence
  Description of Artificial Sequence: Synthetic oligonucleotide
uguacccuuucgggucaug

SEQ ID NO: 2108070 - RNA, 19 nt, Artificial Sequence
  Description of Artificial Sequence: Synthetic oligonucleotide
acaaucgcaggugcauauu

SEQ ID NO: 2108071 - RNA, 19 nt, Artificial Sequence
  Description of Artificial Sequence: Synthetic oligonucleotide
ggccauggcuacucgguga

SEQ ID NO: 2108072 - RNA, 19 nt, Artificial Sequence
  Description of Artificial Sequence: Synthetic oligonucleotide
ucccgccaaucaagaccag

SEQ ID NO: 2108073 - RNA, 19 nt, Artificial Sequence
  Description of Artificial Sequence: Synthetic oligonucleotide
gacauugcagaggcuaauu

SEQ ID NO: 2108074 - RNA, 19 nt, Artificial Sequence
  Description of Artificial Sequence: Synthetic oligonucleotide
gaccagcgcccucuaacua

SEQ ID NO: 2108075 - RNA, 19 nt, Artificial Sequence
  Description of Artificial Sequence: Synthetic oligonucleotide
gggucuggaucuuccaucu

SEQ ID NO: 2108076 - RNA, 19 nt, Artificial Sequence
  Description of Artificial Sequence: Synthetic oligonucleotide
acucggugaugggaagcca

SEQ ID NO: 2108077 - RNA, 19 nt, Artificial Sequence
  Description of Artificial Sequence: Synthetic oligonucleotide
ggcaucuguuuuacuucag

SEQ ID NO: 2108078 - RNA, 19 nt, Artificial Sequence
  Description of Artificial Sequence: Synthetic oligonucleotide
cgcaggugcauauuuguga

SEQ ID NO: 2108079 - RNA, 19 nt, Artificial Sequence
  Description of Artificial Sequence: Synthetic oligonucleotide
gcagaggcuaauuacuguu

SEQ ID NO: 2108080 - RNA, 19 nt, Artificial Sequence
  Description of Artificial Sequence: Synthetic oligonucleotide
uaguagcacugaucucauu

SEQ ID NO: 2108081 - RNA, 19 nt, Artificial Sequence
  Description of Artificial Sequence: Synthetic oligonucleotide
ccucuaacuaaucuuuccu

SEQ ID NO: 2108082 - RNA, 19 nt, Artificial Sequence
  Description of Artificial Sequence: Synthetic oligonucleotide
gcugggccauggcuacucg

SEQ ID NO: 2108083 - RNA, 19 nt, Artificial Sequence
  Description of Artificial Sequence: Synthetic oligonucleotide
cuggggucuggaucuucca

SEQ ID NO: 2108084 - RNA, 19 nt, Artificial Sequence
  Description of Artificial Sequence: Synthetic oligonucleotide
gcucacucgucccaggggu

SEQ ID NO: 2108085 - RNA, 19 nt, Artificial Sequence
  Description of Artificial Sequence: Synthetic oligonucleotide
caaucgcaggugcauauuu

SEQ ID NO: 2108086 - RNA, 19 nt, Artificial Sequence
  Description of Artificial Sequence: Synthetic oligonucleotide
ucccagggguccacccgaa

SEQ ID NO: 2108087 - RNA, 19 nt, Artificial Sequence
  Description of Artificial Sequence: Synthetic oligonucleotide
gcauauuugugaugggguu

SEQ ID NO: 2108088 - RNA, 19 nt, Artificial Sequence
  Description of Artificial Sequence: Synthetic oligonucleotide
gggcgaguccaagauguac

SEQ ID NO: 2108089 - RNA, 19 nt, Artificial Sequence
  Description of Artificial Sequence: Synthetic oligonucleotide
aggaaccgucacugcuagu

SEQ ID NO: 2108090 - RNA, 19 nt, Artificial Sequence
  Description of Artificial Sequence: Synthetic oligonucleotide
ccucacuugguauuauugu

SEQ ID NO: 2108091 - RNA, 19 nt, Artificial Sequence
  Description of Artificial Sequence: Synthetic oligonucleotide
ccuuucgggucaugacccc

SEQ ID NO: 2108092 - RNA, 19 nt, Artificial Sequence
  Description of Artificial Sequence: Synthetic oligonucleotide
ggucuggaucuuccaucug

SEQ ID NO: 2108093 - RNA, 19 nt, Artificial Sequence
  Description of Artificial Sequence: Synthetic oligonucleotide
gauggugccucagcacccu

SEQ ID NO: 2108094 - RNA, 19 nt, Artificial Sequence
  Description of Artificial Sequence: Synthetic oligonucleotide
ggcuacucggugaugggaa

SEQ ID NO: 2108095 - RNA, 19 nt, Artificial Sequence
  Description of Artificial Sequence: Synthetic oligonucleotide
cuguuuggugguagguggu

SEQ ID NO: 2108096 - RNA, 19 nt, Artificial Sequence
  Description of Artificial Sequence: Synthetic oligonucleotide
gcccucgaucaccugguac

SEQ ID NO: 2108097 - RNA, 19 nt, Artificial Sequence
  Description of Artificial Sequence: Synthetic oligonucleotide
ggaugggcgaguccaagau

SEQ ID NO: 2108098 - RNA, 19 nt, Artificial Sequence
  Description of Artificial Sequence: Synthetic oligonucleotide
cucagcacccuucaccguu

SEQ ID NO: 2108099 - RNA, 19 nt, Artificial Sequence
  Description of Artificial Sequence: Synthetic oligonucleotide
gagauacuucacacuuccu

SEQ ID NO: 2108100 - RNA, 19 nt, Artificial Sequence
  Description of Artificial Sequence: Synthetic oligonucleotide
cgccaaucaagaccagcgc

SEQ ID NO: 2108101 - RNA, 19 nt, Artificial Sequence
  Description of Artificial Sequence: Synthetic oligonucleotide
caaucaagaccagcgcccu

SEQ ID NO: 2108102 - RNA, 19 nt, Artificial Sequence
  Description of Artificial Sequence: Synthetic oligonucleotide
ugacggugucagggaggag

SEQ ID NO: 2108103 - RNA, 19 nt, Artificial Sequence
  Description of Artificial Sequence: Synthetic oligonucleotide
ugcccucgaucaccuggua

SEQ ID NO: 2108104 - RNA, 19 nt, Artificial Sequence
  Description of Artificial Sequence: Synthetic oligonucleotide
gugagauaaugcccucgau

SEQ ID NO: 2108105 - RNA, 19 nt, Artificial Sequence
  Description of Artificial Sequence: Synthetic oligonucleotide
cgaucaccugguacauucc

SEQ ID NO: 2108106 - RNA, 19 nt, Artificial Sequence
  Description of Artificial Sequence: Synthetic oligonucleotide
cuuggcccaaggcuuuccu

SEQ ID NO: 2108107 - RNA, 19 nt, Artificial Sequence
  Description of Artificial Sequence: Synthetic oligonucleotide
cccgccaaucaagaccagc

SEQ ID NO: 2108108 - RNA, 19 nt, Artificial Sequence
  Description of Artificial Sequence: Synthetic oligonucleotide
acccugguguuuagaguau

SEQ ID NO: 2108109 - RNA, 19 nt, Artificial Sequence
  Description of Artificial Sequence: Synthetic oligonucleotide
ccgaauccagucagauguc

SEQ ID NO: 2108110 - RNA, 19 nt, Artificial Sequence
  Description of Artificial Sequence: Synthetic oligonucleotide
gcccaaggcuuuccugaug

SEQ ID NO: 2108111 - RNA, 19 nt, Artificial Sequence
  Description of Artificial Sequence: Synthetic oligonucleotide
agguggucucuggccaccu

SEQ ID NO: 2108112 - RNA, 19 nt, Artificial Sequence
  Description of Artificial Sequence: Synthetic oligonucleotide
gguucccuggccaggugga

SEQ ID NO: 2108113 - RNA, 19 nt, Artificial Sequence
  Description of Artificial Sequence: Synthetic oligonucleotide
cagcgcccucuaacuaauc

SEQ ID NO: 2108114 - RNA, 19 nt, Artificial Sequence
  Description of Artificial Sequence: Synthetic oligonucleotide
gcucgggcagugcugcaga

SEQ ID NO: 2108115 - RNA, 19 nt, Artificial Sequence
  Description of Artificial Sequence: Synthetic oligonucleotide
cuuucgggucaugaccccu

SEQ ID NO: 2108116 - RNA, 19 nt, Artificial Sequence
  Description of Artificial Sequence: Synthetic oligonucleotide
gcccucuaacuaaucuuuc

SEQ ID NO: 2108117 - RNA, 19 nt, Artificial Sequence
  Description of Artificial Sequence: Synthetic oligonucleotide
ccuccggcucacacacacc

SEQ ID NO: 2108118 - RNA, 19 nt, Artificial Sequence
  Description of Artificial Sequence: Synthetic oligonucleotide
caaggacauugcagaggcu

SEQ ID NO: 2108119 - RNA, 19 nt, Artificial Sequence
  Description of Artificial Sequence: Synthetic oligonucleotide
gguggucucuggccaccuc

SEQ ID NO: 2108120 - RNA, 19 nt, Artificial Sequence
  Description of Artificial Sequence: Synthetic oligonucleotide
ccgcaggccagaagcacca

SEQ ID NO: 2108121 - RNA, 19 nt, Artificial Sequence
  Description of Artificial Sequence: Synthetic oligonucleotide
ccuuggcccaaggcuuucc

SEQ ID NO: 2108122 - RNA, 19 nt, Artificial Sequence
  Description of Artificial Sequence: Synthetic oligonucleotide
cacccgaauccagucagau

SEQ ID NO: 2108123 - RNA, 19 nt, Artificial Sequence
  Description of Artificial Sequence: Synthetic oligonucleotide
gcgcccucuaacuaaucuu

SEQ ID NO: 2108124 - RNA, 19 nt, Artificial Sequence
  Description of Artificial Sequence: Synthetic oligonucleotide
gcuccacagaggaguuuca

SEQ ID NO: 2108125 - RNA, 19 nt, Artificial Sequence
  Description of Artificial Sequence: Synthetic oligonucleotide
guucaguaaucagcaccuu

SEQ ID NO: 2108126 - RNA, 19 nt, Artificial Sequence
  Description of Artificial Sequence: Synthetic oligonucleotide
augaccccuccggcucaca

SEQ ID NO: 2108127 - RNA, 19 nt, Artificial Sequence
  Description of Artificial Sequence: Synthetic oligonucleotide
ggacauugcagaggcuaau

SEQ ID NO: 2108128 - RNA, 19 nt, Artificial Sequence
  Description of Artificial Sequence: Synthetic oligonucleotide
caccugguacauuccuguu

SEQ ID NO: 2108129 - RNA, 19 nt, Artificial Sequence
  Description of Artificial Sequence: Synthetic oligonucleotide
uuccugccccuuggcccaa

SEQ ID NO: 2108130 - RNA, 19 nt, Artificial Sequence
  Description of Artificial Sequence: Synthetic oligonucleotide
cagcucgggcagugcugca

SEQ ID NO: 2108131 - RNA, 19 nt, Artificial Sequence
  Description of Artificial Sequence: Synthetic oligonucleotide
ccacccgaauccagucaga

SEQ ID NO: 2108132 - RNA, 19 nt, Artificial Sequence
  Description of Artificial Sequence: Synthetic oligonucleotide
ggcccaaggcuuuccugau

SEQ ID NO: 2108133 - RNA, 19 nt, Artificial Sequence
  Description of Artificial Sequence: Synthetic oligonucleotide
cgcccucuaacuaaucuuu

SEQ ID NO: 2108134 - RNA, 19 nt, Artificial Sequence
  Description of Artificial Sequence: Synthetic oligonucleotide
ccauggcuacucggugaug

SEQ ID NO: 2108135 - RNA, 19 nt, Artificial Sequence
  Description of Artificial Sequence: Synthetic oligonucleotide
guucccuggccagguggau

SEQ ID NO: 2108136 - RNA, 19 nt, Artificial Sequence
  Description of Artificial Sequence: Synthetic oligonucleotide
ccagcgcccucuaacuaau

SEQ ID NO: 2108137 - RNA, 19 nt, Artificial Sequence
  Description of Artificial Sequence: Synthetic oligonucleotide
cucgaucaccugguacauu

SEQ ID NO: 2108138 - RNA, 19 nt, Artificial Sequence
  Description of Artificial Sequence: Synthetic oligonucleotide
cccugguguuuagaguaua

SEQ ID NO: 2108139 - RNA, 19 nt, Artificial Sequence
  Description of Artificial Sequence: Synthetic oligonucleotide
cgaguccaagauguacccu

SEQ ID NO: 2108140 - RNA, 19 nt, Artificial Sequence
  Description of Artificial Sequence: Synthetic oligonucleotide
gcucgucuuuccagagguu

SEQ ID NO: 2108141 - RNA, 19 nt, Artificial Sequence
  Description of Artificial Sequence: Synthetic oligonucleotide
gggaagccaccaggucuuu

SEQ ID NO: 2108142 - RNA, 19 nt, Artificial Sequence
  Description of Artificial Sequence: Synthetic oligonucleotide
aguaaaauaaucuuaaaug

SEQ ID NO: 2108143 - RNA, 19 nt, Artificial Sequence
  Description of Artificial Sequence: Synthetic oligonucleotide
aauguagaaaacaaaaugg

SEQ ID NO: 2108144 - RNA, 19 nt, Artificial Sequence
  Description of Artificial Sequence: Synthetic oligonucleotide
aaagaaaugaugaacaauc

SEQ ID NO: 2108145 - RNA, 19 nt, Artificial Sequence
  Description of Artificial Sequence: Synthetic oligonucleotide
aagaaucacuccuuaaugc

SEQ ID NO: 2108146 - RNA, 19 nt, Artificial Sequence
  Description of Artificial Sequence: Synthetic oligonucleotide
uuaaauguagaaaacaaaa

SEQ ID NO: 2108147 - RNA, 19 nt, Artificial Sequence
  Description of Artificial Sequence: Synthetic oligonucleotide
uagguuuuaacucaaagca

SEQ ID NO: 2108148 - RNA, 19 nt, Artificial Sequence
  Description of Artificial Sequence: Synthetic oligonucleotide
agaauuacacuccagacag

SEQ ID NO: 2108149 - RNA, 19 nt, Artificial Sequence
  Description of Artificial Sequence: Synthetic oligonucleotide
uaaucuuaaauguagaaaa

SEQ ID NO: 2108150 - RNA, 19 nt, Artificial Sequence
  Description of Artificial Sequence: Synthetic oligonucleotide
augaugaacaaucucugcc

SEQ ID NO: 2108151 - RNA, 19 nt, Artificial Sequence
  Description of Artificial Sequence: Synthetic oligonucleotide
aacaaucucugcccgagcc

SEQ ID NO: 2108152 - RNA, 19 nt, Artificial Sequence
  Description of Artificial Sequence: Synthetic oligonucleotide
cuuacuauaaacagucucc

SEQ ID NO: 2108153 - RNA, 19 nt, Artificial Sequence
  Description of Artificial Sequence: Synthetic oligonucleotide
uuuauuauuagguuuuaac

SEQ ID NO: 2108154 - RNA, 19 nt, Artificial Sequence
  Description of Artificial Sequence: Synthetic oligonucleotide
agaaucacuccuuaaugcc

SEQ ID NO: 2108155 - RNA, 19 nt, Artificial Sequence
  Description of Artificial Sequence: Synthetic oligonucleotide
uuagguuuuaacucaaagc

SEQ ID NO: 2108156 - RNA, 19 nt, Artificial Sequence
  Description of Artificial Sequence: Synthetic oligonucleotide
uauuauuagguuuuaacuc

SEQ ID NO: 2108157 - RNA, 19 nt, Artificial Sequence
  Description of Artificial Sequence: Synthetic oligonucleotide
aauuacacuccagacagac

SEQ ID NO: 2108158 - RNA, 19 nt, Artificial Sequence
  Description of Artificial Sequence: Synthetic oligonucleotide
aaggccuuacuauaaacag

SEQ ID NO: 2108159 - RNA, 19 nt, Artificial Sequence
  Description of Artificial Sequence: Synthetic oligonucleotide
aauaaucuuaaauguagaa

SEQ ID NO: 2108160 - RNA, 19 nt, Artificial Sequence
  Description of Artificial Sequence: Synthetic oligonucleotide
ugaagauccagcacguccg

SEQ ID NO: 2108161 - RNA, 19 nt, Artificial Sequence
  Description of Artificial Sequence: Synthetic oligonucleotide
aguauguaagaaucacucc

SEQ ID NO: 2108162 - RNA, 19 nt, Artificial Sequence
  Description of Artificial Sequence: Synthetic oligonucleotide
uuuaacucaaagcaauacu

SEQ ID NO: 2108163 - RNA, 19 nt, Artificial Sequence
  Description of Artificial Sequence: Synthetic oligonucleotide
acucaacuagaguauaccc

SEQ ID NO: 2108164 - RNA, 19 nt, Artificial Sequence
  Description of Artificial Sequence: Synthetic oligonucleotide
aagaguauguaagaaucac

SEQ ID NO: 2108165 - RNA, 19 nt, Artificial Sequence
  Description of Artificial Sequence: Synthetic oligonucleotide
uuuaguuuauggaugcucu

SEQ ID NO: 2108166 - RNA, 19 nt, Artificial Sequence
  Description of Artificial Sequence: Synthetic oligonucleotide
uuuauggaugcucucgucc

SEQ ID NO: 2108167 - RNA, 19 nt, Artificial Sequence
  Description of Artificial Sequence: Synthetic oligonucleotide
agagaauccagccuucaac

SEQ ID NO: 2108168 - RNA, 19 nt, Artificial Sequence
  Description of Artificial Sequence: Synthetic oligonucleotide
agaaaugaugaacaaucuc

SEQ ID NO: 2108169 - RNA, 19 nt, Artificial Sequence
  Description of Artificial Sequence: Synthetic oligonucleotide
auuagguuuuaacucaaag

SEQ ID NO: 2108170 - RNA, 19 nt, Artificial Sequence
  Description of Artificial Sequence: Synthetic oligonucleotide
aaucuuaaauguagaaaac

SEQ ID NO: 2108171 - RNA, 19 nt, Artificial Sequence
  Description of Artificial Sequence: Synthetic oligonucleotide
uuuggaagaacagucaaug

SEQ ID NO: 2108172 - RNA, 19 nt, Artificial Sequence
  Description of Artificial Sequence: Synthetic oligonucleotide
ugcucuuaaccauugaagc

SEQ ID NO: 2108173 - RNA, 19 nt, Artificial Sequence
  Description of Artificial Sequence: Synthetic oligonucleotide
ucuuuuaguuuauggaugc

SEQ ID NO: 2108174 - RNA, 19 nt, Artificial Sequence
  Description of Artificial Sequence: Synthetic oligonucleotide
uucuuuuaguuuauggaug

SEQ ID NO: 2108175 - RNA, 19 nt, Artificial Sequence
  Description of Artificial Sequence: Synthetic oligonucleotide
acuauaaacagucuccaga

SEQ ID NO: 2108176 - RNA, 19 nt, Artificial Sequence
  Description of Artificial Sequence: Synthetic oligonucleotide
acaagaguauguaagaauc

SEQ ID NO: 2108177 - RNA, 19 nt, Artificial Sequence
  Description of Artificial Sequence: Synthetic oligonucleotide
uguagaaaacaaaauggaa

SEQ ID NO: 2108178 - RNA, 19 nt, Artificial Sequence
  Description of Artificial Sequence: Synthetic oligonucleotide
uagaguauaccccuucaag

SEQ ID NO: 2108179 - RNA, 19 nt, Artificial Sequence
  Description of Artificial Sequence: Synthetic oligonucleotide
cuuaagaaccucacuaccc

SEQ ID NO: 2108180 - RNA, 19 nt, Artificial Sequence
  Description of Artificial Sequence: Synthetic oligonucleotide
ucaacuagaguauaccccu

SEQ ID NO: 2108181 - RNA, 19 nt, Artificial Sequence
  Description of Artificial Sequence: Synthetic oligonucleotide
uaguauuugcucacaagag

SEQ ID NO: 2108182 - RNA, 19 nt, Artificial Sequence
  Description of Artificial Sequence: Synthetic oligonucleotide
cauuugaaaagugagcugc

SEQ ID NO: 2108183 - RNA, 19 nt, Artificial Sequence
  Description of Artificial Sequence: Synthetic oligonucleotide
ugaugaacaaucucugccc

SEQ ID NO: 2108184 - RNA, 19 nt, Artificial Sequence
  Description of Artificial Sequence: Synthetic oligonucleotide
cucgugaagauccagcacg

SEQ ID NO: 2108185 - RNA, 19 nt, Artificial Sequence
  Description of Artificial Sequence: Synthetic oligonucleotide
uauaguauuugcucacaag

SEQ ID NO: 2108186 - RNA, 19 nt, Artificial Sequence
  Description of Artificial Sequence: Synthetic oligonucleotide
aaccauugaagccaucucu

SEQ ID NO: 2108187 - RNA, 19 nt, Artificial Sequence
  Description of Artificial Sequence: Synthetic oligonucleotide
ucauaauccucucgcaugc

SEQ ID NO: 2108188 - RNA, 19 nt, Artificial Sequence
  Description of Artificial Sequence: Synthetic oligonucleotide
aaagugagcugccauguga

SEQ ID NO: 2108189 - RNA, 19 nt, Artificial Sequence
  Description of Artificial Sequence: Synthetic oligonucleotide
gaugaacaaucucugcccg

SEQ ID NO: 2108190 - RNA, 19 nt, Artificial Sequence
  Description of Artificial Sequence: Synthetic oligonucleotide
aauagcauuugaaaaguga

SEQ ID NO: 2108191 - RNA, 19 nt, Artificial Sequence
  Description of Artificial Sequence: Synthetic oligonucleotide
aauccucucgcaugcgcgc

SEQ ID NO: 2108192 - RNA, 19 nt, Artificial Sequence
  Description of Artificial Sequence: Synthetic oligonucleotide
uccuuaaugccuuaagaac

SEQ ID NO: 2108193 - RNA, 19 nt, Artificial Sequence
  Description of Artificial Sequence: Synthetic oligonucleotide
agaacaguaaaauaaucuu

SEQ ID NO: 2108194 - RNA, 19 nt, Artificial Sequence
  Description of Artificial Sequence: Synthetic oligonucleotide
aacuagaguauaccccuuc

SEQ ID NO: 2108195 - RNA, 19 nt, Artificial Sequence
  Description of Artificial Sequence: Synthetic oligonucleotide
aaaacaaaauggaacauuu

SEQ ID NO: 2108196 - RNA, 19 nt, Artificial Sequence
  Description of Artificial Sequence: Synthetic oligonucleotide
aacaguaaaauaaucuuaa

SEQ ID NO: 2108197 - RNA, 19 nt, Artificial Sequence
  Description of Artificial Sequence: Synthetic oligonucleotide
uucaguggcuucuucgugg

SEQ ID NO: 2108198 - RNA, 19 nt, Artificial Sequence
  Description of Artificial Sequence: Synthetic oligonucleotide
cucaacuagaguauacccc

SEQ ID NO: 2108199 - RNA, 19 nt, Artificial Sequence
  Description of Artificial Sequence: Synthetic oligonucleotide
auaauccucucgcaugcgc

SEQ ID NO: 2108200 - RNA, 19 nt, Artificial Sequence
  Description of Artificial Sequence: Synthetic oligonucleotide
cuaauauaguauuugcuca

SEQ ID NO: 2108201 - RNA, 19 nt, Artificial Sequence
  Description of Artificial Sequence: Synthetic oligonucleotide
uaauccucucgcaugcgcg

SEQ ID NO: 2108202 - RNA, 19 nt, Artificial Sequence
  Description of Artificial Sequence: Synthetic oligonucleotide
auagcauuugaaaagugag

SEQ ID NO: 2108203 - RNA, 19 nt, Artificial Sequence
  Description of Artificial Sequence: Synthetic oligonucleotide
agaguauaccccuucaagu

SEQ ID NO: 2108204 - RNA, 19 nt, Artificial Sequence
  Description of Artificial Sequence: Synthetic oligonucleotide
ugaaaagugagcugccaug

SEQ ID NO: 2108205 - RNA, 19 nt, Artificial Sequence
  Description of Artificial Sequence: Synthetic oligonucleotide
uaauauaguauuugcucac

SEQ ID NO: 2108206 - RNA, 19 nt, Artificial Sequence
  Description of Artificial Sequence: Synthetic oligonucleotide
aaaugaugaacaaucucug

SEQ ID NO: 2108207 - RNA, 19 nt, Artificial Sequence
  Description of Artificial Sequence: Synthetic oligonucleotide
agcauuugaaaagugagcu

SEQ ID NO: 2108208 - RNA, 19 nt, Artificial Sequence
  Description of Artificial Sequence: Synthetic oligonucleotide
gaaaugaugaacaaucucu

SEQ ID NO: 2108209 - RNA, 19 nt, Artificial Sequence
  Description of Artificial Sequence: Synthetic oligonucleotide
uccagugacaaagagaauc

SEQ ID NO: 2108210 - RNA, 19 nt, Artificial Sequence
  Description of Artificial Sequence: Synthetic oligonucleotide
uaguuuauggaugcucucg

SEQ ID NO: 2108211 - RNA, 19 nt, Artificial Sequence
  Description of Artificial Sequence: Synthetic oligonucleotide
uugaaucuggguccuuugg

SEQ ID NO: 2108212 - RNA, 19 nt, Artificial Sequence
  Description of Artificial Sequence: Synthetic oligonucleotide
ucauccauggcgaaauccu

SEQ ID NO: 2108213 - RNA, 19 nt, Artificial Sequence
  Description of Artificial Sequence: Synthetic oligonucleotide
uagcauuugaaaagugagc

SEQ ID NO: 2108214 - RNA, 19 nt, Artificial Sequence
  Description of Artificial Sequence: Synthetic oligonucleotide
agaaacucagaauuacacu

SEQ ID NO: 2108215 - RNA, 19 nt, Artificial Sequence
  Description of Artificial Sequence: Synthetic oligonucleotide
gaguauguaagaaucacuc

SEQ ID NO: 2108216 - RNA, 19 nt, Artificial Sequence
  Description of Artificial Sequence: Synthetic oligonucleotide
uuuuaacucaaagcaauac

SEQ ID NO: 2108217 - RNA, 19 nt, Artificial Sequence
  Description of Artificial Sequence: Synthetic oligonucleotide
ugccuuaagaaccucacua

SEQ ID NO: 2108218 - RNA, 19 nt, Artificial Sequence
  Description of Artificial Sequence: Synthetic oligonucleotide
uuaaccauugaagccaucu

SEQ ID NO: 2108219 - RNA, 19 nt, Artificial Sequence
  Description of Artificial Sequence: Synthetic oligonucleotide
ucuagaaacucagaauuac

SEQ ID NO: 2108220 - RNA, 19 nt, Artificial Sequence
  Description of Artificial Sequence: Synthetic oligonucleotide
aaauaaucuuaaauguaga

SEQ ID NO: 2108221 - RNA, 19 nt, Artificial Sequence
  Description of Artificial Sequence: Synthetic oligonucleotide
gaugcucucguccccaucc

SEQ ID NO: 2108222 - RNA, 19 nt, Artificial Sequence
  Description of Artificial Sequence: Synthetic oligonucleotide
uuauggaugcucucguccc

SEQ ID NO: 2108223 - RNA, 19 nt, Artificial Sequence
  Description of Artificial Sequence: Synthetic oligonucleotide
guauguuucauacucaacu

SEQ ID NO: 2108224 - RNA, 19 nt, Artificial Sequence
  Description of Artificial Sequence: Synthetic oligonucleotide
ccuuaaugccuuaagaacc

SEQ ID NO: 2108225 - RNA, 19 nt, Artificial Sequence
  Description of Artificial Sequence: Synthetic oligonucleotide
uucaacagagcguuguggu

SEQ ID NO: 2108226 - RNA, 19 nt, Artificial Sequence
  Description of Artificial Sequence: Synthetic oligonucleotide
auggcgaaauccucgcccc

SEQ ID NO: 2108227 - RNA, 19 nt, Artificial Sequence
  Description of Artificial Sequence: Synthetic oligonucleotide
auaaucuuaaauguagaaa

SEQ ID NO: 2108228 - RNA, 19 nt, Artificial Sequence
  Description of Artificial Sequence: Synthetic oligonucleotide
aaccucacuaccccugcuc

SEQ ID NO: 2108229 - RNA, 19 nt, Artificial Sequence
  Description of Artificial Sequence: Synthetic oligonucleotide
uccagaacaguaaaauaau

SEQ ID NO: 2108230 - RNA, 19 nt, Artificial Sequence
  Description of Artificial Sequence: Synthetic oligonucleotide
agguucaucgccauccugc

SEQ ID NO: 2108231 - RNA, 19 nt, Artificial Sequence
  Description of Artificial Sequence: Synthetic oligonucleotide
ucuucggagccaaagccgc

SEQ ID NO: 2108232 - RNA, 19 nt, Artificial Sequence
  Description of Artificial Sequence: Synthetic oligonucleotide
ucaaugcucuuaaccauug

SEQ ID NO: 2108233 - RNA, 19 nt, Artificial Sequence
  Description of Artificial Sequence: Synthetic oligonucleotide
aacagucaaugcucuuaac

SEQ ID NO: 2108234 - RNA, 19 nt, Artificial Sequence
  Description of Artificial Sequence: Synthetic oligonucleotide
acuccagacagacaugucu

SEQ ID NO: 2108235 - RNA, 19 nt, Artificial Sequence
  Description of Artificial Sequence: Synthetic oligonucleotide
ugaaucuggguccuuugga

SEQ ID NO: 2108236 - RNA, 19 nt, Artificial Sequence
  Description of Artificial Sequence: Synthetic oligonucleotide
uuacuauaaacagucucca

SEQ ID NO: 2108237 - RNA, 19 nt, Artificial Sequence
  Description of Artificial Sequence: Synthetic oligonucleotide
agaaccucacuaccccugc

SEQ ID NO: 2108238 - RNA, 19 nt, Artificial Sequence
  Description of Artificial Sequence: Synthetic oligonucleotide
aauauaguauuugcucaca

SEQ ID NO: 2108239 - RNA, 19 nt, Artificial Sequence
  Description of Artificial Sequence: Synthetic oligonucleotide
uuuuaguuuauggaugcuc

SEQ ID NO: 2108240 - RNA, 19 nt, Artificial Sequence
  Description of Artificial Sequence: Synthetic oligonucleotide
ucuucguggacuccaguga

SEQ ID NO: 2108241 - RNA, 19 nt, Artificial Sequence
  Description of Artificial Sequence: Synthetic oligonucleotide
uucuucguggacuccagug

SEQ ID NO: 2108242 - RNA, 19 nt, Artificial Sequence
  Description of Artificial Sequence: Synthetic oligonucleotide
ugaacaaucucugcccgag

SEQ ID NO: 2108243 - RNA, 19 nt, Artificial Sequence
  Description of Artificial Sequence: Synthetic oligonucleotide
acuccuuaaugccuuaaga

SEQ ID NO: 2108244 - RNA, 19 nt, Artificial Sequence
  Description of Artificial Sequence: Synthetic oligonucleotide
aagaaaugaugaacaaucu

SEQ ID NO: 2108245 - RNA, 19 nt, Artificial Sequence
  Description of Artificial Sequence: Synthetic oligonucleotide
auuugaaaagugagcugcc

SEQ ID NO: 2108246 - RNA, 19 nt, Artificial Sequence
  Description of Artificial Sequence: Synthetic oligonucleotide
uuauuagguuuuaacucaa

SEQ ID NO: 2108247 - RNA, 19 nt, Artificial Sequence
  Description of Artificial Sequence: Synthetic oligonucleotide
gugacaaagagaauccagc

SEQ ID NO: 2108248 - RNA, 19 nt, Artificial Sequence
  Description of Artificial Sequence: Synthetic oligonucleotide
uacucaacuagaguauacc

SEQ ID NO: 2108249 - RNA, 19 nt, Artificial Sequence
  Description of Artificial Sequence: Synthetic oligonucleotide
guauguaagaaucacuccu

SEQ ID NO: 2108250 - RNA, 19 nt, Artificial Sequence
  Description of Artificial Sequence: Synthetic oligonucleotide
uguauguuucauacucaac

SEQ ID NO: 2108251 - RNA, 19 nt, Artificial Sequence
  Description of Artificial Sequence: Synthetic oligonucleotide
auguagaaaacaaaaugga

SEQ ID NO: 2108252 - RNA, 19 nt, Artificial Sequence
  Description of Artificial Sequence: Synthetic oligonucleotide
cauggcgaaauccucgccc

SEQ ID NO: 2108253 - RNA, 19 nt, Artificial Sequence
  Description of Artificial Sequence: Synthetic oligonucleotide
cucuucggagccaaagccg

SEQ ID NO: 2108254 - RNA, 19 nt, Artificial Sequence
  Description of Artificial Sequence: Synthetic oligonucleotide
uauaaacagucuccagaac

SEQ ID NO: 2108255 - RNA, 19 nt, Artificial Sequence
  Description of Artificial Sequence: Synthetic oligonucleotide
gacaugucuucccagugac

SEQ ID NO: 2108256 - RNA, 19 nt, Artificial Sequence
  Description of Artificial Sequence: Synthetic oligonucleotide
uugaaaagugagcugccau

SEQ ID NO: 2108257 - RNA, 19 nt, Artificial Sequence
  Description of Artificial Sequence: Synthetic oligonucleotide
aguuuauggaugcucucgu

SEQ ID NO: 2108258 - RNA, 19 nt, Artificial Sequence
  Description of Artificial Sequence: Synthetic oligonucleotide
cuccacgcugucauaaucc

SEQ ID NO: 2108259 - RNA, 19 nt, Artificial Sequence
  Description of Artificial Sequence: Synthetic oligonucleotide
agugacaaagagaauccag

SEQ ID NO: 2108260 - RNA, 19 nt, Artificial Sequence
  Description of Artificial Sequence: Synthetic oligonucleotide
agcacguccgccaucuugc

SEQ ID NO: 2108261 - RNA, 19 nt, Artificial Sequence
  Description of Artificial Sequence: Synthetic oligonucleotide
ugcccgagccucuagaaac

SEQ ID NO: 2108262 - RNA, 19 nt, Artificial Sequence
  Description of Artificial Sequence: Synthetic oligonucleotide
aagugagcugccaugugag

SEQ ID NO: 2108263 - RNA, 19 nt, Artificial Sequence
  Description of Artificial Sequence: Synthetic oligonucleotide
uucgccuuuucuuuuaguu

SEQ ID NO: 2108264 - RNA, 19 nt, Artificial Sequence
  Description of Artificial Sequence: Synthetic oligonucleotide
gaaggccuuacuauaaaca

SEQ ID NO: 2108265 - RNA, 19 nt, Artificial Sequence
  Description of Artificial Sequence: Synthetic oligonucleotide
uauuugcucacaagaguau

SEQ ID NO: 2108266 - RNA, 19 nt, Artificial Sequence
  Description of Artificial Sequence: Synthetic oligonucleotide
ucuccagccccacuaauau

SEQ ID NO: 2108267 - RNA, 19 nt, Artificial Sequence
  Description of Artificial Sequence: Synthetic oligonucleotide
aguauaccccuucaaguau

SEQ ID NO: 2108268 - RNA, 19 nt, Artificial Sequence
  Description of Artificial Sequence: Synthetic oligonucleotide
auauaguauuugcucacaa

SEQ ID NO: 2108269 - RNA, 19 nt, Artificial Sequence
  Description of Artificial Sequence: Synthetic oligonucleotide
acuagaguauaccccuuca

SEQ ID NO: 2108270 - RNA, 19 nt, Artificial Sequence
  Description of Artificial Sequence: Synthetic oligonucleotide
cuucaacagagcguugugg

SEQ ID NO: 2108271 - RNA, 19 nt, Artificial Sequence
  Description of Artificial Sequence: Synthetic oligonucleotide
cagaauuacacuccagaca

SEQ ID NO: 2108272 - RNA, 19 nt, Artificial Sequence
  Description of Artificial Sequence: Synthetic oligonucleotide
gaguauaccccuucaagua

SEQ ID NO: 2108273 - RNA, 19 nt, Artificial Sequence
  Description of Artificial Sequence: Synthetic oligonucleotide
acauuuauuauuagguuuu

SEQ ID NO: 2108274 - RNA, 19 nt, Artificial Sequence
  Description of Artificial Sequence: Synthetic oligonucleotide
accauugaagccaucucuc

SEQ ID NO: 2108275 - RNA, 19 nt, Artificial Sequence
  Description of Artificial Sequence: Synthetic oligonucleotide
cucuuaaccauugaagcca

SEQ ID NO: 2108276 - RNA, 19 nt, Artificial Sequence
  Description of Artificial Sequence: Synthetic oligonucleotide
aagauccagcacguccgcc

SEQ ID NO: 2108277 - RNA, 19 nt, Artificial Sequence
  Description of Artificial Sequence: Synthetic oligonucleotide
gacagacaugucuucccag

SEQ ID NO: 2108278 - RNA, 19 nt, Artificial Sequence
  Description of Artificial Sequence: Synthetic oligonucleotide
uauggaugcucucgucccc

SEQ ID NO: 2108279 - RNA, 19 nt, Artificial Sequence
  Description of Artificial Sequence: Synthetic oligonucleotide
cuccuuaaugccuuaagaa

SEQ ID NO: 2108280 - RNA, 19 nt, Artificial Sequence
  Description of Artificial Sequence: Synthetic oligonucleotide
cuagaaacucagaauuaca

SEQ ID NO: 2108281 - RNA, 19 nt, Artificial Sequence
  Description of Artificial Sequence: Synthetic oligonucleotide
uccauggcgaaauccucgc

SEQ ID NO: 2108282 - RNA, 19 nt, Artificial Sequence
  Description of Artificial Sequence: Synthetic oligonucleotide
ugucuucccagugacucag

SEQ ID NO: 2108283 - RNA, 19 nt, Artificial Sequence
  Description of Artificial Sequence: Synthetic oligonucleotide
agccucuagaaacucagaa

SEQ ID NO: 2108284 - RNA, 19 nt, Artificial Sequence
  Description of Artificial Sequence: Synthetic oligonucleotide
uuaguuuauggaugcucuc

SEQ ID NO: 2108285 - RNA, 19 nt, Artificial Sequence
  Description of Artificial Sequence: Synthetic oligonucleotide
uugaagccaucucuccagc

SEQ ID NO: 2108286 - RNA, 19 nt, Artificial Sequence
  Description of Artificial Sequence: Synthetic oligonucleotide
aauugaaucuggguccuuu

SEQ ID NO: 2108287 - RNA, 19 nt, Artificial Sequence
  Description of Artificial Sequence: Synthetic oligonucleotide
auuugcucacaagaguaug

SEQ ID NO: 2108288 - RNA, 19 nt, Artificial Sequence
  Description of Artificial Sequence: Synthetic oligonucleotide
ucuuaaccauugaagccau

SEQ ID NO: 2108289 - RNA, 19 nt, Artificial Sequence
  Description of Artificial Sequence: Synthetic oligonucleotide
uggguccuuuggaagaaca

SEQ ID NO: 2108290 - RNA, 19 nt, Artificial Sequence
  Description of Artificial Sequence: Synthetic oligonucleotide
uauuagguuuuaacucaaa

SEQ ID NO: 2108291 - RNA, 19 nt, Artificial Sequence
  Description of Artificial Sequence: Synthetic oligonucleotide
aaagagaauccagccuuca

SEQ ID NO: 2108292 - RNA, 19 nt, Artificial Sequence
  Description of Artificial Sequence: Synthetic oligonucleotide
caagaguauguaagaauca

SEQ ID NO: 2108293 - RNA, 19 nt, Artificial Sequence
  Description of Artificial Sequence: Synthetic oligonucleotide
agacaugucuucccaguga

SEQ ID NO: 2108294 - RNA, 19 nt, Artificial Sequence
  Description of Artificial Sequence: Synthetic oligonucleotide
ccacuaauauaguauuugc

SEQ ID NO: 2108295 - RNA, 19 nt, Artificial Sequence
  Description of Artificial Sequence: Synthetic oligonucleotide
uaccccugcucucuggucu

SEQ ID NO: 2108296 - RNA, 19 nt, Artificial Sequence
  Description of Artificial Sequence: Synthetic oligonucleotide
aagaaccucacuaccccug

SEQ ID NO: 2108297 - RNA, 19 nt, Artificial Sequence
  Description of Artificial Sequence: Synthetic oligonucleotide
gcucuuaaccauugaagcc

SEQ ID NO: 2108298 - RNA, 19 nt, Artificial Sequence
  Description of Artificial Sequence: Synthetic oligonucleotide
aaagccgcggcccuuucuu

SEQ ID NO: 2108299 - RNA, 19 nt, Artificial Sequence
  Description of Artificial Sequence: Synthetic oligonucleotide
gcucacaagaguauguaag

SEQ ID NO: 2108300 - RNA, 19 nt, Artificial Sequence
  Description of Artificial Sequence: Synthetic oligonucleotide
ccagugacaaagagaaucc

SEQ ID NO: 2108301 - RNA, 19 nt, Artificial Sequence
  Description of Artificial Sequence: Synthetic oligonucleotide
agacagacaugucuuccca

SEQ ID NO: 2108302 - RNA, 19 nt, Artificial Sequence
  Description of Artificial Sequence: Synthetic oligonucleotide
agaguauguaagaaucacu

SEQ ID NO: 2108303 - RNA, 19 nt, Artificial Sequence
  Description of Artificial Sequence: Synthetic oligonucleotide
ucgugaagauccagcacgu

SEQ ID NO: 2108304 - RNA, 19 nt, Artificial Sequence
  Description of Artificial Sequence: Synthetic oligonucleotide
guauuugcucacaagagua

SEQ ID NO: 2108305 - RNA, 19 nt, Artificial Sequence
  Description of Artificial Sequence: Synthetic oligonucleotide
auccauggcgaaauccucg

SEQ ID NO: 2108306 - RNA, 19 nt, Artificial Sequence
  Description of Artificial Sequence: Synthetic oligonucleotide
uucggagccaaagccgcgg

SEQ ID NO: 2108307 - RNA, 19 nt, Artificial Sequence
  Description of Artificial Sequence: Synthetic oligonucleotide
cuucguggacuccagugac

SEQ ID NO: 2108308 - RNA, 19 nt, Artificial Sequence
  Description of Artificial Sequence: Synthetic oligonucleotide
gaacauuuauuauuagguu

SEQ ID NO: 2108309 - RNA, 19 nt, Artificial Sequence
  Description of Artificial Sequence: Synthetic oligonucleotide
aaacagucuccagaacagu

SEQ ID NO: 2108310 - RNA, 19 nt, Artificial Sequence
  Description of Artificial Sequence: Synthetic oligonucleotide
ucaacagagcguugugguc

SEQ ID NO: 2108311 - RNA, 19 nt, Artificial Sequence
  Description of Artificial Sequence: Synthetic oligonucleotide
ucaguggcuucuucgugga

SEQ ID NO: 2108312 - RNA, 19 nt, Artificial Sequence
  Description of Artificial Sequence: Synthetic oligonucleotide
uccacgcugucauaauccu

SEQ ID NO: 2108313 - RNA, 19 nt, Artificial Sequence
  Description of Artificial Sequence: Synthetic oligonucleotide
agagcguugugguccaggu

SEQ ID NO: 2108314 - RNA, 19 nt, Artificial Sequence
  Description of Artificial Sequence: Synthetic oligonucleotide
gaagauccagcacguccgc

SEQ ID NO: 2108315 - RNA, 19 nt, Artificial Sequence
  Description of Artificial Sequence: Synthetic oligonucleotide
aaacaaaauggaacauuua

SEQ ID NO: 2108316 - RNA, 19 nt, Artificial Sequence
  Description of Artificial Sequence: Synthetic oligonucleotide
aacagucuccagaacagua

SEQ ID NO: 2108317 - RNA, 19 nt, Artificial Sequence
  Description of Artificial Sequence: Synthetic oligonucleotide
ccuuacuauaaacagucuc

SEQ ID NO: 2108318 - RNA, 19 nt, Artificial Sequence
  Description of Artificial Sequence: Synthetic oligonucleotide
caaagagaauccagccuuc

SEQ ID NO: 2108319 - RNA, 19 nt, Artificial Sequence
  Description of Artificial Sequence: Synthetic oligonucleotide
ccuuaagaaccucacuacc

SEQ ID NO: 2108320 - RNA, 19 nt, Artificial Sequence
  Description of Artificial Sequence: Synthetic oligonucleotide
cacuccuuaaugccuuaag

SEQ ID NO: 2108321 - RNA, 19 nt, Artificial Sequence
  Description of Artificial Sequence: Synthetic oligonucleotide
ggccuuacuauaaacaguc

SEQ ID NO: 2108322 - RNA, 19 nt, Artificial Sequence
  Description of Artificial Sequence: Synthetic oligonucleotide
aaucacuccuuaaugccuu

SEQ ID NO: 2108323 - RNA, 19 nt, Artificial Sequence
  Description of Artificial Sequence: Synthetic oligonucleotide
acacuccagacagacaugu

SEQ ID NO: 2108324 - RNA, 19 nt, Artificial Sequence
  Description of Artificial Sequence: Synthetic oligonucleotide
cuuaaugccuuaagaaccu

SEQ ID NO: 2108325 - RNA, 19 nt, Artificial Sequence
  Description of Artificial Sequence: Synthetic oligonucleotide
ugagccucuuuguauguuu

SEQ ID NO: 2108326 - RNA, 19 nt, Artificial Sequence
  Description of Artificial Sequence: Synthetic oligonucleotide
gaaaagugagcugccaugu

SEQ ID NO: 2108327 - RNA, 19 nt, Artificial Sequence
  Description of Artificial Sequence: Synthetic oligonucleotide
accucacuaccccugcucu

SEQ ID NO: 2108328 - RNA, 19 nt, Artificial Sequence
  Description of Artificial Sequence: Synthetic oligonucleotide
uucguggacuccagugaca

SEQ ID NO: 2108329 - RNA, 19 nt, Artificial Sequence
  Description of Artificial Sequence: Synthetic oligonucleotide
ucccagugacucagaaggc

SEQ ID NO: 2108330 - RNA, 19 nt, Artificial Sequence
  Description of Artificial Sequence: Synthetic oligonucleotide
cauugaagccaucucucca

SEQ ID NO: 2108331 - RNA, 19 nt, Artificial Sequence
  Description of Artificial Sequence: Synthetic oligonucleotide
ucgccauccugcuccacgc

SEQ ID NO: 2108332 - RNA, 19 nt, Artificial Sequence
  Description of Artificial Sequence: Synthetic oligonucleotide
augaacaaucucugcccga

SEQ ID NO: 2108333 - RNA, 19 nt, Artificial Sequence
  Description of Artificial Sequence: Synthetic oligonucleotide
gccaucuugcuucucucgg

SEQ ID NO: 2108334 - RNA, 19 nt, Artificial Sequence
  Description of Artificial Sequence: Synthetic oligonucleotide
guuuauggaugcucucguc

SEQ ID NO: 2108335 - RNA, 19 nt, Artificial Sequence
  Description of Artificial Sequence: Synthetic oligonucleotide
cuucaguggcuucuucgug

SEQ ID NO: 2108336 - RNA, 19 nt, Artificial Sequence
  Description of Artificial Sequence: Synthetic oligonucleotide
uccagacagacaugucuuc

SEQ ID NO: 2108337 - RNA, 19 nt, Artificial Sequence
  Description of Artificial Sequence: Synthetic oligonucleotide
cauccauggcgaaauccuc

SEQ ID NO: 2108338 - RNA, 19 nt, Artificial Sequence
  Description of Artificial Sequence: Synthetic oligonucleotide
agguuuuaacucaaagcaa

SEQ ID NO: 2108339 - RNA, 19 nt, Artificial Sequence
  Description of Artificial Sequence: Synthetic oligonucleotide
ucugcccgagccucuagaa

SEQ ID NO: 2108340 - RNA, 19 nt, Artificial Sequence
  Description of Artificial Sequence: Synthetic oligonucleotide
cucagaaggccuuacuaua

SEQ ID NO: 2108341 - RNA, 19 nt, Artificial Sequence
  Description of Artificial Sequence: Synthetic oligonucleotide
ucguggacuccagugacaa

SEQ ID NO: 2108342 - RNA, 19 nt, Artificial Sequence
  Description of Artificial Sequence: Synthetic oligonucleotide
cuucggagccaaagccgcg

SEQ ID NO: 2108343 - RNA, 19 nt, Artificial Sequence
  Description of Artificial Sequence: Synthetic oligonucleotide
ucgggaccccucuucggag

SEQ ID NO: 2108344 - RNA, 19 nt, Artificial Sequence
  Description of Artificial Sequence: Synthetic oligonucleotide
cauaauccucucgcaugcg

SEQ ID NO: 2108345 - RNA, 19 nt, Artificial Sequence
  Description of Artificial Sequence: Synthetic oligonucleotide
gaaucacuccuuaaugccu

SEQ ID NO: 2108346 - RNA, 19 nt, Artificial Sequence
  Description of Artificial Sequence: Synthetic oligonucleotide
ccagaacaguaaaauaauc

SEQ ID NO: 2108347 - RNA, 19 nt, Artificial Sequence
  Description of Artificial Sequence: Synthetic oligonucleotide
cucuagaaacucagaauua

SEQ ID NO: 2108348 - RNA, 19 nt, Artificial Sequence
  Description of Artificial Sequence: Synthetic oligonucleotide
cccacuaauauaguauuug

SEQ ID NO: 2108349 - RNA, 19 nt, Artificial Sequence
  Description of Artificial Sequence: Synthetic oligonucleotide
agccucuuuguauguuuca

SEQ ID NO: 2108350 - RNA, 19 nt, Artificial Sequence
  Description of Artificial Sequence: Synthetic oligonucleotide
uugcucacaagaguaugua

SEQ ID NO: 2108351 - RNA, 19 nt, Artificial Sequence
  Description of Artificial Sequence: Synthetic oligonucleotide
ucucgcaugcgcgcucggg

SEQ ID NO: 2108352 - RNA, 19 nt, Artificial Sequence
  Description of Artificial Sequence: Synthetic oligonucleotide
uucuucgccuuuucuuuua

SEQ ID NO: 2108353 - RNA, 19 nt, Artificial Sequence
  Description of Artificial Sequence: Synthetic oligonucleotide
caaucucugcccgagccuc

SEQ ID NO: 2108354 - RNA, 19 nt, Artificial Sequence
  Description of Artificial Sequence: Synthetic oligonucleotide
guauaccccuucaaguauc

SEQ ID NO: 2108355 - RNA, 19 nt, Artificial Sequence
  Description of Artificial Sequence: Synthetic oligonucleotide
agccccacuaauauaguau

SEQ ID NO: 2108356 - RNA, 19 nt, Artificial Sequence
  Description of Artificial Sequence: Synthetic oligonucleotide
ucggagccaaagccgcggc

SEQ ID NO: 2108357 - RNA, 19 nt, Artificial Sequence
  Description of Artificial Sequence: Synthetic oligonucleotide
cuagaguauaccccuucaa

SEQ ID NO: 2108358 - RNA, 19 nt, Artificial Sequence
  Description of Artificial Sequence: Synthetic oligonucleotide
ccauugaagccaucucucc

SEQ ID NO: 2108359 - RNA, 19 nt, Artificial Sequence
  Description of Artificial Sequence: Synthetic oligonucleotide
uuaaugccuuaagaaccuc

SEQ ID NO: 2108360 - RNA, 19 nt, Artificial Sequence
  Description of Artificial Sequence: Synthetic oligonucleotide
cacaagaguauguaagaau

SEQ ID NO: 2108361 - RNA, 19 nt, Artificial Sequence
  Description of Artificial Sequence: Synthetic oligonucleotide
aggccuuacuauaaacagu

SEQ ID NO: 2108362 - RNA, 19 nt, Artificial Sequence
  Description of Artificial Sequence: Synthetic oligonucleotide
guuuuaacucaaagcaaua

SEQ ID NO: 2108363 - RNA, 19 nt, Artificial Sequence
  Description of Artificial Sequence: Synthetic oligonucleotide
ucacuaccccugcucucug

SEQ ID NO: 2108364 - RNA, 19 nt, Artificial Sequence
  Description of Artificial Sequence: Synthetic oligonucleotide
ucgcaugcgcgcucgggac

SEQ ID NO: 2108365 - RNA, 19 nt, Artificial Sequence
  Description of Artificial Sequence: Synthetic oligonucleotide
cccggccucgugaagaucc

SEQ ID NO: 2108366 - RNA, 19 nt, Artificial Sequence
  Description of Artificial Sequence: Synthetic oligonucleotide
ucucugcccgagccucuag

SEQ ID NO: 2108367 - RNA, 19 nt, Artificial Sequence
  Description of Artificial Sequence: Synthetic oligonucleotide
auuacacuccagacagaca

SEQ ID NO: 2108368 - RNA, 19 nt, Artificial Sequence
  Description of Artificial Sequence: Synthetic oligonucleotide
cucucuggucuucuaagaa

SEQ ID NO: 2108369 - RNA, 19 nt, Artificial Sequence
  Description of Artificial Sequence: Synthetic oligonucleotide
cagagcguugugguccagg

SEQ ID NO: 2108370 - RNA, 19 nt, Artificial Sequence
  Description of Artificial Sequence: Synthetic oligonucleotide
ggcccuuucuuuucuucgc

SEQ ID NO: 2108371 - RNA, 19 nt, Artificial Sequence
  Description of Artificial Sequence: Synthetic oligonucleotide
gagccucuuuguauguuuc

SEQ ID NO: 2108372 - RNA, 19 nt, Artificial Sequence
  Description of Artificial Sequence: Synthetic oligonucleotide
gucuccagaacaguaaaau

SEQ ID NO: 2108373 - RNA, 19 nt, Artificial Sequence
  Description of Artificial Sequence: Synthetic oligonucleotide
cuuaaccauugaagccauc

SEQ ID NO: 2108374 - RNA, 19 nt, Artificial Sequence
  Description of Artificial Sequence: Synthetic oligonucleotide
gaauuacacuccagacaga

SEQ ID NO: 2108375 - RNA, 19 nt, Artificial Sequence
  Description of Artificial Sequence: Synthetic oligonucleotide
ccagacagacaugucuucc

SEQ ID NO: 2108376 - RNA, 19 nt, Artificial Sequence
  Description of Artificial Sequence: Synthetic oligonucleotide
ucacuccuuaaugccuuaa

SEQ ID NO: 2108377 - RNA, 19 nt, Artificial Sequence
  Description of Artificial Sequence: Synthetic oligonucleotide
cucgggaccccucuucgga

SEQ ID NO: 2108378 - RNA, 19 nt, Artificial Sequence
  Description of Artificial Sequence: Synthetic oligonucleotide
ugcuccacgcugucauaau

SEQ ID NO: 2108379 - RNA, 19 nt, Artificial Sequence
  Description of Artificial Sequence: Synthetic oligonucleotide
agucuccagaacaguaaaa

SEQ ID NO: 2108380 - RNA, 19 nt, Artificial Sequence
  Description of Artificial Sequence: Synthetic oligonucleotide
gcccuuucuuuucuucgcc

SEQ ID NO: 2108381 - RNA, 19 nt, Artificial Sequence
  Description of Artificial Sequence: Synthetic oligonucleotide
cucgcaugcgcgcucggga

SEQ ID NO: 2108382 - RNA, 19 nt, Artificial Sequence
  Description of Artificial Sequence: Synthetic oligonucleotide
ccucuagaaacucagaauu

SEQ ID NO: 2108383 - RNA, 19 nt, Artificial Sequence
  Description of Artificial Sequence: Synthetic oligonucleotide
cucuccagccccacuaaua

SEQ ID NO: 2108384 - RNA, 19 nt, Artificial Sequence
  Description of Artificial Sequence: Synthetic oligonucleotide
cagaaggccuuacuauaaa

SEQ ID NO: 2108385 - RNA, 19 nt, Artificial Sequence
  Description of Artificial Sequence: Synthetic oligonucleotide
cccucuucggagccaaagc

SEQ ID NO: 2108386 - RNA, 19 nt, Artificial Sequence
  Description of Artificial Sequence: Synthetic oligonucleotide
caaugcucuuaaccauuga

SEQ ID NO: 2108387 - RNA, 19 nt, Artificial Sequence
  Description of Artificial Sequence: Synthetic oligonucleotide
cauuuauuauuagguuuua

SEQ ID NO: 2108388 - RNA, 19 nt, Artificial Sequence
  Description of Artificial Sequence: Synthetic oligonucleotide
auccagccuucaacagagc

SEQ ID NO: 2108389 - RNA, 19 nt, Artificial Sequence
  Description of Artificial Sequence: Synthetic oligonucleotide
cuaccccugcucucugguc

SEQ ID NO: 2108390 - RNA, 19 nt, Artificial Sequence
  Description of Artificial Sequence: Synthetic oligonucleotide
cagugacaaagagaaucca

SEQ ID NO: 2108391 - RNA, 19 nt, Artificial Sequence
  Description of Artificial Sequence: Synthetic oligonucleotide
agugacucagaaggccuua

SEQ ID NO: 2108392 - RNA, 19 nt, Artificial Sequence
  Description of Artificial Sequence: Synthetic oligonucleotide
aagccgcggcccuuucuuu

SEQ ID NO: 2108393 - RNA, 19 nt, Artificial Sequence
  Description of Artificial Sequence: Synthetic oligonucleotide
cuccagacagacaugucuu

SEQ ID NO: 2108394 - RNA, 19 nt, Artificial Sequence
  Description of Artificial Sequence: Synthetic oligonucleotide
ggccucgugaagauccagc

SEQ ID NO: 2108395 - RNA, 19 nt, Artificial Sequence
  Description of Artificial Sequence: Synthetic oligonucleotide
gcuccacgcugucauaauc

SEQ ID NO: 2108396 - RNA, 19 nt, Artificial Sequence
  Description of Artificial Sequence: Synthetic oligonucleotide
gagccucuagaaacucaga

SEQ ID NO: 2108397 - RNA, 19 nt, Artificial Sequence
  Description of Artificial Sequence: Synthetic oligonucleotide
uggaugcucucguccccau

SEQ ID NO: 2108398 - RNA, 19 nt, Artificial Sequence
  Description of Artificial Sequence: Synthetic oligonucleotide
cugcucucuggucuucuaa

SEQ ID NO: 2108399 - RNA, 19 nt, Artificial Sequence
  Description of Artificial Sequence: Synthetic oligonucleotide
ccucgugaagauccagcac

SEQ ID NO: 2108400 - RNA, 19 nt, Artificial Sequence
  Description of Artificial Sequence: Synthetic oligonucleotide
cagccccacuaauauagua

SEQ ID NO: 2108401 - RNA, 19 nt, Artificial Sequence
  Description of Artificial Sequence: Synthetic oligonucleotide
gcucgggaccccucuucgg

SEQ ID NO: 2108402 - RNA, 19 nt, Artificial Sequence
  Description of Artificial Sequence: Synthetic oligonucleotide
cucugcccgagccucuaga

SEQ ID NO: 2108403 - RNA, 19 nt, Artificial Sequence
  Description of Artificial Sequence: Synthetic oligonucleotide
gccucuagaaacucagaau

SEQ ID NO: 2108404 - RNA, 19 nt, Artificial Sequence
  Description of Artificial Sequence: Synthetic oligonucleotide
gauccagcacguccgccau

SEQ ID NO: 2108405 - RNA, 19 nt, Artificial Sequence
  Description of Artificial Sequence: Synthetic oligonucleotide
cucacuaccccugcucucu

SEQ ID NO: 2108406 - RNA, 19 nt, Artificial Sequence
  Description of Artificial Sequence: Synthetic oligonucleotide
agccgcggcccuuucuuuu

SEQ ID NO: 2108407 - RNA, 19 nt, Artificial Sequence
  Description of Artificial Sequence: Synthetic oligonucleotide
gaaccucacuaccccugcu

SEQ ID NO: 2108408 - RNA, 19 nt, Artificial Sequence
  Description of Artificial Sequence: Synthetic oligonucleotide
cuggguccuuuggaagaac

SEQ ID NO: 2108409 - RNA, 19 nt, Artificial Sequence
  Description of Artificial Sequence: Synthetic oligonucleotide
gguucaucgccauccugcu

SEQ ID NO: 2108410 - RNA, 19 nt, Artificial Sequence
  Description of Artificial Sequence: Synthetic oligonucleotide
cuuuuaguuuauggaugcu

SEQ ID NO: 2108411 - RNA, 19 nt, Artificial Sequence
  Description of Artificial Sequence: Synthetic oligonucleotide
cgccaucuugcuucucucg

SEQ ID NO: 2108412 - RNA, 19 nt, Artificial Sequence
  Description of Artificial Sequence: Synthetic oligonucleotide
cgcugucauaauccucucg

SEQ ID NO: 2108413 - RNA, 19 nt, Artificial Sequence
  Description of Artificial Sequence: Synthetic oligonucleotide
cucucgcaugcgcgcucgg

SEQ ID NO: 2108414 - RNA, 19 nt, Artificial Sequence
  Description of Artificial Sequence: Synthetic oligonucleotide
ccauggcgaaauccucgcc

SEQ ID NO: 2108415 - RNA, 19 nt, Artificial Sequence
  Description of Artificial Sequence: Synthetic oligonucleotide
cugcuccacgcugucauaa

SEQ ID NO: 2108416 - RNA, 19 nt, Artificial Sequence
  Description of Artificial Sequence: Synthetic oligonucleotide
cagccuucaacagagcguu

SEQ ID NO: 2108417 - RNA, 19 nt, Artificial Sequence
  Description of Artificial Sequence: Synthetic oligonucleotide
gcucucguccccauccuca

SEQ ID NO: 2108418 - RNA, 19 nt, Artificial Sequence
  Description of Artificial Sequence: Synthetic oligonucleotide
caguggcuucuucguggac

SEQ ID NO: 2108419 - RNA, 19 nt, Artificial Sequence
  Description of Artificial Sequence: Synthetic oligonucleotide
cugcccgagccucuagaaa

SEQ ID NO: 2108420 - RNA, 19 nt, Artificial Sequence
  Description of Artificial Sequence: Synthetic oligonucleotide
ccucuuuguauguuucaua

SEQ ID NO: 2108421 - RNA, 19 nt, Artificial Sequence
  Description of Artificial Sequence: Synthetic oligonucleotide
gcaugcgcgcucgggaccc

SEQ ID NO: 2108422 - RNA, 19 nt, Artificial Sequence
  Description of Artificial Sequence: Synthetic oligonucleotide
ugcgcgcucgggaccccuc

SEQ ID NO: 2108423 - RNA, 19 nt, Artificial Sequence
  Description of Artificial Sequence: Synthetic oligonucleotide
cuccagccccacuaauaua

SEQ ID NO: 2108424 - RNA, 19 nt, Artificial Sequence
  Description of Artificial Sequence: Synthetic oligonucleotide
gcggcccuuucuuuucuuc

SEQ ID NO: 2108425 - RNA, 19 nt, Artificial Sequence
  Description of Artificial Sequence: Synthetic oligonucleotide
gccccacuaauauaguauu

SEQ ID NO: 2108426 - RNA, 19 nt, Artificial Sequence
  Description of Artificial Sequence: Synthetic oligonucleotide
ccagccuucaacagagcgu

SEQ ID NO: 2108427 - RNA, 19 nt, Artificial Sequence
  Description of Artificial Sequence: Synthetic oligonucleotide
ccccucuucggagccaaag

SEQ ID NO: 2108428 - RNA, 19 nt, Artificial Sequence
  Description of Artificial Sequence: Synthetic oligonucleotide
acagagcguugugguccag

SEQ ID NO: 2108429 - RNA, 19 nt, Artificial Sequence
  Description of Artificial Sequence: Synthetic oligonucleotide
ccucacuaccccugcucuc

SEQ ID NO: 2108430 - RNA, 19 nt, Artificial Sequence
  Description of Artificial Sequence: Synthetic oligonucleotide
cuucuucguggacuccagu

SEQ ID NO: 2108431 - RNA, 19 nt, Artificial Sequence
  Description of Artificial Sequence: Synthetic oligonucleotide
ccucucgcaugcgcgcucg

SEQ ID NO: 2108432 - RNA, 19 nt, Artificial Sequence
  Description of Artificial Sequence: Synthetic oligonucleotide
cgcucgggaccccucuucg

SEQ ID NO: 2108433 - RNA, 19 nt, Artificial Sequence
  Description of Artificial Sequence: Synthetic oligonucleotide
gccuucaacagagcguugu

SEQ ID NO: 2108434 - RNA, 19 nt, Artificial Sequence
  Description of Artificial Sequence: Synthetic oligonucleotide
aucucugcccgagccucua

SEQ ID NO: 2108435 - RNA, 19 nt, Artificial Sequence
  Description of Artificial Sequence: Synthetic oligonucleotide
caacuagaguauaccccuu

SEQ ID NO: 2108436 - RNA, 19 nt, Artificial Sequence
  Description of Artificial Sequence: Synthetic oligonucleotide
gagcguugugguccagguu

SEQ ID NO: 2108437 - RNA, 19 nt, Artificial Sequence
  Description of Artificial Sequence: Synthetic oligonucleotide
ccgagccucuagaaacuca

SEQ ID NO: 2108438 - RNA, 19 nt, Artificial Sequence
  Description of Artificial Sequence: Synthetic oligonucleotide
gccgcggcccuuucuuuuc

SEQ ID NO: 2108439 - RNA, 19 nt, Artificial Sequence
  Description of Artificial Sequence: Synthetic oligonucleotide
caaagccgcggcccuuucu

SEQ ID NO: 2108440 - RNA, 19 nt, Artificial Sequence
  Description of Artificial Sequence: Synthetic oligonucleotide
cucucguccccauccucau

SEQ ID NO: 2108441 - RNA, 19 nt, Artificial Sequence
  Description of Artificial Sequence: Synthetic oligonucleotide
gcguugugguccagguuca

SEQ ID NO: 2108442 - RNA, 19 nt, Artificial Sequence
  Description of Artificial Sequence: Synthetic oligonucleotide
caugcgcgcucgggacccc

SEQ ID NO: 2108443 - RNA, 19 nt, Artificial Sequence
  Description of Artificial Sequence: Synthetic oligonucleotide
gccucuuuguauguuucau

SEQ ID NO: 2108444 - RNA, 19 nt, Artificial Sequence
  Description of Artificial Sequence: Synthetic oligonucleotide
gcgcucgggaccccucuuc

SEQ ID NO: 2108445 - RNA, 19 nt, Artificial Sequence
  Description of Artificial Sequence: Synthetic oligonucleotide
augcgcgcucgggaccccu

SEQ ID NO: 2108446 - RNA, 19 nt, Artificial Sequence
  Description of Artificial Sequence: Synthetic oligonucleotide
cccgagccucuagaaacuc

SEQ ID NO: 2108447 - RNA, 19 nt, Artificial Sequence
  Description of Artificial Sequence: Synthetic oligonucleotide
gccuuacuauaaacagucu

SEQ ID NO: 2108448 - RNA, 19 nt, Artificial Sequence
  Description of Artificial Sequence: Synthetic oligonucleotide
cgugaagauccagcacguc

SEQ ID NO: 2108449 - RNA, 19 nt, Artificial Sequence
  Description of Artificial Sequence: Synthetic oligonucleotide
gccuuuucuuuuaguuuau

SEQ ID NO: 2108450 - RNA, 19 nt, Artificial Sequence
  Description of Artificial Sequence: Synthetic oligonucleotide
ccccacuaauauaguauuu

SEQ ID NO: 2108451 - RNA, 19 nt, Artificial Sequence
  Description of Artificial Sequence: Synthetic oligonucleotide
ccugcucucuggucuucua

SEQ ID NO: 2108452 - RNA, 19 nt, Artificial Sequence
  Description of Artificial Sequence: Synthetic oligonucleotide
cacguccgccaucuugcuu

SEQ ID NO: 2108453 - RNA, 19 nt, Artificial Sequence
  Description of Artificial Sequence: Synthetic oligonucleotide
ccggccucgugaagaucca

SEQ ID NO: 2108454 - RNA, 19 nt, Artificial Sequence
  Description of Artificial Sequence: Synthetic oligonucleotide
gcacguccgccaucuugcu

SEQ ID NO: 2108455 - RNA, 19 nt, Artificial Sequence
  Description of Artificial Sequence: Synthetic oligonucleotide
accccucuucggagccaaa

SEQ ID NO: 2108456 - RNA, 19 nt, Artificial Sequence
  Description of Artificial Sequence: Synthetic oligonucleotide
cggccucgugaagauccag

SEQ ID NO: 2108457 - RNA, 19 nt, Artificial Sequence
  Description of Artificial Sequence: Synthetic oligonucleotide
gccaaagccgcggcccuuu

SEQ ID NO: 2108458 - RNA, 19 nt, Artificial Sequence
  Description of Artificial Sequence: Synthetic oligonucleotide
gcgcgcucgggaccccucu

SEQ ID NO: 2108459 - RNA, 19 nt, Artificial Sequence
  Description of Artificial Sequence: Synthetic oligonucleotide
ccccugcucucuggucuuc

SEQ ID NO: 2108460 - RNA, 19 nt, Artificial Sequence
  Description of Artificial Sequence: Synthetic oligonucleotide
ccccggccucgugaagauc

SEQ ID NO: 2108461 - RNA, 19 nt, Artificial Sequence
  Description of Artificial Sequence: Synthetic oligonucleotide
ccgcggcccuuucuuuucu

SEQ ID NO: 2108462 - RNA, 19 nt, Artificial Sequence
  Description of Artificial Sequence: Synthetic oligonucleotide
cgccauccugcuccacgcu

SEQ ID NO: 2108463 - RNA, 19 nt, Artificial Sequence
  Description of Artificial Sequence: Synthetic oligonucleotide
cgcggcccuuucuuuucuu

SEQ ID NO: 2108464 - RNA, 19 nt, Artificial Sequence
  Description of Artificial Sequence: Synthetic oligonucleotide
cgcgcucgggaccccucuu

SEQ ID NO: 2108465 - RNA, 19 nt, Artificial Sequence
  Description of Artificial Sequence: Synthetic oligonucleotide
aaagcuuuaaaucuaacug

SEQ ID NO: 2108466 - RNA, 19 nt, Artificial Sequence
  Description of Artificial Sequence: Synthetic oligonucleotide
aauacaaauuccuaugaag

SEQ ID NO: 2108467 - RNA, 19 nt, Artificial Sequence
  Description of Artificial Sequence: Synthetic oligonucleotide
aacuguauguuguagcccc

SEQ ID NO: 2108468 - RNA, 19 nt, Artificial Sequence
  Description of Artificial Sequence: Synthetic oligonucleotide
uauacugaagcuaauguug

SEQ ID NO: 2108469 - RNA, 19 nt, Artificial Sequence
  Description of Artificial Sequence: Synthetic oligonucleotide
uuucuuaucaccuuuggga

SEQ ID NO: 2108470 - RNA, 19 nt, Artificial Sequence
  Description of Artificial Sequence: Synthetic oligonucleotide
aaaagcuuuaaaucuaacu

SEQ ID NO: 2108471 - RNA, 19 nt, Artificial Sequence
  Description of Artificial Sequence: Synthetic oligonucleotide
agccauuuauucuucaucc

SEQ ID NO: 2108472 - RNA, 19 nt, Artificial Sequence
  Description of Artificial Sequence: Synthetic oligonucleotide
uuaggaacauucaacauca

SEQ ID NO: 2108473 - RNA, 19 nt, Artificial Sequence
  Description of Artificial Sequence: Synthetic oligonucleotide
auaagaaacuaacgaaacc

SEQ ID NO: 2108474 - RNA, 19 nt, Artificial Sequence
  Description of Artificial Sequence: Synthetic oligonucleotide
aaaauaguugccugagcac

SEQ ID NO: 2108475 - RNA, 19 nt, Artificial Sequence
  Description of Artificial Sequence: Synthetic oligonucleotide
aacucggcgaaguugaccg

SEQ ID NO: 2108476 - RNA, 19 nt, Artificial Sequence
  Description of Artificial Sequence: Synthetic oligonucleotide
uucacuuuugaucuuuggg

SEQ ID NO: 2108477 - RNA, 19 nt, Artificial Sequence
  Description of Artificial Sequence: Synthetic oligonucleotide
aaaccauuaaauauuuagg

SEQ ID NO: 2108478 - RNA, 19 nt, Artificial Sequence
  Description of Artificial Sequence: Synthetic oligonucleotide
ugcaguaucuccaauagac

SEQ ID NO: 2108479 - RNA, 19 nt, Artificial Sequence
  Description of Artificial Sequence: Synthetic oligonucleotide
aauauuuaggaacauucaa

SEQ ID NO: 2108480 - RNA, 19 nt, Artificial Sequence
  Description of Artificial Sequence: Synthetic oligonucleotide
caugucugcacgaagaagg

SEQ ID NO: 2108481 - RNA, 19 nt, Artificial Sequence
  Description of Artificial Sequence: Synthetic oligonucleotide
aaagaauuuuaucagcuau

SEQ ID NO: 2108482 - RNA, 19 nt, Artificial Sequence
  Description of Artificial Sequence: Synthetic oligonucleotide
uaccauaagaaacuaacga

SEQ ID NO: 2108483 - RNA, 19 nt, Artificial Sequence
  Description of Artificial Sequence: Synthetic oligonucleotide
aaaguuaauauacauuauu

SEQ ID NO: 2108484 - RNA, 19 nt, Artificial Sequence
  Description of Artificial Sequence: Synthetic oligonucleotide
aggaacauaauucuucauc

SEQ ID NO: 2108485 - RNA, 19 nt, Artificial Sequence
  Description of Artificial Sequence: Synthetic oligonucleotide
uuugcaguaucuccaauag

SEQ ID NO: 2108486 - RNA, 19 nt, Artificial Sequence
  Description of Artificial Sequence: Synthetic oligonucleotide
ucaaauuucgacuuuuccu

SEQ ID NO: 2108487 - RNA, 19 nt, Artificial Sequence
  Description of Artificial Sequence: Synthetic oligonucleotide
ucacuuuugaucuuugggc

SEQ ID NO: 2108488 - RNA, 19 nt, Artificial Sequence
  Description of Artificial Sequence: Synthetic oligonucleotide
agcuuugucgcucuuggcc

SEQ ID NO: 2108489 - RNA, 19 nt, Artificial Sequence
  Description of Artificial Sequence: Synthetic oligonucleotide
auauuuaggaacauucaac

SEQ ID NO: 2108490 - RNA, 19 nt, Artificial Sequence
  Description of Artificial Sequence: Synthetic oligonucleotide
caaaucuucaaauuucgac

SEQ ID NO: 2108491 - RNA, 19 nt, Artificial Sequence
  Description of Artificial Sequence: Synthetic oligonucleotide
agaauuuuaucagcuauac

SEQ ID NO: 2108492 - RNA, 19 nt, Artificial Sequence
  Description of Artificial Sequence: Synthetic oligonucleotide
ucaucucccugucauaacg

SEQ ID NO: 2108493 - RNA, 19 nt, Artificial Sequence
  Description of Artificial Sequence: Synthetic oligonucleotide
acgguaugcagcaauaucc

SEQ ID NO: 2108494 - RNA, 19 nt, Artificial Sequence
  Description of Artificial Sequence: Synthetic oligonucleotide
ucuaacuguauguuguagc

SEQ ID NO: 2108495 - RNA, 19 nt, Artificial Sequence
  Description of Artificial Sequence: Synthetic oligonucleotide
cuaacuguauguuguagcc

SEQ ID NO: 2108496 - RNA, 19 nt, Artificial Sequence
  Description of Artificial Sequence: Synthetic oligonucleotide
gaagcuaauguugagcugc

SEQ ID NO: 2108497 - RNA, 19 nt, Artificial Sequence
  Description of Artificial Sequence: Synthetic oligonucleotide
uaaaucuaacuguauguug

SEQ ID NO: 2108498 - RNA, 19 nt, Artificial Sequence
  Description of Artificial Sequence: Synthetic oligonucleotide
uguucagagcaaaacagga

SEQ ID NO: 2108499 - RNA, 19 nt, Artificial Sequence
  Description of Artificial Sequence: Synthetic oligonucleotide
gaauuucacauucuuagca

SEQ ID NO: 2108500 - RNA, 19 nt, Artificial Sequence
  Description of Artificial Sequence: Synthetic oligonucleotide
uaacgaaaccauuaaauau

SEQ ID NO: 2108501 - RNA, 19 nt, Artificial Sequence
  Description of Artificial Sequence: Synthetic oligonucleotide
aauuucacauucuuagcaa

SEQ ID NO: 2108502 - RNA, 19 nt, Artificial Sequence
  Description of Artificial Sequence: Synthetic oligonucleotide
uuagcaaaauaguugccug

SEQ ID NO: 2108503 - RNA, 19 nt, Artificial Sequence
  Description of Artificial Sequence: Synthetic oligonucleotide
uuuaacuggcaauacaaau

SEQ ID NO: 2108504 - RNA, 19 nt, Artificial Sequence
  Description of Artificial Sequence: Synthetic oligonucleotide
aaguugaccgacgaguccg

SEQ ID NO: 2108505 - RNA, 19 nt, Artificial Sequence
  Description of Artificial Sequence: Synthetic oligonucleotide
uuuuaggacagccauuuau

SEQ ID NO: 2108506 - RNA, 19 nt, Artificial Sequence
  Description of Artificial Sequence: Synthetic oligonucleotide
uauguuguagccccuaaaa

SEQ ID NO: 2108507 - RNA, 19 nt, Artificial Sequence
  Description of Artificial Sequence: Synthetic oligonucleotide
acugaagcuaauguugagc

SEQ ID NO: 2108508 - RNA, 19 nt, Artificial Sequence
  Description of Artificial Sequence: Synthetic oligonucleotide
uuaacuggcaauacaaauu

SEQ ID NO: 2108509 - RNA, 19 nt, Artificial Sequence
  Description of Artificial Sequence: Synthetic oligonucleotide
cuaccauaagaaacuaacg

SEQ ID NO: 2108510 - RNA, 19 nt, Artificial Sequence
  Description of Artificial Sequence: Synthetic oligonucleotide
acgaagaaggcguacgagg

SEQ ID NO: 2108511 - RNA, 19 nt, Artificial Sequence
  Description of Artificial Sequence: Synthetic oligonucleotide
aaauaguugccugagcaca

SEQ ID NO: 2108512 - RNA, 19 nt, Artificial Sequence
  Description of Artificial Sequence: Synthetic oligonucleotide
uacgaggacaucuugcccc

SEQ ID NO: 2108513 - RNA, 19 nt, Artificial Sequence
  Description of Artificial Sequence: Synthetic oligonucleotide
aauguugagcugcacuuga

SEQ ID NO: 2108514 - RNA, 19 nt, Artificial Sequence
  Description of Artificial Sequence: Synthetic oligonucleotide
acuccacacauuuuaggac

SEQ ID NO: 2108515 - RNA, 19 nt, Artificial Sequence
  Description of Artificial Sequence: Synthetic oligonucleotide
caguaucuccaauagacag

SEQ ID NO: 2108516 - RNA, 19 nt, Artificial Sequence
  Description of Artificial Sequence: Synthetic oligonucleotide
aaacuaacgaaaccauuaa

SEQ ID NO: 2108517 - RNA, 19 nt, Artificial Sequence
  Description of Artificial Sequence: Synthetic oligonucleotide
aguuaauauacauuauuuu

SEQ ID NO: 2108518 - RNA, 19 nt, Artificial Sequence
  Description of Artificial Sequence: Synthetic oligonucleotide
uccuuugcagacauggucu

SEQ ID NO: 2108519 - RNA, 19 nt, Artificial Sequence
  Description of Artificial Sequence: Synthetic oligonucleotide
aauagacaggccugggugu

SEQ ID NO: 2108520 - RNA, 19 nt, Artificial Sequence
  Description of Artificial Sequence: Synthetic oligonucleotide
aaguuaauauacauuauuu

SEQ ID NO: 2108521 - RNA, 19 nt, Artificial Sequence
  Description of Artificial Sequence: Synthetic oligonucleotide
aggguuguuuaucuuuggc

SEQ ID NO: 2108522 - RNA, 19 nt, Artificial Sequence
  Description of Artificial Sequence: Synthetic oligonucleotide
accauaagaaacuaacgaa

SEQ ID NO: 2108523 - RNA, 19 nt, Artificial Sequence
  Description of Artificial Sequence: Synthetic oligonucleotide
auacaaauuccuaugaagu

SEQ ID NO: 2108524 - RNA, 19 nt, Artificial Sequence
  Description of Artificial Sequence: Synthetic oligonucleotide
auucuuagcaaaauaguug

SEQ ID NO: 2108525 - RNA, 19 nt, Artificial Sequence
  Description of Artificial Sequence: Synthetic oligonucleotide
ucgacuuuuccuuugcaga

SEQ ID NO: 2108526 - RNA, 19 nt, Artificial Sequence
  Description of Artificial Sequence: Synthetic oligonucleotide
uuccuaugaaguuugcugu

SEQ ID NO: 2108527 - RNA, 19 nt, Artificial Sequence
  Description of Artificial Sequence: Synthetic oligonucleotide
uucgacuuuuccuuugcag

SEQ ID NO: 2108528 - RNA, 19 nt, Artificial Sequence
  Description of Artificial Sequence: Synthetic oligonucleotide
ucuuaucaccuuugggagg

SEQ ID NO: 2108529 - RNA, 19 nt, Artificial Sequence
  Description of Artificial Sequence: Synthetic oligonucleotide
cuuucuuaucaccuuuggg

SEQ ID NO: 2108530 - RNA, 19 nt, Artificial Sequence
  Description of Artificial Sequence: Synthetic oligonucleotide
ugcugugcuaccauaagaa

SEQ ID NO: 2108531 - RNA, 19 nt, Artificial Sequence
  Description of Artificial Sequence: Synthetic oligonucleotide
aacgaaaccauuaaauauu

SEQ ID NO: 2108532 - RNA, 19 nt, Artificial Sequence
  Description of Artificial Sequence: Synthetic oligonucleotide
uuuaggacagccauuuauu

SEQ ID NO: 2108533 - RNA, 19 nt, Artificial Sequence
  Description of Artificial Sequence: Synthetic oligonucleotide
ucagagcaaaacaggaaga

SEQ ID NO: 2108534 - RNA, 19 nt, Artificial Sequence
  Description of Artificial Sequence: Synthetic oligonucleotide
uugggaggaacauaauucu

SEQ ID NO: 2108535 - RNA, 19 nt, Artificial Sequence
  Description of Artificial Sequence: Synthetic oligonucleotide
cugugcuaccauaagaaac

SEQ ID NO: 2108536 - RNA, 19 nt, Artificial Sequence
  Description of Artificial Sequence: Synthetic oligonucleotide
ucugguucauucuucuucu

SEQ ID NO: 2108537 - RNA, 19 nt, Artificial Sequence
  Description of Artificial Sequence: Synthetic oligonucleotide
uggguguucacuuuugauc

SEQ ID NO: 2108538 - RNA, 19 nt, Artificial Sequence
  Description of Artificial Sequence: Synthetic oligonucleotide
uuugcugugcuaccauaag

SEQ ID NO: 2108539 - RNA, 19 nt, Artificial Sequence
  Description of Artificial Sequence: Synthetic oligonucleotide
uuuaguuuggcugcuuucu

SEQ ID NO: 2108540 - RNA, 19 nt, Artificial Sequence
  Description of Artificial Sequence: Synthetic oligonucleotide
caauagacaggccugggug

SEQ ID NO: 2108541 - RNA, 19 nt, Artificial Sequence
  Description of Artificial Sequence: Synthetic oligonucleotide
acuaacgaaaccauuaaau

SEQ ID NO: 2108542 - RNA, 19 nt, Artificial Sequence
  Description of Artificial Sequence: Synthetic oligonucleotide
uuuggcagacuguucagac

SEQ ID NO: 2108543 - RNA, 19 nt, Artificial Sequence
  Description of Artificial Sequence: Synthetic oligonucleotide
gaaacuaacgaaaccauua

SEQ ID NO: 2108544 - RNA, 19 nt, Artificial Sequence
  Description of Artificial Sequence: Synthetic oligonucleotide
aacuaacgaaaccauuaaa

SEQ ID NO: 2108545 - RNA, 19 nt, Artificial Sequence
  Description of Artificial Sequence: Synthetic oligonucleotide
guugccugagcacauacac

SEQ ID NO: 2108546 - RNA, 19 nt, Artificial Sequence
  Description of Artificial Sequence: Synthetic oligonucleotide
uuccuuugcagacaugguc

SEQ ID NO: 2108547 - RNA, 19 nt, Artificial Sequence
  Description of Artificial Sequence: Synthetic oligonucleotide
ucuuagcaaaauaguugcc

SEQ ID NO: 2108548 - RNA, 19 nt, Artificial Sequence
  Description of Artificial Sequence: Synthetic oligonucleotide
ugaccgacgaguccgggug

SEQ ID NO: 2108549 - RNA, 19 nt, Artificial Sequence
  Description of Artificial Sequence: Synthetic oligonucleotide
uuaggacagccauuuauuc

SEQ ID NO: 2108550 - RNA, 19 nt, Artificial Sequence
  Description of Artificial Sequence: Synthetic oligonucleotide
acauacacuccacacauuu

SEQ ID NO: 2108551 - RNA, 19 nt, Artificial Sequence
  Description of Artificial Sequence: Synthetic oligonucleotide
uguucagaccacaucucac

SEQ ID NO: 2108552 - RNA, 19 nt, Artificial Sequence
  Description of Artificial Sequence: Synthetic oligonucleotide
uacaaauuccuaugaaguu

SEQ ID NO: 2108553 - RNA, 19 nt, Artificial Sequence
  Description of Artificial Sequence: Synthetic oligonucleotide
aauuccuaugaaguuugcu

SEQ ID NO: 2108554 - RNA, 19 nt, Artificial Sequence
  Description of Artificial Sequence: Synthetic oligonucleotide
aaaaguuaauauacauuau

SEQ ID NO: 2108555 - RNA, 19 nt, Artificial Sequence
  Description of Artificial Sequence: Synthetic oligonucleotide
ugcacgaagaaggcguacg

SEQ ID NO: 2108556 - RNA, 19 nt, Artificial Sequence
  Description of Artificial Sequence: Synthetic oligonucleotide
guauuuucucuacaaagaa

SEQ ID NO: 2108557 - RNA, 19 nt, Artificial Sequence
  Description of Artificial Sequence: Synthetic oligonucleotide
auaacgagcuuugucgcuc

SEQ ID NO: 2108558 - RNA, 19 nt, Artificial Sequence
  Description of Artificial Sequence: Synthetic oligonucleotide
cuaacgaaaccauuaaaua

SEQ ID NO: 2108559 - RNA, 19 nt, Artificial Sequence
  Description of Artificial Sequence: Synthetic oligonucleotide
gguucauucuucuucuuug

SEQ ID NO: 2108560 - RNA, 19 nt, Artificial Sequence
  Description of Artificial Sequence: Synthetic oligonucleotide
aagaaggcguacgaggaca

SEQ ID NO: 2108561 - RNA, 19 nt, Artificial Sequence
  Description of Artificial Sequence: Synthetic oligonucleotide
aaggcguacgaggacaucu

SEQ ID NO: 2108562 - RNA, 19 nt, Artificial Sequence
  Description of Artificial Sequence: Synthetic oligonucleotide
ucuuggagaacucggcgaa

SEQ ID NO: 2108563 - RNA, 19 nt, Artificial Sequence
  Description of Artificial Sequence: Synthetic oligonucleotide
aagcuacaaacucuuuuaa

SEQ ID NO: 2108564 - RNA, 19 nt, Artificial Sequence
  Description of Artificial Sequence: Synthetic oligonucleotide
uaguuuggcugcuuucugc

SEQ ID NO: 2108565 - RNA, 19 nt, Artificial Sequence
  Description of Artificial Sequence: Synthetic oligonucleotide
auuuaggaacauucaacau

SEQ ID NO: 2108566 - RNA, 19 nt, Artificial Sequence
  Description of Artificial Sequence: Synthetic oligonucleotide
auguucagagcaaaacagg

SEQ ID NO: 2108567 - RNA, 19 nt, Artificial Sequence
  Description of Artificial Sequence: Synthetic oligonucleotide
uuaucuuuggcagacuguu

SEQ ID NO: 2108568 - RNA, 19 nt, Artificial Sequence
  Description of Artificial Sequence: Synthetic oligonucleotide
aggacagccauuuauucuu

SEQ ID NO: 2108569 - RNA, 19 nt, Artificial Sequence
  Description of Artificial Sequence: Synthetic oligonucleotide
aaauuucgacuuuuccuuu

SEQ ID NO: 2108570 - RNA, 19 nt, Artificial Sequence
  Description of Artificial Sequence: Synthetic oligonucleotide
ucaacaucaaaagcuuuaa

SEQ ID NO: 2108571 - RNA, 19 nt, Artificial Sequence
  Description of Artificial Sequence: Synthetic oligonucleotide
aguuuggcugcuuucugcu

SEQ ID NO: 2108572 - RNA, 19 nt, Artificial Sequence
  Description of Artificial Sequence: Synthetic oligonucleotide
aaucuaacuguauguugua

SEQ ID NO: 2108573 - RNA, 19 nt, Artificial Sequence
  Description of Artificial Sequence: Synthetic oligonucleotide
ucagagcacuucuuggaga

SEQ ID NO: 2108574 - RNA, 19 nt, Artificial Sequence
  Description of Artificial Sequence: Synthetic oligonucleotide
cuuucugcucauaggguug

SEQ ID NO: 2108575 - RNA, 19 nt, Artificial Sequence
  Description of Artificial Sequence: Synthetic oligonucleotide
uaggguuguuuaucuuugg

SEQ ID NO: 2108576 - RNA, 19 nt, Artificial Sequence
  Description of Artificial Sequence: Synthetic oligonucleotide
gaauuuuaucagcuauaca

SEQ ID NO: 2108577 - RNA, 19 nt, Artificial Sequence
  Description of Artificial Sequence: Synthetic oligonucleotide
uccuaugaaguuugcugug

SEQ ID NO: 2108578 - RNA, 19 nt, Artificial Sequence
  Description of Artificial Sequence: Synthetic oligonucleotide
acaaauuccuaugaaguuu

SEQ ID NO: 2108579 - RNA, 19 nt, Artificial Sequence
  Description of Artificial Sequence: Synthetic oligonucleotide
ucuuuggcagacuguucag

SEQ ID NO: 2108580 - RNA, 19 nt, Artificial Sequence
  Description of Artificial Sequence: Synthetic oligonucleotide
acauucuuagcaaaauagu

SEQ ID NO: 2108581 - RNA, 19 nt, Artificial Sequence
  Description of Artificial Sequence: Synthetic oligonucleotide
cacuuuugcccuuggcacg

SEQ ID NO: 2108582 - RNA, 19 nt, Artificial Sequence
  Description of Artificial Sequence: Synthetic oligonucleotide
gcuaccauaagaaacuaac

SEQ ID NO: 2108583 - RNA, 19 nt, Artificial Sequence
  Description of Artificial Sequence: Synthetic oligonucleotide
uaacuguauguuguagccc

SEQ ID NO: 2108584 - RNA, 19 nt, Artificial Sequence
  Description of Artificial Sequence: Synthetic oligonucleotide
cuguuggccuuccaggacc

SEQ ID NO: 2108585 - RNA, 19 nt, Artificial Sequence
  Description of Artificial Sequence: Synthetic oligonucleotide
uacugaagcuaauguugag

SEQ ID NO: 2108586 - RNA, 19 nt, Artificial Sequence
  Description of Artificial Sequence: Synthetic oligonucleotide
acuuuugaucuuugggcga

SEQ ID NO: 2108587 - RNA, 19 nt, Artificial Sequence
  Description of Artificial Sequence: Synthetic oligonucleotide
uaauguugagcugcacuug

SEQ ID NO: 2108588 - RNA, 19 nt, Artificial Sequence
  Description of Artificial Sequence: Synthetic oligonucleotide
gagaacucggcgaaguuga

SEQ ID NO: 2108589 - RNA, 19 nt, Artificial Sequence
  Description of Artificial Sequence: Synthetic oligonucleotide
ggaacauaauucuucaucu

SEQ ID NO: 2108590 - RNA, 19 nt, Artificial Sequence
  Description of Artificial Sequence: Synthetic oligonucleotide
guuggggucucccuugccc

SEQ ID NO: 2108591 - RNA, 19 nt, Artificial Sequence
  Description of Artificial Sequence: Synthetic oligonucleotide
gaggacaucuugccccgcg

SEQ ID NO: 2108592 - RNA, 19 nt, Artificial Sequence
  Description of Artificial Sequence: Synthetic oligonucleotide
cuuuaguuuggcugcuuuc

SEQ ID NO: 2108593 - RNA, 19 nt, Artificial Sequence
  Description of Artificial Sequence: Synthetic oligonucleotide
ugcacuugaauuucacauu

SEQ ID NO: 2108594 - RNA, 19 nt, Artificial Sequence
  Description of Artificial Sequence: Synthetic oligonucleotide
uguauguuguagccccuaa

SEQ ID NO: 2108595 - RNA, 19 nt, Artificial Sequence
  Description of Artificial Sequence: Synthetic oligonucleotide
cacuccacacauuuuagga

SEQ ID NO: 2108596 - RNA, 19 nt, Artificial Sequence
  Description of Artificial Sequence: Synthetic oligonucleotide
aucucccugucauaacgag

SEQ ID NO: 2108597 - RNA, 19 nt, Artificial Sequence
  Description of Artificial Sequence: Synthetic oligonucleotide
aagaaggcagacggugguc

SEQ ID NO: 2108598 - RNA, 19 nt, Artificial Sequence
  Description of Artificial Sequence: Synthetic oligonucleotide
auaggguuguuuaucuuug

SEQ ID NO: 2108599 - RNA, 19 nt, Artificial Sequence
  Description of Artificial Sequence: Synthetic oligonucleotide
cuuguuggggucucccuug

SEQ ID NO: 2108600 - RNA, 19 nt, Artificial Sequence
  Description of Artificial Sequence: Synthetic oligonucleotide
uucacauucuuagcaaaau

SEQ ID NO: 2108601 - RNA, 19 nt, Artificial Sequence
  Description of Artificial Sequence: Synthetic oligonucleotide
ugcuuucugcucauagggu

SEQ ID NO: 2108602 - RNA, 19 nt, Artificial Sequence
  Description of Artificial Sequence: Synthetic oligonucleotide
uuucgacuuuuccuuugca

SEQ ID NO: 2108603 - RNA, 19 nt, Artificial Sequence
  Description of Artificial Sequence: Synthetic oligonucleotide
agcuacaaacucuuuuaaa

SEQ ID NO: 2108604 - RNA, 19 nt, Artificial Sequence
  Description of Artificial Sequence: Synthetic oligonucleotide
acgaggacaucuugccccg

SEQ ID NO: 2108605 - RNA, 19 nt, Artificial Sequence
  Description of Artificial Sequence: Synthetic oligonucleotide
gacccuguuggccuuccag

SEQ ID NO: 2108606 - RNA, 19 nt, Artificial Sequence
  Description of Artificial Sequence: Synthetic oligonucleotide
uaguugccugagcacauac

SEQ ID NO: 2108607 - RNA, 19 nt, Artificial Sequence
  Description of Artificial Sequence: Synthetic oligonucleotide
aucuaacuguauguuguag

SEQ ID NO: 2108608 - RNA, 19 nt, Artificial Sequence
  Description of Artificial Sequence: Synthetic oligonucleotide
ucggcgaaguugaccgacg

SEQ ID NO: 2108609 - RNA, 19 nt, Artificial Sequence
  Description of Artificial Sequence: Synthetic oligonucleotide
uugcaguaucuccaauaga

SEQ ID NO: 2108610 - RNA, 19 nt, Artificial Sequence
  Description of Artificial Sequence: Synthetic oligonucleotide
gaagaaggcguacgaggac

SEQ ID NO: 2108611 - RNA, 19 nt, Artificial Sequence
  Description of Artificial Sequence: Synthetic oligonucleotide
guuguuuaucuuuggcaga

SEQ ID NO: 2108612 - RNA, 19 nt, Artificial Sequence
  Description of Artificial Sequence: Synthetic oligonucleotide
uuugaucuuugggcgaugu

SEQ ID NO: 2108613 - RNA, 19 nt, Artificial Sequence
  Description of Artificial Sequence: Synthetic oligonucleotide
uguuggccuuccaggaccc

SEQ ID NO: 2108614 - RNA, 19 nt, Artificial Sequence
  Description of Artificial Sequence: Synthetic oligonucleotide
cugaagcuaauguugagcu

SEQ ID NO: 2108615 - RNA, 19 nt, Artificial Sequence
  Description of Artificial Sequence: Synthetic oligonucleotide
caaauuucgacuuuuccuu

SEQ ID NO: 2108616 - RNA, 19 nt, Artificial Sequence
  Description of Artificial Sequence: Synthetic oligonucleotide
cuuaucaccuuugggagga

SEQ ID NO: 2108617 - RNA, 19 nt, Artificial Sequence
  Description of Artificial Sequence: Synthetic oligonucleotide
uugccugagcacauacacu

SEQ ID NO: 2108618 - RNA, 19 nt, Artificial Sequence
  Description of Artificial Sequence: Synthetic oligonucleotide
aggacaucuugccccgcgg

SEQ ID NO: 2108619 - RNA, 19 nt, Artificial Sequence
  Description of Artificial Sequence: Synthetic oligonucleotide
cucgcggcaugucugcacg

SEQ ID NO: 2108620 - RNA, 19 nt, Artificial Sequence
  Description of Artificial Sequence: Synthetic oligonucleotide
ggaggaacauaauucuuca

SEQ ID NO: 2108621 - RNA, 19 nt, Artificial Sequence
  Description of Artificial Sequence: Synthetic oligonucleotide
gcaauacaaauuccuauga

SEQ ID NO: 2108622 - RNA, 19 nt, Artificial Sequence
  Description of Artificial Sequence: Synthetic oligonucleotide
gaaguuugcugugcuacca

SEQ ID NO: 2108623 - RNA, 19 nt, Artificial Sequence
  Description of Artificial Sequence: Synthetic oligonucleotide
uugccccgcggcuuguugg

SEQ ID NO: 2108624 - RNA, 19 nt, Artificial Sequence
  Description of Artificial Sequence: Synthetic oligonucleotide
gcacuugaauuucacauuc

SEQ ID NO: 2108625 - RNA, 19 nt, Artificial Sequence
  Description of Artificial Sequence: Synthetic oligonucleotide
acuguucagaccacaucuc

SEQ ID NO: 2108626 - RNA, 19 nt, Artificial Sequence
  Description of Artificial Sequence: Synthetic oligonucleotide
uuggagaacucggcgaagu

SEQ ID NO: 2108627 - RNA, 19 nt, Artificial Sequence
  Description of Artificial Sequence: Synthetic oligonucleotide
cacgguaugcagcaauauc

SEQ ID NO: 2108628 - RNA, 19 nt, Artificial Sequence
  Description of Artificial Sequence: Synthetic oligonucleotide
guacgaggacaucuugccc

SEQ ID NO: 2108629 - RNA, 19 nt, Artificial Sequence
  Description of Artificial Sequence: Synthetic oligonucleotide
accuuugggaggaacauaa

SEQ ID NO: 2108630 - RNA, 19 nt, Artificial Sequence
  Description of Artificial Sequence: Synthetic oligonucleotide
agcuuuaaaucuaacugua

SEQ ID NO: 2108631 - RNA, 19 nt, Artificial Sequence
  Description of Artificial Sequence: Synthetic oligonucleotide
cuucacuuuugcccuuggc

SEQ ID NO: 2108632 - RNA, 19 nt, Artificial Sequence
  Description of Artificial Sequence: Synthetic oligonucleotide
gaacucggcgaaguugacc

SEQ ID NO: 2108633 - RNA, 19 nt, Artificial Sequence
  Description of Artificial Sequence: Synthetic oligonucleotide
cucccugucauaacgagcu

SEQ ID NO: 2108634 - RNA, 19 nt, Artificial Sequence
  Description of Artificial Sequence: Synthetic oligonucleotide
uucaucucccugucauaac

SEQ ID NO: 2108635 - RNA, 19 nt, Artificial Sequence
  Description of Artificial Sequence: Synthetic oligonucleotide
uuccuccuccuccuccucc

SEQ ID NO: 2108636 - RNA, 19 nt, Artificial Sequence
  Description of Artificial Sequence: Synthetic oligonucleotide
cacauuuuaggacagccau

SEQ ID NO: 2108637 - RNA, 19 nt, Artificial Sequence
  Description of Artificial Sequence: Synthetic oligonucleotide
ggguguucacuuuugaucu

SEQ ID NO: 2108638 - RNA, 19 nt, Artificial Sequence
  Description of Artificial Sequence: Synthetic oligonucleotide
uaacgagcuuugucgcucu

SEQ ID NO: 2108639 - RNA, 19 nt, Artificial Sequence
  Description of Artificial Sequence: Synthetic oligonucleotide
agcugcacuugaauuucac

SEQ ID NO: 2108640 - RNA, 19 nt, Artificial Sequence
  Description of Artificial Sequence: Synthetic oligonucleotide
cacgaagaaggcguacgag

SEQ ID NO: 2108641 - RNA, 19 nt, Artificial Sequence
  Description of Artificial Sequence: Synthetic oligonucleotide
cuguucagaccacaucuca

SEQ ID NO: 2108642 - RNA, 19 nt, Artificial Sequence
  Description of Artificial Sequence: Synthetic oligonucleotide
cauucaacaucaaaagcuu

SEQ ID NO: 2108643 - RNA, 19 nt, Artificial Sequence
  Description of Artificial Sequence: Synthetic oligonucleotide
agaaacuaacgaaaccauu

SEQ ID NO: 2108644 - RNA, 19 nt, Artificial Sequence
  Description of Artificial Sequence: Synthetic oligonucleotide
aguuugcugugcuaccaua

SEQ ID NO: 2108645 - RNA, 19 nt, Artificial Sequence
  Description of Artificial Sequence: Synthetic oligonucleotide
cagagcacuucuuggagaa

SEQ ID NO: 2108646 - RNA, 19 nt, Artificial Sequence
  Description of Artificial Sequence: Synthetic oligonucleotide
acgaaaccauuaaauauuu

SEQ ID NO: 2108647 - RNA, 19 nt, Artificial Sequence
  Description of Artificial Sequence: Synthetic oligonucleotide
cguacgaggacaucuugcc

SEQ ID NO: 2108648 - RNA, 19 nt, Artificial Sequence
  Description of Artificial Sequence: Synthetic oligonucleotide
cuggcaauacaaauuccua

SEQ ID NO: 2108649 - RNA, 19 nt, Artificial Sequence
  Description of Artificial Sequence: Synthetic oligonucleotide
caggacccuucuuuccugc

SEQ ID NO: 2108650 - RNA, 19 nt, Artificial Sequence
  Description of Artificial Sequence: Synthetic oligonucleotide
ugccccgcggcuuguuggg

SEQ ID NO: 2108651 - RNA, 19 nt, Artificial Sequence
  Description of Artificial Sequence: Synthetic oligonucleotide
aagcuaauguugagcugca

SEQ ID NO: 2108652 - RNA, 19 nt, Artificial Sequence
  Description of Artificial Sequence: Synthetic oligonucleotide
gagcuuugucgcucuuggc

SEQ ID NO: 2108653 - RNA, 19 nt, Artificial Sequence
  Description of Artificial Sequence: Synthetic oligonucleotide
uuuugaucuuugggcgaug

SEQ ID NO: 2108654 - RNA, 19 nt, Artificial Sequence
  Description of Artificial Sequence: Synthetic oligonucleotide
cuuggccaaaucuucaaau

SEQ ID NO: 2108655 - RNA, 19 nt, Artificial Sequence
  Description of Artificial Sequence: Synthetic oligonucleotide
cauaggguuguuuaucuuu

SEQ ID NO: 2108656 - RNA, 19 nt, Artificial Sequence
  Description of Artificial Sequence: Synthetic oligonucleotide
cuucaucucccugucauaa

SEQ ID NO: 2108657 - RNA, 19 nt, Artificial Sequence
  Description of Artificial Sequence: Synthetic oligonucleotide
guauguuguagccccuaaa

SEQ ID NO: 2108658 - RNA, 19 nt, Artificial Sequence
  Description of Artificial Sequence: Synthetic oligonucleotide
gcuuugucgcucuuggcca

SEQ ID NO: 2108659 - RNA, 19 nt, Artificial Sequence
  Description of Artificial Sequence: Synthetic oligonucleotide
uugugcuccucgcggcaug

SEQ ID NO: 2108660 - RNA, 19 nt, Artificial Sequence
  Description of Artificial Sequence: Synthetic oligonucleotide
caucucccugucauaacga

SEQ ID NO: 2108661 - RNA, 19 nt, Artificial Sequence
  Description of Artificial Sequence: Synthetic oligonucleotide
guuugcugugcuaccauaa

SEQ ID NO: 2108662 - RNA, 19 nt, Artificial Sequence
  Description of Artificial Sequence: Synthetic oligonucleotide
ugcuucacuuuugcccuug

SEQ ID NO: 2108663 - RNA, 19 nt, Artificial Sequence
  Description of Artificial Sequence: Synthetic oligonucleotide
uccuccuccuccuccuccu

SEQ ID NO: 2108664 - RNA, 19 nt, Artificial Sequence
  Description of Artificial Sequence: Synthetic oligonucleotide
gcuaauguugagcugcacu

SEQ ID NO: 2108665 - RNA, 19 nt, Artificial Sequence
  Description of Artificial Sequence: Synthetic oligonucleotide
auuuuaggacagccauuua

SEQ ID NO: 2108666 - RNA, 19 nt, Artificial Sequence
  Description of Artificial Sequence: Synthetic oligonucleotide
cagagcaaaacaggaagaa

SEQ ID NO: 2108667 - RNA, 19 nt, Artificial Sequence
  Description of Artificial Sequence: Synthetic oligonucleotide
cauuuuaggacagccauuu

SEQ ID NO: 2108668 - RNA, 19 nt, Artificial Sequence
  Description of Artificial Sequence: Synthetic oligonucleotide
cgagcuuugucgcucuugg

SEQ ID NO: 2108669 - RNA, 19 nt, Artificial Sequence
  Description of Artificial Sequence: Synthetic oligonucleotide
ccuaugaaguuugcugugc

SEQ ID NO: 2108670 - RNA, 19 nt, Artificial Sequence
  Description of Artificial Sequence: Synthetic oligonucleotide
gucugcacgaagaaggcgu

SEQ ID NO: 2108671 - RNA, 19 nt, Artificial Sequence
  Description of Artificial Sequence: Synthetic oligonucleotide
aguugaccgacgaguccgg

SEQ ID NO: 2108672 - RNA, 19 nt, Artificial Sequence
  Description of Artificial Sequence: Synthetic oligonucleotide
cuuggagaacucggcgaag

SEQ ID NO: 2108673 - RNA, 19 nt, Artificial Sequence
  Description of Artificial Sequence: Synthetic oligonucleotide
cuccucgcggcaugucugc

SEQ ID NO: 2108674 - RNA, 19 nt, Artificial Sequence
  Description of Artificial Sequence: Synthetic oligonucleotide
cuuugggaggaacauaauu

SEQ ID NO: 2108675 - RNA, 19 nt, Artificial Sequence
  Description of Artificial Sequence: Synthetic oligonucleotide
ugucgcucuuggccaaauc

SEQ ID NO: 2108676 - RNA, 19 nt, Artificial Sequence
  Description of Artificial Sequence: Synthetic oligonucleotide
cucggcgaaguugaccgac

SEQ ID NO: 2108677 - RNA, 19 nt, Artificial Sequence
  Description of Artificial Sequence: Synthetic oligonucleotide
gaccgacgaguccgggugc

SEQ ID NO: 2108678 - RNA, 19 nt, Artificial Sequence
  Description of Artificial Sequence: Synthetic oligonucleotide
acgagcuuugucgcucuug

SEQ ID NO: 2108679 - RNA, 19 nt, Artificial Sequence
  Description of Artificial Sequence: Synthetic oligonucleotide
cucuuggccaaaucuucaa

SEQ ID NO: 2108680 - RNA, 19 nt, Artificial Sequence
  Description of Artificial Sequence: Synthetic oligonucleotide
ggcgaaguugaccgacgag

SEQ ID NO: 2108681 - RNA, 19 nt, Artificial Sequence
  Description of Artificial Sequence: Synthetic oligonucleotide
cuaugaaguuugcugugcu

SEQ ID NO: 2108682 - RNA, 19 nt, Artificial Sequence
  Description of Artificial Sequence: Synthetic oligonucleotide
cuuuggcagacuguucaga

SEQ ID NO: 2108683 - RNA, 19 nt, Artificial Sequence
  Description of Artificial Sequence: Synthetic oligonucleotide
acauuuuaggacagccauu

SEQ ID NO: 2108684 - RNA, 19 nt, Artificial Sequence
  Description of Artificial Sequence: Synthetic oligonucleotide
gcugcacuugaauuucaca

SEQ ID NO: 2108685 - RNA, 19 nt, Artificial Sequence
  Description of Artificial Sequence: Synthetic oligonucleotide
guugaccgacgaguccggg

SEQ ID NO: 2108686 - RNA, 19 nt, Artificial Sequence
  Description of Artificial Sequence: Synthetic oligonucleotide
aggacccuucuuuccugcu

SEQ ID NO: 2108687 - RNA, 19 nt, Artificial Sequence
  Description of Artificial Sequence: Synthetic oligonucleotide
ugugcuccucgcggcaugu

SEQ ID NO: 2108688 - RNA, 19 nt, Artificial Sequence
  Description of Artificial Sequence: Synthetic oligonucleotide
cuugccccgcggcuuguug

SEQ ID NO: 2108689 - RNA, 19 nt, Artificial Sequence
  Description of Artificial Sequence: Synthetic oligonucleotide
ggcguacgaggacaucuug

SEQ ID NO: 2108690 - RNA, 19 nt, Artificial Sequence
  Description of Artificial Sequence: Synthetic oligonucleotide
cgaaguugaccgacgaguc

SEQ ID NO: 2108691 - RNA, 19 nt, Artificial Sequence
  Description of Artificial Sequence: Synthetic oligonucleotide
gcuucacuuuugcccuugg

SEQ ID NO: 2108692 - RNA, 19 nt, Artificial Sequence
  Description of Artificial Sequence: Synthetic oligonucleotide
gcguacgaggacaucuugc

SEQ ID NO: 2108693 - RNA, 19 nt, Artificial Sequence
  Description of Artificial Sequence: Synthetic oligonucleotide
gaguccgggugcuucuucu

SEQ ID NO: 2108694 - RNA, 19 nt, Artificial Sequence
  Description of Artificial Sequence: Synthetic oligonucleotide
uccuccuccuccuccucuu

SEQ ID NO: 2108695 - RNA, 19 nt, Artificial Sequence
  Description of Artificial Sequence: Synthetic oligonucleotide
aacgagcuuugucgcucuu

SEQ ID NO: 2108696 - RNA, 19 nt, Artificial Sequence
  Description of Artificial Sequence: Synthetic oligonucleotide
acuguauguuguagccccu

SEQ ID NO: 2108697 - RNA, 19 nt, Artificial Sequence
  Description of Artificial Sequence: Synthetic oligonucleotide
cuuugucgcucuuggccaa

SEQ ID NO: 2108698 - RNA, 19 nt, Artificial Sequence
  Description of Artificial Sequence: Synthetic oligonucleotide
uuugucgcucuuggccaaa

SEQ ID NO: 2108699 - RNA, 19 nt, Artificial Sequence
  Description of Artificial Sequence: Synthetic oligonucleotide
acucggcgaaguugaccga

SEQ ID NO: 2108700 - RNA, 19 nt, Artificial Sequence
  Description of Artificial Sequence: Synthetic oligonucleotide
gcacgaagaaggcguacga

SEQ ID NO: 2108701 - RNA, 19 nt, Artificial Sequence
  Description of Artificial Sequence: Synthetic oligonucleotide
gcgaaguugaccgacgagu

SEQ ID NO: 2108702 - RNA, 19 nt, Artificial Sequence
  Description of Artificial Sequence: Synthetic oligonucleotide
ucgcggcaugucugcacga

SEQ ID NO: 2108703 - RNA, 19 nt, Artificial Sequence
  Description of Artificial Sequence: Synthetic oligonucleotide
gacgaguccgggugcuucu

SEQ ID NO: 2108704 - RNA, 19 nt, Artificial Sequence
  Description of Artificial Sequence: Synthetic oligonucleotide
gcggcaugucugcacgaag

SEQ ID NO: 2108705 - RNA, 19 nt, Artificial Sequence
  Description of Artificial Sequence: Synthetic oligonucleotide
ccugagcacauacacucca

SEQ ID NO: 2108706 - RNA, 19 nt, Artificial Sequence
  Description of Artificial Sequence: Synthetic oligonucleotide
uggggucucccuugcccau

SEQ ID NO: 2108707 - RNA, 19 nt, Artificial Sequence
  Description of Artificial Sequence: Synthetic oligonucleotide
ucccugucauaacgagcuu

SEQ ID NO: 2108708 - RNA, 19 nt, Artificial Sequence
  Description of Artificial Sequence: Synthetic oligonucleotide
cugcacgaagaaggcguac

SEQ ID NO: 2108709 - RNA, 19 nt, Artificial Sequence
  Description of Artificial Sequence: Synthetic oligonucleotide
gaaggcguacgaggacauc

SEQ ID NO: 2108710 - RNA, 19 nt, Artificial Sequence
  Description of Artificial Sequence: Synthetic oligonucleotide
cuuuugaucuuugggcgau

SEQ ID NO: 2108711 - RNA, 19 nt, Artificial Sequence
  Description of Artificial Sequence: Synthetic oligonucleotide
ggagcauuaggauccuuuu

SEQ ID NO: 2108712 - RNA, 19 nt, Artificial Sequence
  Description of Artificial Sequence: Synthetic oligonucleotide
auguugagcugcacuugaa

SEQ ID NO: 2108713 - RNA, 19 nt, Artificial Sequence
  Description of Artificial Sequence: Synthetic oligonucleotide
cuuccuccuccuccuccuc

SEQ ID NO: 2108714 - RNA, 19 nt, Artificial Sequence
  Description of Artificial Sequence: Synthetic oligonucleotide
uugucgcucuuggccaaau

SEQ ID NO: 2108715 - RNA, 19 nt, Artificial Sequence
  Description of Artificial Sequence: Synthetic oligonucleotide
uuaucaccuuugggaggaa

SEQ ID NO: 2108716 - RNA, 19 nt, Artificial Sequence
  Description of Artificial Sequence: Synthetic oligonucleotide
uccucgcggcaugucugca

SEQ ID NO: 2108717 - RNA, 19 nt, Artificial Sequence
  Description of Artificial Sequence: Synthetic oligonucleotide
caggaagaaggcagacggu

SEQ ID NO: 2108718 - RNA, 19 nt, Artificial Sequence
  Description of Artificial Sequence: Synthetic oligonucleotide
gccugagcacauacacucc

SEQ ID NO: 2108719 - RNA, 19 nt, Artificial Sequence
  Description of Artificial Sequence: Synthetic oligonucleotide
ggacagccauuuauucuuc

SEQ ID NO: 2108720 - RNA, 19 nt, Artificial Sequence
  Description of Artificial Sequence: Synthetic oligonucleotide
aggcguacgaggacaucuu

SEQ ID NO: 2108721 - RNA, 19 nt, Artificial Sequence
  Description of Artificial Sequence: Synthetic oligonucleotide
uuggagcauuaggauccuu

SEQ ID NO: 2108722 - RNA, 19 nt, Artificial Sequence
  Description of Artificial Sequence: Synthetic oligonucleotide
gcuuuaaaucuaacuguau

SEQ ID NO: 2108723 - RNA, 19 nt, Artificial Sequence
  Description of Artificial Sequence: Synthetic oligonucleotide
cggcaugucugcacgaaga

SEQ ID NO: 2108724 - RNA, 19 nt, Artificial Sequence
  Description of Artificial Sequence: Synthetic oligonucleotide
ggcgauguucagagcaaaa

SEQ ID NO: 2108725 - RNA, 19 nt, Artificial Sequence
  Description of Artificial Sequence: Synthetic oligonucleotide
gccuggguguucacuuuug

SEQ ID NO: 2108726 - RNA, 19 nt, Artificial Sequence
  Description of Artificial Sequence: Synthetic oligonucleotide
caccuuugggaggaacaua

SEQ ID NO: 2108727 - RNA, 19 nt, Artificial Sequence
  Description of Artificial Sequence: Synthetic oligonucleotide
ccaauagacaggccugggu

SEQ ID NO: 2108728 - RNA, 19 nt, Artificial Sequence
  Description of Artificial Sequence: Synthetic oligonucleotide
ggcacgguaugcagcaaua

SEQ ID NO: 2108729 - RNA, 19 nt, Artificial Sequence
  Description of Artificial Sequence: Synthetic oligonucleotide
gcccuuggcacgguaugca

SEQ ID NO: 2108730 - RNA, 19 nt, Artificial Sequence
  Description of Artificial Sequence: Synthetic oligonucleotide
cuuugacccuguuggccuu

SEQ ID NO: 2108731 - RNA, 19 nt, Artificial Sequence
  Description of Artificial Sequence: Synthetic oligonucleotide
ggcuuguuggggucucccu

SEQ ID NO: 2108732 - RNA, 19 nt, Artificial Sequence
  Description of Artificial Sequence: Synthetic oligonucleotide
cacauacacuccacacauu

SEQ ID NO: 2108733 - RNA, 19 nt, Artificial Sequence
  Description of Artificial Sequence: Synthetic oligonucleotide
agaccacaucucacccaau

SEQ ID NO: 2108734 - RNA, 19 nt, Artificial Sequence
  Description of Artificial Sequence: Synthetic oligonucleotide
aucuugccccgcggcuugu

SEQ ID NO: 2108735 - RNA, 19 nt, Artificial Sequence
  Description of Artificial Sequence: Synthetic oligonucleotide
ggggucucccuugcccaug

SEQ ID NO: 2108736 - RNA, 19 nt, Artificial Sequence
  Description of Artificial Sequence: Synthetic oligonucleotide
acgaguccgggugcuucuu

SEQ ID NO: 2108737 - RNA, 19 nt, Artificial Sequence
  Description of Artificial Sequence: Synthetic oligonucleotide
cuccuccuccuccuccucu

SEQ ID NO: 2108738 - RNA, 19 nt, Artificial Sequence
  Description of Artificial Sequence: Synthetic oligonucleotide
gguguucacuuuugaucuu

SEQ ID NO: 2108739 - RNA, 19 nt, Artificial Sequence
  Description of Artificial Sequence: Synthetic oligonucleotide
ggacccuucuuuccugcuu

SEQ ID NO: 2108740 - RNA, 19 nt, Artificial Sequence
  Description of Artificial Sequence: Synthetic oligonucleotide
cgacgaguccgggugcuuc

SEQ ID NO: 2108741 - RNA, 19 nt, Artificial Sequence
  Description of Artificial Sequence: Synthetic oligonucleotide
gcacgguaugcagcaauau

SEQ ID NO: 2108742 - RNA, 19 nt, Artificial Sequence
  Description of Artificial Sequence: Synthetic oligonucleotide
gccccgcggcuuguugggg

SEQ ID NO: 2108743 - RNA, 19 nt, Artificial Sequence
  Description of Artificial Sequence: Synthetic oligonucleotide
cgaguccgggugcuucuuc

SEQ ID NO: 2108744 - RNA, 19 nt, Artificial Sequence
  Description of Artificial Sequence: Synthetic oligonucleotide
ccuccuccuccuccuccuc

SEQ ID NO: 2108745 - RNA, 19 nt, Artificial Sequence
  Description of Artificial Sequence: Synthetic oligonucleotide
cggcgaaguugaccgacga

SEQ ID NO: 2108746 - RNA, 19 nt, Artificial Sequence
  Description of Artificial Sequence: Synthetic oligonucleotide
ccuuugggaggaacauaau

SEQ ID NO: 2108747 - RNA, 19 nt, Artificial Sequence
  Description of Artificial Sequence: Synthetic oligonucleotide
cccugucauaacgagcuuu

SEQ ID NO: 2108748 - RNA, 19 nt, Artificial Sequence
  Description of Artificial Sequence: Synthetic oligonucleotide
cgaggacaucuugccccgc

SEQ ID NO: 2108749 - RNA, 19 nt, Artificial Sequence
  Description of Artificial Sequence: Synthetic oligonucleotide
ccccgcggcuuguuggggu

SEQ ID NO: 2108750 - RNA, 19 nt, Artificial Sequence
  Description of Artificial Sequence: Synthetic oligonucleotide
cgcggcuuguuggggucuc

SEQ ID NO: 2108751 - RNA, 19 nt, Artificial Sequence
  Description of Artificial Sequence: Synthetic oligonucleotide
cgcggcaugucugcacgaa

SEQ ID NO: 2108752 - RNA, 19 nt, Artificial Sequence
  Description of Artificial Sequence: Synthetic oligonucleotide
ccgcggcuuguuggggucu

SEQ ID NO: 2108753 - RNA, 19 nt, Artificial Sequence
  Description of Artificial Sequence: Synthetic oligonucleotide
ccgacgaguccgggugcuu

SEQ ID NO: 2108754 - RNA, 19 nt, Artificial Sequence
  Description of Artificial Sequence: Synthetic oligonucleotide
aauaauauuaacuaaauca

SEQ ID NO: 2108755 - RNA, 19 nt, Artificial Sequence
  Description of Artificial Sequence: Synthetic oligonucleotide
aacgaaaucaauuaggcuc

SEQ ID NO: 2108756 - RNA, 19 nt, Artificial Sequence
  Description of Artificial Sequence: Synthetic oligonucleotide
aaagagauaaugcaacugc

SEQ ID NO: 2108757 - RNA, 19 nt, Artificial Sequence
  Description of Artificial Sequence: Synthetic oligonucleotide
uacaauaauaguaacagag

SEQ ID NO: 2108758 - RNA, 19 nt, Artificial Sequence
  Description of Artificial Sequence: Synthetic oligonucleotide
aauaguaacagaguaauag

SEQ ID NO: 2108759 - RNA, 19 nt, Artificial Sequence
  Description of Artificial Sequence: Synthetic oligonucleotide
ugaaauaagaacgaaauca

SEQ ID NO: 2108760 - RNA, 19 nt, Artificial Sequence
  Description of Artificial Sequence: Synthetic oligonucleotide
aaaauauauugucccaccc

SEQ ID NO: 2108761 - RNA, 19 nt, Artificial Sequence
  Description of Artificial Sequence: Synthetic oligonucleotide
acuauugaaaucaagaagg

SEQ ID NO: 2108762 - RNA, 19 nt, Artificial Sequence
  Description of Artificial Sequence: Synthetic oligonucleotide
aaaucgaucagcucccagc

SEQ ID NO: 2108763 - RNA, 19 nt, Artificial Sequence
  Description of Artificial Sequence: Synthetic oligonucleotide
acuuuagcaagccuaaggc

SEQ ID NO: 2108764 - RNA, 19 nt, Artificial Sequence
  Description of Artificial Sequence: Synthetic oligonucleotide
aauuccacaaaauccuacg

SEQ ID NO: 2108765 - RNA, 19 nt, Artificial Sequence
  Description of Artificial Sequence: Synthetic oligonucleotide
cugcauugaaauaagaacg

SEQ ID NO: 2108766 - RNA, 19 nt, Artificial Sequence
  Description of Artificial Sequence: Synthetic oligonucleotide
uuuagcaagccuaaggcag

SEQ ID NO: 2108767 - RNA, 19 nt, Artificial Sequence
  Description of Artificial Sequence: Synthetic oligonucleotide
ucuaggaauaauauuaacu

SEQ ID NO: 2108768 - RNA, 19 nt, Artificial Sequence
  Description of Artificial Sequence: Synthetic oligonucleotide
uuacauuucggcaagauau

SEQ ID NO: 2108769 - RNA, 19 nt, Artificial Sequence
  Description of Artificial Sequence: Synthetic oligonucleotide
aauauauugucccacccug

SEQ ID NO: 2108770 - RNA, 19 nt, Artificial Sequence
  Description of Artificial Sequence: Synthetic oligonucleotide
aaucgaucagcucccagcc

SEQ ID NO: 2108771 - RNA, 19 nt, Artificial Sequence
  Description of Artificial Sequence: Synthetic oligonucleotide
uuacaaaauauauuguccc

SEQ ID NO: 2108772 - RNA, 19 nt, Artificial Sequence
  Description of Artificial Sequence: Synthetic oligonucleotide
auuucggcaagauaugggc

SEQ ID NO: 2108773 - RNA, 19 nt, Artificial Sequence
  Description of Artificial Sequence: Synthetic oligonucleotide
gaagguucaaaucuguucc

SEQ ID NO: 2108774 - RNA, 19 nt, Artificial Sequence
  Description of Artificial Sequence: Synthetic oligonucleotide
uuacaaauuauguugggug

SEQ ID NO: 2108775 - RNA, 19 nt, Artificial Sequence
  Description of Artificial Sequence: Synthetic oligonucleotide
uccauaauagucaaugaug

SEQ ID NO: 2108776 - RNA, 19 nt, Artificial Sequence
  Description of Artificial Sequence: Synthetic oligonucleotide
agucuuguaagucugguuc

SEQ ID NO: 2108777 - RNA, 19 nt, Artificial Sequence
  Description of Artificial Sequence: Synthetic oligonucleotide
aacguuucauuaguaaugc

SEQ ID NO: 2108778 - RNA, 19 nt, Artificial Sequence
  Description of Artificial Sequence: Synthetic oligonucleotide
aacuacuuccauccgaagg

SEQ ID NO: 2108779 - RNA, 19 nt, Artificial Sequence
  Description of Artificial Sequence: Synthetic oligonucleotide
gguaaaaucgaucagcucc

SEQ ID NO: 2108780 - RNA, 19 nt, Artificial Sequence
  Description of Artificial Sequence: Synthetic oligonucleotide
ugaauagccauuuacauuu

SEQ ID NO: 2108781 - RNA, 19 nt, Artificial Sequence
  Description of Artificial Sequence: Synthetic oligonucleotide
aaaucuaggaauaauauua

SEQ ID NO: 2108782 - RNA, 19 nt, Artificial Sequence
  Description of Artificial Sequence: Synthetic oligonucleotide
uucauuaccgcuguaaucc

SEQ ID NO: 2108783 - RNA, 19 nt, Artificial Sequence
  Description of Artificial Sequence: Synthetic oligonucleotide
uguaugaauagccauuuac

SEQ ID NO: 2108784 - RNA, 19 nt, Artificial Sequence
  Description of Artificial Sequence: Synthetic oligonucleotide
aucaagaagguucaaaucu

SEQ ID NO: 2108785 - RNA, 19 nt, Artificial Sequence
  Description of Artificial Sequence: Synthetic oligonucleotide
ucauuaguaaugcugaguc

SEQ ID NO: 2108786 - RNA, 19 nt, Artificial Sequence
  Description of Artificial Sequence: Synthetic oligonucleotide
agaguaauaggcuagcugu

SEQ ID NO: 2108787 - RNA, 19 nt, Artificial Sequence
  Description of Artificial Sequence: Synthetic oligonucleotide
ucaacaaaucaaaauugag

SEQ ID NO: 2108788 - RNA, 19 nt, Artificial Sequence
  Description of Artificial Sequence: Synthetic oligonucleotide
auccuuacaaauuauguug

SEQ ID NO: 2108789 - RNA, 19 nt, Artificial Sequence
  Description of Artificial Sequence: Synthetic oligonucleotide
agaacgaaaucaauuaggc

SEQ ID NO: 2108790 - RNA, 19 nt, Artificial Sequence
  Description of Artificial Sequence: Synthetic oligonucleotide
uaguacuuaaaggaaaagg

SEQ ID NO: 2108791 - RNA, 19 nt, Artificial Sequence
  Description of Artificial Sequence: Synthetic oligonucleotide
uaggcuagcugucucaugg

SEQ ID NO: 2108792 - RNA, 19 nt, Artificial Sequence
  Description of Artificial Sequence: Synthetic oligonucleotide
uuaacuaaaucaacaaauc

SEQ ID NO: 2108793 - RNA, 19 nt, Artificial Sequence
  Description of Artificial Sequence: Synthetic oligonucleotide
aagaacgaaaucaauuagg

SEQ ID NO: 2108794 - RNA, 19 nt, Artificial Sequence
  Description of Artificial Sequence: Synthetic oligonucleotide
uaagaacgaaaucaauuag

SEQ ID NO: 2108795 - RNA, 19 nt, Artificial Sequence
  Description of Artificial Sequence: Synthetic oligonucleotide
acaagugacauguaaagga

SEQ ID NO: 2108796 - RNA, 19 nt, Artificial Sequence
  Description of Artificial Sequence: Synthetic oligonucleotide
uuuucuaaacguuucauua

SEQ ID NO: 2108797 - RNA, 19 nt, Artificial Sequence
  Description of Artificial Sequence: Synthetic oligonucleotide
agaagguucaaaucuguuc

SEQ ID NO: 2108798 - RNA, 19 nt, Artificial Sequence
  Description of Artificial Sequence: Synthetic oligonucleotide
uaauccuuacaaauuaugu

SEQ ID NO: 2108799 - RNA, 19 nt, Artificial Sequence
  Description of Artificial Sequence: Synthetic oligonucleotide
aaauauauugucccacccu

SEQ ID NO: 2108800 - RNA, 19 nt, Artificial Sequence
  Description of Artificial Sequence: Synthetic oligonucleotide
uacuuaaaggaaaaggaaa

SEQ ID NO: 2108801 - RNA, 19 nt, Artificial Sequence
  Description of Artificial Sequence: Synthetic oligonucleotide
aauguguuucauuaccgcu

SEQ ID NO: 2108802 - RNA, 19 nt, Artificial Sequence
  Description of Artificial Sequence: Synthetic oligonucleotide
ugacaagugacauguaaag

SEQ ID NO: 2108803 - RNA, 19 nt, Artificial Sequence
  Description of Artificial Sequence: Synthetic oligonucleotide
aagagauaaugcaacugcc

SEQ ID NO: 2108804 - RNA, 19 nt, Artificial Sequence
  Description of Artificial Sequence: Synthetic oligonucleotide
aaauugagcacacaccaaa

SEQ ID NO: 2108805 - RNA, 19 nt, Artificial Sequence
  Description of Artificial Sequence: Synthetic oligonucleotide
ugugaauagauuauuguuu

SEQ ID NO: 2108806 - RNA, 19 nt, Artificial Sequence
  Description of Artificial Sequence: Synthetic oligonucleotide
uagucaaugauguaacuac

SEQ ID NO: 2108807 - RNA, 19 nt, Artificial Sequence
  Description of Artificial Sequence: Synthetic oligonucleotide
aauagccauuuacauuucg

SEQ ID NO: 2108808 - RNA, 19 nt, Artificial Sequence
  Description of Artificial Sequence: Synthetic oligonucleotide
aaugacaagugacauguaa

SEQ ID NO: 2108809 - RNA, 19 nt, Artificial Sequence
  Description of Artificial Sequence: Synthetic oligonucleotide
uaauagucaaugauguaac

SEQ ID NO: 2108810 - RNA, 19 nt, Artificial Sequence
  Description of Artificial Sequence: Synthetic oligonucleotide
caaugauguaacuacuucc

SEQ ID NO: 2108811 - RNA, 19 nt, Artificial Sequence
  Description of Artificial Sequence: Synthetic oligonucleotide
aauaaaucuaggaauaaua

SEQ ID NO: 2108812 - RNA, 19 nt, Artificial Sequence
  Description of Artificial Sequence: Synthetic oligonucleotide
auaagaacgaaaucaauua

SEQ ID NO: 2108813 - RNA, 19 nt, Artificial Sequence
  Description of Artificial Sequence: Synthetic oligonucleotide
gugacaaaacuuuagcaag

SEQ ID NO: 2108814 - RNA, 19 nt, Artificial Sequence
  Description of Artificial Sequence: Synthetic oligonucleotide
uacaaauuauguugggugc

SEQ ID NO: 2108815 - RNA, 19 nt, Artificial Sequence
  Description of Artificial Sequence: Synthetic oligonucleotide
aauaagaacgaaaucaauu

SEQ ID NO: 2108816 - RNA, 19 nt, Artificial Sequence
  Description of Artificial Sequence: Synthetic oligonucleotide
auuaacuaaaucaacaaau

SEQ ID NO: 2108817 - RNA, 19 nt, Artificial Sequence
  Description of Artificial Sequence: Synthetic oligonucleotide
aauccuuacaaauuauguu

SEQ ID NO: 2108818 - RNA, 19 nt, Artificial Sequence
  Description of Artificial Sequence: Synthetic oligonucleotide
aaggaaaaucuggaauucc

SEQ ID NO: 2108819 - RNA, 19 nt, Artificial Sequence
  Description of Artificial Sequence: Synthetic oligonucleotide
uccgagguaaaaucgauca

SEQ ID NO: 2108820 - RNA, 19 nt, Artificial Sequence
  Description of Artificial Sequence: Synthetic oligonucleotide
uccacaaaauccuacggug

SEQ ID NO: 2108821 - RNA, 19 nt, Artificial Sequence
  Description of Artificial Sequence: Synthetic oligonucleotide
acggugacaaaacuuuagc

SEQ ID NO: 2108822 - RNA, 19 nt, Artificial Sequence
  Description of Artificial Sequence: Synthetic oligonucleotide
aaaagagauaaugcaacug

SEQ ID NO: 2108823 - RNA, 19 nt, Artificial Sequence
  Description of Artificial Sequence: Synthetic oligonucleotide
uugagcacacaccaaaaca

SEQ ID NO: 2108824 - RNA, 19 nt, Artificial Sequence
  Description of Artificial Sequence: Synthetic oligonucleotide
aaacguuucauuaguaaug

SEQ ID NO: 2108825 - RNA, 19 nt, Artificial Sequence
  Description of Artificial Sequence: Synthetic oligonucleotide
aaaucaauuaggcucccaa

SEQ ID NO: 2108826 - RNA, 19 nt, Artificial Sequence
  Description of Artificial Sequence: Synthetic oligonucleotide
acuauuaaauaaaucuagg

SEQ ID NO: 2108827 - RNA, 19 nt, Artificial Sequence
  Description of Artificial Sequence: Synthetic oligonucleotide
ucaagaagguucaaaucug

SEQ ID NO: 2108828 - RNA, 19 nt, Artificial Sequence
  Description of Artificial Sequence: Synthetic oligonucleotide
uaugaauagccauuuacau

SEQ ID NO: 2108829 - RNA, 19 nt, Artificial Sequence
  Description of Artificial Sequence: Synthetic oligonucleotide
uaaaggacaguacaguaau

SEQ ID NO: 2108830 - RNA, 19 nt, Artificial Sequence
  Description of Artificial Sequence: Synthetic oligonucleotide
aaaucaaaauugagcacac

SEQ ID NO: 2108831 - RNA, 19 nt, Artificial Sequence
  Description of Artificial Sequence: Synthetic oligonucleotide
ugcauugaaauaagaacga

SEQ ID NO: 2108832 - RNA, 19 nt, Artificial Sequence
  Description of Artificial Sequence: Synthetic oligonucleotide
aaugauguaacuacuucca

SEQ ID NO: 2108833 - RNA, 19 nt, Artificial Sequence
  Description of Artificial Sequence: Synthetic oligonucleotide
acauguaaaggacaguaca

SEQ ID NO: 2108834 - RNA, 19 nt, Artificial Sequence
  Description of Artificial Sequence: Synthetic oligonucleotide
auaauagucaaugauguaa

SEQ ID NO: 2108835 - RNA, 19 nt, Artificial Sequence
  Description of Artificial Sequence: Synthetic oligonucleotide
uauauugucccacccugag

SEQ ID NO: 2108836 - RNA, 19 nt, Artificial Sequence
  Description of Artificial Sequence: Synthetic oligonucleotide
aauccuacggugacaaaac

SEQ ID NO: 2108837 - RNA, 19 nt, Artificial Sequence
  Description of Artificial Sequence: Synthetic oligonucleotide
aacagaguaauaggcuagc

SEQ ID NO: 2108838 - RNA, 19 nt, Artificial Sequence
  Description of Artificial Sequence: Synthetic oligonucleotide
uuuauggauacaacugugu

SEQ ID NO: 2108839 - RNA, 19 nt, Artificial Sequence
  Description of Artificial Sequence: Synthetic oligonucleotide
augaaauacuauuauaaua

SEQ ID NO: 2108840 - RNA, 19 nt, Artificial Sequence
  Description of Artificial Sequence: Synthetic oligonucleotide
ugacaaaacuuuagcaagc

SEQ ID NO: 2108841 - RNA, 19 nt, Artificial Sequence
  Description of Artificial Sequence: Synthetic oligonucleotide
caucauuuauuaaugguuc

SEQ ID NO: 2108842 - RNA, 19 nt, Artificial Sequence
  Description of Artificial Sequence: Synthetic oligonucleotide
uaagaaagacuauuaaaua

SEQ ID NO: 2108843 - RNA, 19 nt, Artificial Sequence
  Description of Artificial Sequence: Synthetic oligonucleotide
acgaaaucaauuaggcucc

SEQ ID NO: 2108844 - RNA, 19 nt, Artificial Sequence
  Description of Artificial Sequence: Synthetic oligonucleotide
uguaacuacuuccauccga

SEQ ID NO: 2108845 - RNA, 19 nt, Artificial Sequence
  Description of Artificial Sequence: Synthetic oligonucleotide
acuacuuccauccgaaggu

SEQ ID NO: 2108846 - RNA, 19 nt, Artificial Sequence
  Description of Artificial Sequence: Synthetic oligonucleotide
aaucuggaauuccacauaa

SEQ ID NO: 2108847 - RNA, 19 nt, Artificial Sequence
  Description of Artificial Sequence: Synthetic oligonucleotide
ucacuauugaaaucaagaa

SEQ ID NO: 2108848 - RNA, 19 nt, Artificial Sequence
  Description of Artificial Sequence: Synthetic oligonucleotide
uaaugcaacugccacuuug

SEQ ID NO: 2108849 - RNA, 19 nt, Artificial Sequence
  Description of Artificial Sequence: Synthetic oligonucleotide
ucaaugauguaacuacuuc

SEQ ID NO: 2108850 - RNA, 19 nt, Artificial Sequence
  Description of Artificial Sequence: Synthetic oligonucleotide
uucuaaacguuucauuagu

SEQ ID NO: 2108851 - RNA, 19 nt, Artificial Sequence
  Description of Artificial Sequence: Synthetic oligonucleotide
uauuaaugguucuuuuaca

SEQ ID NO: 2108852 - RNA, 19 nt, Artificial Sequence
  Description of Artificial Sequence: Synthetic oligonucleotide
cugaacaugagcuguguag

SEQ ID NO: 2108853 - RNA, 19 nt, Artificial Sequence
  Description of Artificial Sequence: Synthetic oligonucleotide
acggucacgagccacagag

SEQ ID NO: 2108854 - RNA, 19 nt, Artificial Sequence
  Description of Artificial Sequence: Synthetic oligonucleotide
caaaauugagcacacacca

SEQ ID NO: 2108855 - RNA, 19 nt, Artificial Sequence
  Description of Artificial Sequence: Synthetic oligonucleotide
uuagcaagccuaaggcagg

SEQ ID NO: 2108856 - RNA, 19 nt, Artificial Sequence
  Description of Artificial Sequence: Synthetic oligonucleotide
aucuaggaauaauauuaac

SEQ ID NO: 2108857 - RNA, 19 nt, Artificial Sequence
  Description of Artificial Sequence: Synthetic oligonucleotide
gagauaaugcaacugccac

SEQ ID NO: 2108858 - RNA, 19 nt, Artificial Sequence
  Description of Artificial Sequence: Synthetic oligonucleotide
ucaauuaggcucccaauuc

SEQ ID NO: 2108859 - RNA, 19 nt, Artificial Sequence
  Description of Artificial Sequence: Synthetic oligonucleotide
aauagucaaugauguaacu

SEQ ID NO: 2108860 - RNA, 19 nt, Artificial Sequence
  Description of Artificial Sequence: Synthetic oligonucleotide
gucucauggagacagaaac

SEQ ID NO: 2108861 - RNA, 19 nt, Artificial Sequence
  Description of Artificial Sequence: Synthetic oligonucleotide
uuccauaauagucaaugau

SEQ ID NO: 2108862 - RNA, 19 nt, Artificial Sequence
  Description of Artificial Sequence: Synthetic oligonucleotide
uagcaucauuuauuaaugg

SEQ ID NO: 2108863 - RNA, 19 nt, Artificial Sequence
  Description of Artificial Sequence: Synthetic oligonucleotide
uagccauuuacauuucggc

SEQ ID NO: 2108864 - RNA, 19 nt, Artificial Sequence
  Description of Artificial Sequence: Synthetic oligonucleotide
acauuuauggauacaacug

SEQ ID NO: 2108865 - RNA, 19 nt, Artificial Sequence
  Description of Artificial Sequence: Synthetic oligonucleotide
aaauuauguugggugcugg

SEQ ID NO: 2108866 - RNA, 19 nt, Artificial Sequence
  Description of Artificial Sequence: Synthetic oligonucleotide
uugugaauagauuauuguu

SEQ ID NO: 2108867 - RNA, 19 nt, Artificial Sequence
  Description of Artificial Sequence: Synthetic oligonucleotide
uguaagucugguuccauaa

SEQ ID NO: 2108868 - RNA, 19 nt, Artificial Sequence
  Description of Artificial Sequence: Synthetic oligonucleotide
aaauccuacggugacaaaa

SEQ ID NO: 2108869 - RNA, 19 nt, Artificial Sequence
  Description of Artificial Sequence: Synthetic oligonucleotide
ucacgagccacagagugcg

SEQ ID NO: 2108870 - RNA, 19 nt, Artificial Sequence
  Description of Artificial Sequence: Synthetic oligonucleotide
gacaagugacauguaaagg

SEQ ID NO: 2108871 - RNA, 19 nt, Artificial Sequence
  Description of Artificial Sequence: Synthetic oligonucleotide
uaggaauaauauuaacuaa

SEQ ID NO: 2108872 - RNA, 19 nt, Artificial Sequence
  Description of Artificial Sequence: Synthetic oligonucleotide
agcaucauuuauuaauggu

SEQ ID NO: 2108873 - RNA, 19 nt, Artificial Sequence
  Description of Artificial Sequence: Synthetic oligonucleotide
uuaacugguucuugcguag

SEQ ID NO: 2108874 - RNA, 19 nt, Artificial Sequence
  Description of Artificial Sequence: Synthetic oligonucleotide
ugguucuuuuacaaaauau

SEQ ID NO: 2108875 - RNA, 19 nt, Artificial Sequence
  Description of Artificial Sequence: Synthetic oligonucleotide
ugcauaaaauaguacuuaa

SEQ ID NO: 2108876 - RNA, 19 nt, Artificial Sequence
  Description of Artificial Sequence: Synthetic oligonucleotide
uguaaaggacaguacagua

SEQ ID NO: 2108877 - RNA, 19 nt, Artificial Sequence
  Description of Artificial Sequence: Synthetic oligonucleotide
aaaaucgaucagcucccag

SEQ ID NO: 2108878 - RNA, 19 nt, Artificial Sequence
  Description of Artificial Sequence: Synthetic oligonucleotide
uuccacaaaauccuacggu

SEQ ID NO: 2108879 - RNA, 19 nt, Artificial Sequence
  Description of Artificial Sequence: Synthetic oligonucleotide
agcuguguaguuuguacag

SEQ ID NO: 2108880 - RNA, 19 nt, Artificial Sequence
  Description of Artificial Sequence: Synthetic oligonucleotide
uuuacauuucggcaagaua

SEQ ID NO: 2108881 - RNA, 19 nt, Artificial Sequence
  Description of Artificial Sequence: Synthetic oligonucleotide
aauuauguugggugcugga

SEQ ID NO: 2108882 - RNA, 19 nt, Artificial Sequence
  Description of Artificial Sequence: Synthetic oligonucleotide
cauuucggcaagauauggg

SEQ ID NO: 2108883 - RNA, 19 nt, Artificial Sequence
  Description of Artificial Sequence: Synthetic oligonucleotide
gcaacugccacuuuguaug

SEQ ID NO: 2108884 - RNA, 19 nt, Artificial Sequence
  Description of Artificial Sequence: Synthetic oligonucleotide
uuucauuaguaaugcugag

SEQ ID NO: 2108885 - RNA, 19 nt, Artificial Sequence
  Description of Artificial Sequence: Synthetic oligonucleotide
uuauguugggugcuggaaa

SEQ ID NO: 2108886 - RNA, 19 nt, Artificial Sequence
  Description of Artificial Sequence: Synthetic oligonucleotide
uuauggauacaacuguguu

SEQ ID NO: 2108887 - RNA, 19 nt, Artificial Sequence
  Description of Artificial Sequence: Synthetic oligonucleotide
uguguuucauuaccgcugu

SEQ ID NO: 2108888 - RNA, 19 nt, Artificial Sequence
  Description of Artificial Sequence: Synthetic oligonucleotide
auaaaucuaggaauaauau

SEQ ID NO: 2108889 - RNA, 19 nt, Artificial Sequence
  Description of Artificial Sequence: Synthetic oligonucleotide
uacauuucggcaagauaug

SEQ ID NO: 2108890 - RNA, 19 nt, Artificial Sequence
  Description of Artificial Sequence: Synthetic oligonucleotide
uaagucugguuccauaaua

SEQ ID NO: 2108891 - RNA, 19 nt, Artificial Sequence
  Description of Artificial Sequence: Synthetic oligonucleotide
caauuaggcucccaauucc

SEQ ID NO: 2108892 - RNA, 19 nt, Artificial Sequence
  Description of Artificial Sequence: Synthetic oligonucleotide
guuucauuaguaaugcuga

SEQ ID NO: 2108893 - RNA, 19 nt, Artificial Sequence
  Description of Artificial Sequence: Synthetic oligonucleotide
uguaauccuuacaaauuau

SEQ ID NO: 2108894 - RNA, 19 nt, Artificial Sequence
  Description of Artificial Sequence: Synthetic oligonucleotide
gguuccauaauagucaaug

SEQ ID NO: 2108895 - RNA, 19 nt, Artificial Sequence
  Description of Artificial Sequence: Synthetic oligonucleotide
ugacauguaaaggacagua

SEQ ID NO: 2108896 - RNA, 19 nt, Artificial Sequence
  Description of Artificial Sequence: Synthetic oligonucleotide
caaaacuuuagcaagccua

SEQ ID NO: 2108897 - RNA, 19 nt, Artificial Sequence
  Description of Artificial Sequence: Synthetic oligonucleotide
guaaaauguguuucauuac

SEQ ID NO: 2108898 - RNA, 19 nt, Artificial Sequence
  Description of Artificial Sequence: Synthetic oligonucleotide
auagccauuuacauuucgg

SEQ ID NO: 2108899 - RNA, 19 nt, Artificial Sequence
  Description of Artificial Sequence: Synthetic oligonucleotide
ugccacuuuguaugaauag

SEQ ID NO: 2108900 - RNA, 19 nt, Artificial Sequence
  Description of Artificial Sequence: Synthetic oligonucleotide
aucauuuauuaaugguucu

SEQ ID NO: 2108901 - RNA, 19 nt, Artificial Sequence
  Description of Artificial Sequence: Synthetic oligonucleotide
aucaauuaggcucccaauu

SEQ ID NO: 2108902 - RNA, 19 nt, Artificial Sequence
  Description of Artificial Sequence: Synthetic oligonucleotide
caauaauaguaacagagua

SEQ ID NO: 2108903 - RNA, 19 nt, Artificial Sequence
  Description of Artificial Sequence: Synthetic oligonucleotide
aguuaacugguucuugcgu

SEQ ID NO: 2108904 - RNA, 19 nt, Artificial Sequence
  Description of Artificial Sequence: Synthetic oligonucleotide
uuguacaguuaacugguuc

SEQ ID NO: 2108905 - RNA, 19 nt, Artificial Sequence
  Description of Artificial Sequence: Synthetic oligonucleotide
uuucauuaccgcuguaauc

SEQ ID NO: 2108906 - RNA, 19 nt, Artificial Sequence
  Description of Artificial Sequence: Synthetic oligonucleotide
aaugcaacugccacuuugu

SEQ ID NO: 2108907 - RNA, 19 nt, Artificial Sequence
  Description of Artificial Sequence: Synthetic oligonucleotide
aaucuaggaauaauauuaa

SEQ ID NO: 2108908 - RNA, 19 nt, Artificial Sequence
  Description of Artificial Sequence: Synthetic oligonucleotide
uggagacagaaacccauga

SEQ ID NO: 2108909 - RNA, 19 nt, Artificial Sequence
  Description of Artificial Sequence: Synthetic oligonucleotide
guaugaauagccauuuaca

SEQ ID NO: 2108910 - RNA, 19 nt, Artificial Sequence
  Description of Artificial Sequence: Synthetic oligonucleotide
uauguugggugcuggaaaa

SEQ ID NO: 2108911 - RNA, 19 nt, Artificial Sequence
  Description of Artificial Sequence: Synthetic oligonucleotide
guaauccuuacaaauuaug

SEQ ID NO: 2108912 - RNA, 19 nt, Artificial Sequence
  Description of Artificial Sequence: Synthetic oligonucleotide
uguuucauuaccgcuguaa

SEQ ID NO: 2108913 - RNA, 19 nt, Artificial Sequence
  Description of Artificial Sequence: Synthetic oligonucleotide
acauuucggcaagauaugg

SEQ ID NO: 2108914 - RNA, 19 nt, Artificial Sequence
  Description of Artificial Sequence: Synthetic oligonucleotide
aagguucaaaucuguuccu

SEQ ID NO: 2108915 - RNA, 19 nt, Artificial Sequence
  Description of Artificial Sequence: Synthetic oligonucleotide
aaauaagaacgaaaucaau

SEQ ID NO: 2108916 - RNA, 19 nt, Artificial Sequence
  Description of Artificial Sequence: Synthetic oligonucleotide
ugcguagcaucauuuauua

SEQ ID NO: 2108917 - RNA, 19 nt, Artificial Sequence
  Description of Artificial Sequence: Synthetic oligonucleotide
ugcugagucuuguaagucu

SEQ ID NO: 2108918 - RNA, 19 nt, Artificial Sequence
  Description of Artificial Sequence: Synthetic oligonucleotide
cauaaggggcucacuauug

SEQ ID NO: 2108919 - RNA, 19 nt, Artificial Sequence
  Description of Artificial Sequence: Synthetic oligonucleotide
auuuauggauacaacugug

SEQ ID NO: 2108920 - RNA, 19 nt, Artificial Sequence
  Description of Artificial Sequence: Synthetic oligonucleotide
uuucggcaagauaugggcu

SEQ ID NO: 2108921 - RNA, 19 nt, Artificial Sequence
  Description of Artificial Sequence: Synthetic oligonucleotide
gguauccgagguaaaaucg

SEQ ID NO: 2108922 - RNA, 19 nt, Artificial Sequence
  Description of Artificial Sequence: Synthetic oligonucleotide
guaacagaguaauaggcua

SEQ ID NO: 2108923 - RNA, 19 nt, Artificial Sequence
  Description of Artificial Sequence: Synthetic oligonucleotide
ugguucuugcguagcauca

SEQ ID NO: 2108924 - RNA, 19 nt, Artificial Sequence
  Description of Artificial Sequence: Synthetic oligonucleotide
gagguccucacacuugggc

SEQ ID NO: 2108925 - RNA, 19 nt, Artificial Sequence
  Description of Artificial Sequence: Synthetic oligonucleotide
aaaaccaacuucacuccca

SEQ ID NO: 2108926 - RNA, 19 nt, Artificial Sequence
  Description of Artificial Sequence: Synthetic oligonucleotide
agguaaaaucgaucagcuc

SEQ ID NO: 2108927 - RNA, 19 nt, Artificial Sequence
  Description of Artificial Sequence: Synthetic oligonucleotide
cacaaaauccuacggugac

SEQ ID NO: 2108928 - RNA, 19 nt, Artificial Sequence
  Description of Artificial Sequence: Synthetic oligonucleotide
aauuaggcucccaauucca

SEQ ID NO: 2108929 - RNA, 19 nt, Artificial Sequence
  Description of Artificial Sequence: Synthetic oligonucleotide
aggacaguacaguaauaca

SEQ ID NO: 2108930 - RNA, 19 nt, Artificial Sequence
  Description of Artificial Sequence: Synthetic oligonucleotide
aagccuaaggcaggguauc

SEQ ID NO: 2108931 - RNA, 19 nt, Artificial Sequence
  Description of Artificial Sequence: Synthetic oligonucleotide
agguccaacaaucugcauu

SEQ ID NO: 2108932 - RNA, 19 nt, Artificial Sequence
  Description of Artificial Sequence: Synthetic oligonucleotide
ccacuuuguaugaauagcc

SEQ ID NO: 2108933 - RNA, 19 nt, Artificial Sequence
  Description of Artificial Sequence: Synthetic oligonucleotide
auccgaagguccaacaauc

SEQ ID NO: 2108934 - RNA, 19 nt, Artificial Sequence
  Description of Artificial Sequence: Synthetic oligonucleotide
ucgaucagcucccagccau

SEQ ID NO: 2108935 - RNA, 19 nt, Artificial Sequence
  Description of Artificial Sequence: Synthetic oligonucleotide
uacuuccauccgaaggucc

SEQ ID NO: 2108936 - RNA, 19 nt, Artificial Sequence
  Description of Artificial Sequence: Synthetic oligonucleotide
guaaugcugagucuuguaa

SEQ ID NO: 2108937 - RNA, 19 nt, Artificial Sequence
  Description of Artificial Sequence: Synthetic oligonucleotide
uauccgagguaaaaucgau

SEQ ID NO: 2108938 - RNA, 19 nt, Artificial Sequence
  Description of Artificial Sequence: Synthetic oligonucleotide
aaacuuuagcaagccuaag

SEQ ID NO: 2108939 - RNA, 19 nt, Artificial Sequence
  Description of Artificial Sequence: Synthetic oligonucleotide
uccaacaaucugcauugaa

SEQ ID NO: 2108940 - RNA, 19 nt, Artificial Sequence
  Description of Artificial Sequence: Synthetic oligonucleotide
uguguaguuuguacaguua

SEQ ID NO: 2108941 - RNA, 19 nt, Artificial Sequence
  Description of Artificial Sequence: Synthetic oligonucleotide
uucaaaucuguuccucuuu

SEQ ID NO: 2108942 - RNA, 19 nt, Artificial Sequence
  Description of Artificial Sequence: Synthetic oligonucleotide
auaaggggcucacuauuga

SEQ ID NO: 2108943 - RNA, 19 nt, Artificial Sequence
  Description of Artificial Sequence: Synthetic oligonucleotide
auguaacuacuuccauccg

SEQ ID NO: 2108944 - RNA, 19 nt, Artificial Sequence
  Description of Artificial Sequence: Synthetic oligonucleotide
acaguacaguaauacaaua

SEQ ID NO: 2108945 - RNA, 19 nt, Artificial Sequence
  Description of Artificial Sequence: Synthetic oligonucleotide
acccaugaaauacuauuau

SEQ ID NO: 2108946 - RNA, 19 nt, Artificial Sequence
  Description of Artificial Sequence: Synthetic oligonucleotide
acaaauuauguugggugcu

SEQ ID NO: 2108947 - RNA, 19 nt, Artificial Sequence
  Description of Artificial Sequence: Synthetic oligonucleotide
aguaauaggcuagcugucu

SEQ ID NO: 2108948 - RNA, 19 nt, Artificial Sequence
  Description of Artificial Sequence: Synthetic oligonucleotide
aagugacauguaaaggaca

SEQ ID NO: 2108949 - RNA, 19 nt, Artificial Sequence
  Description of Artificial Sequence: Synthetic oligonucleotide
ucauuuauuaaugguucuu

SEQ ID NO: 2108950 - RNA, 19 nt, Artificial Sequence
  Description of Artificial Sequence: Synthetic oligonucleotide
aacccaugaaauacuauua

SEQ ID NO: 2108951 - RNA, 19 nt, Artificial Sequence
  Description of Artificial Sequence: Synthetic oligonucleotide
uauugaaaucaagaagguu

SEQ ID NO: 2108952 - RNA, 19 nt, Artificial Sequence
  Description of Artificial Sequence: Synthetic oligonucleotide
ucccaguaaaauguguuuc

SEQ ID NO: 2108953 - RNA, 19 nt, Artificial Sequence
  Description of Artificial Sequence: Synthetic oligonucleotide
aggaaaaucuggaauucca

SEQ ID NO: 2108954 - RNA, 19 nt, Artificial Sequence
  Description of Artificial Sequence: Synthetic oligonucleotide
ugucucauggagacagaaa

SEQ ID NO: 2108955 - RNA, 19 nt, Artificial Sequence
  Description of Artificial Sequence: Synthetic oligonucleotide
cguuucauuaguaaugcug

SEQ ID NO: 2108956 - RNA, 19 nt, Artificial Sequence
  Description of Artificial Sequence: Synthetic oligonucleotide
gagcuguguaguuuguaca

SEQ ID NO: 2108957 - RNA, 19 nt, Artificial Sequence
  Description of Artificial Sequence: Synthetic oligonucleotide
aauugagcacacaccaaaa

SEQ ID NO: 2108958 - RNA, 19 nt, Artificial Sequence
  Description of Artificial Sequence: Synthetic oligonucleotide
agagauaaugcaacugcca

SEQ ID NO: 2108959 - RNA, 19 nt, Artificial Sequence
  Description of Artificial Sequence: Synthetic oligonucleotide
uccuacggugacaaaacuu

SEQ ID NO: 2108960 - RNA, 19 nt, Artificial Sequence
  Description of Artificial Sequence: Synthetic oligonucleotide
cuaaggcaggguauccgag

SEQ ID NO: 2108961 - RNA, 19 nt, Artificial Sequence
  Description of Artificial Sequence: Synthetic oligonucleotide
uccgaagguccaacaaucu

SEQ ID NO: 2108962 - RNA, 19 nt, Artificial Sequence
  Description of Artificial Sequence: Synthetic oligonucleotide
gucuccucgcucccgacgg

SEQ ID NO: 2108963 - RNA, 19 nt, Artificial Sequence
  Description of Artificial Sequence: Synthetic oligonucleotide
cacaccaaaacaucaucca

SEQ ID NO: 2108964 - RNA, 19 nt, Artificial Sequence
  Description of Artificial Sequence: Synthetic oligonucleotide
auuaggcucccaauuccac

SEQ ID NO: 2108965 - RNA, 19 nt, Artificial Sequence
  Description of Artificial Sequence: Synthetic oligonucleotide
acauaaggggcucacuauu

SEQ ID NO: 2108966 - RNA, 19 nt, Artificial Sequence
  Description of Artificial Sequence: Synthetic oligonucleotide
aaucaaaauugagcacaca

SEQ ID NO: 2108967 - RNA, 19 nt, Artificial Sequence
  Description of Artificial Sequence: Synthetic oligonucleotide
ggucacgagccacagagug

SEQ ID NO: 2108968 - RNA, 19 nt, Artificial Sequence
  Description of Artificial Sequence: Synthetic oligonucleotide
aauaggcuagcugucucau

SEQ ID NO: 2108969 - RNA, 19 nt, Artificial Sequence
  Description of Artificial Sequence: Synthetic oligonucleotide
uucggcaagauaugggcuu

SEQ ID NO: 2108970 - RNA, 19 nt, Artificial Sequence
  Description of Artificial Sequence: Synthetic oligonucleotide
aaaauugagcacacaccaa

SEQ ID NO: 2108971 - RNA, 19 nt, Artificial Sequence
  Description of Artificial Sequence: Synthetic oligonucleotide
caguacaguaauacaauaa

SEQ ID NO: 2108972 - RNA, 19 nt, Artificial Sequence
  Description of Artificial Sequence: Synthetic oligonucleotide
guuaacugguucuugcgua

SEQ ID NO: 2108973 - RNA, 19 nt, Artificial Sequence
  Description of Artificial Sequence: Synthetic oligonucleotide
cugagucuuguaagucugg

SEQ ID NO: 2108974 - RNA, 19 nt, Artificial Sequence
  Description of Artificial Sequence: Synthetic oligonucleotide
cacacaccaaaacaucauc

SEQ ID NO: 2108975 - RNA, 19 nt, Artificial Sequence
  Description of Artificial Sequence: Synthetic oligonucleotide
acugccacuuuguaugaau

SEQ ID NO: 2108976 - RNA, 19 nt, Artificial Sequence
  Description of Artificial Sequence: Synthetic oligonucleotide
aucagcucccagccauccc

SEQ ID NO: 2108977 - RNA, 19 nt, Artificial Sequence
  Description of Artificial Sequence: Synthetic oligonucleotide
uucuugcguagcaucauuu

SEQ ID NO: 2108978 - RNA, 19 nt, Artificial Sequence
  Description of Artificial Sequence: Synthetic oligonucleotide
ucuugcguagcaucauuua

SEQ ID NO: 2108979 - RNA, 19 nt, Artificial Sequence
  Description of Artificial Sequence: Synthetic oligonucleotide
guaguuuguacaguuaacu

SEQ ID NO: 2108980 - RNA, 19 nt, Artificial Sequence
  Description of Artificial Sequence: Synthetic oligonucleotide
guaauaggcuagcugucuc

SEQ ID NO: 2108981 - RNA, 19 nt, Artificial Sequence
  Description of Artificial Sequence: Synthetic oligonucleotide
augguucuuuuacaaaaua

SEQ ID NO: 2108982 - RNA, 19 nt, Artificial Sequence
  Description of Artificial Sequence: Synthetic oligonucleotide
gauaaugcaacugccacuu

SEQ ID NO: 2108983 - RNA, 19 nt, Artificial Sequence
  Description of Artificial Sequence: Synthetic oligonucleotide
cacuuuguaugaauagcca

SEQ ID NO: 2108984 - RNA, 19 nt, Artificial Sequence
  Description of Artificial Sequence: Synthetic oligonucleotide
ugagucuuguaagucuggu

SEQ ID NO: 2108985 - RNA, 19 nt, Artificial Sequence
  Description of Artificial Sequence: Synthetic oligonucleotide
cacccugagguccucacac

SEQ ID NO: 2108986 - RNA, 19 nt, Artificial Sequence
  Description of Artificial Sequence: Synthetic oligonucleotide
gaacgaaaucaauuaggcu

SEQ ID NO: 2108987 - RNA, 19 nt, Artificial Sequence
  Description of Artificial Sequence: Synthetic oligonucleotide
caaauuauguugggugcug

SEQ ID NO: 2108988 - RNA, 19 nt, Artificial Sequence
  Description of Artificial Sequence: Synthetic oligonucleotide
agcacacaccaaaacauca

SEQ ID NO: 2108989 - RNA, 19 nt, Artificial Sequence
  Description of Artificial Sequence: Synthetic oligonucleotide
ucauuaccgcuguaauccu

SEQ ID NO: 2108990 - RNA, 19 nt, Artificial Sequence
  Description of Artificial Sequence: Synthetic oligonucleotide
augacaagugacauguaaa

SEQ ID NO: 2108991 - RNA, 19 nt, Artificial Sequence
  Description of Artificial Sequence: Synthetic oligonucleotide
cugguucuugcguagcauc

SEQ ID NO: 2108992 - RNA, 19 nt, Artificial Sequence
  Description of Artificial Sequence: Synthetic oligonucleotide
guaaaggacaguacaguaa

SEQ ID NO: 2108993 - RNA, 19 nt, Artificial Sequence
  Description of Artificial Sequence: Synthetic oligonucleotide
uugucccacccugaggucc

SEQ ID NO: 2108994 - RNA, 19 nt, Artificial Sequence
  Description of Artificial Sequence: Synthetic oligonucleotide
caacaaucugcauugaaau

SEQ ID NO: 2108995 - RNA, 19 nt, Artificial Sequence
  Description of Artificial Sequence: Synthetic oligonucleotide
uuguaagucugguuccaua

SEQ ID NO: 2108996 - RNA, 19 nt, Artificial Sequence
  Description of Artificial Sequence: Synthetic oligonucleotide
cagagugcggaggaggccc

SEQ ID NO: 2108997 - RNA, 19 nt, Artificial Sequence
  Description of Artificial Sequence: Synthetic oligonucleotide
auuauguugggugcuggaa

SEQ ID NO: 2108998 - RNA, 19 nt, Artificial Sequence
  Description of Artificial Sequence: Synthetic oligonucleotide
aguaaugcugagucuugua

SEQ ID NO: 2108999 - RNA, 19 nt, Artificial Sequence
  Description of Artificial Sequence: Synthetic oligonucleotide
agucaaugauguaacuacu

SEQ ID NO: 2109000 - RNA, 19 nt, Artificial Sequence
  Description of Artificial Sequence: Synthetic oligonucleotide
caaaauccuacggugacaa

SEQ ID NO: 2109001 - RNA, 19 nt, Artificial Sequence
  Description of Artificial Sequence: Synthetic oligonucleotide
uagcaagccuaaggcaggg

SEQ ID NO: 2109002 - RNA, 19 nt, Artificial Sequence
  Description of Artificial Sequence: Synthetic oligonucleotide
gguucuuuuacaaaauaua

SEQ ID NO: 2109003 - RNA, 19 nt, Artificial Sequence
  Description of Artificial Sequence: Synthetic oligonucleotide
gagguaaaaucgaucagcu

SEQ ID NO: 2109004 - RNA, 19 nt, Artificial Sequence
  Description of Artificial Sequence: Synthetic oligonucleotide
ugucccgcggcgacgguca

SEQ ID NO: 2109005 - RNA, 19 nt, Artificial Sequence
  Description of Artificial Sequence: Synthetic oligonucleotide
uggggaagccugacccgcg

SEQ ID NO: 2109006 - RNA, 19 nt, Artificial Sequence
  Description of Artificial Sequence: Synthetic oligonucleotide
agccuaaggcaggguaucc

SEQ ID NO: 2109007 - RNA, 19 nt, Artificial Sequence
  Description of Artificial Sequence: Synthetic oligonucleotide
ggacaguacaguaauacaa

SEQ ID NO: 2109008 - RNA, 19 nt, Artificial Sequence
  Description of Artificial Sequence: Synthetic oligonucleotide
ccuuacaaauuauguuggg

SEQ ID NO: 2109009 - RNA, 19 nt, Artificial Sequence
  Description of Artificial Sequence: Synthetic oligonucleotide
auccgagguaaaaucgauc

SEQ ID NO: 2109010 - RNA, 19 nt, Artificial Sequence
  Description of Artificial Sequence: Synthetic oligonucleotide
aaaauccuacggugacaaa

SEQ ID NO: 2109011 - RNA, 19 nt, Artificial Sequence
  Description of Artificial Sequence: Synthetic oligonucleotide
acaaaauccuacggugaca

SEQ ID NO: 2109012 - RNA, 19 nt, Artificial Sequence
  Description of Artificial Sequence: Synthetic oligonucleotide
uuguaugaauagccauuua

SEQ ID NO: 2109013 - RNA, 19 nt, Artificial Sequence
  Description of Artificial Sequence: Synthetic oligonucleotide
uuuguacaguuaacugguu

SEQ ID NO: 2109014 - RNA, 19 nt, Artificial Sequence
  Description of Artificial Sequence: Synthetic oligonucleotide
ggaaaaucuggaauuccac

SEQ ID NO: 2109015 - RNA, 19 nt, Artificial Sequence
  Description of Artificial Sequence: Synthetic oligonucleotide
uaccgcuguaauccuuaca

SEQ ID NO: 2109016 - RNA, 19 nt, Artificial Sequence
  Description of Artificial Sequence: Synthetic oligonucleotide
auccuacggugacaaaacu

SEQ ID NO: 2109017 - RNA, 19 nt, Artificial Sequence
  Description of Artificial Sequence: Synthetic oligonucleotide
ggguauccgagguaaaauc

SEQ ID NO: 2109018 - RNA, 19 nt, Artificial Sequence
  Description of Artificial Sequence: Synthetic oligonucleotide
auguugggugcuggaaaac

SEQ ID NO: 2109019 - RNA, 19 nt, Artificial Sequence
  Description of Artificial Sequence: Synthetic oligonucleotide
guugggugcuggaaaacac

SEQ ID NO: 2109020 - RNA, 19 nt, Artificial Sequence
  Description of Artificial Sequence: Synthetic oligonucleotide
guauccgagguaaaaucga

SEQ ID NO: 2109021 - RNA, 19 nt, Artificial Sequence
  Description of Artificial Sequence: Synthetic oligonucleotide
gaguaauaggcuagcuguc

SEQ ID NO: 2109022 - RNA, 19 nt, Artificial Sequence
  Description of Artificial Sequence: Synthetic oligonucleotide
auaggcuagcugucucaug

SEQ ID NO: 2109023 - RNA, 19 nt, Artificial Sequence
  Description of Artificial Sequence: Synthetic oligonucleotide
gccacuuuguaugaauagc

SEQ ID NO: 2109024 - RNA, 19 nt, Artificial Sequence
  Description of Artificial Sequence: Synthetic oligonucleotide
cuuuguaugaauagccauu

SEQ ID NO: 2109025 - RNA, 19 nt, Artificial Sequence
  Description of Artificial Sequence: Synthetic oligonucleotide
uaaaaucgaucagcuccca

SEQ ID NO: 2109026 - RNA, 19 nt, Artificial Sequence
  Description of Artificial Sequence: Synthetic oligonucleotide
cgagguaaaaucgaucagc

SEQ ID NO: 2109027 - RNA, 19 nt, Artificial Sequence
  Description of Artificial Sequence: Synthetic oligonucleotide
uaacugguucuugcguagc

SEQ ID NO: 2109028 - RNA, 19 nt, Artificial Sequence
  Description of Artificial Sequence: Synthetic oligonucleotide
gacaguacaguaauacaau

SEQ ID NO: 2109029 - RNA, 19 nt, Artificial Sequence
  Description of Artificial Sequence: Synthetic oligonucleotide
auauauugucccacccuga

SEQ ID NO: 2109030 - RNA, 19 nt, Artificial Sequence
  Description of Artificial Sequence: Synthetic oligonucleotide
ccauaauagucaaugaugu

SEQ ID NO: 2109031 - RNA, 19 nt, Artificial Sequence
  Description of Artificial Sequence: Synthetic oligonucleotide
cuuacaaauuauguugggu

SEQ ID NO: 2109032 - RNA, 19 nt, Artificial Sequence
  Description of Artificial Sequence: Synthetic oligonucleotide
gaagccugacccgcgggcc

SEQ ID NO: 2109033 - RNA, 19 nt, Artificial Sequence
  Description of Artificial Sequence: Synthetic oligonucleotide
acguuucauuaguaaugcu

SEQ ID NO: 2109034 - RNA, 19 nt, Artificial Sequence
  Description of Artificial Sequence: Synthetic oligonucleotide
cauaauagucaaugaugua

SEQ ID NO: 2109035 - RNA, 19 nt, Artificial Sequence
  Description of Artificial Sequence: Synthetic oligonucleotide
ugucccacccugagguccu

SEQ ID NO: 2109036 - RNA, 19 nt, Artificial Sequence
  Description of Artificial Sequence: Synthetic oligonucleotide
aagccugacccgcgggcca

SEQ ID NO: 2109037 - RNA, 19 nt, Artificial Sequence
  Description of Artificial Sequence: Synthetic oligonucleotide
uuaccgcuguaauccuuac

SEQ ID NO: 2109038 - RNA, 19 nt, Artificial Sequence
  Description of Artificial Sequence: Synthetic oligonucleotide
acagaguaauaggcuagcu

SEQ ID NO: 2109039 - RNA, 19 nt, Artificial Sequence
  Description of Artificial Sequence: Synthetic oligonucleotide
agaaacccaugaaauacua

SEQ ID NO: 2109040 - RNA, 19 nt, Artificial Sequence
  Description of Artificial Sequence: Synthetic oligonucleotide
ugaaaucaagaagguucaa

SEQ ID NO: 2109041 - RNA, 19 nt, Artificial Sequence
  Description of Artificial Sequence: Synthetic oligonucleotide
aggguauccgagguaaaau

SEQ ID NO: 2109042 - RNA, 19 nt, Artificial Sequence
  Description of Artificial Sequence: Synthetic oligonucleotide
ccaacaaucugcauugaaa

SEQ ID NO: 2109043 - RNA, 19 nt, Artificial Sequence
  Description of Artificial Sequence: Synthetic oligonucleotide
auuaccgcuguaauccuua

SEQ ID NO: 2109044 - RNA, 19 nt, Artificial Sequence
  Description of Artificial Sequence: Synthetic oligonucleotide
acuuccauccgaaggucca

SEQ ID NO: 2109045 - RNA, 19 nt, Artificial Sequence
  Description of Artificial Sequence: Synthetic oligonucleotide
acucccaguaaaauguguu

SEQ ID NO: 2109046 - RNA, 19 nt, Artificial Sequence
  Description of Artificial Sequence: Synthetic oligonucleotide
gaaaucaauuaggcuccca

SEQ ID NO: 2109047 - RNA, 19 nt, Artificial Sequence
  Description of Artificial Sequence: Synthetic oligonucleotide
cacacuugggcgucuccuc

SEQ ID NO: 2109048 - RNA, 19 nt, Artificial Sequence
  Description of Artificial Sequence: Synthetic oligonucleotide
aaaggacaguacaguaaua

SEQ ID NO: 2109049 - RNA, 19 nt, Artificial Sequence
  Description of Artificial Sequence: Synthetic oligonucleotide
uuccacauaaggggcucac

SEQ ID NO: 2109050 - RNA, 19 nt, Artificial Sequence
  Description of Artificial Sequence: Synthetic oligonucleotide
gucacgagccacagagugc

SEQ ID NO: 2109051 - RNA, 19 nt, Artificial Sequence
  Description of Artificial Sequence: Synthetic oligonucleotide
gaauagccauuuacauuuc

SEQ ID NO: 2109052 - RNA, 19 nt, Artificial Sequence
  Description of Artificial Sequence: Synthetic oligonucleotide
acuugggcgucuccucgcu

SEQ ID NO: 2109053 - RNA, 19 nt, Artificial Sequence
  Description of Artificial Sequence: Synthetic oligonucleotide
aucgaucagcucccagcca

SEQ ID NO: 2109054 - RNA, 19 nt, Artificial Sequence
  Description of Artificial Sequence: Synthetic oligonucleotide
cuacuuccauccgaagguc

SEQ ID NO: 2109055 - RNA, 19 nt, Artificial Sequence
  Description of Artificial Sequence: Synthetic oligonucleotide
gaauuccacauaaggggcu

SEQ ID NO: 2109056 - RNA, 19 nt, Artificial Sequence
  Description of Artificial Sequence: Synthetic oligonucleotide
cucccgacggcgccagagg

SEQ ID NO: 2109057 - RNA, 19 nt, Artificial Sequence
  Description of Artificial Sequence: Synthetic oligonucleotide
cucacacuugggcgucucc

SEQ ID NO: 2109058 - RNA, 19 nt, Artificial Sequence
  Description of Artificial Sequence: Synthetic oligonucleotide
ugguuccauaauagucaau

SEQ ID NO: 2109059 - RNA, 19 nt, Artificial Sequence
  Description of Artificial Sequence: Synthetic oligonucleotide
ggaagccugacccgcgggc

SEQ ID NO: 2109060 - RNA, 19 nt, Artificial Sequence
  Description of Artificial Sequence: Synthetic oligonucleotide
cauuuauuaaugguucuuu

SEQ ID NO: 2109061 - RNA, 19 nt, Artificial Sequence
  Description of Artificial Sequence: Synthetic oligonucleotide
ugggcgucuccucgcuccc

SEQ ID NO: 2109062 - RNA, 19 nt, Artificial Sequence
  Description of Artificial Sequence: Synthetic oligonucleotide
aggcuagcugucucaugga

SEQ ID NO: 2109063 - RNA, 19 nt, Artificial Sequence
  Description of Artificial Sequence: Synthetic oligonucleotide
cuugcguagcaucauuuau

SEQ ID NO: 2109064 - RNA, 19 nt, Artificial Sequence
  Description of Artificial Sequence: Synthetic oligonucleotide
cugccacuuuguaugaaua

SEQ ID NO: 2109065 - RNA, 19 nt, Artificial Sequence
  Description of Artificial Sequence: Synthetic oligonucleotide
cguagcaucauuuauuaau

SEQ ID NO: 2109066 - RNA, 19 nt, Artificial Sequence
  Description of Artificial Sequence: Synthetic oligonucleotide
aaaugacaagugacaugua

SEQ ID NO: 2109067 - RNA, 19 nt, Artificial Sequence
  Description of Artificial Sequence: Synthetic oligonucleotide
acccugagguccucacacu

SEQ ID NO: 2109068 - RNA, 19 nt, Artificial Sequence
  Description of Artificial Sequence: Synthetic oligonucleotide
cuacggugacaaaacuuua

SEQ ID NO: 2109069 - RNA, 19 nt, Artificial Sequence
  Description of Artificial Sequence: Synthetic oligonucleotide
ccacaaaauccuacgguga

SEQ ID NO: 2109070 - RNA, 19 nt, Artificial Sequence
  Description of Artificial Sequence: Synthetic oligonucleotide
auuccacauaaggggcuca

SEQ ID NO: 2109071 - RNA, 19 nt, Artificial Sequence
  Description of Artificial Sequence: Synthetic oligonucleotide
caacugccacuuuguauga

SEQ ID NO: 2109072 - RNA, 19 nt, Artificial Sequence
  Description of Artificial Sequence: Synthetic oligonucleotide
gaacaugagcuguguaguu

SEQ ID NO: 2109073 - RNA, 19 nt, Artificial Sequence
  Description of Artificial Sequence: Synthetic oligonucleotide
gccuaaggcaggguauccg

SEQ ID NO: 2109074 - RNA, 19 nt, Artificial Sequence
  Description of Artificial Sequence: Synthetic oligonucleotide
cuguguaguuuguacaguu

SEQ ID NO: 2109075 - RNA, 19 nt, Artificial Sequence
  Description of Artificial Sequence: Synthetic oligonucleotide
agcgccccagugucccgcg

SEQ ID NO: 2109076 - RNA, 19 nt, Artificial Sequence
  Description of Artificial Sequence: Synthetic oligonucleotide
auaaugcaacugccacuuu

SEQ ID NO: 2109077 - RNA, 19 nt, Artificial Sequence
  Description of Artificial Sequence: Synthetic oligonucleotide
ccgagguaaaaucgaucag

SEQ ID NO: 2109078 - RNA, 19 nt, Artificial Sequence
  Description of Artificial Sequence: Synthetic oligonucleotide
gugcggaggaggcccggag

SEQ ID NO: 2109079 - RNA, 19 nt, Artificial Sequence
  Description of Artificial Sequence: Synthetic oligonucleotide
cauccgaagguccaacaau

SEQ ID NO: 2109080 - RNA, 19 nt, Artificial Sequence
  Description of Artificial Sequence: Synthetic oligonucleotide
gcaagccuaaggcagggua

SEQ ID NO: 2109081 - RNA, 19 nt, Artificial Sequence
  Description of Artificial Sequence: Synthetic oligonucleotide
caagccuaaggcaggguau

SEQ ID NO: 2109082 - RNA, 19 nt, Artificial Sequence
  Description of Artificial Sequence: Synthetic oligonucleotide
cacauaaggggcucacuau

SEQ ID NO: 2109083 - RNA, 19 nt, Artificial Sequence
  Description of Artificial Sequence: Synthetic oligonucleotide
aggcccggaggccccgccg

SEQ ID NO: 2109084 - RNA, 19 nt, Artificial Sequence
  Description of Artificial Sequence: Synthetic oligonucleotide
ccuaaggcaggguauccga

SEQ ID NO: 2109085 - RNA, 19 nt, Artificial Sequence
  Description of Artificial Sequence: Synthetic oligonucleotide
ggcaggguauccgagguaa

SEQ ID NO: 2109086 - RNA, 19 nt, Artificial Sequence
  Description of Artificial Sequence: Synthetic oligonucleotide
caguaaaauguguuucauu

SEQ ID NO: 2109087 - RNA, 19 nt, Artificial Sequence
  Description of Artificial Sequence: Synthetic oligonucleotide
gcauugaaauaagaacgaa

SEQ ID NO: 2109088 - RNA, 19 nt, Artificial Sequence
  Description of Artificial Sequence: Synthetic oligonucleotide
cccaugaaauacuauuaua

SEQ ID NO: 2109089 - RNA, 19 nt, Artificial Sequence
  Description of Artificial Sequence: Synthetic oligonucleotide
cacgagccacagagugcgg

SEQ ID NO: 2109090 - RNA, 19 nt, Artificial Sequence
  Description of Artificial Sequence: Synthetic oligonucleotide
augagcuguguaguuugua

SEQ ID NO: 2109091 - RNA, 19 nt, Artificial Sequence
  Description of Artificial Sequence: Synthetic oligonucleotide
ggggcucacuauugaaauc

SEQ ID NO: 2109092 - RNA, 19 nt, Artificial Sequence
  Description of Artificial Sequence: Synthetic oligonucleotide
cggugacaaaacuuuagca

SEQ ID NO: 2109093 - RNA, 19 nt, Artificial Sequence
  Description of Artificial Sequence: Synthetic oligonucleotide
caggguauccgagguaaaa

SEQ ID NO: 2109094 - RNA, 19 nt, Artificial Sequence
  Description of Artificial Sequence: Synthetic oligonucleotide
cucccaguaaaauguguuu

SEQ ID NO: 2109095 - RNA, 19 nt, Artificial Sequence
  Description of Artificial Sequence: Synthetic oligonucleotide
gagugcggaggaggcccgg

SEQ ID NO: 2109096 - RNA, 19 nt, Artificial Sequence
  Description of Artificial Sequence: Synthetic oligonucleotide
ggcucccaauuccacaaaa

SEQ ID NO: 2109097 - RNA, 19 nt, Artificial Sequence
  Description of Artificial Sequence: Synthetic oligonucleotide
cuugggcgucuccucgcuc

SEQ ID NO: 2109098 - RNA, 19 nt, Artificial Sequence
  Description of Artificial Sequence: Synthetic oligonucleotide
gguccucacacuugggcgu

SEQ ID NO: 2109099 - RNA, 19 nt, Artificial Sequence
  Description of Artificial Sequence: Synthetic oligonucleotide
ccacauaaggggcucacua

SEQ ID NO: 2109100 - RNA, 19 nt, Artificial Sequence
  Description of Artificial Sequence: Synthetic oligonucleotide
gcuguaauccuuacaaauu

SEQ ID NO: 2109101 - RNA, 19 nt, Artificial Sequence
  Description of Artificial Sequence: Synthetic oligonucleotide
guucuugcguagcaucauu

SEQ ID NO: 2109102 - RNA, 19 nt, Artificial Sequence
  Description of Artificial Sequence: Synthetic oligonucleotide
agcaagccuaaggcagggu

SEQ ID NO: 2109103 - RNA, 19 nt, Artificial Sequence
  Description of Artificial Sequence: Synthetic oligonucleotide
gccccagugucccgcggcg

SEQ ID NO: 2109104 - RNA, 19 nt, Artificial Sequence
  Description of Artificial Sequence: Synthetic oligonucleotide
ucccgcggcgacggucacg

SEQ ID NO: 2109105 - RNA, 19 nt, Artificial Sequence
  Description of Artificial Sequence: Synthetic oligonucleotide
aggcaggguauccgaggua

SEQ ID NO: 2109106 - RNA, 19 nt, Artificial Sequence
  Description of Artificial Sequence: Synthetic oligonucleotide
agugcggaggaggcccgga

SEQ ID NO: 2109107 - RNA, 19 nt, Artificial Sequence
  Description of Artificial Sequence: Synthetic oligonucleotide
caugagcuguguaguuugu

SEQ ID NO: 2109108 - RNA, 19 nt, Artificial Sequence
  Description of Artificial Sequence: Synthetic oligonucleotide
guacaguuaacugguucuu

SEQ ID NO: 2109109 - RNA, 19 nt, Artificial Sequence
  Description of Artificial Sequence: Synthetic oligonucleotide
acggcgccagaggcagcgc

SEQ ID NO: 2109110 - RNA, 19 nt, Artificial Sequence
  Description of Artificial Sequence: Synthetic oligonucleotide
gugacauguaaaggacagu

SEQ ID NO: 2109111 - RNA, 19 nt, Artificial Sequence
  Description of Artificial Sequence: Synthetic oligonucleotide
gcucccgacggcgccagag

SEQ ID NO: 2109112 - RNA, 19 nt, Artificial Sequence
  Description of Artificial Sequence: Synthetic oligonucleotide
agcucccagccaucccaaa

SEQ ID NO: 2109113 - RNA, 19 nt, Artificial Sequence
  Description of Artificial Sequence: Synthetic oligonucleotide
ccgacggcgccagaggcag

SEQ ID NO: 2109114 - RNA, 19 nt, Artificial Sequence
  Description of Artificial Sequence: Synthetic oligonucleotide
cgcuguaauccuuacaaau

SEQ ID NO: 2109115 - RNA, 19 nt, Artificial Sequence
  Description of Artificial Sequence: Synthetic oligonucleotide
cauuaccgcuguaauccuu

SEQ ID NO: 2109116 - RNA, 19 nt, Artificial Sequence
  Description of Artificial Sequence: Synthetic oligonucleotide
cgucuccucgcucccgacg

SEQ ID NO: 2109117 - RNA, 19 nt, Artificial Sequence
  Description of Artificial Sequence: Synthetic oligonucleotide
agugucccgcggcgacggu

SEQ ID NO: 2109118 - RNA, 19 nt, Artificial Sequence
  Description of Artificial Sequence: Synthetic oligonucleotide
ggcgacggucacgagccac

SEQ ID NO: 2109119 - RNA, 19 nt, Artificial Sequence
  Description of Artificial Sequence: Synthetic oligonucleotide
gugucccgcggcgacgguc

SEQ ID NO: 2109120 - RNA, 19 nt, Artificial Sequence
  Description of Artificial Sequence: Synthetic oligonucleotide
guguuucauuaccgcugua

SEQ ID NO: 2109121 - RNA, 19 nt, Artificial Sequence
  Description of Artificial Sequence: Synthetic oligonucleotide
cgaaaucaauuaggcuccc

SEQ ID NO: 2109122 - RNA, 19 nt, Artificial Sequence
  Description of Artificial Sequence: Synthetic oligonucleotide
gcgacggucacgagccaca

SEQ ID NO: 2109123 - RNA, 19 nt, Artificial Sequence
  Description of Artificial Sequence: Synthetic oligonucleotide
ggccccgccgcuggggaag

SEQ ID NO: 2109124 - RNA, 19 nt, Artificial Sequence
  Description of Artificial Sequence: Synthetic oligonucleotide
ccgcuguaauccuuacaaa

SEQ ID NO: 2109125 - RNA, 19 nt, Artificial Sequence
  Description of Artificial Sequence: Synthetic oligonucleotide
cucgcucccgacggcgcca

SEQ ID NO: 2109126 - RNA, 19 nt, Artificial Sequence
  Description of Artificial Sequence: Synthetic oligonucleotide
gguucuugcguagcaucau

SEQ ID NO: 2109127 - RNA, 19 nt, Artificial Sequence
  Description of Artificial Sequence: Synthetic oligonucleotide
ccaguaaaauguguuucau

SEQ ID NO: 2109128 - RNA, 19 nt, Artificial Sequence
  Description of Artificial Sequence: Synthetic oligonucleotide
gcugucucauggagacaga

SEQ ID NO: 2109129 - RNA, 19 nt, Artificial Sequence
  Description of Artificial Sequence: Synthetic oligonucleotide
gccgcuggggaagccugac

SEQ ID NO: 2109130 - RNA, 19 nt, Artificial Sequence
  Description of Artificial Sequence: Synthetic oligonucleotide
cggcgccagaggcagcgcc

SEQ ID NO: 2109131 - RNA, 19 nt, Artificial Sequence
  Description of Artificial Sequence: Synthetic oligonucleotide
cccgacggcgccagaggca

SEQ ID NO: 2109132 - RNA, 19 nt, Artificial Sequence
  Description of Artificial Sequence: Synthetic oligonucleotide
ccacccugagguccucaca

SEQ ID NO: 2109133 - RNA, 19 nt, Artificial Sequence
  Description of Artificial Sequence: Synthetic oligonucleotide
gcaggguauccgagguaaa

SEQ ID NO: 2109134 - RNA, 19 nt, Artificial Sequence
  Description of Artificial Sequence: Synthetic oligonucleotide
ccaaaacaucauccagaau

SEQ ID NO: 2109135 - RNA, 19 nt, Artificial Sequence
  Description of Artificial Sequence: Synthetic oligonucleotide
gccccgccgcuggggaagc

SEQ ID NO: 2109136 - RNA, 19 nt, Artificial Sequence
  Description of Artificial Sequence: Synthetic oligonucleotide
cgccgcuggggaagccuga

SEQ ID NO: 2109137 - RNA, 19 nt, Artificial Sequence
  Description of Artificial Sequence: Synthetic oligonucleotide
cggucacgagccacagagu

SEQ ID NO: 2109138 - RNA, 19 nt, Artificial Sequence
  Description of Artificial Sequence: Synthetic oligonucleotide
cccgccgcuggggaagccu

SEQ ID NO: 2109139 - RNA, 19 nt, Artificial Sequence
  Description of Artificial Sequence: Synthetic oligonucleotide
cgcucccgacggcgccaga

SEQ ID NO: 2109140 - RNA, 19 nt, Artificial Sequence
  Description of Artificial Sequence: Synthetic oligonucleotide
aaugcaaucugguagcugc

SEQ ID NO: 2109141 - RNA, 19 nt, Artificial Sequence
  Description of Artificial Sequence: Synthetic oligonucleotide
auagcuacggcauagagaa

SEQ ID NO: 2109142 - RNA, 19 nt, Artificial Sequence
  Description of Artificial Sequence: Synthetic oligonucleotide
ucaauuucaaaccuucgca

SEQ ID NO: 2109143 - RNA, 19 nt, Artificial Sequence
  Description of Artificial Sequence: Synthetic oligonucleotide
aaugaucugguagcgaccc

SEQ ID NO: 2109144 - RNA, 19 nt, Artificial Sequence
  Description of Artificial Sequence: Synthetic oligonucleotide
agaaggaauggcuagcugg

SEQ ID NO: 2109145 - RNA, 19 nt, Artificial Sequence
  Description of Artificial Sequence: Synthetic oligonucleotide
gagucggaaaaucugacgg

SEQ ID NO: 2109146 - RNA, 19 nt, Artificial Sequence
  Description of Artificial Sequence: Synthetic oligonucleotide
accauuaaugaucugguag

SEQ ID NO: 2109147 - RNA, 19 nt, Artificial Sequence
  Description of Artificial Sequence: Synthetic oligonucleotide
caugaugacaggaagcugc

SEQ ID NO: 2109148 - RNA, 19 nt, Artificial Sequence
  Description of Artificial Sequence: Synthetic oligonucleotide
ugagcaaggcguaagacca

SEQ ID NO: 2109149 - RNA, 19 nt, Artificial Sequence
  Description of Artificial Sequence: Synthetic oligonucleotide
aaggcguaagaccaggguc

SEQ ID NO: 2109150 - RNA, 19 nt, Artificial Sequence
  Description of Artificial Sequence: Synthetic oligonucleotide
uacggcauagagaagguag

SEQ ID NO: 2109151 - RNA, 19 nt, Artificial Sequence
  Description of Artificial Sequence: Synthetic oligonucleotide
auuucaaaccuucgcagac

SEQ ID NO: 2109152 - RNA, 19 nt, Artificial Sequence
  Description of Artificial Sequence: Synthetic oligonucleotide
auuucauagcuccggaugg

SEQ ID NO: 2109153 - RNA, 19 nt, Artificial Sequence
  Description of Artificial Sequence: Synthetic oligonucleotide
aggugauagcgacagaagc

SEQ ID NO: 2109154 - RNA, 19 nt, Artificial Sequence
  Description of Artificial Sequence: Synthetic oligonucleotide
uggcucuucaccuugaaug

SEQ ID NO: 2109155 - RNA, 19 nt, Artificial Sequence
  Description of Artificial Sequence: Synthetic oligonucleotide
aauuucaaaccuucgcaga

SEQ ID NO: 2109156 - RNA, 19 nt, Artificial Sequence
  Description of Artificial Sequence: Synthetic oligonucleotide
agagaggccacaaagaaag

SEQ ID NO: 2109157 - RNA, 19 nt, Artificial Sequence
  Description of Artificial Sequence: Synthetic oligonucleotide
guauuugcagucuuggccc

SEQ ID NO: 2109158 - RNA, 19 nt, Artificial Sequence
  Description of Artificial Sequence: Synthetic oligonucleotide
caaugcagaacagagaggc

SEQ ID NO: 2109159 - RNA, 19 nt, Artificial Sequence
  Description of Artificial Sequence: Synthetic oligonucleotide
aaugaugaguucuggcuca

SEQ ID NO: 2109160 - RNA, 19 nt, Artificial Sequence
  Description of Artificial Sequence: Synthetic oligonucleotide
ucaggaccaaacauugggg

SEQ ID NO: 2109161 - RNA, 19 nt, Artificial Sequence
  Description of Artificial Sequence: Synthetic oligonucleotide
ugguacucaauuucaaacc

SEQ ID NO: 2109162 - RNA, 19 nt, Artificial Sequence
  Description of Artificial Sequence: Synthetic oligonucleotide
gaaaaucugacggagguac

SEQ ID NO: 2109163 - RNA, 19 nt, Artificial Sequence
  Description of Artificial Sequence: Synthetic oligonucleotide
ugaaugccgauguuggcgg

SEQ ID NO: 2109164 - RNA, 19 nt, Artificial Sequence
  Description of Artificial Sequence: Synthetic oligonucleotide
aaucugacggagguacucc

SEQ ID NO: 2109165 - RNA, 19 nt, Artificial Sequence
  Description of Artificial Sequence: Synthetic oligonucleotide
gacaagaaggaauggcuag

SEQ ID NO: 2109166 - RNA, 19 nt, Artificial Sequence
  Description of Artificial Sequence: Synthetic oligonucleotide
cuggugauuucauagcucc

SEQ ID NO: 2109167 - RNA, 19 nt, Artificial Sequence
  Description of Artificial Sequence: Synthetic oligonucleotide
agacuggugauuucauagc

SEQ ID NO: 2109168 - RNA, 19 nt, Artificial Sequence
  Description of Artificial Sequence: Synthetic oligonucleotide
uuggcggugggaaugauga

SEQ ID NO: 2109169 - RNA, 19 nt, Artificial Sequence
  Description of Artificial Sequence: Synthetic oligonucleotide
agcaguguccgguaacugc

SEQ ID NO: 2109170 - RNA, 19 nt, Artificial Sequence
  Description of Artificial Sequence: Synthetic oligonucleotide
aagaaagccaucaggagca

SEQ ID NO: 2109171 - RNA, 19 nt, Artificial Sequence
  Description of Artificial Sequence: Synthetic oligonucleotide
guagacauggcucuucacc

SEQ ID NO: 2109172 - RNA, 19 nt, Artificial Sequence
  Description of Artificial Sequence: Synthetic oligonucleotide
cucaauuucaaaccuucgc

SEQ ID NO: 2109173 - RNA, 19 nt, Artificial Sequence
  Description of Artificial Sequence: Synthetic oligonucleotide
caauuucaaaccuucgcag

SEQ ID NO: 2109174 - RNA, 19 nt, Artificial Sequence
  Description of Artificial Sequence: Synthetic oligonucleotide
ugccaaggaagucauuccg

SEQ ID NO: 2109175 - RNA, 19 nt, Artificial Sequence
  Description of Artificial Sequence: Synthetic oligonucleotide
cagaccauuaaugaucugg

SEQ ID NO: 2109176 - RNA, 19 nt, Artificial Sequence
  Description of Artificial Sequence: Synthetic oligonucleotide
cagacuggugauuucauag

SEQ ID NO: 2109177 - RNA, 19 nt, Artificial Sequence
  Description of Artificial Sequence: Synthetic oligonucleotide
cugguacucaauuucaaac

SEQ ID NO: 2109178 - RNA, 19 nt, Artificial Sequence
  Description of Artificial Sequence: Synthetic oligonucleotide
ugagucggaaaaucugacg

SEQ ID NO: 2109179 - RNA, 19 nt, Artificial Sequence
  Description of Artificial Sequence: Synthetic oligonucleotide
uacucaauuucaaaccuuc

SEQ ID NO: 2109180 - RNA, 19 nt, Artificial Sequence
  Description of Artificial Sequence: Synthetic oligonucleotide
agcuacggcauagagaagg

SEQ ID NO: 2109181 - RNA, 19 nt, Artificial Sequence
  Description of Artificial Sequence: Synthetic oligonucleotide
ugaaugaggcaucugucac

SEQ ID NO: 2109182 - RNA, 19 nt, Artificial Sequence
  Description of Artificial Sequence: Synthetic oligonucleotide
uauugcucagugcugacuc

SEQ ID NO: 2109183 - RNA, 19 nt, Artificial Sequence
  Description of Artificial Sequence: Synthetic oligonucleotide
aaaucugacggagguacuc

SEQ ID NO: 2109184 - RNA, 19 nt, Artificial Sequence
  Description of Artificial Sequence: Synthetic oligonucleotide
gagugcucggaccagacug

SEQ ID NO: 2109185 - RNA, 19 nt, Artificial Sequence
  Description of Artificial Sequence: Synthetic oligonucleotide
agggccuuucuccagguac

SEQ ID NO: 2109186 - RNA, 19 nt, Artificial Sequence
  Description of Artificial Sequence: Synthetic oligonucleotide
uucaaaccuucgcagacca

SEQ ID NO: 2109187 - RNA, 19 nt, Artificial Sequence
  Description of Artificial Sequence: Synthetic oligonucleotide
agcuauuugggucuguggu

SEQ ID NO: 2109188 - RNA, 19 nt, Artificial Sequence
  Description of Artificial Sequence: Synthetic oligonucleotide
gaaggaauggcuagcuggg

SEQ ID NO: 2109189 - RNA, 19 nt, Artificial Sequence
  Description of Artificial Sequence: Synthetic oligonucleotide
ucauagcuacggcauagag

SEQ ID NO: 2109190 - RNA, 19 nt, Artificial Sequence
  Description of Artificial Sequence: Synthetic oligonucleotide
guacucaucugucuugcgg

SEQ ID NO: 2109191 - RNA, 19 nt, Artificial Sequence
  Description of Artificial Sequence: Synthetic oligonucleotide
uagacauggcucuucaccu

SEQ ID NO: 2109192 - RNA, 19 nt, Artificial Sequence
  Description of Artificial Sequence: Synthetic oligonucleotide
ucgcagaccauuaaugauc

SEQ ID NO: 2109193 - RNA, 19 nt, Artificial Sequence
  Description of Artificial Sequence: Synthetic oligonucleotide
auuccgggagcacagagcu

SEQ ID NO: 2109194 - RNA, 19 nt, Artificial Sequence
  Description of Artificial Sequence: Synthetic oligonucleotide
uggucggcaggucagagcu

SEQ ID NO: 2109195 - RNA, 19 nt, Artificial Sequence
  Description of Artificial Sequence: Synthetic oligonucleotide
caugacaagaaggaauggc

SEQ ID NO: 2109196 - RNA, 19 nt, Artificial Sequence
  Description of Artificial Sequence: Synthetic oligonucleotide
ugucuugcggacacugucc

SEQ ID NO: 2109197 - RNA, 19 nt, Artificial Sequence
  Description of Artificial Sequence: Synthetic oligonucleotide
uaaggaugagcccuucuuc

SEQ ID NO: 2109198 - RNA, 19 nt, Artificial Sequence
  Description of Artificial Sequence: Synthetic oligonucleotide
uaaugaucugguagcgacc

SEQ ID NO: 2109199 - RNA, 19 nt, Artificial Sequence
  Description of Artificial Sequence: Synthetic oligonucleotide
ugacugugaaugccgaugu

SEQ ID NO: 2109200 - RNA, 19 nt, Artificial Sequence
  Description of Artificial Sequence: Synthetic oligonucleotide
aggcguaagaccagggucc

SEQ ID NO: 2109201 - RNA, 19 nt, Artificial Sequence
  Description of Artificial Sequence: Synthetic oligonucleotide
cugggcuucacugagucgg

SEQ ID NO: 2109202 - RNA, 19 nt, Artificial Sequence
  Description of Artificial Sequence: Synthetic oligonucleotide
gugaaugccgauguuggcg

SEQ ID NO: 2109203 - RNA, 19 nt, Artificial Sequence
  Description of Artificial Sequence: Synthetic oligonucleotide
uagagaagguagccgagga

SEQ ID NO: 2109204 - RNA, 19 nt, Artificial Sequence
  Description of Artificial Sequence: Synthetic oligonucleotide
uagccgaggaucaggagca

SEQ ID NO: 2109205 - RNA, 19 nt, Artificial Sequence
  Description of Artificial Sequence: Synthetic oligonucleotide
cauuaaugaucugguagcg

SEQ ID NO: 2109206 - RNA, 19 nt, Artificial Sequence
  Description of Artificial Sequence: Synthetic oligonucleotide
uggccugcaaaucuguggu

SEQ ID NO: 2109207 - RNA, 19 nt, Artificial Sequence
  Description of Artificial Sequence: Synthetic oligonucleotide
uuuccauucucaucccgug

SEQ ID NO: 2109208 - RNA, 19 nt, Artificial Sequence
  Description of Artificial Sequence: Synthetic oligonucleotide
aaugaggcaucugucacaa

SEQ ID NO: 2109209 - RNA, 19 nt, Artificial Sequence
  Description of Artificial Sequence: Synthetic oligonucleotide
ugucauagcuacggcauag

SEQ ID NO: 2109210 - RNA, 19 nt, Artificial Sequence
  Description of Artificial Sequence: Synthetic oligonucleotide
ugacccaucucauccaggu

SEQ ID NO: 2109211 - RNA, 19 nt, Artificial Sequence
  Description of Artificial Sequence: Synthetic oligonucleotide
gaggcaucugucacaaccg

SEQ ID NO: 2109212 - RNA, 19 nt, Artificial Sequence
  Description of Artificial Sequence: Synthetic oligonucleotide
cccaaugcagaacagagag

SEQ ID NO: 2109213 - RNA, 19 nt, Artificial Sequence
  Description of Artificial Sequence: Synthetic oligonucleotide
acuucaggaccaaacauug

SEQ ID NO: 2109214 - RNA, 19 nt, Artificial Sequence
  Description of Artificial Sequence: Synthetic oligonucleotide
gaagcugccaaggaaguca

SEQ ID NO: 2109215 - RNA, 19 nt, Artificial Sequence
  Description of Artificial Sequence: Synthetic oligonucleotide
agugagcagugucauagcu

SEQ ID NO: 2109216 - RNA, 19 nt, Artificial Sequence
  Description of Artificial Sequence: Synthetic oligonucleotide
auagagaagguagccgagg

SEQ ID NO: 2109217 - RNA, 19 nt, Artificial Sequence
  Description of Artificial Sequence: Synthetic oligonucleotide
augacaagaaggaauggcu

SEQ ID NO: 2109218 - RNA, 19 nt, Artificial Sequence
  Description of Artificial Sequence: Synthetic oligonucleotide
gcauacugaucagagaugg

SEQ ID NO: 2109219 - RNA, 19 nt, Artificial Sequence
  Description of Artificial Sequence: Synthetic oligonucleotide
gagaagguagccgaggauc

SEQ ID NO: 2109220 - RNA, 19 nt, Artificial Sequence
  Description of Artificial Sequence: Synthetic oligonucleotide
uggugauuucauagcuccg

SEQ ID NO: 2109221 - RNA, 19 nt, Artificial Sequence
  Description of Artificial Sequence: Synthetic oligonucleotide
ugucuauugcucagugcug

SEQ ID NO: 2109222 - RNA, 19 nt, Artificial Sequence
  Description of Artificial Sequence: Synthetic oligonucleotide
uccagggccuuucuccagg

SEQ ID NO: 2109223 - RNA, 19 nt, Artificial Sequence
  Description of Artificial Sequence: Synthetic oligonucleotide
guaacugcccaggaaacgc

SEQ ID NO: 2109224 - RNA, 19 nt, Artificial Sequence
  Description of Artificial Sequence: Synthetic oligonucleotide
acucggugaggugauagcg

SEQ ID NO: 2109225 - RNA, 19 nt, Artificial Sequence
  Description of Artificial Sequence: Synthetic oligonucleotide
aggaccaaacauuggggug

SEQ ID NO: 2109226 - RNA, 19 nt, Artificial Sequence
  Description of Artificial Sequence: Synthetic oligonucleotide
ugauagcgacagaagcugc

SEQ ID NO: 2109227 - RNA, 19 nt, Artificial Sequence
  Description of Artificial Sequence: Synthetic oligonucleotide
cauagagaagguagccgag

SEQ ID NO: 2109228 - RNA, 19 nt, Artificial Sequence
  Description of Artificial Sequence: Synthetic oligonucleotide
acagccggaagagugcucg

SEQ ID NO: 2109229 - RNA, 19 nt, Artificial Sequence
  Description of Artificial Sequence: Synthetic oligonucleotide
gugauagcgacagaagcug

SEQ ID NO: 2109230 - RNA, 19 nt, Artificial Sequence
  Description of Artificial Sequence: Synthetic oligonucleotide
ucugugguugauggcagag

SEQ ID NO: 2109231 - RNA, 19 nt, Artificial Sequence
  Description of Artificial Sequence: Synthetic oligonucleotide
auggucggcaggucagagc

SEQ ID NO: 2109232 - RNA, 19 nt, Artificial Sequence
  Description of Artificial Sequence: Synthetic oligonucleotide
cuccgcauacugaucagag

SEQ ID NO: 2109233 - RNA, 19 nt, Artificial Sequence
  Description of Artificial Sequence: Synthetic oligonucleotide
ucugacggagguacuccag

SEQ ID NO: 2109234 - RNA, 19 nt, Artificial Sequence
  Description of Artificial Sequence: Synthetic oligonucleotide
uucgcagaccauuaaugau

SEQ ID NO: 2109235 - RNA, 19 nt, Artificial Sequence
  Description of Artificial Sequence: Synthetic oligonucleotide
aagucauuccgggagcaca

SEQ ID NO: 2109236 - RNA, 19 nt, Artificial Sequence
  Description of Artificial Sequence: Synthetic oligonucleotide
acggcauagagaagguagc

SEQ ID NO: 2109237 - RNA, 19 nt, Artificial Sequence
  Description of Artificial Sequence: Synthetic oligonucleotide
gauagcgacagaagcugcc

SEQ ID NO: 2109238 - RNA, 19 nt, Artificial Sequence
  Description of Artificial Sequence: Synthetic oligonucleotide
cauagcuacggcauagaga

SEQ ID NO: 2109239 - RNA, 19 nt, Artificial Sequence
  Description of Artificial Sequence: Synthetic oligonucleotide
ucccgugaguuccccaggg

SEQ ID NO: 2109240 - RNA, 19 nt, Artificial Sequence
  Description of Artificial Sequence: Synthetic oligonucleotide
uguaaggaugagcccuucu

SEQ ID NO: 2109241 - RNA, 19 nt, Artificial Sequence
  Description of Artificial Sequence: Synthetic oligonucleotide
uguccgguaacugcccagg

SEQ ID NO: 2109242 - RNA, 19 nt, Artificial Sequence
  Description of Artificial Sequence: Synthetic oligonucleotide
ugugaaugccgauguuggc

SEQ ID NO: 2109243 - RNA, 19 nt, Artificial Sequence
  Description of Artificial Sequence: Synthetic oligonucleotide
cuucgcagaccauuaauga

SEQ ID NO: 2109244 - RNA, 19 nt, Artificial Sequence
  Description of Artificial Sequence: Synthetic oligonucleotide
agauggacuuggcagucug

SEQ ID NO: 2109245 - RNA, 19 nt, Artificial Sequence
  Description of Artificial Sequence: Synthetic oligonucleotide
ugcagaacagagaggccac

SEQ ID NO: 2109246 - RNA, 19 nt, Artificial Sequence
  Description of Artificial Sequence: Synthetic oligonucleotide
ucggugaggugauagcgac

SEQ ID NO: 2109247 - RNA, 19 nt, Artificial Sequence
  Description of Artificial Sequence: Synthetic oligonucleotide
cuucaggaccaaacauugg

SEQ ID NO: 2109248 - RNA, 19 nt, Artificial Sequence
  Description of Artificial Sequence: Synthetic oligonucleotide
gaaacgcaggcugagccug

SEQ ID NO: 2109249 - RNA, 19 nt, Artificial Sequence
  Description of Artificial Sequence: Synthetic oligonucleotide
aagagugcucggaccagac

SEQ ID NO: 2109250 - RNA, 19 nt, Artificial Sequence
  Description of Artificial Sequence: Synthetic oligonucleotide
agcgacagaagcugccaag

SEQ ID NO: 2109251 - RNA, 19 nt, Artificial Sequence
  Description of Artificial Sequence: Synthetic oligonucleotide
cauagcuccggaugggcug

SEQ ID NO: 2109252 - RNA, 19 nt, Artificial Sequence
  Description of Artificial Sequence: Synthetic oligonucleotide
cauuccgggagcacagagc

SEQ ID NO: 2109253 - RNA, 19 nt, Artificial Sequence
  Description of Artificial Sequence: Synthetic oligonucleotide
gaaugaggcaucugucaca

SEQ ID NO: 2109254 - RNA, 19 nt, Artificial Sequence
  Description of Artificial Sequence: Synthetic oligonucleotide
agucggaaaaucugacgga

SEQ ID NO: 2109255 - RNA, 19 nt, Artificial Sequence
  Description of Artificial Sequence: Synthetic oligonucleotide
auagcuccggaugggcugc

SEQ ID NO: 2109256 - RNA, 19 nt, Artificial Sequence
  Description of Artificial Sequence: Synthetic oligonucleotide
ucauagcuccggaugggcu

SEQ ID NO: 2109257 - RNA, 19 nt, Artificial Sequence
  Description of Artificial Sequence: Synthetic oligonucleotide
ugcaaaucugugguugaug

SEQ ID NO: 2109258 - RNA, 19 nt, Artificial Sequence
  Description of Artificial Sequence: Synthetic oligonucleotide
cugccaaggaagucauucc

SEQ ID NO: 2109259 - RNA, 19 nt, Artificial Sequence
  Description of Artificial Sequence: Synthetic oligonucleotide
cagucuuggcccuccaggc

SEQ ID NO: 2109260 - RNA, 19 nt, Artificial Sequence
  Description of Artificial Sequence: Synthetic oligonucleotide
aagcccagccaugacaaga

SEQ ID NO: 2109261 - RNA, 19 nt, Artificial Sequence
  Description of Artificial Sequence: Synthetic oligonucleotide
acucaauuucaaaccuucg

SEQ ID NO: 2109262 - RNA, 19 nt, Artificial Sequence
  Description of Artificial Sequence: Synthetic oligonucleotide
acugagucggaaaaucuga

SEQ ID NO: 2109263 - RNA, 19 nt, Artificial Sequence
  Description of Artificial Sequence: Synthetic oligonucleotide
aggucauugccuggguagc

SEQ ID NO: 2109264 - RNA, 19 nt, Artificial Sequence
  Description of Artificial Sequence: Synthetic oligonucleotide
uaagaccaggguccggacu

SEQ ID NO: 2109265 - RNA, 19 nt, Artificial Sequence
  Description of Artificial Sequence: Synthetic oligonucleotide
gaggugauagcgacagaag

SEQ ID NO: 2109266 - RNA, 19 nt, Artificial Sequence
  Description of Artificial Sequence: Synthetic oligonucleotide
agugucauagcuacggcau

SEQ ID NO: 2109267 - RNA, 19 nt, Artificial Sequence
  Description of Artificial Sequence: Synthetic oligonucleotide
acuggugauuucauagcuc

SEQ ID NO: 2109268 - RNA, 19 nt, Artificial Sequence
  Description of Artificial Sequence: Synthetic oligonucleotide
ucaccuugaaugaggcauc

SEQ ID NO: 2109269 - RNA, 19 nt, Artificial Sequence
  Description of Artificial Sequence: Synthetic oligonucleotide
caucccgugaguuccccag

SEQ ID NO: 2109270 - RNA, 19 nt, Artificial Sequence
  Description of Artificial Sequence: Synthetic oligonucleotide
gugacugugaaugccgaug

SEQ ID NO: 2109271 - RNA, 19 nt, Artificial Sequence
  Description of Artificial Sequence: Synthetic oligonucleotide
aggggcccaaugcagaaca

SEQ ID NO: 2109272 - RNA, 19 nt, Artificial Sequence
  Description of Artificial Sequence: Synthetic oligonucleotide
agaccauuaaugaucuggu

SEQ ID NO: 2109273 - RNA, 19 nt, Artificial Sequence
  Description of Artificial Sequence: Synthetic oligonucleotide
agagauggacuuggcaguc

SEQ ID NO: 2109274 - RNA, 19 nt, Artificial Sequence
  Description of Artificial Sequence: Synthetic oligonucleotide
ugcugacucggugagguga

SEQ ID NO: 2109275 - RNA, 19 nt, Artificial Sequence
  Description of Artificial Sequence: Synthetic oligonucleotide
ugauuucauagcuccggau

SEQ ID NO: 2109276 - RNA, 19 nt, Artificial Sequence
  Description of Artificial Sequence: Synthetic oligonucleotide
auuaaugaucugguagcga

SEQ ID NO: 2109277 - RNA, 19 nt, Artificial Sequence
  Description of Artificial Sequence: Synthetic oligonucleotide
uucauagcuccggaugggc

SEQ ID NO: 2109278 - RNA, 19 nt, Artificial Sequence
  Description of Artificial Sequence: Synthetic oligonucleotide
agcaggugucuauugcuca

SEQ ID NO: 2109279 - RNA, 19 nt, Artificial Sequence
  Description of Artificial Sequence: Synthetic oligonucleotide
cagcuauuugggucugugg

SEQ ID NO: 2109280 - RNA, 19 nt, Artificial Sequence
  Description of Artificial Sequence: Synthetic oligonucleotide
gcagucuuggcccuccagg

SEQ ID NO: 2109281 - RNA, 19 nt, Artificial Sequence
  Description of Artificial Sequence: Synthetic oligonucleotide
gacucggugaggugauagc

SEQ ID NO: 2109282 - RNA, 19 nt, Artificial Sequence
  Description of Artificial Sequence: Synthetic oligonucleotide
gcggacacuguccugaccc

SEQ ID NO: 2109283 - RNA, 19 nt, Artificial Sequence
  Description of Artificial Sequence: Synthetic oligonucleotide
aggguccggacuucaggac

SEQ ID NO: 2109284 - RNA, 19 nt, Artificial Sequence
  Description of Artificial Sequence: Synthetic oligonucleotide
agcaaggcguaagaccagg

SEQ ID NO: 2109285 - RNA, 19 nt, Artificial Sequence
  Description of Artificial Sequence: Synthetic oligonucleotide
gucggcaggucagagcugg

SEQ ID NO: 2109286 - RNA, 19 nt, Artificial Sequence
  Description of Artificial Sequence: Synthetic oligonucleotide
uccgcauacugaucagaga

SEQ ID NO: 2109287 - RNA, 19 nt, Artificial Sequence
  Description of Artificial Sequence: Synthetic oligonucleotide
gcauagagaagguagccga

SEQ ID NO: 2109288 - RNA, 19 nt, Artificial Sequence
  Description of Artificial Sequence: Synthetic oligonucleotide
guagcagcuauuugggucu

SEQ ID NO: 2109289 - RNA, 19 nt, Artificial Sequence
  Description of Artificial Sequence: Synthetic oligonucleotide
ucuauugcucagugcugac

SEQ ID NO: 2109290 - RNA, 19 nt, Artificial Sequence
  Description of Artificial Sequence: Synthetic oligonucleotide
uauuugcagucuuggcccu

SEQ ID NO: 2109291 - RNA, 19 nt, Artificial Sequence
  Description of Artificial Sequence: Synthetic oligonucleotide
ugggcucuccgcauacuga

SEQ ID NO: 2109292 - RNA, 19 nt, Artificial Sequence
  Description of Artificial Sequence: Synthetic oligonucleotide
aaugccgauguuggcggug

SEQ ID NO: 2109293 - RNA, 19 nt, Artificial Sequence
  Description of Artificial Sequence: Synthetic oligonucleotide
gacuggugauuucauagcu

SEQ ID NO: 2109294 - RNA, 19 nt, Artificial Sequence
  Description of Artificial Sequence: Synthetic oligonucleotide
uauuugggucuguggugcc

SEQ ID NO: 2109295 - RNA, 19 nt, Artificial Sequence
  Description of Artificial Sequence: Synthetic oligonucleotide
caucuggccugcaaaucug

SEQ ID NO: 2109296 - RNA, 19 nt, Artificial Sequence
  Description of Artificial Sequence: Synthetic oligonucleotide
agccaugacaagaaggaau

SEQ ID NO: 2109297 - RNA, 19 nt, Artificial Sequence
  Description of Artificial Sequence: Synthetic oligonucleotide
ugcagucuuggcccuccag

SEQ ID NO: 2109298 - RNA, 19 nt, Artificial Sequence
  Description of Artificial Sequence: Synthetic oligonucleotide
aaaaucugacggagguacu

SEQ ID NO: 2109299 - RNA, 19 nt, Artificial Sequence
  Description of Artificial Sequence: Synthetic oligonucleotide
agaagcugccaaggaaguc

SEQ ID NO: 2109300 - RNA, 19 nt, Artificial Sequence
  Description of Artificial Sequence: Synthetic oligonucleotide
agucauuccgggagcacag

SEQ ID NO: 2109301 - RNA, 19 nt, Artificial Sequence
  Description of Artificial Sequence: Synthetic oligonucleotide
uccgguaacugcccaggaa

SEQ ID NO: 2109302 - RNA, 19 nt, Artificial Sequence
  Description of Artificial Sequence: Synthetic oligonucleotide
gccaugacaagaaggaaug

SEQ ID NO: 2109303 - RNA, 19 nt, Artificial Sequence
  Description of Artificial Sequence: Synthetic oligonucleotide
agaagguagccgaggauca

SEQ ID NO: 2109304 - RNA, 19 nt, Artificial Sequence
  Description of Artificial Sequence: Synthetic oligonucleotide
cccagccaugacaagaagg

SEQ ID NO: 2109305 - RNA, 19 nt, Artificial Sequence
  Description of Artificial Sequence: Synthetic oligonucleotide
agcugggcucuccgcauac

SEQ ID NO: 2109306 - RNA, 19 nt, Artificial Sequence
  Description of Artificial Sequence: Synthetic oligonucleotide
agcugagcaaggcguaaga

SEQ ID NO: 2109307 - RNA, 19 nt, Artificial Sequence
  Description of Artificial Sequence: Synthetic oligonucleotide
ugcuggugacugugaaugc

SEQ ID NO: 2109308 - RNA, 19 nt, Artificial Sequence
  Description of Artificial Sequence: Synthetic oligonucleotide
ccuucgcagaccauuaaug

SEQ ID NO: 2109309 - RNA, 19 nt, Artificial Sequence
  Description of Artificial Sequence: Synthetic oligonucleotide
ccgaggaucaggagcaagg

SEQ ID NO: 2109310 - RNA, 19 nt, Artificial Sequence
  Description of Artificial Sequence: Synthetic oligonucleotide
agugcucggaccagacugg

SEQ ID NO: 2109311 - RNA, 19 nt, Artificial Sequence
  Description of Artificial Sequence: Synthetic oligonucleotide
gguaacugcccaggaaacg

SEQ ID NO: 2109312 - RNA, 19 nt, Artificial Sequence
  Description of Artificial Sequence: Synthetic oligonucleotide
ggagcaaggagcagggcag

SEQ ID NO: 2109313 - RNA, 19 nt, Artificial Sequence
  Description of Artificial Sequence: Synthetic oligonucleotide
gauggucggcaggucagag

SEQ ID NO: 2109314 - RNA, 19 nt, Artificial Sequence
  Description of Artificial Sequence: Synthetic oligonucleotide
accuucgcagaccauuaau

SEQ ID NO: 2109315 - RNA, 19 nt, Artificial Sequence
  Description of Artificial Sequence: Synthetic oligonucleotide
aucugacggagguacucca

SEQ ID NO: 2109316 - RNA, 19 nt, Artificial Sequence
  Description of Artificial Sequence: Synthetic oligonucleotide
uugccuggguagcagcuau

SEQ ID NO: 2109317 - RNA, 19 nt, Artificial Sequence
  Description of Artificial Sequence: Synthetic oligonucleotide
cagugucauagcuacggca

SEQ ID NO: 2109318 - RNA, 19 nt, Artificial Sequence
  Description of Artificial Sequence: Synthetic oligonucleotide
cuugcggacacuguccuga

SEQ ID NO: 2109319 - RNA, 19 nt, Artificial Sequence
  Description of Artificial Sequence: Synthetic oligonucleotide
aaaccuucgcagaccauua

SEQ ID NO: 2109320 - RNA, 19 nt, Artificial Sequence
  Description of Artificial Sequence: Synthetic oligonucleotide
auagcgacagaagcugcca

SEQ ID NO: 2109321 - RNA, 19 nt, Artificial Sequence
  Description of Artificial Sequence: Synthetic oligonucleotide
gaccagacuggugauuuca

SEQ ID NO: 2109322 - RNA, 19 nt, Artificial Sequence
  Description of Artificial Sequence: Synthetic oligonucleotide
aaccuucgcagaccauuaa

SEQ ID NO: 2109323 - RNA, 19 nt, Artificial Sequence
  Description of Artificial Sequence: Synthetic oligonucleotide
ugccaaagcccagccauga

SEQ ID NO: 2109324 - RNA, 19 nt, Artificial Sequence
  Description of Artificial Sequence: Synthetic oligonucleotide
aucccgugaguuccccagg

SEQ ID NO: 2109325 - RNA, 19 nt, Artificial Sequence
  Description of Artificial Sequence: Synthetic oligonucleotide
aguugggccagcugggcuu

SEQ ID NO: 2109326 - RNA, 19 nt, Artificial Sequence
  Description of Artificial Sequence: Synthetic oligonucleotide
gucuauugcucagugcuga

SEQ ID NO: 2109327 - RNA, 19 nt, Artificial Sequence
  Description of Artificial Sequence: Synthetic oligonucleotide
uguccugacccaucucauc

SEQ ID NO: 2109328 - RNA, 19 nt, Artificial Sequence
  Description of Artificial Sequence: Synthetic oligonucleotide
caggagagauggucggcag

SEQ ID NO: 2109329 - RNA, 19 nt, Artificial Sequence
  Description of Artificial Sequence: Synthetic oligonucleotide
aggacuggucaccggccuc

SEQ ID NO: 2109330 - RNA, 19 nt, Artificial Sequence
  Description of Artificial Sequence: Synthetic oligonucleotide
gugggaaugaugaguucug

SEQ ID NO: 2109331 - RNA, 19 nt, Artificial Sequence
  Description of Artificial Sequence: Synthetic oligonucleotide
ugccaucuggccugcaaau

SEQ ID NO: 2109332 - RNA, 19 nt, Artificial Sequence
  Description of Artificial Sequence: Synthetic oligonucleotide
aaucugguagcugcugcuu

SEQ ID NO: 2109333 - RNA, 19 nt, Artificial Sequence
  Description of Artificial Sequence: Synthetic oligonucleotide
gaguuccccagggcaagcg

SEQ ID NO: 2109334 - RNA, 19 nt, Artificial Sequence
  Description of Artificial Sequence: Synthetic oligonucleotide
cugguagcgacccaggggu

SEQ ID NO: 2109335 - RNA, 19 nt, Artificial Sequence
  Description of Artificial Sequence: Synthetic oligonucleotide
aacgcaggcugagccuggg

SEQ ID NO: 2109336 - RNA, 19 nt, Artificial Sequence
  Description of Artificial Sequence: Synthetic oligonucleotide
augccgauguuggcggugg

SEQ ID NO: 2109337 - RNA, 19 nt, Artificial Sequence
  Description of Artificial Sequence: Synthetic oligonucleotide
ggaugagcccuucuucccc

SEQ ID NO: 2109338 - RNA, 19 nt, Artificial Sequence
  Description of Artificial Sequence: Synthetic oligonucleotide
gucauugccuggguagcag

SEQ ID NO: 2109339 - RNA, 19 nt, Artificial Sequence
  Description of Artificial Sequence: Synthetic oligonucleotide
cugggcucuccgcauacug

SEQ ID NO: 2109340 - RNA, 19 nt, Artificial Sequence
  Description of Artificial Sequence: Synthetic oligonucleotide
gcucggaccagacugguga

SEQ ID NO: 2109341 - RNA, 19 nt, Artificial Sequence
  Description of Artificial Sequence: Synthetic oligonucleotide
aaacgcaggcugagccugg

SEQ ID NO: 2109342 - RNA, 19 nt, Artificial Sequence
  Description of Artificial Sequence: Synthetic oligonucleotide
uagcgacagaagcugccaa

SEQ ID NO: 2109343 - RNA, 19 nt, Artificial Sequence
  Description of Artificial Sequence: Synthetic oligonucleotide
ugggguguauuugcagucu

SEQ ID NO: 2109344 - RNA, 19 nt, Artificial Sequence
  Description of Artificial Sequence: Synthetic oligonucleotide
aguguccgguaacugccca

SEQ ID NO: 2109345 - RNA, 19 nt, Artificial Sequence
  Description of Artificial Sequence: Synthetic oligonucleotide
gcaagcgugaguugggcca

SEQ ID NO: 2109346 - RNA, 19 nt, Artificial Sequence
  Description of Artificial Sequence: Synthetic oligonucleotide
aguuccccagggcaagcgu

SEQ ID NO: 2109347 - RNA, 19 nt, Artificial Sequence
  Description of Artificial Sequence: Synthetic oligonucleotide
ggcucuucaccuugaauga

SEQ ID NO: 2109348 - RNA, 19 nt, Artificial Sequence
  Description of Artificial Sequence: Synthetic oligonucleotide
agagugcucggaccagacu

SEQ ID NO: 2109349 - RNA, 19 nt, Artificial Sequence
  Description of Artificial Sequence: Synthetic oligonucleotide
gguacucaucugucuugcg

SEQ ID NO: 2109350 - RNA, 19 nt, Artificial Sequence
  Description of Artificial Sequence: Synthetic oligonucleotide
cuuuccauucucaucccgu

SEQ ID NO: 2109351 - RNA, 19 nt, Artificial Sequence
  Description of Artificial Sequence: Synthetic oligonucleotide
ucuugcggacacuguccug

SEQ ID NO: 2109352 - RNA, 19 nt, Artificial Sequence
  Description of Artificial Sequence: Synthetic oligonucleotide
gccaaggaagucauuccgg

SEQ ID NO: 2109353 - RNA, 19 nt, Artificial Sequence
  Description of Artificial Sequence: Synthetic oligonucleotide
caggguccggacuucagga

SEQ ID NO: 2109354 - RNA, 19 nt, Artificial Sequence
  Description of Artificial Sequence: Synthetic oligonucleotide
gaccauuaaugaucuggua

SEQ ID NO: 2109355 - RNA, 19 nt, Artificial Sequence
  Description of Artificial Sequence: Synthetic oligonucleotide
aagcgugaguugggccagc

SEQ ID NO: 2109356 - RNA, 19 nt, Artificial Sequence
  Description of Artificial Sequence: Synthetic oligonucleotide
ugcggacacuguccugacc

SEQ ID NO: 2109357 - RNA, 19 nt, Artificial Sequence
  Description of Artificial Sequence: Synthetic oligonucleotide
caaacauugggguguauuu

SEQ ID NO: 2109358 - RNA, 19 nt, Artificial Sequence
  Description of Artificial Sequence: Synthetic oligonucleotide
uccaggucauugccugggu

SEQ ID NO: 2109359 - RNA, 19 nt, Artificial Sequence
  Description of Artificial Sequence: Synthetic oligonucleotide
agucugaccaggagagaug

SEQ ID NO: 2109360 - RNA, 19 nt, Artificial Sequence
  Description of Artificial Sequence: Synthetic oligonucleotide
gcaggugucuauugcucag

SEQ ID NO: 2109361 - RNA, 19 nt, Artificial Sequence
  Description of Artificial Sequence: Synthetic oligonucleotide
gcucuccgcauacugauca

SEQ ID NO: 2109362 - RNA, 19 nt, Artificial Sequence
  Description of Artificial Sequence: Synthetic oligonucleotide
cucggugaggugauagcga

SEQ ID NO: 2109363 - RNA, 19 nt, Artificial Sequence
  Description of Artificial Sequence: Synthetic oligonucleotide
ugggcuucacugagucgga

SEQ ID NO: 2109364 - RNA, 19 nt, Artificial Sequence
  Description of Artificial Sequence: Synthetic oligonucleotide
guaagaccaggguccggac

SEQ ID NO: 2109365 - RNA, 19 nt, Artificial Sequence
  Description of Artificial Sequence: Synthetic oligonucleotide
cucuccgcauacugaucag

SEQ ID NO: 2109366 - RNA, 19 nt, Artificial Sequence
  Description of Artificial Sequence: Synthetic oligonucleotide
ugcucggaccagacuggug

SEQ ID NO: 2109367 - RNA, 19 nt, Artificial Sequence
  Description of Artificial Sequence: Synthetic oligonucleotide
guguccgguaacugcccag

SEQ ID NO: 2109368 - RNA, 19 nt, Artificial Sequence
  Description of Artificial Sequence: Synthetic oligonucleotide
augaugacaggaagcugcu

SEQ ID NO: 2109369 - RNA, 19 nt, Artificial Sequence
  Description of Artificial Sequence: Synthetic oligonucleotide
ggguccggacuucaggacc

SEQ ID NO: 2109370 - RNA, 19 nt, Artificial Sequence
  Description of Artificial Sequence: Synthetic oligonucleotide
gaagucauuccgggagcac

SEQ ID NO: 2109371 - RNA, 19 nt, Artificial Sequence
  Description of Artificial Sequence: Synthetic oligonucleotide
cuguagacauggcucuuca

SEQ ID NO: 2109372 - RNA, 19 nt, Artificial Sequence
  Description of Artificial Sequence: Synthetic oligonucleotide
ucaucccgugaguucccca

SEQ ID NO: 2109373 - RNA, 19 nt, Artificial Sequence
  Description of Artificial Sequence: Synthetic oligonucleotide
cagagaggccacaaagaaa

SEQ ID NO: 2109374 - RNA, 19 nt, Artificial Sequence
  Description of Artificial Sequence: Synthetic oligonucleotide
aucugguagcugcugcuuu

SEQ ID NO: 2109375 - RNA, 19 nt, Artificial Sequence
  Description of Artificial Sequence: Synthetic oligonucleotide
gcuucacugagucggaaaa

SEQ ID NO: 2109376 - RNA, 19 nt, Artificial Sequence
  Description of Artificial Sequence: Synthetic oligonucleotide
aucugugguugauggcaga

SEQ ID NO: 2109377 - RNA, 19 nt, Artificial Sequence
  Description of Artificial Sequence: Synthetic oligonucleotide
uagcuacggcauagagaag

SEQ ID NO: 2109378 - RNA, 19 nt, Artificial Sequence
  Description of Artificial Sequence: Synthetic oligonucleotide
gaucaggagcaaggagcag

SEQ ID NO: 2109379 - RNA, 19 nt, Artificial Sequence
  Description of Artificial Sequence: Synthetic oligonucleotide
guuggcggugggaaugaug

SEQ ID NO: 2109380 - RNA, 19 nt, Artificial Sequence
  Description of Artificial Sequence: Synthetic oligonucleotide
ugccgauguuggcgguggg

SEQ ID NO: 2109381 - RNA, 19 nt, Artificial Sequence
  Description of Artificial Sequence: Synthetic oligonucleotide
ugagcugagcaaggcguaa

SEQ ID NO: 2109382 - RNA, 19 nt, Artificial Sequence
  Description of Artificial Sequence: Synthetic oligonucleotide
ucaaaccuucgcagaccau

SEQ ID NO: 2109383 - RNA, 19 nt, Artificial Sequence
  Description of Artificial Sequence: Synthetic oligonucleotide
ggaucaggagcaaggagca

SEQ ID NO: 2109384 - RNA, 19 nt, Artificial Sequence
  Description of Artificial Sequence: Synthetic oligonucleotide
agacauggcucuucaccuu

SEQ ID NO: 2109385 - RNA, 19 nt, Artificial Sequence
  Description of Artificial Sequence: Synthetic oligonucleotide
ugaguuccccagggcaagc

SEQ ID NO: 2109386 - RNA, 19 nt, Artificial Sequence
  Description of Artificial Sequence: Synthetic oligonucleotide
ugguagcgacccaggggug

SEQ ID NO: 2109387 - RNA, 19 nt, Artificial Sequence
  Description of Artificial Sequence: Synthetic oligonucleotide
gagcaggagcaguguccgg

SEQ ID NO: 2109388 - RNA, 19 nt, Artificial Sequence
  Description of Artificial Sequence: Synthetic oligonucleotide
ccggacuucaggaccaaac

SEQ ID NO: 2109389 - RNA, 19 nt, Artificial Sequence
  Description of Artificial Sequence: Synthetic oligonucleotide
agcugcuggugacugugaa

SEQ ID NO: 2109390 - RNA, 19 nt, Artificial Sequence
  Description of Artificial Sequence: Synthetic oligonucleotide
uggcggugggaaugaugag

SEQ ID NO: 2109391 - RNA, 19 nt, Artificial Sequence
  Description of Artificial Sequence: Synthetic oligonucleotide
gccugcaaaucugugguug

SEQ ID NO: 2109392 - RNA, 19 nt, Artificial Sequence
  Description of Artificial Sequence: Synthetic oligonucleotide
gagcagugucauagcuacg

SEQ ID NO: 2109393 - RNA, 19 nt, Artificial Sequence
  Description of Artificial Sequence: Synthetic oligonucleotide
agaaagccaucaggagcag

SEQ ID NO: 2109394 - RNA, 19 nt, Artificial Sequence
  Description of Artificial Sequence: Synthetic oligonucleotide
auuugggucuguggugcca

SEQ ID NO: 2109395 - RNA, 19 nt, Artificial Sequence
  Description of Artificial Sequence: Synthetic oligonucleotide
gagcaaggcguaagaccag

SEQ ID NO: 2109396 - RNA, 19 nt, Artificial Sequence
  Description of Artificial Sequence: Synthetic oligonucleotide
gacccaucucauccagguc

SEQ ID NO: 2109397 - RNA, 19 nt, Artificial Sequence
  Description of Artificial Sequence: Synthetic oligonucleotide
uuccgggagcacagagcug

SEQ ID NO: 2109398 - RNA, 19 nt, Artificial Sequence
  Description of Artificial Sequence: Synthetic oligonucleotide
ggcaagcgugaguugggcc

SEQ ID NO: 2109399 - RNA, 19 nt, Artificial Sequence
  Description of Artificial Sequence: Synthetic oligonucleotide
ggugauagcgacagaagcu

SEQ ID NO: 2109400 - RNA, 19 nt, Artificial Sequence
  Description of Artificial Sequence: Synthetic oligonucleotide
gccaucaggagcaggagca

SEQ ID NO: 2109401 - RNA, 19 nt, Artificial Sequence
  Description of Artificial Sequence: Synthetic oligonucleotide
caggaaacgcaggcugagc

SEQ ID NO: 2109402 - RNA, 19 nt, Artificial Sequence
  Description of Artificial Sequence: Synthetic oligonucleotide
gagcaguguccgguaacug

SEQ ID NO: 2109403 - RNA, 19 nt, Artificial Sequence
  Description of Artificial Sequence: Synthetic oligonucleotide
acccagggguguaaggaug

SEQ ID NO: 2109404 - RNA, 19 nt, Artificial Sequence
  Description of Artificial Sequence: Synthetic oligonucleotide
gggguguaaggaugagccc

SEQ ID NO: 2109405 - RNA, 19 nt, Artificial Sequence
  Description of Artificial Sequence: Synthetic oligonucleotide
gcuagcugggcucuccgca

SEQ ID NO: 2109406 - RNA, 19 nt, Artificial Sequence
  Description of Artificial Sequence: Synthetic oligonucleotide
uugcggacacuguccugac

SEQ ID NO: 2109407 - RNA, 19 nt, Artificial Sequence
  Description of Artificial Sequence: Synthetic oligonucleotide
aggccacaaagaaagccau

SEQ ID NO: 2109408 - RNA, 19 nt, Artificial Sequence
  Description of Artificial Sequence: Synthetic oligonucleotide
ccuugaaugaggcaucugu

SEQ ID NO: 2109409 - RNA, 19 nt, Artificial Sequence
  Description of Artificial Sequence: Synthetic oligonucleotide
gcagcuauuugggucugug

SEQ ID NO: 2109410 - RNA, 19 nt, Artificial Sequence
  Description of Artificial Sequence: Synthetic oligonucleotide
gugguugauggcagaggac

SEQ ID NO: 2109411 - RNA, 19 nt, Artificial Sequence
  Description of Artificial Sequence: Synthetic oligonucleotide
ggcguaagaccaggguccg

SEQ ID NO: 2109412 - RNA, 19 nt, Artificial Sequence
  Description of Artificial Sequence: Synthetic oligonucleotide
cacaggacucagcaggugu

SEQ ID NO: 2109413 - RNA, 19 nt, Artificial Sequence
  Description of Artificial Sequence: Synthetic oligonucleotide
gacuggucaccggccuccg

SEQ ID NO: 2109414 - RNA, 19 nt, Artificial Sequence
  Description of Artificial Sequence: Synthetic oligonucleotide
gucauagcuacggcauaga

SEQ ID NO: 2109415 - RNA, 19 nt, Artificial Sequence
  Description of Artificial Sequence: Synthetic oligonucleotide
cagccggaagagugcucgg

SEQ ID NO: 2109416 - RNA, 19 nt, Artificial Sequence
  Description of Artificial Sequence: Synthetic oligonucleotide
gcugggcuucacugagucg

SEQ ID NO: 2109417 - RNA, 19 nt, Artificial Sequence
  Description of Artificial Sequence: Synthetic oligonucleotide
aucuggccugcaaaucugu

SEQ ID NO: 2109418 - RNA, 19 nt, Artificial Sequence
  Description of Artificial Sequence: Synthetic oligonucleotide
cucaucccgugaguucccc

SEQ ID NO: 2109419 - RNA, 19 nt, Artificial Sequence
  Description of Artificial Sequence: Synthetic oligonucleotide
gcaaggcguaagaccaggg

SEQ ID NO: 2109420 - RNA, 19 nt, Artificial Sequence
  Description of Artificial Sequence: Synthetic oligonucleotide
gugagcagugucauagcua

SEQ ID NO: 2109421 - RNA, 19 nt, Artificial Sequence
  Description of Artificial Sequence: Synthetic oligonucleotide
ccugacccaucucauccag

SEQ ID NO: 2109422 - RNA, 19 nt, Artificial Sequence
  Description of Artificial Sequence: Synthetic oligonucleotide
agcgacccagggguguaag

SEQ ID NO: 2109423 - RNA, 19 nt, Artificial Sequence
  Description of Artificial Sequence: Synthetic oligonucleotide
caaggcguaagaccagggu

SEQ ID NO: 2109424 - RNA, 19 nt, Artificial Sequence
  Description of Artificial Sequence: Synthetic oligonucleotide
accuugaaugaggcaucug

SEQ ID NO: 2109425 - RNA, 19 nt, Artificial Sequence
  Description of Artificial Sequence: Synthetic oligonucleotide
ggacuggucaccggccucc

SEQ ID NO: 2109426 - RNA, 19 nt, Artificial Sequence
  Description of Artificial Sequence: Synthetic oligonucleotide
ggaccaaacauuggggugu

SEQ ID NO: 2109427 - RNA, 19 nt, Artificial Sequence
  Description of Artificial Sequence: Synthetic oligonucleotide
agauggucggcaggucaga

SEQ ID NO: 2109428 - RNA, 19 nt, Artificial Sequence
  Description of Artificial Sequence: Synthetic oligonucleotide
ggguguaaggaugagcccu

SEQ ID NO: 2109429 - RNA, 19 nt, Artificial Sequence
  Description of Artificial Sequence: Synthetic oligonucleotide
uagcagcuauuugggucug

SEQ ID NO: 2109430 - RNA, 19 nt, Artificial Sequence
  Description of Artificial Sequence: Synthetic oligonucleotide
caaaccuucgcagaccauu

SEQ ID NO: 2109431 - RNA, 19 nt, Artificial Sequence
  Description of Artificial Sequence: Synthetic oligonucleotide
gacccagggguguaaggau

SEQ ID NO: 2109432 - RNA, 19 nt, Artificial Sequence
  Description of Artificial Sequence: Synthetic oligonucleotide
gccggaagagugcucggac

SEQ ID NO: 2109433 - RNA, 19 nt, Artificial Sequence
  Description of Artificial Sequence: Synthetic oligonucleotide
ccgguaacugcccaggaaa

SEQ ID NO: 2109434 - RNA, 19 nt, Artificial Sequence
  Description of Artificial Sequence: Synthetic oligonucleotide
gagagauggucggcagguc

SEQ ID NO: 2109435 - RNA, 19 nt, Artificial Sequence
  Description of Artificial Sequence: Synthetic oligonucleotide
auugccuggguagcagcua

SEQ ID NO: 2109436 - RNA, 19 nt, Artificial Sequence
  Description of Artificial Sequence: Synthetic oligonucleotide
ccugguacucaauuucaaa

SEQ ID NO: 2109437 - RNA, 19 nt, Artificial Sequence
  Description of Artificial Sequence: Synthetic oligonucleotide
gcgacccagggguguaagg

SEQ ID NO: 2109438 - RNA, 19 nt, Artificial Sequence
  Description of Artificial Sequence: Synthetic oligonucleotide
gugucauagcuacggcaua

SEQ ID NO: 2109439 - RNA, 19 nt, Artificial Sequence
  Description of Artificial Sequence: Synthetic oligonucleotide
cagagcugccaucuggccu

SEQ ID NO: 2109440 - RNA, 19 nt, Artificial Sequence
  Description of Artificial Sequence: Synthetic oligonucleotide
cgcauacugaucagagaug

SEQ ID NO: 2109441 - RNA, 19 nt, Artificial Sequence
  Description of Artificial Sequence: Synthetic oligonucleotide
uugggucuguggugccaaa

SEQ ID NO: 2109442 - RNA, 19 nt, Artificial Sequence
  Description of Artificial Sequence: Synthetic oligonucleotide
gcuccggaugggcugcagc

SEQ ID NO: 2109443 - RNA, 19 nt, Artificial Sequence
  Description of Artificial Sequence: Synthetic oligonucleotide
ggaaacgcaggcugagccu

SEQ ID NO: 2109444 - RNA, 19 nt, Artificial Sequence
  Description of Artificial Sequence: Synthetic oligonucleotide
ccgcauacugaucagagau

SEQ ID NO: 2109445 - RNA, 19 nt, Artificial Sequence
  Description of Artificial Sequence: Synthetic oligonucleotide
ccugcaaaucugugguuga

SEQ ID NO: 2109446 - RNA, 19 nt, Artificial Sequence
  Description of Artificial Sequence: Synthetic oligonucleotide
agcgugaguugggccagcu

SEQ ID NO: 2109447 - RNA, 19 nt, Artificial Sequence
  Description of Artificial Sequence: Synthetic oligonucleotide
guccgguaacugcccagga

SEQ ID NO: 2109448 - RNA, 19 nt, Artificial Sequence
  Description of Artificial Sequence: Synthetic oligonucleotide
gcuguagacauggcucuuc

SEQ ID NO: 2109449 - RNA, 19 nt, Artificial Sequence
  Description of Artificial Sequence: Synthetic oligonucleotide
accaggguccggacuucag

SEQ ID NO: 2109450 - RNA, 19 nt, Artificial Sequence
  Description of Artificial Sequence: Synthetic oligonucleotide
gguccggacuucaggacca

SEQ ID NO: 2109451 - RNA, 19 nt, Artificial Sequence
  Description of Artificial Sequence: Synthetic oligonucleotide
guacucaauuucaaaccuu

SEQ ID NO: 2109452 - RNA, 19 nt, Artificial Sequence
  Description of Artificial Sequence: Synthetic oligonucleotide
uccggcccacaggacucag

SEQ ID NO: 2109453 - RNA, 19 nt, Artificial Sequence
  Description of Artificial Sequence: Synthetic oligonucleotide
gucaccggccuccggccca

SEQ ID NO: 2109454 - RNA, 19 nt, Artificial Sequence
  Description of Artificial Sequence: Synthetic oligonucleotide
cuauugcucagugcugacu

SEQ ID NO: 2109455 - RNA, 19 nt, Artificial Sequence
  Description of Artificial Sequence: Synthetic oligonucleotide
ggaaaaucugacggaggua

SEQ ID NO: 2109456 - RNA, 19 nt, Artificial Sequence
  Description of Artificial Sequence: Synthetic oligonucleotide
gaaugccgauguuggcggu

SEQ ID NO: 2109457 - RNA, 19 nt, Artificial Sequence
  Description of Artificial Sequence: Synthetic oligonucleotide
ccgugaguuccccagggca

SEQ ID NO: 2109458 - RNA, 19 nt, Artificial Sequence
  Description of Artificial Sequence: Synthetic oligonucleotide
gaccaaacauuggggugua

SEQ ID NO: 2109459 - RNA, 19 nt, Artificial Sequence
  Description of Artificial Sequence: Synthetic oligonucleotide
ucggaccagacuggugauu

SEQ ID NO: 2109460 - RNA, 19 nt, Artificial Sequence
  Description of Artificial Sequence: Synthetic oligonucleotide
uccggacuucaggaccaaa

SEQ ID NO: 2109461 - RNA, 19 nt, Artificial Sequence
  Description of Artificial Sequence: Synthetic oligonucleotide
caggggcccaaugcagaac

SEQ ID NO: 2109462 - RNA, 19 nt, Artificial Sequence
  Description of Artificial Sequence: Synthetic oligonucleotide
cauucucaucccgugaguu

SEQ ID NO: 2109463 - RNA, 19 nt, Artificial Sequence
  Description of Artificial Sequence: Synthetic oligonucleotide
gacagccggaagagugcuc

SEQ ID NO: 2109464 - RNA, 19 nt, Artificial Sequence
  Description of Artificial Sequence: Synthetic oligonucleotide
guguaaggaugagcccuuc

SEQ ID NO: 2109465 - RNA, 19 nt, Artificial Sequence
  Description of Artificial Sequence: Synthetic oligonucleotide
gaccaggguccggacuuca

SEQ ID NO: 2109466 - RNA, 19 nt, Artificial Sequence
  Description of Artificial Sequence: Synthetic oligonucleotide
cccacaaugcaaucuggua

SEQ ID NO: 2109467 - RNA, 19 nt, Artificial Sequence
  Description of Artificial Sequence: Synthetic oligonucleotide
gacucagcaggugucuauu

SEQ ID NO: 2109468 - RNA, 19 nt, Artificial Sequence
  Description of Artificial Sequence: Synthetic oligonucleotide
gugaggugauagcgacaga

SEQ ID NO: 2109469 - RNA, 19 nt, Artificial Sequence
  Description of Artificial Sequence: Synthetic oligonucleotide
agcagcuauuugggucugu

SEQ ID NO: 2109470 - RNA, 19 nt, Artificial Sequence
  Description of Artificial Sequence: Synthetic oligonucleotide
gagauggacuuggcagucu

SEQ ID NO: 2109471 - RNA, 19 nt, Artificial Sequence
  Description of Artificial Sequence: Synthetic oligonucleotide
ggcggugggaaugaugagu

SEQ ID NO: 2109472 - RNA, 19 nt, Artificial Sequence
  Description of Artificial Sequence: Synthetic oligonucleotide
gucauuccgggagcacaga

SEQ ID NO: 2109473 - RNA, 19 nt, Artificial Sequence
  Description of Artificial Sequence: Synthetic oligonucleotide
uguuggcggugggaaugau

SEQ ID NO: 2109474 - RNA, 19 nt, Artificial Sequence
  Description of Artificial Sequence: Synthetic oligonucleotide
ggucaccggccuccggccc

SEQ ID NO: 2109475 - RNA, 19 nt, Artificial Sequence
  Description of Artificial Sequence: Synthetic oligonucleotide
ggaccagacuggugauuuc

SEQ ID NO: 2109476 - RNA, 19 nt, Artificial Sequence
  Description of Artificial Sequence: Synthetic oligonucleotide
cagccaugacaagaaggaa

SEQ ID NO: 2109477 - RNA, 19 nt, Artificial Sequence
  Description of Artificial Sequence: Synthetic oligonucleotide
ggucauugccuggguagca

SEQ ID NO: 2109478 - RNA, 19 nt, Artificial Sequence
  Description of Artificial Sequence: Synthetic oligonucleotide
gcagaccauuaaugaucug

SEQ ID NO: 2109479 - RNA, 19 nt, Artificial Sequence
  Description of Artificial Sequence: Synthetic oligonucleotide
gccgaggaucaggagcaag

SEQ ID NO: 2109480 - RNA, 19 nt, Artificial Sequence
  Description of Artificial Sequence: Synthetic oligonucleotide
ccuccggcccacaggacuc

SEQ ID NO: 2109481 - RNA, 19 nt, Artificial Sequence
  Description of Artificial Sequence: Synthetic oligonucleotide
cuagcugggcucuccgcau

SEQ ID NO: 2109482 - RNA, 19 nt, Artificial Sequence
  Description of Artificial Sequence: Synthetic oligonucleotide
cguaagaccaggguccgga

SEQ ID NO: 2109483 - RNA, 19 nt, Artificial Sequence
  Description of Artificial Sequence: Synthetic oligonucleotide
gcugccaucuggccugcaa

SEQ ID NO: 2109484 - RNA, 19 nt, Artificial Sequence
  Description of Artificial Sequence: Synthetic oligonucleotide
cuacggcauagagaaggua

SEQ ID NO: 2109485 - RNA, 19 nt, Artificial Sequence
  Description of Artificial Sequence: Synthetic oligonucleotide
caggagcaguguccgguaa

SEQ ID NO: 2109486 - RNA, 19 nt, Artificial Sequence
  Description of Artificial Sequence: Synthetic oligonucleotide
ggucagagcuggugcagcu

SEQ ID NO: 2109487 - RNA, 19 nt, Artificial Sequence
  Description of Artificial Sequence: Synthetic oligonucleotide
gacugugaaugccgauguu

SEQ ID NO: 2109488 - RNA, 19 nt, Artificial Sequence
  Description of Artificial Sequence: Synthetic oligonucleotide
cccgugaguuccccagggc

SEQ ID NO: 2109489 - RNA, 19 nt, Artificial Sequence
  Description of Artificial Sequence: Synthetic oligonucleotide
cccaggaaacgcaggcuga

SEQ ID NO: 2109490 - RNA, 19 nt, Artificial Sequence
  Description of Artificial Sequence: Synthetic oligonucleotide
gcgugaguugggccagcug

SEQ ID NO: 2109491 - RNA, 19 nt, Artificial Sequence
  Description of Artificial Sequence: Synthetic oligonucleotide
cuucacugagucggaaaau

SEQ ID NO: 2109492 - RNA, 19 nt, Artificial Sequence
  Description of Artificial Sequence: Synthetic oligonucleotide
uagcgacccagggguguaa

SEQ ID NO: 2109493 - RNA, 19 nt, Artificial Sequence
  Description of Artificial Sequence: Synthetic oligonucleotide
gguacuccagggccuuucu

SEQ ID NO: 2109494 - RNA, 19 nt, Artificial Sequence
  Description of Artificial Sequence: Synthetic oligonucleotide
gcuuggccugugugaugag

SEQ ID NO: 2109495 - RNA, 19 nt, Artificial Sequence
  Description of Artificial Sequence: Synthetic oligonucleotide
caggacuggucaccggccu

SEQ ID NO: 2109496 - RNA, 19 nt, Artificial Sequence
  Description of Artificial Sequence: Synthetic oligonucleotide
guagcgacccaggggugua

SEQ ID NO: 2109497 - RNA, 19 nt, Artificial Sequence
  Description of Artificial Sequence: Synthetic oligonucleotide
gggcucuccgcauacugau

SEQ ID NO: 2109498 - RNA, 19 nt, Artificial Sequence
  Description of Artificial Sequence: Synthetic oligonucleotide
ggggcccaaugcagaacag

SEQ ID NO: 2109499 - RNA, 19 nt, Artificial Sequence
  Description of Artificial Sequence: Synthetic oligonucleotide
cgcagaccauuaaugaucu

SEQ ID NO: 2109500 - RNA, 19 nt, Artificial Sequence
  Description of Artificial Sequence: Synthetic oligonucleotide
ccagacuggugauuucaua

SEQ ID NO: 2109501 - RNA, 19 nt, Artificial Sequence
  Description of Artificial Sequence: Synthetic oligonucleotide
caccuugaaugaggcaucu

SEQ ID NO: 2109502 - RNA, 19 nt, Artificial Sequence
  Description of Artificial Sequence: Synthetic oligonucleotide
ggacucagcaggugucuau

SEQ ID NO: 2109503 - RNA, 19 nt, Artificial Sequence
  Description of Artificial Sequence: Synthetic oligonucleotide
ccgauguuggcggugggaa

SEQ ID NO: 2109504 - RNA, 19 nt, Artificial Sequence
  Description of Artificial Sequence: Synthetic oligonucleotide
cccugguacucaauuucaa

SEQ ID NO: 2109505 - RNA, 19 nt, Artificial Sequence
  Description of Artificial Sequence: Synthetic oligonucleotide
gcguaagaccaggguccgg

SEQ ID NO: 2109506 - RNA, 19 nt, Artificial Sequence
  Description of Artificial Sequence: Synthetic oligonucleotide
cucggaccagacuggugau

SEQ ID NO: 2109507 - RNA, 19 nt, Artificial Sequence
  Description of Artificial Sequence: Synthetic oligonucleotide
gguagcgacccaggggugu

SEQ ID NO: 2109508 - RNA, 19 nt, Artificial Sequence
  Description of Artificial Sequence: Synthetic oligonucleotide
gcugcuggugacugugaau

SEQ ID NO: 2109509 - RNA, 19 nt, Artificial Sequence
  Description of Artificial Sequence: Synthetic oligonucleotide
gccgauguuggcgguggga

SEQ ID NO: 2109510 - RNA, 19 nt, Artificial Sequence
  Description of Artificial Sequence: Synthetic oligonucleotide
gcuacggcauagagaaggu

SEQ ID NO: 2109511 - RNA, 19 nt, Artificial Sequence
  Description of Artificial Sequence: Synthetic oligonucleotide
cugcaaaucugugguugau

SEQ ID NO: 2109512 - RNA, 19 nt, Artificial Sequence
  Description of Artificial Sequence: Synthetic oligonucleotide
gcggugggaaugaugaguu

SEQ ID NO: 2109513 - RNA, 19 nt, Artificial Sequence
  Description of Artificial Sequence: Synthetic oligonucleotide
gggccuuucuccagguacu

SEQ ID NO: 2109514 - RNA, 19 nt, Artificial Sequence
  Description of Artificial Sequence: Synthetic oligonucleotide
ggcucuccgcauacugauc

SEQ ID NO: 2109515 - RNA, 19 nt, Artificial Sequence
  Description of Artificial Sequence: Synthetic oligonucleotide
ggacagccggaagagugcu

SEQ ID NO: 2109516 - RNA, 19 nt, Artificial Sequence
  Description of Artificial Sequence: Synthetic oligonucleotide
ccgggagcacagagcugcc

SEQ ID NO: 2109517 - RNA, 19 nt, Artificial Sequence
  Description of Artificial Sequence: Synthetic oligonucleotide
ccggcccacaggacucagc

SEQ ID NO: 2109518 - RNA, 19 nt, Artificial Sequence
  Description of Artificial Sequence: Synthetic oligonucleotide
gguguaaggaugagcccuu

SEQ ID NO: 2109519 - RNA, 19 nt, Artificial Sequence
  Description of Artificial Sequence: Synthetic oligonucleotide
ggucggcaggucagagcug

SEQ ID NO: 2109520 - RNA, 19 nt, Artificial Sequence
  Description of Artificial Sequence: Synthetic oligonucleotide
ccccacaaugcaaucuggu

SEQ ID NO: 2109521 - RNA, 19 nt, Artificial Sequence
  Description of Artificial Sequence: Synthetic oligonucleotide
ccccgggcaggacugguca

SEQ ID NO: 2109522 - RNA, 19 nt, Artificial Sequence
  Description of Artificial Sequence: Synthetic oligonucleotide
gggguguauuugcagucuu

SEQ ID NO: 2109523 - RNA, 19 nt, Artificial Sequence
  Description of Artificial Sequence: Synthetic oligonucleotide
agccgaggaucaggagcaa

SEQ ID NO: 2109524 - RNA, 19 nt, Artificial Sequence
  Description of Artificial Sequence: Synthetic oligonucleotide
cccgggcaggacuggucac

SEQ ID NO: 2109525 - RNA, 19 nt, Artificial Sequence
  Description of Artificial Sequence: Synthetic oligonucleotide
gugcucggaccagacuggu

SEQ ID NO: 2109526 - RNA, 19 nt, Artificial Sequence
  Description of Artificial Sequence: Synthetic oligonucleotide
cagggccuuucuccaggua

SEQ ID NO: 2109527 - RNA, 19 nt, Artificial Sequence
  Description of Artificial Sequence: Synthetic oligonucleotide
cuccggcccacaggacuca

SEQ ID NO: 2109528 - RNA, 19 nt, Artificial Sequence
  Description of Artificial Sequence: Synthetic oligonucleotide
cggugggaaugaugaguuc

SEQ ID NO: 2109529 - RNA, 19 nt, Artificial Sequence
  Description of Artificial Sequence: Synthetic oligonucleotide
ccggaugggcugcagcucu

SEQ ID NO: 2109530 - RNA, 19 nt, Artificial Sequence
  Description of Artificial Sequence: Synthetic oligonucleotide
agcugccaaggaagucauu

SEQ ID NO: 2109531 - RNA, 19 nt, Artificial Sequence
  Description of Artificial Sequence: Synthetic oligonucleotide
guccggacuucaggaccaa

SEQ ID NO: 2109532 - RNA, 19 nt, Artificial Sequence
  Description of Artificial Sequence: Synthetic oligonucleotide
gcugacucggugaggugau

SEQ ID NO: 2109533 - RNA, 19 nt, Artificial Sequence
  Description of Artificial Sequence: Synthetic oligonucleotide
cugacucggugaggugaua

SEQ ID NO: 2109534 - RNA, 19 nt, Artificial Sequence
  Description of Artificial Sequence: Synthetic oligonucleotide
caucugucuugcggacacu

SEQ ID NO: 2109535 - RNA, 19 nt, Artificial Sequence
  Description of Artificial Sequence: Synthetic oligonucleotide
cggugaggugauagcgaca

SEQ ID NO: 2109536 - RNA, 19 nt, Artificial Sequence
  Description of Artificial Sequence: Synthetic oligonucleotide
gccccgggcaggacugguc

SEQ ID NO: 2109537 - RNA, 19 nt, Artificial Sequence
  Description of Artificial Sequence: Synthetic oligonucleotide
cuuggcccuccaggcugua

SEQ ID NO: 2109538 - RNA, 19 nt, Artificial Sequence
  Description of Artificial Sequence: Synthetic oligonucleotide
caccggccuccggcccaca

SEQ ID NO: 2109539 - RNA, 19 nt, Artificial Sequence
  Description of Artificial Sequence: Synthetic oligonucleotide
agauaugugaccuggaugg

SEQ ID NO: 2109540 - RNA, 19 nt, Artificial Sequence
  Description of Artificial Sequence: Synthetic oligonucleotide
auauaccugguuuaaaugg

SEQ ID NO: 2109541 - RNA, 19 nt, Artificial Sequence
  Description of Artificial Sequence: Synthetic oligonucleotide
ucgaauaucaaucuccucu

SEQ ID NO: 2109542 - RNA, 19 nt, Artificial Sequence
  Description of Artificial Sequence: Synthetic oligonucleotide
caugucuuaauauaccugg

SEQ ID NO: 2109543 - RNA, 19 nt, Artificial Sequence
  Description of Artificial Sequence: Synthetic oligonucleotide
gaucuagacaaauaggagc

SEQ ID NO: 2109544 - RNA, 19 nt, Artificial Sequence
  Description of Artificial Sequence: Synthetic oligonucleotide
uuauaguuguccuuaaagc

SEQ ID NO: 2109545 - RNA, 19 nt, Artificial Sequence
  Description of Artificial Sequence: Synthetic oligonucleotide
aauauaccugguuuaaaug

SEQ ID NO: 2109546 - RNA, 19 nt, Artificial Sequence
  Description of Artificial Sequence: Synthetic oligonucleotide
aaauugaacagggaugccg

SEQ ID NO: 2109547 - RNA, 19 nt, Artificial Sequence
  Description of Artificial Sequence: Synthetic oligonucleotide
guuauaguuguccuuaaag

SEQ ID NO: 2109548 - RNA, 19 nt, Artificial Sequence
  Description of Artificial Sequence: Synthetic oligonucleotide
gaggguaucaauaagcgcc

SEQ ID NO: 2109549 - RNA, 19 nt, Artificial Sequence
  Description of Artificial Sequence: Synthetic oligonucleotide
ugucaaaacaguauugggu

SEQ ID NO: 2109550 - RNA, 19 nt, Artificial Sequence
  Description of Artificial Sequence: Synthetic oligonucleotide
uuaauugucaaaacaguau

SEQ ID NO: 2109551 - RNA, 19 nt, Artificial Sequence
  Description of Artificial Sequence: Synthetic oligonucleotide
uuuaauugucaaaacagua

SEQ ID NO: 2109552 - RNA, 19 nt, Artificial Sequence
  Description of Artificial Sequence: Synthetic oligonucleotide
ucucauauccauccgagga

SEQ ID NO: 2109553 - RNA, 19 nt, Artificial Sequence
  Description of Artificial Sequence: Synthetic oligonucleotide
agcaguacaaauaccaggc

SEQ ID NO: 2109554 - RNA, 19 nt, Artificial Sequence
  Description of Artificial Sequence: Synthetic oligonucleotide
aauguguuauaguuguccu

SEQ ID NO: 2109555 - RNA, 19 nt, Artificial Sequence
  Description of Artificial Sequence: Synthetic oligonucleotide
ugaguuaggucuuuggcug

SEQ ID NO: 2109556 - RNA, 19 nt, Artificial Sequence
  Description of Artificial Sequence: Synthetic oligonucleotide
uguacagauaguuguagca

SEQ ID NO: 2109557 - RNA, 19 nt, Artificial Sequence
  Description of Artificial Sequence: Synthetic oligonucleotide
uagguuauguggaagugcc

SEQ ID NO: 2109558 - RNA, 19 nt, Artificial Sequence
  Description of Artificial Sequence: Synthetic oligonucleotide
uccaauguguuauaguugu

SEQ ID NO: 2109559 - RNA, 19 nt, Artificial Sequence
  Description of Artificial Sequence: Synthetic oligonucleotide
ugacauuagagaaaaccac

SEQ ID NO: 2109560 - RNA, 19 nt, Artificial Sequence
  Description of Artificial Sequence: Synthetic oligonucleotide
aucuagacaaauaggagcg

SEQ ID NO: 2109561 - RNA, 19 nt, Artificial Sequence
  Description of Artificial Sequence: Synthetic oligonucleotide
agcggaaauucuucaaccc

SEQ ID NO: 2109562 - RNA, 19 nt, Artificial Sequence
  Description of Artificial Sequence: Synthetic oligonucleotide
gauaguuguagcaacuuug

SEQ ID NO: 2109563 - RNA, 19 nt, Artificial Sequence
  Description of Artificial Sequence: Synthetic oligonucleotide
uguuucguagaucuagaca

SEQ ID NO: 2109564 - RNA, 19 nt, Artificial Sequence
  Description of Artificial Sequence: Synthetic oligonucleotide
uauccugaacccuggauag

SEQ ID NO: 2109565 - RNA, 19 nt, Artificial Sequence
  Description of Artificial Sequence: Synthetic oligonucleotide
uaugugaccuggaugguug

SEQ ID NO: 2109566 - RNA, 19 nt, Artificial Sequence
  Description of Artificial Sequence: Synthetic oligonucleotide
aacugagacuaauaugcug

SEQ ID NO: 2109567 - RNA, 19 nt, Artificial Sequence
  Description of Artificial Sequence: Synthetic oligonucleotide
  modified_base (10)..(10): a, c, u, g, unknown or other
gccaguuacngcuagacgc

SEQ ID NO: 2109568 - RNA, 19 nt, Artificial Sequence
  Description of Artificial Sequence: Synthetic oligonucleotide
uucaugucuuaauauaccu

SEQ ID NO: 2109569 - RNA, 19 nt, Artificial Sequence
  Description of Artificial Sequence: Synthetic oligonucleotide
uauaccugguuuaaaugga

SEQ ID NO: 2109570 - RNA, 19 nt, Artificial Sequence
  Description of Artificial Sequence: Synthetic oligonucleotide
uucauugcaaagcgcauga

SEQ ID NO: 2109571 - RNA, 19 nt, Artificial Sequence
  Description of Artificial Sequence: Synthetic oligonucleotide
uuagaguacucuccaaugu

SEQ ID NO: 2109572 - RNA, 19 nt, Artificial Sequence
  Description of Artificial Sequence: Synthetic oligonucleotide
guaaacugagacuaauaug

SEQ ID NO: 2109573 - RNA, 19 nt, Artificial Sequence
  Description of Artificial Sequence: Synthetic oligonucleotide
ucaauaagcgccuugcgua

SEQ ID NO: 2109574 - RNA, 19 nt, Artificial Sequence
  Description of Artificial Sequence: Synthetic oligonucleotide
uuggcgacauuucagguga

SEQ ID NO: 2109575 - RNA, 19 nt, Artificial Sequence
  Description of Artificial Sequence: Synthetic oligonucleotide
auagguuauguggaagugc

SEQ ID NO: 2109576 - RNA, 19 nt, Artificial Sequence
  Description of Artificial Sequence: Synthetic oligonucleotide
ucacucuggccaaagaccc

SEQ ID NO: 2109577 - RNA, 19 nt, Artificial Sequence
  Description of Artificial Sequence: Synthetic oligonucleotide
cuugauauccugaacccug

SEQ ID NO: 2109578 - RNA, 19 nt, Artificial Sequence
  Description of Artificial Sequence: Synthetic oligonucleotide
gcaucuagagcuuucaucc

SEQ ID NO: 2109579 - RNA, 19 nt, Artificial Sequence
  Description of Artificial Sequence: Synthetic oligonucleotide
uuggcauagguuaugugga

SEQ ID NO: 2109580 - RNA, 19 nt, Artificial Sequence
  Description of Artificial Sequence: Synthetic oligonucleotide
  modified_base (3)..(3): a, c, u, g, unknown or other
acngcuagacgccaucgcg

SEQ ID NO: 2109581 - RNA, 19 nt, Artificial Sequence
  Description of Artificial Sequence: Synthetic oligonucleotide
uacuugauauccugaaccc

SEQ ID NO: 2109582 - RNA, 19 nt, Artificial Sequence
  Description of Artificial Sequence: Synthetic oligonucleotide
gauuucauugcaaagcgca

SEQ ID NO: 2109583 - RNA, 19 nt, Artificial Sequence
  Description of Artificial Sequence: Synthetic oligonucleotide
aauugucaaaacaguauug

SEQ ID NO: 2109584 - RNA, 19 nt, Artificial Sequence
  Description of Artificial Sequence: Synthetic oligonucleotide
ucaugucuuaauauaccug

SEQ ID NO: 2109585 - RNA, 19 nt, Artificial Sequence
  Description of Artificial Sequence: Synthetic oligonucleotide
aauaccaggcucccguaug

SEQ ID NO: 2109586 - RNA, 19 nt, Artificial Sequence
  Description of Artificial Sequence: Synthetic oligonucleotide
auagucgaauaucaaucuc

SEQ ID NO: 2109587 - RNA, 19 nt, Artificial Sequence
  Description of Artificial Sequence: Synthetic oligonucleotide
agcgggcugucucauaucc

SEQ ID NO: 2109588 - RNA, 19 nt, Artificial Sequence
  Description of Artificial Sequence: Synthetic oligonucleotide
auaguuguccuuaaagcuc

SEQ ID NO: 2109589 - RNA, 19 nt, Artificial Sequence
  Description of Artificial Sequence: Synthetic oligonucleotide
agauccuuccacuucagga

SEQ ID NO: 2109590 - RNA, 19 nt, Artificial Sequence
  Description of Artificial Sequence: Synthetic oligonucleotide
aguuguagcaacuuugauu

SEQ ID NO: 2109591 - RNA, 19 nt, Artificial Sequence
  Description of Artificial Sequence: Synthetic oligonucleotide
auuccacccacuuagagua

SEQ ID NO: 2109592 - RNA, 19 nt, Artificial Sequence
  Description of Artificial Sequence: Synthetic oligonucleotide
gagauaugugaccuggaug

SEQ ID NO: 2109593 - RNA, 19 nt, Artificial Sequence
  Description of Artificial Sequence: Synthetic oligonucleotide
guagaucuagacaaauagg

SEQ ID NO: 2109594 - RNA, 19 nt, Artificial Sequence
  Description of Artificial Sequence: Synthetic oligonucleotide
uuuuaaguccuugggagca

SEQ ID NO: 2109595 - RNA, 19 nt, Artificial Sequence
  Description of Artificial Sequence: Synthetic oligonucleotide
cucacucuggccaaagacc

SEQ ID NO: 2109596 - RNA, 19 nt, Artificial Sequence
  Description of Artificial Sequence: Synthetic oligonucleotide
caugauuugucucuucaac

SEQ ID NO: 2109597 - RNA, 19 nt, Artificial Sequence
  Description of Artificial Sequence: Synthetic oligonucleotide
ucauauccauccgaggagg

SEQ ID NO: 2109598 - RNA, 19 nt, Artificial Sequence
  Description of Artificial Sequence: Synthetic oligonucleotide
auccuguacagauaguugu

SEQ ID NO: 2109599 - RNA, 19 nt, Artificial Sequence
  Description of Artificial Sequence: Synthetic oligonucleotide
acauucacuccggacagcc

SEQ ID NO: 2109600 - RNA, 19 nt, Artificial Sequence
  Description of Artificial Sequence: Synthetic oligonucleotide
gacauuucaggugacugag

SEQ ID NO: 2109601 - RNA, 19 nt, Artificial Sequence
  Description of Artificial Sequence: Synthetic oligonucleotide
ugggguucauacuugauau

SEQ ID NO: 2109602 - RNA, 19 nt, Artificial Sequence
  Description of Artificial Sequence: Synthetic oligonucleotide
aucaauaagcgccuugcgu

SEQ ID NO: 2109603 - RNA, 19 nt, Artificial Sequence
  Description of Artificial Sequence: Synthetic oligonucleotide
uacagauaguuguagcaac

SEQ ID NO: 2109604 - RNA, 19 nt, Artificial Sequence
  Description of Artificial Sequence: Synthetic oligonucleotide
auugggugaaggcaggaca

SEQ ID NO: 2109605 - RNA, 19 nt, Artificial Sequence
  Description of Artificial Sequence: Synthetic oligonucleotide
uggauagucgaauaucaau

SEQ ID NO: 2109606 - RNA, 19 nt, Artificial Sequence
  Description of Artificial Sequence: Synthetic oligonucleotide
caguauugggugaaggcag

SEQ ID NO: 2109607 - RNA, 19 nt, Artificial Sequence
  Description of Artificial Sequence: Synthetic oligonucleotide
gaggaggguaucaauaagc

SEQ ID NO: 2109608 - RNA, 19 nt, Artificial Sequence
  Description of Artificial Sequence: Synthetic oligonucleotide
agggaugccggccuucagc

SEQ ID NO: 2109609 - RNA, 19 nt, Artificial Sequence
  Description of Artificial Sequence: Synthetic oligonucleotide
cugguuuaaauggagcacc

SEQ ID NO: 2109610 - RNA, 19 nt, Artificial Sequence
  Description of Artificial Sequence: Synthetic oligonucleotide
auaagcgccuugcguacgc

SEQ ID NO: 2109611 - RNA, 19 nt, Artificial Sequence
  Description of Artificial Sequence: Synthetic oligonucleotide
agaccccuguuccauagcg

SEQ ID NO: 2109612 - RNA, 19 nt, Artificial Sequence
  Description of Artificial Sequence: Synthetic oligonucleotide
cuugggagcauuguguccc

SEQ ID NO: 2109613 - RNA, 19 nt, Artificial Sequence
  Description of Artificial Sequence: Synthetic oligonucleotide
accgcaaguacucacucug

SEQ ID NO: 2109614 - RNA, 19 nt, Artificial Sequence
  Description of Artificial Sequence: Synthetic oligonucleotide
auauccugaacccuggaua

SEQ ID NO: 2109615 - RNA, 19 nt, Artificial Sequence
  Description of Artificial Sequence: Synthetic oligonucleotide
agugcuaguguuucguaga

SEQ ID NO: 2109616 - RNA, 19 nt, Artificial Sequence
  Description of Artificial Sequence: Synthetic oligonucleotide
auugaacagggaugccggc

SEQ ID NO: 2109617 - RNA, 19 nt, Artificial Sequence
  Description of Artificial Sequence: Synthetic oligonucleotide
accugguuuaaauggagca

SEQ ID NO: 2109618 - RNA, 19 nt, Artificial Sequence
  Description of Artificial Sequence: Synthetic oligonucleotide
accaaaauuccagaggaca

SEQ ID NO: 2109619 - RNA, 19 nt, Artificial Sequence
  Description of Artificial Sequence: Synthetic oligonucleotide
gagugcuaguguuucguag

SEQ ID NO: 2109620 - RNA, 19 nt, Artificial Sequence
  Description of Artificial Sequence: Synthetic oligonucleotide
aagcgccuugcguacgccc

SEQ ID NO: 2109621 - RNA, 19 nt, Artificial Sequence
  Description of Artificial Sequence: Synthetic oligonucleotide
  modified_base (5)..(5): a, c, u, g, unknown or other
uuacngcuagacgccaucg

SEQ ID NO: 2109622 - RNA, 19 nt, Artificial Sequence
  Description of Artificial Sequence: Synthetic oligonucleotide
uuucauugcaaagcgcaug

SEQ ID NO: 2109623 - RNA, 19 nt, Artificial Sequence
  Description of Artificial Sequence: Synthetic oligonucleotide
accccuguuccauagcggg

SEQ ID NO: 2109624 - RNA, 19 nt, Artificial Sequence
  Description of Artificial Sequence: Synthetic oligonucleotide
gagagcucccaauucgugc

SEQ ID NO: 2109625 - RNA, 19 nt, Artificial Sequence
  Description of Artificial Sequence: Synthetic oligonucleotide
aggaggguaucaauaagcg

SEQ ID NO: 2109626 - RNA, 19 nt, Artificial Sequence
  Description of Artificial Sequence: Synthetic oligonucleotide
uggaagugccagaacauuc

SEQ ID NO: 2109627 - RNA, 19 nt, Artificial Sequence
  Description of Artificial Sequence: Synthetic oligonucleotide
aaaacaguauugggugaag

SEQ ID NO: 2109628 - RNA, 19 nt, Artificial Sequence
  Description of Artificial Sequence: Synthetic oligonucleotide
agaucuagacaaauaggag

SEQ ID NO: 2109629 - RNA, 19 nt, Artificial Sequence
  Description of Artificial Sequence: Synthetic oligonucleotide
uaccugguuuaaauggagc

SEQ ID NO: 2109630 - RNA, 19 nt, Artificial Sequence
  Description of Artificial Sequence: Synthetic oligonucleotide
ugucuuaauauaccugguu

SEQ ID NO: 2109631 - RNA, 19 nt, Artificial Sequence
  Description of Artificial Sequence: Synthetic oligonucleotide
gauagucgaauaucaaucu

SEQ ID NO: 2109632 - RNA, 19 nt, Artificial Sequence
  Description of Artificial Sequence: Synthetic oligonucleotide
agauuucauugcaaagcgc

SEQ ID NO: 2109633 - RNA, 19 nt, Artificial Sequence
  Description of Artificial Sequence: Synthetic oligonucleotide
auaccgcaaguacucacuc

SEQ ID NO: 2109634 - RNA, 19 nt, Artificial Sequence
  Description of Artificial Sequence: Synthetic oligonucleotide
gacgccaucgcgguuuucg

SEQ ID NO: 2109635 - RNA, 19 nt, Artificial Sequence
  Description of Artificial Sequence: Synthetic oligonucleotide
uaacagcaguacaaauacc

SEQ ID NO: 2109636 - RNA, 19 nt, Artificial Sequence
  Description of Artificial Sequence: Synthetic oligonucleotide
acauuccacccacuuagag

SEQ ID NO: 2109637 - RNA, 19 nt, Artificial Sequence
  Description of Artificial Sequence: Synthetic oligonucleotide
acccacuuagaguacucuc

SEQ ID NO: 2109638 - RNA, 19 nt, Artificial Sequence
  Description of Artificial Sequence: Synthetic oligonucleotide
aauucgugcuuugaccaca

SEQ ID NO: 2109639 - RNA, 19 nt, Artificial Sequence
  Description of Artificial Sequence: Synthetic oligonucleotide
cguagaucuagacaaauag

SEQ ID NO: 2109640 - RNA, 19 nt, Artificial Sequence
  Description of Artificial Sequence: Synthetic oligonucleotide
aaggaagugcuuaggacgu

SEQ ID NO: 2109641 - RNA, 19 nt, Artificial Sequence
  Description of Artificial Sequence: Synthetic oligonucleotide
ucuagacaaauaggagcgg

SEQ ID NO: 2109642 - RNA, 19 nt, Artificial Sequence
  Description of Artificial Sequence: Synthetic oligonucleotide
aauaagcgccuugcguacg

SEQ ID NO: 2109643 - RNA, 19 nt, Artificial Sequence
  Description of Artificial Sequence: Synthetic oligonucleotide
agagcucccaauucgugcu

SEQ ID NO: 2109644 - RNA, 19 nt, Artificial Sequence
  Description of Artificial Sequence: Synthetic oligonucleotide
  modified_base (4)..(4): a, c, u, g, unknown or other
uacngcuagacgccaucgc

SEQ ID NO: 2109645 - RNA, 19 nt, Artificial Sequence
  Description of Artificial Sequence: Synthetic oligonucleotide
cuucaacccauuaaauuga

SEQ ID NO: 2109646 - RNA, 19 nt, Artificial Sequence
  Description of Artificial Sequence: Synthetic oligonucleotide
uagacaaauaggagcggaa

SEQ ID NO: 2109647 - RNA, 19 nt, Artificial Sequence
  Description of Artificial Sequence: Synthetic oligonucleotide
  modified_base (11)..(11): a, c, u, g, unknown or other
agccaguuacngcuagacg

SEQ ID NO: 2109648 - RNA, 19 nt, Artificial Sequence
  Description of Artificial Sequence: Synthetic oligonucleotide
  modified_base (2)..(2): a, c, u, g, unknown or other
cngcuagacgccaucgcgg

SEQ ID NO: 2109649 - RNA, 19 nt, Artificial Sequence
  Description of Artificial Sequence: Synthetic oligonucleotide
uuauguggaagugccagaa

SEQ ID NO: 2109650 - RNA, 19 nt, Artificial Sequence
  Description of Artificial Sequence: Synthetic oligonucleotide
uuaggucuuuggcugcuga

SEQ ID NO: 2109651 - RNA, 19 nt, Artificial Sequence
  Description of Artificial Sequence: Synthetic oligonucleotide
aaauaccaggcucccguau

SEQ ID NO: 2109652 - RNA, 19 nt, Artificial Sequence
  Description of Artificial Sequence: Synthetic oligonucleotide
ucauccuguacagauaguu

SEQ ID NO: 2109653 - RNA, 19 nt, Artificial Sequence
  Description of Artificial Sequence: Synthetic oligonucleotide
ucccaauucgugcuuugac

SEQ ID NO: 2109654 - RNA, 19 nt, Artificial Sequence
  Description of Artificial Sequence: Synthetic oligonucleotide
ggguucauacuugauaucc

SEQ ID NO: 2109655 - RNA, 19 nt, Artificial Sequence
  Description of Artificial Sequence: Synthetic oligonucleotide
uccgaggaggguaucaaua

SEQ ID NO: 2109656 - RNA, 19 nt, Artificial Sequence
  Description of Artificial Sequence: Synthetic oligonucleotide
ugggaucucagaggcacgg

SEQ ID NO: 2109657 - RNA, 19 nt, Artificial Sequence
  Description of Artificial Sequence: Synthetic oligonucleotide
uggccaaagaccccuguuc

SEQ ID NO: 2109658 - RNA, 19 nt, Artificial Sequence
  Description of Artificial Sequence: Synthetic oligonucleotide
ggauagucgaauaucaauc

SEQ ID NO: 2109659 - RNA, 19 nt, Artificial Sequence
  Description of Artificial Sequence: Synthetic oligonucleotide
ugauaccgcaaguacucac

SEQ ID NO: 2109660 - RNA, 19 nt, Artificial Sequence
  Description of Artificial Sequence: Synthetic oligonucleotide
uuaauauaccugguuuaaa

SEQ ID NO: 2109661 - RNA, 19 nt, Artificial Sequence
  Description of Artificial Sequence: Synthetic oligonucleotide
ucaggugacugaguuaggu

SEQ ID NO: 2109662 - RNA, 19 nt, Artificial Sequence
  Description of Artificial Sequence: Synthetic oligonucleotide
cuaauaugcugacauuaga

SEQ ID NO: 2109663 - RNA, 19 nt, Artificial Sequence
  Description of Artificial Sequence: Synthetic oligonucleotide
caauaagcgccuugcguac

SEQ ID NO: 2109664 - RNA, 19 nt, Artificial Sequence
  Description of Artificial Sequence: Synthetic oligonucleotide
uuccauagcgggcugucuc

SEQ ID NO: 2109665 - RNA, 19 nt, Artificial Sequence
  Description of Artificial Sequence: Synthetic oligonucleotide
gucucauauccauccgagg

SEQ ID NO: 2109666 - RNA, 19 nt, Artificial Sequence
  Description of Artificial Sequence: Synthetic oligonucleotide
aaacugagacuaauaugcu

SEQ ID NO: 2109667 - RNA, 19 nt, Artificial Sequence
  Description of Artificial Sequence: Synthetic oligonucleotide
uacgcccuugaaaggagug

SEQ ID NO: 2109668 - RNA, 19 nt, Artificial Sequence
  Description of Artificial Sequence: Synthetic oligonucleotide
uucaacccauuaaauugaa

SEQ ID NO: 2109669 - RNA, 19 nt, Artificial Sequence
  Description of Artificial Sequence: Synthetic oligonucleotide
cuuaccaucuuggcauagg

SEQ ID NO: 2109670 - RNA, 19 nt, Artificial Sequence
  Description of Artificial Sequence: Synthetic oligonucleotide
ucguagaucuagacaaaua

SEQ ID NO: 2109671 - RNA, 19 nt, Artificial Sequence
  Description of Artificial Sequence: Synthetic oligonucleotide
auagcgggcugucucauau

SEQ ID NO: 2109672 - RNA, 19 nt, Artificial Sequence
  Description of Artificial Sequence: Synthetic oligonucleotide
gacauuagagaaaaccacu

SEQ ID NO: 2109673 - RNA, 19 nt, Artificial Sequence
  Description of Artificial Sequence: Synthetic oligonucleotide
uacaaauaccaggcucccg

SEQ ID NO: 2109674 - RNA, 19 nt, Artificial Sequence
  Description of Artificial Sequence: Synthetic oligonucleotide
uugaacagggaugccggcc

SEQ ID NO: 2109675 - RNA, 19 nt, Artificial Sequence
  Description of Artificial Sequence: Synthetic oligonucleotide
gugcuuugaccacaguggc

SEQ ID NO: 2109676 - RNA, 19 nt, Artificial Sequence
  Description of Artificial Sequence: Synthetic oligonucleotide
uguuggcgacauuucaggu

SEQ ID NO: 2109677 - RNA, 19 nt, Artificial Sequence
  Description of Artificial Sequence: Synthetic oligonucleotide
gcgguuuucguuuauaaaa

SEQ ID NO: 2109678 - RNA, 19 nt, Artificial Sequence
  Description of Artificial Sequence: Synthetic oligonucleotide
ugcguacgcccuugaaagg

SEQ ID NO: 2109679 - RNA, 19 nt, Artificial Sequence
  Description of Artificial Sequence: Synthetic oligonucleotide
aaguacucacucuggccaa

SEQ ID NO: 2109680 - RNA, 19 nt, Artificial Sequence
  Description of Artificial Sequence: Synthetic oligonucleotide
caguagucuuguaucauca

SEQ ID NO: 2109681 - RNA, 19 nt, Artificial Sequence
  Description of Artificial Sequence: Synthetic oligonucleotide
gcuaguguuucguagaucu

SEQ ID NO: 2109682 - RNA, 19 nt, Artificial Sequence
  Description of Artificial Sequence: Synthetic oligonucleotide
agaguacucuccaaugugu

SEQ ID NO: 2109683 - RNA, 19 nt, Artificial Sequence
  Description of Artificial Sequence: Synthetic oligonucleotide
uucaggugacugaguuagg

SEQ ID NO: 2109684 - RNA, 19 nt, Artificial Sequence
  Description of Artificial Sequence: Synthetic oligonucleotide
cugagacuaauaugcugac

SEQ ID NO: 2109685 - RNA, 19 nt, Artificial Sequence
  Description of Artificial Sequence: Synthetic oligonucleotide
uuugauucccuugggguuu

SEQ ID NO: 2109686 - RNA, 19 nt, Artificial Sequence
  Description of Artificial Sequence: Synthetic oligonucleotide
cuuaauauaccugguuuaa

SEQ ID NO: 2109687 - RNA, 19 nt, Artificial Sequence
  Description of Artificial Sequence: Synthetic oligonucleotide
ugagacuaauaugcugaca

SEQ ID NO: 2109688 - RNA, 19 nt, Artificial Sequence
  Description of Artificial Sequence: Synthetic oligonucleotide
uccuguacagauaguugua

SEQ ID NO: 2109689 - RNA, 19 nt, Artificial Sequence
  Description of Artificial Sequence: Synthetic oligonucleotide
augagguccccuucuagau

SEQ ID NO: 2109690 - RNA, 19 nt, Artificial Sequence
  Description of Artificial Sequence: Synthetic oligonucleotide
uauccauccgaggagggua

SEQ ID NO: 2109691 - RNA, 19 nt, Artificial Sequence
  Description of Artificial Sequence: Synthetic oligonucleotide
cccacuuagaguacucucc

SEQ ID NO: 2109692 - RNA, 19 nt, Artificial Sequence
  Description of Artificial Sequence: Synthetic oligonucleotide
aacccuggauagucgaaua

SEQ ID NO: 2109693 - RNA, 19 nt, Artificial Sequence
  Description of Artificial Sequence: Synthetic oligonucleotide
aaggcaggacagauccuuc

SEQ ID NO: 2109694 - RNA, 19 nt, Artificial Sequence
  Description of Artificial Sequence: Synthetic oligonucleotide
caugagguccccuucuaga

SEQ ID NO: 2109695 - RNA, 19 nt, Artificial Sequence
  Description of Artificial Sequence: Synthetic oligonucleotide
gguaucaauaagcgccuug

SEQ ID NO: 2109696 - RNA, 19 nt, Artificial Sequence
  Description of Artificial Sequence: Synthetic oligonucleotide
acgcccuugaaaggagugc

SEQ ID NO: 2109697 - RNA, 19 nt, Artificial Sequence
  Description of Artificial Sequence: Synthetic oligonucleotide
  modified_base (9)..(9): a, c, u, g, unknown or other
ccaguuacngcuagacgcc

SEQ ID NO: 2109698 - RNA, 19 nt, Artificial Sequence
  Description of Artificial Sequence: Synthetic oligonucleotide
cccaauucgugcuuugacc

SEQ ID NO: 2109699 - RNA, 19 nt, Artificial Sequence
  Description of Artificial Sequence: Synthetic oligonucleotide
acagauaguuguagcaacu

SEQ ID NO: 2109700 - RNA, 19 nt, Artificial Sequence
  Description of Artificial Sequence: Synthetic oligonucleotide
  modified_base (6)..(6): a, c, u, g, unknown or other
guuacngcuagacgccauc

SEQ ID NO: 2109701 - RNA, 19 nt, Artificial Sequence
  Description of Artificial Sequence: Synthetic oligonucleotide
agacaaauaggagcggaaa

SEQ ID NO: 2109702 - RNA, 19 nt, Artificial Sequence
  Description of Artificial Sequence: Synthetic oligonucleotide
cacggauggcaucuagagc

SEQ ID NO: 2109703 - RNA, 19 nt, Artificial Sequence
  Description of Artificial Sequence: Synthetic oligonucleotide
gucuuaauauaccugguuu

SEQ ID NO: 2109704 - RNA, 19 nt, Artificial Sequence
  Description of Artificial Sequence: Synthetic oligonucleotide
uauugggugaaggcaggac

SEQ ID NO: 2109705 - RNA, 19 nt, Artificial Sequence
  Description of Artificial Sequence: Synthetic oligonucleotide
ucgcgguuuucguuuauaa

SEQ ID NO: 2109706 - RNA, 19 nt, Artificial Sequence
  Description of Artificial Sequence: Synthetic oligonucleotide
ccugauaccgcaaguacuc

SEQ ID NO: 2109707 - RNA, 19 nt, Artificial Sequence
  Description of Artificial Sequence: Synthetic oligonucleotide
ggaagugccagaacauucc

SEQ ID NO: 2109708 - RNA, 19 nt, Artificial Sequence
  Description of Artificial Sequence: Synthetic oligonucleotide
guguuucguagaucuagac

SEQ ID NO: 2109709 - RNA, 19 nt, Artificial Sequence
  Description of Artificial Sequence: Synthetic oligonucleotide
gcaaguacucacucuggcc

SEQ ID NO: 2109710 - RNA, 19 nt, Artificial Sequence
  Description of Artificial Sequence: Synthetic oligonucleotide
ugaacccuggauagucgaa

SEQ ID NO: 2109711 - RNA, 19 nt, Artificial Sequence
  Description of Artificial Sequence: Synthetic oligonucleotide
ggaggguaucaauaagcgc

SEQ ID NO: 2109712 - RNA, 19 nt, Artificial Sequence
  Description of Artificial Sequence: Synthetic oligonucleotide
ggcaucuagagcuuucauc

SEQ ID NO: 2109713 - RNA, 19 nt, Artificial Sequence
  Description of Artificial Sequence: Synthetic oligonucleotide
caauucgugcuuugaccac

SEQ ID NO: 2109714 - RNA, 19 nt, Artificial Sequence
  Description of Artificial Sequence: Synthetic oligonucleotide
ucuuaccaucuuggcauag

SEQ ID NO: 2109715 - RNA, 19 nt, Artificial Sequence
  Description of Artificial Sequence: Synthetic oligonucleotide
cugaguuaggucuuuggcu

SEQ ID NO: 2109716 - RNA, 19 nt, Artificial Sequence
  Description of Artificial Sequence: Synthetic oligonucleotide
uaggacguuugcucuucug

SEQ ID NO: 2109717 - RNA, 19 nt, Artificial Sequence
  Description of Artificial Sequence: Synthetic oligonucleotide
cuugcguacgcccuugaaa

SEQ ID NO: 2109718 - RNA, 19 nt, Artificial Sequence
  Description of Artificial Sequence: Synthetic oligonucleotide
caccaaaauuccagaggac

SEQ ID NO: 2109719 - RNA, 19 nt, Artificial Sequence
  Description of Artificial Sequence: Synthetic oligonucleotide
aagucauguucaugucuua

SEQ ID NO: 2109720 - RNA, 19 nt, Artificial Sequence
  Description of Artificial Sequence: Synthetic oligonucleotide
aguguuucguagaucuaga

SEQ ID NO: 2109721 - RNA, 19 nt, Artificial Sequence
  Description of Artificial Sequence: Synthetic oligonucleotide
agacuaauaugcugacauu

SEQ ID NO: 2109722 - RNA, 19 nt, Artificial Sequence
  Description of Artificial Sequence: Synthetic oligonucleotide
gugaccuggaugguuguug

SEQ ID NO: 2109723 - RNA, 19 nt, Artificial Sequence
  Description of Artificial Sequence: Synthetic oligonucleotide
  modified_base (18)..(18): a, c, u, g, unknown or other
uccggacagccaguuacng

SEQ ID NO: 2109724 - RNA, 19 nt, Artificial Sequence
  Description of Artificial Sequence: Synthetic oligonucleotide
auguguuauaguuguccuu

SEQ ID NO: 2109725 - RNA, 19 nt, Artificial Sequence
  Description of Artificial Sequence: Synthetic oligonucleotide
uuaggacguuugcucuucu

SEQ ID NO: 2109726 - RNA, 19 nt, Artificial Sequence
  Description of Artificial Sequence: Synthetic oligonucleotide
aggagugcuaguguuucgu

SEQ ID NO: 2109727 - RNA, 19 nt, Artificial Sequence
  Description of Artificial Sequence: Synthetic oligonucleotide
ggacguuugcucuucugac

SEQ ID NO: 2109728 - RNA, 19 nt, Artificial Sequence
  Description of Artificial Sequence: Synthetic oligonucleotide
  modified_base (12)..(12): a, c, u, g, unknown or other
cagccaguuacngcuagac

SEQ ID NO: 2109729 - RNA, 19 nt, Artificial Sequence
  Description of Artificial Sequence: Synthetic oligonucleotide
ggaggggagauaugugacc

SEQ ID NO: 2109730 - RNA, 19 nt, Artificial Sequence
  Description of Artificial Sequence: Synthetic oligonucleotide
gaccccuguuccauagcgg

SEQ ID NO: 2109731 - RNA, 19 nt, Artificial Sequence
  Description of Artificial Sequence: Synthetic oligonucleotide
ccaauucgugcuuugacca

SEQ ID NO: 2109732 - RNA, 19 nt, Artificial Sequence
  Description of Artificial Sequence: Synthetic oligonucleotide
ccuggauagucgaauauca

SEQ ID NO: 2109733 - RNA, 19 nt, Artificial Sequence
  Description of Artificial Sequence: Synthetic oligonucleotide
gauauccugaacccuggau

SEQ ID NO: 2109734 - RNA, 19 nt, Artificial Sequence
  Description of Artificial Sequence: Synthetic oligonucleotide
aggagcggaaauucuucaa

SEQ ID NO: 2109735 - RNA, 19 nt, Artificial Sequence
  Description of Artificial Sequence: Synthetic oligonucleotide
gauaccgcaaguacucacu

SEQ ID NO: 2109736 - RNA, 19 nt, Artificial Sequence
  Description of Artificial Sequence: Synthetic oligonucleotide
cauuccacccacuuagagu

SEQ ID NO: 2109737 - RNA, 19 nt, Artificial Sequence
  Description of Artificial Sequence: Synthetic oligonucleotide
ugcaguagucuuguaucau

SEQ ID NO: 2109738 - RNA, 19 nt, Artificial Sequence
  Description of Artificial Sequence: Synthetic oligonucleotide
gacguuugcucuucugacu

SEQ ID NO: 2109739 - RNA, 19 nt, Artificial Sequence
  Description of Artificial Sequence: Synthetic oligonucleotide
cugaacccuggauagucga

SEQ ID NO: 2109740 - RNA, 19 nt, Artificial Sequence
  Description of Artificial Sequence: Synthetic oligonucleotide
auuucauugcaaagcgcau

SEQ ID NO: 2109741 - RNA, 19 nt, Artificial Sequence
  Description of Artificial Sequence: Synthetic oligonucleotide
aggguaucaauaagcgccu

SEQ ID NO: 2109742 - RNA, 19 nt, Artificial Sequence
  Description of Artificial Sequence: Synthetic oligonucleotide
auauccauccgaggagggu

SEQ ID NO: 2109743 - RNA, 19 nt, Artificial Sequence
  Description of Artificial Sequence: Synthetic oligonucleotide
augucuuaauauaccuggu

SEQ ID NO: 2109744 - RNA, 19 nt, Artificial Sequence
  Description of Artificial Sequence: Synthetic oligonucleotide
ggaaagucauguucauguc

SEQ ID NO: 2109745 - RNA, 19 nt, Artificial Sequence
  Description of Artificial Sequence: Synthetic oligonucleotide
gcaguagucuuguaucauc

SEQ ID NO: 2109746 - RNA, 19 nt, Artificial Sequence
  Description of Artificial Sequence: Synthetic oligonucleotide
uaggucuuuggcugcugau

SEQ ID NO: 2109747 - RNA, 19 nt, Artificial Sequence
  Description of Artificial Sequence: Synthetic oligonucleotide
gaagugccagaacauuccu

SEQ ID NO: 2109748 - RNA, 19 nt, Artificial Sequence
  Description of Artificial Sequence: Synthetic oligonucleotide
uuuaaguccuugggagcau

SEQ ID NO: 2109749 - RNA, 19 nt, Artificial Sequence
  Description of Artificial Sequence: Synthetic oligonucleotide
gcggaaauucuucaaccca

SEQ ID NO: 2109750 - RNA, 19 nt, Artificial Sequence
  Description of Artificial Sequence: Synthetic oligonucleotide
gucgaauaucaaucuccuc

SEQ ID NO: 2109751 - RNA, 19 nt, Artificial Sequence
  Description of Artificial Sequence: Synthetic oligonucleotide
caaagcgcaugauuugucu

SEQ ID NO: 2109752 - RNA, 19 nt, Artificial Sequence
  Description of Artificial Sequence: Synthetic oligonucleotide
gaggggagauaugugaccu

SEQ ID NO: 2109753 - RNA, 19 nt, Artificial Sequence
  Description of Artificial Sequence: Synthetic oligonucleotide
ccuucuagauuucauugca

SEQ ID NO: 2109754 - RNA, 19 nt, Artificial Sequence
  Description of Artificial Sequence: Synthetic oligonucleotide
gagguccccuucuagauuu

SEQ ID NO: 2109755 - RNA, 19 nt, Artificial Sequence
  Description of Artificial Sequence: Synthetic oligonucleotide
cuggauagucgaauaucaa

SEQ ID NO: 2109756 - RNA, 19 nt, Artificial Sequence
  Description of Artificial Sequence: Synthetic oligonucleotide
auaugugaccuggaugguu

SEQ ID NO: 2109757 - RNA, 19 nt, Artificial Sequence
  Description of Artificial Sequence: Synthetic oligonucleotide
augugaccuggaugguugu

SEQ ID NO: 2109758 - RNA, 19 nt, Artificial Sequence
  Description of Artificial Sequence: Synthetic oligonucleotide
guacucuccaauguguuau

SEQ ID NO: 2109759 - RNA, 19 nt, Artificial Sequence
  Description of Artificial Sequence: Synthetic oligonucleotide
cacaagcacaacauucacu

SEQ ID NO: 2109760 - RNA, 19 nt, Artificial Sequence
  Description of Artificial Sequence: Synthetic oligonucleotide
ccguaugccaucacaagca

SEQ ID NO: 2109761 - RNA, 19 nt, Artificial Sequence
  Description of Artificial Sequence: Synthetic oligonucleotide
auccgaggaggguaucaau

SEQ ID NO: 2109762 - RNA, 19 nt, Artificial Sequence
  Description of Artificial Sequence: Synthetic oligonucleotide
uuccacccacuuagaguac

SEQ ID NO: 2109763 - RNA, 19 nt, Artificial Sequence
  Description of Artificial Sequence: Synthetic oligonucleotide
ugcuaguguuucguagauc

SEQ ID NO: 2109764 - RNA, 19 nt, Artificial Sequence
  Description of Artificial Sequence: Synthetic oligonucleotide
cuuugauucccuugggguu

SEQ ID NO: 2109765 - RNA, 19 nt, Artificial Sequence
  Description of Artificial Sequence: Synthetic oligonucleotide
  modified_base (7)..(7): a, c, u, g, unknown or other
aguuacngcuagacgccau

SEQ ID NO: 2109766 - RNA, 19 nt, Artificial Sequence
  Description of Artificial Sequence: Synthetic oligonucleotide
uucugacuggaggggagau

SEQ ID NO: 2109767 - RNA, 19 nt, Artificial Sequence
  Description of Artificial Sequence: Synthetic oligonucleotide
uaagcgccuugcguacgcc

SEQ ID NO: 2109768 - RNA, 19 nt, Artificial Sequence
  Description of Artificial Sequence: Synthetic oligonucleotide
ugcaaggagcugggguuca

SEQ ID NO: 2109769 - RNA, 19 nt, Artificial Sequence
  Description of Artificial Sequence: Synthetic oligonucleotide
gacauuccacccacuuaga

SEQ ID NO: 2109770 - RNA, 19 nt, Artificial Sequence
  Description of Artificial Sequence: Synthetic oligonucleotide
uucgugcuuugaccacagu

SEQ ID NO: 2109771 - RNA, 19 nt, Artificial Sequence
  Description of Artificial Sequence: Synthetic oligonucleotide
acgccaucgcgguuuucgu

SEQ ID NO: 2109772 - RNA, 19 nt, Artificial Sequence
  Description of Artificial Sequence: Synthetic oligonucleotide
guagcaacuuugauucccu

SEQ ID NO: 2109773 - RNA, 19 nt, Artificial Sequence
  Description of Artificial Sequence: Synthetic oligonucleotide
guauugggugaaggcagga

SEQ ID NO: 2109774 - RNA, 19 nt, Artificial Sequence
  Description of Artificial Sequence: Synthetic oligonucleotide
  modified_base (19)..(19): a, c, u, g, unknown or other
cuccggacagccaguuacn

SEQ ID NO: 2109775 - RNA, 19 nt, Artificial Sequence
  Description of Artificial Sequence: Synthetic oligonucleotide
ccgcaaguacucacucugg

SEQ ID NO: 2109776 - RNA, 19 nt, Artificial Sequence
  Description of Artificial Sequence: Synthetic oligonucleotide
caaauaccaggcucccgua

SEQ ID NO: 2109777 - RNA, 19 nt, Artificial Sequence
  Description of Artificial Sequence: Synthetic oligonucleotide
ggagauaugugaccuggau

SEQ ID NO: 2109778 - RNA, 19 nt, Artificial Sequence
  Description of Artificial Sequence: Synthetic oligonucleotide
  modified_base (16)..(16): a, c, u, g, unknown or other
cggacagccaguuacngcu

SEQ ID NO: 2109779 - RNA, 19 nt, Artificial Sequence
  Description of Artificial Sequence: Synthetic oligonucleotide
gucucugagagcucccaau

SEQ ID NO: 2109780 - RNA, 19 nt, Artificial Sequence
  Description of Artificial Sequence: Synthetic oligonucleotide
cuaguguuucguagaucua

SEQ ID NO: 2109781 - RNA, 19 nt, Artificial Sequence
  Description of Artificial Sequence: Synthetic oligonucleotide
gaacccuggauagucgaau

SEQ ID NO: 2109782 - RNA, 19 nt, Artificial Sequence
  Description of Artificial Sequence: Synthetic oligonucleotide
gauaugugaccuggauggu

SEQ ID NO: 2109783 - RNA, 19 nt, Artificial Sequence
  Description of Artificial Sequence: Synthetic oligonucleotide
  modified_base (17)..(17): a, c, u, g, unknown or other
ccggacagccaguuacngc

SEQ ID NO: 2109784 - RNA, 19 nt, Artificial Sequence
  Description of Artificial Sequence: Synthetic oligonucleotide
cagaggcacggauggcauc

SEQ ID NO: 2109785 - RNA, 19 nt, Artificial Sequence
  Description of Artificial Sequence: Synthetic oligonucleotide
uggcgacauuucaggugac

SEQ ID NO: 2109786 - RNA, 19 nt, Artificial Sequence
  Description of Artificial Sequence: Synthetic oligonucleotide
agcgccuugcguacgcccu

SEQ ID NO: 2109787 - RNA, 19 nt, Artificial Sequence
  Description of Artificial Sequence: Synthetic oligonucleotide
  modified_base (13)..(13): a, c, u, g, unknown or other
acagccaguuacngcuaga

SEQ ID NO: 2109788 - RNA, 19 nt, Artificial Sequence
  Description of Artificial Sequence: Synthetic oligonucleotide
gggguucauacuugauauc

SEQ ID NO: 2109789 - RNA, 19 nt, Artificial Sequence
  Description of Artificial Sequence: Synthetic oligonucleotide
uagcgggcugucucauauc

SEQ ID NO: 2109790 - RNA, 19 nt, Artificial Sequence
  Description of Artificial Sequence: Synthetic oligonucleotide
ugugaccuggaugguuguu

SEQ ID NO: 2109791 - RNA, 19 nt, Artificial Sequence
  Description of Artificial Sequence: Synthetic oligonucleotide
uagacgccaucgcgguuuu

SEQ ID NO: 2109792 - RNA, 19 nt, Artificial Sequence
  Description of Artificial Sequence: Synthetic oligonucleotide
caucuagagcuuucauccu

SEQ ID NO: 2109793 - RNA, 19 nt, Artificial Sequence
  Description of Artificial Sequence: Synthetic oligonucleotide
cugauaccgcaaguacuca

SEQ ID NO: 2109794 - RNA, 19 nt, Artificial Sequence
  Description of Artificial Sequence: Synthetic oligonucleotide
agcgcaugauuugucucuu

SEQ ID NO: 2109795 - RNA, 19 nt, Artificial Sequence
  Description of Artificial Sequence: Synthetic oligonucleotide
ccggccuucagcaugaaau

SEQ ID NO: 2109796 - RNA, 19 nt, Artificial Sequence
  Description of Artificial Sequence: Synthetic oligonucleotide
cagcucaaggaagugcuua

SEQ ID NO: 2109797 - RNA, 19 nt, Artificial Sequence
  Description of Artificial Sequence: Synthetic oligonucleotide
caaaauuccagaggacauu

SEQ ID NO: 2109798 - RNA, 19 nt, Artificial Sequence
  Description of Artificial Sequence: Synthetic oligonucleotide
aucgcgguuuucguuuaua

SEQ ID NO: 2109799 - RNA, 19 nt, Artificial Sequence
  Description of Artificial Sequence: Synthetic oligonucleotide
  modified_base (8)..(8): a, c, u, g, unknown or other
caguuacngcuagacgcca

SEQ ID NO: 2109800 - RNA, 19 nt, Artificial Sequence
  Description of Artificial Sequence: Synthetic oligonucleotide
cguacgcccuugaaaggag

SEQ ID NO: 2109801 - RNA, 19 nt, Artificial Sequence
  Description of Artificial Sequence: Synthetic oligonucleotide
gcucccaauucgugcuuug

SEQ ID NO: 2109802 - RNA, 19 nt, Artificial Sequence
  Description of Artificial Sequence: Synthetic oligonucleotide
gugcuaguguuucguagau

SEQ ID NO: 2109803 - RNA, 19 nt, Artificial Sequence
  Description of Artificial Sequence: Synthetic oligonucleotide
gguuuaaauggagcaccaa

SEQ ID NO: 2109804 - RNA, 19 nt, Artificial Sequence
  Description of Artificial Sequence: Synthetic oligonucleotide
gcaaagcgcaugauuuguc

SEQ ID NO: 2109805 - RNA, 19 nt, Artificial Sequence
  Description of Artificial Sequence: Synthetic oligonucleotide
cucccaauucgugcuuuga

SEQ ID NO: 2109806 - RNA, 19 nt, Artificial Sequence
  Description of Artificial Sequence: Synthetic oligonucleotide
gcguacgcccuugaaagga

SEQ ID NO: 2109807 - RNA, 19 nt, Artificial Sequence
  Description of Artificial Sequence: Synthetic oligonucleotide
cauccgaggaggguaucaa

SEQ ID NO: 2109808 - RNA, 19 nt, Artificial Sequence
  Description of Artificial Sequence: Synthetic oligonucleotide
cggccuucagcaugaaaug

SEQ ID NO: 2109809 - RNA, 19 nt, Artificial Sequence
  Description of Artificial Sequence: Synthetic oligonucleotide
ugggagcauugugucccac

SEQ ID NO: 2109810 - RNA, 19 nt, Artificial Sequence
  Description of Artificial Sequence: Synthetic oligonucleotide
ggacaugagguccccuucu

SEQ ID NO: 2109811 - RNA, 19 nt, Artificial Sequence
  Description of Artificial Sequence: Synthetic oligonucleotide
cuagacgccaucgcgguuu

SEQ ID NO: 2109812 - RNA, 19 nt, Artificial Sequence
  Description of Artificial Sequence: Synthetic oligonucleotide
cgacauuucaggugacuga

SEQ ID NO: 2109813 - RNA, 19 nt, Artificial Sequence
  Description of Artificial Sequence: Synthetic oligonucleotide
ggagugcuaguguuucgua

SEQ ID NO: 2109814 - RNA, 19 nt, Artificial Sequence
  Description of Artificial Sequence: Synthetic oligonucleotide
cgcaugauuugucucuuca

SEQ ID NO: 2109815 - RNA, 19 nt, Artificial Sequence
  Description of Artificial Sequence: Synthetic oligonucleotide
ggcacggauggcaucuaga

SEQ ID NO: 2109816 - RNA, 19 nt, Artificial Sequence
  Description of Artificial Sequence: Synthetic oligonucleotide
uccauccgaggaggguauc

SEQ ID NO: 2109817 - RNA, 19 nt, Artificial Sequence
  Description of Artificial Sequence: Synthetic oligonucleotide
ccacuucaugcugucuuac

SEQ ID NO: 2109818 - RNA, 19 nt, Artificial Sequence
  Description of Artificial Sequence: Synthetic oligonucleotide
guggaagugccagaacauu

SEQ ID NO: 2109819 - RNA, 19 nt, Artificial Sequence
  Description of Artificial Sequence: Synthetic oligonucleotide
cauagcgggcugucucaua

SEQ ID NO: 2109820 - RNA, 19 nt, Artificial Sequence
  Description of Artificial Sequence: Synthetic oligonucleotide
gccaucgcgguuuucguuu

SEQ ID NO: 2109821 - RNA, 19 nt, Artificial Sequence
  Description of Artificial Sequence: Synthetic oligonucleotide
agacgccaucgcgguuuuc

SEQ ID NO: 2109822 - RNA, 19 nt, Artificial Sequence
  Description of Artificial Sequence: Synthetic oligonucleotide
guacgcccuugaaaggagu

SEQ ID NO: 2109823 - RNA, 19 nt, Artificial Sequence
  Description of Artificial Sequence: Synthetic oligonucleotide
cacccacuuagaguacucu

SEQ ID NO: 2109824 - RNA, 19 nt, Artificial Sequence
  Description of Artificial Sequence: Synthetic oligonucleotide
gcgcaugauuugucucuuc

SEQ ID NO: 2109825 - RNA, 19 nt, Artificial Sequence
  Description of Artificial Sequence: Synthetic oligonucleotide
gaacagggaugccggccuu

SEQ ID NO: 2109826 - RNA, 19 nt, Artificial Sequence
  Description of Artificial Sequence: Synthetic oligonucleotide
cgcgguuuucguuuauaaa

SEQ ID NO: 2109827 - RNA, 19 nt, Artificial Sequence
  Description of Artificial Sequence: Synthetic oligonucleotide
gagcucccaauucgugcuu

SEQ ID NO: 2109828 - RNA, 19 nt, Artificial Sequence
  Description of Artificial Sequence: Synthetic oligonucleotide
ccauccgaggaggguauca

SEQ ID NO: 2109829 - RNA, 19 nt, Artificial Sequence
  Description of Artificial Sequence: Synthetic oligonucleotide
ggcgacauuucaggugacu

SEQ ID NO: 2109830 - RNA, 19 nt, Artificial Sequence
  Description of Artificial Sequence: Synthetic oligonucleotide
ccuugcguacgcccuugaa

SEQ ID NO: 2109831 - RNA, 19 nt, Artificial Sequence
  Description of Artificial Sequence: Synthetic oligonucleotide
gccggccuucagcaugaaa

SEQ ID NO: 2109832 - RNA, 19 nt, Artificial Sequence
  Description of Artificial Sequence: Synthetic oligonucleotide
ccaucgcgguuuucguuua

SEQ ID NO: 2109833 - RNA, 19 nt, Artificial Sequence
  Description of Artificial Sequence: Synthetic oligonucleotide
gcccuugaaaggagugcua

SEQ ID NO: 2109834 - RNA, 19 nt, Artificial Sequence
  Description of Artificial Sequence: Synthetic oligonucleotide
caucgcgguuuucguuuau

SEQ ID NO: 2109835 - RNA, 19 nt, Artificial Sequence
  Description of Artificial Sequence: Synthetic oligonucleotide
cagcugcaguagucuugua

SEQ ID NO: 2109836 - RNA, 19 nt, Artificial Sequence
  Description of Artificial Sequence: Synthetic oligonucleotide
ggguaucaauaagcgccuu

SEQ ID NO: 2109837 - RNA, 19 nt, Artificial Sequence
  Description of Artificial Sequence: Synthetic oligonucleotide
gcgccuugcguacgcccuu

SEQ ID NO: 2109838 - RNA, 19 nt, Artificial Sequence
  Description of Artificial Sequence: Synthetic oligonucleotide
cgccaucgcgguuuucguu

SEQ ID NO: 2109839 - RNA, 19 nt, Artificial Sequence
  Description of Artificial Sequence: Synthetic oligonucleotide
uguauuuccaagaagaagu

SEQ ID NO: 2109840 - RNA, 19 nt, Artificial Sequence
  Description of Artificial Sequence: Synthetic oligonucleotide
auaaaaggauccuugaacg

SEQ ID NO: 2109841 - RNA, 19 nt, Artificial Sequence
  Description of Artificial Sequence: Synthetic oligonucleotide
aagaaauggauguagaggu

SEQ ID NO: 2109842 - RNA, 19 nt, Artificial Sequence
  Description of Artificial Sequence: Synthetic oligonucleotide
aaagaaauggauguagagg

SEQ ID NO: 2109843 - RNA, 19 nt, Artificial Sequence
  Description of Artificial Sequence: Synthetic oligonucleotide
agaagaaguauguuccugc

SEQ ID NO: 2109844 - RNA, 19 nt, Artificial Sequence
  Description of Artificial Sequence: Synthetic oligonucleotide
agaaguauguuccugcuuc

SEQ ID NO: 2109845 - RNA, 19 nt, Artificial Sequence
  Description of Artificial Sequence: Synthetic oligonucleotide
gagguugucauacucauag

SEQ ID NO: 2109846 - RNA, 19 nt, Artificial Sequence
  Description of Artificial Sequence: Synthetic oligonucleotide
acugugaucacuccauugc

SEQ ID NO: 2109847 - RNA, 19 nt, Artificial Sequence
  Description of Artificial Sequence: Synthetic oligonucleotide
uccaaaucggcucagacga

SEQ ID NO: 2109848 - RNA, 19 nt, Artificial Sequence
  Description of Artificial Sequence: Synthetic oligonucleotide
ucagucucgauucuguagg

SEQ ID NO: 2109849 - RNA, 19 nt, Artificial Sequence
  Description of Artificial Sequence: Synthetic oligonucleotide
aauccaaaucggcucagac

SEQ ID NO: 2109850 - RNA, 19 nt, Artificial Sequence
  Description of Artificial Sequence: Synthetic oligonucleotide
aaugugaauggguaggaga

SEQ ID NO: 2109851 - RNA, 19 nt, Artificial Sequence
  Description of Artificial Sequence: Synthetic oligonucleotide
agaaagaaggcuucaaaug

SEQ ID NO: 2109852 - RNA, 19 nt, Artificial Sequence
  Description of Artificial Sequence: Synthetic oligonucleotide
auucccagggauuuggugg

SEQ ID NO: 2109853 - RNA, 19 nt, Artificial Sequence
  Description of Artificial Sequence: Synthetic oligonucleotide
aacucugcuggcugaaccc

SEQ ID NO: 2109854 - RNA, 19 nt, Artificial Sequence
  Description of Artificial Sequence: Synthetic oligonucleotide
agggaggacacauuggucg

SEQ ID NO: 2109855 - RNA, 19 nt, Artificial Sequence
  Description of Artificial Sequence: Synthetic oligonucleotide
uaccuguugucucaguucg

SEQ ID NO: 2109856 - RNA, 19 nt, Artificial Sequence
  Description of Artificial Sequence: Synthetic oligonucleotide
guuaguagcugguagcucc

SEQ ID NO: 2109857 - RNA, 19 nt, Artificial Sequence
  Description of Artificial Sequence: Synthetic oligonucleotide
uccaagaagaaguauguuc

SEQ ID NO: 2109858 - RNA, 19 nt, Artificial Sequence
  Description of Artificial Sequence: Synthetic oligonucleotide
gacacauuggucgauagug

SEQ ID NO: 2109859 - RNA, 19 nt, Artificial Sequence
  Description of Artificial Sequence: Synthetic oligonucleotide
caguucggaauccaaaucg

SEQ ID NO: 2109860 - RNA, 19 nt, Artificial Sequence
  Description of Artificial Sequence: Synthetic oligonucleotide
uugaccaguuaguagcugg

SEQ ID NO: 2109861 - RNA, 19 nt, Artificial Sequence
  Description of Artificial Sequence: Synthetic oligonucleotide
cuuacaguagagcacgggc

SEQ ID NO: 2109862 - RNA, 19 nt, Artificial Sequence
  Description of Artificial Sequence: Synthetic oligonucleotide
uuacaguagagcacgggcc

SEQ ID NO: 2109863 - RNA, 19 nt, Artificial Sequence
  Description of Artificial Sequence: Synthetic oligonucleotide
caaagaaauggauguagag

SEQ ID NO: 2109864 - RNA, 19 nt, Artificial Sequence
  Description of Artificial Sequence: Synthetic oligonucleotide
gaauggguaggagaaauag

SEQ ID NO: 2109865 - RNA, 19 nt, Artificial Sequence
  Description of Artificial Sequence: Synthetic oligonucleotide
gauuccaugaaagcccugg

SEQ ID NO: 2109866 - RNA, 19 nt, Artificial Sequence
  Description of Artificial Sequence: Synthetic oligonucleotide
aaacuaccucuccauuuac

SEQ ID NO: 2109867 - RNA, 19 nt, Artificial Sequence
  Description of Artificial Sequence: Synthetic oligonucleotide
augaagaaccuccuuagcu

SEQ ID NO: 2109868 - RNA, 19 nt, Artificial Sequence
  Description of Artificial Sequence: Synthetic oligonucleotide
uggucgauaguguauuucc

SEQ ID NO: 2109869 - RNA, 19 nt, Artificial Sequence
  Description of Artificial Sequence: Synthetic oligonucleotide
auccaaaucggcucagacg

SEQ ID NO: 2109870 - RNA, 19 nt, Artificial Sequence
  Description of Artificial Sequence: Synthetic oligonucleotide
uuugaugccggugaaguca

SEQ ID NO: 2109871 - RNA, 19 nt, Artificial Sequence
  Description of Artificial Sequence: Synthetic oligonucleotide
guguguggaacucugcugg

SEQ ID NO: 2109872 - RNA, 19 nt, Artificial Sequence
  Description of Artificial Sequence: Synthetic oligonucleotide
ugaacgacacggcuguucc

SEQ ID NO: 2109873 - RNA, 19 nt, Artificial Sequence
  Description of Artificial Sequence: Synthetic oligonucleotide
gguauccucacguaggagg

SEQ ID NO: 2109874 - RNA, 19 nt, Artificial Sequence
  Description of Artificial Sequence: Synthetic oligonucleotide
ucgauaguguauuuccaag

SEQ ID NO: 2109875 - RNA, 19 nt, Artificial Sequence
  Description of Artificial Sequence: Synthetic oligonucleotide
aaaucggcucagacgaucc

SEQ ID NO: 2109876 - RNA, 19 nt, Artificial Sequence
  Description of Artificial Sequence: Synthetic oligonucleotide
ugaagucagggcuucacug

SEQ ID NO: 2109877 - RNA, 19 nt, Artificial Sequence
  Description of Artificial Sequence: Synthetic oligonucleotide
gaccuuacaguagagcacg

SEQ ID NO: 2109878 - RNA, 19 nt, Artificial Sequence
  Description of Artificial Sequence: Synthetic oligonucleotide
uagggaaccaccgaugaag

SEQ ID NO: 2109879 - RNA, 19 nt, Artificial Sequence
  Description of Artificial Sequence: Synthetic oligonucleotide
ugaagaaccuccuuagcuc

SEQ ID NO: 2109880 - RNA, 19 nt, Artificial Sequence
  Description of Artificial Sequence: Synthetic oligonucleotide
gaaauggauguagagguug

SEQ ID NO: 2109881 - RNA, 19 nt, Artificial Sequence
  Description of Artificial Sequence: Synthetic oligonucleotide
agaaauaggccaccuuguc

SEQ ID NO: 2109882 - RNA, 19 nt, Artificial Sequence
  Description of Artificial Sequence: Synthetic oligonucleotide
aacgacacggcuguucccg

SEQ ID NO: 2109883 - RNA, 19 nt, Artificial Sequence
  Description of Artificial Sequence: Synthetic oligonucleotide
ucuagggaaccaccgauga

SEQ ID NO: 2109884 - RNA, 19 nt, Artificial Sequence
  Description of Artificial Sequence: Synthetic oligonucleotide
uucggaauccaaaucggcu

SEQ ID NO: 2109885 - RNA, 19 nt, Artificial Sequence
  Description of Artificial Sequence: Synthetic oligonucleotide
cucuccauuuacaaagagc

SEQ ID NO: 2109886 - RNA, 19 nt, Artificial Sequence
  Description of Artificial Sequence: Synthetic oligonucleotide
cuuagcucugccacaaggc

SEQ ID NO: 2109887 - RNA, 19 nt, Artificial Sequence
  Description of Artificial Sequence: Synthetic oligonucleotide
cuguaggguucuuugaugc

SEQ ID NO: 2109888 - RNA, 19 nt, Artificial Sequence
  Description of Artificial Sequence: Synthetic oligonucleotide
ucuagcacauugugugugg

SEQ ID NO: 2109889 - RNA, 19 nt, Artificial Sequence
  Description of Artificial Sequence: Synthetic oligonucleotide
aggccaguguuccugaggg

SEQ ID NO: 2109890 - RNA, 19 nt, Artificial Sequence
  Description of Artificial Sequence: Synthetic oligonucleotide
gaugggcuugaccaguuag

SEQ ID NO: 2109891 - RNA, 19 nt, Artificial Sequence
  Description of Artificial Sequence: Synthetic oligonucleotide
ggauccuugaacgacacgg

SEQ ID NO: 2109892 - RNA, 19 nt, Artificial Sequence
  Description of Artificial Sequence: Synthetic oligonucleotide
agcacauuguguguggaac

SEQ ID NO: 2109893 - RNA, 19 nt, Artificial Sequence
  Description of Artificial Sequence: Synthetic oligonucleotide
aaucggcucagacgauccc

SEQ ID NO: 2109894 - RNA, 19 nt, Artificial Sequence
  Description of Artificial Sequence: Synthetic oligonucleotide
gcuucuagcacauugugug

SEQ ID NO: 2109895 - RNA, 19 nt, Artificial Sequence
  Description of Artificial Sequence: Synthetic oligonucleotide
gaaccaccgaugaagaacc

SEQ ID NO: 2109896 - RNA, 19 nt, Artificial Sequence
  Description of Artificial Sequence: Synthetic oligonucleotide
cauacucauagccuugggc

SEQ ID NO: 2109897 - RNA, 19 nt, Artificial Sequence
  Description of Artificial Sequence: Synthetic oligonucleotide
uaaaaggauccuugaacga

SEQ ID NO: 2109898 - RNA, 19 nt, Artificial Sequence
  Description of Artificial Sequence: Synthetic oligonucleotide
accaguuaguagcugguag

SEQ ID NO: 2109899 - RNA, 19 nt, Artificial Sequence
  Description of Artificial Sequence: Synthetic oligonucleotide
uacaguagagcacgggcca

SEQ ID NO: 2109900 - RNA, 19 nt, Artificial Sequence
  Description of Artificial Sequence: Synthetic oligonucleotide
ugcgagggaggacacauug

SEQ ID NO: 2109901 - RNA, 19 nt, Artificial Sequence
  Description of Artificial Sequence: Synthetic oligonucleotide
aaggugacgguaccuguug

SEQ ID NO: 2109902 - RNA, 19 nt, Artificial Sequence
  Description of Artificial Sequence: Synthetic oligonucleotide
uugggcugaaacuaccucu

SEQ ID NO: 2109903 - RNA, 19 nt, Artificial Sequence
  Description of Artificial Sequence: Synthetic oligonucleotide
uaggguucuuugaugccgg

SEQ ID NO: 2109904 - RNA, 19 nt, Artificial Sequence
  Description of Artificial Sequence: Synthetic oligonucleotide
uagcuccacaaagaaaugg

SEQ ID NO: 2109905 - RNA, 19 nt, Artificial Sequence
  Description of Artificial Sequence: Synthetic oligonucleotide
ucuguaggguucuuugaug

SEQ ID NO: 2109906 - RNA, 19 nt, Artificial Sequence
  Description of Artificial Sequence: Synthetic oligonucleotide
ucucuugcuccacaggcca

SEQ ID NO: 2109907 - RNA, 19 nt, Artificial Sequence
  Description of Artificial Sequence: Synthetic oligonucleotide
agcuccaugggccuccacg

SEQ ID NO: 2109908 - RNA, 19 nt, Artificial Sequence
  Description of Artificial Sequence: Synthetic oligonucleotide
uucacugugaucacuccau

SEQ ID NO: 2109909 - RNA, 19 nt, Artificial Sequence
  Description of Artificial Sequence: Synthetic oligonucleotide
uccuugaacgacacggcug

SEQ ID NO: 2109910 - RNA, 19 nt, Artificial Sequence
  Description of Artificial Sequence: Synthetic oligonucleotide
uggguaggagaaauaggcc

SEQ ID NO: 2109911 - RNA, 19 nt, Artificial Sequence
  Description of Artificial Sequence: Synthetic oligonucleotide
gaugaagaaccuccuuagc

SEQ ID NO: 2109912 - RNA, 19 nt, Artificial Sequence
  Description of Artificial Sequence: Synthetic oligonucleotide
aguauguuccugcuucucu

SEQ ID NO: 2109913 - RNA, 19 nt, Artificial Sequence
  Description of Artificial Sequence: Synthetic oligonucleotide
ugaaacuaccucuccauuu

SEQ ID NO: 2109914 - RNA, 19 nt, Artificial Sequence
  Description of Artificial Sequence: Synthetic oligonucleotide
gaacucugcuggcugaacc

SEQ ID NO: 2109915 - RNA, 19 nt, Artificial Sequence
  Description of Artificial Sequence: Synthetic oligonucleotide
ucaaagucugugcccacga

SEQ ID NO: 2109916 - RNA, 19 nt, Artificial Sequence
  Description of Artificial Sequence: Synthetic oligonucleotide
guaggguucuuugaugccg

SEQ ID NO: 2109917 - RNA, 19 nt, Artificial Sequence
  Description of Artificial Sequence: Synthetic oligonucleotide
uguugucucaguucggaau

SEQ ID NO: 2109918 - RNA, 19 nt, Artificial Sequence
  Description of Artificial Sequence: Synthetic oligonucleotide
uagccuuccacacgguacc

SEQ ID NO: 2109919 - RNA, 19 nt, Artificial Sequence
  Description of Artificial Sequence: Synthetic oligonucleotide
uauguuccugcuucucucc

SEQ ID NO: 2109920 - RNA, 19 nt, Artificial Sequence
  Description of Artificial Sequence: Synthetic oligonucleotide
ugucauacucauagccuug

SEQ ID NO: 2109921 - RNA, 19 nt, Artificial Sequence
  Description of Artificial Sequence: Synthetic oligonucleotide
ucauacucauagccuuggg

SEQ ID NO: 2109922 - RNA, 19 nt, Artificial Sequence
  Description of Artificial Sequence: Synthetic oligonucleotide
ucucccucagucucgauuc

SEQ ID NO: 2109923 - RNA, 19 nt, Artificial Sequence
  Description of Artificial Sequence: Synthetic oligonucleotide
uccauugcuguccaccuuc

SEQ ID NO: 2109924 - RNA, 19 nt, Artificial Sequence
  Description of Artificial Sequence: Synthetic oligonucleotide
ucagggugugugauccugg

SEQ ID NO: 2109925 - RNA, 19 nt, Artificial Sequence
  Description of Artificial Sequence: Synthetic oligonucleotide
ucggaauccaaaucggcuc

SEQ ID NO: 2109926 - RNA, 19 nt, Artificial Sequence
  Description of Artificial Sequence: Synthetic oligonucleotide
gucaucucaaagucugugc

SEQ ID NO: 2109927 - RNA, 19 nt, Artificial Sequence
  Description of Artificial Sequence: Synthetic oligonucleotide
uccguagggaguuggauuc

SEQ ID NO: 2109928 - RNA, 19 nt, Artificial Sequence
  Description of Artificial Sequence: Synthetic oligonucleotide
gaugccggugaagucaggg

SEQ ID NO: 2109929 - RNA, 19 nt, Artificial Sequence
  Description of Artificial Sequence: Synthetic oligonucleotide
uugaugccggugaagucag

SEQ ID NO: 2109930 - RNA, 19 nt, Artificial Sequence
  Description of Artificial Sequence: Synthetic oligonucleotide
guguauuuccaagaagaag

SEQ ID NO: 2109931 - RNA, 19 nt, Artificial Sequence
  Description of Artificial Sequence: Synthetic oligonucleotide
ucaguucggaauccaaauc

SEQ ID NO: 2109932 - RNA, 19 nt, Artificial Sequence
  Description of Artificial Sequence: Synthetic oligonucleotide
uuguggcggccauaaaagg

SEQ ID NO: 2109933 - RNA, 19 nt, Artificial Sequence
  Description of Artificial Sequence: Synthetic oligonucleotide
uucucuugcuccacaggcc

SEQ ID NO: 2109934 - RNA, 19 nt, Artificial Sequence
  Description of Artificial Sequence: Synthetic oligonucleotide
agguugucauacucauagc

SEQ ID NO: 2109935 - RNA, 19 nt, Artificial Sequence
  Description of Artificial Sequence: Synthetic oligonucleotide
ugcaagcggaaggugacgg

SEQ ID NO: 2109936 - RNA, 19 nt, Artificial Sequence
  Description of Artificial Sequence: Synthetic oligonucleotide
uugucauacucauagccuu

SEQ ID NO: 2109937 - RNA, 19 nt, Artificial Sequence
  Description of Artificial Sequence: Synthetic oligonucleotide
agggagaggaccuuacagu

SEQ ID NO: 2109938 - RNA, 19 nt, Artificial Sequence
  Description of Artificial Sequence: Synthetic oligonucleotide
cucagucucgauucuguag

SEQ ID NO: 2109939 - RNA, 19 nt, Artificial Sequence
  Description of Artificial Sequence: Synthetic oligonucleotide
ucucaguucggaauccaaa

SEQ ID NO: 2109940 - RNA, 19 nt, Artificial Sequence
  Description of Artificial Sequence: Synthetic oligonucleotide
uccgcaucuguuuccguag

SEQ ID NO: 2109941 - RNA, 19 nt, Artificial Sequence
  Description of Artificial Sequence: Synthetic oligonucleotide
uaggccaguguuccugagg

SEQ ID NO: 2109942 - RNA, 19 nt, Artificial Sequence
  Description of Artificial Sequence: Synthetic oligonucleotide
uuccaugaaagcccuggac

SEQ ID NO: 2109943 - RNA, 19 nt, Artificial Sequence
  Description of Artificial Sequence: Synthetic oligonucleotide
ugggacggucaucucaaag

SEQ ID NO: 2109944 - RNA, 19 nt, Artificial Sequence
  Description of Artificial Sequence: Synthetic oligonucleotide
ugccggugaagucagggcu

SEQ ID NO: 2109945 - RNA, 19 nt, Artificial Sequence
  Description of Artificial Sequence: Synthetic oligonucleotide
gaaacuaccucuccauuua

SEQ ID NO: 2109946 - RNA, 19 nt, Artificial Sequence
  Description of Artificial Sequence: Synthetic oligonucleotide
aguucggaauccaaaucgg

SEQ ID NO: 2109947 - RNA, 19 nt, Artificial Sequence
  Description of Artificial Sequence: Synthetic oligonucleotide
cauuguguguggaacucug

SEQ ID NO: 2109948 - RNA, 19 nt, Artificial Sequence
  Description of Artificial Sequence: Synthetic oligonucleotide
uguuuccguagggaguugg

SEQ ID NO: 2109949 - RNA, 19 nt, Artificial Sequence
  Description of Artificial Sequence: Synthetic oligonucleotide
aaguauguuccugcuucuc

SEQ ID NO: 2109950 - RNA, 19 nt, Artificial Sequence
  Description of Artificial Sequence: Synthetic oligonucleotide
ucgacggaaggcuucuagc

SEQ ID NO: 2109951 - RNA, 19 nt, Artificial Sequence
  Description of Artificial Sequence: Synthetic oligonucleotide
uggucagggugugugaucc

SEQ ID NO: 2109952 - RNA, 19 nt, Artificial Sequence
  Description of Artificial Sequence: Synthetic oligonucleotide
uguaggguucuuugaugcc

SEQ ID NO: 2109953 - RNA, 19 nt, Artificial Sequence
  Description of Artificial Sequence: Synthetic oligonucleotide
aucggcucagacgaucccc

SEQ ID NO: 2109954 - RNA, 19 nt, Artificial Sequence
  Description of Artificial Sequence: Synthetic oligonucleotide
uucuagcacauugugugug

SEQ ID NO: 2109955 - RNA, 19 nt, Artificial Sequence
  Description of Artificial Sequence: Synthetic oligonucleotide
uuaguagcugguagcucca

SEQ ID NO: 2109956 - RNA, 19 nt, Artificial Sequence
  Description of Artificial Sequence: Synthetic oligonucleotide
agcggaaggugacgguacc

SEQ ID NO: 2109957 - RNA, 19 nt, Artificial Sequence
  Description of Artificial Sequence: Synthetic oligonucleotide
cauagccuugggcugaaac

SEQ ID NO: 2109958 - RNA, 19 nt, Artificial Sequence
  Description of Artificial Sequence: Synthetic oligonucleotide
acacuccgcaucuguuucc

SEQ ID NO: 2109959 - RNA, 19 nt, Artificial Sequence
  Description of Artificial Sequence: Synthetic oligonucleotide
cacacgguaccucugccag

SEQ ID NO: 2109960 - RNA, 19 nt, Artificial Sequence
  Description of Artificial Sequence: Synthetic oligonucleotide
aagcggaaggugacgguac

SEQ ID NO: 2109961 - RNA, 19 nt, Artificial Sequence
  Description of Artificial Sequence: Synthetic oligonucleotide
ugaccaguuaguagcuggu

SEQ ID NO: 2109962 - RNA, 19 nt, Artificial Sequence
  Description of Artificial Sequence: Synthetic oligonucleotide
uugaagguucccgguaucc

SEQ ID NO: 2109963 - RNA, 19 nt, Artificial Sequence
  Description of Artificial Sequence: Synthetic oligonucleotide
ucccgguauccucacguag

SEQ ID NO: 2109964 - RNA, 19 nt, Artificial Sequence
  Description of Artificial Sequence: Synthetic oligonucleotide
acggaaggcuucuagcaca

SEQ ID NO: 2109965 - RNA, 19 nt, Artificial Sequence
  Description of Artificial Sequence: Synthetic oligonucleotide
gagaacugagggaaugaug

SEQ ID NO: 2109966 - RNA, 19 nt, Artificial Sequence
  Description of Artificial Sequence: Synthetic oligonucleotide
auuguguguggaacucugc

SEQ ID NO: 2109967 - RNA, 19 nt, Artificial Sequence
  Description of Artificial Sequence: Synthetic oligonucleotide
uuacaaagagccggagggc

SEQ ID NO: 2109968 - RNA, 19 nt, Artificial Sequence
  Description of Artificial Sequence: Synthetic oligonucleotide
gaagguucccgguauccuc

SEQ ID NO: 2109969 - RNA, 19 nt, Artificial Sequence
  Description of Artificial Sequence: Synthetic oligonucleotide
ugggcugaaacuaccucuc

SEQ ID NO: 2109970 - RNA, 19 nt, Artificial Sequence
  Description of Artificial Sequence: Synthetic oligonucleotide
gucauacucauagccuugg

SEQ ID NO: 2109971 - RNA, 19 nt, Artificial Sequence
  Description of Artificial Sequence: Synthetic oligonucleotide
cuuuguggcggccauaaaa

SEQ ID NO: 2109972 - RNA, 19 nt, Artificial Sequence
  Description of Artificial Sequence: Synthetic oligonucleotide
acggucaucucaaagucug

SEQ ID NO: 2109973 - RNA, 19 nt, Artificial Sequence
  Description of Artificial Sequence: Synthetic oligonucleotide
ucuugcaugcggcgccggg

SEQ ID NO: 2109974 - RNA, 19 nt, Artificial Sequence
  Description of Artificial Sequence: Synthetic oligonucleotide
guauguuccugcuucucuc

SEQ ID NO: 2109975 - RNA, 19 nt, Artificial Sequence
  Description of Artificial Sequence: Synthetic oligonucleotide
aggacacauuggucgauag

SEQ ID NO: 2109976 - RNA, 19 nt, Artificial Sequence
  Description of Artificial Sequence: Synthetic oligonucleotide
ugaauggguaggagaaaua

SEQ ID NO: 2109977 - RNA, 19 nt, Artificial Sequence
  Description of Artificial Sequence: Synthetic oligonucleotide
gauccuugaacgacacggc

SEQ ID NO: 2109978 - RNA, 19 nt, Artificial Sequence
  Description of Artificial Sequence: Synthetic oligonucleotide
guaggaggaguccuccagc

SEQ ID NO: 2109979 - RNA, 19 nt, Artificial Sequence
  Description of Artificial Sequence: Synthetic oligonucleotide
gaagaaccuccuuagcucu

SEQ ID NO: 2109980 - RNA, 19 nt, Artificial Sequence
  Description of Artificial Sequence: Synthetic oligonucleotide
ccaccgaugaagaaccucc

SEQ ID NO: 2109981 - RNA, 19 nt, Artificial Sequence
  Description of Artificial Sequence: Synthetic oligonucleotide
cagcucuagggaaccaccg

SEQ ID NO: 2109982 - RNA, 19 nt, Artificial Sequence
  Description of Artificial Sequence: Synthetic oligonucleotide
augugaauggguaggagaa

SEQ ID NO: 2109983 - RNA, 19 nt, Artificial Sequence
  Description of Artificial Sequence: Synthetic oligonucleotide
aguuaguagcugguagcuc

SEQ ID NO: 2109984 - RNA, 19 nt, Artificial Sequence
  Description of Artificial Sequence: Synthetic oligonucleotide
acugagggaaugaugggcu

SEQ ID NO: 2109985 - RNA, 19 nt, Artificial Sequence
  Description of Artificial Sequence: Synthetic oligonucleotide
ugagggaaugaugggcuug

SEQ ID NO: 2109986 - RNA, 19 nt, Artificial Sequence
  Description of Artificial Sequence: Synthetic oligonucleotide
uguguggaacucugcuggc

SEQ ID NO: 2109987 - RNA, 19 nt, Artificial Sequence
  Description of Artificial Sequence: Synthetic oligonucleotide
ugugcgagggaggacacau

SEQ ID NO: 2109988 - RNA, 19 nt, Artificial Sequence
  Description of Artificial Sequence: Synthetic oligonucleotide
cauucccagggauuuggug

SEQ ID NO: 2109989 - RNA, 19 nt, Artificial Sequence
  Description of Artificial Sequence: Synthetic oligonucleotide
guaccuguugucucaguuc

SEQ ID NO: 2109990 - RNA, 19 nt, Artificial Sequence
  Description of Artificial Sequence: Synthetic oligonucleotide
uaccucugccagaagucca

SEQ ID NO: 2109991 - RNA, 19 nt, Artificial Sequence
  Description of Artificial Sequence: Synthetic oligonucleotide
aaccuccuuagcucugcca

SEQ ID NO: 2109992 - RNA, 19 nt, Artificial Sequence
  Description of Artificial Sequence: Synthetic oligonucleotide
gcugaacccuuccaggcgg

SEQ ID NO: 2109993 - RNA, 19 nt, Artificial Sequence
  Description of Artificial Sequence: Synthetic oligonucleotide
uuccguagggaguuggauu

SEQ ID NO: 2109994 - RNA, 19 nt, Artificial Sequence
  Description of Artificial Sequence: Synthetic oligonucleotide
cucaaagucugugcccacg

SEQ ID NO: 2109995 - RNA, 19 nt, Artificial Sequence
  Description of Artificial Sequence: Synthetic oligonucleotide
guagcugguagcuccacaa

SEQ ID NO: 2109996 - RNA, 19 nt, Artificial Sequence
  Description of Artificial Sequence: Synthetic oligonucleotide
agagagcuaggccaguguu

SEQ ID NO: 2109997 - RNA, 19 nt, Artificial Sequence
  Description of Artificial Sequence: Synthetic oligonucleotide
ggaaccaccgaugaagaac

SEQ ID NO: 2109998 - RNA, 19 nt, Artificial Sequence
  Description of Artificial Sequence: Synthetic oligonucleotide
cccauagccuuccacacgg

SEQ ID NO: 2109999 - RNA, 19 nt, Artificial Sequence
  Description of Artificial Sequence: Synthetic oligonucleotide
acacggcuguucccgcucc

SEQ ID NO: 2110000 - RNA, 19 nt, Artificial Sequence
  Description of Artificial Sequence: Synthetic oligonucleotide
gacgguaccuguugucuca

SEQ ID NO: 2110001 - RNA, 19 nt, Artificial Sequence
  Description of Artificial Sequence: Synthetic oligonucleotide
cucgacggaaggcuucuag

SEQ ID NO: 2110002 - RNA, 19 nt, Artificial Sequence
  Description of Artificial Sequence: Synthetic oligonucleotide
aacuaccucuccauuuaca

SEQ ID NO: 2110003 - RNA, 19 nt, Artificial Sequence
  Description of Artificial Sequence: Synthetic oligonucleotide
gucgauaguguauuuccaa

SEQ ID NO: 2110004 - RNA, 19 nt, Artificial Sequence
  Description of Artificial Sequence: Synthetic oligonucleotide
cagucucgauucuguaggg

SEQ ID NO: 2110005 - RNA, 19 nt, Artificial Sequence
  Description of Artificial Sequence: Synthetic oligonucleotide
aucacuccauugcugucca

SEQ ID NO: 2110006 - RNA, 19 nt, Artificial Sequence
  Description of Artificial Sequence: Synthetic oligonucleotide
ugaaagcccuggacugcag

SEQ ID NO: 2110007 - RNA, 19 nt, Artificial Sequence
  Description of Artificial Sequence: Synthetic oligonucleotide
acaaagagccggagggcac

SEQ ID NO: 2110008 - RNA, 19 nt, Artificial Sequence
  Description of Artificial Sequence: Synthetic oligonucleotide
guucggaauccaaaucggc

SEQ ID NO: 2110009 - RNA, 19 nt, Artificial Sequence
  Description of Artificial Sequence: Synthetic oligonucleotide
uccgggagggcgucagccg

SEQ ID NO: 2110010 - RNA, 19 nt, Artificial Sequence
  Description of Artificial Sequence: Synthetic oligonucleotide
gagcacgggccauuccggg

SEQ ID NO: 2110011 - RNA, 19 nt, Artificial Sequence
  Description of Artificial Sequence: Synthetic oligonucleotide
ugugugauccugggguggc

SEQ ID NO: 2110012 - RNA, 19 nt, Artificial Sequence
  Description of Artificial Sequence: Synthetic oligonucleotide
cagggugugugauccuggg

SEQ ID NO: 2110013 - RNA, 19 nt, Artificial Sequence
  Description of Artificial Sequence: Synthetic oligonucleotide
uuggucgauaguguauuuc

SEQ ID NO: 2110014 - RNA, 19 nt, Artificial Sequence
  Description of Artificial Sequence: Synthetic oligonucleotide
ccuuagcucugccacaagg

SEQ ID NO: 2110015 - RNA, 19 nt, Artificial Sequence
  Description of Artificial Sequence: Synthetic oligonucleotide
aguguauuuccaagaagaa

SEQ ID NO: 2110016 - RNA, 19 nt, Artificial Sequence
  Description of Artificial Sequence: Synthetic oligonucleotide
guaccucugccagaagucc

SEQ ID NO: 2110017 - RNA, 19 nt, Artificial Sequence
  Description of Artificial Sequence: Synthetic oligonucleotide
uugcaugcggcgccgggcu

SEQ ID NO: 2110018 - RNA, 19 nt, Artificial Sequence
  Description of Artificial Sequence: Synthetic oligonucleotide
acgacacggcuguucccgc

SEQ ID NO: 2110019 - RNA, 19 nt, Artificial Sequence
  Description of Artificial Sequence: Synthetic oligonucleotide
gacucauccugguggagaa

SEQ ID NO: 2110020 - RNA, 19 nt, Artificial Sequence
  Description of Artificial Sequence: Synthetic oligonucleotide
accaccgaugaagaaccuc

SEQ ID NO: 2110021 - RNA, 19 nt, Artificial Sequence
  Description of Artificial Sequence: Synthetic oligonucleotide
aggcgguccaacacacucc

SEQ ID NO: 2110022 - RNA, 19 nt, Artificial Sequence
  Description of Artificial Sequence: Synthetic oligonucleotide
uugaacgacacggcuguuc

SEQ ID NO: 2110023 - RNA, 19 nt, Artificial Sequence
  Description of Artificial Sequence: Synthetic oligonucleotide
agcucuagggaaccaccga

SEQ ID NO: 2110024 - RNA, 19 nt, Artificial Sequence
  Description of Artificial Sequence: Synthetic oligonucleotide
gggaaugaugggcuugacc

SEQ ID NO: 2110025 - RNA, 19 nt, Artificial Sequence
  Description of Artificial Sequence: Synthetic oligonucleotide
ggcgucagccgacucaucc

SEQ ID NO: 2110026 - RNA, 19 nt, Artificial Sequence
  Description of Artificial Sequence: Synthetic oligonucleotide
caaagucugugcccacgag

SEQ ID NO: 2110027 - RNA, 19 nt, Artificial Sequence
  Description of Artificial Sequence: Synthetic oligonucleotide
gugaucacuccauugcugu

SEQ ID NO: 2110028 - RNA, 19 nt, Artificial Sequence
  Description of Artificial Sequence: Synthetic oligonucleotide
ugacgguaccuguugucuc

SEQ ID NO: 2110029 - RNA, 19 nt, Artificial Sequence
  Description of Artificial Sequence: Synthetic oligonucleotide
agauggucaggguguguga

SEQ ID NO: 2110030 - RNA, 19 nt, Artificial Sequence
  Description of Artificial Sequence: Synthetic oligonucleotide
guugucauacucauagccu

SEQ ID NO: 2110031 - RNA, 19 nt, Artificial Sequence
  Description of Artificial Sequence: Synthetic oligonucleotide
ucagccgacucauccuggu

SEQ ID NO: 2110032 - RNA, 19 nt, Artificial Sequence
  Description of Artificial Sequence: Synthetic oligonucleotide
gaacccuuccaggcggucc

SEQ ID NO: 2110033 - RNA, 19 nt, Artificial Sequence
  Description of Artificial Sequence: Synthetic oligonucleotide
ggccauaaaaggauccuug

SEQ ID NO: 2110034 - RNA, 19 nt, Artificial Sequence
  Description of Artificial Sequence: Synthetic oligonucleotide
uggagaaagaaggcuucaa

SEQ ID NO: 2110035 - RNA, 19 nt, Artificial Sequence
  Description of Artificial Sequence: Synthetic oligonucleotide
uuuccguagggaguuggau

SEQ ID NO: 2110036 - RNA, 19 nt, Artificial Sequence
  Description of Artificial Sequence: Synthetic oligonucleotide
auuccgggagggcgucagc

SEQ ID NO: 2110037 - RNA, 19 nt, Artificial Sequence
  Description of Artificial Sequence: Synthetic oligonucleotide
uacucuuuguggcggccau

SEQ ID NO: 2110038 - RNA, 19 nt, Artificial Sequence
  Description of Artificial Sequence: Synthetic oligonucleotide
caaaucggcucagacgauc

SEQ ID NO: 2110039 - RNA, 19 nt, Artificial Sequence
  Description of Artificial Sequence: Synthetic oligonucleotide
ugugaauggguaggagaaa

SEQ ID NO: 2110040 - RNA, 19 nt, Artificial Sequence
  Description of Artificial Sequence: Synthetic oligonucleotide
ugaucacuccauugcuguc

SEQ ID NO: 2110041 - RNA, 19 nt, Artificial Sequence
  Description of Artificial Sequence: Synthetic oligonucleotide
guauccucacguaggagga

SEQ ID NO: 2110042 - RNA, 19 nt, Artificial Sequence
  Description of Artificial Sequence: Synthetic oligonucleotide
cgaugaagaaccuccuuag

SEQ ID NO: 2110043 - RNA, 19 nt, Artificial Sequence
  Description of Artificial Sequence: Synthetic oligonucleotide
uagcacauuguguguggaa

SEQ ID NO: 2110044 - RNA, 19 nt, Artificial Sequence
  Description of Artificial Sequence: Synthetic oligonucleotide
agagcacgggccauuccgg

SEQ ID NO: 2110045 - RNA, 19 nt, Artificial Sequence
  Description of Artificial Sequence: Synthetic oligonucleotide
ugggcuugaccaguuagua

SEQ ID NO: 2110046 - RNA, 19 nt, Artificial Sequence
  Description of Artificial Sequence: Synthetic oligonucleotide
cuugaagguucccgguauc

SEQ ID NO: 2110047 - RNA, 19 nt, Artificial Sequence
  Description of Artificial Sequence: Synthetic oligonucleotide
gaacgacacggcuguuccc

SEQ ID NO: 2110048 - RNA, 19 nt, Artificial Sequence
  Description of Artificial Sequence: Synthetic oligonucleotide
cacaggucugggucacucc

SEQ ID NO: 2110049 - RNA, 19 nt, Artificial Sequence
  Description of Artificial Sequence: Synthetic oligonucleotide
uagcugguagcuccacaaa

SEQ ID NO: 2110050 - RNA, 19 nt, Artificial Sequence
  Description of Artificial Sequence: Synthetic oligonucleotide
cccgguauccucacguagg

SEQ ID NO: 2110051 - RNA, 19 nt, Artificial Sequence
  Description of Artificial Sequence: Synthetic oligonucleotide
acacauuggucgauagugu

SEQ ID NO: 2110052 - RNA, 19 nt, Artificial Sequence
  Description of Artificial Sequence: Synthetic oligonucleotide
gugugugauccuggggugg

SEQ ID NO: 2110053 - RNA, 19 nt, Artificial Sequence
  Description of Artificial Sequence: Synthetic oligonucleotide
caaaugugaauggguagga

SEQ ID NO: 2110054 - RNA, 19 nt, Artificial Sequence
  Description of Artificial Sequence: Synthetic oligonucleotide
uccucacguaggaggaguc

SEQ ID NO: 2110055 - RNA, 19 nt, Artificial Sequence
  Description of Artificial Sequence: Synthetic oligonucleotide
agguucccgguauccucac

SEQ ID NO: 2110056 - RNA, 19 nt, Artificial Sequence
  Description of Artificial Sequence: Synthetic oligonucleotide
uccuuagcucugccacaag

SEQ ID NO: 2110057 - RNA, 19 nt, Artificial Sequence
  Description of Artificial Sequence: Synthetic oligonucleotide
accgcagccccauagccuu

SEQ ID NO: 2110058 - RNA, 19 nt, Artificial Sequence
  Description of Artificial Sequence: Synthetic oligonucleotide
cacuccgcaucuguuuccg

SEQ ID NO: 2110059 - RNA, 19 nt, Artificial Sequence
  Description of Artificial Sequence: Synthetic oligonucleotide
cuugcaugcggcgccgggc

SEQ ID NO: 2110060 - RNA, 19 nt, Artificial Sequence
  Description of Artificial Sequence: Synthetic oligonucleotide
acauuguguguggaacucu

SEQ ID NO: 2110061 - RNA, 19 nt, Artificial Sequence
  Description of Artificial Sequence: Synthetic oligonucleotide
cacguaggaggaguccucc

SEQ ID NO: 2110062 - RNA, 19 nt, Artificial Sequence
  Description of Artificial Sequence: Synthetic oligonucleotide
acucauagccuugggcuga

SEQ ID NO: 2110063 - RNA, 19 nt, Artificial Sequence
  Description of Artificial Sequence: Synthetic oligonucleotide
gagggaaugaugggcuuga

SEQ ID NO: 2110064 - RNA, 19 nt, Artificial Sequence
  Description of Artificial Sequence: Synthetic oligonucleotide
guagcuccacaaagaaaug

SEQ ID NO: 2110065 - RNA, 19 nt, Artificial Sequence
  Description of Artificial Sequence: Synthetic oligonucleotide
gaaguauguuccugcuucu

SEQ ID NO: 2110066 - RNA, 19 nt, Artificial Sequence
  Description of Artificial Sequence: Synthetic oligonucleotide
gagagcuaggccaguguuc

SEQ ID NO: 2110067 - RNA, 19 nt, Artificial Sequence
  Description of Artificial Sequence: Synthetic oligonucleotide
ggugugugauccuggggug

SEQ ID NO: 2110068 - RNA, 19 nt, Artificial Sequence
  Description of Artificial Sequence: Synthetic oligonucleotide
aagaaccuccuuagcucug

SEQ ID NO: 2110069 - RNA, 19 nt, Artificial Sequence
  Description of Artificial Sequence: Synthetic oligonucleotide
gugcccacgaggcugcuga

SEQ ID NO: 2110070 - RNA, 19 nt, Artificial Sequence
  Description of Artificial Sequence: Synthetic oligonucleotide
gccauaaaaggauccuuga

SEQ ID NO: 2110071 - RNA, 19 nt, Artificial Sequence
  Description of Artificial Sequence: Synthetic oligonucleotide
ugaugccggugaagucagg

SEQ ID NO: 2110072 - RNA, 19 nt, Artificial Sequence
  Description of Artificial Sequence: Synthetic oligonucleotide
cacauuggucgauagugua

SEQ ID NO: 2110073 - RNA, 19 nt, Artificial Sequence
  Description of Artificial Sequence: Synthetic oligonucleotide
auuggucgauaguguauuu

SEQ ID NO: 2110074 - RNA, 19 nt, Artificial Sequence
  Description of Artificial Sequence: Synthetic oligonucleotide
aggagaaauaggccaccuu

SEQ ID NO: 2110075 - RNA, 19 nt, Artificial Sequence
  Description of Artificial Sequence: Synthetic oligonucleotide
auccucacguaggaggagu

SEQ ID NO: 2110076 - RNA, 19 nt, Artificial Sequence
  Description of Artificial Sequence: Synthetic oligonucleotide
aggugacgguaccuguugu

SEQ ID NO: 2110077 - RNA, 19 nt, Artificial Sequence
  Description of Artificial Sequence: Synthetic oligonucleotide
ggaguuggauuccaugaaa

SEQ ID NO: 2110078 - RNA, 19 nt, Artificial Sequence
  Description of Artificial Sequence: Synthetic oligonucleotide
gacacggcuguucccgcuc

SEQ ID NO: 2110079 - RNA, 19 nt, Artificial Sequence
  Description of Artificial Sequence: Synthetic oligonucleotide
cucaguucggaauccaaau

SEQ ID NO: 2110080 - RNA, 19 nt, Artificial Sequence
  Description of Artificial Sequence: Synthetic oligonucleotide
guucccgguauccucacgu

SEQ ID NO: 2110081 - RNA, 19 nt, Artificial Sequence
  Description of Artificial Sequence: Synthetic oligonucleotide
guccaacacacuccgcauc

SEQ ID NO: 2110082 - RNA, 19 nt, Artificial Sequence
  Description of Artificial Sequence: Synthetic oligonucleotide
cauugcuguccaccuucag

SEQ ID NO: 2110083 - RNA, 19 nt, Artificial Sequence
  Description of Artificial Sequence: Synthetic oligonucleotide
agggaaccaccgaugaaga

SEQ ID NO: 2110084 - RNA, 19 nt, Artificial Sequence
  Description of Artificial Sequence: Synthetic oligonucleotide
uggcggccauaaaaggauc

SEQ ID NO: 2110085 - RNA, 19 nt, Artificial Sequence
  Description of Artificial Sequence: Synthetic oligonucleotide
cacaaggcccagcuccaug

SEQ ID NO: 2110086 - RNA, 19 nt, Artificial Sequence
  Description of Artificial Sequence: Synthetic oligonucleotide
ggagaggaccuuacaguag

SEQ ID NO: 2110087 - RNA, 19 nt, Artificial Sequence
  Description of Artificial Sequence: Synthetic oligonucleotide
uucucucccucagucucga

SEQ ID NO: 2110088 - RNA, 19 nt, Artificial Sequence
  Description of Artificial Sequence: Synthetic oligonucleotide
agucucgauucuguagggu

SEQ ID NO: 2110089 - RNA, 19 nt, Artificial Sequence
  Description of Artificial Sequence: Synthetic oligonucleotide
gggagaggaccuuacagua

SEQ ID NO: 2110090 - RNA, 19 nt, Artificial Sequence
  Description of Artificial Sequence: Synthetic oligonucleotide
gggacggucaucucaaagu

SEQ ID NO: 2110091 - RNA, 19 nt, Artificial Sequence
  Description of Artificial Sequence: Synthetic oligonucleotide
agcacgggccauuccggga

SEQ ID NO: 2110092 - RNA, 19 nt, Artificial Sequence
  Description of Artificial Sequence: Synthetic oligonucleotide
gaauccaaaucggcucaga

SEQ ID NO: 2110093 - RNA, 19 nt, Artificial Sequence
  Description of Artificial Sequence: Synthetic oligonucleotide
accgaugaagaaccuccuu

SEQ ID NO: 2110094 - RNA, 19 nt, Artificial Sequence
  Description of Artificial Sequence: Synthetic oligonucleotide
ggaccuuacaguagagcac

SEQ ID NO: 2110095 - RNA, 19 nt, Artificial Sequence
  Description of Artificial Sequence: Synthetic oligonucleotide
gagggaggacacauugguc

SEQ ID NO: 2110096 - RNA, 19 nt, Artificial Sequence
  Description of Artificial Sequence: Synthetic oligonucleotide
ucccucagucucgauucug

SEQ ID NO: 2110097 - RNA, 19 nt, Artificial Sequence
  Description of Artificial Sequence: Synthetic oligonucleotide
gucagccgacucauccugg

SEQ ID NO: 2110098 - RNA, 19 nt, Artificial Sequence
  Description of Artificial Sequence: Synthetic oligonucleotide
cugagaacugagggaauga

SEQ ID NO: 2110099 - RNA, 19 nt, Artificial Sequence
  Description of Artificial Sequence: Synthetic oligonucleotide
agaaauggauguagagguu

SEQ ID NO: 2110100 - RNA, 19 nt, Artificial Sequence
  Description of Artificial Sequence: Synthetic oligonucleotide
acguaggaggaguccucca

SEQ ID NO: 2110101 - RNA, 19 nt, Artificial Sequence
  Description of Artificial Sequence: Synthetic oligonucleotide
cauuccgggagggcgucag

SEQ ID NO: 2110102 - RNA, 19 nt, Artificial Sequence
  Description of Artificial Sequence: Synthetic oligonucleotide
cugggucacuccugagaac

SEQ ID NO: 2110103 - RNA, 19 nt, Artificial Sequence
  Description of Artificial Sequence: Synthetic oligonucleotide
gucucgauucuguaggguu

SEQ ID NO: 2110104 - RNA, 19 nt, Artificial Sequence
  Description of Artificial Sequence: Synthetic oligonucleotide
gugaauggguaggagaaau

SEQ ID NO: 2110105 - RNA, 19 nt, Artificial Sequence
  Description of Artificial Sequence: Synthetic oligonucleotide
gggccauuccgggagggcg

SEQ ID NO: 2110106 - RNA, 19 nt, Artificial Sequence
  Description of Artificial Sequence: Synthetic oligonucleotide
uguuccugaggggcucaca

SEQ ID NO: 2110107 - RNA, 19 nt, Artificial Sequence
  Description of Artificial Sequence: Synthetic oligonucleotide
accuuacaguagagcacgg

SEQ ID NO: 2110108 - RNA, 19 nt, Artificial Sequence
  Description of Artificial Sequence: Synthetic oligonucleotide
uucccgguauccucacgua

SEQ ID NO: 2110109 - RNA, 19 nt, Artificial Sequence
  Description of Artificial Sequence: Synthetic oligonucleotide
ggugacgguaccuguuguc

SEQ ID NO: 2110110 - RNA, 19 nt, Artificial Sequence
  Description of Artificial Sequence: Synthetic oligonucleotide
ggugaagucagggcuucac

SEQ ID NO: 2110111 - RNA, 19 nt, Artificial Sequence
  Description of Artificial Sequence: Synthetic oligonucleotide
acacgguaccucugccaga

SEQ ID NO: 2110112 - RNA, 19 nt, Artificial Sequence
  Description of Artificial Sequence: Synthetic oligonucleotide
gugaagucagggcuucacu

SEQ ID NO: 2110113 - RNA, 19 nt, Artificial Sequence
  Description of Artificial Sequence: Synthetic oligonucleotide
ccuuacaguagagcacggg

SEQ ID NO: 2110114 - RNA, 19 nt, Artificial Sequence
  Description of Artificial Sequence: Synthetic oligonucleotide
ugguggcacaggucugggu

SEQ ID NO: 2110115 - RNA, 19 nt, Artificial Sequence
  Description of Artificial Sequence: Synthetic oligonucleotide
acgguaccuguugucucag

SEQ ID NO: 2110116 - RNA, 19 nt, Artificial Sequence
  Description of Artificial Sequence: Synthetic oligonucleotide
gcaccgcagccccauagcc

SEQ ID NO: 2110117 - RNA, 19 nt, Artificial Sequence
  Description of Artificial Sequence: Synthetic oligonucleotide
ggcggccauaaaaggaucc

SEQ ID NO: 2110118 - RNA, 19 nt, Artificial Sequence
  Description of Artificial Sequence: Synthetic oligonucleotide
ggggcucacaagguccugg

SEQ ID NO: 2110119 - RNA, 19 nt, Artificial Sequence
  Description of Artificial Sequence: Synthetic oligonucleotide
accuguugucucaguucgg

SEQ ID NO: 2110120 - RNA, 19 nt, Artificial Sequence
  Description of Artificial Sequence: Synthetic oligonucleotide
cgauaguguauuuccaaga

SEQ ID NO: 2110121 - RNA, 19 nt, Artificial Sequence
  Description of Artificial Sequence: Synthetic oligonucleotide
cugugaucacuccauugcu

SEQ ID NO: 2110122 - RNA, 19 nt, Artificial Sequence
  Description of Artificial Sequence: Synthetic oligonucleotide
ggaauccaaaucggcucag

SEQ ID NO: 2110123 - RNA, 19 nt, Artificial Sequence
  Description of Artificial Sequence: Synthetic oligonucleotide
cuccgcaucuguuuccgua

SEQ ID NO: 2110124 - RNA, 19 nt, Artificial Sequence
  Description of Artificial Sequence: Synthetic oligonucleotide
aggguucuuugaugccggu

SEQ ID NO: 2110125 - RNA, 19 nt, Artificial Sequence
  Description of Artificial Sequence: Synthetic oligonucleotide
agggcgucagccgacucau

SEQ ID NO: 2110126 - RNA, 19 nt, Artificial Sequence
  Description of Artificial Sequence: Synthetic oligonucleotide
gagggcaccugggacgguc

SEQ ID NO: 2110127 - RNA, 19 nt, Artificial Sequence
  Description of Artificial Sequence: Synthetic oligonucleotide
cuagcacauugugugugga

SEQ ID NO: 2110128 - RNA, 19 nt, Artificial Sequence
  Description of Artificial Sequence: Synthetic oligonucleotide
gauggucagggugugugau

SEQ ID NO: 2110129 - RNA, 19 nt, Artificial Sequence
  Description of Artificial Sequence: Synthetic oligonucleotide
guacucuuuguggcggcca

SEQ ID NO: 2110130 - RNA, 19 nt, Artificial Sequence
  Description of Artificial Sequence: Synthetic oligonucleotide
ggcugugcgagggaggaca

SEQ ID NO: 2110131 - RNA, 19 nt, Artificial Sequence
  Description of Artificial Sequence: Synthetic oligonucleotide
ugcccacgaggcugcugag

SEQ ID NO: 2110132 - RNA, 19 nt, Artificial Sequence
  Description of Artificial Sequence: Synthetic oligonucleotide
cguaggaggaguccuccag

SEQ ID NO: 2110133 - RNA, 19 nt, Artificial Sequence
  Description of Artificial Sequence: Synthetic oligonucleotide
cacgguaccucugccagaa

SEQ ID NO: 2110134 - RNA, 19 nt, Artificial Sequence
  Description of Artificial Sequence: Synthetic oligonucleotide
guuuccguagggaguugga

SEQ ID NO: 2110135 - RNA, 19 nt, Artificial Sequence
  Description of Artificial Sequence: Synthetic oligonucleotide
gacggucaucucaaagucu

SEQ ID NO: 2110136 - RNA, 19 nt, Artificial Sequence
  Description of Artificial Sequence: Synthetic oligonucleotide
ggucgauaguguauuucca

SEQ ID NO: 2110137 - RNA, 19 nt, Artificial Sequence
  Description of Artificial Sequence: Synthetic oligonucleotide
cugguggagaaagaaggcu

SEQ ID NO: 2110138 - RNA, 19 nt, Artificial Sequence
  Description of Artificial Sequence: Synthetic oligonucleotide
gguucccgguauccucacg

SEQ ID NO: 2110139 - RNA, 19 nt, Artificial Sequence
  Description of Artificial Sequence: Synthetic oligonucleotide
cacgggccauuccgggagg

SEQ ID NO: 2110140 - RNA, 19 nt, Artificial Sequence
  Description of Artificial Sequence: Synthetic oligonucleotide
cagccgacucauccuggug

SEQ ID NO: 2110141 - RNA, 19 nt, Artificial Sequence
  Description of Artificial Sequence: Synthetic oligonucleotide
cuagggaaccaccgaugaa

SEQ ID NO: 2110142 - RNA, 19 nt, Artificial Sequence
  Description of Artificial Sequence: Synthetic oligonucleotide
aaccaccgaugaagaaccu

SEQ ID NO: 2110143 - RNA, 19 nt, Artificial Sequence
  Description of Artificial Sequence: Synthetic oligonucleotide
caagcggaaggugacggua

SEQ ID NO: 2110144 - RNA, 19 nt, Artificial Sequence
  Description of Artificial Sequence: Synthetic oligonucleotide
caguuaguagcugguagcu

SEQ ID NO: 2110145 - RNA, 19 nt, Artificial Sequence
  Description of Artificial Sequence: Synthetic oligonucleotide
ugcagagagcuaggccagu

SEQ ID NO: 2110146 - RNA, 19 nt, Artificial Sequence
  Description of Artificial Sequence: Synthetic oligonucleotide
acaguagagcacgggccau

SEQ ID NO: 2110147 - RNA, 19 nt, Artificial Sequence
  Description of Artificial Sequence: Synthetic oligonucleotide
cagccccauagccuuccac

SEQ ID NO: 2110148 - RNA, 19 nt, Artificial Sequence
  Description of Artificial Sequence: Synthetic oligonucleotide
ccgaugaagaaccuccuua

SEQ ID NO: 2110149 - RNA, 19 nt, Artificial Sequence
  Description of Artificial Sequence: Synthetic oligonucleotide
gaccaguuaguagcuggua

SEQ ID NO: 2110150 - RNA, 19 nt, Artificial Sequence
  Description of Artificial Sequence: Synthetic oligonucleotide
caacacacuccgcaucugu

SEQ ID NO: 2110151 - RNA, 19 nt, Artificial Sequence
  Description of Artificial Sequence: Synthetic oligonucleotide
acuccgcaucuguuuccgu

SEQ ID NO: 2110152 - RNA, 19 nt, Artificial Sequence
  Description of Artificial Sequence: Synthetic oligonucleotide
cucacguaggaggaguccu

SEQ ID NO: 2110153 - RNA, 19 nt, Artificial Sequence
  Description of Artificial Sequence: Synthetic oligonucleotide
ccuccucuggcugugcgag

SEQ ID NO: 2110154 - RNA, 19 nt, Artificial Sequence
  Description of Artificial Sequence: Synthetic oligonucleotide
cauuggucgauaguguauu

SEQ ID NO: 2110155 - RNA, 19 nt, Artificial Sequence
  Description of Artificial Sequence: Synthetic oligonucleotide
acgguaccucugccagaag

SEQ ID NO: 2110156 - RNA, 19 nt, Artificial Sequence
  Description of Artificial Sequence: Synthetic oligonucleotide
ggguucuuugaugccggug

SEQ ID NO: 2110157 - RNA, 19 nt, Artificial Sequence
  Description of Artificial Sequence: Synthetic oligonucleotide
caugggccuccacguggag

SEQ ID NO: 2110158 - RNA, 19 nt, Artificial Sequence
  Description of Artificial Sequence: Synthetic oligonucleotide
gguaccuguugucucaguu

SEQ ID NO: 2110159 - RNA, 19 nt, Artificial Sequence
  Description of Artificial Sequence: Synthetic oligonucleotide
gcacauuguguguggaacu

SEQ ID NO: 2110160 - RNA, 19 nt, Artificial Sequence
  Description of Artificial Sequence: Synthetic oligonucleotide
gaaggugacgguaccuguu

SEQ ID NO: 2110161 - RNA, 19 nt, Artificial Sequence
  Description of Artificial Sequence: Synthetic oligonucleotide
agagguugucauacucaua

SEQ ID NO: 2110162 - RNA, 19 nt, Artificial Sequence
  Description of Artificial Sequence: Synthetic oligonucleotide
ugcaugcggcgccgggcuc

SEQ ID NO: 2110163 - RNA, 19 nt, Artificial Sequence
  Description of Artificial Sequence: Synthetic oligonucleotide
ggaaggugacgguaccugu

SEQ ID NO: 2110164 - RNA, 19 nt, Artificial Sequence
  Description of Artificial Sequence: Synthetic oligonucleotide
cucuugcaugcggcgccgg

SEQ ID NO: 2110165 - RNA, 19 nt, Artificial Sequence
  Description of Artificial Sequence: Synthetic oligonucleotide
ccgcaucuguuuccguagg

SEQ ID NO: 2110166 - RNA, 19 nt, Artificial Sequence
  Description of Artificial Sequence: Synthetic oligonucleotide
ucccagggauuugguggca

SEQ ID NO: 2110167 - RNA, 19 nt, Artificial Sequence
  Description of Artificial Sequence: Synthetic oligonucleotide
ccuugaacgacacggcugu

SEQ ID NO: 2110168 - RNA, 19 nt, Artificial Sequence
  Description of Artificial Sequence: Synthetic oligonucleotide
augaugggcuugaccaguu

SEQ ID NO: 2110169 - RNA, 19 nt, Artificial Sequence
  Description of Artificial Sequence: Synthetic oligonucleotide
ccugggacggucaucucaa

SEQ ID NO: 2110170 - RNA, 19 nt, Artificial Sequence
  Description of Artificial Sequence: Synthetic oligonucleotide
gcaugcggcgccgggcucg

SEQ ID NO: 2110171 - RNA, 19 nt, Artificial Sequence
  Description of Artificial Sequence: Synthetic oligonucleotide
ccuguugucucaguucgga

SEQ ID NO: 2110172 - RNA, 19 nt, Artificial Sequence
  Description of Artificial Sequence: Synthetic oligonucleotide
cugaaacuaccucuccauu

SEQ ID NO: 2110173 - RNA, 19 nt, Artificial Sequence
  Description of Artificial Sequence: Synthetic oligonucleotide
gccgacucauccuggugga

SEQ ID NO: 2110174 - RNA, 19 nt, Artificial Sequence
  Description of Artificial Sequence: Synthetic oligonucleotide
ccucacguaggaggagucc

SEQ ID NO: 2110175 - RNA, 19 nt, Artificial Sequence
  Description of Artificial Sequence: Synthetic oligonucleotide
gcucuagggaaccaccgau

SEQ ID NO: 2110176 - RNA, 19 nt, Artificial Sequence
  Description of Artificial Sequence: Synthetic oligonucleotide
agccuuccacacgguaccu

SEQ ID NO: 2110177 - RNA, 19 nt, Artificial Sequence
  Description of Artificial Sequence: Synthetic oligonucleotide
auaggccaccuuguccauu

SEQ ID NO: 2110178 - RNA, 19 nt, Artificial Sequence
  Description of Artificial Sequence: Synthetic oligonucleotide
ggacacauuggucgauagu

SEQ ID NO: 2110179 - RNA, 19 nt, Artificial Sequence
  Description of Artificial Sequence: Synthetic oligonucleotide
cuguuuccguagggaguug

SEQ ID NO: 2110180 - RNA, 19 nt, Artificial Sequence
  Description of Artificial Sequence: Synthetic oligonucleotide
caccgaugaagaaccuccu

SEQ ID NO: 2110181 - RNA, 19 nt, Artificial Sequence
  Description of Artificial Sequence: Synthetic oligonucleotide
cgguccaacacacuccgca

SEQ ID NO: 2110182 - RNA, 19 nt, Artificial Sequence
  Description of Artificial Sequence: Synthetic oligonucleotide
gcaccugggacggucaucu

SEQ ID NO: 2110183 - RNA, 19 nt, Artificial Sequence
  Description of Artificial Sequence: Synthetic oligonucleotide
gggaaccaccgaugaagaa

SEQ ID NO: 2110184 - RNA, 19 nt, Artificial Sequence
  Description of Artificial Sequence: Synthetic oligonucleotide
caccgcagccccauagccu

SEQ ID NO: 2110185 - RNA, 19 nt, Artificial Sequence
  Description of Artificial Sequence: Synthetic oligonucleotide
agggcaccugggacgguca

SEQ ID NO: 2110186 - RNA, 19 nt, Artificial Sequence
  Description of Artificial Sequence: Synthetic oligonucleotide
gcccacgaggcugcugagg

SEQ ID NO: 2110187 - RNA, 19 nt, Artificial Sequence
  Description of Artificial Sequence: Synthetic oligonucleotide
cggaauccaaaucggcuca

SEQ ID NO: 2110188 - RNA, 19 nt, Artificial Sequence
  Description of Artificial Sequence: Synthetic oligonucleotide
ccuuccacacgguaccucu

SEQ ID NO: 2110189 - RNA, 19 nt, Artificial Sequence
  Description of Artificial Sequence: Synthetic oligonucleotide
aggggcucacaagguccug

SEQ ID NO: 2110190 - RNA, 19 nt, Artificial Sequence
  Description of Artificial Sequence: Synthetic oligonucleotide
gggucacuccugagaacug

SEQ ID NO: 2110191 - RNA, 19 nt, Artificial Sequence
  Description of Artificial Sequence: Synthetic oligonucleotide
acucuuuguggcggccaua

SEQ ID NO: 2110192 - RNA, 19 nt, Artificial Sequence
  Description of Artificial Sequence: Synthetic oligonucleotide
uggcugugcgagggaggac

SEQ ID NO: 2110193 - RNA, 19 nt, Artificial Sequence
  Description of Artificial Sequence: Synthetic oligonucleotide
ccucuugcaugcggcgccg

SEQ ID NO: 2110194 - RNA, 19 nt, Artificial Sequence
  Description of Artificial Sequence: Synthetic oligonucleotide
gugugauccugggguggca

SEQ ID NO: 2110195 - RNA, 19 nt, Artificial Sequence
  Description of Artificial Sequence: Synthetic oligonucleotide
gcuugaccaguuaguagcu

SEQ ID NO: 2110196 - RNA, 19 nt, Artificial Sequence
  Description of Artificial Sequence: Synthetic oligonucleotide
cugagggaaugaugggcuu

SEQ ID NO: 2110197 - RNA, 19 nt, Artificial Sequence
  Description of Artificial Sequence: Synthetic oligonucleotide
cugaacccuuccaggcggu

SEQ ID NO: 2110198 - RNA, 19 nt, Artificial Sequence
  Description of Artificial Sequence: Synthetic oligonucleotide
ccguagggaguuggauucc

SEQ ID NO: 2110199 - RNA, 19 nt, Artificial Sequence
  Description of Artificial Sequence: Synthetic oligonucleotide
ccuugggcugaaacuaccu

SEQ ID NO: 2110200 - RNA, 19 nt, Artificial Sequence
  Description of Artificial Sequence: Synthetic oligonucleotide
ccuugaagguucccgguau

SEQ ID NO: 2110201 - RNA, 19 nt, Artificial Sequence
  Description of Artificial Sequence: Synthetic oligonucleotide
gcgucagccgacucauccu

SEQ ID NO: 2110202 - RNA, 19 nt, Artificial Sequence
  Description of Artificial Sequence: Synthetic oligonucleotide
cugugcgagggaggacaca

SEQ ID NO: 2110203 - RNA, 19 nt, Artificial Sequence
  Description of Artificial Sequence: Synthetic oligonucleotide
ggagggcgucagccgacuc

SEQ ID NO: 2110204 - RNA, 19 nt, Artificial Sequence
  Description of Artificial Sequence: Synthetic oligonucleotide
gcggccauaaaaggauccu

SEQ ID NO: 2110205 - RNA, 19 nt, Artificial Sequence
  Description of Artificial Sequence: Synthetic oligonucleotide
ccggugaagucagggcuuc

SEQ ID NO: 2110206 - RNA, 19 nt, Artificial Sequence
  Description of Artificial Sequence: Synthetic oligonucleotide
ccaguguuccugaggggcu

SEQ ID NO: 2110207 - RNA, 19 nt, Artificial Sequence
  Description of Artificial Sequence: Synthetic oligonucleotide
ggcaccugggacggucauc

SEQ ID NO: 2110208 - RNA, 19 nt, Artificial Sequence
  Description of Artificial Sequence: Synthetic oligonucleotide
cgacucauccugguggaga

SEQ ID NO: 2110209 - RNA, 19 nt, Artificial Sequence
  Description of Artificial Sequence: Synthetic oligonucleotide
cucugcuggcugaacccuu

SEQ ID NO: 2110210 - RNA, 19 nt, Artificial Sequence
  Description of Artificial Sequence: Synthetic oligonucleotide
gccuuccacacgguaccuc

SEQ ID NO: 2110211 - RNA, 19 nt, Artificial Sequence
  Description of Artificial Sequence: Synthetic oligonucleotide
gaggcucucucgggccucu

SEQ ID NO: 2110212 - RNA, 19 nt, Artificial Sequence
  Description of Artificial Sequence: Synthetic oligonucleotide
gggaggcucucucgggccu

SEQ ID NO: 2110213 - RNA, 19 nt, Artificial Sequence
  Description of Artificial Sequence: Synthetic oligonucleotide
ccgggagggcgucagccga

SEQ ID NO: 2110214 - RNA, 19 nt, Artificial Sequence
  Description of Artificial Sequence: Synthetic oligonucleotide
cgguauccucacguaggag

SEQ ID NO: 2110215 - RNA, 19 nt, Artificial Sequence
  Description of Artificial Sequence: Synthetic oligonucleotide
ccgacucauccugguggag

SEQ ID NO: 2110216 - RNA, 19 nt, Artificial Sequence
  Description of Artificial Sequence: Synthetic oligonucleotide
gccauuccgggagggcguc

SEQ ID NO: 2110217 - RNA, 19 nt, Artificial Sequence
  Description of Artificial Sequence: Synthetic oligonucleotide
caugcggcgccgggcucga

SEQ ID NO: 2110218 - RNA, 19 nt, Artificial Sequence
  Description of Artificial Sequence: Synthetic oligonucleotide
ggguggcaggcagcaccgc

SEQ ID NO: 2110219 - RNA, 19 nt, Artificial Sequence
  Description of Artificial Sequence: Synthetic oligonucleotide
gcgccgggcucgacggaag

SEQ ID NO: 2110220 - RNA, 19 nt, Artificial Sequence
  Description of Artificial Sequence: Synthetic oligonucleotide
cgggagggcgucagccgac

SEQ ID NO: 2110221 - RNA, 19 nt, Artificial Sequence
  Description of Artificial Sequence: Synthetic oligonucleotide
ccauucccagggauuuggu

SEQ ID NO: 2110222 - RNA, 19 nt, Artificial Sequence
  Description of Artificial Sequence: Synthetic oligonucleotide
gcggaaggugacgguaccu

SEQ ID NO: 2110223 - RNA, 19 nt, Artificial Sequence
  Description of Artificial Sequence: Synthetic oligonucleotide
cccuuccaggcgguccaac

SEQ ID NO: 2110224 - RNA, 19 nt, Artificial Sequence
  Description of Artificial Sequence: Synthetic oligonucleotide
cacggcuguucccgcuccu

SEQ ID NO: 2110225 - RNA, 19 nt, Artificial Sequence
  Description of Artificial Sequence: Synthetic oligonucleotide
ggcagcaccgcagccccau

SEQ ID NO: 2110226 - RNA, 19 nt, Artificial Sequence
  Description of Artificial Sequence: Synthetic oligonucleotide
gccggugaagucagggcuu

SEQ ID NO: 2110227 - RNA, 19 nt, Artificial Sequence
  Description of Artificial Sequence: Synthetic oligonucleotide
ccgggcucgacggaaggcu

SEQ ID NO: 2110228 - RNA, 19 nt, Artificial Sequence
  Description of Artificial Sequence: Synthetic oligonucleotide
cgggccauuccgggagggc

SEQ ID NO: 2110229 - RNA, 19 nt, Artificial Sequence
  Description of Artificial Sequence: Synthetic oligonucleotide
cuugaacgacacggcuguu

SEQ ID NO: 2110230 - RNA, 19 nt, Artificial Sequence
  Description of Artificial Sequence: Synthetic oligonucleotide
ccaaaucggcucagacgau

SEQ ID NO: 2110231 - RNA, 19 nt, Artificial Sequence
  Description of Artificial Sequence: Synthetic oligonucleotide
gugcgagggaggacacauu

SEQ ID NO: 2110232 - RNA, 19 nt, Artificial Sequence
  Description of Artificial Sequence: Synthetic oligonucleotide
gggagggcgucagccgacu

SEQ ID NO: 2110233 - RNA, 19 nt, Artificial Sequence
  Description of Artificial Sequence: Synthetic oligonucleotide
gggcaccugggacggucau

SEQ ID NO: 2110234 - RNA, 19 nt, Artificial Sequence
  Description of Artificial Sequence: Synthetic oligonucleotide
gggcgucagccgacucauc

SEQ ID NO: 2110235 - RNA, 19 nt, Artificial Sequence
  Description of Artificial Sequence: Synthetic oligonucleotide
cgacacggcuguucccgcu

SEQ ID NO: 2110236 - RNA, 19 nt, Artificial Sequence
  Description of Artificial Sequence: Synthetic oligonucleotide
cggccauaaaaggauccuu

SEQ ID NO: 2110237 - RNA, 19 nt, Artificial Sequence
  Description of Artificial Sequence: Synthetic oligonucleotide
cgguaccuguugucucagu

SEQ ID NO: 2110238 - RNA, 19 nt, Artificial Sequence
  Description of Artificial Sequence: Synthetic oligonucleotide
ggagggcaccugggacggu

SEQ ID NO: 2110239 - RNA, 19 nt, Artificial Sequence
  Description of Artificial Sequence: Synthetic oligonucleotide
uauauuaucacaauuuuac

SEQ ID NO: 2110240 - RNA, 19 nt, Artificial Sequence
  Description of Artificial Sequence: Synthetic oligonucleotide
aaacaugucuuucaguacc

SEQ ID NO: 2110241 - RNA, 19 nt, Artificial Sequence
  Description of Artificial Sequence: Synthetic oligonucleotide
acuauuaaaagaaaagucc

SEQ ID NO: 2110242 - RNA, 19 nt, Artificial Sequence
  Description of Artificial Sequence: Synthetic oligonucleotide
aaaaucuaaguguagcaac

SEQ ID NO: 2110243 - RNA, 19 nt, Artificial Sequence
  Description of Artificial Sequence: Synthetic oligonucleotide
ugugagaucagcauuaagc

SEQ ID NO: 2110244 - RNA, 19 nt, Artificial Sequence
  Description of Artificial Sequence: Synthetic oligonucleotide
agagaaaguaaucaggagg

SEQ ID NO: 2110245 - RNA, 19 nt, Artificial Sequence
  Description of Artificial Sequence: Synthetic oligonucleotide
aaagaaaagucccuuuauc

SEQ ID NO: 2110246 - RNA, 19 nt, Artificial Sequence
  Description of Artificial Sequence: Synthetic oligonucleotide
aguacauuggucuguauac

SEQ ID NO: 2110247 - RNA, 19 nt, Artificial Sequence
  Description of Artificial Sequence: Synthetic oligonucleotide
cuauuaaaagaaaaguccc

SEQ ID NO: 2110248 - RNA, 19 nt, Artificial Sequence
  Description of Artificial Sequence: Synthetic oligonucleotide
uauacacugacauaaaggu

SEQ ID NO: 2110249 - RNA, 19 nt, Artificial Sequence
  Description of Artificial Sequence: Synthetic oligonucleotide
agaacauugugucuguagc

SEQ ID NO: 2110250 - RNA, 19 nt, Artificial Sequence
  Description of Artificial Sequence: Synthetic oligonucleotide
ucugagaauaaauauauuc

SEQ ID NO: 2110251 - RNA, 19 nt, Artificial Sequence
  Description of Artificial Sequence: Synthetic oligonucleotide
uuaucacaauuuuacaugg

SEQ ID NO: 2110252 - RNA, 19 nt, Artificial Sequence
  Description of Artificial Sequence: Synthetic oligonucleotide
aagaaaagucccuuuaucu

SEQ ID NO: 2110253 - RNA, 19 nt, Artificial Sequence
  Description of Artificial Sequence: Synthetic oligonucleotide
guaaucaggagguagaagc

SEQ ID NO: 2110254 - RNA, 19 nt, Artificial Sequence
  Description of Artificial Sequence: Synthetic oligonucleotide
aaugccaucuuccucccac

SEQ ID NO: 2110255 - RNA, 19 nt, Artificial Sequence
  Description of Artificial Sequence: Synthetic oligonucleotide
auuagaaugaauucuauuu

SEQ ID NO: 2110256 - RNA, 19 nt, Artificial Sequence
  Description of Artificial Sequence: Synthetic oligonucleotide
agcaacuuuaccaagcucc

SEQ ID NO: 2110257 - RNA, 19 nt, Artificial Sequence
  Description of Artificial Sequence: Synthetic oligonucleotide
ucuaacaagacugucaaca

SEQ ID NO: 2110258 - RNA, 19 nt, Artificial Sequence
  Description of Artificial Sequence: Synthetic oligonucleotide
uacaaguaaaacaauuuga

SEQ ID NO: 2110259 - RNA, 19 nt, Artificial Sequence
  Description of Artificial Sequence: Synthetic oligonucleotide
aacuagagaaaguaaucag

SEQ ID NO: 2110260 - RNA, 19 nt, Artificial Sequence
  Description of Artificial Sequence: Synthetic oligonucleotide
auuguguucagcuuuggag

SEQ ID NO: 2110261 - RNA, 19 nt, Artificial Sequence
  Description of Artificial Sequence: Synthetic oligonucleotide
agcaaacaguaauuuaucc

SEQ ID NO: 2110262 - RNA, 19 nt, Artificial Sequence
  Description of Artificial Sequence: Synthetic oligonucleotide
ugaacauucagcuguacca

SEQ ID NO: 2110263 - RNA, 19 nt, Artificial Sequence
  Description of Artificial Sequence: Synthetic oligonucleotide
gaugguuucgaucucagac

SEQ ID NO: 2110264 - RNA, 19 nt, Artificial Sequence
  Description of Artificial Sequence: Synthetic oligonucleotide
aucaaaaucuaaguguagc

SEQ ID NO: 2110265 - RNA, 19 nt, Artificial Sequence
  Description of Artificial Sequence: Synthetic oligonucleotide
uuuaacuucuuccucacuc

SEQ ID NO: 2110266 - RNA, 19 nt, Artificial Sequence
  Description of Artificial Sequence: Synthetic oligonucleotide
aaaggcucuaacaagacug

SEQ ID NO: 2110267 - RNA, 19 nt, Artificial Sequence
  Description of Artificial Sequence: Synthetic oligonucleotide
auauucucauaucacuagc

SEQ ID NO: 2110268 - RNA, 19 nt, Artificial Sequence
  Description of Artificial Sequence: Synthetic oligonucleotide
uauauucucauaucacuag

SEQ ID NO: 2110269 - RNA, 19 nt, Artificial Sequence
  Description of Artificial Sequence: Synthetic oligonucleotide
aucugcauuagcaaggugc

SEQ ID NO: 2110270 - RNA, 19 nt, Artificial Sequence
  Description of Artificial Sequence: Synthetic oligonucleotide
auacaaguaaaacaauuug

SEQ ID NO: 2110271 - RNA, 19 nt, Artificial Sequence
  Description of Artificial Sequence: Synthetic oligonucleotide
uuuacauggaaccccagcu

SEQ ID NO: 2110272 - RNA, 19 nt, Artificial Sequence
  Description of Artificial Sequence: Synthetic oligonucleotide
uaucagaacuuugaaaagg

SEQ ID NO: 2110273 - RNA, 19 nt, Artificial Sequence
  Description of Artificial Sequence: Synthetic oligonucleotide
aauuaucagaacuuugaaa

SEQ ID NO: 2110274 - RNA, 19 nt, Artificial Sequence
  Description of Artificial Sequence: Synthetic oligonucleotide
uauuaucacaauuuuacau

SEQ ID NO: 2110275 - RNA, 19 nt, Artificial Sequence
  Description of Artificial Sequence: Synthetic oligonucleotide
cuagguaacaguacauugg

SEQ ID NO: 2110276 - RNA, 19 nt, Artificial Sequence
  Description of Artificial Sequence: Synthetic oligonucleotide
aguaauuuaucccuaggcu

SEQ ID NO: 2110277 - RNA, 19 nt, Artificial Sequence
  Description of Artificial Sequence: Synthetic oligonucleotide
augguuucgaucucagacc

SEQ ID NO: 2110278 - RNA, 19 nt, Artificial Sequence
  Description of Artificial Sequence: Synthetic oligonucleotide
ucuguauacacugacauaa

SEQ ID NO: 2110279 - RNA, 19 nt, Artificial Sequence
  Description of Artificial Sequence: Synthetic oligonucleotide
ugagaauaaauauauucuc

SEQ ID NO: 2110280 - RNA, 19 nt, Artificial Sequence
  Description of Artificial Sequence: Synthetic oligonucleotide
ucuuauuagaaugaauucu

SEQ ID NO: 2110281 - RNA, 19 nt, Artificial Sequence
  Description of Artificial Sequence: Synthetic oligonucleotide
uaauuuaucccuaggcucu

SEQ ID NO: 2110282 - RNA, 19 nt, Artificial Sequence
  Description of Artificial Sequence: Synthetic oligonucleotide
uauuaaaagaaaagucccu

SEQ ID NO: 2110283 - RNA, 19 nt, Artificial Sequence
  Description of Artificial Sequence: Synthetic oligonucleotide
cuacgugacacuaacacac

SEQ ID NO: 2110284 - RNA, 19 nt, Artificial Sequence
  Description of Artificial Sequence: Synthetic oligonucleotide
aaacuagagaaaguaauca

SEQ ID NO: 2110285 - RNA, 19 nt, Artificial Sequence
  Description of Artificial Sequence: Synthetic oligonucleotide
ucuggaaaggcucuaacaa

SEQ ID NO: 2110286 - RNA, 19 nt, Artificial Sequence
  Description of Artificial Sequence: Synthetic oligonucleotide
uguagcaacuuuaccaagc

SEQ ID NO: 2110287 - RNA, 19 nt, Artificial Sequence
  Description of Artificial Sequence: Synthetic oligonucleotide
ucaguuccacaucaguugg

SEQ ID NO: 2110288 - RNA, 19 nt, Artificial Sequence
  Description of Artificial Sequence: Synthetic oligonucleotide
ugacauaaaggucuggaaa

SEQ ID NO: 2110289 - RNA, 19 nt, Artificial Sequence
  Description of Artificial Sequence: Synthetic oligonucleotide
ucuuucaguaccaagcuua

SEQ ID NO: 2110290 - RNA, 19 nt, Artificial Sequence
  Description of Artificial Sequence: Synthetic oligonucleotide
uuuaucucagcguaagccu

SEQ ID NO: 2110291 - RNA, 19 nt, Artificial Sequence
  Description of Artificial Sequence: Synthetic oligonucleotide
aaauuaucagaacuuugaa

SEQ ID NO: 2110292 - RNA, 19 nt, Artificial Sequence
  Description of Artificial Sequence: Synthetic oligonucleotide
ugacuuaccaagcaagccu

SEQ ID NO: 2110293 - RNA, 19 nt, Artificial Sequence
  Description of Artificial Sequence: Synthetic oligonucleotide
agcuccagaacauuguguc

SEQ ID NO: 2110294 - RNA, 19 nt, Artificial Sequence
  Description of Artificial Sequence: Synthetic oligonucleotide
gaaaguaaucaggagguag

SEQ ID NO: 2110295 - RNA, 19 nt, Artificial Sequence
  Description of Artificial Sequence: Synthetic oligonucleotide
uguuuuaacugcucuaggu

SEQ ID NO: 2110296 - RNA, 19 nt, Artificial Sequence
  Description of Artificial Sequence: Synthetic oligonucleotide
uggaaaggcucuaacaaga

SEQ ID NO: 2110297 - RNA, 19 nt, Artificial Sequence
  Description of Artificial Sequence: Synthetic oligonucleotide
uuuuacauggaaccccagc

SEQ ID NO: 2110298 - RNA, 19 nt, Artificial Sequence
  Description of Artificial Sequence: Synthetic oligonucleotide
uuaucagaacuuugaaaag

SEQ ID NO: 2110299 - RNA, 19 nt, Artificial Sequence
  Description of Artificial Sequence: Synthetic oligonucleotide
aguuaacaugucgaaaccc

SEQ ID NO: 2110300 - RNA, 19 nt, Artificial Sequence
  Description of Artificial Sequence: Synthetic oligonucleotide
cuuuaucucagcguaagcc

SEQ ID NO: 2110301 - RNA, 19 nt, Artificial Sequence
  Description of Artificial Sequence: Synthetic oligonucleotide
auucucauaucacuagcuc

SEQ ID NO: 2110302 - RNA, 19 nt, Artificial Sequence
  Description of Artificial Sequence: Synthetic oligonucleotide
aggagguagaagccaaugc

SEQ ID NO: 2110303 - RNA, 19 nt, Artificial Sequence
  Description of Artificial Sequence: Synthetic oligonucleotide
uucagcuguaccaaaacaa

SEQ ID NO: 2110304 - RNA, 19 nt, Artificial Sequence
  Description of Artificial Sequence: Synthetic oligonucleotide
guaauuuaucccuaggcuc

SEQ ID NO: 2110305 - RNA, 19 nt, Artificial Sequence
  Description of Artificial Sequence: Synthetic oligonucleotide
uugaacauucagcuguacc

SEQ ID NO: 2110306 - RNA, 19 nt, Artificial Sequence
  Description of Artificial Sequence: Synthetic oligonucleotide
agaaugaccuaugagagcu

SEQ ID NO: 2110307 - RNA, 19 nt, Artificial Sequence
  Description of Artificial Sequence: Synthetic oligonucleotide
cacagaaugaccuaugaga

SEQ ID NO: 2110308 - RNA, 19 nt, Artificial Sequence
  Description of Artificial Sequence: Synthetic oligonucleotide
ucacaauuuuacauggaac

SEQ ID NO: 2110309 - RNA, 19 nt, Artificial Sequence
  Description of Artificial Sequence: Synthetic oligonucleotide
uuaacuucuuccucacucc

SEQ ID NO: 2110310 - RNA, 19 nt, Artificial Sequence
  Description of Artificial Sequence: Synthetic oligonucleotide
cauggucugacuuaccaag

SEQ ID NO: 2110311 - RNA, 19 nt, Artificial Sequence
  Description of Artificial Sequence: Synthetic oligonucleotide
auaucacuagcucucccac

SEQ ID NO: 2110312 - RNA, 19 nt, Artificial Sequence
  Description of Artificial Sequence: Synthetic oligonucleotide
uauucucauaucacuagcu

SEQ ID NO: 2110313 - RNA, 19 nt, Artificial Sequence
  Description of Artificial Sequence: Synthetic oligonucleotide
ucugacuuaccaagcaagc

SEQ ID NO: 2110314 - RNA, 19 nt, Artificial Sequence
  Description of Artificial Sequence: Synthetic oligonucleotide
caguaauuuaucccuaggc

SEQ ID NO: 2110315 - RNA, 19 nt, Artificial Sequence
  Description of Artificial Sequence: Synthetic oligonucleotide
ucucauaucacuagcucuc

SEQ ID NO: 2110316 - RNA, 19 nt, Artificial Sequence
  Description of Artificial Sequence: Synthetic oligonucleotide
uaaucaggagguagaagcc

SEQ ID NO: 2110317 - RNA, 19 nt, Artificial Sequence
  Description of Artificial Sequence: Synthetic oligonucleotide
ugcuuaaagggaaacuaga

SEQ ID NO: 2110318 - RNA, 19 nt, Artificial Sequence
  Description of Artificial Sequence: Synthetic oligonucleotide
uuuuaacugcucuagguua

SEQ ID NO: 2110319 - RNA, 19 nt, Artificial Sequence
  Description of Artificial Sequence: Synthetic oligonucleotide
ucuaaguguagcaacuuua

SEQ ID NO: 2110320 - RNA, 19 nt, Artificial Sequence
  Description of Artificial Sequence: Synthetic oligonucleotide
acaaggauucucuccuccc

SEQ ID NO: 2110321 - RNA, 19 nt, Artificial Sequence
  Description of Artificial Sequence: Synthetic oligonucleotide
aggaccuugaacauucagc

SEQ ID NO: 2110322 - RNA, 19 nt, Artificial Sequence
  Description of Artificial Sequence: Synthetic oligonucleotide
uagguaacaguacauuggu

SEQ ID NO: 2110323 - RNA, 19 nt, Artificial Sequence
  Description of Artificial Sequence: Synthetic oligonucleotide
agcacugggauuugguuuc

SEQ ID NO: 2110324 - RNA, 19 nt, Artificial Sequence
  Description of Artificial Sequence: Synthetic oligonucleotide
ugcauuagcaaggugcugc

SEQ ID NO: 2110325 - RNA, 19 nt, Artificial Sequence
  Description of Artificial Sequence: Synthetic oligonucleotide
ucagaccugaguuaacaug

SEQ ID NO: 2110326 - RNA, 19 nt, Artificial Sequence
  Description of Artificial Sequence: Synthetic oligonucleotide
uucucauaucacuagcucu

SEQ ID NO: 2110327 - RNA, 19 nt, Artificial Sequence
  Description of Artificial Sequence: Synthetic oligonucleotide
acaguaauuuaucccuagg

SEQ ID NO: 2110328 - RNA, 19 nt, Artificial Sequence
  Description of Artificial Sequence: Synthetic oligonucleotide
aaaguaaucaggagguaga

SEQ ID NO: 2110329 - RNA, 19 nt, Artificial Sequence
  Description of Artificial Sequence: Synthetic oligonucleotide
aaaucuaaguguagcaacu

SEQ ID NO: 2110330 - RNA, 19 nt, Artificial Sequence
  Description of Artificial Sequence: Synthetic oligonucleotide
ucugcauuagcaaggugcu

SEQ ID NO: 2110331 - RNA, 19 nt, Artificial Sequence
  Description of Artificial Sequence: Synthetic oligonucleotide
acuaagauacuguucaguu

SEQ ID NO: 2110332 - RNA, 19 nt, Artificial Sequence
  Description of Artificial Sequence: Synthetic oligonucleotide
ugucaacaggaaaugugag

SEQ ID NO: 2110333 - RNA, 19 nt, Artificial Sequence
  Description of Artificial Sequence: Synthetic oligonucleotide
uaaguguagcaacuuuacc

SEQ ID NO: 2110334 - RNA, 19 nt, Artificial Sequence
  Description of Artificial Sequence: Synthetic oligonucleotide
ugucuacagagcaggacag

SEQ ID NO: 2110335 - RNA, 19 nt, Artificial Sequence
  Description of Artificial Sequence: Synthetic oligonucleotide
cuaacaagacugucaacag

SEQ ID NO: 2110336 - RNA, 19 nt, Artificial Sequence
  Description of Artificial Sequence: Synthetic oligonucleotide
gagaauaaauauauucuca

SEQ ID NO: 2110337 - RNA, 19 nt, Artificial Sequence
  Description of Artificial Sequence: Synthetic oligonucleotide
uuaccaagcaagccucuag

SEQ ID NO: 2110338 - RNA, 19 nt, Artificial Sequence
  Description of Artificial Sequence: Synthetic oligonucleotide
aauuuuacauggaacccca

SEQ ID NO: 2110339 - RNA, 19 nt, Artificial Sequence
  Description of Artificial Sequence: Synthetic oligonucleotide
aacaugucgaaaccccuga

SEQ ID NO: 2110340 - RNA, 19 nt, Artificial Sequence
  Description of Artificial Sequence: Synthetic oligonucleotide
guuaacaugucgaaacccc

SEQ ID NO: 2110341 - RNA, 19 nt, Artificial Sequence
  Description of Artificial Sequence: Synthetic oligonucleotide
caauuuuacauggaacccc

SEQ ID NO: 2110342 - RNA, 19 nt, Artificial Sequence
  Description of Artificial Sequence: Synthetic oligonucleotide
aguguagcaacuuuaccaa

SEQ ID NO: 2110343 - RNA, 19 nt, Artificial Sequence
  Description of Artificial Sequence: Synthetic oligonucleotide
uuaacaugucgaaaccccu

SEQ ID NO: 2110344 - RNA, 19 nt, Artificial Sequence
  Description of Artificial Sequence: Synthetic oligonucleotide
uuacauggaaccccagcug

SEQ ID NO: 2110345 - RNA, 19 nt, Artificial Sequence
  Description of Artificial Sequence: Synthetic oligonucleotide
aggcacaaggauucucucc

SEQ ID NO: 2110346 - RNA, 19 nt, Artificial Sequence
  Description of Artificial Sequence: Synthetic oligonucleotide
augucgaaaccccugagga

SEQ ID NO: 2110347 - RNA, 19 nt, Artificial Sequence
  Description of Artificial Sequence: Synthetic oligonucleotide
cuuuccuuuggcuuggauc

SEQ ID NO: 2110348 - RNA, 19 nt, Artificial Sequence
  Description of Artificial Sequence: Synthetic oligonucleotide
uuuaacugcucuagguuaa

SEQ ID NO: 2110349 - RNA, 19 nt, Artificial Sequence
  Description of Artificial Sequence: Synthetic oligonucleotide
gaaacuagagaaaguaauc

SEQ ID NO: 2110350 - RNA, 19 nt, Artificial Sequence
  Description of Artificial Sequence: Synthetic oligonucleotide
cugaggauacuccagcccc

SEQ ID NO: 2110351 - RNA, 19 nt, Artificial Sequence
  Description of Artificial Sequence: Synthetic oligonucleotide
uuauuagaaugaauucuau

SEQ ID NO: 2110352 - RNA, 19 nt, Artificial Sequence
  Description of Artificial Sequence: Synthetic oligonucleotide
aaaccccugaggauacucc

SEQ ID NO: 2110353 - RNA, 19 nt, Artificial Sequence
  Description of Artificial Sequence: Synthetic oligonucleotide
uaaagggaaacuagagaaa

SEQ ID NO: 2110354 - RNA, 19 nt, Artificial Sequence
  Description of Artificial Sequence: Synthetic oligonucleotide
aaggaccuugaacauucag

SEQ ID NO: 2110355 - RNA, 19 nt, Artificial Sequence
  Description of Artificial Sequence: Synthetic oligonucleotide
uguucaguuccacaucagu

SEQ ID NO: 2110356 - RNA, 19 nt, Artificial Sequence
  Description of Artificial Sequence: Synthetic oligonucleotide
aaagucccuuuaucucagc

SEQ ID NO: 2110357 - RNA, 19 nt, Artificial Sequence
  Description of Artificial Sequence: Synthetic oligonucleotide
aaggcacaaggauucucuc

SEQ ID NO: 2110358 - RNA, 19 nt, Artificial Sequence
  Description of Artificial Sequence: Synthetic oligonucleotide
ucgaucucagaccugaguu

SEQ ID NO: 2110359 - RNA, 19 nt, Artificial Sequence
  Description of Artificial Sequence: Synthetic oligonucleotide
gaccugaguuaacaugucg

SEQ ID NO: 2110360 - RNA, 19 nt, Artificial Sequence
  Description of Artificial Sequence: Synthetic oligonucleotide
uacauuggucuguauacac

SEQ ID NO: 2110361 - RNA, 19 nt, Artificial Sequence
  Description of Artificial Sequence: Synthetic oligonucleotide
uaacaugucgaaaccccug

SEQ ID NO: 2110362 - RNA, 19 nt, Artificial Sequence
  Description of Artificial Sequence: Synthetic oligonucleotide
ugguuucgaucucagaccu

SEQ ID NO: 2110363 - RNA, 19 nt, Artificial Sequence
  Description of Artificial Sequence: Synthetic oligonucleotide
gcaaacaguaauuuauccc

SEQ ID NO: 2110364 - RNA, 19 nt, Artificial Sequence
  Description of Artificial Sequence: Synthetic oligonucleotide
uaccaagcaagccucuagc

SEQ ID NO: 2110365 - RNA, 19 nt, Artificial Sequence
  Description of Artificial Sequence: Synthetic oligonucleotide
uuuaucccuaggcucuuug

SEQ ID NO: 2110366 - RNA, 19 nt, Artificial Sequence
  Description of Artificial Sequence: Synthetic oligonucleotide
guaacaguacauuggucug

SEQ ID NO: 2110367 - RNA, 19 nt, Artificial Sequence
  Description of Artificial Sequence: Synthetic oligonucleotide
cugagaauaaauauauucu

SEQ ID NO: 2110368 - RNA, 19 nt, Artificial Sequence
  Description of Artificial Sequence: Synthetic oligonucleotide
caugucgaaaccccugagg

SEQ ID NO: 2110369 - RNA, 19 nt, Artificial Sequence
  Description of Artificial Sequence: Synthetic oligonucleotide
uuucaagaugguuucgauc

SEQ ID NO: 2110370 - RNA, 19 nt, Artificial Sequence
  Description of Artificial Sequence: Synthetic oligonucleotide
aaaugugagaucagcauua

SEQ ID NO: 2110371 - RNA, 19 nt, Artificial Sequence
  Description of Artificial Sequence: Synthetic oligonucleotide
cuggaaaggcucuaacaag

SEQ ID NO: 2110372 - RNA, 19 nt, Artificial Sequence
  Description of Artificial Sequence: Synthetic oligonucleotide
ggagguagaagccaaugcc

SEQ ID NO: 2110373 - RNA, 19 nt, Artificial Sequence
  Description of Artificial Sequence: Synthetic oligonucleotide
aaugaccuaugagagcuca

SEQ ID NO: 2110374 - RNA, 19 nt, Artificial Sequence
  Description of Artificial Sequence: Synthetic oligonucleotide
ucucccacuaagauacugu

SEQ ID NO: 2110375 - RNA, 19 nt, Artificial Sequence
  Description of Artificial Sequence: Synthetic oligonucleotide
acuaacacacauccuuuca

SEQ ID NO: 2110376 - RNA, 19 nt, Artificial Sequence
  Description of Artificial Sequence: Synthetic oligonucleotide
acaauuugacaauuguguu

SEQ ID NO: 2110377 - RNA, 19 nt, Artificial Sequence
  Description of Artificial Sequence: Synthetic oligonucleotide
uuggucuguauacacugac

SEQ ID NO: 2110378 - RNA, 19 nt, Artificial Sequence
  Description of Artificial Sequence: Synthetic oligonucleotide
uuugacaauuguguucagc

SEQ ID NO: 2110379 - RNA, 19 nt, Artificial Sequence
  Description of Artificial Sequence: Synthetic oligonucleotide
cuaagauacuguucaguuc

SEQ ID NO: 2110380 - RNA, 19 nt, Artificial Sequence
  Description of Artificial Sequence: Synthetic oligonucleotide
uuaucucagcguaagccuc

SEQ ID NO: 2110381 - RNA, 19 nt, Artificial Sequence
  Description of Artificial Sequence: Synthetic oligonucleotide
ugcacuggcccauagcacu

SEQ ID NO: 2110382 - RNA, 19 nt, Artificial Sequence
  Description of Artificial Sequence: Synthetic oligonucleotide
auacuccagccccaucugc

SEQ ID NO: 2110383 - RNA, 19 nt, Artificial Sequence
  Description of Artificial Sequence: Synthetic oligonucleotide
cagaacauugugucuguag

SEQ ID NO: 2110384 - RNA, 19 nt, Artificial Sequence
  Description of Artificial Sequence: Synthetic oligonucleotide
uccccuagguaacaguaca

SEQ ID NO: 2110385 - RNA, 19 nt, Artificial Sequence
  Description of Artificial Sequence: Synthetic oligonucleotide
aacauugugucuguagcaa

SEQ ID NO: 2110386 - RNA, 19 nt, Artificial Sequence
  Description of Artificial Sequence: Synthetic oligonucleotide
cacacauccuuucaagaug

SEQ ID NO: 2110387 - RNA, 19 nt, Artificial Sequence
  Description of Artificial Sequence: Synthetic oligonucleotide
gaacauugugucuguagca

SEQ ID NO: 2110388 - RNA, 19 nt, Artificial Sequence
  Description of Artificial Sequence: Synthetic oligonucleotide
ugcucuagguuaaaacaaa

SEQ ID NO: 2110389 - RNA, 19 nt, Artificial Sequence
  Description of Artificial Sequence: Synthetic oligonucleotide
uaucacaauuuuacaugga

SEQ ID NO: 2110390 - RNA, 19 nt, Artificial Sequence
  Description of Artificial Sequence: Synthetic oligonucleotide
augaaaaccaaaguauaaa

SEQ ID NO: 2110391 - RNA, 19 nt, Artificial Sequence
  Description of Artificial Sequence: Synthetic oligonucleotide
caguaccaagcuuaacucc

SEQ ID NO: 2110392 - RNA, 19 nt, Artificial Sequence
  Description of Artificial Sequence: Synthetic oligonucleotide
cauaaaggucuggaaaggc

SEQ ID NO: 2110393 - RNA, 19 nt, Artificial Sequence
  Description of Artificial Sequence: Synthetic oligonucleotide
aguauaaaucaaaaucuaa

SEQ ID NO: 2110394 - RNA, 19 nt, Artificial Sequence
  Description of Artificial Sequence: Synthetic oligonucleotide
cugucaacaggaaauguga

SEQ ID NO: 2110395 - RNA, 19 nt, Artificial Sequence
  Description of Artificial Sequence: Synthetic oligonucleotide
ucuacagagcaggacaggu

SEQ ID NO: 2110396 - RNA, 19 nt, Artificial Sequence
  Description of Artificial Sequence: Synthetic oligonucleotide
acugucaacaggaaaugug

SEQ ID NO: 2110397 - RNA, 19 nt, Artificial Sequence
  Description of Artificial Sequence: Synthetic oligonucleotide
uagcuaucugagaauaaau

SEQ ID NO: 2110398 - RNA, 19 nt, Artificial Sequence
  Description of Artificial Sequence: Synthetic oligonucleotide
gagaaaguaaucaggaggu

SEQ ID NO: 2110399 - RNA, 19 nt, Artificial Sequence
  Description of Artificial Sequence: Synthetic oligonucleotide
gguaacaguacauuggucu

SEQ ID NO: 2110400 - RNA, 19 nt, Artificial Sequence
  Description of Artificial Sequence: Synthetic oligonucleotide
agacccaccuccuccacag

SEQ ID NO: 2110401 - RNA, 19 nt, Artificial Sequence
  Description of Artificial Sequence: Synthetic oligonucleotide
uuuguccuacacuauuaaa

SEQ ID NO: 2110402 - RNA, 19 nt, Artificial Sequence
  Description of Artificial Sequence: Synthetic oligonucleotide
ucauaucacuagcucuccc

SEQ ID NO: 2110403 - RNA, 19 nt, Artificial Sequence
  Description of Artificial Sequence: Synthetic oligonucleotide
uggucugacuuaccaagca

SEQ ID NO: 2110404 - RNA, 19 nt, Artificial Sequence
  Description of Artificial Sequence: Synthetic oligonucleotide
uuuggagaaacaugucuuu

SEQ ID NO: 2110405 - RNA, 19 nt, Artificial Sequence
  Description of Artificial Sequence: Synthetic oligonucleotide
ucucagaccugaguuaaca

SEQ ID NO: 2110406 - RNA, 19 nt, Artificial Sequence
  Description of Artificial Sequence: Synthetic oligonucleotide
acugacauaaaggucugga

SEQ ID NO: 2110407 - RNA, 19 nt, Artificial Sequence
  Description of Artificial Sequence: Synthetic oligonucleotide
gauucucuccucccuuucc

SEQ ID NO: 2110408 - RNA, 19 nt, Artificial Sequence
  Description of Artificial Sequence: Synthetic oligonucleotide
agugcuuaaagggaaacua

SEQ ID NO: 2110409 - RNA, 19 nt, Artificial Sequence
  Description of Artificial Sequence: Synthetic oligonucleotide
uucgaucucagaccugagu

SEQ ID NO: 2110410 - RNA, 19 nt, Artificial Sequence
  Description of Artificial Sequence: Synthetic oligonucleotide
uggucuguauacacugaca

SEQ ID NO: 2110411 - RNA, 19 nt, Artificial Sequence
  Description of Artificial Sequence: Synthetic oligonucleotide
auuagcaaggugcugccuu

SEQ ID NO: 2110412 - RNA, 19 nt, Artificial Sequence
  Description of Artificial Sequence: Synthetic oligonucleotide
aaccccugaggauacucca

SEQ ID NO: 2110413 - RNA, 19 nt, Artificial Sequence
  Description of Artificial Sequence: Synthetic oligonucleotide
cuugacuuucaaguucagg

SEQ ID NO: 2110414 - RNA, 19 nt, Artificial Sequence
  Description of Artificial Sequence: Synthetic oligonucleotide
aaggcaaaugaaaaccaaa

SEQ ID NO: 2110415 - RNA, 19 nt, Artificial Sequence
  Description of Artificial Sequence: Synthetic oligonucleotide
aguaccaagcuuaacuccu

SEQ ID NO: 2110416 - RNA, 19 nt, Artificial Sequence
  Description of Artificial Sequence: Synthetic oligonucleotide
ugacuuucaaguucagguu

SEQ ID NO: 2110417 - RNA, 19 nt, Artificial Sequence
  Description of Artificial Sequence: Synthetic oligonucleotide
uucagcuuuggagaaacau

SEQ ID NO: 2110418 - RNA, 19 nt, Artificial Sequence
  Description of Artificial Sequence: Synthetic oligonucleotide
ucugagacuugacuuucaa

SEQ ID NO: 2110419 - RNA, 19 nt, Artificial Sequence
  Description of Artificial Sequence: Synthetic oligonucleotide
aacauucagcuguaccaaa

SEQ ID NO: 2110420 - RNA, 19 nt, Artificial Sequence
  Description of Artificial Sequence: Synthetic oligonucleotide
uggcccauagcacugggau

SEQ ID NO: 2110421 - RNA, 19 nt, Artificial Sequence
  Description of Artificial Sequence: Synthetic oligonucleotide
guaccaaaacaaauacaag

SEQ ID NO: 2110422 - RNA, 19 nt, Artificial Sequence
  Description of Artificial Sequence: Synthetic oligonucleotide
cauucagcuguaccaaaac

SEQ ID NO: 2110423 - RNA, 19 nt, Artificial Sequence
  Description of Artificial Sequence: Synthetic oligonucleotide
uuugucuacagagcaggac

SEQ ID NO: 2110424 - RNA, 19 nt, Artificial Sequence
  Description of Artificial Sequence: Synthetic oligonucleotide
cacaaggauucucuccucc

SEQ ID NO: 2110425 - RNA, 19 nt, Artificial Sequence
  Description of Artificial Sequence: Synthetic oligonucleotide
cugagacuugacuuucaag

SEQ ID NO: 2110426 - RNA, 19 nt, Artificial Sequence
  Description of Artificial Sequence: Synthetic oligonucleotide
caggaaaugugagaucagc

SEQ ID NO: 2110427 - RNA, 19 nt, Artificial Sequence
  Description of Artificial Sequence: Synthetic oligonucleotide
aguaaucaggagguagaag

SEQ ID NO: 2110428 - RNA, 19 nt, Artificial Sequence
  Description of Artificial Sequence: Synthetic oligonucleotide
auaaaggucuggaaaggcu

SEQ ID NO: 2110429 - RNA, 19 nt, Artificial Sequence
  Description of Artificial Sequence: Synthetic oligonucleotide
auauauucucauaucacua

SEQ ID NO: 2110430 - RNA, 19 nt, Artificial Sequence
  Description of Artificial Sequence: Synthetic oligonucleotide
ucuagcuaucugagaauaa

SEQ ID NO: 2110431 - RNA, 19 nt, Artificial Sequence
  Description of Artificial Sequence: Synthetic oligonucleotide
cugacuuaccaagcaagcc

SEQ ID NO: 2110432 - RNA, 19 nt, Artificial Sequence
  Description of Artificial Sequence: Synthetic oligonucleotide
agggaaacuagagaaagua

SEQ ID NO: 2110433 - RNA, 19 nt, Artificial Sequence
  Description of Artificial Sequence: Synthetic oligonucleotide
ugaccuaugagagcucacu

SEQ ID NO: 2110434 - RNA, 19 nt, Artificial Sequence
  Description of Artificial Sequence: Synthetic oligonucleotide
gucaacaggaaaugugaga

SEQ ID NO: 2110435 - RNA, 19 nt, Artificial Sequence
  Description of Artificial Sequence: Synthetic oligonucleotide
auggucugacuuaccaagc

SEQ ID NO: 2110436 - RNA, 19 nt, Artificial Sequence
  Description of Artificial Sequence: Synthetic oligonucleotide
agcuuaacuccuuugucua

SEQ ID NO: 2110437 - RNA, 19 nt, Artificial Sequence
  Description of Artificial Sequence: Synthetic oligonucleotide
auauauuaucacaauuuua

SEQ ID NO: 2110438 - RNA, 19 nt, Artificial Sequence
  Description of Artificial Sequence: Synthetic oligonucleotide
uccccuacgugacacuaac

SEQ ID NO: 2110439 - RNA, 19 nt, Artificial Sequence
  Description of Artificial Sequence: Synthetic oligonucleotide
guagcaaacaguaauuuau

SEQ ID NO: 2110440 - RNA, 19 nt, Artificial Sequence
  Description of Artificial Sequence: Synthetic oligonucleotide
ucauggucugacuuaccaa

SEQ ID NO: 2110441 - RNA, 19 nt, Artificial Sequence
  Description of Artificial Sequence: Synthetic oligonucleotide
gcuuaaagggaaacuagag

SEQ ID NO: 2110442 - RNA, 19 nt, Artificial Sequence
  Description of Artificial Sequence: Synthetic oligonucleotide
gacaauuguguucagcuuu

SEQ ID NO: 2110443 - RNA, 19 nt, Artificial Sequence
  Description of Artificial Sequence: Synthetic oligonucleotide
gagagcucacuuuccuuug

SEQ ID NO: 2110444 - RNA, 19 nt, Artificial Sequence
  Description of Artificial Sequence: Synthetic oligonucleotide
aaguaaucaggagguagaa

SEQ ID NO: 2110445 - RNA, 19 nt, Artificial Sequence
  Description of Artificial Sequence: Synthetic oligonucleotide
cucagcguaagccucaaaa

SEQ ID NO: 2110446 - RNA, 19 nt, Artificial Sequence
  Description of Artificial Sequence: Synthetic oligonucleotide
caguuggcagugcuuaaag

SEQ ID NO: 2110447 - RNA, 19 nt, Artificial Sequence
  Description of Artificial Sequence: Synthetic oligonucleotide
aaggauucucuccucccuu

SEQ ID NO: 2110448 - RNA, 19 nt, Artificial Sequence
  Description of Artificial Sequence: Synthetic oligonucleotide
aggugcacuggcccauagc

SEQ ID NO: 2110449 - RNA, 19 nt, Artificial Sequence
  Description of Artificial Sequence: Synthetic oligonucleotide
uuaucccuaggcucuuugu

SEQ ID NO: 2110450 - RNA, 19 nt, Artificial Sequence
  Description of Artificial Sequence: Synthetic oligonucleotide
ccuagguaacaguacauug

SEQ ID NO: 2110451 - RNA, 19 nt, Artificial Sequence
  Description of Artificial Sequence: Synthetic oligonucleotide
agccaaugccaucuuccuc

SEQ ID NO: 2110452 - RNA, 19 nt, Artificial Sequence
  Description of Artificial Sequence: Synthetic oligonucleotide
uagcacugggauuugguuu

SEQ ID NO: 2110453 - RNA, 19 nt, Artificial Sequence
  Description of Artificial Sequence: Synthetic oligonucleotide
accaagcaagccucuagcu

SEQ ID NO: 2110454 - RNA, 19 nt, Artificial Sequence
  Description of Artificial Sequence: Synthetic oligonucleotide
agauacuguucaguuccac

SEQ ID NO: 2110455 - RNA, 19 nt, Artificial Sequence
  Description of Artificial Sequence: Synthetic oligonucleotide
aaucuaaguguagcaacuu

SEQ ID NO: 2110456 - RNA, 19 nt, Artificial Sequence
  Description of Artificial Sequence: Synthetic oligonucleotide
gacuuaccaagcaagccuc

SEQ ID NO: 2110457 - RNA, 19 nt, Artificial Sequence
  Description of Artificial Sequence: Synthetic oligonucleotide
augugagaucagcauuaag

SEQ ID NO: 2110458 - RNA, 19 nt, Artificial Sequence
  Description of Artificial Sequence: Synthetic oligonucleotide
gaccuugaacauucagcug

SEQ ID NO: 2110459 - RNA, 19 nt, Artificial Sequence
  Description of Artificial Sequence: Synthetic oligonucleotide
auagcacugggauuugguu

SEQ ID NO: 2110460 - RNA, 19 nt, Artificial Sequence
  Description of Artificial Sequence: Synthetic oligonucleotide
cucauggucugacuuacca

SEQ ID NO: 2110461 - RNA, 19 nt, Artificial Sequence
  Description of Artificial Sequence: Synthetic oligonucleotide
cuacagagcaggacaggug

SEQ ID NO: 2110462 - RNA, 19 nt, Artificial Sequence
  Description of Artificial Sequence: Synthetic oligonucleotide
acaugucgaaaccccugag

SEQ ID NO: 2110463 - RNA, 19 nt, Artificial Sequence
  Description of Artificial Sequence: Synthetic oligonucleotide
uaacaguacauuggucugu

SEQ ID NO: 2110464 - RNA, 19 nt, Artificial Sequence
  Description of Artificial Sequence: Synthetic oligonucleotide
aucuaaguguagcaacuuu

SEQ ID NO: 2110465 - RNA, 19 nt, Artificial Sequence
  Description of Artificial Sequence: Synthetic oligonucleotide
uuucgaucucagaccugag

SEQ ID NO: 2110466 - RNA, 19 nt, Artificial Sequence
  Description of Artificial Sequence: Synthetic oligonucleotide
aagggaaacuagagaaagu

SEQ ID NO: 2110467 - RNA, 19 nt, Artificial Sequence
  Description of Artificial Sequence: Synthetic oligonucleotide
acaauuguguucagcuuug

SEQ ID NO: 2110468 - RNA, 19 nt, Artificial Sequence
  Description of Artificial Sequence: Synthetic oligonucleotide
gugucuguagcaaacagua

SEQ ID NO: 2110469 - RNA, 19 nt, Artificial Sequence
  Description of Artificial Sequence: Synthetic oligonucleotide
accugaguuaacaugucga

SEQ ID NO: 2110470 - RNA, 19 nt, Artificial Sequence
  Description of Artificial Sequence: Synthetic oligonucleotide
aaggcucuaacaagacugu

SEQ ID NO: 2110471 - RNA, 19 nt, Artificial Sequence
  Description of Artificial Sequence: Synthetic oligonucleotide
uaucacuagcucucccacu

SEQ ID NO: 2110472 - RNA, 19 nt, Artificial Sequence
  Description of Artificial Sequence: Synthetic oligonucleotide
aaugugagaucagcauuaa

SEQ ID NO: 2110473 - RNA, 19 nt, Artificial Sequence
  Description of Artificial Sequence: Synthetic oligonucleotide
cuccuuugucuacagagca

SEQ ID NO: 2110474 - RNA, 19 nt, Artificial Sequence
  Description of Artificial Sequence: Synthetic oligonucleotide
auugugucuguagcaaaca

SEQ ID NO: 2110475 - RNA, 19 nt, Artificial Sequence
  Description of Artificial Sequence: Synthetic oligonucleotide
guccuacacuauuaaaaga

SEQ ID NO: 2110476 - RNA, 19 nt, Artificial Sequence
  Description of Artificial Sequence: Synthetic oligonucleotide
ugacaauuguguucagcuu

SEQ ID NO: 2110477 - RNA, 19 nt, Artificial Sequence
  Description of Artificial Sequence: Synthetic oligonucleotide
cagaccugaguuaacaugu

SEQ ID NO: 2110478 - RNA, 19 nt, Artificial Sequence
  Description of Artificial Sequence: Synthetic oligonucleotide
cccacuaagauacuguuca

SEQ ID NO: 2110479 - RNA, 19 nt, Artificial Sequence
  Description of Artificial Sequence: Synthetic oligonucleotide
ggaaccccagcugagaccc

SEQ ID NO: 2110480 - RNA, 19 nt, Artificial Sequence
  Description of Artificial Sequence: Synthetic oligonucleotide
uccuuucaagaugguuucg

SEQ ID NO: 2110481 - RNA, 19 nt, Artificial Sequence
  Description of Artificial Sequence: Synthetic oligonucleotide
gaucucagaccugaguuaa

SEQ ID NO: 2110482 - RNA, 19 nt, Artificial Sequence
  Description of Artificial Sequence: Synthetic oligonucleotide
uccagaacauugugucugu

SEQ ID NO: 2110483 - RNA, 19 nt, Artificial Sequence
  Description of Artificial Sequence: Synthetic oligonucleotide
uaggcucuuuguccuacac

SEQ ID NO: 2110484 - RNA, 19 nt, Artificial Sequence
  Description of Artificial Sequence: Synthetic oligonucleotide
cugcucuagguuaaaacaa

SEQ ID NO: 2110485 - RNA, 19 nt, Artificial Sequence
  Description of Artificial Sequence: Synthetic oligonucleotide
cacuaacacacauccuuuc

SEQ ID NO: 2110486 - RNA, 19 nt, Artificial Sequence
  Description of Artificial Sequence: Synthetic oligonucleotide
agcuaucugagaauaaaua

SEQ ID NO: 2110487 - RNA, 19 nt, Artificial Sequence
  Description of Artificial Sequence: Synthetic oligonucleotide
accuaugagagcucacuuu

SEQ ID NO: 2110488 - RNA, 19 nt, Artificial Sequence
  Description of Artificial Sequence: Synthetic oligonucleotide
aacaguacauuggucugua

SEQ ID NO: 2110489 - RNA, 19 nt, Artificial Sequence
  Description of Artificial Sequence: Synthetic oligonucleotide
agcuguaccaaaacaaaua

SEQ ID NO: 2110490 - RNA, 19 nt, Artificial Sequence
  Description of Artificial Sequence: Synthetic oligonucleotide
gaacauucagcuguaccaa

SEQ ID NO: 2110491 - RNA, 19 nt, Artificial Sequence
  Description of Artificial Sequence: Synthetic oligonucleotide
ccuaugagagcucacuuuc

SEQ ID NO: 2110492 - RNA, 19 nt, Artificial Sequence
  Description of Artificial Sequence: Synthetic oligonucleotide
uaacuccuuugucuacaga

SEQ ID NO: 2110493 - RNA, 19 nt, Artificial Sequence
  Description of Artificial Sequence: Synthetic oligonucleotide
acauugugucuguagcaaa

SEQ ID NO: 2110494 - RNA, 19 nt, Artificial Sequence
  Description of Artificial Sequence: Synthetic oligonucleotide
uagcaacuuuaccaagcuc

SEQ ID NO: 2110495 - RNA, 19 nt, Artificial Sequence
  Description of Artificial Sequence: Synthetic oligonucleotide
ugucgaaaccccugaggau

SEQ ID NO: 2110496 - RNA, 19 nt, Artificial Sequence
  Description of Artificial Sequence: Synthetic oligonucleotide
cuagcuaucugagaauaaa

SEQ ID NO: 2110497 - RNA, 19 nt, Artificial Sequence
  Description of Artificial Sequence: Synthetic oligonucleotide
cucauaucacuagcucucc

SEQ ID NO: 2110498 - RNA, 19 nt, Artificial Sequence
  Description of Artificial Sequence: Synthetic oligonucleotide
uucgucucccacagccuca

SEQ ID NO: 2110499 - RNA, 19 nt, Artificial Sequence
  Description of Artificial Sequence: Synthetic oligonucleotide
ggcucuuuguccuacacua

SEQ ID NO: 2110500 - RNA, 19 nt, Artificial Sequence
  Description of Artificial Sequence: Synthetic oligonucleotide
guuuuaacugcucuagguu

SEQ ID NO: 2110501 - RNA, 19 nt, Artificial Sequence
  Description of Artificial Sequence: Synthetic oligonucleotide
cccuacgugacacuaacac

SEQ ID NO: 2110502 - RNA, 19 nt, Artificial Sequence
  Description of Artificial Sequence: Synthetic oligonucleotide
cacuagcucucccacuaag

SEQ ID NO: 2110503 - RNA, 19 nt, Artificial Sequence
  Description of Artificial Sequence: Synthetic oligonucleotide
gucccuuuaucucagcgua

SEQ ID NO: 2110504 - RNA, 19 nt, Artificial Sequence
  Description of Artificial Sequence: Synthetic oligonucleotide
gcuaucugagaauaaauau

SEQ ID NO: 2110505 - RNA, 19 nt, Artificial Sequence
  Description of Artificial Sequence: Synthetic oligonucleotide
cuucgucucccacagccuc

SEQ ID NO: 2110506 - RNA, 19 nt, Artificial Sequence
  Description of Artificial Sequence: Synthetic oligonucleotide
uagcucucccacuaagaua

SEQ ID NO: 2110507 - RNA, 19 nt, Artificial Sequence
  Description of Artificial Sequence: Synthetic oligonucleotide
aggcucuuuguccuacacu

SEQ ID NO: 2110508 - RNA, 19 nt, Artificial Sequence
  Description of Artificial Sequence: Synthetic oligonucleotide
acauuggucuguauacacu

SEQ ID NO: 2110509 - RNA, 19 nt, Artificial Sequence
  Description of Artificial Sequence: Synthetic oligonucleotide
gaaaccccugaggauacuc

SEQ ID NO: 2110510 - RNA, 19 nt, Artificial Sequence
  Description of Artificial Sequence: Synthetic oligonucleotide
agguaacaguacauugguc

SEQ ID NO: 2110511 - RNA, 19 nt, Artificial Sequence
  Description of Artificial Sequence: Synthetic oligonucleotide
guagcaacuuuaccaagcu

SEQ ID NO: 2110512 - RNA, 19 nt, Artificial Sequence
  Description of Artificial Sequence: Synthetic oligonucleotide
uccagccccaucugcauua

SEQ ID NO: 2110513 - RNA, 19 nt, Artificial Sequence
  Description of Artificial Sequence: Synthetic oligonucleotide
gcucuaacaagacugucaa

SEQ ID NO: 2110514 - RNA, 19 nt, Artificial Sequence
  Description of Artificial Sequence: Synthetic oligonucleotide
cuccccuagguaacaguac

SEQ ID NO: 2110515 - RNA, 19 nt, Artificial Sequence
  Description of Artificial Sequence: Synthetic oligonucleotide
ugguuucugcuucuuuauu

SEQ ID NO: 2110516 - RNA, 19 nt, Artificial Sequence
  Description of Artificial Sequence: Synthetic oligonucleotide
caagacugucaacaggaaa

SEQ ID NO: 2110517 - RNA, 19 nt, Artificial Sequence
  Description of Artificial Sequence: Synthetic oligonucleotide
cuuucaguaccaagcuuaa

SEQ ID NO: 2110518 - RNA, 19 nt, Artificial Sequence
  Description of Artificial Sequence: Synthetic oligonucleotide
aagauacuguucaguucca

SEQ ID NO: 2110519 - RNA, 19 nt, Artificial Sequence
  Description of Artificial Sequence: Synthetic oligonucleotide
acuagcucucccacuaaga

SEQ ID NO: 2110520 - RNA, 19 nt, Artificial Sequence
  Description of Artificial Sequence: Synthetic oligonucleotide
gucgaaaccccugaggaua

SEQ ID NO: 2110521 - RNA, 19 nt, Artificial Sequence
  Description of Artificial Sequence: Synthetic oligonucleotide
caauuguguucagcuuugg

SEQ ID NO: 2110522 - RNA, 19 nt, Artificial Sequence
  Description of Artificial Sequence: Synthetic oligonucleotide
ucccuuuaucucagcguaa

SEQ ID NO: 2110523 - RNA, 19 nt, Artificial Sequence
  Description of Artificial Sequence: Synthetic oligonucleotide
aauuuaucccuaggcucuu

SEQ ID NO: 2110524 - RNA, 19 nt, Artificial Sequence
  Description of Artificial Sequence: Synthetic oligonucleotide
gucuacagagcaggacagg

SEQ ID NO: 2110525 - RNA, 19 nt, Artificial Sequence
  Description of Artificial Sequence: Synthetic oligonucleotide
uaccaagcuuaacuccuuu

SEQ ID NO: 2110526 - RNA, 19 nt, Artificial Sequence
  Description of Artificial Sequence: Synthetic oligonucleotide
uuucaguaccaagcuuaac

SEQ ID NO: 2110527 - RNA, 19 nt, Artificial Sequence
  Description of Artificial Sequence: Synthetic oligonucleotide
guacauuggucuguauaca

SEQ ID NO: 2110528 - RNA, 19 nt, Artificial Sequence
  Description of Artificial Sequence: Synthetic oligonucleotide
ggaaacuagagaaaguaau

SEQ ID NO: 2110529 - RNA, 19 nt, Artificial Sequence
  Description of Artificial Sequence: Synthetic oligonucleotide
uuuccccuacgugacacua

SEQ ID NO: 2110530 - RNA, 19 nt, Artificial Sequence
  Description of Artificial Sequence: Synthetic oligonucleotide
agaccugaguuaacauguc

SEQ ID NO: 2110531 - RNA, 19 nt, Artificial Sequence
  Description of Artificial Sequence: Synthetic oligonucleotide
aggauacuccagccccauc

SEQ ID NO: 2110532 - RNA, 19 nt, Artificial Sequence
  Description of Artificial Sequence: Synthetic oligonucleotide
acagccucauggucugacu

SEQ ID NO: 2110533 - RNA, 19 nt, Artificial Sequence
  Description of Artificial Sequence: Synthetic oligonucleotide
aggcucuaacaagacuguc

SEQ ID NO: 2110534 - RNA, 19 nt, Artificial Sequence
  Description of Artificial Sequence: Synthetic oligonucleotide
cuuugucuacagagcagga

SEQ ID NO: 2110535 - RNA, 19 nt, Artificial Sequence
  Description of Artificial Sequence: Synthetic oligonucleotide
acauucagcuguaccaaaa

SEQ ID NO: 2110536 - RNA, 19 nt, Artificial Sequence
  Description of Artificial Sequence: Synthetic oligonucleotide
uuaacugcucuagguuaaa

SEQ ID NO: 2110537 - RNA, 19 nt, Artificial Sequence
  Description of Artificial Sequence: Synthetic oligonucleotide
uccucccuuuccccuacgu

SEQ ID NO: 2110538 - RNA, 19 nt, Artificial Sequence
  Description of Artificial Sequence: Synthetic oligonucleotide
uaacugcucuagguuaaaa

SEQ ID NO: 2110539 - RNA, 19 nt, Artificial Sequence
  Description of Artificial Sequence: Synthetic oligonucleotide
augaccuaugagagcucac

SEQ ID NO: 2110540 - RNA, 19 nt, Artificial Sequence
  Description of Artificial Sequence: Synthetic oligonucleotide
auuggucuguauacacuga

SEQ ID NO: 2110541 - RNA, 19 nt, Artificial Sequence
  Description of Artificial Sequence: Synthetic oligonucleotide
ccugaggauacuccagccc

SEQ ID NO: 2110542 - RNA, 19 nt, Artificial Sequence
  Description of Artificial Sequence: Synthetic oligonucleotide
uuccccuacgugacacuaa

SEQ ID NO: 2110543 - RNA, 19 nt, Artificial Sequence
  Description of Artificial Sequence: Synthetic oligonucleotide
acauccuuucaagaugguu

SEQ ID NO: 2110544 - RNA, 19 nt, Artificial Sequence
  Description of Artificial Sequence: Synthetic oligonucleotide
ggcacaaggauucucuccu

SEQ ID NO: 2110545 - RNA, 19 nt, Artificial Sequence
  Description of Artificial Sequence: Synthetic oligonucleotide
ugagacccaccuccuccac

SEQ ID NO: 2110546 - RNA, 19 nt, Artificial Sequence
  Description of Artificial Sequence: Synthetic oligonucleotide
ggcucuaacaagacuguca

SEQ ID NO: 2110547 - RNA, 19 nt, Artificial Sequence
  Description of Artificial Sequence: Synthetic oligonucleotide
acacuaacacacauccuuu

SEQ ID NO: 2110548 - RNA, 19 nt, Artificial Sequence
  Description of Artificial Sequence: Synthetic oligonucleotide
aucaguuggcagugcuuaa

SEQ ID NO: 2110549 - RNA, 19 nt, Artificial Sequence
  Description of Artificial Sequence: Synthetic oligonucleotide
caucaguuggcagugcuua

SEQ ID NO: 2110550 - RNA, 19 nt, Artificial Sequence
  Description of Artificial Sequence: Synthetic oligonucleotide
cucuagcuaucugagaaua

SEQ ID NO: 2110551 - RNA, 19 nt, Artificial Sequence
  Description of Artificial Sequence: Synthetic oligonucleotide
cauagcacugggauuuggu

SEQ ID NO: 2110552 - RNA, 19 nt, Artificial Sequence
  Description of Artificial Sequence: Synthetic oligonucleotide
cugaguuaacaugucgaaa

SEQ ID NO: 2110553 - RNA, 19 nt, Artificial Sequence
  Description of Artificial Sequence: Synthetic oligonucleotide
ggaaaggcucuaacaagac

SEQ ID NO: 2110554 - RNA, 19 nt, Artificial Sequence
  Description of Artificial Sequence: Synthetic oligonucleotide
acuuuccuuuggcuuggau

SEQ ID NO: 2110555 - RNA, 19 nt, Artificial Sequence
  Description of Artificial Sequence: Synthetic oligonucleotide
gagacccaccuccuccaca

SEQ ID NO: 2110556 - RNA, 19 nt, Artificial Sequence
  Description of Artificial Sequence: Synthetic oligonucleotide
gcuuaacuccuuugucuac

SEQ ID NO: 2110557 - RNA, 19 nt, Artificial Sequence
  Description of Artificial Sequence: Synthetic oligonucleotide
cuuucaagaugguuucgau

SEQ ID NO: 2110558 - RNA, 19 nt, Artificial Sequence
  Description of Artificial Sequence: Synthetic oligonucleotide
ccuuuaucucagcguaagc

SEQ ID NO: 2110559 - RNA, 19 nt, Artificial Sequence
  Description of Artificial Sequence: Synthetic oligonucleotide
ggauccuucugagacuuga

SEQ ID NO: 2110560 - RNA, 19 nt, Artificial Sequence
  Description of Artificial Sequence: Synthetic oligonucleotide
ggucugacuuaccaagcaa

SEQ ID NO: 2110561 - RNA, 19 nt, Artificial Sequence
  Description of Artificial Sequence: Synthetic oligonucleotide
gaaugaccuaugagagcuc

SEQ ID NO: 2110562 - RNA, 19 nt, Artificial Sequence
  Description of Artificial Sequence: Synthetic oligonucleotide
acuugacuuucaaguucag

SEQ ID NO: 2110563 - RNA, 19 nt, Artificial Sequence
  Description of Artificial Sequence: Synthetic oligonucleotide
ccuacgugacacuaacaca

SEQ ID NO: 2110564 - RNA, 19 nt, Artificial Sequence
  Description of Artificial Sequence: Synthetic oligonucleotide
uagcaaggugcugccuucu

SEQ ID NO: 2110565 - RNA, 19 nt, Artificial Sequence
  Description of Artificial Sequence: Synthetic oligonucleotide
acuuaccaagcaagccucu

SEQ ID NO: 2110566 - RNA, 19 nt, Artificial Sequence
  Description of Artificial Sequence: Synthetic oligonucleotide
gggaaacuagagaaaguaa

SEQ ID NO: 2110567 - RNA, 19 nt, Artificial Sequence
  Description of Artificial Sequence: Synthetic oligonucleotide
gaccuaugagagcucacuu

SEQ ID NO: 2110568 - RNA, 19 nt, Artificial Sequence
  Description of Artificial Sequence: Synthetic oligonucleotide
ccaccuccuccacagaaug

SEQ ID NO: 2110569 - RNA, 19 nt, Artificial Sequence
  Description of Artificial Sequence: Synthetic oligonucleotide
gacugucaacaggaaaugu

SEQ ID NO: 2110570 - RNA, 19 nt, Artificial Sequence
  Description of Artificial Sequence: Synthetic oligonucleotide
acaagacugucaacaggaa

SEQ ID NO: 2110571 - RNA, 19 nt, Artificial Sequence
  Description of Artificial Sequence: Synthetic oligonucleotide
ccugaguuaacaugucgaa

SEQ ID NO: 2110572 - RNA, 19 nt, Artificial Sequence
  Description of Artificial Sequence: Synthetic oligonucleotide
cgugacacuaacacacauc

SEQ ID NO: 2110573 - RNA, 19 nt, Artificial Sequence
  Description of Artificial Sequence: Synthetic oligonucleotide
ucacucccugccuggguuu

SEQ ID NO: 2110574 - RNA, 19 nt, Artificial Sequence
  Description of Artificial Sequence: Synthetic oligonucleotide
gcaacuuuaccaagcucca

SEQ ID NO: 2110575 - RNA, 19 nt, Artificial Sequence
  Description of Artificial Sequence: Synthetic oligonucleotide
caaggauucucuccucccu

SEQ ID NO: 2110576 - RNA, 19 nt, Artificial Sequence
  Description of Artificial Sequence: Synthetic oligonucleotide
ccccugaggauacuccagc

SEQ ID NO: 2110577 - RNA, 19 nt, Artificial Sequence
  Description of Artificial Sequence: Synthetic oligonucleotide
gcagugcuuaaagggaaac

SEQ ID NO: 2110578 - RNA, 19 nt, Artificial Sequence
  Description of Artificial Sequence: Synthetic oligonucleotide
caggugcacuggcccauag

SEQ ID NO: 2110579 - RNA, 19 nt, Artificial Sequence
  Description of Artificial Sequence: Synthetic oligonucleotide
uuccuuuggcuuggauccu

SEQ ID NO: 2110580 - RNA, 19 nt, Artificial Sequence
  Description of Artificial Sequence: Synthetic oligonucleotide
cuaggcucuuuguccuaca

SEQ ID NO: 2110581 - RNA, 19 nt, Artificial Sequence
  Description of Artificial Sequence: Synthetic oligonucleotide
gugcacuggcccauagcac

SEQ ID NO: 2110582 - RNA, 19 nt, Artificial Sequence
  Description of Artificial Sequence: Synthetic oligonucleotide
gcauuaagcagcacacaaa

SEQ ID NO: 2110583 - RNA, 19 nt, Artificial Sequence
  Description of Artificial Sequence: Synthetic oligonucleotide
acaucaguuggcagugcuu

SEQ ID NO: 2110584 - RNA, 19 nt, Artificial Sequence
  Description of Artificial Sequence: Synthetic oligonucleotide
gaucagcauuaagcagcac

SEQ ID NO: 2110585 - RNA, 19 nt, Artificial Sequence
  Description of Artificial Sequence: Synthetic oligonucleotide
cagcauuaagcagcacaca

SEQ ID NO: 2110586 - RNA, 19 nt, Artificial Sequence
  Description of Artificial Sequence: Synthetic oligonucleotide
cucagaccugaguuaacau

SEQ ID NO: 2110587 - RNA, 19 nt, Artificial Sequence
  Description of Artificial Sequence: Synthetic oligonucleotide
ccuuucaagaugguuucga

SEQ ID NO: 2110588 - RNA, 19 nt, Artificial Sequence
  Description of Artificial Sequence: Synthetic oligonucleotide
cuuaccaagcaagccucua

SEQ ID NO: 2110589 - RNA, 19 nt, Artificial Sequence
  Description of Artificial Sequence: Synthetic oligonucleotide
cucccacuaagauacuguu

SEQ ID NO: 2110590 - RNA, 19 nt, Artificial Sequence
  Description of Artificial Sequence: Synthetic oligonucleotide
ccucccuuuccccuacgug

SEQ ID NO: 2110591 - RNA, 19 nt, Artificial Sequence
  Description of Artificial Sequence: Synthetic oligonucleotide
gucuuucaguaccaagcuu

SEQ ID NO: 2110592 - RNA, 19 nt, Artificial Sequence
  Description of Artificial Sequence: Synthetic oligonucleotide
guucagcuuuggagaaaca

SEQ ID NO: 2110593 - RNA, 19 nt, Artificial Sequence
  Description of Artificial Sequence: Synthetic oligonucleotide
cagugcuuaaagggaaacu

SEQ ID NO: 2110594 - RNA, 19 nt, Artificial Sequence
  Description of Artificial Sequence: Synthetic oligonucleotide
ccauagcacugggauuugg

SEQ ID NO: 2110595 - RNA, 19 nt, Artificial Sequence
  Description of Artificial Sequence: Synthetic oligonucleotide
ggcuuggauccuucugaga

SEQ ID NO: 2110596 - RNA, 19 nt, Artificial Sequence
  Description of Artificial Sequence: Synthetic oligonucleotide
ccaagcaagccucuagcua

SEQ ID NO: 2110597 - RNA, 19 nt, Artificial Sequence
  Description of Artificial Sequence: Synthetic oligonucleotide
ccuaggcucuuuguccuac

SEQ ID NO: 2110598 - RNA, 19 nt, Artificial Sequence
  Description of Artificial Sequence: Synthetic oligonucleotide
ccacccuccccuagguaac

SEQ ID NO: 2110599 - RNA, 19 nt, Artificial Sequence
  Description of Artificial Sequence: Synthetic oligonucleotide
gcacaaggauucucuccuc

SEQ ID NO: 2110600 - RNA, 19 nt, Artificial Sequence
  Description of Artificial Sequence: Synthetic oligonucleotide
ccuccccuagguaacagua

SEQ ID NO: 2110601 - RNA, 19 nt, Artificial Sequence
  Description of Artificial Sequence: Synthetic oligonucleotide
gcaaggugcugccuucucu

SEQ ID NO: 2110602 - RNA, 19 nt, Artificial Sequence
  Description of Artificial Sequence: Synthetic oligonucleotide
gacccaccuccuccacaga

SEQ ID NO: 2110603 - RNA, 19 nt, Artificial Sequence
  Description of Artificial Sequence: Synthetic oligonucleotide
cacucccugccuggguuuc

SEQ ID NO: 2110604 - RNA, 19 nt, Artificial Sequence
  Description of Artificial Sequence: Synthetic oligonucleotide
gcuccagaacauugugucu

SEQ ID NO: 2110605 - RNA, 19 nt, Artificial Sequence
  Description of Artificial Sequence: Synthetic oligonucleotide
gacaggugcacuggcccau

SEQ ID NO: 2110606 - RNA, 19 nt, Artificial Sequence
  Description of Artificial Sequence: Synthetic oligonucleotide
gaggauacuccagccccau

SEQ ID NO: 2110607 - RNA, 19 nt, Artificial Sequence
  Description of Artificial Sequence: Synthetic oligonucleotide
gcccauagcacugggauuu

SEQ ID NO: 2110608 - RNA, 19 nt, Artificial Sequence
  Description of Artificial Sequence: Synthetic oligonucleotide
cagccucauggucugacuu

SEQ ID NO: 2110609 - RNA, 19 nt, Artificial Sequence
  Description of Artificial Sequence: Synthetic oligonucleotide
ccuugaacauucagcugua

SEQ ID NO: 2110610 - RNA, 19 nt, Artificial Sequence
  Description of Artificial Sequence: Synthetic oligonucleotide
cacauccuuucaagauggu

SEQ ID NO: 2110611 - RNA, 19 nt, Artificial Sequence
  Description of Artificial Sequence: Synthetic oligonucleotide
acaggugcacuggcccaua

SEQ ID NO: 2110612 - RNA, 19 nt, Artificial Sequence
  Description of Artificial Sequence: Synthetic oligonucleotide
cgaucucagaccugaguua

SEQ ID NO: 2110613 - RNA, 19 nt, Artificial Sequence
  Description of Artificial Sequence: Synthetic oligonucleotide
guaccaagcuuaacuccuu

SEQ ID NO: 2110614 - RNA, 19 nt, Artificial Sequence
  Description of Artificial Sequence: Synthetic oligonucleotide
cacccuccccuagguaaca

SEQ ID NO: 2110615 - RNA, 19 nt, Artificial Sequence
  Description of Artificial Sequence: Synthetic oligonucleotide
cucccacccuccccuaggu

SEQ ID NO: 2110616 - RNA, 19 nt, Artificial Sequence
  Description of Artificial Sequence: Synthetic oligonucleotide
ccccuacgugacacuaaca

SEQ ID NO: 2110617 - RNA, 19 nt, Artificial Sequence
  Description of Artificial Sequence: Synthetic oligonucleotide
cacuuuccuuuggcuugga

SEQ ID NO: 2110618 - RNA, 19 nt, Artificial Sequence
  Description of Artificial Sequence: Synthetic oligonucleotide
gcucuuuguccuacacuau

SEQ ID NO: 2110619 - RNA, 19 nt, Artificial Sequence
  Description of Artificial Sequence: Synthetic oligonucleotide
ccuccacagaaugaccuau

SEQ ID NO: 2110620 - RNA, 19 nt, Artificial Sequence
  Description of Artificial Sequence: Synthetic oligonucleotide
ccccuagguaacaguacau

SEQ ID NO: 2110621 - RNA, 19 nt, Artificial Sequence
  Description of Artificial Sequence: Synthetic oligonucleotide
cccuagguaacaguacauu

SEQ ID NO: 2110622 - RNA, 19 nt, Artificial Sequence
  Description of Artificial Sequence: Synthetic oligonucleotide
ccagaacauugugucugua

SEQ ID NO: 2110623 - RNA, 19 nt, Artificial Sequence
  Description of Artificial Sequence: Synthetic oligonucleotide
cccuccccuagguaacagu

SEQ ID NO: 2110624 - RNA, 19 nt, Artificial Sequence
  Description of Artificial Sequence: Synthetic oligonucleotide
cccuaggcucuuuguccua

SEQ ID NO: 2110625 - RNA, 19 nt, Artificial Sequence
  Description of Artificial Sequence: Synthetic oligonucleotide
gcacugggauuugguuucu

SEQ ID NO: 2110626 - RNA, 19 nt, Artificial Sequence
  Description of Artificial Sequence: Synthetic oligonucleotide
uuagccauauguuagagag

SEQ ID NO: 2110627 - RNA, 19 nt, Artificial Sequence
  Description of Artificial Sequence: Synthetic oligonucleotide
aauuuaagcugucaggauc

SEQ ID NO: 2110628 - RNA, 19 nt, Artificial Sequence
  Description of Artificial Sequence: Synthetic oligonucleotide
aacauugugucacagaccu

SEQ ID NO: 2110629 - RNA, 19 nt, Artificial Sequence
  Description of Artificial Sequence: Synthetic oligonucleotide
uucacaacaagcuuuacca

SEQ ID NO: 2110630 - RNA, 19 nt, Artificial Sequence
  Description of Artificial Sequence: Synthetic oligonucleotide
aucaaaugggcccacaugg

SEQ ID NO: 2110631 - RNA, 19 nt, Artificial Sequence
  Description of Artificial Sequence: Synthetic oligonucleotide
aacugguugauccaacgcg

SEQ ID NO: 2110632 - RNA, 19 nt, Artificial Sequence
  Description of Artificial Sequence: Synthetic oligonucleotide
acaugggaaaaccaggccc

SEQ ID NO: 2110633 - RNA, 19 nt, Artificial Sequence
  Description of Artificial Sequence: Synthetic oligonucleotide
gaugucaacugguugaucc

SEQ ID NO: 2110634 - RNA, 19 nt, Artificial Sequence
  Description of Artificial Sequence: Synthetic oligonucleotide
uacaauuuaagcugucagg

SEQ ID NO: 2110635 - RNA, 19 nt, Artificial Sequence
  Description of Artificial Sequence: Synthetic oligonucleotide
ugucuuuacagccugcucc

SEQ ID NO: 2110636 - RNA, 19 nt, Artificial Sequence
  Description of Artificial Sequence: Synthetic oligonucleotide
aauguguggcagcauacgg

SEQ ID NO: 2110637 - RNA, 19 nt, Artificial Sequence
  Description of Artificial Sequence: Synthetic oligonucleotide
aagugaacgaaguccuggc

SEQ ID NO: 2110638 - RNA, 19 nt, Artificial Sequence
  Description of Artificial Sequence: Synthetic oligonucleotide
aucauggaaacauuguguc

SEQ ID NO: 2110639 - RNA, 19 nt, Artificial Sequence
  Description of Artificial Sequence: Synthetic oligonucleotide
aaaaccaggccccgagagc

SEQ ID NO: 2110640 - RNA, 19 nt, Artificial Sequence
  Description of Artificial Sequence: Synthetic oligonucleotide
uuuaccaucauggaaacau

SEQ ID NO: 2110641 - RNA, 19 nt, Artificial Sequence
  Description of Artificial Sequence: Synthetic oligonucleotide
ugauccaacgcguguaucg

SEQ ID NO: 2110642 - RNA, 19 nt, Artificial Sequence
  Description of Artificial Sequence: Synthetic oligonucleotide
auacaauuuaagcugucag

SEQ ID NO: 2110643 - RNA, 19 nt, Artificial Sequence
  Description of Artificial Sequence: Synthetic oligonucleotide
aagugaacacggugggucc

SEQ ID NO: 2110644 - RNA, 19 nt, Artificial Sequence
  Description of Artificial Sequence: Synthetic oligonucleotide
gacauggcagucuuuagcc

SEQ ID NO: 2110645 - RNA, 19 nt, Artificial Sequence
  Description of Artificial Sequence: Synthetic oligonucleotide
agccauauguuagagaggg

SEQ ID NO: 2110646 - RNA, 19 nt, Artificial Sequence
  Description of Artificial Sequence: Synthetic oligonucleotide
cauccuaugauacucguug

SEQ ID NO: 2110647 - RNA, 19 nt, Artificial Sequence
  Description of Artificial Sequence: Synthetic oligonucleotide
uaugauacucguugggugc

SEQ ID NO: 2110648 - RNA, 19 nt, Artificial Sequence
  Description of Artificial Sequence: Synthetic oligonucleotide
agaaagguggcacggcagc

SEQ ID NO: 2110649 - RNA, 19 nt, Artificial Sequence
  Description of Artificial Sequence: Synthetic oligonucleotide
ucacagaccucugagaaag

SEQ ID NO: 2110650 - RNA, 19 nt, Artificial Sequence
  Description of Artificial Sequence: Synthetic oligonucleotide
uccuucaucaaaugggccc

SEQ ID NO: 2110651 - RNA, 19 nt, Artificial Sequence
  Description of Artificial Sequence: Synthetic oligonucleotide
cuuccaacgaggcaggacc

SEQ ID NO: 2110652 - RNA, 19 nt, Artificial Sequence
  Description of Artificial Sequence: Synthetic oligonucleotide
ucuccugaggugcucauag

SEQ ID NO: 2110653 - RNA, 19 nt, Artificial Sequence
  Description of Artificial Sequence: Synthetic oligonucleotide
ucaacugguugauccaacg

SEQ ID NO: 2110654 - RNA, 19 nt, Artificial Sequence
  Description of Artificial Sequence: Synthetic oligonucleotide
ucaaggacugaaugugugg

SEQ ID NO: 2110655 - RNA, 19 nt, Artificial Sequence
  Description of Artificial Sequence: Synthetic oligonucleotide
aaacauugugucacagacc

SEQ ID NO: 2110656 - RNA, 19 nt, Artificial Sequence
  Description of Artificial Sequence: Synthetic oligonucleotide
aagugcagugacuucaggu

SEQ ID NO: 2110657 - RNA, 19 nt, Artificial Sequence
  Description of Artificial Sequence: Synthetic oligonucleotide
ugugucaacagcugaucag

SEQ ID NO: 2110658 - RNA, 19 nt, Artificial Sequence
  Description of Artificial Sequence: Synthetic oligonucleotide
gaagugaacgaaguccugg

SEQ ID NO: 2110659 - RNA, 19 nt, Artificial Sequence
  Description of Artificial Sequence: Synthetic oligonucleotide
uccuaugauacucguuggg

SEQ ID NO: 2110660 - RNA, 19 nt, Artificial Sequence
  Description of Artificial Sequence: Synthetic oligonucleotide
uaugugucuuuacagccug

SEQ ID NO: 2110661 - RNA, 19 nt, Artificial Sequence
  Description of Artificial Sequence: Synthetic oligonucleotide
gaaaaccaggccccgagag

SEQ ID NO: 2110662 - RNA, 19 nt, Artificial Sequence
  Description of Artificial Sequence: Synthetic oligonucleotide
cucuaggaagugaacacgg

SEQ ID NO: 2110663 - RNA, 19 nt, Artificial Sequence
  Description of Artificial Sequence: Synthetic oligonucleotide
ugucacagaccucugagaa

SEQ ID NO: 2110664 - RNA, 19 nt, Artificial Sequence
  Description of Artificial Sequence: Synthetic oligonucleotide
aagacccugugcucugugc

SEQ ID NO: 2110665 - RNA, 19 nt, Artificial Sequence
  Description of Artificial Sequence: Synthetic oligonucleotide
uccuugccuaccuagcugg

SEQ ID NO: 2110666 - RNA, 19 nt, Artificial Sequence
  Description of Artificial Sequence: Synthetic oligonucleotide
agugaacgaaguccuggcc

SEQ ID NO: 2110667 - RNA, 19 nt, Artificial Sequence
  Description of Artificial Sequence: Synthetic oligonucleotide
uugcuaugugucuuuacag

SEQ ID NO: 2110668 - RNA, 19 nt, Artificial Sequence
  Description of Artificial Sequence: Synthetic oligonucleotide
ucaaaugggcccacauggg

SEQ ID NO: 2110669 - RNA, 19 nt, Artificial Sequence
  Description of Artificial Sequence: Synthetic oligonucleotide
ucaccagccaucacuauac

SEQ ID NO: 2110670 - RNA, 19 nt, Artificial Sequence
  Description of Artificial Sequence: Synthetic oligonucleotide
ugcgguauaaccgucgccc

SEQ ID NO: 2110671 - RNA, 19 nt, Artificial Sequence
  Description of Artificial Sequence: Synthetic oligonucleotide
cauggaaacauugugucac

SEQ ID NO: 2110672 - RNA, 19 nt, Artificial Sequence
  Description of Artificial Sequence: Synthetic oligonucleotide
caugggaaaaccaggcccc

SEQ ID NO: 2110673 - RNA, 19 nt, Artificial Sequence
  Description of Artificial Sequence: Synthetic oligonucleotide
ugaucagaugucaacuggu

SEQ ID NO: 2110674 - RNA, 19 nt, Artificial Sequence
  Description of Artificial Sequence: Synthetic oligonucleotide
guuagagagggugggaugg

SEQ ID NO: 2110675 - RNA, 19 nt, Artificial Sequence
  Description of Artificial Sequence: Synthetic oligonucleotide
cugaucagaugucaacugg

SEQ ID NO: 2110676 - RNA, 19 nt, Artificial Sequence
  Description of Artificial Sequence: Synthetic oligonucleotide
caaauggugaaggacuucc

SEQ ID NO: 2110677 - RNA, 19 nt, Artificial Sequence
  Description of Artificial Sequence: Synthetic oligonucleotide
cuaugauacucguugggug

SEQ ID NO: 2110678 - RNA, 19 nt, Artificial Sequence
  Description of Artificial Sequence: Synthetic oligonucleotide
ugagaaagguggcacggca

SEQ ID NO: 2110679 - RNA, 19 nt, Artificial Sequence
  Description of Artificial Sequence: Synthetic oligonucleotide
ugaguccuugccuaccuag

SEQ ID NO: 2110680 - RNA, 19 nt, Artificial Sequence
  Description of Artificial Sequence: Synthetic oligonucleotide
agcuucauguugcagccuc

SEQ ID NO: 2110681 - RNA, 19 nt, Artificial Sequence
  Description of Artificial Sequence: Synthetic oligonucleotide
ugggauggagaccagccug

SEQ ID NO: 2110682 - RNA, 19 nt, Artificial Sequence
  Description of Artificial Sequence: Synthetic oligonucleotide
aagcuuuaccaucauggaa

SEQ ID NO: 2110683 - RNA, 19 nt, Artificial Sequence
  Description of Artificial Sequence: Synthetic oligonucleotide
auauguuagagaggguggg

SEQ ID NO: 2110684 - RNA, 19 nt, Artificial Sequence
  Description of Artificial Sequence: Synthetic oligonucleotide
ucuuuagccauauguuaga

SEQ ID NO: 2110685 - RNA, 19 nt, Artificial Sequence
  Description of Artificial Sequence: Synthetic oligonucleotide
acagaugacaaagggugac

SEQ ID NO: 2110686 - RNA, 19 nt, Artificial Sequence
  Description of Artificial Sequence: Synthetic oligonucleotide
ugcaggauggggaccuucg

SEQ ID NO: 2110687 - RNA, 19 nt, Artificial Sequence
  Description of Artificial Sequence: Synthetic oligonucleotide
aacgaggcaggaccuguuc

SEQ ID NO: 2110688 - RNA, 19 nt, Artificial Sequence
  Description of Artificial Sequence: Synthetic oligonucleotide
guugcuaugugucuuuaca

SEQ ID NO: 2110689 - RNA, 19 nt, Artificial Sequence
  Description of Artificial Sequence: Synthetic oligonucleotide
guagaggagcaguuugugg

SEQ ID NO: 2110690 - RNA, 19 nt, Artificial Sequence
  Description of Artificial Sequence: Synthetic oligonucleotide
ugaauguguggcagcauac

SEQ ID NO: 2110691 - RNA, 19 nt, Artificial Sequence
  Description of Artificial Sequence: Synthetic oligonucleotide
aaacaaagguaagacccug

SEQ ID NO: 2110692 - RNA, 19 nt, Artificial Sequence
  Description of Artificial Sequence: Synthetic oligonucleotide
uaacaucaucugaauacca

SEQ ID NO: 2110693 - RNA, 19 nt, Artificial Sequence
  Description of Artificial Sequence: Synthetic oligonucleotide
uuuagccauauguuagaga

SEQ ID NO: 2110694 - RNA, 19 nt, Artificial Sequence
  Description of Artificial Sequence: Synthetic oligonucleotide
gucuuuagccauauguuag

SEQ ID NO: 2110695 - RNA, 19 nt, Artificial Sequence
  Description of Artificial Sequence: Synthetic oligonucleotide
caguuugugguccacccgg

SEQ ID NO: 2110696 - RNA, 19 nt, Artificial Sequence
  Description of Artificial Sequence: Synthetic oligonucleotide
caucauaacaucaucugaa

SEQ ID NO: 2110697 - RNA, 19 nt, Artificial Sequence
  Description of Artificial Sequence: Synthetic oligonucleotide
uccucguggcaguagaagc

SEQ ID NO: 2110698 - RNA, 19 nt, Artificial Sequence
  Description of Artificial Sequence: Synthetic oligonucleotide
acgaggcaggaccuguucc

SEQ ID NO: 2110699 - RNA, 19 nt, Artificial Sequence
  Description of Artificial Sequence: Synthetic oligonucleotide
uccucuaggaagugaacac

SEQ ID NO: 2110700 - RNA, 19 nt, Artificial Sequence
  Description of Artificial Sequence: Synthetic oligonucleotide
gaagugaacacgguggguc

SEQ ID NO: 2110701 - RNA, 19 nt, Artificial Sequence
  Description of Artificial Sequence: Synthetic oligonucleotide
agacccugugcucugugcg

SEQ ID NO: 2110702 - RNA, 19 nt, Artificial Sequence
  Description of Artificial Sequence: Synthetic oligonucleotide
ugcuccuggaagcugaguc

SEQ ID NO: 2110703 - RNA, 19 nt, Artificial Sequence
  Description of Artificial Sequence: Synthetic oligonucleotide
ucugacaagucaccagcca

SEQ ID NO: 2110704 - RNA, 19 nt, Artificial Sequence
  Description of Artificial Sequence: Synthetic oligonucleotide
ucuguagagucugaggggu

SEQ ID NO: 2110705 - RNA, 19 nt, Artificial Sequence
  Description of Artificial Sequence: Synthetic oligonucleotide
auccuaugauacucguugg

SEQ ID NO: 2110706 - RNA, 19 nt, Artificial Sequence
  Description of Artificial Sequence: Synthetic oligonucleotide
caaagguaagacccugugc

SEQ ID NO: 2110707 - RNA, 19 nt, Artificial Sequence
  Description of Artificial Sequence: Synthetic oligonucleotide
cuuuacagccugcuccugg

SEQ ID NO: 2110708 - RNA, 19 nt, Artificial Sequence
  Description of Artificial Sequence: Synthetic oligonucleotide
aacgaaguccuggccuucc

SEQ ID NO: 2110709 - RNA, 19 nt, Artificial Sequence
  Description of Artificial Sequence: Synthetic oligonucleotide
uagccauauguuagagagg

SEQ ID NO: 2110710 - RNA, 19 nt, Artificial Sequence
  Description of Artificial Sequence: Synthetic oligonucleotide
agucuuuagccauauguua

SEQ ID NO: 2110711 - RNA, 19 nt, Artificial Sequence
  Description of Artificial Sequence: Synthetic oligonucleotide
agaggagcaguuugugguc

SEQ ID NO: 2110712 - RNA, 19 nt, Artificial Sequence
  Description of Artificial Sequence: Synthetic oligonucleotide
uuggaagugcaggaugggg

SEQ ID NO: 2110713 - RNA, 19 nt, Artificial Sequence
  Description of Artificial Sequence: Synthetic oligonucleotide
acucguugggugcugaaca

SEQ ID NO: 2110714 - RNA, 19 nt, Artificial Sequence
  Description of Artificial Sequence: Synthetic oligonucleotide
ggcaugaucacuguggggc

SEQ ID NO: 2110715 - RNA, 19 nt, Artificial Sequence
  Description of Artificial Sequence: Synthetic oligonucleotide
gcuaugugucuuuacagcc

SEQ ID NO: 2110716 - RNA, 19 nt, Artificial Sequence
  Description of Artificial Sequence: Synthetic oligonucleotide
ugaacaccugugucaacag

SEQ ID NO: 2110717 - RNA, 19 nt, Artificial Sequence
  Description of Artificial Sequence: Synthetic oligonucleotide
agugcagugacuucagguu

SEQ ID NO: 2110718 - RNA, 19 nt, Artificial Sequence
  Description of Artificial Sequence: Synthetic oligonucleotide
agcugaagugaacgaaguc

SEQ ID NO: 2110719 - RNA, 19 nt, Artificial Sequence
  Description of Artificial Sequence: Synthetic oligonucleotide
acccggaauacaccgcccc

SEQ ID NO: 2110720 - RNA, 19 nt, Artificial Sequence
  Description of Artificial Sequence: Synthetic oligonucleotide
aucauaacaucaucugaau

SEQ ID NO: 2110721 - RNA, 19 nt, Artificial Sequence
  Description of Artificial Sequence: Synthetic oligonucleotide
aacagcugaucagauguca

SEQ ID NO: 2110722 - RNA, 19 nt, Artificial Sequence
  Description of Artificial Sequence: Synthetic oligonucleotide
caaggacugaauguguggc

SEQ ID NO: 2110723 - RNA, 19 nt, Artificial Sequence
  Description of Artificial Sequence: Synthetic oligonucleotide
aucaccuugcgccggcugg

SEQ ID NO: 2110724 - RNA, 19 nt, Artificial Sequence
  Description of Artificial Sequence: Synthetic oligonucleotide
cucaaggacugaaugugug

SEQ ID NO: 2110725 - RNA, 19 nt, Artificial Sequence
  Description of Artificial Sequence: Synthetic oligonucleotide
cagauggucaucucaagga

SEQ ID NO: 2110726 - RNA, 19 nt, Artificial Sequence
  Description of Artificial Sequence: Synthetic oligonucleotide
cucugagaaagguggcacg

SEQ ID NO: 2110727 - RNA, 19 nt, Artificial Sequence
  Description of Artificial Sequence: Synthetic oligonucleotide
guccacccggaauacaccg

SEQ ID NO: 2110728 - RNA, 19 nt, Artificial Sequence
  Description of Artificial Sequence: Synthetic oligonucleotide
ggcaucauaacaucaucug

SEQ ID NO: 2110729 - RNA, 19 nt, Artificial Sequence
  Description of Artificial Sequence: Synthetic oligonucleotide
uuggcauccuaugauacuc

SEQ ID NO: 2110730 - RNA, 19 nt, Artificial Sequence
  Description of Artificial Sequence: Synthetic oligonucleotide
ucuaggaagugaacacggu

SEQ ID NO: 2110731 - RNA, 19 nt, Artificial Sequence
  Description of Artificial Sequence: Synthetic oligonucleotide
auaaccgucgccccucgcu

SEQ ID NO: 2110732 - RNA, 19 nt, Artificial Sequence
  Description of Artificial Sequence: Synthetic oligonucleotide
aggccccgagagcagaacc

SEQ ID NO: 2110733 - RNA, 19 nt, Artificial Sequence
  Description of Artificial Sequence: Synthetic oligonucleotide
uucggcuugggccuuuccu

SEQ ID NO: 2110734 - RNA, 19 nt, Artificial Sequence
  Description of Artificial Sequence: Synthetic oligonucleotide
gggaccuucggcuugggcc

SEQ ID NO: 2110735 - RNA, 19 nt, Artificial Sequence
  Description of Artificial Sequence: Synthetic oligonucleotide
caacugguugauccaacgc

SEQ ID NO: 2110736 - RNA, 19 nt, Artificial Sequence
  Description of Artificial Sequence: Synthetic oligonucleotide
cuuuagccauauguuagag

SEQ ID NO: 2110737 - RNA, 19 nt, Artificial Sequence
  Description of Artificial Sequence: Synthetic oligonucleotide
auguguggcagcauacggg

SEQ ID NO: 2110738 - RNA, 19 nt, Artificial Sequence
  Description of Artificial Sequence: Synthetic oligonucleotide
uggaaacauugugucacag

SEQ ID NO: 2110739 - RNA, 19 nt, Artificial Sequence
  Description of Artificial Sequence: Synthetic oligonucleotide
caaagggugacugggcagc

SEQ ID NO: 2110740 - RNA, 19 nt, Artificial Sequence
  Description of Artificial Sequence: Synthetic oligonucleotide
uccagauggucaucucaag

SEQ ID NO: 2110741 - RNA, 19 nt, Artificial Sequence
  Description of Artificial Sequence: Synthetic oligonucleotide
agcugaucagaugucaacu

SEQ ID NO: 2110742 - RNA, 19 nt, Artificial Sequence
  Description of Artificial Sequence: Synthetic oligonucleotide
cagguugucuucaaacuca

SEQ ID NO: 2110743 - RNA, 19 nt, Artificial Sequence
  Description of Artificial Sequence: Synthetic oligonucleotide
uccaaauggugaaggacuu

SEQ ID NO: 2110744 - RNA, 19 nt, Artificial Sequence
  Description of Artificial Sequence: Synthetic oligonucleotide
uugccuaccuagcugggau

SEQ ID NO: 2110745 - RNA, 19 nt, Artificial Sequence
  Description of Artificial Sequence: Synthetic oligonucleotide
cucugacaagucaccagcc

SEQ ID NO: 2110746 - RNA, 19 nt, Artificial Sequence
  Description of Artificial Sequence: Synthetic oligonucleotide
uguagagucugaggggucu

SEQ ID NO: 2110747 - RNA, 19 nt, Artificial Sequence
  Description of Artificial Sequence: Synthetic oligonucleotide
agggugacugggcagcuug

SEQ ID NO: 2110748 - RNA, 19 nt, Artificial Sequence
  Description of Artificial Sequence: Synthetic oligonucleotide
uaucgcucuguagagucug

SEQ ID NO: 2110749 - RNA, 19 nt, Artificial Sequence
  Description of Artificial Sequence: Synthetic oligonucleotide
cagaccucugagaaaggug

SEQ ID NO: 2110750 - RNA, 19 nt, Artificial Sequence
  Description of Artificial Sequence: Synthetic oligonucleotide
ugggugcugaacagcagcu

SEQ ID NO: 2110751 - RNA, 19 nt, Artificial Sequence
  Description of Artificial Sequence: Synthetic oligonucleotide
caggugggcaugaucacug

SEQ ID NO: 2110752 - RNA, 19 nt, Artificial Sequence
  Description of Artificial Sequence: Synthetic oligonucleotide
gauccaacgcguguaucgc

SEQ ID NO: 2110753 - RNA, 19 nt, Artificial Sequence
  Description of Artificial Sequence: Synthetic oligonucleotide
cuaccuagcugggaugucc

SEQ ID NO: 2110754 - RNA, 19 nt, Artificial Sequence
  Description of Artificial Sequence: Synthetic oligonucleotide
aguccuugccuaccuagcu

SEQ ID NO: 2110755 - RNA, 19 nt, Artificial Sequence
  Description of Artificial Sequence: Synthetic oligonucleotide
ugguugauccaacgcgugu

SEQ ID NO: 2110756 - RNA, 19 nt, Artificial Sequence
  Description of Artificial Sequence: Synthetic oligonucleotide
aaaugggcccacaugggaa

SEQ ID NO: 2110757 - RNA, 19 nt, Artificial Sequence
  Description of Artificial Sequence: Synthetic oligonucleotide
uguugcuaugugucuuuac

SEQ ID NO: 2110758 - RNA, 19 nt, Artificial Sequence
  Description of Artificial Sequence: Synthetic oligonucleotide
uccaacgcguguaucgcuc

SEQ ID NO: 2110759 - RNA, 19 nt, Artificial Sequence
  Description of Artificial Sequence: Synthetic oligonucleotide
cagcauacgggugguagcg

SEQ ID NO: 2110760 - RNA, 19 nt, Artificial Sequence
  Description of Artificial Sequence: Synthetic oligonucleotide
ugggcagcuuggaagugca

SEQ ID NO: 2110761 - RNA, 19 nt, Artificial Sequence
  Description of Artificial Sequence: Synthetic oligonucleotide
caucauggaaacauugugu

SEQ ID NO: 2110762 - RNA, 19 nt, Artificial Sequence
  Description of Artificial Sequence: Synthetic oligonucleotide
ccauauguuagagagggug

SEQ ID NO: 2110763 - RNA, 19 nt, Artificial Sequence
  Description of Artificial Sequence: Synthetic oligonucleotide
augucaacugguugaucca

SEQ ID NO: 2110764 - RNA, 19 nt, Artificial Sequence
  Description of Artificial Sequence: Synthetic oligonucleotide
aggauccugggacauggca

SEQ ID NO: 2110765 - RNA, 19 nt, Artificial Sequence
  Description of Artificial Sequence: Synthetic oligonucleotide
uucauguugcagccucacu

SEQ ID NO: 2110766 - RNA, 19 nt, Artificial Sequence
  Description of Artificial Sequence: Synthetic oligonucleotide
ugagguccagcuucacaca

SEQ ID NO: 2110767 - RNA, 19 nt, Artificial Sequence
  Description of Artificial Sequence: Synthetic oligonucleotide
auguugcagccucacucuc

SEQ ID NO: 2110768 - RNA, 19 nt, Artificial Sequence
  Description of Artificial Sequence: Synthetic oligonucleotide
gaucacuguggggccaugg

SEQ ID NO: 2110769 - RNA, 19 nt, Artificial Sequence
  Description of Artificial Sequence: Synthetic oligonucleotide
cucguugggugcugaacag

SEQ ID NO: 2110770 - RNA, 19 nt, Artificial Sequence
  Description of Artificial Sequence: Synthetic oligonucleotide
ucggcuugggccuuuccuc

SEQ ID NO: 2110771 - RNA, 19 nt, Artificial Sequence
  Description of Artificial Sequence: Synthetic oligonucleotide
ccagauggucaucucaagg

SEQ ID NO: 2110772 - RNA, 19 nt, Artificial Sequence
  Description of Artificial Sequence: Synthetic oligonucleotide
uaccuagcugggauguccu

SEQ ID NO: 2110773 - RNA, 19 nt, Artificial Sequence
  Description of Artificial Sequence: Synthetic oligonucleotide
gcauuccaaauggugaagg

SEQ ID NO: 2110774 - RNA, 19 nt, Artificial Sequence
  Description of Artificial Sequence: Synthetic oligonucleotide
agaaggccaucaccuugcg

SEQ ID NO: 2110775 - RNA, 19 nt, Artificial Sequence
  Description of Artificial Sequence: Synthetic oligonucleotide
acugguugauccaacgcgu

SEQ ID NO: 2110776 - RNA, 19 nt, Artificial Sequence
  Description of Artificial Sequence: Synthetic oligonucleotide
aaauggugaaggacuucca

SEQ ID NO: 2110777 - RNA, 19 nt, Artificial Sequence
  Description of Artificial Sequence: Synthetic oligonucleotide
cugaagugaacgaaguccu

SEQ ID NO: 2110778 - RNA, 19 nt, Artificial Sequence
  Description of Artificial Sequence: Synthetic oligonucleotide
acaagucaccagccaucac

SEQ ID NO: 2110779 - RNA, 19 nt, Artificial Sequence
  Description of Artificial Sequence: Synthetic oligonucleotide
uuccaacgaggcaggaccu

SEQ ID NO: 2110780 - RNA, 19 nt, Artificial Sequence
  Description of Artificial Sequence: Synthetic oligonucleotide
gacaagucaccagccauca

SEQ ID NO: 2110781 - RNA, 19 nt, Artificial Sequence
  Description of Artificial Sequence: Synthetic oligonucleotide
agguaagacccugugcucu

SEQ ID NO: 2110782 - RNA, 19 nt, Artificial Sequence
  Description of Artificial Sequence: Synthetic oligonucleotide
gcugaucagaugucaacug

SEQ ID NO: 2110783 - RNA, 19 nt, Artificial Sequence
  Description of Artificial Sequence: Synthetic oligonucleotide
ugggacauggcagucuuua

SEQ ID NO: 2110784 - RNA, 19 nt, Artificial Sequence
  Description of Artificial Sequence: Synthetic oligonucleotide
gacugaauguguggcagca

SEQ ID NO: 2110785 - RNA, 19 nt, Artificial Sequence
  Description of Artificial Sequence: Synthetic oligonucleotide
agccugauguugcuaugug

SEQ ID NO: 2110786 - RNA, 19 nt, Artificial Sequence
  Description of Artificial Sequence: Synthetic oligonucleotide
ugucaacugguugauccaa

SEQ ID NO: 2110787 - RNA, 19 nt, Artificial Sequence
  Description of Artificial Sequence: Synthetic oligonucleotide
acagaccucugagaaaggu

SEQ ID NO: 2110788 - RNA, 19 nt, Artificial Sequence
  Description of Artificial Sequence: Synthetic oligonucleotide
guauaaccgucgccccucg

SEQ ID NO: 2110789 - RNA, 19 nt, Artificial Sequence
  Description of Artificial Sequence: Synthetic oligonucleotide
gcguguaucgcucuguaga

SEQ ID NO: 2110790 - RNA, 19 nt, Artificial Sequence
  Description of Artificial Sequence: Synthetic oligonucleotide
cauugugucacagaccucu

SEQ ID NO: 2110791 - RNA, 19 nt, Artificial Sequence
  Description of Artificial Sequence: Synthetic oligonucleotide
auacgggugguagcgguag

SEQ ID NO: 2110792 - RNA, 19 nt, Artificial Sequence
  Description of Artificial Sequence: Synthetic oligonucleotide
aagucaccagccaucacua

SEQ ID NO: 2110793 - RNA, 19 nt, Artificial Sequence
  Description of Artificial Sequence: Synthetic oligonucleotide
accgucgccccucgcuugc

SEQ ID NO: 2110794 - RNA, 19 nt, Artificial Sequence
  Description of Artificial Sequence: Synthetic oligonucleotide
gggaaaaccaggccccgag

SEQ ID NO: 2110795 - RNA, 19 nt, Artificial Sequence
  Description of Artificial Sequence: Synthetic oligonucleotide
cucucuggggcaucauaac

SEQ ID NO: 2110796 - RNA, 19 nt, Artificial Sequence
  Description of Artificial Sequence: Synthetic oligonucleotide
cugguugauccaacgcgug

SEQ ID NO: 2110797 - RNA, 19 nt, Artificial Sequence
  Description of Artificial Sequence: Synthetic oligonucleotide
guagaagcccuuccugauc

SEQ ID NO: 2110798 - RNA, 19 nt, Artificial Sequence
  Description of Artificial Sequence: Synthetic oligonucleotide
caucacagaaggccaucac

SEQ ID NO: 2110799 - RNA, 19 nt, Artificial Sequence
  Description of Artificial Sequence: Synthetic oligonucleotide
ggggucucuccucacuugg

SEQ ID NO: 2110800 - RNA, 19 nt, Artificial Sequence
  Description of Artificial Sequence: Synthetic oligonucleotide
acggcagcagccucagcug

SEQ ID NO: 2110801 - RNA, 19 nt, Artificial Sequence
  Description of Artificial Sequence: Synthetic oligonucleotide
agcuucacacagaugacaa

SEQ ID NO: 2110802 - RNA, 19 nt, Artificial Sequence
  Description of Artificial Sequence: Synthetic oligonucleotide
aaccgucgccccucgcuug

SEQ ID NO: 2110803 - RNA, 19 nt, Artificial Sequence
  Description of Artificial Sequence: Synthetic oligonucleotide
ugcccugaggcuucacaac

SEQ ID NO: 2110804 - RNA, 19 nt, Artificial Sequence
  Description of Artificial Sequence: Synthetic oligonucleotide
agcugggauguccugcccu

SEQ ID NO: 2110805 - RNA, 19 nt, Artificial Sequence
  Description of Artificial Sequence: Synthetic oligonucleotide
gcaguagaagcccuuccug

SEQ ID NO: 2110806 - RNA, 19 nt, Artificial Sequence
  Description of Artificial Sequence: Synthetic oligonucleotide
ugcaagucaggcugcggua

SEQ ID NO: 2110807 - RNA, 19 nt, Artificial Sequence
  Description of Artificial Sequence: Synthetic oligonucleotide
aacgcguguaucgcucugu

SEQ ID NO: 2110808 - RNA, 19 nt, Artificial Sequence
  Description of Artificial Sequence: Synthetic oligonucleotide
agucaggcugcgguauaac

SEQ ID NO: 2110809 - RNA, 19 nt, Artificial Sequence
  Description of Artificial Sequence: Synthetic oligonucleotide
ugccuaccuagcugggaug

SEQ ID NO: 2110810 - RNA, 19 nt, Artificial Sequence
  Description of Artificial Sequence: Synthetic oligonucleotide
uauaaccgucgccccucgc

SEQ ID NO: 2110811 - RNA, 19 nt, Artificial Sequence
  Description of Artificial Sequence: Synthetic oligonucleotide
cugugucaacagcugauca

SEQ ID NO: 2110812 - RNA, 19 nt, Artificial Sequence
  Description of Artificial Sequence: Synthetic oligonucleotide
uacucguugggugcugaac

SEQ ID NO: 2110813 - RNA, 19 nt, Artificial Sequence
  Description of Artificial Sequence: Synthetic oligonucleotide
agaugucaacugguugauc

SEQ ID NO: 2110814 - RNA, 19 nt, Artificial Sequence
  Description of Artificial Sequence: Synthetic oligonucleotide
ucguugggugcugaacagc

SEQ ID NO: 2110815 - RNA, 19 nt, Artificial Sequence
  Description of Artificial Sequence: Synthetic oligonucleotide
cacacagaugacaaagggu

SEQ ID NO: 2110816 - RNA, 19 nt, Artificial Sequence
  Description of Artificial Sequence: Synthetic oligonucleotide
ugcgccggcuggcugcaag

SEQ ID NO: 2110817 - RNA, 19 nt, Artificial Sequence
  Description of Artificial Sequence: Synthetic oligonucleotide
cugaauguguggcagcaua

SEQ ID NO: 2110818 - RNA, 19 nt, Artificial Sequence
  Description of Artificial Sequence: Synthetic oligonucleotide
uaaccgucgccccucgcuu

SEQ ID NO: 2110819 - RNA, 19 nt, Artificial Sequence
  Description of Artificial Sequence: Synthetic oligonucleotide
augugucuuuacagccugc

SEQ ID NO: 2110820 - RNA, 19 nt, Artificial Sequence
  Description of Artificial Sequence: Synthetic oligonucleotide
augggaaaaccaggccccg

SEQ ID NO: 2110821 - RNA, 19 nt, Artificial Sequence
  Description of Artificial Sequence: Synthetic oligonucleotide
aaagggugacugggcagcu

SEQ ID NO: 2110822 - RNA, 19 nt, Artificial Sequence
  Description of Artificial Sequence: Synthetic oligonucleotide
ucgcuugccugcauuccaa

SEQ ID NO: 2110823 - RNA, 19 nt, Artificial Sequence
  Description of Artificial Sequence: Synthetic oligonucleotide
uuagagagggugggaugga

SEQ ID NO: 2110824 - RNA, 19 nt, Artificial Sequence
  Description of Artificial Sequence: Synthetic oligonucleotide
aagcccuuccugaucuugu

SEQ ID NO: 2110825 - RNA, 19 nt, Artificial Sequence
  Description of Artificial Sequence: Synthetic oligonucleotide
ccugaucuuguucucauca

SEQ ID NO: 2110826 - RNA, 19 nt, Artificial Sequence
  Description of Artificial Sequence: Synthetic oligonucleotide
cugagaaagguggcacggc

SEQ ID NO: 2110827 - RNA, 19 nt, Artificial Sequence
  Description of Artificial Sequence: Synthetic oligonucleotide
gcaguuugugguccacccg

SEQ ID NO: 2110828 - RNA, 19 nt, Artificial Sequence
  Description of Artificial Sequence: Synthetic oligonucleotide
uucaucaaaugggcccaca

SEQ ID NO: 2110829 - RNA, 19 nt, Artificial Sequence
  Description of Artificial Sequence: Synthetic oligonucleotide
uguccugcccugaggcuuc

SEQ ID NO: 2110830 - RNA, 19 nt, Artificial Sequence
  Description of Artificial Sequence: Synthetic oligonucleotide
auccaacgcguguaucgcu

SEQ ID NO: 2110831 - RNA, 19 nt, Artificial Sequence
  Description of Artificial Sequence: Synthetic oligonucleotide
ucgcucuguagagucugag

SEQ ID NO: 2110832 - RNA, 19 nt, Artificial Sequence
  Description of Artificial Sequence: Synthetic oligonucleotide
augauacucguugggugcu

SEQ ID NO: 2110833 - RNA, 19 nt, Artificial Sequence
  Description of Artificial Sequence: Synthetic oligonucleotide
caugggaggugaacaccug

SEQ ID NO: 2110834 - RNA, 19 nt, Artificial Sequence
  Description of Artificial Sequence: Synthetic oligonucleotide
gcgguagaggagcaguuug

SEQ ID NO: 2110835 - RNA, 19 nt, Artificial Sequence
  Description of Artificial Sequence: Synthetic oligonucleotide
cuggggcaucauaacauca

SEQ ID NO: 2110836 - RNA, 19 nt, Artificial Sequence
  Description of Artificial Sequence: Synthetic oligonucleotide
aagucaggcugcgguauaa

SEQ ID NO: 2110837 - RNA, 19 nt, Artificial Sequence
  Description of Artificial Sequence: Synthetic oligonucleotide
gguagaggagcaguuugug

SEQ ID NO: 2110838 - RNA, 19 nt, Artificial Sequence
  Description of Artificial Sequence: Synthetic oligonucleotide
gguccagauggucaucuca

SEQ ID NO: 2110839 - RNA, 19 nt, Artificial Sequence
  Description of Artificial Sequence: Synthetic oligonucleotide
cauguugcagccucacucu

SEQ ID NO: 2110840 - RNA, 19 nt, Artificial Sequence
  Description of Artificial Sequence: Synthetic oligonucleotide
uggcacggcagcagccuca

SEQ ID NO: 2110841 - RNA, 19 nt, Artificial Sequence
  Description of Artificial Sequence: Synthetic oligonucleotide
gucaccagccaucacuaua

SEQ ID NO: 2110842 - RNA, 19 nt, Artificial Sequence
  Description of Artificial Sequence: Synthetic oligonucleotide
agcauacgggugguagcgg

SEQ ID NO: 2110843 - RNA, 19 nt, Artificial Sequence
  Description of Artificial Sequence: Synthetic oligonucleotide
gccaucacuauacaauuua

SEQ ID NO: 2110844 - RNA, 19 nt, Artificial Sequence
  Description of Artificial Sequence: Synthetic oligonucleotide
ucguggcaguagaagcccu

SEQ ID NO: 2110845 - RNA, 19 nt, Artificial Sequence
  Description of Artificial Sequence: Synthetic oligonucleotide
uccugaucuuguucucauc

SEQ ID NO: 2110846 - RNA, 19 nt, Artificial Sequence
  Description of Artificial Sequence: Synthetic oligonucleotide
accucugagaaagguggca

SEQ ID NO: 2110847 - RNA, 19 nt, Artificial Sequence
  Description of Artificial Sequence: Synthetic oligonucleotide
cuuccugcaagugcaguga

SEQ ID NO: 2110848 - RNA, 19 nt, Artificial Sequence
  Description of Artificial Sequence: Synthetic oligonucleotide
ugccugcauuccaaauggu

SEQ ID NO: 2110849 - RNA, 19 nt, Artificial Sequence
  Description of Artificial Sequence: Synthetic oligonucleotide
cugcgguauaaccgucgcc

SEQ ID NO: 2110850 - RNA, 19 nt, Artificial Sequence
  Description of Artificial Sequence: Synthetic oligonucleotide
gcagcagguccucugguac

SEQ ID NO: 2110851 - RNA, 19 nt, Artificial Sequence
  Description of Artificial Sequence: Synthetic oligonucleotide
gauacucguugggugcuga

SEQ ID NO: 2110852 - RNA, 19 nt, Artificial Sequence
  Description of Artificial Sequence: Synthetic oligonucleotide
acgggugguagcgguagag

SEQ ID NO: 2110853 - RNA, 19 nt, Artificial Sequence
  Description of Artificial Sequence: Synthetic oligonucleotide
ugauacucguugggugcug

SEQ ID NO: 2110854 - RNA, 19 nt, Artificial Sequence
  Description of Artificial Sequence: Synthetic oligonucleotide
uagcgguagaggagcaguu

SEQ ID NO: 2110855 - RNA, 19 nt, Artificial Sequence
  Description of Artificial Sequence: Synthetic oligonucleotide
ucaccuugcgccggcuggc

SEQ ID NO: 2110856 - RNA, 19 nt, Artificial Sequence
  Description of Artificial Sequence: Synthetic oligonucleotide
auggggaccuucggcuugg

SEQ ID NO: 2110857 - RNA, 19 nt, Artificial Sequence
  Description of Artificial Sequence: Synthetic oligonucleotide
aggagcaguuuguggucca

SEQ ID NO: 2110858 - RNA, 19 nt, Artificial Sequence
  Description of Artificial Sequence: Synthetic oligonucleotide
guugggugcugaacagcag

SEQ ID NO: 2110859 - RNA, 19 nt, Artificial Sequence
  Description of Artificial Sequence: Synthetic oligonucleotide
agguggcacggcagcagcc

SEQ ID NO: 2110860 - RNA, 19 nt, Artificial Sequence
  Description of Artificial Sequence: Synthetic oligonucleotide
gcaugaucacuguggggcc

SEQ ID NO: 2110861 - RNA, 19 nt, Artificial Sequence
  Description of Artificial Sequence: Synthetic oligonucleotide
uccaacgaggcaggaccug

SEQ ID NO: 2110862 - RNA, 19 nt, Artificial Sequence
  Description of Artificial Sequence: Synthetic oligonucleotide
cguguaucgcucuguagag

SEQ ID NO: 2110863 - RNA, 19 nt, Artificial Sequence
  Description of Artificial Sequence: Synthetic oligonucleotide
aggcaggaccuguuccucu

SEQ ID NO: 2110864 - RNA, 19 nt, Artificial Sequence
  Description of Artificial Sequence: Synthetic oligonucleotide
uugauccaacgcguguauc

SEQ ID NO: 2110865 - RNA, 19 nt, Artificial Sequence
  Description of Artificial Sequence: Synthetic oligonucleotide
cacuuggcauccuaugaua

SEQ ID NO: 2110866 - RNA, 19 nt, Artificial Sequence
  Description of Artificial Sequence: Synthetic oligonucleotide
gucaacugguugauccaac

SEQ ID NO: 2110867 - RNA, 19 nt, Artificial Sequence
  Description of Artificial Sequence: Synthetic oligonucleotide
cagucuuuagccauauguu

SEQ ID NO: 2110868 - RNA, 19 nt, Artificial Sequence
  Description of Artificial Sequence: Synthetic oligonucleotide
agugaacacggugggucca

SEQ ID NO: 2110869 - RNA, 19 nt, Artificial Sequence
  Description of Artificial Sequence: Synthetic oligonucleotide
cucagcugaagugaacgaa

SEQ ID NO: 2110870 - RNA, 19 nt, Artificial Sequence
  Description of Artificial Sequence: Synthetic oligonucleotide
cuguagagucugagggguc

SEQ ID NO: 2110871 - RNA, 19 nt, Artificial Sequence
  Description of Artificial Sequence: Synthetic oligonucleotide
cacccggaauacaccgccc

SEQ ID NO: 2110872 - RNA, 19 nt, Artificial Sequence
  Description of Artificial Sequence: Synthetic oligonucleotide
gcugcgguauaaccgucgc

SEQ ID NO: 2110873 - RNA, 19 nt, Artificial Sequence
  Description of Artificial Sequence: Synthetic oligonucleotide
ggugggcaugaucacugug

SEQ ID NO: 2110874 - RNA, 19 nt, Artificial Sequence
  Description of Artificial Sequence: Synthetic oligonucleotide
uacgggugguagcgguaga

SEQ ID NO: 2110875 - RNA, 19 nt, Artificial Sequence
  Description of Artificial Sequence: Synthetic oligonucleotide
auugugucacagaccucug

SEQ ID NO: 2110876 - RNA, 19 nt, Artificial Sequence
  Description of Artificial Sequence: Synthetic oligonucleotide
cucuggggcaucauaacau

SEQ ID NO: 2110877 - RNA, 19 nt, Artificial Sequence
  Description of Artificial Sequence: Synthetic oligonucleotide
cugcccugaggcuucacaa

SEQ ID NO: 2110878 - RNA, 19 nt, Artificial Sequence
  Description of Artificial Sequence: Synthetic oligonucleotide
cucgcuugccugcauucca

SEQ ID NO: 2110879 - RNA, 19 nt, Artificial Sequence
  Description of Artificial Sequence: Synthetic oligonucleotide
gugaacacgguggguccag

SEQ ID NO: 2110880 - RNA, 19 nt, Artificial Sequence
  Description of Artificial Sequence: Synthetic oligonucleotide
accuagcugggauguccug

SEQ ID NO: 2110881 - RNA, 19 nt, Artificial Sequence
  Description of Artificial Sequence: Synthetic oligonucleotide
gguauaaccgucgccccuc

SEQ ID NO: 2110882 - RNA, 19 nt, Artificial Sequence
  Description of Artificial Sequence: Synthetic oligonucleotide
accugugucaacagcugau

SEQ ID NO: 2110883 - RNA, 19 nt, Artificial Sequence
  Description of Artificial Sequence: Synthetic oligonucleotide
cauggcagucuuuagccau

SEQ ID NO: 2110884 - RNA, 19 nt, Artificial Sequence
  Description of Artificial Sequence: Synthetic oligonucleotide
gggcaugaucacugugggg

SEQ ID NO: 2110885 - RNA, 19 nt, Artificial Sequence
  Description of Artificial Sequence: Synthetic oligonucleotide
ccugaggcuucacaacaag

SEQ ID NO: 2110886 - RNA, 19 nt, Artificial Sequence
  Description of Artificial Sequence: Synthetic oligonucleotide
cuuggcauccuaugauacu

SEQ ID NO: 2110887 - RNA, 19 nt, Artificial Sequence
  Description of Artificial Sequence: Synthetic oligonucleotide
gccugcauuccaaauggug

SEQ ID NO: 2110888 - RNA, 19 nt, Artificial Sequence
  Description of Artificial Sequence: Synthetic oligonucleotide
acgguggguccagaugguc

SEQ ID NO: 2110889 - RNA, 19 nt, Artificial Sequence
  Description of Artificial Sequence: Synthetic oligonucleotide
cagcuucacacagaugaca

SEQ ID NO: 2110890 - RNA, 19 nt, Artificial Sequence
  Description of Artificial Sequence: Synthetic oligonucleotide
ccacccggaauacaccgcc

SEQ ID NO: 2110891 - RNA, 19 nt, Artificial Sequence
  Description of Artificial Sequence: Synthetic oligonucleotide
acgaaguccuggccuuccu

SEQ ID NO: 2110892 - RNA, 19 nt, Artificial Sequence
  Description of Artificial Sequence: Synthetic oligonucleotide
ugggaaaaccaggccccga

SEQ ID NO: 2110893 - RNA, 19 nt, Artificial Sequence
  Description of Artificial Sequence: Synthetic oligonucleotide
caauuuaagcugucaggau

SEQ ID NO: 2110894 - RNA, 19 nt, Artificial Sequence
  Description of Artificial Sequence: Synthetic oligonucleotide
acauugugucacagaccuc

SEQ ID NO: 2110895 - RNA, 19 nt, Artificial Sequence
  Description of Artificial Sequence: Synthetic oligonucleotide
ucgccccucgcuugccugc

SEQ ID NO: 2110896 - RNA, 19 nt, Artificial Sequence
  Description of Artificial Sequence: Synthetic oligonucleotide
caucaccuugcgccggcug

SEQ ID NO: 2110897 - RNA, 19 nt, Artificial Sequence
  Description of Artificial Sequence: Synthetic oligonucleotide
cugcaagugcagugacuuc

SEQ ID NO: 2110898 - RNA, 19 nt, Artificial Sequence
  Description of Artificial Sequence: Synthetic oligonucleotide
ccucacuuggcauccuaug

SEQ ID NO: 2110899 - RNA, 19 nt, Artificial Sequence
  Description of Artificial Sequence: Synthetic oligonucleotide
auacucguugggugcugaa

SEQ ID NO: 2110900 - RNA, 19 nt, Artificial Sequence
  Description of Artificial Sequence: Synthetic oligonucleotide
caggauccugggacauggc

SEQ ID NO: 2110901 - RNA, 19 nt, Artificial Sequence
  Description of Artificial Sequence: Synthetic oligonucleotide
ccuagcugggauguccugc

SEQ ID NO: 2110902 - RNA, 19 nt, Artificial Sequence
  Description of Artificial Sequence: Synthetic oligonucleotide
ggaccuguuccucuaggaa

SEQ ID NO: 2110903 - RNA, 19 nt, Artificial Sequence
  Description of Artificial Sequence: Synthetic oligonucleotide
ugaacacgguggguccaga

SEQ ID NO: 2110904 - RNA, 19 nt, Artificial Sequence
  Description of Artificial Sequence: Synthetic oligonucleotide
cugacaagucaccagccau

SEQ ID NO: 2110905 - RNA, 19 nt, Artificial Sequence
  Description of Artificial Sequence: Synthetic oligonucleotide
caggcugcgguauaaccgu

SEQ ID NO: 2110906 - RNA, 19 nt, Artificial Sequence
  Description of Artificial Sequence: Synthetic oligonucleotide
aguuugugguccacccgga

SEQ ID NO: 2110907 - RNA, 19 nt, Artificial Sequence
  Description of Artificial Sequence: Synthetic oligonucleotide
guagcgguagaggagcagu

SEQ ID NO: 2110908 - RNA, 19 nt, Artificial Sequence
  Description of Artificial Sequence: Synthetic oligonucleotide
cuucaucaaaugggcccac

SEQ ID NO: 2110909 - RNA, 19 nt, Artificial Sequence
  Description of Artificial Sequence: Synthetic oligonucleotide
gauguccugcccugaggcu

SEQ ID NO: 2110910 - RNA, 19 nt, Artificial Sequence
  Description of Artificial Sequence: Synthetic oligonucleotide
caccugugucaacagcuga

SEQ ID NO: 2110911 - RNA, 19 nt, Artificial Sequence
  Description of Artificial Sequence: Synthetic oligonucleotide
caacgcguguaucgcucug

SEQ ID NO: 2110912 - RNA, 19 nt, Artificial Sequence
  Description of Artificial Sequence: Synthetic oligonucleotide
agucaccagccaucacuau

SEQ ID NO: 2110913 - RNA, 19 nt, Artificial Sequence
  Description of Artificial Sequence: Synthetic oligonucleotide
gcccugaggcuucacaaca

SEQ ID NO: 2110914 - RNA, 19 nt, Artificial Sequence
  Description of Artificial Sequence: Synthetic oligonucleotide
guugauccaacgcguguau

SEQ ID NO: 2110915 - RNA, 19 nt, Artificial Sequence
  Description of Artificial Sequence: Synthetic oligonucleotide
cuucggcuugggccuuucc

SEQ ID NO: 2110916 - RNA, 19 nt, Artificial Sequence
  Description of Artificial Sequence: Synthetic oligonucleotide
ggaaaaccaggccccgaga

SEQ ID NO: 2110917 - RNA, 19 nt, Artificial Sequence
  Description of Artificial Sequence: Synthetic oligonucleotide
gcgguauaaccgucgcccc

SEQ ID NO: 2110918 - RNA, 19 nt, Artificial Sequence
  Description of Artificial Sequence: Synthetic oligonucleotide
guuugugguccacccggaa

SEQ ID NO: 2110919 - RNA, 19 nt, Artificial Sequence
  Description of Artificial Sequence: Synthetic oligonucleotide
gaacgaaguccuggccuuc

SEQ ID NO: 2110920 - RNA, 19 nt, Artificial Sequence
  Description of Artificial Sequence: Synthetic oligonucleotide
uggcagucuuuagccauau

SEQ ID NO: 2110921 - RNA, 19 nt, Artificial Sequence
  Description of Artificial Sequence: Synthetic oligonucleotide
gucgccccucgcuugccug

SEQ ID NO: 2110922 - RNA, 19 nt, Artificial Sequence
  Description of Artificial Sequence: Synthetic oligonucleotide
acugaauguguggcagcau

SEQ ID NO: 2110923 - RNA, 19 nt, Artificial Sequence
  Description of Artificial Sequence: Synthetic oligonucleotide
gggcccacaugggaaaacc

SEQ ID NO: 2110924 - RNA, 19 nt, Artificial Sequence
  Description of Artificial Sequence: Synthetic oligonucleotide
ccuugcgccggcuggcugc

SEQ ID NO: 2110925 - RNA, 19 nt, Artificial Sequence
  Description of Artificial Sequence: Synthetic oligonucleotide
acgcguguaucgcucugua

SEQ ID NO: 2110926 - RNA, 19 nt, Artificial Sequence
  Description of Artificial Sequence: Synthetic oligonucleotide
caugaucacuguggggcca

SEQ ID NO: 2110927 - RNA, 19 nt, Artificial Sequence
  Description of Artificial Sequence: Synthetic oligonucleotide
gguugauccaacgcgugua

SEQ ID NO: 2110928 - RNA, 19 nt, Artificial Sequence
  Description of Artificial Sequence: Synthetic oligonucleotide
augaucacuguggggccau

SEQ ID NO: 2110929 - RNA, 19 nt, Artificial Sequence
  Description of Artificial Sequence: Synthetic oligonucleotide
agcgguagaggagcaguuu

SEQ ID NO: 2110930 - RNA, 19 nt, Artificial Sequence
  Description of Artificial Sequence: Synthetic oligonucleotide
gguugucuucaaacucacc

SEQ ID NO: 2110931 - RNA, 19 nt, Artificial Sequence
  Description of Artificial Sequence: Synthetic oligonucleotide
ggaccuucggcuugggccu

SEQ ID NO: 2110932 - RNA, 19 nt, Artificial Sequence
  Description of Artificial Sequence: Synthetic oligonucleotide
cuugccuaccuagcuggga

SEQ ID NO: 2110933 - RNA, 19 nt, Artificial Sequence
  Description of Artificial Sequence: Synthetic oligonucleotide
accuugcgccggcuggcug

SEQ ID NO: 2110934 - RNA, 19 nt, Artificial Sequence
  Description of Artificial Sequence: Synthetic oligonucleotide
gguccacccggaauacacc

SEQ ID NO: 2110935 - RNA, 19 nt, Artificial Sequence
  Description of Artificial Sequence: Synthetic oligonucleotide
gcaggaccuguuccucuag

SEQ ID NO: 2110936 - RNA, 19 nt, Artificial Sequence
  Description of Artificial Sequence: Synthetic oligonucleotide
gaacacgguggguccagau

SEQ ID NO: 2110937 - RNA, 19 nt, Artificial Sequence
  Description of Artificial Sequence: Synthetic oligonucleotide
aggcugcgguauaaccguc

SEQ ID NO: 2110938 - RNA, 19 nt, Artificial Sequence
  Description of Artificial Sequence: Synthetic oligonucleotide
auguugcuaugugucuuua

SEQ ID NO: 2110939 - RNA, 19 nt, Artificial Sequence
  Description of Artificial Sequence: Synthetic oligonucleotide
gaggggucucuccucacuu

SEQ ID NO: 2110940 - RNA, 19 nt, Artificial Sequence
  Description of Artificial Sequence: Synthetic oligonucleotide
caacaucacagaaggccau

SEQ ID NO: 2110941 - RNA, 19 nt, Artificial Sequence
  Description of Artificial Sequence: Synthetic oligonucleotide
aagggugacugggcagcuu

SEQ ID NO: 2110942 - RNA, 19 nt, Artificial Sequence
  Description of Artificial Sequence: Synthetic oligonucleotide
ggugaacaccugugucaac

SEQ ID NO: 2110943 - RNA, 19 nt, Artificial Sequence
  Description of Artificial Sequence: Synthetic oligonucleotide
gggccaugggaggugaaca

SEQ ID NO: 2110944 - RNA, 19 nt, Artificial Sequence
  Description of Artificial Sequence: Synthetic oligonucleotide
guggcacggcagcagccuc

SEQ ID NO: 2110945 - RNA, 19 nt, Artificial Sequence
  Description of Artificial Sequence: Synthetic oligonucleotide
auggcagucuuuagccaua

SEQ ID NO: 2110946 - RNA, 19 nt, Artificial Sequence
  Description of Artificial Sequence: Synthetic oligonucleotide
ccccgagagcagaaccagg

SEQ ID NO: 2110947 - RNA, 19 nt, Artificial Sequence
  Description of Artificial Sequence: Synthetic oligonucleotide
gggaggugaacaccugugu

SEQ ID NO: 2110948 - RNA, 19 nt, Artificial Sequence
  Description of Artificial Sequence: Synthetic oligonucleotide
ccgagagcagaaccaggug

SEQ ID NO: 2110949 - RNA, 19 nt, Artificial Sequence
  Description of Artificial Sequence: Synthetic oligonucleotide
gucaucucaaggacugaau

SEQ ID NO: 2110950 - RNA, 19 nt, Artificial Sequence
  Description of Artificial Sequence: Synthetic oligonucleotide
aucgcucuguagagucuga

SEQ ID NO: 2110951 - RNA, 19 nt, Artificial Sequence
  Description of Artificial Sequence: Synthetic oligonucleotide
gacuuccaacgaggcagga

SEQ ID NO: 2110952 - RNA, 19 nt, Artificial Sequence
  Description of Artificial Sequence: Synthetic oligonucleotide
gccccgagagcagaaccag

SEQ ID NO: 2110953 - RNA, 19 nt, Artificial Sequence
  Description of Artificial Sequence: Synthetic oligonucleotide
ggcauccuaugauacucgu

SEQ ID NO: 2110954 - RNA, 19 nt, Artificial Sequence
  Description of Artificial Sequence: Synthetic oligonucleotide
gccaucaccuugcgccggc

SEQ ID NO: 2110955 - RNA, 19 nt, Artificial Sequence
  Description of Artificial Sequence: Synthetic oligonucleotide
uggggaccuucggcuuggg

SEQ ID NO: 2110956 - RNA, 19 nt, Artificial Sequence
  Description of Artificial Sequence: Synthetic oligonucleotide
gccugauguugcuaugugu

SEQ ID NO: 2110957 - RNA, 19 nt, Artificial Sequence
  Description of Artificial Sequence: Synthetic oligonucleotide
ccuaugauacucguugggu

SEQ ID NO: 2110958 - RNA, 19 nt, Artificial Sequence
  Description of Artificial Sequence: Synthetic oligonucleotide
ccucagcugaagugaacga

SEQ ID NO: 2110959 - RNA, 19 nt, Artificial Sequence
  Description of Artificial Sequence: Synthetic oligonucleotide
gggugggauggagaccagc

SEQ ID NO: 2110960 - RNA, 19 nt, Artificial Sequence
  Description of Artificial Sequence: Synthetic oligonucleotide
ccaaauggugaaggacuuc

SEQ ID NO: 2110961 - RNA, 19 nt, Artificial Sequence
  Description of Artificial Sequence: Synthetic oligonucleotide
uggggccaugggaggugaa

SEQ ID NO: 2110962 - RNA, 19 nt, Artificial Sequence
  Description of Artificial Sequence: Synthetic oligonucleotide
gggucucuccucacuuggc

SEQ ID NO: 2110963 - RNA, 19 nt, Artificial Sequence
  Description of Artificial Sequence: Synthetic oligonucleotide
guaucgcucuguagagucu

SEQ ID NO: 2110964 - RNA, 19 nt, Artificial Sequence
  Description of Artificial Sequence: Synthetic oligonucleotide
gcauacgggugguagcggu

SEQ ID NO: 2110965 - RNA, 19 nt, Artificial Sequence
  Description of Artificial Sequence: Synthetic oligonucleotide
cccucgcuugccugcauuc

SEQ ID NO: 2110966 - RNA, 19 nt, Artificial Sequence
  Description of Artificial Sequence: Synthetic oligonucleotide
guguaucgcucuguagagu

SEQ ID NO: 2110967 - RNA, 19 nt, Artificial Sequence
  Description of Artificial Sequence: Synthetic oligonucleotide
ccucgcuugccugcauucc

SEQ ID NO: 2110968 - RNA, 19 nt, Artificial Sequence
  Description of Artificial Sequence: Synthetic oligonucleotide
caggccccgagagcagaac

SEQ ID NO: 2110969 - RNA, 19 nt, Artificial Sequence
  Description of Artificial Sequence: Synthetic oligonucleotide
ggccaucaccuugcgccgg

SEQ ID NO: 2110970 - RNA, 19 nt, Artificial Sequence
  Description of Artificial Sequence: Synthetic oligonucleotide
ggggccaugggaggugaac

SEQ ID NO: 2110971 - RNA, 19 nt, Artificial Sequence
  Description of Artificial Sequence: Synthetic oligonucleotide
ggcaggaccuguuccucua

SEQ ID NO: 2110972 - RNA, 19 nt, Artificial Sequence
  Description of Artificial Sequence: Synthetic oligonucleotide
cagccugauguugcuaugu

SEQ ID NO: 2110973 - RNA, 19 nt, Artificial Sequence
  Description of Artificial Sequence: Synthetic oligonucleotide
cagaugucaacugguugau

SEQ ID NO: 2110974 - RNA, 19 nt, Artificial Sequence
  Description of Artificial Sequence: Synthetic oligonucleotide
cccgagagcagaaccaggu

SEQ ID NO: 2110975 - RNA, 19 nt, Artificial Sequence
  Description of Artificial Sequence: Synthetic oligonucleotide
cugaguccuugccuaccua

SEQ ID NO: 2110976 - RNA, 19 nt, Artificial Sequence
  Description of Artificial Sequence: Synthetic oligonucleotide
ggcccacaugggaaaacca

SEQ ID NO: 2110977 - RNA, 19 nt, Artificial Sequence
  Description of Artificial Sequence: Synthetic oligonucleotide
cgcguguaucgcucuguag

SEQ ID NO: 2110978 - RNA, 19 nt, Artificial Sequence
  Description of Artificial Sequence: Synthetic oligonucleotide
gccggcuggcugcaaguca

SEQ ID NO: 2110979 - RNA, 19 nt, Artificial Sequence
  Description of Artificial Sequence: Synthetic oligonucleotide
gugguccacccggaauaca

SEQ ID NO: 2110980 - RNA, 19 nt, Artificial Sequence
  Description of Artificial Sequence: Synthetic oligonucleotide
guaagacccugugcucugu

SEQ ID NO: 2110981 - RNA, 19 nt, Artificial Sequence
  Description of Artificial Sequence: Synthetic oligonucleotide
guggguccagauggucauc

SEQ ID NO: 2110982 - RNA, 19 nt, Artificial Sequence
  Description of Artificial Sequence: Synthetic oligonucleotide
cugggauguccugcccuga

SEQ ID NO: 2110983 - RNA, 19 nt, Artificial Sequence
  Description of Artificial Sequence: Synthetic oligonucleotide
ccugcaagugcagugacuu

SEQ ID NO: 2110984 - RNA, 19 nt, Artificial Sequence
  Description of Artificial Sequence: Synthetic oligonucleotide
ggaagugaacacggugggu

SEQ ID NO: 2110985 - RNA, 19 nt, Artificial Sequence
  Description of Artificial Sequence: Synthetic oligonucleotide
cuugcgccggcuggcugca

SEQ ID NO: 2110986 - RNA, 19 nt, Artificial Sequence
  Description of Artificial Sequence: Synthetic oligonucleotide
gccuaccuagcugggaugu

SEQ ID NO: 2110987 - RNA, 19 nt, Artificial Sequence
  Description of Artificial Sequence: Synthetic oligonucleotide
gcaagucaggcugcgguau

SEQ ID NO: 2110988 - RNA, 19 nt, Artificial Sequence
  Description of Artificial Sequence: Synthetic oligonucleotide
uccugcccugaggcuucac

SEQ ID NO: 2110989 - RNA, 19 nt, Artificial Sequence
  Description of Artificial Sequence: Synthetic oligonucleotide
caacgaggcaggaccuguu

SEQ ID NO: 2110990 - RNA, 19 nt, Artificial Sequence
  Description of Artificial Sequence: Synthetic oligonucleotide
ccuaccuagcugggauguc

SEQ ID NO: 2110991 - RNA, 19 nt, Artificial Sequence
  Description of Artificial Sequence: Synthetic oligonucleotide
cagaguccucguggcagua

SEQ ID NO: 2110992 - RNA, 19 nt, Artificial Sequence
  Description of Artificial Sequence: Synthetic oligonucleotide
ccaacgcguguaucgcucu

SEQ ID NO: 2110993 - RNA, 19 nt, Artificial Sequence
  Description of Artificial Sequence: Synthetic oligonucleotide
ccaacgaggcaggaccugu

SEQ ID NO: 2110994 - RNA, 19 nt, Artificial Sequence
  Description of Artificial Sequence: Synthetic oligonucleotide
gcauccuaugauacucguu

SEQ ID NO: 2110995 - RNA, 19 nt, Artificial Sequence
  Description of Artificial Sequence: Synthetic oligonucleotide
accuucggcuugggccuuu

SEQ ID NO: 2110996 - RNA, 19 nt, Artificial Sequence
  Description of Artificial Sequence: Synthetic oligonucleotide
gcgccggcuggcugcaagu

SEQ ID NO: 2110997 - RNA, 19 nt, Artificial Sequence
  Description of Artificial Sequence: Synthetic oligonucleotide
caccuugcgccggcuggcu

SEQ ID NO: 2110998 - RNA, 19 nt, Artificial Sequence
  Description of Artificial Sequence: Synthetic oligonucleotide
cgguauaaccgucgccccu

SEQ ID NO: 2110999 - RNA, 19 nt, Artificial Sequence
  Description of Artificial Sequence: Synthetic oligonucleotide
gaccuucggcuugggccuu

SEQ ID NO: 2111000 - RNA, 19 nt, Artificial Sequence
  Description of Artificial Sequence: Synthetic oligonucleotide
ccgucgccccucgcuugcc

SEQ ID NO: 2111001 - RNA, 19 nt, Artificial Sequence
  Description of Artificial Sequence: Synthetic oligonucleotide
cgccggcuggcugcaaguc

SEQ ID NO: 2111002 - RNA, 19 nt, Artificial Sequence
  Description of Artificial Sequence: Synthetic oligonucleotide
cguggcaguagaagcccuu

SEQ ID NO: 2111003 - RNA, 19 nt, Artificial Sequence
  Description of Artificial Sequence: Synthetic oligonucleotide
ccaucaccuugcgccggcu

SEQ ID NO: 2111004 - RNA, 19 nt, Artificial Sequence
  Description of Artificial Sequence: Synthetic oligonucleotide
ccccucgcuugccugcauu

SEQ ID NO: 2111005 - RNA, 19 nt, Artificial Sequence
  Description of Artificial Sequence: Synthetic oligonucleotide
gccccucgcuugccugcau

SEQ ID NO: 2111006 - RNA, 19 nt, Artificial Sequence
  Description of Artificial Sequence: Synthetic oligonucleotide
cgucgccccucgcuugccu

SEQ ID NO: 2111007 - RNA, 19 nt, Artificial Sequence
  Description of Artificial Sequence: Synthetic oligonucleotide
uuuauuucugugaguaggg

SEQ ID NO: 2111008 - RNA, 19 nt, Artificial Sequence
  Description of Artificial Sequence: Synthetic oligonucleotide
aaguagugcgccaagaagg

SEQ ID NO: 2111009 - RNA, 19 nt, Artificial Sequence
  Description of Artificial Sequence: Synthetic oligonucleotide
aacuccagcagcacgaagc

SEQ ID NO: 2111010 - RNA, 19 nt, Artificial Sequence
  Description of Artificial Sequence: Synthetic oligonucleotide
gauuuugcgcagaagaggc

SEQ ID NO: 2111011 - RNA, 19 nt, Artificial Sequence
  Description of Artificial Sequence: Synthetic oligonucleotide
gaaguagugcgccaagaag

SEQ ID NO: 2111012 - RNA, 19 nt, Artificial Sequence
  Description of Artificial Sequence: Synthetic oligonucleotide
uuggcgaugaagagggcgg

SEQ ID NO: 2111013 - RNA, 19 nt, Artificial Sequence
  Description of Artificial Sequence: Synthetic oligonucleotide
uggauuuugcgcagaagag

SEQ ID NO: 2111014 - RNA, 19 nt, Artificial Sequence
  Description of Artificial Sequence: Synthetic oligonucleotide
ucuagguagugugugggcg

SEQ ID NO: 2111015 - RNA, 19 nt, Artificial Sequence
  Description of Artificial Sequence: Synthetic oligonucleotide
aaggcgaugggcuccucgg

SEQ ID NO: 2111016 - RNA, 19 nt, Artificial Sequence
  Description of Artificial Sequence: Synthetic oligonucleotide
ugugaguagggauggcagg

SEQ ID NO: 2111017 - RNA, 19 nt, Artificial Sequence
  Description of Artificial Sequence: Synthetic oligonucleotide
ugguuugaaggucccaaag

SEQ ID NO: 2111018 - RNA, 19 nt, Artificial Sequence
  Description of Artificial Sequence: Synthetic oligonucleotide
ucuagcguguccagcacag

SEQ ID NO: 2111019 - RNA, 19 nt, Artificial Sequence
  Description of Artificial Sequence: Synthetic oligonucleotide
guuugaaggucccaaaguc

SEQ ID NO: 2111020 - RNA, 19 nt, Artificial Sequence
  Description of Artificial Sequence: Synthetic oligonucleotide
uccugcagggucuacgcgg

SEQ ID NO: 2111021 - RNA, 19 nt, Artificial Sequence
  Description of Artificial Sequence: Synthetic oligonucleotide
aaaguccugcgucgugggc

SEQ ID NO: 2111022 - RNA, 19 nt, Artificial Sequence
  Description of Artificial Sequence: Synthetic oligonucleotide
acauuguuguugaaggccg

SEQ ID NO: 2111023 - RNA, 19 nt, Artificial Sequence
  Description of Artificial Sequence: Synthetic oligonucleotide
acuguaugugcgcccgucc

SEQ ID NO: 2111024 - RNA, 19 nt, Artificial Sequence
  Description of Artificial Sequence: Synthetic oligonucleotide
uauuucugugaguagggau

SEQ ID NO: 2111025 - RNA, 19 nt, Artificial Sequence
  Description of Artificial Sequence: Synthetic oligonucleotide
uuuugcgcagaagaggcgc

SEQ ID NO: 2111026 - RNA, 19 nt, Artificial Sequence
  Description of Artificial Sequence: Synthetic oligonucleotide
aguagugcgccaagaaggc

SEQ ID NO: 2111027 - RNA, 19 nt, Artificial Sequence
  Description of Artificial Sequence: Synthetic oligonucleotide
uagugcgccaagaaggcga

SEQ ID NO: 2111028 - RNA, 19 nt, Artificial Sequence
  Description of Artificial Sequence: Synthetic oligonucleotide
cuggauuuugcgcagaaga

SEQ ID NO: 2111029 - RNA, 19 nt, Artificial Sequence
  Description of Artificial Sequence: Synthetic oligonucleotide
gaaggugccacagcgcgcg

SEQ ID NO: 2111030 - RNA, 19 nt, Artificial Sequence
  Description of Artificial Sequence: Synthetic oligonucleotide
uagcguguccagcacagcc

SEQ ID NO: 2111031 - RNA, 19 nt, Artificial Sequence
  Description of Artificial Sequence: Synthetic oligonucleotide
cuguccgcgaaacuggccg

SEQ ID NO: 2111032 - RNA, 19 nt, Artificial Sequence
  Description of Artificial Sequence: Synthetic oligonucleotide
acacucguaggccacgcuc

SEQ ID NO: 2111033 - RNA, 19 nt, Artificial Sequence
  Description of Artificial Sequence: Synthetic oligonucleotide
agcagcacgaagcacgaca

SEQ ID NO: 2111034 - RNA, 19 nt, Artificial Sequence
  Description of Artificial Sequence: Synthetic oligonucleotide
agcaccuucaguagggccg

SEQ ID NO: 2111035 - RNA, 19 nt, Artificial Sequence
  Description of Artificial Sequence: Synthetic oligonucleotide
augccugcccggaagaugc

SEQ ID NO: 2111036 - RNA, 19 nt, Artificial Sequence
  Description of Artificial Sequence: Synthetic oligonucleotide
guaggccacgcucacauug

SEQ ID NO: 2111037 - RNA, 19 nt, Artificial Sequence
  Description of Artificial Sequence: Synthetic oligonucleotide
uguaugugcgcccguccag

SEQ ID NO: 2111038 - RNA, 19 nt, Artificial Sequence
  Description of Artificial Sequence: Synthetic oligonucleotide
cuuggcgaugaagagggcg

SEQ ID NO: 2111039 - RNA, 19 nt, Artificial Sequence
  Description of Artificial Sequence: Synthetic oligonucleotide
ucugcgaguggugagccag

SEQ ID NO: 2111040 - RNA, 19 nt, Artificial Sequence
  Description of Artificial Sequence: Synthetic oligonucleotide
aucuccgucacgccgaccu

SEQ ID NO: 2111041 - RNA, 19 nt, Artificial Sequence
  Description of Artificial Sequence: Synthetic oligonucleotide
cugugaguagggauggcag

SEQ ID NO: 2111042 - RNA, 19 nt, Artificial Sequence
  Description of Artificial Sequence: Synthetic oligonucleotide
agaucucccgcgccuagcg

SEQ ID NO: 2111043 - RNA, 19 nt, Artificial Sequence
  Description of Artificial Sequence: Synthetic oligonucleotide
ggaaccggccucuagguag

SEQ ID NO: 2111044 - RNA, 19 nt, Artificial Sequence
  Description of Artificial Sequence: Synthetic oligonucleotide
cuagguagugugugggcgc

SEQ ID NO: 2111045 - RNA, 19 nt, Artificial Sequence
  Description of Artificial Sequence: Synthetic oligonucleotide
ugugcgcccguccagcccc

SEQ ID NO: 2111046 - RNA, 19 nt, Artificial Sequence
  Description of Artificial Sequence: Synthetic oligonucleotide
ggauuuugcgcagaagagg

SEQ ID NO: 2111047 - RNA, 19 nt, Artificial Sequence
  Description of Artificial Sequence: Synthetic oligonucleotide
aagcacgacagcaugccug

SEQ ID NO: 2111048 - RNA, 19 nt, Artificial Sequence
  Description of Artificial Sequence: Synthetic oligonucleotide
uuugcgcagaagaggcgcc

SEQ ID NO: 2111049 - RNA, 19 nt, Artificial Sequence
  Description of Artificial Sequence: Synthetic oligonucleotide
gucccaaaguccugcgucg

SEQ ID NO: 2111050 - RNA, 19 nt, Artificial Sequence
  Description of Artificial Sequence: Synthetic oligonucleotide
caaaguccugcgucguggg

SEQ ID NO: 2111051 - RNA, 19 nt, Artificial Sequence
  Description of Artificial Sequence: Synthetic oligonucleotide
auuguuguugaaggccguc

SEQ ID NO: 2111052 - RNA, 19 nt, Artificial Sequence
  Description of Artificial Sequence: Synthetic oligonucleotide
agccccggcuucuucuugc

SEQ ID NO: 2111053 - RNA, 19 nt, Artificial Sequence
  Description of Artificial Sequence: Synthetic oligonucleotide
cucacuguaugugcgcccg

SEQ ID NO: 2111054 - RNA, 19 nt, Artificial Sequence
  Description of Artificial Sequence: Synthetic oligonucleotide
gacaccgucguccggccgc

SEQ ID NO: 2111055 - RNA, 19 nt, Artificial Sequence
  Description of Artificial Sequence: Synthetic oligonucleotide
guacagaggggucugagcu

SEQ ID NO: 2111056 - RNA, 19 nt, Artificial Sequence
  Description of Artificial Sequence: Synthetic oligonucleotide
aacuccucgcgggccaugg

SEQ ID NO: 2111057 - RNA, 19 nt, Artificial Sequence
  Description of Artificial Sequence: Synthetic oligonucleotide
gcgaaggugccacagcgcg

SEQ ID NO: 2111058 - RNA, 19 nt, Artificial Sequence
  Description of Artificial Sequence: Synthetic oligonucleotide
cucuagguagugugugggc

SEQ ID NO: 2111059 - RNA, 19 nt, Artificial Sequence
  Description of Artificial Sequence: Synthetic oligonucleotide
aguccugcgucgugggcuc

SEQ ID NO: 2111060 - RNA, 19 nt, Artificial Sequence
  Description of Artificial Sequence: Synthetic oligonucleotide
acucguaggccacgcucac

SEQ ID NO: 2111061 - RNA, 19 nt, Artificial Sequence
  Description of Artificial Sequence: Synthetic oligonucleotide
cuugaccuuggcgaugaag

SEQ ID NO: 2111062 - RNA, 19 nt, Artificial Sequence
  Description of Artificial Sequence: Synthetic oligonucleotide
cgggacacugguuugaagg

SEQ ID NO: 2111063 - RNA, 19 nt, Artificial Sequence
  Description of Artificial Sequence: Synthetic oligonucleotide
cugguguuacugccagucg

SEQ ID NO: 2111064 - RNA, 19 nt, Artificial Sequence
  Description of Artificial Sequence: Synthetic oligonucleotide
aaggccguccucugcgagu

SEQ ID NO: 2111065 - RNA, 19 nt, Artificial Sequence
  Description of Artificial Sequence: Synthetic oligonucleotide
ucuacgcggguccccuucc

SEQ ID NO: 2111066 - RNA, 19 nt, Artificial Sequence
  Description of Artificial Sequence: Synthetic oligonucleotide
ugguccugcagggucuacg

SEQ ID NO: 2111067 - RNA, 19 nt, Artificial Sequence
  Description of Artificial Sequence: Synthetic oligonucleotide
ugaguagggauggcaggcc

SEQ ID NO: 2111068 - RNA, 19 nt, Artificial Sequence
  Description of Artificial Sequence: Synthetic oligonucleotide
ucggccaccgccaggccug

SEQ ID NO: 2111069 - RNA, 19 nt, Artificial Sequence
  Description of Artificial Sequence: Synthetic oligonucleotide
uucuugcggccacuggcgc

SEQ ID NO: 2111070 - RNA, 19 nt, Artificial Sequence
  Description of Artificial Sequence: Synthetic oligonucleotide
uaggccacgcucacauugu

SEQ ID NO: 2111071 - RNA, 19 nt, Artificial Sequence
  Description of Artificial Sequence: Synthetic oligonucleotide
acugguuugaaggucccaa

SEQ ID NO: 2111072 - RNA, 19 nt, Artificial Sequence
  Description of Artificial Sequence: Synthetic oligonucleotide
cacgcucacauuguuguug

SEQ ID NO: 2111073 - RNA, 19 nt, Artificial Sequence
  Description of Artificial Sequence: Synthetic oligonucleotide
uaugugcgcccguccagcc

SEQ ID NO: 2111074 - RNA, 19 nt, Artificial Sequence
  Description of Artificial Sequence: Synthetic oligonucleotide
auuuugcgcagaagaggcg

SEQ ID NO: 2111075 - RNA, 19 nt, Artificial Sequence
  Description of Artificial Sequence: Synthetic oligonucleotide
ggcgcucagacacucguag

SEQ ID NO: 2111076 - RNA, 19 nt, Artificial Sequence
  Description of Artificial Sequence: Synthetic oligonucleotide
gaacuccagcagcacgaag

SEQ ID NO: 2111077 - RNA, 19 nt, Artificial Sequence
  Description of Artificial Sequence: Synthetic oligonucleotide
cagggcacgugccaggcug

SEQ ID NO: 2111078 - RNA, 19 nt, Artificial Sequence
  Description of Artificial Sequence: Synthetic oligonucleotide
ucgaaguagugcgccaaga

SEQ ID NO: 2111079 - RNA, 19 nt, Artificial Sequence
  Description of Artificial Sequence: Synthetic oligonucleotide
aacuggccgcugguguuac

SEQ ID NO: 2111080 - RNA, 19 nt, Artificial Sequence
  Description of Artificial Sequence: Synthetic oligonucleotide
cuggcccacgcgccgaucg

SEQ ID NO: 2111081 - RNA, 19 nt, Artificial Sequence
  Description of Artificial Sequence: Synthetic oligonucleotide
acuggauuuugcgcagaag

SEQ ID NO: 2111082 - RNA, 19 nt, Artificial Sequence
  Description of Artificial Sequence: Synthetic oligonucleotide
cuucaguagggccgcgcgc

SEQ ID NO: 2111083 - RNA, 19 nt, Artificial Sequence
  Description of Artificial Sequence: Synthetic oligonucleotide
uguccgcgaaacuggccgc

SEQ ID NO: 2111084 - RNA, 19 nt, Artificial Sequence
  Description of Artificial Sequence: Synthetic oligonucleotide
gaguagggauggcaggcca

SEQ ID NO: 2111085 - RNA, 19 nt, Artificial Sequence
  Description of Artificial Sequence: Synthetic oligonucleotide
cucgaaguagugcgccaag

SEQ ID NO: 2111086 - RNA, 19 nt, Artificial Sequence
  Description of Artificial Sequence: Synthetic oligonucleotide
ucgugggcucagcccaccg

SEQ ID NO: 2111087 - RNA, 19 nt, Artificial Sequence
  Description of Artificial Sequence: Synthetic oligonucleotide
agcguaggcccauguucuc

SEQ ID NO: 2111088 - RNA, 19 nt, Artificial Sequence
  Description of Artificial Sequence: Synthetic oligonucleotide
cuccucgcgggccaugggc

SEQ ID NO: 2111089 - RNA, 19 nt, Artificial Sequence
  Description of Artificial Sequence: Synthetic oligonucleotide
ucucgaaguagugcgccaa

SEQ ID NO: 2111090 - RNA, 19 nt, Artificial Sequence
  Description of Artificial Sequence: Synthetic oligonucleotide
uccgucacgccgaccugcc

SEQ ID NO: 2111091 - RNA, 19 nt, Artificial Sequence
  Description of Artificial Sequence: Synthetic oligonucleotide
ggucccaaaguccugcguc

SEQ ID NO: 2111092 - RNA, 19 nt, Artificial Sequence
  Description of Artificial Sequence: Synthetic oligonucleotide
accuucaguagggccgcgc

SEQ ID NO: 2111093 - RNA, 19 nt, Artificial Sequence
  Description of Artificial Sequence: Synthetic oligonucleotide
guagugcgccaagaaggcg

SEQ ID NO: 2111094 - RNA, 19 nt, Artificial Sequence
  Description of Artificial Sequence: Synthetic oligonucleotide
aagaaggcgaugggcuccu

SEQ ID NO: 2111095 - RNA, 19 nt, Artificial Sequence
  Description of Artificial Sequence: Synthetic oligonucleotide
guaugugcgcccguccagc

SEQ ID NO: 2111096 - RNA, 19 nt, Artificial Sequence
  Description of Artificial Sequence: Synthetic oligonucleotide
gagacaccgucguccggcc

SEQ ID NO: 2111097 - RNA, 19 nt, Artificial Sequence
  Description of Artificial Sequence: Synthetic oligonucleotide
gcagcucacuguaugugcg

SEQ ID NO: 2111098 - RNA, 19 nt, Artificial Sequence
  Description of Artificial Sequence: Synthetic oligonucleotide
aagagggcggcagccuucu

SEQ ID NO: 2111099 - RNA, 19 nt, Artificial Sequence
  Description of Artificial Sequence: Synthetic oligonucleotide
cacucguaggccacgcuca

SEQ ID NO: 2111100 - RNA, 19 nt, Artificial Sequence
  Description of Artificial Sequence: Synthetic oligonucleotide
gguccugcagggucuacgc

SEQ ID NO: 2111101 - RNA, 19 nt, Artificial Sequence
  Description of Artificial Sequence: Synthetic oligonucleotide
gcgggaaccggccucuagg

SEQ ID NO: 2111102 - RNA, 19 nt, Artificial Sequence
  Description of Artificial Sequence: Synthetic oligonucleotide
gaucucccgcgccuagcgc

SEQ ID NO: 2111103 - RNA, 19 nt, Artificial Sequence
  Description of Artificial Sequence: Synthetic oligonucleotide
accgccucguggucccggc

SEQ ID NO: 2111104 - RNA, 19 nt, Artificial Sequence
  Description of Artificial Sequence: Synthetic oligonucleotide
ucucccgcgccuagcgcgc

SEQ ID NO: 2111105 - RNA, 19 nt, Artificial Sequence
  Description of Artificial Sequence: Synthetic oligonucleotide
gcacgugccaggcugucag

SEQ ID NO: 2111106 - RNA, 19 nt, Artificial Sequence
  Description of Artificial Sequence: Synthetic oligonucleotide
acgcggguccccuuccuug

SEQ ID NO: 2111107 - RNA, 19 nt, Artificial Sequence
  Description of Artificial Sequence: Synthetic oligonucleotide
ugccccgccaucccugcac

SEQ ID NO: 2111108 - RNA, 19 nt, Artificial Sequence
  Description of Artificial Sequence: Synthetic oligonucleotide
aaggugccacagcgcgcgg

SEQ ID NO: 2111109 - RNA, 19 nt, Artificial Sequence
  Description of Artificial Sequence: Synthetic oligonucleotide
gguuugaaggucccaaagu

SEQ ID NO: 2111110 - RNA, 19 nt, Artificial Sequence
  Description of Artificial Sequence: Synthetic oligonucleotide
gccucuagguagugugugg

SEQ ID NO: 2111111 - RNA, 19 nt, Artificial Sequence
  Description of Artificial Sequence: Synthetic oligonucleotide
gaagaggcgccaccaccuc

SEQ ID NO: 2111112 - RNA, 19 nt, Artificial Sequence
  Description of Artificial Sequence: Synthetic oligonucleotide
guggccgcccgguccaggg

SEQ ID NO: 2111113 - RNA, 19 nt, Artificial Sequence
  Description of Artificial Sequence: Synthetic oligonucleotide
uggcccacgcgccgaucgg

SEQ ID NO: 2111114 - RNA, 19 nt, Artificial Sequence
  Description of Artificial Sequence: Synthetic oligonucleotide
ucuccgucacgccgaccug

SEQ ID NO: 2111115 - RNA, 19 nt, Artificial Sequence
  Description of Artificial Sequence: Synthetic oligonucleotide
ccuucaguagggccgcgcg

SEQ ID NO: 2111116 - RNA, 19 nt, Artificial Sequence
  Description of Artificial Sequence: Synthetic oligonucleotide
gcugguguuacugccaguc

SEQ ID NO: 2111117 - RNA, 19 nt, Artificial Sequence
  Description of Artificial Sequence: Synthetic oligonucleotide
gccugagacaccgucgucc

SEQ ID NO: 2111118 - RNA, 19 nt, Artificial Sequence
  Description of Artificial Sequence: Synthetic oligonucleotide
agacaccgucguccggccg

SEQ ID NO: 2111119 - RNA, 19 nt, Artificial Sequence
  Description of Artificial Sequence: Synthetic oligonucleotide
agcaucuccgucacgccga

SEQ ID NO: 2111120 - RNA, 19 nt, Artificial Sequence
  Description of Artificial Sequence: Synthetic oligonucleotide
ccguaggaaguccuccucg

SEQ ID NO: 2111121 - RNA, 19 nt, Artificial Sequence
  Description of Artificial Sequence: Synthetic oligonucleotide
cuguaugugcgcccgucca

SEQ ID NO: 2111122 - RNA, 19 nt, Artificial Sequence
  Description of Artificial Sequence: Synthetic oligonucleotide
aggugccacagcgcgcggc

SEQ ID NO: 2111123 - RNA, 19 nt, Artificial Sequence
  Description of Artificial Sequence: Synthetic oligonucleotide
caugccugcccggaagaug

SEQ ID NO: 2111124 - RNA, 19 nt, Artificial Sequence
  Description of Artificial Sequence: Synthetic oligonucleotide
aaacuggccgcugguguua

SEQ ID NO: 2111125 - RNA, 19 nt, Artificial Sequence
  Description of Artificial Sequence: Synthetic oligonucleotide
gagggcgcuggcccgugcc

SEQ ID NO: 2111126 - RNA, 19 nt, Artificial Sequence
  Description of Artificial Sequence: Synthetic oligonucleotide
agcgggaaccggccucuag

SEQ ID NO: 2111127 - RNA, 19 nt, Artificial Sequence
  Description of Artificial Sequence: Synthetic oligonucleotide
gcacacgcgcuucagcagc

SEQ ID NO: 2111128 - RNA, 19 nt, Artificial Sequence
  Description of Artificial Sequence: Synthetic oligonucleotide
guuggcuggcgagcguagg

SEQ ID NO: 2111129 - RNA, 19 nt, Artificial Sequence
  Description of Artificial Sequence: Synthetic oligonucleotide
ccucuagguaguguguggg

SEQ ID NO: 2111130 - RNA, 19 nt, Artificial Sequence
  Description of Artificial Sequence: Synthetic oligonucleotide
guccucugcgaguggugag

SEQ ID NO: 2111131 - RNA, 19 nt, Artificial Sequence
  Description of Artificial Sequence: Synthetic oligonucleotide
aggucccaaaguccugcgu

SEQ ID NO: 2111132 - RNA, 19 nt, Artificial Sequence
  Description of Artificial Sequence: Synthetic oligonucleotide
acugccagucgccgcuucu

SEQ ID NO: 2111133 - RNA, 19 nt, Artificial Sequence
  Description of Artificial Sequence: Synthetic oligonucleotide
agggucuacgcgggucccc

SEQ ID NO: 2111134 - RNA, 19 nt, Artificial Sequence
  Description of Artificial Sequence: Synthetic oligonucleotide
cccggcacuggauuuugcg

SEQ ID NO: 2111135 - RNA, 19 nt, Artificial Sequence
  Description of Artificial Sequence: Synthetic oligonucleotide
ccugcagggucuacgcggg

SEQ ID NO: 2111136 - RNA, 19 nt, Artificial Sequence
  Description of Artificial Sequence: Synthetic oligonucleotide
agcguguccagcacagccu

SEQ ID NO: 2111137 - RNA, 19 nt, Artificial Sequence
  Description of Artificial Sequence: Synthetic oligonucleotide
agucgccgcuucuccacug

SEQ ID NO: 2111138 - RNA, 19 nt, Artificial Sequence
  Description of Artificial Sequence: Synthetic oligonucleotide
ucacuguaugugcgcccgu

SEQ ID NO: 2111139 - RNA, 19 nt, Artificial Sequence
  Description of Artificial Sequence: Synthetic oligonucleotide
cuccgucacgccgaccugc

SEQ ID NO: 2111140 - RNA, 19 nt, Artificial Sequence
  Description of Artificial Sequence: Synthetic oligonucleotide
ucgggugccccgccauccc

SEQ ID NO: 2111141 - RNA, 19 nt, Artificial Sequence
  Description of Artificial Sequence: Synthetic oligonucleotide
ucgcucucggccgccgccg

SEQ ID NO: 2111142 - RNA, 19 nt, Artificial Sequence
  Description of Artificial Sequence: Synthetic oligonucleotide
cgcucagacacucguaggc

SEQ ID NO: 2111143 - RNA, 19 nt, Artificial Sequence
  Description of Artificial Sequence: Synthetic oligonucleotide
uucugugaguagggauggc

SEQ ID NO: 2111144 - RNA, 19 nt, Artificial Sequence
  Description of Artificial Sequence: Synthetic oligonucleotide
ccggcacuggauuuugcgc

SEQ ID NO: 2111145 - RNA, 19 nt, Artificial Sequence
  Description of Artificial Sequence: Synthetic oligonucleotide
acuccucgcgggccauggg

SEQ ID NO: 2111146 - RNA, 19 nt, Artificial Sequence
  Description of Artificial Sequence: Synthetic oligonucleotide
aggccguccucugcgagug

SEQ ID NO: 2111147 - RNA, 19 nt, Artificial Sequence
  Description of Artificial Sequence: Synthetic oligonucleotide
cucgggugccccgccaucc

SEQ ID NO: 2111148 - RNA, 19 nt, Artificial Sequence
  Description of Artificial Sequence: Synthetic oligonucleotide
cugguuugaaggucccaaa

SEQ ID NO: 2111149 - RNA, 19 nt, Artificial Sequence
  Description of Artificial Sequence: Synthetic oligonucleotide
gccgaccugccguaggaag

SEQ ID NO: 2111150 - RNA, 19 nt, Artificial Sequence
  Description of Artificial Sequence: Synthetic oligonucleotide
cugagacaccgucguccgg

SEQ ID NO: 2111151 - RNA, 19 nt, Artificial Sequence
  Description of Artificial Sequence: Synthetic oligonucleotide
cacgccgaccugccguagg

SEQ ID NO: 2111152 - RNA, 19 nt, Artificial Sequence
  Description of Artificial Sequence: Synthetic oligonucleotide
acgccgaccugccguagga

SEQ ID NO: 2111153 - RNA, 19 nt, Artificial Sequence
  Description of Artificial Sequence: Synthetic oligonucleotide
gucguccggccgcuguccg

SEQ ID NO: 2111154 - RNA, 19 nt, Artificial Sequence
  Description of Artificial Sequence: Synthetic oligonucleotide
cgugccacgaacuccagca

SEQ ID NO: 2111155 - RNA, 19 nt, Artificial Sequence
  Description of Artificial Sequence: Synthetic oligonucleotide
uugcgcagaagaggcgcca

SEQ ID NO: 2111156 - RNA, 19 nt, Artificial Sequence
  Description of Artificial Sequence: Synthetic oligonucleotide
caccgccaggccugggucc

SEQ ID NO: 2111157 - RNA, 19 nt, Artificial Sequence
  Description of Artificial Sequence: Synthetic oligonucleotide
cagggcccaagcgggaacc

SEQ ID NO: 2111158 - RNA, 19 nt, Artificial Sequence
  Description of Artificial Sequence: Synthetic oligonucleotide
gcucagacacucguaggcc

SEQ ID NO: 2111159 - RNA, 19 nt, Artificial Sequence
  Description of Artificial Sequence: Synthetic oligonucleotide
gucgccgcuucuccacugc

SEQ ID NO: 2111160 - RNA, 19 nt, Artificial Sequence
  Description of Artificial Sequence: Synthetic oligonucleotide
cugcgucgugggcucagcc

SEQ ID NO: 2111161 - RNA, 19 nt, Artificial Sequence
  Description of Artificial Sequence: Synthetic oligonucleotide
agggugccgggacacuggu

SEQ ID NO: 2111162 - RNA, 19 nt, Artificial Sequence
  Description of Artificial Sequence: Synthetic oligonucleotide
gaaacuggccgcugguguu

SEQ ID NO: 2111163 - RNA, 19 nt, Artificial Sequence
  Description of Artificial Sequence: Synthetic oligonucleotide
cucuagcguguccagcaca

SEQ ID NO: 2111164 - RNA, 19 nt, Artificial Sequence
  Description of Artificial Sequence: Synthetic oligonucleotide
gccaugggcgcgcugggcc

SEQ ID NO: 2111165 - RNA, 19 nt, Artificial Sequence
  Description of Artificial Sequence: Synthetic oligonucleotide
cugcccggaagaugcccag

SEQ ID NO: 2111166 - RNA, 19 nt, Artificial Sequence
  Description of Artificial Sequence: Synthetic oligonucleotide
gaagcacgacagcaugccu

SEQ ID NO: 2111167 - RNA, 19 nt, Artificial Sequence
  Description of Artificial Sequence: Synthetic oligonucleotide
ugccgggacacugguuuga

SEQ ID NO: 2111168 - RNA, 19 nt, Artificial Sequence
  Description of Artificial Sequence: Synthetic oligonucleotide
gcgaugaagagggcggcag

SEQ ID NO: 2111169 - RNA, 19 nt, Artificial Sequence
  Description of Artificial Sequence: Synthetic oligonucleotide
ugcgcagaagaggcgccac

SEQ ID NO: 2111170 - RNA, 19 nt, Artificial Sequence
  Description of Artificial Sequence: Synthetic oligonucleotide
gucuacgcggguccccuuc

SEQ ID NO: 2111171 - RNA, 19 nt, Artificial Sequence
  Description of Artificial Sequence: Synthetic oligonucleotide
ccgcuguccgcgaaacugg

SEQ ID NO: 2111172 - RNA, 19 nt, Artificial Sequence
  Description of Artificial Sequence: Synthetic oligonucleotide
gcgcucagacacucguagg

SEQ ID NO: 2111173 - RNA, 19 nt, Artificial Sequence
  Description of Artificial Sequence: Synthetic oligonucleotide
cacuguaugugcgcccguc

SEQ ID NO: 2111174 - RNA, 19 nt, Artificial Sequence
  Description of Artificial Sequence: Synthetic oligonucleotide
ccaagaaggcgaugggcuc

SEQ ID NO: 2111175 - RNA, 19 nt, Artificial Sequence
  Description of Artificial Sequence: Synthetic oligonucleotide
acuggcgcucagacacucg

SEQ ID NO: 2111176 - RNA, 19 nt, Artificial Sequence
  Description of Artificial Sequence: Synthetic oligonucleotide
cgagcguaggcccauguuc

SEQ ID NO: 2111177 - RNA, 19 nt, Artificial Sequence
  Description of Artificial Sequence: Synthetic oligonucleotide
accgucguccggccgcugu

SEQ ID NO: 2111178 - RNA, 19 nt, Artificial Sequence
  Description of Artificial Sequence: Synthetic oligonucleotide
gcucacuguaugugcgccc

SEQ ID NO: 2111179 - RNA, 19 nt, Artificial Sequence
  Description of Artificial Sequence: Synthetic oligonucleotide
gaccugccguaggaagucc

SEQ ID NO: 2111180 - RNA, 19 nt, Artificial Sequence
  Description of Artificial Sequence: Synthetic oligonucleotide
cgaguggugagccaggcga

SEQ ID NO: 2111181 - RNA, 19 nt, Artificial Sequence
  Description of Artificial Sequence: Synthetic oligonucleotide
uggcgcucagacacucgua

SEQ ID NO: 2111182 - RNA, 19 nt, Artificial Sequence
  Description of Artificial Sequence: Synthetic oligonucleotide
uccgcgaaacuggccgcug

SEQ ID NO: 2111183 - RNA, 19 nt, Artificial Sequence
  Description of Artificial Sequence: Synthetic oligonucleotide
cagaucucccgcgccuagc

SEQ ID NO: 2111184 - RNA, 19 nt, Artificial Sequence
  Description of Artificial Sequence: Synthetic oligonucleotide
gcguaggcccauguucucg

SEQ ID NO: 2111185 - RNA, 19 nt, Artificial Sequence
  Description of Artificial Sequence: Synthetic oligonucleotide
ugccugcccggaagaugcc

SEQ ID NO: 2111186 - RNA, 19 nt, Artificial Sequence
  Description of Artificial Sequence: Synthetic oligonucleotide
gugccgggacacugguuug

SEQ ID NO: 2111187 - RNA, 19 nt, Artificial Sequence
  Description of Artificial Sequence: Synthetic oligonucleotide
agguagugugugggcgccg

SEQ ID NO: 2111188 - RNA, 19 nt, Artificial Sequence
  Description of Artificial Sequence: Synthetic oligonucleotide
uacgcggguccccuuccuu

SEQ ID NO: 2111189 - RNA, 19 nt, Artificial Sequence
  Description of Artificial Sequence: Synthetic oligonucleotide
uacugccagucgccgcuuc

SEQ ID NO: 2111190 - RNA, 19 nt, Artificial Sequence
  Description of Artificial Sequence: Synthetic oligonucleotide
gaucggccaccgccaggcc

SEQ ID NO: 2111191 - RNA, 19 nt, Artificial Sequence
  Description of Artificial Sequence: Synthetic oligonucleotide
ugcccggaagaugcccagc

SEQ ID NO: 2111192 - RNA, 19 nt, Artificial Sequence
  Description of Artificial Sequence: Synthetic oligonucleotide
gcgaguggugagccaggcg

SEQ ID NO: 2111193 - RNA, 19 nt, Artificial Sequence
  Description of Artificial Sequence: Synthetic oligonucleotide
agggcccaagcgggaaccg

SEQ ID NO: 2111194 - RNA, 19 nt, Artificial Sequence
  Description of Artificial Sequence: Synthetic oligonucleotide
gcgucgugggcucagccca

SEQ ID NO: 2111195 - RNA, 19 nt, Artificial Sequence
  Description of Artificial Sequence: Synthetic oligonucleotide
ggccucuagguagugugug

SEQ ID NO: 2111196 - RNA, 19 nt, Artificial Sequence
  Description of Artificial Sequence: Synthetic oligonucleotide
aagagggcgcuggcccgug

SEQ ID NO: 2111197 - RNA, 19 nt, Artificial Sequence
  Description of Artificial Sequence: Synthetic oligonucleotide
ucguccggccgcuguccgc

SEQ ID NO: 2111198 - RNA, 19 nt, Artificial Sequence
  Description of Artificial Sequence: Synthetic oligonucleotide
ggugccgggacacugguuu

SEQ ID NO: 2111199 - RNA, 19 nt, Artificial Sequence
  Description of Artificial Sequence: Synthetic oligonucleotide
cacuggauuuugcgcagaa

SEQ ID NO: 2111200 - RNA, 19 nt, Artificial Sequence
  Description of Artificial Sequence: Synthetic oligonucleotide
ccgccaucccugcacacgc

SEQ ID NO: 2111201 - RNA, 19 nt, Artificial Sequence
  Description of Artificial Sequence: Synthetic oligonucleotide
gccgccugagacaccgucg

SEQ ID NO: 2111202 - RNA, 19 nt, Artificial Sequence
  Description of Artificial Sequence: Synthetic oligonucleotide
cauuguuguugaaggccgu

SEQ ID NO: 2111203 - RNA, 19 nt, Artificial Sequence
  Description of Artificial Sequence: Synthetic oligonucleotide
agugcgccaagaaggcgau

SEQ ID NO: 2111204 - RNA, 19 nt, Artificial Sequence
  Description of Artificial Sequence: Synthetic oligonucleotide
agggcgcuggcccgugcca

SEQ ID NO: 2111205 - RNA, 19 nt, Artificial Sequence
  Description of Artificial Sequence: Synthetic oligonucleotide
cucgcgggccaugggcgcg

SEQ ID NO: 2111206 - RNA, 19 nt, Artificial Sequence
  Description of Artificial Sequence: Synthetic oligonucleotide
ccaugggcgcgcugggccg

SEQ ID NO: 2111207 - RNA, 19 nt, Artificial Sequence
  Description of Artificial Sequence: Synthetic oligonucleotide
uagggauggcaggccagua

SEQ ID NO: 2111208 - RNA, 19 nt, Artificial Sequence
  Description of Artificial Sequence: Synthetic oligonucleotide
ggcccaagcgggaaccggc

SEQ ID NO: 2111209 - RNA, 19 nt, Artificial Sequence
  Description of Artificial Sequence: Synthetic oligonucleotide
gugugugggcgccgccgcc

SEQ ID NO: 2111210 - RNA, 19 nt, Artificial Sequence
  Description of Artificial Sequence: Synthetic oligonucleotide
gugugggcgccgccgccag

SEQ ID NO: 2111211 - RNA, 19 nt, Artificial Sequence
  Description of Artificial Sequence: Synthetic oligonucleotide
gccaguacagaggggucug

SEQ ID NO: 2111212 - RNA, 19 nt, Artificial Sequence
  Description of Artificial Sequence: Synthetic oligonucleotide
ucacgccgaccugccguag

SEQ ID NO: 2111213 - RNA, 19 nt, Artificial Sequence
  Description of Artificial Sequence: Synthetic oligonucleotide
gucccggcacuggauuuug

SEQ ID NO: 2111214 - RNA, 19 nt, Artificial Sequence
  Description of Artificial Sequence: Synthetic oligonucleotide
aaccggccucuagguagug

SEQ ID NO: 2111215 - RNA, 19 nt, Artificial Sequence
  Description of Artificial Sequence: Synthetic oligonucleotide
cugccagucgccgcuucuc

SEQ ID NO: 2111216 - RNA, 19 nt, Artificial Sequence
  Description of Artificial Sequence: Synthetic oligonucleotide
gcaccuucaguagggccgc

SEQ ID NO: 2111217 - RNA, 19 nt, Artificial Sequence
  Description of Artificial Sequence: Synthetic oligonucleotide
ggcgaaggugccacagcgc

SEQ ID NO: 2111218 - RNA, 19 nt, Artificial Sequence
  Description of Artificial Sequence: Synthetic oligonucleotide
cuggcgcucagacacucgu

SEQ ID NO: 2111219 - RNA, 19 nt, Artificial Sequence
  Description of Artificial Sequence: Synthetic oligonucleotide
cgaucggccaccgccaggc

SEQ ID NO: 2111220 - RNA, 19 nt, Artificial Sequence
  Description of Artificial Sequence: Synthetic oligonucleotide
ggcgcuggcccgugccacg

SEQ ID NO: 2111221 - RNA, 19 nt, Artificial Sequence
  Description of Artificial Sequence: Synthetic oligonucleotide
aggccacgcucacauuguu

SEQ ID NO: 2111222 - RNA, 19 nt, Artificial Sequence
  Description of Artificial Sequence: Synthetic oligonucleotide
gugcagggugccgggacac

SEQ ID NO: 2111223 - RNA, 19 nt, Artificial Sequence
  Description of Artificial Sequence: Synthetic oligonucleotide
gcgcgcagcaucuccguca

SEQ ID NO: 2111224 - RNA, 19 nt, Artificial Sequence
  Description of Artificial Sequence: Synthetic oligonucleotide
ggugccccgccaucccugc

SEQ ID NO: 2111225 - RNA, 19 nt, Artificial Sequence
  Description of Artificial Sequence: Synthetic oligonucleotide
caugggcgcgcugggccgc

SEQ ID NO: 2111226 - RNA, 19 nt, Artificial Sequence
  Description of Artificial Sequence: Synthetic oligonucleotide
gccgccagaucucccgcgc

SEQ ID NO: 2111227 - RNA, 19 nt, Artificial Sequence
  Description of Artificial Sequence: Synthetic oligonucleotide
ccgcugguguuacugccag

SEQ ID NO: 2111228 - RNA, 19 nt, Artificial Sequence
  Description of Artificial Sequence: Synthetic oligonucleotide
gucacgccgaccugccgua

SEQ ID NO: 2111229 - RNA, 19 nt, Artificial Sequence
  Description of Artificial Sequence: Synthetic oligonucleotide
ccaagcgggaaccggccuc

SEQ ID NO: 2111230 - RNA, 19 nt, Artificial Sequence
  Description of Artificial Sequence: Synthetic oligonucleotide
gaaccggccucuagguagu

SEQ ID NO: 2111231 - RNA, 19 nt, Artificial Sequence
  Description of Artificial Sequence: Synthetic oligonucleotide
gccguaggaaguccuccuc

SEQ ID NO: 2111232 - RNA, 19 nt, Artificial Sequence
  Description of Artificial Sequence: Synthetic oligonucleotide
guaggcccauguucucgaa

SEQ ID NO: 2111233 - RNA, 19 nt, Artificial Sequence
  Description of Artificial Sequence: Synthetic oligonucleotide
guagggauggcaggccagu

SEQ ID NO: 2111234 - RNA, 19 nt, Artificial Sequence
  Description of Artificial Sequence: Synthetic oligonucleotide
augggcgcgcugggccgcc

SEQ ID NO: 2111235 - RNA, 19 nt, Artificial Sequence
  Description of Artificial Sequence: Synthetic oligonucleotide
gcgcagaagaggcgccacc

SEQ ID NO: 2111236 - RNA, 19 nt, Artificial Sequence
  Description of Artificial Sequence: Synthetic oligonucleotide
gcagggugccgggacacug

SEQ ID NO: 2111237 - RNA, 19 nt, Artificial Sequence
  Description of Artificial Sequence: Synthetic oligonucleotide
ugcggccacuggcgcucag

SEQ ID NO: 2111238 - RNA, 19 nt, Artificial Sequence
  Description of Artificial Sequence: Synthetic oligonucleotide
gcgaaacuggccgcuggug

SEQ ID NO: 2111239 - RNA, 19 nt, Artificial Sequence
  Description of Artificial Sequence: Synthetic oligonucleotide
gccuagcgcgcccucuagc

SEQ ID NO: 2111240 - RNA, 19 nt, Artificial Sequence
  Description of Artificial Sequence: Synthetic oligonucleotide
ccucugcgaguggugagcc

SEQ ID NO: 2111241 - RNA, 19 nt, Artificial Sequence
  Description of Artificial Sequence: Synthetic oligonucleotide
accggccucuagguagugu

SEQ ID NO: 2111242 - RNA, 19 nt, Artificial Sequence
  Description of Artificial Sequence: Synthetic oligonucleotide
ccgcgaaacuggccgcugg

SEQ ID NO: 2111243 - RNA, 19 nt, Artificial Sequence
  Description of Artificial Sequence: Synthetic oligonucleotide
cagccccggcuucuucuug

SEQ ID NO: 2111244 - RNA, 19 nt, Artificial Sequence
  Description of Artificial Sequence: Synthetic oligonucleotide
gucgugggcucagcccacc

SEQ ID NO: 2111245 - RNA, 19 nt, Artificial Sequence
  Description of Artificial Sequence: Synthetic oligonucleotide
uccggccgcuguccgcgaa

SEQ ID NO: 2111246 - RNA, 19 nt, Artificial Sequence
  Description of Artificial Sequence: Synthetic oligonucleotide
cccgguccagggcacgugc

SEQ ID NO: 2111247 - RNA, 19 nt, Artificial Sequence
  Description of Artificial Sequence: Synthetic oligonucleotide
gccgcgcgcagcaucuccg

SEQ ID NO: 2111248 - RNA, 19 nt, Artificial Sequence
  Description of Artificial Sequence: Synthetic oligonucleotide
gcuggcccgugccacgaac

SEQ ID NO: 2111249 - RNA, 19 nt, Artificial Sequence
  Description of Artificial Sequence: Synthetic oligonucleotide
cacgcgccgaucggccacc

SEQ ID NO: 2111250 - RNA, 19 nt, Artificial Sequence
  Description of Artificial Sequence: Synthetic oligonucleotide
ggcccgugccacgaacucc

SEQ ID NO: 2111251 - RNA, 19 nt, Artificial Sequence
  Description of Artificial Sequence: Synthetic oligonucleotide
cucugcgaguggugagcca

SEQ ID NO: 2111252 - RNA, 19 nt, Artificial Sequence
  Description of Artificial Sequence: Synthetic oligonucleotide
caccgccucguggucccgg

SEQ ID NO: 2111253 - RNA, 19 nt, Artificial Sequence
  Description of Artificial Sequence: Synthetic oligonucleotide
ugagggccccgugcagggu

SEQ ID NO: 2111254 - RNA, 19 nt, Artificial Sequence
  Description of Artificial Sequence: Synthetic oligonucleotide
gccccgugcagggugccgg

SEQ ID NO: 2111255 - RNA, 19 nt, Artificial Sequence
  Description of Artificial Sequence: Synthetic oligonucleotide
cgccaagaaggcgaugggc

SEQ ID NO: 2111256 - RNA, 19 nt, Artificial Sequence
  Description of Artificial Sequence: Synthetic oligonucleotide
cacugguuugaagguccca

SEQ ID NO: 2111257 - RNA, 19 nt, Artificial Sequence
  Description of Artificial Sequence: Synthetic oligonucleotide
gaagagggcgcuggcccgu

SEQ ID NO: 2111258 - RNA, 19 nt, Artificial Sequence
  Description of Artificial Sequence: Synthetic oligonucleotide
gcuguccgcgaaacuggcc

SEQ ID NO: 2111259 - RNA, 19 nt, Artificial Sequence
  Description of Artificial Sequence: Synthetic oligonucleotide
gcccgugccacgaacucca

SEQ ID NO: 2111260 - RNA, 19 nt, Artificial Sequence
  Description of Artificial Sequence: Synthetic oligonucleotide
gcggguccccuuccuuggg

SEQ ID NO: 2111261 - RNA, 19 nt, Artificial Sequence
  Description of Artificial Sequence: Synthetic oligonucleotide
acaccgucguccggccgcu

SEQ ID NO: 2111262 - RNA, 19 nt, Artificial Sequence
  Description of Artificial Sequence: Synthetic oligonucleotide
ccgggacacugguuugaag

SEQ ID NO: 2111263 - RNA, 19 nt, Artificial Sequence
  Description of Artificial Sequence: Synthetic oligonucleotide
cgcggguccccuuccuugg

SEQ ID NO: 2111264 - RNA, 19 nt, Artificial Sequence
  Description of Artificial Sequence: Synthetic oligonucleotide
agcccaccggcuugaccuu

SEQ ID NO: 2111265 - RNA, 19 nt, Artificial Sequence
  Description of Artificial Sequence: Synthetic oligonucleotide
gccgaucggccaccgccag

SEQ ID NO: 2111266 - RNA, 19 nt, Artificial Sequence
  Description of Artificial Sequence: Synthetic oligonucleotide
caccuucaguagggccgcg

SEQ ID NO: 2111267 - RNA, 19 nt, Artificial Sequence
  Description of Artificial Sequence: Synthetic oligonucleotide
uggcgagcguaggcccaug

SEQ ID NO: 2111268 - RNA, 19 nt, Artificial Sequence
  Description of Artificial Sequence: Synthetic oligonucleotide
cucguaggccacgcucaca

SEQ ID NO: 2111269 - RNA, 19 nt, Artificial Sequence
  Description of Artificial Sequence: Synthetic oligonucleotide
gcaucuccgucacgccgac

SEQ ID NO: 2111270 - RNA, 19 nt, Artificial Sequence
  Description of Artificial Sequence: Synthetic oligonucleotide
cgcuguccgcgaaacuggc

SEQ ID NO: 2111271 - RNA, 19 nt, Artificial Sequence
  Description of Artificial Sequence: Synthetic oligonucleotide
ccgugccacgaacuccagc

SEQ ID NO: 2111272 - RNA, 19 nt, Artificial Sequence
  Description of Artificial Sequence: Synthetic oligonucleotide
gcccaagcgggaaccggcc

SEQ ID NO: 2111273 - RNA, 19 nt, Artificial Sequence
  Description of Artificial Sequence: Synthetic oligonucleotide
ugcgcccguccagccccgg

SEQ ID NO: 2111274 - RNA, 19 nt, Artificial Sequence
  Description of Artificial Sequence: Synthetic oligonucleotide
gccugcccggaagaugccc

SEQ ID NO: 2111275 - RNA, 19 nt, Artificial Sequence
  Description of Artificial Sequence: Synthetic oligonucleotide
ggcgaugaagagggcggca

SEQ ID NO: 2111276 - RNA, 19 nt, Artificial Sequence
  Description of Artificial Sequence: Synthetic oligonucleotide
agcgcgcccucuagcgugu

SEQ ID NO: 2111277 - RNA, 19 nt, Artificial Sequence
  Description of Artificial Sequence: Synthetic oligonucleotide
caagcgggaaccggccucu

SEQ ID NO: 2111278 - RNA, 19 nt, Artificial Sequence
  Description of Artificial Sequence: Synthetic oligonucleotide
ccuuggcgaugaagagggc

SEQ ID NO: 2111279 - RNA, 19 nt, Artificial Sequence
  Description of Artificial Sequence: Synthetic oligonucleotide
cguuggcuggcgagcguag

SEQ ID NO: 2111280 - RNA, 19 nt, Artificial Sequence
  Description of Artificial Sequence: Synthetic oligonucleotide
cguccggccgcuguccgcg

SEQ ID NO: 2111281 - RNA, 19 nt, Artificial Sequence
  Description of Artificial Sequence: Synthetic oligonucleotide
ccgugcagggugccgggac

SEQ ID NO: 2111282 - RNA, 19 nt, Artificial Sequence
  Description of Artificial Sequence: Synthetic oligonucleotide
gcgcccucuagcgugucca

SEQ ID NO: 2111283 - RNA, 19 nt, Artificial Sequence
  Description of Artificial Sequence: Synthetic oligonucleotide
uugcggccacuggcgcuca

SEQ ID NO: 2111284 - RNA, 19 nt, Artificial Sequence
  Description of Artificial Sequence: Synthetic oligonucleotide
ccgaucggccaccgccagg

SEQ ID NO: 2111285 - RNA, 19 nt, Artificial Sequence
  Description of Artificial Sequence: Synthetic oligonucleotide
gcccucuagcguguccagc

SEQ ID NO: 2111286 - RNA, 19 nt, Artificial Sequence
  Description of Artificial Sequence: Synthetic oligonucleotide
ggcccacgcgccgaucggc

SEQ ID NO: 2111287 - RNA, 19 nt, Artificial Sequence
  Description of Artificial Sequence: Synthetic oligonucleotide
caucccugcacacgcgcuu

SEQ ID NO: 2111288 - RNA, 19 nt, Artificial Sequence
  Description of Artificial Sequence: Synthetic oligonucleotide
cagaggggucugagcugca

SEQ ID NO: 2111289 - RNA, 19 nt, Artificial Sequence
  Description of Artificial Sequence: Synthetic oligonucleotide
gccgccguccgguggccgc

SEQ ID NO: 2111290 - RNA, 19 nt, Artificial Sequence
  Description of Artificial Sequence: Synthetic oligonucleotide
cugguccugcagggucuac

SEQ ID NO: 2111291 - RNA, 19 nt, Artificial Sequence
  Description of Artificial Sequence: Synthetic oligonucleotide
gaugggcuccucgggccgu

SEQ ID NO: 2111292 - RNA, 19 nt, Artificial Sequence
  Description of Artificial Sequence: Synthetic oligonucleotide
acgcgccgaucggccaccg

SEQ ID NO: 2111293 - RNA, 19 nt, Artificial Sequence
  Description of Artificial Sequence: Synthetic oligonucleotide
cccuuccuugggugagggc

SEQ ID NO: 2111294 - RNA, 19 nt, Artificial Sequence
  Description of Artificial Sequence: Synthetic oligonucleotide
ccacgcgccgaucggccac

SEQ ID NO: 2111295 - RNA, 19 nt, Artificial Sequence
  Description of Artificial Sequence: Synthetic oligonucleotide
cucagcccaccggcuugac

SEQ ID NO: 2111296 - RNA, 19 nt, Artificial Sequence
  Description of Artificial Sequence: Synthetic oligonucleotide
gguggccgcccgguccagg

SEQ ID NO: 2111297 - RNA, 19 nt, Artificial Sequence
  Description of Artificial Sequence: Synthetic oligonucleotide
ggccguccucugcgagugg

SEQ ID NO: 2111298 - RNA, 19 nt, Artificial Sequence
  Description of Artificial Sequence: Synthetic oligonucleotide
ccccgugcagggugccggg

SEQ ID NO: 2111299 - RNA, 19 nt, Artificial Sequence
  Description of Artificial Sequence: Synthetic oligonucleotide
gugcgccaagaaggcgaug

SEQ ID NO: 2111300 - RNA, 19 nt, Artificial Sequence
  Description of Artificial Sequence: Synthetic oligonucleotide
gugcgcccguccagccccg

SEQ ID NO: 2111301 - RNA, 19 nt, Artificial Sequence
  Description of Artificial Sequence: Synthetic oligonucleotide
cgaaacuggccgcuggugu

SEQ ID NO: 2111302 - RNA, 19 nt, Artificial Sequence
  Description of Artificial Sequence: Synthetic oligonucleotide
cgacagcaugccugcccgg

SEQ ID NO: 2111303 - RNA, 19 nt, Artificial Sequence
  Description of Artificial Sequence: Synthetic oligonucleotide
ccaccggcuugaccuuggc

SEQ ID NO: 2111304 - RNA, 19 nt, Artificial Sequence
  Description of Artificial Sequence: Synthetic oligonucleotide
cgaccugccguaggaaguc

SEQ ID NO: 2111305 - RNA, 19 nt, Artificial Sequence
  Description of Artificial Sequence: Synthetic oligonucleotide
gcuggcgagcguaggccca

SEQ ID NO: 2111306 - RNA, 19 nt, Artificial Sequence
  Description of Artificial Sequence: Synthetic oligonucleotide
guccgguggccgcccgguc

SEQ ID NO: 2111307 - RNA, 19 nt, Artificial Sequence
  Description of Artificial Sequence: Synthetic oligonucleotide
ggcacgugccaggcuguca

SEQ ID NO: 2111308 - RNA, 19 nt, Artificial Sequence
  Description of Artificial Sequence: Synthetic oligonucleotide
ggccaugggcgcgcugggc

SEQ ID NO: 2111309 - RNA, 19 nt, Artificial Sequence
  Description of Artificial Sequence: Synthetic oligonucleotide
cgccaucccugcacacgcg

SEQ ID NO: 2111310 - RNA, 19 nt, Artificial Sequence
  Description of Artificial Sequence: Synthetic oligonucleotide
cgccgccagaucucccgcg

SEQ ID NO: 2111311 - RNA, 19 nt, Artificial Sequence
  Description of Artificial Sequence: Synthetic oligonucleotide
cagucgccgcuucuccacu

SEQ ID NO: 2111312 - RNA, 19 nt, Artificial Sequence
  Description of Artificial Sequence: Synthetic oligonucleotide
ggccccgugcagggugccg

SEQ ID NO: 2111313 - RNA, 19 nt, Artificial Sequence
  Description of Artificial Sequence: Synthetic oligonucleotide
cccugcacacgcgcuucag

SEQ ID NO: 2111314 - RNA, 19 nt, Artificial Sequence
  Description of Artificial Sequence: Synthetic oligonucleotide
cuacgcggguccccuuccu

SEQ ID NO: 2111315 - RNA, 19 nt, Artificial Sequence
  Description of Artificial Sequence: Synthetic oligonucleotide
ggcgagcguaggcccaugu

SEQ ID NO: 2111316 - RNA, 19 nt, Artificial Sequence
  Description of Artificial Sequence: Synthetic oligonucleotide
cgucguccggccgcugucc

SEQ ID NO: 2111317 - RNA, 19 nt, Artificial Sequence
  Description of Artificial Sequence: Synthetic oligonucleotide
gcccaccggcuugaccuug

SEQ ID NO: 2111318 - RNA, 19 nt, Artificial Sequence
  Description of Artificial Sequence: Synthetic oligonucleotide
ccgucguccggccgcuguc

SEQ ID NO: 2111319 - RNA, 19 nt, Artificial Sequence
  Description of Artificial Sequence: Synthetic oligonucleotide
cguccucugcgagugguga

SEQ ID NO: 2111320 - RNA, 19 nt, Artificial Sequence
  Description of Artificial Sequence: Synthetic oligonucleotide
cgugcagggugccgggaca

SEQ ID NO: 2111321 - RNA, 19 nt, Artificial Sequence
  Description of Artificial Sequence: Synthetic oligonucleotide
cgcccucuagcguguccag

SEQ ID NO: 2111322 - RNA, 19 nt, Artificial Sequence
  Description of Artificial Sequence: Synthetic oligonucleotide
cgccgccugagacaccguc

SEQ ID NO: 2111323 - RNA, 19 nt, Artificial Sequence
  Description of Artificial Sequence: Synthetic oligonucleotide
cgucgugggcucagcccac

SEQ ID NO: 2111324 - RNA, 19 nt, Artificial Sequence
  Description of Artificial Sequence: Synthetic oligonucleotide
ccucgggugccccgccauc

SEQ ID NO: 2111325 - RNA, 19 nt, Artificial Sequence
  Description of Artificial Sequence: Synthetic oligonucleotide
ccguccgguggccgcccgg

SEQ ID NO: 2111326 - RNA, 19 nt, Artificial Sequence
  Description of Artificial Sequence: Synthetic oligonucleotide
gcgcccguccagccccggc

SEQ ID NO: 2111327 - RNA, 19 nt, Artificial Sequence
  Description of Artificial Sequence: Synthetic oligonucleotide
gccgggacacugguuugaa

SEQ ID NO: 2111328 - RNA, 19 nt, Artificial Sequence
  Description of Artificial Sequence: Synthetic oligonucleotide
ccgccugagacaccgucgu

SEQ ID NO: 2111329 - RNA, 19 nt, Artificial Sequence
  Description of Artificial Sequence: Synthetic oligonucleotide
cgccuagcgcgcccucuag

SEQ ID NO: 2111330 - RNA, 19 nt, Artificial Sequence
  Description of Artificial Sequence: Synthetic oligonucleotide
guccggccgcuguccgcga

SEQ ID NO: 2111331 - RNA, 19 nt, Artificial Sequence
  Description of Artificial Sequence: Synthetic oligonucleotide
gcggcaccgccucgugguc

SEQ ID NO: 2111332 - RNA, 19 nt, Artificial Sequence
  Description of Artificial Sequence: Synthetic oligonucleotide
ggccgccguccgguggccg

SEQ ID NO: 2111333 - RNA, 19 nt, Artificial Sequence
  Description of Artificial Sequence: Synthetic oligonucleotide
ccaucccugcacacgcgcu

SEQ ID NO: 2111334 - RNA, 19 nt, Artificial Sequence
  Description of Artificial Sequence: Synthetic oligonucleotide
gcggccacuggcgcucaga

SEQ ID NO: 2111335 - RNA, 19 nt, Artificial Sequence
  Description of Artificial Sequence: Synthetic oligonucleotide
cgucacgccgaccugccgu

SEQ ID NO: 2111336 - RNA, 19 nt, Artificial Sequence
  Description of Artificial Sequence: Synthetic oligonucleotide
gcgccuagcgcgcccucua

SEQ ID NO: 2111337 - RNA, 19 nt, Artificial Sequence
  Description of Artificial Sequence: Synthetic oligonucleotide
cgcgcccucuagcgugucc

SEQ ID NO: 2111338 - RNA, 19 nt, Artificial Sequence
  Description of Artificial Sequence: Synthetic oligonucleotide
cccguccagccccggcuuc

SEQ ID NO: 2111339 - RNA, 19 nt, Artificial Sequence
  Description of Artificial Sequence: Synthetic oligonucleotide
gcgagcguaggcccauguu

SEQ ID NO: 2111340 - RNA, 19 nt, Artificial Sequence
  Description of Artificial Sequence: Synthetic oligonucleotide
cccacgcgccgaucggcca

SEQ ID NO: 2111341 - RNA, 19 nt, Artificial Sequence
  Description of Artificial Sequence: Synthetic oligonucleotide
guccugcgucgugggcuca

SEQ ID NO: 2111342 - RNA, 19 nt, Artificial Sequence
  Description of Artificial Sequence: Synthetic oligonucleotide
gggcacgugccaggcuguc

SEQ ID NO: 2111343 - RNA, 19 nt, Artificial Sequence
  Description of Artificial Sequence: Synthetic oligonucleotide
ccggcuugaccuuggcgau

SEQ ID NO: 2111344 - RNA, 19 nt, Artificial Sequence
  Description of Artificial Sequence: Synthetic oligonucleotide
ggucccggcacuggauuuu

SEQ ID NO: 2111345 - RNA, 19 nt, Artificial Sequence
  Description of Artificial Sequence: Synthetic oligonucleotide
cuggcgagcguaggcccau

SEQ ID NO: 2111346 - RNA, 19 nt, Artificial Sequence
  Description of Artificial Sequence: Synthetic oligonucleotide
gcaccgccucguggucccg

SEQ ID NO: 2111347 - RNA, 19 nt, Artificial Sequence
  Description of Artificial Sequence: Synthetic oligonucleotide
ccguuggcuggcgagcgua

SEQ ID NO: 2111348 - RNA, 19 nt, Artificial Sequence
  Description of Artificial Sequence: Synthetic oligonucleotide
caccgucguccggccgcug

SEQ ID NO: 2111349 - RNA, 19 nt, Artificial Sequence
  Description of Artificial Sequence: Synthetic oligonucleotide
ccgccguccgguggccgcc

SEQ ID NO: 2111350 - RNA, 19 nt, Artificial Sequence
  Description of Artificial Sequence: Synthetic oligonucleotide
gcgcuggcccgugccacga

SEQ ID NO: 2111351 - RNA, 19 nt, Artificial Sequence
  Description of Artificial Sequence: Synthetic oligonucleotide
cgcgcgcagcaucuccguc

SEQ ID NO: 2111352 - RNA, 19 nt, Artificial Sequence
  Description of Artificial Sequence: Synthetic oligonucleotide
ccacagcgcgcggcccagg

SEQ ID NO: 2111353 - RNA, 19 nt, Artificial Sequence
  Description of Artificial Sequence: Synthetic oligonucleotide
cggccgcuguccgcgaaac

SEQ ID NO: 2111354 - RNA, 19 nt, Artificial Sequence
  Description of Artificial Sequence: Synthetic oligonucleotide
gggccccgugcagggugcc

SEQ ID NO: 2111355 - RNA, 19 nt, Artificial Sequence
  Description of Artificial Sequence: Synthetic oligonucleotide
gccgcccgguccagggcac

SEQ ID NO: 2111356 - RNA, 19 nt, Artificial Sequence
  Description of Artificial Sequence: Synthetic oligonucleotide
cgccugagacaccgucguc

SEQ ID NO: 2111357 - RNA, 19 nt, Artificial Sequence
  Description of Artificial Sequence: Synthetic oligonucleotide
ggccgcuguccgcgaaacu

SEQ ID NO: 2111358 - RNA, 19 nt, Artificial Sequence
  Description of Artificial Sequence: Synthetic oligonucleotide
ggccaccgccaggccuggg

SEQ ID NO: 2111359 - RNA, 19 nt, Artificial Sequence
  Description of Artificial Sequence: Synthetic oligonucleotide
cccaagcgggaaccggccu

SEQ ID NO: 2111360 - RNA, 19 nt, Artificial Sequence
  Description of Artificial Sequence: Synthetic oligonucleotide
cggcgccgccguuggcugg

SEQ ID NO: 2111361 - RNA, 19 nt, Artificial Sequence
  Description of Artificial Sequence: Synthetic oligonucleotide
gcgggccaugggcgcgcug

SEQ ID NO: 2111362 - RNA, 19 nt, Artificial Sequence
  Description of Artificial Sequence: Synthetic oligonucleotide
ccgcccgguccagggcacg

SEQ ID NO: 2111363 - RNA, 19 nt, Artificial Sequence
  Description of Artificial Sequence: Synthetic oligonucleotide
guagggccgcgcgcagcau

SEQ ID NO: 2111364 - RNA, 19 nt, Artificial Sequence
  Description of Artificial Sequence: Synthetic oligonucleotide
cgcgccgaucggccaccgc

SEQ ID NO: 2111365 - RNA, 19 nt, Artificial Sequence
  Description of Artificial Sequence: Synthetic oligonucleotide
ggucuacgcggguccccuu

SEQ ID NO: 2111366 - RNA, 19 nt, Artificial Sequence
  Description of Artificial Sequence: Synthetic oligonucleotide
ccuggcccacgcgccgauc

SEQ ID NO: 2111367 - RNA, 19 nt, Artificial Sequence
  Description of Artificial Sequence: Synthetic oligonucleotide
ccggccgcuguccgcgaaa

SEQ ID NO: 2111368 - RNA, 19 nt, Artificial Sequence
  Description of Artificial Sequence: Synthetic oligonucleotide
cgccagaucucccgcgccu

SEQ ID NO: 2111369 - RNA, 19 nt, Artificial Sequence
  Description of Artificial Sequence: Synthetic oligonucleotide
ccgccucguggucccggca

SEQ ID NO: 2111370 - RNA, 19 nt, Artificial Sequence
  Description of Artificial Sequence: Synthetic oligonucleotide
ccagccccggcuucuucuu

SEQ ID NO: 2111371 - RNA, 19 nt, Artificial Sequence
  Description of Artificial Sequence: Synthetic oligonucleotide
cccgugcagggugccggga

SEQ ID NO: 2111372 - RNA, 19 nt, Artificial Sequence
  Description of Artificial Sequence: Synthetic oligonucleotide
ccgcgcgcagcaucuccgu

SEQ ID NO: 2111373 - RNA, 19 nt, Artificial Sequence
  Description of Artificial Sequence: Synthetic oligonucleotide
gcgcgcggcccaggcgcug

SEQ ID NO: 2111374 - RNA, 19 nt, Artificial Sequence
  Description of Artificial Sequence: Synthetic oligonucleotide
ccgcgccuagcgcgcccuc

SEQ ID NO: 2111375 - RNA, 19 nt, Artificial Sequence
  Description of Artificial Sequence: Synthetic oligonucleotide
gccuggcccacgcgccgau

SEQ ID NO: 2111376 - RNA, 19 nt, Artificial Sequence
  Description of Artificial Sequence: Synthetic oligonucleotide
cgccguccgguggccgccc

SEQ ID NO: 2111377 - RNA, 19 nt, Artificial Sequence
  Description of Artificial Sequence: Synthetic oligonucleotide
cgcugguguuacugccagu

SEQ ID NO: 2111378 - RNA, 19 nt, Artificial Sequence
  Description of Artificial Sequence: Synthetic oligonucleotide
gggugccgggacacugguu

SEQ ID NO: 2111379 - RNA, 19 nt, Artificial Sequence
  Description of Artificial Sequence: Synthetic oligonucleotide
gcgcgcccucuagcguguc

SEQ ID NO: 2111380 - RNA, 19 nt, Artificial Sequence
  Description of Artificial Sequence: Synthetic oligonucleotide
cgccgaccugccguaggaa

SEQ ID NO: 2111381 - RNA, 19 nt, Artificial Sequence
  Description of Artificial Sequence: Synthetic oligonucleotide
gccgugucuccagcaccuu

SEQ ID NO: 2111382 - RNA, 19 nt, Artificial Sequence
  Description of Artificial Sequence: Synthetic oligonucleotide
cguccgguggccgcccggu

SEQ ID NO: 2111383 - RNA, 19 nt, Artificial Sequence
  Description of Artificial Sequence: Synthetic oligonucleotide
gcgcggcccaggcgcugcu

SEQ ID NO: 2111384 - RNA, 19 nt, Artificial Sequence
  Description of Artificial Sequence: Synthetic oligonucleotide
cgcuggcccgugccacgaa

SEQ ID NO: 2111385 - RNA, 19 nt, Artificial Sequence
  Description of Artificial Sequence: Synthetic oligonucleotide
cgcgccuagcgcgcccucu

SEQ ID NO: 2111386 - RNA, 19 nt, Artificial Sequence
  Description of Artificial Sequence: Synthetic oligonucleotide
ccgccgccugagacaccgu

SEQ ID NO: 2111387 - RNA, 19 nt, Artificial Sequence
  Description of Artificial Sequence: Synthetic oligonucleotide
cgcccgguccagggcacgu

SEQ ID NO: 2111388 - RNA, 19 nt, Artificial Sequence
  Description of Artificial Sequence: Synthetic oligonucleotide
cgcgggccaugggcgcgcu

SEQ ID NO: 2111389 - RNA, 19 nt, Artificial Sequence
  Description of Artificial Sequence: Synthetic oligonucleotide
aaggcaaagagguuguugg

SEQ ID NO: 2111390 - RNA, 19 nt, Artificial Sequence
  Description of Artificial Sequence: Synthetic oligonucleotide
uauaguaugcagaagggga

SEQ ID NO: 2111391 - RNA, 19 nt, Artificial Sequence
  Description of Artificial Sequence: Synthetic oligonucleotide
ugcaguucuaggaagaagc

SEQ ID NO: 2111392 - RNA, 19 nt, Artificial Sequence
  Description of Artificial Sequence: Synthetic oligonucleotide
aguucuaggaagaagcgcc

SEQ ID NO: 2111393 - RNA, 19 nt, Artificial Sequence
  Description of Artificial Sequence: Synthetic oligonucleotide
guuguuuucauucagggaa

SEQ ID NO: 2111394 - RNA, 19 nt, Artificial Sequence
  Description of Artificial Sequence: Synthetic oligonucleotide
gaguuguuuucauucaggg

SEQ ID NO: 2111395 - RNA, 19 nt, Artificial Sequence
  Description of Artificial Sequence: Synthetic oligonucleotide
cuuauaguaugcagaaggg

SEQ ID NO: 2111396 - RNA, 19 nt, Artificial Sequence
  Description of Artificial Sequence: Synthetic oligonucleotide
gaacggaacagcuccaagg

SEQ ID NO: 2111397 - RNA, 19 nt, Artificial Sequence
  Description of Artificial Sequence: Synthetic oligonucleotide
uguggaguuguuuucauuc

SEQ ID NO: 2111398 - RNA, 19 nt, Artificial Sequence
  Description of Artificial Sequence: Synthetic oligonucleotide
ccuuauaguaugcagaagg

SEQ ID NO: 2111399 - RNA, 19 nt, Artificial Sequence
  Description of Artificial Sequence: Synthetic oligonucleotide
gagaugaagauguuuccug

SEQ ID NO: 2111400 - RNA, 19 nt, Artificial Sequence
  Description of Artificial Sequence: Synthetic oligonucleotide
ucauucagggaacggaaca

SEQ ID NO: 2111401 - RNA, 19 nt, Artificial Sequence
  Description of Artificial Sequence: Synthetic oligonucleotide
uuuucauucagggaacgga

SEQ ID NO: 2111402 - RNA, 19 nt, Artificial Sequence
  Description of Artificial Sequence: Synthetic oligonucleotide
gaagauguuuccuguggag

SEQ ID NO: 2111403 - RNA, 19 nt, Artificial Sequence
  Description of Artificial Sequence: Synthetic oligonucleotide
acagcuccaaggcaaagag

SEQ ID NO: 2111404 - RNA, 19 nt, Artificial Sequence
  Description of Artificial Sequence: Synthetic oligonucleotide
uaggaagaagcgcccaggg

SEQ ID NO: 2111405 - RNA, 19 nt, Artificial Sequence
  Description of Artificial Sequence: Synthetic oligonucleotide
uuucauucagggaacggaa

SEQ ID NO: 2111406 - RNA, 19 nt, Artificial Sequence
  Description of Artificial Sequence: Synthetic oligonucleotide
gaaugugggaggcuccacg

SEQ ID NO: 2111407 - RNA, 19 nt, Artificial Sequence
  Description of Artificial Sequence: Synthetic oligonucleotide
ugaagauguuuccugugga

SEQ ID NO: 2111408 - RNA, 19 nt, Artificial Sequence
  Description of Artificial Sequence: Synthetic oligonucleotide
uggaguuguuuucauucag

SEQ ID NO: 2111409 - RNA, 19 nt, Artificial Sequence
  Description of Artificial Sequence: Synthetic oligonucleotide
ggaagaagcgcccagggcc

SEQ ID NO: 2111410 - RNA, 19 nt, Artificial Sequence
  Description of Artificial Sequence: Synthetic oligonucleotide
aaugugggaggcuccacgu

SEQ ID NO: 2111411 - RNA, 19 nt, Artificial Sequence
  Description of Artificial Sequence: Synthetic oligonucleotide
gagagaugaagauguuucc

SEQ ID NO: 2111412 - RNA, 19 nt, Artificial Sequence
  Description of Artificial Sequence: Synthetic oligonucleotide
cagggaacggaacagcucc

SEQ ID NO: 2111413 - RNA, 19 nt, Artificial Sequence
  Description of Artificial Sequence: Synthetic oligonucleotide
gaugaagauguuuccugug

SEQ ID NO: 2111414 - RNA, 19 nt, Artificial Sequence
  Description of Artificial Sequence: Synthetic oligonucleotide
ucuaggaagaagcgcccag

SEQ ID NO: 2111415 - RNA, 19 nt, Artificial Sequence
  Description of Artificial Sequence: Synthetic oligonucleotide
agaugaagauguuuccugu

SEQ ID NO: 2111416 - RNA, 19 nt, Artificial Sequence
  Description of Artificial Sequence: Synthetic oligonucleotide
aagauguuuccuguggagu

SEQ ID NO: 2111417 - RNA, 19 nt, Artificial Sequence
  Description of Artificial Sequence: Synthetic oligonucleotide
aggaagaagcgcccagggc

SEQ ID NO: 2111418 - RNA, 19 nt, Artificial Sequence
  Description of Artificial Sequence: Synthetic oligonucleotide
guuggcugugcucagcugc

SEQ ID NO: 2111419 - RNA, 19 nt, Artificial Sequence
  Description of Artificial Sequence: Synthetic oligonucleotide
aagagguuguuggcugugc

SEQ ID NO: 2111420 - RNA, 19 nt, Artificial Sequence
  Description of Artificial Sequence: Synthetic oligonucleotide
auucagggaacggaacagc

SEQ ID NO: 2111421 - RNA, 19 nt, Artificial Sequence
  Description of Artificial Sequence: Synthetic oligonucleotide
uguuuucauucagggaacg

SEQ ID NO: 2111422 - RNA, 19 nt, Artificial Sequence
  Description of Artificial Sequence: Synthetic oligonucleotide
aggcaaagagguuguuggc

SEQ ID NO: 2111423 - RNA, 19 nt, Artificial Sequence
  Description of Artificial Sequence: Synthetic oligonucleotide
uucagggaacggaacagcu

SEQ ID NO: 2111424 - RNA, 19 nt, Artificial Sequence
  Description of Artificial Sequence: Synthetic oligonucleotide
agcuccaaggcaaagaggu

SEQ ID NO: 2111425 - RNA, 19 nt, Artificial Sequence
  Description of Artificial Sequence: Synthetic oligonucleotide
agcuguagcccuuauagua

SEQ ID NO: 2111426 - RNA, 19 nt, Artificial Sequence
  Description of Artificial Sequence: Synthetic oligonucleotide
aguuguuuucauucaggga

SEQ ID NO: 2111427 - RNA, 19 nt, Artificial Sequence
  Description of Artificial Sequence: Synthetic oligonucleotide
ugcuguagcagguccagcu

SEQ ID NO: 2111428 - RNA, 19 nt, Artificial Sequence
  Description of Artificial Sequence: Synthetic oligonucleotide
auaguaugcagaaggggag

SEQ ID NO: 2111429 - RNA, 19 nt, Artificial Sequence
  Description of Artificial Sequence: Synthetic oligonucleotide
uagcccuuauaguaugcag

SEQ ID NO: 2111430 - RNA, 19 nt, Artificial Sequence
  Description of Artificial Sequence: Synthetic oligonucleotide
ucagaaugugggaggcucc

SEQ ID NO: 2111431 - RNA, 19 nt, Artificial Sequence
  Description of Artificial Sequence: Synthetic oligonucleotide
uucauucagggaacggaac

SEQ ID NO: 2111432 - RNA, 19 nt, Artificial Sequence
  Description of Artificial Sequence: Synthetic oligonucleotide
uguagcccuuauaguaugc

SEQ ID NO: 2111433 - RNA, 19 nt, Artificial Sequence
  Description of Artificial Sequence: Synthetic oligonucleotide
ccagcuguagcccuuauag

SEQ ID NO: 2111434 - RNA, 19 nt, Artificial Sequence
  Description of Artificial Sequence: Synthetic oligonucleotide
uucagaaugugggaggcuc

SEQ ID NO: 2111435 - RNA, 19 nt, Artificial Sequence
  Description of Artificial Sequence: Synthetic oligonucleotide
aacagcuccaaggcaaaga

SEQ ID NO: 2111436 - RNA, 19 nt, Artificial Sequence
  Description of Artificial Sequence: Synthetic oligonucleotide
aaggggagugucguccugg

SEQ ID NO: 2111437 - RNA, 19 nt, Artificial Sequence
  Description of Artificial Sequence: Synthetic oligonucleotide
ugcugcaguucuaggaaga

SEQ ID NO: 2111438 - RNA, 19 nt, Artificial Sequence
  Description of Artificial Sequence: Synthetic oligonucleotide
agagaugaagauguuuccu

SEQ ID NO: 2111439 - RNA, 19 nt, Artificial Sequence
  Description of Artificial Sequence: Synthetic oligonucleotide
uuguuggcugugcucagcu

SEQ ID NO: 2111440 - RNA, 19 nt, Artificial Sequence
  Description of Artificial Sequence: Synthetic oligonucleotide
agauguuuccuguggaguu

SEQ ID NO: 2111441 - RNA, 19 nt, Artificial Sequence
  Description of Artificial Sequence: Synthetic oligonucleotide
uggugaaggcugcuguagc

SEQ ID NO: 2111442 - RNA, 19 nt, Artificial Sequence
  Description of Artificial Sequence: Synthetic oligonucleotide
cuguagcagguccagcucc

SEQ ID NO: 2111443 - RNA, 19 nt, Artificial Sequence
  Description of Artificial Sequence: Synthetic oligonucleotide
cuccaaggcaaagagguug

SEQ ID NO: 2111444 - RNA, 19 nt, Artificial Sequence
  Description of Artificial Sequence: Synthetic oligonucleotide
agcugcugcaguucuagga

SEQ ID NO: 2111445 - RNA, 19 nt, Artificial Sequence
  Description of Artificial Sequence: Synthetic oligonucleotide
guuuucauucagggaacgg

SEQ ID NO: 2111446 - RNA, 19 nt, Artificial Sequence
  Description of Artificial Sequence: Synthetic oligonucleotide
uguagcagguccagcucca

SEQ ID NO: 2111447 - RNA, 19 nt, Artificial Sequence
  Description of Artificial Sequence: Synthetic oligonucleotide
cauucagggaacggaacag

SEQ ID NO: 2111448 - RNA, 19 nt, Artificial Sequence
  Description of Artificial Sequence: Synthetic oligonucleotide
uaugcagaaggggaguguc

SEQ ID NO: 2111449 - RNA, 19 nt, Artificial Sequence
  Description of Artificial Sequence: Synthetic oligonucleotide
gauguuuccuguggaguug

SEQ ID NO: 2111450 - RNA, 19 nt, Artificial Sequence
  Description of Artificial Sequence: Synthetic oligonucleotide
aaagagguuguuggcugug

SEQ ID NO: 2111451 - RNA, 19 nt, Artificial Sequence
  Description of Artificial Sequence: Synthetic oligonucleotide
cuaggaagaagcgcccagg

SEQ ID NO: 2111452 - RNA, 19 nt, Artificial Sequence
  Description of Artificial Sequence: Synthetic oligonucleotide
cagaaggggagugucgucc

SEQ ID NO: 2111453 - RNA, 19 nt, Artificial Sequence
  Description of Artificial Sequence: Synthetic oligonucleotide
ggaguuguuuucauucagg

SEQ ID NO: 2111454 - RNA, 19 nt, Artificial Sequence
  Description of Artificial Sequence: Synthetic oligonucleotide
agguuguuggcugugcuca

SEQ ID NO: 2111455 - RNA, 19 nt, Artificial Sequence
  Description of Artificial Sequence: Synthetic oligonucleotide
aggggagugucguccuggc

SEQ ID NO: 2111456 - RNA, 19 nt, Artificial Sequence
  Description of Artificial Sequence: Synthetic oligonucleotide
aaggcugcuguagcagguc

SEQ ID NO: 2111457 - RNA, 19 nt, Artificial Sequence
  Description of Artificial Sequence: Synthetic oligonucleotide
ggaggcuccacguuugccc

SEQ ID NO: 2111458 - RNA, 19 nt, Artificial Sequence
  Description of Artificial Sequence: Synthetic oligonucleotide
ugcagaaggggagugucgu

SEQ ID NO: 2111459 - RNA, 19 nt, Artificial Sequence
  Description of Artificial Sequence: Synthetic oligonucleotide
caguucuaggaagaagcgc

SEQ ID NO: 2111460 - RNA, 19 nt, Artificial Sequence
  Description of Artificial Sequence: Synthetic oligonucleotide
auggugaaggcugcuguag

SEQ ID NO: 2111461 - RNA, 19 nt, Artificial Sequence
  Description of Artificial Sequence: Synthetic oligonucleotide
aguaugcagaaggggagug

SEQ ID NO: 2111462 - RNA, 19 nt, Artificial Sequence
  Description of Artificial Sequence: Synthetic oligonucleotide
cuguagcccuuauaguaug

SEQ ID NO: 2111463 - RNA, 19 nt, Artificial Sequence
  Description of Artificial Sequence: Synthetic oligonucleotide
agagguuguuggcugugcu

SEQ ID NO: 2111464 - RNA, 19 nt, Artificial Sequence
  Description of Artificial Sequence: Synthetic oligonucleotide
cucagcugcuccaugguga

SEQ ID NO: 2111465 - RNA, 19 nt, Artificial Sequence
  Description of Artificial Sequence: Synthetic oligonucleotide
uccuguggaguuguuuuca

SEQ ID NO: 2111466 - RNA, 19 nt, Artificial Sequence
  Description of Artificial Sequence: Synthetic oligonucleotide
agcccuuauaguaugcaga

SEQ ID NO: 2111467 - RNA, 19 nt, Artificial Sequence
  Description of Artificial Sequence: Synthetic oligonucleotide
cagcuccaaggcaaagagg

SEQ ID NO: 2111468 - RNA, 19 nt, Artificial Sequence
  Description of Artificial Sequence: Synthetic oligonucleotide
uaguaugcagaaggggagu

SEQ ID NO: 2111469 - RNA, 19 nt, Artificial Sequence
  Description of Artificial Sequence: Synthetic oligonucleotide
cugcugcaguucuaggaag

SEQ ID NO: 2111470 - RNA, 19 nt, Artificial Sequence
  Description of Artificial Sequence: Synthetic oligonucleotide
gagguuguuggcugugcuc

SEQ ID NO: 2111471 - RNA, 19 nt, Artificial Sequence
  Description of Artificial Sequence: Synthetic oligonucleotide
guggaguuguuuucauuca

SEQ ID NO: 2111472 - RNA, 19 nt, Artificial Sequence
  Description of Artificial Sequence: Synthetic oligonucleotide
agaaggggagugucguccu

SEQ ID NO: 2111473 - RNA, 19 nt, Artificial Sequence
  Description of Artificial Sequence: Synthetic oligonucleotide
uccauggugaaggcugcug

SEQ ID NO: 2111474 - RNA, 19 nt, Artificial Sequence
  Description of Artificial Sequence: Synthetic oligonucleotide
uucuaggaagaagcgccca

SEQ ID NO: 2111475 - RNA, 19 nt, Artificial Sequence
  Description of Artificial Sequence: Synthetic oligonucleotide
uuccuguggaguuguuuuc

SEQ ID NO: 2111476 - RNA, 19 nt, Artificial Sequence
  Description of Artificial Sequence: Synthetic oligonucleotide
agaaugugggaggcuccac

SEQ ID NO: 2111477 - RNA, 19 nt, Artificial Sequence
  Description of Artificial Sequence: Synthetic oligonucleotide
guucuaggaagaagcgccc

SEQ ID NO: 2111478 - RNA, 19 nt, Artificial Sequence
  Description of Artificial Sequence: Synthetic oligonucleotide
uguuggcugugcucagcug

SEQ ID NO: 2111479 - RNA, 19 nt, Artificial Sequence
  Description of Artificial Sequence: Synthetic oligonucleotide
gcaguucuaggaagaagcg

SEQ ID NO: 2111480 - RNA, 19 nt, Artificial Sequence
  Description of Artificial Sequence: Synthetic oligonucleotide
acggaacagcuccaaggca

SEQ ID NO: 2111481 - RNA, 19 nt, Artificial Sequence
  Description of Artificial Sequence: Synthetic oligonucleotide
gaggcuccacguuugccca

SEQ ID NO: 2111482 - RNA, 19 nt, Artificial Sequence
  Description of Artificial Sequence: Synthetic oligonucleotide
cugcaguucuaggaagaag

SEQ ID NO: 2111483 - RNA, 19 nt, Artificial Sequence
  Description of Artificial Sequence: Synthetic oligonucleotide
augcagaaggggagugucg

SEQ ID NO: 2111484 - RNA, 19 nt, Artificial Sequence
  Description of Artificial Sequence: Synthetic oligonucleotide
gaacagcuccaaggcaaag

SEQ ID NO: 2111485 - RNA, 19 nt, Artificial Sequence
  Description of Artificial Sequence: Synthetic oligonucleotide
ggaacggaacagcuccaag

SEQ ID NO: 2111486 - RNA, 19 nt, Artificial Sequence
  Description of Artificial Sequence: Synthetic oligonucleotide
agcgcccagggccagcugu

SEQ ID NO: 2111487 - RNA, 19 nt, Artificial Sequence
  Description of Artificial Sequence: Synthetic oligonucleotide
gaaggggagugucguccug

SEQ ID NO: 2111488 - RNA, 19 nt, Artificial Sequence
  Description of Artificial Sequence: Synthetic oligonucleotide
ugggaggcuccacguuugc

SEQ ID NO: 2111489 - RNA, 19 nt, Artificial Sequence
  Description of Artificial Sequence: Synthetic oligonucleotide
ggugaaggcugcuguagca

SEQ ID NO: 2111490 - RNA, 19 nt, Artificial Sequence
  Description of Artificial Sequence: Synthetic oligonucleotide
guagcccuuauaguaugca

SEQ ID NO: 2111491 - RNA, 19 nt, Artificial Sequence
  Description of Artificial Sequence: Synthetic oligonucleotide
guuguuggcugugcucagc

SEQ ID NO: 2111492 - RNA, 19 nt, Artificial Sequence
  Description of Artificial Sequence: Synthetic oligonucleotide
cccagggccagcuguagcc

SEQ ID NO: 2111493 - RNA, 19 nt, Artificial Sequence
  Description of Artificial Sequence: Synthetic oligonucleotide
gcccuuauaguaugcagaa

SEQ ID NO: 2111494 - RNA, 19 nt, Artificial Sequence
  Description of Artificial Sequence: Synthetic oligonucleotide
cagcugcugcaguucuagg

SEQ ID NO: 2111495 - RNA, 19 nt, Artificial Sequence
  Description of Artificial Sequence: Synthetic oligonucleotide
agaagcgcccagggccagc

SEQ ID NO: 2111496 - RNA, 19 nt, Artificial Sequence
  Description of Artificial Sequence: Synthetic oligonucleotide
ggcugugcucagcugcucc

SEQ ID NO: 2111497 - RNA, 19 nt, Artificial Sequence
  Description of Artificial Sequence: Synthetic oligonucleotide
gguuguuggcugugcucag

SEQ ID NO: 2111498 - RNA, 19 nt, Artificial Sequence
  Description of Artificial Sequence: Synthetic oligonucleotide
gugggaggcuccacguuug

SEQ ID NO: 2111499 - RNA, 19 nt, Artificial Sequence
  Description of Artificial Sequence: Synthetic oligonucleotide
cauggugaaggcugcugua

SEQ ID NO: 2111500 - RNA, 19 nt, Artificial Sequence
  Description of Artificial Sequence: Synthetic oligonucleotide
gcucagcugcuccauggug

SEQ ID NO: 2111501 - RNA, 19 nt, Artificial Sequence
  Description of Artificial Sequence: Synthetic oligonucleotide
uccagcugcugcaguucua

SEQ ID NO: 2111502 - RNA, 19 nt, Artificial Sequence
  Description of Artificial Sequence: Synthetic oligonucleotide
guagcagguccagcuccag

SEQ ID NO: 2111503 - RNA, 19 nt, Artificial Sequence
  Description of Artificial Sequence: Synthetic oligonucleotide
augugggaggcuccacguu

SEQ ID NO: 2111504 - RNA, 19 nt, Artificial Sequence
  Description of Artificial Sequence: Synthetic oligonucleotide
uguuuccuguggaguuguu

SEQ ID NO: 2111505 - RNA, 19 nt, Artificial Sequence
  Description of Artificial Sequence: Synthetic oligonucleotide
cagaaugugggaggcucca

SEQ ID NO: 2111506 - RNA, 19 nt, Artificial Sequence
  Description of Artificial Sequence: Synthetic oligonucleotide
aagcgcccagggccagcug

SEQ ID NO: 2111507 - RNA, 19 nt, Artificial Sequence
  Description of Artificial Sequence: Synthetic oligonucleotide
cugcuguagcagguccagc

SEQ ID NO: 2111508 - RNA, 19 nt, Artificial Sequence
  Description of Artificial Sequence: Synthetic oligonucleotide
agggaacggaacagcucca

SEQ ID NO: 2111509 - RNA, 19 nt, Artificial Sequence
  Description of Artificial Sequence: Synthetic oligonucleotide
cggaacagcuccaaggcaa

SEQ ID NO: 2111510 - RNA, 19 nt, Artificial Sequence
  Description of Artificial Sequence: Synthetic oligonucleotide
guaugcagaaggggagugu

SEQ ID NO: 2111511 - RNA, 19 nt, Artificial Sequence
  Description of Artificial Sequence: Synthetic oligonucleotide
cagcuguagcccuuauagu

SEQ ID NO: 2111512 - RNA, 19 nt, Artificial Sequence
  Description of Artificial Sequence: Synthetic oligonucleotide
gaagcgcccagggccagcu

SEQ ID NO: 2111513 - RNA, 19 nt, Artificial Sequence
  Description of Artificial Sequence: Synthetic oligonucleotide
gcagaaggggagugucguc

SEQ ID NO: 2111514 - RNA, 19 nt, Artificial Sequence
  Description of Artificial Sequence: Synthetic oligonucleotide
guuuccuguggaguuguuu

SEQ ID NO: 2111515 - RNA, 19 nt, Artificial Sequence
  Description of Artificial Sequence: Synthetic oligonucleotide
gggaggcuccacguuugcc

SEQ ID NO: 2111516 - RNA, 19 nt, Artificial Sequence
  Description of Artificial Sequence: Synthetic oligonucleotide
gcuguagcccuuauaguau

SEQ ID NO: 2111517 - RNA, 19 nt, Artificial Sequence
  Description of Artificial Sequence: Synthetic oligonucleotide
uggcugugcucagcugcuc

SEQ ID NO: 2111518 - RNA, 19 nt, Artificial Sequence
  Description of Artificial Sequence: Synthetic oligonucleotide
gcugcaguucuaggaagaa

SEQ ID NO: 2111519 - RNA, 19 nt, Artificial Sequence
  Description of Artificial Sequence: Synthetic oligonucleotide
agggagagaugaagauguu

SEQ ID NO: 2111520 - RNA, 19 nt, Artificial Sequence
  Description of Artificial Sequence: Synthetic oligonucleotide
cuguggaguuguuuucauu

SEQ ID NO: 2111521 - RNA, 19 nt, Artificial Sequence
  Description of Artificial Sequence: Synthetic oligonucleotide
gggagagaugaagauguuu

SEQ ID NO: 2111522 - RNA, 19 nt, Artificial Sequence
  Description of Artificial Sequence: Synthetic oligonucleotide
ggggagugucguccuggca

SEQ ID NO: 2111523 - RNA, 19 nt, Artificial Sequence
  Description of Artificial Sequence: Synthetic oligonucleotide
gggaacggaacagcuccaa

SEQ ID NO: 2111524 - RNA, 19 nt, Artificial Sequence
  Description of Artificial Sequence: Synthetic oligonucleotide
gccagcuguagcccuuaua

SEQ ID NO: 2111525 - RNA, 19 nt, Artificial Sequence
  Description of Artificial Sequence: Synthetic oligonucleotide
agggccagcuguagcccuu

SEQ ID NO: 2111526 - RNA, 19 nt, Artificial Sequence
  Description of Artificial Sequence: Synthetic oligonucleotide
ccuguggaguuguuuucau

SEQ ID NO: 2111527 - RNA, 19 nt, Artificial Sequence
  Description of Artificial Sequence: Synthetic oligonucleotide
cuccauggugaaggcugcu

SEQ ID NO: 2111528 - RNA, 19 nt, Artificial Sequence
  Description of Artificial Sequence: Synthetic oligonucleotide
gcuccaaggcaaagagguu

SEQ ID NO: 2111529 - RNA, 19 nt, Artificial Sequence
  Description of Artificial Sequence: Synthetic oligonucleotide
cgcccagggccagcuguag

SEQ ID NO: 2111530 - RNA, 19 nt, Artificial Sequence
  Description of Artificial Sequence: Synthetic oligonucleotide
gcgcccagggccagcugua

SEQ ID NO: 2111531 - RNA, 19 nt, Artificial Sequence
  Description of Artificial Sequence: Synthetic oligonucleotide
ccaaggcaaagagguuguu

SEQ ID NO: 2111532 - RNA, 19 nt, Artificial Sequence
  Description of Artificial Sequence: Synthetic oligonucleotide
uucauuugagcuuugaagg

SEQ ID NO: 2111533 - RNA, 19 nt, Artificial Sequence
  Description of Artificial Sequence: Synthetic oligonucleotide
uuuaaggcuauucagaaac

SEQ ID NO: 2111534 - RNA, 19 nt, Artificial Sequence
  Description of Artificial Sequence: Synthetic oligonucleotide
uuaauuuugcaauagcagc

SEQ ID NO: 2111535 - RNA, 19 nt, Artificial Sequence
  Description of Artificial Sequence: Synthetic oligonucleotide
ucaguuuuggucuuggcgg

SEQ ID NO: 2111536 - RNA, 19 nt, Artificial Sequence
  Description of Artificial Sequence: Synthetic oligonucleotide
aaugcuuaaguucgggcuc

SEQ ID NO: 2111537 - RNA, 19 nt, Artificial Sequence
  Description of Artificial Sequence: Synthetic oligonucleotide
uuauuuaaggcuauucaga

SEQ ID NO: 2111538 - RNA, 19 nt, Artificial Sequence
  Description of Artificial Sequence: Synthetic oligonucleotide
guuauuuaaggcuauucag

SEQ ID NO: 2111539 - RNA, 19 nt, Artificial Sequence
  Description of Artificial Sequence: Synthetic oligonucleotide
uacaauacuguuuggaucu

SEQ ID NO: 2111540 - RNA, 19 nt, Artificial Sequence
  Description of Artificial Sequence: Synthetic oligonucleotide
ucuuacacgucacuacucg

SEQ ID NO: 2111541 - RNA, 19 nt, Artificial Sequence
  Description of Artificial Sequence: Synthetic oligonucleotide
auggagauuaugcuguucg

SEQ ID NO: 2111542 - RNA, 19 nt, Artificial Sequence
  Description of Artificial Sequence: Synthetic oligonucleotide
uaauuuugcaauagcagcu

SEQ ID NO: 2111543 - RNA, 19 nt, Artificial Sequence
  Description of Artificial Sequence: Synthetic oligonucleotide
agccacaagaaguaaggcc

SEQ ID NO: 2111544 - RNA, 19 nt, Artificial Sequence
  Description of Artificial Sequence: Synthetic oligonucleotide
aaaccuggcaugcucuucg

SEQ ID NO: 2111545 - RNA, 19 nt, Artificial Sequence
  Description of Artificial Sequence: Synthetic oligonucleotide
uuucagagccacaagaagu

SEQ ID NO: 2111546 - RNA, 19 nt, Artificial Sequence
  Description of Artificial Sequence: Synthetic oligonucleotide
uauuacaccugaaaccuug

SEQ ID NO: 2111547 - RNA, 19 nt, Artificial Sequence
  Description of Artificial Sequence: Synthetic oligonucleotide
aauucccugaacuccucgg

SEQ ID NO: 2111548 - RNA, 19 nt, Artificial Sequence
  Description of Artificial Sequence: Synthetic oligonucleotide
agggagauaguccuguuuc

SEQ ID NO: 2111549 - RNA, 19 nt, Artificial Sequence
  Description of Artificial Sequence: Synthetic oligonucleotide
auggacauggcacugccgg

SEQ ID NO: 2111550 - RNA, 19 nt, Artificial Sequence
  Description of Artificial Sequence: Synthetic oligonucleotide
uauucagaaaccuggcaug

SEQ ID NO: 2111551 - RNA, 19 nt, Artificial Sequence
  Description of Artificial Sequence: Synthetic oligonucleotide
uccuguuuccacaagggca

SEQ ID NO: 2111552 - RNA, 19 nt, Artificial Sequence
  Description of Artificial Sequence: Synthetic oligonucleotide
uuauuugggagccugucaa

SEQ ID NO: 2111553 - RNA, 19 nt, Artificial Sequence
  Description of Artificial Sequence: Synthetic oligonucleotide
uuaugcuguucgcugaugc

SEQ ID NO: 2111554 - RNA, 19 nt, Artificial Sequence
  Description of Artificial Sequence: Synthetic oligonucleotide
uuugcaauagcagcuaacu

SEQ ID NO: 2111555 - RNA, 19 nt, Artificial Sequence
  Description of Artificial Sequence: Synthetic oligonucleotide
ugcagagauagacuggaug

SEQ ID NO: 2111556 - RNA, 19 nt, Artificial Sequence
  Description of Artificial Sequence: Synthetic oligonucleotide
gagauuaugcuguucgcug

SEQ ID NO: 2111557 - RNA, 19 nt, Artificial Sequence
  Description of Artificial Sequence: Synthetic oligonucleotide
aucguuucuguauuucuuc

SEQ ID NO: 2111558 - RNA, 19 nt, Artificial Sequence
  Description of Artificial Sequence: Synthetic oligonucleotide
aaggccggucaugagaacc

SEQ ID NO: 2111559 - RNA, 19 nt, Artificial Sequence
  Description of Artificial Sequence: Synthetic oligonucleotide
caagcuuaggcaucugugg

SEQ ID NO: 2111560 - RNA, 19 nt, Artificial Sequence
  Description of Artificial Sequence: Synthetic oligonucleotide
uccagcuacaucuuggggu

SEQ ID NO: 2111561 - RNA, 19 nt, Artificial Sequence
  Description of Artificial Sequence: Synthetic oligonucleotide
auuuguagaggccacaauu

SEQ ID NO: 2111562 - RNA, 19 nt, Artificial Sequence
  Description of Artificial Sequence: Synthetic oligonucleotide
uuacaauacuguuuggauc

SEQ ID NO: 2111563 - RNA, 19 nt, Artificial Sequence
  Description of Artificial Sequence: Synthetic oligonucleotide
aaccuggggaacucugccc

SEQ ID NO: 2111564 - RNA, 19 nt, Artificial Sequence
  Description of Artificial Sequence: Synthetic oligonucleotide
ugucaagggagauaguccu

SEQ ID NO: 2111565 - RNA, 19 nt, Artificial Sequence
  Description of Artificial Sequence: Synthetic oligonucleotide
ugcagugcuuauuugggag

SEQ ID NO: 2111566 - RNA, 19 nt, Artificial Sequence
  Description of Artificial Sequence: Synthetic oligonucleotide
ucccuauuacaccugaaac

SEQ ID NO: 2111567 - RNA, 19 nt, Artificial Sequence
  Description of Artificial Sequence: Synthetic oligonucleotide
uuacacgucacuacucggc

SEQ ID NO: 2111568 - RNA, 19 nt, Artificial Sequence
  Description of Artificial Sequence: Synthetic oligonucleotide
acugucgagauggacaugg

SEQ ID NO: 2111569 - RNA, 19 nt, Artificial Sequence
  Description of Artificial Sequence: Synthetic oligonucleotide
uuuacuggcaggcuccaac

SEQ ID NO: 2111570 - RNA, 19 nt, Artificial Sequence
  Description of Artificial Sequence: Synthetic oligonucleotide
aguucgaggagacugggca

SEQ ID NO: 2111571 - RNA, 19 nt, Artificial Sequence
  Description of Artificial Sequence: Synthetic oligonucleotide
agauggacauggcacugcc

SEQ ID NO: 2111572 - RNA, 19 nt, Artificial Sequence
  Description of Artificial Sequence: Synthetic oligonucleotide
aagacaagcucuucuggga

SEQ ID NO: 2111573 - RNA, 19 nt, Artificial Sequence
  Description of Artificial Sequence: Synthetic oligonucleotide
auuacugcagugcuuauuu

SEQ ID NO: 2111574 - RNA, 19 nt, Artificial Sequence
  Description of Artificial Sequence: Synthetic oligonucleotide
uuaaguucgggcuccaaau

SEQ ID NO: 2111575 - RNA, 19 nt, Artificial Sequence
  Description of Artificial Sequence: Synthetic oligonucleotide
ggcuaaaugcuuaaguucg

SEQ ID NO: 2111576 - RNA, 19 nt, Artificial Sequence
  Description of Artificial Sequence: Synthetic oligonucleotide
auucagaaaccuggcaugc

SEQ ID NO: 2111577 - RNA, 19 nt, Artificial Sequence
  Description of Artificial Sequence: Synthetic oligonucleotide
uguugcuucaagagggcug

SEQ ID NO: 2111578 - RNA, 19 nt, Artificial Sequence
  Description of Artificial Sequence: Synthetic oligonucleotide
acucaucuucaguaggaac

SEQ ID NO: 2111579 - RNA, 19 nt, Artificial Sequence
  Description of Artificial Sequence: Synthetic oligonucleotide
ucgccucucggcaacaggg

SEQ ID NO: 2111580 - RNA, 19 nt, Artificial Sequence
  Description of Artificial Sequence: Synthetic oligonucleotide
uuugggagccugucaaggg

SEQ ID NO: 2111581 - RNA, 19 nt, Artificial Sequence
  Description of Artificial Sequence: Synthetic oligonucleotide
aaagagaacgucauccccu

SEQ ID NO: 2111582 - RNA, 19 nt, Artificial Sequence
  Description of Artificial Sequence: Synthetic oligonucleotide
aaguucgggcuccaaaugu

SEQ ID NO: 2111583 - RNA, 19 nt, Artificial Sequence
  Description of Artificial Sequence: Synthetic oligonucleotide
acgucuuacacgucacuac

SEQ ID NO: 2111584 - RNA, 19 nt, Artificial Sequence
  Description of Artificial Sequence: Synthetic oligonucleotide
uuaaggcuauucagaaacc

SEQ ID NO: 2111585 - RNA, 19 nt, Artificial Sequence
  Description of Artificial Sequence: Synthetic oligonucleotide
ucauuugagcuuugaagga

SEQ ID NO: 2111586 - RNA, 19 nt, Artificial Sequence
  Description of Artificial Sequence: Synthetic oligonucleotide
guagaggccacaauuacug

SEQ ID NO: 2111587 - RNA, 19 nt, Artificial Sequence
  Description of Artificial Sequence: Synthetic oligonucleotide
ugugguucuuuccaaccug

SEQ ID NO: 2111588 - RNA, 19 nt, Artificial Sequence
  Description of Artificial Sequence: Synthetic oligonucleotide
uguagaggccacaauuacu

SEQ ID NO: 2111589 - RNA, 19 nt, Artificial Sequence
  Description of Artificial Sequence: Synthetic oligonucleotide
aagcuuaggcaucuguggu

SEQ ID NO: 2111590 - RNA, 19 nt, Artificial Sequence
  Description of Artificial Sequence: Synthetic oligonucleotide
uuggcuaaaugcuuaaguu

SEQ ID NO: 2111591 - RNA, 19 nt, Artificial Sequence
  Description of Artificial Sequence: Synthetic oligonucleotide
uugagcuuugaaggaaucg

SEQ ID NO: 2111592 - RNA, 19 nt, Artificial Sequence
  Description of Artificial Sequence: Synthetic oligonucleotide
cagaaucuggccuuuugcc

SEQ ID NO: 2111593 - RNA, 19 nt, Artificial Sequence
  Description of Artificial Sequence: Synthetic oligonucleotide
uggcuaaaugcuuaaguuc

SEQ ID NO: 2111594 - RNA, 19 nt, Artificial Sequence
  Description of Artificial Sequence: Synthetic oligonucleotide
uuugggcucccuauuacac

SEQ ID NO: 2111595 - RNA, 19 nt, Artificial Sequence
  Description of Artificial Sequence: Synthetic oligonucleotide
agagccacaagaaguaagg

SEQ ID NO: 2111596 - RNA, 19 nt, Artificial Sequence
  Description of Artificial Sequence: Synthetic oligonucleotide
ggaauuccgaguuuguuug

SEQ ID NO: 2111597 - RNA, 19 nt, Artificial Sequence
  Description of Artificial Sequence: Synthetic oligonucleotide
gccacaagaaguaaggccg

SEQ ID NO: 2111598 - RNA, 19 nt, Artificial Sequence
  Description of Artificial Sequence: Synthetic oligonucleotide
ucuagcaucuguuguuucu

SEQ ID NO: 2111599 - RNA, 19 nt, Artificial Sequence
  Description of Artificial Sequence: Synthetic oligonucleotide
ugagcuuugaaggaaucgu

SEQ ID NO: 2111600 - RNA, 19 nt, Artificial Sequence
  Description of Artificial Sequence: Synthetic oligonucleotide
uuugcccuuaauuuugcaa

SEQ ID NO: 2111601 - RNA, 19 nt, Artificial Sequence
  Description of Artificial Sequence: Synthetic oligonucleotide
aggcuauucagaaaccugg

SEQ ID NO: 2111602 - RNA, 19 nt, Artificial Sequence
  Description of Artificial Sequence: Synthetic oligonucleotide
uugcccuuaauuuugcaau

SEQ ID NO: 2111603 - RNA, 19 nt, Artificial Sequence
  Description of Artificial Sequence: Synthetic oligonucleotide
cugucaagggagauagucc

SEQ ID NO: 2111604 - RNA, 19 nt, Artificial Sequence
  Description of Artificial Sequence: Synthetic oligonucleotide
uaaguucgggcuccaaaug

SEQ ID NO: 2111605 - RNA, 19 nt, Artificial Sequence
  Description of Artificial Sequence: Synthetic oligonucleotide
uuccgaguuuguuuguucc

SEQ ID NO: 2111606 - RNA, 19 nt, Artificial Sequence
  Description of Artificial Sequence: Synthetic oligonucleotide
caucaauucccugaacucc

SEQ ID NO: 2111607 - RNA, 19 nt, Artificial Sequence
  Description of Artificial Sequence: Synthetic oligonucleotide
aaggaaucguuucuguauu

SEQ ID NO: 2111608 - RNA, 19 nt, Artificial Sequence
  Description of Artificial Sequence: Synthetic oligonucleotide
ucaguaggaacgguguugc

SEQ ID NO: 2111609 - RNA, 19 nt, Artificial Sequence
  Description of Artificial Sequence: Synthetic oligonucleotide
ucagaaaccuggcaugcuc

SEQ ID NO: 2111610 - RNA, 19 nt, Artificial Sequence
  Description of Artificial Sequence: Synthetic oligonucleotide
aggugcacgucuuacacgu

SEQ ID NO: 2111611 - RNA, 19 nt, Artificial Sequence
  Description of Artificial Sequence: Synthetic oligonucleotide
agggucaucaauucccuga

SEQ ID NO: 2111612 - RNA, 19 nt, Artificial Sequence
  Description of Artificial Sequence: Synthetic oligonucleotide
auuugggagccugucaagg

SEQ ID NO: 2111613 - RNA, 19 nt, Artificial Sequence
  Description of Artificial Sequence: Synthetic oligonucleotide
cuaaaugcuuaaguucggg

SEQ ID NO: 2111614 - RNA, 19 nt, Artificial Sequence
  Description of Artificial Sequence: Synthetic oligonucleotide
auuccgaguuuguuuguuc

SEQ ID NO: 2111615 - RNA, 19 nt, Artificial Sequence
  Description of Artificial Sequence: Synthetic oligonucleotide
augcucuucgccucucggc

SEQ ID NO: 2111616 - RNA, 19 nt, Artificial Sequence
  Description of Artificial Sequence: Synthetic oligonucleotide
gguuauuuaaggcuauuca

SEQ ID NO: 2111617 - RNA, 19 nt, Artificial Sequence
  Description of Artificial Sequence: Synthetic oligonucleotide
ucggcaacaggguuucucc

SEQ ID NO: 2111618 - RNA, 19 nt, Artificial Sequence
  Description of Artificial Sequence: Synthetic oligonucleotide
uucaguaggaacgguguug

SEQ ID NO: 2111619 - RNA, 19 nt, Artificial Sequence
  Description of Artificial Sequence: Synthetic oligonucleotide
cuuacacgucacuacucgg

SEQ ID NO: 2111620 - RNA, 19 nt, Artificial Sequence
  Description of Artificial Sequence: Synthetic oligonucleotide
ccuugguuuggcuaaaugc

SEQ ID NO: 2111621 - RNA, 19 nt, Artificial Sequence
  Description of Artificial Sequence: Synthetic oligonucleotide
cuggauggcagguuugggc

SEQ ID NO: 2111622 - RNA, 19 nt, Artificial Sequence
  Description of Artificial Sequence: Synthetic oligonucleotide
uguaccaagcuuaggcauc

SEQ ID NO: 2111623 - RNA, 19 nt, Artificial Sequence
  Description of Artificial Sequence: Synthetic oligonucleotide
ugucgagauggacauggca

SEQ ID NO: 2111624 - RNA, 19 nt, Artificial Sequence
  Description of Artificial Sequence: Synthetic oligonucleotide
gcuucaagagggcugaugc

SEQ ID NO: 2111625 - RNA, 19 nt, Artificial Sequence
  Description of Artificial Sequence: Synthetic oligonucleotide
ugcacgcuccuucacgucc

SEQ ID NO: 2111626 - RNA, 19 nt, Artificial Sequence
  Description of Artificial Sequence: Synthetic oligonucleotide
uacacgucacuacucggca

SEQ ID NO: 2111627 - RNA, 19 nt, Artificial Sequence
  Description of Artificial Sequence: Synthetic oligonucleotide
uuagcauuccaucccgcuc

SEQ ID NO: 2111628 - RNA, 19 nt, Artificial Sequence
  Description of Artificial Sequence: Synthetic oligonucleotide
uacaccugaaaccuugguu

SEQ ID NO: 2111629 - RNA, 19 nt, Artificial Sequence
  Description of Artificial Sequence: Synthetic oligonucleotide
ugaaaccuugguuuggcua

SEQ ID NO: 2111630 - RNA, 19 nt, Artificial Sequence
  Description of Artificial Sequence: Synthetic oligonucleotide
cacgccaucgugccaaugg

SEQ ID NO: 2111631 - RNA, 19 nt, Artificial Sequence
  Description of Artificial Sequence: Synthetic oligonucleotide
ugcucuucgccucucggca

SEQ ID NO: 2111632 - RNA, 19 nt, Artificial Sequence
  Description of Artificial Sequence: Synthetic oligonucleotide
uucccugaacuccucggag

SEQ ID NO: 2111633 - RNA, 19 nt, Artificial Sequence
  Description of Artificial Sequence: Synthetic oligonucleotide
ucuccuccgaucuuuggac

SEQ ID NO: 2111634 - RNA, 19 nt, Artificial Sequence
  Description of Artificial Sequence: Synthetic oligonucleotide
gaugcagagauagacugga

SEQ ID NO: 2111635 - RNA, 19 nt, Artificial Sequence
  Description of Artificial Sequence: Synthetic oligonucleotide
agauuaugcuguucgcuga

SEQ ID NO: 2111636 - RNA, 19 nt, Artificial Sequence
  Description of Artificial Sequence: Synthetic oligonucleotide
agccugucaagggagauag

SEQ ID NO: 2111637 - RNA, 19 nt, Artificial Sequence
  Description of Artificial Sequence: Synthetic oligonucleotide
uauuugggagccugucaag

SEQ ID NO: 2111638 - RNA, 19 nt, Artificial Sequence
  Description of Artificial Sequence: Synthetic oligonucleotide
ucauccccuucugagaugc

SEQ ID NO: 2111639 - RNA, 19 nt, Artificial Sequence
  Description of Artificial Sequence: Synthetic oligonucleotide
aggguuucuccuccgaucu

SEQ ID NO: 2111640 - RNA, 19 nt, Artificial Sequence
  Description of Artificial Sequence: Synthetic oligonucleotide
ucuguugcuucaagagggc

SEQ ID NO: 2111641 - RNA, 19 nt, Artificial Sequence
  Description of Artificial Sequence: Synthetic oligonucleotide
gagauagacuggauggcag

SEQ ID NO: 2111642 - RNA, 19 nt, Artificial Sequence
  Description of Artificial Sequence: Synthetic oligonucleotide
gagauaguccuguuuccac

SEQ ID NO: 2111643 - RNA, 19 nt, Artificial Sequence
  Description of Artificial Sequence: Synthetic oligonucleotide
uugaaggaaucguuucugu

SEQ ID NO: 2111644 - RNA, 19 nt, Artificial Sequence
  Description of Artificial Sequence: Synthetic oligonucleotide
ucaagagggcugaugcaga

SEQ ID NO: 2111645 - RNA, 19 nt, Artificial Sequence
  Description of Artificial Sequence: Synthetic oligonucleotide
uuccgcauuucuagcaucu

SEQ ID NO: 2111646 - RNA, 19 nt, Artificial Sequence
  Description of Artificial Sequence: Synthetic oligonucleotide
gaggccacaauuacugcag

SEQ ID NO: 2111647 - RNA, 19 nt, Artificial Sequence
  Description of Artificial Sequence: Synthetic oligonucleotide
uacucggcauuucacuucu

SEQ ID NO: 2111648 - RNA, 19 nt, Artificial Sequence
  Description of Artificial Sequence: Synthetic oligonucleotide
aauuuugcaauagcagcua

SEQ ID NO: 2111649 - RNA, 19 nt, Artificial Sequence
  Description of Artificial Sequence: Synthetic oligonucleotide
ucgagauggacauggcacu

SEQ ID NO: 2111650 - RNA, 19 nt, Artificial Sequence
  Description of Artificial Sequence: Synthetic oligonucleotide
gucgagauggacauggcac

SEQ ID NO: 2111651 - RNA, 19 nt, Artificial Sequence
  Description of Artificial Sequence: Synthetic oligonucleotide
uggccuuuugcccuuaauu

SEQ ID NO: 2111652 - RNA, 19 nt, Artificial Sequence
  Description of Artificial Sequence: Synthetic oligonucleotide
cuuuugcccuuaauuuugc

SEQ ID NO: 2111653 - RNA, 19 nt, Artificial Sequence
  Description of Artificial Sequence: Synthetic oligonucleotide
acaauuacugcagugcuua

SEQ ID NO: 2111654 - RNA, 19 nt, Artificial Sequence
  Description of Artificial Sequence: Synthetic oligonucleotide
augcuuaaguucgggcucc

SEQ ID NO: 2111655 - RNA, 19 nt, Artificial Sequence
  Description of Artificial Sequence: Synthetic oligonucleotide
gguucuuuccaaccugggg

SEQ ID NO: 2111656 - RNA, 19 nt, Artificial Sequence
  Description of Artificial Sequence: Synthetic oligonucleotide
cuucugacuuccucuuccg

SEQ ID NO: 2111657 - RNA, 19 nt, Artificial Sequence
  Description of Artificial Sequence: Synthetic oligonucleotide
aguccuguuuccacaaggg

SEQ ID NO: 2111658 - RNA, 19 nt, Artificial Sequence
  Description of Artificial Sequence: Synthetic oligonucleotide
cagacugucgagauggaca

SEQ ID NO: 2111659 - RNA, 19 nt, Artificial Sequence
  Description of Artificial Sequence: Synthetic oligonucleotide
uuacuggcaggcuccaacu

SEQ ID NO: 2111660 - RNA, 19 nt, Artificial Sequence
  Description of Artificial Sequence: Synthetic oligonucleotide
agacugucgagauggacau

SEQ ID NO: 2111661 - RNA, 19 nt, Artificial Sequence
  Description of Artificial Sequence: Synthetic oligonucleotide
ucugcacgcuccuucacgu

SEQ ID NO: 2111662 - RNA, 19 nt, Artificial Sequence
  Description of Artificial Sequence: Synthetic oligonucleotide
gccuguaccaagcuuaggc

SEQ ID NO: 2111663 - RNA, 19 nt, Artificial Sequence
  Description of Artificial Sequence: Synthetic oligonucleotide
uggagauuaugcuguucgc

SEQ ID NO: 2111664 - RNA, 19 nt, Artificial Sequence
  Description of Artificial Sequence: Synthetic oligonucleotide
uaugcuguucgcugaugca

SEQ ID NO: 2111665 - RNA, 19 nt, Artificial Sequence
  Description of Artificial Sequence: Synthetic oligonucleotide
aacucugccccaguucgag

SEQ ID NO: 2111666 - RNA, 19 nt, Artificial Sequence
  Description of Artificial Sequence: Synthetic oligonucleotide
aaccucuucacgccaucgu

SEQ ID NO: 2111667 - RNA, 19 nt, Artificial Sequence
  Description of Artificial Sequence: Synthetic oligonucleotide
agaaccauuugcagagggg

SEQ ID NO: 2111668 - RNA, 19 nt, Artificial Sequence
  Description of Artificial Sequence: Synthetic oligonucleotide
gaugccuguaccaagcuua

SEQ ID NO: 2111669 - RNA, 19 nt, Artificial Sequence
  Description of Artificial Sequence: Synthetic oligonucleotide
gauaguccuguuuccacaa

SEQ ID NO: 2111670 - RNA, 19 nt, Artificial Sequence
  Description of Artificial Sequence: Synthetic oligonucleotide
ucacuacucggcauuucac

SEQ ID NO: 2111671 - RNA, 19 nt, Artificial Sequence
  Description of Artificial Sequence: Synthetic oligonucleotide
uucgccucucggcaacagg

SEQ ID NO: 2111672 - RNA, 19 nt, Artificial Sequence
  Description of Artificial Sequence: Synthetic oligonucleotide
agcuuaggcaucuguggug

SEQ ID NO: 2111673 - RNA, 19 nt, Artificial Sequence
  Description of Artificial Sequence: Synthetic oligonucleotide
aagagaacgucauccccuu

SEQ ID NO: 2111674 - RNA, 19 nt, Artificial Sequence
  Description of Artificial Sequence: Synthetic oligonucleotide
ucuuccgcauuucuagcau

SEQ ID NO: 2111675 - RNA, 19 nt, Artificial Sequence
  Description of Artificial Sequence: Synthetic oligonucleotide
ucccugaacuccucggagc

SEQ ID NO: 2111676 - RNA, 19 nt, Artificial Sequence
  Description of Artificial Sequence: Synthetic oligonucleotide
uuacaccugaaaccuuggu

SEQ ID NO: 2111677 - RNA, 19 nt, Artificial Sequence
  Description of Artificial Sequence: Synthetic oligonucleotide
uuguuccuggaugauugag

SEQ ID NO: 2111678 - RNA, 19 nt, Artificial Sequence
  Description of Artificial Sequence: Synthetic oligonucleotide
agagauagacuggauggca

SEQ ID NO: 2111679 - RNA, 19 nt, Artificial Sequence
  Description of Artificial Sequence: Synthetic oligonucleotide
aaucguuucuguauuucuu

SEQ ID NO: 2111680 - RNA, 19 nt, Artificial Sequence
  Description of Artificial Sequence: Synthetic oligonucleotide
gaccaguuuucuccuuuag

SEQ ID NO: 2111681 - RNA, 19 nt, Artificial Sequence
  Description of Artificial Sequence: Synthetic oligonucleotide
cuuuagcauuccaucccgc

SEQ ID NO: 2111682 - RNA, 19 nt, Artificial Sequence
  Description of Artificial Sequence: Synthetic oligonucleotide
acuacucggcauuucacuu

SEQ ID NO: 2111683 - RNA, 19 nt, Artificial Sequence
  Description of Artificial Sequence: Synthetic oligonucleotide
agcauuccaucccgcuccc

SEQ ID NO: 2111684 - RNA, 19 nt, Artificial Sequence
  Description of Artificial Sequence: Synthetic oligonucleotide
cucggagcaagacaagcuc

SEQ ID NO: 2111685 - RNA, 19 nt, Artificial Sequence
  Description of Artificial Sequence: Synthetic oligonucleotide
cucugcacgcuccuucacg

SEQ ID NO: 2111686 - RNA, 19 nt, Artificial Sequence
  Description of Artificial Sequence: Synthetic oligonucleotide
aacaggguuucuccuccga

SEQ ID NO: 2111687 - RNA, 19 nt, Artificial Sequence
  Description of Artificial Sequence: Synthetic oligonucleotide
agaacgucauccccuucug

SEQ ID NO: 2111688 - RNA, 19 nt, Artificial Sequence
  Description of Artificial Sequence: Synthetic oligonucleotide
ccaguuuucuccuuuagca

SEQ ID NO: 2111689 - RNA, 19 nt, Artificial Sequence
  Description of Artificial Sequence: Synthetic oligonucleotide
gaucuuuggaccaguuuuc

SEQ ID NO: 2111690 - RNA, 19 nt, Artificial Sequence
  Description of Artificial Sequence: Synthetic oligonucleotide
agaaguaaggccggucaug

SEQ ID NO: 2111691 - RNA, 19 nt, Artificial Sequence
  Description of Artificial Sequence: Synthetic oligonucleotide
uuacugcagugcuuauuug

SEQ ID NO: 2111692 - RNA, 19 nt, Artificial Sequence
  Description of Artificial Sequence: Synthetic oligonucleotide
gaaucguuucuguauuucu

SEQ ID NO: 2111693 - RNA, 19 nt, Artificial Sequence
  Description of Artificial Sequence: Synthetic oligonucleotide
guuuuggucuuggcggugg

SEQ ID NO: 2111694 - RNA, 19 nt, Artificial Sequence
  Description of Artificial Sequence: Synthetic oligonucleotide
caucuguuuccuuacaaua

SEQ ID NO: 2111695 - RNA, 19 nt, Artificial Sequence
  Description of Artificial Sequence: Synthetic oligonucleotide
auuuugcaauagcagcuaa

SEQ ID NO: 2111696 - RNA, 19 nt, Artificial Sequence
  Description of Artificial Sequence: Synthetic oligonucleotide
caaccuggggaacucugcc

SEQ ID NO: 2111697 - RNA, 19 nt, Artificial Sequence
  Description of Artificial Sequence: Synthetic oligonucleotide
auucccugaacuccucgga

SEQ ID NO: 2111698 - RNA, 19 nt, Artificial Sequence
  Description of Artificial Sequence: Synthetic oligonucleotide
guaggaacgguguugcucu

SEQ ID NO: 2111699 - RNA, 19 nt, Artificial Sequence
  Description of Artificial Sequence: Synthetic oligonucleotide
cuuauuugggagccuguca

SEQ ID NO: 2111700 - RNA, 19 nt, Artificial Sequence
  Description of Artificial Sequence: Synthetic oligonucleotide
cuuacaauacuguuuggau

SEQ ID NO: 2111701 - RNA, 19 nt, Artificial Sequence
  Description of Artificial Sequence: Synthetic oligonucleotide
uugcaauagcagcuaacuu

SEQ ID NO: 2111702 - RNA, 19 nt, Artificial Sequence
  Description of Artificial Sequence: Synthetic oligonucleotide
caagagggcugaugcagag

SEQ ID NO: 2111703 - RNA, 19 nt, Artificial Sequence
  Description of Artificial Sequence: Synthetic oligonucleotide
accaagcuuaggcaucugu

SEQ ID NO: 2111704 - RNA, 19 nt, Artificial Sequence
  Description of Artificial Sequence: Synthetic oligonucleotide
uccucggagcaagacaagc

SEQ ID NO: 2111705 - RNA, 19 nt, Artificial Sequence
  Description of Artificial Sequence: Synthetic oligonucleotide
guucgaggagacugggcag

SEQ ID NO: 2111706 - RNA, 19 nt, Artificial Sequence
  Description of Artificial Sequence: Synthetic oligonucleotide
uucgaggagacugggcagc

SEQ ID NO: 2111707 - RNA, 19 nt, Artificial Sequence
  Description of Artificial Sequence: Synthetic oligonucleotide
caugcucuucgccucucgg

SEQ ID NO: 2111708 - RNA, 19 nt, Artificial Sequence
  Description of Artificial Sequence: Synthetic oligonucleotide
ucuguggugcugugguucu

SEQ ID NO: 2111709 - RNA, 19 nt, Artificial Sequence
  Description of Artificial Sequence: Synthetic oligonucleotide
uccgaguuuguuuguuccu

SEQ ID NO: 2111710 - RNA, 19 nt, Artificial Sequence
  Description of Artificial Sequence: Synthetic oligonucleotide
ucuuuggaccaguuuucuc

SEQ ID NO: 2111711 - RNA, 19 nt, Artificial Sequence
  Description of Artificial Sequence: Synthetic oligonucleotide
auaguccuguuuccacaag

SEQ ID NO: 2111712 - RNA, 19 nt, Artificial Sequence
  Description of Artificial Sequence: Synthetic oligonucleotide
ugcacgucuuacacgucac

SEQ ID NO: 2111713 - RNA, 19 nt, Artificial Sequence
  Description of Artificial Sequence: Synthetic oligonucleotide
ccuuuugcccuuaauuuug

SEQ ID NO: 2111714 - RNA, 19 nt, Artificial Sequence
  Description of Artificial Sequence: Synthetic oligonucleotide
cagagauagacuggauggc

SEQ ID NO: 2111715 - RNA, 19 nt, Artificial Sequence
  Description of Artificial Sequence: Synthetic oligonucleotide
guucgggcuccaaaugugg

SEQ ID NO: 2111716 - RNA, 19 nt, Artificial Sequence
  Description of Artificial Sequence: Synthetic oligonucleotide
uggcgguggugauucauca

SEQ ID NO: 2111717 - RNA, 19 nt, Artificial Sequence
  Description of Artificial Sequence: Synthetic oligonucleotide
cagugcuuauuugggagcc

SEQ ID NO: 2111718 - RNA, 19 nt, Artificial Sequence
  Description of Artificial Sequence: Synthetic oligonucleotide
cuacucggcauuucacuuc

SEQ ID NO: 2111719 - RNA, 19 nt, Artificial Sequence
  Description of Artificial Sequence: Synthetic oligonucleotide
gagaacgucauccccuucu

SEQ ID NO: 2111720 - RNA, 19 nt, Artificial Sequence
  Description of Artificial Sequence: Synthetic oligonucleotide
gauggacauggcacugccg

SEQ ID NO: 2111721 - RNA, 19 nt, Artificial Sequence
  Description of Artificial Sequence: Synthetic oligonucleotide
aucccgcucccauuuguag

SEQ ID NO: 2111722 - RNA, 19 nt, Artificial Sequence
  Description of Artificial Sequence: Synthetic oligonucleotide
aauuccgaguuuguuuguu

SEQ ID NO: 2111723 - RNA, 19 nt, Artificial Sequence
  Description of Artificial Sequence: Synthetic oligonucleotide
uuucuagcaucuguuguuu

SEQ ID NO: 2111724 - RNA, 19 nt, Artificial Sequence
  Description of Artificial Sequence: Synthetic oligonucleotide
guugcuucaagagggcuga

SEQ ID NO: 2111725 - RNA, 19 nt, Artificial Sequence
  Description of Artificial Sequence: Synthetic oligonucleotide
ucccgcucccauuuguaga

SEQ ID NO: 2111726 - RNA, 19 nt, Artificial Sequence
  Description of Artificial Sequence: Synthetic oligonucleotide
ugcccuuaauuuugcaaua

SEQ ID NO: 2111727 - RNA, 19 nt, Artificial Sequence
  Description of Artificial Sequence: Synthetic oligonucleotide
guccagcuacaucuugggg

SEQ ID NO: 2111728 - RNA, 19 nt, Artificial Sequence
  Description of Artificial Sequence: Synthetic oligonucleotide
guuugggcucccuauuaca

SEQ ID NO: 2111729 - RNA, 19 nt, Artificial Sequence
  Description of Artificial Sequence: Synthetic oligonucleotide
ugaacuccucggagcaaga

SEQ ID NO: 2111730 - RNA, 19 nt, Artificial Sequence
  Description of Artificial Sequence: Synthetic oligonucleotide
ugggcagggucaucaauuc

SEQ ID NO: 2111731 - RNA, 19 nt, Artificial Sequence
  Description of Artificial Sequence: Synthetic oligonucleotide
ccaacucaucuucaguagg

SEQ ID NO: 2111732 - RNA, 19 nt, Artificial Sequence
  Description of Artificial Sequence: Synthetic oligonucleotide
gagccacaagaaguaaggc

SEQ ID NO: 2111733 - RNA, 19 nt, Artificial Sequence
  Description of Artificial Sequence: Synthetic oligonucleotide
agcuacaucuugggguuuc

SEQ ID NO: 2111734 - RNA, 19 nt, Artificial Sequence
  Description of Artificial Sequence: Synthetic oligonucleotide
uggaccaguuuucuccuuu

SEQ ID NO: 2111735 - RNA, 19 nt, Artificial Sequence
  Description of Artificial Sequence: Synthetic oligonucleotide
ucaauucccugaacuccuc

SEQ ID NO: 2111736 - RNA, 19 nt, Artificial Sequence
  Description of Artificial Sequence: Synthetic oligonucleotide
caggguuucuccuccgauc

SEQ ID NO: 2111737 - RNA, 19 nt, Artificial Sequence
  Description of Artificial Sequence: Synthetic oligonucleotide
ugcuucaagagggcugaug

SEQ ID NO: 2111738 - RNA, 19 nt, Artificial Sequence
  Description of Artificial Sequence: Synthetic oligonucleotide
uuccaucccgcucccauuu

SEQ ID NO: 2111739 - RNA, 19 nt, Artificial Sequence
  Description of Artificial Sequence: Synthetic oligonucleotide
gcaacaggguuucuccucc

SEQ ID NO: 2111740 - RNA, 19 nt, Artificial Sequence
  Description of Artificial Sequence: Synthetic oligonucleotide
acgucauccccuucugaga

SEQ ID NO: 2111741 - RNA, 19 nt, Artificial Sequence
  Description of Artificial Sequence: Synthetic oligonucleotide
agagaacgucauccccuuc

SEQ ID NO: 2111742 - RNA, 19 nt, Artificial Sequence
  Description of Artificial Sequence: Synthetic oligonucleotide
ccagaaucuggccuuuugc

SEQ ID NO: 2111743 - RNA, 19 nt, Artificial Sequence
  Description of Artificial Sequence: Synthetic oligonucleotide
aguucgggcuccaaaugug

SEQ ID NO: 2111744 - RNA, 19 nt, Artificial Sequence
  Description of Artificial Sequence: Synthetic oligonucleotide
aaaugugggcagggucauc

SEQ ID NO: 2111745 - RNA, 19 nt, Artificial Sequence
  Description of Artificial Sequence: Synthetic oligonucleotide
ugcugcacucaguuuuggu

SEQ ID NO: 2111746 - RNA, 19 nt, Artificial Sequence
  Description of Artificial Sequence: Synthetic oligonucleotide
guaaggccggucaugagaa

SEQ ID NO: 2111747 - RNA, 19 nt, Artificial Sequence
  Description of Artificial Sequence: Synthetic oligonucleotide
cauuucuagcaucuguugu

SEQ ID NO: 2111748 - RNA, 19 nt, Artificial Sequence
  Description of Artificial Sequence: Synthetic oligonucleotide
cucuuccgcauuucuagca

SEQ ID NO: 2111749 - RNA, 19 nt, Artificial Sequence
  Description of Artificial Sequence: Synthetic oligonucleotide
aucgugccaauggagauua

SEQ ID NO: 2111750 - RNA, 19 nt, Artificial Sequence
  Description of Artificial Sequence: Synthetic oligonucleotide
cucccuauuacaccugaaa

SEQ ID NO: 2111751 - RNA, 19 nt, Artificial Sequence
  Description of Artificial Sequence: Synthetic oligonucleotide
gggagauaguccuguuucc

SEQ ID NO: 2111752 - RNA, 19 nt, Artificial Sequence
  Description of Artificial Sequence: Synthetic oligonucleotide
acaggguuucuccuccgau

SEQ ID NO: 2111753 - RNA, 19 nt, Artificial Sequence
  Description of Artificial Sequence: Synthetic oligonucleotide
gcuuaggcaucuguggugc

SEQ ID NO: 2111754 - RNA, 19 nt, Artificial Sequence
  Description of Artificial Sequence: Synthetic oligonucleotide
uacuggcaggcuccaacuc

SEQ ID NO: 2111755 - RNA, 19 nt, Artificial Sequence
  Description of Artificial Sequence: Synthetic oligonucleotide
auuaugcuguucgcugaug

SEQ ID NO: 2111756 - RNA, 19 nt, Artificial Sequence
  Description of Artificial Sequence: Synthetic oligonucleotide
gcagugcuuauuugggagc

SEQ ID NO: 2111757 - RNA, 19 nt, Artificial Sequence
  Description of Artificial Sequence: Synthetic oligonucleotide
cuggcaugcucuucgccuc

SEQ ID NO: 2111758 - RNA, 19 nt, Artificial Sequence
  Description of Artificial Sequence: Synthetic oligonucleotide
gcuaaaugcuuaaguucgg

SEQ ID NO: 2111759 - RNA, 19 nt, Artificial Sequence
  Description of Artificial Sequence: Synthetic oligonucleotide
caguucgaggagacugggc

SEQ ID NO: 2111760 - RNA, 19 nt, Artificial Sequence
  Description of Artificial Sequence: Synthetic oligonucleotide
cccuuaauuuugcaauagc

SEQ ID NO: 2111761 - RNA, 19 nt, Artificial Sequence
  Description of Artificial Sequence: Synthetic oligonucleotide
ugccccaguucgaggagac

SEQ ID NO: 2111762 - RNA, 19 nt, Artificial Sequence
  Description of Artificial Sequence: Synthetic oligonucleotide
cuucacguccagcuacauc

SEQ ID NO: 2111763 - RNA, 19 nt, Artificial Sequence
  Description of Artificial Sequence: Synthetic oligonucleotide
cuucaagagggcugaugca

SEQ ID NO: 2111764 - RNA, 19 nt, Artificial Sequence
  Description of Artificial Sequence: Synthetic oligonucleotide
gaugcuccucaucuuuucu

SEQ ID NO: 2111765 - RNA, 19 nt, Artificial Sequence
  Description of Artificial Sequence: Synthetic oligonucleotide
acgccaucgugccaaugga

SEQ ID NO: 2111766 - RNA, 19 nt, Artificial Sequence
  Description of Artificial Sequence: Synthetic oligonucleotide
ccucuucacgccaucgugc

SEQ ID NO: 2111767 - RNA, 19 nt, Artificial Sequence
  Description of Artificial Sequence: Synthetic oligonucleotide
gaacgucauccccuucuga

SEQ ID NO: 2111768 - RNA, 19 nt, Artificial Sequence
  Description of Artificial Sequence: Synthetic oligonucleotide
ccugucaagggagauaguc

SEQ ID NO: 2111769 - RNA, 19 nt, Artificial Sequence
  Description of Artificial Sequence: Synthetic oligonucleotide
agaaaccuggcaugcucuu

SEQ ID NO: 2111770 - RNA, 19 nt, Artificial Sequence
  Description of Artificial Sequence: Synthetic oligonucleotide
agguuugggcucccuauua

SEQ ID NO: 2111771 - RNA, 19 nt, Artificial Sequence
  Description of Artificial Sequence: Synthetic oligonucleotide
aggaaucguuucuguauuu

SEQ ID NO: 2111772 - RNA, 19 nt, Artificial Sequence
  Description of Artificial Sequence: Synthetic oligonucleotide
ccacaagaaguaaggccgg

SEQ ID NO: 2111773 - RNA, 19 nt, Artificial Sequence
  Description of Artificial Sequence: Synthetic oligonucleotide
gguuugggcucccuauuac

SEQ ID NO: 2111774 - RNA, 19 nt, Artificial Sequence
  Description of Artificial Sequence: Synthetic oligonucleotide
gaaaccuggcaugcucuuc

SEQ ID NO: 2111775 - RNA, 19 nt, Artificial Sequence
  Description of Artificial Sequence: Synthetic oligonucleotide
cugucgagauggacauggc

SEQ ID NO: 2111776 - RNA, 19 nt, Artificial Sequence
  Description of Artificial Sequence: Synthetic oligonucleotide
uccaucccgcucccauuug

SEQ ID NO: 2111777 - RNA, 19 nt, Artificial Sequence
  Description of Artificial Sequence: Synthetic oligonucleotide
gcugaugcaggucuccaga

SEQ ID NO: 2111778 - RNA, 19 nt, Artificial Sequence
  Description of Artificial Sequence: Synthetic oligonucleotide
gauuaugcuguucgcugau

SEQ ID NO: 2111779 - RNA, 19 nt, Artificial Sequence
  Description of Artificial Sequence: Synthetic oligonucleotide
ugggaauuccgaguuuguu

SEQ ID NO: 2111780 - RNA, 19 nt, Artificial Sequence
  Description of Artificial Sequence: Synthetic oligonucleotide
guuucuccuccgaucuuug

SEQ ID NO: 2111781 - RNA, 19 nt, Artificial Sequence
  Description of Artificial Sequence: Synthetic oligonucleotide
ggcuauucagaaaccuggc

SEQ ID NO: 2111782 - RNA, 19 nt, Artificial Sequence
  Description of Artificial Sequence: Synthetic oligonucleotide
cccaguucgaggagacugg

SEQ ID NO: 2111783 - RNA, 19 nt, Artificial Sequence
  Description of Artificial Sequence: Synthetic oligonucleotide
ggaaucguuucuguauuuc

SEQ ID NO: 2111784 - RNA, 19 nt, Artificial Sequence
  Description of Artificial Sequence: Synthetic oligonucleotide
guguaggugcacgucuuac

SEQ ID NO: 2111785 - RNA, 19 nt, Artificial Sequence
  Description of Artificial Sequence: Synthetic oligonucleotide
uguuuccacaagggcauuu

SEQ ID NO: 2111786 - RNA, 19 nt, Artificial Sequence
  Description of Artificial Sequence: Synthetic oligonucleotide
acaagcucuucugggaauu

SEQ ID NO: 2111787 - RNA, 19 nt, Artificial Sequence
  Description of Artificial Sequence: Synthetic oligonucleotide
aggccacaauuacugcagu

SEQ ID NO: 2111788 - RNA, 19 nt, Artificial Sequence
  Description of Artificial Sequence: Synthetic oligonucleotide
cucuucgccucucggcaac

SEQ ID NO: 2111789 - RNA, 19 nt, Artificial Sequence
  Description of Artificial Sequence: Synthetic oligonucleotide
augccuguaccaagcuuag

SEQ ID NO: 2111790 - RNA, 19 nt, Artificial Sequence
  Description of Artificial Sequence: Synthetic oligonucleotide
cacguccagcuacaucuug

SEQ ID NO: 2111791 - RNA, 19 nt, Artificial Sequence
  Description of Artificial Sequence: Synthetic oligonucleotide
cugcagugcuuauuuggga

SEQ ID NO: 2111792 - RNA, 19 nt, Artificial Sequence
  Description of Artificial Sequence: Synthetic oligonucleotide
ccuauuacaccugaaaccu

SEQ ID NO: 2111793 - RNA, 19 nt, Artificial Sequence
  Description of Artificial Sequence: Synthetic oligonucleotide
cgaguuuguuuguuccugg

SEQ ID NO: 2111794 - RNA, 19 nt, Artificial Sequence
  Description of Artificial Sequence: Synthetic oligonucleotide
cuucacgccaucgugccaa

SEQ ID NO: 2111795 - RNA, 19 nt, Artificial Sequence
  Description of Artificial Sequence: Synthetic oligonucleotide
gcccuuaauuuugcaauag

SEQ ID NO: 2111796 - RNA, 19 nt, Artificial Sequence
  Description of Artificial Sequence: Synthetic oligonucleotide
acacgucacuacucggcau

SEQ ID NO: 2111797 - RNA, 19 nt, Artificial Sequence
  Description of Artificial Sequence: Synthetic oligonucleotide
cacuacucggcauuucacu

SEQ ID NO: 2111798 - RNA, 19 nt, Artificial Sequence
  Description of Artificial Sequence: Synthetic oligonucleotide
gucauccccuucugagaug

SEQ ID NO: 2111799 - RNA, 19 nt, Artificial Sequence
  Description of Artificial Sequence: Synthetic oligonucleotide
uugcucuucucugcacgcu

SEQ ID NO: 2111800 - RNA, 19 nt, Artificial Sequence
  Description of Artificial Sequence: Synthetic oligonucleotide
cagggucaucaauucccug

SEQ ID NO: 2111801 - RNA, 19 nt, Artificial Sequence
  Description of Artificial Sequence: Synthetic oligonucleotide
ccugaaaccuugguuuggc

SEQ ID NO: 2111802 - RNA, 19 nt, Artificial Sequence
  Description of Artificial Sequence: Synthetic oligonucleotide
ccuuacaauacuguuugga

SEQ ID NO: 2111803 - RNA, 19 nt, Artificial Sequence
  Description of Artificial Sequence: Synthetic oligonucleotide
uaaggccggucaugagaac

SEQ ID NO: 2111804 - RNA, 19 nt, Artificial Sequence
  Description of Artificial Sequence: Synthetic oligonucleotide
gcuccaaaugugggcaggg

SEQ ID NO: 2111805 - RNA, 19 nt, Artificial Sequence
  Description of Artificial Sequence: Synthetic oligonucleotide
ccuguaccaagcuuaggca

SEQ ID NO: 2111806 - RNA, 19 nt, Artificial Sequence
  Description of Artificial Sequence: Synthetic oligonucleotide
ucgaggagacugggcagca

SEQ ID NO: 2111807 - RNA, 19 nt, Artificial Sequence
  Description of Artificial Sequence: Synthetic oligonucleotide
gccagaaucuggccuuuug

SEQ ID NO: 2111808 - RNA, 19 nt, Artificial Sequence
  Description of Artificial Sequence: Synthetic oligonucleotide
cuguaccaagcuuaggcau

SEQ ID NO: 2111809 - RNA, 19 nt, Artificial Sequence
  Description of Artificial Sequence: Synthetic oligonucleotide
cuccucggagcaagacaag

SEQ ID NO: 2111810 - RNA, 19 nt, Artificial Sequence
  Description of Artificial Sequence: Synthetic oligonucleotide
agugcuuauuugggagccu

SEQ ID NO: 2111811 - RNA, 19 nt, Artificial Sequence
  Description of Artificial Sequence: Synthetic oligonucleotide
ggcucugggcuucauuuga

SEQ ID NO: 2111812 - RNA, 19 nt, Artificial Sequence
  Description of Artificial Sequence: Synthetic oligonucleotide
gaauuccgaguuuguuugu

SEQ ID NO: 2111813 - RNA, 19 nt, Artificial Sequence
  Description of Artificial Sequence: Synthetic oligonucleotide
gcgguggugauucaucaaa

SEQ ID NO: 2111814 - RNA, 19 nt, Artificial Sequence
  Description of Artificial Sequence: Synthetic oligonucleotide
aggcuugaaguggguguag

SEQ ID NO: 2111815 - RNA, 19 nt, Artificial Sequence
  Description of Artificial Sequence: Synthetic oligonucleotide
aaccuugguuuggcuaaau

SEQ ID NO: 2111816 - RNA, 19 nt, Artificial Sequence
  Description of Artificial Sequence: Synthetic oligonucleotide
gaaguggguguaggugcac

SEQ ID NO: 2111817 - RNA, 19 nt, Artificial Sequence
  Description of Artificial Sequence: Synthetic oligonucleotide
gaacgguguugcucuucuc

SEQ ID NO: 2111818 - RNA, 19 nt, Artificial Sequence
  Description of Artificial Sequence: Synthetic oligonucleotide
ccacaagggcauuugaaaa

SEQ ID NO: 2111819 - RNA, 19 nt, Artificial Sequence
  Description of Artificial Sequence: Synthetic oligonucleotide
gacaagcucuucugggaau

SEQ ID NO: 2111820 - RNA, 19 nt, Artificial Sequence
  Description of Artificial Sequence: Synthetic oligonucleotide
uuccaaccuggggaacucu

SEQ ID NO: 2111821 - RNA, 19 nt, Artificial Sequence
  Description of Artificial Sequence: Synthetic oligonucleotide
cuucugggaauuccgaguu

SEQ ID NO: 2111822 - RNA, 19 nt, Artificial Sequence
  Description of Artificial Sequence: Synthetic oligonucleotide
cucggcauuucacuucucu

SEQ ID NO: 2111823 - RNA, 19 nt, Artificial Sequence
  Description of Artificial Sequence: Synthetic oligonucleotide
ccucuuccgcauuucuagc

SEQ ID NO: 2111824 - RNA, 19 nt, Artificial Sequence
  Description of Artificial Sequence: Synthetic oligonucleotide
gggaauuccgaguuuguuu

SEQ ID NO: 2111825 - RNA, 19 nt, Artificial Sequence
  Description of Artificial Sequence: Synthetic oligonucleotide
gggucaucaauucccugaa

SEQ ID NO: 2111826 - RNA, 19 nt, Artificial Sequence
  Description of Artificial Sequence: Synthetic oligonucleotide
ucuucgccucucggcaaca

SEQ ID NO: 2111827 - RNA, 19 nt, Artificial Sequence
  Description of Artificial Sequence: Synthetic oligonucleotide
caagcucuucugggaauuc

SEQ ID NO: 2111828 - RNA, 19 nt, Artificial Sequence
  Description of Artificial Sequence: Synthetic oligonucleotide
cugugguucuuuccaaccu

SEQ ID NO: 2111829 - RNA, 19 nt, Artificial Sequence
  Description of Artificial Sequence: Synthetic oligonucleotide
cacgucuuacacgucacua

SEQ ID NO: 2111830 - RNA, 19 nt, Artificial Sequence
  Description of Artificial Sequence: Synthetic oligonucleotide
gcaugcucuucgccucucg

SEQ ID NO: 2111831 - RNA, 19 nt, Artificial Sequence
  Description of Artificial Sequence: Synthetic oligonucleotide
gcuuauuugggagccuguc

SEQ ID NO: 2111832 - RNA, 19 nt, Artificial Sequence
  Description of Artificial Sequence: Synthetic oligonucleotide
acugggcagcagacugucg

SEQ ID NO: 2111833 - RNA, 19 nt, Artificial Sequence
  Description of Artificial Sequence: Synthetic oligonucleotide
acugccgggcucugggcuu

SEQ ID NO: 2111834 - RNA, 19 nt, Artificial Sequence
  Description of Artificial Sequence: Synthetic oligonucleotide
gacauggcacugccgggcu

SEQ ID NO: 2111835 - RNA, 19 nt, Artificial Sequence
  Description of Artificial Sequence: Synthetic oligonucleotide
cauccccuucugagaugcc

SEQ ID NO: 2111836 - RNA, 19 nt, Artificial Sequence
  Description of Artificial Sequence: Synthetic oligonucleotide
guaccaagcuuaggcaucu

SEQ ID NO: 2111837 - RNA, 19 nt, Artificial Sequence
  Description of Artificial Sequence: Synthetic oligonucleotide
gacugucgagauggacaug

SEQ ID NO: 2111838 - RNA, 19 nt, Artificial Sequence
  Description of Artificial Sequence: Synthetic oligonucleotide
ccgaguuuguuuguuccug

SEQ ID NO: 2111839 - RNA, 19 nt, Artificial Sequence
  Description of Artificial Sequence: Synthetic oligonucleotide
cuucgccucucggcaacag

SEQ ID NO: 2111840 - RNA, 19 nt, Artificial Sequence
  Description of Artificial Sequence: Synthetic oligonucleotide
gagcuuugaaggaaucguu

SEQ ID NO: 2111841 - RNA, 19 nt, Artificial Sequence
  Description of Artificial Sequence: Synthetic oligonucleotide
ccaguucgaggagacuggg

SEQ ID NO: 2111842 - RNA, 19 nt, Artificial Sequence
  Description of Artificial Sequence: Synthetic oligonucleotide
gaacucugccccaguucga

SEQ ID NO: 2111843 - RNA, 19 nt, Artificial Sequence
  Description of Artificial Sequence: Synthetic oligonucleotide
gcucccauuuguagaggcc

SEQ ID NO: 2111844 - RNA, 19 nt, Artificial Sequence
  Description of Artificial Sequence: Synthetic oligonucleotide
cauuccaucccgcucccau

SEQ ID NO: 2111845 - RNA, 19 nt, Artificial Sequence
  Description of Artificial Sequence: Synthetic oligonucleotide
uaccaagcuuaggcaucug

SEQ ID NO: 2111846 - RNA, 19 nt, Artificial Sequence
  Description of Artificial Sequence: Synthetic oligonucleotide
cugcacgcuccuucacguc

SEQ ID NO: 2111847 - RNA, 19 nt, Artificial Sequence
  Description of Artificial Sequence: Synthetic oligonucleotide
ggcucccuauuacaccuga

SEQ ID NO: 2111848 - RNA, 19 nt, Artificial Sequence
  Description of Artificial Sequence: Synthetic oligonucleotide
gcugcugcacucaguuuug

SEQ ID NO: 2111849 - RNA, 19 nt, Artificial Sequence
  Description of Artificial Sequence: Synthetic oligonucleotide
cuguucgcugaugcagguc

SEQ ID NO: 2111850 - RNA, 19 nt, Artificial Sequence
  Description of Artificial Sequence: Synthetic oligonucleotide
cgcucccauuuguagaggc

SEQ ID NO: 2111851 - RNA, 19 nt, Artificial Sequence
  Description of Artificial Sequence: Synthetic oligonucleotide
ucacgccaucgugccaaug

SEQ ID NO: 2111852 - RNA, 19 nt, Artificial Sequence
  Description of Artificial Sequence: Synthetic oligonucleotide
gcucugggcuucauuugag

SEQ ID NO: 2111853 - RNA, 19 nt, Artificial Sequence
  Description of Artificial Sequence: Synthetic oligonucleotide
uucacgccaucgugccaau

SEQ ID NO: 2111854 - RNA, 19 nt, Artificial Sequence
  Description of Artificial Sequence: Synthetic oligonucleotide
cugggcuucauuugagcuu

SEQ ID NO: 2111855 - RNA, 19 nt, Artificial Sequence
  Description of Artificial Sequence: Synthetic oligonucleotide
ggagcaagacaagcucuuc

SEQ ID NO: 2111856 - RNA, 19 nt, Artificial Sequence
  Description of Artificial Sequence: Synthetic oligonucleotide
cugaaaccuugguuuggcu

SEQ ID NO: 2111857 - RNA, 19 nt, Artificial Sequence
  Description of Artificial Sequence: Synthetic oligonucleotide
gagccugucaagggagaua

SEQ ID NO: 2111858 - RNA, 19 nt, Artificial Sequence
  Description of Artificial Sequence: Synthetic oligonucleotide
caucccgcucccauuugua

SEQ ID NO: 2111859 - RNA, 19 nt, Artificial Sequence
  Description of Artificial Sequence: Synthetic oligonucleotide
gcagacugucgagauggac

SEQ ID NO: 2111860 - RNA, 19 nt, Artificial Sequence
  Description of Artificial Sequence: Synthetic oligonucleotide
cgugccaauggagauuaug

SEQ ID NO: 2111861 - RNA, 19 nt, Artificial Sequence
  Description of Artificial Sequence: Synthetic oligonucleotide
cuugggguuucaucuguuu

SEQ ID NO: 2111862 - RNA, 19 nt, Artificial Sequence
  Description of Artificial Sequence: Synthetic oligonucleotide
gugggcagggucaucaauu

SEQ ID NO: 2111863 - RNA, 19 nt, Artificial Sequence
  Description of Artificial Sequence: Synthetic oligonucleotide
gccuuuugcccuuaauuuu

SEQ ID NO: 2111864 - RNA, 19 nt, Artificial Sequence
  Description of Artificial Sequence: Synthetic oligonucleotide
guucgcugaugcaggucuc

SEQ ID NO: 2111865 - RNA, 19 nt, Artificial Sequence
  Description of Artificial Sequence: Synthetic oligonucleotide
uugccagaaucuggccuuu

SEQ ID NO: 2111866 - RNA, 19 nt, Artificial Sequence
  Description of Artificial Sequence: Synthetic oligonucleotide
ggaccaguuuucuccuuua

SEQ ID NO: 2111867 - RNA, 19 nt, Artificial Sequence
  Description of Artificial Sequence: Synthetic oligonucleotide
cuauuacaccugaaaccuu

SEQ ID NO: 2111868 - RNA, 19 nt, Artificial Sequence
  Description of Artificial Sequence: Synthetic oligonucleotide
cgaucuuuggaccaguuuu

SEQ ID NO: 2111869 - RNA, 19 nt, Artificial Sequence
  Description of Artificial Sequence: Synthetic oligonucleotide
ccacaauuacugcagugcu

SEQ ID NO: 2111870 - RNA, 19 nt, Artificial Sequence
  Description of Artificial Sequence: Synthetic oligonucleotide
acgucacuacucggcauuu

SEQ ID NO: 2111871 - RNA, 19 nt, Artificial Sequence
  Description of Artificial Sequence: Synthetic oligonucleotide
gcagguuugggcucccuau

SEQ ID NO: 2111872 - RNA, 19 nt, Artificial Sequence
  Description of Artificial Sequence: Synthetic oligonucleotide
ccuggcaugcucuucgccu

SEQ ID NO: 2111873 - RNA, 19 nt, Artificial Sequence
  Description of Artificial Sequence: Synthetic oligonucleotide
cacgucacuacucggcauu

SEQ ID NO: 2111874 - RNA, 19 nt, Artificial Sequence
  Description of Artificial Sequence: Synthetic oligonucleotide
augcagagauagacuggau

SEQ ID NO: 2111875 - RNA, 19 nt, Artificial Sequence
  Description of Artificial Sequence: Synthetic oligonucleotide
agcagacugucgagaugga

SEQ ID NO: 2111876 - RNA, 19 nt, Artificial Sequence
  Description of Artificial Sequence: Synthetic oligonucleotide
ucgugccaauggagauuau

SEQ ID NO: 2111877 - RNA, 19 nt, Artificial Sequence
  Description of Artificial Sequence: Synthetic oligonucleotide
ggcuucauuugagcuuuga

SEQ ID NO: 2111878 - RNA, 19 nt, Artificial Sequence
  Description of Artificial Sequence: Synthetic oligonucleotide
ccuccgaucuuuggaccag

SEQ ID NO: 2111879 - RNA, 19 nt, Artificial Sequence
  Description of Artificial Sequence: Synthetic oligonucleotide
ccauuuguagaggccacaa

SEQ ID NO: 2111880 - RNA, 19 nt, Artificial Sequence
  Description of Artificial Sequence: Synthetic oligonucleotide
ccggucaugagaaccauuu

SEQ ID NO: 2111881 - RNA, 19 nt, Artificial Sequence
  Description of Artificial Sequence: Synthetic oligonucleotide
ggcgguggugauucaucaa

SEQ ID NO: 2111882 - RNA, 19 nt, Artificial Sequence
  Description of Artificial Sequence: Synthetic oligonucleotide
caauuacugcagugcuuau

SEQ ID NO: 2111883 - RNA, 19 nt, Artificial Sequence
  Description of Artificial Sequence: Synthetic oligonucleotide
cuuaggcaucuguggugcu

SEQ ID NO: 2111884 - RNA, 19 nt, Artificial Sequence
  Description of Artificial Sequence: Synthetic oligonucleotide
cggucaugagaaccauuug

SEQ ID NO: 2111885 - RNA, 19 nt, Artificial Sequence
  Description of Artificial Sequence: Synthetic oligonucleotide
cugccccaguucgaggaga

SEQ ID NO: 2111886 - RNA, 19 nt, Artificial Sequence
  Description of Artificial Sequence: Synthetic oligonucleotide
gguuucuccuccgaucuuu

SEQ ID NO: 2111887 - RNA, 19 nt, Artificial Sequence
  Description of Artificial Sequence: Synthetic oligonucleotide
uugcuucaagagggcugau

SEQ ID NO: 2111888 - RNA, 19 nt, Artificial Sequence
  Description of Artificial Sequence: Synthetic oligonucleotide
ugccagaaucuggccuuuu

SEQ ID NO: 2111889 - RNA, 19 nt, Artificial Sequence
  Description of Artificial Sequence: Synthetic oligonucleotide
ccucggagcaagacaagcu

SEQ ID NO: 2111890 - RNA, 19 nt, Artificial Sequence
  Description of Artificial Sequence: Synthetic oligonucleotide
cacaagaaguaaggccggu

SEQ ID NO: 2111891 - RNA, 19 nt, Artificial Sequence
  Description of Artificial Sequence: Synthetic oligonucleotide
gcacucaguuuuggucuug

SEQ ID NO: 2111892 - RNA, 19 nt, Artificial Sequence
  Description of Artificial Sequence: Synthetic oligonucleotide
cgucuuacacgucacuacu

SEQ ID NO: 2111893 - RNA, 19 nt, Artificial Sequence
  Description of Artificial Sequence: Synthetic oligonucleotide
gcuguucgcugaugcaggu

SEQ ID NO: 2111894 - RNA, 19 nt, Artificial Sequence
  Description of Artificial Sequence: Synthetic oligonucleotide
cagguuugggcucccuauu

SEQ ID NO: 2111895 - RNA, 19 nt, Artificial Sequence
  Description of Artificial Sequence: Synthetic oligonucleotide
gcucuucgccucucggcaa

SEQ ID NO: 2111896 - RNA, 19 nt, Artificial Sequence
  Description of Artificial Sequence: Synthetic oligonucleotide
caucgugccaauggagauu

SEQ ID NO: 2111897 - RNA, 19 nt, Artificial Sequence
  Description of Artificial Sequence: Synthetic oligonucleotide
cugccgggcucugggcuuc

SEQ ID NO: 2111898 - RNA, 19 nt, Artificial Sequence
  Description of Artificial Sequence: Synthetic oligonucleotide
caagggagauaguccuguu

SEQ ID NO: 2111899 - RNA, 19 nt, Artificial Sequence
  Description of Artificial Sequence: Synthetic oligonucleotide
ccgcauuucuagcaucugu

SEQ ID NO: 2111900 - RNA, 19 nt, Artificial Sequence
  Description of Artificial Sequence: Synthetic oligonucleotide
ggagacugggcagcagacu

SEQ ID NO: 2111901 - RNA, 19 nt, Artificial Sequence
  Description of Artificial Sequence: Synthetic oligonucleotide
cgguggugauucaucaaaa

SEQ ID NO: 2111902 - RNA, 19 nt, Artificial Sequence
  Description of Artificial Sequence: Synthetic oligonucleotide
caguaggaacgguguugcu

SEQ ID NO: 2111903 - RNA, 19 nt, Artificial Sequence
  Description of Artificial Sequence: Synthetic oligonucleotide
cgcauuucuagcaucuguu

SEQ ID NO: 2111904 - RNA, 19 nt, Artificial Sequence
  Description of Artificial Sequence: Synthetic oligonucleotide
cccauuuguagaggccaca

SEQ ID NO: 2111905 - RNA, 19 nt, Artificial Sequence
  Description of Artificial Sequence: Synthetic oligonucleotide
gggcucccuauuacaccug

SEQ ID NO: 2111906 - RNA, 19 nt, Artificial Sequence
  Description of Artificial Sequence: Synthetic oligonucleotide
cuacaucuugggguuucau

SEQ ID NO: 2111907 - RNA, 19 nt, Artificial Sequence
  Description of Artificial Sequence: Synthetic oligonucleotide
ggugcacgucuuacacguc

SEQ ID NO: 2111908 - RNA, 19 nt, Artificial Sequence
  Description of Artificial Sequence: Synthetic oligonucleotide
ccgcucccauuuguagagg

SEQ ID NO: 2111909 - RNA, 19 nt, Artificial Sequence
  Description of Artificial Sequence: Synthetic oligonucleotide
ggcaugcucuucgccucuc

SEQ ID NO: 2111910 - RNA, 19 nt, Artificial Sequence
  Description of Artificial Sequence: Synthetic oligonucleotide
cuccgaucuuuggaccagu

SEQ ID NO: 2111911 - RNA, 19 nt, Artificial Sequence
  Description of Artificial Sequence: Synthetic oligonucleotide
ggggaacucugccccaguu

SEQ ID NO: 2111912 - RNA, 19 nt, Artificial Sequence
  Description of Artificial Sequence: Synthetic oligonucleotide
gcucccuauuacaccugaa

SEQ ID NO: 2111913 - RNA, 19 nt, Artificial Sequence
  Description of Artificial Sequence: Synthetic oligonucleotide
ggagccugucaagggagau

SEQ ID NO: 2111914 - RNA, 19 nt, Artificial Sequence
  Description of Artificial Sequence: Synthetic oligonucleotide
ccucucggcaacaggguuu

SEQ ID NO: 2111915 - RNA, 19 nt, Artificial Sequence
  Description of Artificial Sequence: Synthetic oligonucleotide
gggguuauuuaaggcuauu

SEQ ID NO: 2111916 - RNA, 19 nt, Artificial Sequence
  Description of Artificial Sequence: Synthetic oligonucleotide
ccaucccgcucccauuugu

SEQ ID NO: 2111917 - RNA, 19 nt, Artificial Sequence
  Description of Artificial Sequence: Synthetic oligonucleotide
cgggcucugggcuucauuu

SEQ ID NO: 2111918 - RNA, 19 nt, Artificial Sequence
  Description of Artificial Sequence: Synthetic oligonucleotide
cgucacuacucggcauuuc

SEQ ID NO: 2111919 - RNA, 19 nt, Artificial Sequence
  Description of Artificial Sequence: Synthetic oligonucleotide
ggguuucaucuguuuccuu

SEQ ID NO: 2111920 - RNA, 19 nt, Artificial Sequence
  Description of Artificial Sequence: Synthetic oligonucleotide
ccgaucuuuggaccaguuu

SEQ ID NO: 2111921 - RNA, 19 nt, Artificial Sequence
  Description of Artificial Sequence: Synthetic oligonucleotide
ggccggucaugagaaccau

SEQ ID NO: 2111922 - RNA, 19 nt, Artificial Sequence
  Description of Artificial Sequence: Synthetic oligonucleotide
cagcuacaucuugggguuu

SEQ ID NO: 2111923 - RNA, 19 nt, Artificial Sequence
  Description of Artificial Sequence: Synthetic oligonucleotide
gccggucaugagaaccauu

SEQ ID NO: 2111924 - RNA, 19 nt, Artificial Sequence
  Description of Artificial Sequence: Synthetic oligonucleotide
gccugucaagggagauagu

SEQ ID NO: 2111925 - RNA, 19 nt, Artificial Sequence
  Description of Artificial Sequence: Synthetic oligonucleotide
gccccaguucgaggagacu

SEQ ID NO: 2111926 - RNA, 19 nt, Artificial Sequence
  Description of Artificial Sequence: Synthetic oligonucleotide
ccgggcucugggcuucauu

SEQ ID NO: 2111927 - RNA, 19 nt, Artificial Sequence
  Description of Artificial Sequence: Synthetic oligonucleotide
cucacaaacaggaugaugc

SEQ ID NO: 2111928 - RNA, 19 nt, Artificial Sequence
  Description of Artificial Sequence: Synthetic oligonucleotide
ucgacaaccggcuuuaugg

SEQ ID NO: 2111929 - RNA, 19 nt, Artificial Sequence
  Description of Artificial Sequence: Synthetic oligonucleotide
cuuuacagaaaacaguucc

SEQ ID NO: 2111930 - RNA, 19 nt, Artificial Sequence
  Description of Artificial Sequence: Synthetic oligonucleotide
ucaagugacagaacugucg

SEQ ID NO: 2111931 - RNA, 19 nt, Artificial Sequence
  Description of Artificial Sequence: Synthetic oligonucleotide
aucgucgccauccugaggc

SEQ ID NO: 2111932 - RNA, 19 nt, Artificial Sequence
  Description of Artificial Sequence: Synthetic oligonucleotide
ucaaagacauuguugagug

SEQ ID NO: 2111933 - RNA, 19 nt, Artificial Sequence
  Description of Artificial Sequence: Synthetic oligonucleotide
uuuuaucaggugcagaaga

SEQ ID NO: 2111934 - RNA, 19 nt, Artificial Sequence
  Description of Artificial Sequence: Synthetic oligonucleotide
uaauucaggaugaucagac

SEQ ID NO: 2111935 - RNA, 19 nt, Artificial Sequence
  Description of Artificial Sequence: Synthetic oligonucleotide
uugagugugugcaugaaga

SEQ ID NO: 2111936 - RNA, 19 nt, Artificial Sequence
  Description of Artificial Sequence: Synthetic oligonucleotide
aauccugcucuggagaucg

SEQ ID NO: 2111937 - RNA, 19 nt, Artificial Sequence
  Description of Artificial Sequence: Synthetic oligonucleotide
ugaaguucaaggccaacug

SEQ ID NO: 2111938 - RNA, 19 nt, Artificial Sequence
  Description of Artificial Sequence: Synthetic oligonucleotide
uaucaggugcagaagaugu

SEQ ID NO: 2111939 - RNA, 19 nt, Artificial Sequence
  Description of Artificial Sequence: Synthetic oligonucleotide
agaagagauggauagcuug

SEQ ID NO: 2111940 - RNA, 19 nt, Artificial Sequence
  Description of Artificial Sequence: Synthetic oligonucleotide
ugugcauuagucaguaaac

SEQ ID NO: 2111941 - RNA, 19 nt, Artificial Sequence
  Description of Artificial Sequence: Synthetic oligonucleotide
ggaacagggauauauaggc

SEQ ID NO: 2111942 - RNA, 19 nt, Artificial Sequence
  Description of Artificial Sequence: Synthetic oligonucleotide
aaaccuaugucgacaaccg

SEQ ID NO: 2111943 - RNA, 19 nt, Artificial Sequence
  Description of Artificial Sequence: Synthetic oligonucleotide
aagaugaugaggucuggca

SEQ ID NO: 2111944 - RNA, 19 nt, Artificial Sequence
  Description of Artificial Sequence: Synthetic oligonucleotide
uuuacagaaaacaguuccu

SEQ ID NO: 2111945 - RNA, 19 nt, Artificial Sequence
  Description of Artificial Sequence: Synthetic oligonucleotide
gauguauggcuccauaaac

SEQ ID NO: 2111946 - RNA, 19 nt, Artificial Sequence
  Description of Artificial Sequence: Synthetic oligonucleotide
cauugaagaaguccgaaug

SEQ ID NO: 2111947 - RNA, 19 nt, Artificial Sequence
  Description of Artificial Sequence: Synthetic oligonucleotide
gucgaugauaucuuggccc

SEQ ID NO: 2111948 - RNA, 19 nt, Artificial Sequence
  Description of Artificial Sequence: Synthetic oligonucleotide
aguaaaccacccuugaagu

SEQ ID NO: 2111949 - RNA, 19 nt, Artificial Sequence
  Description of Artificial Sequence: Synthetic oligonucleotide
gaugaggucuggcaggcgg

SEQ ID NO: 2111950 - RNA, 19 nt, Artificial Sequence
  Description of Artificial Sequence: Synthetic oligonucleotide
cauuagucaguaaaccacc

SEQ ID NO: 2111951 - RNA, 19 nt, Artificial Sequence
  Description of Artificial Sequence: Synthetic oligonucleotide
gcuccauaaaccuaugucg

SEQ ID NO: 2111952 - RNA, 19 nt, Artificial Sequence
  Description of Artificial Sequence: Synthetic oligonucleotide
ucgaagaggcucuuuacag

SEQ ID NO: 2111953 - RNA, 19 nt, Artificial Sequence
  Description of Artificial Sequence: Synthetic oligonucleotide
ugagucaucguugccaggg

SEQ ID NO: 2111954 - RNA, 19 nt, Artificial Sequence
  Description of Artificial Sequence: Synthetic oligonucleotide
ugcauuagucaguaaacca

SEQ ID NO: 2111955 - RNA, 19 nt, Artificial Sequence
  Description of Artificial Sequence: Synthetic oligonucleotide
caguaaaccacccuugaag

SEQ ID NO: 2111956 - RNA, 19 nt, Artificial Sequence
  Description of Artificial Sequence: Synthetic oligonucleotide
uguauggcuccauaaaccu

SEQ ID NO: 2111957 - RNA, 19 nt, Artificial Sequence
  Description of Artificial Sequence: Synthetic oligonucleotide
gaagagauggauagcuugg

SEQ ID NO: 2111958 - RNA, 19 nt, Artificial Sequence
  Description of Artificial Sequence: Synthetic oligonucleotide
auguauggcuccauaaacc

SEQ ID NO: 2111959 - RNA, 19 nt, Artificial Sequence
  Description of Artificial Sequence: Synthetic oligonucleotide
uauggcuccauaaaccuau

SEQ ID NO: 2111960 - RNA, 19 nt, Artificial Sequence
  Description of Artificial Sequence: Synthetic oligonucleotide
guagauucaaggcugucug

SEQ ID NO: 2111961 - RNA, 19 nt, Artificial Sequence
  Description of Artificial Sequence: Synthetic oligonucleotide
ucuagaauccugcucugga

SEQ ID NO: 2111962 - RNA, 19 nt, Artificial Sequence
  Description of Artificial Sequence: Synthetic oligonucleotide
uaccauucagccccgcugg

SEQ ID NO: 2111963 - RNA, 19 nt, Artificial Sequence
  Description of Artificial Sequence: Synthetic oligonucleotide
aacuguagauucaaggcug

SEQ ID NO: 2111964 - RNA, 19 nt, Artificial Sequence
  Description of Artificial Sequence: Synthetic oligonucleotide
ucucaaucaagugacagaa

SEQ ID NO: 2111965 - RNA, 19 nt, Artificial Sequence
  Description of Artificial Sequence: Synthetic oligonucleotide
guuaauucaggaugaucag

SEQ ID NO: 2111966 - RNA, 19 nt, Artificial Sequence
  Description of Artificial Sequence: Synthetic oligonucleotide
agauggauagcuuggggug

SEQ ID NO: 2111967 - RNA, 19 nt, Artificial Sequence
  Description of Artificial Sequence: Synthetic oligonucleotide
accuaugucgacaaccggc

SEQ ID NO: 2111968 - RNA, 19 nt, Artificial Sequence
  Description of Artificial Sequence: Synthetic oligonucleotide
aguggcacaucuagaaucc

SEQ ID NO: 2111969 - RNA, 19 nt, Artificial Sequence
  Description of Artificial Sequence: Synthetic oligonucleotide
aagauguauggcuccauaa

SEQ ID NO: 2111970 - RNA, 19 nt, Artificial Sequence
  Description of Artificial Sequence: Synthetic oligonucleotide
aucguugccagggauaggg

SEQ ID NO: 2111971 - RNA, 19 nt, Artificial Sequence
  Description of Artificial Sequence: Synthetic oligonucleotide
augauaucuuggcccaggc

SEQ ID NO: 2111972 - RNA, 19 nt, Artificial Sequence
  Description of Artificial Sequence: Synthetic oligonucleotide
ucaccauccuaccauucag

SEQ ID NO: 2111973 - RNA, 19 nt, Artificial Sequence
  Description of Artificial Sequence: Synthetic oligonucleotide
uucucaaucaagugacaga

SEQ ID NO: 2111974 - RNA, 19 nt, Artificial Sequence
  Description of Artificial Sequence: Synthetic oligonucleotide
auuagucaguaaaccaccc

SEQ ID NO: 2111975 - RNA, 19 nt, Artificial Sequence
  Description of Artificial Sequence: Synthetic oligonucleotide
uauaggccaaggcuggaca

SEQ ID NO: 2111976 - RNA, 19 nt, Artificial Sequence
  Description of Artificial Sequence: Synthetic oligonucleotide
guuaccaaagauguauggc

SEQ ID NO: 2111977 - RNA, 19 nt, Artificial Sequence
  Description of Artificial Sequence: Synthetic oligonucleotide
uuuaucaggugcagaagau

SEQ ID NO: 2111978 - RNA, 19 nt, Artificial Sequence
  Description of Artificial Sequence: Synthetic oligonucleotide
acaaccggcuuuauggccc

SEQ ID NO: 2111979 - RNA, 19 nt, Artificial Sequence
  Description of Artificial Sequence: Synthetic oligonucleotide
aaccuaugucgacaaccgg

SEQ ID NO: 2111980 - RNA, 19 nt, Artificial Sequence
  Description of Artificial Sequence: Synthetic oligonucleotide
gaacuauaggucucugaug

SEQ ID NO: 2111981 - RNA, 19 nt, Artificial Sequence
  Description of Artificial Sequence: Synthetic oligonucleotide
uuaauucaggaugaucaga

SEQ ID NO: 2111982 - RNA, 19 nt, Artificial Sequence
  Description of Artificial Sequence: Synthetic oligonucleotide
aaaccacccuugaaguagc

SEQ ID NO: 2111983 - RNA, 19 nt, Artificial Sequence
  Description of Artificial Sequence: Synthetic oligonucleotide
agaacugucgguuccugcu

SEQ ID NO: 2111984 - RNA, 19 nt, Artificial Sequence
  Description of Artificial Sequence: Synthetic oligonucleotide
ucuagugugggagcagggg

SEQ ID NO: 2111985 - RNA, 19 nt, Artificial Sequence
  Description of Artificial Sequence: Synthetic oligonucleotide
ucgaugauaucuuggccca

SEQ ID NO: 2111986 - RNA, 19 nt, Artificial Sequence
  Description of Artificial Sequence: Synthetic oligonucleotide
ugcgguaggccacaugagc

SEQ ID NO: 2111987 - RNA, 19 nt, Artificial Sequence
  Description of Artificial Sequence: Synthetic oligonucleotide
uuagucaguaaaccacccu

SEQ ID NO: 2111988 - RNA, 19 nt, Artificial Sequence
  Description of Artificial Sequence: Synthetic oligonucleotide
gaaguagcgggugugagca

SEQ ID NO: 2111989 - RNA, 19 nt, Artificial Sequence
  Description of Artificial Sequence: Synthetic oligonucleotide
aagagcuugcagaagagau

SEQ ID NO: 2111990 - RNA, 19 nt, Artificial Sequence
  Description of Artificial Sequence: Synthetic oligonucleotide
ucaucguugccagggauag

SEQ ID NO: 2111991 - RNA, 19 nt, Artificial Sequence
  Description of Artificial Sequence: Synthetic oligonucleotide
ugugagcauacucuccgca

SEQ ID NO: 2111992 - RNA, 19 nt, Artificial Sequence
  Description of Artificial Sequence: Synthetic oligonucleotide
ugaucagacucuggggugg

SEQ ID NO: 2111993 - RNA, 19 nt, Artificial Sequence
  Description of Artificial Sequence: Synthetic oligonucleotide
ugaaguagcgggugugagc

SEQ ID NO: 2111994 - RNA, 19 nt, Artificial Sequence
  Description of Artificial Sequence: Synthetic oligonucleotide
ucugcaaccgaugcagugc

SEQ ID NO: 2111995 - RNA, 19 nt, Artificial Sequence
  Description of Artificial Sequence: Synthetic oligonucleotide
cuagugugggagcaggggc

SEQ ID NO: 2111996 - RNA, 19 nt, Artificial Sequence
  Description of Artificial Sequence: Synthetic oligonucleotide
ugagcauacucuccgcagu

SEQ ID NO: 2111997 - RNA, 19 nt, Artificial Sequence
  Description of Artificial Sequence: Synthetic oligonucleotide
caguggcacaucuagaauc

SEQ ID NO: 2111998 - RNA, 19 nt, Artificial Sequence
  Description of Artificial Sequence: Synthetic oligonucleotide
uuggggugagucaucguug

SEQ ID NO: 2111999 - RNA, 19 nt, Artificial Sequence
  Description of Artificial Sequence: Synthetic oligonucleotide
acaaggagccuccugcuca

SEQ ID NO: 2112000 - RNA, 19 nt, Artificial Sequence
  Description of Artificial Sequence: Synthetic oligonucleotide
agauguauggcuccauaaa

SEQ ID NO: 2112001 - RNA, 19 nt, Artificial Sequence
  Description of Artificial Sequence: Synthetic oligonucleotide
aaguccgaaugcugcagug

SEQ ID NO: 2112002 - RNA, 19 nt, Artificial Sequence
  Description of Artificial Sequence: Synthetic oligonucleotide
agggauauauaggccaagg

SEQ ID NO: 2112003 - RNA, 19 nt, Artificial Sequence
  Description of Artificial Sequence: Synthetic oligonucleotide
ugacauugaagaaguccga

SEQ ID NO: 2112004 - RNA, 19 nt, Artificial Sequence
  Description of Artificial Sequence: Synthetic oligonucleotide
aggucuggcaggcggaccg

SEQ ID NO: 2112005 - RNA, 19 nt, Artificial Sequence
  Description of Artificial Sequence: Synthetic oligonucleotide
aucuugggaacuauagguc

SEQ ID NO: 2112006 - RNA, 19 nt, Artificial Sequence
  Description of Artificial Sequence: Synthetic oligonucleotide
uggcacaucuagaauccug

SEQ ID NO: 2112007 - RNA, 19 nt, Artificial Sequence
  Description of Artificial Sequence: Synthetic oligonucleotide
gacaaccggcuuuauggcc

SEQ ID NO: 2112008 - RNA, 19 nt, Artificial Sequence
  Description of Artificial Sequence: Synthetic oligonucleotide
cuggagaucgucgccaucc

SEQ ID NO: 2112009 - RNA, 19 nt, Artificial Sequence
  Description of Artificial Sequence: Synthetic oligonucleotide
uaugucgacaaccggcuuu

SEQ ID NO: 2112010 - RNA, 19 nt, Artificial Sequence
  Description of Artificial Sequence: Synthetic oligonucleotide
uauucucaaucaagugaca

SEQ ID NO: 2112011 - RNA, 19 nt, Artificial Sequence
  Description of Artificial Sequence: Synthetic oligonucleotide
cauucagccccgcugggcc

SEQ ID NO: 2112012 - RNA, 19 nt, Artificial Sequence
  Description of Artificial Sequence: Synthetic oligonucleotide
aggcauggguugcaguugg

SEQ ID NO: 2112013 - RNA, 19 nt, Artificial Sequence
  Description of Artificial Sequence: Synthetic oligonucleotide
uccauaaaccuaugucgac

SEQ ID NO: 2112014 - RNA, 19 nt, Artificial Sequence
  Description of Artificial Sequence: Synthetic oligonucleotide
ggaugaucagacucugggg

SEQ ID NO: 2112015 - RNA, 19 nt, Artificial Sequence
  Description of Artificial Sequence: Synthetic oligonucleotide
cuccauaaaccuaugucga

SEQ ID NO: 2112016 - RNA, 19 nt, Artificial Sequence
  Description of Artificial Sequence: Synthetic oligonucleotide
auauaggccaaggcuggac

SEQ ID NO: 2112017 - RNA, 19 nt, Artificial Sequence
  Description of Artificial Sequence: Synthetic oligonucleotide
ggggaacagggauauauag

SEQ ID NO: 2112018 - RNA, 19 nt, Artificial Sequence
  Description of Artificial Sequence: Synthetic oligonucleotide
agaggaguugugcauuagu

SEQ ID NO: 2112019 - RNA, 19 nt, Artificial Sequence
  Description of Artificial Sequence: Synthetic oligonucleotide
ugaggcauggguugcaguu

SEQ ID NO: 2112020 - RNA, 19 nt, Artificial Sequence
  Description of Artificial Sequence: Synthetic oligonucleotide
cugcucacaaacaggauga

SEQ ID NO: 2112021 - RNA, 19 nt, Artificial Sequence
  Description of Artificial Sequence: Synthetic oligonucleotide
gggacuggcuuuuaucagg

SEQ ID NO: 2112022 - RNA, 19 nt, Artificial Sequence
  Description of Artificial Sequence: Synthetic oligonucleotide
caggcuuggcucuagugug

SEQ ID NO: 2112023 - RNA, 19 nt, Artificial Sequence
  Description of Artificial Sequence: Synthetic oligonucleotide
agcgggugugagcauacuc

SEQ ID NO: 2112024 - RNA, 19 nt, Artificial Sequence
  Description of Artificial Sequence: Synthetic oligonucleotide
gugagcauacucuccgcag

SEQ ID NO: 2112025 - RNA, 19 nt, Artificial Sequence
  Description of Artificial Sequence: Synthetic oligonucleotide
ggaacucugcaaccgaugc

SEQ ID NO: 2112026 - RNA, 19 nt, Artificial Sequence
  Description of Artificial Sequence: Synthetic oligonucleotide
ugggguucaaagacauugu

SEQ ID NO: 2112027 - RNA, 19 nt, Artificial Sequence
  Description of Artificial Sequence: Synthetic oligonucleotide
gaggaguugugcauuaguc

SEQ ID NO: 2112028 - RNA, 19 nt, Artificial Sequence
  Description of Artificial Sequence: Synthetic oligonucleotide
gagauggauagcuuggggu

SEQ ID NO: 2112029 - RNA, 19 nt, Artificial Sequence
  Description of Artificial Sequence: Synthetic oligonucleotide
gagugugugcaugaagaug

SEQ ID NO: 2112030 - RNA, 19 nt, Artificial Sequence
  Description of Artificial Sequence: Synthetic oligonucleotide
gugcauuagucaguaaacc

SEQ ID NO: 2112031 - RNA, 19 nt, Artificial Sequence
  Description of Artificial Sequence: Synthetic oligonucleotide
aaguucaaggccaacugua

SEQ ID NO: 2112032 - RNA, 19 nt, Artificial Sequence
  Description of Artificial Sequence: Synthetic oligonucleotide
gaacagggauauauaggcc

SEQ ID NO: 2112033 - RNA, 19 nt, Artificial Sequence
  Description of Artificial Sequence: Synthetic oligonucleotide
cauacucuccgcagucccg

SEQ ID NO: 2112034 - RNA, 19 nt, Artificial Sequence
  Description of Artificial Sequence: Synthetic oligonucleotide
ugucgguuccugcucacaa

SEQ ID NO: 2112035 - RNA, 19 nt, Artificial Sequence
  Description of Artificial Sequence: Synthetic oligonucleotide
ggcucuuuacagaaaacag

SEQ ID NO: 2112036 - RNA, 19 nt, Artificial Sequence
  Description of Artificial Sequence: Synthetic oligonucleotide
uauggcccagguguacucg

SEQ ID NO: 2112037 - RNA, 19 nt, Artificial Sequence
  Description of Artificial Sequence: Synthetic oligonucleotide
cuugggaacuauaggucuc

SEQ ID NO: 2112038 - RNA, 19 nt, Artificial Sequence
  Description of Artificial Sequence: Synthetic oligonucleotide
guguacucgggccucgaag

SEQ ID NO: 2112039 - RNA, 19 nt, Artificial Sequence
  Description of Artificial Sequence: Synthetic oligonucleotide
uuuauggcccagguguacu

SEQ ID NO: 2112040 - RNA, 19 nt, Artificial Sequence
  Description of Artificial Sequence: Synthetic oligonucleotide
auggggaacagggauauau

SEQ ID NO: 2112041 - RNA, 19 nt, Artificial Sequence
  Description of Artificial Sequence: Synthetic oligonucleotide
agugacagaacugucgguu

SEQ ID NO: 2112042 - RNA, 19 nt, Artificial Sequence
  Description of Artificial Sequence: Synthetic oligonucleotide
acaaugcccacugugggga

SEQ ID NO: 2112043 - RNA, 19 nt, Artificial Sequence
  Description of Artificial Sequence: Synthetic oligonucleotide
auucagccccgcugggccc

SEQ ID NO: 2112044 - RNA, 19 nt, Artificial Sequence
  Description of Artificial Sequence: Synthetic oligonucleotide
cucuuuacagaaaacaguu

SEQ ID NO: 2112045 - RNA, 19 nt, Artificial Sequence
  Description of Artificial Sequence: Synthetic oligonucleotide
caccauccuaccauucagc

SEQ ID NO: 2112046 - RNA, 19 nt, Artificial Sequence
  Description of Artificial Sequence: Synthetic oligonucleotide
auagcuuggggugagucau

SEQ ID NO: 2112047 - RNA, 19 nt, Artificial Sequence
  Description of Artificial Sequence: Synthetic oligonucleotide
aguccgaaugcugcagugg

SEQ ID NO: 2112048 - RNA, 19 nt, Artificial Sequence
  Description of Artificial Sequence: Synthetic oligonucleotide
ggugagucaucguugccag

SEQ ID NO: 2112049 - RNA, 19 nt, Artificial Sequence
  Description of Artificial Sequence: Synthetic oligonucleotide
aggcucgcugaccaugggg

SEQ ID NO: 2112050 - RNA, 19 nt, Artificial Sequence
  Description of Artificial Sequence: Synthetic oligonucleotide
gagaucgucgccauccuga

SEQ ID NO: 2112051 - RNA, 19 nt, Artificial Sequence
  Description of Artificial Sequence: Synthetic oligonucleotide
agaucgucgccauccugag

SEQ ID NO: 2112052 - RNA, 19 nt, Artificial Sequence
  Description of Artificial Sequence: Synthetic oligonucleotide
gauucaaggcugucugcuc

SEQ ID NO: 2112053 - RNA, 19 nt, Artificial Sequence
  Description of Artificial Sequence: Synthetic oligonucleotide
gcuuuuaucaggugcagaa

SEQ ID NO: 2112054 - RNA, 19 nt, Artificial Sequence
  Description of Artificial Sequence: Synthetic oligonucleotide
ggcuuuauggcccaggugu

SEQ ID NO: 2112055 - RNA, 19 nt, Artificial Sequence
  Description of Artificial Sequence: Synthetic oligonucleotide
cugcaaccgaugcagugcc

SEQ ID NO: 2112056 - RNA, 19 nt, Artificial Sequence
  Description of Artificial Sequence: Synthetic oligonucleotide
caggugcagaagauguccc

SEQ ID NO: 2112057 - RNA, 19 nt, Artificial Sequence
  Description of Artificial Sequence: Synthetic oligonucleotide
aucaagugacagaacuguc

SEQ ID NO: 2112058 - RNA, 19 nt, Artificial Sequence
  Description of Artificial Sequence: Synthetic oligonucleotide
agucaguaaaccacccuug

SEQ ID NO: 2112059 - RNA, 19 nt, Artificial Sequence
  Description of Artificial Sequence: Synthetic oligonucleotide
ggcuccauaaaccuauguc

SEQ ID NO: 2112060 - RNA, 19 nt, Artificial Sequence
  Description of Artificial Sequence: Synthetic oligonucleotide
uucaaggcugucugcucca

SEQ ID NO: 2112061 - RNA, 19 nt, Artificial Sequence
  Description of Artificial Sequence: Synthetic oligonucleotide
uugcgguaggccacaugag

SEQ ID NO: 2112062 - RNA, 19 nt, Artificial Sequence
  Description of Artificial Sequence: Synthetic oligonucleotide
uacucgggccucgaagagg

SEQ ID NO: 2112063 - RNA, 19 nt, Artificial Sequence
  Description of Artificial Sequence: Synthetic oligonucleotide
cuugcagaagagauggaua

SEQ ID NO: 2112064 - RNA, 19 nt, Artificial Sequence
  Description of Artificial Sequence: Synthetic oligonucleotide
cucuagugugggagcaggg

SEQ ID NO: 2112065 - RNA, 19 nt, Artificial Sequence
  Description of Artificial Sequence: Synthetic oligonucleotide
ugugugcaugaagaugaug

SEQ ID NO: 2112066 - RNA, 19 nt, Artificial Sequence
  Description of Artificial Sequence: Synthetic oligonucleotide
agagcuugcagaagagaug

SEQ ID NO: 2112067 - RNA, 19 nt, Artificial Sequence
  Description of Artificial Sequence: Synthetic oligonucleotide
cucugcaaccgaugcagug

SEQ ID NO: 2112068 - RNA, 19 nt, Artificial Sequence
  Description of Artificial Sequence: Synthetic oligonucleotide
ccaaggcuggacaaggagc

SEQ ID NO: 2112069 - RNA, 19 nt, Artificial Sequence
  Description of Artificial Sequence: Synthetic oligonucleotide
acuauaggucucugaugcu

SEQ ID NO: 2112070 - RNA, 19 nt, Artificial Sequence
  Description of Artificial Sequence: Synthetic oligonucleotide
gaugaggcauggguugcag

SEQ ID NO: 2112071 - RNA, 19 nt, Artificial Sequence
  Description of Artificial Sequence: Synthetic oligonucleotide
uccgaaugcugcaguggca

SEQ ID NO: 2112072 - RNA, 19 nt, Artificial Sequence
  Description of Artificial Sequence: Synthetic oligonucleotide
guaagugaugaggcauggg

SEQ ID NO: 2112073 - RNA, 19 nt, Artificial Sequence
  Description of Artificial Sequence: Synthetic oligonucleotide
uggggaacagggauauaua

SEQ ID NO: 2112074 - RNA, 19 nt, Artificial Sequence
  Description of Artificial Sequence: Synthetic oligonucleotide
cucgaagaggcucuuuaca

SEQ ID NO: 2112075 - RNA, 19 nt, Artificial Sequence
  Description of Artificial Sequence: Synthetic oligonucleotide
ggcacaucuagaauccugc

SEQ ID NO: 2112076 - RNA, 19 nt, Artificial Sequence
  Description of Artificial Sequence: Synthetic oligonucleotide
cugcucuggagaucgucgc

SEQ ID NO: 2112077 - RNA, 19 nt, Artificial Sequence
  Description of Artificial Sequence: Synthetic oligonucleotide
acugucgguuccugcucac

SEQ ID NO: 2112078 - RNA, 19 nt, Artificial Sequence
  Description of Artificial Sequence: Synthetic oligonucleotide
agucccgggcuguauucuc

SEQ ID NO: 2112079 - RNA, 19 nt, Artificial Sequence
  Description of Artificial Sequence: Synthetic oligonucleotide
caggaugaucagacucugg

SEQ ID NO: 2112080 - RNA, 19 nt, Artificial Sequence
  Description of Artificial Sequence: Synthetic oligonucleotide
gaucgucgccauccugagg

SEQ ID NO: 2112081 - RNA, 19 nt, Artificial Sequence
  Description of Artificial Sequence: Synthetic oligonucleotide
cagaacugucgguuccugc

SEQ ID NO: 2112082 - RNA, 19 nt, Artificial Sequence
  Description of Artificial Sequence: Synthetic oligonucleotide
gagcauacucuccgcaguc

SEQ ID NO: 2112083 - RNA, 19 nt, Artificial Sequence
  Description of Artificial Sequence: Synthetic oligonucleotide
ugggaacucugcaaccgau

SEQ ID NO: 2112084 - RNA, 19 nt, Artificial Sequence
  Description of Artificial Sequence: Synthetic oligonucleotide
gacauugaagaaguccgaa

SEQ ID NO: 2112085 - RNA, 19 nt, Artificial Sequence
  Description of Artificial Sequence: Synthetic oligonucleotide
gaagagcuugcagaagaga

SEQ ID NO: 2112086 - RNA, 19 nt, Artificial Sequence
  Description of Artificial Sequence: Synthetic oligonucleotide
caaccgaugcagugccucc

SEQ ID NO: 2112087 - RNA, 19 nt, Artificial Sequence
  Description of Artificial Sequence: Synthetic oligonucleotide
uggcuccauaaaccuaugu

SEQ ID NO: 2112088 - RNA, 19 nt, Artificial Sequence
  Description of Artificial Sequence: Synthetic oligonucleotide
uuauggcccagguguacuc

SEQ ID NO: 2112089 - RNA, 19 nt, Artificial Sequence
  Description of Artificial Sequence: Synthetic oligonucleotide
guuccuugacauugaagaa

SEQ ID NO: 2112090 - RNA, 19 nt, Artificial Sequence
  Description of Artificial Sequence: Synthetic oligonucleotide
aguugugcauuagucagua

SEQ ID NO: 2112091 - RNA, 19 nt, Artificial Sequence
  Description of Artificial Sequence: Synthetic oligonucleotide
aaggccaacuguagauuca

SEQ ID NO: 2112092 - RNA, 19 nt, Artificial Sequence
  Description of Artificial Sequence: Synthetic oligonucleotide
auaggccaaggcuggacaa

SEQ ID NO: 2112093 - RNA, 19 nt, Artificial Sequence
  Description of Artificial Sequence: Synthetic oligonucleotide
gaacugucgguuccugcuc

SEQ ID NO: 2112094 - RNA, 19 nt, Artificial Sequence
  Description of Artificial Sequence: Synthetic oligonucleotide
ggaacuauaggucucugau

SEQ ID NO: 2112095 - RNA, 19 nt, Artificial Sequence
  Description of Artificial Sequence: Synthetic oligonucleotide
gucgacaaccggcuuuaug

SEQ ID NO: 2112096 - RNA, 19 nt, Artificial Sequence
  Description of Artificial Sequence: Synthetic oligonucleotide
aucaggugcagaagauguc

SEQ ID NO: 2112097 - RNA, 19 nt, Artificial Sequence
  Description of Artificial Sequence: Synthetic oligonucleotide
cacaugggguucaaagaca

SEQ ID NO: 2112098 - RNA, 19 nt, Artificial Sequence
  Description of Artificial Sequence: Synthetic oligonucleotide
aggcuggacaaggagccuc

SEQ ID NO: 2112099 - RNA, 19 nt, Artificial Sequence
  Description of Artificial Sequence: Synthetic oligonucleotide
uggcuuuuaucaggugcag

SEQ ID NO: 2112100 - RNA, 19 nt, Artificial Sequence
  Description of Artificial Sequence: Synthetic oligonucleotide
agucaucguugccagggau

SEQ ID NO: 2112101 - RNA, 19 nt, Artificial Sequence
  Description of Artificial Sequence: Synthetic oligonucleotide
accauucagccccgcuggg

SEQ ID NO: 2112102 - RNA, 19 nt, Artificial Sequence
  Description of Artificial Sequence: Synthetic oligonucleotide
guacucgggccucgaagag

SEQ ID NO: 2112103 - RNA, 19 nt, Artificial Sequence
  Description of Artificial Sequence: Synthetic oligonucleotide
accacccuugaaguagcgg

SEQ ID NO: 2112104 - RNA, 19 nt, Artificial Sequence
  Description of Artificial Sequence: Synthetic oligonucleotide
cuuuauggcccagguguac

SEQ ID NO: 2112105 - RNA, 19 nt, Artificial Sequence
  Description of Artificial Sequence: Synthetic oligonucleotide
ucgccuucugcaggaaacc

SEQ ID NO: 2112106 - RNA, 19 nt, Artificial Sequence
  Description of Artificial Sequence: Synthetic oligonucleotide
gugaggacagccggagcgg

SEQ ID NO: 2112107 - RNA, 19 nt, Artificial Sequence
  Description of Artificial Sequence: Synthetic oligonucleotide
caggaaaccuggccagcgc

SEQ ID NO: 2112108 - RNA, 19 nt, Artificial Sequence
  Description of Artificial Sequence: Synthetic oligonucleotide
ugcaguugguguccacaau

SEQ ID NO: 2112109 - RNA, 19 nt, Artificial Sequence
  Description of Artificial Sequence: Synthetic oligonucleotide
ggccacaugagccgugaag

SEQ ID NO: 2112110 - RNA, 19 nt, Artificial Sequence
  Description of Artificial Sequence: Synthetic oligonucleotide
gcauacucuccgcaguccc

SEQ ID NO: 2112111 - RNA, 19 nt, Artificial Sequence
  Description of Artificial Sequence: Synthetic oligonucleotide
aaaccuggccagcgccaca

SEQ ID NO: 2112112 - RNA, 19 nt, Artificial Sequence
  Description of Artificial Sequence: Synthetic oligonucleotide
aaccgaugcagugccucca

SEQ ID NO: 2112113 - RNA, 19 nt, Artificial Sequence
  Description of Artificial Sequence: Synthetic oligonucleotide
gugugagcauacucuccgc

SEQ ID NO: 2112114 - RNA, 19 nt, Artificial Sequence
  Description of Artificial Sequence: Synthetic oligonucleotide
aaccacccuugaaguagcg

SEQ ID NO: 2112115 - RNA, 19 nt, Artificial Sequence
  Description of Artificial Sequence: Synthetic oligonucleotide
ucccgucaccauccuacca

SEQ ID NO: 2112116 - RNA, 19 nt, Artificial Sequence
  Description of Artificial Sequence: Synthetic oligonucleotide
guaaaccacccuugaagua

SEQ ID NO: 2112117 - RNA, 19 nt, Artificial Sequence
  Description of Artificial Sequence: Synthetic oligonucleotide
gacagccggagcgggagcc

SEQ ID NO: 2112118 - RNA, 19 nt, Artificial Sequence
  Description of Artificial Sequence: Synthetic oligonucleotide
auaucuuggcccaggcggu

SEQ ID NO: 2112119 - RNA, 19 nt, Artificial Sequence
  Description of Artificial Sequence: Synthetic oligonucleotide
gaaaccuggccagcgccac

SEQ ID NO: 2112120 - RNA, 19 nt, Artificial Sequence
  Description of Artificial Sequence: Synthetic oligonucleotide
ugaugaggcauggguugca

SEQ ID NO: 2112121 - RNA, 19 nt, Artificial Sequence
  Description of Artificial Sequence: Synthetic oligonucleotide
ggauaggguaagugaugag

SEQ ID NO: 2112122 - RNA, 19 nt, Artificial Sequence
  Description of Artificial Sequence: Synthetic oligonucleotide
ugcacaccgcagccgggug

SEQ ID NO: 2112123 - RNA, 19 nt, Artificial Sequence
  Description of Artificial Sequence: Synthetic oligonucleotide
gcagaagaugucccacugc

SEQ ID NO: 2112124 - RNA, 19 nt, Artificial Sequence
  Description of Artificial Sequence: Synthetic oligonucleotide
acuugggcucccgucacca

SEQ ID NO: 2112125 - RNA, 19 nt, Artificial Sequence
  Description of Artificial Sequence: Synthetic oligonucleotide
auaggucucugaugcugau

SEQ ID NO: 2112126 - RNA, 19 nt, Artificial Sequence
  Description of Artificial Sequence: Synthetic oligonucleotide
gaggcucgcugaccauggg

SEQ ID NO: 2112127 - RNA, 19 nt, Artificial Sequence
  Description of Artificial Sequence: Synthetic oligonucleotide
cuggacaaggagccuccug

SEQ ID NO: 2112128 - RNA, 19 nt, Artificial Sequence
  Description of Artificial Sequence: Synthetic oligonucleotide
ucguugccagggauagggu

SEQ ID NO: 2112129 - RNA, 19 nt, Artificial Sequence
  Description of Artificial Sequence: Synthetic oligonucleotide
cuugaaguagcggguguga

SEQ ID NO: 2112130 - RNA, 19 nt, Artificial Sequence
  Description of Artificial Sequence: Synthetic oligonucleotide
cucccgucaccauccuacc

SEQ ID NO: 2112131 - RNA, 19 nt, Artificial Sequence
  Description of Artificial Sequence: Synthetic oligonucleotide
gacuugggcucccgucacc

SEQ ID NO: 2112132 - RNA, 19 nt, Artificial Sequence
  Description of Artificial Sequence: Synthetic oligonucleotide
ccagggauaggguaaguga

SEQ ID NO: 2112133 - RNA, 19 nt, Artificial Sequence
  Description of Artificial Sequence: Synthetic oligonucleotide
gaucagacucugggguggc

SEQ ID NO: 2112134 - RNA, 19 nt, Artificial Sequence
  Description of Artificial Sequence: Synthetic oligonucleotide
cugaggcucgcugaccaug

SEQ ID NO: 2112135 - RNA, 19 nt, Artificial Sequence
  Description of Artificial Sequence: Synthetic oligonucleotide
ccauccuaccauucagccc

SEQ ID NO: 2112136 - RNA, 19 nt, Artificial Sequence
  Description of Artificial Sequence: Synthetic oligonucleotide
gcaggaaaccuggccagcg

SEQ ID NO: 2112137 - RNA, 19 nt, Artificial Sequence
  Description of Artificial Sequence: Synthetic oligonucleotide
ccugggaacucugcaaccg

SEQ ID NO: 2112138 - RNA, 19 nt, Artificial Sequence
  Description of Artificial Sequence: Synthetic oligonucleotide
gcgguaggccacaugagcc

SEQ ID NO: 2112139 - RNA, 19 nt, Artificial Sequence
  Description of Artificial Sequence: Synthetic oligonucleotide
acagaacugucgguuccug

SEQ ID NO: 2112140 - RNA, 19 nt, Artificial Sequence
  Description of Artificial Sequence: Synthetic oligonucleotide
cagggauauauaggccaag

SEQ ID NO: 2112141 - RNA, 19 nt, Artificial Sequence
  Description of Artificial Sequence: Synthetic oligonucleotide
ugggaacuauaggucucug

SEQ ID NO: 2112142 - RNA, 19 nt, Artificial Sequence
  Description of Artificial Sequence: Synthetic oligonucleotide
accggcuuuauggcccagg

SEQ ID NO: 2112143 - RNA, 19 nt, Artificial Sequence
  Description of Artificial Sequence: Synthetic oligonucleotide
gccgggugaggacagccgg

SEQ ID NO: 2112144 - RNA, 19 nt, Artificial Sequence
  Description of Artificial Sequence: Synthetic oligonucleotide
cagggauaggguaagugau

SEQ ID NO: 2112145 - RNA, 19 nt, Artificial Sequence
  Description of Artificial Sequence: Synthetic oligonucleotide
gcucccgucaccauccuac

SEQ ID NO: 2112146 - RNA, 19 nt, Artificial Sequence
  Description of Artificial Sequence: Synthetic oligonucleotide
aagaggcucuuuacagaaa

SEQ ID NO: 2112147 - RNA, 19 nt, Artificial Sequence
  Description of Artificial Sequence: Synthetic oligonucleotide
ugaggucuggcaggcggac

SEQ ID NO: 2112148 - RNA, 19 nt, Artificial Sequence
  Description of Artificial Sequence: Synthetic oligonucleotide
gcagaagagauggauagcu

SEQ ID NO: 2112149 - RNA, 19 nt, Artificial Sequence
  Description of Artificial Sequence: Synthetic oligonucleotide
gggaacuauaggucucuga

SEQ ID NO: 2112150 - RNA, 19 nt, Artificial Sequence
  Description of Artificial Sequence: Synthetic oligonucleotide
ugcaaccgaugcagugccu

SEQ ID NO: 2112151 - RNA, 19 nt, Artificial Sequence
  Description of Artificial Sequence: Synthetic oligonucleotide
cacacaccugcacaccgca

SEQ ID NO: 2112152 - RNA, 19 nt, Artificial Sequence
  Description of Artificial Sequence: Synthetic oligonucleotide
ucgggccucgaagaggcuc

SEQ ID NO: 2112153 - RNA, 19 nt, Artificial Sequence
  Description of Artificial Sequence: Synthetic oligonucleotide
cacaccgcagccgggugag

SEQ ID NO: 2112154 - RNA, 19 nt, Artificial Sequence
  Description of Artificial Sequence: Synthetic oligonucleotide
ugcugcaguggcacaucua

SEQ ID NO: 2112155 - RNA, 19 nt, Artificial Sequence
  Description of Artificial Sequence: Synthetic oligonucleotide
augucgacaaccggcuuua

SEQ ID NO: 2112156 - RNA, 19 nt, Artificial Sequence
  Description of Artificial Sequence: Synthetic oligonucleotide
aaguagcgggugugagcau

SEQ ID NO: 2112157 - RNA, 19 nt, Artificial Sequence
  Description of Artificial Sequence: Synthetic oligonucleotide
uccugucauggggacuggc

SEQ ID NO: 2112158 - RNA, 19 nt, Artificial Sequence
  Description of Artificial Sequence: Synthetic oligonucleotide
augcccacuguggggaugu

SEQ ID NO: 2112159 - RNA, 19 nt, Artificial Sequence
  Description of Artificial Sequence: Synthetic oligonucleotide
guagcgggugugagcauac

SEQ ID NO: 2112160 - RNA, 19 nt, Artificial Sequence
  Description of Artificial Sequence: Synthetic oligonucleotide
ggagcaggggcuccuguca

SEQ ID NO: 2112161 - RNA, 19 nt, Artificial Sequence
  Description of Artificial Sequence: Synthetic oligonucleotide
gccgugaaguucaaggcca

SEQ ID NO: 2112162 - RNA, 19 nt, Artificial Sequence
  Description of Artificial Sequence: Synthetic oligonucleotide
cugggaacucugcaaccga

SEQ ID NO: 2112163 - RNA, 19 nt, Artificial Sequence
  Description of Artificial Sequence: Synthetic oligonucleotide
gcucuuuacagaaaacagu

SEQ ID NO: 2112164 - RNA, 19 nt, Artificial Sequence
  Description of Artificial Sequence: Synthetic oligonucleotide
ugggcccaaagaggaguug

SEQ ID NO: 2112165 - RNA, 19 nt, Artificial Sequence
  Description of Artificial Sequence: Synthetic oligonucleotide
ccauaaaccuaugucgaca

SEQ ID NO: 2112166 - RNA, 19 nt, Artificial Sequence
  Description of Artificial Sequence: Synthetic oligonucleotide
ccgaaugcugcaguggcac

SEQ ID NO: 2112167 - RNA, 19 nt, Artificial Sequence
  Description of Artificial Sequence: Synthetic oligonucleotide
ggauagcuuggggugaguc

SEQ ID NO: 2112168 - RNA, 19 nt, Artificial Sequence
  Description of Artificial Sequence: Synthetic oligonucleotide
gucgguuccugcucacaaa

SEQ ID NO: 2112169 - RNA, 19 nt, Artificial Sequence
  Description of Artificial Sequence: Synthetic oligonucleotide
ugcucacaaacaggaugau

SEQ ID NO: 2112170 - RNA, 19 nt, Artificial Sequence
  Description of Artificial Sequence: Synthetic oligonucleotide
ccaggucgaugauaucuug

SEQ ID NO: 2112171 - RNA, 19 nt, Artificial Sequence
  Description of Artificial Sequence: Synthetic oligonucleotide
gccagggauaggguaagug

SEQ ID NO: 2112172 - RNA, 19 nt, Artificial Sequence
  Description of Artificial Sequence: Synthetic oligonucleotide
gggaacucugcaaccgaug

SEQ ID NO: 2112173 - RNA, 19 nt, Artificial Sequence
  Description of Artificial Sequence: Synthetic oligonucleotide
gucaucguugccagggaua

SEQ ID NO: 2112174 - RNA, 19 nt, Artificial Sequence
  Description of Artificial Sequence: Synthetic oligonucleotide
ggcuguccggaagagcuug

SEQ ID NO: 2112175 - RNA, 19 nt, Artificial Sequence
  Description of Artificial Sequence: Synthetic oligonucleotide
caucguugccagggauagg

SEQ ID NO: 2112176 - RNA, 19 nt, Artificial Sequence
  Description of Artificial Sequence: Synthetic oligonucleotide
augaggucuggcaggcgga

SEQ ID NO: 2112177 - RNA, 19 nt, Artificial Sequence
  Description of Artificial Sequence: Synthetic oligonucleotide
caucccucacagccacaug

SEQ ID NO: 2112178 - RNA, 19 nt, Artificial Sequence
  Description of Artificial Sequence: Synthetic oligonucleotide
gaguugugcauuagucagu

SEQ ID NO: 2112179 - RNA, 19 nt, Artificial Sequence
  Description of Artificial Sequence: Synthetic oligonucleotide
cgacaaccggcuuuauggc

SEQ ID NO: 2112180 - RNA, 19 nt, Artificial Sequence
  Description of Artificial Sequence: Synthetic oligonucleotide
cagguguacucgggccucg

SEQ ID NO: 2112181 - RNA, 19 nt, Artificial Sequence
  Description of Artificial Sequence: Synthetic oligonucleotide
gcgguuaccaaagauguau

SEQ ID NO: 2112182 - RNA, 19 nt, Artificial Sequence
  Description of Artificial Sequence: Synthetic oligonucleotide
gccacaugagccgugaagu

SEQ ID NO: 2112183 - RNA, 19 nt, Artificial Sequence
  Description of Artificial Sequence: Synthetic oligonucleotide
guauggcuccauaaaccua

SEQ ID NO: 2112184 - RNA, 19 nt, Artificial Sequence
  Description of Artificial Sequence: Synthetic oligonucleotide
gggugugagcauacucucc

SEQ ID NO: 2112185 - RNA, 19 nt, Artificial Sequence
  Description of Artificial Sequence: Synthetic oligonucleotide
guugugcauuagucaguaa

SEQ ID NO: 2112186 - RNA, 19 nt, Artificial Sequence
  Description of Artificial Sequence: Synthetic oligonucleotide
ccacacaccugcacaccgc

SEQ ID NO: 2112187 - RNA, 19 nt, Artificial Sequence
  Description of Artificial Sequence: Synthetic oligonucleotide
gcaaccgaugcagugccuc

SEQ ID NO: 2112188 - RNA, 19 nt, Artificial Sequence
  Description of Artificial Sequence: Synthetic oligonucleotide
auccuaccauucagccccg

SEQ ID NO: 2112189 - RNA, 19 nt, Artificial Sequence
  Description of Artificial Sequence: Synthetic oligonucleotide
cgguuaccaaagauguaug

SEQ ID NO: 2112190 - RNA, 19 nt, Artificial Sequence
  Description of Artificial Sequence: Synthetic oligonucleotide
guaggccacaugagccgug

SEQ ID NO: 2112191 - RNA, 19 nt, Artificial Sequence
  Description of Artificial Sequence: Synthetic oligonucleotide
ggggacuugggcucccguc

SEQ ID NO: 2112192 - RNA, 19 nt, Artificial Sequence
  Description of Artificial Sequence: Synthetic oligonucleotide
caaagacauuguugagugu

SEQ ID NO: 2112193 - RNA, 19 nt, Artificial Sequence
  Description of Artificial Sequence: Synthetic oligonucleotide
uggauagcuuggggugagu

SEQ ID NO: 2112194 - RNA, 19 nt, Artificial Sequence
  Description of Artificial Sequence: Synthetic oligonucleotide
gccggagcgggagccaugg

SEQ ID NO: 2112195 - RNA, 19 nt, Artificial Sequence
  Description of Artificial Sequence: Synthetic oligonucleotide
ccuaugucgacaaccggcu

SEQ ID NO: 2112196 - RNA, 19 nt, Artificial Sequence
  Description of Artificial Sequence: Synthetic oligonucleotide
uaucuuggcccaggcgguu

SEQ ID NO: 2112197 - RNA, 19 nt, Artificial Sequence
  Description of Artificial Sequence: Synthetic oligonucleotide
caaccggcuuuauggccca

SEQ ID NO: 2112198 - RNA, 19 nt, Artificial Sequence
  Description of Artificial Sequence: Synthetic oligonucleotide
cacccuugaaguagcgggu

SEQ ID NO: 2112199 - RNA, 19 nt, Artificial Sequence
  Description of Artificial Sequence: Synthetic oligonucleotide
cagcgccacacaccugcac

SEQ ID NO: 2112200 - RNA, 19 nt, Artificial Sequence
  Description of Artificial Sequence: Synthetic oligonucleotide
aaccggcuuuauggcccag

SEQ ID NO: 2112201 - RNA, 19 nt, Artificial Sequence
  Description of Artificial Sequence: Synthetic oligonucleotide
ggggugagucaucguugcc

SEQ ID NO: 2112202 - RNA, 19 nt, Artificial Sequence
  Description of Artificial Sequence: Synthetic oligonucleotide
gcgccacacaccugcacac

SEQ ID NO: 2112203 - RNA, 19 nt, Artificial Sequence
  Description of Artificial Sequence: Synthetic oligonucleotide
gcccaggcgguuaccaaag

SEQ ID NO: 2112204 - RNA, 19 nt, Artificial Sequence
  Description of Artificial Sequence: Synthetic oligonucleotide
ggcuuuuaucaggugcaga

SEQ ID NO: 2112205 - RNA, 19 nt, Artificial Sequence
  Description of Artificial Sequence: Synthetic oligonucleotide
cccucagaucccugggaac

SEQ ID NO: 2112206 - RNA, 19 nt, Artificial Sequence
  Description of Artificial Sequence: Synthetic oligonucleotide
ggccaacuguagauucaag

SEQ ID NO: 2112207 - RNA, 19 nt, Artificial Sequence
  Description of Artificial Sequence: Synthetic oligonucleotide
cuccugucauggggacugg

SEQ ID NO: 2112208 - RNA, 19 nt, Artificial Sequence
  Description of Artificial Sequence: Synthetic oligonucleotide
uccuaccauucagccccgc

SEQ ID NO: 2112209 - RNA, 19 nt, Artificial Sequence
  Description of Artificial Sequence: Synthetic oligonucleotide
ugccagggauaggguaagu

SEQ ID NO: 2112210 - RNA, 19 nt, Artificial Sequence
  Description of Artificial Sequence: Synthetic oligonucleotide
gggugaggacagccggagc

SEQ ID NO: 2112211 - RNA, 19 nt, Artificial Sequence
  Description of Artificial Sequence: Synthetic oligonucleotide
gcucgcugaccauggggac

SEQ ID NO: 2112212 - RNA, 19 nt, Artificial Sequence
  Description of Artificial Sequence: Synthetic oligonucleotide
gggcuguauucucaaucaa

SEQ ID NO: 2112213 - RNA, 19 nt, Artificial Sequence
  Description of Artificial Sequence: Synthetic oligonucleotide
uagcgggugugagcauacu

SEQ ID NO: 2112214 - RNA, 19 nt, Artificial Sequence
  Description of Artificial Sequence: Synthetic oligonucleotide
gcuugcagaagagauggau

SEQ ID NO: 2112215 - RNA, 19 nt, Artificial Sequence
  Description of Artificial Sequence: Synthetic oligonucleotide
gcgggugugagcauacucu

SEQ ID NO: 2112216 - RNA, 19 nt, Artificial Sequence
  Description of Artificial Sequence: Synthetic oligonucleotide
cucuccgcagucccgggcu

SEQ ID NO: 2112217 - RNA, 19 nt, Artificial Sequence
  Description of Artificial Sequence: Synthetic oligonucleotide
cccgggugauggcuguccg

SEQ ID NO: 2112218 - RNA, 19 nt, Artificial Sequence
  Description of Artificial Sequence: Synthetic oligonucleotide
cuguccggaagagcuugca

SEQ ID NO: 2112219 - RNA, 19 nt, Artificial Sequence
  Description of Artificial Sequence: Synthetic oligonucleotide
gagcaggggcuccugucau

SEQ ID NO: 2112220 - RNA, 19 nt, Artificial Sequence
  Description of Artificial Sequence: Synthetic oligonucleotide
ucauggggacuggcuuuua

SEQ ID NO: 2112221 - RNA, 19 nt, Artificial Sequence
  Description of Artificial Sequence: Synthetic oligonucleotide
gcacaucuagaauccugcu

SEQ ID NO: 2112222 - RNA, 19 nt, Artificial Sequence
  Description of Artificial Sequence: Synthetic oligonucleotide
agguguacucgggccucga

SEQ ID NO: 2112223 - RNA, 19 nt, Artificial Sequence
  Description of Artificial Sequence: Synthetic oligonucleotide
ugucgacaaccggcuuuau

SEQ ID NO: 2112224 - RNA, 19 nt, Artificial Sequence
  Description of Artificial Sequence: Synthetic oligonucleotide
gacucugggguggccagau

SEQ ID NO: 2112225 - RNA, 19 nt, Artificial Sequence
  Description of Artificial Sequence: Synthetic oligonucleotide
ccggggucgccuucugcag

SEQ ID NO: 2112226 - RNA, 19 nt, Artificial Sequence
  Description of Artificial Sequence: Synthetic oligonucleotide
gguguacucgggccucgaa

SEQ ID NO: 2112227 - RNA, 19 nt, Artificial Sequence
  Description of Artificial Sequence: Synthetic oligonucleotide
cugucgguuccugcucaca

SEQ ID NO: 2112228 - RNA, 19 nt, Artificial Sequence
  Description of Artificial Sequence: Synthetic oligonucleotide
ggucgccuucugcaggaaa

SEQ ID NO: 2112229 - RNA, 19 nt, Artificial Sequence
  Description of Artificial Sequence: Synthetic oligonucleotide
gcacaccgcagccggguga

SEQ ID NO: 2112230 - RNA, 19 nt, Artificial Sequence
  Description of Artificial Sequence: Synthetic oligonucleotide
gcaguggcacaucuagaau

SEQ ID NO: 2112231 - RNA, 19 nt, Artificial Sequence
  Description of Artificial Sequence: Synthetic oligonucleotide
gcuguccggaagagcuugc

SEQ ID NO: 2112232 - RNA, 19 nt, Artificial Sequence
  Description of Artificial Sequence: Synthetic oligonucleotide
gagcaggcuuggcucuagu

SEQ ID NO: 2112233 - RNA, 19 nt, Artificial Sequence
  Description of Artificial Sequence: Synthetic oligonucleotide
cucgcugaccauggggacu

SEQ ID NO: 2112234 - RNA, 19 nt, Artificial Sequence
  Description of Artificial Sequence: Synthetic oligonucleotide
caaagauguauggcuccau

SEQ ID NO: 2112235 - RNA, 19 nt, Artificial Sequence
  Description of Artificial Sequence: Synthetic oligonucleotide
gauggggaacagggauaua

SEQ ID NO: 2112236 - RNA, 19 nt, Artificial Sequence
  Description of Artificial Sequence: Synthetic oligonucleotide
gggcccaaagaggaguugu

SEQ ID NO: 2112237 - RNA, 19 nt, Artificial Sequence
  Description of Artificial Sequence: Synthetic oligonucleotide
gcuuuauggcccaggugua

SEQ ID NO: 2112238 - RNA, 19 nt, Artificial Sequence
  Description of Artificial Sequence: Synthetic oligonucleotide
ccauggggacuugggcucc

SEQ ID NO: 2112239 - RNA, 19 nt, Artificial Sequence
  Description of Artificial Sequence: Synthetic oligonucleotide
cgucaccauccuaccauuc

SEQ ID NO: 2112240 - RNA, 19 nt, Artificial Sequence
  Description of Artificial Sequence: Synthetic oligonucleotide
gguaggccacaugagccgu

SEQ ID NO: 2112241 - RNA, 19 nt, Artificial Sequence
  Description of Artificial Sequence: Synthetic oligonucleotide
ccucagaucccugggaacu

SEQ ID NO: 2112242 - RNA, 19 nt, Artificial Sequence
  Description of Artificial Sequence: Synthetic oligonucleotide
gcccgggugauggcugucc

SEQ ID NO: 2112243 - RNA, 19 nt, Artificial Sequence
  Description of Artificial Sequence: Synthetic oligonucleotide
cccgcugggcccggggucg

SEQ ID NO: 2112244 - RNA, 19 nt, Artificial Sequence
  Description of Artificial Sequence: Synthetic oligonucleotide
ccgugggcccaaagaggag

SEQ ID NO: 2112245 - RNA, 19 nt, Artificial Sequence
  Description of Artificial Sequence: Synthetic oligonucleotide
cgggugaggacagccggag

SEQ ID NO: 2112246 - RNA, 19 nt, Artificial Sequence
  Description of Artificial Sequence: Synthetic oligonucleotide
cuaugucgacaaccggcuu

SEQ ID NO: 2112247 - RNA, 19 nt, Artificial Sequence
  Description of Artificial Sequence: Synthetic oligonucleotide
caugggguucaaagacauu

SEQ ID NO: 2112248 - RNA, 19 nt, Artificial Sequence
  Description of Artificial Sequence: Synthetic oligonucleotide
gcggaccgugggcccaaag

SEQ ID NO: 2112249 - RNA, 19 nt, Artificial Sequence
  Description of Artificial Sequence: Synthetic oligonucleotide
cggcuuuauggcccaggug

SEQ ID NO: 2112250 - RNA, 19 nt, Artificial Sequence
  Description of Artificial Sequence: Synthetic oligonucleotide
cugcacaccgcagccgggu

SEQ ID NO: 2112251 - RNA, 19 nt, Artificial Sequence
  Description of Artificial Sequence: Synthetic oligonucleotide
ggccagaucuugggaacua

SEQ ID NO: 2112252 - RNA, 19 nt, Artificial Sequence
  Description of Artificial Sequence: Synthetic oligonucleotide
caggcggaccgugggccca

SEQ ID NO: 2112253 - RNA, 19 nt, Artificial Sequence
  Description of Artificial Sequence: Synthetic oligonucleotide
auccugcucuggagaucgu

SEQ ID NO: 2112254 - RNA, 19 nt, Artificial Sequence
  Description of Artificial Sequence: Synthetic oligonucleotide
ccgggugaggacagccgga

SEQ ID NO: 2112255 - RNA, 19 nt, Artificial Sequence
  Description of Artificial Sequence: Synthetic oligonucleotide
caaugcccacuguggggau

SEQ ID NO: 2112256 - RNA, 19 nt, Artificial Sequence
  Description of Artificial Sequence: Synthetic oligonucleotide
cuugggcucccgucaccau

SEQ ID NO: 2112257 - RNA, 19 nt, Artificial Sequence
  Description of Artificial Sequence: Synthetic oligonucleotide
cagucccgggcuguauucu

SEQ ID NO: 2112258 - RNA, 19 nt, Artificial Sequence
  Description of Artificial Sequence: Synthetic oligonucleotide
ccuaccauucagccccgcu

SEQ ID NO: 2112259 - RNA, 19 nt, Artificial Sequence
  Description of Artificial Sequence: Synthetic oligonucleotide
cccagguguacucgggccu

SEQ ID NO: 2112260 - RNA, 19 nt, Artificial Sequence
  Description of Artificial Sequence: Synthetic oligonucleotide
ccggcuuuauggcccaggu

SEQ ID NO: 2112261 - RNA, 19 nt, Artificial Sequence
  Description of Artificial Sequence: Synthetic oligonucleotide
aggcggaccgugggcccaa

SEQ ID NO: 2112262 - RNA, 19 nt, Artificial Sequence
  Description of Artificial Sequence: Synthetic oligonucleotide
gcagccgggugaggacagc

SEQ ID NO: 2112263 - RNA, 19 nt, Artificial Sequence
  Description of Artificial Sequence: Synthetic oligonucleotide
gcuuggggugagucaucgu

SEQ ID NO: 2112264 - RNA, 19 nt, Artificial Sequence
  Description of Artificial Sequence: Synthetic oligonucleotide
ggcccggggucgccuucug

SEQ ID NO: 2112265 - RNA, 19 nt, Artificial Sequence
  Description of Artificial Sequence: Synthetic oligonucleotide
ggcucccgucaccauccua

SEQ ID NO: 2112266 - RNA, 19 nt, Artificial Sequence
  Description of Artificial Sequence: Synthetic oligonucleotide
ccgcagccgggugaggaca

SEQ ID NO: 2112267 - RNA, 19 nt, Artificial Sequence
  Description of Artificial Sequence: Synthetic oligonucleotide
cucgggccucgaagaggcu

SEQ ID NO: 2112268 - RNA, 19 nt, Artificial Sequence
  Description of Artificial Sequence: Synthetic oligonucleotide
gcuggacaaggagccuccu

SEQ ID NO: 2112269 - RNA, 19 nt, Artificial Sequence
  Description of Artificial Sequence: Synthetic oligonucleotide
ccgucaccauccuaccauu

SEQ ID NO: 2112270 - RNA, 19 nt, Artificial Sequence
  Description of Artificial Sequence: Synthetic oligonucleotide
ggucuggcaggcggaccgu

SEQ ID NO: 2112271 - RNA, 19 nt, Artificial Sequence
  Description of Artificial Sequence: Synthetic oligonucleotide
gggucgccuucugcaggaa

SEQ ID NO: 2112272 - RNA, 19 nt, Artificial Sequence
  Description of Artificial Sequence: Synthetic oligonucleotide
gggcucccgucaccauccu

SEQ ID NO: 2112273 - RNA, 19 nt, Artificial Sequence
  Description of Artificial Sequence: Synthetic oligonucleotide
cgcugaccauggggacuug

SEQ ID NO: 2112274 - RNA, 19 nt, Artificial Sequence
  Description of Artificial Sequence: Synthetic oligonucleotide
ggcggaccgugggcccaaa

SEQ ID NO: 2112275 - RNA, 19 nt, Artificial Sequence
  Description of Artificial Sequence: Synthetic oligonucleotide
cgccauccugaggcucgcu

SEQ ID NO: 2112276 - RNA, 19 nt, Artificial Sequence
  Description of Artificial Sequence: Synthetic oligonucleotide
caugauauuacuuaggugg

SEQ ID NO: 2112277 - RNA, 19 nt, Artificial Sequence
  Description of Artificial Sequence: Synthetic oligonucleotide
aaaagauauuuccacaugg

SEQ ID NO: 2112278 - RNA, 19 nt, Artificial Sequence
  Description of Artificial Sequence: Synthetic oligonucleotide
agugauaugaaccaaaucu

SEQ ID NO: 2112279 - RNA, 19 nt, Artificial Sequence
  Description of Artificial Sequence: Synthetic oligonucleotide
uaagauaaagguuaugaug

SEQ ID NO: 2112280 - RNA, 19 nt, Artificial Sequence
  Description of Artificial Sequence: Synthetic oligonucleotide
gauauuuccacaugguuag

SEQ ID NO: 2112281 - RNA, 19 nt, Artificial Sequence
  Description of Artificial Sequence: Synthetic oligonucleotide
aaagcgacugauaacaugg

SEQ ID NO: 2112282 - RNA, 19 nt, Artificial Sequence
  Description of Artificial Sequence: Synthetic oligonucleotide
ucauaaaccauaauuucgc

SEQ ID NO: 2112283 - RNA, 19 nt, Artificial Sequence
  Description of Artificial Sequence: Synthetic oligonucleotide
agaugcauaucuuacgucg

SEQ ID NO: 2112284 - RNA, 19 nt, Artificial Sequence
  Description of Artificial Sequence: Synthetic oligonucleotide
aagauaaagguuaugaugu

SEQ ID NO: 2112285 - RNA, 19 nt, Artificial Sequence
  Description of Artificial Sequence: Synthetic oligonucleotide
aaaagggaaagaguuaggg

SEQ ID NO: 2112286 - RNA, 19 nt, Artificial Sequence
  Description of Artificial Sequence: Synthetic oligonucleotide
auucauaaaccauaauuuc

SEQ ID NO: 2112287 - RNA, 19 nt, Artificial Sequence
  Description of Artificial Sequence: Synthetic oligonucleotide
ugauucauaaaccauaauu

SEQ ID NO: 2112288 - RNA, 19 nt, Artificial Sequence
  Description of Artificial Sequence: Synthetic oligonucleotide
ucuguuuagggaaacagga

SEQ ID NO: 2112289 - RNA, 19 nt, Artificial Sequence
  Description of Artificial Sequence: Synthetic oligonucleotide
aaagaguuaggggagagag

SEQ ID NO: 2112290 - RNA, 19 nt, Artificial Sequence
  Description of Artificial Sequence: Synthetic oligonucleotide
ugauaucuggauaacaugu

SEQ ID NO: 2112291 - RNA, 19 nt, Artificial Sequence
  Description of Artificial Sequence: Synthetic oligonucleotide
uuucagaacauuuauuaga

SEQ ID NO: 2112292 - RNA, 19 nt, Artificial Sequence
  Description of Artificial Sequence: Synthetic oligonucleotide
ucacauaccacucuguaga

SEQ ID NO: 2112293 - RNA, 19 nt, Artificial Sequence
  Description of Artificial Sequence: Synthetic oligonucleotide
uucccauuaagcuacaaug

SEQ ID NO: 2112294 - RNA, 19 nt, Artificial Sequence
  Description of Artificial Sequence: Synthetic oligonucleotide
uaaaccauaauuucgcccu

SEQ ID NO: 2112295 - RNA, 19 nt, Artificial Sequence
  Description of Artificial Sequence: Synthetic oligonucleotide
aaguguucaaaagcuaccc

SEQ ID NO: 2112296 - RNA, 19 nt, Artificial Sequence
  Description of Artificial Sequence: Synthetic oligonucleotide
aguuauaucaaggagcuug

SEQ ID NO: 2112297 - RNA, 19 nt, Artificial Sequence
  Description of Artificial Sequence: Synthetic oligonucleotide
ucuuuggcaagcaauaaac

SEQ ID NO: 2112298 - RNA, 19 nt, Artificial Sequence
  Description of Artificial Sequence: Synthetic oligonucleotide
aggaguuauaucaaggagc

SEQ ID NO: 2112299 - RNA, 19 nt, Artificial Sequence
  Description of Artificial Sequence: Synthetic oligonucleotide
uuccaaauguacaagcacc

SEQ ID NO: 2112300 - RNA, 19 nt, Artificial Sequence
  Description of Artificial Sequence: Synthetic oligonucleotide
auguacaagcaccagguac

SEQ ID NO: 2112301 - RNA, 19 nt, Artificial Sequence
  Description of Artificial Sequence: Synthetic oligonucleotide
acccaaaguguucaaaagc

SEQ ID NO: 2112302 - RNA, 19 nt, Artificial Sequence
  Description of Artificial Sequence: Synthetic oligonucleotide
uguaugugugaucacacca

SEQ ID NO: 2112303 - RNA, 19 nt, Artificial Sequence
  Description of Artificial Sequence: Synthetic oligonucleotide
aaagcaacacauccaucac

SEQ ID NO: 2112304 - RNA, 19 nt, Artificial Sequence
  Description of Artificial Sequence: Synthetic oligonucleotide
uguuuagggaaacaggagu

SEQ ID NO: 2112305 - RNA, 19 nt, Artificial Sequence
  Description of Artificial Sequence: Synthetic oligonucleotide
acaagcaccagguacagug

SEQ ID NO: 2112306 - RNA, 19 nt, Artificial Sequence
  Description of Artificial Sequence: Synthetic oligonucleotide
gguaauaccugauaucugg

SEQ ID NO: 2112307 - RNA, 19 nt, Artificial Sequence
  Description of Artificial Sequence: Synthetic oligonucleotide
aagguuaugauguggucug

SEQ ID NO: 2112308 - RNA, 19 nt, Artificial Sequence
  Description of Artificial Sequence: Synthetic oligonucleotide
ugaugauagugguaguugg

SEQ ID NO: 2112309 - RNA, 19 nt, Artificial Sequence
  Description of Artificial Sequence: Synthetic oligonucleotide
gacacuugaacagaaaagc

SEQ ID NO: 2112310 - RNA, 19 nt, Artificial Sequence
  Description of Artificial Sequence: Synthetic oligonucleotide
gaagcaugauauuacuuag

SEQ ID NO: 2112311 - RNA, 19 nt, Artificial Sequence
  Description of Artificial Sequence: Synthetic oligonucleotide
auaucaaggagcuugguaa

SEQ ID NO: 2112312 - RNA, 19 nt, Artificial Sequence
  Description of Artificial Sequence: Synthetic oligonucleotide
auguuggucucacuaaagc

SEQ ID NO: 2112313 - RNA, 19 nt, Artificial Sequence
  Description of Artificial Sequence: Synthetic oligonucleotide
aguacacaaaaugacauag

SEQ ID NO: 2112314 - RNA, 19 nt, Artificial Sequence
  Description of Artificial Sequence: Synthetic oligonucleotide
aaagaagcaugauauuacu

SEQ ID NO: 2112315 - RNA, 19 nt, Artificial Sequence
  Description of Artificial Sequence: Synthetic oligonucleotide
cuagaacgcagucugaccg

SEQ ID NO: 2112316 - RNA, 19 nt, Artificial Sequence
  Description of Artificial Sequence: Synthetic oligonucleotide
uaugaaccaaaucucucag

SEQ ID NO: 2112317 - RNA, 19 nt, Artificial Sequence
  Description of Artificial Sequence: Synthetic oligonucleotide
cuuagcuucccucaugucc

SEQ ID NO: 2112318 - RNA, 19 nt, Artificial Sequence
  Description of Artificial Sequence: Synthetic oligonucleotide
cauuaaauaagacacuuga

SEQ ID NO: 2112319 - RNA, 19 nt, Artificial Sequence
  Description of Artificial Sequence: Synthetic oligonucleotide
ugugugaucacaccaguac

SEQ ID NO: 2112320 - RNA, 19 nt, Artificial Sequence
  Description of Artificial Sequence: Synthetic oligonucleotide
gauaaagguuaugaugugg

SEQ ID NO: 2112321 - RNA, 19 nt, Artificial Sequence
  Description of Artificial Sequence: Synthetic oligonucleotide
aaauguacaagcaccaggu

SEQ ID NO: 2112322 - RNA, 19 nt, Artificial Sequence
  Description of Artificial Sequence: Synthetic oligonucleotide
aaaagcgacugauaacaug

SEQ ID NO: 2112323 - RNA, 19 nt, Artificial Sequence
  Description of Artificial Sequence: Synthetic oligonucleotide
gauguggucugccaauugg

SEQ ID NO: 2112324 - RNA, 19 nt, Artificial Sequence
  Description of Artificial Sequence: Synthetic oligonucleotide
ugauaugaaccaaaucucu

SEQ ID NO: 2112325 - RNA, 19 nt, Artificial Sequence
  Description of Artificial Sequence: Synthetic oligonucleotide
ucucacuaaagcaacacau

SEQ ID NO: 2112326 - RNA, 19 nt, Artificial Sequence
  Description of Artificial Sequence: Synthetic oligonucleotide
acuugaacagaaaagcgac

SEQ ID NO: 2112327 - RNA, 19 nt, Artificial Sequence
  Description of Artificial Sequence: Synthetic oligonucleotide
caaauguacaagcaccagg

SEQ ID NO: 2112328 - RNA, 19 nt, Artificial Sequence
  Description of Artificial Sequence: Synthetic oligonucleotide
aaagguuaugauguggucu

SEQ ID NO: 2112329 - RNA, 19 nt, Artificial Sequence
  Description of Artificial Sequence: Synthetic oligonucleotide
ugauuuccaaagaagcaug

SEQ ID NO: 2112330 - RNA, 19 nt, Artificial Sequence
  Description of Artificial Sequence: Synthetic oligonucleotide
uaucuuacgucgaggacag

SEQ ID NO: 2112331 - RNA, 19 nt, Artificial Sequence
  Description of Artificial Sequence: Synthetic oligonucleotide
agcuugguaagauaaaggu

SEQ ID NO: 2112332 - RNA, 19 nt, Artificial Sequence
  Description of Artificial Sequence: Synthetic oligonucleotide
uguucaaaagcuacccagc

SEQ ID NO: 2112333 - RNA, 19 nt, Artificial Sequence
  Description of Artificial Sequence: Synthetic oligonucleotide
auauuacuuagguggcugc

SEQ ID NO: 2112334 - RNA, 19 nt, Artificial Sequence
  Description of Artificial Sequence: Synthetic oligonucleotide
aacaggaguuauaucaagg

SEQ ID NO: 2112335 - RNA, 19 nt, Artificial Sequence
  Description of Artificial Sequence: Synthetic oligonucleotide
caaagaagcaugauauuac

SEQ ID NO: 2112336 - RNA, 19 nt, Artificial Sequence
  Description of Artificial Sequence: Synthetic oligonucleotide
cuugguaagauaaagguua

SEQ ID NO: 2112337 - RNA, 19 nt, Artificial Sequence
  Description of Artificial Sequence: Synthetic oligonucleotide
uuagcuucccucauguccu

SEQ ID NO: 2112338 - RNA, 19 nt, Artificial Sequence
  Description of Artificial Sequence: Synthetic oligonucleotide
agcaugauauuacuuaggu

SEQ ID NO: 2112339 - RNA, 19 nt, Artificial Sequence
  Description of Artificial Sequence: Synthetic oligonucleotide
agaagcaugauauuacuua

SEQ ID NO: 2112340 - RNA, 19 nt, Artificial Sequence
  Description of Artificial Sequence: Synthetic oligonucleotide
uuagugcagucucaacugg

SEQ ID NO: 2112341 - RNA, 19 nt, Artificial Sequence
  Description of Artificial Sequence: Synthetic oligonucleotide
acuaaagcaacacauccau

SEQ ID NO: 2112342 - RNA, 19 nt, Artificial Sequence
  Description of Artificial Sequence: Synthetic oligonucleotide
ugcuacaccucgaugaugu

SEQ ID NO: 2112343 - RNA, 19 nt, Artificial Sequence
  Description of Artificial Sequence: Synthetic oligonucleotide
guuucagaacauuuauuag

SEQ ID NO: 2112344 - RNA, 19 nt, Artificial Sequence
  Description of Artificial Sequence: Synthetic oligonucleotide
uugaacagaaaagcgacug

SEQ ID NO: 2112345 - RNA, 19 nt, Artificial Sequence
  Description of Artificial Sequence: Synthetic oligonucleotide
guguucaaaagcuacccag

SEQ ID NO: 2112346 - RNA, 19 nt, Artificial Sequence
  Description of Artificial Sequence: Synthetic oligonucleotide
uccaaauguacaagcacca

SEQ ID NO: 2112347 - RNA, 19 nt, Artificial Sequence
  Description of Artificial Sequence: Synthetic oligonucleotide
aucugcuacaccucgauga

SEQ ID NO: 2112348 - RNA, 19 nt, Artificial Sequence
  Description of Artificial Sequence: Synthetic oligonucleotide
cuggauaacaugucguccc

SEQ ID NO: 2112349 - RNA, 19 nt, Artificial Sequence
  Description of Artificial Sequence: Synthetic oligonucleotide
uuacgucgaggacagaagc

SEQ ID NO: 2112350 - RNA, 19 nt, Artificial Sequence
  Description of Artificial Sequence: Synthetic oligonucleotide
acaugguuagugcagucuc

SEQ ID NO: 2112351 - RNA, 19 nt, Artificial Sequence
  Description of Artificial Sequence: Synthetic oligonucleotide
ugugaucacaccaguacac

SEQ ID NO: 2112352 - RNA, 19 nt, Artificial Sequence
  Description of Artificial Sequence: Synthetic oligonucleotide
aaaucugcagaggcucucc

SEQ ID NO: 2112353 - RNA, 19 nt, Artificial Sequence
  Description of Artificial Sequence: Synthetic oligonucleotide
aaaagaagaggggacggug

SEQ ID NO: 2112354 - RNA, 19 nt, Artificial Sequence
  Description of Artificial Sequence: Synthetic oligonucleotide
uccacguucccauuaagcu

SEQ ID NO: 2112355 - RNA, 19 nt, Artificial Sequence
  Description of Artificial Sequence: Synthetic oligonucleotide
uggcaagcaauaaacauua

SEQ ID NO: 2112356 - RNA, 19 nt, Artificial Sequence
  Description of Artificial Sequence: Synthetic oligonucleotide
aucuggauaacaugucguc

SEQ ID NO: 2112357 - RNA, 19 nt, Artificial Sequence
  Description of Artificial Sequence: Synthetic oligonucleotide
auaucuuacgucgaggaca

SEQ ID NO: 2112358 - RNA, 19 nt, Artificial Sequence
  Description of Artificial Sequence: Synthetic oligonucleotide
uauaucaaggagcuuggua

SEQ ID NO: 2112359 - RNA, 19 nt, Artificial Sequence
  Description of Artificial Sequence: Synthetic oligonucleotide
aagcuacaaugucaaggac

SEQ ID NO: 2112360 - RNA, 19 nt, Artificial Sequence
  Description of Artificial Sequence: Synthetic oligonucleotide
ucccauuaagcuacaaugu

SEQ ID NO: 2112361 - RNA, 19 nt, Artificial Sequence
  Description of Artificial Sequence: Synthetic oligonucleotide
ugacugugaaguuucagaa

SEQ ID NO: 2112362 - RNA, 19 nt, Artificial Sequence
  Description of Artificial Sequence: Synthetic oligonucleotide
auuacuuagguggcugccc

SEQ ID NO: 2112363 - RNA, 19 nt, Artificial Sequence
  Description of Artificial Sequence: Synthetic oligonucleotide
aauuucgcccucuguuuag

SEQ ID NO: 2112364 - RNA, 19 nt, Artificial Sequence
  Description of Artificial Sequence: Synthetic oligonucleotide
gucucaaaucugcagaggc

SEQ ID NO: 2112365 - RNA, 19 nt, Artificial Sequence
  Description of Artificial Sequence: Synthetic oligonucleotide
uacaaugucaaggacaguu

SEQ ID NO: 2112366 - RNA, 19 nt, Artificial Sequence
  Description of Artificial Sequence: Synthetic oligonucleotide
augauauuacuuagguggc

SEQ ID NO: 2112367 - RNA, 19 nt, Artificial Sequence
  Description of Artificial Sequence: Synthetic oligonucleotide
auaccugauaucuggauaa

SEQ ID NO: 2112368 - RNA, 19 nt, Artificial Sequence
  Description of Artificial Sequence: Synthetic oligonucleotide
uuggcaagcaauaaacauu

SEQ ID NO: 2112369 - RNA, 19 nt, Artificial Sequence
  Description of Artificial Sequence: Synthetic oligonucleotide
uuacccaaaguguucaaaa

SEQ ID NO: 2112370 - RNA, 19 nt, Artificial Sequence
  Description of Artificial Sequence: Synthetic oligonucleotide
guaguuggggaaucaagag

SEQ ID NO: 2112371 - RNA, 19 nt, Artificial Sequence
  Description of Artificial Sequence: Synthetic oligonucleotide
ucaucuuuggcaagcaaua

SEQ ID NO: 2112372 - RNA, 19 nt, Artificial Sequence
  Description of Artificial Sequence: Synthetic oligonucleotide
ugacauagaaaaccauccu

SEQ ID NO: 2112373 - RNA, 19 nt, Artificial Sequence
  Description of Artificial Sequence: Synthetic oligonucleotide
cccagucuaaaacagaugg

SEQ ID NO: 2112374 - RNA, 19 nt, Artificial Sequence
  Description of Artificial Sequence: Synthetic oligonucleotide
uacccaaaguguucaaaag

SEQ ID NO: 2112375 - RNA, 19 nt, Artificial Sequence
  Description of Artificial Sequence: Synthetic oligonucleotide
aaaccauaauuucgcccuc

SEQ ID NO: 2112376 - RNA, 19 nt, Artificial Sequence
  Description of Artificial Sequence: Synthetic oligonucleotide
uggggaaucaagaggagau

SEQ ID NO: 2112377 - RNA, 19 nt, Artificial Sequence
  Description of Artificial Sequence: Synthetic oligonucleotide
ugguaguuggggaaucaag

SEQ ID NO: 2112378 - RNA, 19 nt, Artificial Sequence
  Description of Artificial Sequence: Synthetic oligonucleotide
cacguucccauuaagcuac

SEQ ID NO: 2112379 - RNA, 19 nt, Artificial Sequence
  Description of Artificial Sequence: Synthetic oligonucleotide
cugauaacaugguugccag

SEQ ID NO: 2112380 - RNA, 19 nt, Artificial Sequence
  Description of Artificial Sequence: Synthetic oligonucleotide
agagaaggggagguaauac

SEQ ID NO: 2112381 - RNA, 19 nt, Artificial Sequence
  Description of Artificial Sequence: Synthetic oligonucleotide
aagaggagaugggaaguac

SEQ ID NO: 2112382 - RNA, 19 nt, Artificial Sequence
  Description of Artificial Sequence: Synthetic oligonucleotide
guuauaucaaggagcuugg

SEQ ID NO: 2112383 - RNA, 19 nt, Artificial Sequence
  Description of Artificial Sequence: Synthetic oligonucleotide
uaacaugucgucccauuac

SEQ ID NO: 2112384 - RNA, 19 nt, Artificial Sequence
  Description of Artificial Sequence: Synthetic oligonucleotide
uuugcuuguucccagucua

SEQ ID NO: 2112385 - RNA, 19 nt, Artificial Sequence
  Description of Artificial Sequence: Synthetic oligonucleotide
uccugagccgaccugacgu

SEQ ID NO: 2112386 - RNA, 19 nt, Artificial Sequence
  Description of Artificial Sequence: Synthetic oligonucleotide
aaaugagcuuggaagggag

SEQ ID NO: 2112387 - RNA, 19 nt, Artificial Sequence
  Description of Artificial Sequence: Synthetic oligonucleotide
caaugucaaggacaguugc

SEQ ID NO: 2112388 - RNA, 19 nt, Artificial Sequence
  Description of Artificial Sequence: Synthetic oligonucleotide
gguaagauaaagguuauga

SEQ ID NO: 2112389 - RNA, 19 nt, Artificial Sequence
  Description of Artificial Sequence: Synthetic oligonucleotide
uuuccacaugguuagugca

SEQ ID NO: 2112390 - RNA, 19 nt, Artificial Sequence
  Description of Artificial Sequence: Synthetic oligonucleotide
aagcaugauauuacuuagg

SEQ ID NO: 2112391 - RNA, 19 nt, Artificial Sequence
  Description of Artificial Sequence: Synthetic oligonucleotide
cugauaucuggauaacaug

SEQ ID NO: 2112392 - RNA, 19 nt, Artificial Sequence
  Description of Artificial Sequence: Synthetic oligonucleotide
gagcuugguaagauaaagg

SEQ ID NO: 2112393 - RNA, 19 nt, Artificial Sequence
  Description of Artificial Sequence: Synthetic oligonucleotide
gggauuccaaugcugaagg

SEQ ID NO: 2112394 - RNA, 19 nt, Artificial Sequence
  Description of Artificial Sequence: Synthetic oligonucleotide
uuaugauguggucugccaa

SEQ ID NO: 2112395 - RNA, 19 nt, Artificial Sequence
  Description of Artificial Sequence: Synthetic oligonucleotide
aaaccauccuuagcuuccc

SEQ ID NO: 2112396 - RNA, 19 nt, Artificial Sequence
  Description of Artificial Sequence: Synthetic oligonucleotide
ggugcuagaacgcagucug

SEQ ID NO: 2112397 - RNA, 19 nt, Artificial Sequence
  Description of Artificial Sequence: Synthetic oligonucleotide
auaaagguuaugauguggu

SEQ ID NO: 2112398 - RNA, 19 nt, Artificial Sequence
  Description of Artificial Sequence: Synthetic oligonucleotide
ucuggauaacaugucgucc

SEQ ID NO: 2112399 - RNA, 19 nt, Artificial Sequence
  Description of Artificial Sequence: Synthetic oligonucleotide
uaugugugaucacaccagu

SEQ ID NO: 2112400 - RNA, 19 nt, Artificial Sequence
  Description of Artificial Sequence: Synthetic oligonucleotide
caaaagauauuuccacaug

SEQ ID NO: 2112401 - RNA, 19 nt, Artificial Sequence
  Description of Artificial Sequence: Synthetic oligonucleotide
uuggucucacuaaagcaac

SEQ ID NO: 2112402 - RNA, 19 nt, Artificial Sequence
  Description of Artificial Sequence: Synthetic oligonucleotide
caggaguuauaucaaggag

SEQ ID NO: 2112403 - RNA, 19 nt, Artificial Sequence
  Description of Artificial Sequence: Synthetic oligonucleotide
agaggagaugggaaguacc

SEQ ID NO: 2112404 - RNA, 19 nt, Artificial Sequence
  Description of Artificial Sequence: Synthetic oligonucleotide
uccuuagcuucccucaugu

SEQ ID NO: 2112405 - RNA, 19 nt, Artificial Sequence
  Description of Artificial Sequence: Synthetic oligonucleotide
ugauagugguaguugggga

SEQ ID NO: 2112406 - RNA, 19 nt, Artificial Sequence
  Description of Artificial Sequence: Synthetic oligonucleotide
uacaccucgaugaugucau

SEQ ID NO: 2112407 - RNA, 19 nt, Artificial Sequence
  Description of Artificial Sequence: Synthetic oligonucleotide
cuuacgucgaggacagaag

SEQ ID NO: 2112408 - RNA, 19 nt, Artificial Sequence
  Description of Artificial Sequence: Synthetic oligonucleotide
uauuuccacaugguuagug

SEQ ID NO: 2112409 - RNA, 19 nt, Artificial Sequence
  Description of Artificial Sequence: Synthetic oligonucleotide
ugcauaucuuacgucgagg

SEQ ID NO: 2112410 - RNA, 19 nt, Artificial Sequence
  Description of Artificial Sequence: Synthetic oligonucleotide
agacacuugaacagaaaag

SEQ ID NO: 2112411 - RNA, 19 nt, Artificial Sequence
  Description of Artificial Sequence: Synthetic oligonucleotide
augaggcagaugcauaucu

SEQ ID NO: 2112412 - RNA, 19 nt, Artificial Sequence
  Description of Artificial Sequence: Synthetic oligonucleotide
ugucaaggacaguugcugc

SEQ ID NO: 2112413 - RNA, 19 nt, Artificial Sequence
  Description of Artificial Sequence: Synthetic oligonucleotide
gguacagugauaugaacca

SEQ ID NO: 2112414 - RNA, 19 nt, Artificial Sequence
  Description of Artificial Sequence: Synthetic oligonucleotide
acguuucaagucucaaauc

SEQ ID NO: 2112415 - RNA, 19 nt, Artificial Sequence
  Description of Artificial Sequence: Synthetic oligonucleotide
cauuaagcuacaaugucaa

SEQ ID NO: 2112416 - RNA, 19 nt, Artificial Sequence
  Description of Artificial Sequence: Synthetic oligonucleotide
gauaugaaccaaaucucuc

SEQ ID NO: 2112417 - RNA, 19 nt, Artificial Sequence
  Description of Artificial Sequence: Synthetic oligonucleotide
aaggagcuugguaagauaa

SEQ ID NO: 2112418 - RNA, 19 nt, Artificial Sequence
  Description of Artificial Sequence: Synthetic oligonucleotide
ugggauuccaaugcugaag

SEQ ID NO: 2112419 - RNA, 19 nt, Artificial Sequence
  Description of Artificial Sequence: Synthetic oligonucleotide
ucuuacgucgaggacagaa

SEQ ID NO: 2112420 - RNA, 19 nt, Artificial Sequence
  Description of Artificial Sequence: Synthetic oligonucleotide
aguacccacauccugggau

SEQ ID NO: 2112421 - RNA, 19 nt, Artificial Sequence
  Description of Artificial Sequence: Synthetic oligonucleotide
uucauguuggucucacuaa

SEQ ID NO: 2112422 - RNA, 19 nt, Artificial Sequence
  Description of Artificial Sequence: Synthetic oligonucleotide
uagaacgcagucugaccgg

SEQ ID NO: 2112423 - RNA, 19 nt, Artificial Sequence
  Description of Artificial Sequence: Synthetic oligonucleotide
cuguuuagggaaacaggag

SEQ ID NO: 2112424 - RNA, 19 nt, Artificial Sequence
  Description of Artificial Sequence: Synthetic oligonucleotide
agauaaagguuaugaugug

SEQ ID NO: 2112425 - RNA, 19 nt, Artificial Sequence
  Description of Artificial Sequence: Synthetic oligonucleotide
gacgguguaugugugauca

SEQ ID NO: 2112426 - RNA, 19 nt, Artificial Sequence
  Description of Artificial Sequence: Synthetic oligonucleotide
gagguaauaccugauaucu

SEQ ID NO: 2112427 - RNA, 19 nt, Artificial Sequence
  Description of Artificial Sequence: Synthetic oligonucleotide
uguggucugccaauuggcu

SEQ ID NO: 2112428 - RNA, 19 nt, Artificial Sequence
  Description of Artificial Sequence: Synthetic oligonucleotide
uaugauguggucugccaau

SEQ ID NO: 2112429 - RNA, 19 nt, Artificial Sequence
  Description of Artificial Sequence: Synthetic oligonucleotide
ggccaugggugcuagaacg

SEQ ID NO: 2112430 - RNA, 19 nt, Artificial Sequence
  Description of Artificial Sequence: Synthetic oligonucleotide
gaaucaagaggagauggga

SEQ ID NO: 2112431 - RNA, 19 nt, Artificial Sequence
  Description of Artificial Sequence: Synthetic oligonucleotide
gacguuucaagucucaaau

SEQ ID NO: 2112432 - RNA, 19 nt, Artificial Sequence
  Description of Artificial Sequence: Synthetic oligonucleotide
guaugugugaucacaccag

SEQ ID NO: 2112433 - RNA, 19 nt, Artificial Sequence
  Description of Artificial Sequence: Synthetic oligonucleotide
auaacaugguugccagaag

SEQ ID NO: 2112434 - RNA, 19 nt, Artificial Sequence
  Description of Artificial Sequence: Synthetic oligonucleotide
aaucaagaggagaugggaa

SEQ ID NO: 2112435 - RNA, 19 nt, Artificial Sequence
  Description of Artificial Sequence: Synthetic oligonucleotide
auuaagcuacaaugucaag

SEQ ID NO: 2112436 - RNA, 19 nt, Artificial Sequence
  Description of Artificial Sequence: Synthetic oligonucleotide
uauuacuuagguggcugcc

SEQ ID NO: 2112437 - RNA, 19 nt, Artificial Sequence
  Description of Artificial Sequence: Synthetic oligonucleotide
aaagaagaggggacggugu

SEQ ID NO: 2112438 - RNA, 19 nt, Artificial Sequence
  Description of Artificial Sequence: Synthetic oligonucleotide
aguguucaaaagcuaccca

SEQ ID NO: 2112439 - RNA, 19 nt, Artificial Sequence
  Description of Artificial Sequence: Synthetic oligonucleotide
gacugugaaguuucagaac

SEQ ID NO: 2112440 - RNA, 19 nt, Artificial Sequence
  Description of Artificial Sequence: Synthetic oligonucleotide
uacgucgaggacagaagca

SEQ ID NO: 2112441 - RNA, 19 nt, Artificial Sequence
  Description of Artificial Sequence: Synthetic oligonucleotide
gugauaugaaccaaaucuc

SEQ ID NO: 2112442 - RNA, 19 nt, Artificial Sequence
  Description of Artificial Sequence: Synthetic oligonucleotide
auguggucugccaauuggc

SEQ ID NO: 2112443 - RNA, 19 nt, Artificial Sequence
  Description of Artificial Sequence: Synthetic oligonucleotide
acaccaguacacaaaauga

SEQ ID NO: 2112444 - RNA, 19 nt, Artificial Sequence
  Description of Artificial Sequence: Synthetic oligonucleotide
gggaaucaagaggagaugg

SEQ ID NO: 2112445 - RNA, 19 nt, Artificial Sequence
  Description of Artificial Sequence: Synthetic oligonucleotide
uaaagguuaugaugugguc

SEQ ID NO: 2112446 - RNA, 19 nt, Artificial Sequence
  Description of Artificial Sequence: Synthetic oligonucleotide
uaauuucgcccucuguuua

SEQ ID NO: 2112447 - RNA, 19 nt, Artificial Sequence
  Description of Artificial Sequence: Synthetic oligonucleotide
cucaaaucugcagaggcuc

SEQ ID NO: 2112448 - RNA, 19 nt, Artificial Sequence
  Description of Artificial Sequence: Synthetic oligonucleotide
cagaaaagcgacugauaac

SEQ ID NO: 2112449 - RNA, 19 nt, Artificial Sequence
  Description of Artificial Sequence: Synthetic oligonucleotide
ucccauuacccaaaguguu

SEQ ID NO: 2112450 - RNA, 19 nt, Artificial Sequence
  Description of Artificial Sequence: Synthetic oligonucleotide
ugacguuucaagucucaaa

SEQ ID NO: 2112451 - RNA, 19 nt, Artificial Sequence
  Description of Artificial Sequence: Synthetic oligonucleotide
uggauaacaugucguccca

SEQ ID NO: 2112452 - RNA, 19 nt, Artificial Sequence
  Description of Artificial Sequence: Synthetic oligonucleotide
acaugucgucccauuaccc

SEQ ID NO: 2112453 - RNA, 19 nt, Artificial Sequence
  Description of Artificial Sequence: Synthetic oligonucleotide
ggcagaugcauaucuuacg

SEQ ID NO: 2112454 - RNA, 19 nt, Artificial Sequence
  Description of Artificial Sequence: Synthetic oligonucleotide
uugguaagauaaagguuau

SEQ ID NO: 2112455 - RNA, 19 nt, Artificial Sequence
  Description of Artificial Sequence: Synthetic oligonucleotide
uuucgcccucuguuuaggg

SEQ ID NO: 2112456 - RNA, 19 nt, Artificial Sequence
  Description of Artificial Sequence: Synthetic oligonucleotide
gugaugauagugguaguug

SEQ ID NO: 2112457 - RNA, 19 nt, Artificial Sequence
  Description of Artificial Sequence: Synthetic oligonucleotide
agaacgcagucugaccggc

SEQ ID NO: 2112458 - RNA, 19 nt, Artificial Sequence
  Description of Artificial Sequence: Synthetic oligonucleotide
aggcagaugcauaucuuac

SEQ ID NO: 2112459 - RNA, 19 nt, Artificial Sequence
  Description of Artificial Sequence: Synthetic oligonucleotide
cauaucuuacgucgaggac

SEQ ID NO: 2112460 - RNA, 19 nt, Artificial Sequence
  Description of Artificial Sequence: Synthetic oligonucleotide
aauguacaagcaccaggua

SEQ ID NO: 2112461 - RNA, 19 nt, Artificial Sequence
  Description of Artificial Sequence: Synthetic oligonucleotide
gaagaggggacgguguaug

SEQ ID NO: 2112462 - RNA, 19 nt, Artificial Sequence
  Description of Artificial Sequence: Synthetic oligonucleotide
agggaaacaggaguuauau

SEQ ID NO: 2112463 - RNA, 19 nt, Artificial Sequence
  Description of Artificial Sequence: Synthetic oligonucleotide
ucugcuacaccucgaugau

SEQ ID NO: 2112464 - RNA, 19 nt, Artificial Sequence
  Description of Artificial Sequence: Synthetic oligonucleotide
aaggacaguugcugcaaau

SEQ ID NO: 2112465 - RNA, 19 nt, Artificial Sequence
  Description of Artificial Sequence: Synthetic oligonucleotide
auaacaugucgucccauua

SEQ ID NO: 2112466 - RNA, 19 nt, Artificial Sequence
  Description of Artificial Sequence: Synthetic oligonucleotide
guuaugauguggucugcca

SEQ ID NO: 2112467 - RNA, 19 nt, Artificial Sequence
  Description of Artificial Sequence: Synthetic oligonucleotide
uucaugaggcagaugcaua

SEQ ID NO: 2112468 - RNA, 19 nt, Artificial Sequence
  Description of Artificial Sequence: Synthetic oligonucleotide
uuagggaaacaggaguuau

SEQ ID NO: 2112469 - RNA, 19 nt, Artificial Sequence
  Description of Artificial Sequence: Synthetic oligonucleotide
guuggucucacuaaagcaa

SEQ ID NO: 2112470 - RNA, 19 nt, Artificial Sequence
  Description of Artificial Sequence: Synthetic oligonucleotide
agaaaaccauccuuagcuu

SEQ ID NO: 2112471 - RNA, 19 nt, Artificial Sequence
  Description of Artificial Sequence: Synthetic oligonucleotide
uuagaaaucuuugcuuguu

SEQ ID NO: 2112472 - RNA, 19 nt, Artificial Sequence
  Description of Artificial Sequence: Synthetic oligonucleotide
ucugccaauuggcugugau

SEQ ID NO: 2112473 - RNA, 19 nt, Artificial Sequence
  Description of Artificial Sequence: Synthetic oligonucleotide
caugggugcuagaacgcag

SEQ ID NO: 2112474 - RNA, 19 nt, Artificial Sequence
  Description of Artificial Sequence: Synthetic oligonucleotide
ucuguagauugcuucuuuu

SEQ ID NO: 2112475 - RNA, 19 nt, Artificial Sequence
  Description of Artificial Sequence: Synthetic oligonucleotide
ugauauuacuuagguggcu

SEQ ID NO: 2112476 - RNA, 19 nt, Artificial Sequence
  Description of Artificial Sequence: Synthetic oligonucleotide
augaaccaaaucucucaga

SEQ ID NO: 2112477 - RNA, 19 nt, Artificial Sequence
  Description of Artificial Sequence: Synthetic oligonucleotide
ugcuagaacgcagucugac

SEQ ID NO: 2112478 - RNA, 19 nt, Artificial Sequence
  Description of Artificial Sequence: Synthetic oligonucleotide
acaaugucaaggacaguug

SEQ ID NO: 2112479 - RNA, 19 nt, Artificial Sequence
  Description of Artificial Sequence: Synthetic oligonucleotide
aggacaguugcugcaaaug

SEQ ID NO: 2112480 - RNA, 19 nt, Artificial Sequence
  Description of Artificial Sequence: Synthetic oligonucleotide
ggagaugggaaguacccac

SEQ ID NO: 2112481 - RNA, 19 nt, Artificial Sequence
  Description of Artificial Sequence: Synthetic oligonucleotide
uuuagggaaacaggaguua

SEQ ID NO: 2112482 - RNA, 19 nt, Artificial Sequence
  Description of Artificial Sequence: Synthetic oligonucleotide
gauuccaaugcugaaggcu

SEQ ID NO: 2112483 - RNA, 19 nt, Artificial Sequence
  Description of Artificial Sequence: Synthetic oligonucleotide
caccaauuccaaauguaca

SEQ ID NO: 2112484 - RNA, 19 nt, Artificial Sequence
  Description of Artificial Sequence: Synthetic oligonucleotide
ugggaaguacccacauccu

SEQ ID NO: 2112485 - RNA, 19 nt, Artificial Sequence
  Description of Artificial Sequence: Synthetic oligonucleotide
ccaaaucucucagaguugg

SEQ ID NO: 2112486 - RNA, 19 nt, Artificial Sequence
  Description of Artificial Sequence: Synthetic oligonucleotide
accauaauuucgcccucug

SEQ ID NO: 2112487 - RNA, 19 nt, Artificial Sequence
  Description of Artificial Sequence: Synthetic oligonucleotide
guaagauaaagguuaugau

SEQ ID NO: 2112488 - RNA, 19 nt, Artificial Sequence
  Description of Artificial Sequence: Synthetic oligonucleotide
gcgacugauaacaugguug

SEQ ID NO: 2112489 - RNA, 19 nt, Artificial Sequence
  Description of Artificial Sequence: Synthetic oligonucleotide
aagaagcaugauauuacuu

SEQ ID NO: 2112490 - RNA, 19 nt, Artificial Sequence
  Description of Artificial Sequence: Synthetic oligonucleotide
aagaggggacgguguaugu

SEQ ID NO: 2112491 - RNA, 19 nt, Artificial Sequence
  Description of Artificial Sequence: Synthetic oligonucleotide
gugugaucacaccaguaca

SEQ ID NO: 2112492 - RNA, 19 nt, Artificial Sequence
  Description of Artificial Sequence: Synthetic oligonucleotide
guggucugccaauuggcug

SEQ ID NO: 2112493 - RNA, 19 nt, Artificial Sequence
  Description of Artificial Sequence: Synthetic oligonucleotide
uggucucacuaaagcaaca

SEQ ID NO: 2112494 - RNA, 19 nt, Artificial Sequence
  Description of Artificial Sequence: Synthetic oligonucleotide
agugacugugaaguuucag

SEQ ID NO: 2112495 - RNA, 19 nt, Artificial Sequence
  Description of Artificial Sequence: Synthetic oligonucleotide
ucaaggagcuugguaagau

SEQ ID NO: 2112496 - RNA, 19 nt, Artificial Sequence
  Description of Artificial Sequence: Synthetic oligonucleotide
uucgcccucuguuuaggga

SEQ ID NO: 2112497 - RNA, 19 nt, Artificial Sequence
  Description of Artificial Sequence: Synthetic oligonucleotide
ggaaucaagaggagauggg

SEQ ID NO: 2112498 - RNA, 19 nt, Artificial Sequence
  Description of Artificial Sequence: Synthetic oligonucleotide
aaccauaauuucgcccucu

SEQ ID NO: 2112499 - RNA, 19 nt, Artificial Sequence
  Description of Artificial Sequence: Synthetic oligonucleotide
uuuucauguuggucucacu

SEQ ID NO: 2112500 - RNA, 19 nt, Artificial Sequence
  Description of Artificial Sequence: Synthetic oligonucleotide
gaugcauaucuuacgucga

SEQ ID NO: 2112501 - RNA, 19 nt, Artificial Sequence
  Description of Artificial Sequence: Synthetic oligonucleotide
gucgaggacagaagcagcc

SEQ ID NO: 2112502 - RNA, 19 nt, Artificial Sequence
  Description of Artificial Sequence: Synthetic oligonucleotide
cagucugaccggcugcucc

SEQ ID NO: 2112503 - RNA, 19 nt, Artificial Sequence
  Description of Artificial Sequence: Synthetic oligonucleotide
gucucacuaaagcaacaca

SEQ ID NO: 2112504 - RNA, 19 nt, Artificial Sequence
  Description of Artificial Sequence: Synthetic oligonucleotide
cagaugcauaucuuacguc

SEQ ID NO: 2112505 - RNA, 19 nt, Artificial Sequence
  Description of Artificial Sequence: Synthetic oligonucleotide
aaugagcuuggaagggaga

SEQ ID NO: 2112506 - RNA, 19 nt, Artificial Sequence
  Description of Artificial Sequence: Synthetic oligonucleotide
ggcaucacauaccacucug

SEQ ID NO: 2112507 - RNA, 19 nt, Artificial Sequence
  Description of Artificial Sequence: Synthetic oligonucleotide
ugauaacaugguugccaga

SEQ ID NO: 2112508 - RNA, 19 nt, Artificial Sequence
  Description of Artificial Sequence: Synthetic oligonucleotide
uugccagaaggagaaggca

SEQ ID NO: 2112509 - RNA, 19 nt, Artificial Sequence
  Description of Artificial Sequence: Synthetic oligonucleotide
gguaguuggggaaucaaga

SEQ ID NO: 2112510 - RNA, 19 nt, Artificial Sequence
  Description of Artificial Sequence: Synthetic oligonucleotide
uccaaagaagcaugauauu

SEQ ID NO: 2112511 - RNA, 19 nt, Artificial Sequence
  Description of Artificial Sequence: Synthetic oligonucleotide
agaugggaaguacccacau

SEQ ID NO: 2112512 - RNA, 19 nt, Artificial Sequence
  Description of Artificial Sequence: Synthetic oligonucleotide
ggagguaauaccugauauc

SEQ ID NO: 2112513 - RNA, 19 nt, Artificial Sequence
  Description of Artificial Sequence: Synthetic oligonucleotide
auuucgcccucuguuuagg

SEQ ID NO: 2112514 - RNA, 19 nt, Artificial Sequence
  Description of Artificial Sequence: Synthetic oligonucleotide
gcauaucuuacgucgagga

SEQ ID NO: 2112515 - RNA, 19 nt, Artificial Sequence
  Description of Artificial Sequence: Synthetic oligonucleotide
auaagacacuugaacagaa

SEQ ID NO: 2112516 - RNA, 19 nt, Artificial Sequence
  Description of Artificial Sequence: Synthetic oligonucleotide
cagugauaugaaccaaauc

SEQ ID NO: 2112517 - RNA, 19 nt, Artificial Sequence
  Description of Artificial Sequence: Synthetic oligonucleotide
augucgucccauuacccaa

SEQ ID NO: 2112518 - RNA, 19 nt, Artificial Sequence
  Description of Artificial Sequence: Synthetic oligonucleotide
gguuagugcagucucaacu

SEQ ID NO: 2112519 - RNA, 19 nt, Artificial Sequence
  Description of Artificial Sequence: Synthetic oligonucleotide
augguugccagaaggagaa

SEQ ID NO: 2112520 - RNA, 19 nt, Artificial Sequence
  Description of Artificial Sequence: Synthetic oligonucleotide
gcaagcaauaaacauuaaa

SEQ ID NO: 2112521 - RNA, 19 nt, Artificial Sequence
  Description of Artificial Sequence: Synthetic oligonucleotide
aaaagcuacccagcaguuu

SEQ ID NO: 2112522 - RNA, 19 nt, Artificial Sequence
  Description of Artificial Sequence: Synthetic oligonucleotide
auugagguccacguuccca

SEQ ID NO: 2112523 - RNA, 19 nt, Artificial Sequence
  Description of Artificial Sequence: Synthetic oligonucleotide
uggcugugauuuccaaaga

SEQ ID NO: 2112524 - RNA, 19 nt, Artificial Sequence
  Description of Artificial Sequence: Synthetic oligonucleotide
guccacguucccauuaagc

SEQ ID NO: 2112525 - RNA, 19 nt, Artificial Sequence
  Description of Artificial Sequence: Synthetic oligonucleotide
agucuaaaacagauggcau

SEQ ID NO: 2112526 - RNA, 19 nt, Artificial Sequence
  Description of Artificial Sequence: Synthetic oligonucleotide
agguuaugauguggucugc

SEQ ID NO: 2112527 - RNA, 19 nt, Artificial Sequence
  Description of Artificial Sequence: Synthetic oligonucleotide
ugucgucccauuacccaaa

SEQ ID NO: 2112528 - RNA, 19 nt, Artificial Sequence
  Description of Artificial Sequence: Synthetic oligonucleotide
acagugauaugaaccaaau

SEQ ID NO: 2112529 - RNA, 19 nt, Artificial Sequence
  Description of Artificial Sequence: Synthetic oligonucleotide
ggacaguugcugcaaauga

SEQ ID NO: 2112530 - RNA, 19 nt, Artificial Sequence
  Description of Artificial Sequence: Synthetic oligonucleotide
acuuagguggcugccccag

SEQ ID NO: 2112531 - RNA, 19 nt, Artificial Sequence
  Description of Artificial Sequence: Synthetic oligonucleotide
uuauaucaaggagcuuggu

SEQ ID NO: 2112532 - RNA, 19 nt, Artificial Sequence
  Description of Artificial Sequence: Synthetic oligonucleotide
augagcuuggaagggagaa

SEQ ID NO: 2112533 - RNA, 19 nt, Artificial Sequence
  Description of Artificial Sequence: Synthetic oligonucleotide
acgguguaugugugaucac

SEQ ID NO: 2112534 - RNA, 19 nt, Artificial Sequence
  Description of Artificial Sequence: Synthetic oligonucleotide
gaccugacguuucaagucu

SEQ ID NO: 2112535 - RNA, 19 nt, Artificial Sequence
  Description of Artificial Sequence: Synthetic oligonucleotide
gaaagaguuaggggagaga

SEQ ID NO: 2112536 - RNA, 19 nt, Artificial Sequence
  Description of Artificial Sequence: Synthetic oligonucleotide
ucaacuggccaugggugcu

SEQ ID NO: 2112537 - RNA, 19 nt, Artificial Sequence
  Description of Artificial Sequence: Synthetic oligonucleotide
guaauaccugauaucugga

SEQ ID NO: 2112538 - RNA, 19 nt, Artificial Sequence
  Description of Artificial Sequence: Synthetic oligonucleotide
auuuccaaagaagcaugau

SEQ ID NO: 2112539 - RNA, 19 nt, Artificial Sequence
  Description of Artificial Sequence: Synthetic oligonucleotide
ccagucuaaaacagauggc

SEQ ID NO: 2112540 - RNA, 19 nt, Artificial Sequence
  Description of Artificial Sequence: Synthetic oligonucleotide
gcuagaacgcagucugacc

SEQ ID NO: 2112541 - RNA, 19 nt, Artificial Sequence
  Description of Artificial Sequence: Synthetic oligonucleotide
ugagccgaccugacguuuc

SEQ ID NO: 2112542 - RNA, 19 nt, Artificial Sequence
  Description of Artificial Sequence: Synthetic oligonucleotide
gggaaguacccacauccug

SEQ ID NO: 2112543 - RNA, 19 nt, Artificial Sequence
  Description of Artificial Sequence: Synthetic oligonucleotide
gaggggacgguguaugugu

SEQ ID NO: 2112544 - RNA, 19 nt, Artificial Sequence
  Description of Artificial Sequence: Synthetic oligonucleotide
guacaagcaccagguacag

SEQ ID NO: 2112545 - RNA, 19 nt, Artificial Sequence
  Description of Artificial Sequence: Synthetic oligonucleotide
ggaguuauaucaaggagcu

SEQ ID NO: 2112546 - RNA, 19 nt, Artificial Sequence
  Description of Artificial Sequence: Synthetic oligonucleotide
uugcuuguucccagucuaa

SEQ ID NO: 2112547 - RNA, 19 nt, Artificial Sequence
  Description of Artificial Sequence: Synthetic oligonucleotide
accugauaucuggauaaca

SEQ ID NO: 2112548 - RNA, 19 nt, Artificial Sequence
  Description of Artificial Sequence: Synthetic oligonucleotide
gcaccaauuccaaauguac

SEQ ID NO: 2112549 - RNA, 19 nt, Artificial Sequence
  Description of Artificial Sequence: Synthetic oligonucleotide
accucgaugaugucaucuu

SEQ ID NO: 2112550 - RNA, 19 nt, Artificial Sequence
  Description of Artificial Sequence: Synthetic oligonucleotide
gguguaugugugaucacac

SEQ ID NO: 2112551 - RNA, 19 nt, Artificial Sequence
  Description of Artificial Sequence: Synthetic oligonucleotide
gauaacaugucgucccauu

SEQ ID NO: 2112552 - RNA, 19 nt, Artificial Sequence
  Description of Artificial Sequence: Synthetic oligonucleotide
guacacaaaaugacauaga

SEQ ID NO: 2112553 - RNA, 19 nt, Artificial Sequence
  Description of Artificial Sequence: Synthetic oligonucleotide
gaaccaaaucucucagagu

SEQ ID NO: 2112554 - RNA, 19 nt, Artificial Sequence
  Description of Artificial Sequence: Synthetic oligonucleotide
cuccccaucugcuacaccu

SEQ ID NO: 2112555 - RNA, 19 nt, Artificial Sequence
  Description of Artificial Sequence: Synthetic oligonucleotide
gucucaacuggccaugggu

SEQ ID NO: 2112556 - RNA, 19 nt, Artificial Sequence
  Description of Artificial Sequence: Synthetic oligonucleotide
agguaauaccugauaucug

SEQ ID NO: 2112557 - RNA, 19 nt, Artificial Sequence
  Description of Artificial Sequence: Synthetic oligonucleotide
ggaaagaguuaggggagag

SEQ ID NO: 2112558 - RNA, 19 nt, Artificial Sequence
  Description of Artificial Sequence: Synthetic oligonucleotide
ccaauuggcugugauuucc

SEQ ID NO: 2112559 - RNA, 19 nt, Artificial Sequence
  Description of Artificial Sequence: Synthetic oligonucleotide
ugggugcuagaacgcaguc

SEQ ID NO: 2112560 - RNA, 19 nt, Artificial Sequence
  Description of Artificial Sequence: Synthetic oligonucleotide
aucaaggagcuugguaaga

SEQ ID NO: 2112561 - RNA, 19 nt, Artificial Sequence
  Description of Artificial Sequence: Synthetic oligonucleotide
agaggggacgguguaugug

SEQ ID NO: 2112562 - RNA, 19 nt, Artificial Sequence
  Description of Artificial Sequence: Synthetic oligonucleotide
cccauuaagcuacaauguc

SEQ ID NO: 2112563 - RNA, 19 nt, Artificial Sequence
  Description of Artificial Sequence: Synthetic oligonucleotide
gguuaugauguggucugcc

SEQ ID NO: 2112564 - RNA, 19 nt, Artificial Sequence
  Description of Artificial Sequence: Synthetic oligonucleotide
accaaaucucucagaguug

SEQ ID NO: 2112565 - RNA, 19 nt, Artificial Sequence
  Description of Artificial Sequence: Synthetic oligonucleotide
ucgaggacagaagcagccu

SEQ ID NO: 2112566 - RNA, 19 nt, Artificial Sequence
  Description of Artificial Sequence: Synthetic oligonucleotide
gagaugggaaguacccaca

SEQ ID NO: 2112567 - RNA, 19 nt, Artificial Sequence
  Description of Artificial Sequence: Synthetic oligonucleotide
guuggggaaucaagaggag

SEQ ID NO: 2112568 - RNA, 19 nt, Artificial Sequence
  Description of Artificial Sequence: Synthetic oligonucleotide
cuacaccucgaugauguca

SEQ ID NO: 2112569 - RNA, 19 nt, Artificial Sequence
  Description of Artificial Sequence: Synthetic oligonucleotide
caucacauaccacucugua

SEQ ID NO: 2112570 - RNA, 19 nt, Artificial Sequence
  Description of Artificial Sequence: Synthetic oligonucleotide
aggagaugggaaguaccca

SEQ ID NO: 2112571 - RNA, 19 nt, Artificial Sequence
  Description of Artificial Sequence: Synthetic oligonucleotide
aacuggccaugggugcuag

SEQ ID NO: 2112572 - RNA, 19 nt, Artificial Sequence
  Description of Artificial Sequence: Synthetic oligonucleotide
gaccggcugcuccucaaac

SEQ ID NO: 2112573 - RNA, 19 nt, Artificial Sequence
  Description of Artificial Sequence: Synthetic oligonucleotide
cauugagguccacguuccc

SEQ ID NO: 2112574 - RNA, 19 nt, Artificial Sequence
  Description of Artificial Sequence: Synthetic oligonucleotide
gucgucccauuacccaaag

SEQ ID NO: 2112575 - RNA, 19 nt, Artificial Sequence
  Description of Artificial Sequence: Synthetic oligonucleotide
auguccucuccugagccga

SEQ ID NO: 2112576 - RNA, 19 nt, Artificial Sequence
  Description of Artificial Sequence: Synthetic oligonucleotide
gugaucacaccaguacaca

SEQ ID NO: 2112577 - RNA, 19 nt, Artificial Sequence
  Description of Artificial Sequence: Synthetic oligonucleotide
ugcagaggcucuccccauc

SEQ ID NO: 2112578 - RNA, 19 nt, Artificial Sequence
  Description of Artificial Sequence: Synthetic oligonucleotide
ggucucacuaaagcaacac

SEQ ID NO: 2112579 - RNA, 19 nt, Artificial Sequence
  Description of Artificial Sequence: Synthetic oligonucleotide
agauggcaucacauaccac

SEQ ID NO: 2112580 - RNA, 19 nt, Artificial Sequence
  Description of Artificial Sequence: Synthetic oligonucleotide
gcagaugcauaucuuacgu

SEQ ID NO: 2112581 - RNA, 19 nt, Artificial Sequence
  Description of Artificial Sequence: Synthetic oligonucleotide
guucccauuaagcuacaau

SEQ ID NO: 2112582 - RNA, 19 nt, Artificial Sequence
  Description of Artificial Sequence: Synthetic oligonucleotide
ccggcugcuccucaaaccc

SEQ ID NO: 2112583 - RNA, 19 nt, Artificial Sequence
  Description of Artificial Sequence: Synthetic oligonucleotide
ucucucagaguugggugau

SEQ ID NO: 2112584 - RNA, 19 nt, Artificial Sequence
  Description of Artificial Sequence: Synthetic oligonucleotide
ggcugugauuuccaaagaa

SEQ ID NO: 2112585 - RNA, 19 nt, Artificial Sequence
  Description of Artificial Sequence: Synthetic oligonucleotide
cuugaacagaaaagcgacu

SEQ ID NO: 2112586 - RNA, 19 nt, Artificial Sequence
  Description of Artificial Sequence: Synthetic oligonucleotide
caaaucugcagaggcucuc

SEQ ID NO: 2112587 - RNA, 19 nt, Artificial Sequence
  Description of Artificial Sequence: Synthetic oligonucleotide
ucgucccauuacccaaagu

SEQ ID NO: 2112588 - RNA, 19 nt, Artificial Sequence
  Description of Artificial Sequence: Synthetic oligonucleotide
ucuccccaucugcuacacc

SEQ ID NO: 2112589 - RNA, 19 nt, Artificial Sequence
  Description of Artificial Sequence: Synthetic oligonucleotide
ccugauucauaaaccauaa

SEQ ID NO: 2112590 - RNA, 19 nt, Artificial Sequence
  Description of Artificial Sequence: Synthetic oligonucleotide
gcauugagguccacguucc

SEQ ID NO: 2112591 - RNA, 19 nt, Artificial Sequence
  Description of Artificial Sequence: Synthetic oligonucleotide
gccgaccugacguuucaag

SEQ ID NO: 2112592 - RNA, 19 nt, Artificial Sequence
  Description of Artificial Sequence: Synthetic oligonucleotide
caugaggcagaugcauauc

SEQ ID NO: 2112593 - RNA, 19 nt, Artificial Sequence
  Description of Artificial Sequence: Synthetic oligonucleotide
accugacguuucaagucuc

SEQ ID NO: 2112594 - RNA, 19 nt, Artificial Sequence
  Description of Artificial Sequence: Synthetic oligonucleotide
guucccagucuaaaacaga

SEQ ID NO: 2112595 - RNA, 19 nt, Artificial Sequence
  Description of Artificial Sequence: Synthetic oligonucleotide
gcugcaaaugagcuuggaa

SEQ ID NO: 2112596 - RNA, 19 nt, Artificial Sequence
  Description of Artificial Sequence: Synthetic oligonucleotide
ccaaagaagcaugauauua

SEQ ID NO: 2112597 - RNA, 19 nt, Artificial Sequence
  Description of Artificial Sequence: Synthetic oligonucleotide
cccauuacccaaaguguuc

SEQ ID NO: 2112598 - RNA, 19 nt, Artificial Sequence
  Description of Artificial Sequence: Synthetic oligonucleotide
gggagguaauaccugauau

SEQ ID NO: 2112599 - RNA, 19 nt, Artificial Sequence
  Description of Artificial Sequence: Synthetic oligonucleotide
gagguccacguucccauua

SEQ ID NO: 2112600 - RNA, 19 nt, Artificial Sequence
  Description of Artificial Sequence: Synthetic oligonucleotide
auauuuccacaugguuagu

SEQ ID NO: 2112601 - RNA, 19 nt, Artificial Sequence
  Description of Artificial Sequence: Synthetic oligonucleotide
ggcucuccccaucugcuac

SEQ ID NO: 2112602 - RNA, 19 nt, Artificial Sequence
  Description of Artificial Sequence: Synthetic oligonucleotide
ccugauaucuggauaacau

SEQ ID NO: 2112603 - RNA, 19 nt, Artificial Sequence
  Description of Artificial Sequence: Synthetic oligonucleotide
gguccacguucccauuaag

SEQ ID NO: 2112604 - RNA, 19 nt, Artificial Sequence
  Description of Artificial Sequence: Synthetic oligonucleotide
ccaaauguacaagcaccag

SEQ ID NO: 2112605 - RNA, 19 nt, Artificial Sequence
  Description of Artificial Sequence: Synthetic oligonucleotide
uacaagcaccagguacagu

SEQ ID NO: 2112606 - RNA, 19 nt, Artificial Sequence
  Description of Artificial Sequence: Synthetic oligonucleotide
ggggagaggggccaccuga

SEQ ID NO: 2112607 - RNA, 19 nt, Artificial Sequence
  Description of Artificial Sequence: Synthetic oligonucleotide
gcuuguucccagucuaaaa

SEQ ID NO: 2112608 - RNA, 19 nt, Artificial Sequence
  Description of Artificial Sequence: Synthetic oligonucleotide
gagccgaccugacguuuca

SEQ ID NO: 2112609 - RNA, 19 nt, Artificial Sequence
  Description of Artificial Sequence: Synthetic oligonucleotide
ccaguacacaaaaugacau

SEQ ID NO: 2112610 - RNA, 19 nt, Artificial Sequence
  Description of Artificial Sequence: Synthetic oligonucleotide
caccagguacagugauaug

SEQ ID NO: 2112611 - RNA, 19 nt, Artificial Sequence
  Description of Artificial Sequence: Synthetic oligonucleotide
uacccacauccugggauuc

SEQ ID NO: 2112612 - RNA, 19 nt, Artificial Sequence
  Description of Artificial Sequence: Synthetic oligonucleotide
cugggauuccaaugcugaa

SEQ ID NO: 2112613 - RNA, 19 nt, Artificial Sequence
  Description of Artificial Sequence: Synthetic oligonucleotide
ucuguccuaucugcugcua

SEQ ID NO: 2112614 - RNA, 19 nt, Artificial Sequence
  Description of Artificial Sequence: Synthetic oligonucleotide
guccuaucugcugcuaaaa

SEQ ID NO: 2112615 - RNA, 19 nt, Artificial Sequence
  Description of Artificial Sequence: Synthetic oligonucleotide
augugugaucacaccagua

SEQ ID NO: 2112616 - RNA, 19 nt, Artificial Sequence
  Description of Artificial Sequence: Synthetic oligonucleotide
cuguccuaucugcugcuaa

SEQ ID NO: 2112617 - RNA, 19 nt, Artificial Sequence
  Description of Artificial Sequence: Synthetic oligonucleotide
cagaggcucuccccaucug

SEQ ID NO: 2112618 - RNA, 19 nt, Artificial Sequence
  Description of Artificial Sequence: Synthetic oligonucleotide
caccugauucauaaaccau

SEQ ID NO: 2112619 - RNA, 19 nt, Artificial Sequence
  Description of Artificial Sequence: Synthetic oligonucleotide
cucuccccaucugcuacac

SEQ ID NO: 2112620 - RNA, 19 nt, Artificial Sequence
  Description of Artificial Sequence: Synthetic oligonucleotide
aggggacgguguaugugug

SEQ ID NO: 2112621 - RNA, 19 nt, Artificial Sequence
  Description of Artificial Sequence: Synthetic oligonucleotide
gugguaguuggggaaucaa

SEQ ID NO: 2112622 - RNA, 19 nt, Artificial Sequence
  Description of Artificial Sequence: Synthetic oligonucleotide
cacaugguuagugcagucu

SEQ ID NO: 2112623 - RNA, 19 nt, Artificial Sequence
  Description of Artificial Sequence: Synthetic oligonucleotide
ggggagguaauaccugaua

SEQ ID NO: 2112624 - RNA, 19 nt, Artificial Sequence
  Description of Artificial Sequence: Synthetic oligonucleotide
caaaagcuacccagcaguu

SEQ ID NO: 2112625 - RNA, 19 nt, Artificial Sequence
  Description of Artificial Sequence: Synthetic oligonucleotide
cugacguuucaagucucaa

SEQ ID NO: 2112626 - RNA, 19 nt, Artificial Sequence
  Description of Artificial Sequence: Synthetic oligonucleotide
guacccacauccugggauu

SEQ ID NO: 2112627 - RNA, 19 nt, Artificial Sequence
  Description of Artificial Sequence: Synthetic oligonucleotide
aggggagguaauaccugau

SEQ ID NO: 2112628 - RNA, 19 nt, Artificial Sequence
  Description of Artificial Sequence: Synthetic oligonucleotide
gaguuaggggagagagaaa

SEQ ID NO: 2112629 - RNA, 19 nt, Artificial Sequence
  Description of Artificial Sequence: Synthetic oligonucleotide
cgucgaggacagaagcagc

SEQ ID NO: 2112630 - RNA, 19 nt, Artificial Sequence
  Description of Artificial Sequence: Synthetic oligonucleotide
gcaccagguacagugauau

SEQ ID NO: 2112631 - RNA, 19 nt, Artificial Sequence
  Description of Artificial Sequence: Synthetic oligonucleotide
ccacguucccauuaagcua

SEQ ID NO: 2112632 - RNA, 19 nt, Artificial Sequence
  Description of Artificial Sequence: Synthetic oligonucleotide
cacauaccacucuguagau

SEQ ID NO: 2112633 - RNA, 19 nt, Artificial Sequence
  Description of Artificial Sequence: Synthetic oligonucleotide
ggacgguguaugugugauc

SEQ ID NO: 2112634 - RNA, 19 nt, Artificial Sequence
  Description of Artificial Sequence: Synthetic oligonucleotide
ccugacguuucaagucuca

SEQ ID NO: 2112635 - RNA, 19 nt, Artificial Sequence
  Description of Artificial Sequence: Synthetic oligonucleotide
gcuugguaagauaaagguu

SEQ ID NO: 2112636 - RNA, 19 nt, Artificial Sequence
  Description of Artificial Sequence: Synthetic oligonucleotide
ccacaugguuagugcaguc

SEQ ID NO: 2112637 - RNA, 19 nt, Artificial Sequence
  Description of Artificial Sequence: Synthetic oligonucleotide
ggggacgguguauguguga

SEQ ID NO: 2112638 - RNA, 19 nt, Artificial Sequence
  Description of Artificial Sequence: Synthetic oligonucleotide
cugaccggcugcuccucaa

SEQ ID NO: 2112639 - RNA, 19 nt, Artificial Sequence
  Description of Artificial Sequence: Synthetic oligonucleotide
ccuuagcuucccucauguc

SEQ ID NO: 2112640 - RNA, 19 nt, Artificial Sequence
  Description of Artificial Sequence: Synthetic oligonucleotide
gugcuagaacgcagucuga

SEQ ID NO: 2112641 - RNA, 19 nt, Artificial Sequence
  Description of Artificial Sequence: Synthetic oligonucleotide
cugccaauuggcugugauu

SEQ ID NO: 2112642 - RNA, 19 nt, Artificial Sequence
  Description of Artificial Sequence: Synthetic oligonucleotide
cauccuuagcuucccucau

SEQ ID NO: 2112643 - RNA, 19 nt, Artificial Sequence
  Description of Artificial Sequence: Synthetic oligonucleotide
ggucugccaauuggcugug

SEQ ID NO: 2112644 - RNA, 19 nt, Artificial Sequence
  Description of Artificial Sequence: Synthetic oligonucleotide
gcuacaccucgaugauguc

SEQ ID NO: 2112645 - RNA, 19 nt, Artificial Sequence
  Description of Artificial Sequence: Synthetic oligonucleotide
gcagaggcucuccccaucu

SEQ ID NO: 2112646 - RNA, 19 nt, Artificial Sequence
  Description of Artificial Sequence: Synthetic oligonucleotide
ccgaccugacguuucaagu

SEQ ID NO: 2112647 - RNA, 19 nt, Artificial Sequence
  Description of Artificial Sequence: Synthetic oligonucleotide
cgguguaugugugaucaca

SEQ ID NO: 2112648 - RNA, 19 nt, Artificial Sequence
  Description of Artificial Sequence: Synthetic oligonucleotide
cccucauguccucuccuga

SEQ ID NO: 2112649 - RNA, 19 nt, Artificial Sequence
  Description of Artificial Sequence: Synthetic oligonucleotide
gucugaccggcugcuccuc

SEQ ID NO: 2112650 - RNA, 19 nt, Artificial Sequence
  Description of Artificial Sequence: Synthetic oligonucleotide
gaacgcagucugaccggcu

SEQ ID NO: 2112651 - RNA, 19 nt, Artificial Sequence
  Description of Artificial Sequence: Synthetic oligonucleotide
ccaugggugcuagaacgca

SEQ ID NO: 2112652 - RNA, 19 nt, Artificial Sequence
  Description of Artificial Sequence: Synthetic oligonucleotide
gggugcuagaacgcagucu

SEQ ID NO: 2112653 - RNA, 19 nt, Artificial Sequence
  Description of Artificial Sequence: Synthetic oligonucleotide
agccgaccugacguuucaa

SEQ ID NO: 2112654 - RNA, 19 nt, Artificial Sequence
  Description of Artificial Sequence: Synthetic oligonucleotide
acguucccauuaagcuaca

SEQ ID NO: 2112655 - RNA, 19 nt, Artificial Sequence
  Description of Artificial Sequence: Synthetic oligonucleotide
gggacgguguaugugugau

SEQ ID NO: 2112656 - RNA, 19 nt, Artificial Sequence
  Description of Artificial Sequence: Synthetic oligonucleotide
ccucuccugagccgaccug

SEQ ID NO: 2112657 - RNA, 19 nt, Artificial Sequence
  Description of Artificial Sequence: Synthetic oligonucleotide
ccauaauuucgcccucugu

SEQ ID NO: 2112658 - RNA, 19 nt, Artificial Sequence
  Description of Artificial Sequence: Synthetic oligonucleotide
aucuuacgucgaggacaga

SEQ ID NO: 2112659 - RNA, 19 nt, Artificial Sequence
  Description of Artificial Sequence: Synthetic oligonucleotide
gcccucuguuuagggaaac

SEQ ID NO: 2112660 - RNA, 19 nt, Artificial Sequence
  Description of Artificial Sequence: Synthetic oligonucleotide
ggauaacaugucgucccau

SEQ ID NO: 2112661 - RNA, 19 nt, Artificial Sequence
  Description of Artificial Sequence: Synthetic oligonucleotide
gggccaccugauucauaaa

SEQ ID NO: 2112662 - RNA, 19 nt, Artificial Sequence
  Description of Artificial Sequence: Synthetic oligonucleotide
cccucuguuuagggaaaca

SEQ ID NO: 2112663 - RNA, 19 nt, Artificial Sequence
  Description of Artificial Sequence: Synthetic oligonucleotide
ccacauccugggauuccaa

SEQ ID NO: 2112664 - RNA, 19 nt, Artificial Sequence
  Description of Artificial Sequence: Synthetic oligonucleotide
ggagaggggccaccugauu

SEQ ID NO: 2112665 - RNA, 19 nt, Artificial Sequence
  Description of Artificial Sequence: Synthetic oligonucleotide
cugagccgaccugacguuu

SEQ ID NO: 2112666 - RNA, 19 nt, Artificial Sequence
  Description of Artificial Sequence: Synthetic oligonucleotide
ccugagccgaccugacguu

SEQ ID NO: 2112667 - RNA, 19 nt, Artificial Sequence
  Description of Artificial Sequence: Synthetic oligonucleotide
cguucccauuaagcuacaa

SEQ ID NO: 2112668 - RNA, 19 nt, Artificial Sequence
  Description of Artificial Sequence: Synthetic oligonucleotide
cgcagucugaccggcugcu

SEQ ID NO: 2112669 - RNA, 19 nt, Artificial Sequence
  Description of Artificial Sequence: Synthetic oligonucleotide
aauuuuaucucacaggacu

SEQ ID NO: 2112670 - RNA, 19 nt, Artificial Sequence
  Description of Artificial Sequence: Synthetic oligonucleotide
aaaacuacaucauagcaga

SEQ ID NO: 2112671 - RNA, 19 nt, Artificial Sequence
  Description of Artificial Sequence: Synthetic oligonucleotide
auuucugucaguucggugg

SEQ ID NO: 2112672 - RNA, 19 nt, Artificial Sequence
  Description of Artificial Sequence: Synthetic oligonucleotide
ucaucauggcacaagaacg

SEQ ID NO: 2112673 - RNA, 19 nt, Artificial Sequence
  Description of Artificial Sequence: Synthetic oligonucleotide
cauacuuaaauuuucgaag

SEQ ID NO: 2112674 - RNA, 19 nt, Artificial Sequence
  Description of Artificial Sequence: Synthetic oligonucleotide
caucuuuugugaaagaacg

SEQ ID NO: 2112675 - RNA, 19 nt, Artificial Sequence
  Description of Artificial Sequence: Synthetic oligonucleotide
auacuuaaauuuucgaagg

SEQ ID NO: 2112676 - RNA, 19 nt, Artificial Sequence
  Description of Artificial Sequence: Synthetic oligonucleotide
aaggcucugggguagauac

SEQ ID NO: 2112677 - RNA, 19 nt, Artificial Sequence
  Description of Artificial Sequence: Synthetic oligonucleotide
uuaacuucgaucuuuucug

SEQ ID NO: 2112678 - RNA, 19 nt, Artificial Sequence
  Description of Artificial Sequence: Synthetic oligonucleotide
aaugacagggacuucaggu

SEQ ID NO: 2112679 - RNA, 19 nt, Artificial Sequence
  Description of Artificial Sequence: Synthetic oligonucleotide
uaauuuacuauacauacuu

SEQ ID NO: 2112680 - RNA, 19 nt, Artificial Sequence
  Description of Artificial Sequence: Synthetic oligonucleotide
cacaagaacgccaauaagc

SEQ ID NO: 2112681 - RNA, 19 nt, Artificial Sequence
  Description of Artificial Sequence: Synthetic oligonucleotide
uguagcuugacuauucucu

SEQ ID NO: 2112682 - RNA, 19 nt, Artificial Sequence
  Description of Artificial Sequence: Synthetic oligonucleotide
aaacaaauacuuguucucg

SEQ ID NO: 2112683 - RNA, 19 nt, Artificial Sequence
  Description of Artificial Sequence: Synthetic oligonucleotide
aacaaauacuuguucucgg

SEQ ID NO: 2112684 - RNA, 19 nt, Artificial Sequence
  Description of Artificial Sequence: Synthetic oligonucleotide
ugcucuuucuacuacacag

SEQ ID NO: 2112685 - RNA, 19 nt, Artificial Sequence
  Description of Artificial Sequence: Synthetic oligonucleotide
uuuugcaucaacuuccaga

SEQ ID NO: 2112686 - RNA, 19 nt, Artificial Sequence
  Description of Artificial Sequence: Synthetic oligonucleotide
aaaaugugcucucaaguga

SEQ ID NO: 2112687 - RNA, 19 nt, Artificial Sequence
  Description of Artificial Sequence: Synthetic oligonucleotide
acaugcuuaacuucgaucu

SEQ ID NO: 2112688 - RNA, 19 nt, Artificial Sequence
  Description of Artificial Sequence: Synthetic oligonucleotide
aacaugcuuaacuucgauc

SEQ ID NO: 2112689 - RNA, 19 nt, Artificial Sequence
  Description of Artificial Sequence: Synthetic oligonucleotide
aagauuguggacugcugac

SEQ ID NO: 2112690 - RNA, 19 nt, Artificial Sequence
  Description of Artificial Sequence: Synthetic oligonucleotide
acgccaauaagccuuauuc

SEQ ID NO: 2112691 - RNA, 19 nt, Artificial Sequence
  Description of Artificial Sequence: Synthetic oligonucleotide
uuauacaugucccacggcu

SEQ ID NO: 2112692 - RNA, 19 nt, Artificial Sequence
  Description of Artificial Sequence: Synthetic oligonucleotide
acaagaacgccaauaagcc

SEQ ID NO: 2112693 - RNA, 19 nt, Artificial Sequence
  Description of Artificial Sequence: Synthetic oligonucleotide
ugucugucuaguuucaucc

SEQ ID NO: 2112694 - RNA, 19 nt, Artificial Sequence
  Description of Artificial Sequence: Synthetic oligonucleotide
cucacuuaaaugcauggcg

SEQ ID NO: 2112695 - RNA, 19 nt, Artificial Sequence
  Description of Artificial Sequence: Synthetic oligonucleotide
uuacuauacauacuuaaau

SEQ ID NO: 2112696 - RNA, 19 nt, Artificial Sequence
  Description of Artificial Sequence: Synthetic oligonucleotide
uuucuaaugccacuuuugc

SEQ ID NO: 2112697 - RNA, 19 nt, Artificial Sequence
  Description of Artificial Sequence: Synthetic oligonucleotide
gauaagagggccuucacuc

SEQ ID NO: 2112698 - RNA, 19 nt, Artificial Sequence
  Description of Artificial Sequence: Synthetic oligonucleotide
ugcaguaccacucacuuaa

SEQ ID NO: 2112699 - RNA, 19 nt, Artificial Sequence
  Description of Artificial Sequence: Synthetic oligonucleotide
aaaugcauggcgcaacugu

SEQ ID NO: 2112700 - RNA, 19 nt, Artificial Sequence
  Description of Artificial Sequence: Synthetic oligonucleotide
aauuuucgaaggcucuggg

SEQ ID NO: 2112701 - RNA, 19 nt, Artificial Sequence
  Description of Artificial Sequence: Synthetic oligonucleotide
ucacuuaaaugcauggcgc

SEQ ID NO: 2112702 - RNA, 19 nt, Artificial Sequence
  Description of Artificial Sequence: Synthetic oligonucleotide
cuuaaauuuucgaaggcuc

SEQ ID NO: 2112703 - RNA, 19 nt, Artificial Sequence
  Description of Artificial Sequence: Synthetic oligonucleotide
ucgcuauaaaccuccagcg

SEQ ID NO: 2112704 - RNA, 19 nt, Artificial Sequence
  Description of Artificial Sequence: Synthetic oligonucleotide
ucguacuggaaacaaauac

SEQ ID NO: 2112705 - RNA, 19 nt, Artificial Sequence
  Description of Artificial Sequence: Synthetic oligonucleotide
cacuuuugcaucaacuucc

SEQ ID NO: 2112706 - RNA, 19 nt, Artificial Sequence
  Description of Artificial Sequence: Synthetic oligonucleotide
aguaccacucacuuaaaug

SEQ ID NO: 2112707 - RNA, 19 nt, Artificial Sequence
  Description of Artificial Sequence: Synthetic oligonucleotide
uuuuauucaucacgaagac

SEQ ID NO: 2112708 - RNA, 19 nt, Artificial Sequence
  Description of Artificial Sequence: Synthetic oligonucleotide
uuaaauuuucgaaggcucu

SEQ ID NO: 2112709 - RNA, 19 nt, Artificial Sequence
  Description of Artificial Sequence: Synthetic oligonucleotide
aaauuuucgaaggcucugg

SEQ ID NO: 2112710 - RNA, 19 nt, Artificial Sequence
  Description of Artificial Sequence: Synthetic oligonucleotide
ucuacuacacagcccauca

SEQ ID NO: 2112711 - RNA, 19 nt, Artificial Sequence
  Description of Artificial Sequence: Synthetic oligonucleotide
acaaauacuuguucucggg

SEQ ID NO: 2112712 - RNA, 19 nt, Artificial Sequence
  Description of Artificial Sequence: Synthetic oligonucleotide
ucccauauuguaaaaugug

SEQ ID NO: 2112713 - RNA, 19 nt, Artificial Sequence
  Description of Artificial Sequence: Synthetic oligonucleotide
ucuuuugugaaagaacgca

SEQ ID NO: 2112714 - RNA, 19 nt, Artificial Sequence
  Description of Artificial Sequence: Synthetic oligonucleotide
uccaaaacuacaucauagc

SEQ ID NO: 2112715 - RNA, 19 nt, Artificial Sequence
  Description of Artificial Sequence: Synthetic oligonucleotide
cuuugaaugcucuuucuac

SEQ ID NO: 2112716 - RNA, 19 nt, Artificial Sequence
  Description of Artificial Sequence: Synthetic oligonucleotide
aagaucauuccgcauuucu

SEQ ID NO: 2112717 - RNA, 19 nt, Artificial Sequence
  Description of Artificial Sequence: Synthetic oligonucleotide
acuucgaucuuuucuguuc

SEQ ID NO: 2112718 - RNA, 19 nt, Artificial Sequence
  Description of Artificial Sequence: Synthetic oligonucleotide
aaauacuuguucucgggau

SEQ ID NO: 2112719 - RNA, 19 nt, Artificial Sequence
  Description of Artificial Sequence: Synthetic oligonucleotide
uuauguugaaauauuucua

SEQ ID NO: 2112720 - RNA, 19 nt, Artificial Sequence
  Description of Artificial Sequence: Synthetic oligonucleotide
gucgcuauaaaccuccagc

SEQ ID NO: 2112721 - RNA, 19 nt, Artificial Sequence
  Description of Artificial Sequence: Synthetic oligonucleotide
cauauuguaaaaugugcuc

SEQ ID NO: 2112722 - RNA, 19 nt, Artificial Sequence
  Description of Artificial Sequence: Synthetic oligonucleotide
aauauuucuaaugccacuu

SEQ ID NO: 2112723 - RNA, 19 nt, Artificial Sequence
  Description of Artificial Sequence: Synthetic oligonucleotide
uacuauacauacuuaaauu

SEQ ID NO: 2112724 - RNA, 19 nt, Artificial Sequence
  Description of Artificial Sequence: Synthetic oligonucleotide
uuuauucaucacgaagacg

SEQ ID NO: 2112725 - RNA, 19 nt, Artificial Sequence
  Description of Artificial Sequence: Synthetic oligonucleotide
cuguccguccacaagagcc

SEQ ID NO: 2112726 - RNA, 19 nt, Artificial Sequence
  Description of Artificial Sequence: Synthetic oligonucleotide
uacuuaaauuuucgaaggc

SEQ ID NO: 2112727 - RNA, 19 nt, Artificial Sequence
  Description of Artificial Sequence: Synthetic oligonucleotide
agcuugacuauucucucgg

SEQ ID NO: 2112728 - RNA, 19 nt, Artificial Sequence
  Description of Artificial Sequence: Synthetic oligonucleotide
gcuauaaaccuccagcggg

SEQ ID NO: 2112729 - RNA, 19 nt, Artificial Sequence
  Description of Artificial Sequence: Synthetic oligonucleotide
aacgagguuuggcugagug

SEQ ID NO: 2112730 - RNA, 19 nt, Artificial Sequence
  Description of Artificial Sequence: Synthetic oligonucleotide
auauuguaaaaugugcucu

SEQ ID NO: 2112731 - RNA, 19 nt, Artificial Sequence
  Description of Artificial Sequence: Synthetic oligonucleotide
uuauccaaaacuacaucau

SEQ ID NO: 2112732 - RNA, 19 nt, Artificial Sequence
  Description of Artificial Sequence: Synthetic oligonucleotide
uuucugucaguucgguggg

SEQ ID NO: 2112733 - RNA, 19 nt, Artificial Sequence
  Description of Artificial Sequence: Synthetic oligonucleotide
uuaacgauaacugccuacu

SEQ ID NO: 2112734 - RNA, 19 nt, Artificial Sequence
  Description of Artificial Sequence: Synthetic oligonucleotide
uacauacuuaaauuuucga

SEQ ID NO: 2112735 - RNA, 19 nt, Artificial Sequence
  Description of Artificial Sequence: Synthetic oligonucleotide
cugaaaucuucgaacgagg

SEQ ID NO: 2112736 - RNA, 19 nt, Artificial Sequence
  Description of Artificial Sequence: Synthetic oligonucleotide
auuuucgaaggcucugggg

SEQ ID NO: 2112737 - RNA, 19 nt, Artificial Sequence
  Description of Artificial Sequence: Synthetic oligonucleotide
aaagccccagcaaugacag

SEQ ID NO: 2112738 - RNA, 19 nt, Artificial Sequence
  Description of Artificial Sequence: Synthetic oligonucleotide
auagcagaaagccccagca

SEQ ID NO: 2112739 - RNA, 19 nt, Artificial Sequence
  Description of Artificial Sequence: Synthetic oligonucleotide
uacauuaaagcacgggcau

SEQ ID NO: 2112740 - RNA, 19 nt, Artificial Sequence
  Description of Artificial Sequence: Synthetic oligonucleotide
cuuucguuggcauccauuc

SEQ ID NO: 2112741 - RNA, 19 nt, Artificial Sequence
  Description of Artificial Sequence: Synthetic oligonucleotide
ucucucgggauucugagau

SEQ ID NO: 2112742 - RNA, 19 nt, Artificial Sequence
  Description of Artificial Sequence: Synthetic oligonucleotide
uuuuccgagaucuuuccaa

SEQ ID NO: 2112743 - RNA, 19 nt, Artificial Sequence
  Description of Artificial Sequence: Synthetic oligonucleotide
cuucgaucuuuucuguucg

SEQ ID NO: 2112744 - RNA, 19 nt, Artificial Sequence
  Description of Artificial Sequence: Synthetic oligonucleotide
aacgauaacugccuacuuu

SEQ ID NO: 2112745 - RNA, 19 nt, Artificial Sequence
  Description of Artificial Sequence: Synthetic oligonucleotide
aaggcuuauacauguccca

SEQ ID NO: 2112746 - RNA, 19 nt, Artificial Sequence
  Description of Artificial Sequence: Synthetic oligonucleotide
auccaaaacuacaucauag

SEQ ID NO: 2112747 - RNA, 19 nt, Artificial Sequence
  Description of Artificial Sequence: Synthetic oligonucleotide
ucccuguacauuaaagcac

SEQ ID NO: 2112748 - RNA, 19 nt, Artificial Sequence
  Description of Artificial Sequence: Synthetic oligonucleotide
cuauaaaccuccagcgggc

SEQ ID NO: 2112749 - RNA, 19 nt, Artificial Sequence
  Description of Artificial Sequence: Synthetic oligonucleotide
uuaaaugcauggcgcaacu

SEQ ID NO: 2112750 - RNA, 19 nt, Artificial Sequence
  Description of Artificial Sequence: Synthetic oligonucleotide
ugcauggcgcaacuguagg

SEQ ID NO: 2112751 - RNA, 19 nt, Artificial Sequence
  Description of Artificial Sequence: Synthetic oligonucleotide
acucacuuaaaugcauggc

SEQ ID NO: 2112752 - RNA, 19 nt, Artificial Sequence
  Description of Artificial Sequence: Synthetic oligonucleotide
caagugaguggguaaagac

SEQ ID NO: 2112753 - RNA, 19 nt, Artificial Sequence
  Description of Artificial Sequence: Synthetic oligonucleotide
gaagauuguggacugcuga

SEQ ID NO: 2112754 - RNA, 19 nt, Artificial Sequence
  Description of Artificial Sequence: Synthetic oligonucleotide
uacuacacagcccaucauc

SEQ ID NO: 2112755 - RNA, 19 nt, Artificial Sequence
  Description of Artificial Sequence: Synthetic oligonucleotide
cacucacuuaaaugcaugg

SEQ ID NO: 2112756 - RNA, 19 nt, Artificial Sequence
  Description of Artificial Sequence: Synthetic oligonucleotide
gauuguggacugcugacac

SEQ ID NO: 2112757 - RNA, 19 nt, Artificial Sequence
  Description of Artificial Sequence: Synthetic oligonucleotide
acuuaaauuuucgaaggcu

SEQ ID NO: 2112758 - RNA, 19 nt, Artificial Sequence
  Description of Artificial Sequence: Synthetic oligonucleotide
aauacuuguucucgggaua

SEQ ID NO: 2112759 - RNA, 19 nt, Artificial Sequence
  Description of Artificial Sequence: Synthetic oligonucleotide
ucuuucuacuacacagccc

SEQ ID NO: 2112760 - RNA, 19 nt, Artificial Sequence
  Description of Artificial Sequence: Synthetic oligonucleotide
uugacuauucucucgggau

SEQ ID NO: 2112761 - RNA, 19 nt, Artificial Sequence
  Description of Artificial Sequence: Synthetic oligonucleotide
auuguggacugcugacacc

SEQ ID NO: 2112762 - RNA, 19 nt, Artificial Sequence
  Description of Artificial Sequence: Synthetic oligonucleotide
uaaauuuucgaaggcucug

SEQ ID NO: 2112763 - RNA, 19 nt, Artificial Sequence
  Description of Artificial Sequence: Synthetic oligonucleotide
auaaaccuccagcgggccc

SEQ ID NO: 2112764 - RNA, 19 nt, Artificial Sequence
  Description of Artificial Sequence: Synthetic oligonucleotide
uaaagcacgggcaucuuuu

SEQ ID NO: 2112765 - RNA, 19 nt, Artificial Sequence
  Description of Artificial Sequence: Synthetic oligonucleotide
ucuguucggggaguuaacg

SEQ ID NO: 2112766 - RNA, 19 nt, Artificial Sequence
  Description of Artificial Sequence: Synthetic oligonucleotide
ucugcaguaccacucacuu

SEQ ID NO: 2112767 - RNA, 19 nt, Artificial Sequence
  Description of Artificial Sequence: Synthetic oligonucleotide
uuguuauguugaaauauuu

SEQ ID NO: 2112768 - RNA, 19 nt, Artificial Sequence
  Description of Artificial Sequence: Synthetic oligonucleotide
aagaacgccaauaagccuu

SEQ ID NO: 2112769 - RNA, 19 nt, Artificial Sequence
  Description of Artificial Sequence: Synthetic oligonucleotide
ggaguuaacgauaacugcc

SEQ ID NO: 2112770 - RNA, 19 nt, Artificial Sequence
  Description of Artificial Sequence: Synthetic oligonucleotide
agaacgcagguucucuuuc

SEQ ID NO: 2112771 - RNA, 19 nt, Artificial Sequence
  Description of Artificial Sequence: Synthetic oligonucleotide
uaagccuuauucacuucug

SEQ ID NO: 2112772 - RNA, 19 nt, Artificial Sequence
  Description of Artificial Sequence: Synthetic oligonucleotide
aguuucauccucaguuacc

SEQ ID NO: 2112773 - RNA, 19 nt, Artificial Sequence
  Description of Artificial Sequence: Synthetic oligonucleotide
uaucucacaggacuugguc

SEQ ID NO: 2112774 - RNA, 19 nt, Artificial Sequence
  Description of Artificial Sequence: Synthetic oligonucleotide
uagcuugacuauucucucg

SEQ ID NO: 2112775 - RNA, 19 nt, Artificial Sequence
  Description of Artificial Sequence: Synthetic oligonucleotide
gcuuauacaugucccacgg

SEQ ID NO: 2112776 - RNA, 19 nt, Artificial Sequence
  Description of Artificial Sequence: Synthetic oligonucleotide
aucuuuugugaaagaacgc

SEQ ID NO: 2112777 - RNA, 19 nt, Artificial Sequence
  Description of Artificial Sequence: Synthetic oligonucleotide
aucauuccgcauuucuguc

SEQ ID NO: 2112778 - RNA, 19 nt, Artificial Sequence
  Description of Artificial Sequence: Synthetic oligonucleotide
uuuuaucucacaggacuug

SEQ ID NO: 2112779 - RNA, 19 nt, Artificial Sequence
  Description of Artificial Sequence: Synthetic oligonucleotide
cuacaucauagcagaaagc

SEQ ID NO: 2112780 - RNA, 19 nt, Artificial Sequence
  Description of Artificial Sequence: Synthetic oligonucleotide
guuaacgauaacugccuac

SEQ ID NO: 2112781 - RNA, 19 nt, Artificial Sequence
  Description of Artificial Sequence: Synthetic oligonucleotide
gacaccucguacuggaaac

SEQ ID NO: 2112782 - RNA, 19 nt, Artificial Sequence
  Description of Artificial Sequence: Synthetic oligonucleotide
ugaucacauaaucaucuuu

SEQ ID NO: 2112783 - RNA, 19 nt, Artificial Sequence
  Description of Artificial Sequence: Synthetic oligonucleotide
ugaagucaccaauucugug

SEQ ID NO: 2112784 - RNA, 19 nt, Artificial Sequence
  Description of Artificial Sequence: Synthetic oligonucleotide
acgauaacugccuacuuuu

SEQ ID NO: 2112785 - RNA, 19 nt, Artificial Sequence
  Description of Artificial Sequence: Synthetic oligonucleotide
uucgaacgagguuuggcug

SEQ ID NO: 2112786 - RNA, 19 nt, Artificial Sequence
  Description of Artificial Sequence: Synthetic oligonucleotide
aaagcacgggcaucuuuug

SEQ ID NO: 2112787 - RNA, 19 nt, Artificial Sequence
  Description of Artificial Sequence: Synthetic oligonucleotide
caagcugaucacauaauca

SEQ ID NO: 2112788 - RNA, 19 nt, Artificial Sequence
  Description of Artificial Sequence: Synthetic oligonucleotide
guaaaaugugcucucaagu

SEQ ID NO: 2112789 - RNA, 19 nt, Artificial Sequence
  Description of Artificial Sequence: Synthetic oligonucleotide
ucgaucuuuucuguucggg

SEQ ID NO: 2112790 - RNA, 19 nt, Artificial Sequence
  Description of Artificial Sequence: Synthetic oligonucleotide
gaacgcagguucucuuucg

SEQ ID NO: 2112791 - RNA, 19 nt, Artificial Sequence
  Description of Artificial Sequence: Synthetic oligonucleotide
aucacauaaucaucuuuga

SEQ ID NO: 2112792 - RNA, 19 nt, Artificial Sequence
  Description of Artificial Sequence: Synthetic oligonucleotide
cccaacaugcuuaacuucg

SEQ ID NO: 2112793 - RNA, 19 nt, Artificial Sequence
  Description of Artificial Sequence: Synthetic oligonucleotide
uguucggggaguuaacgau

SEQ ID NO: 2112794 - RNA, 19 nt, Artificial Sequence
  Description of Artificial Sequence: Synthetic oligonucleotide
uaccacucacuuaaaugca

SEQ ID NO: 2112795 - RNA, 19 nt, Artificial Sequence
  Description of Artificial Sequence: Synthetic oligonucleotide
ugccacuuuugcaucaacu

SEQ ID NO: 2112796 - RNA, 19 nt, Artificial Sequence
  Description of Artificial Sequence: Synthetic oligonucleotide
gacgucgcuauaaaccucc

SEQ ID NO: 2112797 - RNA, 19 nt, Artificial Sequence
  Description of Artificial Sequence: Synthetic oligonucleotide
agaaagccccagcaaugac

SEQ ID NO: 2112798 - RNA, 19 nt, Artificial Sequence
  Description of Artificial Sequence: Synthetic oligonucleotide
cccauauuguaaaaugugc

SEQ ID NO: 2112799 - RNA, 19 nt, Artificial Sequence
  Description of Artificial Sequence: Synthetic oligonucleotide
gaucauuccgcauuucugu

SEQ ID NO: 2112800 - RNA, 19 nt, Artificial Sequence
  Description of Artificial Sequence: Synthetic oligonucleotide
uucggugggugacagcuga

SEQ ID NO: 2112801 - RNA, 19 nt, Artificial Sequence
  Description of Artificial Sequence: Synthetic oligonucleotide
uaagagggccuucacucac

SEQ ID NO: 2112802 - RNA, 19 nt, Artificial Sequence
  Description of Artificial Sequence: Synthetic oligonucleotide
aguucggugggugacagcu

SEQ ID NO: 2112803 - RNA, 19 nt, Artificial Sequence
  Description of Artificial Sequence: Synthetic oligonucleotide
uuguggacugcugacaccu

SEQ ID NO: 2112804 - RNA, 19 nt, Artificial Sequence
  Description of Artificial Sequence: Synthetic oligonucleotide
cauuccgcauuucugucag

SEQ ID NO: 2112805 - RNA, 19 nt, Artificial Sequence
  Description of Artificial Sequence: Synthetic oligonucleotide
uucauccucaguuaccauu

SEQ ID NO: 2112806 - RNA, 19 nt, Artificial Sequence
  Description of Artificial Sequence: Synthetic oligonucleotide
cacauaaucaucuuugaau

SEQ ID NO: 2112807 - RNA, 19 nt, Artificial Sequence
  Description of Artificial Sequence: Synthetic oligonucleotide
uuauacuuguuauguugaa

SEQ ID NO: 2112808 - RNA, 19 nt, Artificial Sequence
  Description of Artificial Sequence: Synthetic oligonucleotide
gaccaagcugaucacauaa

SEQ ID NO: 2112809 - RNA, 19 nt, Artificial Sequence
  Description of Artificial Sequence: Synthetic oligonucleotide
uaacugccuacuuuucucu

SEQ ID NO: 2112810 - RNA, 19 nt, Artificial Sequence
  Description of Artificial Sequence: Synthetic oligonucleotide
ugggguagauacagugucc

SEQ ID NO: 2112811 - RNA, 19 nt, Artificial Sequence
  Description of Artificial Sequence: Synthetic oligonucleotide
uagggaguugaaauguuuu

SEQ ID NO: 2112812 - RNA, 19 nt, Artificial Sequence
  Description of Artificial Sequence: Synthetic oligonucleotide
cuuaacuucgaucuuuucu

SEQ ID NO: 2112813 - RNA, 19 nt, Artificial Sequence
  Description of Artificial Sequence: Synthetic oligonucleotide
gauacaguguccucugucu

SEQ ID NO: 2112814 - RNA, 19 nt, Artificial Sequence
  Description of Artificial Sequence: Synthetic oligonucleotide
ucaagugaguggguaaaga

SEQ ID NO: 2112815 - RNA, 19 nt, Artificial Sequence
  Description of Artificial Sequence: Synthetic oligonucleotide
ugucuaguuucauccucag

SEQ ID NO: 2112816 - RNA, 19 nt, Artificial Sequence
  Description of Artificial Sequence: Synthetic oligonucleotide
uugaaugcucuuucuacua

SEQ ID NO: 2112817 - RNA, 19 nt, Artificial Sequence
  Description of Artificial Sequence: Synthetic oligonucleotide
uguccguccacaagagcca

SEQ ID NO: 2112818 - RNA, 19 nt, Artificial Sequence
  Description of Artificial Sequence: Synthetic oligonucleotide
ucuucgaacgagguuuggc

SEQ ID NO: 2112819 - RNA, 19 nt, Artificial Sequence
  Description of Artificial Sequence: Synthetic oligonucleotide
ucgaacgagguuuggcuga

SEQ ID NO: 2112820 - RNA, 19 nt, Artificial Sequence
  Description of Artificial Sequence: Synthetic oligonucleotide
uucccaacaugcuuaacuu

SEQ ID NO: 2112821 - RNA, 19 nt, Artificial Sequence
  Description of Artificial Sequence: Synthetic oligonucleotide
caucuuugaaugcucuuuc

SEQ ID NO: 2112822 - RNA, 19 nt, Artificial Sequence
  Description of Artificial Sequence: Synthetic oligonucleotide
aaagaacgcagguucucuu

SEQ ID NO: 2112823 - RNA, 19 nt, Artificial Sequence
  Description of Artificial Sequence: Synthetic oligonucleotide
ucaucacgaagacggugcc

SEQ ID NO: 2112824 - RNA, 19 nt, Artificial Sequence
  Description of Artificial Sequence: Synthetic oligonucleotide
cauagcagaaagccccagc

SEQ ID NO: 2112825 - RNA, 19 nt, Artificial Sequence
  Description of Artificial Sequence: Synthetic oligonucleotide
agcaaugacagggacuuca

SEQ ID NO: 2112826 - RNA, 19 nt, Artificial Sequence
  Description of Artificial Sequence: Synthetic oligonucleotide
cuguacauuaaagcacggg

SEQ ID NO: 2112827 - RNA, 19 nt, Artificial Sequence
  Description of Artificial Sequence: Synthetic oligonucleotide
cugggguagauacaguguc

SEQ ID NO: 2112828 - RNA, 19 nt, Artificial Sequence
  Description of Artificial Sequence: Synthetic oligonucleotide
uucgaucuuuucuguucgg

SEQ ID NO: 2112829 - RNA, 19 nt, Artificial Sequence
  Description of Artificial Sequence: Synthetic oligonucleotide
uuucguuggcauccauuca

SEQ ID NO: 2112830 - RNA, 19 nt, Artificial Sequence
  Description of Artificial Sequence: Synthetic oligonucleotide
guacauuaaagcacgggca

SEQ ID NO: 2112831 - RNA, 19 nt, Artificial Sequence
  Description of Artificial Sequence: Synthetic oligonucleotide
uaaugccacuuuugcauca

SEQ ID NO: 2112832 - RNA, 19 nt, Artificial Sequence
  Description of Artificial Sequence: Synthetic oligonucleotide
uuaucucacaggacuuggu

SEQ ID NO: 2112833 - RNA, 19 nt, Artificial Sequence
  Description of Artificial Sequence: Synthetic oligonucleotide
auaagagggccuucacuca

SEQ ID NO: 2112834 - RNA, 19 nt, Artificial Sequence
  Description of Artificial Sequence: Synthetic oligonucleotide
gggucagggucuuugaaag

SEQ ID NO: 2112835 - RNA, 19 nt, Artificial Sequence
  Description of Artificial Sequence: Synthetic oligonucleotide
gucaaaggcuuauacaugu

SEQ ID NO: 2112836 - RNA, 19 nt, Artificial Sequence
  Description of Artificial Sequence: Synthetic oligonucleotide
uauucaucacgaagacggu

SEQ ID NO: 2112837 - RNA, 19 nt, Artificial Sequence
  Description of Artificial Sequence: Synthetic oligonucleotide
uuuccgagaucuuuccaau

SEQ ID NO: 2112838 - RNA, 19 nt, Artificial Sequence
  Description of Artificial Sequence: Synthetic oligonucleotide
guggacugcugacaccucg

SEQ ID NO: 2112839 - RNA, 19 nt, Artificial Sequence
  Description of Artificial Sequence: Synthetic oligonucleotide
cccuguacauuaaagcacg

SEQ ID NO: 2112840 - RNA, 19 nt, Artificial Sequence
  Description of Artificial Sequence: Synthetic oligonucleotide
uguugggucagggucuuug

SEQ ID NO: 2112841 - RNA, 19 nt, Artificial Sequence
  Description of Artificial Sequence: Synthetic oligonucleotide
uaacuucgaucuuuucugu

SEQ ID NO: 2112842 - RNA, 19 nt, Artificial Sequence
  Description of Artificial Sequence: Synthetic oligonucleotide
cuaaugccacuuuugcauc

SEQ ID NO: 2112843 - RNA, 19 nt, Artificial Sequence
  Description of Artificial Sequence: Synthetic oligonucleotide
gggaguuaacgauaacugc

SEQ ID NO: 2112844 - RNA, 19 nt, Artificial Sequence
  Description of Artificial Sequence: Synthetic oligonucleotide
uacuuguuauguugaaaua

SEQ ID NO: 2112845 - RNA, 19 nt, Artificial Sequence
  Description of Artificial Sequence: Synthetic oligonucleotide
cagaauggacuuucugcag

SEQ ID NO: 2112846 - RNA, 19 nt, Artificial Sequence
  Description of Artificial Sequence: Synthetic oligonucleotide
uacaguguccucugucugu

SEQ ID NO: 2112847 - RNA, 19 nt, Artificial Sequence
  Description of Artificial Sequence: Synthetic oligonucleotide
gcucugaccaagcugauca

SEQ ID NO: 2112848 - RNA, 19 nt, Artificial Sequence
  Description of Artificial Sequence: Synthetic oligonucleotide
ggugggugacagcugagcg

SEQ ID NO: 2112849 - RNA, 19 nt, Artificial Sequence
  Description of Artificial Sequence: Synthetic oligonucleotide
gacuucaggugcucugacc

SEQ ID NO: 2112850 - RNA, 19 nt, Artificial Sequence
  Description of Artificial Sequence: Synthetic oligonucleotide
acauuaaagcacgggcauc

SEQ ID NO: 2112851 - RNA, 19 nt, Artificial Sequence
  Description of Artificial Sequence: Synthetic oligonucleotide
uucaggugcucugaccaag

SEQ ID NO: 2112852 - RNA, 19 nt, Artificial Sequence
  Description of Artificial Sequence: Synthetic oligonucleotide
ugacuauucucucgggauu

SEQ ID NO: 2112853 - RNA, 19 nt, Artificial Sequence
  Description of Artificial Sequence: Synthetic oligonucleotide
uuaaagcacgggcaucuuu

SEQ ID NO: 2112854 - RNA, 19 nt, Artificial Sequence
  Description of Artificial Sequence: Synthetic oligonucleotide
gauaacugccuacuuuucu

SEQ ID NO: 2112855 - RNA, 19 nt, Artificial Sequence
  Description of Artificial Sequence: Synthetic oligonucleotide
agaucauuccgcauuucug

SEQ ID NO: 2112856 - RNA, 19 nt, Artificial Sequence
  Description of Artificial Sequence: Synthetic oligonucleotide
gcccugaaaucuucgaacg

SEQ ID NO: 2112857 - RNA, 19 nt, Artificial Sequence
  Description of Artificial Sequence: Synthetic oligonucleotide
ucuuucguuggcauccauu

SEQ ID NO: 2112858 - RNA, 19 nt, Artificial Sequence
  Description of Artificial Sequence: Synthetic oligonucleotide
agcugaucacauaaucauc

SEQ ID NO: 2112859 - RNA, 19 nt, Artificial Sequence
  Description of Artificial Sequence: Synthetic oligonucleotide
cuuauacaugucccacggc

SEQ ID NO: 2112860 - RNA, 19 nt, Artificial Sequence
  Description of Artificial Sequence: Synthetic oligonucleotide
ggcuuauacaugucccacg

SEQ ID NO: 2112861 - RNA, 19 nt, Artificial Sequence
  Description of Artificial Sequence: Synthetic oligonucleotide
guagcuugacuauucucuc

SEQ ID NO: 2112862 - RNA, 19 nt, Artificial Sequence
  Description of Artificial Sequence: Synthetic oligonucleotide
aaucuucgaacgagguuug

SEQ ID NO: 2112863 - RNA, 19 nt, Artificial Sequence
  Description of Artificial Sequence: Synthetic oligonucleotide
auuuuccgagaucuuucca

SEQ ID NO: 2112864 - RNA, 19 nt, Artificial Sequence
  Description of Artificial Sequence: Synthetic oligonucleotide
guuaccauuuuccgagauc

SEQ ID NO: 2112865 - RNA, 19 nt, Artificial Sequence
  Description of Artificial Sequence: Synthetic oligonucleotide
uccagucucuuauccaaaa

SEQ ID NO: 2112866 - RNA, 19 nt, Artificial Sequence
  Description of Artificial Sequence: Synthetic oligonucleotide
gaagacggugccaggauca

SEQ ID NO: 2112867 - RNA, 19 nt, Artificial Sequence
  Description of Artificial Sequence: Synthetic oligonucleotide
ggggaguuaacgauaacug

SEQ ID NO: 2112868 - RNA, 19 nt, Artificial Sequence
  Description of Artificial Sequence: Synthetic oligonucleotide
ucugucaguucggugggug

SEQ ID NO: 2112869 - RNA, 19 nt, Artificial Sequence
  Description of Artificial Sequence: Synthetic oligonucleotide
ccgcauuucugucaguucg

SEQ ID NO: 2112870 - RNA, 19 nt, Artificial Sequence
  Description of Artificial Sequence: Synthetic oligonucleotide
aagcacgggcaucuuuugu

SEQ ID NO: 2112871 - RNA, 19 nt, Artificial Sequence
  Description of Artificial Sequence: Synthetic oligonucleotide
ucaguucggugggugacag

SEQ ID NO: 2112872 - RNA, 19 nt, Artificial Sequence
  Description of Artificial Sequence: Synthetic oligonucleotide
ucucaagugaguggguaaa

SEQ ID NO: 2112873 - RNA, 19 nt, Artificial Sequence
  Description of Artificial Sequence: Synthetic oligonucleotide
auauuucuaaugccacuuu

SEQ ID NO: 2112874 - RNA, 19 nt, Artificial Sequence
  Description of Artificial Sequence: Synthetic oligonucleotide
aacgccaauaagccuuauu

SEQ ID NO: 2112875 - RNA, 19 nt, Artificial Sequence
  Description of Artificial Sequence: Synthetic oligonucleotide
gucucuuauccaaaacuac

SEQ ID NO: 2112876 - RNA, 19 nt, Artificial Sequence
  Description of Artificial Sequence: Synthetic oligonucleotide
gacuauucucucgggauuc

SEQ ID NO: 2112877 - RNA, 19 nt, Artificial Sequence
  Description of Artificial Sequence: Synthetic oligonucleotide
auggcgcaacuguagggag

SEQ ID NO: 2112878 - RNA, 19 nt, Artificial Sequence
  Description of Artificial Sequence: Synthetic oligonucleotide
ugaaagaacgcagguucuc

SEQ ID NO: 2112879 - RNA, 19 nt, Artificial Sequence
  Description of Artificial Sequence: Synthetic oligonucleotide
aaugcauggcgcaacugua

SEQ ID NO: 2112880 - RNA, 19 nt, Artificial Sequence
  Description of Artificial Sequence: Synthetic oligonucleotide
aguuaccauuuuccgagau

SEQ ID NO: 2112881 - RNA, 19 nt, Artificial Sequence
  Description of Artificial Sequence: Synthetic oligonucleotide
uggguaaagacaggcccug

SEQ ID NO: 2112882 - RNA, 19 nt, Artificial Sequence
  Description of Artificial Sequence: Synthetic oligonucleotide
gaguggguaaagacaggcc

SEQ ID NO: 2112883 - RNA, 19 nt, Artificial Sequence
  Description of Artificial Sequence: Synthetic oligonucleotide
cacuuaaaugcauggcgca

SEQ ID NO: 2112884 - RNA, 19 nt, Artificial Sequence
  Description of Artificial Sequence: Synthetic oligonucleotide
ccucaguuaccauuuuccg

SEQ ID NO: 2112885 - RNA, 19 nt, Artificial Sequence
  Description of Artificial Sequence: Synthetic oligonucleotide
uggacugcugacaccucgu

SEQ ID NO: 2112886 - RNA, 19 nt, Artificial Sequence
  Description of Artificial Sequence: Synthetic oligonucleotide
cugucuaguuucauccuca

SEQ ID NO: 2112887 - RNA, 19 nt, Artificial Sequence
  Description of Artificial Sequence: Synthetic oligonucleotide
agccuuauucacuucuguu

SEQ ID NO: 2112888 - RNA, 19 nt, Artificial Sequence
  Description of Artificial Sequence: Synthetic oligonucleotide
ucgggauucugagaugccu

SEQ ID NO: 2112889 - RNA, 19 nt, Artificial Sequence
  Description of Artificial Sequence: Synthetic oligonucleotide
gaauggacuuucugcagua

SEQ ID NO: 2112890 - RNA, 19 nt, Artificial Sequence
  Description of Artificial Sequence: Synthetic oligonucleotide
uucucucgggauucugaga

SEQ ID NO: 2112891 - RNA, 19 nt, Artificial Sequence
  Description of Artificial Sequence: Synthetic oligonucleotide
ucucgggauaagagggccu

SEQ ID NO: 2112892 - RNA, 19 nt, Artificial Sequence
  Description of Artificial Sequence: Synthetic oligonucleotide
agauuguggacugcugaca

SEQ ID NO: 2112893 - RNA, 19 nt, Artificial Sequence
  Description of Artificial Sequence: Synthetic oligonucleotide
aaggucccuguacauuaaa

SEQ ID NO: 2112894 - RNA, 19 nt, Artificial Sequence
  Description of Artificial Sequence: Synthetic oligonucleotide
agaugccuucucuucuaug

SEQ ID NO: 2112895 - RNA, 19 nt, Artificial Sequence
  Description of Artificial Sequence: Synthetic oligonucleotide
cuuucugcaguaccacuca

SEQ ID NO: 2112896 - RNA, 19 nt, Artificial Sequence
  Description of Artificial Sequence: Synthetic oligonucleotide
uucuguucggggaguuaac

SEQ ID NO: 2112897 - RNA, 19 nt, Artificial Sequence
  Description of Artificial Sequence: Synthetic oligonucleotide
uugggucagggucuuugaa

SEQ ID NO: 2112898 - RNA, 19 nt, Artificial Sequence
  Description of Artificial Sequence: Synthetic oligonucleotide
ucacgaagacggugccagg

SEQ ID NO: 2112899 - RNA, 19 nt, Artificial Sequence
  Description of Artificial Sequence: Synthetic oligonucleotide
ggcccugaaaucuucgaac

SEQ ID NO: 2112900 - RNA, 19 nt, Artificial Sequence
  Description of Artificial Sequence: Synthetic oligonucleotide
cauggcacaagaacgccaa

SEQ ID NO: 2112901 - RNA, 19 nt, Artificial Sequence
  Description of Artificial Sequence: Synthetic oligonucleotide
uaacgauaacugccuacuu

SEQ ID NO: 2112902 - RNA, 19 nt, Artificial Sequence
  Description of Artificial Sequence: Synthetic oligonucleotide
aacugccuacuuuucucuu

SEQ ID NO: 2112903 - RNA, 19 nt, Artificial Sequence
  Description of Artificial Sequence: Synthetic oligonucleotide
auacuuguucucgggauaa

SEQ ID NO: 2112904 - RNA, 19 nt, Artificial Sequence
  Description of Artificial Sequence: Synthetic oligonucleotide
auuuuaucucacaggacuu

SEQ ID NO: 2112905 - RNA, 19 nt, Artificial Sequence
  Description of Artificial Sequence: Synthetic oligonucleotide
ugucaguucggugggugac

SEQ ID NO: 2112906 - RNA, 19 nt, Artificial Sequence
  Description of Artificial Sequence: Synthetic oligonucleotide
ucauagcagaaagccccag

SEQ ID NO: 2112907 - RNA, 19 nt, Artificial Sequence
  Description of Artificial Sequence: Synthetic oligonucleotide
cuuuugcaucaacuuccag

SEQ ID NO: 2112908 - RNA, 19 nt, Artificial Sequence
  Description of Artificial Sequence: Synthetic oligonucleotide
aagacggugccaggaucag

SEQ ID NO: 2112909 - RNA, 19 nt, Artificial Sequence
  Description of Artificial Sequence: Synthetic oligonucleotide
aguuaacgauaacugccua

SEQ ID NO: 2112910 - RNA, 19 nt, Artificial Sequence
  Description of Artificial Sequence: Synthetic oligonucleotide
cuucgaacgagguuuggcu

SEQ ID NO: 2112911 - RNA, 19 nt, Artificial Sequence
  Description of Artificial Sequence: Synthetic oligonucleotide
acuuaaaugcauggcgcaa

SEQ ID NO: 2112912 - RNA, 19 nt, Artificial Sequence
  Description of Artificial Sequence: Synthetic oligonucleotide
gaguuucaaagggaagguc

SEQ ID NO: 2112913 - RNA, 19 nt, Artificial Sequence
  Description of Artificial Sequence: Synthetic oligonucleotide
gaguuaacgauaacugccu

SEQ ID NO: 2112914 - RNA, 19 nt, Artificial Sequence
  Description of Artificial Sequence: Synthetic oligonucleotide
ggcacaagaacgccaauaa

SEQ ID NO: 2112915 - RNA, 19 nt, Artificial Sequence
  Description of Artificial Sequence: Synthetic oligonucleotide
augcucuuucuacuacaca

SEQ ID NO: 2112916 - RNA, 19 nt, Artificial Sequence
  Description of Artificial Sequence: Synthetic oligonucleotide
cucaagugaguggguaaag

SEQ ID NO: 2112917 - RNA, 19 nt, Artificial Sequence
  Description of Artificial Sequence: Synthetic oligonucleotide
uccgcauuucugucaguuc

SEQ ID NO: 2112918 - RNA, 19 nt, Artificial Sequence
  Description of Artificial Sequence: Synthetic oligonucleotide
ggcucugggguagauacag

SEQ ID NO: 2112919 - RNA, 19 nt, Artificial Sequence
  Description of Artificial Sequence: Synthetic oligonucleotide
uuccgcauuucugucaguu

SEQ ID NO: 2112920 - RNA, 19 nt, Artificial Sequence
  Description of Artificial Sequence: Synthetic oligonucleotide
aguguccucugucugucua

SEQ ID NO: 2112921 - RNA, 19 nt, Artificial Sequence
  Description of Artificial Sequence: Synthetic oligonucleotide
ccaagcugaucacauaauc

SEQ ID NO: 2112922 - RNA, 19 nt, Artificial Sequence
  Description of Artificial Sequence: Synthetic oligonucleotide
gaaaucuucgaacgagguu

SEQ ID NO: 2112923 - RNA, 19 nt, Artificial Sequence
  Description of Artificial Sequence: Synthetic oligonucleotide
gagguuuggcugagugggg

SEQ ID NO: 2112924 - RNA, 19 nt, Artificial Sequence
  Description of Artificial Sequence: Synthetic oligonucleotide
cgaucuuuucuguucgggg

SEQ ID NO: 2112925 - RNA, 19 nt, Artificial Sequence
  Description of Artificial Sequence: Synthetic oligonucleotide
uggcgcaacuguagggagu

SEQ ID NO: 2112926 - RNA, 19 nt, Artificial Sequence
  Description of Artificial Sequence: Synthetic oligonucleotide
aggcccugaaaucuucgaa

SEQ ID NO: 2112927 - RNA, 19 nt, Artificial Sequence
  Description of Artificial Sequence: Synthetic oligonucleotide
gaaagaacgcagguucucu

SEQ ID NO: 2112928 - RNA, 19 nt, Artificial Sequence
  Description of Artificial Sequence: Synthetic oligonucleotide
cuguucggggaguuaacga

SEQ ID NO: 2112929 - RNA, 19 nt, Artificial Sequence
  Description of Artificial Sequence: Synthetic oligonucleotide
augcuuaacuucgaucuuu

SEQ ID NO: 2112930 - RNA, 19 nt, Artificial Sequence
  Description of Artificial Sequence: Synthetic oligonucleotide
acaggcccugaaaucuucg

SEQ ID NO: 2112931 - RNA, 19 nt, Artificial Sequence
  Description of Artificial Sequence: Synthetic oligonucleotide
augcauggcgcaacuguag

SEQ ID NO: 2112932 - RNA, 19 nt, Artificial Sequence
  Description of Artificial Sequence: Synthetic oligonucleotide
cauggcgcaacuguaggga

SEQ ID NO: 2112933 - RNA, 19 nt, Artificial Sequence
  Description of Artificial Sequence: Synthetic oligonucleotide
ggucaaaggcuuauacaug

SEQ ID NO: 2112934 - RNA, 19 nt, Artificial Sequence
  Description of Artificial Sequence: Synthetic oligonucleotide
uuccgagaucuuuccaaua

SEQ ID NO: 2112935 - RNA, 19 nt, Artificial Sequence
  Description of Artificial Sequence: Synthetic oligonucleotide
cauuaaagcacgggcaucu

SEQ ID NO: 2112936 - RNA, 19 nt, Artificial Sequence
  Description of Artificial Sequence: Synthetic oligonucleotide
uacuuguucucgggauaag

SEQ ID NO: 2112937 - RNA, 19 nt, Artificial Sequence
  Description of Artificial Sequence: Synthetic oligonucleotide
cucgggauucugagaugcc

SEQ ID NO: 2112938 - RNA, 19 nt, Artificial Sequence
  Description of Artificial Sequence: Synthetic oligonucleotide
acgggcaucuuuugugaaa

SEQ ID NO: 2112939 - RNA, 19 nt, Artificial Sequence
  Description of Artificial Sequence: Synthetic oligonucleotide
ugaccaagcugaucacaua

SEQ ID NO: 2112940 - RNA, 19 nt, Artificial Sequence
  Description of Artificial Sequence: Synthetic oligonucleotide
gggugaagauuguggacug

SEQ ID NO: 2112941 - RNA, 19 nt, Artificial Sequence
  Description of Artificial Sequence: Synthetic oligonucleotide
gcuugacuauucucucggg

SEQ ID NO: 2112942 - RNA, 19 nt, Artificial Sequence
  Description of Artificial Sequence: Synthetic oligonucleotide
acgaagacggugccaggau

SEQ ID NO: 2112943 - RNA, 19 nt, Artificial Sequence
  Description of Artificial Sequence: Synthetic oligonucleotide
aaacuacaucauagcagaa

SEQ ID NO: 2112944 - RNA, 19 nt, Artificial Sequence
  Description of Artificial Sequence: Synthetic oligonucleotide
ucggugggugacagcugag

SEQ ID NO: 2112945 - RNA, 19 nt, Artificial Sequence
  Description of Artificial Sequence: Synthetic oligonucleotide
gcugaucacauaaucaucu

SEQ ID NO: 2112946 - RNA, 19 nt, Artificial Sequence
  Description of Artificial Sequence: Synthetic oligonucleotide
aucauagcagaaagcccca

SEQ ID NO: 2112947 - RNA, 19 nt, Artificial Sequence
  Description of Artificial Sequence: Synthetic oligonucleotide
agguuuggcugaguggggu

SEQ ID NO: 2112948 - RNA, 19 nt, Artificial Sequence
  Description of Artificial Sequence: Synthetic oligonucleotide
aagagggccuucacucaca

SEQ ID NO: 2112949 - RNA, 19 nt, Artificial Sequence
  Description of Artificial Sequence: Synthetic oligonucleotide
agcuugucccauauuguaa

SEQ ID NO: 2112950 - RNA, 19 nt, Artificial Sequence
  Description of Artificial Sequence: Synthetic oligonucleotide
ccauauuguaaaaugugcu

SEQ ID NO: 2112951 - RNA, 19 nt, Artificial Sequence
  Description of Artificial Sequence: Synthetic oligonucleotide
cucucaagugaguggguaa

SEQ ID NO: 2112952 - RNA, 19 nt, Artificial Sequence
  Description of Artificial Sequence: Synthetic oligonucleotide
gucccauauuguaaaaugu

SEQ ID NO: 2112953 - RNA, 19 nt, Artificial Sequence
  Description of Artificial Sequence: Synthetic oligonucleotide
aucuucgaacgagguuugg

SEQ ID NO: 2112954 - RNA, 19 nt, Artificial Sequence
  Description of Artificial Sequence: Synthetic oligonucleotide
caucaucauggcacaagaa

SEQ ID NO: 2112955 - RNA, 19 nt, Artificial Sequence
  Description of Artificial Sequence: Synthetic oligonucleotide
cuggaaacaaauacuuguu

SEQ ID NO: 2112956 - RNA, 19 nt, Artificial Sequence
  Description of Artificial Sequence: Synthetic oligonucleotide
gguaaagacaggcccugaa

SEQ ID NO: 2112957 - RNA, 19 nt, Artificial Sequence
  Description of Artificial Sequence: Synthetic oligonucleotide
ccacucacuuaaaugcaug

SEQ ID NO: 2112958 - RNA, 19 nt, Artificial Sequence
  Description of Artificial Sequence: Synthetic oligonucleotide
ccgagaucuuuccaauagc

SEQ ID NO: 2112959 - RNA, 19 nt, Artificial Sequence
  Description of Artificial Sequence: Synthetic oligonucleotide
ggcaucuuuugugaaagaa

SEQ ID NO: 2112960 - RNA, 19 nt, Artificial Sequence
  Description of Artificial Sequence: Synthetic oligonucleotide
uuuucuguucggggaguua

SEQ ID NO: 2112961 - RNA, 19 nt, Artificial Sequence
  Description of Artificial Sequence: Synthetic oligonucleotide
cucguacuggaaacaaaua

SEQ ID NO: 2112962 - RNA, 19 nt, Artificial Sequence
  Description of Artificial Sequence: Synthetic oligonucleotide
accacucacuuaaaugcau

SEQ ID NO: 2112963 - RNA, 19 nt, Artificial Sequence
  Description of Artificial Sequence: Synthetic oligonucleotide
cucucgggauucugagaug

SEQ ID NO: 2112964 - RNA, 19 nt, Artificial Sequence
  Description of Artificial Sequence: Synthetic oligonucleotide
uccguccacaagagccaga

SEQ ID NO: 2112965 - RNA, 19 nt, Artificial Sequence
  Description of Artificial Sequence: Synthetic oligonucleotide
agguucucuuucguuggca

SEQ ID NO: 2112966 - RNA, 19 nt, Artificial Sequence
  Description of Artificial Sequence: Synthetic oligonucleotide
cgcuauaaaccuccagcgg

SEQ ID NO: 2112967 - RNA, 19 nt, Artificial Sequence
  Description of Artificial Sequence: Synthetic oligonucleotide
acaccucguacuggaaaca

SEQ ID NO: 2112968 - RNA, 19 nt, Artificial Sequence
  Description of Artificial Sequence: Synthetic oligonucleotide
gugaagauuguggacugcu

SEQ ID NO: 2112969 - RNA, 19 nt, Artificial Sequence
  Description of Artificial Sequence: Synthetic oligonucleotide
uguggacugcugacaccuc

SEQ ID NO: 2112970 - RNA, 19 nt, Artificial Sequence
  Description of Artificial Sequence: Synthetic oligonucleotide
ucccacggcuguccgucca

SEQ ID NO: 2112971 - RNA, 19 nt, Artificial Sequence
  Description of Artificial Sequence: Synthetic oligonucleotide
ucggggaguuaacgauaac

SEQ ID NO: 2112972 - RNA, 19 nt, Artificial Sequence
  Description of Artificial Sequence: Synthetic oligonucleotide
caagaacgccaauaagccu

SEQ ID NO: 2112973 - RNA, 19 nt, Artificial Sequence
  Description of Artificial Sequence: Synthetic oligonucleotide
gugccaggaucaguuuucc

SEQ ID NO: 2112974 - RNA, 19 nt, Artificial Sequence
  Description of Artificial Sequence: Synthetic oligonucleotide
cugucaguucgguggguga

SEQ ID NO: 2112975 - RNA, 19 nt, Artificial Sequence
  Description of Artificial Sequence: Synthetic oligonucleotide
ggugccaggaucaguuuuc

SEQ ID NO: 2112976 - RNA, 19 nt, Artificial Sequence
  Description of Artificial Sequence: Synthetic oligonucleotide
cacgaagacggugccagga

SEQ ID NO: 2112977 - RNA, 19 nt, Artificial Sequence
  Description of Artificial Sequence: Synthetic oligonucleotide
gacggugccaggaucaguu

SEQ ID NO: 2112978 - RNA, 19 nt, Artificial Sequence
  Description of Artificial Sequence: Synthetic oligonucleotide
cugccuacuuuucucuuua

SEQ ID NO: 2112979 - RNA, 19 nt, Artificial Sequence
  Description of Artificial Sequence: Synthetic oligonucleotide
gggauaagagggccuucac

SEQ ID NO: 2112980 - RNA, 19 nt, Artificial Sequence
  Description of Artificial Sequence: Synthetic oligonucleotide
acgcagguucucuuucguu

SEQ ID NO: 2112981 - RNA, 19 nt, Artificial Sequence
  Description of Artificial Sequence: Synthetic oligonucleotide
guccguccacaagagccag

SEQ ID NO: 2112982 - RNA, 19 nt, Artificial Sequence
  Description of Artificial Sequence: Synthetic oligonucleotide
caggcccugaaaucuucga

SEQ ID NO: 2112983 - RNA, 19 nt, Artificial Sequence
  Description of Artificial Sequence: Synthetic oligonucleotide
auuccgcauuucugucagu

SEQ ID NO: 2112984 - RNA, 19 nt, Artificial Sequence
  Description of Artificial Sequence: Synthetic oligonucleotide
caguuaccauuuuccgaga

SEQ ID NO: 2112985 - RNA, 19 nt, Artificial Sequence
  Description of Artificial Sequence: Synthetic oligonucleotide
cccaucaucauggcacaag

SEQ ID NO: 2112986 - RNA, 19 nt, Artificial Sequence
  Description of Artificial Sequence: Synthetic oligonucleotide
guucggggaguuaacgaua

SEQ ID NO: 2112987 - RNA, 19 nt, Artificial Sequence
  Description of Artificial Sequence: Synthetic oligonucleotide
gcacgggcaucuuuuguga

SEQ ID NO: 2112988 - RNA, 19 nt, Artificial Sequence
  Description of Artificial Sequence: Synthetic oligonucleotide
gugaaagaacgcagguucu

SEQ ID NO: 2112989 - RNA, 19 nt, Artificial Sequence
  Description of Artificial Sequence: Synthetic oligonucleotide
acuuggucaaaggcuuaua

SEQ ID NO: 2112990 - RNA, 19 nt, Artificial Sequence
  Description of Artificial Sequence: Synthetic oligonucleotide
cuucaggugcucugaccaa

SEQ ID NO: 2112991 - RNA, 19 nt, Artificial Sequence
  Description of Artificial Sequence: Synthetic oligonucleotide
caguucggugggugacagc

SEQ ID NO: 2112992 - RNA, 19 nt, Artificial Sequence
  Description of Artificial Sequence: Synthetic oligonucleotide
agaacgccaauaagccuua

SEQ ID NO: 2112993 - RNA, 19 nt, Artificial Sequence
  Description of Artificial Sequence: Synthetic oligonucleotide
ggacuucaggugcucugac

SEQ ID NO: 2112994 - RNA, 19 nt, Artificial Sequence
  Description of Artificial Sequence: Synthetic oligonucleotide
caaagggaaggucccugua

SEQ ID NO: 2112995 - RNA, 19 nt, Artificial Sequence
  Description of Artificial Sequence: Synthetic oligonucleotide
gucaguucggugggugaca

SEQ ID NO: 2112996 - RNA, 19 nt, Artificial Sequence
  Description of Artificial Sequence: Synthetic oligonucleotide
cgggcaucuuuugugaaag

SEQ ID NO: 2112997 - RNA, 19 nt, Artificial Sequence
  Description of Artificial Sequence: Synthetic oligonucleotide
gaaggcucugggguagaua

SEQ ID NO: 2112998 - RNA, 19 nt, Artificial Sequence
  Description of Artificial Sequence: Synthetic oligonucleotide
ggcauccauucauccaguc

SEQ ID NO: 2112999 - RNA, 19 nt, Artificial Sequence
  Description of Artificial Sequence: Synthetic oligonucleotide
guucggugggugacagcug

SEQ ID NO: 2113000 - RNA, 19 nt, Artificial Sequence
  Description of Artificial Sequence: Synthetic oligonucleotide
ucgggauaagagggccuuc

SEQ ID NO: 2113001 - RNA, 19 nt, Artificial Sequence
  Description of Artificial Sequence: Synthetic oligonucleotide
accucguacuggaaacaaa

SEQ ID NO: 2113002 - RNA, 19 nt, Artificial Sequence
  Description of Artificial Sequence: Synthetic oligonucleotide
cuggcgacgucgcuauaaa

SEQ ID NO: 2113003 - RNA, 19 nt, Artificial Sequence
  Description of Artificial Sequence: Synthetic oligonucleotide
gacuuggucaaaggcuuau

SEQ ID NO: 2113004 - RNA, 19 nt, Artificial Sequence
  Description of Artificial Sequence: Synthetic oligonucleotide
ggaucaguuuucccaacau

SEQ ID NO: 2113005 - RNA, 19 nt, Artificial Sequence
  Description of Artificial Sequence: Synthetic oligonucleotide
gagggccuucacucacauc

SEQ ID NO: 2113006 - RNA, 19 nt, Artificial Sequence
  Description of Artificial Sequence: Synthetic oligonucleotide
gcauccauucauccagucu

SEQ ID NO: 2113007 - RNA, 19 nt, Artificial Sequence
  Description of Artificial Sequence: Synthetic oligonucleotide
ccucguacuggaaacaaau

SEQ ID NO: 2113008 - RNA, 19 nt, Artificial Sequence
  Description of Artificial Sequence: Synthetic oligonucleotide
guagggaguugaaauguuu

SEQ ID NO: 2113009 - RNA, 19 nt, Artificial Sequence
  Description of Artificial Sequence: Synthetic oligonucleotide
agacggugccaggaucagu

SEQ ID NO: 2113010 - RNA, 19 nt, Artificial Sequence
  Description of Artificial Sequence: Synthetic oligonucleotide
caagagccagaauggacuu

SEQ ID NO: 2113011 - RNA, 19 nt, Artificial Sequence
  Description of Artificial Sequence: Synthetic oligonucleotide
ccaacaugcuuaacuucga

SEQ ID NO: 2113012 - RNA, 19 nt, Artificial Sequence
  Description of Artificial Sequence: Synthetic oligonucleotide
caucacgaagacggugcca

SEQ ID NO: 2113013 - RNA, 19 nt, Artificial Sequence
  Description of Artificial Sequence: Synthetic oligonucleotide
cgagaucuuuccaauagcu

SEQ ID NO: 2113014 - RNA, 19 nt, Artificial Sequence
  Description of Artificial Sequence: Synthetic oligonucleotide
acggugccaggaucaguuu

SEQ ID NO: 2113015 - RNA, 19 nt, Artificial Sequence
  Description of Artificial Sequence: Synthetic oligonucleotide
caccucguacuggaaacaa

SEQ ID NO: 2113016 - RNA, 19 nt, Artificial Sequence
  Description of Artificial Sequence: Synthetic oligonucleotide
cacgggcaucuuuugugaa

SEQ ID NO: 2113017 - RNA, 19 nt, Artificial Sequence
  Description of Artificial Sequence: Synthetic oligonucleotide
gggguagauacaguguccu

SEQ ID NO: 2113018 - RNA, 19 nt, Artificial Sequence
  Description of Artificial Sequence: Synthetic oligonucleotide
agacaggcccugaaaucuu

SEQ ID NO: 2113019 - RNA, 19 nt, Artificial Sequence
  Description of Artificial Sequence: Synthetic oligonucleotide
cugcaguaccacucacuua

SEQ ID NO: 2113020 - RNA, 19 nt, Artificial Sequence
  Description of Artificial Sequence: Synthetic oligonucleotide
cgauaacugccuacuuuuc

SEQ ID NO: 2113021 - RNA, 19 nt, Artificial Sequence
  Description of Artificial Sequence: Synthetic oligonucleotide
ccuccagcgggccccgccg

SEQ ID NO: 2113022 - RNA, 19 nt, Artificial Sequence
  Description of Artificial Sequence: Synthetic oligonucleotide
caguaccacucacuuaaau

SEQ ID NO: 2113023 - RNA, 19 nt, Artificial Sequence
  Description of Artificial Sequence: Synthetic oligonucleotide
gucccacggcuguccgucc

SEQ ID NO: 2113024 - RNA, 19 nt, Artificial Sequence
  Description of Artificial Sequence: Synthetic oligonucleotide
caugcuuaacuucgaucuu

SEQ ID NO: 2113025 - RNA, 19 nt, Artificial Sequence
  Description of Artificial Sequence: Synthetic oligonucleotide
gggcaucuuuugugaaaga

SEQ ID NO: 2113026 - RNA, 19 nt, Artificial Sequence
  Description of Artificial Sequence: Synthetic oligonucleotide
cgucgcuauaaaccuccag

SEQ ID NO: 2113027 - RNA, 19 nt, Artificial Sequence
  Description of Artificial Sequence: Synthetic oligonucleotide
aguccacuuuauacuuguu

SEQ ID NO: 2113028 - RNA, 19 nt, Artificial Sequence
  Description of Artificial Sequence: Synthetic oligonucleotide
cccugaaaucuucgaacga

SEQ ID NO: 2113029 - RNA, 19 nt, Artificial Sequence
  Description of Artificial Sequence: Synthetic oligonucleotide
gcuggcgacgucgcuauaa

SEQ ID NO: 2113030 - RNA, 19 nt, Artificial Sequence
  Description of Artificial Sequence: Synthetic oligonucleotide
acgucgcuauaaaccucca

SEQ ID NO: 2113031 - RNA, 19 nt, Artificial Sequence
  Description of Artificial Sequence: Synthetic oligonucleotide
cacggcuguccguccacaa

SEQ ID NO: 2113032 - RNA, 19 nt, Artificial Sequence
  Description of Artificial Sequence: Synthetic oligonucleotide
cuacuacacagcccaucau

SEQ ID NO: 2113033 - RNA, 19 nt, Artificial Sequence
  Description of Artificial Sequence: Synthetic oligonucleotide
ggauucugagaugccuucu

SEQ ID NO: 2113034 - RNA, 19 nt, Artificial Sequence
  Description of Artificial Sequence: Synthetic oligonucleotide
ggacugcugacaccucgua

SEQ ID NO: 2113035 - RNA, 19 nt, Artificial Sequence
  Description of Artificial Sequence: Synthetic oligonucleotide
ggcugaguggggugaagau

SEQ ID NO: 2113036 - RNA, 19 nt, Artificial Sequence
  Description of Artificial Sequence: Synthetic oligonucleotide
gagccagaauggacuuucu

SEQ ID NO: 2113037 - RNA, 19 nt, Artificial Sequence
  Description of Artificial Sequence: Synthetic oligonucleotide
caccaauucuguguagcuu

SEQ ID NO: 2113038 - RNA, 19 nt, Artificial Sequence
  Description of Artificial Sequence: Synthetic oligonucleotide
ccaauagcuugucccauau

SEQ ID NO: 2113039 - RNA, 19 nt, Artificial Sequence
  Description of Artificial Sequence: Synthetic oligonucleotide
cgaacgagguuuggcugag

SEQ ID NO: 2113040 - RNA, 19 nt, Artificial Sequence
  Description of Artificial Sequence: Synthetic oligonucleotide
cucgggauaagagggccuu

SEQ ID NO: 2113041 - RNA, 19 nt, Artificial Sequence
  Description of Artificial Sequence: Synthetic oligonucleotide
cgacgucgcuauaaaccuc

SEQ ID NO: 2113042 - RNA, 19 nt, Artificial Sequence
  Description of Artificial Sequence: Synthetic oligonucleotide
cggggaguuaacgauaacu

SEQ ID NO: 2113043 - RNA, 19 nt, Artificial Sequence
  Description of Artificial Sequence: Synthetic oligonucleotide
ccguccacaagagccagaa

SEQ ID NO: 2113044 - RNA, 19 nt, Artificial Sequence
  Description of Artificial Sequence: Synthetic oligonucleotide
gcugaguggggugaagauu

SEQ ID NO: 2113045 - RNA, 19 nt, Artificial Sequence
  Description of Artificial Sequence: Synthetic oligonucleotide
ggcgcaacuguagggaguu

SEQ ID NO: 2113046 - RNA, 19 nt, Artificial Sequence
  Description of Artificial Sequence: Synthetic oligonucleotide
gaacgagguuuggcugagu

SEQ ID NO: 2113047 - RNA, 19 nt, Artificial Sequence
  Description of Artificial Sequence: Synthetic oligonucleotide
cccacggcuguccguccac

SEQ ID NO: 2113048 - RNA, 19 nt, Artificial Sequence
  Description of Artificial Sequence: Synthetic oligonucleotide
ggccuucacucacaucaau

SEQ ID NO: 2113049 - RNA, 19 nt, Artificial Sequence
  Description of Artificial Sequence: Synthetic oligonucleotide
cgggauaagagggccuuca

SEQ ID NO: 2113050 - RNA, 19 nt, Artificial Sequence
  Description of Artificial Sequence: Synthetic oligonucleotide
cucuuucguuggcauccau

SEQ ID NO: 2113051 - RNA, 19 nt, Artificial Sequence
  Description of Artificial Sequence: Synthetic oligonucleotide
gcggcuggcgacgucgcua

SEQ ID NO: 2113052 - RNA, 19 nt, Artificial Sequence
  Description of Artificial Sequence: Synthetic oligonucleotide
gcgcaacuguagggaguug

SEQ ID NO: 2113053 - RNA, 19 nt, Artificial Sequence
  Description of Artificial Sequence: Synthetic oligonucleotide
cgggauucugagaugccuu

SEQ ID NO: 2113054 - RNA, 19 nt, Artificial Sequence
  Description of Artificial Sequence: Synthetic oligonucleotide
gugcucugaccaagcugau

SEQ ID NO: 2113055 - RNA, 19 nt, Artificial Sequence
  Description of Artificial Sequence: Synthetic oligonucleotide
ccacggcuguccguccaca

SEQ ID NO: 2113056 - RNA, 19 nt, Artificial Sequence
  Description of Artificial Sequence: Synthetic oligonucleotide
cggugccaggaucaguuuu

SEQ ID NO: 2113057 - RNA, 19 nt, Artificial Sequence
  Description of Artificial Sequence: Synthetic oligonucleotide
ggcuggcgacgucgcuaua

SEQ ID NO: 2113058 - RNA, 19 nt, Artificial Sequence
  Description of Artificial Sequence: Synthetic oligonucleotide
cggcuggcgacgucgcuau

SEQ ID NO: 2113059 - RNA, 19 nt, Artificial Sequence
  Description of Artificial Sequence: Synthetic oligonucleotide
cguccacaagagccagaau

SEQ ID NO: 2113060 - RNA, 19 nt, Artificial Sequence
  Description of Artificial Sequence: Synthetic oligonucleotide
cgaaggcucugggguagau

SEQ ID NO: 2113061 - RNA, 19 nt, Artificial Sequence
  Description of Artificial Sequence: Synthetic oligonucleotide
aagugugccaucuugggcc

SEQ ID NO: 2113062 - RNA, 19 nt, Artificial Sequence
  Description of Artificial Sequence: Synthetic oligonucleotide
caaacugguacuuugaggg

SEQ ID NO: 2113063 - RNA, 19 nt, Artificial Sequence
  Description of Artificial Sequence: Synthetic oligonucleotide
accauuagaaaccucauag

SEQ ID NO: 2113064 - RNA, 19 nt, Artificial Sequence
  Description of Artificial Sequence: Synthetic oligonucleotide
aacuuuacuuuguuccucc

SEQ ID NO: 2113065 - RNA, 19 nt, Artificial Sequence
  Description of Artificial Sequence: Synthetic oligonucleotide
uuagaaaccucauaggcca

SEQ ID NO: 2113066 - RNA, 19 nt, Artificial Sequence
  Description of Artificial Sequence: Synthetic oligonucleotide
aguccauugauuucacucc

SEQ ID NO: 2113067 - RNA, 19 nt, Artificial Sequence
  Description of Artificial Sequence: Synthetic oligonucleotide
acugcuaugccugauaugg

SEQ ID NO: 2113068 - RNA, 19 nt, Artificial Sequence
  Description of Artificial Sequence: Synthetic oligonucleotide
cauuagaaaccucauaggc

SEQ ID NO: 2113069 - RNA, 19 nt, Artificial Sequence
  Description of Artificial Sequence: Synthetic oligonucleotide
agcugcaaacuacacaucc

SEQ ID NO: 2113070 - RNA, 19 nt, Artificial Sequence
  Description of Artificial Sequence: Synthetic oligonucleotide
aggaguaucugguaccucc

SEQ ID NO: 2113071 - RNA, 19 nt, Artificial Sequence
  Description of Artificial Sequence: Synthetic oligonucleotide
acaaaggcacuucacagac

SEQ ID NO: 2113072 - RNA, 19 nt, Artificial Sequence
  Description of Artificial Sequence: Synthetic oligonucleotide
auuagaaaccucauaggcc

SEQ ID NO: 2113073 - RNA, 19 nt, Artificial Sequence
  Description of Artificial Sequence: Synthetic oligonucleotide
aaaccuaccaccccuccuc

SEQ ID NO: 2113074 - RNA, 19 nt, Artificial Sequence
  Description of Artificial Sequence: Synthetic oligonucleotide
uuuacuuuguuccuccaga

SEQ ID NO: 2113075 - RNA, 19 nt, Artificial Sequence
  Description of Artificial Sequence: Synthetic oligonucleotide
uuggauguuggccaguugc

SEQ ID NO: 2113076 - RNA, 19 nt, Artificial Sequence
  Description of Artificial Sequence: Synthetic oligonucleotide
aaacuacacaucccggccg

SEQ ID NO: 2113077 - RNA, 19 nt, Artificial Sequence
  Description of Artificial Sequence: Synthetic oligonucleotide
ucuugguccaccucagucg

SEQ ID NO: 2113078 - RNA, 19 nt, Artificial Sequence
  Description of Artificial Sequence: Synthetic oligonucleotide
aacuacacaucccggccgc

SEQ ID NO: 2113079 - RNA, 19 nt, Artificial Sequence
  Description of Artificial Sequence: Synthetic oligonucleotide
ucugccgcgauccuaggcg

SEQ ID NO: 2113080 - RNA, 19 nt, Artificial Sequence
  Description of Artificial Sequence: Synthetic oligonucleotide
agggauguccccuucauag

SEQ ID NO: 2113081 - RNA, 19 nt, Artificial Sequence
  Description of Artificial Sequence: Synthetic oligonucleotide
acguggacguuucacaggc

SEQ ID NO: 2113082 - RNA, 19 nt, Artificial Sequence
  Description of Artificial Sequence: Synthetic oligonucleotide
augauuuggauguuggcca

SEQ ID NO: 2113083 - RNA, 19 nt, Artificial Sequence
  Description of Artificial Sequence: Synthetic oligonucleotide
ugcuugaugaacuuuacuu

SEQ ID NO: 2113084 - RNA, 19 nt, Artificial Sequence
  Description of Artificial Sequence: Synthetic oligonucleotide
uuggucacguucuuggucc

SEQ ID NO: 2113085 - RNA, 19 nt, Artificial Sequence
  Description of Artificial Sequence: Synthetic oligonucleotide
caugauuuggauguuggcc

SEQ ID NO: 2113086 - RNA, 19 nt, Artificial Sequence
  Description of Artificial Sequence: Synthetic oligonucleotide
cucaugauuuggauguugg

SEQ ID NO: 2113087 - RNA, 19 nt, Artificial Sequence
  Description of Artificial Sequence: Synthetic oligonucleotide
cuaacugguccacaggugc

SEQ ID NO: 2113088 - RNA, 19 nt, Artificial Sequence
  Description of Artificial Sequence: Synthetic oligonucleotide
acuggugucauagcagugc

SEQ ID NO: 2113089 - RNA, 19 nt, Artificial Sequence
  Description of Artificial Sequence: Synthetic oligonucleotide
gugcucagcaccuaacugg

SEQ ID NO: 2113090 - RNA, 19 nt, Artificial Sequence
  Description of Artificial Sequence: Synthetic oligonucleotide
uuacguggacguuucacag

SEQ ID NO: 2113091 - RNA, 19 nt, Artificial Sequence
  Description of Artificial Sequence: Synthetic oligonucleotide
ugcaaacuacacaucccgg

SEQ ID NO: 2113092 - RNA, 19 nt, Artificial Sequence
  Description of Artificial Sequence: Synthetic oligonucleotide
cauugauuucacuccacag

SEQ ID NO: 2113093 - RNA, 19 nt, Artificial Sequence
  Description of Artificial Sequence: Synthetic oligonucleotide
cucagcaccuaacuggucc

SEQ ID NO: 2113094 - RNA, 19 nt, Artificial Sequence
  Description of Artificial Sequence: Synthetic oligonucleotide
caaacuacacaucccggcc

SEQ ID NO: 2113095 - RNA, 19 nt, Artificial Sequence
  Description of Artificial Sequence: Synthetic oligonucleotide
cucaccauuagaaaccuca

SEQ ID NO: 2113096 - RNA, 19 nt, Artificial Sequence
  Description of Artificial Sequence: Synthetic oligonucleotide
caguccauugauuucacuc

SEQ ID NO: 2113097 - RNA, 19 nt, Artificial Sequence
  Description of Artificial Sequence: Synthetic oligonucleotide
acagccauagccaagugug

SEQ ID NO: 2113098 - RNA, 19 nt, Artificial Sequence
  Description of Artificial Sequence: Synthetic oligonucleotide
ucugugucuuacguggacg

SEQ ID NO: 2113099 - RNA, 19 nt, Artificial Sequence
  Description of Artificial Sequence: Synthetic oligonucleotide
guggacguuucacaggccg

SEQ ID NO: 2113100 - RNA, 19 nt, Artificial Sequence
  Description of Artificial Sequence: Synthetic oligonucleotide
acagucaagccccgugccc

SEQ ID NO: 2113101 - RNA, 19 nt, Artificial Sequence
  Description of Artificial Sequence: Synthetic oligonucleotide
aaaaccuaccaccccuccu

SEQ ID NO: 2113102 - RNA, 19 nt, Artificial Sequence
  Description of Artificial Sequence: Synthetic oligonucleotide
guaguuucugugucuuacg

SEQ ID NO: 2113103 - RNA, 19 nt, Artificial Sequence
  Description of Artificial Sequence: Synthetic oligonucleotide
ucuuuggucuggcuggaga

SEQ ID NO: 2113104 - RNA, 19 nt, Artificial Sequence
  Description of Artificial Sequence: Synthetic oligonucleotide
gacccuuagagguccuugg

SEQ ID NO: 2113105 - RNA, 19 nt, Artificial Sequence
  Description of Artificial Sequence: Synthetic oligonucleotide
gucaccauccgaaugcccg

SEQ ID NO: 2113106 - RNA, 19 nt, Artificial Sequence
  Description of Artificial Sequence: Synthetic oligonucleotide
cuugguccaccucagucgg

SEQ ID NO: 2113107 - RNA, 19 nt, Artificial Sequence
  Description of Artificial Sequence: Synthetic oligonucleotide
ugauuuggauguuggccag

SEQ ID NO: 2113108 - RNA, 19 nt, Artificial Sequence
  Description of Artificial Sequence: Synthetic oligonucleotide
uacauguguguccacugcu

SEQ ID NO: 2113109 - RNA, 19 nt, Artificial Sequence
  Description of Artificial Sequence: Synthetic oligonucleotide
aguuucugugucuuacgug

SEQ ID NO: 2113110 - RNA, 19 nt, Artificial Sequence
  Description of Artificial Sequence: Synthetic oligonucleotide
ucaugauuuggauguuggc

SEQ ID NO: 2113111 - RNA, 19 nt, Artificial Sequence
  Description of Artificial Sequence: Synthetic oligonucleotide
agugugccaucuugggccc

SEQ ID NO: 2113112 - RNA, 19 nt, Artificial Sequence
  Description of Artificial Sequence: Synthetic oligonucleotide
accuaacugguccacaggu

SEQ ID NO: 2113113 - RNA, 19 nt, Artificial Sequence
  Description of Artificial Sequence: Synthetic oligonucleotide
ugcaguauggcgguugucu

SEQ ID NO: 2113114 - RNA, 19 nt, Artificial Sequence
  Description of Artificial Sequence: Synthetic oligonucleotide
uaucugguaccuccgcacc

SEQ ID NO: 2113115 - RNA, 19 nt, Artificial Sequence
  Description of Artificial Sequence: Synthetic oligonucleotide
ugugcgugucuccucuggg

SEQ ID NO: 2113116 - RNA, 19 nt, Artificial Sequence
  Description of Artificial Sequence: Synthetic oligonucleotide
aaugcccguguucaugccu

SEQ ID NO: 2113117 - RNA, 19 nt, Artificial Sequence
  Description of Artificial Sequence: Synthetic oligonucleotide
uuggccaaagcccaccauc

SEQ ID NO: 2113118 - RNA, 19 nt, Artificial Sequence
  Description of Artificial Sequence: Synthetic oligonucleotide
cuuuacuuuguuccuccag

SEQ ID NO: 2113119 - RNA, 19 nt, Artificial Sequence
  Description of Artificial Sequence: Synthetic oligonucleotide
agugcucagcaccuaacug

SEQ ID NO: 2113120 - RNA, 19 nt, Artificial Sequence
  Description of Artificial Sequence: Synthetic oligonucleotide
agccauagccaagugugcc

SEQ ID NO: 2113121 - RNA, 19 nt, Artificial Sequence
  Description of Artificial Sequence: Synthetic oligonucleotide
uggacguuucacaggccgg

SEQ ID NO: 2113122 - RNA, 19 nt, Artificial Sequence
  Description of Artificial Sequence: Synthetic oligonucleotide
gaugagccugcccagcaug

SEQ ID NO: 2113123 - RNA, 19 nt, Artificial Sequence
  Description of Artificial Sequence: Synthetic oligonucleotide
cuuugaggggcucagcauc

SEQ ID NO: 2113124 - RNA, 19 nt, Artificial Sequence
  Description of Artificial Sequence: Synthetic oligonucleotide
aguugcugcugccaguucu

SEQ ID NO: 2113125 - RNA, 19 nt, Artificial Sequence
  Description of Artificial Sequence: Synthetic oligonucleotide
uauggcgguugucugcuug

SEQ ID NO: 2113126 - RNA, 19 nt, Artificial Sequence
  Description of Artificial Sequence: Synthetic oligonucleotide
ggauguccccuucauagcg

SEQ ID NO: 2113127 - RNA, 19 nt, Artificial Sequence
  Description of Artificial Sequence: Synthetic oligonucleotide
ugcuaugccugauaugguc

SEQ ID NO: 2113128 - RNA, 19 nt, Artificial Sequence
  Description of Artificial Sequence: Synthetic oligonucleotide
uuacuuuguuccuccagaa

SEQ ID NO: 2113129 - RNA, 19 nt, Artificial Sequence
  Description of Artificial Sequence: Synthetic oligonucleotide
cuaugccugauaugguccc

SEQ ID NO: 2113130 - RNA, 19 nt, Artificial Sequence
  Description of Artificial Sequence: Synthetic oligonucleotide
acguucuugguccaccuca

SEQ ID NO: 2113131 - RNA, 19 nt, Artificial Sequence
  Description of Artificial Sequence: Synthetic oligonucleotide
uaccuccgcaccuuugggg

SEQ ID NO: 2113132 - RNA, 19 nt, Artificial Sequence
  Description of Artificial Sequence: Synthetic oligonucleotide
ucgguuggugauucuaugu

SEQ ID NO: 2113133 - RNA, 19 nt, Artificial Sequence
  Description of Artificial Sequence: Synthetic oligonucleotide
uccucacaaaggcacuuca

SEQ ID NO: 2113134 - RNA, 19 nt, Artificial Sequence
  Description of Artificial Sequence: Synthetic oligonucleotide
cuuacguggacguuucaca

SEQ ID NO: 2113135 - RNA, 19 nt, Artificial Sequence
  Description of Artificial Sequence: Synthetic oligonucleotide
aguaucugguaccuccgca

SEQ ID NO: 2113136 - RNA, 19 nt, Artificial Sequence
  Description of Artificial Sequence: Synthetic oligonucleotide
ucugucuguaggaugcuuu

SEQ ID NO: 2113137 - RNA, 19 nt, Artificial Sequence
  Description of Artificial Sequence: Synthetic oligonucleotide
cuuagagguccuuggcagc

SEQ ID NO: 2113138 - RNA, 19 nt, Artificial Sequence
  Description of Artificial Sequence: Synthetic oligonucleotide
gucauagcagugcucagca

SEQ ID NO: 2113139 - RNA, 19 nt, Artificial Sequence
  Description of Artificial Sequence: Synthetic oligonucleotide
caagugugccaucuugggc

SEQ ID NO: 2113140 - RNA, 19 nt, Artificial Sequence
  Description of Artificial Sequence: Synthetic oligonucleotide
aacaccugguaaggcuacc

SEQ ID NO: 2113141 - RNA, 19 nt, Artificial Sequence
  Description of Artificial Sequence: Synthetic oligonucleotide
ucuuacguggacguuucac

SEQ ID NO: 2113142 - RNA, 19 nt, Artificial Sequence
  Description of Artificial Sequence: Synthetic oligonucleotide
cagaggaaguccucugacc

SEQ ID NO: 2113143 - RNA, 19 nt, Artificial Sequence
  Description of Artificial Sequence: Synthetic oligonucleotide
guaucugguaccuccgcac

SEQ ID NO: 2113144 - RNA, 19 nt, Artificial Sequence
  Description of Artificial Sequence: Synthetic oligonucleotide
acauguaguuucugugucu

SEQ ID NO: 2113145 - RNA, 19 nt, Artificial Sequence
  Description of Artificial Sequence: Synthetic oligonucleotide
cacaggugcauccuucuug

SEQ ID NO: 2113146 - RNA, 19 nt, Artificial Sequence
  Description of Artificial Sequence: Synthetic oligonucleotide
ugucuuacguggacguuuc

SEQ ID NO: 2113147 - RNA, 19 nt, Artificial Sequence
  Description of Artificial Sequence: Synthetic oligonucleotide
uuuguuccuccagaagccc

SEQ ID NO: 2113148 - RNA, 19 nt, Artificial Sequence
  Description of Artificial Sequence: Synthetic oligonucleotide
ucaugccugaagcugcaaa

SEQ ID NO: 2113149 - RNA, 19 nt, Artificial Sequence
  Description of Artificial Sequence: Synthetic oligonucleotide
ucucaugauuuggauguug

SEQ ID NO: 2113150 - RNA, 19 nt, Artificial Sequence
  Description of Artificial Sequence: Synthetic oligonucleotide
cacauguaguuucuguguc

SEQ ID NO: 2113151 - RNA, 19 nt, Artificial Sequence
  Description of Artificial Sequence: Synthetic oligonucleotide
gcaaacuacacaucccggc

SEQ ID NO: 2113152 - RNA, 19 nt, Artificial Sequence
  Description of Artificial Sequence: Synthetic oligonucleotide
cacggaagcagggaugucc

SEQ ID NO: 2113153 - RNA, 19 nt, Artificial Sequence
  Description of Artificial Sequence: Synthetic oligonucleotide
uguguccacugcuaugccu

SEQ ID NO: 2113154 - RNA, 19 nt, Artificial Sequence
  Description of Artificial Sequence: Synthetic oligonucleotide
caccccuccucacaaaggc

SEQ ID NO: 2113155 - RNA, 19 nt, Artificial Sequence
  Description of Artificial Sequence: Synthetic oligonucleotide
guacauguguguccacugc

SEQ ID NO: 2113156 - RNA, 19 nt, Artificial Sequence
  Description of Artificial Sequence: Synthetic oligonucleotide
ucagcaccuaacuggucca

SEQ ID NO: 2113157 - RNA, 19 nt, Artificial Sequence
  Description of Artificial Sequence: Synthetic oligonucleotide
gguaccuccgcaccuuugg

SEQ ID NO: 2113158 - RNA, 19 nt, Artificial Sequence
  Description of Artificial Sequence: Synthetic oligonucleotide
ucaccauuagaaaccucau

SEQ ID NO: 2113159 - RNA, 19 nt, Artificial Sequence
  Description of Artificial Sequence: Synthetic oligonucleotide
cucccaaacugguacuuug

SEQ ID NO: 2113160 - RNA, 19 nt, Artificial Sequence
  Description of Artificial Sequence: Synthetic oligonucleotide
uguuggccaaagcccacca

SEQ ID NO: 2113161 - RNA, 19 nt, Artificial Sequence
  Description of Artificial Sequence: Synthetic oligonucleotide
uuguuccuccagaagccca

SEQ ID NO: 2113162 - RNA, 19 nt, Artificial Sequence
  Description of Artificial Sequence: Synthetic oligonucleotide
ucagcgacaggaguaucug

SEQ ID NO: 2113163 - RNA, 19 nt, Artificial Sequence
  Description of Artificial Sequence: Synthetic oligonucleotide
accuuucucaccauuagaa

SEQ ID NO: 2113164 - RNA, 19 nt, Artificial Sequence
  Description of Artificial Sequence: Synthetic oligonucleotide
ccaaacugguacuuugagg

SEQ ID NO: 2113165 - RNA, 19 nt, Artificial Sequence
  Description of Artificial Sequence: Synthetic oligonucleotide
uuuccacagucaagccccg

SEQ ID NO: 2113166 - RNA, 19 nt, Artificial Sequence
  Description of Artificial Sequence: Synthetic oligonucleotide
auagccaagugugccaucu

SEQ ID NO: 2113167 - RNA, 19 nt, Artificial Sequence
  Description of Artificial Sequence: Synthetic oligonucleotide
cuucacagacucuggccag

SEQ ID NO: 2113168 - RNA, 19 nt, Artificial Sequence
  Description of Artificial Sequence: Synthetic oligonucleotide
uacacaucccggccgcccc

SEQ ID NO: 2113169 - RNA, 19 nt, Artificial Sequence
  Description of Artificial Sequence: Synthetic oligonucleotide
auagcgcugcugcaguaug

SEQ ID NO: 2113170 - RNA, 19 nt, Artificial Sequence
  Description of Artificial Sequence: Synthetic oligonucleotide
guguucaugccugaagcug

SEQ ID NO: 2113171 - RNA, 19 nt, Artificial Sequence
  Description of Artificial Sequence: Synthetic oligonucleotide
aagccccgugcccguaggc

SEQ ID NO: 2113172 - RNA, 19 nt, Artificial Sequence
  Description of Artificial Sequence: Synthetic oligonucleotide
ccuuagagguccuuggcag

SEQ ID NO: 2113173 - RNA, 19 nt, Artificial Sequence
  Description of Artificial Sequence: Synthetic oligonucleotide
aaguccucugacccuuaga

SEQ ID NO: 2113174 - RNA, 19 nt, Artificial Sequence
  Description of Artificial Sequence: Synthetic oligonucleotide
gguuggugauucuauguac

SEQ ID NO: 2113175 - RNA, 19 nt, Artificial Sequence
  Description of Artificial Sequence: Synthetic oligonucleotide
caaaaccuaccaccccucc

SEQ ID NO: 2113176 - RNA, 19 nt, Artificial Sequence
  Description of Artificial Sequence: Synthetic oligonucleotide
caguauggcgguugucugc

SEQ ID NO: 2113177 - RNA, 19 nt, Artificial Sequence
  Description of Artificial Sequence: Synthetic oligonucleotide
gaguaucugguaccuccgc

SEQ ID NO: 2113178 - RNA, 19 nt, Artificial Sequence
  Description of Artificial Sequence: Synthetic oligonucleotide
ugucuguaggaugcuuucc

SEQ ID NO: 2113179 - RNA, 19 nt, Artificial Sequence
  Description of Artificial Sequence: Synthetic oligonucleotide
acugcgagucaccauccga

SEQ ID NO: 2113180 - RNA, 19 nt, Artificial Sequence
  Description of Artificial Sequence: Synthetic oligonucleotide
gaaguccucugacccuuag

SEQ ID NO: 2113181 - RNA, 19 nt, Artificial Sequence
  Description of Artificial Sequence: Synthetic oligonucleotide
gugcgugucuccucugggg

SEQ ID NO: 2113182 - RNA, 19 nt, Artificial Sequence
  Description of Artificial Sequence: Synthetic oligonucleotide
gcgguugucugcuugauga

SEQ ID NO: 2113183 - RNA, 19 nt, Artificial Sequence
  Description of Artificial Sequence: Synthetic oligonucleotide
ugccugaagcugcaaacua

SEQ ID NO: 2113184 - RNA, 19 nt, Artificial Sequence
  Description of Artificial Sequence: Synthetic oligonucleotide
aguauggcgguugucugcu

SEQ ID NO: 2113185 - RNA, 19 nt, Artificial Sequence
  Description of Artificial Sequence: Synthetic oligonucleotide
aaccuaccaccccuccuca

SEQ ID NO: 2113186 - RNA, 19 nt, Artificial Sequence
  Description of Artificial Sequence: Synthetic oligonucleotide
ugccacggaagcagggaug

SEQ ID NO: 2113187 - RNA, 19 nt, Artificial Sequence
  Description of Artificial Sequence: Synthetic oligonucleotide
guguccacugcuaugccug

SEQ ID NO: 2113188 - RNA, 19 nt, Artificial Sequence
  Description of Artificial Sequence: Synthetic oligonucleotide
ggugucauagcagugcuca

SEQ ID NO: 2113189 - RNA, 19 nt, Artificial Sequence
  Description of Artificial Sequence: Synthetic oligonucleotide
caaagcccaccaucagucc

SEQ ID NO: 2113190 - RNA, 19 nt, Artificial Sequence
  Description of Artificial Sequence: Synthetic oligonucleotide
auccgaaugcccguguuca

SEQ ID NO: 2113191 - RNA, 19 nt, Artificial Sequence
  Description of Artificial Sequence: Synthetic oligonucleotide
cagucaagccccgugcccg

SEQ ID NO: 2113192 - RNA, 19 nt, Artificial Sequence
  Description of Artificial Sequence: Synthetic oligonucleotide
uucacaggccggcagcuuu

SEQ ID NO: 2113193 - RNA, 19 nt, Artificial Sequence
  Description of Artificial Sequence: Synthetic oligonucleotide
gguagccacuccuccaagg

SEQ ID NO: 2113194 - RNA, 19 nt, Artificial Sequence
  Description of Artificial Sequence: Synthetic oligonucleotide
ugacccuuagagguccuug

SEQ ID NO: 2113195 - RNA, 19 nt, Artificial Sequence
  Description of Artificial Sequence: Synthetic oligonucleotide
uucugccgcgauccuaggc

SEQ ID NO: 2113196 - RNA, 19 nt, Artificial Sequence
  Description of Artificial Sequence: Synthetic oligonucleotide
gcuuuccacagucaagccc

SEQ ID NO: 2113197 - RNA, 19 nt, Artificial Sequence
  Description of Artificial Sequence: Synthetic oligonucleotide
cugguccacaggugcaucc

SEQ ID NO: 2113198 - RNA, 19 nt, Artificial Sequence
  Description of Artificial Sequence: Synthetic oligonucleotide
uagccacuccuccaaggcu

SEQ ID NO: 2113199 - RNA, 19 nt, Artificial Sequence
  Description of Artificial Sequence: Synthetic oligonucleotide
cacccuucugccgcgaucc

SEQ ID NO: 2113200 - RNA, 19 nt, Artificial Sequence
  Description of Artificial Sequence: Synthetic oligonucleotide
aggcgugcggcuccgacug

SEQ ID NO: 2113201 - RNA, 19 nt, Artificial Sequence
  Description of Artificial Sequence: Synthetic oligonucleotide
ugcccguaggcgcugcaug

SEQ ID NO: 2113202 - RNA, 19 nt, Artificial Sequence
  Description of Artificial Sequence: Synthetic oligonucleotide
cacagucaagccccgugcc

SEQ ID NO: 2113203 - RNA, 19 nt, Artificial Sequence
  Description of Artificial Sequence: Synthetic oligonucleotide
gccacauguaguuucugug

SEQ ID NO: 2113204 - RNA, 19 nt, Artificial Sequence
  Description of Artificial Sequence: Synthetic oligonucleotide
gauguccccuucauagcgc

SEQ ID NO: 2113205 - RNA, 19 nt, Artificial Sequence
  Description of Artificial Sequence: Synthetic oligonucleotide
gacugcgagucaccauccg

SEQ ID NO: 2113206 - RNA, 19 nt, Artificial Sequence
  Description of Artificial Sequence: Synthetic oligonucleotide
ccucauaggccacauguag

SEQ ID NO: 2113207 - RNA, 19 nt, Artificial Sequence
  Description of Artificial Sequence: Synthetic oligonucleotide
acguuucacaggccggcag

SEQ ID NO: 2113208 - RNA, 19 nt, Artificial Sequence
  Description of Artificial Sequence: Synthetic oligonucleotide
gucgguuggugauucuaug

SEQ ID NO: 2113209 - RNA, 19 nt, Artificial Sequence
  Description of Artificial Sequence: Synthetic oligonucleotide
guaccuccgcaccuuuggg

SEQ ID NO: 2113210 - RNA, 19 nt, Artificial Sequence
  Description of Artificial Sequence: Synthetic oligonucleotide
ccaaagcccaccaucaguc

SEQ ID NO: 2113211 - RNA, 19 nt, Artificial Sequence
  Description of Artificial Sequence: Synthetic oligonucleotide
ucaagccccgugcccguag

SEQ ID NO: 2113212 - RNA, 19 nt, Artificial Sequence
  Description of Artificial Sequence: Synthetic oligonucleotide
auagcagugcucagcaccu

SEQ ID NO: 2113213 - RNA, 19 nt, Artificial Sequence
  Description of Artificial Sequence: Synthetic oligonucleotide
uccacugcuaugccugaua

SEQ ID NO: 2113214 - RNA, 19 nt, Artificial Sequence
  Description of Artificial Sequence: Synthetic oligonucleotide
ucacguucuugguccaccu

SEQ ID NO: 2113215 - RNA, 19 nt, Artificial Sequence
  Description of Artificial Sequence: Synthetic oligonucleotide
caccuaacugguccacagg

SEQ ID NO: 2113216 - RNA, 19 nt, Artificial Sequence
  Description of Artificial Sequence: Synthetic oligonucleotide
uagaaaccucauaggccac

SEQ ID NO: 2113217 - RNA, 19 nt, Artificial Sequence
  Description of Artificial Sequence: Synthetic oligonucleotide
ucuggggucuuggucacgu

SEQ ID NO: 2113218 - RNA, 19 nt, Artificial Sequence
  Description of Artificial Sequence: Synthetic oligonucleotide
agcgacaggaguaucuggu

SEQ ID NO: 2113219 - RNA, 19 nt, Artificial Sequence
  Description of Artificial Sequence: Synthetic oligonucleotide
agagcaucagcgacaggag

SEQ ID NO: 2113220 - RNA, 19 nt, Artificial Sequence
  Description of Artificial Sequence: Synthetic oligonucleotide
ucugccacggaagcaggga

SEQ ID NO: 2113221 - RNA, 19 nt, Artificial Sequence
  Description of Artificial Sequence: Synthetic oligonucleotide
ucaccauccgaaugcccgu

SEQ ID NO: 2113222 - RNA, 19 nt, Artificial Sequence
  Description of Artificial Sequence: Synthetic oligonucleotide
acacccuucugccgcgauc

SEQ ID NO: 2113223 - RNA, 19 nt, Artificial Sequence
  Description of Artificial Sequence: Synthetic oligonucleotide
cugugcgugucuccucugg

SEQ ID NO: 2113224 - RNA, 19 nt, Artificial Sequence
  Description of Artificial Sequence: Synthetic oligonucleotide
guaggcgcugcauggcacc

SEQ ID NO: 2113225 - RNA, 19 nt, Artificial Sequence
  Description of Artificial Sequence: Synthetic oligonucleotide
accucagucgguuggugau

SEQ ID NO: 2113226 - RNA, 19 nt, Artificial Sequence
  Description of Artificial Sequence: Synthetic oligonucleotide
cagcgacaggaguaucugg

SEQ ID NO: 2113227 - RNA, 19 nt, Artificial Sequence
  Description of Artificial Sequence: Synthetic oligonucleotide
ucaguccauugauuucacu

SEQ ID NO: 2113228 - RNA, 19 nt, Artificial Sequence
  Description of Artificial Sequence: Synthetic oligonucleotide
agucaccauccgaaugccc

SEQ ID NO: 2113229 - RNA, 19 nt, Artificial Sequence
  Description of Artificial Sequence: Synthetic oligonucleotide
auguccccuucauagcgcu

SEQ ID NO: 2113230 - RNA, 19 nt, Artificial Sequence
  Description of Artificial Sequence: Synthetic oligonucleotide
ucccgucacuugcucuacg

SEQ ID NO: 2113231 - RNA, 19 nt, Artificial Sequence
  Description of Artificial Sequence: Synthetic oligonucleotide
ccguguucaugccugaagc

SEQ ID NO: 2113232 - RNA, 19 nt, Artificial Sequence
  Description of Artificial Sequence: Synthetic oligonucleotide
aucaguccauugauuucac

SEQ ID NO: 2113233 - RNA, 19 nt, Artificial Sequence
  Description of Artificial Sequence: Synthetic oligonucleotide
aucagcgacaggaguaucu

SEQ ID NO: 2113234 - RNA, 19 nt, Artificial Sequence
  Description of Artificial Sequence: Synthetic oligonucleotide
aucugguaccuccgcaccu

SEQ ID NO: 2113235 - RNA, 19 nt, Artificial Sequence
  Description of Artificial Sequence: Synthetic oligonucleotide
gaaugcccguguucaugcc

SEQ ID NO: 2113236 - RNA, 19 nt, Artificial Sequence
  Description of Artificial Sequence: Synthetic oligonucleotide
agcuucucgcggcgugagc

SEQ ID NO: 2113237 - RNA, 19 nt, Artificial Sequence
  Description of Artificial Sequence: Synthetic oligonucleotide
ugcugcaguauggcgguug

SEQ ID NO: 2113238 - RNA, 19 nt, Artificial Sequence
  Description of Artificial Sequence: Synthetic oligonucleotide
gcuaugccugauauggucc

SEQ ID NO: 2113239 - RNA, 19 nt, Artificial Sequence
  Description of Artificial Sequence: Synthetic oligonucleotide
gcaccuaacugguccacag

SEQ ID NO: 2113240 - RNA, 19 nt, Artificial Sequence
  Description of Artificial Sequence: Synthetic oligonucleotide
ggggcucccaaacugguac

SEQ ID NO: 2113241 - RNA, 19 nt, Artificial Sequence
  Description of Artificial Sequence: Synthetic oligonucleotide
agucccgucacuugcucua

SEQ ID NO: 2113242 - RNA, 19 nt, Artificial Sequence
  Description of Artificial Sequence: Synthetic oligonucleotide
uaugccugauauggucccc

SEQ ID NO: 2113243 - RNA, 19 nt, Artificial Sequence
  Description of Artificial Sequence: Synthetic oligonucleotide
ugaggcaggccuggcacug

SEQ ID NO: 2113244 - RNA, 19 nt, Artificial Sequence
  Description of Artificial Sequence: Synthetic oligonucleotide
gagccugcccagcauguca

SEQ ID NO: 2113245 - RNA, 19 nt, Artificial Sequence
  Description of Artificial Sequence: Synthetic oligonucleotide
ugggcccaacaccugguaa

SEQ ID NO: 2113246 - RNA, 19 nt, Artificial Sequence
  Description of Artificial Sequence: Synthetic oligonucleotide
ggaguaucugguaccuccg

SEQ ID NO: 2113247 - RNA, 19 nt, Artificial Sequence
  Description of Artificial Sequence: Synthetic oligonucleotide
cagaucuguuggccaaagc

SEQ ID NO: 2113248 - RNA, 19 nt, Artificial Sequence
  Description of Artificial Sequence: Synthetic oligonucleotide
caucuugggcccaacaccu

SEQ ID NO: 2113249 - RNA, 19 nt, Artificial Sequence
  Description of Artificial Sequence: Synthetic oligonucleotide
auggcgguugucugcuuga

SEQ ID NO: 2113250 - RNA, 19 nt, Artificial Sequence
  Description of Artificial Sequence: Synthetic oligonucleotide
acuacacaucccggccgcc

SEQ ID NO: 2113251 - RNA, 19 nt, Artificial Sequence
  Description of Artificial Sequence: Synthetic oligonucleotide
gccaagugugccaucuugg

SEQ ID NO: 2113252 - RNA, 19 nt, Artificial Sequence
  Description of Artificial Sequence: Synthetic oligonucleotide
uaggcgugcggcuccgacu

SEQ ID NO: 2113253 - RNA, 19 nt, Artificial Sequence
  Description of Artificial Sequence: Synthetic oligonucleotide
acacaucccggccgccccg

SEQ ID NO: 2113254 - RNA, 19 nt, Artificial Sequence
  Description of Artificial Sequence: Synthetic oligonucleotide
aggcagaucuguuggccaa

SEQ ID NO: 2113255 - RNA, 19 nt, Artificial Sequence
  Description of Artificial Sequence: Synthetic oligonucleotide
cacugcuaugccugauaug

SEQ ID NO: 2113256 - RNA, 19 nt, Artificial Sequence
  Description of Artificial Sequence: Synthetic oligonucleotide
ucucaccauuagaaaccuc

SEQ ID NO: 2113257 - RNA, 19 nt, Artificial Sequence
  Description of Artificial Sequence: Synthetic oligonucleotide
cacuggugucauagcagug

SEQ ID NO: 2113258 - RNA, 19 nt, Artificial Sequence
  Description of Artificial Sequence: Synthetic oligonucleotide
cuacacaucccggccgccc

SEQ ID NO: 2113259 - RNA, 19 nt, Artificial Sequence
  Description of Artificial Sequence: Synthetic oligonucleotide
uggugucauagcagugcuc

SEQ ID NO: 2113260 - RNA, 19 nt, Artificial Sequence
  Description of Artificial Sequence: Synthetic oligonucleotide
uucucgcggcgugagcucc

SEQ ID NO: 2113261 - RNA, 19 nt, Artificial Sequence
  Description of Artificial Sequence: Synthetic oligonucleotide
ugcggcuccgacugcgagu

SEQ ID NO: 2113262 - RNA, 19 nt, Artificial Sequence
  Description of Artificial Sequence: Synthetic oligonucleotide
cucagucgguuggugauuc

SEQ ID NO: 2113263 - RNA, 19 nt, Artificial Sequence
  Description of Artificial Sequence: Synthetic oligonucleotide
accuggucuuuggucuggc

SEQ ID NO: 2113264 - RNA, 19 nt, Artificial Sequence
  Description of Artificial Sequence: Synthetic oligonucleotide
cgucacuugcucuacgcgc

SEQ ID NO: 2113265 - RNA, 19 nt, Artificial Sequence
  Description of Artificial Sequence: Synthetic oligonucleotide
uguccccuucauagcgcug

SEQ ID NO: 2113266 - RNA, 19 nt, Artificial Sequence
  Description of Artificial Sequence: Synthetic oligonucleotide
aagcccaccaucaguccau

SEQ ID NO: 2113267 - RNA, 19 nt, Artificial Sequence
  Description of Artificial Sequence: Synthetic oligonucleotide
cgaaugcccguguucaugc

SEQ ID NO: 2113268 - RNA, 19 nt, Artificial Sequence
  Description of Artificial Sequence: Synthetic oligonucleotide
uggccagaggaaguccucu

SEQ ID NO: 2113269 - RNA, 19 nt, Artificial Sequence
  Description of Artificial Sequence: Synthetic oligonucleotide
gggauguccccuucauagc

SEQ ID NO: 2113270 - RNA, 19 nt, Artificial Sequence
  Description of Artificial Sequence: Synthetic oligonucleotide
cugguaaggcuaccagcuc

SEQ ID NO: 2113271 - RNA, 19 nt, Artificial Sequence
  Description of Artificial Sequence: Synthetic oligonucleotide
acccgcugucaccuggucu

SEQ ID NO: 2113272 - RNA, 19 nt, Artificial Sequence
  Description of Artificial Sequence: Synthetic oligonucleotide
ucugacccuuagagguccu

SEQ ID NO: 2113273 - RNA, 19 nt, Artificial Sequence
  Description of Artificial Sequence: Synthetic oligonucleotide
caccuuucucaccauuaga

SEQ ID NO: 2113274 - RNA, 19 nt, Artificial Sequence
  Description of Artificial Sequence: Synthetic oligonucleotide
augcccguguucaugccug

SEQ ID NO: 2113275 - RNA, 19 nt, Artificial Sequence
  Description of Artificial Sequence: Synthetic oligonucleotide
ugucugcuugaugaacuuu

SEQ ID NO: 2113276 - RNA, 19 nt, Artificial Sequence
  Description of Artificial Sequence: Synthetic oligonucleotide
caagccccgugcccguagg

SEQ ID NO: 2113277 - RNA, 19 nt, Artificial Sequence
  Description of Artificial Sequence: Synthetic oligonucleotide
ccgacugcgagucaccauc

SEQ ID NO: 2113278 - RNA, 19 nt, Artificial Sequence
  Description of Artificial Sequence: Synthetic oligonucleotide
cuucugccgcgauccuagg

SEQ ID NO: 2113279 - RNA, 19 nt, Artificial Sequence
  Description of Artificial Sequence: Synthetic oligonucleotide
accauccgaaugcccgugu

SEQ ID NO: 2113280 - RNA, 19 nt, Artificial Sequence
  Description of Artificial Sequence: Synthetic oligonucleotide
uggucacguucuuggucca

SEQ ID NO: 2113281 - RNA, 19 nt, Artificial Sequence
  Description of Artificial Sequence: Synthetic oligonucleotide
aggaaguccucugacccuu

SEQ ID NO: 2113282 - RNA, 19 nt, Artificial Sequence
  Description of Artificial Sequence: Synthetic oligonucleotide
ucagucgguuggugauucu

SEQ ID NO: 2113283 - RNA, 19 nt, Artificial Sequence
  Description of Artificial Sequence: Synthetic oligonucleotide
agcuccuccccacacccuu

SEQ ID NO: 2113284 - RNA, 19 nt, Artificial Sequence
  Description of Artificial Sequence: Synthetic oligonucleotide
uccaccucagucgguuggu

SEQ ID NO: 2113285 - RNA, 19 nt, Artificial Sequence
  Description of Artificial Sequence: Synthetic oligonucleotide
ggacguuucacaggccggc

SEQ ID NO: 2113286 - RNA, 19 nt, Artificial Sequence
  Description of Artificial Sequence: Synthetic oligonucleotide
ucacaggccggcagcuuuu

SEQ ID NO: 2113287 - RNA, 19 nt, Artificial Sequence
  Description of Artificial Sequence: Synthetic oligonucleotide
guaaggcuaccagcucugc

SEQ ID NO: 2113288 - RNA, 19 nt, Artificial Sequence
  Description of Artificial Sequence: Synthetic oligonucleotide
ccagaggaaguccucugac

SEQ ID NO: 2113289 - RNA, 19 nt, Artificial Sequence
  Description of Artificial Sequence: Synthetic oligonucleotide
gaggaaguccucugacccu

SEQ ID NO: 2113290 - RNA, 19 nt, Artificial Sequence
  Description of Artificial Sequence: Synthetic oligonucleotide
agucaagccccgugcccgu

SEQ ID NO: 2113291 - RNA, 19 nt, Artificial Sequence
  Description of Artificial Sequence: Synthetic oligonucleotide
ugccgcgauccuaggcgug

SEQ ID NO: 2113292 - RNA, 19 nt, Artificial Sequence
  Description of Artificial Sequence: Synthetic oligonucleotide
ugguccaccucagucgguu

SEQ ID NO: 2113293 - RNA, 19 nt, Artificial Sequence
  Description of Artificial Sequence: Synthetic oligonucleotide
cuucucgcggcgugagcuc

SEQ ID NO: 2113294 - RNA, 19 nt, Artificial Sequence
  Description of Artificial Sequence: Synthetic oligonucleotide
uaggcgcugcauggcaccc

SEQ ID NO: 2113295 - RNA, 19 nt, Artificial Sequence
  Description of Artificial Sequence: Synthetic oligonucleotide
agcaccuaacugguccaca

SEQ ID NO: 2113296 - RNA, 19 nt, Artificial Sequence
  Description of Artificial Sequence: Synthetic oligonucleotide
ccaucaguccauugauuuc

SEQ ID NO: 2113297 - RNA, 19 nt, Artificial Sequence
  Description of Artificial Sequence: Synthetic oligonucleotide
caggguagaugagccugcc

SEQ ID NO: 2113298 - RNA, 19 nt, Artificial Sequence
  Description of Artificial Sequence: Synthetic oligonucleotide
cugugucuuacguggacgu

SEQ ID NO: 2113299 - RNA, 19 nt, Artificial Sequence
  Description of Artificial Sequence: Synthetic oligonucleotide
ugugccaucuugggcccaa

SEQ ID NO: 2113300 - RNA, 19 nt, Artificial Sequence
  Description of Artificial Sequence: Synthetic oligonucleotide
caccauuagaaaccucaua

SEQ ID NO: 2113301 - RNA, 19 nt, Artificial Sequence
  Description of Artificial Sequence: Synthetic oligonucleotide
ccucacaaaggcacuucac

SEQ ID NO: 2113302 - RNA, 19 nt, Artificial Sequence
  Description of Artificial Sequence: Synthetic oligonucleotide
caccucagucgguugguga

SEQ ID NO: 2113303 - RNA, 19 nt, Artificial Sequence
  Description of Artificial Sequence: Synthetic oligonucleotide
uggggcucccaaacuggua

SEQ ID NO: 2113304 - RNA, 19 nt, Artificial Sequence
  Description of Artificial Sequence: Synthetic oligonucleotide
uccuaggcgugcggcuccg

SEQ ID NO: 2113305 - RNA, 19 nt, Artificial Sequence
  Description of Artificial Sequence: Synthetic oligonucleotide
cccgucacuugcucuacgc

SEQ ID NO: 2113306 - RNA, 19 nt, Artificial Sequence
  Description of Artificial Sequence: Synthetic oligonucleotide
ugugucuuacguggacguu

SEQ ID NO: 2113307 - RNA, 19 nt, Artificial Sequence
  Description of Artificial Sequence: Synthetic oligonucleotide
uccgaaugcccguguucau

SEQ ID NO: 2113308 - RNA, 19 nt, Artificial Sequence
  Description of Artificial Sequence: Synthetic oligonucleotide
ccugguaaggcuaccagcu

SEQ ID NO: 2113309 - RNA, 19 nt, Artificial Sequence
  Description of Artificial Sequence: Synthetic oligonucleotide
ccgucacuugcucuacgcg

SEQ ID NO: 2113310 - RNA, 19 nt, Artificial Sequence
  Description of Artificial Sequence: Synthetic oligonucleotide
aucccggccgccccgcagu

SEQ ID NO: 2113311 - RNA, 19 nt, Artificial Sequence
  Description of Artificial Sequence: Synthetic oligonucleotide
cagacucuggccagaggaa

SEQ ID NO: 2113312 - RNA, 19 nt, Artificial Sequence
  Description of Artificial Sequence: Synthetic oligonucleotide
uugguccaccucagucggu

SEQ ID NO: 2113313 - RNA, 19 nt, Artificial Sequence
  Description of Artificial Sequence: Synthetic oligonucleotide
cuccucacaaaggcacuuc

SEQ ID NO: 2113314 - RNA, 19 nt, Artificial Sequence
  Description of Artificial Sequence: Synthetic oligonucleotide
gacguuucacaggccggca

SEQ ID NO: 2113315 - RNA, 19 nt, Artificial Sequence
  Description of Artificial Sequence: Synthetic oligonucleotide
cacguucuugguccaccuc

SEQ ID NO: 2113316 - RNA, 19 nt, Artificial Sequence
  Description of Artificial Sequence: Synthetic oligonucleotide
gccugaagcugcaaacuac

SEQ ID NO: 2113317 - RNA, 19 nt, Artificial Sequence
  Description of Artificial Sequence: Synthetic oligonucleotide
cgacaggaguaucugguac

SEQ ID NO: 2113318 - RNA, 19 nt, Artificial Sequence
  Description of Artificial Sequence: Synthetic oligonucleotide
ucucgcggcgugagcuccu

SEQ ID NO: 2113319 - RNA, 19 nt, Artificial Sequence
  Description of Artificial Sequence: Synthetic oligonucleotide
cacagccauagccaagugu

SEQ ID NO: 2113320 - RNA, 19 nt, Artificial Sequence
  Description of Artificial Sequence: Synthetic oligonucleotide
ggcgguugucugcuugaug

SEQ ID NO: 2113321 - RNA, 19 nt, Artificial Sequence
  Description of Artificial Sequence: Synthetic oligonucleotide
gccagaggaaguccucuga

SEQ ID NO: 2113322 - RNA, 19 nt, Artificial Sequence
  Description of Artificial Sequence: Synthetic oligonucleotide
ugguugaggcaggccuggc

SEQ ID NO: 2113323 - RNA, 19 nt, Artificial Sequence
  Description of Artificial Sequence: Synthetic oligonucleotide
gcgcugcugcaguauggcg

SEQ ID NO: 2113324 - RNA, 19 nt, Artificial Sequence
  Description of Artificial Sequence: Synthetic oligonucleotide
ggcuggagagcaucagcga

SEQ ID NO: 2113325 - RNA, 19 nt, Artificial Sequence
  Description of Artificial Sequence: Synthetic oligonucleotide
cugcuugaugaacuuuacu

SEQ ID NO: 2113326 - RNA, 19 nt, Artificial Sequence
  Description of Artificial Sequence: Synthetic oligonucleotide
cagugcucagcaccuaacu

SEQ ID NO: 2113327 - RNA, 19 nt, Artificial Sequence
  Description of Artificial Sequence: Synthetic oligonucleotide
caccauccgaaugcccgug

SEQ ID NO: 2113328 - RNA, 19 nt, Artificial Sequence
  Description of Artificial Sequence: Synthetic oligonucleotide
uaccaccccuccucacaaa

SEQ ID NO: 2113329 - RNA, 19 nt, Artificial Sequence
  Description of Artificial Sequence: Synthetic oligonucleotide
cauguaguuucugugucuu

SEQ ID NO: 2113330 - RNA, 19 nt, Artificial Sequence
  Description of Artificial Sequence: Synthetic oligonucleotide
gggcacagggccugguuga

SEQ ID NO: 2113331 - RNA, 19 nt, Artificial Sequence
  Description of Artificial Sequence: Synthetic oligonucleotide
ggguagccacuccuccaag

SEQ ID NO: 2113332 - RNA, 19 nt, Artificial Sequence
  Description of Artificial Sequence: Synthetic oligonucleotide
uuucacaggccggcagcuu

SEQ ID NO: 2113333 - RNA, 19 nt, Artificial Sequence
  Description of Artificial Sequence: Synthetic oligonucleotide
ucgcggcgugagcuccucc

SEQ ID NO: 2113334 - RNA, 19 nt, Artificial Sequence
  Description of Artificial Sequence: Synthetic oligonucleotide
ggcuaccagcucugccacg

SEQ ID NO: 2113335 - RNA, 19 nt, Artificial Sequence
  Description of Artificial Sequence: Synthetic oligonucleotide
cugccaguucuggggcucc

SEQ ID NO: 2113336 - RNA, 19 nt, Artificial Sequence
  Description of Artificial Sequence: Synthetic oligonucleotide
caucccggccgccccgcag

SEQ ID NO: 2113337 - RNA, 19 nt, Artificial Sequence
  Description of Artificial Sequence: Synthetic oligonucleotide
ccaacaccugguaaggcua

SEQ ID NO: 2113338 - RNA, 19 nt, Artificial Sequence
  Description of Artificial Sequence: Synthetic oligonucleotide
aucuugggcccaacaccug

SEQ ID NO: 2113339 - RNA, 19 nt, Artificial Sequence
  Description of Artificial Sequence: Synthetic oligonucleotide
ccgcagucccgucacuugc

SEQ ID NO: 2113340 - RNA, 19 nt, Artificial Sequence
  Description of Artificial Sequence: Synthetic oligonucleotide
cccuuagagguccuuggca

SEQ ID NO: 2113341 - RNA, 19 nt, Artificial Sequence
  Description of Artificial Sequence: Synthetic oligonucleotide
guuucacaggccggcagcu

SEQ ID NO: 2113342 - RNA, 19 nt, Artificial Sequence
  Description of Artificial Sequence: Synthetic oligonucleotide
gguccaccucagucgguug

SEQ ID NO: 2113343 - RNA, 19 nt, Artificial Sequence
  Description of Artificial Sequence: Synthetic oligonucleotide
gugucuuacguggacguuu

SEQ ID NO: 2113344 - RNA, 19 nt, Artificial Sequence
  Description of Artificial Sequence: Synthetic oligonucleotide
aggccacauguaguuucug

SEQ ID NO: 2113345 - RNA, 19 nt, Artificial Sequence
  Description of Artificial Sequence: Synthetic oligonucleotide
caucagcgacaggaguauc

SEQ ID NO: 2113346 - RNA, 19 nt, Artificial Sequence
  Description of Artificial Sequence: Synthetic oligonucleotide
ccacauguaguuucugugu

SEQ ID NO: 2113347 - RNA, 19 nt, Artificial Sequence
  Description of Artificial Sequence: Synthetic oligonucleotide
ggcgugagcuccuccccac

SEQ ID NO: 2113348 - RNA, 19 nt, Artificial Sequence
  Description of Artificial Sequence: Synthetic oligonucleotide
ggccacauguaguuucugu

SEQ ID NO: 2113349 - RNA, 19 nt, Artificial Sequence
  Description of Artificial Sequence: Synthetic oligonucleotide
cagcaccuaacugguccac

SEQ ID NO: 2113350 - RNA, 19 nt, Artificial Sequence
  Description of Artificial Sequence: Synthetic oligonucleotide
accccuccucacaaaggca

SEQ ID NO: 2113351 - RNA, 19 nt, Artificial Sequence
  Description of Artificial Sequence: Synthetic oligonucleotide
gcgauccuaggcgugcggc

SEQ ID NO: 2113352 - RNA, 19 nt, Artificial Sequence
  Description of Artificial Sequence: Synthetic oligonucleotide
gucuuacguggacguuuca

SEQ ID NO: 2113353 - RNA, 19 nt, Artificial Sequence
  Description of Artificial Sequence: Synthetic oligonucleotide
ccucugacccuuagagguc

SEQ ID NO: 2113354 - RNA, 19 nt, Artificial Sequence
  Description of Artificial Sequence: Synthetic oligonucleotide
ggcuccgacugcgagucac

SEQ ID NO: 2113355 - RNA, 19 nt, Artificial Sequence
  Description of Artificial Sequence: Synthetic oligonucleotide
caggaguaucugguaccuc

SEQ ID NO: 2113356 - RNA, 19 nt, Artificial Sequence
  Description of Artificial Sequence: Synthetic oligonucleotide
cuccaaggcugugcguguc

SEQ ID NO: 2113357 - RNA, 19 nt, Artificial Sequence
  Description of Artificial Sequence: Synthetic oligonucleotide
ccgaaugcccguguucaug

SEQ ID NO: 2113358 - RNA, 19 nt, Artificial Sequence
  Description of Artificial Sequence: Synthetic oligonucleotide
uggcgguugucugcuugau

SEQ ID NO: 2113359 - RNA, 19 nt, Artificial Sequence
  Description of Artificial Sequence: Synthetic oligonucleotide
ggagagcaucagcgacagg

SEQ ID NO: 2113360 - RNA, 19 nt, Artificial Sequence
  Description of Artificial Sequence: Synthetic oligonucleotide
cgacugcgagucaccaucc

SEQ ID NO: 2113361 - RNA, 19 nt, Artificial Sequence
  Description of Artificial Sequence: Synthetic oligonucleotide
cacaucccggccgccccgc

SEQ ID NO: 2113362 - RNA, 19 nt, Artificial Sequence
  Description of Artificial Sequence: Synthetic oligonucleotide
gcggcuccgacugcgaguc

SEQ ID NO: 2113363 - RNA, 19 nt, Artificial Sequence
  Description of Artificial Sequence: Synthetic oligonucleotide
cagucgguuggugauucua

SEQ ID NO: 2113364 - RNA, 19 nt, Artificial Sequence
  Description of Artificial Sequence: Synthetic oligonucleotide
cuccgacugcgagucacca

SEQ ID NO: 2113365 - RNA, 19 nt, Artificial Sequence
  Description of Artificial Sequence: Synthetic oligonucleotide
gucccgucacuugcucuac

SEQ ID NO: 2113366 - RNA, 19 nt, Artificial Sequence
  Description of Artificial Sequence: Synthetic oligonucleotide
gcggcgugagcuccucccc

SEQ ID NO: 2113367 - RNA, 19 nt, Artificial Sequence
  Description of Artificial Sequence: Synthetic oligonucleotide
cugcuaugccugauauggu

SEQ ID NO: 2113368 - RNA, 19 nt, Artificial Sequence
  Description of Artificial Sequence: Synthetic oligonucleotide
cguaggcgcugcauggcac

SEQ ID NO: 2113369 - RNA, 19 nt, Artificial Sequence
  Description of Artificial Sequence: Synthetic oligonucleotide
cagggauguccccuucaua

SEQ ID NO: 2113370 - RNA, 19 nt, Artificial Sequence
  Description of Artificial Sequence: Synthetic oligonucleotide
gcuucucgcggcgugagcu

SEQ ID NO: 2113371 - RNA, 19 nt, Artificial Sequence
  Description of Artificial Sequence: Synthetic oligonucleotide
cgcggcgugagcuccuccc

SEQ ID NO: 2113372 - RNA, 19 nt, Artificial Sequence
  Description of Artificial Sequence: Synthetic oligonucleotide
ggggucuuggucacguucu

SEQ ID NO: 2113373 - RNA, 19 nt, Artificial Sequence
  Description of Artificial Sequence: Synthetic oligonucleotide
ggcugugcgugucuccucu

SEQ ID NO: 2113374 - RNA, 19 nt, Artificial Sequence
  Description of Artificial Sequence: Synthetic oligonucleotide
gccgcgauccuaggcgugc

SEQ ID NO: 2113375 - RNA, 19 nt, Artificial Sequence
  Description of Artificial Sequence: Synthetic oligonucleotide
cuaccagcucugccacgga

SEQ ID NO: 2113376 - RNA, 19 nt, Artificial Sequence
  Description of Artificial Sequence: Synthetic oligonucleotide
gcugugcgugucuccucug

SEQ ID NO: 2113377 - RNA, 19 nt, Artificial Sequence
  Description of Artificial Sequence: Synthetic oligonucleotide
cugcaguauggcgguuguc

SEQ ID NO: 2113378 - RNA, 19 nt, Artificial Sequence
  Description of Artificial Sequence: Synthetic oligonucleotide
guuggccaaagcccaccau

SEQ ID NO: 2113379 - RNA, 19 nt, Artificial Sequence
  Description of Artificial Sequence: Synthetic oligonucleotide
cugucaccuggucuuuggu

SEQ ID NO: 2113380 - RNA, 19 nt, Artificial Sequence
  Description of Artificial Sequence: Synthetic oligonucleotide
acaucccggccgccccgca

SEQ ID NO: 2113381 - RNA, 19 nt, Artificial Sequence
  Description of Artificial Sequence: Synthetic oligonucleotide
ucccggccgccccgcaguc

SEQ ID NO: 2113382 - RNA, 19 nt, Artificial Sequence
  Description of Artificial Sequence: Synthetic oligonucleotide
cccuggguagccacuccuc

SEQ ID NO: 2113383 - RNA, 19 nt, Artificial Sequence
  Description of Artificial Sequence: Synthetic oligonucleotide
cauagcgcugcugcaguau

SEQ ID NO: 2113384 - RNA, 19 nt, Artificial Sequence
  Description of Artificial Sequence: Synthetic oligonucleotide
gcccaacaccugguaaggc

SEQ ID NO: 2113385 - RNA, 19 nt, Artificial Sequence
  Description of Artificial Sequence: Synthetic oligonucleotide
gcugcaguauggcgguugu

SEQ ID NO: 2113386 - RNA, 19 nt, Artificial Sequence
  Description of Artificial Sequence: Synthetic oligonucleotide
cugccacggaagcagggau

SEQ ID NO: 2113387 - RNA, 19 nt, Artificial Sequence
  Description of Artificial Sequence: Synthetic oligonucleotide
cagucccgucacuugcucu

SEQ ID NO: 2113388 - RNA, 19 nt, Artificial Sequence
  Description of Artificial Sequence: Synthetic oligonucleotide
cugccgcgauccuaggcgu

SEQ ID NO: 2113389 - RNA, 19 nt, Artificial Sequence
  Description of Artificial Sequence: Synthetic oligonucleotide
gccacggaagcagggaugu

SEQ ID NO: 2113390 - RNA, 19 nt, Artificial Sequence
  Description of Artificial Sequence: Synthetic oligonucleotide
cagcucugccacggaagca

SEQ ID NO: 2113391 - RNA, 19 nt, Artificial Sequence
  Description of Artificial Sequence: Synthetic oligonucleotide
cugcccagcaugucaucau

SEQ ID NO: 2113392 - RNA, 19 nt, Artificial Sequence
  Description of Artificial Sequence: Synthetic oligonucleotide
cguggacguuucacaggcc

SEQ ID NO: 2113393 - RNA, 19 nt, Artificial Sequence
  Description of Artificial Sequence: Synthetic oligonucleotide
cccguaggcgcugcauggc

SEQ ID NO: 2113394 - RNA, 19 nt, Artificial Sequence
  Description of Artificial Sequence: Synthetic oligonucleotide
cgguuggugauucuaugua

SEQ ID NO: 2113395 - RNA, 19 nt, Artificial Sequence
  Description of Artificial Sequence: Synthetic oligonucleotide
gcagcuucucgcggcguga

SEQ ID NO: 2113396 - RNA, 19 nt, Artificial Sequence
  Description of Artificial Sequence: Synthetic oligonucleotide
ggcagaucuguuggccaaa

SEQ ID NO: 2113397 - RNA, 19 nt, Artificial Sequence
  Description of Artificial Sequence: Synthetic oligonucleotide
cucgcggcgugagcuccuc

SEQ ID NO: 2113398 - RNA, 19 nt, Artificial Sequence
  Description of Artificial Sequence: Synthetic oligonucleotide
ccacugcuaugccugauau

SEQ ID NO: 2113399 - RNA, 19 nt, Artificial Sequence
  Description of Artificial Sequence: Synthetic oligonucleotide
ccguaggcgcugcauggca

SEQ ID NO: 2113400 - RNA, 19 nt, Artificial Sequence
  Description of Artificial Sequence: Synthetic oligonucleotide
cgcgauccuaggcgugcgg

SEQ ID NO: 2113401 - RNA, 19 nt, Artificial Sequence
  Description of Artificial Sequence: Synthetic oligonucleotide
gugccaucuugggcccaac

SEQ ID NO: 2113402 - RNA, 19 nt, Artificial Sequence
  Description of Artificial Sequence: Synthetic oligonucleotide
gggcucccaaacugguacu

SEQ ID NO: 2113403 - RNA, 19 nt, Artificial Sequence
  Description of Artificial Sequence: Synthetic oligonucleotide
gcgugagcuccuccccaca

SEQ ID NO: 2113404 - RNA, 19 nt, Artificial Sequence
  Description of Artificial Sequence: Synthetic oligonucleotide
cccgcugucaccuggucuu

SEQ ID NO: 2113405 - RNA, 19 nt, Artificial Sequence
  Description of Artificial Sequence: Synthetic oligonucleotide
ccaccucagucgguuggug

SEQ ID NO: 2113406 - RNA, 19 nt, Artificial Sequence
  Description of Artificial Sequence: Synthetic oligonucleotide
ccgcgauccuaggcgugcg

SEQ ID NO: 2113407 - RNA, 19 nt, Artificial Sequence
  Description of Artificial Sequence: Synthetic oligonucleotide
ggcgugcggcuccgacugc

SEQ ID NO: 2113408 - RNA, 19 nt, Artificial Sequence
  Description of Artificial Sequence: Synthetic oligonucleotide
cuccuccaaggcugugcgu

SEQ ID NO: 2113409 - RNA, 19 nt, Artificial Sequence
  Description of Artificial Sequence: Synthetic oligonucleotide
gugugccaucuugggccca

SEQ ID NO: 2113410 - RNA, 19 nt, Artificial Sequence
  Description of Artificial Sequence: Synthetic oligonucleotide
gcucagcaccuaacugguc

SEQ ID NO: 2113411 - RNA, 19 nt, Artificial Sequence
  Description of Artificial Sequence: Synthetic oligonucleotide
cugguaccuccgcaccuuu

SEQ ID NO: 2113412 - RNA, 19 nt, Artificial Sequence
  Description of Artificial Sequence: Synthetic oligonucleotide
ccuuggcagcagggcacag

SEQ ID NO: 2113413 - RNA, 19 nt, Artificial Sequence
  Description of Artificial Sequence: Synthetic oligonucleotide
guauggcgguugucugcuu

SEQ ID NO: 2113414 - RNA, 19 nt, Artificial Sequence
  Description of Artificial Sequence: Synthetic oligonucleotide
ccauagccaagugugccau

SEQ ID NO: 2113415 - RNA, 19 nt, Artificial Sequence
  Description of Artificial Sequence: Synthetic oligonucleotide
gugcccguaggcgcugcau

SEQ ID NO: 2113416 - RNA, 19 nt, Artificial Sequence
  Description of Artificial Sequence: Synthetic oligonucleotide
cacacccuucugccgcgau

SEQ ID NO: 2113417 - RNA, 19 nt, Artificial Sequence
  Description of Artificial Sequence: Synthetic oligonucleotide
cccuccucacaaaggcacu

SEQ ID NO: 2113418 - RNA, 19 nt, Artificial Sequence
  Description of Artificial Sequence: Synthetic oligonucleotide
ccuggucuuuggucuggcu

SEQ ID NO: 2113419 - RNA, 19 nt, Artificial Sequence
  Description of Artificial Sequence: Synthetic oligonucleotide
cgauccuaggcgugcggcu

SEQ ID NO: 2113420 - RNA, 19 nt, Artificial Sequence
  Description of Artificial Sequence: Synthetic oligonucleotide
cuggggucuuggucacguu

SEQ ID NO: 2113421 - RNA, 19 nt, Artificial Sequence
  Description of Artificial Sequence: Synthetic oligonucleotide
ccacggaagcagggauguc

SEQ ID NO: 2113422 - RNA, 19 nt, Artificial Sequence
  Description of Artificial Sequence: Synthetic oligonucleotide
cggcgugagcuccucccca

SEQ ID NO: 2113423 - RNA, 19 nt, Artificial Sequence
  Description of Artificial Sequence: Synthetic oligonucleotide
ccauccgaaugcccguguu

SEQ ID NO: 2113424 - RNA, 19 nt, Artificial Sequence
  Description of Artificial Sequence: Synthetic oligonucleotide
cagcagcuucucgcggcgu

SEQ ID NO: 2113425 - RNA, 19 nt, Artificial Sequence
  Description of Artificial Sequence: Synthetic oligonucleotide
ccgccccgcagucccguca

SEQ ID NO: 2113426 - RNA, 19 nt, Artificial Sequence
  Description of Artificial Sequence: Synthetic oligonucleotide
cgcagucccgucacuugcu

SEQ ID NO: 2113427 - RNA, 19 nt, Artificial Sequence
  Description of Artificial Sequence: Synthetic oligonucleotide
ccgugcccguaggcgcugc

SEQ ID NO: 2113428 - RNA, 19 nt, Artificial Sequence
  Description of Artificial Sequence: Synthetic oligonucleotide
cccgugcccguaggcgcug

SEQ ID NO: 2113429 - RNA, 19 nt, Artificial Sequence
  Description of Artificial Sequence: Synthetic oligonucleotide
gccgccccgcagucccguc

SEQ ID NO: 2113430 - RNA, 19 nt, Artificial Sequence
  Description of Artificial Sequence: Synthetic oligonucleotide
ccccgugcccguaggcgcu

SEQ ID NO: 2113431 - RNA, 19 nt, Artificial Sequence
  Description of Artificial Sequence: Synthetic oligonucleotide
ccacacccuucugccgcga

SEQ ID NO: 2113432 - RNA, 19 nt, Artificial Sequence
  Description of Artificial Sequence: Synthetic oligonucleotide
ccucagucgguuggugauu

SEQ ID NO: 2113433 - RNA, 19 nt, Artificial Sequence
  Description of Artificial Sequence: Synthetic oligonucleotide
cgugcccguaggcgcugca

SEQ ID NO: 2113434 - RNA, 19 nt, Artificial Sequence
  Description of Artificial Sequence: Synthetic oligonucleotide
ccuaggcgugcggcuccga

SEQ ID NO: 2113435 - RNA, 19 nt, Artificial Sequence
  Description of Artificial Sequence: Synthetic oligonucleotide
ccccgcagucccgucacuu

SEQ ID NO: 2113436 - RNA, 19 nt, Artificial Sequence
  Description of Artificial Sequence: Synthetic oligonucleotide
cggcuccgacugcgaguca

SEQ ID NO: 2113437 - RNA, 19 nt, Artificial Sequence
  Description of Artificial Sequence: Synthetic oligonucleotide
ccgcugucaccuggucuuu

SEQ ID NO: 2113438 - RNA, 19 nt, Artificial Sequence
  Description of Artificial Sequence: Synthetic oligonucleotide
ucaacuuuuacaaacuucc

SEQ ID NO: 2113439 - RNA, 19 nt, Artificial Sequence
  Description of Artificial Sequence: Synthetic oligonucleotide
auuguuuaagcccacgggc

SEQ ID NO: 2113440 - RNA, 19 nt, Artificial Sequence
  Description of Artificial Sequence: Synthetic oligonucleotide
agaaaggcgaacccgaucc

SEQ ID NO: 2113441 - RNA, 19 nt, Artificial Sequence
  Description of Artificial Sequence: Synthetic oligonucleotide
cauauaaucaucucugucc

SEQ ID NO: 2113442 - RNA, 19 nt, Artificial Sequence
  Description of Artificial Sequence: Synthetic oligonucleotide
uuuaguauugcuaccacga

SEQ ID NO: 2113443 - RNA, 19 nt, Artificial Sequence
  Description of Artificial Sequence: Synthetic oligonucleotide
augacauaggcauggaacc

SEQ ID NO: 2113444 - RNA, 19 nt, Artificial Sequence
  Description of Artificial Sequence: Synthetic oligonucleotide
ugguugacagacaugaggg

SEQ ID NO: 2113445 - RNA, 19 nt, Artificial Sequence
  Description of Artificial Sequence: Synthetic oligonucleotide
aauccgaaaugccaucccc

SEQ ID NO: 2113446 - RNA, 19 nt, Artificial Sequence
  Description of Artificial Sequence: Synthetic oligonucleotide
uuggaagggguccauaugg

SEQ ID NO: 2113447 - RNA, 19 nt, Artificial Sequence
  Description of Artificial Sequence: Synthetic oligonucleotide
aaacauauaaucaucucug

SEQ ID NO: 2113448 - RNA, 19 nt, Artificial Sequence
  Description of Artificial Sequence: Synthetic oligonucleotide
uuauuguuuaagcccacgg

SEQ ID NO: 2113449 - RNA, 19 nt, Artificial Sequence
  Description of Artificial Sequence: Synthetic oligonucleotide
aacccgauccaagagaccc

SEQ ID NO: 2113450 - RNA, 19 nt, Artificial Sequence
  Description of Artificial Sequence: Synthetic oligonucleotide
auaggguucguuccuaggc

SEQ ID NO: 2113451 - RNA, 19 nt, Artificial Sequence
  Description of Artificial Sequence: Synthetic oligonucleotide
uucaaugggcaccuggugg

SEQ ID NO: 2113452 - RNA, 19 nt, Artificial Sequence
  Description of Artificial Sequence: Synthetic oligonucleotide
ggcaucuacauucagaggg

SEQ ID NO: 2113453 - RNA, 19 nt, Artificial Sequence
  Description of Artificial Sequence: Synthetic oligonucleotide
uuucaaaucggaauaccug

SEQ ID NO: 2113454 - RNA, 19 nt, Artificial Sequence
  Description of Artificial Sequence: Synthetic oligonucleotide
aagggguccauauggaauc

SEQ ID NO: 2113455 - RNA, 19 nt, Artificial Sequence
  Description of Artificial Sequence: Synthetic oligonucleotide
auggcaucuacauucagag

SEQ ID NO: 2113456 - RNA, 19 nt, Artificial Sequence
  Description of Artificial Sequence: Synthetic oligonucleotide
cuagugaucagaaccgugg

SEQ ID NO: 2113457 - RNA, 19 nt, Artificial Sequence
  Description of Artificial Sequence: Synthetic oligonucleotide
uaccacgaggauuagaaag

SEQ ID NO: 2113458 - RNA, 19 nt, Artificial Sequence
  Description of Artificial Sequence: Synthetic oligonucleotide
aggauuagaaaggcgaacc

SEQ ID NO: 2113459 - RNA, 19 nt, Artificial Sequence
  Description of Artificial Sequence: Synthetic oligonucleotide
uaguauugcuaccacgagg

SEQ ID NO: 2113460 - RNA, 19 nt, Artificial Sequence
  Description of Artificial Sequence: Synthetic oligonucleotide
uaggcauggaaccacuagg

SEQ ID NO: 2113461 - RNA, 19 nt, Artificial Sequence
  Description of Artificial Sequence: Synthetic oligonucleotide
uucaaaucggaauaccugu

SEQ ID NO: 2113462 - RNA, 19 nt, Artificial Sequence
  Description of Artificial Sequence: Synthetic oligonucleotide
acauauaaucaucucuguc

SEQ ID NO: 2113463 - RNA, 19 nt, Artificial Sequence
  Description of Artificial Sequence: Synthetic oligonucleotide
uuccauauguugcaugugc

SEQ ID NO: 2113464 - RNA, 19 nt, Artificial Sequence
  Description of Artificial Sequence: Synthetic oligonucleotide
gauuagaaaggcgaacccg

SEQ ID NO: 2113465 - RNA, 19 nt, Artificial Sequence
  Description of Artificial Sequence: Synthetic oligonucleotide
gaugacauaggcauggaac

SEQ ID NO: 2113466 - RNA, 19 nt, Artificial Sequence
  Description of Artificial Sequence: Synthetic oligonucleotide
acagacaugagggauagag

SEQ ID NO: 2113467 - RNA, 19 nt, Artificial Sequence
  Description of Artificial Sequence: Synthetic oligonucleotide
aguacucugugacaugcac

SEQ ID NO: 2113468 - RNA, 19 nt, Artificial Sequence
  Description of Artificial Sequence: Synthetic oligonucleotide
aaaucggaauaccuguugu

SEQ ID NO: 2113469 - RNA, 19 nt, Artificial Sequence
  Description of Artificial Sequence: Synthetic oligonucleotide
uuugguaggguguugucug

SEQ ID NO: 2113470 - RNA, 19 nt, Artificial Sequence
  Description of Artificial Sequence: Synthetic oligonucleotide
aucggaauaccuguugucc

SEQ ID NO: 2113471 - RNA, 19 nt, Artificial Sequence
  Description of Artificial Sequence: Synthetic oligonucleotide
cuuuaguauugcuaccacg

SEQ ID NO: 2113472 - RNA, 19 nt, Artificial Sequence
  Description of Artificial Sequence: Synthetic oligonucleotide
uauacacuucccgaggagg

SEQ ID NO: 2113473 - RNA, 19 nt, Artificial Sequence
  Description of Artificial Sequence: Synthetic oligonucleotide
uccauauggaauccgaaau

SEQ ID NO: 2113474 - RNA, 19 nt, Artificial Sequence
  Description of Artificial Sequence: Synthetic oligonucleotide
agugaucagaaccgugggc

SEQ ID NO: 2113475 - RNA, 19 nt, Artificial Sequence
  Description of Artificial Sequence: Synthetic oligonucleotide
agaggcgugucacuguccc

SEQ ID NO: 2113476 - RNA, 19 nt, Artificial Sequence
  Description of Artificial Sequence: Synthetic oligonucleotide
cauauggaauccgaaaugc

SEQ ID NO: 2113477 - RNA, 19 nt, Artificial Sequence
  Description of Artificial Sequence: Synthetic oligonucleotide
gugacaugcaccuggaggc

SEQ ID NO: 2113478 - RNA, 19 nt, Artificial Sequence
  Description of Artificial Sequence: Synthetic oligonucleotide
uucaacuuuuacaaacuuc

SEQ ID NO: 2113479 - RNA, 19 nt, Artificial Sequence
  Description of Artificial Sequence: Synthetic oligonucleotide
ucgggucagguucacaggg

SEQ ID NO: 2113480 - RNA, 19 nt, Artificial Sequence
  Description of Artificial Sequence: Synthetic oligonucleotide
uuaguauugcuaccacgag

SEQ ID NO: 2113481 - RNA, 19 nt, Artificial Sequence
  Description of Artificial Sequence: Synthetic oligonucleotide
aagagacccagcuuuggcu

SEQ ID NO: 2113482 - RNA, 19 nt, Artificial Sequence
  Description of Artificial Sequence: Synthetic oligonucleotide
gaaccacuaggugugaagg

SEQ ID NO: 2113483 - RNA, 19 nt, Artificial Sequence
  Description of Artificial Sequence: Synthetic oligonucleotide
ugguuuucaaaucggaaua

SEQ ID NO: 2113484 - RNA, 19 nt, Artificial Sequence
  Description of Artificial Sequence: Synthetic oligonucleotide
ugagccuuuguagaacugg

SEQ ID NO: 2113485 - RNA, 19 nt, Artificial Sequence
  Description of Artificial Sequence: Synthetic oligonucleotide
ucggguaguacucugugac

SEQ ID NO: 2113486 - RNA, 19 nt, Artificial Sequence
  Description of Artificial Sequence: Synthetic oligonucleotide
uagugaucagaaccguggg

SEQ ID NO: 2113487 - RNA, 19 nt, Artificial Sequence
  Description of Artificial Sequence: Synthetic oligonucleotide
aguauugcuaccacgagga

SEQ ID NO: 2113488 - RNA, 19 nt, Artificial Sequence
  Description of Artificial Sequence: Synthetic oligonucleotide
ucgugguugacagacauga

SEQ ID NO: 2113489 - RNA, 19 nt, Artificial Sequence
  Description of Artificial Sequence: Synthetic oligonucleotide
uucagagggguaaaugacu

SEQ ID NO: 2113490 - RNA, 19 nt, Artificial Sequence
  Description of Artificial Sequence: Synthetic oligonucleotide
ucuucuccccuucuugcgg

SEQ ID NO: 2113491 - RNA, 19 nt, Artificial Sequence
  Description of Artificial Sequence: Synthetic oligonucleotide
uuccuaggcuuucaugcgg

SEQ ID NO: 2113492 - RNA, 19 nt, Artificial Sequence
  Description of Artificial Sequence: Synthetic oligonucleotide
aacuggguccccucggguc

SEQ ID NO: 2113493 - RNA, 19 nt, Artificial Sequence
  Description of Artificial Sequence: Synthetic oligonucleotide
auaggcauggaaccacuag

SEQ ID NO: 2113494 - RNA, 19 nt, Artificial Sequence
  Description of Artificial Sequence: Synthetic oligonucleotide
ugaguaguugcagaugaug

SEQ ID NO: 2113495 - RNA, 19 nt, Artificial Sequence
  Description of Artificial Sequence: Synthetic oligonucleotide
auauggaauccgaaaugcc

SEQ ID NO: 2113496 - RNA, 19 nt, Artificial Sequence
  Description of Artificial Sequence: Synthetic oligonucleotide
uccauauguugcaugugca

SEQ ID NO: 2113497 - RNA, 19 nt, Artificial Sequence
  Description of Artificial Sequence: Synthetic oligonucleotide
gacucuuucaaugggcacc

SEQ ID NO: 2113498 - RNA, 19 nt, Artificial Sequence
  Description of Artificial Sequence: Synthetic oligonucleotide
ugcuuugauccucaguuuc

SEQ ID NO: 2113499 - RNA, 19 nt, Artificial Sequence
  Description of Artificial Sequence: Synthetic oligonucleotide
uuucaaugggcaccuggug

SEQ ID NO: 2113500 - RNA, 19 nt, Artificial Sequence
  Description of Artificial Sequence: Synthetic oligonucleotide
gugaucagaaccgugggcc

SEQ ID NO: 2113501 - RNA, 19 nt, Artificial Sequence
  Description of Artificial Sequence: Synthetic oligonucleotide
uggaaguuugguagggugu

SEQ ID NO: 2113502 - RNA, 19 nt, Artificial Sequence
  Description of Artificial Sequence: Synthetic oligonucleotide
cuuccccaugucaugaacc

SEQ ID NO: 2113503 - RNA, 19 nt, Artificial Sequence
  Description of Artificial Sequence: Synthetic oligonucleotide
ugauccucaguuucugaug

SEQ ID NO: 2113504 - RNA, 19 nt, Artificial Sequence
  Description of Artificial Sequence: Synthetic oligonucleotide
uuucugauguggcugcccu

SEQ ID NO: 2113505 - RNA, 19 nt, Artificial Sequence
  Description of Artificial Sequence: Synthetic oligonucleotide
uuuuacaaacuuccccauc

SEQ ID NO: 2113506 - RNA, 19 nt, Artificial Sequence
  Description of Artificial Sequence: Synthetic oligonucleotide
guggaugacauaggcaugg

SEQ ID NO: 2113507 - RNA, 19 nt, Artificial Sequence
  Description of Artificial Sequence: Synthetic oligonucleotide
accacgaggauuagaaagg

SEQ ID NO: 2113508 - RNA, 19 nt, Artificial Sequence
  Description of Artificial Sequence: Synthetic oligonucleotide
guuccuaggcuuucaugcg

SEQ ID NO: 2113509 - RNA, 19 nt, Artificial Sequence
  Description of Artificial Sequence: Synthetic oligonucleotide
cacaaggaaguccaguuuc

SEQ ID NO: 2113510 - RNA, 19 nt, Artificial Sequence
  Description of Artificial Sequence: Synthetic oligonucleotide
auauacacuucccgaggag

SEQ ID NO: 2113511 - RNA, 19 nt, Artificial Sequence
  Description of Artificial Sequence: Synthetic oligonucleotide
agggauagaggcgugucac

SEQ ID NO: 2113512 - RNA, 19 nt, Artificial Sequence
  Description of Artificial Sequence: Synthetic oligonucleotide
caacuuuuacaaacuuccc

SEQ ID NO: 2113513 - RNA, 19 nt, Artificial Sequence
  Description of Artificial Sequence: Synthetic oligonucleotide
accacuaggugugaagggg

SEQ ID NO: 2113514 - RNA, 19 nt, Artificial Sequence
  Description of Artificial Sequence: Synthetic oligonucleotide
uccgcugccccucuucccg

SEQ ID NO: 2113515 - RNA, 19 nt, Artificial Sequence
  Description of Artificial Sequence: Synthetic oligonucleotide
auuagaaaggcgaacccga

SEQ ID NO: 2113516 - RNA, 19 nt, Artificial Sequence
  Description of Artificial Sequence: Synthetic oligonucleotide
auugcuaccacgaggauua

SEQ ID NO: 2113517 - RNA, 19 nt, Artificial Sequence
  Description of Artificial Sequence: Synthetic oligonucleotide
gaggcguuccauauguugc

SEQ ID NO: 2113518 - RNA, 19 nt, Artificial Sequence
  Description of Artificial Sequence: Synthetic oligonucleotide
aaaugccauccccagugga

SEQ ID NO: 2113519 - RNA, 19 nt, Artificial Sequence
  Description of Artificial Sequence: Synthetic oligonucleotide
acgaggauuagaaaggcga

SEQ ID NO: 2113520 - RNA, 19 nt, Artificial Sequence
  Description of Artificial Sequence: Synthetic oligonucleotide
caaaucggaauaccuguug

SEQ ID NO: 2113521 - RNA, 19 nt, Artificial Sequence
  Description of Artificial Sequence: Synthetic oligonucleotide
ucacugucccuagugauca

SEQ ID NO: 2113522 - RNA, 19 nt, Artificial Sequence
  Description of Artificial Sequence: Synthetic oligonucleotide
gaauccgaaaugccauccc

SEQ ID NO: 2113523 - RNA, 19 nt, Artificial Sequence
  Description of Artificial Sequence: Synthetic oligonucleotide
acuaggugugaaggggucc

SEQ ID NO: 2113524 - RNA, 19 nt, Artificial Sequence
  Description of Artificial Sequence: Synthetic oligonucleotide
uaggguucguuccuaggcu

SEQ ID NO: 2113525 - RNA, 19 nt, Artificial Sequence
  Description of Artificial Sequence: Synthetic oligonucleotide
augaugguuuucaaaucgg

SEQ ID NO: 2113526 - RNA, 19 nt, Artificial Sequence
  Description of Artificial Sequence: Synthetic oligonucleotide
uugcagaugaugguuuuca

SEQ ID NO: 2113527 - RNA, 19 nt, Artificial Sequence
  Description of Artificial Sequence: Synthetic oligonucleotide
ucaugcggaaggcggugcg

SEQ ID NO: 2113528 - RNA, 19 nt, Artificial Sequence
  Description of Artificial Sequence: Synthetic oligonucleotide
aaguuugguaggguguugu

SEQ ID NO: 2113529 - RNA, 19 nt, Artificial Sequence
  Description of Artificial Sequence: Synthetic oligonucleotide
ucggaauaccuguuguccu

SEQ ID NO: 2113530 - RNA, 19 nt, Artificial Sequence
  Description of Artificial Sequence: Synthetic oligonucleotide
aguaggggccgacucuuuc

SEQ ID NO: 2113531 - RNA, 19 nt, Artificial Sequence
  Description of Artificial Sequence: Synthetic oligonucleotide
cauaggguucguuccuagg

SEQ ID NO: 2113532 - RNA, 19 nt, Artificial Sequence
  Description of Artificial Sequence: Synthetic oligonucleotide
cagggucccgucuuugucg

SEQ ID NO: 2113533 - RNA, 19 nt, Artificial Sequence
  Description of Artificial Sequence: Synthetic oligonucleotide
ugcaugugcauguccacaa

SEQ ID NO: 2113534 - RNA, 19 nt, Artificial Sequence
  Description of Artificial Sequence: Synthetic oligonucleotide
cacgaggauuagaaaggcg

SEQ ID NO: 2113535 - RNA, 19 nt, Artificial Sequence
  Description of Artificial Sequence: Synthetic oligonucleotide
uuccccaugucaugaaccu

SEQ ID NO: 2113536 - RNA, 19 nt, Artificial Sequence
  Description of Artificial Sequence: Synthetic oligonucleotide
ugcggaaacgcucuuuauu

SEQ ID NO: 2113537 - RNA, 19 nt, Artificial Sequence
  Description of Artificial Sequence: Synthetic oligonucleotide
uccaagagacccagcuuug

SEQ ID NO: 2113538 - RNA, 19 nt, Artificial Sequence
  Description of Artificial Sequence: Synthetic oligonucleotide
gcauauacacuucccgagg

SEQ ID NO: 2113539 - RNA, 19 nt, Artificial Sequence
  Description of Artificial Sequence: Synthetic oligonucleotide
ucaugcuuugauccucagu

SEQ ID NO: 2113540 - RNA, 19 nt, Artificial Sequence
  Description of Artificial Sequence: Synthetic oligonucleotide
gcggaaacgcucuuuauug

SEQ ID NO: 2113541 - RNA, 19 nt, Artificial Sequence
  Description of Artificial Sequence: Synthetic oligonucleotide
acaugagggauagaggcgu

SEQ ID NO: 2113542 - RNA, 19 nt, Artificial Sequence
  Description of Artificial Sequence: Synthetic oligonucleotide
uugguaggguguugucugg

SEQ ID NO: 2113543 - RNA, 19 nt, Artificial Sequence
  Description of Artificial Sequence: Synthetic oligonucleotide
cuaggugugaagggguccg

SEQ ID NO: 2113544 - RNA, 19 nt, Artificial Sequence
  Description of Artificial Sequence: Synthetic oligonucleotide
uggcaucuacauucagagg

SEQ ID NO: 2113545 - RNA, 19 nt, Artificial Sequence
  Description of Artificial Sequence: Synthetic oligonucleotide
ucaaaucggaauaccuguu

SEQ ID NO: 2113546 - RNA, 19 nt, Artificial Sequence
  Description of Artificial Sequence: Synthetic oligonucleotide
ugggccucucugcauauac

SEQ ID NO: 2113547 - RNA, 19 nt, Artificial Sequence
  Description of Artificial Sequence: Synthetic oligonucleotide
cguuccuaggcuuucaugc

SEQ ID NO: 2113548 - RNA, 19 nt, Artificial Sequence
  Description of Artificial Sequence: Synthetic oligonucleotide
agcccacgggcuuugguuc

SEQ ID NO: 2113549 - RNA, 19 nt, Artificial Sequence
  Description of Artificial Sequence: Synthetic oligonucleotide
uccuaggcuuucaugcgga

SEQ ID NO: 2113550 - RNA, 19 nt, Artificial Sequence
  Description of Artificial Sequence: Synthetic oligonucleotide
acauucagagggguaaaug

SEQ ID NO: 2113551 - RNA, 19 nt, Artificial Sequence
  Description of Artificial Sequence: Synthetic oligonucleotide
uuagaaaggcgaacccgau

SEQ ID NO: 2113552 - RNA, 19 nt, Artificial Sequence
  Description of Artificial Sequence: Synthetic oligonucleotide
gauccucaguuucugaugu

SEQ ID NO: 2113553 - RNA, 19 nt, Artificial Sequence
  Description of Artificial Sequence: Synthetic oligonucleotide
acucggagaccgcuccagc

SEQ ID NO: 2113554 - RNA, 19 nt, Artificial Sequence
  Description of Artificial Sequence: Synthetic oligonucleotide
acauaggguucguuccuag

SEQ ID NO: 2113555 - RNA, 19 nt, Artificial Sequence
  Description of Artificial Sequence: Synthetic oligonucleotide
ggauuagaaaggcgaaccc

SEQ ID NO: 2113556 - RNA, 19 nt, Artificial Sequence
  Description of Artificial Sequence: Synthetic oligonucleotide
uagaagggcuuucuucuau

SEQ ID NO: 2113557 - RNA, 19 nt, Artificial Sequence
  Description of Artificial Sequence: Synthetic oligonucleotide
aauaccuguuguccucuuu

SEQ ID NO: 2113558 - RNA, 19 nt, Artificial Sequence
  Description of Artificial Sequence: Synthetic oligonucleotide
uguuuaagcccacgggcuu

SEQ ID NO: 2113559 - RNA, 19 nt, Artificial Sequence
  Description of Artificial Sequence: Synthetic oligonucleotide
gaugguuuucaaaucggaa

SEQ ID NO: 2113560 - RNA, 19 nt, Artificial Sequence
  Description of Artificial Sequence: Synthetic oligonucleotide
uuacaaacuuccccaucau

SEQ ID NO: 2113561 - RNA, 19 nt, Artificial Sequence
  Description of Artificial Sequence: Synthetic oligonucleotide
ugacauaggcauggaacca

SEQ ID NO: 2113562 - RNA, 19 nt, Artificial Sequence
  Description of Artificial Sequence: Synthetic oligonucleotide
gagcccgaugcccugcggg

SEQ ID NO: 2113563 - RNA, 19 nt, Artificial Sequence
  Description of Artificial Sequence: Synthetic oligonucleotide
uagaaaggcgaacccgauc

SEQ ID NO: 2113564 - RNA, 19 nt, Artificial Sequence
  Description of Artificial Sequence: Synthetic oligonucleotide
aagcccacgggcuuugguu

SEQ ID NO: 2113565 - RNA, 19 nt, Artificial Sequence
  Description of Artificial Sequence: Synthetic oligonucleotide
gcuuucaugcggaaggcgg

SEQ ID NO: 2113566 - RNA, 19 nt, Artificial Sequence
  Description of Artificial Sequence: Synthetic oligonucleotide
ugaucagaaccgugggccu

SEQ ID NO: 2113567 - RNA, 19 nt, Artificial Sequence
  Description of Artificial Sequence: Synthetic oligonucleotide
aaugccauccccaguggau

SEQ ID NO: 2113568 - RNA, 19 nt, Artificial Sequence
  Description of Artificial Sequence: Synthetic oligonucleotide
gaggauuagaaaggcgaac

SEQ ID NO: 2113569 - RNA, 19 nt, Artificial Sequence
  Description of Artificial Sequence: Synthetic oligonucleotide
agggucccgucuuugucgg

SEQ ID NO: 2113570 - RNA, 19 nt, Artificial Sequence
  Description of Artificial Sequence: Synthetic oligonucleotide
uaguugcagaugaugguuu

SEQ ID NO: 2113571 - RNA, 19 nt, Artificial Sequence
  Description of Artificial Sequence: Synthetic oligonucleotide
uauugcuaccacgaggauu

SEQ ID NO: 2113572 - RNA, 19 nt, Artificial Sequence
  Description of Artificial Sequence: Synthetic oligonucleotide
ugacaugcaccuggaggcg

SEQ ID NO: 2113573 - RNA, 19 nt, Artificial Sequence
  Description of Artificial Sequence: Synthetic oligonucleotide
aaggcgaacccgauccaag

SEQ ID NO: 2113574 - RNA, 19 nt, Artificial Sequence
  Description of Artificial Sequence: Synthetic oligonucleotide
cugcauauacacuucccga

SEQ ID NO: 2113575 - RNA, 19 nt, Artificial Sequence
  Description of Artificial Sequence: Synthetic oligonucleotide
gucuuugucggccccggcc

SEQ ID NO: 2113576 - RNA, 19 nt, Artificial Sequence
  Description of Artificial Sequence: Synthetic oligonucleotide
cauauacacuucccgagga

SEQ ID NO: 2113577 - RNA, 19 nt, Artificial Sequence
  Description of Artificial Sequence: Synthetic oligonucleotide
ucguuccuaggcuuucaug

SEQ ID NO: 2113578 - RNA, 19 nt, Artificial Sequence
  Description of Artificial Sequence: Synthetic oligonucleotide
acgggcuuugguucuuuag

SEQ ID NO: 2113579 - RNA, 19 nt, Artificial Sequence
  Description of Artificial Sequence: Synthetic oligonucleotide
gaaggcggugcggaaacgc

SEQ ID NO: 2113580 - RNA, 19 nt, Artificial Sequence
  Description of Artificial Sequence: Synthetic oligonucleotide
aguuucugauguggcugcc

SEQ ID NO: 2113581 - RNA, 19 nt, Artificial Sequence
  Description of Artificial Sequence: Synthetic oligonucleotide
uaccuguuguccucuuucu

SEQ ID NO: 2113582 - RNA, 19 nt, Artificial Sequence
  Description of Artificial Sequence: Synthetic oligonucleotide
ggaggcguuccauauguug

SEQ ID NO: 2113583 - RNA, 19 nt, Artificial Sequence
  Description of Artificial Sequence: Synthetic oligonucleotide
aaacccaguaggggccgac

SEQ ID NO: 2113584 - RNA, 19 nt, Artificial Sequence
  Description of Artificial Sequence: Synthetic oligonucleotide
acccaguaggggccgacuc

SEQ ID NO: 2113585 - RNA, 19 nt, Artificial Sequence
  Description of Artificial Sequence: Synthetic oligonucleotide
gagggguaaaugacuuucc

SEQ ID NO: 2113586 - RNA, 19 nt, Artificial Sequence
  Description of Artificial Sequence: Synthetic oligonucleotide
cucgggucagguucacagg

SEQ ID NO: 2113587 - RNA, 19 nt, Artificial Sequence
  Description of Artificial Sequence: Synthetic oligonucleotide
uuucaugcggaaggcggug

SEQ ID NO: 2113588 - RNA, 19 nt, Artificial Sequence
  Description of Artificial Sequence: Synthetic oligonucleotide
aacuuccccaucaugcuuu

SEQ ID NO: 2113589 - RNA, 19 nt, Artificial Sequence
  Description of Artificial Sequence: Synthetic oligonucleotide
uuagaagggcuuucuucua

SEQ ID NO: 2113590 - RNA, 19 nt, Artificial Sequence
  Description of Artificial Sequence: Synthetic oligonucleotide
ugguaggguguugucuggg

SEQ ID NO: 2113591 - RNA, 19 nt, Artificial Sequence
  Description of Artificial Sequence: Synthetic oligonucleotide
uggaauccgaaaugccauc

SEQ ID NO: 2113592 - RNA, 19 nt, Artificial Sequence
  Description of Artificial Sequence: Synthetic oligonucleotide
uuuaagcccacgggcuuug

SEQ ID NO: 2113593 - RNA, 19 nt, Artificial Sequence
  Description of Artificial Sequence: Synthetic oligonucleotide
agggguccauauggaaucc

SEQ ID NO: 2113594 - RNA, 19 nt, Artificial Sequence
  Description of Artificial Sequence: Synthetic oligonucleotide
uuggucggguaguacucug

SEQ ID NO: 2113595 - RNA, 19 nt, Artificial Sequence
  Description of Artificial Sequence: Synthetic oligonucleotide
auggaauccgaaaugccau

SEQ ID NO: 2113596 - RNA, 19 nt, Artificial Sequence
  Description of Artificial Sequence: Synthetic oligonucleotide
aaaggcgaacccgauccaa

SEQ ID NO: 2113597 - RNA, 19 nt, Artificial Sequence
  Description of Artificial Sequence: Synthetic oligonucleotide
aggcguuccauauguugca

SEQ ID NO: 2113598 - RNA, 19 nt, Artificial Sequence
  Description of Artificial Sequence: Synthetic oligonucleotide
cucucugcauauacacuuc

SEQ ID NO: 2113599 - RNA, 19 nt, Artificial Sequence
  Description of Artificial Sequence: Synthetic oligonucleotide
ugucccuagugaucagaac

SEQ ID NO: 2113600 - RNA, 19 nt, Artificial Sequence
  Description of Artificial Sequence: Synthetic oligonucleotide
augggcaccugguggaagu

SEQ ID NO: 2113601 - RNA, 19 nt, Artificial Sequence
  Description of Artificial Sequence: Synthetic oligonucleotide
ggcuacauaggguucguuc

SEQ ID NO: 2113602 - RNA, 19 nt, Artificial Sequence
  Description of Artificial Sequence: Synthetic oligonucleotide
ccauauggaauccgaaaug

SEQ ID NO: 2113603 - RNA, 19 nt, Artificial Sequence
  Description of Artificial Sequence: Synthetic oligonucleotide
cuaggcuuucaugcggaag

SEQ ID NO: 2113604 - RNA, 19 nt, Artificial Sequence
  Description of Artificial Sequence: Synthetic oligonucleotide
cgcucuuuauuguuuaagc

SEQ ID NO: 2113605 - RNA, 19 nt, Artificial Sequence
  Description of Artificial Sequence: Synthetic oligonucleotide
gagggauagaggcguguca

SEQ ID NO: 2113606 - RNA, 19 nt, Artificial Sequence
  Description of Artificial Sequence: Synthetic oligonucleotide
gccuuuguagaacuggguc

SEQ ID NO: 2113607 - RNA, 19 nt, Artificial Sequence
  Description of Artificial Sequence: Synthetic oligonucleotide
uagaggcgugucacugucc

SEQ ID NO: 2113608 - RNA, 19 nt, Artificial Sequence
  Description of Artificial Sequence: Synthetic oligonucleotide
gaaccugucuuucaacuuu

SEQ ID NO: 2113609 - RNA, 19 nt, Artificial Sequence
  Description of Artificial Sequence: Synthetic oligonucleotide
gaaguuugguaggguguug

SEQ ID NO: 2113610 - RNA, 19 nt, Artificial Sequence
  Description of Artificial Sequence: Synthetic oligonucleotide
uucguuccuaggcuuucau

SEQ ID NO: 2113611 - RNA, 19 nt, Artificial Sequence
  Description of Artificial Sequence: Synthetic oligonucleotide
agaccgcuccagcuccucg

SEQ ID NO: 2113612 - RNA, 19 nt, Artificial Sequence
  Description of Artificial Sequence: Synthetic oligonucleotide
ggggccgacucuuucaaug

SEQ ID NO: 2113613 - RNA, 19 nt, Artificial Sequence
  Description of Artificial Sequence: Synthetic oligonucleotide
uaagcccacgggcuuuggu

SEQ ID NO: 2113614 - RNA, 19 nt, Artificial Sequence
  Description of Artificial Sequence: Synthetic oligonucleotide
uggucggguaguacucugu

SEQ ID NO: 2113615 - RNA, 19 nt, Artificial Sequence
  Description of Artificial Sequence: Synthetic oligonucleotide
cuauggcaucuacauucag

SEQ ID NO: 2113616 - RNA, 19 nt, Artificial Sequence
  Description of Artificial Sequence: Synthetic oligonucleotide
uaggggccgacucuuucaa

SEQ ID NO: 2113617 - RNA, 19 nt, Artificial Sequence
  Description of Artificial Sequence: Synthetic oligonucleotide
ggaauccgaaaugccaucc

SEQ ID NO: 2113618 - RNA, 19 nt, Artificial Sequence
  Description of Artificial Sequence: Synthetic oligonucleotide
aggcgaacccgauccaaga

SEQ ID NO: 2113619 - RNA, 19 nt, Artificial Sequence
  Description of Artificial Sequence: Synthetic oligonucleotide
uucuccccuucuugcgggg

SEQ ID NO: 2113620 - RNA, 19 nt, Artificial Sequence
  Description of Artificial Sequence: Synthetic oligonucleotide
aggcauggaaccacuaggu

SEQ ID NO: 2113621 - RNA, 19 nt, Artificial Sequence
  Description of Artificial Sequence: Synthetic oligonucleotide
ugagggauagaggcguguc

SEQ ID NO: 2113622 - RNA, 19 nt, Artificial Sequence
  Description of Artificial Sequence: Synthetic oligonucleotide
gacuuuccuuuaguauugc

SEQ ID NO: 2113623 - RNA, 19 nt, Artificial Sequence
  Description of Artificial Sequence: Synthetic oligonucleotide
uucaugcggaaggcggugc

SEQ ID NO: 2113624 - RNA, 19 nt, Artificial Sequence
  Description of Artificial Sequence: Synthetic oligonucleotide
cccaguggaugacauaggc

SEQ ID NO: 2113625 - RNA, 19 nt, Artificial Sequence
  Description of Artificial Sequence: Synthetic oligonucleotide
gcuaccacgaggauuagaa

SEQ ID NO: 2113626 - RNA, 19 nt, Artificial Sequence
  Description of Artificial Sequence: Synthetic oligonucleotide
uucccgaggagggaagggu

SEQ ID NO: 2113627 - RNA, 19 nt, Artificial Sequence
  Description of Artificial Sequence: Synthetic oligonucleotide
uacauucagagggguaaau

SEQ ID NO: 2113628 - RNA, 19 nt, Artificial Sequence
  Description of Artificial Sequence: Synthetic oligonucleotide
uccgugucuguguccgucu

SEQ ID NO: 2113629 - RNA, 19 nt, Artificial Sequence
  Description of Artificial Sequence: Synthetic oligonucleotide
guaggggccgacucuuuca

SEQ ID NO: 2113630 - RNA, 19 nt, Artificial Sequence
  Description of Artificial Sequence: Synthetic oligonucleotide
cacuaggugugaagggguc

SEQ ID NO: 2113631 - RNA, 19 nt, Artificial Sequence
  Description of Artificial Sequence: Synthetic oligonucleotide
ggggccaaacauauaauca

SEQ ID NO: 2113632 - RNA, 19 nt, Artificial Sequence
  Description of Artificial Sequence: Synthetic oligonucleotide
guuucugauguggcugccc

SEQ ID NO: 2113633 - RNA, 19 nt, Artificial Sequence
  Description of Artificial Sequence: Synthetic oligonucleotide
gugucacugucccuaguga

SEQ ID NO: 2113634 - RNA, 19 nt, Artificial Sequence
  Description of Artificial Sequence: Synthetic oligonucleotide
aagccacucggagaccgcu

SEQ ID NO: 2113635 - RNA, 19 nt, Artificial Sequence
  Description of Artificial Sequence: Synthetic oligonucleotide
auccgaaaugccaucccca

SEQ ID NO: 2113636 - RNA, 19 nt, Artificial Sequence
  Description of Artificial Sequence: Synthetic oligonucleotide
guuccauauguugcaugug

SEQ ID NO: 2113637 - RNA, 19 nt, Artificial Sequence
  Description of Artificial Sequence: Synthetic oligonucleotide
ggcauggaaccacuaggug

SEQ ID NO: 2113638 - RNA, 19 nt, Artificial Sequence
  Description of Artificial Sequence: Synthetic oligonucleotide
caugagggauagaggcgug

SEQ ID NO: 2113639 - RNA, 19 nt, Artificial Sequence
  Description of Artificial Sequence: Synthetic oligonucleotide
cugagccuuuguagaacug

SEQ ID NO: 2113640 - RNA, 19 nt, Artificial Sequence
  Description of Artificial Sequence: Synthetic oligonucleotide
ggcgaacccgauccaagag

SEQ ID NO: 2113641 - RNA, 19 nt, Artificial Sequence
  Description of Artificial Sequence: Synthetic oligonucleotide
acugucccuagugaucaga

SEQ ID NO: 2113642 - RNA, 19 nt, Artificial Sequence
  Description of Artificial Sequence: Synthetic oligonucleotide
caaacuuccccaucaugcu

SEQ ID NO: 2113643 - RNA, 19 nt, Artificial Sequence
  Description of Artificial Sequence: Synthetic oligonucleotide
aggagcccgaugcccugcg

SEQ ID NO: 2113644 - RNA, 19 nt, Artificial Sequence
  Description of Artificial Sequence: Synthetic oligonucleotide
cuucccgaggagggaaggg

SEQ ID NO: 2113645 - RNA, 19 nt, Artificial Sequence
  Description of Artificial Sequence: Synthetic oligonucleotide
ggucggguaguacucugug

SEQ ID NO: 2113646 - RNA, 19 nt, Artificial Sequence
  Description of Artificial Sequence: Synthetic oligonucleotide
aggguucguuccuaggcuu

SEQ ID NO: 2113647 - RNA, 19 nt, Artificial Sequence
  Description of Artificial Sequence: Synthetic oligonucleotide
ccucaguuucugauguggc

SEQ ID NO: 2113648 - RNA, 19 nt, Artificial Sequence
  Description of Artificial Sequence: Synthetic oligonucleotide
gguucacagggucguguag

SEQ ID NO: 2113649 - RNA, 19 nt, Artificial Sequence
  Description of Artificial Sequence: Synthetic oligonucleotide
guugacagacaugagggau

SEQ ID NO: 2113650 - RNA, 19 nt, Artificial Sequence
  Description of Artificial Sequence: Synthetic oligonucleotide
cuagcgccaaggugacuug

SEQ ID NO: 2113651 - RNA, 19 nt, Artificial Sequence
  Description of Artificial Sequence: Synthetic oligonucleotide
caaguaccuuuucucccuc

SEQ ID NO: 2113652 - RNA, 19 nt, Artificial Sequence
  Description of Artificial Sequence: Synthetic oligonucleotide
uuaagcccacgggcuuugg

SEQ ID NO: 2113653 - RNA, 19 nt, Artificial Sequence
  Description of Artificial Sequence: Synthetic oligonucleotide
ggccgacucuuucaauggg

SEQ ID NO: 2113654 - RNA, 19 nt, Artificial Sequence
  Description of Artificial Sequence: Synthetic oligonucleotide
cacuucccgaggagggaag

SEQ ID NO: 2113655 - RNA, 19 nt, Artificial Sequence
  Description of Artificial Sequence: Synthetic oligonucleotide
uacauaggguucguuccua

SEQ ID NO: 2113656 - RNA, 19 nt, Artificial Sequence
  Description of Artificial Sequence: Synthetic oligonucleotide
caugcggaaggcggugcgg

SEQ ID NO: 2113657 - RNA, 19 nt, Artificial Sequence
  Description of Artificial Sequence: Synthetic oligonucleotide
ccuagugaucagaaccgug

SEQ ID NO: 2113658 - RNA, 19 nt, Artificial Sequence
  Description of Artificial Sequence: Synthetic oligonucleotide
ccuggcuacauaggguucg

SEQ ID NO: 2113659 - RNA, 19 nt, Artificial Sequence
  Description of Artificial Sequence: Synthetic oligonucleotide
uggaugacauaggcaugga

SEQ ID NO: 2113660 - RNA, 19 nt, Artificial Sequence
  Description of Artificial Sequence: Synthetic oligonucleotide
gucggguaguacucuguga

SEQ ID NO: 2113661 - RNA, 19 nt, Artificial Sequence
  Description of Artificial Sequence: Synthetic oligonucleotide
uccccaugucaugaaccug

SEQ ID NO: 2113662 - RNA, 19 nt, Artificial Sequence
  Description of Artificial Sequence: Synthetic oligonucleotide
cuuugucggccccggcccc

SEQ ID NO: 2113663 - RNA, 19 nt, Artificial Sequence
  Description of Artificial Sequence: Synthetic oligonucleotide
gaacccgauccaagagacc

SEQ ID NO: 2113664 - RNA, 19 nt, Artificial Sequence
  Description of Artificial Sequence: Synthetic oligonucleotide
aacccaguaggggccgacu

SEQ ID NO: 2113665 - RNA, 19 nt, Artificial Sequence
  Description of Artificial Sequence: Synthetic oligonucleotide
guuugguaggguguugucu

SEQ ID NO: 2113666 - RNA, 19 nt, Artificial Sequence
  Description of Artificial Sequence: Synthetic oligonucleotide
cugucccuagugaucagaa

SEQ ID NO: 2113667 - RNA, 19 nt, Artificial Sequence
  Description of Artificial Sequence: Synthetic oligonucleotide
guugcagaugaugguuuuc

SEQ ID NO: 2113668 - RNA, 19 nt, Artificial Sequence
  Description of Artificial Sequence: Synthetic oligonucleotide
ggccaaacauauaaucauc

SEQ ID NO: 2113669 - RNA, 19 nt, Artificial Sequence
  Description of Artificial Sequence: Synthetic oligonucleotide
ugaagggguccgugucugu

SEQ ID NO: 2113670 - RNA, 19 nt, Artificial Sequence
  Description of Artificial Sequence: Synthetic oligonucleotide
aaaacccaguaggggccga

SEQ ID NO: 2113671 - RNA, 19 nt, Artificial Sequence
  Description of Artificial Sequence: Synthetic oligonucleotide
uagcgccaaggugacuugc

SEQ ID NO: 2113672 - RNA, 19 nt, Artificial Sequence
  Description of Artificial Sequence: Synthetic oligonucleotide
cuuuuacaaacuuccccau

SEQ ID NO: 2113673 - RNA, 19 nt, Artificial Sequence
  Description of Artificial Sequence: Synthetic oligonucleotide
ucccgucuuugucggcccc

SEQ ID NO: 2113674 - RNA, 19 nt, Artificial Sequence
  Description of Artificial Sequence: Synthetic oligonucleotide
cuuucaugcggaaggcggu

SEQ ID NO: 2113675 - RNA, 19 nt, Artificial Sequence
  Description of Artificial Sequence: Synthetic oligonucleotide
augagggauagaggcgugu

SEQ ID NO: 2113676 - RNA, 19 nt, Artificial Sequence
  Description of Artificial Sequence: Synthetic oligonucleotide
aggcggugcggaaacgcuc

SEQ ID NO: 2113677 - RNA, 19 nt, Artificial Sequence
  Description of Artificial Sequence: Synthetic oligonucleotide
ucuucccggccaccgcccu

SEQ ID NO: 2113678 - RNA, 19 nt, Artificial Sequence
  Description of Artificial Sequence: Synthetic oligonucleotide
gaagccacucggagaccgc

SEQ ID NO: 2113679 - RNA, 19 nt, Artificial Sequence
  Description of Artificial Sequence: Synthetic oligonucleotide
agccuuuguagaacugggu

SEQ ID NO: 2113680 - RNA, 19 nt, Artificial Sequence
  Description of Artificial Sequence: Synthetic oligonucleotide
gccccuagcgccaagguga

SEQ ID NO: 2113681 - RNA, 19 nt, Artificial Sequence
  Description of Artificial Sequence: Synthetic oligonucleotide
gauccaagagacccagcuu

SEQ ID NO: 2113682 - RNA, 19 nt, Artificial Sequence
  Description of Artificial Sequence: Synthetic oligonucleotide
gucccgucuuugucggccc

SEQ ID NO: 2113683 - RNA, 19 nt, Artificial Sequence
  Description of Artificial Sequence: Synthetic oligonucleotide
cucagccaaguaccuuuuc

SEQ ID NO: 2113684 - RNA, 19 nt, Artificial Sequence
  Description of Artificial Sequence: Synthetic oligonucleotide
cuaccacgaggauuagaaa

SEQ ID NO: 2113685 - RNA, 19 nt, Artificial Sequence
  Description of Artificial Sequence: Synthetic oligonucleotide
aggcgugucacugucccua

SEQ ID NO: 2113686 - RNA, 19 nt, Artificial Sequence
  Description of Artificial Sequence: Synthetic oligonucleotide
ggugcggaaacgcucuuua

SEQ ID NO: 2113687 - RNA, 19 nt, Artificial Sequence
  Description of Artificial Sequence: Synthetic oligonucleotide
gcgaacccgauccaagaga

SEQ ID NO: 2113688 - RNA, 19 nt, Artificial Sequence
  Description of Artificial Sequence: Synthetic oligonucleotide
gccaaacauauaaucaucu

SEQ ID NO: 2113689 - RNA, 19 nt, Artificial Sequence
  Description of Artificial Sequence: Synthetic oligonucleotide
cccgaggagggaagggugg

SEQ ID NO: 2113690 - RNA, 19 nt, Artificial Sequence
  Description of Artificial Sequence: Synthetic oligonucleotide
cuacauaggguucguuccu

SEQ ID NO: 2113691 - RNA, 19 nt, Artificial Sequence
  Description of Artificial Sequence: Synthetic oligonucleotide
ggagaugcugaagccacuc

SEQ ID NO: 2113692 - RNA, 19 nt, Artificial Sequence
  Description of Artificial Sequence: Synthetic oligonucleotide
ccacgaggauuagaaaggc

SEQ ID NO: 2113693 - RNA, 19 nt, Artificial Sequence
  Description of Artificial Sequence: Synthetic oligonucleotide
gcguuccauauguugcaug

SEQ ID NO: 2113694 - RNA, 19 nt, Artificial Sequence
  Description of Artificial Sequence: Synthetic oligonucleotide
cgugucacugucccuagug

SEQ ID NO: 2113695 - RNA, 19 nt, Artificial Sequence
  Description of Artificial Sequence: Synthetic oligonucleotide
ggaugacauaggcauggaa

SEQ ID NO: 2113696 - RNA, 19 nt, Artificial Sequence
  Description of Artificial Sequence: Synthetic oligonucleotide
ccuuggucggguaguacuc

SEQ ID NO: 2113697 - RNA, 19 nt, Artificial Sequence
  Description of Artificial Sequence: Synthetic oligonucleotide
aucuacauucagaggggua

SEQ ID NO: 2113698 - RNA, 19 nt, Artificial Sequence
  Description of Artificial Sequence: Synthetic oligonucleotide
ugccccucuucccggccac

SEQ ID NO: 2113699 - RNA, 19 nt, Artificial Sequence
  Description of Artificial Sequence: Synthetic oligonucleotide
cauaggcauggaaccacua

SEQ ID NO: 2113700 - RNA, 19 nt, Artificial Sequence
  Description of Artificial Sequence: Synthetic oligonucleotide
uuguuggaagggguccaua

SEQ ID NO: 2113701 - RNA, 19 nt, Artificial Sequence
  Description of Artificial Sequence: Synthetic oligonucleotide
gucagguucacagggucgu

SEQ ID NO: 2113702 - RNA, 19 nt, Artificial Sequence
  Description of Artificial Sequence: Synthetic oligonucleotide
cacugucccuagugaucag

SEQ ID NO: 2113703 - RNA, 19 nt, Artificial Sequence
  Description of Artificial Sequence: Synthetic oligonucleotide
gggguccauauggaauccg

SEQ ID NO: 2113704 - RNA, 19 nt, Artificial Sequence
  Description of Artificial Sequence: Synthetic oligonucleotide
uuugucggccccggccccu

SEQ ID NO: 2113705 - RNA, 19 nt, Artificial Sequence
  Description of Artificial Sequence: Synthetic oligonucleotide
agccacucggagaccgcuc

SEQ ID NO: 2113706 - RNA, 19 nt, Artificial Sequence
  Description of Artificial Sequence: Synthetic oligonucleotide
ggccccuagcgccaaggug

SEQ ID NO: 2113707 - RNA, 19 nt, Artificial Sequence
  Description of Artificial Sequence: Synthetic oligonucleotide
ccgacucuuucaaugggca

SEQ ID NO: 2113708 - RNA, 19 nt, Artificial Sequence
  Description of Artificial Sequence: Synthetic oligonucleotide
ggcgugucacugucccuag

SEQ ID NO: 2113709 - RNA, 19 nt, Artificial Sequence
  Description of Artificial Sequence: Synthetic oligonucleotide
uaggugugaagggguccgu

SEQ ID NO: 2113710 - RNA, 19 nt, Artificial Sequence
  Description of Artificial Sequence: Synthetic oligonucleotide
guucguuccuaggcuuuca

SEQ ID NO: 2113711 - RNA, 19 nt, Artificial Sequence
  Description of Artificial Sequence: Synthetic oligonucleotide
ggaaacgcucuuuauuguu

SEQ ID NO: 2113712 - RNA, 19 nt, Artificial Sequence
  Description of Artificial Sequence: Synthetic oligonucleotide
ccggccaccgcccuccagc

SEQ ID NO: 2113713 - RNA, 19 nt, Artificial Sequence
  Description of Artificial Sequence: Synthetic oligonucleotide
uugcuaccacgaggauuag

SEQ ID NO: 2113714 - RNA, 19 nt, Artificial Sequence
  Description of Artificial Sequence: Synthetic oligonucleotide
ggguccauauggaauccga

SEQ ID NO: 2113715 - RNA, 19 nt, Artificial Sequence
  Description of Artificial Sequence: Synthetic oligonucleotide
cucggagaccgcuccagcu

SEQ ID NO: 2113716 - RNA, 19 nt, Artificial Sequence
  Description of Artificial Sequence: Synthetic oligonucleotide
ccaucaugcuuugauccuc

SEQ ID NO: 2113717 - RNA, 19 nt, Artificial Sequence
  Description of Artificial Sequence: Synthetic oligonucleotide
ugucggccccggccccuag

SEQ ID NO: 2113718 - RNA, 19 nt, Artificial Sequence
  Description of Artificial Sequence: Synthetic oligonucleotide
cugcgggguccuccgcugc

SEQ ID NO: 2113719 - RNA, 19 nt, Artificial Sequence
  Description of Artificial Sequence: Synthetic oligonucleotide
gguccauauggaauccgaa

SEQ ID NO: 2113720 - RNA, 19 nt, Artificial Sequence
  Description of Artificial Sequence: Synthetic oligonucleotide
ggaaggcggugcggaaacg

SEQ ID NO: 2113721 - RNA, 19 nt, Artificial Sequence
  Description of Artificial Sequence: Synthetic oligonucleotide
cccgauccaagagacccag

SEQ ID NO: 2113722 - RNA, 19 nt, Artificial Sequence
  Description of Artificial Sequence: Synthetic oligonucleotide
ccucauccagcucgauccc

SEQ ID NO: 2113723 - RNA, 19 nt, Artificial Sequence
  Description of Artificial Sequence: Synthetic oligonucleotide
gacaugcaccuggaggcgu

SEQ ID NO: 2113724 - RNA, 19 nt, Artificial Sequence
  Description of Artificial Sequence: Synthetic oligonucleotide
acccgauccaagagaccca

SEQ ID NO: 2113725 - RNA, 19 nt, Artificial Sequence
  Description of Artificial Sequence: Synthetic oligonucleotide
aggggccgacucuuucaau

SEQ ID NO: 2113726 - RNA, 19 nt, Artificial Sequence
  Description of Artificial Sequence: Synthetic oligonucleotide
ccaaguaccuuuucucccu

SEQ ID NO: 2113727 - RNA, 19 nt, Artificial Sequence
  Description of Artificial Sequence: Synthetic oligonucleotide
gcuuguuggaaggggucca

SEQ ID NO: 2113728 - RNA, 19 nt, Artificial Sequence
  Description of Artificial Sequence: Synthetic oligonucleotide
ggccugagccuuuguagaa

SEQ ID NO: 2113729 - RNA, 19 nt, Artificial Sequence
  Description of Artificial Sequence: Synthetic oligonucleotide
gguucguuccuaggcuuuc

SEQ ID NO: 2113730 - RNA, 19 nt, Artificial Sequence
  Description of Artificial Sequence: Synthetic oligonucleotide
caucuacauucagaggggu

SEQ ID NO: 2113731 - RNA, 19 nt, Artificial Sequence
  Description of Artificial Sequence: Synthetic oligonucleotide
ccccaugucaugaaccugu

SEQ ID NO: 2113732 - RNA, 19 nt, Artificial Sequence
  Description of Artificial Sequence: Synthetic oligonucleotide
ggaauaccuguuguccucu

SEQ ID NO: 2113733 - RNA, 19 nt, Artificial Sequence
  Description of Artificial Sequence: Synthetic oligonucleotide
gagaccgcuccagcuccuc

SEQ ID NO: 2113734 - RNA, 19 nt, Artificial Sequence
  Description of Artificial Sequence: Synthetic oligonucleotide
cuggggccaaacauauaau

SEQ ID NO: 2113735 - RNA, 19 nt, Artificial Sequence
  Description of Artificial Sequence: Synthetic oligonucleotide
cugaguaguugcagaugau

SEQ ID NO: 2113736 - RNA, 19 nt, Artificial Sequence
  Description of Artificial Sequence: Synthetic oligonucleotide
cccaugucaugaaccuguc

SEQ ID NO: 2113737 - RNA, 19 nt, Artificial Sequence
  Description of Artificial Sequence: Synthetic oligonucleotide
cgaggauuagaaaggcgaa

SEQ ID NO: 2113738 - RNA, 19 nt, Artificial Sequence
  Description of Artificial Sequence: Synthetic oligonucleotide
gacagacaugagggauaga

SEQ ID NO: 2113739 - RNA, 19 nt, Artificial Sequence
  Description of Artificial Sequence: Synthetic oligonucleotide
cuuggucggguaguacucu

SEQ ID NO: 2113740 - RNA, 19 nt, Artificial Sequence
  Description of Artificial Sequence: Synthetic oligonucleotide
gggguccgugucugugucc

SEQ ID NO: 2113741 - RNA, 19 nt, Artificial Sequence
  Description of Artificial Sequence: Synthetic oligonucleotide
ugggcaccugguggaaguu

SEQ ID NO: 2113742 - RNA, 19 nt, Artificial Sequence
  Description of Artificial Sequence: Synthetic oligonucleotide
guuuaagcccacgggcuuu

SEQ ID NO: 2113743 - RNA, 19 nt, Artificial Sequence
  Description of Artificial Sequence: Synthetic oligonucleotide
uggcuacauaggguucguu

SEQ ID NO: 2113744 - RNA, 19 nt, Artificial Sequence
  Description of Artificial Sequence: Synthetic oligonucleotide
guauugcuaccacgaggau

SEQ ID NO: 2113745 - RNA, 19 nt, Artificial Sequence
  Description of Artificial Sequence: Synthetic oligonucleotide
ucagaaccgugggccucuc

SEQ ID NO: 2113746 - RNA, 19 nt, Artificial Sequence
  Description of Artificial Sequence: Synthetic oligonucleotide
ccugagccuuuguagaacu

SEQ ID NO: 2113747 - RNA, 19 nt, Artificial Sequence
  Description of Artificial Sequence: Synthetic oligonucleotide
gaggcgugucacugucccu

SEQ ID NO: 2113748 - RNA, 19 nt, Artificial Sequence
  Description of Artificial Sequence: Synthetic oligonucleotide
gggauagaggcgugucacu

SEQ ID NO: 2113749 - RNA, 19 nt, Artificial Sequence
  Description of Artificial Sequence: Synthetic oligonucleotide
cagguucacagggucgugu

SEQ ID NO: 2113750 - RNA, 19 nt, Artificial Sequence
  Description of Artificial Sequence: Synthetic oligonucleotide
uggcugcccuggcuacaua

SEQ ID NO: 2113751 - RNA, 19 nt, Artificial Sequence
  Description of Artificial Sequence: Synthetic oligonucleotide
ccauauguugcaugugcau

SEQ ID NO: 2113752 - RNA, 19 nt, Artificial Sequence
  Description of Artificial Sequence: Synthetic oligonucleotide
ccgaggagggaaggguggc

SEQ ID NO: 2113753 - RNA, 19 nt, Artificial Sequence
  Description of Artificial Sequence: Synthetic oligonucleotide
gugcggaaacgcucuuuau

SEQ ID NO: 2113754 - RNA, 19 nt, Artificial Sequence
  Description of Artificial Sequence: Synthetic oligonucleotide
cccuuggucggguaguacu

SEQ ID NO: 2113755 - RNA, 19 nt, Artificial Sequence
  Description of Artificial Sequence: Synthetic oligonucleotide
ccgucuuugucggccccgg

SEQ ID NO: 2113756 - RNA, 19 nt, Artificial Sequence
  Description of Artificial Sequence: Synthetic oligonucleotide
caaugggcaccugguggaa

SEQ ID NO: 2113757 - RNA, 19 nt, Artificial Sequence
  Description of Artificial Sequence: Synthetic oligonucleotide
cccgucuuugucggccccg

SEQ ID NO: 2113758 - RNA, 19 nt, Artificial Sequence
  Description of Artificial Sequence: Synthetic oligonucleotide
cagagggguaaaugacuuu

SEQ ID NO: 2113759 - RNA, 19 nt, Artificial Sequence
  Description of Artificial Sequence: Synthetic oligonucleotide
ccccuagcgccaaggugac

SEQ ID NO: 2113760 - RNA, 19 nt, Artificial Sequence
  Description of Artificial Sequence: Synthetic oligonucleotide
ccacuaggugugaaggggu

SEQ ID NO: 2113761 - RNA, 19 nt, Artificial Sequence
  Description of Artificial Sequence: Synthetic oligonucleotide
ccccucuucccggccaccg

SEQ ID NO: 2113762 - RNA, 19 nt, Artificial Sequence
  Description of Artificial Sequence: Synthetic oligonucleotide
caccugguggaaguuuggu

SEQ ID NO: 2113763 - RNA, 19 nt, Artificial Sequence
  Description of Artificial Sequence: Synthetic oligonucleotide
cacgggcuuugguucuuua

SEQ ID NO: 2113764 - RNA, 19 nt, Artificial Sequence
  Description of Artificial Sequence: Synthetic oligonucleotide
cuuguuggaagggguccau

SEQ ID NO: 2113765 - RNA, 19 nt, Artificial Sequence
  Description of Artificial Sequence: Synthetic oligonucleotide
ggcggugcggaaacgcucu

SEQ ID NO: 2113766 - RNA, 19 nt, Artificial Sequence
  Description of Artificial Sequence: Synthetic oligonucleotide
ccgcugccccucuucccgg

SEQ ID NO: 2113767 - RNA, 19 nt, Artificial Sequence
  Description of Artificial Sequence: Synthetic oligonucleotide
cccucagccaaguaccuuu

SEQ ID NO: 2113768 - RNA, 19 nt, Artificial Sequence
  Description of Artificial Sequence: Synthetic oligonucleotide
ccggccccuagcgccaagg

SEQ ID NO: 2113769 - RNA, 19 nt, Artificial Sequence
  Description of Artificial Sequence: Synthetic oligonucleotide
cccgaugcccugcgggguc

SEQ ID NO: 2113770 - RNA, 19 nt, Artificial Sequence
  Description of Artificial Sequence: Synthetic oligonucleotide
uugucggccccggccccua

SEQ ID NO: 2113771 - RNA, 19 nt, Artificial Sequence
  Description of Artificial Sequence: Synthetic oligonucleotide
gcuccucgugguugacaga

SEQ ID NO: 2113772 - RNA, 19 nt, Artificial Sequence
  Description of Artificial Sequence: Synthetic oligonucleotide
gggucccgucuuugucggc

SEQ ID NO: 2113773 - RNA, 19 nt, Artificial Sequence
  Description of Artificial Sequence: Synthetic oligonucleotide
cuggcuacauaggguucgu

SEQ ID NO: 2113774 - RNA, 19 nt, Artificial Sequence
  Description of Artificial Sequence: Synthetic oligonucleotide
ccuaggcuuucaugcggaa

SEQ ID NO: 2113775 - RNA, 19 nt, Artificial Sequence
  Description of Artificial Sequence: Synthetic oligonucleotide
gcggaaggcggugcggaaa

SEQ ID NO: 2113776 - RNA, 19 nt, Artificial Sequence
  Description of Artificial Sequence: Synthetic oligonucleotide
ccgaugcccugcggggucc

SEQ ID NO: 2113777 - RNA, 19 nt, Artificial Sequence
  Description of Artificial Sequence: Synthetic oligonucleotide
ccaugucaugaaccugucu

SEQ ID NO: 2113778 - RNA, 19 nt, Artificial Sequence
  Description of Artificial Sequence: Synthetic oligonucleotide
ccacaaggaaguccaguuu

SEQ ID NO: 2113779 - RNA, 19 nt, Artificial Sequence
  Description of Artificial Sequence: Synthetic oligonucleotide
cccaguaggggccgacucu

SEQ ID NO: 2113780 - RNA, 19 nt, Artificial Sequence
  Description of Artificial Sequence: Synthetic oligonucleotide
ccccacuggggccaaacau

SEQ ID NO: 2113781 - RNA, 19 nt, Artificial Sequence
  Description of Artificial Sequence: Synthetic oligonucleotide
gugggccucucugcauaua

SEQ ID NO: 2113782 - RNA, 19 nt, Artificial Sequence
  Description of Artificial Sequence: Synthetic oligonucleotide
ggcguuccauauguugcau

SEQ ID NO: 2113783 - RNA, 19 nt, Artificial Sequence
  Description of Artificial Sequence: Synthetic oligonucleotide
ccgugggccucucugcaua

SEQ ID NO: 2113784 - RNA, 19 nt, Artificial Sequence
  Description of Artificial Sequence: Synthetic oligonucleotide
ccccuuggucggguaguac

SEQ ID NO: 2113785 - RNA, 19 nt, Artificial Sequence
  Description of Artificial Sequence: Synthetic oligonucleotide
ccacucggagaccgcucca

SEQ ID NO: 2113786 - RNA, 19 nt, Artificial Sequence
  Description of Artificial Sequence: Synthetic oligonucleotide
ggguucguuccuaggcuuu

SEQ ID NO: 2113787 - RNA, 19 nt, Artificial Sequence
  Description of Artificial Sequence: Synthetic oligonucleotide
gguccuccgcugccccucu

SEQ ID NO: 2113788 - RNA, 19 nt, Artificial Sequence
  Description of Artificial Sequence: Synthetic oligonucleotide
ccucagccaaguaccuuuu

SEQ ID NO: 2113789 - RNA, 19 nt, Artificial Sequence
  Description of Artificial Sequence: Synthetic oligonucleotide
gcgugucacugucccuagu

SEQ ID NO: 2113790 - RNA, 19 nt, Artificial Sequence
  Description of Artificial Sequence: Synthetic oligonucleotide
ccaguaggggccgacucuu

SEQ ID NO: 2113791 - RNA, 19 nt, Artificial Sequence
  Description of Artificial Sequence: Synthetic oligonucleotide
ggagaccgcuccagcuccu

SEQ ID NO: 2113792 - RNA, 19 nt, Artificial Sequence
  Description of Artificial Sequence: Synthetic oligonucleotide
cccggccaccgcccuccag

SEQ ID NO: 2113793 - RNA, 19 nt, Artificial Sequence
  Description of Artificial Sequence: Synthetic oligonucleotide
gggcaccugguggaaguuu

SEQ ID NO: 2113794 - RNA, 19 nt, Artificial Sequence
  Description of Artificial Sequence: Synthetic oligonucleotide
cgggucagguucacagggu

SEQ ID NO: 2113795 - RNA, 19 nt, Artificial Sequence
  Description of Artificial Sequence: Synthetic oligonucleotide
gcccgaugcccugcggggu

SEQ ID NO: 2113796 - RNA, 19 nt, Artificial Sequence
  Description of Artificial Sequence: Synthetic oligonucleotide
cgugggccucucugcauau

SEQ ID NO: 2113797 - RNA, 19 nt, Artificial Sequence
  Description of Artificial Sequence: Synthetic oligonucleotide
gcggugcggaaacgcucuu

SEQ ID NO: 2113798 - RNA, 19 nt, Artificial Sequence
  Description of Artificial Sequence: Synthetic oligonucleotide
cggccccuagcgccaaggu

SEQ ID NO: 2113799 - RNA, 19 nt, Artificial Sequence
  Description of Artificial Sequence: Synthetic oligonucleotide
ccccucagccaaguaccuu

SEQ ID NO: 2113800 - RNA, 19 nt, Artificial Sequence
  Description of Artificial Sequence: Synthetic oligonucleotide
cggugcggaaacgcucuuu

SEQ ID NO: 2113801 - RNA, 19 nt, Artificial Sequence
  Description of Artificial Sequence: Synthetic oligonucleotide
ccccggccccuagcgccaa

SEQ ID NO: 2113802 - RNA, 19 nt, Artificial Sequence
  Description of Artificial Sequence: Synthetic oligonucleotide
uccaucacuguaaacaucg

SEQ ID NO: 2113803 - RNA, 19 nt, Artificial Sequence
  Description of Artificial Sequence: Synthetic oligonucleotide
ggaucaacaaacuugaucc

SEQ ID NO: 2113804 - RNA, 19 nt, Artificial Sequence
  Description of Artificial Sequence: Synthetic oligonucleotide
cugguuguaaucaagagac

SEQ ID NO: 2113805 - RNA, 19 nt, Artificial Sequence
  Description of Artificial Sequence: Synthetic oligonucleotide
acauaaaaggcaucuuucc

SEQ ID NO: 2113806 - RNA, 19 nt, Artificial Sequence
  Description of Artificial Sequence: Synthetic oligonucleotide
acuguaaacaucgaugagc

SEQ ID NO: 2113807 - RNA, 19 nt, Artificial Sequence
  Description of Artificial Sequence: Synthetic oligonucleotide
gaaguaauugcagaagugg

SEQ ID NO: 2113808 - RNA, 19 nt, Artificial Sequence
  Description of Artificial Sequence: Synthetic oligonucleotide
aagguugacagaucuucgc

SEQ ID NO: 2113809 - RNA, 19 nt, Artificial Sequence
  Description of Artificial Sequence: Synthetic oligonucleotide
guaaucaagagacugcugc

SEQ ID NO: 2113810 - RNA, 19 nt, Artificial Sequence
  Description of Artificial Sequence: Synthetic oligonucleotide
ugugacaugguauacugug

SEQ ID NO: 2113811 - RNA, 19 nt, Artificial Sequence
  Description of Artificial Sequence: Synthetic oligonucleotide
guaaacaucgaugagcucc

SEQ ID NO: 2113812 - RNA, 19 nt, Artificial Sequence
  Description of Artificial Sequence: Synthetic oligonucleotide
uuuccuucaugugacaugg

SEQ ID NO: 2113813 - RNA, 19 nt, Artificial Sequence
  Description of Artificial Sequence: Synthetic oligonucleotide
uggcauaagaucuuguccc

SEQ ID NO: 2113814 - RNA, 19 nt, Artificial Sequence
  Description of Artificial Sequence: Synthetic oligonucleotide
ugaaauacccaggaguggg

SEQ ID NO: 2113815 - RNA, 19 nt, Artificial Sequence
  Description of Artificial Sequence: Synthetic oligonucleotide
aggaucaacaaacuugauc

SEQ ID NO: 2113816 - RNA, 19 nt, Artificial Sequence
  Description of Artificial Sequence: Synthetic oligonucleotide
uaaacaucgaugagcuccg

SEQ ID NO: 2113817 - RNA, 19 nt, Artificial Sequence
  Description of Artificial Sequence: Synthetic oligonucleotide
ucugguuguaaucaagaga

SEQ ID NO: 2113818 - RNA, 19 nt, Artificial Sequence
  Description of Artificial Sequence: Synthetic oligonucleotide
uguaugguucuucugaauc

SEQ ID NO: 2113819 - RNA, 19 nt, Artificial Sequence
  Description of Artificial Sequence: Synthetic oligonucleotide
aauuaagagaugccguggu

SEQ ID NO: 2113820 - RNA, 19 nt, Artificial Sequence
  Description of Artificial Sequence: Synthetic oligonucleotide
ggugguaaagaccaggagg

SEQ ID NO: 2113821 - RNA, 19 nt, Artificial Sequence
  Description of Artificial Sequence: Synthetic oligonucleotide
aagaccaggaggcucagcu

SEQ ID NO: 2113822 - RNA, 19 nt, Artificial Sequence
  Description of Artificial Sequence: Synthetic oligonucleotide
agaauuaagagaugccgug

SEQ ID NO: 2113823 - RNA, 19 nt, Artificial Sequence
  Description of Artificial Sequence: Synthetic oligonucleotide
caaacuugauccuggagag

SEQ ID NO: 2113824 - RNA, 19 nt, Artificial Sequence
  Description of Artificial Sequence: Synthetic oligonucleotide
aguggcauaagaucuuguc

SEQ ID NO: 2113825 - RNA, 19 nt, Artificial Sequence
  Description of Artificial Sequence: Synthetic oligonucleotide
acugcacuagaucugguag

SEQ ID NO: 2113826 - RNA, 19 nt, Artificial Sequence
  Description of Artificial Sequence: Synthetic oligonucleotide
acaugguauacugugacuc

SEQ ID NO: 2113827 - RNA, 19 nt, Artificial Sequence
  Description of Artificial Sequence: Synthetic oligonucleotide
agaagcucaacuccaucac

SEQ ID NO: 2113828 - RNA, 19 nt, Artificial Sequence
  Description of Artificial Sequence: Synthetic oligonucleotide
aaugggaagguugcaagag

SEQ ID NO: 2113829 - RNA, 19 nt, Artificial Sequence
  Description of Artificial Sequence: Synthetic oligonucleotide
ucaaccacugucaucuucu

SEQ ID NO: 2113830 - RNA, 19 nt, Artificial Sequence
  Description of Artificial Sequence: Synthetic oligonucleotide
ugguguuuccuucauguga

SEQ ID NO: 2113831 - RNA, 19 nt, Artificial Sequence
  Description of Artificial Sequence: Synthetic oligonucleotide
cugaucaccagagaagugg

SEQ ID NO: 2113832 - RNA, 19 nt, Artificial Sequence
  Description of Artificial Sequence: Synthetic oligonucleotide
gaauuaagagaugccgugg

SEQ ID NO: 2113833 - RNA, 19 nt, Artificial Sequence
  Description of Artificial Sequence: Synthetic oligonucleotide
agcuccgaaagguugacag

SEQ ID NO: 2113834 - RNA, 19 nt, Artificial Sequence
  Description of Artificial Sequence: Synthetic oligonucleotide
ugcaggaaugggaagguug

SEQ ID NO: 2113835 - RNA, 19 nt, Artificial Sequence
  Description of Artificial Sequence: Synthetic oligonucleotide
aacuugauccuggagagga

SEQ ID NO: 2113836 - RNA, 19 nt, Artificial Sequence
  Description of Artificial Sequence: Synthetic oligonucleotide
uggagaggaaucuucgcag

SEQ ID NO: 2113837 - RNA, 19 nt, Artificial Sequence
  Description of Artificial Sequence: Synthetic oligonucleotide
uuaagagaugccgugguca

SEQ ID NO: 2113838 - RNA, 19 nt, Artificial Sequence
  Description of Artificial Sequence: Synthetic oligonucleotide
ugugucugcagaaggaagu

SEQ ID NO: 2113839 - RNA, 19 nt, Artificial Sequence
  Description of Artificial Sequence: Synthetic oligonucleotide
ucauugauuccaaccucgg

SEQ ID NO: 2113840 - RNA, 19 nt, Artificial Sequence
  Description of Artificial Sequence: Synthetic oligonucleotide
uugcugaucaccagagaag

SEQ ID NO: 2113841 - RNA, 19 nt, Artificial Sequence
  Description of Artificial Sequence: Synthetic oligonucleotide
agaucaugcugcaucacgc

SEQ ID NO: 2113842 - RNA, 19 nt, Artificial Sequence
  Description of Artificial Sequence: Synthetic oligonucleotide
caugugacaugguauacug

SEQ ID NO: 2113843 - RNA, 19 nt, Artificial Sequence
  Description of Artificial Sequence: Synthetic oligonucleotide
aaucuucgcagcuccccac

SEQ ID NO: 2113844 - RNA, 19 nt, Artificial Sequence
  Description of Artificial Sequence: Synthetic oligonucleotide
ugacaugguauacugugac

SEQ ID NO: 2113845 - RNA, 19 nt, Artificial Sequence
  Description of Artificial Sequence: Synthetic oligonucleotide
gaaagguugacagaucuuc

SEQ ID NO: 2113846 - RNA, 19 nt, Artificial Sequence
  Description of Artificial Sequence: Synthetic oligonucleotide
cacuagaucugguagggag

SEQ ID NO: 2113847 - RNA, 19 nt, Artificial Sequence
  Description of Artificial Sequence: Synthetic oligonucleotide
guaauugcagaagugguug

SEQ ID NO: 2113848 - RNA, 19 nt, Artificial Sequence
  Description of Artificial Sequence: Synthetic oligonucleotide
aaagguugacagaucuucg

SEQ ID NO: 2113849 - RNA, 19 nt, Artificial Sequence
  Description of Artificial Sequence: Synthetic oligonucleotide
agugaaauacccaggagug

SEQ ID NO: 2113850 - RNA, 19 nt, Artificial Sequence
  Description of Artificial Sequence: Synthetic oligonucleotide
agcuccugagaauuaagag

SEQ ID NO: 2113851 - RNA, 19 nt, Artificial Sequence
  Description of Artificial Sequence: Synthetic oligonucleotide
agugguugguguuuccuuc

SEQ ID NO: 2113852 - RNA, 19 nt, Artificial Sequence
  Description of Artificial Sequence: Synthetic oligonucleotide
uuuccagaguggcauaaga

SEQ ID NO: 2113853 - RNA, 19 nt, Artificial Sequence
  Description of Artificial Sequence: Synthetic oligonucleotide
ucagugaaauacccaggag

SEQ ID NO: 2113854 - RNA, 19 nt, Artificial Sequence
  Description of Artificial Sequence: Synthetic oligonucleotide
caaugucuggucaucagug

SEQ ID NO: 2113855 - RNA, 19 nt, Artificial Sequence
  Description of Artificial Sequence: Synthetic oligonucleotide
auuaagagaugccgugguc

SEQ ID NO: 2113856 - RNA, 19 nt, Artificial Sequence
  Description of Artificial Sequence: Synthetic oligonucleotide
guagggaggaucaacaaac

SEQ ID NO: 2113857 - RNA, 19 nt, Artificial Sequence
  Description of Artificial Sequence: Synthetic oligonucleotide
uuuaggaguggucuccuuc

SEQ ID NO: 2113858 - RNA, 19 nt, Artificial Sequence
  Description of Artificial Sequence: Synthetic oligonucleotide
ugcacuagaucugguaggg

SEQ ID NO: 2113859 - RNA, 19 nt, Artificial Sequence
  Description of Artificial Sequence: Synthetic oligonucleotide
agagaugccguggucagcg

SEQ ID NO: 2113860 - RNA, 19 nt, Artificial Sequence
  Description of Artificial Sequence: Synthetic oligonucleotide
gucauugauuccaaccucg

SEQ ID NO: 2113861 - RNA, 19 nt, Artificial Sequence
  Description of Artificial Sequence: Synthetic oligonucleotide
uaaucaagagacugcugca

SEQ ID NO: 2113862 - RNA, 19 nt, Artificial Sequence
  Description of Artificial Sequence: Synthetic oligonucleotide
gaggaaucuucgcagcucc

SEQ ID NO: 2113863 - RNA, 19 nt, Artificial Sequence
  Description of Artificial Sequence: Synthetic oligonucleotide
aaguaauugcagaaguggu

SEQ ID NO: 2113864 - RNA, 19 nt, Artificial Sequence
  Description of Artificial Sequence: Synthetic oligonucleotide
ugggaagguugcaagaggu

SEQ ID NO: 2113865 - RNA, 19 nt, Artificial Sequence
  Description of Artificial Sequence: Synthetic oligonucleotide
cugugacuccagaugaugg

SEQ ID NO: 2113866 - RNA, 19 nt, Artificial Sequence
  Description of Artificial Sequence: Synthetic oligonucleotide
guuguaaucaagagacugc

SEQ ID NO: 2113867 - RNA, 19 nt, Artificial Sequence
  Description of Artificial Sequence: Synthetic oligonucleotide
uugucugguuguaaucaag

SEQ ID NO: 2113868 - RNA, 19 nt, Artificial Sequence
  Description of Artificial Sequence: Synthetic oligonucleotide
aggaggauagacgggaagg

SEQ ID NO: 2113869 - RNA, 19 nt, Artificial Sequence
  Description of Artificial Sequence: Synthetic oligonucleotide
auucguggcuucuucgauc

SEQ ID NO: 2113870 - RNA, 19 nt, Artificial Sequence
  Description of Artificial Sequence: Synthetic oligonucleotide
cagaucaugcugcaucacg

SEQ ID NO: 2113871 - RNA, 19 nt, Artificial Sequence
  Description of Artificial Sequence: Synthetic oligonucleotide
caugguauacugugacucc

SEQ ID NO: 2113872 - RNA, 19 nt, Artificial Sequence
  Description of Artificial Sequence: Synthetic oligonucleotide
uccacugcacuagaucugg

SEQ ID NO: 2113873 - RNA, 19 nt, Artificial Sequence
  Description of Artificial Sequence: Synthetic oligonucleotide
ucaguuuccagaguggcau

SEQ ID NO: 2113874 - RNA, 19 nt, Artificial Sequence
  Description of Artificial Sequence: Synthetic oligonucleotide
augggaagguugcaagagg

SEQ ID NO: 2113875 - RNA, 19 nt, Artificial Sequence
  Description of Artificial Sequence: Synthetic oligonucleotide
cacaggagggacaggagcc

SEQ ID NO: 2113876 - RNA, 19 nt, Artificial Sequence
  Description of Artificial Sequence: Synthetic oligonucleotide
ucugaauccggguuccacu

SEQ ID NO: 2113877 - RNA, 19 nt, Artificial Sequence
  Description of Artificial Sequence: Synthetic oligonucleotide
caucgaugagcuccgaaag

SEQ ID NO: 2113878 - RNA, 19 nt, Artificial Sequence
  Description of Artificial Sequence: Synthetic oligonucleotide
agaaggaaguccaaugucu

SEQ ID NO: 2113879 - RNA, 19 nt, Artificial Sequence
  Description of Artificial Sequence: Synthetic oligonucleotide
agacgggaaggcugggugc

SEQ ID NO: 2113880 - RNA, 19 nt, Artificial Sequence
  Description of Artificial Sequence: Synthetic oligonucleotide
ugugacuccagaugaugga

SEQ ID NO: 2113881 - RNA, 19 nt, Artificial Sequence
  Description of Artificial Sequence: Synthetic oligonucleotide
gaugagcuccgaaagguug

SEQ ID NO: 2113882 - RNA, 19 nt, Artificial Sequence
  Description of Artificial Sequence: Synthetic oligonucleotide
agaucugguagggaggauc

SEQ ID NO: 2113883 - RNA, 19 nt, Artificial Sequence
  Description of Artificial Sequence: Synthetic oligonucleotide
uuguccccgaagcaggacc

SEQ ID NO: 2113884 - RNA, 19 nt, Artificial Sequence
  Description of Artificial Sequence: Synthetic oligonucleotide
ugucauugauuccaaccuc

SEQ ID NO: 2113885 - RNA, 19 nt, Artificial Sequence
  Description of Artificial Sequence: Synthetic oligonucleotide
ucaacuccaucacuguaaa

SEQ ID NO: 2113886 - RNA, 19 nt, Artificial Sequence
  Description of Artificial Sequence: Synthetic oligonucleotide
ugauuccaaccucggaagc

SEQ ID NO: 2113887 - RNA, 19 nt, Artificial Sequence
  Description of Artificial Sequence: Synthetic oligonucleotide
uucguggcuucuucgaucu

SEQ ID NO: 2113888 - RNA, 19 nt, Artificial Sequence
  Description of Artificial Sequence: Synthetic oligonucleotide
cugcacuagaucugguagg

SEQ ID NO: 2113889 - RNA, 19 nt, Artificial Sequence
  Description of Artificial Sequence: Synthetic oligonucleotide
ugguauacugugacuccag

SEQ ID NO: 2113890 - RNA, 19 nt, Artificial Sequence
  Description of Artificial Sequence: Synthetic oligonucleotide
agaugucauugauuccaac

SEQ ID NO: 2113891 - RNA, 19 nt, Artificial Sequence
  Description of Artificial Sequence: Synthetic oligonucleotide
gguuguaaucaagagacug

SEQ ID NO: 2113892 - RNA, 19 nt, Artificial Sequence
  Description of Artificial Sequence: Synthetic oligonucleotide
aggaguggucuccuucagc

SEQ ID NO: 2113893 - RNA, 19 nt, Artificial Sequence
  Description of Artificial Sequence: Synthetic oligonucleotide
aagguugcaagaggucccg

SEQ ID NO: 2113894 - RNA, 19 nt, Artificial Sequence
  Description of Artificial Sequence: Synthetic oligonucleotide
aucaugcugcaucacgcag

SEQ ID NO: 2113895 - RNA, 19 nt, Artificial Sequence
  Description of Artificial Sequence: Synthetic oligonucleotide
uucuggucugaaguaauug

SEQ ID NO: 2113896 - RNA, 19 nt, Artificial Sequence
  Description of Artificial Sequence: Synthetic oligonucleotide
acaggugguaaagaccagg

SEQ ID NO: 2113897 - RNA, 19 nt, Artificial Sequence
  Description of Artificial Sequence: Synthetic oligonucleotide
acuagaucugguagggagg

SEQ ID NO: 2113898 - RNA, 19 nt, Artificial Sequence
  Description of Artificial Sequence: Synthetic oligonucleotide
aggcggccaaagcacagcc

SEQ ID NO: 2113899 - RNA, 19 nt, Artificial Sequence
  Description of Artificial Sequence: Synthetic oligonucleotide
augccagugguguugguca

SEQ ID NO: 2113900 - RNA, 19 nt, Artificial Sequence
  Description of Artificial Sequence: Synthetic oligonucleotide
uccuucaugugacauggua

SEQ ID NO: 2113901 - RNA, 19 nt, Artificial Sequence
  Description of Artificial Sequence: Synthetic oligonucleotide
guugacagaucuucgcuuc

SEQ ID NO: 2113902 - RNA, 19 nt, Artificial Sequence
  Description of Artificial Sequence: Synthetic oligonucleotide
cucuguaugguucuucuga

SEQ ID NO: 2113903 - RNA, 19 nt, Artificial Sequence
  Description of Artificial Sequence: Synthetic oligonucleotide
ggaaugggaagguugcaag

SEQ ID NO: 2113904 - RNA, 19 nt, Artificial Sequence
  Description of Artificial Sequence: Synthetic oligonucleotide
gaagguugcaagagguccc

SEQ ID NO: 2113905 - RNA, 19 nt, Artificial Sequence
  Description of Artificial Sequence: Synthetic oligonucleotide
agguugacagaucuucgcu

SEQ ID NO: 2113906 - RNA, 19 nt, Artificial Sequence
  Description of Artificial Sequence: Synthetic oligonucleotide
ucagggcucaucccuguug

SEQ ID NO: 2113907 - RNA, 19 nt, Artificial Sequence
  Description of Artificial Sequence: Synthetic oligonucleotide
aaauacccaggagugggcu

SEQ ID NO: 2113908 - RNA, 19 nt, Artificial Sequence
  Description of Artificial Sequence: Synthetic oligonucleotide
gggaggaucaacaaacuug

SEQ ID NO: 2113909 - RNA, 19 nt, Artificial Sequence
  Description of Artificial Sequence: Synthetic oligonucleotide
ugucacuaugccaguggug

SEQ ID NO: 2113910 - RNA, 19 nt, Artificial Sequence
  Description of Artificial Sequence: Synthetic oligonucleotide
ucuucugaauccggguucc

SEQ ID NO: 2113911 - RNA, 19 nt, Artificial Sequence
  Description of Artificial Sequence: Synthetic oligonucleotide
ucaugugacaugguauacu

SEQ ID NO: 2113912 - RNA, 19 nt, Artificial Sequence
  Description of Artificial Sequence: Synthetic oligonucleotide
caucacgcagcuccaacag

SEQ ID NO: 2113913 - RNA, 19 nt, Artificial Sequence
  Description of Artificial Sequence: Synthetic oligonucleotide
uuccacugcacuagaucug

SEQ ID NO: 2113914 - RNA, 19 nt, Artificial Sequence
  Description of Artificial Sequence: Synthetic oligonucleotide
ugcgugacccucgaagucc

SEQ ID NO: 2113915 - RNA, 19 nt, Artificial Sequence
  Description of Artificial Sequence: Synthetic oligonucleotide
agaggaaucuucgcagcuc

SEQ ID NO: 2113916 - RNA, 19 nt, Artificial Sequence
  Description of Artificial Sequence: Synthetic oligonucleotide
ugcaagaggucccgcuaag

SEQ ID NO: 2113917 - RNA, 19 nt, Artificial Sequence
  Description of Artificial Sequence: Synthetic oligonucleotide
ggaagguugcaagaggucc

SEQ ID NO: 2113918 - RNA, 19 nt, Artificial Sequence
  Description of Artificial Sequence: Synthetic oligonucleotide
aggugguaaagaccaggag

SEQ ID NO: 2113919 - RNA, 19 nt, Artificial Sequence
  Description of Artificial Sequence: Synthetic oligonucleotide
aacaucgaugagcuccgaa

SEQ ID NO: 2113920 - RNA, 19 nt, Artificial Sequence
  Description of Artificial Sequence: Synthetic oligonucleotide
cuguaaacaucgaugagcu

SEQ ID NO: 2113921 - RNA, 19 nt, Artificial Sequence
  Description of Artificial Sequence: Synthetic oligonucleotide
guuccacugcacuagaucu

SEQ ID NO: 2113922 - RNA, 19 nt, Artificial Sequence
  Description of Artificial Sequence: Synthetic oligonucleotide
uagggaggaucaacaaacu

SEQ ID NO: 2113923 - RNA, 19 nt, Artificial Sequence
  Description of Artificial Sequence: Synthetic oligonucleotide
acuaugccagugguguugg

SEQ ID NO: 2113924 - RNA, 19 nt, Artificial Sequence
  Description of Artificial Sequence: Synthetic oligonucleotide
guaaagaccaggaggcuca

SEQ ID NO: 2113925 - RNA, 19 nt, Artificial Sequence
  Description of Artificial Sequence: Synthetic oligonucleotide
caaagcacagccagcgguc

SEQ ID NO: 2113926 - RNA, 19 nt, Artificial Sequence
  Description of Artificial Sequence: Synthetic oligonucleotide
cucgaaguccucuucucuc

SEQ ID NO: 2113927 - RNA, 19 nt, Artificial Sequence
  Description of Artificial Sequence: Synthetic oligonucleotide
ucaucccaacuccauccug

SEQ ID NO: 2113928 - RNA, 19 nt, Artificial Sequence
  Description of Artificial Sequence: Synthetic oligonucleotide
agaucuucgcuucucccau

SEQ ID NO: 2113929 - RNA, 19 nt, Artificial Sequence
  Description of Artificial Sequence: Synthetic oligonucleotide
gaaguccucuucucuccag

SEQ ID NO: 2113930 - RNA, 19 nt, Artificial Sequence
  Description of Artificial Sequence: Synthetic oligonucleotide
gugaaauacccaggagugg

SEQ ID NO: 2113931 - RNA, 19 nt, Artificial Sequence
  Description of Artificial Sequence: Synthetic oligonucleotide
ugaauccggguuccacugc

SEQ ID NO: 2113932 - RNA, 19 nt, Artificial Sequence
  Description of Artificial Sequence: Synthetic oligonucleotide
gaucaugcugcaucacgca

SEQ ID NO: 2113933 - RNA, 19 nt, Artificial Sequence
  Description of Artificial Sequence: Synthetic oligonucleotide
agguccaggaggauagacg

SEQ ID NO: 2113934 - RNA, 19 nt, Artificial Sequence
  Description of Artificial Sequence: Synthetic oligonucleotide
aggauagacgggaaggcug

SEQ ID NO: 2113935 - RNA, 19 nt, Artificial Sequence
  Description of Artificial Sequence: Synthetic oligonucleotide
gaaucuucgcagcucccca

SEQ ID NO: 2113936 - RNA, 19 nt, Artificial Sequence
  Description of Artificial Sequence: Synthetic oligonucleotide
ugcaucacgcagcuccaac

SEQ ID NO: 2113937 - RNA, 19 nt, Artificial Sequence
  Description of Artificial Sequence: Synthetic oligonucleotide
ugucugcagaaggaagucc

SEQ ID NO: 2113938 - RNA, 19 nt, Artificial Sequence
  Description of Artificial Sequence: Synthetic oligonucleotide
cucaacuccaucacuguaa

SEQ ID NO: 2113939 - RNA, 19 nt, Artificial Sequence
  Description of Artificial Sequence: Synthetic oligonucleotide
cucggaagcugucacuaug

SEQ ID NO: 2113940 - RNA, 19 nt, Artificial Sequence
  Description of Artificial Sequence: Synthetic oligonucleotide
uucugcccagaagaggaag

SEQ ID NO: 2113941 - RNA, 19 nt, Artificial Sequence
  Description of Artificial Sequence: Synthetic oligonucleotide
acgcagcuccaacaggcgg

SEQ ID NO: 2113942 - RNA, 19 nt, Artificial Sequence
  Description of Artificial Sequence: Synthetic oligonucleotide
cuggagaggaaucuucgca

SEQ ID NO: 2113943 - RNA, 19 nt, Artificial Sequence
  Description of Artificial Sequence: Synthetic oligonucleotide
gcugucacuaugccagugg

SEQ ID NO: 2113944 - RNA, 19 nt, Artificial Sequence
  Description of Artificial Sequence: Synthetic oligonucleotide
cagugaaauacccaggagu

SEQ ID NO: 2113945 - RNA, 19 nt, Artificial Sequence
  Description of Artificial Sequence: Synthetic oligonucleotide
ggaggaucaacaaacuuga

SEQ ID NO: 2113946 - RNA, 19 nt, Artificial Sequence
  Description of Artificial Sequence: Synthetic oligonucleotide
accgucaaccacugucauc

SEQ ID NO: 2113947 - RNA, 19 nt, Artificial Sequence
  Description of Artificial Sequence: Synthetic oligonucleotide
augucuggucaucagugaa

SEQ ID NO: 2113948 - RNA, 19 nt, Artificial Sequence
  Description of Artificial Sequence: Synthetic oligonucleotide
gaucugguagggaggauca

SEQ ID NO: 2113949 - RNA, 19 nt, Artificial Sequence
  Description of Artificial Sequence: Synthetic oligonucleotide
gaauccggguuccacugca

SEQ ID NO: 2113950 - RNA, 19 nt, Artificial Sequence
  Description of Artificial Sequence: Synthetic oligonucleotide
gagaauuaagagaugccgu

SEQ ID NO: 2113951 - RNA, 19 nt, Artificial Sequence
  Description of Artificial Sequence: Synthetic oligonucleotide
uaugccagugguguugguc

SEQ ID NO: 2113952 - RNA, 19 nt, Artificial Sequence
  Description of Artificial Sequence: Synthetic oligonucleotide
ucuuguccccgaagcagga

SEQ ID NO: 2113953 - RNA, 19 nt, Artificial Sequence
  Description of Artificial Sequence: Synthetic oligonucleotide
ugguuguaaucaagagacu

SEQ ID NO: 2113954 - RNA, 19 nt, Artificial Sequence
  Description of Artificial Sequence: Synthetic oligonucleotide
aaccucggaagcugucacu

SEQ ID NO: 2113955 - RNA, 19 nt, Artificial Sequence
  Description of Artificial Sequence: Synthetic oligonucleotide
ggucccgcuaagcagauca

SEQ ID NO: 2113956 - RNA, 19 nt, Artificial Sequence
  Description of Artificial Sequence: Synthetic oligonucleotide
cagagagcugacacaggag

SEQ ID NO: 2113957 - RNA, 19 nt, Artificial Sequence
  Description of Artificial Sequence: Synthetic oligonucleotide
aguaauugcagaagugguu

SEQ ID NO: 2113958 - RNA, 19 nt, Artificial Sequence
  Description of Artificial Sequence: Synthetic oligonucleotide
gguguuuccuucaugugac

SEQ ID NO: 2113959 - RNA, 19 nt, Artificial Sequence
  Description of Artificial Sequence: Synthetic oligonucleotide
agaguggcauaagaucuug

SEQ ID NO: 2113960 - RNA, 19 nt, Artificial Sequence
  Description of Artificial Sequence: Synthetic oligonucleotide
uggaccaucuggccuucca

SEQ ID NO: 2113961 - RNA, 19 nt, Artificial Sequence
  Description of Artificial Sequence: Synthetic oligonucleotide
cccgcuaagcagaucaugc

SEQ ID NO: 2113962 - RNA, 19 nt, Artificial Sequence
  Description of Artificial Sequence: Synthetic oligonucleotide
ggauagacgggaaggcugg

SEQ ID NO: 2113963 - RNA, 19 nt, Artificial Sequence
  Description of Artificial Sequence: Synthetic oligonucleotide
agcucaacuccaucacugu

SEQ ID NO: 2113964 - RNA, 19 nt, Artificial Sequence
  Description of Artificial Sequence: Synthetic oligonucleotide
caagagacugcugcaguug

SEQ ID NO: 2113965 - RNA, 19 nt, Artificial Sequence
  Description of Artificial Sequence: Synthetic oligonucleotide
uuccaugagcgcccagcgc

SEQ ID NO: 2113966 - RNA, 19 nt, Artificial Sequence
  Description of Artificial Sequence: Synthetic oligonucleotide
aauccggguuccacugcac

SEQ ID NO: 2113967 - RNA, 19 nt, Artificial Sequence
  Description of Artificial Sequence: Synthetic oligonucleotide
agcuugcugaucaccagag

SEQ ID NO: 2113968 - RNA, 19 nt, Artificial Sequence
  Description of Artificial Sequence: Synthetic oligonucleotide
gucacuaugccaguggugu

SEQ ID NO: 2113969 - RNA, 19 nt, Artificial Sequence
  Description of Artificial Sequence: Synthetic oligonucleotide
gaggcucagcuccugagaa

SEQ ID NO: 2113970 - RNA, 19 nt, Artificial Sequence
  Description of Artificial Sequence: Synthetic oligonucleotide
gccuugaaggcucaguuuc

SEQ ID NO: 2113971 - RNA, 19 nt, Artificial Sequence
  Description of Artificial Sequence: Synthetic oligonucleotide
augguauacugugacucca

SEQ ID NO: 2113972 - RNA, 19 nt, Artificial Sequence
  Description of Artificial Sequence: Synthetic oligonucleotide
agaggucccgcuaagcaga

SEQ ID NO: 2113973 - RNA, 19 nt, Artificial Sequence
  Description of Artificial Sequence: Synthetic oligonucleotide
ugguagggaggaucaacaa

SEQ ID NO: 2113974 - RNA, 19 nt, Artificial Sequence
  Description of Artificial Sequence: Synthetic oligonucleotide
ggagaggaaucuucgcagc

SEQ ID NO: 2113975 - RNA, 19 nt, Artificial Sequence
  Description of Artificial Sequence: Synthetic oligonucleotide
aagugcugcgugacccucg

SEQ ID NO: 2113976 - RNA, 19 nt, Artificial Sequence
  Description of Artificial Sequence: Synthetic oligonucleotide
gcggccaaagcacagccag

SEQ ID NO: 2113977 - RNA, 19 nt, Artificial Sequence
  Description of Artificial Sequence: Synthetic oligonucleotide
ggcauaagaucuugucccc

SEQ ID NO: 2113978 - RNA, 19 nt, Artificial Sequence
  Description of Artificial Sequence: Synthetic oligonucleotide
agcgguccccaagugcugc

SEQ ID NO: 2113979 - RNA, 19 nt, Artificial Sequence
  Description of Artificial Sequence: Synthetic oligonucleotide
uccgaaagguugacagauc

SEQ ID NO: 2113980 - RNA, 19 nt, Artificial Sequence
  Description of Artificial Sequence: Synthetic oligonucleotide
uguaaacaucgaugagcuc

SEQ ID NO: 2113981 - RNA, 19 nt, Artificial Sequence
  Description of Artificial Sequence: Synthetic oligonucleotide
cacgcagcuccaacaggcg

SEQ ID NO: 2113982 - RNA, 19 nt, Artificial Sequence
  Description of Artificial Sequence: Synthetic oligonucleotide
gaagaggaagacagacuuc

SEQ ID NO: 2113983 - RNA, 19 nt, Artificial Sequence
  Description of Artificial Sequence: Synthetic oligonucleotide
caccagagaaguggggugc

SEQ ID NO: 2113984 - RNA, 19 nt, Artificial Sequence
  Description of Artificial Sequence: Synthetic oligonucleotide
gaucaacaaacuugauccu

SEQ ID NO: 2113985 - RNA, 19 nt, Artificial Sequence
  Description of Artificial Sequence: Synthetic oligonucleotide
gaaguggggugcccaucag

SEQ ID NO: 2113986 - RNA, 19 nt, Artificial Sequence
  Description of Artificial Sequence: Synthetic oligonucleotide
aucccaacuccauccugug

SEQ ID NO: 2113987 - RNA, 19 nt, Artificial Sequence
  Description of Artificial Sequence: Synthetic oligonucleotide
cuaagcagaucaugcugca

SEQ ID NO: 2113988 - RNA, 19 nt, Artificial Sequence
  Description of Artificial Sequence: Synthetic oligonucleotide
gaguggucuccuucagcug

SEQ ID NO: 2113989 - RNA, 19 nt, Artificial Sequence
  Description of Artificial Sequence: Synthetic oligonucleotide
caaccucggaagcugucac

SEQ ID NO: 2113990 - RNA, 19 nt, Artificial Sequence
  Description of Artificial Sequence: Synthetic oligonucleotide
gauagacgggaaggcuggg

SEQ ID NO: 2113991 - RNA, 19 nt, Artificial Sequence
  Description of Artificial Sequence: Synthetic oligonucleotide
uuccaaccucggaagcugu

SEQ ID NO: 2113992 - RNA, 19 nt, Artificial Sequence
  Description of Artificial Sequence: Synthetic oligonucleotide
cauccugugucugcagaag

SEQ ID NO: 2113993 - RNA, 19 nt, Artificial Sequence
  Description of Artificial Sequence: Synthetic oligonucleotide
uacugugacuccagaugau

SEQ ID NO: 2113994 - RNA, 19 nt, Artificial Sequence
  Description of Artificial Sequence: Synthetic oligonucleotide
ggaagacagacuucugguc

SEQ ID NO: 2113995 - RNA, 19 nt, Artificial Sequence
  Description of Artificial Sequence: Synthetic oligonucleotide
agacugcugcaguuggagu

SEQ ID NO: 2113996 - RNA, 19 nt, Artificial Sequence
  Description of Artificial Sequence: Synthetic oligonucleotide
cuagaucugguagggagga

SEQ ID NO: 2113997 - RNA, 19 nt, Artificial Sequence
  Description of Artificial Sequence: Synthetic oligonucleotide
agggguuagugcaggaaug

SEQ ID NO: 2113998 - RNA, 19 nt, Artificial Sequence
  Description of Artificial Sequence: Synthetic oligonucleotide
augguucuucugaauccgg

SEQ ID NO: 2113999 - RNA, 19 nt, Artificial Sequence
  Description of Artificial Sequence: Synthetic oligonucleotide
ugccagugguguuggucag

SEQ ID NO: 2114000 - RNA, 19 nt, Artificial Sequence
  Description of Artificial Sequence: Synthetic oligonucleotide
caccaacuggagaagcuca

SEQ ID NO: 2114001 - RNA, 19 nt, Artificial Sequence
  Description of Artificial Sequence: Synthetic oligonucleotide
aggaaugggaagguugcaa

SEQ ID NO: 2114002 - RNA, 19 nt, Artificial Sequence
  Description of Artificial Sequence: Synthetic oligonucleotide
ucccgcuaagcagaucaug

SEQ ID NO: 2114003 - RNA, 19 nt, Artificial Sequence
  Description of Artificial Sequence: Synthetic oligonucleotide
aggaaucuucgcagcuccc

SEQ ID NO: 2114004 - RNA, 19 nt, Artificial Sequence
  Description of Artificial Sequence: Synthetic oligonucleotide
gccuucaccaacuggagaa

SEQ ID NO: 2114005 - RNA, 19 nt, Artificial Sequence
  Description of Artificial Sequence: Synthetic oligonucleotide
cauugauuccaaccucgga

SEQ ID NO: 2114006 - RNA, 19 nt, Artificial Sequence
  Description of Artificial Sequence: Synthetic oligonucleotide
gacaugguauacugugacu

SEQ ID NO: 2114007 - RNA, 19 nt, Artificial Sequence
  Description of Artificial Sequence: Synthetic oligonucleotide
agagaaguggggugcccau

SEQ ID NO: 2114008 - RNA, 19 nt, Artificial Sequence
  Description of Artificial Sequence: Synthetic oligonucleotide
ucccaacuccauccugugu

SEQ ID NO: 2114009 - RNA, 19 nt, Artificial Sequence
  Description of Artificial Sequence: Synthetic oligonucleotide
cucaguuuccagaguggca

SEQ ID NO: 2114010 - RNA, 19 nt, Artificial Sequence
  Description of Artificial Sequence: Synthetic oligonucleotide
ggaggauagacgggaaggc

SEQ ID NO: 2114011 - RNA, 19 nt, Artificial Sequence
  Description of Artificial Sequence: Synthetic oligonucleotide
guuuccagaguggcauaag

SEQ ID NO: 2114012 - RNA, 19 nt, Artificial Sequence
  Description of Artificial Sequence: Synthetic oligonucleotide
gguuagugcaggaauggga

SEQ ID NO: 2114013 - RNA, 19 nt, Artificial Sequence
  Description of Artificial Sequence: Synthetic oligonucleotide
ggaguggucuccuucagcu

SEQ ID NO: 2114014 - RNA, 19 nt, Artificial Sequence
  Description of Artificial Sequence: Synthetic oligonucleotide
agugcugcgugacccucga

SEQ ID NO: 2114015 - RNA, 19 nt, Artificial Sequence
  Description of Artificial Sequence: Synthetic oligonucleotide
cuugucugguuguaaucaa

SEQ ID NO: 2114016 - RNA, 19 nt, Artificial Sequence
  Description of Artificial Sequence: Synthetic oligonucleotide
uccggguuccacugcacua

SEQ ID NO: 2114017 - RNA, 19 nt, Artificial Sequence
  Description of Artificial Sequence: Synthetic oligonucleotide
ggaaucuucgcagcucccc

SEQ ID NO: 2114018 - RNA, 19 nt, Artificial Sequence
  Description of Artificial Sequence: Synthetic oligonucleotide
uggagucuggugccuucac

SEQ ID NO: 2114019 - RNA, 19 nt, Artificial Sequence
  Description of Artificial Sequence: Synthetic oligonucleotide
aguuuccagaguggcauaa

SEQ ID NO: 2114020 - RNA, 19 nt, Artificial Sequence
  Description of Artificial Sequence: Synthetic oligonucleotide
ugacagaucuucgcuucuc

SEQ ID NO: 2114021 - RNA, 19 nt, Artificial Sequence
  Description of Artificial Sequence: Synthetic oligonucleotide
gagaggaaucuucgcagcu

SEQ ID NO: 2114022 - RNA, 19 nt, Artificial Sequence
  Description of Artificial Sequence: Synthetic oligonucleotide
augagcuccgaaagguuga

SEQ ID NO: 2114023 - RNA, 19 nt, Artificial Sequence
  Description of Artificial Sequence: Synthetic oligonucleotide
uuggagucuggugccuuca

SEQ ID NO: 2114024 - RNA, 19 nt, Artificial Sequence
  Description of Artificial Sequence: Synthetic oligonucleotide
agcuccaacaggcggccaa

SEQ ID NO: 2114025 - RNA, 19 nt, Artificial Sequence
  Description of Artificial Sequence: Synthetic oligonucleotide
uccagaugauggagccaga

SEQ ID NO: 2114026 - RNA, 19 nt, Artificial Sequence
  Description of Artificial Sequence: Synthetic oligonucleotide
ugagcuccgaaagguugac

SEQ ID NO: 2114027 - RNA, 19 nt, Artificial Sequence
  Description of Artificial Sequence: Synthetic oligonucleotide
guauacugugacuccagau

SEQ ID NO: 2114028 - RNA, 19 nt, Artificial Sequence
  Description of Artificial Sequence: Synthetic oligonucleotide
uuuuaggaguggucuccuu

SEQ ID NO: 2114029 - RNA, 19 nt, Artificial Sequence
  Description of Artificial Sequence: Synthetic oligonucleotide
cagaguucccagggaagag

SEQ ID NO: 2114030 - RNA, 19 nt, Artificial Sequence
  Description of Artificial Sequence: Synthetic oligonucleotide
uccaaccucggaagcuguc

SEQ ID NO: 2114031 - RNA, 19 nt, Artificial Sequence
  Description of Artificial Sequence: Synthetic oligonucleotide
cuggugacauaaaaggcau

SEQ ID NO: 2114032 - RNA, 19 nt, Artificial Sequence
  Description of Artificial Sequence: Synthetic oligonucleotide
gugacaugguauacuguga

SEQ ID NO: 2114033 - RNA, 19 nt, Artificial Sequence
  Description of Artificial Sequence: Synthetic oligonucleotide
ccuugaaggcucaguuucc

SEQ ID NO: 2114034 - RNA, 19 nt, Artificial Sequence
  Description of Artificial Sequence: Synthetic oligonucleotide
auagacgggaaggcugggu

SEQ ID NO: 2114035 - RNA, 19 nt, Artificial Sequence
  Description of Artificial Sequence: Synthetic oligonucleotide
agguugcaagaggucccgc

SEQ ID NO: 2114036 - RNA, 19 nt, Artificial Sequence
  Description of Artificial Sequence: Synthetic oligonucleotide
caucccaacuccauccugu

SEQ ID NO: 2114037 - RNA, 19 nt, Artificial Sequence
  Description of Artificial Sequence: Synthetic oligonucleotide
gaagcaggaccaggccuug

SEQ ID NO: 2114038 - RNA, 19 nt, Artificial Sequence
  Description of Artificial Sequence: Synthetic oligonucleotide
ugacccucgaaguccucuu

SEQ ID NO: 2114039 - RNA, 19 nt, Artificial Sequence
  Description of Artificial Sequence: Synthetic oligonucleotide
gaagugguugguguuuccu

SEQ ID NO: 2114040 - RNA, 19 nt, Artificial Sequence
  Description of Artificial Sequence: Synthetic oligonucleotide
gacgggaaggcugggugca

SEQ ID NO: 2114041 - RNA, 19 nt, Artificial Sequence
  Description of Artificial Sequence: Synthetic oligonucleotide
uccccaagugcugcgugac

SEQ ID NO: 2114042 - RNA, 19 nt, Artificial Sequence
  Description of Artificial Sequence: Synthetic oligonucleotide
gggcucaucccuguugucc

SEQ ID NO: 2114043 - RNA, 19 nt, Artificial Sequence
  Description of Artificial Sequence: Synthetic oligonucleotide
accucggaagcugucacua

SEQ ID NO: 2114044 - RNA, 19 nt, Artificial Sequence
  Description of Artificial Sequence: Synthetic oligonucleotide
gugucugcagaaggaaguc

SEQ ID NO: 2114045 - RNA, 19 nt, Artificial Sequence
  Description of Artificial Sequence: Synthetic oligonucleotide
cugcgugacccucgaaguc

SEQ ID NO: 2114046 - RNA, 19 nt, Artificial Sequence
  Description of Artificial Sequence: Synthetic oligonucleotide
aggagugggcuggcugcgc

SEQ ID NO: 2114047 - RNA, 19 nt, Artificial Sequence
  Description of Artificial Sequence: Synthetic oligonucleotide
agaggaagacagacuucug

SEQ ID NO: 2114048 - RNA, 19 nt, Artificial Sequence
  Description of Artificial Sequence: Synthetic oligonucleotide
cccaagugcugcgugaccc

SEQ ID NO: 2114049 - RNA, 19 nt, Artificial Sequence
  Description of Artificial Sequence: Synthetic oligonucleotide
cagguccaggaggauagac

SEQ ID NO: 2114050 - RNA, 19 nt, Artificial Sequence
  Description of Artificial Sequence: Synthetic oligonucleotide
gagaugccguggucagcgc

SEQ ID NO: 2114051 - RNA, 19 nt, Artificial Sequence
  Description of Artificial Sequence: Synthetic oligonucleotide
agcugucacuaugccagug

SEQ ID NO: 2114052 - RNA, 19 nt, Artificial Sequence
  Description of Artificial Sequence: Synthetic oligonucleotide
ucacuaugccagugguguu

SEQ ID NO: 2114053 - RNA, 19 nt, Artificial Sequence
  Description of Artificial Sequence: Synthetic oligonucleotide
gcaucacgcagcuccaaca

SEQ ID NO: 2114054 - RNA, 19 nt, Artificial Sequence
  Description of Artificial Sequence: Synthetic oligonucleotide
cagaugucauugauuccaa

SEQ ID NO: 2114055 - RNA, 19 nt, Artificial Sequence
  Description of Artificial Sequence: Synthetic oligonucleotide
gaggauagacgggaaggcu

SEQ ID NO: 2114056 - RNA, 19 nt, Artificial Sequence
  Description of Artificial Sequence: Synthetic oligonucleotide
aaacaucgaugagcuccga

SEQ ID NO: 2114057 - RNA, 19 nt, Artificial Sequence
  Description of Artificial Sequence: Synthetic oligonucleotide
gccaaagcacagccagcgg

SEQ ID NO: 2114058 - RNA, 19 nt, Artificial Sequence
  Description of Artificial Sequence: Synthetic oligonucleotide
acaggcggccaaagcacag

SEQ ID NO: 2114059 - RNA, 19 nt, Artificial Sequence
  Description of Artificial Sequence: Synthetic oligonucleotide
caucacuguaaacaucgau

SEQ ID NO: 2114060 - RNA, 19 nt, Artificial Sequence
  Description of Artificial Sequence: Synthetic oligonucleotide
cacugcacuagaucuggua

SEQ ID NO: 2114061 - RNA, 19 nt, Artificial Sequence
  Description of Artificial Sequence: Synthetic oligonucleotide
ugagcgcccagcgcaggcu

SEQ ID NO: 2114062 - RNA, 19 nt, Artificial Sequence
  Description of Artificial Sequence: Synthetic oligonucleotide
caggcggccaaagcacagc

SEQ ID NO: 2114063 - RNA, 19 nt, Artificial Sequence
  Description of Artificial Sequence: Synthetic oligonucleotide
gagaaguggggugcccauc

SEQ ID NO: 2114064 - RNA, 19 nt, Artificial Sequence
  Description of Artificial Sequence: Synthetic oligonucleotide
ccuugucugguuguaauca

SEQ ID NO: 2114065 - RNA, 19 nt, Artificial Sequence
  Description of Artificial Sequence: Synthetic oligonucleotide
gguguuggucagguccagg

SEQ ID NO: 2114066 - RNA, 19 nt, Artificial Sequence
  Description of Artificial Sequence: Synthetic oligonucleotide
gcucuguaugguucuucug

SEQ ID NO: 2114067 - RNA, 19 nt, Artificial Sequence
  Description of Artificial Sequence: Synthetic oligonucleotide
cuccgaaagguugacagau

SEQ ID NO: 2114068 - RNA, 19 nt, Artificial Sequence
  Description of Artificial Sequence: Synthetic oligonucleotide
augccguggucagcgcuuc

SEQ ID NO: 2114069 - RNA, 19 nt, Artificial Sequence
  Description of Artificial Sequence: Synthetic oligonucleotide
guccccaagugcugcguga

SEQ ID NO: 2114070 - RNA, 19 nt, Artificial Sequence
  Description of Artificial Sequence: Synthetic oligonucleotide
caugagcgcccagcgcagg

SEQ ID NO: 2114071 - RNA, 19 nt, Artificial Sequence
  Description of Artificial Sequence: Synthetic oligonucleotide
cuuguccccgaagcaggac

SEQ ID NO: 2114072 - RNA, 19 nt, Artificial Sequence
  Description of Artificial Sequence: Synthetic oligonucleotide
guguuuccuucaugugaca

SEQ ID NO: 2114073 - RNA, 19 nt, Artificial Sequence
  Description of Artificial Sequence: Synthetic oligonucleotide
ucagguccaggaggauaga

SEQ ID NO: 2114074 - RNA, 19 nt, Artificial Sequence
  Description of Artificial Sequence: Synthetic oligonucleotide
ucguggcuucuucgaucug

SEQ ID NO: 2114075 - RNA, 19 nt, Artificial Sequence
  Description of Artificial Sequence: Synthetic oligonucleotide
uccccacggccaguuuuag

SEQ ID NO: 2114076 - RNA, 19 nt, Artificial Sequence
  Description of Artificial Sequence: Synthetic oligonucleotide
gcaagaggucccgcuaagc

SEQ ID NO: 2114077 - RNA, 19 nt, Artificial Sequence
  Description of Artificial Sequence: Synthetic oligonucleotide
gcucagcuugcugaucacc

SEQ ID NO: 2114078 - RNA, 19 nt, Artificial Sequence
  Description of Artificial Sequence: Synthetic oligonucleotide
ccaguuuuaggaguggucu

SEQ ID NO: 2114079 - RNA, 19 nt, Artificial Sequence
  Description of Artificial Sequence: Synthetic oligonucleotide
gguccccaagugcugcgug

SEQ ID NO: 2114080 - RNA, 19 nt, Artificial Sequence
  Description of Artificial Sequence: Synthetic oligonucleotide
ccgucaaccacugucaucu

SEQ ID NO: 2114081 - RNA, 19 nt, Artificial Sequence
  Description of Artificial Sequence: Synthetic oligonucleotide
gcuccgaaagguugacaga

SEQ ID NO: 2114082 - RNA, 19 nt, Artificial Sequence
  Description of Artificial Sequence: Synthetic oligonucleotide
cuucugcccagaagaggaa

SEQ ID NO: 2114083 - RNA, 19 nt, Artificial Sequence
  Description of Artificial Sequence: Synthetic oligonucleotide
caggagguacaggugguaa

SEQ ID NO: 2114084 - RNA, 19 nt, Artificial Sequence
  Description of Artificial Sequence: Synthetic oligonucleotide
cagggcucaucccuguugu

SEQ ID NO: 2114085 - RNA, 19 nt, Artificial Sequence
  Description of Artificial Sequence: Synthetic oligonucleotide
acuugauccuggagaggaa

SEQ ID NO: 2114086 - RNA, 19 nt, Artificial Sequence
  Description of Artificial Sequence: Synthetic oligonucleotide
cacggccaguuuuaggagu

SEQ ID NO: 2114087 - RNA, 19 nt, Artificial Sequence
  Description of Artificial Sequence: Synthetic oligonucleotide
ccgaaagguugacagaucu

SEQ ID NO: 2114088 - RNA, 19 nt, Artificial Sequence
  Description of Artificial Sequence: Synthetic oligonucleotide
ccuucaugugacaugguau

SEQ ID NO: 2114089 - RNA, 19 nt, Artificial Sequence
  Description of Artificial Sequence: Synthetic oligonucleotide
gcugcgugacccucgaagu

SEQ ID NO: 2114090 - RNA, 19 nt, Artificial Sequence
  Description of Artificial Sequence: Synthetic oligonucleotide
cagcgguccccaagugcug

SEQ ID NO: 2114091 - RNA, 19 nt, Artificial Sequence
  Description of Artificial Sequence: Synthetic oligonucleotide
gagcuccgaaagguugaca

SEQ ID NO: 2114092 - RNA, 19 nt, Artificial Sequence
  Description of Artificial Sequence: Synthetic oligonucleotide
ccguggucagcgcuucugc

SEQ ID NO: 2114093 - RNA, 19 nt, Artificial Sequence
  Description of Artificial Sequence: Synthetic oligonucleotide
gcagcuccaacaggcggcc

SEQ ID NO: 2114094 - RNA, 19 nt, Artificial Sequence
  Description of Artificial Sequence: Synthetic oligonucleotide
ccaugagcgcccagcgcag

SEQ ID NO: 2114095 - RNA, 19 nt, Artificial Sequence
  Description of Artificial Sequence: Synthetic oligonucleotide
gggaagguugcaagagguc

SEQ ID NO: 2114096 - RNA, 19 nt, Artificial Sequence
  Description of Artificial Sequence: Synthetic oligonucleotide
cuucuggucugaaguaauu

SEQ ID NO: 2114097 - RNA, 19 nt, Artificial Sequence
  Description of Artificial Sequence: Synthetic oligonucleotide
cauucguggcuucuucgau

SEQ ID NO: 2114098 - RNA, 19 nt, Artificial Sequence
  Description of Artificial Sequence: Synthetic oligonucleotide
ugccguggucagcgcuucu

SEQ ID NO: 2114099 - RNA, 19 nt, Artificial Sequence
  Description of Artificial Sequence: Synthetic oligonucleotide
gacagacuucuggucugaa

SEQ ID NO: 2114100 - RNA, 19 nt, Artificial Sequence
  Description of Artificial Sequence: Synthetic oligonucleotide
cuccccacggccaguuuua

SEQ ID NO: 2114101 - RNA, 19 nt, Artificial Sequence
  Description of Artificial Sequence: Synthetic oligonucleotide
gcucaacuccaucacugua

SEQ ID NO: 2114102 - RNA, 19 nt, Artificial Sequence
  Description of Artificial Sequence: Synthetic oligonucleotide
gaguggcauaagaucuugu

SEQ ID NO: 2114103 - RNA, 19 nt, Artificial Sequence
  Description of Artificial Sequence: Synthetic oligonucleotide
ccaaagcacagccagcggu

SEQ ID NO: 2114104 - RNA, 19 nt, Artificial Sequence
  Description of Artificial Sequence: Synthetic oligonucleotide
gugacccucgaaguccucu

SEQ ID NO: 2114105 - RNA, 19 nt, Artificial Sequence
  Description of Artificial Sequence: Synthetic oligonucleotide
ccaaugucuggucaucagu

SEQ ID NO: 2114106 - RNA, 19 nt, Artificial Sequence
  Description of Artificial Sequence: Synthetic oligonucleotide
aggucccgcuaagcagauc

SEQ ID NO: 2114107 - RNA, 19 nt, Artificial Sequence
  Description of Artificial Sequence: Synthetic oligonucleotide
caguuuccagaguggcaua

SEQ ID NO: 2114108 - RNA, 19 nt, Artificial Sequence
  Description of Artificial Sequence: Synthetic oligonucleotide
caucagggcucaucccugu

SEQ ID NO: 2114109 - RNA, 19 nt, Artificial Sequence
  Description of Artificial Sequence: Synthetic oligonucleotide
uggcugcgcaggccuugaa

SEQ ID NO: 2114110 - RNA, 19 nt, Artificial Sequence
  Description of Artificial Sequence: Synthetic oligonucleotide
gcgcuucugcccagaagag

SEQ ID NO: 2114111 - RNA, 19 nt, Artificial Sequence
  Description of Artificial Sequence: Synthetic oligonucleotide
gccguggucagcgcuucug

SEQ ID NO: 2114112 - RNA, 19 nt, Artificial Sequence
  Description of Artificial Sequence: Synthetic oligonucleotide
augcugcaucacgcagcuc

SEQ ID NO: 2114113 - RNA, 19 nt, Artificial Sequence
  Description of Artificial Sequence: Synthetic oligonucleotide
gaucuucgcuucucccauu

SEQ ID NO: 2114114 - RNA, 19 nt, Artificial Sequence
  Description of Artificial Sequence: Synthetic oligonucleotide
ccaaccucggaagcuguca

SEQ ID NO: 2114115 - RNA, 19 nt, Artificial Sequence
  Description of Artificial Sequence: Synthetic oligonucleotide
gcugggugcaggagguaca

SEQ ID NO: 2114116 - RNA, 19 nt, Artificial Sequence
  Description of Artificial Sequence: Synthetic oligonucleotide
gaggaucaacaaacuugau

SEQ ID NO: 2114117 - RNA, 19 nt, Artificial Sequence
  Description of Artificial Sequence: Synthetic oligonucleotide
gucagcgcuucugcccaga

SEQ ID NO: 2114118 - RNA, 19 nt, Artificial Sequence
  Description of Artificial Sequence: Synthetic oligonucleotide
cuguuguccuggugacaua

SEQ ID NO: 2114119 - RNA, 19 nt, Artificial Sequence
  Description of Artificial Sequence: Synthetic oligonucleotide
ccuguuguccuggugacau

SEQ ID NO: 2114120 - RNA, 19 nt, Artificial Sequence
  Description of Artificial Sequence: Synthetic oligonucleotide
auggagccagaggcaccgu

SEQ ID NO: 2114121 - RNA, 19 nt, Artificial Sequence
  Description of Artificial Sequence: Synthetic oligonucleotide
cggccaaagcacagccagc

SEQ ID NO: 2114122 - RNA, 19 nt, Artificial Sequence
  Description of Artificial Sequence: Synthetic oligonucleotide
agcgcccagcgcaggcuca

SEQ ID NO: 2114123 - RNA, 19 nt, Artificial Sequence
  Description of Artificial Sequence: Synthetic oligonucleotide
cuggcugcgcaggccuuga

SEQ ID NO: 2114124 - RNA, 19 nt, Artificial Sequence
  Description of Artificial Sequence: Synthetic oligonucleotide
ggccuugaaggcucaguuu

SEQ ID NO: 2114125 - RNA, 19 nt, Artificial Sequence
  Description of Artificial Sequence: Synthetic oligonucleotide
ggcggccaaagcacagcca

SEQ ID NO: 2114126 - RNA, 19 nt, Artificial Sequence
  Description of Artificial Sequence: Synthetic oligonucleotide
ccgcuaagcagaucaugcu

SEQ ID NO: 2114127 - RNA, 19 nt, Artificial Sequence
  Description of Artificial Sequence: Synthetic oligonucleotide
caccgucaaccacugucau

SEQ ID NO: 2114128 - RNA, 19 nt, Artificial Sequence
  Description of Artificial Sequence: Synthetic oligonucleotide
cgcagcuccccacggccag

SEQ ID NO: 2114129 - RNA, 19 nt, Artificial Sequence
  Description of Artificial Sequence: Synthetic oligonucleotide
gaggucccgcuaagcagau

SEQ ID NO: 2114130 - RNA, 19 nt, Artificial Sequence
  Description of Artificial Sequence: Synthetic oligonucleotide
cuaugccagugguguuggu

SEQ ID NO: 2114131 - RNA, 19 nt, Artificial Sequence
  Description of Artificial Sequence: Synthetic oligonucleotide
gcuccccacggccaguuuu

SEQ ID NO: 2114132 - RNA, 19 nt, Artificial Sequence
  Description of Artificial Sequence: Synthetic oligonucleotide
ccgcucuguaugguucuuc

SEQ ID NO: 2114133 - RNA, 19 nt, Artificial Sequence
  Description of Artificial Sequence: Synthetic oligonucleotide
cuucucccauucguggcuu

SEQ ID NO: 2114134 - RNA, 19 nt, Artificial Sequence
  Description of Artificial Sequence: Synthetic oligonucleotide
caguuggagucuggugccu

SEQ ID NO: 2114135 - RNA, 19 nt, Artificial Sequence
  Description of Artificial Sequence: Synthetic oligonucleotide
ccaagugcugcgugacccu

SEQ ID NO: 2114136 - RNA, 19 nt, Artificial Sequence
  Description of Artificial Sequence: Synthetic oligonucleotide
gucccgcuaagcagaucau

SEQ ID NO: 2114137 - RNA, 19 nt, Artificial Sequence
  Description of Artificial Sequence: Synthetic oligonucleotide
gcgugacccucgaaguccu

SEQ ID NO: 2114138 - RNA, 19 nt, Artificial Sequence
  Description of Artificial Sequence: Synthetic oligonucleotide
ggccuuccaugagcgccca

SEQ ID NO: 2114139 - RNA, 19 nt, Artificial Sequence
  Description of Artificial Sequence: Synthetic oligonucleotide
cagcuccaacaggcggcca

SEQ ID NO: 2114140 - RNA, 19 nt, Artificial Sequence
  Description of Artificial Sequence: Synthetic oligonucleotide
cgaaagguugacagaucuu

SEQ ID NO: 2114141 - RNA, 19 nt, Artificial Sequence
  Description of Artificial Sequence: Synthetic oligonucleotide
cccuguuguccuggugaca

SEQ ID NO: 2114142 - RNA, 19 nt, Artificial Sequence
  Description of Artificial Sequence: Synthetic oligonucleotide
cggguuccacugcacuaga

SEQ ID NO: 2114143 - RNA, 19 nt, Artificial Sequence
  Description of Artificial Sequence: Synthetic oligonucleotide
cgugacccucgaaguccuc

SEQ ID NO: 2114144 - RNA, 19 nt, Artificial Sequence
  Description of Artificial Sequence: Synthetic oligonucleotide
cgaugagcuccgaaagguu

SEQ ID NO: 2114145 - RNA, 19 nt, Artificial Sequence
  Description of Artificial Sequence: Synthetic oligonucleotide
ccucggaagcugucacuau

SEQ ID NO: 2114146 - RNA, 19 nt, Artificial Sequence
  Description of Artificial Sequence: Synthetic oligonucleotide
ccacugcacuagaucuggu

SEQ ID NO: 2114147 - RNA, 19 nt, Artificial Sequence
  Description of Artificial Sequence: Synthetic oligonucleotide
cgcaggccuugaaggcuca

SEQ ID NO: 2114148 - RNA, 19 nt, Artificial Sequence
  Description of Artificial Sequence: Synthetic oligonucleotide
cagcuccccacggccaguu

SEQ ID NO: 2114149 - RNA, 19 nt, Artificial Sequence
  Description of Artificial Sequence: Synthetic oligonucleotide
ggugcccaucagggcucau

SEQ ID NO: 2114150 - RNA, 19 nt, Artificial Sequence
  Description of Artificial Sequence: Synthetic oligonucleotide
aaauauguaaaccagaucu

SEQ ID NO: 2114151 - RNA, 19 nt, Artificial Sequence
  Description of Artificial Sequence: Synthetic oligonucleotide
ucuuuagcuagacugaggg

SEQ ID NO: 2114152 - RNA, 19 nt, Artificial Sequence
  Description of Artificial Sequence: Synthetic oligonucleotide
ugaaguuaggaucugaaug

SEQ ID NO: 2114153 - RNA, 19 nt, Artificial Sequence
  Description of Artificial Sequence: Synthetic oligonucleotide
aaucaagugcuucugucgc

SEQ ID NO: 2114154 - RNA, 19 nt, Artificial Sequence
  Description of Artificial Sequence: Synthetic oligonucleotide
aaauuguuugcccaguaag

SEQ ID NO: 2114155 - RNA, 19 nt, Artificial Sequence
  Description of Artificial Sequence: Synthetic oligonucleotide
uguacaaugugucugccag

SEQ ID NO: 2114156 - RNA, 19 nt, Artificial Sequence
  Description of Artificial Sequence: Synthetic oligonucleotide
uagauuacguucauggugc

SEQ ID NO: 2114157 - RNA, 19 nt, Artificial Sequence
  Description of Artificial Sequence: Synthetic oligonucleotide
aauucaaucaagugcuucu

SEQ ID NO: 2114158 - RNA, 19 nt, Artificial Sequence
  Description of Artificial Sequence: Synthetic oligonucleotide
aguguagcagaauucaauc

SEQ ID NO: 2114159 - RNA, 19 nt, Artificial Sequence
  Description of Artificial Sequence: Synthetic oligonucleotide
aggccguacacauucaugc

SEQ ID NO: 2114160 - RNA, 19 nt, Artificial Sequence
  Description of Artificial Sequence: Synthetic oligonucleotide
auuacguucauggugcagc

SEQ ID NO: 2114161 - RNA, 19 nt, Artificial Sequence
  Description of Artificial Sequence: Synthetic oligonucleotide
cauaucuucucauggaugc

SEQ ID NO: 2114162 - RNA, 19 nt, Artificial Sequence
  Description of Artificial Sequence: Synthetic oligonucleotide
auucaugcggaaucgaagg

SEQ ID NO: 2114163 - RNA, 19 nt, Artificial Sequence
  Description of Artificial Sequence: Synthetic oligonucleotide
auauguaaaccagaucucc

SEQ ID NO: 2114164 - RNA, 19 nt, Artificial Sequence
  Description of Artificial Sequence: Synthetic oligonucleotide
uguuuguugggaacgagcc

SEQ ID NO: 2114165 - RNA, 19 nt, Artificial Sequence
  Description of Artificial Sequence: Synthetic oligonucleotide
aaugaguagcauuacuaca

SEQ ID NO: 2114166 - RNA, 19 nt, Artificial Sequence
  Description of Artificial Sequence: Synthetic oligonucleotide
ucaaauauguaaaccagau

SEQ ID NO: 2114167 - RNA, 19 nt, Artificial Sequence
  Description of Artificial Sequence: Synthetic oligonucleotide
aauaaaccucugcuccugc

SEQ ID NO: 2114168 - RNA, 19 nt, Artificial Sequence
  Description of Artificial Sequence: Synthetic oligonucleotide
guagcauuacuacaguccg

SEQ ID NO: 2114169 - RNA, 19 nt, Artificial Sequence
  Description of Artificial Sequence: Synthetic oligonucleotide
aguaauaagugacugugca

SEQ ID NO: 2114170 - RNA, 19 nt, Artificial Sequence
  Description of Artificial Sequence: Synthetic oligonucleotide
uuuagcuagacugagggcu

SEQ ID NO: 2114171 - RNA, 19 nt, Artificial Sequence
  Description of Artificial Sequence: Synthetic oligonucleotide
gauaguaaagcaugcucag

SEQ ID NO: 2114172 - RNA, 19 nt, Artificial Sequence
  Description of Artificial Sequence: Synthetic oligonucleotide
uugggaacgagccuguaag

SEQ ID NO: 2114173 - RNA, 19 nt, Artificial Sequence
  Description of Artificial Sequence: Synthetic oligonucleotide
uuugccauugaacacucca

SEQ ID NO: 2114174 - RNA, 19 nt, Artificial Sequence
  Description of Artificial Sequence: Synthetic oligonucleotide
cauucaaauauguaaacca

SEQ ID NO: 2114175 - RNA, 19 nt, Artificial Sequence
  Description of Artificial Sequence: Synthetic oligonucleotide
guagauuacguucauggug

SEQ ID NO: 2114176 - RNA, 19 nt, Artificial Sequence
  Description of Artificial Sequence: Synthetic oligonucleotide
aauauguaaaccagaucuc

SEQ ID NO: 2114177 - RNA, 19 nt, Artificial Sequence
  Description of Artificial Sequence: Synthetic oligonucleotide
ugagaugacuuucaguaac

SEQ ID NO: 2114178 - RNA, 19 nt, Artificial Sequence
  Description of Artificial Sequence: Synthetic oligonucleotide
uguagcagaauucaaucaa

SEQ ID NO: 2114179 - RNA, 19 nt, Artificial Sequence
  Description of Artificial Sequence: Synthetic oligonucleotide
ugcuggaagaagauucucg

SEQ ID NO: 2114180 - RNA, 19 nt, Artificial Sequence
  Description of Artificial Sequence: Synthetic oligonucleotide
ucucgaauguucaggauug

SEQ ID NO: 2114181 - RNA, 19 nt, Artificial Sequence
  Description of Artificial Sequence: Synthetic oligonucleotide
cuaagaugucuuuagcuag

SEQ ID NO: 2114182 - RNA, 19 nt, Artificial Sequence
  Description of Artificial Sequence: Synthetic oligonucleotide
uucaguaacgcuugaauaa

SEQ ID NO: 2114183 - RNA, 19 nt, Artificial Sequence
  Description of Artificial Sequence: Synthetic oligonucleotide
ucauucacaaauuguuugc

SEQ ID NO: 2114184 - RNA, 19 nt, Artificial Sequence
  Description of Artificial Sequence: Synthetic oligonucleotide
caucagauaguaaagcaug

SEQ ID NO: 2114185 - RNA, 19 nt, Artificial Sequence
  Description of Artificial Sequence: Synthetic oligonucleotide
aaagauacuucugggcaac

SEQ ID NO: 2114186 - RNA, 19 nt, Artificial Sequence
  Description of Artificial Sequence: Synthetic oligonucleotide
gaaugaguagcauuacuac

SEQ ID NO: 2114187 - RNA, 19 nt, Artificial Sequence
  Description of Artificial Sequence: Synthetic oligonucleotide
gcagaauucaaucaagugc

SEQ ID NO: 2114188 - RNA, 19 nt, Artificial Sequence
  Description of Artificial Sequence: Synthetic oligonucleotide
uuuguguacaaugugucug

SEQ ID NO: 2114189 - RNA, 19 nt, Artificial Sequence
  Description of Artificial Sequence: Synthetic oligonucleotide
agccuucugaugcacaggc

SEQ ID NO: 2114190 - RNA, 19 nt, Artificial Sequence
  Description of Artificial Sequence: Synthetic oligonucleotide
ggguagauuacguucaugg

SEQ ID NO: 2114191 - RNA, 19 nt, Artificial Sequence
  Description of Artificial Sequence: Synthetic oligonucleotide
uacacauucaugcggaauc

SEQ ID NO: 2114192 - RNA, 19 nt, Artificial Sequence
  Description of Artificial Sequence: Synthetic oligonucleotide
  modified_base (3)..(3): a, c, u, g, unknown or other
acncuaagaugucuuuagc

SEQ ID NO: 2114193 - RNA, 19 nt, Artificial Sequence
  Description of Artificial Sequence: Synthetic oligonucleotide
cuguaagaggacuugguag

SEQ ID NO: 2114194 - RNA, 19 nt, Artificial Sequence
  Description of Artificial Sequence: Synthetic oligonucleotide
aguaacgcuugaauaaacc

SEQ ID NO: 2114195 - RNA, 19 nt, Artificial Sequence
  Description of Artificial Sequence: Synthetic oligonucleotide
acaguaauaagugacugug

SEQ ID NO: 2114196 - RNA, 19 nt, Artificial Sequence
  Description of Artificial Sequence: Synthetic oligonucleotide
caaucaagugcuucugucg

SEQ ID NO: 2114197 - RNA, 19 nt, Artificial Sequence
  Description of Artificial Sequence: Synthetic oligonucleotide
aaguuaggaucugaauggc

SEQ ID NO: 2114198 - RNA, 19 nt, Artificial Sequence
  Description of Artificial Sequence: Synthetic oligonucleotide
uuuguugggaacgagccug

SEQ ID NO: 2114199 - RNA, 19 nt, Artificial Sequence
  Description of Artificial Sequence: Synthetic oligonucleotide
aaccagaucuccgagaccu

SEQ ID NO: 2114200 - RNA, 19 nt, Artificial Sequence
  Description of Artificial Sequence: Synthetic oligonucleotide
aaaagauacuucugggcaa

SEQ ID NO: 2114201 - RNA, 19 nt, Artificial Sequence
  Description of Artificial Sequence: Synthetic oligonucleotide
aguccguugauuugaggac

SEQ ID NO: 2114202 - RNA, 19 nt, Artificial Sequence
  Description of Artificial Sequence: Synthetic oligonucleotide
uuagccagaugguaacggg

SEQ ID NO: 2114203 - RNA, 19 nt, Artificial Sequence
  Description of Artificial Sequence: Synthetic oligonucleotide
  modified_base (4)..(4): a, c, u, g, unknown or other
cacncuaagaugucuuuag

SEQ ID NO: 2114204 - RNA, 19 nt, Artificial Sequence
  Description of Artificial Sequence: Synthetic oligonucleotide
uaacgcuugaauaaaccuc

SEQ ID NO: 2114205 - RNA, 19 nt, Artificial Sequence
  Description of Artificial Sequence: Synthetic oligonucleotide
cauuuugcuaagagcauag

SEQ ID NO: 2114206 - RNA, 19 nt, Artificial Sequence
  Description of Artificial Sequence: Synthetic oligonucleotide
cucuacugaguucaggccg

SEQ ID NO: 2114207 - RNA, 19 nt, Artificial Sequence
  Description of Artificial Sequence: Synthetic oligonucleotide
aacgcuugaauaaaccucu

SEQ ID NO: 2114208 - RNA, 19 nt, Artificial Sequence
  Description of Artificial Sequence: Synthetic oligonucleotide
aaaccagaucuccgagacc

SEQ ID NO: 2114209 - RNA, 19 nt, Artificial Sequence
  Description of Artificial Sequence: Synthetic oligonucleotide
aagauucucgaauguucag

SEQ ID NO: 2114210 - RNA, 19 nt, Artificial Sequence
  Description of Artificial Sequence: Synthetic oligonucleotide
gauuugaggacuguccacc

SEQ ID NO: 2114211 - RNA, 19 nt, Artificial Sequence
  Description of Artificial Sequence: Synthetic oligonucleotide
ugacuuucaguaacgcuug

SEQ ID NO: 2114212 - RNA, 19 nt, Artificial Sequence
  Description of Artificial Sequence: Synthetic oligonucleotide
uucaugcggaaucgaaggg

SEQ ID NO: 2114213 - RNA, 19 nt, Artificial Sequence
  Description of Artificial Sequence: Synthetic oligonucleotide
agaggaauuagcaggggac

SEQ ID NO: 2114214 - RNA, 19 nt, Artificial Sequence
  Description of Artificial Sequence: Synthetic oligonucleotide
ucaggauugaaguuaggau

SEQ ID NO: 2114215 - RNA, 19 nt, Artificial Sequence
  Description of Artificial Sequence: Synthetic oligonucleotide
aguggagagccgcagggac

SEQ ID NO: 2114216 - RNA, 19 nt, Artificial Sequence
  Description of Artificial Sequence: Synthetic oligonucleotide
agcagaauucaaucaagug

SEQ ID NO: 2114217 - RNA, 19 nt, Artificial Sequence
  Description of Artificial Sequence: Synthetic oligonucleotide
uuucaguaacgcuugaaua

SEQ ID NO: 2114218 - RNA, 19 nt, Artificial Sequence
  Description of Artificial Sequence: Synthetic oligonucleotide
uacgcagaggaauuagcag

SEQ ID NO: 2114219 - RNA, 19 nt, Artificial Sequence
  Description of Artificial Sequence: Synthetic oligonucleotide
aucagauaguaaagcaugc

SEQ ID NO: 2114220 - RNA, 19 nt, Artificial Sequence
  Description of Artificial Sequence: Synthetic oligonucleotide
uagugaucauucaaauaug

SEQ ID NO: 2114221 - RNA, 19 nt, Artificial Sequence
  Description of Artificial Sequence: Synthetic oligonucleotide
gauucucgaauguucagga

SEQ ID NO: 2114222 - RNA, 19 nt, Artificial Sequence
  Description of Artificial Sequence: Synthetic oligonucleotide
agacugagggcucucuugg

SEQ ID NO: 2114223 - RNA, 19 nt, Artificial Sequence
  Description of Artificial Sequence: Synthetic oligonucleotide
cuucauaaugaagacaguc

SEQ ID NO: 2114224 - RNA, 19 nt, Artificial Sequence
  Description of Artificial Sequence: Synthetic oligonucleotide
agauucucgaauguucagg

SEQ ID NO: 2114225 - RNA, 19 nt, Artificial Sequence
  Description of Artificial Sequence: Synthetic oligonucleotide
ugcacauccgcucggccgg

SEQ ID NO: 2114226 - RNA, 19 nt, Artificial Sequence
  Description of Artificial Sequence: Synthetic oligonucleotide
guugauuugaggacugucc

SEQ ID NO: 2114227 - RNA, 19 nt, Artificial Sequence
  Description of Artificial Sequence: Synthetic oligonucleotide
uacaaugugucugccagcc

SEQ ID NO: 2114228 - RNA, 19 nt, Artificial Sequence
  Description of Artificial Sequence: Synthetic oligonucleotide
uaagaugucuuuagcuaga

SEQ ID NO: 2114229 - RNA, 19 nt, Artificial Sequence
  Description of Artificial Sequence: Synthetic oligonucleotide
cauucaugcggaaucgaag

SEQ ID NO: 2114230 - RNA, 19 nt, Artificial Sequence
  Description of Artificial Sequence: Synthetic oligonucleotide
acacuccaacaucagauag

SEQ ID NO: 2114231 - RNA, 19 nt, Artificial Sequence
  Description of Artificial Sequence: Synthetic oligonucleotide
aauguucaggauugaaguu

SEQ ID NO: 2114232 - RNA, 19 nt, Artificial Sequence
  Description of Artificial Sequence: Synthetic oligonucleotide
ugggcaacaguguagcaga

SEQ ID NO: 2114233 - RNA, 19 nt, Artificial Sequence
  Description of Artificial Sequence: Synthetic oligonucleotide
uucucgaauguucaggauu

SEQ ID NO: 2114234 - RNA, 19 nt, Artificial Sequence
  Description of Artificial Sequence: Synthetic oligonucleotide
aucuccgagaccuuugugu

SEQ ID NO: 2114235 - RNA, 19 nt, Artificial Sequence
  Description of Artificial Sequence: Synthetic oligonucleotide
  modified_base (12)..(12): a, c, u, g, unknown or other
ugcuccugcacncuaagau

SEQ ID NO: 2114236 - RNA, 19 nt, Artificial Sequence
  Description of Artificial Sequence: Synthetic oligonucleotide
auuugaggacuguccaccg

SEQ ID NO: 2114237 - RNA, 19 nt, Artificial Sequence
  Description of Artificial Sequence: Synthetic oligonucleotide
ugaauaaaccucugcuccu

SEQ ID NO: 2114238 - RNA, 19 nt, Artificial Sequence
  Description of Artificial Sequence: Synthetic oligonucleotide
cagauaguaaagcaugcuc

SEQ ID NO: 2114239 - RNA, 19 nt, Artificial Sequence
  Description of Artificial Sequence: Synthetic oligonucleotide
auuagccagaugguaacgg

SEQ ID NO: 2114240 - RNA, 19 nt, Artificial Sequence
  Description of Artificial Sequence: Synthetic oligonucleotide
gaggacuugguagugauca

SEQ ID NO: 2114241 - RNA, 19 nt, Artificial Sequence
  Description of Artificial Sequence: Synthetic oligonucleotide
caugcggaaucgaagggag

SEQ ID NO: 2114242 - RNA, 19 nt, Artificial Sequence
  Description of Artificial Sequence: Synthetic oligonucleotide
cuguuuguugggaacgagc

SEQ ID NO: 2114243 - RNA, 19 nt, Artificial Sequence
  Description of Artificial Sequence: Synthetic oligonucleotide
acagccagcggguagauua

SEQ ID NO: 2114244 - RNA, 19 nt, Artificial Sequence
  Description of Artificial Sequence: Synthetic oligonucleotide
uaaaccucugcuccugcac

SEQ ID NO: 2114245 - RNA, 19 nt, Artificial Sequence
  Description of Artificial Sequence: Synthetic oligonucleotide
aguuaggaucugaauggcc

SEQ ID NO: 2114246 - RNA, 19 nt, Artificial Sequence
  Description of Artificial Sequence: Synthetic oligonucleotide
acuacaguccguugauuug

SEQ ID NO: 2114247 - RNA, 19 nt, Artificial Sequence
  Description of Artificial Sequence: Synthetic oligonucleotide
ugucuuuagcuagacugag

SEQ ID NO: 2114248 - RNA, 19 nt, Artificial Sequence
  Description of Artificial Sequence: Synthetic oligonucleotide
augacuuucaguaacgcuu

SEQ ID NO: 2114249 - RNA, 19 nt, Artificial Sequence
  Description of Artificial Sequence: Synthetic oligonucleotide
aguaaagcaugcucagggu

SEQ ID NO: 2114250 - RNA, 19 nt, Artificial Sequence
  Description of Artificial Sequence: Synthetic oligonucleotide
ugcggaaucgaagggagug

SEQ ID NO: 2114251 - RNA, 19 nt, Artificial Sequence
  Description of Artificial Sequence: Synthetic oligonucleotide
ggaaguagccuccugaauc

SEQ ID NO: 2114252 - RNA, 19 nt, Artificial Sequence
  Description of Artificial Sequence: Synthetic oligonucleotide
aacacuccaacaucagaua

SEQ ID NO: 2114253 - RNA, 19 nt, Artificial Sequence
  Description of Artificial Sequence: Synthetic oligonucleotide
cuccugaaucauuagccag

SEQ ID NO: 2114254 - RNA, 19 nt, Artificial Sequence
  Description of Artificial Sequence: Synthetic oligonucleotide
auaguaaagcaugcucagg

SEQ ID NO: 2114255 - RNA, 19 nt, Artificial Sequence
  Description of Artificial Sequence: Synthetic oligonucleotide
gaguuguagaagggcaugg

SEQ ID NO: 2114256 - RNA, 19 nt, Artificial Sequence
  Description of Artificial Sequence: Synthetic oligonucleotide
acugaguucaggccguaca

SEQ ID NO: 2114257 - RNA, 19 nt, Artificial Sequence
  Description of Artificial Sequence: Synthetic oligonucleotide
caaauauguaaaccagauc

SEQ ID NO: 2114258 - RNA, 19 nt, Artificial Sequence
  Description of Artificial Sequence: Synthetic oligonucleotide
caguaauaagugacugugc

SEQ ID NO: 2114259 - RNA, 19 nt, Artificial Sequence
  Description of Artificial Sequence: Synthetic oligonucleotide
gugacugugcaguccaugc

SEQ ID NO: 2114260 - RNA, 19 nt, Artificial Sequence
  Description of Artificial Sequence: Synthetic oligonucleotide
aaucauuagccagauggua

SEQ ID NO: 2114261 - RNA, 19 nt, Artificial Sequence
  Description of Artificial Sequence: Synthetic oligonucleotide
guagcagaauucaaucaag

SEQ ID NO: 2114262 - RNA, 19 nt, Artificial Sequence
  Description of Artificial Sequence: Synthetic oligonucleotide
uuacguucauggugcagcc

SEQ ID NO: 2114263 - RNA, 19 nt, Artificial Sequence
  Description of Artificial Sequence: Synthetic oligonucleotide
guaaagcaugcucaggguc

SEQ ID NO: 2114264 - RNA, 19 nt, Artificial Sequence
  Description of Artificial Sequence: Synthetic oligonucleotide
auacuucugggcaacagug

SEQ ID NO: 2114265 - RNA, 19 nt, Artificial Sequence
  Description of Artificial Sequence: Synthetic oligonucleotide
gaacgagccuguaagagga

SEQ ID NO: 2114266 - RNA, 19 nt, Artificial Sequence
  Description of Artificial Sequence: Synthetic oligonucleotide
aggcacaagcucuacugag

SEQ ID NO: 2114267 - RNA, 19 nt, Artificial Sequence
  Description of Artificial Sequence: Synthetic oligonucleotide
cucacagcagagccgacgc

SEQ ID NO: 2114268 - RNA, 19 nt, Artificial Sequence
  Description of Artificial Sequence: Synthetic oligonucleotide
cuuuagcuagacugagggc

SEQ ID NO: 2114269 - RNA, 19 nt, Artificial Sequence
  Description of Artificial Sequence: Synthetic oligonucleotide
cauuacuacaguccguuga

SEQ ID NO: 2114270 - RNA, 19 nt, Artificial Sequence
  Description of Artificial Sequence: Synthetic oligonucleotide
gaugcaguaaagaaugagu

SEQ ID NO: 2114271 - RNA, 19 nt, Artificial Sequence
  Description of Artificial Sequence: Synthetic oligonucleotide
agaaugaguagcauuacua

SEQ ID NO: 2114272 - RNA, 19 nt, Artificial Sequence
  Description of Artificial Sequence: Synthetic oligonucleotide
agugucauucacaaauugu

SEQ ID NO: 2114273 - RNA, 19 nt, Artificial Sequence
  Description of Artificial Sequence: Synthetic oligonucleotide
acacauucaugcggaaucg

SEQ ID NO: 2114274 - RNA, 19 nt, Artificial Sequence
  Description of Artificial Sequence: Synthetic oligonucleotide
caguccguugauuugagga

SEQ ID NO: 2114275 - RNA, 19 nt, Artificial Sequence
  Description of Artificial Sequence: Synthetic oligonucleotide
gaauaaaccucugcuccug

SEQ ID NO: 2114276 - RNA, 19 nt, Artificial Sequence
  Description of Artificial Sequence: Synthetic oligonucleotide
ucaguaacgcuugaauaaa

SEQ ID NO: 2114277 - RNA, 19 nt, Artificial Sequence
  Description of Artificial Sequence: Synthetic oligonucleotide
ugaguuguagaagggcaug

SEQ ID NO: 2114278 - RNA, 19 nt, Artificial Sequence
  Description of Artificial Sequence: Synthetic oligonucleotide
aagauguuggccaggugga

SEQ ID NO: 2114279 - RNA, 19 nt, Artificial Sequence
  Description of Artificial Sequence: Synthetic oligonucleotide
uuagcuagacugagggcuc

SEQ ID NO: 2114280 - RNA, 19 nt, Artificial Sequence
  Description of Artificial Sequence: Synthetic oligonucleotide
aagaagauucucgaauguu

SEQ ID NO: 2114281 - RNA, 19 nt, Artificial Sequence
  Description of Artificial Sequence: Synthetic oligonucleotide
ucuucauaaugaagacagu

SEQ ID NO: 2114282 - RNA, 19 nt, Artificial Sequence
  Description of Artificial Sequence: Synthetic oligonucleotide
guaacgggcuuccucgaag

SEQ ID NO: 2114283 - RNA, 19 nt, Artificial Sequence
  Description of Artificial Sequence: Synthetic oligonucleotide
uccguugauuugaggacug

SEQ ID NO: 2114284 - RNA, 19 nt, Artificial Sequence
  Description of Artificial Sequence: Synthetic oligonucleotide
ucaugcggaaucgaaggga

SEQ ID NO: 2114285 - RNA, 19 nt, Artificial Sequence
  Description of Artificial Sequence: Synthetic oligonucleotide
gaugcacaggcccacagua

SEQ ID NO: 2114286 - RNA, 19 nt, Artificial Sequence
  Description of Artificial Sequence: Synthetic oligonucleotide
uacaguccguugauuugag

SEQ ID NO: 2114287 - RNA, 19 nt, Artificial Sequence
  Description of Artificial Sequence: Synthetic oligonucleotide
uagcaggggacauaucuuc

SEQ ID NO: 2114288 - RNA, 19 nt, Artificial Sequence
  Description of Artificial Sequence: Synthetic oligonucleotide
aucgaagggaguggagagc

SEQ ID NO: 2114289 - RNA, 19 nt, Artificial Sequence
  Description of Artificial Sequence: Synthetic oligonucleotide
ucauggaugcugcccaguc

SEQ ID NO: 2114290 - RNA, 19 nt, Artificial Sequence
  Description of Artificial Sequence: Synthetic oligonucleotide
ugcuaagagcauagaagau

SEQ ID NO: 2114291 - RNA, 19 nt, Artificial Sequence
  Description of Artificial Sequence: Synthetic oligonucleotide
guaacgcuugaauaaaccu

SEQ ID NO: 2114292 - RNA, 19 nt, Artificial Sequence
  Description of Artificial Sequence: Synthetic oligonucleotide
agagccgacgccccuuggg

SEQ ID NO: 2114293 - RNA, 19 nt, Artificial Sequence
  Description of Artificial Sequence: Synthetic oligonucleotide
uccucgguugagaugacuu

SEQ ID NO: 2114294 - RNA, 19 nt, Artificial Sequence
  Description of Artificial Sequence: Synthetic oligonucleotide
guguagcagaauucaauca

SEQ ID NO: 2114295 - RNA, 19 nt, Artificial Sequence
  Description of Artificial Sequence: Synthetic oligonucleotide
uccgagaccuuuguguaca

SEQ ID NO: 2114296 - RNA, 19 nt, Artificial Sequence
  Description of Artificial Sequence: Synthetic oligonucleotide
cuuuuggggugcuuugcug

SEQ ID NO: 2114297 - RNA, 19 nt, Artificial Sequence
  Description of Artificial Sequence: Synthetic oligonucleotide
ucuccgagaccuuugugua

SEQ ID NO: 2114298 - RNA, 19 nt, Artificial Sequence
  Description of Artificial Sequence: Synthetic oligonucleotide
cucugaguuguagaagggc

SEQ ID NO: 2114299 - RNA, 19 nt, Artificial Sequence
  Description of Artificial Sequence: Synthetic oligonucleotide
agggcauggucguacgcag

SEQ ID NO: 2114300 - RNA, 19 nt, Artificial Sequence
  Description of Artificial Sequence: Synthetic oligonucleotide
aagcucuacugaguucagg

SEQ ID NO: 2114301 - RNA, 19 nt, Artificial Sequence
  Description of Artificial Sequence: Synthetic oligonucleotide
gauacuucugggcaacagu

SEQ ID NO: 2114302 - RNA, 19 nt, Artificial Sequence
  Description of Artificial Sequence: Synthetic oligonucleotide
ccuucugaugcacaggccc

SEQ ID NO: 2114303 - RNA, 19 nt, Artificial Sequence
  Description of Artificial Sequence: Synthetic oligonucleotide
agacagucuuuuggggugc

SEQ ID NO: 2114304 - RNA, 19 nt, Artificial Sequence
  Description of Artificial Sequence: Synthetic oligonucleotide
cacuauccggcccagacca

SEQ ID NO: 2114305 - RNA, 19 nt, Artificial Sequence
  Description of Artificial Sequence: Synthetic oligonucleotide
cagugucauucacaaauug

SEQ ID NO: 2114306 - RNA, 19 nt, Artificial Sequence
  Description of Artificial Sequence: Synthetic oligonucleotide
gaugacuuucaguaacgcu

SEQ ID NO: 2114307 - RNA, 19 nt, Artificial Sequence
  Description of Artificial Sequence: Synthetic oligonucleotide
cauggucguacgcagagga

SEQ ID NO: 2114308 - RNA, 19 nt, Artificial Sequence
  Description of Artificial Sequence: Synthetic oligonucleotide
cuugguagugaucauucaa

SEQ ID NO: 2114309 - RNA, 19 nt, Artificial Sequence
  Description of Artificial Sequence: Synthetic oligonucleotide
guaaaccagaucuccgaga

SEQ ID NO: 2114310 - RNA, 19 nt, Artificial Sequence
  Description of Artificial Sequence: Synthetic oligonucleotide
uaacgggcuuccucgaagu

SEQ ID NO: 2114311 - RNA, 19 nt, Artificial Sequence
  Description of Artificial Sequence: Synthetic oligonucleotide
uaagcaggcacaagcucua

SEQ ID NO: 2114312 - RNA, 19 nt, Artificial Sequence
  Description of Artificial Sequence: Synthetic oligonucleotide
uaagaggacuugguaguga

SEQ ID NO: 2114313 - RNA, 19 nt, Artificial Sequence
  Description of Artificial Sequence: Synthetic oligonucleotide
agauacuucugggcaacag

SEQ ID NO: 2114314 - RNA, 19 nt, Artificial Sequence
  Description of Artificial Sequence: Synthetic oligonucleotide
caguaacgcuugaauaaac

SEQ ID NO: 2114315 - RNA, 19 nt, Artificial Sequence
  Description of Artificial Sequence: Synthetic oligonucleotide
ugccagcccauuuugcuaa

SEQ ID NO: 2114316 - RNA, 19 nt, Artificial Sequence
  Description of Artificial Sequence: Synthetic oligonucleotide
cauuagccagaugguaacg

SEQ ID NO: 2114317 - RNA, 19 nt, Artificial Sequence
  Description of Artificial Sequence: Synthetic oligonucleotide
gccguacacauucaugcgg

SEQ ID NO: 2114318 - RNA, 19 nt, Artificial Sequence
  Description of Artificial Sequence: Synthetic oligonucleotide
acuccaacaucagauagua

SEQ ID NO: 2114319 - RNA, 19 nt, Artificial Sequence
  Description of Artificial Sequence: Synthetic oligonucleotide
ugcuuugcuggaagaagau

SEQ ID NO: 2114320 - RNA, 19 nt, Artificial Sequence
  Description of Artificial Sequence: Synthetic oligonucleotide
acgccccuugggcacagcc

SEQ ID NO: 2114321 - RNA, 19 nt, Artificial Sequence
  Description of Artificial Sequence: Synthetic oligonucleotide
aguaaagaaugaguagcau

SEQ ID NO: 2114322 - RNA, 19 nt, Artificial Sequence
  Description of Artificial Sequence: Synthetic oligonucleotide
cacagcagagccgacgccc

SEQ ID NO: 2114323 - RNA, 19 nt, Artificial Sequence
  Description of Artificial Sequence: Synthetic oligonucleotide
gaacacuccaacaucagau

SEQ ID NO: 2114324 - RNA, 19 nt, Artificial Sequence
  Description of Artificial Sequence: Synthetic oligonucleotide
cagcggguagauuacguuc

SEQ ID NO: 2114325 - RNA, 19 nt, Artificial Sequence
  Description of Artificial Sequence: Synthetic oligonucleotide
acaguccguugauuugagg

SEQ ID NO: 2114326 - RNA, 19 nt, Artificial Sequence
  Description of Artificial Sequence: Synthetic oligonucleotide
ucguacgcagaggaauuag

SEQ ID NO: 2114327 - RNA, 19 nt, Artificial Sequence
  Description of Artificial Sequence: Synthetic oligonucleotide
gauuacguucauggugcag

SEQ ID NO: 2114328 - RNA, 19 nt, Artificial Sequence
  Description of Artificial Sequence: Synthetic oligonucleotide
agaucuccgagaccuuugu

SEQ ID NO: 2114329 - RNA, 19 nt, Artificial Sequence
  Description of Artificial Sequence: Synthetic oligonucleotide
agcauuacuacaguccguu

SEQ ID NO: 2114330 - RNA, 19 nt, Artificial Sequence
  Description of Artificial Sequence: Synthetic oligonucleotide
  modified_base (2)..(2): a, c, u, g, unknown or other
cncuaagaugucuuuagcu

SEQ ID NO: 2114331 - RNA, 19 nt, Artificial Sequence
  Description of Artificial Sequence: Synthetic oligonucleotide
gaggaauuagcaggggaca

SEQ ID NO: 2114332 - RNA, 19 nt, Artificial Sequence
  Description of Artificial Sequence: Synthetic oligonucleotide
guuaggaucugaauggccu

SEQ ID NO: 2114333 - RNA, 19 nt, Artificial Sequence
  Description of Artificial Sequence: Synthetic oligonucleotide
acaaauuguuugcccagua

SEQ ID NO: 2114334 - RNA, 19 nt, Artificial Sequence
  Description of Artificial Sequence: Synthetic oligonucleotide
gucuuuagcuagacugagg

SEQ ID NO: 2114335 - RNA, 19 nt, Artificial Sequence
  Description of Artificial Sequence: Synthetic oligonucleotide
aauuagcaggggacauauc

SEQ ID NO: 2114336 - RNA, 19 nt, Artificial Sequence
  Description of Artificial Sequence: Synthetic oligonucleotide
agaugucuuuagcuagacu

SEQ ID NO: 2114337 - RNA, 19 nt, Artificial Sequence
  Description of Artificial Sequence: Synthetic oligonucleotide
  modified_base (10)..(10): a, c, u, g, unknown or other
cuccugcacncuaagaugu

SEQ ID NO: 2114338 - RNA, 19 nt, Artificial Sequence
  Description of Artificial Sequence: Synthetic oligonucleotide
uagcauuacuacaguccgu

SEQ ID NO: 2114339 - RNA, 19 nt, Artificial Sequence
  Description of Artificial Sequence: Synthetic oligonucleotide
ugggaacgagccuguaaga

SEQ ID NO: 2114340 - RNA, 19 nt, Artificial Sequence
  Description of Artificial Sequence: Synthetic oligonucleotide
uggucguacgcagaggaau

SEQ ID NO: 2114341 - RNA, 19 nt, Artificial Sequence
  Description of Artificial Sequence: Synthetic oligonucleotide
guacaaugugucugccagc

SEQ ID NO: 2114342 - RNA, 19 nt, Artificial Sequence
  Description of Artificial Sequence: Synthetic oligonucleotide
gauagguauucuucagccu

SEQ ID NO: 2114343 - RNA, 19 nt, Artificial Sequence
  Description of Artificial Sequence: Synthetic oligonucleotide
gagccgacgccccuugggc

SEQ ID NO: 2114344 - RNA, 19 nt, Artificial Sequence
  Description of Artificial Sequence: Synthetic oligonucleotide
  modified_base (6)..(6): a, c, u, g, unknown or other
ugcacncuaagaugucuuu

SEQ ID NO: 2114345 - RNA, 19 nt, Artificial Sequence
  Description of Artificial Sequence: Synthetic oligonucleotide
gaucuccgagaccuuugug

SEQ ID NO: 2114346 - RNA, 19 nt, Artificial Sequence
  Description of Artificial Sequence: Synthetic oligonucleotide
ggugcuuugcuggaagaag

SEQ ID NO: 2114347 - RNA, 19 nt, Artificial Sequence
  Description of Artificial Sequence: Synthetic oligonucleotide
agccuguaagaggacuugg

SEQ ID NO: 2114348 - RNA, 19 nt, Artificial Sequence
  Description of Artificial Sequence: Synthetic oligonucleotide
ggcauggucguacgcagag

SEQ ID NO: 2114349 - RNA, 19 nt, Artificial Sequence
  Description of Artificial Sequence: Synthetic oligonucleotide
ucgaauguucaggauugaa

SEQ ID NO: 2114350 - RNA, 19 nt, Artificial Sequence
  Description of Artificial Sequence: Synthetic oligonucleotide
uuguugggaacgagccugu

SEQ ID NO: 2114351 - RNA, 19 nt, Artificial Sequence
  Description of Artificial Sequence: Synthetic oligonucleotide
cucgguugagaugacuuuc

SEQ ID NO: 2114352 - RNA, 19 nt, Artificial Sequence
  Description of Artificial Sequence: Synthetic oligonucleotide
guaagaggacuugguagug

SEQ ID NO: 2114353 - RNA, 19 nt, Artificial Sequence
  Description of Artificial Sequence: Synthetic oligonucleotide
  modified_base (11)..(11): a, c, u, g, unknown or other
gcuccugcacncuaagaug

SEQ ID NO: 2114354 - RNA, 19 nt, Artificial Sequence
  Description of Artificial Sequence: Synthetic oligonucleotide
agccugcacuauccggccc

SEQ ID NO: 2114355 - RNA, 19 nt, Artificial Sequence
  Description of Artificial Sequence: Synthetic oligonucleotide
gagagccgcagggacagcc

SEQ ID NO: 2114356 - RNA, 19 nt, Artificial Sequence
  Description of Artificial Sequence: Synthetic oligonucleotide
ucaggccguacacauucau

SEQ ID NO: 2114357 - RNA, 19 nt, Artificial Sequence
  Description of Artificial Sequence: Synthetic oligonucleotide
caggccguacacauucaug

SEQ ID NO: 2114358 - RNA, 19 nt, Artificial Sequence
  Description of Artificial Sequence: Synthetic oligonucleotide
cugaugcacaggcccacag

SEQ ID NO: 2114359 - RNA, 19 nt, Artificial Sequence
  Description of Artificial Sequence: Synthetic oligonucleotide
cuuucaguaacgcuugaau

SEQ ID NO: 2114360 - RNA, 19 nt, Artificial Sequence
  Description of Artificial Sequence: Synthetic oligonucleotide
cagaucuccgagaccuuug

SEQ ID NO: 2114361 - RNA, 19 nt, Artificial Sequence
  Description of Artificial Sequence: Synthetic oligonucleotide
aguuguagaagggcauggu

SEQ ID NO: 2114362 - RNA, 19 nt, Artificial Sequence
  Description of Artificial Sequence: Synthetic oligonucleotide
gaaggcccagguuccgaug

SEQ ID NO: 2114363 - RNA, 19 nt, Artificial Sequence
  Description of Artificial Sequence: Synthetic oligonucleotide
caaauuguuugcccaguaa

SEQ ID NO: 2114364 - RNA, 19 nt, Artificial Sequence
  Description of Artificial Sequence: Synthetic oligonucleotide
ugugucugccagcccauuu

SEQ ID NO: 2114365 - RNA, 19 nt, Artificial Sequence
  Description of Artificial Sequence: Synthetic oligonucleotide
aacgagccuguaagaggac

SEQ ID NO: 2114366 - RNA, 19 nt, Artificial Sequence
  Description of Artificial Sequence: Synthetic oligonucleotide
cagaggaauuagcagggga

SEQ ID NO: 2114367 - RNA, 19 nt, Artificial Sequence
  Description of Artificial Sequence: Synthetic oligonucleotide
cagaugguaacgggcuucc

SEQ ID NO: 2114368 - RNA, 19 nt, Artificial Sequence
  Description of Artificial Sequence: Synthetic oligonucleotide
agguaagcaggcacaagcu

SEQ ID NO: 2114369 - RNA, 19 nt, Artificial Sequence
  Description of Artificial Sequence: Synthetic oligonucleotide
cuacaguccguugauuuga

SEQ ID NO: 2114370 - RNA, 19 nt, Artificial Sequence
  Description of Artificial Sequence: Synthetic oligonucleotide
gagccuguaagaggacuug

SEQ ID NO: 2114371 - RNA, 19 nt, Artificial Sequence
  Description of Artificial Sequence: Synthetic oligonucleotide
uucaggccguacacauuca

SEQ ID NO: 2114372 - RNA, 19 nt, Artificial Sequence
  Description of Artificial Sequence: Synthetic oligonucleotide
ggccguacacauucaugcg

SEQ ID NO: 2114373 - RNA, 19 nt, Artificial Sequence
  Description of Artificial Sequence: Synthetic oligonucleotide
gggaacgagccuguaagag

SEQ ID NO: 2114374 - RNA, 19 nt, Artificial Sequence
  Description of Artificial Sequence: Synthetic oligonucleotide
ggcuucgcacaccucacag

SEQ ID NO: 2114375 - RNA, 19 nt, Artificial Sequence
  Description of Artificial Sequence: Synthetic oligonucleotide
gguaagcaggcacaagcuc

SEQ ID NO: 2114376 - RNA, 19 nt, Artificial Sequence
  Description of Artificial Sequence: Synthetic oligonucleotide
gugcuuugcuggaagaaga

SEQ ID NO: 2114377 - RNA, 19 nt, Artificial Sequence
  Description of Artificial Sequence: Synthetic oligonucleotide
aagauacuucugggcaaca

SEQ ID NO: 2114378 - RNA, 19 nt, Artificial Sequence
  Description of Artificial Sequence: Synthetic oligonucleotide
agccagaugguaacgggcu

SEQ ID NO: 2114379 - RNA, 19 nt, Artificial Sequence
  Description of Artificial Sequence: Synthetic oligonucleotide
acauucaugcggaaucgaa

SEQ ID NO: 2114380 - RNA, 19 nt, Artificial Sequence
  Description of Artificial Sequence: Synthetic oligonucleotide
cuuuguguacaaugugucu

SEQ ID NO: 2114381 - RNA, 19 nt, Artificial Sequence
  Description of Artificial Sequence: Synthetic oligonucleotide
cacaagcucuacugaguuc

SEQ ID NO: 2114382 - RNA, 19 nt, Artificial Sequence
  Description of Artificial Sequence: Synthetic oligonucleotide
guagccuccugaaucauua

SEQ ID NO: 2114383 - RNA, 19 nt, Artificial Sequence
  Description of Artificial Sequence: Synthetic oligonucleotide
aggggacauaucuucucau

SEQ ID NO: 2114384 - RNA, 19 nt, Artificial Sequence
  Description of Artificial Sequence: Synthetic oligonucleotide
caagcucuacugaguucag

SEQ ID NO: 2114385 - RNA, 19 nt, Artificial Sequence
  Description of Artificial Sequence: Synthetic oligonucleotide
gucuuuuggggugcuuugc

SEQ ID NO: 2114386 - RNA, 19 nt, Artificial Sequence
  Description of Artificial Sequence: Synthetic oligonucleotide
auaucuucucauggaugcu

SEQ ID NO: 2114387 - RNA, 19 nt, Artificial Sequence
  Description of Artificial Sequence: Synthetic oligonucleotide
  modified_base (9)..(9): a, c, u, g, unknown or other
uccugcacncuaagauguc

SEQ ID NO: 2114388 - RNA, 19 nt, Artificial Sequence
  Description of Artificial Sequence: Synthetic oligonucleotide
cuauccggcccagaccaag

SEQ ID NO: 2114389 - RNA, 19 nt, Artificial Sequence
  Description of Artificial Sequence: Synthetic oligonucleotide
ugugcaguccaugcacauc

SEQ ID NO: 2114390 - RNA, 19 nt, Artificial Sequence
  Description of Artificial Sequence: Synthetic oligonucleotide
ucggccggggcuucgcaca

SEQ ID NO: 2114391 - RNA, 19 nt, Artificial Sequence
  Description of Artificial Sequence: Synthetic oligonucleotide
guugggaacgagccuguaa

SEQ ID NO: 2114392 - RNA, 19 nt, Artificial Sequence
  Description of Artificial Sequence: Synthetic oligonucleotide
aggaauuagcaggggacau

SEQ ID NO: 2114393 - RNA, 19 nt, Artificial Sequence
  Description of Artificial Sequence: Synthetic oligonucleotide
uucugaugcacaggcccac

SEQ ID NO: 2114394 - RNA, 19 nt, Artificial Sequence
  Description of Artificial Sequence: Synthetic oligonucleotide
gugucauucacaaauuguu

SEQ ID NO: 2114395 - RNA, 19 nt, Artificial Sequence
  Description of Artificial Sequence: Synthetic oligonucleotide
cagccugcacuauccggcc

SEQ ID NO: 2114396 - RNA, 19 nt, Artificial Sequence
  Description of Artificial Sequence: Synthetic oligonucleotide
ugguaacgggcuuccucga

SEQ ID NO: 2114397 - RNA, 19 nt, Artificial Sequence
  Description of Artificial Sequence: Synthetic oligonucleotide
agaggacuugguagugauc

SEQ ID NO: 2114398 - RNA, 19 nt, Artificial Sequence
  Description of Artificial Sequence: Synthetic oligonucleotide
uugcuggaagaagauucuc

SEQ ID NO: 2114399 - RNA, 19 nt, Artificial Sequence
  Description of Artificial Sequence: Synthetic oligonucleotide
caggccagugucauucaca

SEQ ID NO: 2114400 - RNA, 19 nt, Artificial Sequence
  Description of Artificial Sequence: Synthetic oligonucleotide
cauaaugaagacagucuuu

SEQ ID NO: 2114401 - RNA, 19 nt, Artificial Sequence
  Description of Artificial Sequence: Synthetic oligonucleotide
caggcccacaguaauaagu

SEQ ID NO: 2114402 - RNA, 19 nt, Artificial Sequence
  Description of Artificial Sequence: Synthetic oligonucleotide
acgagccuguaagaggacu

SEQ ID NO: 2114403 - RNA, 19 nt, Artificial Sequence
  Description of Artificial Sequence: Synthetic oligonucleotide
gccagguggaaguagccuc

SEQ ID NO: 2114404 - RNA, 19 nt, Artificial Sequence
  Description of Artificial Sequence: Synthetic oligonucleotide
caguguagcagaauucaau

SEQ ID NO: 2114405 - RNA, 19 nt, Artificial Sequence
  Description of Artificial Sequence: Synthetic oligonucleotide
cugaaucauuagccagaug

SEQ ID NO: 2114406 - RNA, 19 nt, Artificial Sequence
  Description of Artificial Sequence: Synthetic oligonucleotide
gacuuucaguaacgcuuga

SEQ ID NO: 2114407 - RNA, 19 nt, Artificial Sequence
  Description of Artificial Sequence: Synthetic oligonucleotide
gguuccgaugcaguaaaga

SEQ ID NO: 2114408 - RNA, 19 nt, Artificial Sequence
  Description of Artificial Sequence: Synthetic oligonucleotide
acaguguagcagaauucaa

SEQ ID NO: 2114409 - RNA, 19 nt, Artificial Sequence
  Description of Artificial Sequence: Synthetic oligonucleotide
gguagauuacguucauggu

SEQ ID NO: 2114410 - RNA, 19 nt, Artificial Sequence
  Description of Artificial Sequence: Synthetic oligonucleotide
caggcacaagcucuacuga

SEQ ID NO: 2114411 - RNA, 19 nt, Artificial Sequence
  Description of Artificial Sequence: Synthetic oligonucleotide
guuuguugggaacgagccu

SEQ ID NO: 2114412 - RNA, 19 nt, Artificial Sequence
  Description of Artificial Sequence: Synthetic oligonucleotide
cagccagcggguagauuac

SEQ ID NO: 2114413 - RNA, 19 nt, Artificial Sequence
  Description of Artificial Sequence: Synthetic oligonucleotide
agcagguaagcaggcacaa

SEQ ID NO: 2114414 - RNA, 19 nt, Artificial Sequence
  Description of Artificial Sequence: Synthetic oligonucleotide
cacaggcccacaguaauaa

SEQ ID NO: 2114415 - RNA, 19 nt, Artificial Sequence
  Description of Artificial Sequence: Synthetic oligonucleotide
gcacuauccggcccagacc

SEQ ID NO: 2114416 - RNA, 19 nt, Artificial Sequence
  Description of Artificial Sequence: Synthetic oligonucleotide
agccgacgccccuugggca

SEQ ID NO: 2114417 - RNA, 19 nt, Artificial Sequence
  Description of Artificial Sequence: Synthetic oligonucleotide
agccagcggguagauuacg

SEQ ID NO: 2114418 - RNA, 19 nt, Artificial Sequence
  Description of Artificial Sequence: Synthetic oligonucleotide
cacuccaacaucagauagu

SEQ ID NO: 2114419 - RNA, 19 nt, Artificial Sequence
  Description of Artificial Sequence: Synthetic oligonucleotide
ggaaucgaagggaguggag

SEQ ID NO: 2114420 - RNA, 19 nt, Artificial Sequence
  Description of Artificial Sequence: Synthetic oligonucleotide
gcauuacuacaguccguug

SEQ ID NO: 2114421 - RNA, 19 nt, Artificial Sequence
  Description of Artificial Sequence: Synthetic oligonucleotide
uagcuagacugagggcucu

SEQ ID NO: 2114422 - RNA, 19 nt, Artificial Sequence
  Description of Artificial Sequence: Synthetic oligonucleotide
gcggaaucgaagggagugg

SEQ ID NO: 2114423 - RNA, 19 nt, Artificial Sequence
  Description of Artificial Sequence: Synthetic oligonucleotide
gguauucuucagccugcac

SEQ ID NO: 2114424 - RNA, 19 nt, Artificial Sequence
  Description of Artificial Sequence: Synthetic oligonucleotide
cugaguuguagaagggcau

SEQ ID NO: 2114425 - RNA, 19 nt, Artificial Sequence
  Description of Artificial Sequence: Synthetic oligonucleotide
cgaugcaguaaagaaugag

SEQ ID NO: 2114426 - RNA, 19 nt, Artificial Sequence
  Description of Artificial Sequence: Synthetic oligonucleotide
cgcuugaauaaaccucugc

SEQ ID NO: 2114427 - RNA, 19 nt, Artificial Sequence
  Description of Artificial Sequence: Synthetic oligonucleotide
gcaggggacauaucuucuc

SEQ ID NO: 2114428 - RNA, 19 nt, Artificial Sequence
  Description of Artificial Sequence: Synthetic oligonucleotide
ccucacagcagagccgacg

SEQ ID NO: 2114429 - RNA, 19 nt, Artificial Sequence
  Description of Artificial Sequence: Synthetic oligonucleotide
cucggccggggcuucgcac

SEQ ID NO: 2114430 - RNA, 19 nt, Artificial Sequence
  Description of Artificial Sequence: Synthetic oligonucleotide
ggauugaaguuaggaucug

SEQ ID NO: 2114431 - RNA, 19 nt, Artificial Sequence
  Description of Artificial Sequence: Synthetic oligonucleotide
guccguugauuugaggacu

SEQ ID NO: 2114432 - RNA, 19 nt, Artificial Sequence
  Description of Artificial Sequence: Synthetic oligonucleotide
agauguuggccagguggaa

SEQ ID NO: 2114433 - RNA, 19 nt, Artificial Sequence
  Description of Artificial Sequence: Synthetic oligonucleotide
  modified_base (7)..(7): a, c, u, g, unknown or other
cugcacncuaagaugucuu

SEQ ID NO: 2114434 - RNA, 19 nt, Artificial Sequence
  Description of Artificial Sequence: Synthetic oligonucleotide
cacauucaugcggaaucga

SEQ ID NO: 2114435 - RNA, 19 nt, Artificial Sequence
  Description of Artificial Sequence: Synthetic oligonucleotide
cugccagcccauuuugcua

SEQ ID NO: 2114436 - RNA, 19 nt, Artificial Sequence
  Description of Artificial Sequence: Synthetic oligonucleotide
acgcuugaauaaaccucug

SEQ ID NO: 2114437 - RNA, 19 nt, Artificial Sequence
  Description of Artificial Sequence: Synthetic oligonucleotide
gaggacuguccaccgggcu

SEQ ID NO: 2114438 - RNA, 19 nt, Artificial Sequence
  Description of Artificial Sequence: Synthetic oligonucleotide
ccauugaacacuccaacau

SEQ ID NO: 2114439 - RNA, 19 nt, Artificial Sequence
  Description of Artificial Sequence: Synthetic oligonucleotide
agguuccgaugcaguaaag

SEQ ID NO: 2114440 - RNA, 19 nt, Artificial Sequence
  Description of Artificial Sequence: Synthetic oligonucleotide
gcauggucguacgcagagg

SEQ ID NO: 2114441 - RNA, 19 nt, Artificial Sequence
  Description of Artificial Sequence: Synthetic oligonucleotide
ccuguaagaggacuuggua

SEQ ID NO: 2114442 - RNA, 19 nt, Artificial Sequence
  Description of Artificial Sequence: Synthetic oligonucleotide
cagagccgacgccccuugg

SEQ ID NO: 2114443 - RNA, 19 nt, Artificial Sequence
  Description of Artificial Sequence: Synthetic oligonucleotide
gccauguagagaaggccca

SEQ ID NO: 2114444 - RNA, 19 nt, Artificial Sequence
  Description of Artificial Sequence: Synthetic oligonucleotide
guacacauucaugcggaau

SEQ ID NO: 2114445 - RNA, 19 nt, Artificial Sequence
  Description of Artificial Sequence: Synthetic oligonucleotide
cuccaacaucagauaguaa

SEQ ID NO: 2114446 - RNA, 19 nt, Artificial Sequence
  Description of Artificial Sequence: Synthetic oligonucleotide
gugucugccagcccauuuu

SEQ ID NO: 2114447 - RNA, 19 nt, Artificial Sequence
  Description of Artificial Sequence: Synthetic oligonucleotide
ccagaugguaacgggcuuc

SEQ ID NO: 2114448 - RNA, 19 nt, Artificial Sequence
  Description of Artificial Sequence: Synthetic oligonucleotide
ggaauuagcaggggacaua

SEQ ID NO: 2114449 - RNA, 19 nt, Artificial Sequence
  Description of Artificial Sequence: Synthetic oligonucleotide
aguucaggccguacacauu

SEQ ID NO: 2114450 - RNA, 19 nt, Artificial Sequence
  Description of Artificial Sequence: Synthetic oligonucleotide
augcggaaucgaagggagu

SEQ ID NO: 2114451 - RNA, 19 nt, Artificial Sequence
  Description of Artificial Sequence: Synthetic oligonucleotide
gguaacgggcuuccucgaa

SEQ ID NO: 2114452 - RNA, 19 nt, Artificial Sequence
  Description of Artificial Sequence: Synthetic oligonucleotide
auggucguacgcagaggaa

SEQ ID NO: 2114453 - RNA, 19 nt, Artificial Sequence
  Description of Artificial Sequence: Synthetic oligonucleotide
cccacaguaauaagugacu

SEQ ID NO: 2114454 - RNA, 19 nt, Artificial Sequence
  Description of Artificial Sequence: Synthetic oligonucleotide
cucgaauguucaggauuga

SEQ ID NO: 2114455 - RNA, 19 nt, Artificial Sequence
  Description of Artificial Sequence: Synthetic oligonucleotide
ggggugcuuugcuggaaga

SEQ ID NO: 2114456 - RNA, 19 nt, Artificial Sequence
  Description of Artificial Sequence: Synthetic oligonucleotide
gucguacgcagaggaauua

SEQ ID NO: 2114457 - RNA, 19 nt, Artificial Sequence
  Description of Artificial Sequence: Synthetic oligonucleotide
  modified_base (5)..(5): a, c, u, g, unknown or other
gcacncuaagaugucuuua

SEQ ID NO: 2114458 - RNA, 19 nt, Artificial Sequence
  Description of Artificial Sequence: Synthetic oligonucleotide
gccgacgccccuugggcac

SEQ ID NO: 2114459 - RNA, 19 nt, Artificial Sequence
  Description of Artificial Sequence: Synthetic oligonucleotide
ugcaggccaugcugccuuu

SEQ ID NO: 2114460 - RNA, 19 nt, Artificial Sequence
  Description of Artificial Sequence: Synthetic oligonucleotide
cgguugagaugacuuucag

SEQ ID NO: 2114461 - RNA, 19 nt, Artificial Sequence
  Description of Artificial Sequence: Synthetic oligonucleotide
ggcacaagcucuacugagu

SEQ ID NO: 2114462 - RNA, 19 nt, Artificial Sequence
  Description of Artificial Sequence: Synthetic oligonucleotide
gccagcccauuuugcuaag

SEQ ID NO: 2114463 - RNA, 19 nt, Artificial Sequence
  Description of Artificial Sequence: Synthetic oligonucleotide
ccaggccagugucauucac

SEQ ID NO: 2114464 - RNA, 19 nt, Artificial Sequence
  Description of Artificial Sequence: Synthetic oligonucleotide
cuagacugagggcucucuu

SEQ ID NO: 2114465 - RNA, 19 nt, Artificial Sequence
  Description of Artificial Sequence: Synthetic oligonucleotide
guagaagggcauggucgua

SEQ ID NO: 2114466 - RNA, 19 nt, Artificial Sequence
  Description of Artificial Sequence: Synthetic oligonucleotide
gggugcuuugcuggaagaa

SEQ ID NO: 2114467 - RNA, 19 nt, Artificial Sequence
  Description of Artificial Sequence: Synthetic oligonucleotide
cugugcaguccaugcacau

SEQ ID NO: 2114468 - RNA, 19 nt, Artificial Sequence
  Description of Artificial Sequence: Synthetic oligonucleotide
guccaccgggcuugggaua

SEQ ID NO: 2114469 - RNA, 19 nt, Artificial Sequence
  Description of Artificial Sequence: Synthetic oligonucleotide
gggcuucgcacaccucaca

SEQ ID NO: 2114470 - RNA, 19 nt, Artificial Sequence
  Description of Artificial Sequence: Synthetic oligonucleotide
cggggcuucgcacaccuca

SEQ ID NO: 2114471 - RNA, 19 nt, Artificial Sequence
  Description of Artificial Sequence: Synthetic oligonucleotide
acuauccggcccagaccaa

SEQ ID NO: 2114472 - RNA, 19 nt, Artificial Sequence
  Description of Artificial Sequence: Synthetic oligonucleotide
auccgcucggccggggcuu

SEQ ID NO: 2114473 - RNA, 19 nt, Artificial Sequence
  Description of Artificial Sequence: Synthetic oligonucleotide
gccuguaagaggacuuggu

SEQ ID NO: 2114474 - RNA, 19 nt, Artificial Sequence
  Description of Artificial Sequence: Synthetic oligonucleotide
cauccgcucggccggggcu

SEQ ID NO: 2114475 - RNA, 19 nt, Artificial Sequence
  Description of Artificial Sequence: Synthetic oligonucleotide
ggucguacgcagaggaauu

SEQ ID NO: 2114476 - RNA, 19 nt, Artificial Sequence
  Description of Artificial Sequence: Synthetic oligonucleotide
accgggcuugggauaggua

SEQ ID NO: 2114477 - RNA, 19 nt, Artificial Sequence
  Description of Artificial Sequence: Synthetic oligonucleotide
ggccagguggaaguagccu

SEQ ID NO: 2114478 - RNA, 19 nt, Artificial Sequence
  Description of Artificial Sequence: Synthetic oligonucleotide
gacgccccuugggcacagc

SEQ ID NO: 2114479 - RNA, 19 nt, Artificial Sequence
  Description of Artificial Sequence: Synthetic oligonucleotide
cggaaucgaagggagugga

SEQ ID NO: 2114480 - RNA, 19 nt, Artificial Sequence
  Description of Artificial Sequence: Synthetic oligonucleotide
  modified_base (8)..(8): a, c, u, g, unknown or other
ccugcacncuaagaugucu

SEQ ID NO: 2114481 - RNA, 19 nt, Artificial Sequence
  Description of Artificial Sequence: Synthetic oligonucleotide
  modified_base (16)..(16): a, c, u, g, unknown or other
ccucugcuccugcacncua

SEQ ID NO: 2114482 - RNA, 19 nt, Artificial Sequence
  Description of Artificial Sequence: Synthetic oligonucleotide
ccugaaucauuagccagau

SEQ ID NO: 2114483 - RNA, 19 nt, Artificial Sequence
  Description of Artificial Sequence: Synthetic oligonucleotide
cggguagauuacguucaug

SEQ ID NO: 2114484 - RNA, 19 nt, Artificial Sequence
  Description of Artificial Sequence: Synthetic oligonucleotide
gggcauggucguacgcaga

SEQ ID NO: 2114485 - RNA, 19 nt, Artificial Sequence
  Description of Artificial Sequence: Synthetic oligonucleotide
ggcaacaguguagcagaau

SEQ ID NO: 2114486 - RNA, 19 nt, Artificial Sequence
  Description of Artificial Sequence: Synthetic oligonucleotide
cccagaccaaggcuggccu

SEQ ID NO: 2114487 - RNA, 19 nt, Artificial Sequence
  Description of Artificial Sequence: Synthetic oligonucleotide
gccagcggguagauuacgu

SEQ ID NO: 2114488 - RNA, 19 nt, Artificial Sequence
  Description of Artificial Sequence: Synthetic oligonucleotide
cagguggaaguagccuccu

SEQ ID NO: 2114489 - RNA, 19 nt, Artificial Sequence
  Description of Artificial Sequence: Synthetic oligonucleotide
cguacacauucaugcggaa

SEQ ID NO: 2114490 - RNA, 19 nt, Artificial Sequence
  Description of Artificial Sequence: Synthetic oligonucleotide
cugcacuauccggcccaga

SEQ ID NO: 2114491 - RNA, 19 nt, Artificial Sequence
  Description of Artificial Sequence: Synthetic oligonucleotide
ccagcggguagauuacguu

SEQ ID NO: 2114492 - RNA, 19 nt, Artificial Sequence
  Description of Artificial Sequence: Synthetic oligonucleotide
gccagaugguaacgggcuu

SEQ ID NO: 2114493 - RNA, 19 nt, Artificial Sequence
  Description of Artificial Sequence: Synthetic oligonucleotide
ggagagccgcagggacagc

SEQ ID NO: 2114494 - RNA, 19 nt, Artificial Sequence
  Description of Artificial Sequence: Synthetic oligonucleotide
gcucggccggggcuucgca

SEQ ID NO: 2114495 - RNA, 19 nt, Artificial Sequence
  Description of Artificial Sequence: Synthetic oligonucleotide
gcggguagauuacguucau

SEQ ID NO: 2114496 - RNA, 19 nt, Artificial Sequence
  Description of Artificial Sequence: Synthetic oligonucleotide
cagcagagccgacgccccu

SEQ ID NO: 2114497 - RNA, 19 nt, Artificial Sequence
  Description of Artificial Sequence: Synthetic oligonucleotide
cgagccuguaagaggacuu

SEQ ID NO: 2114498 - RNA, 19 nt, Artificial Sequence
  Description of Artificial Sequence: Synthetic oligonucleotide
ccgagaccuuuguguacaa

SEQ ID NO: 2114499 - RNA, 19 nt, Artificial Sequence
  Description of Artificial Sequence: Synthetic oligonucleotide
ccgcagggacagccucuuc

SEQ ID NO: 2114500 - RNA, 19 nt, Artificial Sequence
  Description of Artificial Sequence: Synthetic oligonucleotide
ccggggcuucgcacaccuc

SEQ ID NO: 2114501 - RNA, 19 nt, Artificial Sequence
  Description of Artificial Sequence: Synthetic oligonucleotide
ccguugauuugaggacugu

SEQ ID NO: 2114502 - RNA, 19 nt, Artificial Sequence
  Description of Artificial Sequence: Synthetic oligonucleotide
cacagccagcggguagauu

SEQ ID NO: 2114503 - RNA, 19 nt, Artificial Sequence
  Description of Artificial Sequence: Synthetic oligonucleotide
gccgcagggacagccucuu

SEQ ID NO: 2114504 - RNA, 19 nt, Artificial Sequence
  Description of Artificial Sequence: Synthetic oligonucleotide
ccgacgccccuugggcaca

SEQ ID NO: 2114505 - RNA, 19 nt, Artificial Sequence
  Description of Artificial Sequence: Synthetic oligonucleotide
cgacgccccuugggcacag

SEQ ID NO: 2114506 - RNA, 19 nt, Artificial Sequence
  Description of Artificial Sequence: Synthetic oligonucleotide
gagaagauggcauacaggg

SEQ ID NO: 2114507 - RNA, 19 nt, Artificial Sequence
  Description of Artificial Sequence: Synthetic oligonucleotide
aaugucuggggacagacuc

SEQ ID NO: 2114508 - RNA, 19 nt, Artificial Sequence
  Description of Artificial Sequence: Synthetic oligonucleotide
uucauugucaaacuccacg

SEQ ID NO: 2114509 - RNA, 19 nt, Artificial Sequence
  Description of Artificial Sequence: Synthetic oligonucleotide
uaaucacaagcuaacagcg

SEQ ID NO: 2114510 - RNA, 19 nt, Artificial Sequence
  Description of Artificial Sequence: Synthetic oligonucleotide
uuuaaucacaagcuaacag

SEQ ID NO: 2114511 - RNA, 19 nt, Artificial Sequence
  Description of Artificial Sequence: Synthetic oligonucleotide
uuaaucacaagcuaacagc

SEQ ID NO: 2114512 - RNA, 19 nt, Artificial Sequence
  Description of Artificial Sequence: Synthetic oligonucleotide
agguuguugauauaaauag

SEQ ID NO: 2114513 - RNA, 19 nt, Artificial Sequence
  Description of Artificial Sequence: Synthetic oligonucleotide
auauaaauagugugguugg

SEQ ID NO: 2114514 - RNA, 19 nt, Artificial Sequence
  Description of Artificial Sequence: Synthetic oligonucleotide
aauagugugguugggacgg

SEQ ID NO: 2114515 - RNA, 19 nt, Artificial Sequence
  Description of Artificial Sequence: Synthetic oligonucleotide
aucacaagcuaacagcgcc

SEQ ID NO: 2114516 - RNA, 19 nt, Artificial Sequence
  Description of Artificial Sequence: Synthetic oligonucleotide
uucugagugaucuuaaagc

SEQ ID NO: 2114517 - RNA, 19 nt, Artificial Sequence
  Description of Artificial Sequence: Synthetic oligonucleotide
agacgcaccuccuugaagc

SEQ ID NO: 2114518 - RNA, 19 nt, Artificial Sequence
  Description of Artificial Sequence: Synthetic oligonucleotide
gagagcaugagcucguugg

SEQ ID NO: 2114519 - RNA, 19 nt, Artificial Sequence
  Description of Artificial Sequence: Synthetic oligonucleotide
aaauagugugguugggacg

SEQ ID NO: 2114520 - RNA, 19 nt, Artificial Sequence
  Description of Artificial Sequence: Synthetic oligonucleotide
gaugacaaaggccuggccc

SEQ ID NO: 2114521 - RNA, 19 nt, Artificial Sequence
  Description of Artificial Sequence: Synthetic oligonucleotide
aaaagagaucuucauggca

SEQ ID NO: 2114522 - RNA, 19 nt, Artificial Sequence
  Description of Artificial Sequence: Synthetic oligonucleotide
augggcuugucguagaagg

SEQ ID NO: 2114523 - RNA, 19 nt, Artificial Sequence
  Description of Artificial Sequence: Synthetic oligonucleotide
aucuuaaagccuugcaggg

SEQ ID NO: 2114524 - RNA, 19 nt, Artificial Sequence
  Description of Artificial Sequence: Synthetic oligonucleotide
acaaaggugcccuucaucu

SEQ ID NO: 2114525 - RNA, 19 nt, Artificial Sequence
  Description of Artificial Sequence: Synthetic oligonucleotide
ucaucgguggcauacccgg

SEQ ID NO: 2114526 - RNA, 19 nt, Artificial Sequence
  Description of Artificial Sequence: Synthetic oligonucleotide
ucuugaucuucucauugag

SEQ ID NO: 2114527 - RNA, 19 nt, Artificial Sequence
  Description of Artificial Sequence: Synthetic oligonucleotide
gaucuggccaaacugggag

SEQ ID NO: 2114528 - RNA, 19 nt, Artificial Sequence
  Description of Artificial Sequence: Synthetic oligonucleotide
cacuucauugucaaacucc

SEQ ID NO: 2114529 - RNA, 19 nt, Artificial Sequence
  Description of Artificial Sequence: Synthetic oligonucleotide
acuuuaaucacaagcuaac

SEQ ID NO: 2114530 - RNA, 19 nt, Artificial Sequence
  Description of Artificial Sequence: Synthetic oligonucleotide
gaacgcagggcauucgugg

SEQ ID NO: 2114531 - RNA, 19 nt, Artificial Sequence
  Description of Artificial Sequence: Synthetic oligonucleotide
gguugaaaagcauggagag

SEQ ID NO: 2114532 - RNA, 19 nt, Artificial Sequence
  Description of Artificial Sequence: Synthetic oligonucleotide
cuacuucuuggcaaaagag

SEQ ID NO: 2114533 - RNA, 19 nt, Artificial Sequence
  Description of Artificial Sequence: Synthetic oligonucleotide
aaucacaagcuaacagcgc

SEQ ID NO: 2114534 - RNA, 19 nt, Artificial Sequence
  Description of Artificial Sequence: Synthetic oligonucleotide
agcuaacagcgccaggugc

SEQ ID NO: 2114535 - RNA, 19 nt, Artificial Sequence
  Description of Artificial Sequence: Synthetic oligonucleotide
aaggcgaugucgugccgcc

SEQ ID NO: 2114536 - RNA, 19 nt, Artificial Sequence
  Description of Artificial Sequence: Synthetic oligonucleotide
ugagugaucuuaaagccuu

SEQ ID NO: 2114537 - RNA, 19 nt, Artificial Sequence
  Description of Artificial Sequence: Synthetic oligonucleotide
uauaaauagugugguuggg

SEQ ID NO: 2114538 - RNA, 19 nt, Artificial Sequence
  Description of Artificial Sequence: Synthetic oligonucleotide
aaaaccacuuuaaucacaa

SEQ ID NO: 2114539 - RNA, 19 nt, Artificial Sequence
  Description of Artificial Sequence: Synthetic oligonucleotide
uggcauguaaggaggcugg

SEQ ID NO: 2114540 - RNA, 19 nt, Artificial Sequence
  Description of Artificial Sequence: Synthetic oligonucleotide
caaaagagaucuucauggc

SEQ ID NO: 2114541 - RNA, 19 nt, Artificial Sequence
  Description of Artificial Sequence: Synthetic oligonucleotide
ugucaaacuccacgaaggc

SEQ ID NO: 2114542 - RNA, 19 nt, Artificial Sequence
  Description of Artificial Sequence: Synthetic oligonucleotide
cugguugaaaagcauggag

SEQ ID NO: 2114543 - RNA, 19 nt, Artificial Sequence
  Description of Artificial Sequence: Synthetic oligonucleotide
agucaucgguggcauaccc

SEQ ID NO: 2114544 - RNA, 19 nt, Artificial Sequence
  Description of Artificial Sequence: Synthetic oligonucleotide
ucacacgcggcucugagaa

SEQ ID NO: 2114545 - RNA, 19 nt, Artificial Sequence
  Description of Artificial Sequence: Synthetic oligonucleotide
uggcauacccgguacaggc

SEQ ID NO: 2114546 - RNA, 19 nt, Artificial Sequence
  Description of Artificial Sequence: Synthetic oligonucleotide
ugucgugccgcccagggac

SEQ ID NO: 2114547 - RNA, 19 nt, Artificial Sequence
  Description of Artificial Sequence: Synthetic oligonucleotide
uacuggaugcgcaugggcu

SEQ ID NO: 2114548 - RNA, 19 nt, Artificial Sequence
  Description of Artificial Sequence: Synthetic oligonucleotide
cuuaccuucagggacugag

SEQ ID NO: 2114549 - RNA, 19 nt, Artificial Sequence
  Description of Artificial Sequence: Synthetic oligonucleotide
ugagguuguugauauaaau

SEQ ID NO: 2114550 - RNA, 19 nt, Artificial Sequence
  Description of Artificial Sequence: Synthetic oligonucleotide
uuugcggucccucuccaca

SEQ ID NO: 2114551 - RNA, 19 nt, Artificial Sequence
  Description of Artificial Sequence: Synthetic oligonucleotide
gaugucgugccgcccaggg

SEQ ID NO: 2114552 - RNA, 19 nt, Artificial Sequence
  Description of Artificial Sequence: Synthetic oligonucleotide
uccacgaaggcgaugucgu

SEQ ID NO: 2114553 - RNA, 19 nt, Artificial Sequence
  Description of Artificial Sequence: Synthetic oligonucleotide
cuggguacaaugcugugug

SEQ ID NO: 2114554 - RNA, 19 nt, Artificial Sequence
  Description of Artificial Sequence: Synthetic oligonucleotide
agcaugagcucguuggucu

SEQ ID NO: 2114555 - RNA, 19 nt, Artificial Sequence
  Description of Artificial Sequence: Synthetic oligonucleotide
gaugcguggugccugaguc

SEQ ID NO: 2114556 - RNA, 19 nt, Artificial Sequence
  Description of Artificial Sequence: Synthetic oligonucleotide
uggcauguggugcaugaug

SEQ ID NO: 2114557 - RNA, 19 nt, Artificial Sequence
  Description of Artificial Sequence: Synthetic oligonucleotide
aggugcaaugucuggggac

SEQ ID NO: 2114558 - RNA, 19 nt, Artificial Sequence
  Description of Artificial Sequence: Synthetic oligonucleotide
cuuaaagccuugcagggca

SEQ ID NO: 2114559 - RNA, 19 nt, Artificial Sequence
  Description of Artificial Sequence: Synthetic oligonucleotide
uguguggcaaccacacacu

SEQ ID NO: 2114560 - RNA, 19 nt, Artificial Sequence
  Description of Artificial Sequence: Synthetic oligonucleotide
ugagucaucgguggcauac

SEQ ID NO: 2114561 - RNA, 19 nt, Artificial Sequence
  Description of Artificial Sequence: Synthetic oligonucleotide
uucauggcauuguucugag

SEQ ID NO: 2114562 - RNA, 19 nt, Artificial Sequence
  Description of Artificial Sequence: Synthetic oligonucleotide
auaaauagugugguuggga

SEQ ID NO: 2114563 - RNA, 19 nt, Artificial Sequence
  Description of Artificial Sequence: Synthetic oligonucleotide
cuggacagcgcccaccacg

SEQ ID NO: 2114564 - RNA, 19 nt, Artificial Sequence
  Description of Artificial Sequence: Synthetic oligonucleotide
uuaccuucagggacugagc

SEQ ID NO: 2114565 - RNA, 19 nt, Artificial Sequence
  Description of Artificial Sequence: Synthetic oligonucleotide
uccgaguccgucuuggcgu

SEQ ID NO: 2114566 - RNA, 19 nt, Artificial Sequence
  Description of Artificial Sequence: Synthetic oligonucleotide
uguaaggaggcuggccugg

SEQ ID NO: 2114567 - RNA, 19 nt, Artificial Sequence
  Description of Artificial Sequence: Synthetic oligonucleotide
aaaccacuuuaaucacaag

SEQ ID NO: 2114568 - RNA, 19 nt, Artificial Sequence
  Description of Artificial Sequence: Synthetic oligonucleotide
aagcuaacagcgccaggug

SEQ ID NO: 2114569 - RNA, 19 nt, Artificial Sequence
  Description of Artificial Sequence: Synthetic oligonucleotide
accacacacucacacgcgg

SEQ ID NO: 2114570 - RNA, 19 nt, Artificial Sequence
  Description of Artificial Sequence: Synthetic oligonucleotide
guugggacgggucucagga

SEQ ID NO: 2114571 - RNA, 19 nt, Artificial Sequence
  Description of Artificial Sequence: Synthetic oligonucleotide
ucguagaaggggaaacccu

SEQ ID NO: 2114572 - RNA, 19 nt, Artificial Sequence
  Description of Artificial Sequence: Synthetic oligonucleotide
uuuagcagcuggugucucc

SEQ ID NO: 2114573 - RNA, 19 nt, Artificial Sequence
  Description of Artificial Sequence: Synthetic oligonucleotide
auauccaggaucuggccaa

SEQ ID NO: 2114574 - RNA, 19 nt, Artificial Sequence
  Description of Artificial Sequence: Synthetic oligonucleotide
uccgucuuggcguacugga

SEQ ID NO: 2114575 - RNA, 19 nt, Artificial Sequence
  Description of Artificial Sequence: Synthetic oligonucleotide
ucuuaaagccuugcagggc

SEQ ID NO: 2114576 - RNA, 19 nt, Artificial Sequence
  Description of Artificial Sequence: Synthetic oligonucleotide
ggaaacccugcauggaacg

SEQ ID NO: 2114577 - RNA, 19 nt, Artificial Sequence
  Description of Artificial Sequence: Synthetic oligonucleotide
cuugcagggcaucucgagc

SEQ ID NO: 2114578 - RNA, 19 nt, Artificial Sequence
  Description of Artificial Sequence: Synthetic oligonucleotide
uggugcaugaugcguggug

SEQ ID NO: 2114579 - RNA, 19 nt, Artificial Sequence
  Description of Artificial Sequence: Synthetic oligonucleotide
ugggacgggucucaggaac

SEQ ID NO: 2114580 - RNA, 19 nt, Artificial Sequence
  Description of Artificial Sequence: Synthetic oligonucleotide
uucguggcgcugcugaccu

SEQ ID NO: 2114581 - RNA, 19 nt, Artificial Sequence
  Description of Artificial Sequence: Synthetic oligonucleotide
ucguuugcggucccucucc

SEQ ID NO: 2114582 - RNA, 19 nt, Artificial Sequence
  Description of Artificial Sequence: Synthetic oligonucleotide
ucggagagaggcugggcag

SEQ ID NO: 2114583 - RNA, 19 nt, Artificial Sequence
  Description of Artificial Sequence: Synthetic oligonucleotide
acaaugcuguguggcaacc

SEQ ID NO: 2114584 - RNA, 19 nt, Artificial Sequence
  Description of Artificial Sequence: Synthetic oligonucleotide
uugagguuguugauauaaa

SEQ ID NO: 2114585 - RNA, 19 nt, Artificial Sequence
  Description of Artificial Sequence: Synthetic oligonucleotide
acacgcggcucugagaagg

SEQ ID NO: 2114586 - RNA, 19 nt, Artificial Sequence
  Description of Artificial Sequence: Synthetic oligonucleotide
gggacuuaccuucagggac

SEQ ID NO: 2114587 - RNA, 19 nt, Artificial Sequence
  Description of Artificial Sequence: Synthetic oligonucleotide
aaacccugcauggaacgca

SEQ ID NO: 2114588 - RNA, 19 nt, Artificial Sequence
  Description of Artificial Sequence: Synthetic oligonucleotide
cucguuggucuccucaggc

SEQ ID NO: 2114589 - RNA, 19 nt, Artificial Sequence
  Description of Artificial Sequence: Synthetic oligonucleotide
uccucuucucucguuugcg

SEQ ID NO: 2114590 - RNA, 19 nt, Artificial Sequence
  Description of Artificial Sequence: Synthetic oligonucleotide
augcgcaugggcuugucgu

SEQ ID NO: 2114591 - RNA, 19 nt, Artificial Sequence
  Description of Artificial Sequence: Synthetic oligonucleotide
uacaaugcuguguggcaac

SEQ ID NO: 2114592 - RNA, 19 nt, Artificial Sequence
  Description of Artificial Sequence: Synthetic oligonucleotide
auucguggcgcugcugacc

SEQ ID NO: 2114593 - RNA, 19 nt, Artificial Sequence
  Description of Artificial Sequence: Synthetic oligonucleotide
gagguuguugauauaaaua

SEQ ID NO: 2114594 - RNA, 19 nt, Artificial Sequence
  Description of Artificial Sequence: Synthetic oligonucleotide
uuggcguacuggaugcgca

SEQ ID NO: 2114595 - RNA, 19 nt, Artificial Sequence
  Description of Artificial Sequence: Synthetic oligonucleotide
uggccaaacugggagaaga

SEQ ID NO: 2114596 - RNA, 19 nt, Artificial Sequence
  Description of Artificial Sequence: Synthetic oligonucleotide
uuguucugagugaucuuaa

SEQ ID NO: 2114597 - RNA, 19 nt, Artificial Sequence
  Description of Artificial Sequence: Synthetic oligonucleotide
agggcauucguggcgcugc

SEQ ID NO: 2114598 - RNA, 19 nt, Artificial Sequence
  Description of Artificial Sequence: Synthetic oligonucleotide
agacucuggguacaaugcu

SEQ ID NO: 2114599 - RNA, 19 nt, Artificial Sequence
  Description of Artificial Sequence: Synthetic oligonucleotide
guugaaaagcauggagagc

SEQ ID NO: 2114600 - RNA, 19 nt, Artificial Sequence
  Description of Artificial Sequence: Synthetic oligonucleotide
agcucguuggucuccucag

SEQ ID NO: 2114601 - RNA, 19 nt, Artificial Sequence
  Description of Artificial Sequence: Synthetic oligonucleotide
gacucuggguacaaugcug

SEQ ID NO: 2114602 - RNA, 19 nt, Artificial Sequence
  Description of Artificial Sequence: Synthetic oligonucleotide
uggggacagacucugggua

SEQ ID NO: 2114603 - RNA, 19 nt, Artificial Sequence
  Description of Artificial Sequence: Synthetic oligonucleotide
caccaggauauccaggauc

SEQ ID NO: 2114604 - RNA, 19 nt, Artificial Sequence
  Description of Artificial Sequence: Synthetic oligonucleotide
guccgaguccgucuuggcg

SEQ ID NO: 2114605 - RNA, 19 nt, Artificial Sequence
  Description of Artificial Sequence: Synthetic oligonucleotide
uggaacgcagggcauucgu

SEQ ID NO: 2114606 - RNA, 19 nt, Artificial Sequence
  Description of Artificial Sequence: Synthetic oligonucleotide
ggugucuccugacucuugg

SEQ ID NO: 2114607 - RNA, 19 nt, Artificial Sequence
  Description of Artificial Sequence: Synthetic oligonucleotide
uguucugagugaucuuaaa

SEQ ID NO: 2114608 - RNA, 19 nt, Artificial Sequence
  Description of Artificial Sequence: Synthetic oligonucleotide
caggcuccgagacaccagg

SEQ ID NO: 2114609 - RNA, 19 nt, Artificial Sequence
  Description of Artificial Sequence: Synthetic oligonucleotide
gggauucucggagagaggc

SEQ ID NO: 2114610 - RNA, 19 nt, Artificial Sequence
  Description of Artificial Sequence: Synthetic oligonucleotide
uggguacaaugcugugugg

SEQ ID NO: 2114611 - RNA, 19 nt, Artificial Sequence
  Description of Artificial Sequence: Synthetic oligonucleotide
auguaaggaggcuggccug

SEQ ID NO: 2114612 - RNA, 19 nt, Artificial Sequence
  Description of Artificial Sequence: Synthetic oligonucleotide
ugaggaacaggaugugauu

SEQ ID NO: 2114613 - RNA, 19 nt, Artificial Sequence
  Description of Artificial Sequence: Synthetic oligonucleotide
agagcaugagcucguuggu

SEQ ID NO: 2114614 - RNA, 19 nt, Artificial Sequence
  Description of Artificial Sequence: Synthetic oligonucleotide
guacuggaugcgcaugggc

SEQ ID NO: 2114615 - RNA, 19 nt, Artificial Sequence
  Description of Artificial Sequence: Synthetic oligonucleotide
aacccugcauggaacgcag

SEQ ID NO: 2114616 - RNA, 19 nt, Artificial Sequence
  Description of Artificial Sequence: Synthetic oligonucleotide
acaagcuaacagcgccagg

SEQ ID NO: 2114617 - RNA, 19 nt, Artificial Sequence
  Description of Artificial Sequence: Synthetic oligonucleotide
cauacccgguacaggcugg

SEQ ID NO: 2114618 - RNA, 19 nt, Artificial Sequence
  Description of Artificial Sequence: Synthetic oligonucleotide
aucuguccaggcaugagcu

SEQ ID NO: 2114619 - RNA, 19 nt, Artificial Sequence
  Description of Artificial Sequence: Synthetic oligonucleotide
acucacacgcggcucugag

SEQ ID NO: 2114620 - RNA, 19 nt, Artificial Sequence
  Description of Artificial Sequence: Synthetic oligonucleotide
cacgaaggcgaugucgugc

SEQ ID NO: 2114621 - RNA, 19 nt, Artificial Sequence
  Description of Artificial Sequence: Synthetic oligonucleotide
cugcauggaacgcagggca

SEQ ID NO: 2114622 - RNA, 19 nt, Artificial Sequence
  Description of Artificial Sequence: Synthetic oligonucleotide
gaaacccugcauggaacgc

SEQ ID NO: 2114623 - RNA, 19 nt, Artificial Sequence
  Description of Artificial Sequence: Synthetic oligonucleotide
ugguggcauguaaggaggc

SEQ ID NO: 2114624 - RNA, 19 nt, Artificial Sequence
  Description of Artificial Sequence: Synthetic oligonucleotide
gacgcaccuccuugaagcc

SEQ ID NO: 2114625 - RNA, 19 nt, Artificial Sequence
  Description of Artificial Sequence: Synthetic oligonucleotide
guggcauguaaggaggcug

SEQ ID NO: 2114626 - RNA, 19 nt, Artificial Sequence
  Description of Artificial Sequence: Synthetic oligonucleotide
ugaugcguggugccugagu

SEQ ID NO: 2114627 - RNA, 19 nt, Artificial Sequence
  Description of Artificial Sequence: Synthetic oligonucleotide
cacaaaggugcccuucauc

SEQ ID NO: 2114628 - RNA, 19 nt, Artificial Sequence
  Description of Artificial Sequence: Synthetic oligonucleotide
ggugggaucaugccaggug

SEQ ID NO: 2114629 - RNA, 19 nt, Artificial Sequence
  Description of Artificial Sequence: Synthetic oligonucleotide
cauguaaggaggcuggccu

SEQ ID NO: 2114630 - RNA, 19 nt, Artificial Sequence
  Description of Artificial Sequence: Synthetic oligonucleotide
uucucggagagaggcuggg

SEQ ID NO: 2114631 - RNA, 19 nt, Artificial Sequence
  Description of Artificial Sequence: Synthetic oligonucleotide
guagaaggggaaacccugc

SEQ ID NO: 2114632 - RNA, 19 nt, Artificial Sequence
  Description of Artificial Sequence: Synthetic oligonucleotide
ugauguccgaguccgucuu

SEQ ID NO: 2114633 - RNA, 19 nt, Artificial Sequence
  Description of Artificial Sequence: Synthetic oligonucleotide
auguccgaguccgucuugg

SEQ ID NO: 2114634 - RNA, 19 nt, Artificial Sequence
  Description of Artificial Sequence: Synthetic oligonucleotide
ucgguggcauacccgguac

SEQ ID NO: 2114635 - RNA, 19 nt, Artificial Sequence
  Description of Artificial Sequence: Synthetic oligonucleotide
cuuggcguacuggaugcgc

SEQ ID NO: 2114636 - RNA, 19 nt, Artificial Sequence
  Description of Artificial Sequence: Synthetic oligonucleotide
ucucguuugcggucccucu

SEQ ID NO: 2114637 - RNA, 19 nt, Artificial Sequence
  Description of Artificial Sequence: Synthetic oligonucleotide
gucaucgguggcauacccg

SEQ ID NO: 2114638 - RNA, 19 nt, Artificial Sequence
  Description of Artificial Sequence: Synthetic oligonucleotide
acccgguacaggcuggaca

SEQ ID NO: 2114639 - RNA, 19 nt, Artificial Sequence
  Description of Artificial Sequence: Synthetic oligonucleotide
gguacaaugcuguguggca

SEQ ID NO: 2114640 - RNA, 19 nt, Artificial Sequence
  Description of Artificial Sequence: Synthetic oligonucleotide
cacaagcuaacagcgccag

SEQ ID NO: 2114641 - RNA, 19 nt, Artificial Sequence
  Description of Artificial Sequence: Synthetic oligonucleotide
caggcaugagcugcugugg

SEQ ID NO: 2114642 - RNA, 19 nt, Artificial Sequence
  Description of Artificial Sequence: Synthetic oligonucleotide
ucucgagcugccccugccu

SEQ ID NO: 2114643 - RNA, 19 nt, Artificial Sequence
  Description of Artificial Sequence: Synthetic oligonucleotide
uggcaucuguccaggcaug

SEQ ID NO: 2114644 - RNA, 19 nt, Artificial Sequence
  Description of Artificial Sequence: Synthetic oligonucleotide
ggugcaugaugcguggugc

SEQ ID NO: 2114645 - RNA, 19 nt, Artificial Sequence
  Description of Artificial Sequence: Synthetic oligonucleotide
gggcuugucguagaagggg

SEQ ID NO: 2114646 - RNA, 19 nt, Artificial Sequence
  Description of Artificial Sequence: Synthetic oligonucleotide
accagacgcaccuccuuga

SEQ ID NO: 2114647 - RNA, 19 nt, Artificial Sequence
  Description of Artificial Sequence: Synthetic oligonucleotide
gagcucguuggucuccuca

SEQ ID NO: 2114648 - RNA, 19 nt, Artificial Sequence
  Description of Artificial Sequence: Synthetic oligonucleotide
ggguacaaugcuguguggc

SEQ ID NO: 2114649 - RNA, 19 nt, Artificial Sequence
  Description of Artificial Sequence: Synthetic oligonucleotide
cugggagaagauggcauac

SEQ ID NO: 2114650 - RNA, 19 nt, Artificial Sequence
  Description of Artificial Sequence: Synthetic oligonucleotide
cccgguacaggcuggacag

SEQ ID NO: 2114651 - RNA, 19 nt, Artificial Sequence
  Description of Artificial Sequence: Synthetic oligonucleotide
ucuuggcguacuggaugcg

SEQ ID NO: 2114652 - RNA, 19 nt, Artificial Sequence
  Description of Artificial Sequence: Synthetic oligonucleotide
gcguacuggaugcgcaugg

SEQ ID NO: 2114653 - RNA, 19 nt, Artificial Sequence
  Description of Artificial Sequence: Synthetic oligonucleotide
ugcccuucaucuuggcaau

SEQ ID NO: 2114654 - RNA, 19 nt, Artificial Sequence
  Description of Artificial Sequence: Synthetic oligonucleotide
ugccugagucaucgguggc

SEQ ID NO: 2114655 - RNA, 19 nt, Artificial Sequence
  Description of Artificial Sequence: Synthetic oligonucleotide
aucuucaggcuccgagaca

SEQ ID NO: 2114656 - RNA, 19 nt, Artificial Sequence
  Description of Artificial Sequence: Synthetic oligonucleotide
auucucggagagaggcugg

SEQ ID NO: 2114657 - RNA, 19 nt, Artificial Sequence
  Description of Artificial Sequence: Synthetic oligonucleotide
ggaggcgcuacuucuuggc

SEQ ID NO: 2114658 - RNA, 19 nt, Artificial Sequence
  Description of Artificial Sequence: Synthetic oligonucleotide
aggcgcuacuucuuggcaa

SEQ ID NO: 2114659 - RNA, 19 nt, Artificial Sequence
  Description of Artificial Sequence: Synthetic oligonucleotide
ugcguggugccugagucau

SEQ ID NO: 2114660 - RNA, 19 nt, Artificial Sequence
  Description of Artificial Sequence: Synthetic oligonucleotide
ggucucaggaacugccaug

SEQ ID NO: 2114661 - RNA, 19 nt, Artificial Sequence
  Description of Artificial Sequence: Synthetic oligonucleotide
uguccgaguccgucuuggc

SEQ ID NO: 2114662 - RNA, 19 nt, Artificial Sequence
  Description of Artificial Sequence: Synthetic oligonucleotide
agcgccaggugcaaugucu

SEQ ID NO: 2114663 - RNA, 19 nt, Artificial Sequence
  Description of Artificial Sequence: Synthetic oligonucleotide
gaggcgcuacuucuuggca

SEQ ID NO: 2114664 - RNA, 19 nt, Artificial Sequence
  Description of Artificial Sequence: Synthetic oligonucleotide
gguggcauacccgguacag

SEQ ID NO: 2114665 - RNA, 19 nt, Artificial Sequence
  Description of Artificial Sequence: Synthetic oligonucleotide
cagacgcaccuccuugaag

SEQ ID NO: 2114666 - RNA, 19 nt, Artificial Sequence
  Description of Artificial Sequence: Synthetic oligonucleotide
gcauacccgguacaggcug

SEQ ID NO: 2114667 - RNA, 19 nt, Artificial Sequence
  Description of Artificial Sequence: Synthetic oligonucleotide
cauggaacgcagggcauuc

SEQ ID NO: 2114668 - RNA, 19 nt, Artificial Sequence
  Description of Artificial Sequence: Synthetic oligonucleotide
gagucaucgguggcauacc

SEQ ID NO: 2114669 - RNA, 19 nt, Artificial Sequence
  Description of Artificial Sequence: Synthetic oligonucleotide
gagugaucuuaaagccuug

SEQ ID NO: 2114670 - RNA, 19 nt, Artificial Sequence
  Description of Artificial Sequence: Synthetic oligonucleotide
ccaggugguggcauguaag

SEQ ID NO: 2114671 - RNA, 19 nt, Artificial Sequence
  Description of Artificial Sequence: Synthetic oligonucleotide
gacuuaccuucagggacug

SEQ ID NO: 2114672 - RNA, 19 nt, Artificial Sequence
  Description of Artificial Sequence: Synthetic oligonucleotide
uugcggucccucuccacaa

SEQ ID NO: 2114673 - RNA, 19 nt, Artificial Sequence
  Description of Artificial Sequence: Synthetic oligonucleotide
augcguggugccugaguca

SEQ ID NO: 2114674 - RNA, 19 nt, Artificial Sequence
  Description of Artificial Sequence: Synthetic oligonucleotide
cauucguggcgcugcugac

SEQ ID NO: 2114675 - RNA, 19 nt, Artificial Sequence
  Description of Artificial Sequence: Synthetic oligonucleotide
cucguuugcggucccucuc

SEQ ID NO: 2114676 - RNA, 19 nt, Artificial Sequence
  Description of Artificial Sequence: Synthetic oligonucleotide
ugcgcaugggcuugucgua

SEQ ID NO: 2114677 - RNA, 19 nt, Artificial Sequence
  Description of Artificial Sequence: Synthetic oligonucleotide
acuccacgaaggcgauguc

SEQ ID NO: 2114678 - RNA, 19 nt, Artificial Sequence
  Description of Artificial Sequence: Synthetic oligonucleotide
aguccgucuuggcguacug

SEQ ID NO: 2114679 - RNA, 19 nt, Artificial Sequence
  Description of Artificial Sequence: Synthetic oligonucleotide
ccgcccagggaccagacgc

SEQ ID NO: 2114680 - RNA, 19 nt, Artificial Sequence
  Description of Artificial Sequence: Synthetic oligonucleotide
gagcaugagcucguugguc

SEQ ID NO: 2114681 - RNA, 19 nt, Artificial Sequence
  Description of Artificial Sequence: Synthetic oligonucleotide
gagcaaggccuggcggugg

SEQ ID NO: 2114682 - RNA, 19 nt, Artificial Sequence
  Description of Artificial Sequence: Synthetic oligonucleotide
gcauucguggcgcugcuga

SEQ ID NO: 2114683 - RNA, 19 nt, Artificial Sequence
  Description of Artificial Sequence: Synthetic oligonucleotide
ccaggcaugagcugcugug

SEQ ID NO: 2114684 - RNA, 19 nt, Artificial Sequence
  Description of Artificial Sequence: Synthetic oligonucleotide
cugacucuugggcuuccuc

SEQ ID NO: 2114685 - RNA, 19 nt, Artificial Sequence
  Description of Artificial Sequence: Synthetic oligonucleotide
ggaucuggccaggagcaag

SEQ ID NO: 2114686 - RNA, 19 nt, Artificial Sequence
  Description of Artificial Sequence: Synthetic oligonucleotide
gggcagguggcaucugucc

SEQ ID NO: 2114687 - RNA, 19 nt, Artificial Sequence
  Description of Artificial Sequence: Synthetic oligonucleotide
guggcaucuguccaggcau

SEQ ID NO: 2114688 - RNA, 19 nt, Artificial Sequence
  Description of Artificial Sequence: Synthetic oligonucleotide
gguggcaucuguccaggca

SEQ ID NO: 2114689 - RNA, 19 nt, Artificial Sequence
  Description of Artificial Sequence: Synthetic oligonucleotide
auagugugguugggacggg

SEQ ID NO: 2114690 - RNA, 19 nt, Artificial Sequence
  Description of Artificial Sequence: Synthetic oligonucleotide
ucucggagagaggcugggc

SEQ ID NO: 2114691 - RNA, 19 nt, Artificial Sequence
  Description of Artificial Sequence: Synthetic oligonucleotide
guccgucuuggcguacugg

SEQ ID NO: 2114692 - RNA, 19 nt, Artificial Sequence
  Description of Artificial Sequence: Synthetic oligonucleotide
cuccgagacaccaggauau

SEQ ID NO: 2114693 - RNA, 19 nt, Artificial Sequence
  Description of Artificial Sequence: Synthetic oligonucleotide
acgcggcucugagaaggcc

SEQ ID NO: 2114694 - RNA, 19 nt, Artificial Sequence
  Description of Artificial Sequence: Synthetic oligonucleotide
caugaugcguggugccuga

SEQ ID NO: 2114695 - RNA, 19 nt, Artificial Sequence
  Description of Artificial Sequence: Synthetic oligonucleotide
ggggacagacucuggguac

SEQ ID NO: 2114696 - RNA, 19 nt, Artificial Sequence
  Description of Artificial Sequence: Synthetic oligonucleotide
cacgcggcucugagaaggc

SEQ ID NO: 2114697 - RNA, 19 nt, Artificial Sequence
  Description of Artificial Sequence: Synthetic oligonucleotide
ccuggcggugggaucaugc

SEQ ID NO: 2114698 - RNA, 19 nt, Artificial Sequence
  Description of Artificial Sequence: Synthetic oligonucleotide
uggcguacuggaugcgcau

SEQ ID NO: 2114699 - RNA, 19 nt, Artificial Sequence
  Description of Artificial Sequence: Synthetic oligonucleotide
gcauuguucugagugaucu

SEQ ID NO: 2114700 - RNA, 19 nt, Artificial Sequence
  Description of Artificial Sequence: Synthetic oligonucleotide
uggcaaccacacacucaca

SEQ ID NO: 2114701 - RNA, 19 nt, Artificial Sequence
  Description of Artificial Sequence: Synthetic oligonucleotide
ggagagcaugagcucguug

SEQ ID NO: 2114702 - RNA, 19 nt, Artificial Sequence
  Description of Artificial Sequence: Synthetic oligonucleotide
gcucguuggucuccucagg

SEQ ID NO: 2114703 - RNA, 19 nt, Artificial Sequence
  Description of Artificial Sequence: Synthetic oligonucleotide
ccuccuugaagccagggaa

SEQ ID NO: 2114704 - RNA, 19 nt, Artificial Sequence
  Description of Artificial Sequence: Synthetic oligonucleotide
cuugucguagaaggggaaa

SEQ ID NO: 2114705 - RNA, 19 nt, Artificial Sequence
  Description of Artificial Sequence: Synthetic oligonucleotide
uugggacgggucucaggaa

SEQ ID NO: 2114706 - RNA, 19 nt, Artificial Sequence
  Description of Artificial Sequence: Synthetic oligonucleotide
ccuugcagggcaucucgag

SEQ ID NO: 2114707 - RNA, 19 nt, Artificial Sequence
  Description of Artificial Sequence: Synthetic oligonucleotide
gcuaacagcgccaggugca

SEQ ID NO: 2114708 - RNA, 19 nt, Artificial Sequence
  Description of Artificial Sequence: Synthetic oligonucleotide
aggccuggcggugggauca

SEQ ID NO: 2114709 - RNA, 19 nt, Artificial Sequence
  Description of Artificial Sequence: Synthetic oligonucleotide
ugaccuccuugaagaugac

SEQ ID NO: 2114710 - RNA, 19 nt, Artificial Sequence
  Description of Artificial Sequence: Synthetic oligonucleotide
caucucgagcugccccugc

SEQ ID NO: 2114711 - RNA, 19 nt, Artificial Sequence
  Description of Artificial Sequence: Synthetic oligonucleotide
gcauguaaggaggcuggcc

SEQ ID NO: 2114712 - RNA, 19 nt, Artificial Sequence
  Description of Artificial Sequence: Synthetic oligonucleotide
guuugcggucccucuccac

SEQ ID NO: 2114713 - RNA, 19 nt, Artificial Sequence
  Description of Artificial Sequence: Synthetic oligonucleotide
ggggacuuaccuucaggga

SEQ ID NO: 2114714 - RNA, 19 nt, Artificial Sequence
  Description of Artificial Sequence: Synthetic oligonucleotide
acagcgccaggugcaaugu

SEQ ID NO: 2114715 - RNA, 19 nt, Artificial Sequence
  Description of Artificial Sequence: Synthetic oligonucleotide
augucuggggacagacucu

SEQ ID NO: 2114716 - RNA, 19 nt, Artificial Sequence
  Description of Artificial Sequence: Synthetic oligonucleotide
auggagagcaugagcucgu

SEQ ID NO: 2114717 - RNA, 19 nt, Artificial Sequence
  Description of Artificial Sequence: Synthetic oligonucleotide
gggcaucucgagcugcccc

SEQ ID NO: 2114718 - RNA, 19 nt, Artificial Sequence
  Description of Artificial Sequence: Synthetic oligonucleotide
augucgugccgcccaggga

SEQ ID NO: 2114719 - RNA, 19 nt, Artificial Sequence
  Description of Artificial Sequence: Synthetic oligonucleotide
aggggaaacccugcaugga

SEQ ID NO: 2114720 - RNA, 19 nt, Artificial Sequence
  Description of Artificial Sequence: Synthetic oligonucleotide
caccuccuugaagccaggg

SEQ ID NO: 2114721 - RNA, 19 nt, Artificial Sequence
  Description of Artificial Sequence: Synthetic oligonucleotide
ugcggucccucuccacaaa

SEQ ID NO: 2114722 - RNA, 19 nt, Artificial Sequence
  Description of Artificial Sequence: Synthetic oligonucleotide
guaaggaggcuggccuggc

SEQ ID NO: 2114723 - RNA, 19 nt, Artificial Sequence
  Description of Artificial Sequence: Synthetic oligonucleotide
ccacacacucacacgcggc

SEQ ID NO: 2114724 - RNA, 19 nt, Artificial Sequence
  Description of Artificial Sequence: Synthetic oligonucleotide
cucucguuugcggucccuc

SEQ ID NO: 2114725 - RNA, 19 nt, Artificial Sequence
  Description of Artificial Sequence: Synthetic oligonucleotide
ggaacgcagggcauucgug

SEQ ID NO: 2114726 - RNA, 19 nt, Artificial Sequence
  Description of Artificial Sequence: Synthetic oligonucleotide
cucacacgcggcucugaga

SEQ ID NO: 2114727 - RNA, 19 nt, Artificial Sequence
  Description of Artificial Sequence: Synthetic oligonucleotide
cacacgcggcucugagaag

SEQ ID NO: 2114728 - RNA, 19 nt, Artificial Sequence
  Description of Artificial Sequence: Synthetic oligonucleotide
uccgagacaccaggauauc

SEQ ID NO: 2114729 - RNA, 19 nt, Artificial Sequence
  Description of Artificial Sequence: Synthetic oligonucleotide
caggugcaaugucugggga

SEQ ID NO: 2114730 - RNA, 19 nt, Artificial Sequence
  Description of Artificial Sequence: Synthetic oligonucleotide
aggcgaugucgugccgccc

SEQ ID NO: 2114731 - RNA, 19 nt, Artificial Sequence
  Description of Artificial Sequence: Synthetic oligonucleotide
cauguggugcaugaugcgu

SEQ ID NO: 2114732 - RNA, 19 nt, Artificial Sequence
  Description of Artificial Sequence: Synthetic oligonucleotide
ggcgaugucgugccgccca

SEQ ID NO: 2114733 - RNA, 19 nt, Artificial Sequence
  Description of Artificial Sequence: Synthetic oligonucleotide
ugguugggacgggucucag

SEQ ID NO: 2114734 - RNA, 19 nt, Artificial Sequence
  Description of Artificial Sequence: Synthetic oligonucleotide
ggcgcuacuucuuggcaaa

SEQ ID NO: 2114735 - RNA, 19 nt, Artificial Sequence
  Description of Artificial Sequence: Synthetic oligonucleotide
gcaugaugcguggugccug

SEQ ID NO: 2114736 - RNA, 19 nt, Artificial Sequence
  Description of Artificial Sequence: Synthetic oligonucleotide
ggucccucuccacaaaggu

SEQ ID NO: 2114737 - RNA, 19 nt, Artificial Sequence
  Description of Artificial Sequence: Synthetic oligonucleotide
cagggacuucuugagcuca

SEQ ID NO: 2114738 - RNA, 19 nt, Artificial Sequence
  Description of Artificial Sequence: Synthetic oligonucleotide
gcggucccucuccacaaag

SEQ ID NO: 2114739 - RNA, 19 nt, Artificial Sequence
  Description of Artificial Sequence: Synthetic oligonucleotide
gguacaggcuggacagcgc

SEQ ID NO: 2114740 - RNA, 19 nt, Artificial Sequence
  Description of Artificial Sequence: Synthetic oligonucleotide
ggcuggacagcgcccacca

SEQ ID NO: 2114741 - RNA, 19 nt, Artificial Sequence
  Description of Artificial Sequence: Synthetic oligonucleotide
ccgagacaccaggauaucc

SEQ ID NO: 2114742 - RNA, 19 nt, Artificial Sequence
  Description of Artificial Sequence: Synthetic oligonucleotide
gcuccgagacaccaggaua

SEQ ID NO: 2114743 - RNA, 19 nt, Artificial Sequence
  Description of Artificial Sequence: Synthetic oligonucleotide
uccugacucuugggcuucc

SEQ ID NO: 2114744 - RNA, 19 nt, Artificial Sequence
  Description of Artificial Sequence: Synthetic oligonucleotide
auacccgguacaggcugga

SEQ ID NO: 2114745 - RNA, 19 nt, Artificial Sequence
  Description of Artificial Sequence: Synthetic oligonucleotide
ucucucguuugcggucccu

SEQ ID NO: 2114746 - RNA, 19 nt, Artificial Sequence
  Description of Artificial Sequence: Synthetic oligonucleotide
ugagcucguuggucuccuc

SEQ ID NO: 2114747 - RNA, 19 nt, Artificial Sequence
  Description of Artificial Sequence: Synthetic oligonucleotide
cgcggcucugagaaggccc

SEQ ID NO: 2114748 - RNA, 19 nt, Artificial Sequence
  Description of Artificial Sequence: Synthetic oligonucleotide
caaugcuguguggcaacca

SEQ ID NO: 2114749 - RNA, 19 nt, Artificial Sequence
  Description of Artificial Sequence: Synthetic oligonucleotide
acacucacacgcggcucug

SEQ ID NO: 2114750 - RNA, 19 nt, Artificial Sequence
  Description of Artificial Sequence: Synthetic oligonucleotide
gugguugggacgggucuca

SEQ ID NO: 2114751 - RNA, 19 nt, Artificial Sequence
  Description of Artificial Sequence: Synthetic oligonucleotide
ggcauguaaggaggcuggc

SEQ ID NO: 2114752 - RNA, 19 nt, Artificial Sequence
  Description of Artificial Sequence: Synthetic oligonucleotide
ccacuuuaaucacaagcua

SEQ ID NO: 2114753 - RNA, 19 nt, Artificial Sequence
  Description of Artificial Sequence: Synthetic oligonucleotide
cauugagguuguugauaua

SEQ ID NO: 2114754 - RNA, 19 nt, Artificial Sequence
  Description of Artificial Sequence: Synthetic oligonucleotide
cuccugacucuugggcuuc

SEQ ID NO: 2114755 - RNA, 19 nt, Artificial Sequence
  Description of Artificial Sequence: Synthetic oligonucleotide
cgguacaggcuggacagcg

SEQ ID NO: 2114756 - RNA, 19 nt, Artificial Sequence
  Description of Artificial Sequence: Synthetic oligonucleotide
cuaacagcgccaggugcaa

SEQ ID NO: 2114757 - RNA, 19 nt, Artificial Sequence
  Description of Artificial Sequence: Synthetic oligonucleotide
caaugucuggggacagacu

SEQ ID NO: 2114758 - RNA, 19 nt, Artificial Sequence
  Description of Artificial Sequence: Synthetic oligonucleotide
uaacagcgccaggugcaau

SEQ ID NO: 2114759 - RNA, 19 nt, Artificial Sequence
  Description of Artificial Sequence: Synthetic oligonucleotide
ggacuuaccuucagggacu

SEQ ID NO: 2114760 - RNA, 19 nt, Artificial Sequence
  Description of Artificial Sequence: Synthetic oligonucleotide
uacccgguacaggcuggac

SEQ ID NO: 2114761 - RNA, 19 nt, Artificial Sequence
  Description of Artificial Sequence: Synthetic oligonucleotide
gcaugagcucguuggucuc

SEQ ID NO: 2114762 - RNA, 19 nt, Artificial Sequence
  Description of Artificial Sequence: Synthetic oligonucleotide
ggacgggucucaggaacug

SEQ ID NO: 2114763 - RNA, 19 nt, Artificial Sequence
  Description of Artificial Sequence: Synthetic oligonucleotide
gcgcaugggcuugucguag

SEQ ID NO: 2114764 - RNA, 19 nt, Artificial Sequence
  Description of Artificial Sequence: Synthetic oligonucleotide
gucgugccgcccagggacc

SEQ ID NO: 2114765 - RNA, 19 nt, Artificial Sequence
  Description of Artificial Sequence: Synthetic oligonucleotide
uggagagcaugagcucguu

SEQ ID NO: 2114766 - RNA, 19 nt, Artificial Sequence
  Description of Artificial Sequence: Synthetic oligonucleotide
gcggugggaucaugccagg

SEQ ID NO: 2114767 - RNA, 19 nt, Artificial Sequence
  Description of Artificial Sequence: Synthetic oligonucleotide
ucgugccgcccagggacca

SEQ ID NO: 2114768 - RNA, 19 nt, Artificial Sequence
  Description of Artificial Sequence: Synthetic oligonucleotide
gggacagacucuggguaca

SEQ ID NO: 2114769 - RNA, 19 nt, Artificial Sequence
  Description of Artificial Sequence: Synthetic oligonucleotide
ucuucucauugagguuguu

SEQ ID NO: 2114770 - RNA, 19 nt, Artificial Sequence
  Description of Artificial Sequence: Synthetic oligonucleotide
ggcaucucgagcugccccu

SEQ ID NO: 2114771 - RNA, 19 nt, Artificial Sequence
  Description of Artificial Sequence: Synthetic oligonucleotide
acuuaccuucagggacuga

SEQ ID NO: 2114772 - RNA, 19 nt, Artificial Sequence
  Description of Artificial Sequence: Synthetic oligonucleotide
ggcauuguucugagugauc

SEQ ID NO: 2114773 - RNA, 19 nt, Artificial Sequence
  Description of Artificial Sequence: Synthetic oligonucleotide
caaacuccacgaaggcgau

SEQ ID NO: 2114774 - RNA, 19 nt, Artificial Sequence
  Description of Artificial Sequence: Synthetic oligonucleotide
cguggcgcugcugaccucc

SEQ ID NO: 2114775 - RNA, 19 nt, Artificial Sequence
  Description of Artificial Sequence: Synthetic oligonucleotide
gcgaugucgugccgcccag

SEQ ID NO: 2114776 - RNA, 19 nt, Artificial Sequence
  Description of Artificial Sequence: Synthetic oligonucleotide
cagcgccaggugcaauguc

SEQ ID NO: 2114777 - RNA, 19 nt, Artificial Sequence
  Description of Artificial Sequence: Synthetic oligonucleotide
cauuguucugagugaucuu

SEQ ID NO: 2114778 - RNA, 19 nt, Artificial Sequence
  Description of Artificial Sequence: Synthetic oligonucleotide
agggacuucuugagcucau

SEQ ID NO: 2114779 - RNA, 19 nt, Artificial Sequence
  Description of Artificial Sequence: Synthetic oligonucleotide
caaaggugcccuucaucuu

SEQ ID NO: 2114780 - RNA, 19 nt, Artificial Sequence
  Description of Artificial Sequence: Synthetic oligonucleotide
guccaggcaugagcugcug

SEQ ID NO: 2114781 - RNA, 19 nt, Artificial Sequence
  Description of Artificial Sequence: Synthetic oligonucleotide
gaguccgucuuggcguacu

SEQ ID NO: 2114782 - RNA, 19 nt, Artificial Sequence
  Description of Artificial Sequence: Synthetic oligonucleotide
ccacgaaggcgaugucgug

SEQ ID NO: 2114783 - RNA, 19 nt, Artificial Sequence
  Description of Artificial Sequence: Synthetic oligonucleotide
cgcuacuucuuggcaaaag

SEQ ID NO: 2114784 - RNA, 19 nt, Artificial Sequence
  Description of Artificial Sequence: Synthetic oligonucleotide
gcgcugcugaccuccuuga

SEQ ID NO: 2114785 - RNA, 19 nt, Artificial Sequence
  Description of Artificial Sequence: Synthetic oligonucleotide
gagcugccccugccugcac

SEQ ID NO: 2114786 - RNA, 19 nt, Artificial Sequence
  Description of Artificial Sequence: Synthetic oligonucleotide
caaugauguccgaguccgu

SEQ ID NO: 2114787 - RNA, 19 nt, Artificial Sequence
  Description of Artificial Sequence: Synthetic oligonucleotide
cgcagggcauucguggcgc

SEQ ID NO: 2114788 - RNA, 19 nt, Artificial Sequence
  Description of Artificial Sequence: Synthetic oligonucleotide
gcaucucgagcugccccug

SEQ ID NO: 2114789 - RNA, 19 nt, Artificial Sequence
  Description of Artificial Sequence: Synthetic oligonucleotide
ggcauucguggcgcugcug

SEQ ID NO: 2114790 - RNA, 19 nt, Artificial Sequence
  Description of Artificial Sequence: Synthetic oligonucleotide
ggcuccgagacaccaggau

SEQ ID NO: 2114791 - RNA, 19 nt, Artificial Sequence
  Description of Artificial Sequence: Synthetic oligonucleotide
caucgguggcauacccggu

SEQ ID NO: 2114792 - RNA, 19 nt, Artificial Sequence
  Description of Artificial Sequence: Synthetic oligonucleotide
cagggaccagacgcaccuc

SEQ ID NO: 2114793 - RNA, 19 nt, Artificial Sequence
  Description of Artificial Sequence: Synthetic oligonucleotide
ggauucucggagagaggcu

SEQ ID NO: 2114794 - RNA, 19 nt, Artificial Sequence
  Description of Artificial Sequence: Synthetic oligonucleotide
cacucacacgcggcucuga

SEQ ID NO: 2114795 - RNA, 19 nt, Artificial Sequence
  Description of Artificial Sequence: Synthetic oligonucleotide
ggcauacccgguacaggcu

SEQ ID NO: 2114796 - RNA, 19 nt, Artificial Sequence
  Description of Artificial Sequence: Synthetic oligonucleotide
gggacgggucucaggaacu

SEQ ID NO: 2114797 - RNA, 19 nt, Artificial Sequence
  Description of Artificial Sequence: Synthetic oligonucleotide
ccagacgcaccuccuugaa

SEQ ID NO: 2114798 - RNA, 19 nt, Artificial Sequence
  Description of Artificial Sequence: Synthetic oligonucleotide
guggugcaugaugcguggu

SEQ ID NO: 2114799 - RNA, 19 nt, Artificial Sequence
  Description of Artificial Sequence: Synthetic oligonucleotide
ggaccagacgcaccuccuu

SEQ ID NO: 2114800 - RNA, 19 nt, Artificial Sequence
  Description of Artificial Sequence: Synthetic oligonucleotide
ccgguacaggcuggacagc

SEQ ID NO: 2114801 - RNA, 19 nt, Artificial Sequence
  Description of Artificial Sequence: Synthetic oligonucleotide
gggaucuggccaggagcaa

SEQ ID NO: 2114802 - RNA, 19 nt, Artificial Sequence
  Description of Artificial Sequence: Synthetic oligonucleotide
cgaugucgugccgcccagg

SEQ ID NO: 2114803 - RNA, 19 nt, Artificial Sequence
  Description of Artificial Sequence: Synthetic oligonucleotide
cgcaugggcuugucguaga

SEQ ID NO: 2114804 - RNA, 19 nt, Artificial Sequence
  Description of Artificial Sequence: Synthetic oligonucleotide
ccugagucaucgguggcau

SEQ ID NO: 2114805 - RNA, 19 nt, Artificial Sequence
  Description of Artificial Sequence: Synthetic oligonucleotide
cguuugcggucccucucca

SEQ ID NO: 2114806 - RNA, 19 nt, Artificial Sequence
  Description of Artificial Sequence: Synthetic oligonucleotide
ccgaguccgucuuggcgua

SEQ ID NO: 2114807 - RNA, 19 nt, Artificial Sequence
  Description of Artificial Sequence: Synthetic oligonucleotide
gcugccccugccugcacuu

SEQ ID NO: 2114808 - RNA, 19 nt, Artificial Sequence
  Description of Artificial Sequence: Synthetic oligonucleotide
gggcauucguggcgcugcu

SEQ ID NO: 2114809 - RNA, 19 nt, Artificial Sequence
  Description of Artificial Sequence: Synthetic oligonucleotide
gcgcuacuucuuggcaaaa

SEQ ID NO: 2114810 - RNA, 19 nt, Artificial Sequence
  Description of Artificial Sequence: Synthetic oligonucleotide
ccacaaaggugcccuucau

SEQ ID NO: 2114811 - RNA, 19 nt, Artificial Sequence
  Description of Artificial Sequence: Synthetic oligonucleotide
ccgucuuggcguacuggau

SEQ ID NO: 2114812 - RNA, 19 nt, Artificial Sequence
  Description of Artificial Sequence: Synthetic oligonucleotide
gccuggcggugggaucaug

SEQ ID NO: 2114813 - RNA, 19 nt, Artificial Sequence
  Description of Artificial Sequence: Synthetic oligonucleotide
cgguggcauacccgguaca

SEQ ID NO: 2114814 - RNA, 19 nt, Artificial Sequence
  Description of Artificial Sequence: Synthetic oligonucleotide
guggcgcugcugaccuccu

SEQ ID NO: 2114815 - RNA, 19 nt, Artificial Sequence
  Description of Artificial Sequence: Synthetic oligonucleotide
ccacccugaacagccuuuu

SEQ ID NO: 2114816 - RNA, 19 nt, Artificial Sequence
  Description of Artificial Sequence: Synthetic oligonucleotide
ccugacucuugggcuuccu

SEQ ID NO: 2114817 - RNA, 19 nt, Artificial Sequence
  Description of Artificial Sequence: Synthetic oligonucleotide
gccccugccugcacuucau

SEQ ID NO: 2114818 - RNA, 19 nt, Artificial Sequence
  Description of Artificial Sequence: Synthetic oligonucleotide
ggccuggcauguggugcau

SEQ ID NO: 2114819 - RNA, 19 nt, Artificial Sequence
  Description of Artificial Sequence: Synthetic oligonucleotide
ggccuggcggugggaucau

SEQ ID NO: 2114820 - RNA, 19 nt, Artificial Sequence
  Description of Artificial Sequence: Synthetic oligonucleotide
uuucauauaaugaacccgg

SEQ ID NO: 2114821 - RNA, 19 nt, Artificial Sequence
  Description of Artificial Sequence: Synthetic oligonucleotide
aacuuuaacuuuuaaugug

SEQ ID NO: 2114822 - RNA, 19 nt, Artificial Sequence
  Description of Artificial Sequence: Synthetic oligonucleotide
aaagauuucuuuuccuugu

SEQ ID NO: 2114823 - RNA, 19 nt, Artificial Sequence
  Description of Artificial Sequence: Synthetic oligonucleotide
ugauuguucacaaucuucu

SEQ ID NO: 2114824 - RNA, 19 nt, Artificial Sequence
  Description of Artificial Sequence: Synthetic oligonucleotide
uucauuauuguuuguagcu

SEQ ID NO: 2114825 - RNA, 19 nt, Artificial Sequence
  Description of Artificial Sequence: Synthetic oligonucleotide
cuuuuaauguguucugugg

SEQ ID NO: 2114826 - RNA, 19 nt, Artificial Sequence
  Description of Artificial Sequence: Synthetic oligonucleotide
guugaagucaucuugguga

SEQ ID NO: 2114827 - RNA, 19 nt, Artificial Sequence
  Description of Artificial Sequence: Synthetic oligonucleotide
auuucauauaaugaacccg

SEQ ID NO: 2114828 - RNA, 19 nt, Artificial Sequence
  Description of Artificial Sequence: Synthetic oligonucleotide
ugaaaugucaggcucugga

SEQ ID NO: 2114829 - RNA, 19 nt, Artificial Sequence
  Description of Artificial Sequence: Synthetic oligonucleotide
ucgugaauuucauauaaug

SEQ ID NO: 2114830 - RNA, 19 nt, Artificial Sequence
  Description of Artificial Sequence: Synthetic oligonucleotide
uuuccuuuagaccacccca

SEQ ID NO: 2114831 - RNA, 19 nt, Artificial Sequence
  Description of Artificial Sequence: Synthetic oligonucleotide
aaaauauuccuggauggug

SEQ ID NO: 2114832 - RNA, 19 nt, Artificial Sequence
  Description of Artificial Sequence: Synthetic oligonucleotide
uuucgugaauuucauauaa

SEQ ID NO: 2114833 - RNA, 19 nt, Artificial Sequence
  Description of Artificial Sequence: Synthetic oligonucleotide
auuucuacccgcccuggcc

SEQ ID NO: 2114834 - RNA, 19 nt, Artificial Sequence
  Description of Artificial Sequence: Synthetic oligonucleotide
guugugguagucaucaugg

SEQ ID NO: 2114835 - RNA, 19 nt, Artificial Sequence
  Description of Artificial Sequence: Synthetic oligonucleotide
ugugguagucaucauggag

SEQ ID NO: 2114836 - RNA, 19 nt, Artificial Sequence
  Description of Artificial Sequence: Synthetic oligonucleotide
aaauuugccgagcgccgcc

SEQ ID NO: 2114837 - RNA, 19 nt, Artificial Sequence
  Description of Artificial Sequence: Synthetic oligonucleotide
uuuaacugggccauccucu

SEQ ID NO: 2114838 - RNA, 19 nt, Artificial Sequence
  Description of Artificial Sequence: Synthetic oligonucleotide
aaugucaggcucuggagcu

SEQ ID NO: 2114839 - RNA, 19 nt, Artificial Sequence
  Description of Artificial Sequence: Synthetic oligonucleotide
uucucaagcauccucuggc

SEQ ID NO: 2114840 - RNA, 19 nt, Artificial Sequence
  Description of Artificial Sequence: Synthetic oligonucleotide
gacauugucgcaaauuugc

SEQ ID NO: 2114841 - RNA, 19 nt, Artificial Sequence
  Description of Artificial Sequence: Synthetic oligonucleotide
cauuauuguuuguagcucc

SEQ ID NO: 2114842 - RNA, 19 nt, Artificial Sequence
  Description of Artificial Sequence: Synthetic oligonucleotide
auugucgcaaauuugccga

SEQ ID NO: 2114843 - RNA, 19 nt, Artificial Sequence
  Description of Artificial Sequence: Synthetic oligonucleotide
uguggugucuauuucuacc

SEQ ID NO: 2114844 - RNA, 19 nt, Artificial Sequence
  Description of Artificial Sequence: Synthetic oligonucleotide
uuuaauguguucuguggcu

SEQ ID NO: 2114845 - RNA, 19 nt, Artificial Sequence
  Description of Artificial Sequence: Synthetic oligonucleotide
ucaucugcaauggaggugc

SEQ ID NO: 2114846 - RNA, 19 nt, Artificial Sequence
  Description of Artificial Sequence: Synthetic oligonucleotide
auuguuuguagcuccaagu

SEQ ID NO: 2114847 - RNA, 19 nt, Artificial Sequence
  Description of Artificial Sequence: Synthetic oligonucleotide
ugggugauuguucacaauc

SEQ ID NO: 2114848 - RNA, 19 nt, Artificial Sequence
  Description of Artificial Sequence: Synthetic oligonucleotide
ucuauuucuacccgcccug

SEQ ID NO: 2114849 - RNA, 19 nt, Artificial Sequence
  Description of Artificial Sequence: Synthetic oligonucleotide
aaauauuccuggaugguga

SEQ ID NO: 2114850 - RNA, 19 nt, Artificial Sequence
  Description of Artificial Sequence: Synthetic oligonucleotide
gaaaugucaggcucuggag

SEQ ID NO: 2114851 - RNA, 19 nt, Artificial Sequence
  Description of Artificial Sequence: Synthetic oligonucleotide
uguccgaggaaucugcugu

SEQ ID NO: 2114852 - RNA, 19 nt, Artificial Sequence
  Description of Artificial Sequence: Synthetic oligonucleotide
cauugucgcaaauuugccg

SEQ ID NO: 2114853 - RNA, 19 nt, Artificial Sequence
  Description of Artificial Sequence: Synthetic oligonucleotide
ucugcaauggaggugcugc

SEQ ID NO: 2114854 - RNA, 19 nt, Artificial Sequence
  Description of Artificial Sequence: Synthetic oligonucleotide
guugagugcugccaaaagc

SEQ ID NO: 2114855 - RNA, 19 nt, Artificial Sequence
  Description of Artificial Sequence: Synthetic oligonucleotide
aagucggucucucuucuug

SEQ ID NO: 2114856 - RNA, 19 nt, Artificial Sequence
  Description of Artificial Sequence: Synthetic oligonucleotide
agauccuucccuuucguga

SEQ ID NO: 2114857 - RNA, 19 nt, Artificial Sequence
  Description of Artificial Sequence: Synthetic oligonucleotide
ucgacauugucgcaaauuu

SEQ ID NO: 2114858 - RNA, 19 nt, Artificial Sequence
  Description of Artificial Sequence: Synthetic oligonucleotide
uccgccagcaucgacauug

SEQ ID NO: 2114859 - RNA, 19 nt, Artificial Sequence
  Description of Artificial Sequence: Synthetic oligonucleotide
uguugagugcugccaaaag

SEQ ID NO: 2114860 - RNA, 19 nt, Artificial Sequence
  Description of Artificial Sequence: Synthetic oligonucleotide
uuuuaugucgcuuggccuu

SEQ ID NO: 2114861 - RNA, 19 nt, Artificial Sequence
  Description of Artificial Sequence: Synthetic oligonucleotide
uuuuaacugggccauccuc

SEQ ID NO: 2114862 - RNA, 19 nt, Artificial Sequence
  Description of Artificial Sequence: Synthetic oligonucleotide
gcugcaaccauccugagca

SEQ ID NO: 2114863 - RNA, 19 nt, Artificial Sequence
  Description of Artificial Sequence: Synthetic oligonucleotide
ggcuucagaacacucaucc

SEQ ID NO: 2114864 - RNA, 19 nt, Artificial Sequence
  Description of Artificial Sequence: Synthetic oligonucleotide
aguccauuucugcuuccgc

SEQ ID NO: 2114865 - RNA, 19 nt, Artificial Sequence
  Description of Artificial Sequence: Synthetic oligonucleotide
cuucaggacaucacccugg

SEQ ID NO: 2114866 - RNA, 19 nt, Artificial Sequence
  Description of Artificial Sequence: Synthetic oligonucleotide
gaacacucauccccgcugg

SEQ ID NO: 2114867 - RNA, 19 nt, Artificial Sequence
  Description of Artificial Sequence: Synthetic oligonucleotide
ucuucaaggcuaaaagauu

SEQ ID NO: 2114868 - RNA, 19 nt, Artificial Sequence
  Description of Artificial Sequence: Synthetic oligonucleotide
auauaaugaacccgguuuu

SEQ ID NO: 2114869 - RNA, 19 nt, Artificial Sequence
  Description of Artificial Sequence: Synthetic oligonucleotide
gucgcaaauuugccgagcg

SEQ ID NO: 2114870 - RNA, 19 nt, Artificial Sequence
  Description of Artificial Sequence: Synthetic oligonucleotide
uggugucuauuucuacccg

SEQ ID NO: 2114871 - RNA, 19 nt, Artificial Sequence
  Description of Artificial Sequence: Synthetic oligonucleotide
guggugucuauuucuaccc

SEQ ID NO: 2114872 - RNA, 19 nt, Artificial Sequence
  Description of Artificial Sequence: Synthetic oligonucleotide
aauauuccuggauggugaa

SEQ ID NO: 2114873 - RNA, 19 nt, Artificial Sequence
  Description of Artificial Sequence: Synthetic oligonucleotide
uuuagaccaccccaucuuc

SEQ ID NO: 2114874 - RNA, 19 nt, Artificial Sequence
  Description of Artificial Sequence: Synthetic oligonucleotide
uuccauucaucagaggucu

SEQ ID NO: 2114875 - RNA, 19 nt, Artificial Sequence
  Description of Artificial Sequence: Synthetic oligonucleotide
ugagcagucuucugguucu

SEQ ID NO: 2114876 - RNA, 19 nt, Artificial Sequence
  Description of Artificial Sequence: Synthetic oligonucleotide
agaacacucauccccgcug

SEQ ID NO: 2114877 - RNA, 19 nt, Artificial Sequence
  Description of Artificial Sequence: Synthetic oligonucleotide
gaaucaucauugcuccaug

SEQ ID NO: 2114878 - RNA, 19 nt, Artificial Sequence
  Description of Artificial Sequence: Synthetic oligonucleotide
ucauauaaugaacccgguu

SEQ ID NO: 2114879 - RNA, 19 nt, Artificial Sequence
  Description of Artificial Sequence: Synthetic oligonucleotide
acauugucgcaaauuugcc

SEQ ID NO: 2114880 - RNA, 19 nt, Artificial Sequence
  Description of Artificial Sequence: Synthetic oligonucleotide
uuucgcuccgggaggacag

SEQ ID NO: 2114881 - RNA, 19 nt, Artificial Sequence
  Description of Artificial Sequence: Synthetic oligonucleotide
gucgguuucgcuccgggag

SEQ ID NO: 2114882 - RNA, 19 nt, Artificial Sequence
  Description of Artificial Sequence: Synthetic oligonucleotide
uuucuacccgcccuggccu

SEQ ID NO: 2114883 - RNA, 19 nt, Artificial Sequence
  Description of Artificial Sequence: Synthetic oligonucleotide
uguggcaaguguugagugc

SEQ ID NO: 2114884 - RNA, 19 nt, Artificial Sequence
  Description of Artificial Sequence: Synthetic oligonucleotide
ugagugcugccaaaagcug

SEQ ID NO: 2114885 - RNA, 19 nt, Artificial Sequence
  Description of Artificial Sequence: Synthetic oligonucleotide
cuccaugcaguguuucugg

SEQ ID NO: 2114886 - RNA, 19 nt, Artificial Sequence
  Description of Artificial Sequence: Synthetic oligonucleotide
aucauugcuccaugcagug

SEQ ID NO: 2114887 - RNA, 19 nt, Artificial Sequence
  Description of Artificial Sequence: Synthetic oligonucleotide
uucauauaaugaacccggu

SEQ ID NO: 2114888 - RNA, 19 nt, Artificial Sequence
  Description of Artificial Sequence: Synthetic oligonucleotide
ugucuauuucuacccgccc

SEQ ID NO: 2114889 - RNA, 19 nt, Artificial Sequence
  Description of Artificial Sequence: Synthetic oligonucleotide
gaaucugcuguuuccugac

SEQ ID NO: 2114890 - RNA, 19 nt, Artificial Sequence
  Description of Artificial Sequence: Synthetic oligonucleotide
cauccucuggccaaacuug

SEQ ID NO: 2114891 - RNA, 19 nt, Artificial Sequence
  Description of Artificial Sequence: Synthetic oligonucleotide
ucauuauuguuuguagcuc

SEQ ID NO: 2114892 - RNA, 19 nt, Artificial Sequence
  Description of Artificial Sequence: Synthetic oligonucleotide
uuggccuuguguuggggag

SEQ ID NO: 2114893 - RNA, 19 nt, Artificial Sequence
  Description of Artificial Sequence: Synthetic oligonucleotide
ucucaagcauccucuggcc

SEQ ID NO: 2114894 - RNA, 19 nt, Artificial Sequence
  Description of Artificial Sequence: Synthetic oligonucleotide
aaguguugagugcugccaa

SEQ ID NO: 2114895 - RNA, 19 nt, Artificial Sequence
  Description of Artificial Sequence: Synthetic oligonucleotide
gaguucuccacaucuguga

SEQ ID NO: 2114896 - RNA, 19 nt, Artificial Sequence
  Description of Artificial Sequence: Synthetic oligonucleotide
ccagcaucgacauugucgc

SEQ ID NO: 2114897 - RNA, 19 nt, Artificial Sequence
  Description of Artificial Sequence: Synthetic oligonucleotide
aaaaugcaguccaggucgg

SEQ ID NO: 2114898 - RNA, 19 nt, Artificial Sequence
  Description of Artificial Sequence: Synthetic oligonucleotide
uguucacaaucuucuucag

SEQ ID NO: 2114899 - RNA, 19 nt, Artificial Sequence
  Description of Artificial Sequence: Synthetic oligonucleotide
ucaagcauccucuggccaa

SEQ ID NO: 2114900 - RNA, 19 nt, Artificial Sequence
  Description of Artificial Sequence: Synthetic oligonucleotide
ugcugccaaaagcugguug

SEQ ID NO: 2114901 - RNA, 19 nt, Artificial Sequence
  Description of Artificial Sequence: Synthetic oligonucleotide
acuucaggacaucacccug

SEQ ID NO: 2114902 - RNA, 19 nt, Artificial Sequence
  Description of Artificial Sequence: Synthetic oligonucleotide
uuggacuucaggacaucac

SEQ ID NO: 2114903 - RNA, 19 nt, Artificial Sequence
  Description of Artificial Sequence: Synthetic oligonucleotide
uuaauguguucuguggcuc

SEQ ID NO: 2114904 - RNA, 19 nt, Artificial Sequence
  Description of Artificial Sequence: Synthetic oligonucleotide
acucauccccgcugggacc

SEQ ID NO: 2114905 - RNA, 19 nt, Artificial Sequence
  Description of Artificial Sequence: Synthetic oligonucleotide
aacacucauccccgcuggg

SEQ ID NO: 2114906 - RNA, 19 nt, Artificial Sequence
  Description of Artificial Sequence: Synthetic oligonucleotide
uucgugaauuucauauaau

SEQ ID NO: 2114907 - RNA, 19 nt, Artificial Sequence
  Description of Artificial Sequence: Synthetic oligonucleotide
ugaccgggagcccaggggu

SEQ ID NO: 2114908 - RNA, 19 nt, Artificial Sequence
  Description of Artificial Sequence: Synthetic oligonucleotide
uauuucuacccgcccuggc

SEQ ID NO: 2114909 - RNA, 19 nt, Artificial Sequence
  Description of Artificial Sequence: Synthetic oligonucleotide
guguuucugggauccacag

SEQ ID NO: 2114910 - RNA, 19 nt, Artificial Sequence
  Description of Artificial Sequence: Synthetic oligonucleotide
uucuugaucacaggcucca

SEQ ID NO: 2114911 - RNA, 19 nt, Artificial Sequence
  Description of Artificial Sequence: Synthetic oligonucleotide
aggcuaaaagauuucuuuu

SEQ ID NO: 2114912 - RNA, 19 nt, Artificial Sequence
  Description of Artificial Sequence: Synthetic oligonucleotide
gccagcaucgacauugucg

SEQ ID NO: 2114913 - RNA, 19 nt, Artificial Sequence
  Description of Artificial Sequence: Synthetic oligonucleotide
uuccuuuagaccaccccau

SEQ ID NO: 2114914 - RNA, 19 nt, Artificial Sequence
  Description of Artificial Sequence: Synthetic oligonucleotide
ugcuccugagcucccaaac

SEQ ID NO: 2114915 - RNA, 19 nt, Artificial Sequence
  Description of Artificial Sequence: Synthetic oligonucleotide
ucagcuucggcagaggcuu

SEQ ID NO: 2114916 - RNA, 19 nt, Artificial Sequence
  Description of Artificial Sequence: Synthetic oligonucleotide
ucugaccgggagcccaggg

SEQ ID NO: 2114917 - RNA, 19 nt, Artificial Sequence
  Description of Artificial Sequence: Synthetic oligonucleotide
ugcugcaaccauccugagc

SEQ ID NO: 2114918 - RNA, 19 nt, Artificial Sequence
  Description of Artificial Sequence: Synthetic oligonucleotide
aagucaucuggaagcuuuc

SEQ ID NO: 2114919 - RNA, 19 nt, Artificial Sequence
  Description of Artificial Sequence: Synthetic oligonucleotide
uuucacgggugccuucucu

SEQ ID NO: 2114920 - RNA, 19 nt, Artificial Sequence
  Description of Artificial Sequence: Synthetic oligonucleotide
uguggcuccuugcuccuga

SEQ ID NO: 2114921 - RNA, 19 nt, Artificial Sequence
  Description of Artificial Sequence: Synthetic oligonucleotide
ugagcucccaaacccuuuc

SEQ ID NO: 2114922 - RNA, 19 nt, Artificial Sequence
  Description of Artificial Sequence: Synthetic oligonucleotide
ugcagcucaagucggucuc

SEQ ID NO: 2114923 - RNA, 19 nt, Artificial Sequence
  Description of Artificial Sequence: Synthetic oligonucleotide
aucagaggucucugaaaug

SEQ ID NO: 2114924 - RNA, 19 nt, Artificial Sequence
  Description of Artificial Sequence: Synthetic oligonucleotide
uugucgcaaauuugccgag

SEQ ID NO: 2114925 - RNA, 19 nt, Artificial Sequence
  Description of Artificial Sequence: Synthetic oligonucleotide
uccaagucccagauuguua

SEQ ID NO: 2114926 - RNA, 19 nt, Artificial Sequence
  Description of Artificial Sequence: Synthetic oligonucleotide
uuuaugucgcuuggccuug

SEQ ID NO: 2114927 - RNA, 19 nt, Artificial Sequence
  Description of Artificial Sequence: Synthetic oligonucleotide
ugcugggugauuguucaca

SEQ ID NO: 2114928 - RNA, 19 nt, Artificial Sequence
  Description of Artificial Sequence: Synthetic oligonucleotide
uuguccgaggaaucugcug

SEQ ID NO: 2114929 - RNA, 19 nt, Artificial Sequence
  Description of Artificial Sequence: Synthetic oligonucleotide
ucgcuuggccuuguguugg

SEQ ID NO: 2114930 - RNA, 19 nt, Artificial Sequence
  Description of Artificial Sequence: Synthetic oligonucleotide
aggaaucugcuguuuccug

SEQ ID NO: 2114931 - RNA, 19 nt, Artificial Sequence
  Description of Artificial Sequence: Synthetic oligonucleotide
auucaucagaggucucuga

SEQ ID NO: 2114932 - RNA, 19 nt, Artificial Sequence
  Description of Artificial Sequence: Synthetic oligonucleotide
cuguggcaaguguugagug

SEQ ID NO: 2114933 - RNA, 19 nt, Artificial Sequence
  Description of Artificial Sequence: Synthetic oligonucleotide
ggugucuauuucuacccgc

SEQ ID NO: 2114934 - RNA, 19 nt, Artificial Sequence
  Description of Artificial Sequence: Synthetic oligonucleotide
ucgcaaauuugccgagcgc

SEQ ID NO: 2114935 - RNA, 19 nt, Artificial Sequence
  Description of Artificial Sequence: Synthetic oligonucleotide
uccuuguuguccgaggaau

SEQ ID NO: 2114936 - RNA, 19 nt, Artificial Sequence
  Description of Artificial Sequence: Synthetic oligonucleotide
uccaguugucuucauuauu

SEQ ID NO: 2114937 - RNA, 19 nt, Artificial Sequence
  Description of Artificial Sequence: Synthetic oligonucleotide
ucggcagaggcuucagaac

SEQ ID NO: 2114938 - RNA, 19 nt, Artificial Sequence
  Description of Artificial Sequence: Synthetic oligonucleotide
aaagcugguugaagucauc

SEQ ID NO: 2114939 - RNA, 19 nt, Artificial Sequence
  Description of Artificial Sequence: Synthetic oligonucleotide
cuaguguggugucuauuuc

SEQ ID NO: 2114940 - RNA, 19 nt, Artificial Sequence
  Description of Artificial Sequence: Synthetic oligonucleotide
gugucuauuucuacccgcc

SEQ ID NO: 2114941 - RNA, 19 nt, Artificial Sequence
  Description of Artificial Sequence: Synthetic oligonucleotide
gcuccgggaggacagaucc

SEQ ID NO: 2114942 - RNA, 19 nt, Artificial Sequence
  Description of Artificial Sequence: Synthetic oligonucleotide
uuucgcucgccuuuucuuu

SEQ ID NO: 2114943 - RNA, 19 nt, Artificial Sequence
  Description of Artificial Sequence: Synthetic oligonucleotide
gggaccuccagguugcagc

SEQ ID NO: 2114944 - RNA, 19 nt, Artificial Sequence
  Description of Artificial Sequence: Synthetic oligonucleotide
ugaaggcacugguuguggu

SEQ ID NO: 2114945 - RNA, 19 nt, Artificial Sequence
  Description of Artificial Sequence: Synthetic oligonucleotide
caaauuugccgagcgccgc

SEQ ID NO: 2114946 - RNA, 19 nt, Artificial Sequence
  Description of Artificial Sequence: Synthetic oligonucleotide
cugaccgggagcccagggg

SEQ ID NO: 2114947 - RNA, 19 nt, Artificial Sequence
  Description of Artificial Sequence: Synthetic oligonucleotide
cuauuucuacccgcccugg

SEQ ID NO: 2114948 - RNA, 19 nt, Artificial Sequence
  Description of Artificial Sequence: Synthetic oligonucleotide
cacucauccccgcugggac

SEQ ID NO: 2114949 - RNA, 19 nt, Artificial Sequence
  Description of Artificial Sequence: Synthetic oligonucleotide
uuccuuguuguccgaggaa

SEQ ID NO: 2114950 - RNA, 19 nt, Artificial Sequence
  Description of Artificial Sequence: Synthetic oligonucleotide
caaucuucuucagcuucgg

SEQ ID NO: 2114951 - RNA, 19 nt, Artificial Sequence
  Description of Artificial Sequence: Synthetic oligonucleotide
uuaacugggccauccucuu

SEQ ID NO: 2114952 - RNA, 19 nt, Artificial Sequence
  Description of Artificial Sequence: Synthetic oligonucleotide
uggaggugcugcaaccauc

SEQ ID NO: 2114953 - RNA, 19 nt, Artificial Sequence
  Description of Artificial Sequence: Synthetic oligonucleotide
agcucccaaacccuuuccu

SEQ ID NO: 2114954 - RNA, 19 nt, Artificial Sequence
  Description of Artificial Sequence: Synthetic oligonucleotide
uccuuuagaccaccccauc

SEQ ID NO: 2114955 - RNA, 19 nt, Artificial Sequence
  Description of Artificial Sequence: Synthetic oligonucleotide
uccugacuguggcaagugu

SEQ ID NO: 2114956 - RNA, 19 nt, Artificial Sequence
  Description of Artificial Sequence: Synthetic oligonucleotide
agucggucucucuucuuga

SEQ ID NO: 2114957 - RNA, 19 nt, Artificial Sequence
  Description of Artificial Sequence: Synthetic oligonucleotide
ggugccuucucuagugugg

SEQ ID NO: 2114958 - RNA, 19 nt, Artificial Sequence
  Description of Artificial Sequence: Synthetic oligonucleotide
agcaauccaguugucuuca

SEQ ID NO: 2114959 - RNA, 19 nt, Artificial Sequence
  Description of Artificial Sequence: Synthetic oligonucleotide
cuuuuccuuguuguccgag

SEQ ID NO: 2114960 - RNA, 19 nt, Artificial Sequence
  Description of Artificial Sequence: Synthetic oligonucleotide
acagauccuucccuuucgu

SEQ ID NO: 2114961 - RNA, 19 nt, Artificial Sequence
  Description of Artificial Sequence: Synthetic oligonucleotide
ucggucucucuucuugauc

SEQ ID NO: 2114962 - RNA, 19 nt, Artificial Sequence
  Description of Artificial Sequence: Synthetic oligonucleotide
ucauggagguguccacuuc

SEQ ID NO: 2114963 - RNA, 19 nt, Artificial Sequence
  Description of Artificial Sequence: Synthetic oligonucleotide
gugaaggcacugguugugg

SEQ ID NO: 2114964 - RNA, 19 nt, Artificial Sequence
  Description of Artificial Sequence: Synthetic oligonucleotide
agcaucgacauugucgcaa

SEQ ID NO: 2114965 - RNA, 19 nt, Artificial Sequence
  Description of Artificial Sequence: Synthetic oligonucleotide
ucccuuucgugaauuucau

SEQ ID NO: 2114966 - RNA, 19 nt, Artificial Sequence
  Description of Artificial Sequence: Synthetic oligonucleotide
auccucuggccaaacuugg

SEQ ID NO: 2114967 - RNA, 19 nt, Artificial Sequence
  Description of Artificial Sequence: Synthetic oligonucleotide
auccaguugucuucauuau

SEQ ID NO: 2114968 - RNA, 19 nt, Artificial Sequence
  Description of Artificial Sequence: Synthetic oligonucleotide
aauuugccgagcgccgccu

SEQ ID NO: 2114969 - RNA, 19 nt, Artificial Sequence
  Description of Artificial Sequence: Synthetic oligonucleotide
cauggagguguccacuuca

SEQ ID NO: 2114970 - RNA, 19 nt, Artificial Sequence
  Description of Artificial Sequence: Synthetic oligonucleotide
ugacuguggcaaguguuga

SEQ ID NO: 2114971 - RNA, 19 nt, Artificial Sequence
  Description of Artificial Sequence: Synthetic oligonucleotide
ugucgcaaauuugccgagc

SEQ ID NO: 2114972 - RNA, 19 nt, Artificial Sequence
  Description of Artificial Sequence: Synthetic oligonucleotide
ggugcugcaaccauccuga

SEQ ID NO: 2114973 - RNA, 19 nt, Artificial Sequence
  Description of Artificial Sequence: Synthetic oligonucleotide
uucacgggugccuucucua

SEQ ID NO: 2114974 - RNA, 19 nt, Artificial Sequence
  Description of Artificial Sequence: Synthetic oligonucleotide
aguguuucugggauccaca

SEQ ID NO: 2114975 - RNA, 19 nt, Artificial Sequence
  Description of Artificial Sequence: Synthetic oligonucleotide
uguguuggggagaguucuc

SEQ ID NO: 2114976 - RNA, 19 nt, Artificial Sequence
  Description of Artificial Sequence: Synthetic oligonucleotide
aucauggagguguccacuu

SEQ ID NO: 2114977 - RNA, 19 nt, Artificial Sequence
  Description of Artificial Sequence: Synthetic oligonucleotide
ggaaucugcuguuuccuga

SEQ ID NO: 2114978 - RNA, 19 nt, Artificial Sequence
  Description of Artificial Sequence: Synthetic oligonucleotide
uggaaucaucauugcucca

SEQ ID NO: 2114979 - RNA, 19 nt, Artificial Sequence
  Description of Artificial Sequence: Synthetic oligonucleotide
gcaaauuugccgagcgccg

SEQ ID NO: 2114980 - RNA, 19 nt, Artificial Sequence
  Description of Artificial Sequence: Synthetic oligonucleotide
uuugccgagcgccgccucu

SEQ ID NO: 2114981 - RNA, 19 nt, Artificial Sequence
  Description of Artificial Sequence: Synthetic oligonucleotide
ucccaaacccuuuccuuua

SEQ ID NO: 2114982 - RNA, 19 nt, Artificial Sequence
  Description of Artificial Sequence: Synthetic oligonucleotide
uaugucgcuuggccuugug

SEQ ID NO: 2114983 - RNA, 19 nt, Artificial Sequence
  Description of Artificial Sequence: Synthetic oligonucleotide
uagucaucauggagguguc

SEQ ID NO: 2114984 - RNA, 19 nt, Artificial Sequence
  Description of Artificial Sequence: Synthetic oligonucleotide
aguguugagugcugccaaa

SEQ ID NO: 2114985 - RNA, 19 nt, Artificial Sequence
  Description of Artificial Sequence: Synthetic oligonucleotide
ggaggugcugcaaccaucc

SEQ ID NO: 2114986 - RNA, 19 nt, Artificial Sequence
  Description of Artificial Sequence: Synthetic oligonucleotide
cagauccuucccuuucgug

SEQ ID NO: 2114987 - RNA, 19 nt, Artificial Sequence
  Description of Artificial Sequence: Synthetic oligonucleotide
gagcucccaaacccuuucc

SEQ ID NO: 2114988 - RNA, 19 nt, Artificial Sequence
  Description of Artificial Sequence: Synthetic oligonucleotide
agaccaccccaucuucuca

SEQ ID NO: 2114989 - RNA, 19 nt, Artificial Sequence
  Description of Artificial Sequence: Synthetic oligonucleotide
uggcaaguguugagugcug

SEQ ID NO: 2114990 - RNA, 19 nt, Artificial Sequence
  Description of Artificial Sequence: Synthetic oligonucleotide
agucccagauuguuauuuu

SEQ ID NO: 2114991 - RNA, 19 nt, Artificial Sequence
  Description of Artificial Sequence: Synthetic oligonucleotide
agguugcagcucaagucgg

SEQ ID NO: 2114992 - RNA, 19 nt, Artificial Sequence
  Description of Artificial Sequence: Synthetic oligonucleotide
cagaggcuucagaacacuc

SEQ ID NO: 2114993 - RNA, 19 nt, Artificial Sequence
  Description of Artificial Sequence: Synthetic oligonucleotide
cuuggccuuguguugggga

SEQ ID NO: 2114994 - RNA, 19 nt, Artificial Sequence
  Description of Artificial Sequence: Synthetic oligonucleotide
gaaggcacugguuguggua

SEQ ID NO: 2114995 - RNA, 19 nt, Artificial Sequence
  Description of Artificial Sequence: Synthetic oligonucleotide
auuugccgagcgccgccuc

SEQ ID NO: 2114996 - RNA, 19 nt, Artificial Sequence
  Description of Artificial Sequence: Synthetic oligonucleotide
caaguguugagugcugcca

SEQ ID NO: 2114997 - RNA, 19 nt, Artificial Sequence
  Description of Artificial Sequence: Synthetic oligonucleotide
ugcaaccauccugagcagu

SEQ ID NO: 2114998 - RNA, 19 nt, Artificial Sequence
  Description of Artificial Sequence: Synthetic oligonucleotide
ugcaauggaggugcugcaa

SEQ ID NO: 2114999 - RNA, 19 nt, Artificial Sequence
  Description of Artificial Sequence: Synthetic oligonucleotide
accaccccaucuucucaag

SEQ ID NO: 2115000 - RNA, 19 nt, Artificial Sequence
  Description of Artificial Sequence: Synthetic oligonucleotide
guguggugucuauuucuac

SEQ ID NO: 2115001 - RNA, 19 nt, Artificial Sequence
  Description of Artificial Sequence: Synthetic oligonucleotide
cgcaaauuugccgagcgcc

SEQ ID NO: 2115002 - RNA, 19 nt, Artificial Sequence
  Description of Artificial Sequence: Synthetic oligonucleotide
gcaaguguugagugcugcc

SEQ ID NO: 2115003 - RNA, 19 nt, Artificial Sequence
  Description of Artificial Sequence: Synthetic oligonucleotide
gcugcugggugauuguuca

SEQ ID NO: 2115004 - RNA, 19 nt, Artificial Sequence
  Description of Artificial Sequence: Synthetic oligonucleotide
gcaauggaggugcugcaac

SEQ ID NO: 2115005 - RNA, 19 nt, Artificial Sequence
  Description of Artificial Sequence: Synthetic oligonucleotide
agcgccgccucugaccggg

SEQ ID NO: 2115006 - RNA, 19 nt, Artificial Sequence
  Description of Artificial Sequence: Synthetic oligonucleotide
ucucuaguguggugucuau

SEQ ID NO: 2115007 - RNA, 19 nt, Artificial Sequence
  Description of Artificial Sequence: Synthetic oligonucleotide
aaaugcaguccaggucggu

SEQ ID NO: 2115008 - RNA, 19 nt, Artificial Sequence
  Description of Artificial Sequence: Synthetic oligonucleotide
agcauccucuggccaaacu

SEQ ID NO: 2115009 - RNA, 19 nt, Artificial Sequence
  Description of Artificial Sequence: Synthetic oligonucleotide
cugaaaugucaggcucugg

SEQ ID NO: 2115010 - RNA, 19 nt, Artificial Sequence
  Description of Artificial Sequence: Synthetic oligonucleotide
uuuucacgggugccuucuc

SEQ ID NO: 2115011 - RNA, 19 nt, Artificial Sequence
  Description of Artificial Sequence: Synthetic oligonucleotide
caucuuggugagcaaucca

SEQ ID NO: 2115012 - RNA, 19 nt, Artificial Sequence
  Description of Artificial Sequence: Synthetic oligonucleotide
agcucaagucggucucucu

SEQ ID NO: 2115013 - RNA, 19 nt, Artificial Sequence
  Description of Artificial Sequence: Synthetic oligonucleotide
cuucaucugcaauggaggu

SEQ ID NO: 2115014 - RNA, 19 nt, Artificial Sequence
  Description of Artificial Sequence: Synthetic oligonucleotide
cucaagcauccucuggcca

SEQ ID NO: 2115015 - RNA, 19 nt, Artificial Sequence
  Description of Artificial Sequence: Synthetic oligonucleotide
ugaggcucguggcuugcuu

SEQ ID NO: 2115016 - RNA, 19 nt, Artificial Sequence
  Description of Artificial Sequence: Synthetic oligonucleotide
gcuccugagcucccaaacc

SEQ ID NO: 2115017 - RNA, 19 nt, Artificial Sequence
  Description of Artificial Sequence: Synthetic oligonucleotide
gggagaguucuccacaucu

SEQ ID NO: 2115018 - RNA, 19 nt, Artificial Sequence
  Description of Artificial Sequence: Synthetic oligonucleotide
guagcuccaagucccagau

SEQ ID NO: 2115019 - RNA, 19 nt, Artificial Sequence
  Description of Artificial Sequence: Synthetic oligonucleotide
aggcuucagaacacucauc

SEQ ID NO: 2115020 - RNA, 19 nt, Artificial Sequence
  Description of Artificial Sequence: Synthetic oligonucleotide
uccauucaucagaggucuc

SEQ ID NO: 2115021 - RNA, 19 nt, Artificial Sequence
  Description of Artificial Sequence: Synthetic oligonucleotide
gaggaaucugcuguuuccu

SEQ ID NO: 2115022 - RNA, 19 nt, Artificial Sequence
  Description of Artificial Sequence: Synthetic oligonucleotide
ugggauccacaguccauuu

SEQ ID NO: 2115023 - RNA, 19 nt, Artificial Sequence
  Description of Artificial Sequence: Synthetic oligonucleotide
uugcuccugagcucccaaa

SEQ ID NO: 2115024 - RNA, 19 nt, Artificial Sequence
  Description of Artificial Sequence: Synthetic oligonucleotide
caucacccuggcugcuggg

SEQ ID NO: 2115025 - RNA, 19 nt, Artificial Sequence
  Description of Artificial Sequence: Synthetic oligonucleotide
ggagaguucuccacaucug

SEQ ID NO: 2115026 - RNA, 19 nt, Artificial Sequence
  Description of Artificial Sequence: Synthetic oligonucleotide
acacucauccccgcuggga

SEQ ID NO: 2115027 - RNA, 19 nt, Artificial Sequence
  Description of Artificial Sequence: Synthetic oligonucleotide
guggcaaguguugagugcu

SEQ ID NO: 2115028 - RNA, 19 nt, Artificial Sequence
  Description of Artificial Sequence: Synthetic oligonucleotide
cugcaaccauccugagcag

SEQ ID NO: 2115029 - RNA, 19 nt, Artificial Sequence
  Description of Artificial Sequence: Synthetic oligonucleotide
cuggccaaacuuggaauca

SEQ ID NO: 2115030 - RNA, 19 nt, Artificial Sequence
  Description of Artificial Sequence: Synthetic oligonucleotide
cuuuagaccaccccaucuu

SEQ ID NO: 2115031 - RNA, 19 nt, Artificial Sequence
  Description of Artificial Sequence: Synthetic oligonucleotide
ugggaccuccagguugcag

SEQ ID NO: 2115032 - RNA, 19 nt, Artificial Sequence
  Description of Artificial Sequence: Synthetic oligonucleotide
ggcuccaccucugcuuucg

SEQ ID NO: 2115033 - RNA, 19 nt, Artificial Sequence
  Description of Artificial Sequence: Synthetic oligonucleotide
ggcaaguguugagugcugc

SEQ ID NO: 2115034 - RNA, 19 nt, Artificial Sequence
  Description of Artificial Sequence: Synthetic oligonucleotide
cuuguuguccgaggaaucu

SEQ ID NO: 2115035 - RNA, 19 nt, Artificial Sequence
  Description of Artificial Sequence: Synthetic oligonucleotide
gggugccuucucuagugug

SEQ ID NO: 2115036 - RNA, 19 nt, Artificial Sequence
  Description of Artificial Sequence: Synthetic oligonucleotide
guuucgcuccgggaggaca

SEQ ID NO: 2115037 - RNA, 19 nt, Artificial Sequence
  Description of Artificial Sequence: Synthetic oligonucleotide
caguccaggucgguuucgc

SEQ ID NO: 2115038 - RNA, 19 nt, Artificial Sequence
  Description of Artificial Sequence: Synthetic oligonucleotide
caaggcuaaaagauuucuu

SEQ ID NO: 2115039 - RNA, 19 nt, Artificial Sequence
  Description of Artificial Sequence: Synthetic oligonucleotide
cuuggugagcaauccaguu

SEQ ID NO: 2115040 - RNA, 19 nt, Artificial Sequence
  Description of Artificial Sequence: Synthetic oligonucleotide
ugcuuucgcucgccuuuuc

SEQ ID NO: 2115041 - RNA, 19 nt, Artificial Sequence
  Description of Artificial Sequence: Synthetic oligonucleotide
aggcucguggcuugcuuuu

SEQ ID NO: 2115042 - RNA, 19 nt, Artificial Sequence
  Description of Artificial Sequence: Synthetic oligonucleotide
gcaaccauccugagcaguc

SEQ ID NO: 2115043 - RNA, 19 nt, Artificial Sequence
  Description of Artificial Sequence: Synthetic oligonucleotide
uccccgcugggaccuccag

SEQ ID NO: 2115044 - RNA, 19 nt, Artificial Sequence
  Description of Artificial Sequence: Synthetic oligonucleotide
cgacauugucgcaaauuug

SEQ ID NO: 2115045 - RNA, 19 nt, Artificial Sequence
  Description of Artificial Sequence: Synthetic oligonucleotide
ccuuuccuuuagaccaccc

SEQ ID NO: 2115046 - RNA, 19 nt, Artificial Sequence
  Description of Artificial Sequence: Synthetic oligonucleotide
ccuuguuguccgaggaauc

SEQ ID NO: 2115047 - RNA, 19 nt, Artificial Sequence
  Description of Artificial Sequence: Synthetic oligonucleotide
uugccgagcgccgccucug

SEQ ID NO: 2115048 - RNA, 19 nt, Artificial Sequence
  Description of Artificial Sequence: Synthetic oligonucleotide
ggaaucaucauugcuccau

SEQ ID NO: 2115049 - RNA, 19 nt, Artificial Sequence
  Description of Artificial Sequence: Synthetic oligonucleotide
cugcugggugauuguucac

SEQ ID NO: 2115050 - RNA, 19 nt, Artificial Sequence
  Description of Artificial Sequence: Synthetic oligonucleotide
uccgaggaaucugcuguuu

SEQ ID NO: 2115051 - RNA, 19 nt, Artificial Sequence
  Description of Artificial Sequence: Synthetic oligonucleotide
uuaugucgcuuggccuugu

SEQ ID NO: 2115052 - RNA, 19 nt, Artificial Sequence
  Description of Artificial Sequence: Synthetic oligonucleotide
cgagcgccgccucugaccg

SEQ ID NO: 2115053 - RNA, 19 nt, Artificial Sequence
  Description of Artificial Sequence: Synthetic oligonucleotide
gcugggugauuguucacaa

SEQ ID NO: 2115054 - RNA, 19 nt, Artificial Sequence
  Description of Artificial Sequence: Synthetic oligonucleotide
agcuucggcagaggcuuca

SEQ ID NO: 2115055 - RNA, 19 nt, Artificial Sequence
  Description of Artificial Sequence: Synthetic oligonucleotide
ugccgagcgccgccucuga

SEQ ID NO: 2115056 - RNA, 19 nt, Artificial Sequence
  Description of Artificial Sequence: Synthetic oligonucleotide
cuuucgcucgccuuuucuu

SEQ ID NO: 2115057 - RNA, 19 nt, Artificial Sequence
  Description of Artificial Sequence: Synthetic oligonucleotide
auggagguguccacuucau

SEQ ID NO: 2115058 - RNA, 19 nt, Artificial Sequence
  Description of Artificial Sequence: Synthetic oligonucleotide
uucuacccgcccuggccuu

SEQ ID NO: 2115059 - RNA, 19 nt, Artificial Sequence
  Description of Artificial Sequence: Synthetic oligonucleotide
ccgagcgccgccucugacc

SEQ ID NO: 2115060 - RNA, 19 nt, Artificial Sequence
  Description of Artificial Sequence: Synthetic oligonucleotide
ggaggacagauccuucccu

SEQ ID NO: 2115061 - RNA, 19 nt, Artificial Sequence
  Description of Artificial Sequence: Synthetic oligonucleotide
uuccgccgaggcuccgcca

SEQ ID NO: 2115062 - RNA, 19 nt, Artificial Sequence
  Description of Artificial Sequence: Synthetic oligonucleotide
cccaaacccuuuccuuuag

SEQ ID NO: 2115063 - RNA, 19 nt, Artificial Sequence
  Description of Artificial Sequence: Synthetic oligonucleotide
ccgaggaaucugcuguuuc

SEQ ID NO: 2115064 - RNA, 19 nt, Artificial Sequence
  Description of Artificial Sequence: Synthetic oligonucleotide
ccaccccaucuucucaagc

SEQ ID NO: 2115065 - RNA, 19 nt, Artificial Sequence
  Description of Artificial Sequence: Synthetic oligonucleotide
cucugaccgggagcccagg

SEQ ID NO: 2115066 - RNA, 19 nt, Artificial Sequence
  Description of Artificial Sequence: Synthetic oligonucleotide
uacccgcccuggccuuugc

SEQ ID NO: 2115067 - RNA, 19 nt, Artificial Sequence
  Description of Artificial Sequence: Synthetic oligonucleotide
caucauggagguguccacu

SEQ ID NO: 2115068 - RNA, 19 nt, Artificial Sequence
  Description of Artificial Sequence: Synthetic oligonucleotide
gguagucaucauggaggug

SEQ ID NO: 2115069 - RNA, 19 nt, Artificial Sequence
  Description of Artificial Sequence: Synthetic oligonucleotide
ccgcccuggccuuugcagc

SEQ ID NO: 2115070 - RNA, 19 nt, Artificial Sequence
  Description of Artificial Sequence: Synthetic oligonucleotide
cagcucaagucggucucuc

SEQ ID NO: 2115071 - RNA, 19 nt, Artificial Sequence
  Description of Artificial Sequence: Synthetic oligonucleotide
gccgccucugaccgggagc

SEQ ID NO: 2115072 - RNA, 19 nt, Artificial Sequence
  Description of Artificial Sequence: Synthetic oligonucleotide
gagcgccgccucugaccgg

SEQ ID NO: 2115073 - RNA, 19 nt, Artificial Sequence
  Description of Artificial Sequence: Synthetic oligonucleotide
ggccaaacuuggaaucauc

SEQ ID NO: 2115074 - RNA, 19 nt, Artificial Sequence
  Description of Artificial Sequence: Synthetic oligonucleotide
ccgccucugaccgggagcc

SEQ ID NO: 2115075 - RNA, 19 nt, Artificial Sequence
  Description of Artificial Sequence: Synthetic oligonucleotide
cauccccgcugggaccucc

SEQ ID NO: 2115076 - RNA, 19 nt, Artificial Sequence
  Description of Artificial Sequence: Synthetic oligonucleotide
caagcauccucuggccaaa

SEQ ID NO: 2115077 - RNA, 19 nt, Artificial Sequence
  Description of Artificial Sequence: Synthetic oligonucleotide
ggucgguuucgcuccggga

SEQ ID NO: 2115078 - RNA, 19 nt, Artificial Sequence
  Description of Artificial Sequence: Synthetic oligonucleotide
gcaguccaggucgguuucg

SEQ ID NO: 2115079 - RNA, 19 nt, Artificial Sequence
  Description of Artificial Sequence: Synthetic oligonucleotide
ucgcuccgggaggacagau

SEQ ID NO: 2115080 - RNA, 19 nt, Artificial Sequence
  Description of Artificial Sequence: Synthetic oligonucleotide
gucggucucucuucuugau

SEQ ID NO: 2115081 - RNA, 19 nt, Artificial Sequence
  Description of Artificial Sequence: Synthetic oligonucleotide
ggaccuccagguugcagcu

SEQ ID NO: 2115082 - RNA, 19 nt, Artificial Sequence
  Description of Artificial Sequence: Synthetic oligonucleotide
cagcaucgacauugucgca

SEQ ID NO: 2115083 - RNA, 19 nt, Artificial Sequence
  Description of Artificial Sequence: Synthetic oligonucleotide
gggccauccucuuggcaaa

SEQ ID NO: 2115084 - RNA, 19 nt, Artificial Sequence
  Description of Artificial Sequence: Synthetic oligonucleotide
gcuucggcagaggcuucag

SEQ ID NO: 2115085 - RNA, 19 nt, Artificial Sequence
  Description of Artificial Sequence: Synthetic oligonucleotide
cuacccgcccuggccuuug

SEQ ID NO: 2115086 - RNA, 19 nt, Artificial Sequence
  Description of Artificial Sequence: Synthetic oligonucleotide
ucuacccgcccuggccuuu

SEQ ID NO: 2115087 - RNA, 19 nt, Artificial Sequence
  Description of Artificial Sequence: Synthetic oligonucleotide
cucauccccgcugggaccu

SEQ ID NO: 2115088 - RNA, 19 nt, Artificial Sequence
  Description of Artificial Sequence: Synthetic oligonucleotide
gcuuucgcucgccuuuucu

SEQ ID NO: 2115089 - RNA, 19 nt, Artificial Sequence
  Description of Artificial Sequence: Synthetic oligonucleotide
cugggauccacaguccauu

SEQ ID NO: 2115090 - RNA, 19 nt, Artificial Sequence
  Description of Artificial Sequence: Synthetic oligonucleotide
ccauccucuuggcaaaaua

SEQ ID NO: 2115091 - RNA, 19 nt, Artificial Sequence
  Description of Artificial Sequence: Synthetic oligonucleotide
ccaggucgguuucgcuccg

SEQ ID NO: 2115092 - RNA, 19 nt, Artificial Sequence
  Description of Artificial Sequence: Synthetic oligonucleotide
gaggcuccgccagcaucga

SEQ ID NO: 2115093 - RNA, 19 nt, Artificial Sequence
  Description of Artificial Sequence: Synthetic oligonucleotide
ccgaggcuccgccagcauc

SEQ ID NO: 2115094 - RNA, 19 nt, Artificial Sequence
  Description of Artificial Sequence: Synthetic oligonucleotide
cugggugauuguucacaau

SEQ ID NO: 2115095 - RNA, 19 nt, Artificial Sequence
  Description of Artificial Sequence: Synthetic oligonucleotide
gagcugaggcucguggcuu

SEQ ID NO: 2115096 - RNA, 19 nt, Artificial Sequence
  Description of Artificial Sequence: Synthetic oligonucleotide
cccgcugggaccuccaggu

SEQ ID NO: 2115097 - RNA, 19 nt, Artificial Sequence
  Description of Artificial Sequence: Synthetic oligonucleotide
ccugacuguggcaaguguu

SEQ ID NO: 2115098 - RNA, 19 nt, Artificial Sequence
  Description of Artificial Sequence: Synthetic oligonucleotide
gccucugaccgggagccca

SEQ ID NO: 2115099 - RNA, 19 nt, Artificial Sequence
  Description of Artificial Sequence: Synthetic oligonucleotide
gguuucgcuccgggaggac

SEQ ID NO: 2115100 - RNA, 19 nt, Artificial Sequence
  Description of Artificial Sequence: Synthetic oligonucleotide
cuccgggaggacagauccu

SEQ ID NO: 2115101 - RNA, 19 nt, Artificial Sequence
  Description of Artificial Sequence: Synthetic oligonucleotide
auccccgcugggaccucca

SEQ ID NO: 2115102 - RNA, 19 nt, Artificial Sequence
  Description of Artificial Sequence: Synthetic oligonucleotide
ucauccccgcugggaccuc

SEQ ID NO: 2115103 - RNA, 19 nt, Artificial Sequence
  Description of Artificial Sequence: Synthetic oligonucleotide
caagucggucucucuucuu

SEQ ID NO: 2115104 - RNA, 19 nt, Artificial Sequence
  Description of Artificial Sequence: Synthetic oligonucleotide
cccuuucgugaauuucaua

SEQ ID NO: 2115105 - RNA, 19 nt, Artificial Sequence
  Description of Artificial Sequence: Synthetic oligonucleotide
cugggaccuccagguugca

SEQ ID NO: 2115106 - RNA, 19 nt, Artificial Sequence
  Description of Artificial Sequence: Synthetic oligonucleotide
ccgccgaggcuccgccagc

SEQ ID NO: 2115107 - RNA, 19 nt, Artificial Sequence
  Description of Artificial Sequence: Synthetic oligonucleotide
ggccauccucuuggcaaaa

SEQ ID NO: 2115108 - RNA, 19 nt, Artificial Sequence
  Description of Artificial Sequence: Synthetic oligonucleotide
cugaggcucguggcuugcu

SEQ ID NO: 2115109 - RNA, 19 nt, Artificial Sequence
  Description of Artificial Sequence: Synthetic oligonucleotide
cugcuuucgcucgccuuuu

SEQ ID NO: 2115110 - RNA, 19 nt, Artificial Sequence
  Description of Artificial Sequence: Synthetic oligonucleotide
cgccgccucugaccgggag

SEQ ID NO: 2115111 - RNA, 19 nt, Artificial Sequence
  Description of Artificial Sequence: Synthetic oligonucleotide
cgccagcaucgacauuguc

SEQ ID NO: 2115112 - RNA, 19 nt, Artificial Sequence
  Description of Artificial Sequence: Synthetic oligonucleotide
ccucugcuuucgcucgccu

SEQ ID NO: 2115113 - RNA, 19 nt, Artificial Sequence
  Description of Artificial Sequence: Synthetic oligonucleotide
ccgccagcaucgacauugu

SEQ ID NO: 2115114 - RNA, 19 nt, Artificial Sequence
  Description of Artificial Sequence: Synthetic oligonucleotide
cuccgccagcaucgacauu

SEQ ID NO: 2115115 - RNA, 19 nt, Artificial Sequence
  Description of Artificial Sequence: Synthetic oligonucleotide
ccgcugggaccuccagguu

SEQ ID NO: 2115116 - RNA, 19 nt, Artificial Sequence
  Description of Artificial Sequence: Synthetic oligonucleotide
ucuuauacuagccagaggg

SEQ ID NO: 2115117 - RNA, 19 nt, Artificial Sequence
  Description of Artificial Sequence: Synthetic oligonucleotide
ucgauuuucaacaaaauag

SEQ ID NO: 2115118 - RNA, 19 nt, Artificial Sequence
  Description of Artificial Sequence: Synthetic oligonucleotide
aacaacguggaguugaugc

SEQ ID NO: 2115119 - RNA, 19 nt, Artificial Sequence
  Description of Artificial Sequence: Synthetic oligonucleotide
aaauuuacuuaucacuugc

SEQ ID NO: 2115120 - RNA, 19 nt, Artificial Sequence
  Description of Artificial Sequence: Synthetic oligonucleotide
aauagaucgauuuucaaca

SEQ ID NO: 2115121 - RNA, 19 nt, Artificial Sequence
  Description of Artificial Sequence: Synthetic oligonucleotide
ucuacaagugacuaaaugg

SEQ ID NO: 2115122 - RNA, 19 nt, Artificial Sequence
  Description of Artificial Sequence: Synthetic oligonucleotide
gguaguaaagaauagaucg

SEQ ID NO: 2115123 - RNA, 19 nt, Artificial Sequence
  Description of Artificial Sequence: Synthetic oligonucleotide
ugugcuauaaaacugugag

SEQ ID NO: 2115124 - RNA, 19 nt, Artificial Sequence
  Description of Artificial Sequence: Synthetic oligonucleotide
ugcuauaaaacugugaggg

SEQ ID NO: 2115125 - RNA, 19 nt, Artificial Sequence
  Description of Artificial Sequence: Synthetic oligonucleotide
caugaauuaaauaaaggag

SEQ ID NO: 2115126 - RNA, 19 nt, Artificial Sequence
  Description of Artificial Sequence: Synthetic oligonucleotide
cauacuaguacacacacgg

SEQ ID NO: 2115127 - RNA, 19 nt, Artificial Sequence
  Description of Artificial Sequence: Synthetic oligonucleotide
aauaccuggagauauuuug

SEQ ID NO: 2115128 - RNA, 19 nt, Artificial Sequence
  Description of Artificial Sequence: Synthetic oligonucleotide
aaagaauagaucgauuuuc

SEQ ID NO: 2115129 - RNA, 19 nt, Artificial Sequence
  Description of Artificial Sequence: Synthetic oligonucleotide
acaugaauuaaauaaagga

SEQ ID NO: 2115130 - RNA, 19 nt, Artificial Sequence
  Description of Artificial Sequence: Synthetic oligonucleotide
uauaagggcagaaugacac

SEQ ID NO: 2115131 - RNA, 19 nt, Artificial Sequence
  Description of Artificial Sequence: Synthetic oligonucleotide
uacuaguacacacacgggg

SEQ ID NO: 2115132 - RNA, 19 nt, Artificial Sequence
  Description of Artificial Sequence: Synthetic oligonucleotide
aaaacugugagggacaagu

SEQ ID NO: 2115133 - RNA, 19 nt, Artificial Sequence
  Description of Artificial Sequence: Synthetic oligonucleotide
gagaccauggaauggacgg

SEQ ID NO: 2115134 - RNA, 19 nt, Artificial Sequence
  Description of Artificial Sequence: Synthetic oligonucleotide
cuaucugcauuuauaaggg

SEQ ID NO: 2115135 - RNA, 19 nt, Artificial Sequence
  Description of Artificial Sequence: Synthetic oligonucleotide
gcuaucugcauuuauaagg

SEQ ID NO: 2115136 - RNA, 19 nt, Artificial Sequence
  Description of Artificial Sequence: Synthetic oligonucleotide
auauauugugcuauaaaac

SEQ ID NO: 2115137 - RNA, 19 nt, Artificial Sequence
  Description of Artificial Sequence: Synthetic oligonucleotide
gaauagaucgauuuucaac

SEQ ID NO: 2115138 - RNA, 19 nt, Artificial Sequence
  Description of Artificial Sequence: Synthetic oligonucleotide
aaugggguggcacaugcag

SEQ ID NO: 2115139 - RNA, 19 nt, Artificial Sequence
  Description of Artificial Sequence: Synthetic oligonucleotide
auaaugggguggcacaugc

SEQ ID NO: 2115140 - RNA, 19 nt, Artificial Sequence
  Description of Artificial Sequence: Synthetic oligonucleotide
gauucauuccacuauggac

SEQ ID NO: 2115141 - RNA, 19 nt, Artificial Sequence
  Description of Artificial Sequence: Synthetic oligonucleotide
uauugugcuauaaaacugu

SEQ ID NO: 2115142 - RNA, 19 nt, Artificial Sequence
  Description of Artificial Sequence: Synthetic oligonucleotide
ucaagugggauauauugug

SEQ ID NO: 2115143 - RNA, 19 nt, Artificial Sequence
  Description of Artificial Sequence: Synthetic oligonucleotide
uuugcuucuuauacuagcc

SEQ ID NO: 2115144 - RNA, 19 nt, Artificial Sequence
  Description of Artificial Sequence: Synthetic oligonucleotide
uuacuuaucacuugcaaua

SEQ ID NO: 2115145 - RNA, 19 nt, Artificial Sequence
  Description of Artificial Sequence: Synthetic oligonucleotide
agugacuaaauggugaggg

SEQ ID NO: 2115146 - RNA, 19 nt, Artificial Sequence
  Description of Artificial Sequence: Synthetic oligonucleotide
uccucacuaaccaagcucc

SEQ ID NO: 2115147 - RNA, 19 nt, Artificial Sequence
  Description of Artificial Sequence: Synthetic oligonucleotide
aagugcugucuucucaggc

SEQ ID NO: 2115148 - RNA, 19 nt, Artificial Sequence
  Description of Artificial Sequence: Synthetic oligonucleotide
aguuucaucuacaagugac

SEQ ID NO: 2115149 - RNA, 19 nt, Artificial Sequence
  Description of Artificial Sequence: Synthetic oligonucleotide
cauuuauaagggcagaaug

SEQ ID NO: 2115150 - RNA, 19 nt, Artificial Sequence
  Description of Artificial Sequence: Synthetic oligonucleotide
cucacauuagcacaccucc

SEQ ID NO: 2115151 - RNA, 19 nt, Artificial Sequence
  Description of Artificial Sequence: Synthetic oligonucleotide
cacacaauaccacaggcag

SEQ ID NO: 2115152 - RNA, 19 nt, Artificial Sequence
  Description of Artificial Sequence: Synthetic oligonucleotide
gaaauuuacuuaucacuug

SEQ ID NO: 2115153 - RNA, 19 nt, Artificial Sequence
  Description of Artificial Sequence: Synthetic oligonucleotide
uucaacaaaauaguauccc

SEQ ID NO: 2115154 - RNA, 19 nt, Artificial Sequence
  Description of Artificial Sequence: Synthetic oligonucleotide
augaugagguacuugagcu

SEQ ID NO: 2115155 - RNA, 19 nt, Artificial Sequence
  Description of Artificial Sequence: Synthetic oligonucleotide
aacaucagggaacagugau

SEQ ID NO: 2115156 - RNA, 19 nt, Artificial Sequence
  Description of Artificial Sequence: Synthetic oligonucleotide
uuuauaagggcagaaugac

SEQ ID NO: 2115157 - RNA, 19 nt, Artificial Sequence
  Description of Artificial Sequence: Synthetic oligonucleotide
aaggcuauaugcagugacc

SEQ ID NO: 2115158 - RNA, 19 nt, Artificial Sequence
  Description of Artificial Sequence: Synthetic oligonucleotide
uuugcuaucugcauuuaua

SEQ ID NO: 2115159 - RNA, 19 nt, Artificial Sequence
  Description of Artificial Sequence: Synthetic oligonucleotide
uugagcuugaguucccggg

SEQ ID NO: 2115160 - RNA, 19 nt, Artificial Sequence
  Description of Artificial Sequence: Synthetic oligonucleotide
auucauuccacuauggacu

SEQ ID NO: 2115161 - RNA, 19 nt, Artificial Sequence
  Description of Artificial Sequence: Synthetic oligonucleotide
aagugggauauauugugcu

SEQ ID NO: 2115162 - RNA, 19 nt, Artificial Sequence
  Description of Artificial Sequence: Synthetic oligonucleotide
aacugugagggacaaguga

SEQ ID NO: 2115163 - RNA, 19 nt, Artificial Sequence
  Description of Artificial Sequence: Synthetic oligonucleotide
acuuaucacuugcaauacc

SEQ ID NO: 2115164 - RNA, 19 nt, Artificial Sequence
  Description of Artificial Sequence: Synthetic oligonucleotide
auggacucaggauggaaac

SEQ ID NO: 2115165 - RNA, 19 nt, Artificial Sequence
  Description of Artificial Sequence: Synthetic oligonucleotide
aaguucucaaugaugaggu

SEQ ID NO: 2115166 - RNA, 19 nt, Artificial Sequence
  Description of Artificial Sequence: Synthetic oligonucleotide
cacaauaccacaggcaggg

SEQ ID NO: 2115167 - RNA, 19 nt, Artificial Sequence
  Description of Artificial Sequence: Synthetic oligonucleotide
cuauaaaacugugagggac

SEQ ID NO: 2115168 - RNA, 19 nt, Artificial Sequence
  Description of Artificial Sequence: Synthetic oligonucleotide
agguacuugagcuugaguu

SEQ ID NO: 2115169 - RNA, 19 nt, Artificial Sequence
  Description of Artificial Sequence: Synthetic oligonucleotide
uacaagugacuaaauggug

SEQ ID NO: 2115170 - RNA, 19 nt, Artificial Sequence
  Description of Artificial Sequence: Synthetic oligonucleotide
acugauucauuccacuaug

SEQ ID NO: 2115171 - RNA, 19 nt, Artificial Sequence
  Description of Artificial Sequence: Synthetic oligonucleotide
augugaaggacuuugcuau

SEQ ID NO: 2115172 - RNA, 19 nt, Artificial Sequence
  Description of Artificial Sequence: Synthetic oligonucleotide
aucuacaagugacuaaaug

SEQ ID NO: 2115173 - RNA, 19 nt, Artificial Sequence
  Description of Artificial Sequence: Synthetic oligonucleotide
agaugugacucagaaauag

SEQ ID NO: 2115174 - RNA, 19 nt, Artificial Sequence
  Description of Artificial Sequence: Synthetic oligonucleotide
aaagauugugccuggguuu

SEQ ID NO: 2115175 - RNA, 19 nt, Artificial Sequence
  Description of Artificial Sequence: Synthetic oligonucleotide
uaaagaauagaucgauuuu

SEQ ID NO: 2115176 - RNA, 19 nt, Artificial Sequence
  Description of Artificial Sequence: Synthetic oligonucleotide
uuauaagggcagaaugaca

SEQ ID NO: 2115177 - RNA, 19 nt, Artificial Sequence
  Description of Artificial Sequence: Synthetic oligonucleotide
cuuauacuagccagagggg

SEQ ID NO: 2115178 - RNA, 19 nt, Artificial Sequence
  Description of Artificial Sequence: Synthetic oligonucleotide
gauauuuugggcugucaca

SEQ ID NO: 2115179 - RNA, 19 nt, Artificial Sequence
  Description of Artificial Sequence: Synthetic oligonucleotide
acauuagcacaccuccucg

SEQ ID NO: 2115180 - RNA, 19 nt, Artificial Sequence
  Description of Artificial Sequence: Synthetic oligonucleotide
ugauucauuccacuaugga

SEQ ID NO: 2115181 - RNA, 19 nt, Artificial Sequence
  Description of Artificial Sequence: Synthetic oligonucleotide
gauggaaacaucagggaac

SEQ ID NO: 2115182 - RNA, 19 nt, Artificial Sequence
  Description of Artificial Sequence: Synthetic oligonucleotide
gaugaaguucucaaugaug

SEQ ID NO: 2115183 - RNA, 19 nt, Artificial Sequence
  Description of Artificial Sequence: Synthetic oligonucleotide
ucaucuacaagugacuaaa

SEQ ID NO: 2115184 - RNA, 19 nt, Artificial Sequence
  Description of Artificial Sequence: Synthetic oligonucleotide
augugacucagaaauaggg

SEQ ID NO: 2115185 - RNA, 19 nt, Artificial Sequence
  Description of Artificial Sequence: Synthetic oligonucleotide
acaagugacccgaacaacg

SEQ ID NO: 2115186 - RNA, 19 nt, Artificial Sequence
  Description of Artificial Sequence: Synthetic oligonucleotide
acuugcaauaccuggagau

SEQ ID NO: 2115187 - RNA, 19 nt, Artificial Sequence
  Description of Artificial Sequence: Synthetic oligonucleotide
acaacguggaguugaugcg

SEQ ID NO: 2115188 - RNA, 19 nt, Artificial Sequence
  Description of Artificial Sequence: Synthetic oligonucleotide
auuuauaagggcagaauga

SEQ ID NO: 2115189 - RNA, 19 nt, Artificial Sequence
  Description of Artificial Sequence: Synthetic oligonucleotide
ugucacaaaggaaggugag

SEQ ID NO: 2115190 - RNA, 19 nt, Artificial Sequence
  Description of Artificial Sequence: Synthetic oligonucleotide
agccacaccucacauuagc

SEQ ID NO: 2115191 - RNA, 19 nt, Artificial Sequence
  Description of Artificial Sequence: Synthetic oligonucleotide
caagugacuaaauggugag

SEQ ID NO: 2115192 - RNA, 19 nt, Artificial Sequence
  Description of Artificial Sequence: Synthetic oligonucleotide
cugacugaggcgucuaucc

SEQ ID NO: 2115193 - RNA, 19 nt, Artificial Sequence
  Description of Artificial Sequence: Synthetic oligonucleotide
ugcguccaagugauaaugg

SEQ ID NO: 2115194 - RNA, 19 nt, Artificial Sequence
  Description of Artificial Sequence: Synthetic oligonucleotide
uauggacucaggauggaaa

SEQ ID NO: 2115195 - RNA, 19 nt, Artificial Sequence
  Description of Artificial Sequence: Synthetic oligonucleotide
uuauacuagccagagggga

SEQ ID NO: 2115196 - RNA, 19 nt, Artificial Sequence
  Description of Artificial Sequence: Synthetic oligonucleotide
cuggguuugcuucuuauac

SEQ ID NO: 2115197 - RNA, 19 nt, Artificial Sequence
  Description of Artificial Sequence: Synthetic oligonucleotide
ucaggcacuagccaucuuc

SEQ ID NO: 2115198 - RNA, 19 nt, Artificial Sequence
  Description of Artificial Sequence: Synthetic oligonucleotide
cacuauggacucaggaugg

SEQ ID NO: 2115199 - RNA, 19 nt, Artificial Sequence
  Description of Artificial Sequence: Synthetic oligonucleotide
gacuagguaaaucuggcaa

SEQ ID NO: 2115200 - RNA, 19 nt, Artificial Sequence
  Description of Artificial Sequence: Synthetic oligonucleotide
cacacacacacacacacac

SEQ ID NO: 2115201 - RNA, 19 nt, Artificial Sequence
  Description of Artificial Sequence: Synthetic oligonucleotide
uucacacauacuaguacac

SEQ ID NO: 2115202 - RNA, 19 nt, Artificial Sequence
  Description of Artificial Sequence: Synthetic oligonucleotide
uucuuauacuagccagagg

SEQ ID NO: 2115203 - RNA, 19 nt, Artificial Sequence
  Description of Artificial Sequence: Synthetic oligonucleotide
cacauacuaguacacacac

SEQ ID NO: 2115204 - RNA, 19 nt, Artificial Sequence
  Description of Artificial Sequence: Synthetic oligonucleotide
agaaauuuacuuaucacuu

SEQ ID NO: 2115205 - RNA, 19 nt, Artificial Sequence
  Description of Artificial Sequence: Synthetic oligonucleotide
aucgauuuucaacaaaaua

SEQ ID NO: 2115206 - RNA, 19 nt, Artificial Sequence
  Description of Artificial Sequence: Synthetic oligonucleotide
aauaccacaggcaggggcu

SEQ ID NO: 2115207 - RNA, 19 nt, Artificial Sequence
  Description of Artificial Sequence: Synthetic oligonucleotide
auauugugcuauaaaacug

SEQ ID NO: 2115208 - RNA, 19 nt, Artificial Sequence
  Description of Artificial Sequence: Synthetic oligonucleotide
cacacacacacacaauacc

SEQ ID NO: 2115209 - RNA, 19 nt, Artificial Sequence
  Description of Artificial Sequence: Synthetic oligonucleotide
ugcuaucugcauuuauaag

SEQ ID NO: 2115210 - RNA, 19 nt, Artificial Sequence
  Description of Artificial Sequence: Synthetic oligonucleotide
uauacuagccagaggggaa

SEQ ID NO: 2115211 - RNA, 19 nt, Artificial Sequence
  Description of Artificial Sequence: Synthetic oligonucleotide
uccacuauggacucaggau

SEQ ID NO: 2115212 - RNA, 19 nt, Artificial Sequence
  Description of Artificial Sequence: Synthetic oligonucleotide
gugcuauaaaacugugagg

SEQ ID NO: 2115213 - RNA, 19 nt, Artificial Sequence
  Description of Artificial Sequence: Synthetic oligonucleotide
caagugggauauauugugc

SEQ ID NO: 2115214 - RNA, 19 nt, Artificial Sequence
  Description of Artificial Sequence: Synthetic oligonucleotide
gauggagaccauggaaugg

SEQ ID NO: 2115215 - RNA, 19 nt, Artificial Sequence
  Description of Artificial Sequence: Synthetic oligonucleotide
uaagggcagaaugacacug

SEQ ID NO: 2115216 - RNA, 19 nt, Artificial Sequence
  Description of Artificial Sequence: Synthetic oligonucleotide
agugacccgaacaacgugg

SEQ ID NO: 2115217 - RNA, 19 nt, Artificial Sequence
  Description of Artificial Sequence: Synthetic oligonucleotide
aggaagggccaguucacac

SEQ ID NO: 2115218 - RNA, 19 nt, Artificial Sequence
  Description of Artificial Sequence: Synthetic oligonucleotide
gaagauggagaccauggaa

SEQ ID NO: 2115219 - RNA, 19 nt, Artificial Sequence
  Description of Artificial Sequence: Synthetic oligonucleotide
gaaugacacugauucauuc

SEQ ID NO: 2115220 - RNA, 19 nt, Artificial Sequence
  Description of Artificial Sequence: Synthetic oligonucleotide
gaguugaugcguccaagug

SEQ ID NO: 2115221 - RNA, 19 nt, Artificial Sequence
  Description of Artificial Sequence: Synthetic oligonucleotide
acuagcaguucacagccca

SEQ ID NO: 2115222 - RNA, 19 nt, Artificial Sequence
  Description of Artificial Sequence: Synthetic oligonucleotide
ugugagggacaagugaccc

SEQ ID NO: 2115223 - RNA, 19 nt, Artificial Sequence
  Description of Artificial Sequence: Synthetic oligonucleotide
agggaacagugaucaaagc

SEQ ID NO: 2115224 - RNA, 19 nt, Artificial Sequence
  Description of Artificial Sequence: Synthetic oligonucleotide
auaccuggagauauuuugg

SEQ ID NO: 2115225 - RNA, 19 nt, Artificial Sequence
  Description of Artificial Sequence: Synthetic oligonucleotide
cuuggggccugacugaggc

SEQ ID NO: 2115226 - RNA, 19 nt, Artificial Sequence
  Description of Artificial Sequence: Synthetic oligonucleotide
acaccuugggccuagcccu

SEQ ID NO: 2115227 - RNA, 19 nt, Artificial Sequence
  Description of Artificial Sequence: Synthetic oligonucleotide
cuucuuauacuagccagag

SEQ ID NO: 2115228 - RNA, 19 nt, Artificial Sequence
  Description of Artificial Sequence: Synthetic oligonucleotide
guaaagaauagaucgauuu

SEQ ID NO: 2115229 - RNA, 19 nt, Artificial Sequence
  Description of Artificial Sequence: Synthetic oligonucleotide
uaguaaagaauagaucgau

SEQ ID NO: 2115230 - RNA, 19 nt, Artificial Sequence
  Description of Artificial Sequence: Synthetic oligonucleotide
agguaguaaagaauagauc

SEQ ID NO: 2115231 - RNA, 19 nt, Artificial Sequence
  Description of Artificial Sequence: Synthetic oligonucleotide
aauuuacuuaucacuugca

SEQ ID NO: 2115232 - RNA, 19 nt, Artificial Sequence
  Description of Artificial Sequence: Synthetic oligonucleotide
aagugacuaaauggugagg

SEQ ID NO: 2115233 - RNA, 19 nt, Artificial Sequence
  Description of Artificial Sequence: Synthetic oligonucleotide
gaucucuccucacuaacca

SEQ ID NO: 2115234 - RNA, 19 nt, Artificial Sequence
  Description of Artificial Sequence: Synthetic oligonucleotide
acuagguaaaucuggcaaa

SEQ ID NO: 2115235 - RNA, 19 nt, Artificial Sequence
  Description of Artificial Sequence: Synthetic oligonucleotide
aucugcccuuuucucaccc

SEQ ID NO: 2115236 - RNA, 19 nt, Artificial Sequence
  Description of Artificial Sequence: Synthetic oligonucleotide
auauuuugggcugucacaa

SEQ ID NO: 2115237 - RNA, 19 nt, Artificial Sequence
  Description of Artificial Sequence: Synthetic oligonucleotide
gugacuaaauggugagggg

SEQ ID NO: 2115238 - RNA, 19 nt, Artificial Sequence
  Description of Artificial Sequence: Synthetic oligonucleotide
aguucacacagguaguaaa

SEQ ID NO: 2115239 - RNA, 19 nt, Artificial Sequence
  Description of Artificial Sequence: Synthetic oligonucleotide
ucccucaaugcccaguuaa

SEQ ID NO: 2115240 - RNA, 19 nt, Artificial Sequence
  Description of Artificial Sequence: Synthetic oligonucleotide
gaagaagccacaccucaca

SEQ ID NO: 2115241 - RNA, 19 nt, Artificial Sequence
  Description of Artificial Sequence: Synthetic oligonucleotide
gaaaugugaaggacuuugc

SEQ ID NO: 2115242 - RNA, 19 nt, Artificial Sequence
  Description of Artificial Sequence: Synthetic oligonucleotide
caugaggaggagcuugggg

SEQ ID NO: 2115243 - RNA, 19 nt, Artificial Sequence
  Description of Artificial Sequence: Synthetic oligonucleotide
agugcugucuucucaggca

SEQ ID NO: 2115244 - RNA, 19 nt, Artificial Sequence
  Description of Artificial Sequence: Synthetic oligonucleotide
ugagggacaagugacccga

SEQ ID NO: 2115245 - RNA, 19 nt, Artificial Sequence
  Description of Artificial Sequence: Synthetic oligonucleotide
acacacacacacacaauac

SEQ ID NO: 2115246 - RNA, 19 nt, Artificial Sequence
  Description of Artificial Sequence: Synthetic oligonucleotide
gaauuaaauaaaggagaca

SEQ ID NO: 2115247 - RNA, 19 nt, Artificial Sequence
  Description of Artificial Sequence: Synthetic oligonucleotide
gaagugcugucuucucagg

SEQ ID NO: 2115248 - RNA, 19 nt, Artificial Sequence
  Description of Artificial Sequence: Synthetic oligonucleotide
ugaugcguccaagugauaa

SEQ ID NO: 2115249 - RNA, 19 nt, Artificial Sequence
  Description of Artificial Sequence: Synthetic oligonucleotide
cuggagauauuuugggcug

SEQ ID NO: 2115250 - RNA, 19 nt, Artificial Sequence
  Description of Artificial Sequence: Synthetic oligonucleotide
ucagggaacagugaucaaa

SEQ ID NO: 2115251 - RNA, 19 nt, Artificial Sequence
  Description of Artificial Sequence: Synthetic oligonucleotide
agacaagaagauggagacc

SEQ ID NO: 2115252 - RNA, 19 nt, Artificial Sequence
  Description of Artificial Sequence: Synthetic oligonucleotide
aaaacaggcagaggugcca

SEQ ID NO: 2115253 - RNA, 19 nt, Artificial Sequence
  Description of Artificial Sequence: Synthetic oligonucleotide
guucacacagguaguaaag

SEQ ID NO: 2115254 - RNA, 19 nt, Artificial Sequence
  Description of Artificial Sequence: Synthetic oligonucleotide
aucugcauuuauaagggca

SEQ ID NO: 2115255 - RNA, 19 nt, Artificial Sequence
  Description of Artificial Sequence: Synthetic oligonucleotide
uucaucuacaagugacuaa

SEQ ID NO: 2115256 - RNA, 19 nt, Artificial Sequence
  Description of Artificial Sequence: Synthetic oligonucleotide
cacacacacacaauaccac

SEQ ID NO: 2115257 - RNA, 19 nt, Artificial Sequence
  Description of Artificial Sequence: Synthetic oligonucleotide
acagguaguaaagaauaga

SEQ ID NO: 2115258 - RNA, 19 nt, Artificial Sequence
  Description of Artificial Sequence: Synthetic oligonucleotide
uucacacagguaguaaaga

SEQ ID NO: 2115259 - RNA, 19 nt, Artificial Sequence
  Description of Artificial Sequence: Synthetic oligonucleotide
aaagcgucaggagcugcuc

SEQ ID NO: 2115260 - RNA, 19 nt, Artificial Sequence
  Description of Artificial Sequence: Synthetic oligonucleotide
cuacaagugacuaaauggu

SEQ ID NO: 2115261 - RNA, 19 nt, Artificial Sequence
  Description of Artificial Sequence: Synthetic oligonucleotide
uccaagugauaauggggug

SEQ ID NO: 2115262 - RNA, 19 nt, Artificial Sequence
  Description of Artificial Sequence: Synthetic oligonucleotide
caagugauaaugggguggc

SEQ ID NO: 2115263 - RNA, 19 nt, Artificial Sequence
  Description of Artificial Sequence: Synthetic oligonucleotide
cauuagcacaccuccucgc

SEQ ID NO: 2115264 - RNA, 19 nt, Artificial Sequence
  Description of Artificial Sequence: Synthetic oligonucleotide
cuugagcuugaguucccgg

SEQ ID NO: 2115265 - RNA, 19 nt, Artificial Sequence
  Description of Artificial Sequence: Synthetic oligonucleotide
caggcacuagccaucuucc

SEQ ID NO: 2115266 - RNA, 19 nt, Artificial Sequence
  Description of Artificial Sequence: Synthetic oligonucleotide
gacaugaggaggagcuugg

SEQ ID NO: 2115267 - RNA, 19 nt, Artificial Sequence
  Description of Artificial Sequence: Synthetic oligonucleotide
acacacacacacaauacca

SEQ ID NO: 2115268 - RNA, 19 nt, Artificial Sequence
  Description of Artificial Sequence: Synthetic oligonucleotide
uuucaucuacaagugacua

SEQ ID NO: 2115269 - RNA, 19 nt, Artificial Sequence
  Description of Artificial Sequence: Synthetic oligonucleotide
ucuggaggcagcagacaug

SEQ ID NO: 2115270 - RNA, 19 nt, Artificial Sequence
  Description of Artificial Sequence: Synthetic oligonucleotide
uacuuaucacuugcaauac

SEQ ID NO: 2115271 - RNA, 19 nt, Artificial Sequence
  Description of Artificial Sequence: Synthetic oligonucleotide
aaccaagcuccaugaauaa

SEQ ID NO: 2115272 - RNA, 19 nt, Artificial Sequence
  Description of Artificial Sequence: Synthetic oligonucleotide
uugcaauaccuggagauau

SEQ ID NO: 2115273 - RNA, 19 nt, Artificial Sequence
  Description of Artificial Sequence: Synthetic oligonucleotide
gucacaaaggaaggugagg

SEQ ID NO: 2115274 - RNA, 19 nt, Artificial Sequence
  Description of Artificial Sequence: Synthetic oligonucleotide
aggggcuccuccucugacc

SEQ ID NO: 2115275 - RNA, 19 nt, Artificial Sequence
  Description of Artificial Sequence: Synthetic oligonucleotide
gauuuucaacaaaauagua

SEQ ID NO: 2115276 - RNA, 19 nt, Artificial Sequence
  Description of Artificial Sequence: Synthetic oligonucleotide
guaguaaagaauagaucga

SEQ ID NO: 2115277 - RNA, 19 nt, Artificial Sequence
  Description of Artificial Sequence: Synthetic oligonucleotide
agggacaagugacccgaac

SEQ ID NO: 2115278 - RNA, 19 nt, Artificial Sequence
  Description of Artificial Sequence: Synthetic oligonucleotide
aacguggaguugaugcguc

SEQ ID NO: 2115279 - RNA, 19 nt, Artificial Sequence
  Description of Artificial Sequence: Synthetic oligonucleotide
gaaaacaggcagaggugcc

SEQ ID NO: 2115280 - RNA, 19 nt, Artificial Sequence
  Description of Artificial Sequence: Synthetic oligonucleotide
agacaugaggaggagcuug

SEQ ID NO: 2115281 - RNA, 19 nt, Artificial Sequence
  Description of Artificial Sequence: Synthetic oligonucleotide
acuaguacacacacgggga

SEQ ID NO: 2115282 - RNA, 19 nt, Artificial Sequence
  Description of Artificial Sequence: Synthetic oligonucleotide
ugaggcgucuauccaggca

SEQ ID NO: 2115283 - RNA, 19 nt, Artificial Sequence
  Description of Artificial Sequence: Synthetic oligonucleotide
caucagggaacagugauca

SEQ ID NO: 2115284 - RNA, 19 nt, Artificial Sequence
  Description of Artificial Sequence: Synthetic oligonucleotide
acaccucacauuagcacac

SEQ ID NO: 2115285 - RNA, 19 nt, Artificial Sequence
  Description of Artificial Sequence: Synthetic oligonucleotide
cacaccucacauuagcaca

SEQ ID NO: 2115286 - RNA, 19 nt, Artificial Sequence
  Description of Artificial Sequence: Synthetic oligonucleotide
auagaucgauuuucaacaa

SEQ ID NO: 2115287 - RNA, 19 nt, Artificial Sequence
  Description of Artificial Sequence: Synthetic oligonucleotide
aguacacacacggggauga

SEQ ID NO: 2115288 - RNA, 19 nt, Artificial Sequence
  Description of Artificial Sequence: Synthetic oligonucleotide
aggcacuagccaucuuccc

SEQ ID NO: 2115289 - RNA, 19 nt, Artificial Sequence
  Description of Artificial Sequence: Synthetic oligonucleotide
ugcauuuauaagggcagaa

SEQ ID NO: 2115290 - RNA, 19 nt, Artificial Sequence
  Description of Artificial Sequence: Synthetic oligonucleotide
agaaagcgucaggagcugc

SEQ ID NO: 2115291 - RNA, 19 nt, Artificial Sequence
  Description of Artificial Sequence: Synthetic oligonucleotide
gaagaaaagaaggcuauau

SEQ ID NO: 2115292 - RNA, 19 nt, Artificial Sequence
  Description of Artificial Sequence: Synthetic oligonucleotide
gugauaaugggguggcaca

SEQ ID NO: 2115293 - RNA, 19 nt, Artificial Sequence
  Description of Artificial Sequence: Synthetic oligonucleotide
acguggaguugaugcgucc

SEQ ID NO: 2115294 - RNA, 19 nt, Artificial Sequence
  Description of Artificial Sequence: Synthetic oligonucleotide
acacacggggaugaaguuc

SEQ ID NO: 2115295 - RNA, 19 nt, Artificial Sequence
  Description of Artificial Sequence: Synthetic oligonucleotide
ucuccucacuaaccaagcu

SEQ ID NO: 2115296 - RNA, 19 nt, Artificial Sequence
  Description of Artificial Sequence: Synthetic oligonucleotide
uauaugcagugaccacggc

SEQ ID NO: 2115297 - RNA, 19 nt, Artificial Sequence
  Description of Artificial Sequence: Synthetic oligonucleotide
cugucacaaaggaagguga

SEQ ID NO: 2115298 - RNA, 19 nt, Artificial Sequence
  Description of Artificial Sequence: Synthetic oligonucleotide
cacacacacacacacacaa

SEQ ID NO: 2115299 - RNA, 19 nt, Artificial Sequence
  Description of Artificial Sequence: Synthetic oligonucleotide
uucucaggcacuagccauc

SEQ ID NO: 2115300 - RNA, 19 nt, Artificial Sequence
  Description of Artificial Sequence: Synthetic oligonucleotide
acauacuaguacacacacg

SEQ ID NO: 2115301 - RNA, 19 nt, Artificial Sequence
  Description of Artificial Sequence: Synthetic oligonucleotide
aagcgucaggagcugcuca

SEQ ID NO: 2115302 - RNA, 19 nt, Artificial Sequence
  Description of Artificial Sequence: Synthetic oligonucleotide
acacacacggggaugaagu

SEQ ID NO: 2115303 - RNA, 19 nt, Artificial Sequence
  Description of Artificial Sequence: Synthetic oligonucleotide
aggcuauaugcagugacca

SEQ ID NO: 2115304 - RNA, 19 nt, Artificial Sequence
  Description of Artificial Sequence: Synthetic oligonucleotide
acaucagggaacagugauc

SEQ ID NO: 2115305 - RNA, 19 nt, Artificial Sequence
  Description of Artificial Sequence: Synthetic oligonucleotide
auggacacuagcaguucac

SEQ ID NO: 2115306 - RNA, 19 nt, Artificial Sequence
  Description of Artificial Sequence: Synthetic oligonucleotide
acggggaugaaguucucaa

SEQ ID NO: 2115307 - RNA, 19 nt, Artificial Sequence
  Description of Artificial Sequence: Synthetic oligonucleotide
augcguccaagugauaaug

SEQ ID NO: 2115308 - RNA, 19 nt, Artificial Sequence
  Description of Artificial Sequence: Synthetic oligonucleotide
cugcucaccaucagacaag

SEQ ID NO: 2115309 - RNA, 19 nt, Artificial Sequence
  Description of Artificial Sequence: Synthetic oligonucleotide
cagguaguaaagaauagau

SEQ ID NO: 2115310 - RNA, 19 nt, Artificial Sequence
  Description of Artificial Sequence: Synthetic oligonucleotide
auugugcuauaaaacugug

SEQ ID NO: 2115311 - RNA, 19 nt, Artificial Sequence
  Description of Artificial Sequence: Synthetic oligonucleotide
agugggauauauugugcua

SEQ ID NO: 2115312 - RNA, 19 nt, Artificial Sequence
  Description of Artificial Sequence: Synthetic oligonucleotide
accaucagacaagaagaug

SEQ ID NO: 2115313 - RNA, 19 nt, Artificial Sequence
  Description of Artificial Sequence: Synthetic oligonucleotide
aggggaaaugugaaggacu

SEQ ID NO: 2115314 - RNA, 19 nt, Artificial Sequence
  Description of Artificial Sequence: Synthetic oligonucleotide
ggggacuagguaaaucugg

SEQ ID NO: 2115315 - RNA, 19 nt, Artificial Sequence
  Description of Artificial Sequence: Synthetic oligonucleotide
acacugauucauuccacua

SEQ ID NO: 2115316 - RNA, 19 nt, Artificial Sequence
  Description of Artificial Sequence: Synthetic oligonucleotide
gauaaugggguggcacaug

SEQ ID NO: 2115317 - RNA, 19 nt, Artificial Sequence
  Description of Artificial Sequence: Synthetic oligonucleotide
cacacacacacacacaaua

SEQ ID NO: 2115318 - RNA, 19 nt, Artificial Sequence
  Description of Artificial Sequence: Synthetic oligonucleotide
uggaguugaugcguccaag

SEQ ID NO: 2115319 - RNA, 19 nt, Artificial Sequence
  Description of Artificial Sequence: Synthetic oligonucleotide
acacaauaccacaggcagg

SEQ ID NO: 2115320 - RNA, 19 nt, Artificial Sequence
  Description of Artificial Sequence: Synthetic oligonucleotide
cacuaaccaagcuccauga

SEQ ID NO: 2115321 - RNA, 19 nt, Artificial Sequence
  Description of Artificial Sequence: Synthetic oligonucleotide
cuagcaguucacagcccag

SEQ ID NO: 2115322 - RNA, 19 nt, Artificial Sequence
  Description of Artificial Sequence: Synthetic oligonucleotide
ugagguacuugagcuugag

SEQ ID NO: 2115323 - RNA, 19 nt, Artificial Sequence
  Description of Artificial Sequence: Synthetic oligonucleotide
acccgaacaacguggaguu

SEQ ID NO: 2115324 - RNA, 19 nt, Artificial Sequence
  Description of Artificial Sequence: Synthetic oligonucleotide
aaacaucagggaacaguga

SEQ ID NO: 2115325 - RNA, 19 nt, Artificial Sequence
  Description of Artificial Sequence: Synthetic oligonucleotide
gacaagugacccgaacaac

SEQ ID NO: 2115326 - RNA, 19 nt, Artificial Sequence
  Description of Artificial Sequence: Synthetic oligonucleotide
cccagaaagcgucaggagc

SEQ ID NO: 2115327 - RNA, 19 nt, Artificial Sequence
  Description of Artificial Sequence: Synthetic oligonucleotide
ggauauauugugcuauaaa

SEQ ID NO: 2115328 - RNA, 19 nt, Artificial Sequence
  Description of Artificial Sequence: Synthetic oligonucleotide
gcguccaagugauaauggg

SEQ ID NO: 2115329 - RNA, 19 nt, Artificial Sequence
  Description of Artificial Sequence: Synthetic oligonucleotide
ugugaaggacuuugcuauc

SEQ ID NO: 2115330 - RNA, 19 nt, Artificial Sequence
  Description of Artificial Sequence: Synthetic oligonucleotide
ugauaaugggguggcacau

SEQ ID NO: 2115331 - RNA, 19 nt, Artificial Sequence
  Description of Artificial Sequence: Synthetic oligonucleotide
cuuuucucaccccuucaca

SEQ ID NO: 2115332 - RNA, 19 nt, Artificial Sequence
  Description of Artificial Sequence: Synthetic oligonucleotide
uaaaacugugagggacaag

SEQ ID NO: 2115333 - RNA, 19 nt, Artificial Sequence
  Description of Artificial Sequence: Synthetic oligonucleotide
uaaugggguggcacaugca

SEQ ID NO: 2115334 - RNA, 19 nt, Artificial Sequence
  Description of Artificial Sequence: Synthetic oligonucleotide
uaguacacacacggggaug

SEQ ID NO: 2115335 - RNA, 19 nt, Artificial Sequence
  Description of Artificial Sequence: Synthetic oligonucleotide
cacaugcaguuucaucuac

SEQ ID NO: 2115336 - RNA, 19 nt, Artificial Sequence
  Description of Artificial Sequence: Synthetic oligonucleotide
caucagacaagaagaugga

SEQ ID NO: 2115337 - RNA, 19 nt, Artificial Sequence
  Description of Artificial Sequence: Synthetic oligonucleotide
uggagaccauggaauggac

SEQ ID NO: 2115338 - RNA, 19 nt, Artificial Sequence
  Description of Artificial Sequence: Synthetic oligonucleotide
caccccuucacacauacua

SEQ ID NO: 2115339 - RNA, 19 nt, Artificial Sequence
  Description of Artificial Sequence: Synthetic oligonucleotide
ugacccgaacaacguggag

SEQ ID NO: 2115340 - RNA, 19 nt, Artificial Sequence
  Description of Artificial Sequence: Synthetic oligonucleotide
ugggauauauugugcuaua

SEQ ID NO: 2115341 - RNA, 19 nt, Artificial Sequence
  Description of Artificial Sequence: Synthetic oligonucleotide
ccaagugauaauggggugg

SEQ ID NO: 2115342 - RNA, 19 nt, Artificial Sequence
  Description of Artificial Sequence: Synthetic oligonucleotide
uagguaaaucuggcaaaga

SEQ ID NO: 2115343 - RNA, 19 nt, Artificial Sequence
  Description of Artificial Sequence: Synthetic oligonucleotide
ugcagugaccacggcaggc

SEQ ID NO: 2115344 - RNA, 19 nt, Artificial Sequence
  Description of Artificial Sequence: Synthetic oligonucleotide
uggacucaggauggaaaca

SEQ ID NO: 2115345 - RNA, 19 nt, Artificial Sequence
  Description of Artificial Sequence: Synthetic oligonucleotide
aguaaagaauagaucgauu

SEQ ID NO: 2115346 - RNA, 19 nt, Artificial Sequence
  Description of Artificial Sequence: Synthetic oligonucleotide
uggacggguaaaggaagug

SEQ ID NO: 2115347 - RNA, 19 nt, Artificial Sequence
  Description of Artificial Sequence: Synthetic oligonucleotide
ugcaauaccuggagauauu

SEQ ID NO: 2115348 - RNA, 19 nt, Artificial Sequence
  Description of Artificial Sequence: Synthetic oligonucleotide
caggcgaggggaucucucc

SEQ ID NO: 2115349 - RNA, 19 nt, Artificial Sequence
  Description of Artificial Sequence: Synthetic oligonucleotide
uggcacaugcaguuucauc

SEQ ID NO: 2115350 - RNA, 19 nt, Artificial Sequence
  Description of Artificial Sequence: Synthetic oligonucleotide
acuaaccaagcuccaugaa

SEQ ID NO: 2115351 - RNA, 19 nt, Artificial Sequence
  Description of Artificial Sequence: Synthetic oligonucleotide
ucugcccuuuucucacccc

SEQ ID NO: 2115352 - RNA, 19 nt, Artificial Sequence
  Description of Artificial Sequence: Synthetic oligonucleotide
gaccacggcaggcccaggc

SEQ ID NO: 2115353 - RNA, 19 nt, Artificial Sequence
  Description of Artificial Sequence: Synthetic oligonucleotide
ggagaccauggaauggacg

SEQ ID NO: 2115354 - RNA, 19 nt, Artificial Sequence
  Description of Artificial Sequence: Synthetic oligonucleotide
ggucugcucguucugugcc

SEQ ID NO: 2115355 - RNA, 19 nt, Artificial Sequence
  Description of Artificial Sequence: Synthetic oligonucleotide
guccaagugauaauggggu

SEQ ID NO: 2115356 - RNA, 19 nt, Artificial Sequence
  Description of Artificial Sequence: Synthetic oligonucleotide
ucaggcgaggggaucucuc

SEQ ID NO: 2115357 - RNA, 19 nt, Artificial Sequence
  Description of Artificial Sequence: Synthetic oligonucleotide
cucaagugggauauauugu

SEQ ID NO: 2115358 - RNA, 19 nt, Artificial Sequence
  Description of Artificial Sequence: Synthetic oligonucleotide
aagaugugacucagaaaua

SEQ ID NO: 2115359 - RNA, 19 nt, Artificial Sequence
  Description of Artificial Sequence: Synthetic oligonucleotide
ucucaggcacuagccaucu

SEQ ID NO: 2115360 - RNA, 19 nt, Artificial Sequence
  Description of Artificial Sequence: Synthetic oligonucleotide
uggagauauuuugggcugu

SEQ ID NO: 2115361 - RNA, 19 nt, Artificial Sequence
  Description of Artificial Sequence: Synthetic oligonucleotide
gggacuagguaaaucuggc

SEQ ID NO: 2115362 - RNA, 19 nt, Artificial Sequence
  Description of Artificial Sequence: Synthetic oligonucleotide
uuggggccugacugaggcg

SEQ ID NO: 2115363 - RNA, 19 nt, Artificial Sequence
  Description of Artificial Sequence: Synthetic oligonucleotide
acaugaggaggagcuuggg

SEQ ID NO: 2115364 - RNA, 19 nt, Artificial Sequence
  Description of Artificial Sequence: Synthetic oligonucleotide
gacggguaaaggaagugcu

SEQ ID NO: 2115365 - RNA, 19 nt, Artificial Sequence
  Description of Artificial Sequence: Synthetic oligonucleotide
guugaugcguccaagugau

SEQ ID NO: 2115366 - RNA, 19 nt, Artificial Sequence
  Description of Artificial Sequence: Synthetic oligonucleotide
aggggaucucuccucacua

SEQ ID NO: 2115367 - RNA, 19 nt, Artificial Sequence
  Description of Artificial Sequence: Synthetic oligonucleotide
ggacggguaaaggaagugc

SEQ ID NO: 2115368 - RNA, 19 nt, Artificial Sequence
  Description of Artificial Sequence: Synthetic oligonucleotide
gacccgaacaacguggagu

SEQ ID NO: 2115369 - RNA, 19 nt, Artificial Sequence
  Description of Artificial Sequence: Synthetic oligonucleotide
agaagaaaagaaggcuaua

SEQ ID NO: 2115370 - RNA, 19 nt, Artificial Sequence
  Description of Artificial Sequence: Synthetic oligonucleotide
ugggccuagcccucaggcu

SEQ ID NO: 2115371 - RNA, 19 nt, Artificial Sequence
  Description of Artificial Sequence: Synthetic oligonucleotide
cacacggggaugaaguucu

SEQ ID NO: 2115372 - RNA, 19 nt, Artificial Sequence
  Description of Artificial Sequence: Synthetic oligonucleotide
ccucugaccacaccuuggg

SEQ ID NO: 2115373 - RNA, 19 nt, Artificial Sequence
  Description of Artificial Sequence: Synthetic oligonucleotide
gcuauaaaacugugaggga

SEQ ID NO: 2115374 - RNA, 19 nt, Artificial Sequence
  Description of Artificial Sequence: Synthetic oligonucleotide
ucgcccucaauggacacua

SEQ ID NO: 2115375 - RNA, 19 nt, Artificial Sequence
  Description of Artificial Sequence: Synthetic oligonucleotide
auacuagccagaggggaaa

SEQ ID NO: 2115376 - RNA, 19 nt, Artificial Sequence
  Description of Artificial Sequence: Synthetic oligonucleotide
gaacaacguggaguugaug

SEQ ID NO: 2115377 - RNA, 19 nt, Artificial Sequence
  Description of Artificial Sequence: Synthetic oligonucleotide
cacacagguaguaaagaau

SEQ ID NO: 2115378 - RNA, 19 nt, Artificial Sequence
  Description of Artificial Sequence: Synthetic oligonucleotide
acaugcaguuucaucuaca

SEQ ID NO: 2115379 - RNA, 19 nt, Artificial Sequence
  Description of Artificial Sequence: Synthetic oligonucleotide
caaagauugugccuggguu

SEQ ID NO: 2115380 - RNA, 19 nt, Artificial Sequence
  Description of Artificial Sequence: Synthetic oligonucleotide
caucugcccuuuucucacc

SEQ ID NO: 2115381 - RNA, 19 nt, Artificial Sequence
  Description of Artificial Sequence: Synthetic oligonucleotide
cacuagcaguucacagccc

SEQ ID NO: 2115382 - RNA, 19 nt, Artificial Sequence
  Description of Artificial Sequence: Synthetic oligonucleotide
ggaaacaucagggaacagu

SEQ ID NO: 2115383 - RNA, 19 nt, Artificial Sequence
  Description of Artificial Sequence: Synthetic oligonucleotide
ugaguucccgggucugcuc

SEQ ID NO: 2115384 - RNA, 19 nt, Artificial Sequence
  Description of Artificial Sequence: Synthetic oligonucleotide
ucccgggucugcucguucu

SEQ ID NO: 2115385 - RNA, 19 nt, Artificial Sequence
  Description of Artificial Sequence: Synthetic oligonucleotide
gguuugcuucuuauacuag

SEQ ID NO: 2115386 - RNA, 19 nt, Artificial Sequence
  Description of Artificial Sequence: Synthetic oligonucleotide
acggguaaaggaagugcug

SEQ ID NO: 2115387 - RNA, 19 nt, Artificial Sequence
  Description of Artificial Sequence: Synthetic oligonucleotide
uggaaacaucagggaacag

SEQ ID NO: 2115388 - RNA, 19 nt, Artificial Sequence
  Description of Artificial Sequence: Synthetic oligonucleotide
cauggaauggacggguaaa

SEQ ID NO: 2115389 - RNA, 19 nt, Artificial Sequence
  Description of Artificial Sequence: Synthetic oligonucleotide
cagaaugacacugauucau

SEQ ID NO: 2115390 - RNA, 19 nt, Artificial Sequence
  Description of Artificial Sequence: Synthetic oligonucleotide
acuagccagaggggaaaug

SEQ ID NO: 2115391 - RNA, 19 nt, Artificial Sequence
  Description of Artificial Sequence: Synthetic oligonucleotide
cacggcaggcccaggcagc

SEQ ID NO: 2115392 - RNA, 19 nt, Artificial Sequence
  Description of Artificial Sequence: Synthetic oligonucleotide
acuagccaucuucccuucu

SEQ ID NO: 2115393 - RNA, 19 nt, Artificial Sequence
  Description of Artificial Sequence: Synthetic oligonucleotide
aguucucaaugaugaggua

SEQ ID NO: 2115394 - RNA, 19 nt, Artificial Sequence
  Description of Artificial Sequence: Synthetic oligonucleotide
cugaggcgucuauccaggc

SEQ ID NO: 2115395 - RNA, 19 nt, Artificial Sequence
  Description of Artificial Sequence: Synthetic oligonucleotide
caguuucaucuacaaguga

SEQ ID NO: 2115396 - RNA, 19 nt, Artificial Sequence
  Description of Artificial Sequence: Synthetic oligonucleotide
gaugcguccaagugauaau

SEQ ID NO: 2115397 - RNA, 19 nt, Artificial Sequence
  Description of Artificial Sequence: Synthetic oligonucleotide
gaucgauuuucaacaaaau

SEQ ID NO: 2115398 - RNA, 19 nt, Artificial Sequence
  Description of Artificial Sequence: Synthetic oligonucleotide
ggcuauaugcagugaccac

SEQ ID NO: 2115399 - RNA, 19 nt, Artificial Sequence
  Description of Artificial Sequence: Synthetic oligonucleotide
ccagaggggaaaugugaag

SEQ ID NO: 2115400 - RNA, 19 nt, Artificial Sequence
  Description of Artificial Sequence: Synthetic oligonucleotide
ggacuagguaaaucuggca

SEQ ID NO: 2115401 - RNA, 19 nt, Artificial Sequence
  Description of Artificial Sequence: Synthetic oligonucleotide
aggcgaggggaucucuccu

SEQ ID NO: 2115402 - RNA, 19 nt, Artificial Sequence
  Description of Artificial Sequence: Synthetic oligonucleotide
aggcuggggugcucaagug

SEQ ID NO: 2115403 - RNA, 19 nt, Artificial Sequence
  Description of Artificial Sequence: Synthetic oligonucleotide
cucaaugcccaguuaacuu

SEQ ID NO: 2115404 - RNA, 19 nt, Artificial Sequence
  Description of Artificial Sequence: Synthetic oligonucleotide
caagugacccgaacaacgu

SEQ ID NO: 2115405 - RNA, 19 nt, Artificial Sequence
  Description of Artificial Sequence: Synthetic oligonucleotide
auggacggguaaaggaagu

SEQ ID NO: 2115406 - RNA, 19 nt, Artificial Sequence
  Description of Artificial Sequence: Synthetic oligonucleotide
auugugccuggguuugcuu

SEQ ID NO: 2115407 - RNA, 19 nt, Artificial Sequence
  Description of Artificial Sequence: Synthetic oligonucleotide
acuauggacucaggaugga

SEQ ID NO: 2115408 - RNA, 19 nt, Artificial Sequence
  Description of Artificial Sequence: Synthetic oligonucleotide
ccuggagauauuuugggcu

SEQ ID NO: 2115409 - RNA, 19 nt, Artificial Sequence
  Description of Artificial Sequence: Synthetic oligonucleotide
ucauuccacuauggacuca

SEQ ID NO: 2115410 - RNA, 19 nt, Artificial Sequence
  Description of Artificial Sequence: Synthetic oligonucleotide
cuugcaauaccuggagaua

SEQ ID NO: 2115411 - RNA, 19 nt, Artificial Sequence
  Description of Artificial Sequence: Synthetic oligonucleotide
gaggggaucucuccucacu

SEQ ID NO: 2115412 - RNA, 19 nt, Artificial Sequence
  Description of Artificial Sequence: Synthetic oligonucleotide
acacacacacacacacaca

SEQ ID NO: 2115413 - RNA, 19 nt, Artificial Sequence
  Description of Artificial Sequence: Synthetic oligonucleotide
gggcugucacaaaggaagg

SEQ ID NO: 2115414 - RNA, 19 nt, Artificial Sequence
  Description of Artificial Sequence: Synthetic oligonucleotide
gaaagcgucaggagcugcu

SEQ ID NO: 2115415 - RNA, 19 nt, Artificial Sequence
  Description of Artificial Sequence: Synthetic oligonucleotide
gcccucaauggacacuagc

SEQ ID NO: 2115416 - RNA, 19 nt, Artificial Sequence
  Description of Artificial Sequence: Synthetic oligonucleotide
cugaccacaccuugggccu

SEQ ID NO: 2115417 - RNA, 19 nt, Artificial Sequence
  Description of Artificial Sequence: Synthetic oligonucleotide
gggucugcucguucugugc

SEQ ID NO: 2115418 - RNA, 19 nt, Artificial Sequence
  Description of Artificial Sequence: Synthetic oligonucleotide
cacugauucauuccacuau

SEQ ID NO: 2115419 - RNA, 19 nt, Artificial Sequence
  Description of Artificial Sequence: Synthetic oligonucleotide
gcagaaugacacugauuca

SEQ ID NO: 2115420 - RNA, 19 nt, Artificial Sequence
  Description of Artificial Sequence: Synthetic oligonucleotide
gaccauggaauggacgggu

SEQ ID NO: 2115421 - RNA, 19 nt, Artificial Sequence
  Description of Artificial Sequence: Synthetic oligonucleotide
gcagacaugaggaggagcu

SEQ ID NO: 2115422 - RNA, 19 nt, Artificial Sequence
  Description of Artificial Sequence: Synthetic oligonucleotide
cacuagccaucuucccuuc

SEQ ID NO: 2115423 - RNA, 19 nt, Artificial Sequence
  Description of Artificial Sequence: Synthetic oligonucleotide
ggaagaagccacaccucac

SEQ ID NO: 2115424 - RNA, 19 nt, Artificial Sequence
  Description of Artificial Sequence: Synthetic oligonucleotide
augggguggcacaugcagu

SEQ ID NO: 2115425 - RNA, 19 nt, Artificial Sequence
  Description of Artificial Sequence: Synthetic oligonucleotide
ccagaaagcgucaggagcu

SEQ ID NO: 2115426 - RNA, 19 nt, Artificial Sequence
  Description of Artificial Sequence: Synthetic oligonucleotide
cuagcccucaggcuggggu

SEQ ID NO: 2115427 - RNA, 19 nt, Artificial Sequence
  Description of Artificial Sequence: Synthetic oligonucleotide
ggaguugaugcguccaagu

SEQ ID NO: 2115428 - RNA, 19 nt, Artificial Sequence
  Description of Artificial Sequence: Synthetic oligonucleotide
gaccacaccuugggccuag

SEQ ID NO: 2115429 - RNA, 19 nt, Artificial Sequence
  Description of Artificial Sequence: Synthetic oligonucleotide
uacuagccagaggggaaau

SEQ ID NO: 2115430 - RNA, 19 nt, Artificial Sequence
  Description of Artificial Sequence: Synthetic oligonucleotide
cccucaaugcccaguuaac

SEQ ID NO: 2115431 - RNA, 19 nt, Artificial Sequence
  Description of Artificial Sequence: Synthetic oligonucleotide
uucccgggucugcucguuc

SEQ ID NO: 2115432 - RNA, 19 nt, Artificial Sequence
  Description of Artificial Sequence: Synthetic oligonucleotide
gauugugccuggguuugcu

SEQ ID NO: 2115433 - RNA, 19 nt, Artificial Sequence
  Description of Artificial Sequence: Synthetic oligonucleotide
ggcacuagccaucuucccu

SEQ ID NO: 2115434 - RNA, 19 nt, Artificial Sequence
  Description of Artificial Sequence: Synthetic oligonucleotide
cugcauuuauaagggcaga

SEQ ID NO: 2115435 - RNA, 19 nt, Artificial Sequence
  Description of Artificial Sequence: Synthetic oligonucleotide
cuaguacacacacggggau

SEQ ID NO: 2115436 - RNA, 19 nt, Artificial Sequence
  Description of Artificial Sequence: Synthetic oligonucleotide
ucucaccccuucacacaua

SEQ ID NO: 2115437 - RNA, 19 nt, Artificial Sequence
  Description of Artificial Sequence: Synthetic oligonucleotide
cuauggacucaggauggaa

SEQ ID NO: 2115438 - RNA, 19 nt, Artificial Sequence
  Description of Artificial Sequence: Synthetic oligonucleotide
gugacccgaacaacgugga

SEQ ID NO: 2115439 - RNA, 19 nt, Artificial Sequence
  Description of Artificial Sequence: Synthetic oligonucleotide
agugaccacggcaggccca

SEQ ID NO: 2115440 - RNA, 19 nt, Artificial Sequence
  Description of Artificial Sequence: Synthetic oligonucleotide
acacacacacacacacaau

SEQ ID NO: 2115441 - RNA, 19 nt, Artificial Sequence
  Description of Artificial Sequence: Synthetic oligonucleotide
uugaugcguccaagugaua

SEQ ID NO: 2115442 - RNA, 19 nt, Artificial Sequence
  Description of Artificial Sequence: Synthetic oligonucleotide
acaagaagauggagaccau

SEQ ID NO: 2115443 - RNA, 19 nt, Artificial Sequence
  Description of Artificial Sequence: Synthetic oligonucleotide
gcaaagauugugccugggu

SEQ ID NO: 2115444 - RNA, 19 nt, Artificial Sequence
  Description of Artificial Sequence: Synthetic oligonucleotide
cuuugcuaucugcauuuau

SEQ ID NO: 2115445 - RNA, 19 nt, Artificial Sequence
  Description of Artificial Sequence: Synthetic oligonucleotide
accacaccuugggccuagc

SEQ ID NO: 2115446 - RNA, 19 nt, Artificial Sequence
  Description of Artificial Sequence: Synthetic oligonucleotide
ggagauauuuugggcuguc

SEQ ID NO: 2115447 - RNA, 19 nt, Artificial Sequence
  Description of Artificial Sequence: Synthetic oligonucleotide
caccaucagacaagaagau

SEQ ID NO: 2115448 - RNA, 19 nt, Artificial Sequence
  Description of Artificial Sequence: Synthetic oligonucleotide
caauaccuggagauauuuu

SEQ ID NO: 2115449 - RNA, 19 nt, Artificial Sequence
  Description of Artificial Sequence: Synthetic oligonucleotide
caacguggaguugaugcgu

SEQ ID NO: 2115450 - RNA, 19 nt, Artificial Sequence
  Description of Artificial Sequence: Synthetic oligonucleotide
ccacggcaggcccaggcag

SEQ ID NO: 2115451 - RNA, 19 nt, Artificial Sequence
  Description of Artificial Sequence: Synthetic oligonucleotide
ggacucaggauggaaacau

SEQ ID NO: 2115452 - RNA, 19 nt, Artificial Sequence
  Description of Artificial Sequence: Synthetic oligonucleotide
gcacaugcaguuucaucua

SEQ ID NO: 2115453 - RNA, 19 nt, Artificial Sequence
  Description of Artificial Sequence: Synthetic oligonucleotide
acggcaggcccaggcagcu

SEQ ID NO: 2115454 - RNA, 19 nt, Artificial Sequence
  Description of Artificial Sequence: Synthetic oligonucleotide
gccacaccucacauuagca

SEQ ID NO: 2115455 - RNA, 19 nt, Artificial Sequence
  Description of Artificial Sequence: Synthetic oligonucleotide
gugcucaagugggauauau

SEQ ID NO: 2115456 - RNA, 19 nt, Artificial Sequence
  Description of Artificial Sequence: Synthetic oligonucleotide
ggggaucucuccucacuaa

SEQ ID NO: 2115457 - RNA, 19 nt, Artificial Sequence
  Description of Artificial Sequence: Synthetic oligonucleotide
ugaccacggcaggcccagg

SEQ ID NO: 2115458 - RNA, 19 nt, Artificial Sequence
  Description of Artificial Sequence: Synthetic oligonucleotide
gcgaggggaucucuccuca

SEQ ID NO: 2115459 - RNA, 19 nt, Artificial Sequence
  Description of Artificial Sequence: Synthetic oligonucleotide
accauggaauggacgggua

SEQ ID NO: 2115460 - RNA, 19 nt, Artificial Sequence
  Description of Artificial Sequence: Synthetic oligonucleotide
gcacuagccaucuucccuu

SEQ ID NO: 2115461 - RNA, 19 nt, Artificial Sequence
  Description of Artificial Sequence: Synthetic oligonucleotide
cccuucacacauacuagua

SEQ ID NO: 2115462 - RNA, 19 nt, Artificial Sequence
  Description of Artificial Sequence: Synthetic oligonucleotide
ggggaaaugugaaggacuu

SEQ ID NO: 2115463 - RNA, 19 nt, Artificial Sequence
  Description of Artificial Sequence: Synthetic oligonucleotide
ugaccacaccuugggccua

SEQ ID NO: 2115464 - RNA, 19 nt, Artificial Sequence
  Description of Artificial Sequence: Synthetic oligonucleotide
aggcgucuauccaggcaga

SEQ ID NO: 2115465 - RNA, 19 nt, Artificial Sequence
  Description of Artificial Sequence: Synthetic oligonucleotide
gcuuggggccugacugagg

SEQ ID NO: 2115466 - RNA, 19 nt, Artificial Sequence
  Description of Artificial Sequence: Synthetic oligonucleotide
ccauggaauggacggguaa

SEQ ID NO: 2115467 - RNA, 19 nt, Artificial Sequence
  Description of Artificial Sequence: Synthetic oligonucleotide
cucacuaaccaagcuccau

SEQ ID NO: 2115468 - RNA, 19 nt, Artificial Sequence
  Description of Artificial Sequence: Synthetic oligonucleotide
accuugggccuagcccuca

SEQ ID NO: 2115469 - RNA, 19 nt, Artificial Sequence
  Description of Artificial Sequence: Synthetic oligonucleotide
gcaauaccuggagauauuu

SEQ ID NO: 2115470 - RNA, 19 nt, Artificial Sequence
  Description of Artificial Sequence: Synthetic oligonucleotide
gaggagcuuggggccugac

SEQ ID NO: 2115471 - RNA, 19 nt, Artificial Sequence
  Description of Artificial Sequence: Synthetic oligonucleotide
gggugcucaagugggauau

SEQ ID NO: 2115472 - RNA, 19 nt, Artificial Sequence
  Description of Artificial Sequence: Synthetic oligonucleotide
gcgucaggagcugcucacc

SEQ ID NO: 2115473 - RNA, 19 nt, Artificial Sequence
  Description of Artificial Sequence: Synthetic oligonucleotide
gucccucaaugcccaguua

SEQ ID NO: 2115474 - RNA, 19 nt, Artificial Sequence
  Description of Artificial Sequence: Synthetic oligonucleotide
gagggacaagugacccgaa

SEQ ID NO: 2115475 - RNA, 19 nt, Artificial Sequence
  Description of Artificial Sequence: Synthetic oligonucleotide
ccucacuaaccaagcucca

SEQ ID NO: 2115476 - RNA, 19 nt, Artificial Sequence
  Description of Artificial Sequence: Synthetic oligonucleotide
ccuugggccuagcccucag

SEQ ID NO: 2115477 - RNA, 19 nt, Artificial Sequence
  Description of Artificial Sequence: Synthetic oligonucleotide
cgggucugcucguucugug

SEQ ID NO: 2115478 - RNA, 19 nt, Artificial Sequence
  Description of Artificial Sequence: Synthetic oligonucleotide
ggcgucuauccaggcagaa

SEQ ID NO: 2115479 - RNA, 19 nt, Artificial Sequence
  Description of Artificial Sequence: Synthetic oligonucleotide
cccgggucugcucguucug

SEQ ID NO: 2115480 - RNA, 19 nt, Artificial Sequence
  Description of Artificial Sequence: Synthetic oligonucleotide
cgaggggaucucuccucac

SEQ ID NO: 2115481 - RNA, 19 nt, Artificial Sequence
  Description of Artificial Sequence: Synthetic oligonucleotide
gggcuccuccucugaccac

SEQ ID NO: 2115482 - RNA, 19 nt, Artificial Sequence
  Description of Artificial Sequence: Synthetic oligonucleotide
cggguaaaggaagugcugu

SEQ ID NO: 2115483 - RNA, 19 nt, Artificial Sequence
  Description of Artificial Sequence: Synthetic oligonucleotide
cucaggcgaggggaucucu

SEQ ID NO: 2115484 - RNA, 19 nt, Artificial Sequence
  Description of Artificial Sequence: Synthetic oligonucleotide
cccgaacaacguggaguug

SEQ ID NO: 2115485 - RNA, 19 nt, Artificial Sequence
  Description of Artificial Sequence: Synthetic oligonucleotide
ccuagcccucaggcugggg

SEQ ID NO: 2115486 - RNA, 19 nt, Artificial Sequence
  Description of Artificial Sequence: Synthetic oligonucleotide
cagacaugaggaggagcuu

SEQ ID NO: 2115487 - RNA, 19 nt, Artificial Sequence
  Description of Artificial Sequence: Synthetic oligonucleotide
gcucaggcgaggggaucuc

SEQ ID NO: 2115488 - RNA, 19 nt, Artificial Sequence
  Description of Artificial Sequence: Synthetic oligonucleotide
ggugcucaagugggauaua

SEQ ID NO: 2115489 - RNA, 19 nt, Artificial Sequence
  Description of Artificial Sequence: Synthetic oligonucleotide
gggaaaugugaaggacuuu

SEQ ID NO: 2115490 - RNA, 19 nt, Artificial Sequence
  Description of Artificial Sequence: Synthetic oligonucleotide
gcucaccaucagacaagaa

SEQ ID NO: 2115491 - RNA, 19 nt, Artificial Sequence
  Description of Artificial Sequence: Synthetic oligonucleotide
cgcccucaauggacacuag

SEQ ID NO: 2115492 - RNA, 19 nt, Artificial Sequence
  Description of Artificial Sequence: Synthetic oligonucleotide
cgaacaacguggaguugau

SEQ ID NO: 2115493 - RNA, 19 nt, Artificial Sequence
  Description of Artificial Sequence: Synthetic oligonucleotide
gccugacugaggcgucuau

SEQ ID NO: 2115494 - RNA, 19 nt, Artificial Sequence
  Description of Artificial Sequence: Synthetic oligonucleotide
guucccgggucugcucguu

SEQ ID NO: 2115495 - RNA, 19 nt, Artificial Sequence
  Description of Artificial Sequence: Synthetic oligonucleotide
cucaggcacuagccaucuu

SEQ ID NO: 2115496 - RNA, 19 nt, Artificial Sequence
  Description of Artificial Sequence: Synthetic oligonucleotide
ccgggucugcucguucugu

SEQ ID NO: 2115497 - RNA, 19 nt, Artificial Sequence
  Description of Artificial Sequence: Synthetic oligonucleotide
auauuugaaacacuuaugc

SEQ ID NO: 2115498 - RNA, 19 nt, Artificial Sequence
  Description of Artificial Sequence: Synthetic oligonucleotide
guguguaugaauuagaagg

SEQ ID NO: 2115499 - RNA, 19 nt, Artificial Sequence
  Description of Artificial Sequence: Synthetic oligonucleotide
uuuaaagugaccauuuuag

SEQ ID NO: 2115500 - RNA, 19 nt, Artificial Sequence
  Description of Artificial Sequence: Synthetic oligonucleotide
acuuauuucaugcaaauuc

SEQ ID NO: 2115501 - RNA, 19 nt, Artificial Sequence
  Description of Artificial Sequence: Synthetic oligonucleotide
aaggcgauuaguuagcugg

SEQ ID NO: 2115502 - RNA, 19 nt, Artificial Sequence
  Description of Artificial Sequence: Synthetic oligonucleotide
gaugcuauugcuuuaaggc

SEQ ID NO: 2115503 - RNA, 19 nt, Artificial Sequence
  Description of Artificial Sequence: Synthetic oligonucleotide
aauuagaaggcucuauagg

SEQ ID NO: 2115504 - RNA, 19 nt, Artificial Sequence
  Description of Artificial Sequence: Synthetic oligonucleotide
cuaauuaacaaucaaggag

SEQ ID NO: 2115505 - RNA, 19 nt, Artificial Sequence
  Description of Artificial Sequence: Synthetic oligonucleotide
aauucucuaauuaacaauc

SEQ ID NO: 2115506 - RNA, 19 nt, Artificial Sequence
  Description of Artificial Sequence: Synthetic oligonucleotide
cucuaauuaacaaucaagg

SEQ ID NO: 2115507 - RNA, 19 nt, Artificial Sequence
  Description of Artificial Sequence: Synthetic oligonucleotide
uugaauaaugggaagagga

SEQ ID NO: 2115508 - RNA, 19 nt, Artificial Sequence
  Description of Artificial Sequence: Synthetic oligonucleotide
ucucuaauuaacaaucaag

SEQ ID NO: 2115509 - RNA, 19 nt, Artificial Sequence
  Description of Artificial Sequence: Synthetic oligonucleotide
uaagaucugacaaagggga

SEQ ID NO: 2115510 - RNA, 19 nt, Artificial Sequence
  Description of Artificial Sequence: Synthetic oligonucleotide
uuaagaagcaucauacucu

SEQ ID NO: 2115511 - RNA, 19 nt, Artificial Sequence
  Description of Artificial Sequence: Synthetic oligonucleotide
ugaauagauuauuuuaaag

SEQ ID NO: 2115512 - RNA, 19 nt, Artificial Sequence
  Description of Artificial Sequence: Synthetic oligonucleotide
aagaaugucgucugcuucg

SEQ ID NO: 2115513 - RNA, 19 nt, Artificial Sequence
  Description of Artificial Sequence: Synthetic oligonucleotide
ucuaaaaucaucuuucaua

SEQ ID NO: 2115514 - RNA, 19 nt, Artificial Sequence
  Description of Artificial Sequence: Synthetic oligonucleotide
uuucauaucccuauacuca

SEQ ID NO: 2115515 - RNA, 19 nt, Artificial Sequence
  Description of Artificial Sequence: Synthetic oligonucleotide
ucucuuguuauccucaggc

SEQ ID NO: 2115516 - RNA, 19 nt, Artificial Sequence
  Description of Artificial Sequence: Synthetic oligonucleotide
agauucgucacugugagcg

SEQ ID NO: 2115517 - RNA, 19 nt, Artificial Sequence
  Description of Artificial Sequence: Synthetic oligonucleotide
agguaagucacuuucaucu

SEQ ID NO: 2115518 - RNA, 19 nt, Artificial Sequence
  Description of Artificial Sequence: Synthetic oligonucleotide
aauucugugcguucaguuc

SEQ ID NO: 2115519 - RNA, 19 nt, Artificial Sequence
  Description of Artificial Sequence: Synthetic oligonucleotide
uuaacaaucaaggagcacu

SEQ ID NO: 2115520 - RNA, 19 nt, Artificial Sequence
  Description of Artificial Sequence: Synthetic oligonucleotide
uguuguauuuguuuaaacu

SEQ ID NO: 2115521 - RNA, 19 nt, Artificial Sequence
  Description of Artificial Sequence: Synthetic oligonucleotide
uaagcucuuucacacaccg

SEQ ID NO: 2115522 - RNA, 19 nt, Artificial Sequence
  Description of Artificial Sequence: Synthetic oligonucleotide
cuuuaaggcgauuaguuag

SEQ ID NO: 2115523 - RNA, 19 nt, Artificial Sequence
  Description of Artificial Sequence: Synthetic oligonucleotide
uguguaugaauuagaaggc

SEQ ID NO: 2115524 - RNA, 19 nt, Artificial Sequence
  Description of Artificial Sequence: Synthetic oligonucleotide
uuuuagguaagucacuuuc

SEQ ID NO: 2115525 - RNA, 19 nt, Artificial Sequence
  Description of Artificial Sequence: Synthetic oligonucleotide
ucugaauagauuauuuuaa

SEQ ID NO: 2115526 - RNA, 19 nt, Artificial Sequence
  Description of Artificial Sequence: Synthetic oligonucleotide
ucaaggagcacuuuucugc

SEQ ID NO: 2115527 - RNA, 19 nt, Artificial Sequence
  Description of Artificial Sequence: Synthetic oligonucleotide
aaagugaccauuuuagauu

SEQ ID NO: 2115528 - RNA, 19 nt, Artificial Sequence
  Description of Artificial Sequence: Synthetic oligonucleotide
cuaagaucugacaaagggg

SEQ ID NO: 2115529 - RNA, 19 nt, Artificial Sequence
  Description of Artificial Sequence: Synthetic oligonucleotide
uuauccucaggccagauuc

SEQ ID NO: 2115530 - RNA, 19 nt, Artificial Sequence
  Description of Artificial Sequence: Synthetic oligonucleotide
ugaauaaugggaagaggag

SEQ ID NO: 2115531 - RNA, 19 nt, Artificial Sequence
  Description of Artificial Sequence: Synthetic oligonucleotide
ucgguuuguagaaagacca

SEQ ID NO: 2115532 - RNA, 19 nt, Artificial Sequence
  Description of Artificial Sequence: Synthetic oligonucleotide
gaauagauuauuuuaaagu

SEQ ID NO: 2115533 - RNA, 19 nt, Artificial Sequence
  Description of Artificial Sequence: Synthetic oligonucleotide
ucuaauuaacaaucaagga

SEQ ID NO: 2115534 - RNA, 19 nt, Artificial Sequence
  Description of Artificial Sequence: Synthetic oligonucleotide
ugagaauccccuuuauggg

SEQ ID NO: 2115535 - RNA, 19 nt, Artificial Sequence
  Description of Artificial Sequence: Synthetic oligonucleotide
aaagcaugagcaugccugg

SEQ ID NO: 2115536 - RNA, 19 nt, Artificial Sequence
  Description of Artificial Sequence: Synthetic oligonucleotide
cuuaagaagcaucauacuc

SEQ ID NO: 2115537 - RNA, 19 nt, Artificial Sequence
  Description of Artificial Sequence: Synthetic oligonucleotide
uaaacuuucugaugaagga

SEQ ID NO: 2115538 - RNA, 19 nt, Artificial Sequence
  Description of Artificial Sequence: Synthetic oligonucleotide
uagaaggcucuauaggugg

SEQ ID NO: 2115539 - RNA, 19 nt, Artificial Sequence
  Description of Artificial Sequence: Synthetic oligonucleotide
uuagauuuuacuugacacu

SEQ ID NO: 2115540 - RNA, 19 nt, Artificial Sequence
  Description of Artificial Sequence: Synthetic oligonucleotide
ugaugcuauugcuuuaagg

SEQ ID NO: 2115541 - RNA, 19 nt, Artificial Sequence
  Description of Artificial Sequence: Synthetic oligonucleotide
aagaccaucucuuguuauc

SEQ ID NO: 2115542 - RNA, 19 nt, Artificial Sequence
  Description of Artificial Sequence: Synthetic oligonucleotide
ugcaauucucuaauuaaca

SEQ ID NO: 2115543 - RNA, 19 nt, Artificial Sequence
  Description of Artificial Sequence: Synthetic oligonucleotide
ucuuguuauccucaggcca

SEQ ID NO: 2115544 - RNA, 19 nt, Artificial Sequence
  Description of Artificial Sequence: Synthetic oligonucleotide
ucuuuugcccuccuucugg

SEQ ID NO: 2115545 - RNA, 19 nt, Artificial Sequence
  Description of Artificial Sequence: Synthetic oligonucleotide
uguuuucaaagacuggcca

SEQ ID NO: 2115546 - RNA, 19 nt, Artificial Sequence
  Description of Artificial Sequence: Synthetic oligonucleotide
uaucccuauacucaugcug

SEQ ID NO: 2115547 - RNA, 19 nt, Artificial Sequence
  Description of Artificial Sequence: Synthetic oligonucleotide
aaacacuccauauuugaaa

SEQ ID NO: 2115548 - RNA, 19 nt, Artificial Sequence
  Description of Artificial Sequence: Synthetic oligonucleotide
ugaaggaucuuugucaacc

SEQ ID NO: 2115549 - RNA, 19 nt, Artificial Sequence
  Description of Artificial Sequence: Synthetic oligonucleotide
uuuaaggcgauuaguuagc

SEQ ID NO: 2115550 - RNA, 19 nt, Artificial Sequence
  Description of Artificial Sequence: Synthetic oligonucleotide
caucaacuaauucugugcg

SEQ ID NO: 2115551 - RNA, 19 nt, Artificial Sequence
  Description of Artificial Sequence: Synthetic oligonucleotide
auccagaucugcuacgugg

SEQ ID NO: 2115552 - RNA, 19 nt, Artificial Sequence
  Description of Artificial Sequence: Synthetic oligonucleotide
aguauuuccuuucaucaca

SEQ ID NO: 2115553 - RNA, 19 nt, Artificial Sequence
  Description of Artificial Sequence: Synthetic oligonucleotide
uaauguuuucaaagacugg

SEQ ID NO: 2115554 - RNA, 19 nt, Artificial Sequence
  Description of Artificial Sequence: Synthetic oligonucleotide
uuagaaggcucuauaggug

SEQ ID NO: 2115555 - RNA, 19 nt, Artificial Sequence
  Description of Artificial Sequence: Synthetic oligonucleotide
ugcuauugcuuuaaggcga

SEQ ID NO: 2115556 - RNA, 19 nt, Artificial Sequence
  Description of Artificial Sequence: Synthetic oligonucleotide
ucuugaauaaugggaagag

SEQ ID NO: 2115557 - RNA, 19 nt, Artificial Sequence
  Description of Artificial Sequence: Synthetic oligonucleotide
aucuuucauaucccuauac

SEQ ID NO: 2115558 - RNA, 19 nt, Artificial Sequence
  Description of Artificial Sequence: Synthetic oligonucleotide
uguaugaauuagaaggcuc

SEQ ID NO: 2115559 - RNA, 19 nt, Artificial Sequence
  Description of Artificial Sequence: Synthetic oligonucleotide
uaagaagcaucauacucug

SEQ ID NO: 2115560 - RNA, 19 nt, Artificial Sequence
  Description of Artificial Sequence: Synthetic oligonucleotide
uguagaaagcaugagcaug

SEQ ID NO: 2115561 - RNA, 19 nt, Artificial Sequence
  Description of Artificial Sequence: Synthetic oligonucleotide
ugugccaucuguagaaagc

SEQ ID NO: 2115562 - RNA, 19 nt, Artificial Sequence
  Description of Artificial Sequence: Synthetic oligonucleotide
uuuucuacugucugacugc

SEQ ID NO: 2115563 - RNA, 19 nt, Artificial Sequence
  Description of Artificial Sequence: Synthetic oligonucleotide
uguauuuguuuaaacuuuc

SEQ ID NO: 2115564 - RNA, 19 nt, Artificial Sequence
  Description of Artificial Sequence: Synthetic oligonucleotide
agcacuuuucugcuagagc

SEQ ID NO: 2115565 - RNA, 19 nt, Artificial Sequence
  Description of Artificial Sequence: Synthetic oligonucleotide
uuaugcaauucucuaauua

SEQ ID NO: 2115566 - RNA, 19 nt, Artificial Sequence
  Description of Artificial Sequence: Synthetic oligonucleotide
agcaccaauucuuaagaag

SEQ ID NO: 2115567 - RNA, 19 nt, Artificial Sequence
  Description of Artificial Sequence: Synthetic oligonucleotide
uuauuucaugcaaauucug

SEQ ID NO: 2115568 - RNA, 19 nt, Artificial Sequence
  Description of Artificial Sequence: Synthetic oligonucleotide
uuuagguaagucacuuuca

SEQ ID NO: 2115569 - RNA, 19 nt, Artificial Sequence
  Description of Artificial Sequence: Synthetic oligonucleotide
auugcuuuaaggcgauuag

SEQ ID NO: 2115570 - RNA, 19 nt, Artificial Sequence
  Description of Artificial Sequence: Synthetic oligonucleotide
acugccuaagcucuuucac

SEQ ID NO: 2115571 - RNA, 19 nt, Artificial Sequence
  Description of Artificial Sequence: Synthetic oligonucleotide
uagagcaccaauucuuaag

SEQ ID NO: 2115572 - RNA, 19 nt, Artificial Sequence
  Description of Artificial Sequence: Synthetic oligonucleotide
cauaucccuauacucaugc

SEQ ID NO: 2115573 - RNA, 19 nt, Artificial Sequence
  Description of Artificial Sequence: Synthetic oligonucleotide
acuuuucuaaugaaggauc

SEQ ID NO: 2115574 - RNA, 19 nt, Artificial Sequence
  Description of Artificial Sequence: Synthetic oligonucleotide
aaucaucuuucauaucccu

SEQ ID NO: 2115575 - RNA, 19 nt, Artificial Sequence
  Description of Artificial Sequence: Synthetic oligonucleotide
uaagucacuuucaucugcc

SEQ ID NO: 2115576 - RNA, 19 nt, Artificial Sequence
  Description of Artificial Sequence: Synthetic oligonucleotide
agcucuuucacacaccgcu

SEQ ID NO: 2115577 - RNA, 19 nt, Artificial Sequence
  Description of Artificial Sequence: Synthetic oligonucleotide
aaugaacugccuaagcucu

SEQ ID NO: 2115578 - RNA, 19 nt, Artificial Sequence
  Description of Artificial Sequence: Synthetic oligonucleotide
aaacacuuaugcaauucuc

SEQ ID NO: 2115579 - RNA, 19 nt, Artificial Sequence
  Description of Artificial Sequence: Synthetic oligonucleotide
ugugagucccaccuuaaac

SEQ ID NO: 2115580 - RNA, 19 nt, Artificial Sequence
  Description of Artificial Sequence: Synthetic oligonucleotide
acucagaaauuuuagguaa

SEQ ID NO: 2115581 - RNA, 19 nt, Artificial Sequence
  Description of Artificial Sequence: Synthetic oligonucleotide
aggaggaacuauuuucuuc

SEQ ID NO: 2115582 - RNA, 19 nt, Artificial Sequence
  Description of Artificial Sequence: Synthetic oligonucleotide
uccagaucugcuacguggg

SEQ ID NO: 2115583 - RNA, 19 nt, Artificial Sequence
  Description of Artificial Sequence: Synthetic oligonucleotide
ugaauuagaaggcucuaua

SEQ ID NO: 2115584 - RNA, 19 nt, Artificial Sequence
  Description of Artificial Sequence: Synthetic oligonucleotide
uuguauuuguuuaaacuuu

SEQ ID NO: 2115585 - RNA, 19 nt, Artificial Sequence
  Description of Artificial Sequence: Synthetic oligonucleotide
uuuacuugacacuggagua

SEQ ID NO: 2115586 - RNA, 19 nt, Artificial Sequence
  Description of Artificial Sequence: Synthetic oligonucleotide
ccuaagaucugacaaaggg

SEQ ID NO: 2115587 - RNA, 19 nt, Artificial Sequence
  Description of Artificial Sequence: Synthetic oligonucleotide
ucaucuuucauaucccuau

SEQ ID NO: 2115588 - RNA, 19 nt, Artificial Sequence
  Description of Artificial Sequence: Synthetic oligonucleotide
aagugaccauuuuagauuu

SEQ ID NO: 2115589 - RNA, 19 nt, Artificial Sequence
  Description of Artificial Sequence: Synthetic oligonucleotide
gaauggacuuuucuaauga

SEQ ID NO: 2115590 - RNA, 19 nt, Artificial Sequence
  Description of Artificial Sequence: Synthetic oligonucleotide
acugccuaagaucugacaa

SEQ ID NO: 2115591 - RNA, 19 nt, Artificial Sequence
  Description of Artificial Sequence: Synthetic oligonucleotide
aauagaguucugaauagau

SEQ ID NO: 2115592 - RNA, 19 nt, Artificial Sequence
  Description of Artificial Sequence: Synthetic oligonucleotide
aacacuuaugcaauucucu

SEQ ID NO: 2115593 - RNA, 19 nt, Artificial Sequence
  Description of Artificial Sequence: Synthetic oligonucleotide
agagcaccaauucuuaaga

SEQ ID NO: 2115594 - RNA, 19 nt, Artificial Sequence
  Description of Artificial Sequence: Synthetic oligonucleotide
ucuguuugacucagguucc

SEQ ID NO: 2115595 - RNA, 19 nt, Artificial Sequence
  Description of Artificial Sequence: Synthetic oligonucleotide
ugauccguaaguaauuguu

SEQ ID NO: 2115596 - RNA, 19 nt, Artificial Sequence
  Description of Artificial Sequence: Synthetic oligonucleotide
acuuaugcaauucucuaau

SEQ ID NO: 2115597 - RNA, 19 nt, Artificial Sequence
  Description of Artificial Sequence: Synthetic oligonucleotide
aaaggggaagaaugucguc

SEQ ID NO: 2115598 - RNA, 19 nt, Artificial Sequence
  Description of Artificial Sequence: Synthetic oligonucleotide
aaugucgucugcuucguuu

SEQ ID NO: 2115599 - RNA, 19 nt, Artificial Sequence
  Description of Artificial Sequence: Synthetic oligonucleotide
aauuuuagguaagucacuu

SEQ ID NO: 2115600 - RNA, 19 nt, Artificial Sequence
  Description of Artificial Sequence: Synthetic oligonucleotide
uuugucaaccagcauuuuc

SEQ ID NO: 2115601 - RNA, 19 nt, Artificial Sequence
  Description of Artificial Sequence: Synthetic oligonucleotide
ugcuuuaaggcgauuaguu

SEQ ID NO: 2115602 - RNA, 19 nt, Artificial Sequence
  Description of Artificial Sequence: Synthetic oligonucleotide
uuagguaagucacuuucau

SEQ ID NO: 2115603 - RNA, 19 nt, Artificial Sequence
  Description of Artificial Sequence: Synthetic oligonucleotide
auagauuauuuuaaaguga

SEQ ID NO: 2115604 - RNA, 19 nt, Artificial Sequence
  Description of Artificial Sequence: Synthetic oligonucleotide
aaggggaagaaugucgucu

SEQ ID NO: 2115605 - RNA, 19 nt, Artificial Sequence
  Description of Artificial Sequence: Synthetic oligonucleotide
uaugcuuguucaauuuccu

SEQ ID NO: 2115606 - RNA, 19 nt, Artificial Sequence
  Description of Artificial Sequence: Synthetic oligonucleotide
ugacaaaggggaagaaugu

SEQ ID NO: 2115607 - RNA, 19 nt, Artificial Sequence
  Description of Artificial Sequence: Synthetic oligonucleotide
guagaaagcaugagcaugc

SEQ ID NO: 2115608 - RNA, 19 nt, Artificial Sequence
  Description of Artificial Sequence: Synthetic oligonucleotide
caauucuuaagaagcauca

SEQ ID NO: 2115609 - RNA, 19 nt, Artificial Sequence
  Description of Artificial Sequence: Synthetic oligonucleotide
auagguggaauagaguucu

SEQ ID NO: 2115610 - RNA, 19 nt, Artificial Sequence
  Description of Artificial Sequence: Synthetic oligonucleotide
ucuuaagaagcaucauacu

SEQ ID NO: 2115611 - RNA, 19 nt, Artificial Sequence
  Description of Artificial Sequence: Synthetic oligonucleotide
auccguaaguaauuguucu

SEQ ID NO: 2115612 - RNA, 19 nt, Artificial Sequence
  Description of Artificial Sequence: Synthetic oligonucleotide
agaucugcuacguggggag

SEQ ID NO: 2115613 - RNA, 19 nt, Artificial Sequence
  Description of Artificial Sequence: Synthetic oligonucleotide
aauuaacaaucaaggagca

SEQ ID NO: 2115614 - RNA, 19 nt, Artificial Sequence
  Description of Artificial Sequence: Synthetic oligonucleotide
ucacacaccgcucacuuau

SEQ ID NO: 2115615 - RNA, 19 nt, Artificial Sequence
  Description of Artificial Sequence: Synthetic oligonucleotide
ugaagaacuugcugggugu

SEQ ID NO: 2115616 - RNA, 19 nt, Artificial Sequence
  Description of Artificial Sequence: Synthetic oligonucleotide
uggaguauuuccuuucauc

SEQ ID NO: 2115617 - RNA, 19 nt, Artificial Sequence
  Description of Artificial Sequence: Synthetic oligonucleotide
uggggaguucuucugaccu

SEQ ID NO: 2115618 - RNA, 19 nt, Artificial Sequence
  Description of Artificial Sequence: Synthetic oligonucleotide
ugccuaagaucugacaaag

SEQ ID NO: 2115619 - RNA, 19 nt, Artificial Sequence
  Description of Artificial Sequence: Synthetic oligonucleotide
guaagucacuuucaucugc

SEQ ID NO: 2115620 - RNA, 19 nt, Artificial Sequence
  Description of Artificial Sequence: Synthetic oligonucleotide
ugccuaagcucuuucacac

SEQ ID NO: 2115621 - RNA, 19 nt, Artificial Sequence
  Description of Artificial Sequence: Synthetic oligonucleotide
agcaugagcaugccuggac

SEQ ID NO: 2115622 - RNA, 19 nt, Artificial Sequence
  Description of Artificial Sequence: Synthetic oligonucleotide
cuugaauaaugggaagagg

SEQ ID NO: 2115623 - RNA, 19 nt, Artificial Sequence
  Description of Artificial Sequence: Synthetic oligonucleotide
auuaguuagcuggucauca

SEQ ID NO: 2115624 - RNA, 19 nt, Artificial Sequence
  Description of Artificial Sequence: Synthetic oligonucleotide
aguucuucugaccuacacu

SEQ ID NO: 2115625 - RNA, 19 nt, Artificial Sequence
  Description of Artificial Sequence: Synthetic oligonucleotide
uucauaucccuauacucau

SEQ ID NO: 2115626 - RNA, 19 nt, Artificial Sequence
  Description of Artificial Sequence: Synthetic oligonucleotide
uucuaaaaucaucuuucau

SEQ ID NO: 2115627 - RNA, 19 nt, Artificial Sequence
  Description of Artificial Sequence: Synthetic oligonucleotide
agaaagaccaucucuuguu

SEQ ID NO: 2115628 - RNA, 19 nt, Artificial Sequence
  Description of Artificial Sequence: Synthetic oligonucleotide
agugcccgccacuggaucc

SEQ ID NO: 2115629 - RNA, 19 nt, Artificial Sequence
  Description of Artificial Sequence: Synthetic oligonucleotide
ggaguauuuccuuucauca

SEQ ID NO: 2115630 - RNA, 19 nt, Artificial Sequence
  Description of Artificial Sequence: Synthetic oligonucleotide
uauccucaggccagauucg

SEQ ID NO: 2115631 - RNA, 19 nt, Artificial Sequence
  Description of Artificial Sequence: Synthetic oligonucleotide
aacuaauucugugcguuca

SEQ ID NO: 2115632 - RNA, 19 nt, Artificial Sequence
  Description of Artificial Sequence: Synthetic oligonucleotide
ugcuagagcaccaauucuu

SEQ ID NO: 2115633 - RNA, 19 nt, Artificial Sequence
  Description of Artificial Sequence: Synthetic oligonucleotide
accaucucuuguuauccuc

SEQ ID NO: 2115634 - RNA, 19 nt, Artificial Sequence
  Description of Artificial Sequence: Synthetic oligonucleotide
aaagaccaucucuuguuau

SEQ ID NO: 2115635 - RNA, 19 nt, Artificial Sequence
  Description of Artificial Sequence: Synthetic oligonucleotide
guaugcuuguucaauuucc

SEQ ID NO: 2115636 - RNA, 19 nt, Artificial Sequence
  Description of Artificial Sequence: Synthetic oligonucleotide
uucaguucuguuugacuca

SEQ ID NO: 2115637 - RNA, 19 nt, Artificial Sequence
  Description of Artificial Sequence: Synthetic oligonucleotide
gaagaaugucgucugcuuc

SEQ ID NO: 2115638 - RNA, 19 nt, Artificial Sequence
  Description of Artificial Sequence: Synthetic oligonucleotide
cucagaaauuuuagguaag

SEQ ID NO: 2115639 - RNA, 19 nt, Artificial Sequence
  Description of Artificial Sequence: Synthetic oligonucleotide
ugugcguucaguucuguuu

SEQ ID NO: 2115640 - RNA, 19 nt, Artificial Sequence
  Description of Artificial Sequence: Synthetic oligonucleotide
guaaguaauuguucuguga

SEQ ID NO: 2115641 - RNA, 19 nt, Artificial Sequence
  Description of Artificial Sequence: Synthetic oligonucleotide
aaaugagaauccccuuuau

SEQ ID NO: 2115642 - RNA, 19 nt, Artificial Sequence
  Description of Artificial Sequence: Synthetic oligonucleotide
ugaugaaggaacuguugaa

SEQ ID NO: 2115643 - RNA, 19 nt, Artificial Sequence
  Description of Artificial Sequence: Synthetic oligonucleotide
aucacaaacacuccauauu

SEQ ID NO: 2115644 - RNA, 19 nt, Artificial Sequence
  Description of Artificial Sequence: Synthetic oligonucleotide
uccguaaguaauuguucug

SEQ ID NO: 2115645 - RNA, 19 nt, Artificial Sequence
  Description of Artificial Sequence: Synthetic oligonucleotide
cacuccauauuugaaacac

SEQ ID NO: 2115646 - RNA, 19 nt, Artificial Sequence
  Description of Artificial Sequence: Synthetic oligonucleotide
ugguguguguaugaauuag

SEQ ID NO: 2115647 - RNA, 19 nt, Artificial Sequence
  Description of Artificial Sequence: Synthetic oligonucleotide
uucaugcaaauucugccua

SEQ ID NO: 2115648 - RNA, 19 nt, Artificial Sequence
  Description of Artificial Sequence: Synthetic oligonucleotide
ucagaaauuuuagguaagu

SEQ ID NO: 2115649 - RNA, 19 nt, Artificial Sequence
  Description of Artificial Sequence: Synthetic oligonucleotide
ugaaacacuuaugcaauuc

SEQ ID NO: 2115650 - RNA, 19 nt, Artificial Sequence
  Description of Artificial Sequence: Synthetic oligonucleotide
acuaauucugugcguucag

SEQ ID NO: 2115651 - RNA, 19 nt, Artificial Sequence
  Description of Artificial Sequence: Synthetic oligonucleotide
ugugugucucuuaauguuu

SEQ ID NO: 2115652 - RNA, 19 nt, Artificial Sequence
  Description of Artificial Sequence: Synthetic oligonucleotide
cauacucugcaaugaacug

SEQ ID NO: 2115653 - RNA, 19 nt, Artificial Sequence
  Description of Artificial Sequence: Synthetic oligonucleotide
gcacuuuucugcuagagca

SEQ ID NO: 2115654 - RNA, 19 nt, Artificial Sequence
  Description of Artificial Sequence: Synthetic oligonucleotide
acaaucaaggagcacuuuu

SEQ ID NO: 2115655 - RNA, 19 nt, Artificial Sequence
  Description of Artificial Sequence: Synthetic oligonucleotide
aucaaggagcacuuuucug

SEQ ID NO: 2115656 - RNA, 19 nt, Artificial Sequence
  Description of Artificial Sequence: Synthetic oligonucleotide
cucuuguuauccucaggcc

SEQ ID NO: 2115657 - RNA, 19 nt, Artificial Sequence
  Description of Artificial Sequence: Synthetic oligonucleotide
ucaacuaauucugugcguu

SEQ ID NO: 2115658 - RNA, 19 nt, Artificial Sequence
  Description of Artificial Sequence: Synthetic oligonucleotide
gguagcuucaggaaguccc

SEQ ID NO: 2115659 - RNA, 19 nt, Artificial Sequence
  Description of Artificial Sequence: Synthetic oligonucleotide
ucguuuuggggagugcccg

SEQ ID NO: 2115660 - RNA, 19 nt, Artificial Sequence
  Description of Artificial Sequence: Synthetic oligonucleotide
gcaccaauucuuaagaagc

SEQ ID NO: 2115661 - RNA, 19 nt, Artificial Sequence
  Description of Artificial Sequence: Synthetic oligonucleotide
ugagucccaccuuaaacuc

SEQ ID NO: 2115662 - RNA, 19 nt, Artificial Sequence
  Description of Artificial Sequence: Synthetic oligonucleotide
ucugacugcugguagcuuc

SEQ ID NO: 2115663 - RNA, 19 nt, Artificial Sequence
  Description of Artificial Sequence: Synthetic oligonucleotide
auugguguguguaugaauu

SEQ ID NO: 2115664 - RNA, 19 nt, Artificial Sequence
  Description of Artificial Sequence: Synthetic oligonucleotide
uaacaaucaaggagcacuu

SEQ ID NO: 2115665 - RNA, 19 nt, Artificial Sequence
  Description of Artificial Sequence: Synthetic oligonucleotide
auuuuagauuuuacuugac

SEQ ID NO: 2115666 - RNA, 19 nt, Artificial Sequence
  Description of Artificial Sequence: Synthetic oligonucleotide
uccauauuugaaacacuua

SEQ ID NO: 2115667 - RNA, 19 nt, Artificial Sequence
  Description of Artificial Sequence: Synthetic oligonucleotide
gaaacacuuaugcaauucu

SEQ ID NO: 2115668 - RNA, 19 nt, Artificial Sequence
  Description of Artificial Sequence: Synthetic oligonucleotide
ucgucugcuucguuuuggg

SEQ ID NO: 2115669 - RNA, 19 nt, Artificial Sequence
  Description of Artificial Sequence: Synthetic oligonucleotide
aauucuuaagaagcaucau

SEQ ID NO: 2115670 - RNA, 19 nt, Artificial Sequence
  Description of Artificial Sequence: Synthetic oligonucleotide
uugaugcuauugcuuuaag

SEQ ID NO: 2115671 - RNA, 19 nt, Artificial Sequence
  Description of Artificial Sequence: Synthetic oligonucleotide
uggcugauccguaaguaau

SEQ ID NO: 2115672 - RNA, 19 nt, Artificial Sequence
  Description of Artificial Sequence: Synthetic oligonucleotide
augaaggaucuuugucaac

SEQ ID NO: 2115673 - RNA, 19 nt, Artificial Sequence
  Description of Artificial Sequence: Synthetic oligonucleotide
gugcguucaguucuguuug

SEQ ID NO: 2115674 - RNA, 19 nt, Artificial Sequence
  Description of Artificial Sequence: Synthetic oligonucleotide
ucauaucccuauacucaug

SEQ ID NO: 2115675 - RNA, 19 nt, Artificial Sequence
  Description of Artificial Sequence: Synthetic oligonucleotide
cuucguuuuggggagugcc

SEQ ID NO: 2115676 - RNA, 19 nt, Artificial Sequence
  Description of Artificial Sequence: Synthetic oligonucleotide
aucucuuguuauccucagg

SEQ ID NO: 2115677 - RNA, 19 nt, Artificial Sequence
  Description of Artificial Sequence: Synthetic oligonucleotide
cuuggugguaugcuuguuc

SEQ ID NO: 2115678 - RNA, 19 nt, Artificial Sequence
  Description of Artificial Sequence: Synthetic oligonucleotide
gaguucuucugaccuacac

SEQ ID NO: 2115679 - RNA, 19 nt, Artificial Sequence
  Description of Artificial Sequence: Synthetic oligonucleotide
agauuuuacuugacacugg

SEQ ID NO: 2115680 - RNA, 19 nt, Artificial Sequence
  Description of Artificial Sequence: Synthetic oligonucleotide
gauccguaaguaauuguuc

SEQ ID NO: 2115681 - RNA, 19 nt, Artificial Sequence
  Description of Artificial Sequence: Synthetic oligonucleotide
cuaagcucuuucacacacc

SEQ ID NO: 2115682 - RNA, 19 nt, Artificial Sequence
  Description of Artificial Sequence: Synthetic oligonucleotide
uaaggcgauuaguuagcug

SEQ ID NO: 2115683 - RNA, 19 nt, Artificial Sequence
  Description of Artificial Sequence: Synthetic oligonucleotide
ccuauacucaugcugucgg

SEQ ID NO: 2115684 - RNA, 19 nt, Artificial Sequence
  Description of Artificial Sequence: Synthetic oligonucleotide
ugaccuacacuugacuuuc

SEQ ID NO: 2115685 - RNA, 19 nt, Artificial Sequence
  Description of Artificial Sequence: Synthetic oligonucleotide
ucccaccuuaaacucagaa

SEQ ID NO: 2115686 - RNA, 19 nt, Artificial Sequence
  Description of Artificial Sequence: Synthetic oligonucleotide
cugaauagauuauuuuaaa

SEQ ID NO: 2115687 - RNA, 19 nt, Artificial Sequence
  Description of Artificial Sequence: Synthetic oligonucleotide
aucaacuaauucugugcgu

SEQ ID NO: 2115688 - RNA, 19 nt, Artificial Sequence
  Description of Artificial Sequence: Synthetic oligonucleotide
gaucugacaaaggggaaga

SEQ ID NO: 2115689 - RNA, 19 nt, Artificial Sequence
  Description of Artificial Sequence: Synthetic oligonucleotide
auccccuuuauggggagac

SEQ ID NO: 2115690 - RNA, 19 nt, Artificial Sequence
  Description of Artificial Sequence: Synthetic oligonucleotide
uuguucaauuuccuugguu

SEQ ID NO: 2115691 - RNA, 19 nt, Artificial Sequence
  Description of Artificial Sequence: Synthetic oligonucleotide
cuuaggcuuuucuacuguc

SEQ ID NO: 2115692 - RNA, 19 nt, Artificial Sequence
  Description of Artificial Sequence: Synthetic oligonucleotide
caugagcaugccuggacug

SEQ ID NO: 2115693 - RNA, 19 nt, Artificial Sequence
  Description of Artificial Sequence: Synthetic oligonucleotide
uuacuugacacuggaguau

SEQ ID NO: 2115694 - RNA, 19 nt, Artificial Sequence
  Description of Artificial Sequence: Synthetic oligonucleotide
gggugugugucucuuaaug

SEQ ID NO: 2115695 - RNA, 19 nt, Artificial Sequence
  Description of Artificial Sequence: Synthetic oligonucleotide
uccuuucaucacaaacacu

SEQ ID NO: 2115696 - RNA, 19 nt, Artificial Sequence
  Description of Artificial Sequence: Synthetic oligonucleotide
aggaacuauuuucuucuaa

SEQ ID NO: 2115697 - RNA, 19 nt, Artificial Sequence
  Description of Artificial Sequence: Synthetic oligonucleotide
uugcuuuaaggcgauuagu

SEQ ID NO: 2115698 - RNA, 19 nt, Artificial Sequence
  Description of Artificial Sequence: Synthetic oligonucleotide
gugagucccaccuuaaacu

SEQ ID NO: 2115699 - RNA, 19 nt, Artificial Sequence
  Description of Artificial Sequence: Synthetic oligonucleotide
gagaccgcucucuugaaua

SEQ ID NO: 2115700 - RNA, 19 nt, Artificial Sequence
  Description of Artificial Sequence: Synthetic oligonucleotide
uuucuacugucugacugcu

SEQ ID NO: 2115701 - RNA, 19 nt, Artificial Sequence
  Description of Artificial Sequence: Synthetic oligonucleotide
gcugucgguuuguagaaag

SEQ ID NO: 2115702 - RNA, 19 nt, Artificial Sequence
  Description of Artificial Sequence: Synthetic oligonucleotide
uacguggggaguucuucug

SEQ ID NO: 2115703 - RNA, 19 nt, Artificial Sequence
  Description of Artificial Sequence: Synthetic oligonucleotide
agaacuugcugggugugug

SEQ ID NO: 2115704 - RNA, 19 nt, Artificial Sequence
  Description of Artificial Sequence: Synthetic oligonucleotide
cugucugacugcugguagc

SEQ ID NO: 2115705 - RNA, 19 nt, Artificial Sequence
  Description of Artificial Sequence: Synthetic oligonucleotide
gauuaguuagcuggucauc

SEQ ID NO: 2115706 - RNA, 19 nt, Artificial Sequence
  Description of Artificial Sequence: Synthetic oligonucleotide
uuaaggcgauuaguuagcu

SEQ ID NO: 2115707 - RNA, 19 nt, Artificial Sequence
  Description of Artificial Sequence: Synthetic oligonucleotide
auuuuagguaagucacuuu

SEQ ID NO: 2115708 - RNA, 19 nt, Artificial Sequence
  Description of Artificial Sequence: Synthetic oligonucleotide
gaaagaccaucucuuguua

SEQ ID NO: 2115709 - RNA, 19 nt, Artificial Sequence
  Description of Artificial Sequence: Synthetic oligonucleotide
agucccaccuuaaacucag

SEQ ID NO: 2115710 - RNA, 19 nt, Artificial Sequence
  Description of Artificial Sequence: Synthetic oligonucleotide
cuugacacuggaguauuuc

SEQ ID NO: 2115711 - RNA, 19 nt, Artificial Sequence
  Description of Artificial Sequence: Synthetic oligonucleotide
ccaauucuuaagaagcauc

SEQ ID NO: 2115712 - RNA, 19 nt, Artificial Sequence
  Description of Artificial Sequence: Synthetic oligonucleotide
agucuuggugguaugcuug

SEQ ID NO: 2115713 - RNA, 19 nt, Artificial Sequence
  Description of Artificial Sequence: Synthetic oligonucleotide
accuacacuugacuuucug

SEQ ID NO: 2115714 - RNA, 19 nt, Artificial Sequence
  Description of Artificial Sequence: Synthetic oligonucleotide
gaauccccuuuauggggag

SEQ ID NO: 2115715 - RNA, 19 nt, Artificial Sequence
  Description of Artificial Sequence: Synthetic oligonucleotide
uaugaauuagaaggcucua

SEQ ID NO: 2115716 - RNA, 19 nt, Artificial Sequence
  Description of Artificial Sequence: Synthetic oligonucleotide
uuucaaagacuggccaggu

SEQ ID NO: 2115717 - RNA, 19 nt, Artificial Sequence
  Description of Artificial Sequence: Synthetic oligonucleotide
ucugugagucccaccuuaa

SEQ ID NO: 2115718 - RNA, 19 nt, Artificial Sequence
  Description of Artificial Sequence: Synthetic oligonucleotide
auacucaugcugucgguuu

SEQ ID NO: 2115719 - RNA, 19 nt, Artificial Sequence
  Description of Artificial Sequence: Synthetic oligonucleotide
ugucugacugcugguagcu

SEQ ID NO: 2115720 - RNA, 19 nt, Artificial Sequence
  Description of Artificial Sequence: Synthetic oligonucleotide
uucugugcguucaguucug

SEQ ID NO: 2115721 - RNA, 19 nt, Artificial Sequence
  Description of Artificial Sequence: Synthetic oligonucleotide
uucaaagacuggccagguc

SEQ ID NO: 2115722 - RNA, 19 nt, Artificial Sequence
  Description of Artificial Sequence: Synthetic oligonucleotide
cucuugaauaaugggaaga

SEQ ID NO: 2115723 - RNA, 19 nt, Artificial Sequence
  Description of Artificial Sequence: Synthetic oligonucleotide
ggaggaacuauuuucuucu

SEQ ID NO: 2115724 - RNA, 19 nt, Artificial Sequence
  Description of Artificial Sequence: Synthetic oligonucleotide
ugagcaugccuggacugcc

SEQ ID NO: 2115725 - RNA, 19 nt, Artificial Sequence
  Description of Artificial Sequence: Synthetic oligonucleotide
gguaagucacuuucaucug

SEQ ID NO: 2115726 - RNA, 19 nt, Artificial Sequence
  Description of Artificial Sequence: Synthetic oligonucleotide
uauggggagaccgcucucu

SEQ ID NO: 2115727 - RNA, 19 nt, Artificial Sequence
  Description of Artificial Sequence: Synthetic oligonucleotide
cacuggaguauuuccuuuc

SEQ ID NO: 2115728 - RNA, 19 nt, Artificial Sequence
  Description of Artificial Sequence: Synthetic oligonucleotide
auaucccuauacucaugcu

SEQ ID NO: 2115729 - RNA, 19 nt, Artificial Sequence
  Description of Artificial Sequence: Synthetic oligonucleotide
caacuaauucugugcguuc

SEQ ID NO: 2115730 - RNA, 19 nt, Artificial Sequence
  Description of Artificial Sequence: Synthetic oligonucleotide
guaugaauuagaaggcucu

SEQ ID NO: 2115731 - RNA, 19 nt, Artificial Sequence
  Description of Artificial Sequence: Synthetic oligonucleotide
uucugccuaagugcaaacu

SEQ ID NO: 2115732 - RNA, 19 nt, Artificial Sequence
  Description of Artificial Sequence: Synthetic oligonucleotide
caccaauucuuaagaagca

SEQ ID NO: 2115733 - RNA, 19 nt, Artificial Sequence
  Description of Artificial Sequence: Synthetic oligonucleotide
gguaugcuuguucaauuuc

SEQ ID NO: 2115734 - RNA, 19 nt, Artificial Sequence
  Description of Artificial Sequence: Synthetic oligonucleotide
uguuugacucagguuccug

SEQ ID NO: 2115735 - RNA, 19 nt, Artificial Sequence
  Description of Artificial Sequence: Synthetic oligonucleotide
gguggaauagaguucugaa

SEQ ID NO: 2115736 - RNA, 19 nt, Artificial Sequence
  Description of Artificial Sequence: Synthetic oligonucleotide
caucuguagaaagcaugag

SEQ ID NO: 2115737 - RNA, 19 nt, Artificial Sequence
  Description of Artificial Sequence: Synthetic oligonucleotide
cacuuaugcaauucucuaa

SEQ ID NO: 2115738 - RNA, 19 nt, Artificial Sequence
  Description of Artificial Sequence: Synthetic oligonucleotide
accaauucuuaagaagcau

SEQ ID NO: 2115739 - RNA, 19 nt, Artificial Sequence
  Description of Artificial Sequence: Synthetic oligonucleotide
ccaccuuaggcuuuucuac

SEQ ID NO: 2115740 - RNA, 19 nt, Artificial Sequence
  Description of Artificial Sequence: Synthetic oligonucleotide
auagaguucugaauagauu

SEQ ID NO: 2115741 - RNA, 19 nt, Artificial Sequence
  Description of Artificial Sequence: Synthetic oligonucleotide
uguggcugauccguaagua

SEQ ID NO: 2115742 - RNA, 19 nt, Artificial Sequence
  Description of Artificial Sequence: Synthetic oligonucleotide
accgcucacuuauuucaug

SEQ ID NO: 2115743 - RNA, 19 nt, Artificial Sequence
  Description of Artificial Sequence: Synthetic oligonucleotide
agaauccccuuuaugggga

SEQ ID NO: 2115744 - RNA, 19 nt, Artificial Sequence
  Description of Artificial Sequence: Synthetic oligonucleotide
ugccuggacugccuaagau

SEQ ID NO: 2115745 - RNA, 19 nt, Artificial Sequence
  Description of Artificial Sequence: Synthetic oligonucleotide
uuguucugugagucccacc

SEQ ID NO: 2115746 - RNA, 19 nt, Artificial Sequence
  Description of Artificial Sequence: Synthetic oligonucleotide
gucgucugcuucguuuugg

SEQ ID NO: 2115747 - RNA, 19 nt, Artificial Sequence
  Description of Artificial Sequence: Synthetic oligonucleotide
cacaccgcucacuuauuuc

SEQ ID NO: 2115748 - RNA, 19 nt, Artificial Sequence
  Description of Artificial Sequence: Synthetic oligonucleotide
cugccuaagcucuuucaca

SEQ ID NO: 2115749 - RNA, 19 nt, Artificial Sequence
  Description of Artificial Sequence: Synthetic oligonucleotide
augcugucgguuuguagaa

SEQ ID NO: 2115750 - RNA, 19 nt, Artificial Sequence
  Description of Artificial Sequence: Synthetic oligonucleotide
caugccuggacugccuaag

SEQ ID NO: 2115751 - RNA, 19 nt, Artificial Sequence
  Description of Artificial Sequence: Synthetic oligonucleotide
uucuacugucugacugcug

SEQ ID NO: 2115752 - RNA, 19 nt, Artificial Sequence
  Description of Artificial Sequence: Synthetic oligonucleotide
accgcucucuugaauaaug

SEQ ID NO: 2115753 - RNA, 19 nt, Artificial Sequence
  Description of Artificial Sequence: Synthetic oligonucleotide
agguggaauagaguucuga

SEQ ID NO: 2115754 - RNA, 19 nt, Artificial Sequence
  Description of Artificial Sequence: Synthetic oligonucleotide
acagucuuggugguaugcu

SEQ ID NO: 2115755 - RNA, 19 nt, Artificial Sequence
  Description of Artificial Sequence: Synthetic oligonucleotide
guuagcuggucaucaacua

SEQ ID NO: 2115756 - RNA, 19 nt, Artificial Sequence
  Description of Artificial Sequence: Synthetic oligonucleotide
aaggcucuauagguggaau

SEQ ID NO: 2115757 - RNA, 19 nt, Artificial Sequence
  Description of Artificial Sequence: Synthetic oligonucleotide
gguuuguagaaagaccauc

SEQ ID NO: 2115758 - RNA, 19 nt, Artificial Sequence
  Description of Artificial Sequence: Synthetic oligonucleotide
caaaggggaagaaugucgu

SEQ ID NO: 2115759 - RNA, 19 nt, Artificial Sequence
  Description of Artificial Sequence: Synthetic oligonucleotide
ccgcucacuuauuucaugc

SEQ ID NO: 2115760 - RNA, 19 nt, Artificial Sequence
  Description of Artificial Sequence: Synthetic oligonucleotide
cuuuucugcuagagcacca

SEQ ID NO: 2115761 - RNA, 19 nt, Artificial Sequence
  Description of Artificial Sequence: Synthetic oligonucleotide
ucacagucuuggugguaug

SEQ ID NO: 2115762 - RNA, 19 nt, Artificial Sequence
  Description of Artificial Sequence: Synthetic oligonucleotide
agaccgcucucuugaauaa

SEQ ID NO: 2115763 - RNA, 19 nt, Artificial Sequence
  Description of Artificial Sequence: Synthetic oligonucleotide
uggggagaccgcucucuug

SEQ ID NO: 2115764 - RNA, 19 nt, Artificial Sequence
  Description of Artificial Sequence: Synthetic oligonucleotide
ugcguucaguucuguuuga

SEQ ID NO: 2115765 - RNA, 19 nt, Artificial Sequence
  Description of Artificial Sequence: Synthetic oligonucleotide
uuauggggagaccgcucuc

SEQ ID NO: 2115766 - RNA, 19 nt, Artificial Sequence
  Description of Artificial Sequence: Synthetic oligonucleotide
gaagucccuuuucauugaa

SEQ ID NO: 2115767 - RNA, 19 nt, Artificial Sequence
  Description of Artificial Sequence: Synthetic oligonucleotide
gccaucuguagaaagcaug

SEQ ID NO: 2115768 - RNA, 19 nt, Artificial Sequence
  Description of Artificial Sequence: Synthetic oligonucleotide
uacuugacacuggaguauu

SEQ ID NO: 2115769 - RNA, 19 nt, Artificial Sequence
  Description of Artificial Sequence: Synthetic oligonucleotide
ugcuucguuuuggggagug

SEQ ID NO: 2115770 - RNA, 19 nt, Artificial Sequence
  Description of Artificial Sequence: Synthetic oligonucleotide
aacaaucaaggagcacuuu

SEQ ID NO: 2115771 - RNA, 19 nt, Artificial Sequence
  Description of Artificial Sequence: Synthetic oligonucleotide
guggcugauccguaaguaa

SEQ ID NO: 2115772 - RNA, 19 nt, Artificial Sequence
  Description of Artificial Sequence: Synthetic oligonucleotide
gguuccuguggcugauccg

SEQ ID NO: 2115773 - RNA, 19 nt, Artificial Sequence
  Description of Artificial Sequence: Synthetic oligonucleotide
gcgauuaguuagcugguca

SEQ ID NO: 2115774 - RNA, 19 nt, Artificial Sequence
  Description of Artificial Sequence: Synthetic oligonucleotide
cugccuaagaucugacaaa

SEQ ID NO: 2115775 - RNA, 19 nt, Artificial Sequence
  Description of Artificial Sequence: Synthetic oligonucleotide
aggcucuauagguggaaua

SEQ ID NO: 2115776 - RNA, 19 nt, Artificial Sequence
  Description of Artificial Sequence: Synthetic oligonucleotide
ccaccuuaaacucagaaau

SEQ ID NO: 2115777 - RNA, 19 nt, Artificial Sequence
  Description of Artificial Sequence: Synthetic oligonucleotide
ugaacugccuaagcucuuu

SEQ ID NO: 2115778 - RNA, 19 nt, Artificial Sequence
  Description of Artificial Sequence: Synthetic oligonucleotide
gcugauccguaaguaauug

SEQ ID NO: 2115779 - RNA, 19 nt, Artificial Sequence
  Description of Artificial Sequence: Synthetic oligonucleotide
cagauucgucacugugagc

SEQ ID NO: 2115780 - RNA, 19 nt, Artificial Sequence
  Description of Artificial Sequence: Synthetic oligonucleotide
uggggagugcccgccacug

SEQ ID NO: 2115781 - RNA, 19 nt, Artificial Sequence
  Description of Artificial Sequence: Synthetic oligonucleotide
caucacaaacacuccauau

SEQ ID NO: 2115782 - RNA, 19 nt, Artificial Sequence
  Description of Artificial Sequence: Synthetic oligonucleotide
uacugucugacugcuggua

SEQ ID NO: 2115783 - RNA, 19 nt, Artificial Sequence
  Description of Artificial Sequence: Synthetic oligonucleotide
aagcaugagcaugccugga

SEQ ID NO: 2115784 - RNA, 19 nt, Artificial Sequence
  Description of Artificial Sequence: Synthetic oligonucleotide
ggggagaccgcucucuuga

SEQ ID NO: 2115785 - RNA, 19 nt, Artificial Sequence
  Description of Artificial Sequence: Synthetic oligonucleotide
ucccuauacucaugcuguc

SEQ ID NO: 2115786 - RNA, 19 nt, Artificial Sequence
  Description of Artificial Sequence: Synthetic oligonucleotide
uggugguaugcuuguucaa

SEQ ID NO: 2115787 - RNA, 19 nt, Artificial Sequence
  Description of Artificial Sequence: Synthetic oligonucleotide
aauccccuuuauggggaga

SEQ ID NO: 2115788 - RNA, 19 nt, Artificial Sequence
  Description of Artificial Sequence: Synthetic oligonucleotide
acacaccgcucacuuauuu

SEQ ID NO: 2115789 - RNA, 19 nt, Artificial Sequence
  Description of Artificial Sequence: Synthetic oligonucleotide
acauugguguguguaugaa

SEQ ID NO: 2115790 - RNA, 19 nt, Artificial Sequence
  Description of Artificial Sequence: Synthetic oligonucleotide
aucaucuuucauaucccua

SEQ ID NO: 2115791 - RNA, 19 nt, Artificial Sequence
  Description of Artificial Sequence: Synthetic oligonucleotide
cuagagcaccaauucuuaa

SEQ ID NO: 2115792 - RNA, 19 nt, Artificial Sequence
  Description of Artificial Sequence: Synthetic oligonucleotide
aagucccuuuucauugaau

SEQ ID NO: 2115793 - RNA, 19 nt, Artificial Sequence
  Description of Artificial Sequence: Synthetic oligonucleotide
ccccuuuauggggagaccg

SEQ ID NO: 2115794 - RNA, 19 nt, Artificial Sequence
  Description of Artificial Sequence: Synthetic oligonucleotide
gccuggacugccuaagauc

SEQ ID NO: 2115795 - RNA, 19 nt, Artificial Sequence
  Description of Artificial Sequence: Synthetic oligonucleotide
caaggagcacuuuucugcu

SEQ ID NO: 2115796 - RNA, 19 nt, Artificial Sequence
  Description of Artificial Sequence: Synthetic oligonucleotide
gaggaacuauuuucuucua

SEQ ID NO: 2115797 - RNA, 19 nt, Artificial Sequence
  Description of Artificial Sequence: Synthetic oligonucleotide
augccuggacugccuaaga

SEQ ID NO: 2115798 - RNA, 19 nt, Artificial Sequence
  Description of Artificial Sequence: Synthetic oligonucleotide
guguaugaauuagaaggcu

SEQ ID NO: 2115799 - RNA, 19 nt, Artificial Sequence
  Description of Artificial Sequence: Synthetic oligonucleotide
guuccuguggcugauccgu

SEQ ID NO: 2115800 - RNA, 19 nt, Artificial Sequence
  Description of Artificial Sequence: Synthetic oligonucleotide
ccuacacuugacuuucuga

SEQ ID NO: 2115801 - RNA, 19 nt, Artificial Sequence
  Description of Artificial Sequence: Synthetic oligonucleotide
ugggugugugucucuuaau

SEQ ID NO: 2115802 - RNA, 19 nt, Artificial Sequence
  Description of Artificial Sequence: Synthetic oligonucleotide
cagaucugcuacgugggga

SEQ ID NO: 2115803 - RNA, 19 nt, Artificial Sequence
  Description of Artificial Sequence: Synthetic oligonucleotide
gagugcccgccacuggauc

SEQ ID NO: 2115804 - RNA, 19 nt, Artificial Sequence
  Description of Artificial Sequence: Synthetic oligonucleotide
ggaagucccuuuucauuga

SEQ ID NO: 2115805 - RNA, 19 nt, Artificial Sequence
  Description of Artificial Sequence: Synthetic oligonucleotide
uccccuuuauggggagacc

SEQ ID NO: 2115806 - RNA, 19 nt, Artificial Sequence
  Description of Artificial Sequence: Synthetic oligonucleotide
acucaugcugucgguuugu

SEQ ID NO: 2115807 - RNA, 19 nt, Artificial Sequence
  Description of Artificial Sequence: Synthetic oligonucleotide
cccuauacucaugcugucg

SEQ ID NO: 2115808 - RNA, 19 nt, Artificial Sequence
  Description of Artificial Sequence: Synthetic oligonucleotide
auccucaggccagauucgu

SEQ ID NO: 2115809 - RNA, 19 nt, Artificial Sequence
  Description of Artificial Sequence: Synthetic oligonucleotide
uguuauccucaggccagau

SEQ ID NO: 2115810 - RNA, 19 nt, Artificial Sequence
  Description of Artificial Sequence: Synthetic oligonucleotide
ccuggacugccuaagaucu

SEQ ID NO: 2115811 - RNA, 19 nt, Artificial Sequence
  Description of Artificial Sequence: Synthetic oligonucleotide
cccuuuauggggagaccgc

SEQ ID NO: 2115812 - RNA, 19 nt, Artificial Sequence
  Description of Artificial Sequence: Synthetic oligonucleotide
gauucgucacugugagcgu

SEQ ID NO: 2115813 - RNA, 19 nt, Artificial Sequence
  Description of Artificial Sequence: Synthetic oligonucleotide
gaacuugcugggugugugu

SEQ ID NO: 2115814 - RNA, 19 nt, Artificial Sequence
  Description of Artificial Sequence: Synthetic oligonucleotide
gaccaucucuuguuauccu

SEQ ID NO: 2115815 - RNA, 19 nt, Artificial Sequence
  Description of Artificial Sequence: Synthetic oligonucleotide
ucugugcguucaguucugu

SEQ ID NO: 2115816 - RNA, 19 nt, Artificial Sequence
  Description of Artificial Sequence: Synthetic oligonucleotide
ccaucucuuguuauccuca

SEQ ID NO: 2115817 - RNA, 19 nt, Artificial Sequence
  Description of Artificial Sequence: Synthetic oligonucleotide
caccuuaggcuuuucuacu

SEQ ID NO: 2115818 - RNA, 19 nt, Artificial Sequence
  Description of Artificial Sequence: Synthetic oligonucleotide
ucgucacugugagcguucu

SEQ ID NO: 2115819 - RNA, 19 nt, Artificial Sequence
  Description of Artificial Sequence: Synthetic oligonucleotide
gaguucugaauagauuauu

SEQ ID NO: 2115820 - RNA, 19 nt, Artificial Sequence
  Description of Artificial Sequence: Synthetic oligonucleotide
caucuuucauaucccuaua

SEQ ID NO: 2115821 - RNA, 19 nt, Artificial Sequence
  Description of Artificial Sequence: Synthetic oligonucleotide
cugaccuacacuugacuuu

SEQ ID NO: 2115822 - RNA, 19 nt, Artificial Sequence
  Description of Artificial Sequence: Synthetic oligonucleotide
cugauccguaaguaauugu

SEQ ID NO: 2115823 - RNA, 19 nt, Artificial Sequence
  Description of Artificial Sequence: Synthetic oligonucleotide
cugguagcuucaggaaguc

SEQ ID NO: 2115824 - RNA, 19 nt, Artificial Sequence
  Description of Artificial Sequence: Synthetic oligonucleotide
aggcgauuaguuagcuggu

SEQ ID NO: 2115825 - RNA, 19 nt, Artificial Sequence
  Description of Artificial Sequence: Synthetic oligonucleotide
cuuaugcaauucucuaauu

SEQ ID NO: 2115826 - RNA, 19 nt, Artificial Sequence
  Description of Artificial Sequence: Synthetic oligonucleotide
cauugguguguguaugaau

SEQ ID NO: 2115827 - RNA, 19 nt, Artificial Sequence
  Description of Artificial Sequence: Synthetic oligonucleotide
cccaccuuaaacucagaaa

SEQ ID NO: 2115828 - RNA, 19 nt, Artificial Sequence
  Description of Artificial Sequence: Synthetic oligonucleotide
cuacguggggaguucuucu

SEQ ID NO: 2115829 - RNA, 19 nt, Artificial Sequence
  Description of Artificial Sequence: Synthetic oligonucleotide
ugcugucgguuuguagaaa

SEQ ID NO: 2115830 - RNA, 19 nt, Artificial Sequence
  Description of Artificial Sequence: Synthetic oligonucleotide
gccaccuuaggcuuuucua

SEQ ID NO: 2115831 - RNA, 19 nt, Artificial Sequence
  Description of Artificial Sequence: Synthetic oligonucleotide
aucugcuacguggggaguu

SEQ ID NO: 2115832 - RNA, 19 nt, Artificial Sequence
  Description of Artificial Sequence: Synthetic oligonucleotide
guucuguuugacucagguu

SEQ ID NO: 2115833 - RNA, 19 nt, Artificial Sequence
  Description of Artificial Sequence: Synthetic oligonucleotide
aucugacaaaggggaagaa

SEQ ID NO: 2115834 - RNA, 19 nt, Artificial Sequence
  Description of Artificial Sequence: Synthetic oligonucleotide
auggggagaccgcucucuu

SEQ ID NO: 2115835 - RNA, 19 nt, Artificial Sequence
  Description of Artificial Sequence: Synthetic oligonucleotide
agcuggucaucaacuaauu

SEQ ID NO: 2115836 - RNA, 19 nt, Artificial Sequence
  Description of Artificial Sequence: Synthetic oligonucleotide
cugcuagagcaccaauucu

SEQ ID NO: 2115837 - RNA, 19 nt, Artificial Sequence
  Description of Artificial Sequence: Synthetic oligonucleotide
aggucucuuuugcccuccu

SEQ ID NO: 2115838 - RNA, 19 nt, Artificial Sequence
  Description of Artificial Sequence: Synthetic oligonucleotide
gcucuauagguggaauaga

SEQ ID NO: 2115839 - RNA, 19 nt, Artificial Sequence
  Description of Artificial Sequence: Synthetic oligonucleotide
gcuacguggggaguucuuc

SEQ ID NO: 2115840 - RNA, 19 nt, Artificial Sequence
  Description of Artificial Sequence: Synthetic oligonucleotide
guuauccucaggccagauu

SEQ ID NO: 2115841 - RNA, 19 nt, Artificial Sequence
  Description of Artificial Sequence: Synthetic oligonucleotide
gcaugagcaugccuggacu

SEQ ID NO: 2115842 - RNA, 19 nt, Artificial Sequence
  Description of Artificial Sequence: Synthetic oligonucleotide
cugugagucccaccuuaaa

SEQ ID NO: 2115843 - RNA, 19 nt, Artificial Sequence
  Description of Artificial Sequence: Synthetic oligonucleotide
aggaacuguugaagaacuu

SEQ ID NO: 2115844 - RNA, 19 nt, Artificial Sequence
  Description of Artificial Sequence: Synthetic oligonucleotide
gcuagagcaccaauucuua

SEQ ID NO: 2115845 - RNA, 19 nt, Artificial Sequence
  Description of Artificial Sequence: Synthetic oligonucleotide
ggugguaugcuuguucaau

SEQ ID NO: 2115846 - RNA, 19 nt, Artificial Sequence
  Description of Artificial Sequence: Synthetic oligonucleotide
cgucugcuucguuuugggg

SEQ ID NO: 2115847 - RNA, 19 nt, Artificial Sequence
  Description of Artificial Sequence: Synthetic oligonucleotide
uagcuucaggaagucccuu

SEQ ID NO: 2115848 - RNA, 19 nt, Artificial Sequence
  Description of Artificial Sequence: Synthetic oligonucleotide
cguggggaguucuucugac

SEQ ID NO: 2115849 - RNA, 19 nt, Artificial Sequence
  Description of Artificial Sequence: Synthetic oligonucleotide
cuuucacacaccgcucacu

SEQ ID NO: 2115850 - RNA, 19 nt, Artificial Sequence
  Description of Artificial Sequence: Synthetic oligonucleotide
ggcgauuaguuagcugguc

SEQ ID NO: 2115851 - RNA, 19 nt, Artificial Sequence
  Description of Artificial Sequence: Synthetic oligonucleotide
caucugccaccuuaggcuu

SEQ ID NO: 2115852 - RNA, 19 nt, Artificial Sequence
  Description of Artificial Sequence: Synthetic oligonucleotide
cuacugucugacugcuggu

SEQ ID NO: 2115853 - RNA, 19 nt, Artificial Sequence
  Description of Artificial Sequence: Synthetic oligonucleotide
gugugucucuuaauguuuu

SEQ ID NO: 2115854 - RNA, 19 nt, Artificial Sequence
  Description of Artificial Sequence: Synthetic oligonucleotide
augaacugccuaagcucuu

SEQ ID NO: 2115855 - RNA, 19 nt, Artificial Sequence
  Description of Artificial Sequence: Synthetic oligonucleotide
cuggaguauuuccuuucau

SEQ ID NO: 2115856 - RNA, 19 nt, Artificial Sequence
  Description of Artificial Sequence: Synthetic oligonucleotide
ggauccagaucugcuacgu

SEQ ID NO: 2115857 - RNA, 19 nt, Artificial Sequence
  Description of Artificial Sequence: Synthetic oligonucleotide
gcguucaguucuguuugac

SEQ ID NO: 2115858 - RNA, 19 nt, Artificial Sequence
  Description of Artificial Sequence: Synthetic oligonucleotide
agugaccauuuuagauuuu

SEQ ID NO: 2115859 - RNA, 19 nt, Artificial Sequence
  Description of Artificial Sequence: Synthetic oligonucleotide
gccaggucucuuuugcccu

SEQ ID NO: 2115860 - RNA, 19 nt, Artificial Sequence
  Description of Artificial Sequence: Synthetic oligonucleotide
ccuuaaacucagaaauuuu

SEQ ID NO: 2115861 - RNA, 19 nt, Artificial Sequence
  Description of Artificial Sequence: Synthetic oligonucleotide
ggacugccuaagaucugac

SEQ ID NO: 2115862 - RNA, 19 nt, Artificial Sequence
  Description of Artificial Sequence: Synthetic oligonucleotide
cacuuauuucaugcaaauu

SEQ ID NO: 2115863 - RNA, 19 nt, Artificial Sequence
  Description of Artificial Sequence: Synthetic oligonucleotide
ggggaguucuucugaccua

SEQ ID NO: 2115864 - RNA, 19 nt, Artificial Sequence
  Description of Artificial Sequence: Synthetic oligonucleotide
gaucugcuacguggggagu

SEQ ID NO: 2115865 - RNA, 19 nt, Artificial Sequence
  Description of Artificial Sequence: Synthetic oligonucleotide
gugcccgccacuggaucca

SEQ ID NO: 2115866 - RNA, 19 nt, Artificial Sequence
  Description of Artificial Sequence: Synthetic oligonucleotide
gaaugucgucugcuucguu

SEQ ID NO: 2115867 - RNA, 19 nt, Artificial Sequence
  Description of Artificial Sequence: Synthetic oligonucleotide
caccgcucacuuauuucau

SEQ ID NO: 2115868 - RNA, 19 nt, Artificial Sequence
  Description of Artificial Sequence: Synthetic oligonucleotide
ggaguucuucugaccuaca

SEQ ID NO: 2115869 - RNA, 19 nt, Artificial Sequence
  Description of Artificial Sequence: Synthetic oligonucleotide
gcaugccuggacugccuaa

SEQ ID NO: 2115870 - RNA, 19 nt, Artificial Sequence
  Description of Artificial Sequence: Synthetic oligonucleotide
cucaugcugucgguuugua

SEQ ID NO: 2115871 - RNA, 19 nt, Artificial Sequence
  Description of Artificial Sequence: Synthetic oligonucleotide
ggagaccgcucucuugaau

SEQ ID NO: 2115872 - RNA, 19 nt, Artificial Sequence
  Description of Artificial Sequence: Synthetic oligonucleotide
gcuauugcuuuaaggcgau

SEQ ID NO: 2115873 - RNA, 19 nt, Artificial Sequence
  Description of Artificial Sequence: Synthetic oligonucleotide
cgauuaguuagcuggucau

SEQ ID NO: 2115874 - RNA, 19 nt, Artificial Sequence
  Description of Artificial Sequence: Synthetic oligonucleotide
gaccuacacuugacuuucu

SEQ ID NO: 2115875 - RNA, 19 nt, Artificial Sequence
  Description of Artificial Sequence: Synthetic oligonucleotide
gggagaccgcucucuugaa

SEQ ID NO: 2115876 - RNA, 19 nt, Artificial Sequence
  Description of Artificial Sequence: Synthetic oligonucleotide
cugugcguucaguucuguu

SEQ ID NO: 2115877 - RNA, 19 nt, Artificial Sequence
  Description of Artificial Sequence: Synthetic oligonucleotide
ggcugauccguaaguaauu

SEQ ID NO: 2115878 - RNA, 19 nt, Artificial Sequence
  Description of Artificial Sequence: Synthetic oligonucleotide
ccgccacuggauccagauc

SEQ ID NO: 2115879 - RNA, 19 nt, Artificial Sequence
  Description of Artificial Sequence: Synthetic oligonucleotide
gccuaagugcaaacugaau

SEQ ID NO: 2115880 - RNA, 19 nt, Artificial Sequence
  Description of Artificial Sequence: Synthetic oligonucleotide
cccgccacuggauccagau

SEQ ID NO: 2115881 - RNA, 19 nt, Artificial Sequence
  Description of Artificial Sequence: Synthetic oligonucleotide
ggagugcccgccacuggau

SEQ ID NO: 2115882 - RNA, 19 nt, Artificial Sequence
  Description of Artificial Sequence: Synthetic oligonucleotide
cgguuuguagaaagaccau

SEQ ID NO: 2115883 - RNA, 19 nt, Artificial Sequence
  Description of Artificial Sequence: Synthetic oligonucleotide
ggggacaccaggcugggga

SEQ ID NO: 2115884 - RNA, 19 nt, Artificial Sequence
  Description of Artificial Sequence: Synthetic oligonucleotide
cccggggacaccaggcugg

SEQ ID NO: 2115885 - RNA, 19 nt, Artificial Sequence
  Description of Artificial Sequence: Synthetic oligonucleotide
aggccgggcugccccgggg

SEQ ID NO: 2115886 - RNA, 19 nt, Artificial Sequence
  Description of Artificial Sequence: Synthetic oligonucleotide
accaggcuggggaucuugu

SEQ ID NO: 2115887 - RNA, 19 nt, Artificial Sequence
  Description of Artificial Sequence: Synthetic oligonucleotide
caccaggcuggggaucuug

SEQ ID NO: 2115888 - RNA, 19 nt, Artificial Sequence
  Description of Artificial Sequence: Synthetic oligonucleotide
cuuguagucugugggcccu

SEQ ID NO: 2115889 - RNA, 19 nt, Artificial Sequence
  Description of Artificial Sequence: Synthetic oligonucleotide
ccccggggacaccaggcug

SEQ ID NO: 2115890 - RNA, 19 nt, Artificial Sequence
  Description of Artificial Sequence: Synthetic oligonucleotide
ggcugccccggggacacca

SEQ ID NO: 2115891 - RNA, 19 nt, Artificial Sequence
  Description of Artificial Sequence: Synthetic oligonucleotide
ggccgggcugccccgggga

SEQ ID NO: 2115892 - RNA, 19 nt, Artificial Sequence
  Description of Artificial Sequence: Synthetic oligonucleotide
gcugccccggggacaccag

SEQ ID NO: 2115893 - RNA, 19 nt, Artificial Sequence
  Description of Artificial Sequence: Synthetic oligonucleotide
gccgggcugccccggggac

SEQ ID NO: 2115894 - RNA, 19 nt, Artificial Sequence
  Description of Artificial Sequence: Synthetic oligonucleotide
acaccaggcuggggaucuu

SEQ ID NO: 2115895 - RNA, 19 nt, Artificial Sequence
  Description of Artificial Sequence: Synthetic oligonucleotide
gccccggggacaccaggcu

SEQ ID NO: 2115896 - RNA, 19 nt, Artificial Sequence
  Description of Artificial Sequence: Synthetic oligonucleotide
ugaaguuuaguccaguggg

SEQ ID NO: 2115897 - RNA, 19 nt, Artificial Sequence
  Description of Artificial Sequence: Synthetic oligonucleotide
uaaacgauaaauuaccaug

SEQ ID NO: 2115898 - RNA, 19 nt, Artificial Sequence
  Description of Artificial Sequence: Synthetic oligonucleotide
aauaaugacuuuaaaauug

SEQ ID NO: 2115899 - RNA, 19 nt, Artificial Sequence
  Description of Artificial Sequence: Synthetic oligonucleotide
aauuguauaaacgauaaau

SEQ ID NO: 2115900 - RNA, 19 nt, Artificial Sequence
  Description of Artificial Sequence: Synthetic oligonucleotide
aaaagcugugaucagagug

SEQ ID NO: 2115901 - RNA, 19 nt, Artificial Sequence
  Description of Artificial Sequence: Synthetic oligonucleotide
gaagucuagauccagagug

SEQ ID NO: 2115902 - RNA, 19 nt, Artificial Sequence
  Description of Artificial Sequence: Synthetic oligonucleotide
aaacgauaaauuaccaugc

SEQ ID NO: 2115903 - RNA, 19 nt, Artificial Sequence
  Description of Artificial Sequence: Synthetic oligonucleotide
aguauagaaagcugugucc

SEQ ID NO: 2115904 - RNA, 19 nt, Artificial Sequence
  Description of Artificial Sequence: Synthetic oligonucleotide
agaaguacuguuugaauac

SEQ ID NO: 2115905 - RNA, 19 nt, Artificial Sequence
  Description of Artificial Sequence: Synthetic oligonucleotide
aacgcuuugacaaaggugu

SEQ ID NO: 2115906 - RNA, 19 nt, Artificial Sequence
  Description of Artificial Sequence: Synthetic oligonucleotide
uuaaaauuguauaaacgau

SEQ ID NO: 2115907 - RNA, 19 nt, Artificial Sequence
  Description of Artificial Sequence: Synthetic oligonucleotide
uguuugaauacacuguugu

SEQ ID NO: 2115908 - RNA, 19 nt, Artificial Sequence
  Description of Artificial Sequence: Synthetic oligonucleotide
agaguguagaacaacaugg

SEQ ID NO: 2115909 - RNA, 19 nt, Artificial Sequence
  Description of Artificial Sequence: Synthetic oligonucleotide
uacgcuaugcaccucagag

SEQ ID NO: 2115910 - RNA, 19 nt, Artificial Sequence
  Description of Artificial Sequence: Synthetic oligonucleotide
uaaaauuguauaaacgaua

SEQ ID NO: 2115911 - RNA, 19 nt, Artificial Sequence
  Description of Artificial Sequence: Synthetic oligonucleotide
acugaggugagcuuggguc

SEQ ID NO: 2115912 - RNA, 19 nt, Artificial Sequence
  Description of Artificial Sequence: Synthetic oligonucleotide
uguagaacaacauggacau

SEQ ID NO: 2115913 - RNA, 19 nt, Artificial Sequence
  Description of Artificial Sequence: Synthetic oligonucleotide
uauugaugcagcaggggcg

SEQ ID NO: 2115914 - RNA, 19 nt, Artificial Sequence
  Description of Artificial Sequence: Synthetic oligonucleotide
ucuagauccagaguguccg

SEQ ID NO: 2115915 - RNA, 19 nt, Artificial Sequence
  Description of Artificial Sequence: Synthetic oligonucleotide
ugagcacacacacacaggc

SEQ ID NO: 2115916 - RNA, 19 nt, Artificial Sequence
  Description of Artificial Sequence: Synthetic oligonucleotide
guauaaacgauaaauuacc

SEQ ID NO: 2115917 - RNA, 19 nt, Artificial Sequence
  Description of Artificial Sequence: Synthetic oligonucleotide
uaauuuacaggcgugaggu

SEQ ID NO: 2115918 - RNA, 19 nt, Artificial Sequence
  Description of Artificial Sequence: Synthetic oligonucleotide
auaaauuaccaugcagucc

SEQ ID NO: 2115919 - RNA, 19 nt, Artificial Sequence
  Description of Artificial Sequence: Synthetic oligonucleotide
auaauuuacaggcgugagg

SEQ ID NO: 2115920 - RNA, 19 nt, Artificial Sequence
  Description of Artificial Sequence: Synthetic oligonucleotide
uccuuauaauuuaaaauaa

SEQ ID NO: 2115921 - RNA, 19 nt, Artificial Sequence
  Description of Artificial Sequence: Synthetic oligonucleotide
uuaauaaauaaugacuuua

SEQ ID NO: 2115922 - RNA, 19 nt, Artificial Sequence
  Description of Artificial Sequence: Synthetic oligonucleotide
aacggagucuccuucuggg

SEQ ID NO: 2115923 - RNA, 19 nt, Artificial Sequence
  Description of Artificial Sequence: Synthetic oligonucleotide
aguguagaacaacauggac

SEQ ID NO: 2115924 - RNA, 19 nt, Artificial Sequence
  Description of Artificial Sequence: Synthetic oligonucleotide
uauaaacgauaaauuacca

SEQ ID NO: 2115925 - RNA, 19 nt, Artificial Sequence
  Description of Artificial Sequence: Synthetic oligonucleotide
aaggagaucguaccauggg

SEQ ID NO: 2115926 - RNA, 19 nt, Artificial Sequence
  Description of Artificial Sequence: Synthetic oligonucleotide
ugugucaagggaaugcuga

SEQ ID NO: 2115927 - RNA, 19 nt, Artificial Sequence
  Description of Artificial Sequence: Synthetic oligonucleotide
aauaauuuacaggcgugag

SEQ ID NO: 2115928 - RNA, 19 nt, Artificial Sequence
  Description of Artificial Sequence: Synthetic oligonucleotide
uguugaaggagaucguacc

SEQ ID NO: 2115929 - RNA, 19 nt, Artificial Sequence
  Description of Artificial Sequence: Synthetic oligonucleotide
aggagaucguaccaugggc

SEQ ID NO: 2115930 - RNA, 19 nt, Artificial Sequence
  Description of Artificial Sequence: Synthetic oligonucleotide
ugagcuuggguccagcaug

SEQ ID NO: 2115931 - RNA, 19 nt, Artificial Sequence
  Description of Artificial Sequence: Synthetic oligonucleotide
uuauccccaacccacacac

SEQ ID NO: 2115932 - RNA, 19 nt, Artificial Sequence
  Description of Artificial Sequence: Synthetic oligonucleotide
uuugaauacacuguuguua

SEQ ID NO: 2115933 - RNA, 19 nt, Artificial Sequence
  Description of Artificial Sequence: Synthetic oligonucleotide
uugaauacacuguuguuaa

SEQ ID NO: 2115934 - RNA, 19 nt, Artificial Sequence
  Description of Artificial Sequence: Synthetic oligonucleotide
gaauacacuguuguuaaug

SEQ ID NO: 2115935 - RNA, 19 nt, Artificial Sequence
  Description of Artificial Sequence: Synthetic oligonucleotide
uuuacaggcgugagguagg

SEQ ID NO: 2115936 - RNA, 19 nt, Artificial Sequence
  Description of Artificial Sequence: Synthetic oligonucleotide
guacuguuugaauacacug

SEQ ID NO: 2115937 - RNA, 19 nt, Artificial Sequence
  Description of Artificial Sequence: Synthetic oligonucleotide
acgauaaauuaccaugcag

SEQ ID NO: 2115938 - RNA, 19 nt, Artificial Sequence
  Description of Artificial Sequence: Synthetic oligonucleotide
acaggcgugagguagggag

SEQ ID NO: 2115939 - RNA, 19 nt, Artificial Sequence
  Description of Artificial Sequence: Synthetic oligonucleotide
aucuguguaugguucugcc

SEQ ID NO: 2115940 - RNA, 19 nt, Artificial Sequence
  Description of Artificial Sequence: Synthetic oligonucleotide
ucuuaaacagucugggguc

SEQ ID NO: 2115941 - RNA, 19 nt, Artificial Sequence
  Description of Artificial Sequence: Synthetic oligonucleotide
cugaaguuuaguccagugg

SEQ ID NO: 2115942 - RNA, 19 nt, Artificial Sequence
  Description of Artificial Sequence: Synthetic oligonucleotide
uugacaaagguguggguug

SEQ ID NO: 2115943 - RNA, 19 nt, Artificial Sequence
  Description of Artificial Sequence: Synthetic oligonucleotide
aacgauaaauuaccaugca

SEQ ID NO: 2115944 - RNA, 19 nt, Artificial Sequence
  Description of Artificial Sequence: Synthetic oligonucleotide
ggugcuaaacagcacacgg

SEQ ID NO: 2115945 - RNA, 19 nt, Artificial Sequence
  Description of Artificial Sequence: Synthetic oligonucleotide
guaugguucugccuguacg

SEQ ID NO: 2115946 - RNA, 19 nt, Artificial Sequence
  Description of Artificial Sequence: Synthetic oligonucleotide
ugggacauugcuaucugug

SEQ ID NO: 2115947 - RNA, 19 nt, Artificial Sequence
  Description of Artificial Sequence: Synthetic oligonucleotide
uagaacaacauggacauua

SEQ ID NO: 2115948 - RNA, 19 nt, Artificial Sequence
  Description of Artificial Sequence: Synthetic oligonucleotide
auaaacgauaaauuaccau

SEQ ID NO: 2115949 - RNA, 19 nt, Artificial Sequence
  Description of Artificial Sequence: Synthetic oligonucleotide
auuuacaggcgugagguag

SEQ ID NO: 2115950 - RNA, 19 nt, Artificial Sequence
  Description of Artificial Sequence: Synthetic oligonucleotide
gugaucagaguguagaaca

SEQ ID NO: 2115951 - RNA, 19 nt, Artificial Sequence
  Description of Artificial Sequence: Synthetic oligonucleotide
uggacauuacgcuaugcac

SEQ ID NO: 2115952 - RNA, 19 nt, Artificial Sequence
  Description of Artificial Sequence: Synthetic oligonucleotide
auccggaugaaccuccagg

SEQ ID NO: 2115953 - RNA, 19 nt, Artificial Sequence
  Description of Artificial Sequence: Synthetic oligonucleotide
gaguggccaguauagaaag

SEQ ID NO: 2115954 - RNA, 19 nt, Artificial Sequence
  Description of Artificial Sequence: Synthetic oligonucleotide
ucugccuguacgccgauca

SEQ ID NO: 2115955 - RNA, 19 nt, Artificial Sequence
  Description of Artificial Sequence: Synthetic oligonucleotide
cagcuauugaugcagcagg

SEQ ID NO: 2115956 - RNA, 19 nt, Artificial Sequence
  Description of Artificial Sequence: Synthetic oligonucleotide
ucuauccggaugaaccucc

SEQ ID NO: 2115957 - RNA, 19 nt, Artificial Sequence
  Description of Artificial Sequence: Synthetic oligonucleotide
cucagaguggccaguauag

SEQ ID NO: 2115958 - RNA, 19 nt, Artificial Sequence
  Description of Artificial Sequence: Synthetic oligonucleotide
agcacacacacacaggcug

SEQ ID NO: 2115959 - RNA, 19 nt, Artificial Sequence
  Description of Artificial Sequence: Synthetic oligonucleotide
uaugaguuccagugcuugg

SEQ ID NO: 2115960 - RNA, 19 nt, Artificial Sequence
  Description of Artificial Sequence: Synthetic oligonucleotide
ucaaccucuucuugcagcc

SEQ ID NO: 2115961 - RNA, 19 nt, Artificial Sequence
  Description of Artificial Sequence: Synthetic oligonucleotide
auugaugcagcaggggcgc

SEQ ID NO: 2115962 - RNA, 19 nt, Artificial Sequence
  Description of Artificial Sequence: Synthetic oligonucleotide
uuguggugcaguaugaguu

SEQ ID NO: 2115963 - RNA, 19 nt, Artificial Sequence
  Description of Artificial Sequence: Synthetic oligonucleotide
gaacaacauggacauuacg

SEQ ID NO: 2115964 - RNA, 19 nt, Artificial Sequence
  Description of Artificial Sequence: Synthetic oligonucleotide
uccggaugaaccuccaggc

SEQ ID NO: 2115965 - RNA, 19 nt, Artificial Sequence
  Description of Artificial Sequence: Synthetic oligonucleotide
gugucuauccggaugaacc

SEQ ID NO: 2115966 - RNA, 19 nt, Artificial Sequence
  Description of Artificial Sequence: Synthetic oligonucleotide
uccagaguguccgaagagg

SEQ ID NO: 2115967 - RNA, 19 nt, Artificial Sequence
  Description of Artificial Sequence: Synthetic oligonucleotide
uguuaauguucaccucucc

SEQ ID NO: 2115968 - RNA, 19 nt, Artificial Sequence
  Description of Artificial Sequence: Synthetic oligonucleotide
ucaacgcuuugacaaaggu

SEQ ID NO: 2115969 - RNA, 19 nt, Artificial Sequence
  Description of Artificial Sequence: Synthetic oligonucleotide
uugucgucugucgucaacg

SEQ ID NO: 2115970 - RNA, 19 nt, Artificial Sequence
  Description of Artificial Sequence: Synthetic oligonucleotide
ugauguuucgggucugccc

SEQ ID NO: 2115971 - RNA, 19 nt, Artificial Sequence
  Description of Artificial Sequence: Synthetic oligonucleotide
gucgucaacgcuuugacaa

SEQ ID NO: 2115972 - RNA, 19 nt, Artificial Sequence
  Description of Artificial Sequence: Synthetic oligonucleotide
acuguuugaauacacuguu

SEQ ID NO: 2115973 - RNA, 19 nt, Artificial Sequence
  Description of Artificial Sequence: Synthetic oligonucleotide
auuguauaaacgauaaauu

SEQ ID NO: 2115974 - RNA, 19 nt, Artificial Sequence
  Description of Artificial Sequence: Synthetic oligonucleotide
auggacauuacgcuaugca

SEQ ID NO: 2115975 - RNA, 19 nt, Artificial Sequence
  Description of Artificial Sequence: Synthetic oligonucleotide
acaggcugugucuauccgg

SEQ ID NO: 2115976 - RNA, 19 nt, Artificial Sequence
  Description of Artificial Sequence: Synthetic oligonucleotide
ucggcacuuggucucaaag

SEQ ID NO: 2115977 - RNA, 19 nt, Artificial Sequence
  Description of Artificial Sequence: Synthetic oligonucleotide
cagcaugccauccagcccc

SEQ ID NO: 2115978 - RNA, 19 nt, Artificial Sequence
  Description of Artificial Sequence: Synthetic oligonucleotide
caguauagaaagcuguguc

SEQ ID NO: 2115979 - RNA, 19 nt, Artificial Sequence
  Description of Artificial Sequence: Synthetic oligonucleotide
ugcuaucuguguaugguuc

SEQ ID NO: 2115980 - RNA, 19 nt, Artificial Sequence
  Description of Artificial Sequence: Synthetic oligonucleotide
uuugacaaagguguggguu

SEQ ID NO: 2115981 - RNA, 19 nt, Artificial Sequence
  Description of Artificial Sequence: Synthetic oligonucleotide
cugcugagcacacacacac

SEQ ID NO: 2115982 - RNA, 19 nt, Artificial Sequence
  Description of Artificial Sequence: Synthetic oligonucleotide
aagacugggugagaggaug

SEQ ID NO: 2115983 - RNA, 19 nt, Artificial Sequence
  Description of Artificial Sequence: Synthetic oligonucleotide
aaguuuaguccagugggcu

SEQ ID NO: 2115984 - RNA, 19 nt, Artificial Sequence
  Description of Artificial Sequence: Synthetic oligonucleotide
cagaguguagaacaacaug

SEQ ID NO: 2115985 - RNA, 19 nt, Artificial Sequence
  Description of Artificial Sequence: Synthetic oligonucleotide
guguagaacaacauggaca

SEQ ID NO: 2115986 - RNA, 19 nt, Artificial Sequence
  Description of Artificial Sequence: Synthetic oligonucleotide
auugcuaucuguguauggu

SEQ ID NO: 2115987 - RNA, 19 nt, Artificial Sequence
  Description of Artificial Sequence: Synthetic oligonucleotide
ugucuauccggaugaaccu

SEQ ID NO: 2115988 - RNA, 19 nt, Artificial Sequence
  Description of Artificial Sequence: Synthetic oligonucleotide
ucagaguguagaacaacau

SEQ ID NO: 2115989 - RNA, 19 nt, Artificial Sequence
  Description of Artificial Sequence: Synthetic oligonucleotide
cacacacugacacugucac

SEQ ID NO: 2115990 - RNA, 19 nt, Artificial Sequence
  Description of Artificial Sequence: Synthetic oligonucleotide
caacgcuuugacaaaggug

SEQ ID NO: 2115991 - RNA, 19 nt, Artificial Sequence
  Description of Artificial Sequence: Synthetic oligonucleotide
cauugcuaucuguguaugg

SEQ ID NO: 2115992 - RNA, 19 nt, Artificial Sequence
  Description of Artificial Sequence: Synthetic oligonucleotide
ugugaucagaguguagaac

SEQ ID NO: 2115993 - RNA, 19 nt, Artificial Sequence
  Description of Artificial Sequence: Synthetic oligonucleotide
aacauggacauuacgcuau

SEQ ID NO: 2115994 - RNA, 19 nt, Artificial Sequence
  Description of Artificial Sequence: Synthetic oligonucleotide
cuaugcaccucagaguggc

SEQ ID NO: 2115995 - RNA, 19 nt, Artificial Sequence
  Description of Artificial Sequence: Synthetic oligonucleotide
aaagccuuuagugggccca

SEQ ID NO: 2115996 - RNA, 19 nt, Artificial Sequence
  Description of Artificial Sequence: Synthetic oligonucleotide
cuguugaaggagaucguac

SEQ ID NO: 2115997 - RNA, 19 nt, Artificial Sequence
  Description of Artificial Sequence: Synthetic oligonucleotide
agucaaugccccggcaucc

SEQ ID NO: 2115998 - RNA, 19 nt, Artificial Sequence
  Description of Artificial Sequence: Synthetic oligonucleotide
cugaggugagcuugggucc

SEQ ID NO: 2115999 - RNA, 19 nt, Artificial Sequence
  Description of Artificial Sequence: Synthetic oligonucleotide
gaacggagucuccuucugg

SEQ ID NO: 2116000 - RNA, 19 nt, Artificial Sequence
  Description of Artificial Sequence: Synthetic oligonucleotide
cugacacugucacacacug

SEQ ID NO: 2116001 - RNA, 19 nt, Artificial Sequence
  Description of Artificial Sequence: Synthetic oligonucleotide
ucugcccugucacacgggc

SEQ ID NO: 2116002 - RNA, 19 nt, Artificial Sequence
  Description of Artificial Sequence: Synthetic oligonucleotide
gaaguuuaguccagugggc

SEQ ID NO: 2116003 - RNA, 19 nt, Artificial Sequence
  Description of Artificial Sequence: Synthetic oligonucleotide
ugguucugccuguacgccg

SEQ ID NO: 2116004 - RNA, 19 nt, Artificial Sequence
  Description of Artificial Sequence: Synthetic oligonucleotide
agaacaacauggacauuac

SEQ ID NO: 2116005 - RNA, 19 nt, Artificial Sequence
  Description of Artificial Sequence: Synthetic oligonucleotide
ugaucagaguguagaacaa

SEQ ID NO: 2116006 - RNA, 19 nt, Artificial Sequence
  Description of Artificial Sequence: Synthetic oligonucleotide
gauguuucgggucugcccu

SEQ ID NO: 2116007 - RNA, 19 nt, Artificial Sequence
  Description of Artificial Sequence: Synthetic oligonucleotide
ucgucugucgucaacgcuu

SEQ ID NO: 2116008 - RNA, 19 nt, Artificial Sequence
  Description of Artificial Sequence: Synthetic oligonucleotide
cuuggagucaaugccccgg

SEQ ID NO: 2116009 - RNA, 19 nt, Artificial Sequence
  Description of Artificial Sequence: Synthetic oligonucleotide
uuagugggcccagacacug

SEQ ID NO: 2116010 - RNA, 19 nt, Artificial Sequence
  Description of Artificial Sequence: Synthetic oligonucleotide
auuaccaugcaguccuuau

SEQ ID NO: 2116011 - RNA, 19 nt, Artificial Sequence
  Description of Artificial Sequence: Synthetic oligonucleotide
gaucguaccaugggccugg

SEQ ID NO: 2116012 - RNA, 19 nt, Artificial Sequence
  Description of Artificial Sequence: Synthetic oligonucleotide
cagucugggguccacagug

SEQ ID NO: 2116013 - RNA, 19 nt, Artificial Sequence
  Description of Artificial Sequence: Synthetic oligonucleotide
aucagaguguagaacaaca

SEQ ID NO: 2116014 - RNA, 19 nt, Artificial Sequence
  Description of Artificial Sequence: Synthetic oligonucleotide
gcugagcacacacacacag

SEQ ID NO: 2116015 - RNA, 19 nt, Artificial Sequence
  Description of Artificial Sequence: Synthetic oligonucleotide
ucuguguaugguucugccu

SEQ ID NO: 2116016 - RNA, 19 nt, Artificial Sequence
  Description of Artificial Sequence: Synthetic oligonucleotide
ugucaagggaaugcugaag

SEQ ID NO: 2116017 - RNA, 19 nt, Artificial Sequence
  Description of Artificial Sequence: Synthetic oligonucleotide
gagucuccguuucuuaaac

SEQ ID NO: 2116018 - RNA, 19 nt, Artificial Sequence
  Description of Artificial Sequence: Synthetic oligonucleotide
uccuuggcaaagccuuuag

SEQ ID NO: 2116019 - RNA, 19 nt, Artificial Sequence
  Description of Artificial Sequence: Synthetic oligonucleotide
uucugggacauugcuaucu

SEQ ID NO: 2116020 - RNA, 19 nt, Artificial Sequence
  Description of Artificial Sequence: Synthetic oligonucleotide
ggacauuacgcuaugcacc

SEQ ID NO: 2116021 - RNA, 19 nt, Artificial Sequence
  Description of Artificial Sequence: Synthetic oligonucleotide
cuggacugcacgaccacag

SEQ ID NO: 2116022 - RNA, 19 nt, Artificial Sequence
  Description of Artificial Sequence: Synthetic oligonucleotide
uuuagugggcccagacacu

SEQ ID NO: 2116023 - RNA, 19 nt, Artificial Sequence
  Description of Artificial Sequence: Synthetic oligonucleotide
uggacugcacgaccacagg

SEQ ID NO: 2116024 - RNA, 19 nt, Artificial Sequence
  Description of Artificial Sequence: Synthetic oligonucleotide
cuuaaacagucuggggucc

SEQ ID NO: 2116025 - RNA, 19 nt, Artificial Sequence
  Description of Artificial Sequence: Synthetic oligonucleotide
agugggcccagacacugag

SEQ ID NO: 2116026 - RNA, 19 nt, Artificial Sequence
  Description of Artificial Sequence: Synthetic oligonucleotide
ggaaugcugaaguuuaguc

SEQ ID NO: 2116027 - RNA, 19 nt, Artificial Sequence
  Description of Artificial Sequence: Synthetic oligonucleotide
uguggugcaguaugaguuc

SEQ ID NO: 2116028 - RNA, 19 nt, Artificial Sequence
  Description of Artificial Sequence: Synthetic oligonucleotide
uguaugguucugccuguac

SEQ ID NO: 2116029 - RNA, 19 nt, Artificial Sequence
  Description of Artificial Sequence: Synthetic oligonucleotide
gacugcacgaccacaggcc

SEQ ID NO: 2116030 - RNA, 19 nt, Artificial Sequence
  Description of Artificial Sequence: Synthetic oligonucleotide
uaaacagcacacgggguga

SEQ ID NO: 2116031 - RNA, 19 nt, Artificial Sequence
  Description of Artificial Sequence: Synthetic oligonucleotide
agugauguuucgggucugc

SEQ ID NO: 2116032 - RNA, 19 nt, Artificial Sequence
  Description of Artificial Sequence: Synthetic oligonucleotide
guuuaguccagugggcuug

SEQ ID NO: 2116033 - RNA, 19 nt, Artificial Sequence
  Description of Artificial Sequence: Synthetic oligonucleotide
cacgggcagcuauugaugc

SEQ ID NO: 2116034 - RNA, 19 nt, Artificial Sequence
  Description of Artificial Sequence: Synthetic oligonucleotide
cacacacugagaacucccc

SEQ ID NO: 2116035 - RNA, 19 nt, Artificial Sequence
  Description of Artificial Sequence: Synthetic oligonucleotide
ugcaguccuuauaauuuaa

SEQ ID NO: 2116036 - RNA, 19 nt, Artificial Sequence
  Description of Artificial Sequence: Synthetic oligonucleotide
aguacuguuugaauacacu

SEQ ID NO: 2116037 - RNA, 19 nt, Artificial Sequence
  Description of Artificial Sequence: Synthetic oligonucleotide
cugagcacacacacacagg

SEQ ID NO: 2116038 - RNA, 19 nt, Artificial Sequence
  Description of Artificial Sequence: Synthetic oligonucleotide
gacauuacgcuaugcaccu

SEQ ID NO: 2116039 - RNA, 19 nt, Artificial Sequence
  Description of Artificial Sequence: Synthetic oligonucleotide
gagcgcuugcuccugugag

SEQ ID NO: 2116040 - RNA, 19 nt, Artificial Sequence
  Description of Artificial Sequence: Synthetic oligonucleotide
caggccagaacucgaugcg

SEQ ID NO: 2116041 - RNA, 19 nt, Artificial Sequence
  Description of Artificial Sequence: Synthetic oligonucleotide
aggucaaccucuucuugca

SEQ ID NO: 2116042 - RNA, 19 nt, Artificial Sequence
  Description of Artificial Sequence: Synthetic oligonucleotide
agacacugaggugagcuug

SEQ ID NO: 2116043 - RNA, 19 nt, Artificial Sequence
  Description of Artificial Sequence: Synthetic oligonucleotide
auguggaagacugggugag

SEQ ID NO: 2116044 - RNA, 19 nt, Artificial Sequence
  Description of Artificial Sequence: Synthetic oligonucleotide
agcuauugaugcagcaggg

SEQ ID NO: 2116045 - RNA, 19 nt, Artificial Sequence
  Description of Artificial Sequence: Synthetic oligonucleotide
uuucgggucugcccuguca

SEQ ID NO: 2116046 - RNA, 19 nt, Artificial Sequence
  Description of Artificial Sequence: Synthetic oligonucleotide
auguccguggcuguggucu

SEQ ID NO: 2116047 - RNA, 19 nt, Artificial Sequence
  Description of Artificial Sequence: Synthetic oligonucleotide
uuuaguccagugggcuugg

SEQ ID NO: 2116048 - RNA, 19 nt, Artificial Sequence
  Description of Artificial Sequence: Synthetic oligonucleotide
cauuacgcuaugcaccuca

SEQ ID NO: 2116049 - RNA, 19 nt, Artificial Sequence
  Description of Artificial Sequence: Synthetic oligonucleotide
uggcuguggucuuaucccc

SEQ ID NO: 2116050 - RNA, 19 nt, Artificial Sequence
  Description of Artificial Sequence: Synthetic oligonucleotide
ugucgucugucgucaacgc

SEQ ID NO: 2116051 - RNA, 19 nt, Artificial Sequence
  Description of Artificial Sequence: Synthetic oligonucleotide
caguccuuauaauuuaaaa

SEQ ID NO: 2116052 - RNA, 19 nt, Artificial Sequence
  Description of Artificial Sequence: Synthetic oligonucleotide
uugaaggagaucguaccau

SEQ ID NO: 2116053 - RNA, 19 nt, Artificial Sequence
  Description of Artificial Sequence: Synthetic oligonucleotide
ugucgucaacgcuuugaca

SEQ ID NO: 2116054 - RNA, 19 nt, Artificial Sequence
  Description of Artificial Sequence: Synthetic oligonucleotide
acugcacgaccacaggcca

SEQ ID NO: 2116055 - RNA, 19 nt, Artificial Sequence
  Description of Artificial Sequence: Synthetic oligonucleotide
cugucgucaacgcuuugac

SEQ ID NO: 2116056 - RNA, 19 nt, Artificial Sequence
  Description of Artificial Sequence: Synthetic oligonucleotide
uuacaggcgugagguaggg

SEQ ID NO: 2116057 - RNA, 19 nt, Artificial Sequence
  Description of Artificial Sequence: Synthetic oligonucleotide
gucaagggaaugcugaagu

SEQ ID NO: 2116058 - RNA, 19 nt, Artificial Sequence
  Description of Artificial Sequence: Synthetic oligonucleotide
gaaguacuguuugaauaca

SEQ ID NO: 2116059 - RNA, 19 nt, Artificial Sequence
  Description of Artificial Sequence: Synthetic oligonucleotide
gagucaaugccccggcauc

SEQ ID NO: 2116060 - RNA, 19 nt, Artificial Sequence
  Description of Artificial Sequence: Synthetic oligonucleotide
ugagcgcuugcuccuguga

SEQ ID NO: 2116061 - RNA, 19 nt, Artificial Sequence
  Description of Artificial Sequence: Synthetic oligonucleotide
cacugucacacacugagaa

SEQ ID NO: 2116062 - RNA, 19 nt, Artificial Sequence
  Description of Artificial Sequence: Synthetic oligonucleotide
ugagaggaugagcgcuugc

SEQ ID NO: 2116063 - RNA, 19 nt, Artificial Sequence
  Description of Artificial Sequence: Synthetic oligonucleotide
cauguggaagacuggguga

SEQ ID NO: 2116064 - RNA, 19 nt, Artificial Sequence
  Description of Artificial Sequence: Synthetic oligonucleotide
aggccagaacucgaugcgc

SEQ ID NO: 2116065 - RNA, 19 nt, Artificial Sequence
  Description of Artificial Sequence: Synthetic oligonucleotide
uauagaaagcuguguccuu

SEQ ID NO: 2116066 - RNA, 19 nt, Artificial Sequence
  Description of Artificial Sequence: Synthetic oligonucleotide
uuacgcuaugcaccucaga

SEQ ID NO: 2116067 - RNA, 19 nt, Artificial Sequence
  Description of Artificial Sequence: Synthetic oligonucleotide
cguuucuuaaacagucugg

SEQ ID NO: 2116068 - RNA, 19 nt, Artificial Sequence
  Description of Artificial Sequence: Synthetic oligonucleotide
ccaacccacacacugacac

SEQ ID NO: 2116069 - RNA, 19 nt, Artificial Sequence
  Description of Artificial Sequence: Synthetic oligonucleotide
ggagaucguaccaugggcc

SEQ ID NO: 2116070 - RNA, 19 nt, Artificial Sequence
  Description of Artificial Sequence: Synthetic oligonucleotide
ucaagggaaugcugaaguu

SEQ ID NO: 2116071 - RNA, 19 nt, Artificial Sequence
  Description of Artificial Sequence: Synthetic oligonucleotide
cacugacacugucacacac

SEQ ID NO: 2116072 - RNA, 19 nt, Artificial Sequence
  Description of Artificial Sequence: Synthetic oligonucleotide
ugcuugucgucugucguca

SEQ ID NO: 2116073 - RNA, 19 nt, Artificial Sequence
  Description of Artificial Sequence: Synthetic oligonucleotide
caggcgugagguagggagg

SEQ ID NO: 2116074 - RNA, 19 nt, Artificial Sequence
  Description of Artificial Sequence: Synthetic oligonucleotide
cagcacacggggugaacgg

SEQ ID NO: 2116075 - RNA, 19 nt, Artificial Sequence
  Description of Artificial Sequence: Synthetic oligonucleotide
acacggggugaacggaguc

SEQ ID NO: 2116076 - RNA, 19 nt, Artificial Sequence
  Description of Artificial Sequence: Synthetic oligonucleotide
ugggugagaggaugagcgc

SEQ ID NO: 2116077 - RNA, 19 nt, Artificial Sequence
  Description of Artificial Sequence: Synthetic oligonucleotide
acgcuaugcaccucagagu

SEQ ID NO: 2116078 - RNA, 19 nt, Artificial Sequence
  Description of Artificial Sequence: Synthetic oligonucleotide
uugcuaucuguguaugguu

SEQ ID NO: 2116079 - RNA, 19 nt, Artificial Sequence
  Description of Artificial Sequence: Synthetic oligonucleotide
gucaacgcuuugacaaagg

SEQ ID NO: 2116080 - RNA, 19 nt, Artificial Sequence
  Description of Artificial Sequence: Synthetic oligonucleotide
agucuccguuucuuaaaca

SEQ ID NO: 2116081 - RNA, 19 nt, Artificial Sequence
  Description of Artificial Sequence: Synthetic oligonucleotide
gacauugcuaucuguguau

SEQ ID NO: 2116082 - RNA, 19 nt, Artificial Sequence
  Description of Artificial Sequence: Synthetic oligonucleotide
gugcuuggagucaaugccc

SEQ ID NO: 2116083 - RNA, 19 nt, Artificial Sequence
  Description of Artificial Sequence: Synthetic oligonucleotide
caugcaguccuuauaauuu

SEQ ID NO: 2116084 - RNA, 19 nt, Artificial Sequence
  Description of Artificial Sequence: Synthetic oligonucleotide
acauggacauuacgcuaug

SEQ ID NO: 2116085 - RNA, 19 nt, Artificial Sequence
  Description of Artificial Sequence: Synthetic oligonucleotide
aguuuaguccagugggcuu

SEQ ID NO: 2116086 - RNA, 19 nt, Artificial Sequence
  Description of Artificial Sequence: Synthetic oligonucleotide
ggaagacugggugagagga

SEQ ID NO: 2116087 - RNA, 19 nt, Artificial Sequence
  Description of Artificial Sequence: Synthetic oligonucleotide
cuguguccuuggcaaagcc

SEQ ID NO: 2116088 - RNA, 19 nt, Artificial Sequence
  Description of Artificial Sequence: Synthetic oligonucleotide
uuaaacagucuggggucca

SEQ ID NO: 2116089 - RNA, 19 nt, Artificial Sequence
  Description of Artificial Sequence: Synthetic oligonucleotide
cacaggcugugucuauccg

SEQ ID NO: 2116090 - RNA, 19 nt, Artificial Sequence
  Description of Artificial Sequence: Synthetic oligonucleotide
cugugucaagggaaugcug

SEQ ID NO: 2116091 - RNA, 19 nt, Artificial Sequence
  Description of Artificial Sequence: Synthetic oligonucleotide
acggggugaacggagucuc

SEQ ID NO: 2116092 - RNA, 19 nt, Artificial Sequence
  Description of Artificial Sequence: Synthetic oligonucleotide
gcugugucuauccggauga

SEQ ID NO: 2116093 - RNA, 19 nt, Artificial Sequence
  Description of Artificial Sequence: Synthetic oligonucleotide
ugaauacacuguuguuaau

SEQ ID NO: 2116094 - RNA, 19 nt, Artificial Sequence
  Description of Artificial Sequence: Synthetic oligonucleotide
gcugaaguuuaguccagug

SEQ ID NO: 2116095 - RNA, 19 nt, Artificial Sequence
  Description of Artificial Sequence: Synthetic oligonucleotide
gaguguccgaagagguggg

SEQ ID NO: 2116096 - RNA, 19 nt, Artificial Sequence
  Description of Artificial Sequence: Synthetic oligonucleotide
gcaguaugaguuccagugc

SEQ ID NO: 2116097 - RNA, 19 nt, Artificial Sequence
  Description of Artificial Sequence: Synthetic oligonucleotide
aauuaccaugcaguccuua

SEQ ID NO: 2116098 - RNA, 19 nt, Artificial Sequence
  Description of Artificial Sequence: Synthetic oligonucleotide
ucagaguggccaguauaga

SEQ ID NO: 2116099 - RNA, 19 nt, Artificial Sequence
  Description of Artificial Sequence: Synthetic oligonucleotide
cagaguguccgaagaggug

SEQ ID NO: 2116100 - RNA, 19 nt, Artificial Sequence
  Description of Artificial Sequence: Synthetic oligonucleotide
ugcacgaccacaggccaga

SEQ ID NO: 2116101 - RNA, 19 nt, Artificial Sequence
  Description of Artificial Sequence: Synthetic oligonucleotide
aaacagucugggguccaca

SEQ ID NO: 2116102 - RNA, 19 nt, Artificial Sequence
  Description of Artificial Sequence: Synthetic oligonucleotide
ugcugagcacacacacaca

SEQ ID NO: 2116103 - RNA, 19 nt, Artificial Sequence
  Description of Artificial Sequence: Synthetic oligonucleotide
uguggguuguggugcagua

SEQ ID NO: 2116104 - RNA, 19 nt, Artificial Sequence
  Description of Artificial Sequence: Synthetic oligonucleotide
gucuagauccagagugucc

SEQ ID NO: 2116105 - RNA, 19 nt, Artificial Sequence
  Description of Artificial Sequence: Synthetic oligonucleotide
ucacacgggcagcuauuga

SEQ ID NO: 2116106 - RNA, 19 nt, Artificial Sequence
  Description of Artificial Sequence: Synthetic oligonucleotide
gcugugaucagaguguaga

SEQ ID NO: 2116107 - RNA, 19 nt, Artificial Sequence
  Description of Artificial Sequence: Synthetic oligonucleotide
ccauguggaagacugggug

SEQ ID NO: 2116108 - RNA, 19 nt, Artificial Sequence
  Description of Artificial Sequence: Synthetic oligonucleotide
cucgaugcgcuccccuccg

SEQ ID NO: 2116109 - RNA, 19 nt, Artificial Sequence
  Description of Artificial Sequence: Synthetic oligonucleotide
ucgucaacgcuuugacaaa

SEQ ID NO: 2116110 - RNA, 19 nt, Artificial Sequence
  Description of Artificial Sequence: Synthetic oligonucleotide
agaacucgaugcgcucccc

SEQ ID NO: 2116111 - RNA, 19 nt, Artificial Sequence
  Description of Artificial Sequence: Synthetic oligonucleotide
aagccuuuagugggcccag

SEQ ID NO: 2116112 - RNA, 19 nt, Artificial Sequence
  Description of Artificial Sequence: Synthetic oligonucleotide
ucaaugccccggcauccac

SEQ ID NO: 2116113 - RNA, 19 nt, Artificial Sequence
  Description of Artificial Sequence: Synthetic oligonucleotide
uaugcaccucagaguggcc

SEQ ID NO: 2116114 - RNA, 19 nt, Artificial Sequence
  Description of Artificial Sequence: Synthetic oligonucleotide
cuugucgucugucgucaac

SEQ ID NO: 2116115 - RNA, 19 nt, Artificial Sequence
  Description of Artificial Sequence: Synthetic oligonucleotide
ggacugcacgaccacaggc

SEQ ID NO: 2116116 - RNA, 19 nt, Artificial Sequence
  Description of Artificial Sequence: Synthetic oligonucleotide
gcuauugaugcagcagggg

SEQ ID NO: 2116117 - RNA, 19 nt, Artificial Sequence
  Description of Artificial Sequence: Synthetic oligonucleotide
cuaucuguguaugguucug

SEQ ID NO: 2116118 - RNA, 19 nt, Artificial Sequence
  Description of Artificial Sequence: Synthetic oligonucleotide
gagcuuggguccagcaugc

SEQ ID NO: 2116119 - RNA, 19 nt, Artificial Sequence
  Description of Artificial Sequence: Synthetic oligonucleotide
auccacucucaacaggauu

SEQ ID NO: 2116120 - RNA, 19 nt, Artificial Sequence
  Description of Artificial Sequence: Synthetic oligonucleotide
ugccccggcauccacucuc

SEQ ID NO: 2116121 - RNA, 19 nt, Artificial Sequence
  Description of Artificial Sequence: Synthetic oligonucleotide
cauggacauuacgcuaugc

SEQ ID NO: 2116122 - RNA, 19 nt, Artificial Sequence
  Description of Artificial Sequence: Synthetic oligonucleotide
gucacacacugagaacucc

SEQ ID NO: 2116123 - RNA, 19 nt, Artificial Sequence
  Description of Artificial Sequence: Synthetic oligonucleotide
uccgaagaggugggugggg

SEQ ID NO: 2116124 - RNA, 19 nt, Artificial Sequence
  Description of Artificial Sequence: Synthetic oligonucleotide
gcagcuauugaugcagcag

SEQ ID NO: 2116125 - RNA, 19 nt, Artificial Sequence
  Description of Artificial Sequence: Synthetic oligonucleotide
aacggagucuccguuucuu

SEQ ID NO: 2116126 - RNA, 19 nt, Artificial Sequence
  Description of Artificial Sequence: Synthetic oligonucleotide
agcgcuugcuccugugagu

SEQ ID NO: 2116127 - RNA, 19 nt, Artificial Sequence
  Description of Artificial Sequence: Synthetic oligonucleotide
augcgcuccccuccggcuc

SEQ ID NO: 2116128 - RNA, 19 nt, Artificial Sequence
  Description of Artificial Sequence: Synthetic oligonucleotide
gacugggugagaggaugag

SEQ ID NO: 2116129 - RNA, 19 nt, Artificial Sequence
  Description of Artificial Sequence: Synthetic oligonucleotide
cgcuaugcaccucagagug

SEQ ID NO: 2116130 - RNA, 19 nt, Artificial Sequence
  Description of Artificial Sequence: Synthetic oligonucleotide
acugacacugucacacacu

SEQ ID NO: 2116131 - RNA, 19 nt, Artificial Sequence
  Description of Artificial Sequence: Synthetic oligonucleotide
ugucacacgggcagcuauu

SEQ ID NO: 2116132 - RNA, 19 nt, Artificial Sequence
  Description of Artificial Sequence: Synthetic oligonucleotide
cuuauccccaacccacaca

SEQ ID NO: 2116133 - RNA, 19 nt, Artificial Sequence
  Description of Artificial Sequence: Synthetic oligonucleotide
gagaucguaccaugggccu

SEQ ID NO: 2116134 - RNA, 19 nt, Artificial Sequence
  Description of Artificial Sequence: Synthetic oligonucleotide
cuuggggaacggagucucc

SEQ ID NO: 2116135 - RNA, 19 nt, Artificial Sequence
  Description of Artificial Sequence: Synthetic oligonucleotide
uaaacagucugggguccac

SEQ ID NO: 2116136 - RNA, 19 nt, Artificial Sequence
  Description of Artificial Sequence: Synthetic oligonucleotide
auuacgcuaugcaccucag

SEQ ID NO: 2116137 - RNA, 19 nt, Artificial Sequence
  Description of Artificial Sequence: Synthetic oligonucleotide
ccguuucuuaaacagucug

SEQ ID NO: 2116138 - RNA, 19 nt, Artificial Sequence
  Description of Artificial Sequence: Synthetic oligonucleotide
acacgggcagcuauugaug

SEQ ID NO: 2116139 - RNA, 19 nt, Artificial Sequence
  Description of Artificial Sequence: Synthetic oligonucleotide
aagcugugaucagagugua

SEQ ID NO: 2116140 - RNA, 19 nt, Artificial Sequence
  Description of Artificial Sequence: Synthetic oligonucleotide
ggugcaguaugaguuccag

SEQ ID NO: 2116141 - RNA, 19 nt, Artificial Sequence
  Description of Artificial Sequence: Synthetic oligonucleotide
ucgaugcgcuccccuccgg

SEQ ID NO: 2116142 - RNA, 19 nt, Artificial Sequence
  Description of Artificial Sequence: Synthetic oligonucleotide
cuuggguccagcaugccau

SEQ ID NO: 2116143 - RNA, 19 nt, Artificial Sequence
  Description of Artificial Sequence: Synthetic oligonucleotide
cgauaaauuaccaugcagu

SEQ ID NO: 2116144 - RNA, 19 nt, Artificial Sequence
  Description of Artificial Sequence: Synthetic oligonucleotide
caguaugaguuccagugcu

SEQ ID NO: 2116145 - RNA, 19 nt, Artificial Sequence
  Description of Artificial Sequence: Synthetic oligonucleotide
ugcugaaguuuaguccagu

SEQ ID NO: 2116146 - RNA, 19 nt, Artificial Sequence
  Description of Artificial Sequence: Synthetic oligonucleotide
acggagucuccuucuggga

SEQ ID NO: 2116147 - RNA, 19 nt, Artificial Sequence
  Description of Artificial Sequence: Synthetic oligonucleotide
ugccuguacgccgaucaaa

SEQ ID NO: 2116148 - RNA, 19 nt, Artificial Sequence
  Description of Artificial Sequence: Synthetic oligonucleotide
agaucguaccaugggccug

SEQ ID NO: 2116149 - RNA, 19 nt, Artificial Sequence
  Description of Artificial Sequence: Synthetic oligonucleotide
ccggcauccacucucaaca

SEQ ID NO: 2116150 - RNA, 19 nt, Artificial Sequence
  Description of Artificial Sequence: Synthetic oligonucleotide
uauccccaacccacacacu

SEQ ID NO: 2116151 - RNA, 19 nt, Artificial Sequence
  Description of Artificial Sequence: Synthetic oligonucleotide
cugugaucagaguguagaa

SEQ ID NO: 2116152 - RNA, 19 nt, Artificial Sequence
  Description of Artificial Sequence: Synthetic oligonucleotide
ggcccagacacugagguga

SEQ ID NO: 2116153 - RNA, 19 nt, Artificial Sequence
  Description of Artificial Sequence: Synthetic oligonucleotide
guccgaagagguggguggg

SEQ ID NO: 2116154 - RNA, 19 nt, Artificial Sequence
  Description of Artificial Sequence: Synthetic oligonucleotide
guguccgaagaggugggug

SEQ ID NO: 2116155 - RNA, 19 nt, Artificial Sequence
  Description of Artificial Sequence: Synthetic oligonucleotide
gcauccacucucaacagga

SEQ ID NO: 2116156 - RNA, 19 nt, Artificial Sequence
  Description of Artificial Sequence: Synthetic oligonucleotide
gucacacgggcagcuauug

SEQ ID NO: 2116157 - RNA, 19 nt, Artificial Sequence
  Description of Artificial Sequence: Synthetic oligonucleotide
auguuucgggucugcccug

SEQ ID NO: 2116158 - RNA, 19 nt, Artificial Sequence
  Description of Artificial Sequence: Synthetic oligonucleotide
ggggugaacggagucuccg

SEQ ID NO: 2116159 - RNA, 19 nt, Artificial Sequence
  Description of Artificial Sequence: Synthetic oligonucleotide
gccaguauagaaagcugug

SEQ ID NO: 2116160 - RNA, 19 nt, Artificial Sequence
  Description of Artificial Sequence: Synthetic oligonucleotide
gugauguuucgggucugcc

SEQ ID NO: 2116161 - RNA, 19 nt, Artificial Sequence
  Description of Artificial Sequence: Synthetic oligonucleotide
guuugaauacacuguuguu

SEQ ID NO: 2116162 - RNA, 19 nt, Artificial Sequence
  Description of Artificial Sequence: Synthetic oligonucleotide
ggaacggagucuccuucug

SEQ ID NO: 2116163 - RNA, 19 nt, Artificial Sequence
  Description of Artificial Sequence: Synthetic oligonucleotide
ucaccuccuugccuuugau

SEQ ID NO: 2116164 - RNA, 19 nt, Artificial Sequence
  Description of Artificial Sequence: Synthetic oligonucleotide
aaacagcacacggggugaa

SEQ ID NO: 2116165 - RNA, 19 nt, Artificial Sequence
  Description of Artificial Sequence: Synthetic oligonucleotide
uagugggcccagacacuga

SEQ ID NO: 2116166 - RNA, 19 nt, Artificial Sequence
  Description of Artificial Sequence: Synthetic oligonucleotide
cugcacgaccacaggccag

SEQ ID NO: 2116167 - RNA, 19 nt, Artificial Sequence
  Description of Artificial Sequence: Synthetic oligonucleotide
uuaguccagugggcuuggg

SEQ ID NO: 2116168 - RNA, 19 nt, Artificial Sequence
  Description of Artificial Sequence: Synthetic oligonucleotide
uguuucgggucugcccugu

SEQ ID NO: 2116169 - RNA, 19 nt, Artificial Sequence
  Description of Artificial Sequence: Synthetic oligonucleotide
ggacauugcuaucugugua

SEQ ID NO: 2116170 - RNA, 19 nt, Artificial Sequence
  Description of Artificial Sequence: Synthetic oligonucleotide
gggugcuaaacagcacacg

SEQ ID NO: 2116171 - RNA, 19 nt, Artificial Sequence
  Description of Artificial Sequence: Synthetic oligonucleotide
gucuauccggaugaaccuc

SEQ ID NO: 2116172 - RNA, 19 nt, Artificial Sequence
  Description of Artificial Sequence: Synthetic oligonucleotide
ugucaccuccuugccuuug

SEQ ID NO: 2116173 - RNA, 19 nt, Artificial Sequence
  Description of Artificial Sequence: Synthetic oligonucleotide
ucgggucugcccugucaca

SEQ ID NO: 2116174 - RNA, 19 nt, Artificial Sequence
  Description of Artificial Sequence: Synthetic oligonucleotide
caugggccuggaagucuag

SEQ ID NO: 2116175 - RNA, 19 nt, Artificial Sequence
  Description of Artificial Sequence: Synthetic oligonucleotide
gauguccguggcugugguc

SEQ ID NO: 2116176 - RNA, 19 nt, Artificial Sequence
  Description of Artificial Sequence: Synthetic oligonucleotide
acauuacgcuaugcaccuc

SEQ ID NO: 2116177 - RNA, 19 nt, Artificial Sequence
  Description of Artificial Sequence: Synthetic oligonucleotide
agcuuggguccagcaugcc

SEQ ID NO: 2116178 - RNA, 19 nt, Artificial Sequence
  Description of Artificial Sequence: Synthetic oligonucleotide
uuggguccagcaugccauc

SEQ ID NO: 2116179 - RNA, 19 nt, Artificial Sequence
  Description of Artificial Sequence: Synthetic oligonucleotide
gcuuggagucaaugccccg

SEQ ID NO: 2116180 - RNA, 19 nt, Artificial Sequence
  Description of Artificial Sequence: Synthetic oligonucleotide
caaagguguggguuguggu

SEQ ID NO: 2116181 - RNA, 19 nt, Artificial Sequence
  Description of Artificial Sequence: Synthetic oligonucleotide
accaugggccuggaagucu

SEQ ID NO: 2116182 - RNA, 19 nt, Artificial Sequence
  Description of Artificial Sequence: Synthetic oligonucleotide
cuagauccagaguguccga

SEQ ID NO: 2116183 - RNA, 19 nt, Artificial Sequence
  Description of Artificial Sequence: Synthetic oligonucleotide
cacacacacacaggcugug

SEQ ID NO: 2116184 - RNA, 19 nt, Artificial Sequence
  Description of Artificial Sequence: Synthetic oligonucleotide
acggagucuccguuucuua

SEQ ID NO: 2116185 - RNA, 19 nt, Artificial Sequence
  Description of Artificial Sequence: Synthetic oligonucleotide
cacacgggcagcuauugau

SEQ ID NO: 2116186 - RNA, 19 nt, Artificial Sequence
  Description of Artificial Sequence: Synthetic oligonucleotide
gggucugcccugucacacg

SEQ ID NO: 2116187 - RNA, 19 nt, Artificial Sequence
  Description of Artificial Sequence: Synthetic oligonucleotide
guuccagugcuuggaguca

SEQ ID NO: 2116188 - RNA, 19 nt, Artificial Sequence
  Description of Artificial Sequence: Synthetic oligonucleotide
gugagaggaugagcgcuug

SEQ ID NO: 2116189 - RNA, 19 nt, Artificial Sequence
  Description of Artificial Sequence: Synthetic oligonucleotide
agcacacggggugaacgga

SEQ ID NO: 2116190 - RNA, 19 nt, Artificial Sequence
  Description of Artificial Sequence: Synthetic oligonucleotide
cucugcggagggcuguguc

SEQ ID NO: 2116191 - RNA, 19 nt, Artificial Sequence
  Description of Artificial Sequence: Synthetic oligonucleotide
cucucccagcacugucacc

SEQ ID NO: 2116192 - RNA, 19 nt, Artificial Sequence
  Description of Artificial Sequence: Synthetic oligonucleotide
aaauuaccaugcaguccuu

SEQ ID NO: 2116193 - RNA, 19 nt, Artificial Sequence
  Description of Artificial Sequence: Synthetic oligonucleotide
uccagugcuuggagucaau

SEQ ID NO: 2116194 - RNA, 19 nt, Artificial Sequence
  Description of Artificial Sequence: Synthetic oligonucleotide
cacgaccacaggccagaac

SEQ ID NO: 2116195 - RNA, 19 nt, Artificial Sequence
  Description of Artificial Sequence: Synthetic oligonucleotide
ggcagcuauugaugcagca

SEQ ID NO: 2116196 - RNA, 19 nt, Artificial Sequence
  Description of Artificial Sequence: Synthetic oligonucleotide
gcuaugcaccucagagugg

SEQ ID NO: 2116197 - RNA, 19 nt, Artificial Sequence
  Description of Artificial Sequence: Synthetic oligonucleotide
accucagaguggccaguau

SEQ ID NO: 2116198 - RNA, 19 nt, Artificial Sequence
  Description of Artificial Sequence: Synthetic oligonucleotide
ggugagcuuggguccagca

SEQ ID NO: 2116199 - RNA, 19 nt, Artificial Sequence
  Description of Artificial Sequence: Synthetic oligonucleotide
gggacauugcuaucugugu

SEQ ID NO: 2116200 - RNA, 19 nt, Artificial Sequence
  Description of Artificial Sequence: Synthetic oligonucleotide
agcaggggcgcugcgggcu

SEQ ID NO: 2116201 - RNA, 19 nt, Artificial Sequence
  Description of Artificial Sequence: Synthetic oligonucleotide
gcuuggguccagcaugcca

SEQ ID NO: 2116202 - RNA, 19 nt, Artificial Sequence
  Description of Artificial Sequence: Synthetic oligonucleotide
cugcgggcucugcggaggg

SEQ ID NO: 2116203 - RNA, 19 nt, Artificial Sequence
  Description of Artificial Sequence: Synthetic oligonucleotide
gcggagggcugugucaagg

SEQ ID NO: 2116204 - RNA, 19 nt, Artificial Sequence
  Description of Artificial Sequence: Synthetic oligonucleotide
gugggcccagacacugagg

SEQ ID NO: 2116205 - RNA, 19 nt, Artificial Sequence
  Description of Artificial Sequence: Synthetic oligonucleotide
ggaagucuagauccagagu

SEQ ID NO: 2116206 - RNA, 19 nt, Artificial Sequence
  Description of Artificial Sequence: Synthetic oligonucleotide
ccacucucaacaggauugg

SEQ ID NO: 2116207 - RNA, 19 nt, Artificial Sequence
  Description of Artificial Sequence: Synthetic oligonucleotide
acgcuuugacaaaggugug

SEQ ID NO: 2116208 - RNA, 19 nt, Artificial Sequence
  Description of Artificial Sequence: Synthetic oligonucleotide
cuuugacaaaggugugggu

SEQ ID NO: 2116209 - RNA, 19 nt, Artificial Sequence
  Description of Artificial Sequence: Synthetic oligonucleotide
uacaggcgugagguaggga

SEQ ID NO: 2116210 - RNA, 19 nt, Artificial Sequence
  Description of Artificial Sequence: Synthetic oligonucleotide
gcuaucuguguaugguucu

SEQ ID NO: 2116211 - RNA, 19 nt, Artificial Sequence
  Description of Artificial Sequence: Synthetic oligonucleotide
aguguccgaagaggugggu

SEQ ID NO: 2116212 - RNA, 19 nt, Artificial Sequence
  Description of Artificial Sequence: Synthetic oligonucleotide
gguucugccuguacgccga

SEQ ID NO: 2116213 - RNA, 19 nt, Artificial Sequence
  Description of Artificial Sequence: Synthetic oligonucleotide
gcuguguccuuggcaaagc

SEQ ID NO: 2116214 - RNA, 19 nt, Artificial Sequence
  Description of Artificial Sequence: Synthetic oligonucleotide
gcacacggggugaacggag

SEQ ID NO: 2116215 - RNA, 19 nt, Artificial Sequence
  Description of Artificial Sequence: Synthetic oligonucleotide
ggccaguauagaaagcugu

SEQ ID NO: 2116216 - RNA, 19 nt, Artificial Sequence
  Description of Artificial Sequence: Synthetic oligonucleotide
uccguggcuguggucuuau

SEQ ID NO: 2116217 - RNA, 19 nt, Artificial Sequence
  Description of Artificial Sequence: Synthetic oligonucleotide
ccccaacccacacacugac

SEQ ID NO: 2116218 - RNA, 19 nt, Artificial Sequence
  Description of Artificial Sequence: Synthetic oligonucleotide
gucgucugucgucaacgcu

SEQ ID NO: 2116219 - RNA, 19 nt, Artificial Sequence
  Description of Artificial Sequence: Synthetic oligonucleotide
gugagcuuggguccagcau

SEQ ID NO: 2116220 - RNA, 19 nt, Artificial Sequence
  Description of Artificial Sequence: Synthetic oligonucleotide
gugcaguaugaguuccagu

SEQ ID NO: 2116221 - RNA, 19 nt, Artificial Sequence
  Description of Artificial Sequence: Synthetic oligonucleotide
cacacacaggcugugucua

SEQ ID NO: 2116222 - RNA, 19 nt, Artificial Sequence
  Description of Artificial Sequence: Synthetic oligonucleotide
gucaaugccccggcaucca

SEQ ID NO: 2116223 - RNA, 19 nt, Artificial Sequence
  Description of Artificial Sequence: Synthetic oligonucleotide
gaacggagucuccguuucu

SEQ ID NO: 2116224 - RNA, 19 nt, Artificial Sequence
  Description of Artificial Sequence: Synthetic oligonucleotide
cagugauguuucgggucug

SEQ ID NO: 2116225 - RNA, 19 nt, Artificial Sequence
  Description of Artificial Sequence: Synthetic oligonucleotide
ggagucaaugccccggcau

SEQ ID NO: 2116226 - RNA, 19 nt, Artificial Sequence
  Description of Artificial Sequence: Synthetic oligonucleotide
gugaacggagucuccguuu

SEQ ID NO: 2116227 - RNA, 19 nt, Artificial Sequence
  Description of Artificial Sequence: Synthetic oligonucleotide
cggagucuccuucugggac

SEQ ID NO: 2116228 - RNA, 19 nt, Artificial Sequence
  Description of Artificial Sequence: Synthetic oligonucleotide
gagcacacacacacaggcu

SEQ ID NO: 2116229 - RNA, 19 nt, Artificial Sequence
  Description of Artificial Sequence: Synthetic oligonucleotide
cucccagcacugucaccuc

SEQ ID NO: 2116230 - RNA, 19 nt, Artificial Sequence
  Description of Artificial Sequence: Synthetic oligonucleotide
gccuguacgccgaucaaaa

SEQ ID NO: 2116231 - RNA, 19 nt, Artificial Sequence
  Description of Artificial Sequence: Synthetic oligonucleotide
gucugucgucaacgcuuug

SEQ ID NO: 2116232 - RNA, 19 nt, Artificial Sequence
  Description of Artificial Sequence: Synthetic oligonucleotide
ccagugcuuggagucaaug

SEQ ID NO: 2116233 - RNA, 19 nt, Artificial Sequence
  Description of Artificial Sequence: Synthetic oligonucleotide
cccggcauccacucucaac

SEQ ID NO: 2116234 - RNA, 19 nt, Artificial Sequence
  Description of Artificial Sequence: Synthetic oligonucleotide
cugcccugucacacgggca

SEQ ID NO: 2116235 - RNA, 19 nt, Artificial Sequence
  Description of Artificial Sequence: Synthetic oligonucleotide
ccagaguguccgaagaggu

SEQ ID NO: 2116236 - RNA, 19 nt, Artificial Sequence
  Description of Artificial Sequence: Synthetic oligonucleotide
gggcucggcacuuggucuc

SEQ ID NO: 2116237 - RNA, 19 nt, Artificial Sequence
  Description of Artificial Sequence: Synthetic oligonucleotide
cgucaacgcuuugacaaag

SEQ ID NO: 2116238 - RNA, 19 nt, Artificial Sequence
  Description of Artificial Sequence: Synthetic oligonucleotide
caacccacacacugacacu

SEQ ID NO: 2116239 - RNA, 19 nt, Artificial Sequence
  Description of Artificial Sequence: Synthetic oligonucleotide
cagugggcuuggggaacgg

SEQ ID NO: 2116240 - RNA, 19 nt, Artificial Sequence
  Description of Artificial Sequence: Synthetic oligonucleotide
guuucgggucugcccuguc

SEQ ID NO: 2116241 - RNA, 19 nt, Artificial Sequence
  Description of Artificial Sequence: Synthetic oligonucleotide
gcgcuugcuccugugaguc

SEQ ID NO: 2116242 - RNA, 19 nt, Artificial Sequence
  Description of Artificial Sequence: Synthetic oligonucleotide
gaagacugggugagaggau

SEQ ID NO: 2116243 - RNA, 19 nt, Artificial Sequence
  Description of Artificial Sequence: Synthetic oligonucleotide
ccagugggcuuggggaacg

SEQ ID NO: 2116244 - RNA, 19 nt, Artificial Sequence
  Description of Artificial Sequence: Synthetic oligonucleotide
caaugccccggcauccacu

SEQ ID NO: 2116245 - RNA, 19 nt, Artificial Sequence
  Description of Artificial Sequence: Synthetic oligonucleotide
ccugcugagcacacacaca

SEQ ID NO: 2116246 - RNA, 19 nt, Artificial Sequence
  Description of Artificial Sequence: Synthetic oligonucleotide
guccuuggcaaagccuuua

SEQ ID NO: 2116247 - RNA, 19 nt, Artificial Sequence
  Description of Artificial Sequence: Synthetic oligonucleotide
gggugagaggaugagcgcu

SEQ ID NO: 2116248 - RNA, 19 nt, Artificial Sequence
  Description of Artificial Sequence: Synthetic oligonucleotide
gggaacggagucuccuucu

SEQ ID NO: 2116249 - RNA, 19 nt, Artificial Sequence
  Description of Artificial Sequence: Synthetic oligonucleotide
cugucacacgggcagcuau

SEQ ID NO: 2116250 - RNA, 19 nt, Artificial Sequence
  Description of Artificial Sequence: Synthetic oligonucleotide
ccucagaguggccaguaua

SEQ ID NO: 2116251 - RNA, 19 nt, Artificial Sequence
  Description of Artificial Sequence: Synthetic oligonucleotide
cacacggggugaacggagu

SEQ ID NO: 2116252 - RNA, 19 nt, Artificial Sequence
  Description of Artificial Sequence: Synthetic oligonucleotide
augccccggcauccacucu

SEQ ID NO: 2116253 - RNA, 19 nt, Artificial Sequence
  Description of Artificial Sequence: Synthetic oligonucleotide
cauccacucucaacaggau

SEQ ID NO: 2116254 - RNA, 19 nt, Artificial Sequence
  Description of Artificial Sequence: Synthetic oligonucleotide
ggugaacggagucuccguu

SEQ ID NO: 2116255 - RNA, 19 nt, Artificial Sequence
  Description of Artificial Sequence: Synthetic oligonucleotide
cucggcacuuggucucaaa

SEQ ID NO: 2116256 - RNA, 19 nt, Artificial Sequence
  Description of Artificial Sequence: Synthetic oligonucleotide
ggggcucggcacuuggucu

SEQ ID NO: 2116257 - RNA, 19 nt, Artificial Sequence
  Description of Artificial Sequence: Synthetic oligonucleotide
gggcgagguggggaagggg

SEQ ID NO: 2116258 - RNA, 19 nt, Artificial Sequence
  Description of Artificial Sequence: Synthetic oligonucleotide
ccuguugaaggagaucgua

SEQ ID NO: 2116259 - RNA, 19 nt, Artificial Sequence
  Description of Artificial Sequence: Synthetic oligonucleotide
ccaguauagaaagcugugu

SEQ ID NO: 2116260 - RNA, 19 nt, Artificial Sequence
  Description of Artificial Sequence: Synthetic oligonucleotide
cugccuguacgccgaucaa

SEQ ID NO: 2116261 - RNA, 19 nt, Artificial Sequence
  Description of Artificial Sequence: Synthetic oligonucleotide
cacggggugaacggagucu

SEQ ID NO: 2116262 - RNA, 19 nt, Artificial Sequence
  Description of Artificial Sequence: Synthetic oligonucleotide
gggugaacggagucuccgu

SEQ ID NO: 2116263 - RNA, 19 nt, Artificial Sequence
  Description of Artificial Sequence: Synthetic oligonucleotide
cgaugcgcuccccuccggc

SEQ ID NO: 2116264 - RNA, 19 nt, Artificial Sequence
  Description of Artificial Sequence: Synthetic oligonucleotide
aucguaccaugggccugga

SEQ ID NO: 2116265 - RNA, 19 nt, Artificial Sequence
  Description of Artificial Sequence: Synthetic oligonucleotide
ggccagaacucgaugcgcu

SEQ ID NO: 2116266 - RNA, 19 nt, Artificial Sequence
  Description of Artificial Sequence: Synthetic oligonucleotide
ccugcuugucgucugucgu

SEQ ID NO: 2116267 - RNA, 19 nt, Artificial Sequence
  Description of Artificial Sequence: Synthetic oligonucleotide
cgggucugcccugucacac

SEQ ID NO: 2116268 - RNA, 19 nt, Artificial Sequence
  Description of Artificial Sequence: Synthetic oligonucleotide
guggguuguggugcaguau

SEQ ID NO: 2116269 - RNA, 19 nt, Artificial Sequence
  Description of Artificial Sequence: Synthetic oligonucleotide
ccaugggccuggaagucua

SEQ ID NO: 2116270 - RNA, 19 nt, Artificial Sequence
  Description of Artificial Sequence: Synthetic oligonucleotide
gcacacacacacaggcugu

SEQ ID NO: 2116271 - RNA, 19 nt, Artificial Sequence
  Description of Artificial Sequence: Synthetic oligonucleotide
ccuggacugcacgaccaca

SEQ ID NO: 2116272 - RNA, 19 nt, Artificial Sequence
  Description of Artificial Sequence: Synthetic oligonucleotide
ggugagaggaugagcgcuu

SEQ ID NO: 2116273 - RNA, 19 nt, Artificial Sequence
  Description of Artificial Sequence: Synthetic oligonucleotide
cgcuugcuccugugagucc

SEQ ID NO: 2116274 - RNA, 19 nt, Artificial Sequence
  Description of Artificial Sequence: Synthetic oligonucleotide
cggggugaacggagucucc

SEQ ID NO: 2116275 - RNA, 19 nt, Artificial Sequence
  Description of Artificial Sequence: Synthetic oligonucleotide
gcuugucgucugucgucaa

SEQ ID NO: 2116276 - RNA, 19 nt, Artificial Sequence
  Description of Artificial Sequence: Synthetic oligonucleotide
caaccucuucuugcagccu

SEQ ID NO: 2116277 - RNA, 19 nt, Artificial Sequence
  Description of Artificial Sequence: Synthetic oligonucleotide
guagaacaacauggacauu

SEQ ID NO: 2116278 - RNA, 19 nt, Artificial Sequence
  Description of Artificial Sequence: Synthetic oligonucleotide
gcccugucacacgggcagc

SEQ ID NO: 2116279 - RNA, 19 nt, Artificial Sequence
  Description of Artificial Sequence: Synthetic oligonucleotide
gcaggggcgcugcgggcuc

SEQ ID NO: 2116280 - RNA, 19 nt, Artificial Sequence
  Description of Artificial Sequence: Synthetic oligonucleotide
ggcucggcacuuggucuca

SEQ ID NO: 2116281 - RNA, 19 nt, Artificial Sequence
  Description of Artificial Sequence: Synthetic oligonucleotide
cagccugcuugucgucugu

SEQ ID NO: 2116282 - RNA, 19 nt, Artificial Sequence
  Description of Artificial Sequence: Synthetic oligonucleotide
guccguggcuguggucuua

SEQ ID NO: 2116283 - RNA, 19 nt, Artificial Sequence
  Description of Artificial Sequence: Synthetic oligonucleotide
ggggcccgaggagggugug

SEQ ID NO: 2116284 - RNA, 19 nt, Artificial Sequence
  Description of Artificial Sequence: Synthetic oligonucleotide
ggggcgcugcgggcucugc

SEQ ID NO: 2116285 - RNA, 19 nt, Artificial Sequence
  Description of Artificial Sequence: Synthetic oligonucleotide
cgucugucgucaacgcuuu

SEQ ID NO: 2116286 - RNA, 19 nt, Artificial Sequence
  Description of Artificial Sequence: Synthetic oligonucleotide
caggggcgcugcgggcucu

SEQ ID NO: 2116287 - RNA, 19 nt, Artificial Sequence
  Description of Artificial Sequence: Synthetic oligonucleotide
uuuuaaaccaaccaaaacu

SEQ ID NO: 2116288 - RNA, 19 nt, Artificial Sequence
  Description of Artificial Sequence: Synthetic oligonucleotide
auagcauccauguagcagc

SEQ ID NO: 2116289 - RNA, 19 nt, Artificial Sequence
  Description of Artificial Sequence: Synthetic oligonucleotide
ugaaagacgaacaugugcc

SEQ ID NO: 2116290 - RNA, 19 nt, Artificial Sequence
  Description of Artificial Sequence: Synthetic oligonucleotide
gacauaguagcccacacgg

SEQ ID NO: 2116291 - RNA, 19 nt, Artificial Sequence
  Description of Artificial Sequence: Synthetic oligonucleotide
augagaaccacagugacac

SEQ ID NO: 2116292 - RNA, 19 nt, Artificial Sequence
  Description of Artificial Sequence: Synthetic oligonucleotide
ucuggaggcagcuagaggc

SEQ ID NO: 2116293 - RNA, 19 nt, Artificial Sequence
  Description of Artificial Sequence: Synthetic oligonucleotide
uuuuccuuggggcugacag

SEQ ID NO: 2116294 - RNA, 19 nt, Artificial Sequence
  Description of Artificial Sequence: Synthetic oligonucleotide
acauaaaugaucuuccacu

SEQ ID NO: 2116295 - RNA, 19 nt, Artificial Sequence
  Description of Artificial Sequence: Synthetic oligonucleotide
uuuaaaccaaccaaaacuu

SEQ ID NO: 2116296 - RNA, 19 nt, Artificial Sequence
  Description of Artificial Sequence: Synthetic oligonucleotide
auuguugacauaguagccc

SEQ ID NO: 2116297 - RNA, 19 nt, Artificial Sequence
  Description of Artificial Sequence: Synthetic oligonucleotide
aaaccugauaacuccauga

SEQ ID NO: 2116298 - RNA, 19 nt, Artificial Sequence
  Description of Artificial Sequence: Synthetic oligonucleotide
auaaaugaucuuccacucc

SEQ ID NO: 2116299 - RNA, 19 nt, Artificial Sequence
  Description of Artificial Sequence: Synthetic oligonucleotide
ucggucucaggaaugaggg

SEQ ID NO: 2116300 - RNA, 19 nt, Artificial Sequence
  Description of Artificial Sequence: Synthetic oligonucleotide
uggauuuggguacucauug

SEQ ID NO: 2116301 - RNA, 19 nt, Artificial Sequence
  Description of Artificial Sequence: Synthetic oligonucleotide
aaugaucuuccacuccagg

SEQ ID NO: 2116302 - RNA, 19 nt, Artificial Sequence
  Description of Artificial Sequence: Synthetic oligonucleotide
uccauauuuuccuuggggc

SEQ ID NO: 2116303 - RNA, 19 nt, Artificial Sequence
  Description of Artificial Sequence: Synthetic oligonucleotide
aagacgaacaugugccuuc

SEQ ID NO: 2116304 - RNA, 19 nt, Artificial Sequence
  Description of Artificial Sequence: Synthetic oligonucleotide
aaccugauaacuccaugag

SEQ ID NO: 2116305 - RNA, 19 nt, Artificial Sequence
  Description of Artificial Sequence: Synthetic oligonucleotide
uauuggguagcucaugaga

SEQ ID NO: 2116306 - RNA, 19 nt, Artificial Sequence
  Description of Artificial Sequence: Synthetic oligonucleotide
uaaaagcauuuucauauac

SEQ ID NO: 2116307 - RNA, 19 nt, Artificial Sequence
  Description of Artificial Sequence: Synthetic oligonucleotide
uugauauggaaucggguca

SEQ ID NO: 2116308 - RNA, 19 nt, Artificial Sequence
  Description of Artificial Sequence: Synthetic oligonucleotide
cucauuguugacauaguag

SEQ ID NO: 2116309 - RNA, 19 nt, Artificial Sequence
  Description of Artificial Sequence: Synthetic oligonucleotide
uggaguauuggguagcuca

SEQ ID NO: 2116310 - RNA, 19 nt, Artificial Sequence
  Description of Artificial Sequence: Synthetic oligonucleotide
aucugaucaaacuccucgc

SEQ ID NO: 2116311 - RNA, 19 nt, Artificial Sequence
  Description of Artificial Sequence: Synthetic oligonucleotide
ggugaugagaaccacagug

SEQ ID NO: 2116312 - RNA, 19 nt, Artificial Sequence
  Description of Artificial Sequence: Synthetic oligonucleotide
acaauagcauccauguagc

SEQ ID NO: 2116313 - RNA, 19 nt, Artificial Sequence
  Description of Artificial Sequence: Synthetic oligonucleotide
cugaaagacgaacaugugc

SEQ ID NO: 2116314 - RNA, 19 nt, Artificial Sequence
  Description of Artificial Sequence: Synthetic oligonucleotide
guugauauggaaucggguc

SEQ ID NO: 2116315 - RNA, 19 nt, Artificial Sequence
  Description of Artificial Sequence: Synthetic oligonucleotide
uauggaaucgggucacccg

SEQ ID NO: 2116316 - RNA, 19 nt, Artificial Sequence
  Description of Artificial Sequence: Synthetic oligonucleotide
ugacauaguagcccacacg

SEQ ID NO: 2116317 - RNA, 19 nt, Artificial Sequence
  Description of Artificial Sequence: Synthetic oligonucleotide
gagaagucuggcuuugggg

SEQ ID NO: 2116318 - RNA, 19 nt, Artificial Sequence
  Description of Artificial Sequence: Synthetic oligonucleotide
uuauccuggaguauugggu

SEQ ID NO: 2116319 - RNA, 19 nt, Artificial Sequence
  Description of Artificial Sequence: Synthetic oligonucleotide
uuggccaucaccucgccag

SEQ ID NO: 2116320 - RNA, 19 nt, Artificial Sequence
  Description of Artificial Sequence: Synthetic oligonucleotide
uuucauauacacacugcac

SEQ ID NO: 2116321 - RNA, 19 nt, Artificial Sequence
  Description of Artificial Sequence: Synthetic oligonucleotide
gaauaugucaucaaagcaa

SEQ ID NO: 2116322 - RNA, 19 nt, Artificial Sequence
  Description of Artificial Sequence: Synthetic oligonucleotide
uuuggguacucauuguuga

SEQ ID NO: 2116323 - RNA, 19 nt, Artificial Sequence
  Description of Artificial Sequence: Synthetic oligonucleotide
ucuaggaucugaucaaacu

SEQ ID NO: 2116324 - RNA, 19 nt, Artificial Sequence
  Description of Artificial Sequence: Synthetic oligonucleotide
augaccaagcaugugaggg

SEQ ID NO: 2116325 - RNA, 19 nt, Artificial Sequence
  Description of Artificial Sequence: Synthetic oligonucleotide
cugaucucgaaccggaagg

SEQ ID NO: 2116326 - RNA, 19 nt, Artificial Sequence
  Description of Artificial Sequence: Synthetic oligonucleotide
uucagcaccgacaccuugg

SEQ ID NO: 2116327 - RNA, 19 nt, Artificial Sequence
  Description of Artificial Sequence: Synthetic oligonucleotide
acaugugccuuccagcagg

SEQ ID NO: 2116328 - RNA, 19 nt, Artificial Sequence
  Description of Artificial Sequence: Synthetic oligonucleotide
aggaaugagggauggauug

SEQ ID NO: 2116329 - RNA, 19 nt, Artificial Sequence
  Description of Artificial Sequence: Synthetic oligonucleotide
ucaaacuccucgcucucgg

SEQ ID NO: 2116330 - RNA, 19 nt, Artificial Sequence
  Description of Artificial Sequence: Synthetic oligonucleotide
aauccuugagaugaccaag

SEQ ID NO: 2116331 - RNA, 19 nt, Artificial Sequence
  Description of Artificial Sequence: Synthetic oligonucleotide
cuuauccuggaguauuggg

SEQ ID NO: 2116332 - RNA, 19 nt, Artificial Sequence
  Description of Artificial Sequence: Synthetic oligonucleotide
ugaucaaacuccucgcucu

SEQ ID NO: 2116333 - RNA, 19 nt, Artificial Sequence
  Description of Artificial Sequence: Synthetic oligonucleotide
aauaugucaucaaagcaaa

SEQ ID NO: 2116334 - RNA, 19 nt, Artificial Sequence
  Description of Artificial Sequence: Synthetic oligonucleotide
gagaugaccaagcauguga

SEQ ID NO: 2116335 - RNA, 19 nt, Artificial Sequence
  Description of Artificial Sequence: Synthetic oligonucleotide
auggaaucgggucacccgg

SEQ ID NO: 2116336 - RNA, 19 nt, Artificial Sequence
  Description of Artificial Sequence: Synthetic oligonucleotide
ugaugagaaccacagugac

SEQ ID NO: 2116337 - RNA, 19 nt, Artificial Sequence
  Description of Artificial Sequence: Synthetic oligonucleotide
caucagaugcaguccaugg

SEQ ID NO: 2116338 - RNA, 19 nt, Artificial Sequence
  Description of Artificial Sequence: Synthetic oligonucleotide
aggggaaggccauaguccg

SEQ ID NO: 2116339 - RNA, 19 nt, Artificial Sequence
  Description of Artificial Sequence: Synthetic oligonucleotide
ucauauacacacugcacuc

SEQ ID NO: 2116340 - RNA, 19 nt, Artificial Sequence
  Description of Artificial Sequence: Synthetic oligonucleotide
ugauaacuccaugagaggu

SEQ ID NO: 2116341 - RNA, 19 nt, Artificial Sequence
  Description of Artificial Sequence: Synthetic oligonucleotide
agggacagggcccaccagc

SEQ ID NO: 2116342 - RNA, 19 nt, Artificial Sequence
  Description of Artificial Sequence: Synthetic oligonucleotide
cauuguugacauaguagcc

SEQ ID NO: 2116343 - RNA, 19 nt, Artificial Sequence
  Description of Artificial Sequence: Synthetic oligonucleotide
cacggaugaacucuugucc

SEQ ID NO: 2116344 - RNA, 19 nt, Artificial Sequence
  Description of Artificial Sequence: Synthetic oligonucleotide
agcucaugagaauauguca

SEQ ID NO: 2116345 - RNA, 19 nt, Artificial Sequence
  Description of Artificial Sequence: Synthetic oligonucleotide
acacggaugaacucuuguc

SEQ ID NO: 2116346 - RNA, 19 nt, Artificial Sequence
  Description of Artificial Sequence: Synthetic oligonucleotide
ucaugagaauaugucauca

SEQ ID NO: 2116347 - RNA, 19 nt, Artificial Sequence
  Description of Artificial Sequence: Synthetic oligonucleotide
uccgcuguagcugagagaa

SEQ ID NO: 2116348 - RNA, 19 nt, Artificial Sequence
  Description of Artificial Sequence: Synthetic oligonucleotide
ucuaggugugcaaggagac

SEQ ID NO: 2116349 - RNA, 19 nt, Artificial Sequence
  Description of Artificial Sequence: Synthetic oligonucleotide
aacuccaugagagguuggg

SEQ ID NO: 2116350 - RNA, 19 nt, Artificial Sequence
  Description of Artificial Sequence: Synthetic oligonucleotide
aacucuuguccaugguaag

SEQ ID NO: 2116351 - RNA, 19 nt, Artificial Sequence
  Description of Artificial Sequence: Synthetic oligonucleotide
ugaggggaaggccauaguc

SEQ ID NO: 2116352 - RNA, 19 nt, Artificial Sequence
  Description of Artificial Sequence: Synthetic oligonucleotide
auauggaaucgggucaccc

SEQ ID NO: 2116353 - RNA, 19 nt, Artificial Sequence
  Description of Artificial Sequence: Synthetic oligonucleotide
ucugaucaaacuccucgcu

SEQ ID NO: 2116354 - RNA, 19 nt, Artificial Sequence
  Description of Artificial Sequence: Synthetic oligonucleotide
uaggugugcaaggagacug

SEQ ID NO: 2116355 - RNA, 19 nt, Artificial Sequence
  Description of Artificial Sequence: Synthetic oligonucleotide
caguugauauggaaucggg

SEQ ID NO: 2116356 - RNA, 19 nt, Artificial Sequence
  Description of Artificial Sequence: Synthetic oligonucleotide
uccaggucgucagacaggg

SEQ ID NO: 2116357 - RNA, 19 nt, Artificial Sequence
  Description of Artificial Sequence: Synthetic oligonucleotide
uagcucaugagaauauguc

SEQ ID NO: 2116358 - RNA, 19 nt, Artificial Sequence
  Description of Artificial Sequence: Synthetic oligonucleotide
aguccauggaguucuccgg

SEQ ID NO: 2116359 - RNA, 19 nt, Artificial Sequence
  Description of Artificial Sequence: Synthetic oligonucleotide
aaacuccucgcucucggcu

SEQ ID NO: 2116360 - RNA, 19 nt, Artificial Sequence
  Description of Artificial Sequence: Synthetic oligonucleotide
aagugcaggugaugagaac

SEQ ID NO: 2116361 - RNA, 19 nt, Artificial Sequence
  Description of Artificial Sequence: Synthetic oligonucleotide
cacacugcacucacaauag

SEQ ID NO: 2116362 - RNA, 19 nt, Artificial Sequence
  Description of Artificial Sequence: Synthetic oligonucleotide
gaugaccaagcaugugagg

SEQ ID NO: 2116363 - RNA, 19 nt, Artificial Sequence
  Description of Artificial Sequence: Synthetic oligonucleotide
uaagugcaggugaugagaa

SEQ ID NO: 2116364 - RNA, 19 nt, Artificial Sequence
  Description of Artificial Sequence: Synthetic oligonucleotide
uuuugaugggagugcaacu

SEQ ID NO: 2116365 - RNA, 19 nt, Artificial Sequence
  Description of Artificial Sequence: Synthetic oligonucleotide
ugggagugcaacugagggg

SEQ ID NO: 2116366 - RNA, 19 nt, Artificial Sequence
  Description of Artificial Sequence: Synthetic oligonucleotide
agcuagaggcccucaaauc

SEQ ID NO: 2116367 - RNA, 19 nt, Artificial Sequence
  Description of Artificial Sequence: Synthetic oligonucleotide
aucucgaaccggaaggggc

SEQ ID NO: 2116368 - RNA, 19 nt, Artificial Sequence
  Description of Artificial Sequence: Synthetic oligonucleotide
cuuuugaugggagugcaac

SEQ ID NO: 2116369 - RNA, 19 nt, Artificial Sequence
  Description of Artificial Sequence: Synthetic oligonucleotide
uugagaugaccaagcaugu

SEQ ID NO: 2116370 - RNA, 19 nt, Artificial Sequence
  Description of Artificial Sequence: Synthetic oligonucleotide
ugaucucgaaccggaaggg

SEQ ID NO: 2116371 - RNA, 19 nt, Artificial Sequence
  Description of Artificial Sequence: Synthetic oligonucleotide
uauccuggaguauugggua

SEQ ID NO: 2116372 - RNA, 19 nt, Artificial Sequence
  Description of Artificial Sequence: Synthetic oligonucleotide
auccuugagaugaccaagc

SEQ ID NO: 2116373 - RNA, 19 nt, Artificial Sequence
  Description of Artificial Sequence: Synthetic oligonucleotide
agugcaacugaggggaagg

SEQ ID NO: 2116374 - RNA, 19 nt, Artificial Sequence
  Description of Artificial Sequence: Synthetic oligonucleotide
ucuuguccaugguaagugc

SEQ ID NO: 2116375 - RNA, 19 nt, Artificial Sequence
  Description of Artificial Sequence: Synthetic oligonucleotide
gaagcucuggauuugggua

SEQ ID NO: 2116376 - RNA, 19 nt, Artificial Sequence
  Description of Artificial Sequence: Synthetic oligonucleotide
aaccaaccaaaacuuuuaa

SEQ ID NO: 2116377 - RNA, 19 nt, Artificial Sequence
  Description of Artificial Sequence: Synthetic oligonucleotide
gacagccacguucagcacc

SEQ ID NO: 2116378 - RNA, 19 nt, Artificial Sequence
  Description of Artificial Sequence: Synthetic oligonucleotide
uuaaaccaaccaaaacuuu

SEQ ID NO: 2116379 - RNA, 19 nt, Artificial Sequence
  Description of Artificial Sequence: Synthetic oligonucleotide
gcuagaggcccucaaaucc

SEQ ID NO: 2116380 - RNA, 19 nt, Artificial Sequence
  Description of Artificial Sequence: Synthetic oligonucleotide
auaacuccaugagagguug

SEQ ID NO: 2116381 - RNA, 19 nt, Artificial Sequence
  Description of Artificial Sequence: Synthetic oligonucleotide
ugguaagugcaggugauga

SEQ ID NO: 2116382 - RNA, 19 nt, Artificial Sequence
  Description of Artificial Sequence: Synthetic oligonucleotide
cuuagaagccaagauguuc

SEQ ID NO: 2116383 - RNA, 19 nt, Artificial Sequence
  Description of Artificial Sequence: Synthetic oligonucleotide
ugaccaagcaugugagggc

SEQ ID NO: 2116384 - RNA, 19 nt, Artificial Sequence
  Description of Artificial Sequence: Synthetic oligonucleotide
uugaugggagugcaacuga

SEQ ID NO: 2116385 - RNA, 19 nt, Artificial Sequence
  Description of Artificial Sequence: Synthetic oligonucleotide
ucaaagcaaaccugauaac

SEQ ID NO: 2116386 - RNA, 19 nt, Artificial Sequence
  Description of Artificial Sequence: Synthetic oligonucleotide
acggaugaacucuugucca

SEQ ID NO: 2116387 - RNA, 19 nt, Artificial Sequence
  Description of Artificial Sequence: Synthetic oligonucleotide
ucucgaaccggaaggggcu

SEQ ID NO: 2116388 - RNA, 19 nt, Artificial Sequence
  Description of Artificial Sequence: Synthetic oligonucleotide
ucuggauuuggguacucau

SEQ ID NO: 2116389 - RNA, 19 nt, Artificial Sequence
  Description of Artificial Sequence: Synthetic oligonucleotide
cucacaauagcauccaugu

SEQ ID NO: 2116390 - RNA, 19 nt, Artificial Sequence
  Description of Artificial Sequence: Synthetic oligonucleotide
uagcccacacggaugaacu

SEQ ID NO: 2116391 - RNA, 19 nt, Artificial Sequence
  Description of Artificial Sequence: Synthetic oligonucleotide
acugcauucgaagcugauc

SEQ ID NO: 2116392 - RNA, 19 nt, Artificial Sequence
  Description of Artificial Sequence: Synthetic oligonucleotide
acguucagcaccgacaccu

SEQ ID NO: 2116393 - RNA, 19 nt, Artificial Sequence
  Description of Artificial Sequence: Synthetic oligonucleotide
cucggguucuccaggacag

SEQ ID NO: 2116394 - RNA, 19 nt, Artificial Sequence
  Description of Artificial Sequence: Synthetic oligonucleotide
gauguuccgcuguagcuga

SEQ ID NO: 2116395 - RNA, 19 nt, Artificial Sequence
  Description of Artificial Sequence: Synthetic oligonucleotide
agaagccaagauguuccgc

SEQ ID NO: 2116396 - RNA, 19 nt, Artificial Sequence
  Description of Artificial Sequence: Synthetic oligonucleotide
uccuugagaugaccaagca

SEQ ID NO: 2116397 - RNA, 19 nt, Artificial Sequence
  Description of Artificial Sequence: Synthetic oligonucleotide
auaaaagcauuuucauaua

SEQ ID NO: 2116398 - RNA, 19 nt, Artificial Sequence
  Description of Artificial Sequence: Synthetic oligonucleotide
ucaucaaagcaaaccugau

SEQ ID NO: 2116399 - RNA, 19 nt, Artificial Sequence
  Description of Artificial Sequence: Synthetic oligonucleotide
gaagccaagauguuccgcu

SEQ ID NO: 2116400 - RNA, 19 nt, Artificial Sequence
  Description of Artificial Sequence: Synthetic oligonucleotide
agaugaccaagcaugugag

SEQ ID NO: 2116401 - RNA, 19 nt, Artificial Sequence
  Description of Artificial Sequence: Synthetic oligonucleotide
auuuggguacucauuguug

SEQ ID NO: 2116402 - RNA, 19 nt, Artificial Sequence
  Description of Artificial Sequence: Synthetic oligonucleotide
ugauauggaaucgggucac

SEQ ID NO: 2116403 - RNA, 19 nt, Artificial Sequence
  Description of Artificial Sequence: Synthetic oligonucleotide
aaagggcucggguucucca

SEQ ID NO: 2116404 - RNA, 19 nt, Artificial Sequence
  Description of Artificial Sequence: Synthetic oligonucleotide
acucauuguugacauagua

SEQ ID NO: 2116405 - RNA, 19 nt, Artificial Sequence
  Description of Artificial Sequence: Synthetic oligonucleotide
gccaaaugccuccuuaucc

SEQ ID NO: 2116406 - RNA, 19 nt, Artificial Sequence
  Description of Artificial Sequence: Synthetic oligonucleotide
aaccggaaggggcugugga

SEQ ID NO: 2116407 - RNA, 19 nt, Artificial Sequence
  Description of Artificial Sequence: Synthetic oligonucleotide
uggaaucgggucacccggg

SEQ ID NO: 2116408 - RNA, 19 nt, Artificial Sequence
  Description of Artificial Sequence: Synthetic oligonucleotide
guauuggguagcucaugag

SEQ ID NO: 2116409 - RNA, 19 nt, Artificial Sequence
  Description of Artificial Sequence: Synthetic oligonucleotide
gucggucucaggaaugagg

SEQ ID NO: 2116410 - RNA, 19 nt, Artificial Sequence
  Description of Artificial Sequence: Synthetic oligonucleotide
agacgaacaugugccuucc

SEQ ID NO: 2116411 - RNA, 19 nt, Artificial Sequence
  Description of Artificial Sequence: Synthetic oligonucleotide
cccacauaaaugaucuucc

SEQ ID NO: 2116412 - RNA, 19 nt, Artificial Sequence
  Description of Artificial Sequence: Synthetic oligonucleotide
uuccuuggggcugacaggu

SEQ ID NO: 2116413 - RNA, 19 nt, Artificial Sequence
  Description of Artificial Sequence: Synthetic oligonucleotide
uccaugagagguugggguc

SEQ ID NO: 2116414 - RNA, 19 nt, Artificial Sequence
  Description of Artificial Sequence: Synthetic oligonucleotide
ucucccgaagcucuggauu

SEQ ID NO: 2116415 - RNA, 19 nt, Artificial Sequence
  Description of Artificial Sequence: Synthetic oligonucleotide
cucuuguccaugguaagug

SEQ ID NO: 2116416 - RNA, 19 nt, Artificial Sequence
  Description of Artificial Sequence: Synthetic oligonucleotide
ccaaccaaaacuuuuaaua

SEQ ID NO: 2116417 - RNA, 19 nt, Artificial Sequence
  Description of Artificial Sequence: Synthetic oligonucleotide
acucacaauagcauccaug

SEQ ID NO: 2116418 - RNA, 19 nt, Artificial Sequence
  Description of Artificial Sequence: Synthetic oligonucleotide
guuccgcuguagcugagag

SEQ ID NO: 2116419 - RNA, 19 nt, Artificial Sequence
  Description of Artificial Sequence: Synthetic oligonucleotide
ugucccaguugauauggaa

SEQ ID NO: 2116420 - RNA, 19 nt, Artificial Sequence
  Description of Artificial Sequence: Synthetic oligonucleotide
gaucucgaaccggaagggg

SEQ ID NO: 2116421 - RNA, 19 nt, Artificial Sequence
  Description of Artificial Sequence: Synthetic oligonucleotide
cugaucaaacuccucgcuc

SEQ ID NO: 2116422 - RNA, 19 nt, Artificial Sequence
  Description of Artificial Sequence: Synthetic oligonucleotide
guaagugcaggugaugaga

SEQ ID NO: 2116423 - RNA, 19 nt, Artificial Sequence
  Description of Artificial Sequence: Synthetic oligonucleotide
uaacuccaugagagguugg

SEQ ID NO: 2116424 - RNA, 19 nt, Artificial Sequence
  Description of Artificial Sequence: Synthetic oligonucleotide
gaugaagugcuuuuauuuu

SEQ ID NO: 2116425 - RNA, 19 nt, Artificial Sequence
  Description of Artificial Sequence: Synthetic oligonucleotide
cucuaggugugcaaggaga

SEQ ID NO: 2116426 - RNA, 19 nt, Artificial Sequence
  Description of Artificial Sequence: Synthetic oligonucleotide
aaagacgaacaugugccuu

SEQ ID NO: 2116427 - RNA, 19 nt, Artificial Sequence
  Description of Artificial Sequence: Synthetic oligonucleotide
uacucauuguugacauagu

SEQ ID NO: 2116428 - RNA, 19 nt, Artificial Sequence
  Description of Artificial Sequence: Synthetic oligonucleotide
ggguccauauuuuccuugg

SEQ ID NO: 2116429 - RNA, 19 nt, Artificial Sequence
  Description of Artificial Sequence: Synthetic oligonucleotide
gggcuuagaagccaagaug

SEQ ID NO: 2116430 - RNA, 19 nt, Artificial Sequence
  Description of Artificial Sequence: Synthetic oligonucleotide
acagccacguucagcaccg

SEQ ID NO: 2116431 - RNA, 19 nt, Artificial Sequence
  Description of Artificial Sequence: Synthetic oligonucleotide
agugacacccacggcgucg

SEQ ID NO: 2116432 - RNA, 19 nt, Artificial Sequence
  Description of Artificial Sequence: Synthetic oligonucleotide
auguagcagcagcaagggg

SEQ ID NO: 2116433 - RNA, 19 nt, Artificial Sequence
  Description of Artificial Sequence: Synthetic oligonucleotide
ugagagaagucuggcuuug

SEQ ID NO: 2116434 - RNA, 19 nt, Artificial Sequence
  Description of Artificial Sequence: Synthetic oligonucleotide
aaccacagugacacccacg

SEQ ID NO: 2116435 - RNA, 19 nt, Artificial Sequence
  Description of Artificial Sequence: Synthetic oligonucleotide
aguugauauggaaucgggu

SEQ ID NO: 2116436 - RNA, 19 nt, Artificial Sequence
  Description of Artificial Sequence: Synthetic oligonucleotide
auaguccggguuggggucc

SEQ ID NO: 2116437 - RNA, 19 nt, Artificial Sequence
  Description of Artificial Sequence: Synthetic oligonucleotide
uuggguacucauuguugac

SEQ ID NO: 2116438 - RNA, 19 nt, Artificial Sequence
  Description of Artificial Sequence: Synthetic oligonucleotide
agacuggccaugguccuac

SEQ ID NO: 2116439 - RNA, 19 nt, Artificial Sequence
  Description of Artificial Sequence: Synthetic oligonucleotide
cugcauucgaagcugaucu

SEQ ID NO: 2116440 - RNA, 19 nt, Artificial Sequence
  Description of Artificial Sequence: Synthetic oligonucleotide
cugcacucacaauagcauc

SEQ ID NO: 2116441 - RNA, 19 nt, Artificial Sequence
  Description of Artificial Sequence: Synthetic oligonucleotide
gaugagaaccacagugaca

SEQ ID NO: 2116442 - RNA, 19 nt, Artificial Sequence
  Description of Artificial Sequence: Synthetic oligonucleotide
guggaaagggcucggguuc

SEQ ID NO: 2116443 - RNA, 19 nt, Artificial Sequence
  Description of Artificial Sequence: Synthetic oligonucleotide
acuccaugagagguugggg

SEQ ID NO: 2116444 - RNA, 19 nt, Artificial Sequence
  Description of Artificial Sequence: Synthetic oligonucleotide
cagggcuuagggguaaggg

SEQ ID NO: 2116445 - RNA, 19 nt, Artificial Sequence
  Description of Artificial Sequence: Synthetic oligonucleotide
acacccacggcgucggucu

SEQ ID NO: 2116446 - RNA, 19 nt, Artificial Sequence
  Description of Artificial Sequence: Synthetic oligonucleotide
gguaagugcaggugaugag

SEQ ID NO: 2116447 - RNA, 19 nt, Artificial Sequence
  Description of Artificial Sequence: Synthetic oligonucleotide
ucacugcauucgaagcuga

SEQ ID NO: 2116448 - RNA, 19 nt, Artificial Sequence
  Description of Artificial Sequence: Synthetic oligonucleotide
cauaguccggguugggguc

SEQ ID NO: 2116449 - RNA, 19 nt, Artificial Sequence
  Description of Artificial Sequence: Synthetic oligonucleotide
uggguagcucaugagaaua

SEQ ID NO: 2116450 - RNA, 19 nt, Artificial Sequence
  Description of Artificial Sequence: Synthetic oligonucleotide
gugaugagaaccacaguga

SEQ ID NO: 2116451 - RNA, 19 nt, Artificial Sequence
  Description of Artificial Sequence: Synthetic oligonucleotide
cucaaauccuugagaugac

SEQ ID NO: 2116452 - RNA, 19 nt, Artificial Sequence
  Description of Artificial Sequence: Synthetic oligonucleotide
agcaugugagggccuguag

SEQ ID NO: 2116453 - RNA, 19 nt, Artificial Sequence
  Description of Artificial Sequence: Synthetic oligonucleotide
ugagaugaccaagcaugug

SEQ ID NO: 2116454 - RNA, 19 nt, Artificial Sequence
  Description of Artificial Sequence: Synthetic oligonucleotide
auaguagcccacacggaug

SEQ ID NO: 2116455 - RNA, 19 nt, Artificial Sequence
  Description of Artificial Sequence: Synthetic oligonucleotide
cauccauguagcagcagca

SEQ ID NO: 2116456 - RNA, 19 nt, Artificial Sequence
  Description of Artificial Sequence: Synthetic oligonucleotide
agccacguucagcaccgac

SEQ ID NO: 2116457 - RNA, 19 nt, Artificial Sequence
  Description of Artificial Sequence: Synthetic oligonucleotide
caaagcaaaccugauaacu

SEQ ID NO: 2116458 - RNA, 19 nt, Artificial Sequence
  Description of Artificial Sequence: Synthetic oligonucleotide
gaaucgggucacccggggc

SEQ ID NO: 2116459 - RNA, 19 nt, Artificial Sequence
  Description of Artificial Sequence: Synthetic oligonucleotide
ccucaaauccuugagauga

SEQ ID NO: 2116460 - RNA, 19 nt, Artificial Sequence
  Description of Artificial Sequence: Synthetic oligonucleotide
agccugucugaguuguugu

SEQ ID NO: 2116461 - RNA, 19 nt, Artificial Sequence
  Description of Artificial Sequence: Synthetic oligonucleotide
aguucuccgggaggaggcc

SEQ ID NO: 2116462 - RNA, 19 nt, Artificial Sequence
  Description of Artificial Sequence: Synthetic oligonucleotide
gagguugggguccauauuu

SEQ ID NO: 2116463 - RNA, 19 nt, Artificial Sequence
  Description of Artificial Sequence: Synthetic oligonucleotide
gauuuggguacucauuguu

SEQ ID NO: 2116464 - RNA, 19 nt, Artificial Sequence
  Description of Artificial Sequence: Synthetic oligonucleotide
uccccucuaggugugcaag

SEQ ID NO: 2116465 - RNA, 19 nt, Artificial Sequence
  Description of Artificial Sequence: Synthetic oligonucleotide
agcaccgagucuaggaucu

SEQ ID NO: 2116466 - RNA, 19 nt, Artificial Sequence
  Description of Artificial Sequence: Synthetic oligonucleotide
ggaaugagggauggauugg

SEQ ID NO: 2116467 - RNA, 19 nt, Artificial Sequence
  Description of Artificial Sequence: Synthetic oligonucleotide
uccagccugucugaguugu

SEQ ID NO: 2116468 - RNA, 19 nt, Artificial Sequence
  Description of Artificial Sequence: Synthetic oligonucleotide
gggagugcaacugagggga

SEQ ID NO: 2116469 - RNA, 19 nt, Artificial Sequence
  Description of Artificial Sequence: Synthetic oligonucleotide
gucacccggggcuuagaag

SEQ ID NO: 2116470 - RNA, 19 nt, Artificial Sequence
  Description of Artificial Sequence: Synthetic oligonucleotide
cauucgaagcugaucucga

SEQ ID NO: 2116471 - RNA, 19 nt, Artificial Sequence
  Description of Artificial Sequence: Synthetic oligonucleotide
caaacuccucgcucucggc

SEQ ID NO: 2116472 - RNA, 19 nt, Artificial Sequence
  Description of Artificial Sequence: Synthetic oligonucleotide
acucuuguccaugguaagu

SEQ ID NO: 2116473 - RNA, 19 nt, Artificial Sequence
  Description of Artificial Sequence: Synthetic oligonucleotide
cucgcucucggcugagccc

SEQ ID NO: 2116474 - RNA, 19 nt, Artificial Sequence
  Description of Artificial Sequence: Synthetic oligonucleotide
gaaagacgaacaugugccu

SEQ ID NO: 2116475 - RNA, 19 nt, Artificial Sequence
  Description of Artificial Sequence: Synthetic oligonucleotide
gauauggaaucgggucacc

SEQ ID NO: 2116476 - RNA, 19 nt, Artificial Sequence
  Description of Artificial Sequence: Synthetic oligonucleotide
gaggcccucaaauccuuga

SEQ ID NO: 2116477 - RNA, 19 nt, Artificial Sequence
  Description of Artificial Sequence: Synthetic oligonucleotide
ugcauucgaagcugaucuc

SEQ ID NO: 2116478 - RNA, 19 nt, Artificial Sequence
  Description of Artificial Sequence: Synthetic oligonucleotide
gaguauuggguagcucaug

SEQ ID NO: 2116479 - RNA, 19 nt, Artificial Sequence
  Description of Artificial Sequence: Synthetic oligonucleotide
cucggcugagcccacauaa

SEQ ID NO: 2116480 - RNA, 19 nt, Artificial Sequence
  Description of Artificial Sequence: Synthetic oligonucleotide
ugucugaguuguuguccca

SEQ ID NO: 2116481 - RNA, 19 nt, Artificial Sequence
  Description of Artificial Sequence: Synthetic oligonucleotide
cuuggggcugacaggucug

SEQ ID NO: 2116482 - RNA, 19 nt, Artificial Sequence
  Description of Artificial Sequence: Synthetic oligonucleotide
ugagaaccacagugacacc

SEQ ID NO: 2116483 - RNA, 19 nt, Artificial Sequence
  Description of Artificial Sequence: Synthetic oligonucleotide
auucgaagcugaucucgaa

SEQ ID NO: 2116484 - RNA, 19 nt, Artificial Sequence
  Description of Artificial Sequence: Synthetic oligonucleotide
ggccucacugcauucgaag

SEQ ID NO: 2116485 - RNA, 19 nt, Artificial Sequence
  Description of Artificial Sequence: Synthetic oligonucleotide
augugagggccuguagguc

SEQ ID NO: 2116486 - RNA, 19 nt, Artificial Sequence
  Description of Artificial Sequence: Synthetic oligonucleotide
agcaaaccugauaacucca

SEQ ID NO: 2116487 - RNA, 19 nt, Artificial Sequence
  Description of Artificial Sequence: Synthetic oligonucleotide
ggcuuagaagccaagaugu

SEQ ID NO: 2116488 - RNA, 19 nt, Artificial Sequence
  Description of Artificial Sequence: Synthetic oligonucleotide
caucaaagcaaaccugaua

SEQ ID NO: 2116489 - RNA, 19 nt, Artificial Sequence
  Description of Artificial Sequence: Synthetic oligonucleotide
gagugcaacugaggggaag

SEQ ID NO: 2116490 - RNA, 19 nt, Artificial Sequence
  Description of Artificial Sequence: Synthetic oligonucleotide
aggaucugaucaaacuccu

SEQ ID NO: 2116491 - RNA, 19 nt, Artificial Sequence
  Description of Artificial Sequence: Synthetic oligonucleotide
agcagggacagggcccacc

SEQ ID NO: 2116492 - RNA, 19 nt, Artificial Sequence
  Description of Artificial Sequence: Synthetic oligonucleotide
ccaguugauauggaaucgg

SEQ ID NO: 2116493 - RNA, 19 nt, Artificial Sequence
  Description of Artificial Sequence: Synthetic oligonucleotide
cauaguagcccacacggau

SEQ ID NO: 2116494 - RNA, 19 nt, Artificial Sequence
  Description of Artificial Sequence: Synthetic oligonucleotide
gaaagggcucggguucucc

SEQ ID NO: 2116495 - RNA, 19 nt, Artificial Sequence
  Description of Artificial Sequence: Synthetic oligonucleotide
cacggcgucggucucagga

SEQ ID NO: 2116496 - RNA, 19 nt, Artificial Sequence
  Description of Artificial Sequence: Synthetic oligonucleotide
uuccgcuguagcugagaga

SEQ ID NO: 2116497 - RNA, 19 nt, Artificial Sequence
  Description of Artificial Sequence: Synthetic oligonucleotide
aggugugcaaggagacugg

SEQ ID NO: 2116498 - RNA, 19 nt, Artificial Sequence
  Description of Artificial Sequence: Synthetic oligonucleotide
agaaccacagugacaccca

SEQ ID NO: 2116499 - RNA, 19 nt, Artificial Sequence
  Description of Artificial Sequence: Synthetic oligonucleotide
uacugggaccagccuggcc

SEQ ID NO: 2116500 - RNA, 19 nt, Artificial Sequence
  Description of Artificial Sequence: Synthetic oligonucleotide
ucggcugagcccacauaaa

SEQ ID NO: 2116501 - RNA, 19 nt, Artificial Sequence
  Description of Artificial Sequence: Synthetic oligonucleotide
ggaaucgggucacccgggg

SEQ ID NO: 2116502 - RNA, 19 nt, Artificial Sequence
  Description of Artificial Sequence: Synthetic oligonucleotide
cagcuagggaggcccaggc

SEQ ID NO: 2116503 - RNA, 19 nt, Artificial Sequence
  Description of Artificial Sequence: Synthetic oligonucleotide
gucuaggaucugaucaaac

SEQ ID NO: 2116504 - RNA, 19 nt, Artificial Sequence
  Description of Artificial Sequence: Synthetic oligonucleotide
cgagucuaggaucugauca

SEQ ID NO: 2116505 - RNA, 19 nt, Artificial Sequence
  Description of Artificial Sequence: Synthetic oligonucleotide
guagcucaugagaauaugu

SEQ ID NO: 2116506 - RNA, 19 nt, Artificial Sequence
  Description of Artificial Sequence: Synthetic oligonucleotide
gguagcucaugagaauaug

SEQ ID NO: 2116507 - RNA, 19 nt, Artificial Sequence
  Description of Artificial Sequence: Synthetic oligonucleotide
gccucacugcauucgaagc

SEQ ID NO: 2116508 - RNA, 19 nt, Artificial Sequence
  Description of Artificial Sequence: Synthetic oligonucleotide
agagguugggguccauauu

SEQ ID NO: 2116509 - RNA, 19 nt, Artificial Sequence
  Description of Artificial Sequence: Synthetic oligonucleotide
augguaagugcaggugaug

SEQ ID NO: 2116510 - RNA, 19 nt, Artificial Sequence
  Description of Artificial Sequence: Synthetic oligonucleotide
gugacacccacggcgucgg

SEQ ID NO: 2116511 - RNA, 19 nt, Artificial Sequence
  Description of Artificial Sequence: Synthetic oligonucleotide
caugguccuacugggacca

SEQ ID NO: 2116512 - RNA, 19 nt, Artificial Sequence
  Description of Artificial Sequence: Synthetic oligonucleotide
cugggaccagccuggcccc

SEQ ID NO: 2116513 - RNA, 19 nt, Artificial Sequence
  Description of Artificial Sequence: Synthetic oligonucleotide
uagaggcccucaaauccuu

SEQ ID NO: 2116514 - RNA, 19 nt, Artificial Sequence
  Description of Artificial Sequence: Synthetic oligonucleotide
ugguccuacugggaccagc

SEQ ID NO: 2116515 - RNA, 19 nt, Artificial Sequence
  Description of Artificial Sequence: Synthetic oligonucleotide
uuccagccugucugaguug

SEQ ID NO: 2116516 - RNA, 19 nt, Artificial Sequence
  Description of Artificial Sequence: Synthetic oligonucleotide
ggcugagcccacauaaaug

SEQ ID NO: 2116517 - RNA, 19 nt, Artificial Sequence
  Description of Artificial Sequence: Synthetic oligonucleotide
cagccugucugaguuguug

SEQ ID NO: 2116518 - RNA, 19 nt, Artificial Sequence
  Description of Artificial Sequence: Synthetic oligonucleotide
cuagaggcccucaaauccu

SEQ ID NO: 2116519 - RNA, 19 nt, Artificial Sequence
  Description of Artificial Sequence: Synthetic oligonucleotide
gccugaaagacgaacaugu

SEQ ID NO: 2116520 - RNA, 19 nt, Artificial Sequence
  Description of Artificial Sequence: Synthetic oligonucleotide
ggaugaacucuuguccaug

SEQ ID NO: 2116521 - RNA, 19 nt, Artificial Sequence
  Description of Artificial Sequence: Synthetic oligonucleotide
ggacccagggcuuaggggu

SEQ ID NO: 2116522 - RNA, 19 nt, Artificial Sequence
  Description of Artificial Sequence: Synthetic oligonucleotide
cacccggggcuuagaagcc

SEQ ID NO: 2116523 - RNA, 19 nt, Artificial Sequence
  Description of Artificial Sequence: Synthetic oligonucleotide
accgacaccuuggccauca

SEQ ID NO: 2116524 - RNA, 19 nt, Artificial Sequence
  Description of Artificial Sequence: Synthetic oligonucleotide
cccaguugauauggaaucg

SEQ ID NO: 2116525 - RNA, 19 nt, Artificial Sequence
  Description of Artificial Sequence: Synthetic oligonucleotide
gcaaggagacuggccaugg

SEQ ID NO: 2116526 - RNA, 19 nt, Artificial Sequence
  Description of Artificial Sequence: Synthetic oligonucleotide
acauaguagcccacacgga

SEQ ID NO: 2116527 - RNA, 19 nt, Artificial Sequence
  Description of Artificial Sequence: Synthetic oligonucleotide
ccugaaagacgaacaugug

SEQ ID NO: 2116528 - RNA, 19 nt, Artificial Sequence
  Description of Artificial Sequence: Synthetic oligonucleotide
gccaucaccucgccagggg

SEQ ID NO: 2116529 - RNA, 19 nt, Artificial Sequence
  Description of Artificial Sequence: Synthetic oligonucleotide
auccauguagcagcagcaa

SEQ ID NO: 2116530 - RNA, 19 nt, Artificial Sequence
  Description of Artificial Sequence: Synthetic oligonucleotide
ggguggguucucccgaagc

SEQ ID NO: 2116531 - RNA, 19 nt, Artificial Sequence
  Description of Artificial Sequence: Synthetic oligonucleotide
ugagagguugggguccaua

SEQ ID NO: 2116532 - RNA, 19 nt, Artificial Sequence
  Description of Artificial Sequence: Synthetic oligonucleotide
acggcgucggucucaggaa

SEQ ID NO: 2116533 - RNA, 19 nt, Artificial Sequence
  Description of Artificial Sequence: Synthetic oligonucleotide
ggcuuagggguaaggguag

SEQ ID NO: 2116534 - RNA, 19 nt, Artificial Sequence
  Description of Artificial Sequence: Synthetic oligonucleotide
ugggguccugguucucugu

SEQ ID NO: 2116535 - RNA, 19 nt, Artificial Sequence
  Description of Artificial Sequence: Synthetic oligonucleotide
cgaagcugaucucgaaccg

SEQ ID NO: 2116536 - RNA, 19 nt, Artificial Sequence
  Description of Artificial Sequence: Synthetic oligonucleotide
ggucuggaggcagcuagag

SEQ ID NO: 2116537 - RNA, 19 nt, Artificial Sequence
  Description of Artificial Sequence: Synthetic oligonucleotide
cuguagguccccucuaggu

SEQ ID NO: 2116538 - RNA, 19 nt, Artificial Sequence
  Description of Artificial Sequence: Synthetic oligonucleotide
ucucggcugagcccacaua

SEQ ID NO: 2116539 - RNA, 19 nt, Artificial Sequence
  Description of Artificial Sequence: Synthetic oligonucleotide
ucccgaagcucuggauuug

SEQ ID NO: 2116540 - RNA, 19 nt, Artificial Sequence
  Description of Artificial Sequence: Synthetic oligonucleotide
gcugagagaagucuggcuu

SEQ ID NO: 2116541 - RNA, 19 nt, Artificial Sequence
  Description of Artificial Sequence: Synthetic oligonucleotide
ccuuauccuggaguauugg

SEQ ID NO: 2116542 - RNA, 19 nt, Artificial Sequence
  Description of Artificial Sequence: Synthetic oligonucleotide
caugguaagugcaggugau

SEQ ID NO: 2116543 - RNA, 19 nt, Artificial Sequence
  Description of Artificial Sequence: Synthetic oligonucleotide
guggguucucccgaagcuc

SEQ ID NO: 2116544 - RNA, 19 nt, Artificial Sequence
  Description of Artificial Sequence: Synthetic oligonucleotide
ucgucagacagggccucac

SEQ ID NO: 2116545 - RNA, 19 nt, Artificial Sequence
  Description of Artificial Sequence: Synthetic oligonucleotide
cacguucagcaccgacacc

SEQ ID NO: 2116546 - RNA, 19 nt, Artificial Sequence
  Description of Artificial Sequence: Synthetic oligonucleotide
agcucuggauuuggguacu

SEQ ID NO: 2116547 - RNA, 19 nt, Artificial Sequence
  Description of Artificial Sequence: Synthetic oligonucleotide
ggcccucaaauccuugaga

SEQ ID NO: 2116548 - RNA, 19 nt, Artificial Sequence
  Description of Artificial Sequence: Synthetic oligonucleotide
cucaggucagccugccaaa

SEQ ID NO: 2116549 - RNA, 19 nt, Artificial Sequence
  Description of Artificial Sequence: Synthetic oligonucleotide
accgagucuaggaucugau

SEQ ID NO: 2116550 - RNA, 19 nt, Artificial Sequence
  Description of Artificial Sequence: Synthetic oligonucleotide
cccucaaauccuugagaug

SEQ ID NO: 2116551 - RNA, 19 nt, Artificial Sequence
  Description of Artificial Sequence: Synthetic oligonucleotide
ggugggaguuucucagguc

SEQ ID NO: 2116552 - RNA, 19 nt, Artificial Sequence
  Description of Artificial Sequence: Synthetic oligonucleotide
auuuuccuuggggcugaca

SEQ ID NO: 2116553 - RNA, 19 nt, Artificial Sequence
  Description of Artificial Sequence: Synthetic oligonucleotide
gggaguuucucaggucagc

SEQ ID NO: 2116554 - RNA, 19 nt, Artificial Sequence
  Description of Artificial Sequence: Synthetic oligonucleotide
ggguacucauuguugacau

SEQ ID NO: 2116555 - RNA, 19 nt, Artificial Sequence
  Description of Artificial Sequence: Synthetic oligonucleotide
ucgaaccggaaggggcugu

SEQ ID NO: 2116556 - RNA, 19 nt, Artificial Sequence
  Description of Artificial Sequence: Synthetic oligonucleotide
ccaaaugccuccuuauccu

SEQ ID NO: 2116557 - RNA, 19 nt, Artificial Sequence
  Description of Artificial Sequence: Synthetic oligonucleotide
gcuguggaaagggcucggg

SEQ ID NO: 2116558 - RNA, 19 nt, Artificial Sequence
  Description of Artificial Sequence: Synthetic oligonucleotide
gggcuuagggguaagggua

SEQ ID NO: 2116559 - RNA, 19 nt, Artificial Sequence
  Description of Artificial Sequence: Synthetic oligonucleotide
cuggauuuggguacucauu

SEQ ID NO: 2116560 - RNA, 19 nt, Artificial Sequence
  Description of Artificial Sequence: Synthetic oligonucleotide
ccccucuaggugugcaagg

SEQ ID NO: 2116561 - RNA, 19 nt, Artificial Sequence
  Description of Artificial Sequence: Synthetic oligonucleotide
gggcaucagccugaaagac

SEQ ID NO: 2116562 - RNA, 19 nt, Artificial Sequence
  Description of Artificial Sequence: Synthetic oligonucleotide
agaggcccucaaauccuug

SEQ ID NO: 2116563 - RNA, 19 nt, Artificial Sequence
  Description of Artificial Sequence: Synthetic oligonucleotide
gccacguucagcaccgaca

SEQ ID NO: 2116564 - RNA, 19 nt, Artificial Sequence
  Description of Artificial Sequence: Synthetic oligonucleotide
ccauauuuuccuuggggcu

SEQ ID NO: 2116565 - RNA, 19 nt, Artificial Sequence
  Description of Artificial Sequence: Synthetic oligonucleotide
gguggguucucccgaagcu

SEQ ID NO: 2116566 - RNA, 19 nt, Artificial Sequence
  Description of Artificial Sequence: Synthetic oligonucleotide
cucgaaccggaaggggcug

SEQ ID NO: 2116567 - RNA, 19 nt, Artificial Sequence
  Description of Artificial Sequence: Synthetic oligonucleotide
cuggaguauuggguagcuc

SEQ ID NO: 2116568 - RNA, 19 nt, Artificial Sequence
  Description of Artificial Sequence: Synthetic oligonucleotide
aggggacccagggcuuagg

SEQ ID NO: 2116569 - RNA, 19 nt, Artificial Sequence
  Description of Artificial Sequence: Synthetic oligonucleotide
caggaaugagggauggauu

SEQ ID NO: 2116570 - RNA, 19 nt, Artificial Sequence
  Description of Artificial Sequence: Synthetic oligonucleotide
agguccccucuaggugugc

SEQ ID NO: 2116571 - RNA, 19 nt, Artificial Sequence
  Description of Artificial Sequence: Synthetic oligonucleotide
ggauuuggguacucauugu

SEQ ID NO: 2116572 - RNA, 19 nt, Artificial Sequence
  Description of Artificial Sequence: Synthetic oligonucleotide
aacugaggggaaggccaua

SEQ ID NO: 2116573 - RNA, 19 nt, Artificial Sequence
  Description of Artificial Sequence: Synthetic oligonucleotide
gaaggccauaguccggguu

SEQ ID NO: 2116574 - RNA, 19 nt, Artificial Sequence
  Description of Artificial Sequence: Synthetic oligonucleotide
cuacugggaccagccuggc

SEQ ID NO: 2116575 - RNA, 19 nt, Artificial Sequence
  Description of Artificial Sequence: Synthetic oligonucleotide
ccaagauguuccgcuguag

SEQ ID NO: 2116576 - RNA, 19 nt, Artificial Sequence
  Description of Artificial Sequence: Synthetic oligonucleotide
gcagggacagggcccacca

SEQ ID NO: 2116577 - RNA, 19 nt, Artificial Sequence
  Description of Artificial Sequence: Synthetic oligonucleotide
cccaggcuuuugaugggag

SEQ ID NO: 2116578 - RNA, 19 nt, Artificial Sequence
  Description of Artificial Sequence: Synthetic oligonucleotide
agcccacauaaaugaucuu

SEQ ID NO: 2116579 - RNA, 19 nt, Artificial Sequence
  Description of Artificial Sequence: Synthetic oligonucleotide
cagggacagggcccaccag

SEQ ID NO: 2116580 - RNA, 19 nt, Artificial Sequence
  Description of Artificial Sequence: Synthetic oligonucleotide
caugagagguuggggucca

SEQ ID NO: 2116581 - RNA, 19 nt, Artificial Sequence
  Description of Artificial Sequence: Synthetic oligonucleotide
ucuccgggaggaggccuga

SEQ ID NO: 2116582 - RNA, 19 nt, Artificial Sequence
  Description of Artificial Sequence: Synthetic oligonucleotide
gccugucugaguuguuguc

SEQ ID NO: 2116583 - RNA, 19 nt, Artificial Sequence
  Description of Artificial Sequence: Synthetic oligonucleotide
cuguggaaagggcucgggu

SEQ ID NO: 2116584 - RNA, 19 nt, Artificial Sequence
  Description of Artificial Sequence: Synthetic oligonucleotide
aggucuggaggcagcuaga

SEQ ID NO: 2116585 - RNA, 19 nt, Artificial Sequence
  Description of Artificial Sequence: Synthetic oligonucleotide
caccagcaccgagucuagg

SEQ ID NO: 2116586 - RNA, 19 nt, Artificial Sequence
  Description of Artificial Sequence: Synthetic oligonucleotide
uccucgcucucggcugagc

SEQ ID NO: 2116587 - RNA, 19 nt, Artificial Sequence
  Description of Artificial Sequence: Synthetic oligonucleotide
gcacucacaauagcaucca

SEQ ID NO: 2116588 - RNA, 19 nt, Artificial Sequence
  Description of Artificial Sequence: Synthetic oligonucleotide
ccgagucuaggaucugauc

SEQ ID NO: 2116589 - RNA, 19 nt, Artificial Sequence
  Description of Artificial Sequence: Synthetic oligonucleotide
gucagccugccaaaugccu

SEQ ID NO: 2116590 - RNA, 19 nt, Artificial Sequence
  Description of Artificial Sequence: Synthetic oligonucleotide
cccgaagcucuggauuugg

SEQ ID NO: 2116591 - RNA, 19 nt, Artificial Sequence
  Description of Artificial Sequence: Synthetic oligonucleotide
accaagcaugugagggccu

SEQ ID NO: 2116592 - RNA, 19 nt, Artificial Sequence
  Description of Artificial Sequence: Synthetic oligonucleotide
cagugacacccacggcguc

SEQ ID NO: 2116593 - RNA, 19 nt, Artificial Sequence
  Description of Artificial Sequence: Synthetic oligonucleotide
gggguggguucucccgaag

SEQ ID NO: 2116594 - RNA, 19 nt, Artificial Sequence
  Description of Artificial Sequence: Synthetic oligonucleotide
ggcgucggucucaggaaug

SEQ ID NO: 2116595 - RNA, 19 nt, Artificial Sequence
  Description of Artificial Sequence: Synthetic oligonucleotide
ugacacccacggcgucggu

SEQ ID NO: 2116596 - RNA, 19 nt, Artificial Sequence
  Description of Artificial Sequence: Synthetic oligonucleotide
ggucacccggggcuuagaa

SEQ ID NO: 2116597 - RNA, 19 nt, Artificial Sequence
  Description of Artificial Sequence: Synthetic oligonucleotide
cgacaccuuggccaucacc

SEQ ID NO: 2116598 - RNA, 19 nt, Artificial Sequence
  Description of Artificial Sequence: Synthetic oligonucleotide
ggccugagaugcagcuagg

SEQ ID NO: 2116599 - RNA, 19 nt, Artificial Sequence
  Description of Artificial Sequence: Synthetic oligonucleotide
auguuccgcuguagcugag

SEQ ID NO: 2116600 - RNA, 19 nt, Artificial Sequence
  Description of Artificial Sequence: Synthetic oligonucleotide
uaguccggguugggguccu

SEQ ID NO: 2116601 - RNA, 19 nt, Artificial Sequence
  Description of Artificial Sequence: Synthetic oligonucleotide
gccaagauguuccgcugua

SEQ ID NO: 2116602 - RNA, 19 nt, Artificial Sequence
  Description of Artificial Sequence: Synthetic oligonucleotide
cuaggugugcaaggagacu

SEQ ID NO: 2116603 - RNA, 19 nt, Artificial Sequence
  Description of Artificial Sequence: Synthetic oligonucleotide
gagacuggccaugguccua

SEQ ID NO: 2116604 - RNA, 19 nt, Artificial Sequence
  Description of Artificial Sequence: Synthetic oligonucleotide
augguccuacugggaccag

SEQ ID NO: 2116605 - RNA, 19 nt, Artificial Sequence
  Description of Artificial Sequence: Synthetic oligonucleotide
caucagccugaaagacgaa

SEQ ID NO: 2116606 - RNA, 19 nt, Artificial Sequence
  Description of Artificial Sequence: Synthetic oligonucleotide
ggccauaguccggguuggg

SEQ ID NO: 2116607 - RNA, 19 nt, Artificial Sequence
  Description of Artificial Sequence: Synthetic oligonucleotide
aucgggucacccggggcuu

SEQ ID NO: 2116608 - RNA, 19 nt, Artificial Sequence
  Description of Artificial Sequence: Synthetic oligonucleotide
ggaguauuggguagcucau

SEQ ID NO: 2116609 - RNA, 19 nt, Artificial Sequence
  Description of Artificial Sequence: Synthetic oligonucleotide
augcagcuagggaggccca

SEQ ID NO: 2116610 - RNA, 19 nt, Artificial Sequence
  Description of Artificial Sequence: Synthetic oligonucleotide
ggucgucagacagggccuc

SEQ ID NO: 2116611 - RNA, 19 nt, Artificial Sequence
  Description of Artificial Sequence: Synthetic oligonucleotide
gucgucagacagggccuca

SEQ ID NO: 2116612 - RNA, 19 nt, Artificial Sequence
  Description of Artificial Sequence: Synthetic oligonucleotide
acccacggcgucggucuca

SEQ ID NO: 2116613 - RNA, 19 nt, Artificial Sequence
  Description of Artificial Sequence: Synthetic oligonucleotide
gcgucggucucaggaauga

SEQ ID NO: 2116614 - RNA, 19 nt, Artificial Sequence
  Description of Artificial Sequence: Synthetic oligonucleotide
cuccgggaggaggccugag

SEQ ID NO: 2116615 - RNA, 19 nt, Artificial Sequence
  Description of Artificial Sequence: Synthetic oligonucleotide
caaggagacuggccauggu

SEQ ID NO: 2116616 - RNA, 19 nt, Artificial Sequence
  Description of Artificial Sequence: Synthetic oligonucleotide
cugaggggaaggccauagu

SEQ ID NO: 2116617 - RNA, 19 nt, Artificial Sequence
  Description of Artificial Sequence: Synthetic oligonucleotide
cccucuaggugugcaagga

SEQ ID NO: 2116618 - RNA, 19 nt, Artificial Sequence
  Description of Artificial Sequence: Synthetic oligonucleotide
cacugcauucgaagcugau

SEQ ID NO: 2116619 - RNA, 19 nt, Artificial Sequence
  Description of Artificial Sequence: Synthetic oligonucleotide
ccaggucgucagacagggc

SEQ ID NO: 2116620 - RNA, 19 nt, Artificial Sequence
  Description of Artificial Sequence: Synthetic oligonucleotide
cgaagcucuggauuugggu

SEQ ID NO: 2116621 - RNA, 19 nt, Artificial Sequence
  Description of Artificial Sequence: Synthetic oligonucleotide
cacucacaauagcauccau

SEQ ID NO: 2116622 - RNA, 19 nt, Artificial Sequence
  Description of Artificial Sequence: Synthetic oligonucleotide
gcuuagggguaaggguaga

SEQ ID NO: 2116623 - RNA, 19 nt, Artificial Sequence
  Description of Artificial Sequence: Synthetic oligonucleotide
ccggggcuuagaagccaag

SEQ ID NO: 2116624 - RNA, 19 nt, Artificial Sequence
  Description of Artificial Sequence: Synthetic oligonucleotide
ucgggucacccggggcuua

SEQ ID NO: 2116625 - RNA, 19 nt, Artificial Sequence
  Description of Artificial Sequence: Synthetic oligonucleotide
ccgcuguagcugagagaag

SEQ ID NO: 2116626 - RNA, 19 nt, Artificial Sequence
  Description of Artificial Sequence: Synthetic oligonucleotide
cacccacggcgucggucuc

SEQ ID NO: 2116627 - RNA, 19 nt, Artificial Sequence
  Description of Artificial Sequence: Synthetic oligonucleotide
augagagguugggguccau

SEQ ID NO: 2116628 - RNA, 19 nt, Artificial Sequence
  Description of Artificial Sequence: Synthetic oligonucleotide
cagcugcaguggagccuuc

SEQ ID NO: 2116629 - RNA, 19 nt, Artificial Sequence
  Description of Artificial Sequence: Synthetic oligonucleotide
ccaggcuuuugaugggagu

SEQ ID NO: 2116630 - RNA, 19 nt, Artificial Sequence
  Description of Artificial Sequence: Synthetic oligonucleotide
cccacggcgucggucucag

SEQ ID NO: 2116631 - RNA, 19 nt, Artificial Sequence
  Description of Artificial Sequence: Synthetic oligonucleotide
ggccuguagguccccucua

SEQ ID NO: 2116632 - RNA, 19 nt, Artificial Sequence
  Description of Artificial Sequence: Synthetic oligonucleotide
gcucuggauuuggguacuc

SEQ ID NO: 2116633 - RNA, 19 nt, Artificial Sequence
  Description of Artificial Sequence: Synthetic oligonucleotide
cgucggucucaggaaugag

SEQ ID NO: 2116634 - RNA, 19 nt, Artificial Sequence
  Description of Artificial Sequence: Synthetic oligonucleotide
ggagugcaacugaggggaa

SEQ ID NO: 2116635 - RNA, 19 nt, Artificial Sequence
  Description of Artificial Sequence: Synthetic oligonucleotide
gggccucacugcauucgaa

SEQ ID NO: 2116636 - RNA, 19 nt, Artificial Sequence
  Description of Artificial Sequence: Synthetic oligonucleotide
cggggcuuagaagccaaga

SEQ ID NO: 2116637 - RNA, 19 nt, Artificial Sequence
  Description of Artificial Sequence: Synthetic oligonucleotide
ccuggaguauuggguagcu

SEQ ID NO: 2116638 - RNA, 19 nt, Artificial Sequence
  Description of Artificial Sequence: Synthetic oligonucleotide
cccacacggaugaacucuu

SEQ ID NO: 2116639 - RNA, 19 nt, Artificial Sequence
  Description of Artificial Sequence: Synthetic oligonucleotide
ccgacaccuuggccaucac

SEQ ID NO: 2116640 - RNA, 19 nt, Artificial Sequence
  Description of Artificial Sequence: Synthetic oligonucleotide
cggcugagcccacauaaau

SEQ ID NO: 2116641 - RNA, 19 nt, Artificial Sequence
  Description of Artificial Sequence: Synthetic oligonucleotide
ccacggcgucggucucagg

SEQ ID NO: 2116642 - RNA, 19 nt, Artificial Sequence
  Description of Artificial Sequence: Synthetic oligonucleotide
gcucucggcugagcccaca

SEQ ID NO: 2116643 - RNA, 19 nt, Artificial Sequence
  Description of Artificial Sequence: Synthetic oligonucleotide
cccaucagaugcaguccau

SEQ ID NO: 2116644 - RNA, 19 nt, Artificial Sequence
  Description of Artificial Sequence: Synthetic oligonucleotide
cagggcccaccagcaccga

SEQ ID NO: 2116645 - RNA, 19 nt, Artificial Sequence
  Description of Artificial Sequence: Synthetic oligonucleotide
cagccacguucagcaccga

SEQ ID NO: 2116646 - RNA, 19 nt, Artificial Sequence
  Description of Artificial Sequence: Synthetic oligonucleotide
ccuccuuauccuggaguau

SEQ ID NO: 2116647 - RNA, 19 nt, Artificial Sequence
  Description of Artificial Sequence: Synthetic oligonucleotide
cgcucucggcugagcccac

SEQ ID NO: 2116648 - RNA, 19 nt, Artificial Sequence
  Description of Artificial Sequence: Synthetic oligonucleotide
ccggguugggguccugguu

SEQ ID NO: 2116649 - RNA, 19 nt, Artificial Sequence
  Description of Artificial Sequence: Synthetic oligonucleotide
cggcgucggucucaggaau

SEQ ID NO: 2116650 - RNA, 19 nt, Artificial Sequence
  Description of Artificial Sequence: Synthetic oligonucleotide
ccagccugucugaguuguu

SEQ ID NO: 2116651 - RNA, 19 nt, Artificial Sequence
  Description of Artificial Sequence: Synthetic oligonucleotide
aacuaaauuacuuugcuuc

SEQ ID NO: 2116652 - RNA, 19 nt, Artificial Sequence
  Description of Artificial Sequence: Synthetic oligonucleotide
aaaaucuauaacuccaacc

SEQ ID NO: 2116653 - RNA, 19 nt, Artificial Sequence
  Description of Artificial Sequence: Synthetic oligonucleotide
uauaacuccaaccugagag

SEQ ID NO: 2116654 - RNA, 19 nt, Artificial Sequence
  Description of Artificial Sequence: Synthetic oligonucleotide
aucgaugacauucaggccc

SEQ ID NO: 2116655 - RNA, 19 nt, Artificial Sequence
  Description of Artificial Sequence: Synthetic oligonucleotide
aauaauagcuccuucuucu

SEQ ID NO: 2116656 - RNA, 19 nt, Artificial Sequence
  Description of Artificial Sequence: Synthetic oligonucleotide
aagguaaugauucuguugu

SEQ ID NO: 2116657 - RNA, 19 nt, Artificial Sequence
  Description of Artificial Sequence: Synthetic oligonucleotide
agaaggauuuguuuugucc

SEQ ID NO: 2116658 - RNA, 19 nt, Artificial Sequence
  Description of Artificial Sequence: Synthetic oligonucleotide
ucuuguaagguaaugauuc

SEQ ID NO: 2116659 - RNA, 19 nt, Artificial Sequence
  Description of Artificial Sequence: Synthetic oligonucleotide
acuaaauuacuuugcuucc

SEQ ID NO: 2116660 - RNA, 19 nt, Artificial Sequence
  Description of Artificial Sequence: Synthetic oligonucleotide
aacgaagccaggcucuucc

SEQ ID NO: 2116661 - RNA, 19 nt, Artificial Sequence
  Description of Artificial Sequence: Synthetic oligonucleotide
gauuccaguagauaggagc

SEQ ID NO: 2116662 - RNA, 19 nt, Artificial Sequence
  Description of Artificial Sequence: Synthetic oligonucleotide
uuuuccaccagcucuagag

SEQ ID NO: 2116663 - RNA, 19 nt, Artificial Sequence
  Description of Artificial Sequence: Synthetic oligonucleotide
gaacucugcagcuuaaagg

SEQ ID NO: 2116664 - RNA, 19 nt, Artificial Sequence
  Description of Artificial Sequence: Synthetic oligonucleotide
cuuaaaggcaagcucaugc

SEQ ID NO: 2116665 - RNA, 19 nt, Artificial Sequence
  Description of Artificial Sequence: Synthetic oligonucleotide
auagucagaguccaggguc

SEQ ID NO: 2116666 - RNA, 19 nt, Artificial Sequence
  Description of Artificial Sequence: Synthetic oligonucleotide
uguaagguaaugauucugu

SEQ ID NO: 2116667 - RNA, 19 nt, Artificial Sequence
  Description of Artificial Sequence: Synthetic oligonucleotide
uuuaacucguuccauuucu

SEQ ID NO: 2116668 - RNA, 19 nt, Artificial Sequence
  Description of Artificial Sequence: Synthetic oligonucleotide
uuuaggacccuuccgacug

SEQ ID NO: 2116669 - RNA, 19 nt, Artificial Sequence
  Description of Artificial Sequence: Synthetic oligonucleotide
ucuucuaagcgacuguuca

SEQ ID NO: 2116670 - RNA, 19 nt, Artificial Sequence
  Description of Artificial Sequence: Synthetic oligonucleotide
cauauacucagaaagcuuc

SEQ ID NO: 2116671 - RNA, 19 nt, Artificial Sequence
  Description of Artificial Sequence: Synthetic oligonucleotide
ucugucuuguuuaggaccc

SEQ ID NO: 2116672 - RNA, 19 nt, Artificial Sequence
  Description of Artificial Sequence: Synthetic oligonucleotide
auagaacucacugagaagu

SEQ ID NO: 2116673 - RNA, 19 nt, Artificial Sequence
  Description of Artificial Sequence: Synthetic oligonucleotide
uuauuaacuaaauuacuuu

SEQ ID NO: 2116674 - RNA, 19 nt, Artificial Sequence
  Description of Artificial Sequence: Synthetic oligonucleotide
ugcuccaucaccacaaaga

SEQ ID NO: 2116675 - RNA, 19 nt, Artificial Sequence
  Description of Artificial Sequence: Synthetic oligonucleotide
guuuccaucuuugagauac

SEQ ID NO: 2116676 - RNA, 19 nt, Artificial Sequence
  Description of Artificial Sequence: Synthetic oligonucleotide
ucuggaacgagcuuuucca

SEQ ID NO: 2116677 - RNA, 19 nt, Artificial Sequence
  Description of Artificial Sequence: Synthetic oligonucleotide
uuucaagccauguuucaag

SEQ ID NO: 2116678 - RNA, 19 nt, Artificial Sequence
  Description of Artificial Sequence: Synthetic oligonucleotide
ucaacguccaaucguaacu

SEQ ID NO: 2116679 - RNA, 19 nt, Artificial Sequence
  Description of Artificial Sequence: Synthetic oligonucleotide
auuacuuugcuuccaguug

SEQ ID NO: 2116680 - RNA, 19 nt, Artificial Sequence
  Description of Artificial Sequence: Synthetic oligonucleotide
ucuaauuacugcuguuucc

SEQ ID NO: 2116681 - RNA, 19 nt, Artificial Sequence
  Description of Artificial Sequence: Synthetic oligonucleotide
uuguuuaggacccuuccga

SEQ ID NO: 2116682 - RNA, 19 nt, Artificial Sequence
  Description of Artificial Sequence: Synthetic oligonucleotide
ugcauuaaugccaaacgaa

SEQ ID NO: 2116683 - RNA, 19 nt, Artificial Sequence
  Description of Artificial Sequence: Synthetic oligonucleotide
ugaacucugcagcuuaaag

SEQ ID NO: 2116684 - RNA, 19 nt, Artificial Sequence
  Description of Artificial Sequence: Synthetic oligonucleotide
gaucaaggcuuucauauac

SEQ ID NO: 2116685 - RNA, 19 nt, Artificial Sequence
  Description of Artificial Sequence: Synthetic oligonucleotide
aaccugagaguccaggucu

SEQ ID NO: 2116686 - RNA, 19 nt, Artificial Sequence
  Description of Artificial Sequence: Synthetic oligonucleotide
ucuaucuugauuagucuuc

SEQ ID NO: 2116687 - RNA, 19 nt, Artificial Sequence
  Description of Artificial Sequence: Synthetic oligonucleotide
aguuguuuaaugguggcag

SEQ ID NO: 2116688 - RNA, 19 nt, Artificial Sequence
  Description of Artificial Sequence: Synthetic oligonucleotide
ucacuuuucuguuuuacuc

SEQ ID NO: 2116689 - RNA, 19 nt, Artificial Sequence
  Description of Artificial Sequence: Synthetic oligonucleotide
guagauaggagcuuucuuc

SEQ ID NO: 2116690 - RNA, 19 nt, Artificial Sequence
  Description of Artificial Sequence: Synthetic oligonucleotide
uucauauacucagaaagcu

SEQ ID NO: 2116691 - RNA, 19 nt, Artificial Sequence
  Description of Artificial Sequence: Synthetic oligonucleotide
ucuuguuuaggacccuucc

SEQ ID NO: 2116692 - RNA, 19 nt, Artificial Sequence
  Description of Artificial Sequence: Synthetic oligonucleotide
aacgagcuuuuccaccagc

SEQ ID NO: 2116693 - RNA, 19 nt, Artificial Sequence
  Description of Artificial Sequence: Synthetic oligonucleotide
uuuucaacguccaaucgua

SEQ ID NO: 2116694 - RNA, 19 nt, Artificial Sequence
  Description of Artificial Sequence: Synthetic oligonucleotide
uuaacacuugcuguuaucu

SEQ ID NO: 2116695 - RNA, 19 nt, Artificial Sequence
  Description of Artificial Sequence: Synthetic oligonucleotide
agcaauaauagcuccuucu

SEQ ID NO: 2116696 - RNA, 19 nt, Artificial Sequence
  Description of Artificial Sequence: Synthetic oligonucleotide
cuuugagauacauugaaaa

SEQ ID NO: 2116697 - RNA, 19 nt, Artificial Sequence
  Description of Artificial Sequence: Synthetic oligonucleotide
uuuccaccagcucuagagg

SEQ ID NO: 2116698 - RNA, 19 nt, Artificial Sequence
  Description of Artificial Sequence: Synthetic oligonucleotide
uuacuccuaggucugaacu

SEQ ID NO: 2116699 - RNA, 19 nt, Artificial Sequence
  Description of Artificial Sequence: Synthetic oligonucleotide
uguuuuacuccuaggucug

SEQ ID NO: 2116700 - RNA, 19 nt, Artificial Sequence
  Description of Artificial Sequence: Synthetic oligonucleotide
cacuuuucuguuuuacucc

SEQ ID NO: 2116701 - RNA, 19 nt, Artificial Sequence
  Description of Artificial Sequence: Synthetic oligonucleotide
uugauuagucuucucuucu

SEQ ID NO: 2116702 - RNA, 19 nt, Artificial Sequence
  Description of Artificial Sequence: Synthetic oligonucleotide
ucuucuuguaagguaauga

SEQ ID NO: 2116703 - RNA, 19 nt, Artificial Sequence
  Description of Artificial Sequence: Synthetic oligonucleotide
gugucuuaaguccugggag

SEQ ID NO: 2116704 - RNA, 19 nt, Artificial Sequence
  Description of Artificial Sequence: Synthetic oligonucleotide
caagccauguuucaagcag

SEQ ID NO: 2116705 - RNA, 19 nt, Artificial Sequence
  Description of Artificial Sequence: Synthetic oligonucleotide
gaucuggaguuccaguucc

SEQ ID NO: 2116706 - RNA, 19 nt, Artificial Sequence
  Description of Artificial Sequence: Synthetic oligonucleotide
ugggagaucuuuaacacuu

SEQ ID NO: 2116707 - RNA, 19 nt, Artificial Sequence
  Description of Artificial Sequence: Synthetic oligonucleotide
cuuguuuaggacccuuccg

SEQ ID NO: 2116708 - RNA, 19 nt, Artificial Sequence
  Description of Artificial Sequence: Synthetic oligonucleotide
aaagaacugcuggagaggu

SEQ ID NO: 2116709 - RNA, 19 nt, Artificial Sequence
  Description of Artificial Sequence: Synthetic oligonucleotide
uguucaguucacuuuucug

SEQ ID NO: 2116710 - RNA, 19 nt, Artificial Sequence
  Description of Artificial Sequence: Synthetic oligonucleotide
uccuuuagaugcuuucuug

SEQ ID NO: 2116711 - RNA, 19 nt, Artificial Sequence
  Description of Artificial Sequence: Synthetic oligonucleotide
uucaagccauguuucaagc

SEQ ID NO: 2116712 - RNA, 19 nt, Artificial Sequence
  Description of Artificial Sequence: Synthetic oligonucleotide
uaaugauucuguuguuggc

SEQ ID NO: 2116713 - RNA, 19 nt, Artificial Sequence
  Description of Artificial Sequence: Synthetic oligonucleotide
cagucuaucuugauuaguc

SEQ ID NO: 2116714 - RNA, 19 nt, Artificial Sequence
  Description of Artificial Sequence: Synthetic oligonucleotide
uuucuguuuuacuccuagg

SEQ ID NO: 2116715 - RNA, 19 nt, Artificial Sequence
  Description of Artificial Sequence: Synthetic oligonucleotide
ucuuugagauacauugaaa

SEQ ID NO: 2116716 - RNA, 19 nt, Artificial Sequence
  Description of Artificial Sequence: Synthetic oligonucleotide
ugucuuaaguccugggaga

SEQ ID NO: 2116717 - RNA, 19 nt, Artificial Sequence
  Description of Artificial Sequence: Synthetic oligonucleotide
auguuucaagcagugcucc

SEQ ID NO: 2116718 - RNA, 19 nt, Artificial Sequence
  Description of Artificial Sequence: Synthetic oligonucleotide
aucuuugagauacauugaa

SEQ ID NO: 2116719 - RNA, 19 nt, Artificial Sequence
  Description of Artificial Sequence: Synthetic oligonucleotide
ucaguuuaguguuggauuu

SEQ ID NO: 2116720 - RNA, 19 nt, Artificial Sequence
  Description of Artificial Sequence: Synthetic oligonucleotide
uggcagucuaucuugauua

SEQ ID NO: 2116721 - RNA, 19 nt, Artificial Sequence
  Description of Artificial Sequence: Synthetic oligonucleotide
uaucucugcagcuucugga

SEQ ID NO: 2116722 - RNA, 19 nt, Artificial Sequence
  Description of Artificial Sequence: Synthetic oligonucleotide
cuuucaugcagaaguuggc

SEQ ID NO: 2116723 - RNA, 19 nt, Artificial Sequence
  Description of Artificial Sequence: Synthetic oligonucleotide
uccgacuggauuccaguag

SEQ ID NO: 2116724 - RNA, 19 nt, Artificial Sequence
  Description of Artificial Sequence: Synthetic oligonucleotide
cuugauuagucuucucuuc

SEQ ID NO: 2116725 - RNA, 19 nt, Artificial Sequence
  Description of Artificial Sequence: Synthetic oligonucleotide
guugcugccgcagagacac

SEQ ID NO: 2116726 - RNA, 19 nt, Artificial Sequence
  Description of Artificial Sequence: Synthetic oligonucleotide
gagaccagcaauaauagcu

SEQ ID NO: 2116727 - RNA, 19 nt, Artificial Sequence
  Description of Artificial Sequence: Synthetic oligonucleotide
auaacuccaaccugagagu

SEQ ID NO: 2116728 - RNA, 19 nt, Artificial Sequence
  Description of Artificial Sequence: Synthetic oligonucleotide
aguuccaucucuugucuca

SEQ ID NO: 2116729 - RNA, 19 nt, Artificial Sequence
  Description of Artificial Sequence: Synthetic oligonucleotide
ucuuuaacucguuccauuu

SEQ ID NO: 2116730 - RNA, 19 nt, Artificial Sequence
  Description of Artificial Sequence: Synthetic oligonucleotide
uuucaugcagaaguuggca

SEQ ID NO: 2116731 - RNA, 19 nt, Artificial Sequence
  Description of Artificial Sequence: Synthetic oligonucleotide
uguugaucaaggcuuucau

SEQ ID NO: 2116732 - RNA, 19 nt, Artificial Sequence
  Description of Artificial Sequence: Synthetic oligonucleotide
aaggauuuguuuuguccaa

SEQ ID NO: 2116733 - RNA, 19 nt, Artificial Sequence
  Description of Artificial Sequence: Synthetic oligonucleotide
uagucagaguccagggucc

SEQ ID NO: 2116734 - RNA, 19 nt, Artificial Sequence
  Description of Artificial Sequence: Synthetic oligonucleotide
aucuauaacuccaaccuga

SEQ ID NO: 2116735 - RNA, 19 nt, Artificial Sequence
  Description of Artificial Sequence: Synthetic oligonucleotide
aacuccaaccugagagucc

SEQ ID NO: 2116736 - RNA, 19 nt, Artificial Sequence
  Description of Artificial Sequence: Synthetic oligonucleotide
augccaaacgaagccaggc

SEQ ID NO: 2116737 - RNA, 19 nt, Artificial Sequence
  Description of Artificial Sequence: Synthetic oligonucleotide
gcaagcucaugcuugagag

SEQ ID NO: 2116738 - RNA, 19 nt, Artificial Sequence
  Description of Artificial Sequence: Synthetic oligonucleotide
cauguuucaagcagugcuc

SEQ ID NO: 2116739 - RNA, 19 nt, Artificial Sequence
  Description of Artificial Sequence: Synthetic oligonucleotide
gaggugcauagucagaguc

SEQ ID NO: 2116740 - RNA, 19 nt, Artificial Sequence
  Description of Artificial Sequence: Synthetic oligonucleotide
cauccugcuucucacagac

SEQ ID NO: 2116741 - RNA, 19 nt, Artificial Sequence
  Description of Artificial Sequence: Synthetic oligonucleotide
ccuuucaugcagaaguugg

SEQ ID NO: 2116742 - RNA, 19 nt, Artificial Sequence
  Description of Artificial Sequence: Synthetic oligonucleotide
uggcuuucaagccauguuu

SEQ ID NO: 2116743 - RNA, 19 nt, Artificial Sequence
  Description of Artificial Sequence: Synthetic oligonucleotide
uucaacguccaaucguaac

SEQ ID NO: 2116744 - RNA, 19 nt, Artificial Sequence
  Description of Artificial Sequence: Synthetic oligonucleotide
uggaacgagcuuuuccacc

SEQ ID NO: 2116745 - RNA, 19 nt, Artificial Sequence
  Description of Artificial Sequence: Synthetic oligonucleotide
aucaugagggcauuggcuu

SEQ ID NO: 2116746 - RNA, 19 nt, Artificial Sequence
  Description of Artificial Sequence: Synthetic oligonucleotide
ucacugagaaguuccuucu

SEQ ID NO: 2116747 - RNA, 19 nt, Artificial Sequence
  Description of Artificial Sequence: Synthetic oligonucleotide
agggcauccugcuucucac

SEQ ID NO: 2116748 - RNA, 19 nt, Artificial Sequence
  Description of Artificial Sequence: Synthetic oligonucleotide
uguuuaggacccuuccgac

SEQ ID NO: 2116749 - RNA, 19 nt, Artificial Sequence
  Description of Artificial Sequence: Synthetic oligonucleotide
gacccuuccgacuggauuc

SEQ ID NO: 2116750 - RNA, 19 nt, Artificial Sequence
  Description of Artificial Sequence: Synthetic oligonucleotide
caauaauagcuccuucuuc

SEQ ID NO: 2116751 - RNA, 19 nt, Artificial Sequence
  Description of Artificial Sequence: Synthetic oligonucleotide
uuuaaugguggcagucuau

SEQ ID NO: 2116752 - RNA, 19 nt, Artificial Sequence
  Description of Artificial Sequence: Synthetic oligonucleotide
uguuguuggcgaccgcaag

SEQ ID NO: 2116753 - RNA, 19 nt, Artificial Sequence
  Description of Artificial Sequence: Synthetic oligonucleotide
agaccagcaauaauagcuc

SEQ ID NO: 2116754 - RNA, 19 nt, Artificial Sequence
  Description of Artificial Sequence: Synthetic oligonucleotide
cagcuuaaaggcaagcuca

SEQ ID NO: 2116755 - RNA, 19 nt, Artificial Sequence
  Description of Artificial Sequence: Synthetic oligonucleotide
ugucucaugcugaucugga

SEQ ID NO: 2116756 - RNA, 19 nt, Artificial Sequence
  Description of Artificial Sequence: Synthetic oligonucleotide
uggauuccaguagauagga

SEQ ID NO: 2116757 - RNA, 19 nt, Artificial Sequence
  Description of Artificial Sequence: Synthetic oligonucleotide
ucuguuguuggcgaccgca

SEQ ID NO: 2116758 - RNA, 19 nt, Artificial Sequence
  Description of Artificial Sequence: Synthetic oligonucleotide
uucuaagcgacuguucagu

SEQ ID NO: 2116759 - RNA, 19 nt, Artificial Sequence
  Description of Artificial Sequence: Synthetic oligonucleotide
guuguuggcgaccgcaagc

SEQ ID NO: 2116760 - RNA, 19 nt, Artificial Sequence
  Description of Artificial Sequence: Synthetic oligonucleotide
uuuaacacuugcuguuauc

SEQ ID NO: 2116761 - RNA, 19 nt, Artificial Sequence
  Description of Artificial Sequence: Synthetic oligonucleotide
aggugcauagucagagucc

SEQ ID NO: 2116762 - RNA, 19 nt, Artificial Sequence
  Description of Artificial Sequence: Synthetic oligonucleotide
ucaugcagaaguuggcauc

SEQ ID NO: 2116763 - RNA, 19 nt, Artificial Sequence
  Description of Artificial Sequence: Synthetic oligonucleotide
gaccagcaauaauagcucc

SEQ ID NO: 2116764 - RNA, 19 nt, Artificial Sequence
  Description of Artificial Sequence: Synthetic oligonucleotide
auucaggcccaccaggaga

SEQ ID NO: 2116765 - RNA, 19 nt, Artificial Sequence
  Description of Artificial Sequence: Synthetic oligonucleotide
augauucuguuguuggcga

SEQ ID NO: 2116766 - RNA, 19 nt, Artificial Sequence
  Description of Artificial Sequence: Synthetic oligonucleotide
ugaucuggaguuccaguuc

SEQ ID NO: 2116767 - RNA, 19 nt, Artificial Sequence
  Description of Artificial Sequence: Synthetic oligonucleotide
auucuguuguuggcgaccg

SEQ ID NO: 2116768 - RNA, 19 nt, Artificial Sequence
  Description of Artificial Sequence: Synthetic oligonucleotide
uguccaagaaaguuuucuu

SEQ ID NO: 2116769 - RNA, 19 nt, Artificial Sequence
  Description of Artificial Sequence: Synthetic oligonucleotide
caggagaccagcaauaaua

SEQ ID NO: 2116770 - RNA, 19 nt, Artificial Sequence
  Description of Artificial Sequence: Synthetic oligonucleotide
cuaauuacugcuguuucca

SEQ ID NO: 2116771 - RNA, 19 nt, Artificial Sequence
  Description of Artificial Sequence: Synthetic oligonucleotide
gauucuguuguuggcgacc

SEQ ID NO: 2116772 - RNA, 19 nt, Artificial Sequence
  Description of Artificial Sequence: Synthetic oligonucleotide
uucacucagugcuugcccu

SEQ ID NO: 2116773 - RNA, 19 nt, Artificial Sequence
  Description of Artificial Sequence: Synthetic oligonucleotide
gauuagucuucucuucuaa

SEQ ID NO: 2116774 - RNA, 19 nt, Artificial Sequence
  Description of Artificial Sequence: Synthetic oligonucleotide
cuucacucagugcuugccc

SEQ ID NO: 2116775 - RNA, 19 nt, Artificial Sequence
  Description of Artificial Sequence: Synthetic oligonucleotide
aucguaacugugucuccuc

SEQ ID NO: 2116776 - RNA, 19 nt, Artificial Sequence
  Description of Artificial Sequence: Synthetic oligonucleotide
ucgaugacauucaggccca

SEQ ID NO: 2116777 - RNA, 19 nt, Artificial Sequence
  Description of Artificial Sequence: Synthetic oligonucleotide
uucaagcagugcuccauca

SEQ ID NO: 2116778 - RNA, 19 nt, Artificial Sequence
  Description of Artificial Sequence: Synthetic oligonucleotide
uuucaagcagugcuccauc

SEQ ID NO: 2116779 - RNA, 19 nt, Artificial Sequence
  Description of Artificial Sequence: Synthetic oligonucleotide
ucaagcagugcuccaucac

SEQ ID NO: 2116780 - RNA, 19 nt, Artificial Sequence
  Description of Artificial Sequence: Synthetic oligonucleotide
cuguuuuacuccuaggucu

SEQ ID NO: 2116781 - RNA, 19 nt, Artificial Sequence
  Description of Artificial Sequence: Synthetic oligonucleotide
aacguccaaucguaacugu

SEQ ID NO: 2116782 - RNA, 19 nt, Artificial Sequence
  Description of Artificial Sequence: Synthetic oligonucleotide
uaaugguggcagucuaucu

SEQ ID NO: 2116783 - RNA, 19 nt, Artificial Sequence
  Description of Artificial Sequence: Synthetic oligonucleotide
aggagaccagcaauaauag

SEQ ID NO: 2116784 - RNA, 19 nt, Artificial Sequence
  Description of Artificial Sequence: Synthetic oligonucleotide
ugccaaacgaagccaggcu

SEQ ID NO: 2116785 - RNA, 19 nt, Artificial Sequence
  Description of Artificial Sequence: Synthetic oligonucleotide
ugucaguuuaguguuggau

SEQ ID NO: 2116786 - RNA, 19 nt, Artificial Sequence
  Description of Artificial Sequence: Synthetic oligonucleotide
uuaggacccuuccgacugg

SEQ ID NO: 2116787 - RNA, 19 nt, Artificial Sequence
  Description of Artificial Sequence: Synthetic oligonucleotide
uccaaucguaacugugucu

SEQ ID NO: 2116788 - RNA, 19 nt, Artificial Sequence
  Description of Artificial Sequence: Synthetic oligonucleotide
cuuuaacucguuccauuuc

SEQ ID NO: 2116789 - RNA, 19 nt, Artificial Sequence
  Description of Artificial Sequence: Synthetic oligonucleotide
caggucuucuccuuucaug

SEQ ID NO: 2116790 - RNA, 19 nt, Artificial Sequence
  Description of Artificial Sequence: Synthetic oligonucleotide
gagcccugagaucauccag

SEQ ID NO: 2116791 - RNA, 19 nt, Artificial Sequence
  Description of Artificial Sequence: Synthetic oligonucleotide
uacuccuaggucugaacuc

SEQ ID NO: 2116792 - RNA, 19 nt, Artificial Sequence
  Description of Artificial Sequence: Synthetic oligonucleotide
aguagauaggagcuuucuu

SEQ ID NO: 2116793 - RNA, 19 nt, Artificial Sequence
  Description of Artificial Sequence: Synthetic oligonucleotide
agggcauuggcuucauaga

SEQ ID NO: 2116794 - RNA, 19 nt, Artificial Sequence
  Description of Artificial Sequence: Synthetic oligonucleotide
uucuuggcuuucaagccau

SEQ ID NO: 2116795 - RNA, 19 nt, Artificial Sequence
  Description of Artificial Sequence: Synthetic oligonucleotide
uccuaggucugaacucugc

SEQ ID NO: 2116796 - RNA, 19 nt, Artificial Sequence
  Description of Artificial Sequence: Synthetic oligonucleotide
uucuucuuguaagguaaug

SEQ ID NO: 2116797 - RNA, 19 nt, Artificial Sequence
  Description of Artificial Sequence: Synthetic oligonucleotide
uaacacuugcuguuaucuc

SEQ ID NO: 2116798 - RNA, 19 nt, Artificial Sequence
  Description of Artificial Sequence: Synthetic oligonucleotide
caucgaugacauucaggcc

SEQ ID NO: 2116799 - RNA, 19 nt, Artificial Sequence
  Description of Artificial Sequence: Synthetic oligonucleotide
ugauuagucuucucuucua

SEQ ID NO: 2116800 - RNA, 19 nt, Artificial Sequence
  Description of Artificial Sequence: Synthetic oligonucleotide
cuaagcgacuguucaguuc

SEQ ID NO: 2116801 - RNA, 19 nt, Artificial Sequence
  Description of Artificial Sequence: Synthetic oligonucleotide
guuggcgaccgcaagcucc

SEQ ID NO: 2116802 - RNA, 19 nt, Artificial Sequence
  Description of Artificial Sequence: Synthetic oligonucleotide
aagcagugcuccaucacca

SEQ ID NO: 2116803 - RNA, 19 nt, Artificial Sequence
  Description of Artificial Sequence: Synthetic oligonucleotide
gaugcuuucuugcuucacu

SEQ ID NO: 2116804 - RNA, 19 nt, Artificial Sequence
  Description of Artificial Sequence: Synthetic oligonucleotide
uguuucaagcagugcucca

SEQ ID NO: 2116805 - RNA, 19 nt, Artificial Sequence
  Description of Artificial Sequence: Synthetic oligonucleotide
ugcuuccaguuguuuaaug

SEQ ID NO: 2116806 - RNA, 19 nt, Artificial Sequence
  Description of Artificial Sequence: Synthetic oligonucleotide
aaagcuucuucugcauuaa

SEQ ID NO: 2116807 - RNA, 19 nt, Artificial Sequence
  Description of Artificial Sequence: Synthetic oligonucleotide
aggucugaacucugcagcu

SEQ ID NO: 2116808 - RNA, 19 nt, Artificial Sequence
  Description of Artificial Sequence: Synthetic oligonucleotide
uuucuucuuguaagguaau

SEQ ID NO: 2116809 - RNA, 19 nt, Artificial Sequence
  Description of Artificial Sequence: Synthetic oligonucleotide
ugagaguccaggucuucuc

SEQ ID NO: 2116810 - RNA, 19 nt, Artificial Sequence
  Description of Artificial Sequence: Synthetic oligonucleotide
aucucugcagcuucuggaa

SEQ ID NO: 2116811 - RNA, 19 nt, Artificial Sequence
  Description of Artificial Sequence: Synthetic oligonucleotide
uuucaacguccaaucguaa

SEQ ID NO: 2116812 - RNA, 19 nt, Artificial Sequence
  Description of Artificial Sequence: Synthetic oligonucleotide
acuccuaggucugaacucu

SEQ ID NO: 2116813 - RNA, 19 nt, Artificial Sequence
  Description of Artificial Sequence: Synthetic oligonucleotide
uaacuccaaccugagaguc

SEQ ID NO: 2116814 - RNA, 19 nt, Artificial Sequence
  Description of Artificial Sequence: Synthetic oligonucleotide
uuguuggcgaccgcaagcu

SEQ ID NO: 2116815 - RNA, 19 nt, Artificial Sequence
  Description of Artificial Sequence: Synthetic oligonucleotide
caaucguaacugugucucc

SEQ ID NO: 2116816 - RNA, 19 nt, Artificial Sequence
  Description of Artificial Sequence: Synthetic oligonucleotide
accgcaagcuccucuguca

SEQ ID NO: 2116817 - RNA, 19 nt, Artificial Sequence
  Description of Artificial Sequence: Synthetic oligonucleotide
aaacgaagccaggcucuuc

SEQ ID NO: 2116818 - RNA, 19 nt, Artificial Sequence
  Description of Artificial Sequence: Synthetic oligonucleotide
acuccaaccugagagucca

SEQ ID NO: 2116819 - RNA, 19 nt, Artificial Sequence
  Description of Artificial Sequence: Synthetic oligonucleotide
ccaagaaaguuuucuuggc

SEQ ID NO: 2116820 - RNA, 19 nt, Artificial Sequence
  Description of Artificial Sequence: Synthetic oligonucleotide
caacguccaaucguaacug

SEQ ID NO: 2116821 - RNA, 19 nt, Artificial Sequence
  Description of Artificial Sequence: Synthetic oligonucleotide
ccaacuggugucuuaaguc

SEQ ID NO: 2116822 - RNA, 19 nt, Artificial Sequence
  Description of Artificial Sequence: Synthetic oligonucleotide
aggauuuguuuuguccaag

SEQ ID NO: 2116823 - RNA, 19 nt, Artificial Sequence
  Description of Artificial Sequence: Synthetic oligonucleotide
ugauucuguuguuggcgac

SEQ ID NO: 2116824 - RNA, 19 nt, Artificial Sequence
  Description of Artificial Sequence: Synthetic oligonucleotide
acuugcuguuaucucugca

SEQ ID NO: 2116825 - RNA, 19 nt, Artificial Sequence
  Description of Artificial Sequence: Synthetic oligonucleotide
caucuuugagauacauuga

SEQ ID NO: 2116826 - RNA, 19 nt, Artificial Sequence
  Description of Artificial Sequence: Synthetic oligonucleotide
cuuuucaacguccaaucgu

SEQ ID NO: 2116827 - RNA, 19 nt, Artificial Sequence
  Description of Artificial Sequence: Synthetic oligonucleotide
augcuugagagcccugaga

SEQ ID NO: 2116828 - RNA, 19 nt, Artificial Sequence
  Description of Artificial Sequence: Synthetic oligonucleotide
ccugggagaucuuuaacac

SEQ ID NO: 2116829 - RNA, 19 nt, Artificial Sequence
  Description of Artificial Sequence: Synthetic oligonucleotide
agaaagcuucuucugcauu

SEQ ID NO: 2116830 - RNA, 19 nt, Artificial Sequence
  Description of Artificial Sequence: Synthetic oligonucleotide
uuggcgaccgcaagcuccu

SEQ ID NO: 2116831 - RNA, 19 nt, Artificial Sequence
  Description of Artificial Sequence: Synthetic oligonucleotide
ucuaagcgacuguucaguu

SEQ ID NO: 2116832 - RNA, 19 nt, Artificial Sequence
  Description of Artificial Sequence: Synthetic oligonucleotide
cuucuuguugaucaaggcu

SEQ ID NO: 2116833 - RNA, 19 nt, Artificial Sequence
  Description of Artificial Sequence: Synthetic oligonucleotide
auauacucagaaagcuucu

SEQ ID NO: 2116834 - RNA, 19 nt, Artificial Sequence
  Description of Artificial Sequence: Synthetic oligonucleotide
ggaacgagcuuuuccacca

SEQ ID NO: 2116835 - RNA, 19 nt, Artificial Sequence
  Description of Artificial Sequence: Synthetic oligonucleotide
cuucuuccaucaugagggc

SEQ ID NO: 2116836 - RNA, 19 nt, Artificial Sequence
  Description of Artificial Sequence: Synthetic oligonucleotide
gcagcuuaaaggcaagcuc

SEQ ID NO: 2116837 - RNA, 19 nt, Artificial Sequence
  Description of Artificial Sequence: Synthetic oligonucleotide
cuuaaguccugggagaucu

SEQ ID NO: 2116838 - RNA, 19 nt, Artificial Sequence
  Description of Artificial Sequence: Synthetic oligonucleotide
cuugucucaugcugaucug

SEQ ID NO: 2116839 - RNA, 19 nt, Artificial Sequence
  Description of Artificial Sequence: Synthetic oligonucleotide
gaugacauucaggcccacc

SEQ ID NO: 2116840 - RNA, 19 nt, Artificial Sequence
  Description of Artificial Sequence: Synthetic oligonucleotide
gagagcccugagaucaucc

SEQ ID NO: 2116841 - RNA, 19 nt, Artificial Sequence
  Description of Artificial Sequence: Synthetic oligonucleotide
uagaacucacugagaaguu

SEQ ID NO: 2116842 - RNA, 19 nt, Artificial Sequence
  Description of Artificial Sequence: Synthetic oligonucleotide
ucaugagggcauuggcuuc

SEQ ID NO: 2116843 - RNA, 19 nt, Artificial Sequence
  Description of Artificial Sequence: Synthetic oligonucleotide
cuaaauuacuuugcuucca

SEQ ID NO: 2116844 - RNA, 19 nt, Artificial Sequence
  Description of Artificial Sequence: Synthetic oligonucleotide
cauucaggcccaccaggag

SEQ ID NO: 2116845 - RNA, 19 nt, Artificial Sequence
  Description of Artificial Sequence: Synthetic oligonucleotide
guccaaucguaacuguguc

SEQ ID NO: 2116846 - RNA, 19 nt, Artificial Sequence
  Description of Artificial Sequence: Synthetic oligonucleotide
agaggugcauagucagagu

SEQ ID NO: 2116847 - RNA, 19 nt, Artificial Sequence
  Description of Artificial Sequence: Synthetic oligonucleotide
cucguuccauuucuucuug

SEQ ID NO: 2116848 - RNA, 19 nt, Artificial Sequence
  Description of Artificial Sequence: Synthetic oligonucleotide
gucaguuuaguguuggauu

SEQ ID NO: 2116849 - RNA, 19 nt, Artificial Sequence
  Description of Artificial Sequence: Synthetic oligonucleotide
guuuaaugguggcagucua

SEQ ID NO: 2116850 - RNA, 19 nt, Artificial Sequence
  Description of Artificial Sequence: Synthetic oligonucleotide
guugaucaaggcuuucaua

SEQ ID NO: 2116851 - RNA, 19 nt, Artificial Sequence
  Description of Artificial Sequence: Synthetic oligonucleotide
aacucacugagaaguuccu

SEQ ID NO: 2116852 - RNA, 19 nt, Artificial Sequence
  Description of Artificial Sequence: Synthetic oligonucleotide
ggcauccugcuucucacag

SEQ ID NO: 2116853 - RNA, 19 nt, Artificial Sequence
  Description of Artificial Sequence: Synthetic oligonucleotide
ucauccaguugcugccgca

SEQ ID NO: 2116854 - RNA, 19 nt, Artificial Sequence
  Description of Artificial Sequence: Synthetic oligonucleotide
ccuuuucaacguccaaucg

SEQ ID NO: 2116855 - RNA, 19 nt, Artificial Sequence
  Description of Artificial Sequence: Synthetic oligonucleotide
ugguggcagucuaucuuga

SEQ ID NO: 2116856 - RNA, 19 nt, Artificial Sequence
  Description of Artificial Sequence: Synthetic oligonucleotide
uaucuugauuagucuucuc

SEQ ID NO: 2116857 - RNA, 19 nt, Artificial Sequence
  Description of Artificial Sequence: Synthetic oligonucleotide
ccaaucguaacugugucuc

SEQ ID NO: 2116858 - RNA, 19 nt, Artificial Sequence
  Description of Artificial Sequence: Synthetic oligonucleotide
acuguucaguucacuuuuc

SEQ ID NO: 2116859 - RNA, 19 nt, Artificial Sequence
  Description of Artificial Sequence: Synthetic oligonucleotide
ggauuuguuuuguccaaga

SEQ ID NO: 2116860 - RNA, 19 nt, Artificial Sequence
  Description of Artificial Sequence: Synthetic oligonucleotide
acccuuccgacuggauucc

SEQ ID NO: 2116861 - RNA, 19 nt, Artificial Sequence
  Description of Artificial Sequence: Synthetic oligonucleotide
uuccgacuggauuccagua

SEQ ID NO: 2116862 - RNA, 19 nt, Artificial Sequence
  Description of Artificial Sequence: Synthetic oligonucleotide
caagaaaguuuucuuggcu

SEQ ID NO: 2116863 - RNA, 19 nt, Artificial Sequence
  Description of Artificial Sequence: Synthetic oligonucleotide
ugccaacuggugucuuaag

SEQ ID NO: 2116864 - RNA, 19 nt, Artificial Sequence
  Description of Artificial Sequence: Synthetic oligonucleotide
acauucaggcccaccagga

SEQ ID NO: 2116865 - RNA, 19 nt, Artificial Sequence
  Description of Artificial Sequence: Synthetic oligonucleotide
cacuugcuguuaucucugc

SEQ ID NO: 2116866 - RNA, 19 nt, Artificial Sequence
  Description of Artificial Sequence: Synthetic oligonucleotide
aucaaggcuuucauauacu

SEQ ID NO: 2116867 - RNA, 19 nt, Artificial Sequence
  Description of Artificial Sequence: Synthetic oligonucleotide
cauuggcuucauagaacuc

SEQ ID NO: 2116868 - RNA, 19 nt, Artificial Sequence
  Description of Artificial Sequence: Synthetic oligonucleotide
ggcagucuaucuugauuag

SEQ ID NO: 2116869 - RNA, 19 nt, Artificial Sequence
  Description of Artificial Sequence: Synthetic oligonucleotide
aagaacugcuggagaggug

SEQ ID NO: 2116870 - RNA, 19 nt, Artificial Sequence
  Description of Artificial Sequence: Synthetic oligonucleotide
agucagaguccaggguccg

SEQ ID NO: 2116871 - RNA, 19 nt, Artificial Sequence
  Description of Artificial Sequence: Synthetic oligonucleotide
cagcaauaauagcuccuuc

SEQ ID NO: 2116872 - RNA, 19 nt, Artificial Sequence
  Description of Artificial Sequence: Synthetic oligonucleotide
acguccaaucguaacugug

SEQ ID NO: 2116873 - RNA, 19 nt, Artificial Sequence
  Description of Artificial Sequence: Synthetic oligonucleotide
agauaggagcuuucuucuu

SEQ ID NO: 2116874 - RNA, 19 nt, Artificial Sequence
  Description of Artificial Sequence: Synthetic oligonucleotide
cagugcuccaucaccacaa

SEQ ID NO: 2116875 - RNA, 19 nt, Artificial Sequence
  Description of Artificial Sequence: Synthetic oligonucleotide
ggcuuucauauacucagaa

SEQ ID NO: 2116876 - RNA, 19 nt, Artificial Sequence
  Description of Artificial Sequence: Synthetic oligonucleotide
acgagcuuuuccaccagcu

SEQ ID NO: 2116877 - RNA, 19 nt, Artificial Sequence
  Description of Artificial Sequence: Synthetic oligonucleotide
gucuaucuugauuagucuu

SEQ ID NO: 2116878 - RNA, 19 nt, Artificial Sequence
  Description of Artificial Sequence: Synthetic oligonucleotide
gccaaacgaagccaggcuc

SEQ ID NO: 2116879 - RNA, 19 nt, Artificial Sequence
  Description of Artificial Sequence: Synthetic oligonucleotide
gaccgcaagcuccucuguc

SEQ ID NO: 2116880 - RNA, 19 nt, Artificial Sequence
  Description of Artificial Sequence: Synthetic oligonucleotide
aagcgacuguucaguucac

SEQ ID NO: 2116881 - RNA, 19 nt, Artificial Sequence
  Description of Artificial Sequence: Synthetic oligonucleotide
uucuguuguuggcgaccgc

SEQ ID NO: 2116882 - RNA, 19 nt, Artificial Sequence
  Description of Artificial Sequence: Synthetic oligonucleotide
acuggugucuuaaguccug

SEQ ID NO: 2116883 - RNA, 19 nt, Artificial Sequence
  Description of Artificial Sequence: Synthetic oligonucleotide
cuuucaagccauguuucaa

SEQ ID NO: 2116884 - RNA, 19 nt, Artificial Sequence
  Description of Artificial Sequence: Synthetic oligonucleotide
guuuaggacccuuccgacu

SEQ ID NO: 2116885 - RNA, 19 nt, Artificial Sequence
  Description of Artificial Sequence: Synthetic oligonucleotide
uguuggcgaccgcaagcuc

SEQ ID NO: 2116886 - RNA, 19 nt, Artificial Sequence
  Description of Artificial Sequence: Synthetic oligonucleotide
agguaaugauucuguuguu

SEQ ID NO: 2116887 - RNA, 19 nt, Artificial Sequence
  Description of Artificial Sequence: Synthetic oligonucleotide
gggcauuggcuucauagaa

SEQ ID NO: 2116888 - RNA, 19 nt, Artificial Sequence
  Description of Artificial Sequence: Synthetic oligonucleotide
ugucuuguuuaggacccuu

SEQ ID NO: 2116889 - RNA, 19 nt, Artificial Sequence
  Description of Artificial Sequence: Synthetic oligonucleotide
ggcauuggcuucauagaac

SEQ ID NO: 2116890 - RNA, 19 nt, Artificial Sequence
  Description of Artificial Sequence: Synthetic oligonucleotide
ccauguuucaagcagugcu

SEQ ID NO: 2116891 - RNA, 19 nt, Artificial Sequence
  Description of Artificial Sequence: Synthetic oligonucleotide
cuccuaggucugaacucug

SEQ ID NO: 2116892 - RNA, 19 nt, Artificial Sequence
  Description of Artificial Sequence: Synthetic oligonucleotide
guaagguaaugauucuguu

SEQ ID NO: 2116893 - RNA, 19 nt, Artificial Sequence
  Description of Artificial Sequence: Synthetic oligonucleotide
acucagugcuugcccuucu

SEQ ID NO: 2116894 - RNA, 19 nt, Artificial Sequence
  Description of Artificial Sequence: Synthetic oligonucleotide
gucuuguuuaggacccuuc

SEQ ID NO: 2116895 - RNA, 19 nt, Artificial Sequence
  Description of Artificial Sequence: Synthetic oligonucleotide
caguuguuuaaugguggca

SEQ ID NO: 2116896 - RNA, 19 nt, Artificial Sequence
  Description of Artificial Sequence: Synthetic oligonucleotide
gccgcagagacaccagggc

SEQ ID NO: 2116897 - RNA, 19 nt, Artificial Sequence
  Description of Artificial Sequence: Synthetic oligonucleotide
acugcuggagaggugcaua

SEQ ID NO: 2116898 - RNA, 19 nt, Artificial Sequence
  Description of Artificial Sequence: Synthetic oligonucleotide
uuacugcuguuuccaucuu

SEQ ID NO: 2116899 - RNA, 19 nt, Artificial Sequence
  Description of Artificial Sequence: Synthetic oligonucleotide
ugagagcccugagaucauc

SEQ ID NO: 2116900 - RNA, 19 nt, Artificial Sequence
  Description of Artificial Sequence: Synthetic oligonucleotide
uuccaguagauaggagcuu

SEQ ID NO: 2116901 - RNA, 19 nt, Artificial Sequence
  Description of Artificial Sequence: Synthetic oligonucleotide
caccaggagaccagcaaua

SEQ ID NO: 2116902 - RNA, 19 nt, Artificial Sequence
  Description of Artificial Sequence: Synthetic oligonucleotide
gcaauaauagcuccuucuu

SEQ ID NO: 2116903 - RNA, 19 nt, Artificial Sequence
  Description of Artificial Sequence: Synthetic oligonucleotide
cucaugcuugagagcccug

SEQ ID NO: 2116904 - RNA, 19 nt, Artificial Sequence
  Description of Artificial Sequence: Synthetic oligonucleotide
cugggagaucuuuaacacu

SEQ ID NO: 2116905 - RNA, 19 nt, Artificial Sequence
  Description of Artificial Sequence: Synthetic oligonucleotide
agcgacuguucaguucacu

SEQ ID NO: 2116906 - RNA, 19 nt, Artificial Sequence
  Description of Artificial Sequence: Synthetic oligonucleotide
cuuuaacacuugcuguuau

SEQ ID NO: 2116907 - RNA, 19 nt, Artificial Sequence
  Description of Artificial Sequence: Synthetic oligonucleotide
cuguuguuggcgaccgcaa

SEQ ID NO: 2116908 - RNA, 19 nt, Artificial Sequence
  Description of Artificial Sequence: Synthetic oligonucleotide
guuucaagcagugcuccau

SEQ ID NO: 2116909 - RNA, 19 nt, Artificial Sequence
  Description of Artificial Sequence: Synthetic oligonucleotide
gcgaccgcaagcuccucug

SEQ ID NO: 2116910 - RNA, 19 nt, Artificial Sequence
  Description of Artificial Sequence: Synthetic oligonucleotide
ggucuucuccuuucaugca

SEQ ID NO: 2116911 - RNA, 19 nt, Artificial Sequence
  Description of Artificial Sequence: Synthetic oligonucleotide
guggcagucuaucuugauu

SEQ ID NO: 2116912 - RNA, 19 nt, Artificial Sequence
  Description of Artificial Sequence: Synthetic oligonucleotide
guuuuacuccuaggucuga

SEQ ID NO: 2116913 - RNA, 19 nt, Artificial Sequence
  Description of Artificial Sequence: Synthetic oligonucleotide
cacucagugcuugcccuuc

SEQ ID NO: 2116914 - RNA, 19 nt, Artificial Sequence
  Description of Artificial Sequence: Synthetic oligonucleotide
gcuuaaaggcaagcucaug

SEQ ID NO: 2116915 - RNA, 19 nt, Artificial Sequence
  Description of Artificial Sequence: Synthetic oligonucleotide
gggagaucuuuaacacuug

SEQ ID NO: 2116916 - RNA, 19 nt, Artificial Sequence
  Description of Artificial Sequence: Synthetic oligonucleotide
ccaguagauaggagcuuuc

SEQ ID NO: 2116917 - RNA, 19 nt, Artificial Sequence
  Description of Artificial Sequence: Synthetic oligonucleotide
gugcauagucagaguccag

SEQ ID NO: 2116918 - RNA, 19 nt, Artificial Sequence
  Description of Artificial Sequence: Synthetic oligonucleotide
gccaacuggugucuuaagu

SEQ ID NO: 2116919 - RNA, 19 nt, Artificial Sequence
  Description of Artificial Sequence: Synthetic oligonucleotide
ccuaggucugaacucugca

SEQ ID NO: 2116920 - RNA, 19 nt, Artificial Sequence
  Description of Artificial Sequence: Synthetic oligonucleotide
cuccaaccugagaguccag

SEQ ID NO: 2116921 - RNA, 19 nt, Artificial Sequence
  Description of Artificial Sequence: Synthetic oligonucleotide
cuuggcuuucaagccaugu

SEQ ID NO: 2116922 - RNA, 19 nt, Artificial Sequence
  Description of Artificial Sequence: Synthetic oligonucleotide
ccgacuggauuccaguaga

SEQ ID NO: 2116923 - RNA, 19 nt, Artificial Sequence
  Description of Artificial Sequence: Synthetic oligonucleotide
gccauguuucaagcagugc

SEQ ID NO: 2116924 - RNA, 19 nt, Artificial Sequence
  Description of Artificial Sequence: Synthetic oligonucleotide
aggcccaccaggagaccag

SEQ ID NO: 2116925 - RNA, 19 nt, Artificial Sequence
  Description of Artificial Sequence: Synthetic oligonucleotide
ccaccagcucuagaggccc

SEQ ID NO: 2116926 - RNA, 19 nt, Artificial Sequence
  Description of Artificial Sequence: Synthetic oligonucleotide
gucuuaaguccugggagau

SEQ ID NO: 2116927 - RNA, 19 nt, Artificial Sequence
  Description of Artificial Sequence: Synthetic oligonucleotide
gcugaucuggaguuccagu

SEQ ID NO: 2116928 - RNA, 19 nt, Artificial Sequence
  Description of Artificial Sequence: Synthetic oligonucleotide
cuccuuuagaugcuuucuu

SEQ ID NO: 2116929 - RNA, 19 nt, Artificial Sequence
  Description of Artificial Sequence: Synthetic oligonucleotide
ccgcaagcuccucugucag

SEQ ID NO: 2116930 - RNA, 19 nt, Artificial Sequence
  Description of Artificial Sequence: Synthetic oligonucleotide
caguagauaggagcuuucu

SEQ ID NO: 2116931 - RNA, 19 nt, Artificial Sequence
  Description of Artificial Sequence: Synthetic oligonucleotide
augcugaucuggaguucca

SEQ ID NO: 2116932 - RNA, 19 nt, Artificial Sequence
  Description of Artificial Sequence: Synthetic oligonucleotide
augcagaaguuggcaucga

SEQ ID NO: 2116933 - RNA, 19 nt, Artificial Sequence
  Description of Artificial Sequence: Synthetic oligonucleotide
gcauccugcuucucacaga

SEQ ID NO: 2116934 - RNA, 19 nt, Artificial Sequence
  Description of Artificial Sequence: Synthetic oligonucleotide
ccaaacgaagccaggcucu

SEQ ID NO: 2116935 - RNA, 19 nt, Artificial Sequence
  Description of Artificial Sequence: Synthetic oligonucleotide
caggcccaccaggagacca

SEQ ID NO: 2116936 - RNA, 19 nt, Artificial Sequence
  Description of Artificial Sequence: Synthetic oligonucleotide
ccgcagagacaccagggca

SEQ ID NO: 2116937 - RNA, 19 nt, Artificial Sequence
  Description of Artificial Sequence: Synthetic oligonucleotide
gcgacuguucaguucacuu

SEQ ID NO: 2116938 - RNA, 19 nt, Artificial Sequence
  Description of Artificial Sequence: Synthetic oligonucleotide
ggacccuuccgacuggauu

SEQ ID NO: 2116939 - RNA, 19 nt, Artificial Sequence
  Description of Artificial Sequence: Synthetic oligonucleotide
cguccaaucguaacugugu

SEQ ID NO: 2116940 - RNA, 19 nt, Artificial Sequence
  Description of Artificial Sequence: Synthetic oligonucleotide
cuucugcauuaaugccaaa

SEQ ID NO: 2116941 - RNA, 19 nt, Artificial Sequence
  Description of Artificial Sequence: Synthetic oligonucleotide
gcucaugcuugagagcccu

SEQ ID NO: 2116942 - RNA, 19 nt, Artificial Sequence
  Description of Artificial Sequence: Synthetic oligonucleotide
gguggcagucuaucuugau

SEQ ID NO: 2116943 - RNA, 19 nt, Artificial Sequence
  Description of Artificial Sequence: Synthetic oligonucleotide
aggacccuuccgacuggau

SEQ ID NO: 2116944 - RNA, 19 nt, Artificial Sequence
  Description of Artificial Sequence: Synthetic oligonucleotide
caguuuaguguuggauuuu

SEQ ID NO: 2116945 - RNA, 19 nt, Artificial Sequence
  Description of Artificial Sequence: Synthetic oligonucleotide
ggcgaccgcaagcuccucu

SEQ ID NO: 2116946 - RNA, 19 nt, Artificial Sequence
  Description of Artificial Sequence: Synthetic oligonucleotide
ccaguugcugccgcagaga

SEQ ID NO: 2116947 - RNA, 19 nt, Artificial Sequence
  Description of Artificial Sequence: Synthetic oligonucleotide
caaacgaagccaggcucuu

SEQ ID NO: 2116948 - RNA, 19 nt, Artificial Sequence
  Description of Artificial Sequence: Synthetic oligonucleotide
ccagaaggauuuguuuugu

SEQ ID NO: 2116949 - RNA, 19 nt, Artificial Sequence
  Description of Artificial Sequence: Synthetic oligonucleotide
cuuccaucaugagggcauu

SEQ ID NO: 2116950 - RNA, 19 nt, Artificial Sequence
  Description of Artificial Sequence: Synthetic oligonucleotide
uggcgaccgcaagcuccuc

SEQ ID NO: 2116951 - RNA, 19 nt, Artificial Sequence
  Description of Artificial Sequence: Synthetic oligonucleotide
cgacuguucaguucacuuu

SEQ ID NO: 2116952 - RNA, 19 nt, Artificial Sequence
  Description of Artificial Sequence: Synthetic oligonucleotide
ccaggucuucuccuuucau

SEQ ID NO: 2116953 - RNA, 19 nt, Artificial Sequence
  Description of Artificial Sequence: Synthetic oligonucleotide
cgacuggauuccaguagau

SEQ ID NO: 2116954 - RNA, 19 nt, Artificial Sequence
  Description of Artificial Sequence: Synthetic oligonucleotide
cgaccgcaagcuccucugu

SEQ ID NO: 2116955 - RNA, 19 nt, Artificial Sequence
  Description of Artificial Sequence: Synthetic oligonucleotide
aaacccugugggcugaccc

SEQ ID NO: 2116956 - RNA, 19 nt, Artificial Sequence
  Description of Artificial Sequence: Synthetic oligonucleotide
uguccgagcauccugacca

SEQ ID NO: 2116957 - RNA, 19 nt, Artificial Sequence
  Description of Artificial Sequence: Synthetic oligonucleotide
aaggcuacgccauaggcga

SEQ ID NO: 2116958 - RNA, 19 nt, Artificial Sequence
  Description of Artificial Sequence: Synthetic oligonucleotide
ucuguauguggcuugaacu

SEQ ID NO: 2116959 - RNA, 19 nt, Artificial Sequence
  Description of Artificial Sequence: Synthetic oligonucleotide
cauucuacccgcauguggg

SEQ ID NO: 2116960 - RNA, 19 nt, Artificial Sequence
  Description of Artificial Sequence: Synthetic oligonucleotide
agaaggcuacgccauaggc

SEQ ID NO: 2116961 - RNA, 19 nt, Artificial Sequence
  Description of Artificial Sequence: Synthetic oligonucleotide
aagauggccuuucugccgg

SEQ ID NO: 2116962 - RNA, 19 nt, Artificial Sequence
  Description of Artificial Sequence: Synthetic oligonucleotide
gucaagauggccuuucugc

SEQ ID NO: 2116963 - RNA, 19 nt, Artificial Sequence
  Description of Artificial Sequence: Synthetic oligonucleotide
gaagagauggcguacacaa

SEQ ID NO: 2116964 - RNA, 19 nt, Artificial Sequence
  Description of Artificial Sequence: Synthetic oligonucleotide
acagccacacuuuuccagc

SEQ ID NO: 2116965 - RNA, 19 nt, Artificial Sequence
  Description of Artificial Sequence: Synthetic oligonucleotide
auuccgugguaccagugcc

SEQ ID NO: 2116966 - RNA, 19 nt, Artificial Sequence
  Description of Artificial Sequence: Synthetic oligonucleotide
uauuggcacuccucgaugg

SEQ ID NO: 2116967 - RNA, 19 nt, Artificial Sequence
  Description of Artificial Sequence: Synthetic oligonucleotide
gacguuuuguugcaugugc

SEQ ID NO: 2116968 - RNA, 19 nt, Artificial Sequence
  Description of Artificial Sequence: Synthetic oligonucleotide
aucuguauguggcuugaac

SEQ ID NO: 2116969 - RNA, 19 nt, Artificial Sequence
  Description of Artificial Sequence: Synthetic oligonucleotide
auggcguacacaaaggccg

SEQ ID NO: 2116970 - RNA, 19 nt, Artificial Sequence
  Description of Artificial Sequence: Synthetic oligonucleotide
ugacgaagcagcaccagug

SEQ ID NO: 2116971 - RNA, 19 nt, Artificial Sequence
  Description of Artificial Sequence: Synthetic oligonucleotide
gaaggcuacgccauaggcg

SEQ ID NO: 2116972 - RNA, 19 nt, Artificial Sequence
  Description of Artificial Sequence: Synthetic oligonucleotide
accgaugacagcuuggcca

SEQ ID NO: 2116973 - RNA, 19 nt, Artificial Sequence
  Description of Artificial Sequence: Synthetic oligonucleotide
uuuuguugcaugugcggcc

SEQ ID NO: 2116974 - RNA, 19 nt, Artificial Sequence
  Description of Artificial Sequence: Synthetic oligonucleotide
cugguauuggcacuccucg

SEQ ID NO: 2116975 - RNA, 19 nt, Artificial Sequence
  Description of Artificial Sequence: Synthetic oligonucleotide
accacuggaaacccugugg

SEQ ID NO: 2116976 - RNA, 19 nt, Artificial Sequence
  Description of Artificial Sequence: Synthetic oligonucleotide
ggaagggugguacagcucg

SEQ ID NO: 2116977 - RNA, 19 nt, Artificial Sequence
  Description of Artificial Sequence: Synthetic oligonucleotide
ucccguacguccacaaagg

SEQ ID NO: 2116978 - RNA, 19 nt, Artificial Sequence
  Description of Artificial Sequence: Synthetic oligonucleotide
ugcauggcccaccuggcgg

SEQ ID NO: 2116979 - RNA, 19 nt, Artificial Sequence
  Description of Artificial Sequence: Synthetic oligonucleotide
gucuuuaccucgcaggagc

SEQ ID NO: 2116980 - RNA, 19 nt, Artificial Sequence
  Description of Artificial Sequence: Synthetic oligonucleotide
accugugccguguggaagc

SEQ ID NO: 2116981 - RNA, 19 nt, Artificial Sequence
  Description of Artificial Sequence: Synthetic oligonucleotide
uugcauucuacccgcaugu

SEQ ID NO: 2116982 - RNA, 19 nt, Artificial Sequence
  Description of Artificial Sequence: Synthetic oligonucleotide
cacgucuuuaccucgcagg

SEQ ID NO: 2116983 - RNA, 19 nt, Artificial Sequence
  Description of Artificial Sequence: Synthetic oligonucleotide
gaacacggcgaagacaagg

SEQ ID NO: 2116984 - RNA, 19 nt, Artificial Sequence
  Description of Artificial Sequence: Synthetic oligonucleotide
agguacagccaguugcucg

SEQ ID NO: 2116985 - RNA, 19 nt, Artificial Sequence
  Description of Artificial Sequence: Synthetic oligonucleotide
uguuguccgagcauccuga

SEQ ID NO: 2116986 - RNA, 19 nt, Artificial Sequence
  Description of Artificial Sequence: Synthetic oligonucleotide
aguguggagcaguuccagc

SEQ ID NO: 2116987 - RNA, 19 nt, Artificial Sequence
  Description of Artificial Sequence: Synthetic oligonucleotide
uggacugggcuccagguac

SEQ ID NO: 2116988 - RNA, 19 nt, Artificial Sequence
  Description of Artificial Sequence: Synthetic oligonucleotide
ucggagaugcugcccaccg

SEQ ID NO: 2116989 - RNA, 19 nt, Artificial Sequence
  Description of Artificial Sequence: Synthetic oligonucleotide
augagugcccugcuggagg

SEQ ID NO: 2116990 - RNA, 19 nt, Artificial Sequence
  Description of Artificial Sequence: Synthetic oligonucleotide
acggccgcagcacagcagc

SEQ ID NO: 2116991 - RNA, 19 nt, Artificial Sequence
  Description of Artificial Sequence: Synthetic oligonucleotide
uccggaacugguauuggca

SEQ ID NO: 2116992 - RNA, 19 nt, Artificial Sequence
  Description of Artificial Sequence: Synthetic oligonucleotide
ggcacuugcauucuacccg

SEQ ID NO: 2116993 - RNA, 19 nt, Artificial Sequence
  Description of Artificial Sequence: Synthetic oligonucleotide
aaggccgccucccgagucc

SEQ ID NO: 2116994 - RNA, 19 nt, Artificial Sequence
  Description of Artificial Sequence: Synthetic oligonucleotide
uuuagugcauggcccaccu

SEQ ID NO: 2116995 - RNA, 19 nt, Artificial Sequence
  Description of Artificial Sequence: Synthetic oligonucleotide
cuccuuuagugcauggccc

SEQ ID NO: 2116996 - RNA, 19 nt, Artificial Sequence
  Description of Artificial Sequence: Synthetic oligonucleotide
caaggagucgcagcgaccg

SEQ ID NO: 2116997 - RNA, 19 nt, Artificial Sequence
  Description of Artificial Sequence: Synthetic oligonucleotide
gagaacacggcgaagacaa

SEQ ID NO: 2116998 - RNA, 19 nt, Artificial Sequence
  Description of Artificial Sequence: Synthetic oligonucleotide
caagauggccuuucugccg

SEQ ID NO: 2116999 - RNA, 19 nt, Artificial Sequence
  Description of Artificial Sequence: Synthetic oligonucleotide
cuuucugccggccucguug

SEQ ID NO: 2117000 - RNA, 19 nt, Artificial Sequence
  Description of Artificial Sequence: Synthetic oligonucleotide
cacaccacugcgcaugucc

SEQ ID NO: 2117001 - RNA, 19 nt, Artificial Sequence
  Description of Artificial Sequence: Synthetic oligonucleotide
cuugcuucucucccguacg

SEQ ID NO: 2117002 - RNA, 19 nt, Artificial Sequence
  Description of Artificial Sequence: Synthetic oligonucleotide
aaaggccgccucccgaguc

SEQ ID NO: 2117003 - RNA, 19 nt, Artificial Sequence
  Description of Artificial Sequence: Synthetic oligonucleotide
ucacaggucuccucuucgg

SEQ ID NO: 2117004 - RNA, 19 nt, Artificial Sequence
  Description of Artificial Sequence: Synthetic oligonucleotide
cuugcauucuacccgcaug

SEQ ID NO: 2117005 - RNA, 19 nt, Artificial Sequence
  Description of Artificial Sequence: Synthetic oligonucleotide
uuuguugcaugugcggccc

SEQ ID NO: 2117006 - RNA, 19 nt, Artificial Sequence
  Description of Artificial Sequence: Synthetic oligonucleotide
acggcgaagacaaggaguc

SEQ ID NO: 2117007 - RNA, 19 nt, Artificial Sequence
  Description of Artificial Sequence: Synthetic oligonucleotide
gguacagcucgccagcacg

SEQ ID NO: 2117008 - RNA, 19 nt, Artificial Sequence
  Description of Artificial Sequence: Synthetic oligonucleotide
gagaaggcuacgccauagg

SEQ ID NO: 2117009 - RNA, 19 nt, Artificial Sequence
  Description of Artificial Sequence: Synthetic oligonucleotide
ugcugcacgcccuuguuac

SEQ ID NO: 2117010 - RNA, 19 nt, Artificial Sequence
  Description of Artificial Sequence: Synthetic oligonucleotide
uuuaccucgcaggagccug

SEQ ID NO: 2117011 - RNA, 19 nt, Artificial Sequence
  Description of Artificial Sequence: Synthetic oligonucleotide
ucuguggcaccaucaaacu

SEQ ID NO: 2117012 - RNA, 19 nt, Artificial Sequence
  Description of Artificial Sequence: Synthetic oligonucleotide
uuggacguuuuguugcaug

SEQ ID NO: 2117013 - RNA, 19 nt, Artificial Sequence
  Description of Artificial Sequence: Synthetic oligonucleotide
gacaaggagucgcagcgac

SEQ ID NO: 2117014 - RNA, 19 nt, Artificial Sequence
  Description of Artificial Sequence: Synthetic oligonucleotide
uccuuuagugcauggccca

SEQ ID NO: 2117015 - RNA, 19 nt, Artificial Sequence
  Description of Artificial Sequence: Synthetic oligonucleotide
accacugcgcauguccugc

SEQ ID NO: 2117016 - RNA, 19 nt, Artificial Sequence
  Description of Artificial Sequence: Synthetic oligonucleotide
uguauguggcuugaacugu

SEQ ID NO: 2117017 - RNA, 19 nt, Artificial Sequence
  Description of Artificial Sequence: Synthetic oligonucleotide
cacuuuuccagcucuccac

SEQ ID NO: 2117018 - RNA, 19 nt, Artificial Sequence
  Description of Artificial Sequence: Synthetic oligonucleotide
aaggagucgcagcgaccgc

SEQ ID NO: 2117019 - RNA, 19 nt, Artificial Sequence
  Description of Artificial Sequence: Synthetic oligonucleotide
ugugggcugaccccgugca

SEQ ID NO: 2117020 - RNA, 19 nt, Artificial Sequence
  Description of Artificial Sequence: Synthetic oligonucleotide
ugugcauuccgugguacca

SEQ ID NO: 2117021 - RNA, 19 nt, Artificial Sequence
  Description of Artificial Sequence: Synthetic oligonucleotide
aacacggcgaagacaagga

SEQ ID NO: 2117022 - RNA, 19 nt, Artificial Sequence
  Description of Artificial Sequence: Synthetic oligonucleotide
cgcaugugggucaagaugg

SEQ ID NO: 2117023 - RNA, 19 nt, Artificial Sequence
  Description of Artificial Sequence: Synthetic oligonucleotide
uguggagcaguuccagcgu

SEQ ID NO: 2117024 - RNA, 19 nt, Artificial Sequence
  Description of Artificial Sequence: Synthetic oligonucleotide
cucacaggucuccucuucg

SEQ ID NO: 2117025 - RNA, 19 nt, Artificial Sequence
  Description of Artificial Sequence: Synthetic oligonucleotide
gcuugaacugugcauuccg

SEQ ID NO: 2117026 - RNA, 19 nt, Artificial Sequence
  Description of Artificial Sequence: Synthetic oligonucleotide
acgucuuuaccucgcagga

SEQ ID NO: 2117027 - RNA, 19 nt, Artificial Sequence
  Description of Artificial Sequence: Synthetic oligonucleotide
ucuacccgcauguggguca

SEQ ID NO: 2117028 - RNA, 19 nt, Artificial Sequence
  Description of Artificial Sequence: Synthetic oligonucleotide
gugaagguucaugagugcc

SEQ ID NO: 2117029 - RNA, 19 nt, Artificial Sequence
  Description of Artificial Sequence: Synthetic oligonucleotide
gccagguacagccaguugc

SEQ ID NO: 2117030 - RNA, 19 nt, Artificial Sequence
  Description of Artificial Sequence: Synthetic oligonucleotide
ugaagagauggcguacaca

SEQ ID NO: 2117031 - RNA, 19 nt, Artificial Sequence
  Description of Artificial Sequence: Synthetic oligonucleotide
uccgugguaccagugcccg

SEQ ID NO: 2117032 - RNA, 19 nt, Artificial Sequence
  Description of Artificial Sequence: Synthetic oligonucleotide
uuccggaacugguauuggc

SEQ ID NO: 2117033 - RNA, 19 nt, Artificial Sequence
  Description of Artificial Sequence: Synthetic oligonucleotide
acagccaucaauggccuug

SEQ ID NO: 2117034 - RNA, 19 nt, Artificial Sequence
  Description of Artificial Sequence: Synthetic oligonucleotide
augugcggccccucgugcc

SEQ ID NO: 2117035 - RNA, 19 nt, Artificial Sequence
  Description of Artificial Sequence: Synthetic oligonucleotide
gacugugagaaggcuacgc

SEQ ID NO: 2117036 - RNA, 19 nt, Artificial Sequence
  Description of Artificial Sequence: Synthetic oligonucleotide
uccugcucgcagaagucug

SEQ ID NO: 2117037 - RNA, 19 nt, Artificial Sequence
  Description of Artificial Sequence: Synthetic oligonucleotide
guauuggcacuccucgaug

SEQ ID NO: 2117038 - RNA, 19 nt, Artificial Sequence
  Description of Artificial Sequence: Synthetic oligonucleotide
ugaccccgugcacuguccg

SEQ ID NO: 2117039 - RNA, 19 nt, Artificial Sequence
  Description of Artificial Sequence: Synthetic oligonucleotide
acguuuuguugcaugugcg

SEQ ID NO: 2117040 - RNA, 19 nt, Artificial Sequence
  Description of Artificial Sequence: Synthetic oligonucleotide
gguaccagugcccgggagg

SEQ ID NO: 2117041 - RNA, 19 nt, Artificial Sequence
  Description of Artificial Sequence: Synthetic oligonucleotide
gcauucuacccgcaugugg

SEQ ID NO: 2117042 - RNA, 19 nt, Artificial Sequence
  Description of Artificial Sequence: Synthetic oligonucleotide
gcaugugugcaucuccacg

SEQ ID NO: 2117043 - RNA, 19 nt, Artificial Sequence
  Description of Artificial Sequence: Synthetic oligonucleotide
uaggcgauguuguccgagc

SEQ ID NO: 2117044 - RNA, 19 nt, Artificial Sequence
  Description of Artificial Sequence: Synthetic oligonucleotide
gguacagccaguugcucgc

SEQ ID NO: 2117045 - RNA, 19 nt, Artificial Sequence
  Description of Artificial Sequence: Synthetic oligonucleotide
ucgguuccggaacugguau

SEQ ID NO: 2117046 - RNA, 19 nt, Artificial Sequence
  Description of Artificial Sequence: Synthetic oligonucleotide
acugugcauuccgugguac

SEQ ID NO: 2117047 - RNA, 19 nt, Artificial Sequence
  Description of Artificial Sequence: Synthetic oligonucleotide
caccgaguccaucaccucc

SEQ ID NO: 2117048 - RNA, 19 nt, Artificial Sequence
  Description of Artificial Sequence: Synthetic oligonucleotide
guacacaaaggccgccucc

SEQ ID NO: 2117049 - RNA, 19 nt, Artificial Sequence
  Description of Artificial Sequence: Synthetic oligonucleotide
uguccggucacagccacac

SEQ ID NO: 2117050 - RNA, 19 nt, Artificial Sequence
  Description of Artificial Sequence: Synthetic oligonucleotide
ugccguguggaagccacgg

SEQ ID NO: 2117051 - RNA, 19 nt, Artificial Sequence
  Description of Artificial Sequence: Synthetic oligonucleotide
uuguccgagcauccugacc

SEQ ID NO: 2117052 - RNA, 19 nt, Artificial Sequence
  Description of Artificial Sequence: Synthetic oligonucleotide
cuugugucaccaccuuccc

SEQ ID NO: 2117053 - RNA, 19 nt, Artificial Sequence
  Description of Artificial Sequence: Synthetic oligonucleotide
acgacguggcucuaccucu

SEQ ID NO: 2117054 - RNA, 19 nt, Artificial Sequence
  Description of Artificial Sequence: Synthetic oligonucleotide
guggcacuugcauucuacc

SEQ ID NO: 2117055 - RNA, 19 nt, Artificial Sequence
  Description of Artificial Sequence: Synthetic oligonucleotide
uguuacugcaaaggccaca

SEQ ID NO: 2117056 - RNA, 19 nt, Artificial Sequence
  Description of Artificial Sequence: Synthetic oligonucleotide
cucgccagcacgucuuuac

SEQ ID NO: 2117057 - RNA, 19 nt, Artificial Sequence
  Description of Artificial Sequence: Synthetic oligonucleotide
uggcguacacaaaggccgc

SEQ ID NO: 2117058 - RNA, 19 nt, Artificial Sequence
  Description of Artificial Sequence: Synthetic oligonucleotide
caguggaaccugcagccgc

SEQ ID NO: 2117059 - RNA, 19 nt, Artificial Sequence
  Description of Artificial Sequence: Synthetic oligonucleotide
ugagugcccugcuggagga

SEQ ID NO: 2117060 - RNA, 19 nt, Artificial Sequence
  Description of Artificial Sequence: Synthetic oligonucleotide
ugugggucaagauggccuu

SEQ ID NO: 2117061 - RNA, 19 nt, Artificial Sequence
  Description of Artificial Sequence: Synthetic oligonucleotide
cacuggaaacccugugggc

SEQ ID NO: 2117062 - RNA, 19 nt, Artificial Sequence
  Description of Artificial Sequence: Synthetic oligonucleotide
ucgccagcacgucuuuacc

SEQ ID NO: 2117063 - RNA, 19 nt, Artificial Sequence
  Description of Artificial Sequence: Synthetic oligonucleotide
ugguauuggcacuccucga

SEQ ID NO: 2117064 - RNA, 19 nt, Artificial Sequence
  Description of Artificial Sequence: Synthetic oligonucleotide
cacacuuuuccagcucucc

SEQ ID NO: 2117065 - RNA, 19 nt, Artificial Sequence
  Description of Artificial Sequence: Synthetic oligonucleotide
ucgcaggagccugacaccc

SEQ ID NO: 2117066 - RNA, 19 nt, Artificial Sequence
  Description of Artificial Sequence: Synthetic oligonucleotide
cacacgacguggcucuacc

SEQ ID NO: 2117067 - RNA, 19 nt, Artificial Sequence
  Description of Artificial Sequence: Synthetic oligonucleotide
aguuccagcgucgguuccg

SEQ ID NO: 2117068 - RNA, 19 nt, Artificial Sequence
  Description of Artificial Sequence: Synthetic oligonucleotide
auaggcgauguuguccgag

SEQ ID NO: 2117069 - RNA, 19 nt, Artificial Sequence
  Description of Artificial Sequence: Synthetic oligonucleotide
uuucugccggccucguugu

SEQ ID NO: 2117070 - RNA, 19 nt, Artificial Sequence
  Description of Artificial Sequence: Synthetic oligonucleotide
acguccacaaaggacugug

SEQ ID NO: 2117071 - RNA, 19 nt, Artificial Sequence
  Description of Artificial Sequence: Synthetic oligonucleotide
ugucggcacuugacgaagc

SEQ ID NO: 2117072 - RNA, 19 nt, Artificial Sequence
  Description of Artificial Sequence: Synthetic oligonucleotide
ucggcacuugacgaagcag

SEQ ID NO: 2117073 - RNA, 19 nt, Artificial Sequence
  Description of Artificial Sequence: Synthetic oligonucleotide
ccacuggaaacccuguggg

SEQ ID NO: 2117074 - RNA, 19 nt, Artificial Sequence
  Description of Artificial Sequence: Synthetic oligonucleotide
ugugcggccccucgugccc

SEQ ID NO: 2117075 - RNA, 19 nt, Artificial Sequence
  Description of Artificial Sequence: Synthetic oligonucleotide
cuuuagugcauggcccacc

SEQ ID NO: 2117076 - RNA, 19 nt, Artificial Sequence
  Description of Artificial Sequence: Synthetic oligonucleotide
acaaggagucgcagcgacc

SEQ ID NO: 2117077 - RNA, 19 nt, Artificial Sequence
  Description of Artificial Sequence: Synthetic oligonucleotide
gcacugucggcacuugacg

SEQ ID NO: 2117078 - RNA, 19 nt, Artificial Sequence
  Description of Artificial Sequence: Synthetic oligonucleotide
acgaagcagcaccagugga

SEQ ID NO: 2117079 - RNA, 19 nt, Artificial Sequence
  Description of Artificial Sequence: Synthetic oligonucleotide
acugucggcacuugacgaa

SEQ ID NO: 2117080 - RNA, 19 nt, Artificial Sequence
  Description of Artificial Sequence: Synthetic oligonucleotide
uccagcgucgguuccggaa

SEQ ID NO: 2117081 - RNA, 19 nt, Artificial Sequence
  Description of Artificial Sequence: Synthetic oligonucleotide
ugcauuccgugguaccagu

SEQ ID NO: 2117082 - RNA, 19 nt, Artificial Sequence
  Description of Artificial Sequence: Synthetic oligonucleotide
guauguggcuugaacugug

SEQ ID NO: 2117083 - RNA, 19 nt, Artificial Sequence
  Description of Artificial Sequence: Synthetic oligonucleotide
cugaagagauggcguacac

SEQ ID NO: 2117084 - RNA, 19 nt, Artificial Sequence
  Description of Artificial Sequence: Synthetic oligonucleotide
cacgacguggcucuaccuc

SEQ ID NO: 2117085 - RNA, 19 nt, Artificial Sequence
  Description of Artificial Sequence: Synthetic oligonucleotide
ucccgagucccuuguguca

SEQ ID NO: 2117086 - RNA, 19 nt, Artificial Sequence
  Description of Artificial Sequence: Synthetic oligonucleotide
cucgcaggagccugacacc

SEQ ID NO: 2117087 - RNA, 19 nt, Artificial Sequence
  Description of Artificial Sequence: Synthetic oligonucleotide
aacugugcauuccguggua

SEQ ID NO: 2117088 - RNA, 19 nt, Artificial Sequence
  Description of Artificial Sequence: Synthetic oligonucleotide
auucuacccgcaugugggu

SEQ ID NO: 2117089 - RNA, 19 nt, Artificial Sequence
  Description of Artificial Sequence: Synthetic oligonucleotide
ucccuugcuucucucccgu

SEQ ID NO: 2117090 - RNA, 19 nt, Artificial Sequence
  Description of Artificial Sequence: Synthetic oligonucleotide
ggcgaagacaaggagucgc

SEQ ID NO: 2117091 - RNA, 19 nt, Artificial Sequence
  Description of Artificial Sequence: Synthetic oligonucleotide
ucgcagaagucuggacugg

SEQ ID NO: 2117092 - RNA, 19 nt, Artificial Sequence
  Description of Artificial Sequence: Synthetic oligonucleotide
ugguaccagugcccgggag

SEQ ID NO: 2117093 - RNA, 19 nt, Artificial Sequence
  Description of Artificial Sequence: Synthetic oligonucleotide
uccgcuugcacagcugcac

SEQ ID NO: 2117094 - RNA, 19 nt, Artificial Sequence
  Description of Artificial Sequence: Synthetic oligonucleotide
acuugcauucuacccgcau

SEQ ID NO: 2117095 - RNA, 19 nt, Artificial Sequence
  Description of Artificial Sequence: Synthetic oligonucleotide
cccgaagacaggcagggag

SEQ ID NO: 2117096 - RNA, 19 nt, Artificial Sequence
  Description of Artificial Sequence: Synthetic oligonucleotide
agcaguuccagcgucgguu

SEQ ID NO: 2117097 - RNA, 19 nt, Artificial Sequence
  Description of Artificial Sequence: Synthetic oligonucleotide
uuaccucgcaggagccuga

SEQ ID NO: 2117098 - RNA, 19 nt, Artificial Sequence
  Description of Artificial Sequence: Synthetic oligonucleotide
acagcucgccagcacgucu

SEQ ID NO: 2117099 - RNA, 19 nt, Artificial Sequence
  Description of Artificial Sequence: Synthetic oligonucleotide
gcucacagccaucaauggc

SEQ ID NO: 2117100 - RNA, 19 nt, Artificial Sequence
  Description of Artificial Sequence: Synthetic oligonucleotide
cccuuguuacugcaaaggc

SEQ ID NO: 2117101 - RNA, 19 nt, Artificial Sequence
  Description of Artificial Sequence: Synthetic oligonucleotide
gaccccgugcacuguccgg

SEQ ID NO: 2117102 - RNA, 19 nt, Artificial Sequence
  Description of Artificial Sequence: Synthetic oligonucleotide
ugggcugaccccgugcacu

SEQ ID NO: 2117103 - RNA, 19 nt, Artificial Sequence
  Description of Artificial Sequence: Synthetic oligonucleotide
ugcaugugcggccccucgu

SEQ ID NO: 2117104 - RNA, 19 nt, Artificial Sequence
  Description of Artificial Sequence: Synthetic oligonucleotide
cagccaguugcucgcggcg

SEQ ID NO: 2117105 - RNA, 19 nt, Artificial Sequence
  Description of Artificial Sequence: Synthetic oligonucleotide
caugugcggccccucgugc

SEQ ID NO: 2117106 - RNA, 19 nt, Artificial Sequence
  Description of Artificial Sequence: Synthetic oligonucleotide
uccacgagucgcuggcacu

SEQ ID NO: 2117107 - RNA, 19 nt, Artificial Sequence
  Description of Artificial Sequence: Synthetic oligonucleotide
ucaauggccuuggacguuu

SEQ ID NO: 2117108 - RNA, 19 nt, Artificial Sequence
  Description of Artificial Sequence: Synthetic oligonucleotide
gugcauggcccaccuggcg

SEQ ID NO: 2117109 - RNA, 19 nt, Artificial Sequence
  Description of Artificial Sequence: Synthetic oligonucleotide
cguuuuguugcaugugcgg

SEQ ID NO: 2117110 - RNA, 19 nt, Artificial Sequence
  Description of Artificial Sequence: Synthetic oligonucleotide
aagccacggccgcagcaca

SEQ ID NO: 2117111 - RNA, 19 nt, Artificial Sequence
  Description of Artificial Sequence: Synthetic oligonucleotide
aggcgauguuguccgagca

SEQ ID NO: 2117112 - RNA, 19 nt, Artificial Sequence
  Description of Artificial Sequence: Synthetic oligonucleotide
uggcggaagggugguacag

SEQ ID NO: 2117113 - RNA, 19 nt, Artificial Sequence
  Description of Artificial Sequence: Synthetic oligonucleotide
cagcacgucuuuaccucgc

SEQ ID NO: 2117114 - RNA, 19 nt, Artificial Sequence
  Description of Artificial Sequence: Synthetic oligonucleotide
cacugucggcacuugacga

SEQ ID NO: 2117115 - RNA, 19 nt, Artificial Sequence
  Description of Artificial Sequence: Synthetic oligonucleotide
ugcauucuacccgcaugug

SEQ ID NO: 2117116 - RNA, 19 nt, Artificial Sequence
  Description of Artificial Sequence: Synthetic oligonucleotide
uucggagaugcugcccacc

SEQ ID NO: 2117117 - RNA, 19 nt, Artificial Sequence
  Description of Artificial Sequence: Synthetic oligonucleotide
cagcacaccacugcgcaug

SEQ ID NO: 2117118 - RNA, 19 nt, Artificial Sequence
  Description of Artificial Sequence: Synthetic oligonucleotide
cucgcggcggccgagaaca

SEQ ID NO: 2117119 - RNA, 19 nt, Artificial Sequence
  Description of Artificial Sequence: Synthetic oligonucleotide
acgcccuuguuacugcaaa

SEQ ID NO: 2117120 - RNA, 19 nt, Artificial Sequence
  Description of Artificial Sequence: Synthetic oligonucleotide
ugcucgcagaagucuggac

SEQ ID NO: 2117121 - RNA, 19 nt, Artificial Sequence
  Description of Artificial Sequence: Synthetic oligonucleotide
guuccagcgucgguuccgg

SEQ ID NO: 2117122 - RNA, 19 nt, Artificial Sequence
  Description of Artificial Sequence: Synthetic oligonucleotide
gugcauuccgugguaccag

SEQ ID NO: 2117123 - RNA, 19 nt, Artificial Sequence
  Description of Artificial Sequence: Synthetic oligonucleotide
caccgaugacagcuuggcc

SEQ ID NO: 2117124 - RNA, 19 nt, Artificial Sequence
  Description of Artificial Sequence: Synthetic oligonucleotide
cugaccccgugcacugucc

SEQ ID NO: 2117125 - RNA, 19 nt, Artificial Sequence
  Description of Artificial Sequence: Synthetic oligonucleotide
guacaccagguccucaucu

SEQ ID NO: 2117126 - RNA, 19 nt, Artificial Sequence
  Description of Artificial Sequence: Synthetic oligonucleotide
agcacgucuuuaccucgca

SEQ ID NO: 2117127 - RNA, 19 nt, Artificial Sequence
  Description of Artificial Sequence: Synthetic oligonucleotide
caguguggagcaguuccag

SEQ ID NO: 2117128 - RNA, 19 nt, Artificial Sequence
  Description of Artificial Sequence: Synthetic oligonucleotide
auggccuuucugccggccu

SEQ ID NO: 2117129 - RNA, 19 nt, Artificial Sequence
  Description of Artificial Sequence: Synthetic oligonucleotide
uguugcaugugcggccccu

SEQ ID NO: 2117130 - RNA, 19 nt, Artificial Sequence
  Description of Artificial Sequence: Synthetic oligonucleotide
agcccacacgacguggcuc

SEQ ID NO: 2117131 - RNA, 19 nt, Artificial Sequence
  Description of Artificial Sequence: Synthetic oligonucleotide
cuccacgagucgcuggcac

SEQ ID NO: 2117132 - RNA, 19 nt, Artificial Sequence
  Description of Artificial Sequence: Synthetic oligonucleotide
uguggaagccacggccgca

SEQ ID NO: 2117133 - RNA, 19 nt, Artificial Sequence
  Description of Artificial Sequence: Synthetic oligonucleotide
ggaacugguauuggcacuc

SEQ ID NO: 2117134 - RNA, 19 nt, Artificial Sequence
  Description of Artificial Sequence: Synthetic oligonucleotide
uuguugcaugugcggcccc

SEQ ID NO: 2117135 - RNA, 19 nt, Artificial Sequence
  Description of Artificial Sequence: Synthetic oligonucleotide
aagagauggcguacacaaa

SEQ ID NO: 2117136 - RNA, 19 nt, Artificial Sequence
  Description of Artificial Sequence: Synthetic oligonucleotide
caaaggccacaccugcuga

SEQ ID NO: 2117137 - RNA, 19 nt, Artificial Sequence
  Description of Artificial Sequence: Synthetic oligonucleotide
guuguccgagcauccugac

SEQ ID NO: 2117138 - RNA, 19 nt, Artificial Sequence
  Description of Artificial Sequence: Synthetic oligonucleotide
ccagcacgucuuuaccucg

SEQ ID NO: 2117139 - RNA, 19 nt, Artificial Sequence
  Description of Artificial Sequence: Synthetic oligonucleotide
gcucccuugcuucucuccc

SEQ ID NO: 2117140 - RNA, 19 nt, Artificial Sequence
  Description of Artificial Sequence: Synthetic oligonucleotide
guacguccacaaaggacug

SEQ ID NO: 2117141 - RNA, 19 nt, Artificial Sequence
  Description of Artificial Sequence: Synthetic oligonucleotide
agcacaccacugcgcaugu

SEQ ID NO: 2117142 - RNA, 19 nt, Artificial Sequence
  Description of Artificial Sequence: Synthetic oligonucleotide
uucuacccgcauguggguc

SEQ ID NO: 2117143 - RNA, 19 nt, Artificial Sequence
  Description of Artificial Sequence: Synthetic oligonucleotide
cugugggcugaccccgugc

SEQ ID NO: 2117144 - RNA, 19 nt, Artificial Sequence
  Description of Artificial Sequence: Synthetic oligonucleotide
aggagucgcagcgaccgca

SEQ ID NO: 2117145 - RNA, 19 nt, Artificial Sequence
  Description of Artificial Sequence: Synthetic oligonucleotide
ccggaacugguauuggcac

SEQ ID NO: 2117146 - RNA, 19 nt, Artificial Sequence
  Description of Artificial Sequence: Synthetic oligonucleotide
cugcacgcccuuguuacug

SEQ ID NO: 2117147 - RNA, 19 nt, Artificial Sequence
  Description of Artificial Sequence: Synthetic oligonucleotide
cuucggagaugcugcccac

SEQ ID NO: 2117148 - RNA, 19 nt, Artificial Sequence
  Description of Artificial Sequence: Synthetic oligonucleotide
gaaacccugugggcugacc

SEQ ID NO: 2117149 - RNA, 19 nt, Artificial Sequence
  Description of Artificial Sequence: Synthetic oligonucleotide
acacgacguggcucuaccu

SEQ ID NO: 2117150 - RNA, 19 nt, Artificial Sequence
  Description of Artificial Sequence: Synthetic oligonucleotide
guaccagugcccgggagga

SEQ ID NO: 2117151 - RNA, 19 nt, Artificial Sequence
  Description of Artificial Sequence: Synthetic oligonucleotide
guggagcaguuccagcguc

SEQ ID NO: 2117152 - RNA, 19 nt, Artificial Sequence
  Description of Artificial Sequence: Synthetic oligonucleotide
gauggccuuucugccggcc

SEQ ID NO: 2117153 - RNA, 19 nt, Artificial Sequence
  Description of Artificial Sequence: Synthetic oligonucleotide
cacggcgaagacaaggagu

SEQ ID NO: 2117154 - RNA, 19 nt, Artificial Sequence
  Description of Artificial Sequence: Synthetic oligonucleotide
ggagcaguuccagcgucgg

SEQ ID NO: 2117155 - RNA, 19 nt, Artificial Sequence
  Description of Artificial Sequence: Synthetic oligonucleotide
accggcaugugugcaucuc

SEQ ID NO: 2117156 - RNA, 19 nt, Artificial Sequence
  Description of Artificial Sequence: Synthetic oligonucleotide
aggaggcucccuugcuucu

SEQ ID NO: 2117157 - RNA, 19 nt, Artificial Sequence
  Description of Artificial Sequence: Synthetic oligonucleotide
cguacguccacaaaggacu

SEQ ID NO: 2117158 - RNA, 19 nt, Artificial Sequence
  Description of Artificial Sequence: Synthetic oligonucleotide
cuugaacugugcauuccgu

SEQ ID NO: 2117159 - RNA, 19 nt, Artificial Sequence
  Description of Artificial Sequence: Synthetic oligonucleotide
ggccaacuccaccugugcc

SEQ ID NO: 2117160 - RNA, 19 nt, Artificial Sequence
  Description of Artificial Sequence: Synthetic oligonucleotide
ccgcaugugggucaagaug

SEQ ID NO: 2117161 - RNA, 19 nt, Artificial Sequence
  Description of Artificial Sequence: Synthetic oligonucleotide
gucggcacuugacgaagca

SEQ ID NO: 2117162 - RNA, 19 nt, Artificial Sequence
  Description of Artificial Sequence: Synthetic oligonucleotide
caccugcugaagagauggc

SEQ ID NO: 2117163 - RNA, 19 nt, Artificial Sequence
  Description of Artificial Sequence: Synthetic oligonucleotide
guacagccaguugcucgcg

SEQ ID NO: 2117164 - RNA, 19 nt, Artificial Sequence
  Description of Artificial Sequence: Synthetic oligonucleotide
agcauccugaccacuggaa

SEQ ID NO: 2117165 - RNA, 19 nt, Artificial Sequence
  Description of Artificial Sequence: Synthetic oligonucleotide
gccagcacgucuuuaccuc

SEQ ID NO: 2117166 - RNA, 19 nt, Artificial Sequence
  Description of Artificial Sequence: Synthetic oligonucleotide
uacguccacaaaggacugu

SEQ ID NO: 2117167 - RNA, 19 nt, Artificial Sequence
  Description of Artificial Sequence: Synthetic oligonucleotide
ccuugcuucucucccguac

SEQ ID NO: 2117168 - RNA, 19 nt, Artificial Sequence
  Description of Artificial Sequence: Synthetic oligonucleotide
cacaggucuccucuucgga

SEQ ID NO: 2117169 - RNA, 19 nt, Artificial Sequence
  Description of Artificial Sequence: Synthetic oligonucleotide
gaugacagcuuggccaggu

SEQ ID NO: 2117170 - RNA, 19 nt, Artificial Sequence
  Description of Artificial Sequence: Synthetic oligonucleotide
caccacugcgcauguccug

SEQ ID NO: 2117171 - RNA, 19 nt, Artificial Sequence
  Description of Artificial Sequence: Synthetic oligonucleotide
cacaaaggccgccucccga

SEQ ID NO: 2117172 - RNA, 19 nt, Artificial Sequence
  Description of Artificial Sequence: Synthetic oligonucleotide
gcggcggccgagaacacgg

SEQ ID NO: 2117173 - RNA, 19 nt, Artificial Sequence
  Description of Artificial Sequence: Synthetic oligonucleotide
acccgcaugugggucaaga

SEQ ID NO: 2117174 - RNA, 19 nt, Artificial Sequence
  Description of Artificial Sequence: Synthetic oligonucleotide
gguauuggcacuccucgau

SEQ ID NO: 2117175 - RNA, 19 nt, Artificial Sequence
  Description of Artificial Sequence: Synthetic oligonucleotide
ggcggccgagaacacggcg

SEQ ID NO: 2117176 - RNA, 19 nt, Artificial Sequence
  Description of Artificial Sequence: Synthetic oligonucleotide
gcucgcagaagucuggacu

SEQ ID NO: 2117177 - RNA, 19 nt, Artificial Sequence
  Description of Artificial Sequence: Synthetic oligonucleotide
gagucccuugugucaccac

SEQ ID NO: 2117178 - RNA, 19 nt, Artificial Sequence
  Description of Artificial Sequence: Synthetic oligonucleotide
cacggccgcagcacagcag

SEQ ID NO: 2117179 - RNA, 19 nt, Artificial Sequence
  Description of Artificial Sequence: Synthetic oligonucleotide
aguugcucgcggcggccga

SEQ ID NO: 2117180 - RNA, 19 nt, Artificial Sequence
  Description of Artificial Sequence: Synthetic oligonucleotide
ggacguuuuguugcaugug

SEQ ID NO: 2117181 - RNA, 19 nt, Artificial Sequence
  Description of Artificial Sequence: Synthetic oligonucleotide
gugcacuguccggucacag

SEQ ID NO: 2117182 - RNA, 19 nt, Artificial Sequence
  Description of Artificial Sequence: Synthetic oligonucleotide
gcgauguuguccgagcauc

SEQ ID NO: 2117183 - RNA, 19 nt, Artificial Sequence
  Description of Artificial Sequence: Synthetic oligonucleotide
accccgugcacuguccggu

SEQ ID NO: 2117184 - RNA, 19 nt, Artificial Sequence
  Description of Artificial Sequence: Synthetic oligonucleotide
caguugcucgcggcggccg

SEQ ID NO: 2117185 - RNA, 19 nt, Artificial Sequence
  Description of Artificial Sequence: Synthetic oligonucleotide
ucuccacgagucgcuggca

SEQ ID NO: 2117186 - RNA, 19 nt, Artificial Sequence
  Description of Artificial Sequence: Synthetic oligonucleotide
uccgagcauccugaccacu

SEQ ID NO: 2117187 - RNA, 19 nt, Artificial Sequence
  Description of Artificial Sequence: Synthetic oligonucleotide
ggcaugugugcaucuccac

SEQ ID NO: 2117188 - RNA, 19 nt, Artificial Sequence
  Description of Artificial Sequence: Synthetic oligonucleotide
ccgagcauccugaccacug

SEQ ID NO: 2117189 - RNA, 19 nt, Artificial Sequence
  Description of Artificial Sequence: Synthetic oligonucleotide
ggcuugaacugugcauucc

SEQ ID NO: 2117190 - RNA, 19 nt, Artificial Sequence
  Description of Artificial Sequence: Synthetic oligonucleotide
gcaguuccagcgucgguuc

SEQ ID NO: 2117191 - RNA, 19 nt, Artificial Sequence
  Description of Artificial Sequence: Synthetic oligonucleotide
ccaccgaugacagcuuggc

SEQ ID NO: 2117192 - RNA, 19 nt, Artificial Sequence
  Description of Artificial Sequence: Synthetic oligonucleotide
ccagcgucgguuccggaac

SEQ ID NO: 2117193 - RNA, 19 nt, Artificial Sequence
  Description of Artificial Sequence: Synthetic oligonucleotide
cugcccaccgaugacagcu

SEQ ID NO: 2117194 - RNA, 19 nt, Artificial Sequence
  Description of Artificial Sequence: Synthetic oligonucleotide
gcgcauguccugcucgcag

SEQ ID NO: 2117195 - RNA, 19 nt, Artificial Sequence
  Description of Artificial Sequence: Synthetic oligonucleotide
cccaccgaugacagcuugg

SEQ ID NO: 2117196 - RNA, 19 nt, Artificial Sequence
  Description of Artificial Sequence: Synthetic oligonucleotide
guggcuugaacugugcauu

SEQ ID NO: 2117197 - RNA, 19 nt, Artificial Sequence
  Description of Artificial Sequence: Synthetic oligonucleotide
accccguggcacuugcauu

SEQ ID NO: 2117198 - RNA, 19 nt, Artificial Sequence
  Description of Artificial Sequence: Synthetic oligonucleotide
ccggcaugugugcaucucc

SEQ ID NO: 2117199 - RNA, 19 nt, Artificial Sequence
  Description of Artificial Sequence: Synthetic oligonucleotide
agaacacggcgaagacaag

SEQ ID NO: 2117200 - RNA, 19 nt, Artificial Sequence
  Description of Artificial Sequence: Synthetic oligonucleotide
gcugaagagauggcguaca

SEQ ID NO: 2117201 - RNA, 19 nt, Artificial Sequence
  Description of Artificial Sequence: Synthetic oligonucleotide
ccccguggcacuugcauuc

SEQ ID NO: 2117202 - RNA, 19 nt, Artificial Sequence
  Description of Artificial Sequence: Synthetic oligonucleotide
uacagcucgccagcacguc

SEQ ID NO: 2117203 - RNA, 19 nt, Artificial Sequence
  Description of Artificial Sequence: Synthetic oligonucleotide
augacagcuuggccaggua

SEQ ID NO: 2117204 - RNA, 19 nt, Artificial Sequence
  Description of Artificial Sequence: Synthetic oligonucleotide
ggagaugcugcccaccgau

SEQ ID NO: 2117205 - RNA, 19 nt, Artificial Sequence
  Description of Artificial Sequence: Synthetic oligonucleotide
cguggcacuugcauucuac

SEQ ID NO: 2117206 - RNA, 19 nt, Artificial Sequence
  Description of Artificial Sequence: Synthetic oligonucleotide
guccgagcauccugaccac

SEQ ID NO: 2117207 - RNA, 19 nt, Artificial Sequence
  Description of Artificial Sequence: Synthetic oligonucleotide
cuggcggaagggugguaca

SEQ ID NO: 2117208 - RNA, 19 nt, Artificial Sequence
  Description of Artificial Sequence: Synthetic oligonucleotide
cgagcauccugaccacugg

SEQ ID NO: 2117209 - RNA, 19 nt, Artificial Sequence
  Description of Artificial Sequence: Synthetic oligonucleotide
ggagucgcagcgaccgcag

SEQ ID NO: 2117210 - RNA, 19 nt, Artificial Sequence
  Description of Artificial Sequence: Synthetic oligonucleotide
cacugcgcauguccugcuc

SEQ ID NO: 2117211 - RNA, 19 nt, Artificial Sequence
  Description of Artificial Sequence: Synthetic oligonucleotide
aucaauggccuuggacguu

SEQ ID NO: 2117212 - RNA, 19 nt, Artificial Sequence
  Description of Artificial Sequence: Synthetic oligonucleotide
ugcucgcggcggccgagaa

SEQ ID NO: 2117213 - RNA, 19 nt, Artificial Sequence
  Description of Artificial Sequence: Synthetic oligonucleotide
ggcggaagggugguacagc

SEQ ID NO: 2117214 - RNA, 19 nt, Artificial Sequence
  Description of Artificial Sequence: Synthetic oligonucleotide
ugacaccccguggcacuug

SEQ ID NO: 2117215 - RNA, 19 nt, Artificial Sequence
  Description of Artificial Sequence: Synthetic oligonucleotide
accucgcaggagccugaca

SEQ ID NO: 2117216 - RNA, 19 nt, Artificial Sequence
  Description of Artificial Sequence: Synthetic oligonucleotide
cccgggaggagcccacacg

SEQ ID NO: 2117217 - RNA, 19 nt, Artificial Sequence
  Description of Artificial Sequence: Synthetic oligonucleotide
ccuggcggaagggugguac

SEQ ID NO: 2117218 - RNA, 19 nt, Artificial Sequence
  Description of Artificial Sequence: Synthetic oligonucleotide
gggcugaccccgugcacug

SEQ ID NO: 2117219 - RNA, 19 nt, Artificial Sequence
  Description of Artificial Sequence: Synthetic oligonucleotide
ucccgaagacaggcaggga

SEQ ID NO: 2117220 - RNA, 19 nt, Artificial Sequence
  Description of Artificial Sequence: Synthetic oligonucleotide
ccugcugaagagauggcgu

SEQ ID NO: 2117221 - RNA, 19 nt, Artificial Sequence
  Description of Artificial Sequence: Synthetic oligonucleotide
uaccucgcaggagccugac

SEQ ID NO: 2117222 - RNA, 19 nt, Artificial Sequence
  Description of Artificial Sequence: Synthetic oligonucleotide
cauaggcgauguuguccga

SEQ ID NO: 2117223 - RNA, 19 nt, Artificial Sequence
  Description of Artificial Sequence: Synthetic oligonucleotide
ggcuacgccauaggcgaug

SEQ ID NO: 2117224 - RNA, 19 nt, Artificial Sequence
  Description of Artificial Sequence: Synthetic oligonucleotide
gugagaaggcuacgccaua

SEQ ID NO: 2117225 - RNA, 19 nt, Artificial Sequence
  Description of Artificial Sequence: Synthetic oligonucleotide
agccaucaauggccuugga

SEQ ID NO: 2117226 - RNA, 19 nt, Artificial Sequence
  Description of Artificial Sequence: Synthetic oligonucleotide
uuccagcgucgguuccgga

SEQ ID NO: 2117227 - RNA, 19 nt, Artificial Sequence
  Description of Artificial Sequence: Synthetic oligonucleotide
agucuggacugggcuccag

SEQ ID NO: 2117228 - RNA, 19 nt, Artificial Sequence
  Description of Artificial Sequence: Synthetic oligonucleotide
gugggcugaccccgugcac

SEQ ID NO: 2117229 - RNA, 19 nt, Artificial Sequence
  Description of Artificial Sequence: Synthetic oligonucleotide
ggucacagccacacuuuuc

SEQ ID NO: 2117230 - RNA, 19 nt, Artificial Sequence
  Description of Artificial Sequence: Synthetic oligonucleotide
guugcaugugcggccccuc

SEQ ID NO: 2117231 - RNA, 19 nt, Artificial Sequence
  Description of Artificial Sequence: Synthetic oligonucleotide
accuucccgaagacaggca

SEQ ID NO: 2117232 - RNA, 19 nt, Artificial Sequence
  Description of Artificial Sequence: Synthetic oligonucleotide
gcugaccccgugcacuguc

SEQ ID NO: 2117233 - RNA, 19 nt, Artificial Sequence
  Description of Artificial Sequence: Synthetic oligonucleotide
gcaugugggucaagauggc

SEQ ID NO: 2117234 - RNA, 19 nt, Artificial Sequence
  Description of Artificial Sequence: Synthetic oligonucleotide
ggcgcaccgaguccaucac

SEQ ID NO: 2117235 - RNA, 19 nt, Artificial Sequence
  Description of Artificial Sequence: Synthetic oligonucleotide
gcgaagacaaggagucgca

SEQ ID NO: 2117236 - RNA, 19 nt, Artificial Sequence
  Description of Artificial Sequence: Synthetic oligonucleotide
uugcucgcggcggccgaga

SEQ ID NO: 2117237 - RNA, 19 nt, Artificial Sequence
  Description of Artificial Sequence: Synthetic oligonucleotide
ccgggaggagcccacacga

SEQ ID NO: 2117238 - RNA, 19 nt, Artificial Sequence
  Description of Artificial Sequence: Synthetic oligonucleotide
ccucgugcccagcacacca

SEQ ID NO: 2117239 - RNA, 19 nt, Artificial Sequence
  Description of Artificial Sequence: Synthetic oligonucleotide
cacuugcauucuacccgca

SEQ ID NO: 2117240 - RNA, 19 nt, Artificial Sequence
  Description of Artificial Sequence: Synthetic oligonucleotide
guacagcucgccagcacgu

SEQ ID NO: 2117241 - RNA, 19 nt, Artificial Sequence
  Description of Artificial Sequence: Synthetic oligonucleotide
ccacgagucgcuggcacug

SEQ ID NO: 2117242 - RNA, 19 nt, Artificial Sequence
  Description of Artificial Sequence: Synthetic oligonucleotide
cacgcccuuguuacugcaa

SEQ ID NO: 2117243 - RNA, 19 nt, Artificial Sequence
  Description of Artificial Sequence: Synthetic oligonucleotide
gcggaagggugguacagcu

SEQ ID NO: 2117244 - RNA, 19 nt, Artificial Sequence
  Description of Artificial Sequence: Synthetic oligonucleotide
ugcggccccucgugcccag

SEQ ID NO: 2117245 - RNA, 19 nt, Artificial Sequence
  Description of Artificial Sequence: Synthetic oligonucleotide
ggcguacacaaaggccgcc

SEQ ID NO: 2117246 - RNA, 19 nt, Artificial Sequence
  Description of Artificial Sequence: Synthetic oligonucleotide
gcauuccgugguaccagug

SEQ ID NO: 2117247 - RNA, 19 nt, Artificial Sequence
  Description of Artificial Sequence: Synthetic oligonucleotide
cugcucgcagaagucugga

SEQ ID NO: 2117248 - RNA, 19 nt, Artificial Sequence
  Description of Artificial Sequence: Synthetic oligonucleotide
gguucaugagugcccugcu

SEQ ID NO: 2117249 - RNA, 19 nt, Artificial Sequence
  Description of Artificial Sequence: Synthetic oligonucleotide
ggaggagcccacacgacgu

SEQ ID NO: 2117250 - RNA, 19 nt, Artificial Sequence
  Description of Artificial Sequence: Synthetic oligonucleotide
gcgcaccgaguccaucacc

SEQ ID NO: 2117251 - RNA, 19 nt, Artificial Sequence
  Description of Artificial Sequence: Synthetic oligonucleotide
gcccaccgaugacagcuug

SEQ ID NO: 2117252 - RNA, 19 nt, Artificial Sequence
  Description of Artificial Sequence: Synthetic oligonucleotide
gagcccacacgacguggcu

SEQ ID NO: 2117253 - RNA, 19 nt, Artificial Sequence
  Description of Artificial Sequence: Synthetic oligonucleotide
gccacaccugcugaagaga

SEQ ID NO: 2117254 - RNA, 19 nt, Artificial Sequence
  Description of Artificial Sequence: Synthetic oligonucleotide
ggcgccccggcgcaccgag

SEQ ID NO: 2117255 - RNA, 19 nt, Artificial Sequence
  Description of Artificial Sequence: Synthetic oligonucleotide
cguacacaaaggccgccuc

SEQ ID NO: 2117256 - RNA, 19 nt, Artificial Sequence
  Description of Artificial Sequence: Synthetic oligonucleotide
ccagguacagccaguugcu

SEQ ID NO: 2117257 - RNA, 19 nt, Artificial Sequence
  Description of Artificial Sequence: Synthetic oligonucleotide
gagcaguuccagcgucggu

SEQ ID NO: 2117258 - RNA, 19 nt, Artificial Sequence
  Description of Artificial Sequence: Synthetic oligonucleotide
uucugccggccucguuguu

SEQ ID NO: 2117259 - RNA, 19 nt, Artificial Sequence
  Description of Artificial Sequence: Synthetic oligonucleotide
cuuuaccucgcaggagccu

SEQ ID NO: 2117260 - RNA, 19 nt, Artificial Sequence
  Description of Artificial Sequence: Synthetic oligonucleotide
gcggccgagaacacggcga

SEQ ID NO: 2117261 - RNA, 19 nt, Artificial Sequence
  Description of Artificial Sequence: Synthetic oligonucleotide
gcucuaccucuguggcacc

SEQ ID NO: 2117262 - RNA, 19 nt, Artificial Sequence
  Description of Artificial Sequence: Synthetic oligonucleotide
cuguggcaccaucaaacuu

SEQ ID NO: 2117263 - RNA, 19 nt, Artificial Sequence
  Description of Artificial Sequence: Synthetic oligonucleotide
cugggcgccccggcgcacc

SEQ ID NO: 2117264 - RNA, 19 nt, Artificial Sequence
  Description of Artificial Sequence: Synthetic oligonucleotide
ccgugcacuguccggucac

SEQ ID NO: 2117265 - RNA, 19 nt, Artificial Sequence
  Description of Artificial Sequence: Synthetic oligonucleotide
cgaagacaggcagggaguc

SEQ ID NO: 2117266 - RNA, 19 nt, Artificial Sequence
  Description of Artificial Sequence: Synthetic oligonucleotide
caccccguggcacuugcau

SEQ ID NO: 2117267 - RNA, 19 nt, Artificial Sequence
  Description of Artificial Sequence: Synthetic oligonucleotide
gccccucgugcccagcaca

SEQ ID NO: 2117268 - RNA, 19 nt, Artificial Sequence
  Description of Artificial Sequence: Synthetic oligonucleotide
uacccgcaugugggucaag

SEQ ID NO: 2117269 - RNA, 19 nt, Artificial Sequence
  Description of Artificial Sequence: Synthetic oligonucleotide
ccgaagacaggcagggagu

SEQ ID NO: 2117270 - RNA, 19 nt, Artificial Sequence
  Description of Artificial Sequence: Synthetic oligonucleotide
gcaccgaguccaucaccuc

SEQ ID NO: 2117271 - RNA, 19 nt, Artificial Sequence
  Description of Artificial Sequence: Synthetic oligonucleotide
caucuguauguggcuugaa

SEQ ID NO: 2117272 - RNA, 19 nt, Artificial Sequence
  Description of Artificial Sequence: Synthetic oligonucleotide
ggcgauguuguccgagcau

SEQ ID NO: 2117273 - RNA, 19 nt, Artificial Sequence
  Description of Artificial Sequence: Synthetic oligonucleotide
cccguacguccacaaagga

SEQ ID NO: 2117274 - RNA, 19 nt, Artificial Sequence
  Description of Artificial Sequence: Synthetic oligonucleotide
ccgagucccuugugucacc

SEQ ID NO: 2117275 - RNA, 19 nt, Artificial Sequence
  Description of Artificial Sequence: Synthetic oligonucleotide
ccgugguaccagugcccgg

SEQ ID NO: 2117276 - RNA, 19 nt, Artificial Sequence
  Description of Artificial Sequence: Synthetic oligonucleotide
cugcagccgcagcgcucgg

SEQ ID NO: 2117277 - RNA, 19 nt, Artificial Sequence
  Description of Artificial Sequence: Synthetic oligonucleotide
cagugcccgggaggagccc

SEQ ID NO: 2117278 - RNA, 19 nt, Artificial Sequence
  Description of Artificial Sequence: Synthetic oligonucleotide
ggaggaggcucccuugcuu

SEQ ID NO: 2117279 - RNA, 19 nt, Artificial Sequence
  Description of Artificial Sequence: Synthetic oligonucleotide
ccaguugcucgcggcggcc

SEQ ID NO: 2117280 - RNA, 19 nt, Artificial Sequence
  Description of Artificial Sequence: Synthetic oligonucleotide
gccggccucguuguuguga

SEQ ID NO: 2117281 - RNA, 19 nt, Artificial Sequence
  Description of Artificial Sequence: Synthetic oligonucleotide
cggcaugugugcaucucca

SEQ ID NO: 2117282 - RNA, 19 nt, Artificial Sequence
  Description of Artificial Sequence: Synthetic oligonucleotide
caaaggccgccucccgagu

SEQ ID NO: 2117283 - RNA, 19 nt, Artificial Sequence
  Description of Artificial Sequence: Synthetic oligonucleotide
cuacccgcaugugggucaa

SEQ ID NO: 2117284 - RNA, 19 nt, Artificial Sequence
  Description of Artificial Sequence: Synthetic oligonucleotide
ggccgagaacacggcgaag

SEQ ID NO: 2117285 - RNA, 19 nt, Artificial Sequence
  Description of Artificial Sequence: Synthetic oligonucleotide
ccucuguggcaccaucaaa

SEQ ID NO: 2117286 - RNA, 19 nt, Artificial Sequence
  Description of Artificial Sequence: Synthetic oligonucleotide
cagccgcagcgcucggcca

SEQ ID NO: 2117287 - RNA, 19 nt, Artificial Sequence
  Description of Artificial Sequence: Synthetic oligonucleotide
cgacguggcucuaccucug

SEQ ID NO: 2117288 - RNA, 19 nt, Artificial Sequence
  Description of Artificial Sequence: Synthetic oligonucleotide
ggccccucgugcccagcac

SEQ ID NO: 2117289 - RNA, 19 nt, Artificial Sequence
  Description of Artificial Sequence: Synthetic oligonucleotide
ccacaccugcugaagagau

SEQ ID NO: 2117290 - RNA, 19 nt, Artificial Sequence
  Description of Artificial Sequence: Synthetic oligonucleotide
cagcucgccagcacgucuu

SEQ ID NO: 2117291 - RNA, 19 nt, Artificial Sequence
  Description of Artificial Sequence: Synthetic oligonucleotide
cgcaccgaguccaucaccu

SEQ ID NO: 2117292 - RNA, 19 nt, Artificial Sequence
  Description of Artificial Sequence: Synthetic oligonucleotide
ggaucaggccuuugagcuu

SEQ ID NO: 2117293 - RNA, 19 nt, Artificial Sequence
  Description of Artificial Sequence: Synthetic oligonucleotide
acaccccguggcacuugca

SEQ ID NO: 2117294 - RNA, 19 nt, Artificial Sequence
  Description of Artificial Sequence: Synthetic oligonucleotide
gcccgggaggagcccacac

SEQ ID NO: 2117295 - RNA, 19 nt, Artificial Sequence
  Description of Artificial Sequence: Synthetic oligonucleotide
gcucgcggcggccgagaac

SEQ ID NO: 2117296 - RNA, 19 nt, Artificial Sequence
  Description of Artificial Sequence: Synthetic oligonucleotide
ggaaacccugugggcugac

SEQ ID NO: 2117297 - RNA, 19 nt, Artificial Sequence
  Description of Artificial Sequence: Synthetic oligonucleotide
ccugacaccccguggcacu

SEQ ID NO: 2117298 - RNA, 19 nt, Artificial Sequence
  Description of Artificial Sequence: Synthetic oligonucleotide
ccaucaccuccagguuccg

SEQ ID NO: 2117299 - RNA, 19 nt, Artificial Sequence
  Description of Artificial Sequence: Synthetic oligonucleotide
cuuggacguuuuguugcau

SEQ ID NO: 2117300 - RNA, 19 nt, Artificial Sequence
  Description of Artificial Sequence: Synthetic oligonucleotide
gugcccgggaggagcccac

SEQ ID NO: 2117301 - RNA, 19 nt, Artificial Sequence
  Description of Artificial Sequence: Synthetic oligonucleotide
gcuacgccauaggcgaugu

SEQ ID NO: 2117302 - RNA, 19 nt, Artificial Sequence
  Description of Artificial Sequence: Synthetic oligonucleotide
ccacacgacguggcucuac

SEQ ID NO: 2117303 - RNA, 19 nt, Artificial Sequence
  Description of Artificial Sequence: Synthetic oligonucleotide
gcguacacaaaggccgccu

SEQ ID NO: 2117304 - RNA, 19 nt, Artificial Sequence
  Description of Artificial Sequence: Synthetic oligonucleotide
cggcgaagacaaggagucg

SEQ ID NO: 2117305 - RNA, 19 nt, Artificial Sequence
  Description of Artificial Sequence: Synthetic oligonucleotide
caccggcaugugugcaucu

SEQ ID NO: 2117306 - RNA, 19 nt, Artificial Sequence
  Description of Artificial Sequence: Synthetic oligonucleotide
gugcggccccucgugccca

SEQ ID NO: 2117307 - RNA, 19 nt, Artificial Sequence
  Description of Artificial Sequence: Synthetic oligonucleotide
ccaacuccaccugugccgu

SEQ ID NO: 2117308 - RNA, 19 nt, Artificial Sequence
  Description of Artificial Sequence: Synthetic oligonucleotide
cauggcccaccuggcggaa

SEQ ID NO: 2117309 - RNA, 19 nt, Artificial Sequence
  Description of Artificial Sequence: Synthetic oligonucleotide
ccugaccacuggaaacccu

SEQ ID NO: 2117310 - RNA, 19 nt, Artificial Sequence
  Description of Artificial Sequence: Synthetic oligonucleotide
cccgugcacuguccgguca

SEQ ID NO: 2117311 - RNA, 19 nt, Artificial Sequence
  Description of Artificial Sequence: Synthetic oligonucleotide
ccccgugcacuguccgguc

SEQ ID NO: 2117312 - RNA, 19 nt, Artificial Sequence
  Description of Artificial Sequence: Synthetic oligonucleotide
cgaugacagcuuggccagg

SEQ ID NO: 2117313 - RNA, 19 nt, Artificial Sequence
  Description of Artificial Sequence: Synthetic oligonucleotide
accuggcggaaggguggua

SEQ ID NO: 2117314 - RNA, 19 nt, Artificial Sequence
  Description of Artificial Sequence: Synthetic oligonucleotide
cgccagcacgucuuuaccu

SEQ ID NO: 2117315 - RNA, 19 nt, Artificial Sequence
  Description of Artificial Sequence: Synthetic oligonucleotide
cacagccaucaauggccuu

SEQ ID NO: 2117316 - RNA, 19 nt, Artificial Sequence
  Description of Artificial Sequence: Synthetic oligonucleotide
caccuggcggaaggguggu

SEQ ID NO: 2117317 - RNA, 19 nt, Artificial Sequence
  Description of Artificial Sequence: Synthetic oligonucleotide
cccgcaugugggucaagau

SEQ ID NO: 2117318 - RNA, 19 nt, Artificial Sequence
  Description of Artificial Sequence: Synthetic oligonucleotide
gccgcagcgcucggccaac

SEQ ID NO: 2117319 - RNA, 19 nt, Artificial Sequence
  Description of Artificial Sequence: Synthetic oligonucleotide
cgucgguuccggaacuggu

SEQ ID NO: 2117320 - RNA, 19 nt, Artificial Sequence
  Description of Artificial Sequence: Synthetic oligonucleotide
cugacaccccguggcacuu

SEQ ID NO: 2117321 - RNA, 19 nt, Artificial Sequence
  Description of Artificial Sequence: Synthetic oligonucleotide
cggcggccgagaacacggc

SEQ ID NO: 2117322 - RNA, 19 nt, Artificial Sequence
  Description of Artificial Sequence: Synthetic oligonucleotide
cggccgagaacacggcgaa

SEQ ID NO: 2117323 - RNA, 19 nt, Artificial Sequence
  Description of Artificial Sequence: Synthetic oligonucleotide
cggagaugcugcccaccga

SEQ ID NO: 2117324 - RNA, 19 nt, Artificial Sequence
  Description of Artificial Sequence: Synthetic oligonucleotide
ccccggcgcaccgagucca

SEQ ID NO: 2117325 - RNA, 19 nt, Artificial Sequence
  Description of Artificial Sequence: Synthetic oligonucleotide
cuacgccauaggcgauguu

SEQ ID NO: 2117326 - RNA, 19 nt, Artificial Sequence
  Description of Artificial Sequence: Synthetic oligonucleotide
gcucgccagcacgucuuua

SEQ ID NO: 2117327 - RNA, 19 nt, Artificial Sequence
  Description of Artificial Sequence: Synthetic oligonucleotide
cgugcacuguccggucaca

SEQ ID NO: 2117328 - RNA, 19 nt, Artificial Sequence
  Description of Artificial Sequence: Synthetic oligonucleotide
gcugggcgccccggcgcac

SEQ ID NO: 2117329 - RNA, 19 nt, Artificial Sequence
  Description of Artificial Sequence: Synthetic oligonucleotide
ccguggcacuugcauucua

SEQ ID NO: 2117330 - RNA, 19 nt, Artificial Sequence
  Description of Artificial Sequence: Synthetic oligonucleotide
cggccccucgugcccagca

SEQ ID NO: 2117331 - RNA, 19 nt, Artificial Sequence
  Description of Artificial Sequence: Synthetic oligonucleotide
gccuuucugccggccucgu

SEQ ID NO: 2117332 - RNA, 19 nt, Artificial Sequence
  Description of Artificial Sequence: Synthetic oligonucleotide
cccguggcacuugcauucu

SEQ ID NO: 2117333 - RNA, 19 nt, Artificial Sequence
  Description of Artificial Sequence: Synthetic oligonucleotide
cccugugggcugaccccgu

SEQ ID NO: 2117334 - RNA, 19 nt, Artificial Sequence
  Description of Artificial Sequence: Synthetic oligonucleotide
cguuguugugaagguucau

SEQ ID NO: 2117335 - RNA, 19 nt, Artificial Sequence
  Description of Artificial Sequence: Synthetic oligonucleotide
gccgccucccgagucccuu

SEQ ID NO: 2117336 - RNA, 19 nt, Artificial Sequence
  Description of Artificial Sequence: Synthetic oligonucleotide
ccuuucugccggccucguu

SEQ ID NO: 2117337 - RNA, 19 nt, Artificial Sequence
  Description of Artificial Sequence: Synthetic oligonucleotide
gggcgccccggcgcaccga

SEQ ID NO: 2117338 - RNA, 19 nt, Artificial Sequence
  Description of Artificial Sequence: Synthetic oligonucleotide
cgccucccgagucccuugu

SEQ ID NO: 2117339 - RNA, 19 nt, Artificial Sequence
  Description of Artificial Sequence: Synthetic oligonucleotide
cccacacgacguggcucua

SEQ ID NO: 2117340 - RNA, 19 nt, Artificial Sequence
  Description of Artificial Sequence: Synthetic oligonucleotide
ggccgccucccgagucccu

SEQ ID NO: 2117341 - RNA, 19 nt, Artificial Sequence
  Description of Artificial Sequence: Synthetic oligonucleotide
aaacaugcgggccagaccc

SEQ ID NO: 2117342 - RNA, 19 nt, Artificial Sequence
  Description of Artificial Sequence: Synthetic oligonucleotide
ucaacuuuauugcugaugg

SEQ ID NO: 2117343 - RNA, 19 nt, Artificial Sequence
  Description of Artificial Sequence: Synthetic oligonucleotide
ucaaaucauguaaacaugg

SEQ ID NO: 2117344 - RNA, 19 nt, Artificial Sequence
  Description of Artificial Sequence: Synthetic oligonucleotide
  modified_base (2)..(2): a, c, u, g, unknown or other
anaggcaaggaagacagcc

SEQ ID NO: 2117345 - RNA, 19 nt, Artificial Sequence
  Description of Artificial Sequence: Synthetic oligonucleotide
aaaucauguaaacauggcu

SEQ ID NO: 2117346 - RNA, 19 nt, Artificial Sequence
  Description of Artificial Sequence: Synthetic oligonucleotide
aaggcuacaucugaaaagg

SEQ ID NO: 2117347 - RNA, 19 nt, Artificial Sequence
  Description of Artificial Sequence: Synthetic oligonucleotide
gauacaggaauagagguag

SEQ ID NO: 2117348 - RNA, 19 nt, Artificial Sequence
  Description of Artificial Sequence: Synthetic oligonucleotide
aaaggcaggaggcgggucc

SEQ ID NO: 2117349 - RNA, 19 nt, Artificial Sequence
  Description of Artificial Sequence: Synthetic oligonucleotide
aagucauagagcgacuccc

SEQ ID NO: 2117350 - RNA, 19 nt, Artificial Sequence
  Description of Artificial Sequence: Synthetic oligonucleotide
ucuaagaggacccucugug

SEQ ID NO: 2117351 - RNA, 19 nt, Artificial Sequence
  Description of Artificial Sequence: Synthetic oligonucleotide
aaggaagacagccuaucuc

SEQ ID NO: 2117352 - RNA, 19 nt, Artificial Sequence
  Description of Artificial Sequence: Synthetic oligonucleotide
gauucuucgagucagagcu

SEQ ID NO: 2117353 - RNA, 19 nt, Artificial Sequence
  Description of Artificial Sequence: Synthetic oligonucleotide
ugggauugcagauucuucg

SEQ ID NO: 2117354 - RNA, 19 nt, Artificial Sequence
  Description of Artificial Sequence: Synthetic oligonucleotide
auugcagauucuucgaguc

SEQ ID NO: 2117355 - RNA, 19 nt, Artificial Sequence
  Description of Artificial Sequence: Synthetic oligonucleotide
ucuacaauggcugacgcca

SEQ ID NO: 2117356 - RNA, 19 nt, Artificial Sequence
  Description of Artificial Sequence: Synthetic oligonucleotide
agugacggaaaacaugcgg

SEQ ID NO: 2117357 - RNA, 19 nt, Artificial Sequence
  Description of Artificial Sequence: Synthetic oligonucleotide
cagauugauguguaaacgg

SEQ ID NO: 2117358 - RNA, 19 nt, Artificial Sequence
  Description of Artificial Sequence: Synthetic oligonucleotide
gauguguaaacggauuugg

SEQ ID NO: 2117359 - RNA, 19 nt, Artificial Sequence
  Description of Artificial Sequence: Synthetic oligonucleotide
  modified_base (8)..(8): a, c, u, g, unknown or other
ugggccanaggcaaggaag

SEQ ID NO: 2117360 - RNA, 19 nt, Artificial Sequence
  Description of Artificial Sequence: Synthetic oligonucleotide
aacuuuauugcugaugggu

SEQ ID NO: 2117361 - RNA, 19 nt, Artificial Sequence
  Description of Artificial Sequence: Synthetic oligonucleotide
uauugcacaucaaaucaug

SEQ ID NO: 2117362 - RNA, 19 nt, Artificial Sequence
  Description of Artificial Sequence: Synthetic oligonucleotide
ugggaaaccagagacaggc

SEQ ID NO: 2117363 - RNA, 19 nt, Artificial Sequence
  Description of Artificial Sequence: Synthetic oligonucleotide
agguaauacucccagaagu

SEQ ID NO: 2117364 - RNA, 19 nt, Artificial Sequence
  Description of Artificial Sequence: Synthetic oligonucleotide
agauucuucgagucagagc

SEQ ID NO: 2117365 - RNA, 19 nt, Artificial Sequence
  Description of Artificial Sequence: Synthetic oligonucleotide
uuugggaccaggaaucaga

SEQ ID NO: 2117366 - RNA, 19 nt, Artificial Sequence
  Description of Artificial Sequence: Synthetic oligonucleotide
acuccgaggaaggagauac

SEQ ID NO: 2117367 - RNA, 19 nt, Artificial Sequence
  Description of Artificial Sequence: Synthetic oligonucleotide
uguaaacggauuugggacc

SEQ ID NO: 2117368 - RNA, 19 nt, Artificial Sequence
  Description of Artificial Sequence: Synthetic oligonucleotide
uuuauugcugauggguacg

SEQ ID NO: 2117369 - RNA, 19 nt, Artificial Sequence
  Description of Artificial Sequence: Synthetic oligonucleotide
guguaaacggauuugggac

SEQ ID NO: 2117370 - RNA, 19 nt, Artificial Sequence
  Description of Artificial Sequence: Synthetic oligonucleotide
gauugaggcagauugaugu

SEQ ID NO: 2117371 - RNA, 19 nt, Artificial Sequence
  Description of Artificial Sequence: Synthetic oligonucleotide
uagagcgacucccugcugg

SEQ ID NO: 2117372 - RNA, 19 nt, Artificial Sequence
  Description of Artificial Sequence: Synthetic oligonucleotide
aaggcugaacaguucagcu

SEQ ID NO: 2117373 - RNA, 19 nt, Artificial Sequence
  Description of Artificial Sequence: Synthetic oligonucleotide
gauuaugcagcagugcagc

SEQ ID NO: 2117374 - RNA, 19 nt, Artificial Sequence
  Description of Artificial Sequence: Synthetic oligonucleotide
agugcagacggcucgguuc

SEQ ID NO: 2117375 - RNA, 19 nt, Artificial Sequence
  Description of Artificial Sequence: Synthetic oligonucleotide
ugaacaguucagcuguucu

SEQ ID NO: 2117376 - RNA, 19 nt, Artificial Sequence
  Description of Artificial Sequence: Synthetic oligonucleotide
caaggcuacaucugaaaag

SEQ ID NO: 2117377 - RNA, 19 nt, Artificial Sequence
  Description of Artificial Sequence: Synthetic oligonucleotide
aggucauuggugcuguuuc

SEQ ID NO: 2117378 - RNA, 19 nt, Artificial Sequence
  Description of Artificial Sequence: Synthetic oligonucleotide
guaaacauggcuucaggca

SEQ ID NO: 2117379 - RNA, 19 nt, Artificial Sequence
  Description of Artificial Sequence: Synthetic oligonucleotide
ucugaaaaggcaggaggcg

SEQ ID NO: 2117380 - RNA, 19 nt, Artificial Sequence
  Description of Artificial Sequence: Synthetic oligonucleotide
aaaggcucggaugagcucu

SEQ ID NO: 2117381 - RNA, 19 nt, Artificial Sequence
  Description of Artificial Sequence: Synthetic oligonucleotide
agcaggagaacuccgagga

SEQ ID NO: 2117382 - RNA, 19 nt, Artificial Sequence
  Description of Artificial Sequence: Synthetic oligonucleotide
uacaggaauagagguaggg

SEQ ID NO: 2117383 - RNA, 19 nt, Artificial Sequence
  Description of Artificial Sequence: Synthetic oligonucleotide
auggguacggcucuuccuc

SEQ ID NO: 2117384 - RNA, 19 nt, Artificial Sequence
  Description of Artificial Sequence: Synthetic oligonucleotide
ugcagauucuucgagucag

SEQ ID NO: 2117385 - RNA, 19 nt, Artificial Sequence
  Description of Artificial Sequence: Synthetic oligonucleotide
auuccagguccugaggucc

SEQ ID NO: 2117386 - RNA, 19 nt, Artificial Sequence
  Description of Artificial Sequence: Synthetic oligonucleotide
cuacaucugaaaaggcagg

SEQ ID NO: 2117387 - RNA, 19 nt, Artificial Sequence
  Description of Artificial Sequence: Synthetic oligonucleotide
uugucuacaauggcugacg

SEQ ID NO: 2117388 - RNA, 19 nt, Artificial Sequence
  Description of Artificial Sequence: Synthetic oligonucleotide
aguggcagucugucuagcc

SEQ ID NO: 2117389 - RNA, 19 nt, Artificial Sequence
  Description of Artificial Sequence: Synthetic oligonucleotide
ucucccacgacccuaccca

SEQ ID NO: 2117390 - RNA, 19 nt, Artificial Sequence
  Description of Artificial Sequence: Synthetic oligonucleotide
  modified_base (4)..(4): a, c, u, g, unknown or other
ccanaggcaaggaagacag

SEQ ID NO: 2117391 - RNA, 19 nt, Artificial Sequence
  Description of Artificial Sequence: Synthetic oligonucleotide
cuuuauugcugauggguac

SEQ ID NO: 2117392 - RNA, 19 nt, Artificial Sequence
  Description of Artificial Sequence: Synthetic oligonucleotide
gugacggaaaacaugcggg

SEQ ID NO: 2117393 - RNA, 19 nt, Artificial Sequence
  Description of Artificial Sequence: Synthetic oligonucleotide
  modified_base (13)..(13): a, c, u, g, unknown or other
ucugcugggccanaggcaa

SEQ ID NO: 2117394 - RNA, 19 nt, Artificial Sequence
  Description of Artificial Sequence: Synthetic oligonucleotide
acaggaauagagguagggg

SEQ ID NO: 2117395 - RNA, 19 nt, Artificial Sequence
  Description of Artificial Sequence: Synthetic oligonucleotide
gagguaauacucccagaag

SEQ ID NO: 2117396 - RNA, 19 nt, Artificial Sequence
  Description of Artificial Sequence: Synthetic oligonucleotide
ugucuagcccaaaggcucg

SEQ ID NO: 2117397 - RNA, 19 nt, Artificial Sequence
  Description of Artificial Sequence: Synthetic oligonucleotide
ucauagagcgacucccugc

SEQ ID NO: 2117398 - RNA, 19 nt, Artificial Sequence
  Description of Artificial Sequence: Synthetic oligonucleotide
uucccagugacggaaaaca

SEQ ID NO: 2117399 - RNA, 19 nt, Artificial Sequence
  Description of Artificial Sequence: Synthetic oligonucleotide
uaauacucccagaagucau

SEQ ID NO: 2117400 - RNA, 19 nt, Artificial Sequence
  Description of Artificial Sequence: Synthetic oligonucleotide
uaagaggacccucuguguc

SEQ ID NO: 2117401 - RNA, 19 nt, Artificial Sequence
  Description of Artificial Sequence: Synthetic oligonucleotide
ccagugacggaaaacaugc

SEQ ID NO: 2117402 - RNA, 19 nt, Artificial Sequence
  Description of Artificial Sequence: Synthetic oligonucleotide
uugauguguaaacggauuu

SEQ ID NO: 2117403 - RNA, 19 nt, Artificial Sequence
  Description of Artificial Sequence: Synthetic oligonucleotide
caucaaaucauguaaacau

SEQ ID NO: 2117404 - RNA, 19 nt, Artificial Sequence
  Description of Artificial Sequence: Synthetic oligonucleotide
uccagugguccaaagcccc

SEQ ID NO: 2117405 - RNA, 19 nt, Artificial Sequence
  Description of Artificial Sequence: Synthetic oligonucleotide
ugacggaaaacaugcgggc

SEQ ID NO: 2117406 - RNA, 19 nt, Artificial Sequence
  Description of Artificial Sequence: Synthetic oligonucleotide
agugguccaaagccccucc

SEQ ID NO: 2117407 - RNA, 19 nt, Artificial Sequence
  Description of Artificial Sequence: Synthetic oligonucleotide
cagccuaucucccacgacc

SEQ ID NO: 2117408 - RNA, 19 nt, Artificial Sequence
  Description of Artificial Sequence: Synthetic oligonucleotide
aagaggacccucugugucu

SEQ ID NO: 2117409 - RNA, 19 nt, Artificial Sequence
  Description of Artificial Sequence: Synthetic oligonucleotide
uuucuaagaggacccucug

SEQ ID NO: 2117410 - RNA, 19 nt, Artificial Sequence
  Description of Artificial Sequence: Synthetic oligonucleotide
gguagcacagugcuuaggc

SEQ ID NO: 2117411 - RNA, 19 nt, Artificial Sequence
  Description of Artificial Sequence: Synthetic oligonucleotide
ucagauuaugcagcagugc

SEQ ID NO: 2117412 - RNA, 19 nt, Artificial Sequence
  Description of Artificial Sequence: Synthetic oligonucleotide
uccgccgcuuuucuaagag

SEQ ID NO: 2117413 - RNA, 19 nt, Artificial Sequence
  Description of Artificial Sequence: Synthetic oligonucleotide
cucagauuaugcagcagug

SEQ ID NO: 2117414 - RNA, 19 nt, Artificial Sequence
  Description of Artificial Sequence: Synthetic oligonucleotide
uuauugcugauggguacgg

SEQ ID NO: 2117415 - RNA, 19 nt, Artificial Sequence
  Description of Artificial Sequence: Synthetic oligonucleotide
agugcauaccaggagcagg

SEQ ID NO: 2117416 - RNA, 19 nt, Artificial Sequence
  Description of Artificial Sequence: Synthetic oligonucleotide
acaauggcugacgccaccc

SEQ ID NO: 2117417 - RNA, 19 nt, Artificial Sequence
  Description of Artificial Sequence: Synthetic oligonucleotide
caggaauagagguagggga

SEQ ID NO: 2117418 - RNA, 19 nt, Artificial Sequence
  Description of Artificial Sequence: Synthetic oligonucleotide
uccgaggaaggagauacag

SEQ ID NO: 2117419 - RNA, 19 nt, Artificial Sequence
  Description of Artificial Sequence: Synthetic oligonucleotide
aucucccacgacccuaccc

SEQ ID NO: 2117420 - RNA, 19 nt, Artificial Sequence
  Description of Artificial Sequence: Synthetic oligonucleotide
aaacggauuugggaccagg

SEQ ID NO: 2117421 - RNA, 19 nt, Artificial Sequence
  Description of Artificial Sequence: Synthetic oligonucleotide
cugaaaaggcaggaggcgg

SEQ ID NO: 2117422 - RNA, 19 nt, Artificial Sequence
  Description of Artificial Sequence: Synthetic oligonucleotide
agagcgacucccugcuggc

SEQ ID NO: 2117423 - RNA, 19 nt, Artificial Sequence
  Description of Artificial Sequence: Synthetic oligonucleotide
cagaggguagcccagguuc

SEQ ID NO: 2117424 - RNA, 19 nt, Artificial Sequence
  Description of Artificial Sequence: Synthetic oligonucleotide
ucaaccccuagcuggaggu

SEQ ID NO: 2117425 - RNA, 19 nt, Artificial Sequence
  Description of Artificial Sequence: Synthetic oligonucleotide
cagauuaugcagcagugca

SEQ ID NO: 2117426 - RNA, 19 nt, Artificial Sequence
  Description of Artificial Sequence: Synthetic oligonucleotide
uaggggagguaauacuccc

SEQ ID NO: 2117427 - RNA, 19 nt, Artificial Sequence
  Description of Artificial Sequence: Synthetic oligonucleotide
caguggagugcauaccagg

SEQ ID NO: 2117428 - RNA, 19 nt, Artificial Sequence
  Description of Artificial Sequence: Synthetic oligonucleotide
gagaacuccgaggaaggag

SEQ ID NO: 2117429 - RNA, 19 nt, Artificial Sequence
  Description of Artificial Sequence: Synthetic oligonucleotide
uucuucgagucagagcugc

SEQ ID NO: 2117430 - RNA, 19 nt, Artificial Sequence
  Description of Artificial Sequence: Synthetic oligonucleotide
ugauggguacggcucuucc

SEQ ID NO: 2117431 - RNA, 19 nt, Artificial Sequence
  Description of Artificial Sequence: Synthetic oligonucleotide
gcaguguccaguuuucucc

SEQ ID NO: 2117432 - RNA, 19 nt, Artificial Sequence
  Description of Artificial Sequence: Synthetic oligonucleotide
agauugauguguaaacgga

SEQ ID NO: 2117433 - RNA, 19 nt, Artificial Sequence
  Description of Artificial Sequence: Synthetic oligonucleotide
uacaucugaaaaggcagga

SEQ ID NO: 2117434 - RNA, 19 nt, Artificial Sequence
  Description of Artificial Sequence: Synthetic oligonucleotide
acggaaaacaugcgggcca

SEQ ID NO: 2117435 - RNA, 19 nt, Artificial Sequence
  Description of Artificial Sequence: Synthetic oligonucleotide
uucucaaccccuagcugga

SEQ ID NO: 2117436 - RNA, 19 nt, Artificial Sequence
  Description of Artificial Sequence: Synthetic oligonucleotide
cauguaaacauggcuucag

SEQ ID NO: 2117437 - RNA, 19 nt, Artificial Sequence
  Description of Artificial Sequence: Synthetic oligonucleotide
ugaccagcaacuucccagu

SEQ ID NO: 2117438 - RNA, 19 nt, Artificial Sequence
  Description of Artificial Sequence: Synthetic oligonucleotide
caggagaacuccgaggaag

SEQ ID NO: 2117439 - RNA, 19 nt, Artificial Sequence
  Description of Artificial Sequence: Synthetic oligonucleotide
gcagauugauguguaaacg

SEQ ID NO: 2117440 - RNA, 19 nt, Artificial Sequence
  Description of Artificial Sequence: Synthetic oligonucleotide
caauccaccccgaggauuc

SEQ ID NO: 2117441 - RNA, 19 nt, Artificial Sequence
  Description of Artificial Sequence: Synthetic oligonucleotide
caacuccauguccaaaggc

SEQ ID NO: 2117442 - RNA, 19 nt, Artificial Sequence
  Description of Artificial Sequence: Synthetic oligonucleotide
gaggugggauugcagauuc

SEQ ID NO: 2117443 - RNA, 19 nt, Artificial Sequence
  Description of Artificial Sequence: Synthetic oligonucleotide
uugcugauggguacggcuc

SEQ ID NO: 2117444 - RNA, 19 nt, Artificial Sequence
  Description of Artificial Sequence: Synthetic oligonucleotide
uucgagucagagcugccuc

SEQ ID NO: 2117445 - RNA, 19 nt, Artificial Sequence
  Description of Artificial Sequence: Synthetic oligonucleotide
agaacuccgaggaaggaga

SEQ ID NO: 2117446 - RNA, 19 nt, Artificial Sequence
  Description of Artificial Sequence: Synthetic oligonucleotide
aggcugaacaguucagcug

SEQ ID NO: 2117447 - RNA, 19 nt, Artificial Sequence
  Description of Artificial Sequence: Synthetic oligonucleotide
uugcagauucuucgaguca

SEQ ID NO: 2117448 - RNA, 19 nt, Artificial Sequence
  Description of Artificial Sequence: Synthetic oligonucleotide
agccuaucucccacgaccc

SEQ ID NO: 2117449 - RNA, 19 nt, Artificial Sequence
  Description of Artificial Sequence: Synthetic oligonucleotide
agauuaugcagcagugcag

SEQ ID NO: 2117450 - RNA, 19 nt, Artificial Sequence
  Description of Artificial Sequence: Synthetic oligonucleotide
uugaggcagauugaugugu

SEQ ID NO: 2117451 - RNA, 19 nt, Artificial Sequence
  Description of Artificial Sequence: Synthetic oligonucleotide
cacgacccuacccaggggc

SEQ ID NO: 2117452 - RNA, 19 nt, Artificial Sequence
  Description of Artificial Sequence: Synthetic oligonucleotide
uucccgacaggcccgucag

SEQ ID NO: 2117453 - RNA, 19 nt, Artificial Sequence
  Description of Artificial Sequence: Synthetic oligonucleotide
ggcagauugauguguaaac

SEQ ID NO: 2117454 - RNA, 19 nt, Artificial Sequence
  Description of Artificial Sequence: Synthetic oligonucleotide
aagccuuccgccgcuuuuc

SEQ ID NO: 2117455 - RNA, 19 nt, Artificial Sequence
  Description of Artificial Sequence: Synthetic oligonucleotide
guggcagucugucuagccc

SEQ ID NO: 2117456 - RNA, 19 nt, Artificial Sequence
  Description of Artificial Sequence: Synthetic oligonucleotide
auagagguaggggagguaa

SEQ ID NO: 2117457 - RNA, 19 nt, Artificial Sequence
  Description of Artificial Sequence: Synthetic oligonucleotide
cuccagugguccaaagccc

SEQ ID NO: 2117458 - RNA, 19 nt, Artificial Sequence
  Description of Artificial Sequence: Synthetic oligonucleotide
uacaauggcugacgccacc

SEQ ID NO: 2117459 - RNA, 19 nt, Artificial Sequence
  Description of Artificial Sequence: Synthetic oligonucleotide
ucggaugagcucuucccga

SEQ ID NO: 2117460 - RNA, 19 nt, Artificial Sequence
  Description of Artificial Sequence: Synthetic oligonucleotide
agacggcucgguucccucc

SEQ ID NO: 2117461 - RNA, 19 nt, Artificial Sequence
  Description of Artificial Sequence: Synthetic oligonucleotide
cuccaauccaccccgagga

SEQ ID NO: 2117462 - RNA, 19 nt, Artificial Sequence
  Description of Artificial Sequence: Synthetic oligonucleotide
gacggaaaacaugcgggcc

SEQ ID NO: 2117463 - RNA, 19 nt, Artificial Sequence
  Description of Artificial Sequence: Synthetic oligonucleotide
accacccuggcucgccucc

SEQ ID NO: 2117464 - RNA, 19 nt, Artificial Sequence
  Description of Artificial Sequence: Synthetic oligonucleotide
ccuauugcacaucaaauca

SEQ ID NO: 2117465 - RNA, 19 nt, Artificial Sequence
  Description of Artificial Sequence: Synthetic oligonucleotide
ucgagucagagcugccucc

SEQ ID NO: 2117466 - RNA, 19 nt, Artificial Sequence
  Description of Artificial Sequence: Synthetic oligonucleotide
uguccaguuuucuccuucu

SEQ ID NO: 2117467 - RNA, 19 nt, Artificial Sequence
  Description of Artificial Sequence: Synthetic oligonucleotide
gacgccacccacaccaugc

SEQ ID NO: 2117468 - RNA, 19 nt, Artificial Sequence
  Description of Artificial Sequence: Synthetic oligonucleotide
aggagaacuccgaggaagg

SEQ ID NO: 2117469 - RNA, 19 nt, Artificial Sequence
  Description of Artificial Sequence: Synthetic oligonucleotide
guaauacucccagaaguca

SEQ ID NO: 2117470 - RNA, 19 nt, Artificial Sequence
  Description of Artificial Sequence: Synthetic oligonucleotide
auacucccagaagucauag

SEQ ID NO: 2117471 - RNA, 19 nt, Artificial Sequence
  Description of Artificial Sequence: Synthetic oligonucleotide
gauugcagauucuucgagu

SEQ ID NO: 2117472 - RNA, 19 nt, Artificial Sequence
  Description of Artificial Sequence: Synthetic oligonucleotide
agacagccuaucucccacg

SEQ ID NO: 2117473 - RNA, 19 nt, Artificial Sequence
  Description of Artificial Sequence: Synthetic oligonucleotide
acagccuaucucccacgac

SEQ ID NO: 2117474 - RNA, 19 nt, Artificial Sequence
  Description of Artificial Sequence: Synthetic oligonucleotide
guaggggagguaauacucc

SEQ ID NO: 2117475 - RNA, 19 nt, Artificial Sequence
  Description of Artificial Sequence: Synthetic oligonucleotide
uccaccccgaggauuccag

SEQ ID NO: 2117476 - RNA, 19 nt, Artificial Sequence
  Description of Artificial Sequence: Synthetic oligonucleotide
aacggauuugggaccagga

SEQ ID NO: 2117477 - RNA, 19 nt, Artificial Sequence
  Description of Artificial Sequence: Synthetic oligonucleotide
accccgaggauuccagguc

SEQ ID NO: 2117478 - RNA, 19 nt, Artificial Sequence
  Description of Artificial Sequence: Synthetic oligonucleotide
gucuacaauggcugacgcc

SEQ ID NO: 2117479 - RNA, 19 nt, Artificial Sequence
  Description of Artificial Sequence: Synthetic oligonucleotide
ggauugcagauucuucgag

SEQ ID NO: 2117480 - RNA, 19 nt, Artificial Sequence
  Description of Artificial Sequence: Synthetic oligonucleotide
ggggagguaauacucccag

SEQ ID NO: 2117481 - RNA, 19 nt, Artificial Sequence
  Description of Artificial Sequence: Synthetic oligonucleotide
aacccuggcucagauuaug

SEQ ID NO: 2117482 - RNA, 19 nt, Artificial Sequence
  Description of Artificial Sequence: Synthetic oligonucleotide
gagguaggggagguaauac

SEQ ID NO: 2117483 - RNA, 19 nt, Artificial Sequence
  Description of Artificial Sequence: Synthetic oligonucleotide
cagguccugagguccaacc

SEQ ID NO: 2117484 - RNA, 19 nt, Artificial Sequence
  Description of Artificial Sequence: Synthetic oligonucleotide
agcacagcauggccagagg

SEQ ID NO: 2117485 - RNA, 19 nt, Artificial Sequence
  Description of Artificial Sequence: Synthetic oligonucleotide
cucccacccacccuauugc

SEQ ID NO: 2117486 - RNA, 19 nt, Artificial Sequence
  Description of Artificial Sequence: Synthetic oligonucleotide
gucauagagcgacucccug

SEQ ID NO: 2117487 - RNA, 19 nt, Artificial Sequence
  Description of Artificial Sequence: Synthetic oligonucleotide
uggcucagauuaugcagca

SEQ ID NO: 2117488 - RNA, 19 nt, Artificial Sequence
  Description of Artificial Sequence: Synthetic oligonucleotide
aaccccuagcuggagguca

SEQ ID NO: 2117489 - RNA, 19 nt, Artificial Sequence
  Description of Artificial Sequence: Synthetic oligonucleotide
acgccacccacaccaugcc

SEQ ID NO: 2117490 - RNA, 19 nt, Artificial Sequence
  Description of Artificial Sequence: Synthetic oligonucleotide
gcaacuccauguccaaagg

SEQ ID NO: 2117491 - RNA, 19 nt, Artificial Sequence
  Description of Artificial Sequence: Synthetic oligonucleotide
aaccagagacaggcagugg

SEQ ID NO: 2117492 - RNA, 19 nt, Artificial Sequence
  Description of Artificial Sequence: Synthetic oligonucleotide
gguaauacucccagaaguc

SEQ ID NO: 2117493 - RNA, 19 nt, Artificial Sequence
  Description of Artificial Sequence: Synthetic oligonucleotide
cagauucuucgagucagag

SEQ ID NO: 2117494 - RNA, 19 nt, Artificial Sequence
  Description of Artificial Sequence: Synthetic oligonucleotide
aaccacccuggcucgccuc

SEQ ID NO: 2117495 - RNA, 19 nt, Artificial Sequence
  Description of Artificial Sequence: Synthetic oligonucleotide
ucccacgacccuacccagg

SEQ ID NO: 2117496 - RNA, 19 nt, Artificial Sequence
  Description of Artificial Sequence: Synthetic oligonucleotide
cagcagugcagacggcucg

SEQ ID NO: 2117497 - RNA, 19 nt, Artificial Sequence
  Description of Artificial Sequence: Synthetic oligonucleotide
caggagcaggagaacuccg

SEQ ID NO: 2117498 - RNA, 19 nt, Artificial Sequence
  Description of Artificial Sequence: Synthetic oligonucleotide
cagugacggaaaacaugcg

SEQ ID NO: 2117499 - RNA, 19 nt, Artificial Sequence
  Description of Artificial Sequence: Synthetic oligonucleotide
aauacucccagaagucaua

SEQ ID NO: 2117500 - RNA, 19 nt, Artificial Sequence
  Description of Artificial Sequence: Synthetic oligonucleotide
aggauugaggcagauugau

SEQ ID NO: 2117501 - RNA, 19 nt, Artificial Sequence
  Description of Artificial Sequence: Synthetic oligonucleotide
agcagugcagcagugcaga

SEQ ID NO: 2117502 - RNA, 19 nt, Artificial Sequence
  Description of Artificial Sequence: Synthetic oligonucleotide
ggauuugggaccaggaauc

SEQ ID NO: 2117503 - RNA, 19 nt, Artificial Sequence
  Description of Artificial Sequence: Synthetic oligonucleotide
acggauuugggaccaggaa

SEQ ID NO: 2117504 - RNA, 19 nt, Artificial Sequence
  Description of Artificial Sequence: Synthetic oligonucleotide
uccucugggcaccuugguc

SEQ ID NO: 2117505 - RNA, 19 nt, Artificial Sequence
  Description of Artificial Sequence: Synthetic oligonucleotide
agccccuccacaggguagc

SEQ ID NO: 2117506 - RNA, 19 nt, Artificial Sequence
  Description of Artificial Sequence: Synthetic oligonucleotide
auuugggaccaggaaucag

SEQ ID NO: 2117507 - RNA, 19 nt, Artificial Sequence
  Description of Artificial Sequence: Synthetic oligonucleotide
cagugcuuaggcucugcug

SEQ ID NO: 2117508 - RNA, 19 nt, Artificial Sequence
  Description of Artificial Sequence: Synthetic oligonucleotide
  modified_base (3)..(3): a, c, u, g, unknown or other
canaggcaaggaagacagc

SEQ ID NO: 2117509 - RNA, 19 nt, Artificial Sequence
  Description of Artificial Sequence: Synthetic oligonucleotide
guaaacggauuugggacca

SEQ ID NO: 2117510 - RNA, 19 nt, Artificial Sequence
  Description of Artificial Sequence: Synthetic oligonucleotide
ucccagugacggaaaacau

SEQ ID NO: 2117511 - RNA, 19 nt, Artificial Sequence
  Description of Artificial Sequence: Synthetic oligonucleotide
ggaggcgggucccaaaccc

SEQ ID NO: 2117512 - RNA, 19 nt, Artificial Sequence
  Description of Artificial Sequence: Synthetic oligonucleotide
cagugcagcagugcagacg

SEQ ID NO: 2117513 - RNA, 19 nt, Artificial Sequence
  Description of Artificial Sequence: Synthetic oligonucleotide
agcgacucccugcuggccu

SEQ ID NO: 2117514 - RNA, 19 nt, Artificial Sequence
  Description of Artificial Sequence: Synthetic oligonucleotide
ugcgggccagacccagugg

SEQ ID NO: 2117515 - RNA, 19 nt, Artificial Sequence
  Description of Artificial Sequence: Synthetic oligonucleotide
guagcccagguuccgcugc

SEQ ID NO: 2117516 - RNA, 19 nt, Artificial Sequence
  Description of Artificial Sequence: Synthetic oligonucleotide
acccaguggagugcauacc

SEQ ID NO: 2117517 - RNA, 19 nt, Artificial Sequence
  Description of Artificial Sequence: Synthetic oligonucleotide
aagcccgugggaaaccaga

SEQ ID NO: 2117518 - RNA, 19 nt, Artificial Sequence
  Description of Artificial Sequence: Synthetic oligonucleotide
uggcugacgccacccacac

SEQ ID NO: 2117519 - RNA, 19 nt, Artificial Sequence
  Description of Artificial Sequence: Synthetic oligonucleotide
augcgggccagacccagug

SEQ ID NO: 2117520 - RNA, 19 nt, Artificial Sequence
  Description of Artificial Sequence: Synthetic oligonucleotide
uauugcugauggguacggc

SEQ ID NO: 2117521 - RNA, 19 nt, Artificial Sequence
  Description of Artificial Sequence: Synthetic oligonucleotide
gacagccuaucucccacga

SEQ ID NO: 2117522 - RNA, 19 nt, Artificial Sequence
  Description of Artificial Sequence: Synthetic oligonucleotide
ggcaccuuggucucuccag

SEQ ID NO: 2117523 - RNA, 19 nt, Artificial Sequence
  Description of Artificial Sequence: Synthetic oligonucleotide
agauacaggaauagaggua

SEQ ID NO: 2117524 - RNA, 19 nt, Artificial Sequence
  Description of Artificial Sequence: Synthetic oligonucleotide
cacccuauugcacaucaaa

SEQ ID NO: 2117525 - RNA, 19 nt, Artificial Sequence
  Description of Artificial Sequence: Synthetic oligonucleotide
cuacaauggcugacgccac

SEQ ID NO: 2117526 - RNA, 19 nt, Artificial Sequence
  Description of Artificial Sequence: Synthetic oligonucleotide
gagugcauaccaggagcag

SEQ ID NO: 2117527 - RNA, 19 nt, Artificial Sequence
  Description of Artificial Sequence: Synthetic oligonucleotide
gguccugagguccaaccac

SEQ ID NO: 2117528 - RNA, 19 nt, Artificial Sequence
  Description of Artificial Sequence: Synthetic oligonucleotide
cucacgccgaggccaaggc

SEQ ID NO: 2117529 - RNA, 19 nt, Artificial Sequence
  Description of Artificial Sequence: Synthetic oligonucleotide
cuuccgccgcuuuucuaag

SEQ ID NO: 2117530 - RNA, 19 nt, Artificial Sequence
  Description of Artificial Sequence: Synthetic oligonucleotide
uccuggaagcccgugggaa

SEQ ID NO: 2117531 - RNA, 19 nt, Artificial Sequence
  Description of Artificial Sequence: Synthetic oligonucleotide
agguccaaccacccuggcu

SEQ ID NO: 2117532 - RNA, 19 nt, Artificial Sequence
  Description of Artificial Sequence: Synthetic oligonucleotide
ugacgccacccacaccaug

SEQ ID NO: 2117533 - RNA, 19 nt, Artificial Sequence
  Description of Artificial Sequence: Synthetic oligonucleotide
uagagguaggggagguaau

SEQ ID NO: 2117534 - RNA, 19 nt, Artificial Sequence
  Description of Artificial Sequence: Synthetic oligonucleotide
uacucccagaagucauaga

SEQ ID NO: 2117535 - RNA, 19 nt, Artificial Sequence
  Description of Artificial Sequence: Synthetic oligonucleotide
ucgguucccuccuccaauc

SEQ ID NO: 2117536 - RNA, 19 nt, Artificial Sequence
  Description of Artificial Sequence: Synthetic oligonucleotide
gaggguagcccagguuccg

SEQ ID NO: 2117537 - RNA, 19 nt, Artificial Sequence
  Description of Artificial Sequence: Synthetic oligonucleotide
aggcagauugauguguaaa

SEQ ID NO: 2117538 - RNA, 19 nt, Artificial Sequence
  Description of Artificial Sequence: Synthetic oligonucleotide
aggguagcacagugcuuag

SEQ ID NO: 2117539 - RNA, 19 nt, Artificial Sequence
  Description of Artificial Sequence: Synthetic oligonucleotide
acgacccuacccaggggcc

SEQ ID NO: 2117540 - RNA, 19 nt, Artificial Sequence
  Description of Artificial Sequence: Synthetic oligonucleotide
aauagagguaggggaggua

SEQ ID NO: 2117541 - RNA, 19 nt, Artificial Sequence
  Description of Artificial Sequence: Synthetic oligonucleotide
aacaggauugaggcagauu

SEQ ID NO: 2117542 - RNA, 19 nt, Artificial Sequence
  Description of Artificial Sequence: Synthetic oligonucleotide
agcagugcagacggcucgg

SEQ ID NO: 2117543 - RNA, 19 nt, Artificial Sequence
  Description of Artificial Sequence: Synthetic oligonucleotide
ggcugaacaguucagcugu

SEQ ID NO: 2117544 - RNA, 19 nt, Artificial Sequence
  Description of Artificial Sequence: Synthetic oligonucleotide
ggcuacaucugaaaaggca

SEQ ID NO: 2117545 - RNA, 19 nt, Artificial Sequence
  Description of Artificial Sequence: Synthetic oligonucleotide
gugcauaccaggagcagga

SEQ ID NO: 2117546 - RNA, 19 nt, Artificial Sequence
  Description of Artificial Sequence: Synthetic oligonucleotide
ucacgccgaggccaaggcu

SEQ ID NO: 2117547 - RNA, 19 nt, Artificial Sequence
  Description of Artificial Sequence: Synthetic oligonucleotide
cuucccagugacggaaaac

SEQ ID NO: 2117548 - RNA, 19 nt, Artificial Sequence
  Description of Artificial Sequence: Synthetic oligonucleotide
uuucuuccuggaagcccgu

SEQ ID NO: 2117549 - RNA, 19 nt, Artificial Sequence
  Description of Artificial Sequence: Synthetic oligonucleotide
uuccucugggcaccuuggu

SEQ ID NO: 2117550 - RNA, 19 nt, Artificial Sequence
  Description of Artificial Sequence: Synthetic oligonucleotide
caccuuggucucuccagug

SEQ ID NO: 2117551 - RNA, 19 nt, Artificial Sequence
  Description of Artificial Sequence: Synthetic oligonucleotide
uggguacggcucuuccucu

SEQ ID NO: 2117552 - RNA, 19 nt, Artificial Sequence
  Description of Artificial Sequence: Synthetic oligonucleotide
agaggacccucugugucug

SEQ ID NO: 2117553 - RNA, 19 nt, Artificial Sequence
  Description of Artificial Sequence: Synthetic oligonucleotide
cacaggguagcacagugcu

SEQ ID NO: 2117554 - RNA, 19 nt, Artificial Sequence
  Description of Artificial Sequence: Synthetic oligonucleotide
cccagugacggaaaacaug

SEQ ID NO: 2117555 - RNA, 19 nt, Artificial Sequence
  Description of Artificial Sequence: Synthetic oligonucleotide
gauggguacggcucuuccu

SEQ ID NO: 2117556 - RNA, 19 nt, Artificial Sequence
  Description of Artificial Sequence: Synthetic oligonucleotide
ggaaucagagccagucccc

SEQ ID NO: 2117557 - RNA, 19 nt, Artificial Sequence
  Description of Artificial Sequence: Synthetic oligonucleotide
cuggaagcccgugggaaac

SEQ ID NO: 2117558 - RNA, 19 nt, Artificial Sequence
  Description of Artificial Sequence: Synthetic oligonucleotide
cagcaacuucccagugacg

SEQ ID NO: 2117559 - RNA, 19 nt, Artificial Sequence
  Description of Artificial Sequence: Synthetic oligonucleotide
cgugggaaaccagagacag

SEQ ID NO: 2117560 - RNA, 19 nt, Artificial Sequence
  Description of Artificial Sequence: Synthetic oligonucleotide
cuuaggcucugcugggcca

SEQ ID NO: 2117561 - RNA, 19 nt, Artificial Sequence
  Description of Artificial Sequence: Synthetic oligonucleotide
cauagagcgacucccugcu

SEQ ID NO: 2117562 - RNA, 19 nt, Artificial Sequence
  Description of Artificial Sequence: Synthetic oligonucleotide
uaucucccacgacccuacc

SEQ ID NO: 2117563 - RNA, 19 nt, Artificial Sequence
  Description of Artificial Sequence: Synthetic oligonucleotide
auagagcgacucccugcug

SEQ ID NO: 2117564 - RNA, 19 nt, Artificial Sequence
  Description of Artificial Sequence: Synthetic oligonucleotide
ccuccaauccaccccgagg

SEQ ID NO: 2117565 - RNA, 19 nt, Artificial Sequence
  Description of Artificial Sequence: Synthetic oligonucleotide
gaacaguucagcuguucuu

SEQ ID NO: 2117566 - RNA, 19 nt, Artificial Sequence
  Description of Artificial Sequence: Synthetic oligonucleotide
gugggaaaccagagacagg

SEQ ID NO: 2117567 - RNA, 19 nt, Artificial Sequence
  Description of Artificial Sequence: Synthetic oligonucleotide
gggauugcagauucuucga

SEQ ID NO: 2117568 - RNA, 19 nt, Artificial Sequence
  Description of Artificial Sequence: Synthetic oligonucleotide
caggguagcacagugcuua

SEQ ID NO: 2117569 - RNA, 19 nt, Artificial Sequence
  Description of Artificial Sequence: Synthetic oligonucleotide
gcucagauuaugcagcagu

SEQ ID NO: 2117570 - RNA, 19 nt, Artificial Sequence
  Description of Artificial Sequence: Synthetic oligonucleotide
ccucugugucugcagagcc

SEQ ID NO: 2117571 - RNA, 19 nt, Artificial Sequence
  Description of Artificial Sequence: Synthetic oligonucleotide
ccgcuuuucuaagaggacc

SEQ ID NO: 2117572 - RNA, 19 nt, Artificial Sequence
  Description of Artificial Sequence: Synthetic oligonucleotide
agagguaggggagguaaua

SEQ ID NO: 2117573 - RNA, 19 nt, Artificial Sequence
  Description of Artificial Sequence: Synthetic oligonucleotide
gaagcccgugggaaaccag

SEQ ID NO: 2117574 - RNA, 19 nt, Artificial Sequence
  Description of Artificial Sequence: Synthetic oligonucleotide
cucccacgacccuacccag

SEQ ID NO: 2117575 - RNA, 19 nt, Artificial Sequence
  Description of Artificial Sequence: Synthetic oligonucleotide
cucgccucccggccuaggc

SEQ ID NO: 2117576 - RNA, 19 nt, Artificial Sequence
  Description of Artificial Sequence: Synthetic oligonucleotide
cacgccgaggccaaggcua

SEQ ID NO: 2117577 - RNA, 19 nt, Artificial Sequence
  Description of Artificial Sequence: Synthetic oligonucleotide
gaauagagguaggggaggu

SEQ ID NO: 2117578 - RNA, 19 nt, Artificial Sequence
  Description of Artificial Sequence: Synthetic oligonucleotide
ggaagacagccuaucuccc

SEQ ID NO: 2117579 - RNA, 19 nt, Artificial Sequence
  Description of Artificial Sequence: Synthetic oligonucleotide
caggcaguggcagucuguc

SEQ ID NO: 2117580 - RNA, 19 nt, Artificial Sequence
  Description of Artificial Sequence: Synthetic oligonucleotide
ggcaguguccaguuuucuc

SEQ ID NO: 2117581 - RNA, 19 nt, Artificial Sequence
  Description of Artificial Sequence: Synthetic oligonucleotide
uuccgccgcuuuucuaaga

SEQ ID NO: 2117582 - RNA, 19 nt, Artificial Sequence
  Description of Artificial Sequence: Synthetic oligonucleotide
ggauugaggcagauugaug

SEQ ID NO: 2117583 - RNA, 19 nt, Artificial Sequence
  Description of Artificial Sequence: Synthetic oligonucleotide
gaggcagauugauguguaa

SEQ ID NO: 2117584 - RNA, 19 nt, Artificial Sequence
  Description of Artificial Sequence: Synthetic oligonucleotide
gugggauugcagauucuuc

SEQ ID NO: 2117585 - RNA, 19 nt, Artificial Sequence
  Description of Artificial Sequence: Synthetic oligonucleotide
cccacgacccuacccaggg

SEQ ID NO: 2117586 - RNA, 19 nt, Artificial Sequence
  Description of Artificial Sequence: Synthetic oligonucleotide
ucuagcccaaaggcucgga

SEQ ID NO: 2117587 - RNA, 19 nt, Artificial Sequence
  Description of Artificial Sequence: Synthetic oligonucleotide
cuaagaggacccucugugu

SEQ ID NO: 2117588 - RNA, 19 nt, Artificial Sequence
  Description of Artificial Sequence: Synthetic oligonucleotide
cuggaacaggauugaggca

SEQ ID NO: 2117589 - RNA, 19 nt, Artificial Sequence
  Description of Artificial Sequence: Synthetic oligonucleotide
ggcaguggcagucugucua

SEQ ID NO: 2117590 - RNA, 19 nt, Artificial Sequence
  Description of Artificial Sequence: Synthetic oligonucleotide
ggucccaaacccuggcuca

SEQ ID NO: 2117591 - RNA, 19 nt, Artificial Sequence
  Description of Artificial Sequence: Synthetic oligonucleotide
cuugaccagcaacuuccca

SEQ ID NO: 2117592 - RNA, 19 nt, Artificial Sequence
  Description of Artificial Sequence: Synthetic oligonucleotide
aggagcaggagaacuccga

SEQ ID NO: 2117593 - RNA, 19 nt, Artificial Sequence
  Description of Artificial Sequence: Synthetic oligonucleotide
agcccgugggaaaccagag

SEQ ID NO: 2117594 - RNA, 19 nt, Artificial Sequence
  Description of Artificial Sequence: Synthetic oligonucleotide
ggccagacccaguggagug

SEQ ID NO: 2117595 - RNA, 19 nt, Artificial Sequence
  Description of Artificial Sequence: Synthetic oligonucleotide
ggccuugucauugucuaca

SEQ ID NO: 2117596 - RNA, 19 nt, Artificial Sequence
  Description of Artificial Sequence: Synthetic oligonucleotide
  modified_base (5)..(5): a, c, u, g, unknown or other
gccanaggcaaggaagaca

SEQ ID NO: 2117597 - RNA, 19 nt, Artificial Sequence
  Description of Artificial Sequence: Synthetic oligonucleotide
ggauuccagguccugaggu

SEQ ID NO: 2117598 - RNA, 19 nt, Artificial Sequence
  Description of Artificial Sequence: Synthetic oligonucleotide
auucuucgagucagagcug

SEQ ID NO: 2117599 - RNA, 19 nt, Artificial Sequence
  Description of Artificial Sequence: Synthetic oligonucleotide
  modified_base (7)..(7): a, c, u, g, unknown or other
gggccanaggcaaggaaga

SEQ ID NO: 2117600 - RNA, 19 nt, Artificial Sequence
  Description of Artificial Sequence: Synthetic oligonucleotide
cuucccgacaggcccguca

SEQ ID NO: 2117601 - RNA, 19 nt, Artificial Sequence
  Description of Artificial Sequence: Synthetic oligonucleotide
ggagugcauaccaggagca

SEQ ID NO: 2117602 - RNA, 19 nt, Artificial Sequence
  Description of Artificial Sequence: Synthetic oligonucleotide
aaacccuggcucagauuau

SEQ ID NO: 2117603 - RNA, 19 nt, Artificial Sequence
  Description of Artificial Sequence: Synthetic oligonucleotide
ccaguggagugcauaccag

SEQ ID NO: 2117604 - RNA, 19 nt, Artificial Sequence
  Description of Artificial Sequence: Synthetic oligonucleotide
gggucccaaacccuggcuc

SEQ ID NO: 2117605 - RNA, 19 nt, Artificial Sequence
  Description of Artificial Sequence: Synthetic oligonucleotide
gguagcccagguuccgcug

SEQ ID NO: 2117606 - RNA, 19 nt, Artificial Sequence
  Description of Artificial Sequence: Synthetic oligonucleotide
ccuccucaaaggcugaaca

SEQ ID NO: 2117607 - RNA, 19 nt, Artificial Sequence
  Description of Artificial Sequence: Synthetic oligonucleotide
aacuccgaggaaggagaua

SEQ ID NO: 2117608 - RNA, 19 nt, Artificial Sequence
  Description of Artificial Sequence: Synthetic oligonucleotide
gacaggcccgucagcagca

SEQ ID NO: 2117609 - RNA, 19 nt, Artificial Sequence
  Description of Artificial Sequence: Synthetic oligonucleotide
ucccggccuaggcaguguc

SEQ ID NO: 2117610 - RNA, 19 nt, Artificial Sequence
  Description of Artificial Sequence: Synthetic oligonucleotide
aacaugcgggccagaccca

SEQ ID NO: 2117611 - RNA, 19 nt, Artificial Sequence
  Description of Artificial Sequence: Synthetic oligonucleotide
gucccaaacccuggcucag

SEQ ID NO: 2117612 - RNA, 19 nt, Artificial Sequence
  Description of Artificial Sequence: Synthetic oligonucleotide
aggcaguggcagucugucu

SEQ ID NO: 2117613 - RNA, 19 nt, Artificial Sequence
  Description of Artificial Sequence: Synthetic oligonucleotide
cacagugcuuaggcucugc

SEQ ID NO: 2117614 - RNA, 19 nt, Artificial Sequence
  Description of Artificial Sequence: Synthetic oligonucleotide
ccccgaggauuccaggucc

SEQ ID NO: 2117615 - RNA, 19 nt, Artificial Sequence
  Description of Artificial Sequence: Synthetic oligonucleotide
ggacccucugugucugcag

SEQ ID NO: 2117616 - RNA, 19 nt, Artificial Sequence
  Description of Artificial Sequence: Synthetic oligonucleotide
acggcucgguucccuccuc

SEQ ID NO: 2117617 - RNA, 19 nt, Artificial Sequence
  Description of Artificial Sequence: Synthetic oligonucleotide
agacaggcaguggcagucu

SEQ ID NO: 2117618 - RNA, 19 nt, Artificial Sequence
  Description of Artificial Sequence: Synthetic oligonucleotide
ccaaggcuacaucugaaaa

SEQ ID NO: 2117619 - RNA, 19 nt, Artificial Sequence
  Description of Artificial Sequence: Synthetic oligonucleotide
cccaguggagugcauacca

SEQ ID NO: 2117620 - RNA, 19 nt, Artificial Sequence
  Description of Artificial Sequence: Synthetic oligonucleotide
cagacggcucgguucccuc

SEQ ID NO: 2117621 - RNA, 19 nt, Artificial Sequence
  Description of Artificial Sequence: Synthetic oligonucleotide
aggcgggucccaaacccug

SEQ ID NO: 2117622 - RNA, 19 nt, Artificial Sequence
  Description of Artificial Sequence: Synthetic oligonucleotide
caauggcugacgccaccca

SEQ ID NO: 2117623 - RNA, 19 nt, Artificial Sequence
  Description of Artificial Sequence: Synthetic oligonucleotide
cugauggguacggcucuuc

SEQ ID NO: 2117624 - RNA, 19 nt, Artificial Sequence
  Description of Artificial Sequence: Synthetic oligonucleotide
cccuccacaggguagcaca

SEQ ID NO: 2117625 - RNA, 19 nt, Artificial Sequence
  Description of Artificial Sequence: Synthetic oligonucleotide
  modified_base (9)..(9): a, c, u, g, unknown or other
cugggccanaggcaaggaa

SEQ ID NO: 2117626 - RNA, 19 nt, Artificial Sequence
  Description of Artificial Sequence: Synthetic oligonucleotide
gagcgacucccugcuggcc

SEQ ID NO: 2117627 - RNA, 19 nt, Artificial Sequence
  Description of Artificial Sequence: Synthetic oligonucleotide
gcagccggggcuugaccag

SEQ ID NO: 2117628 - RNA, 19 nt, Artificial Sequence
  Description of Artificial Sequence: Synthetic oligonucleotide
ccacccacccuauugcaca

SEQ ID NO: 2117629 - RNA, 19 nt, Artificial Sequence
  Description of Artificial Sequence: Synthetic oligonucleotide
gggagguaauacucccaga

SEQ ID NO: 2117630 - RNA, 19 nt, Artificial Sequence
  Description of Artificial Sequence: Synthetic oligonucleotide
ggguacggcucuuccucug

SEQ ID NO: 2117631 - RNA, 19 nt, Artificial Sequence
  Description of Artificial Sequence: Synthetic oligonucleotide
cgccgcuuuucuaagagga

SEQ ID NO: 2117632 - RNA, 19 nt, Artificial Sequence
  Description of Artificial Sequence: Synthetic oligonucleotide
ccgccgcuuuucuaagagg

SEQ ID NO: 2117633 - RNA, 19 nt, Artificial Sequence
  Description of Artificial Sequence: Synthetic oligonucleotide
uuccgcugccaggcugaag

SEQ ID NO: 2117634 - RNA, 19 nt, Artificial Sequence
  Description of Artificial Sequence: Synthetic oligonucleotide
cuccgaggaaggagauaca

SEQ ID NO: 2117635 - RNA, 19 nt, Artificial Sequence
  Description of Artificial Sequence: Synthetic oligonucleotide
  modified_base (6)..(6): a, c, u, g, unknown or other
ggccanaggcaaggaagac

SEQ ID NO: 2117636 - RNA, 19 nt, Artificial Sequence
  Description of Artificial Sequence: Synthetic oligonucleotide
cccacccuauugcacauca

SEQ ID NO: 2117637 - RNA, 19 nt, Artificial Sequence
  Description of Artificial Sequence: Synthetic oligonucleotide
gaggucauuggugcuguuu

SEQ ID NO: 2117638 - RNA, 19 nt, Artificial Sequence
  Description of Artificial Sequence: Synthetic oligonucleotide
cagccggggcuugaccagc

SEQ ID NO: 2117639 - RNA, 19 nt, Artificial Sequence
  Description of Artificial Sequence: Synthetic oligonucleotide
caccccgaggauuccaggu

SEQ ID NO: 2117640 - RNA, 19 nt, Artificial Sequence
  Description of Artificial Sequence: Synthetic oligonucleotide
agcuguucuuccaggucuu

SEQ ID NO: 2117641 - RNA, 19 nt, Artificial Sequence
  Description of Artificial Sequence: Synthetic oligonucleotide
uggcucgccucccggccua

SEQ ID NO: 2117642 - RNA, 19 nt, Artificial Sequence
  Description of Artificial Sequence: Synthetic oligonucleotide
ccaaaggcucggaugagcu

SEQ ID NO: 2117643 - RNA, 19 nt, Artificial Sequence
  Description of Artificial Sequence: Synthetic oligonucleotide
cagaagucauagagcgacu

SEQ ID NO: 2117644 - RNA, 19 nt, Artificial Sequence
  Description of Artificial Sequence: Synthetic oligonucleotide
ugcagacggcucgguuccc

SEQ ID NO: 2117645 - RNA, 19 nt, Artificial Sequence
  Description of Artificial Sequence: Synthetic oligonucleotide
gguuccgcugccaggcuga

SEQ ID NO: 2117646 - RNA, 19 nt, Artificial Sequence
  Description of Artificial Sequence: Synthetic oligonucleotide
aaggcucggaugagcucuu

SEQ ID NO: 2117647 - RNA, 19 nt, Artificial Sequence
  Description of Artificial Sequence: Synthetic oligonucleotide
caaccccuagcuggagguc

SEQ ID NO: 2117648 - RNA, 19 nt, Artificial Sequence
  Description of Artificial Sequence: Synthetic oligonucleotide
ggaacaggauugaggcaga

SEQ ID NO: 2117649 - RNA, 19 nt, Artificial Sequence
  Description of Artificial Sequence: Synthetic oligonucleotide
gcgggucccaaacccuggc

SEQ ID NO: 2117650 - RNA, 19 nt, Artificial Sequence
  Description of Artificial Sequence: Synthetic oligonucleotide
ccucacgccgaggccaagg

SEQ ID NO: 2117651 - RNA, 19 nt, Artificial Sequence
  Description of Artificial Sequence: Synthetic oligonucleotide
ggaagcccgugggaaacca

SEQ ID NO: 2117652 - RNA, 19 nt, Artificial Sequence
  Description of Artificial Sequence: Synthetic oligonucleotide
cuagcccaaaggcucggau

SEQ ID NO: 2117653 - RNA, 19 nt, Artificial Sequence
  Description of Artificial Sequence: Synthetic oligonucleotide
gccgcuuuucuaagaggac

SEQ ID NO: 2117654 - RNA, 19 nt, Artificial Sequence
  Description of Artificial Sequence: Synthetic oligonucleotide
gcccgucagcagcagcaag

SEQ ID NO: 2117655 - RNA, 19 nt, Artificial Sequence
  Description of Artificial Sequence: Synthetic oligonucleotide
gccagacccaguggagugc

SEQ ID NO: 2117656 - RNA, 19 nt, Artificial Sequence
  Description of Artificial Sequence: Synthetic oligonucleotide
cucgguucccuccuccaau

SEQ ID NO: 2117657 - RNA, 19 nt, Artificial Sequence
  Description of Artificial Sequence: Synthetic oligonucleotide
acaggguagcacagugcuu

SEQ ID NO: 2117658 - RNA, 19 nt, Artificial Sequence
  Description of Artificial Sequence: Synthetic oligonucleotide
cuucaggcauggccuggaa

SEQ ID NO: 2117659 - RNA, 19 nt, Artificial Sequence
  Description of Artificial Sequence: Synthetic oligonucleotide
ggccuggaacaggauugag

SEQ ID NO: 2117660 - RNA, 19 nt, Artificial Sequence
  Description of Artificial Sequence: Synthetic oligonucleotide
gaacuccgaggaaggagau

SEQ ID NO: 2117661 - RNA, 19 nt, Artificial Sequence
  Description of Artificial Sequence: Synthetic oligonucleotide
caaagccccuccacagggu

SEQ ID NO: 2117662 - RNA, 19 nt, Artificial Sequence
  Description of Artificial Sequence: Synthetic oligonucleotide
aggugggauugcagauucu

SEQ ID NO: 2117663 - RNA, 19 nt, Artificial Sequence
  Description of Artificial Sequence: Synthetic oligonucleotide
ccggggcuugaccagcaac

SEQ ID NO: 2117664 - RNA, 19 nt, Artificial Sequence
  Description of Artificial Sequence: Synthetic oligonucleotide
ggugggauugcagauucuu

SEQ ID NO: 2117665 - RNA, 19 nt, Artificial Sequence
  Description of Artificial Sequence: Synthetic oligonucleotide
gaggcgggucccaaacccu

SEQ ID NO: 2117666 - RNA, 19 nt, Artificial Sequence
  Description of Artificial Sequence: Synthetic oligonucleotide
ccaaccacccuggcucgcc

SEQ ID NO: 2117667 - RNA, 19 nt, Artificial Sequence
  Description of Artificial Sequence: Synthetic oligonucleotide
ccgacaggcccgucagcag

SEQ ID NO: 2117668 - RNA, 19 nt, Artificial Sequence
  Description of Artificial Sequence: Synthetic oligonucleotide
gaacaggauugaggcagau

SEQ ID NO: 2117669 - RNA, 19 nt, Artificial Sequence
  Description of Artificial Sequence: Synthetic oligonucleotide
cccggccuaggcagugucc

SEQ ID NO: 2117670 - RNA, 19 nt, Artificial Sequence
  Description of Artificial Sequence: Synthetic oligonucleotide
ccgugggaaaccagagaca

SEQ ID NO: 2117671 - RNA, 19 nt, Artificial Sequence
  Description of Artificial Sequence: Synthetic oligonucleotide
ccucaaaggcugaacaguu

SEQ ID NO: 2117672 - RNA, 19 nt, Artificial Sequence
  Description of Artificial Sequence: Synthetic oligonucleotide
cacccacaccaugcccagc

SEQ ID NO: 2117673 - RNA, 19 nt, Artificial Sequence
  Description of Artificial Sequence: Synthetic oligonucleotide
gcaggagaacuccgaggaa

SEQ ID NO: 2117674 - RNA, 19 nt, Artificial Sequence
  Description of Artificial Sequence: Synthetic oligonucleotide
gcagauucuucgagucaga

SEQ ID NO: 2117675 - RNA, 19 nt, Artificial Sequence
  Description of Artificial Sequence: Synthetic oligonucleotide
caccucacgccgaggccaa

SEQ ID NO: 2117676 - RNA, 19 nt, Artificial Sequence
  Description of Artificial Sequence: Synthetic oligonucleotide
gggcaccuuggucucucca

SEQ ID NO: 2117677 - RNA, 19 nt, Artificial Sequence
  Description of Artificial Sequence: Synthetic oligonucleotide
ccacgacccuacccagggg

SEQ ID NO: 2117678 - RNA, 19 nt, Artificial Sequence
  Description of Artificial Sequence: Synthetic oligonucleotide
ccaccucacgccgaggcca

SEQ ID NO: 2117679 - RNA, 19 nt, Artificial Sequence
  Description of Artificial Sequence: Synthetic oligonucleotide
cuccuccaauccaccccga

SEQ ID NO: 2117680 - RNA, 19 nt, Artificial Sequence
  Description of Artificial Sequence: Synthetic oligonucleotide
ggaccugucugugcagcaa

SEQ ID NO: 2117681 - RNA, 19 nt, Artificial Sequence
  Description of Artificial Sequence: Synthetic oligonucleotide
cccgacaggcccgucagca

SEQ ID NO: 2117682 - RNA, 19 nt, Artificial Sequence
  Description of Artificial Sequence: Synthetic oligonucleotide
ggcugacgccacccacacc

SEQ ID NO: 2117683 - RNA, 19 nt, Artificial Sequence
  Description of Artificial Sequence: Synthetic oligonucleotide
agccggggcuugaccagca

SEQ ID NO: 2117684 - RNA, 19 nt, Artificial Sequence
  Description of Artificial Sequence: Synthetic oligonucleotide
cgaggccaaggcuacaucu

SEQ ID NO: 2117685 - RNA, 19 nt, Artificial Sequence
  Description of Artificial Sequence: Synthetic oligonucleotide
gcuuuucuaagaggacccu

SEQ ID NO: 2117686 - RNA, 19 nt, Artificial Sequence
  Description of Artificial Sequence: Synthetic oligonucleotide
ucuucccgacaggcccguc

SEQ ID NO: 2117687 - RNA, 19 nt, Artificial Sequence
  Description of Artificial Sequence: Synthetic oligonucleotide
accucacgccgaggccaag

SEQ ID NO: 2117688 - RNA, 19 nt, Artificial Sequence
  Description of Artificial Sequence: Synthetic oligonucleotide
ccuaucucccacgacccua

SEQ ID NO: 2117689 - RNA, 19 nt, Artificial Sequence
  Description of Artificial Sequence: Synthetic oligonucleotide
ccggccuaggcagugucca

SEQ ID NO: 2117690 - RNA, 19 nt, Artificial Sequence
  Description of Artificial Sequence: Synthetic oligonucleotide
gcaggaggcgggucccaaa

SEQ ID NO: 2117691 - RNA, 19 nt, Artificial Sequence
  Description of Artificial Sequence: Synthetic oligonucleotide
cacccacccuauugcacau

SEQ ID NO: 2117692 - RNA, 19 nt, Artificial Sequence
  Description of Artificial Sequence: Synthetic oligonucleotide
caaccacccuggcucgccu

SEQ ID NO: 2117693 - RNA, 19 nt, Artificial Sequence
  Description of Artificial Sequence: Synthetic oligonucleotide
ggaggugggauugcagauu

SEQ ID NO: 2117694 - RNA, 19 nt, Artificial Sequence
  Description of Artificial Sequence: Synthetic oligonucleotide
gcacagugcuuaggcucug

SEQ ID NO: 2117695 - RNA, 19 nt, Artificial Sequence
  Description of Artificial Sequence: Synthetic oligonucleotide
cgccacccacaccaugccc

SEQ ID NO: 2117696 - RNA, 19 nt, Artificial Sequence
  Description of Artificial Sequence: Synthetic oligonucleotide
cgaggauuccagguccuga

SEQ ID NO: 2117697 - RNA, 19 nt, Artificial Sequence
  Description of Artificial Sequence: Synthetic oligonucleotide
cuggcucgccucccggccu

SEQ ID NO: 2117698 - RNA, 19 nt, Artificial Sequence
  Description of Artificial Sequence: Synthetic oligonucleotide
gggccagacccaguggagu

SEQ ID NO: 2117699 - RNA, 19 nt, Artificial Sequence
  Description of Artificial Sequence: Synthetic oligonucleotide
cgacccuacccaggggccc

SEQ ID NO: 2117700 - RNA, 19 nt, Artificial Sequence
  Description of Artificial Sequence: Synthetic oligonucleotide
cugacgccacccacaccau

SEQ ID NO: 2117701 - RNA, 19 nt, Artificial Sequence
  Description of Artificial Sequence: Synthetic oligonucleotide
ccugagguccaaccacccu

SEQ ID NO: 2117702 - RNA, 19 nt, Artificial Sequence
  Description of Artificial Sequence: Synthetic oligonucleotide
gccuaucucccacgacccu

SEQ ID NO: 2117703 - RNA, 19 nt, Artificial Sequence
  Description of Artificial Sequence: Synthetic oligonucleotide
ccucccggccuaggcagug

SEQ ID NO: 2117704 - RNA, 19 nt, Artificial Sequence
  Description of Artificial Sequence: Synthetic oligonucleotide
ccacccuauugcacaucaa

SEQ ID NO: 2117705 - RNA, 19 nt, Artificial Sequence
  Description of Artificial Sequence: Synthetic oligonucleotide
gcucgccucccggccuagg

SEQ ID NO: 2117706 - RNA, 19 nt, Artificial Sequence
  Description of Artificial Sequence: Synthetic oligonucleotide
ggcccgucagcagcagcaa

SEQ ID NO: 2117707 - RNA, 19 nt, Artificial Sequence
  Description of Artificial Sequence: Synthetic oligonucleotide
cucuucccgacaggcccgu

SEQ ID NO: 2117708 - RNA, 19 nt, Artificial Sequence
  Description of Artificial Sequence: Synthetic oligonucleotide
ggcucgccucccggccuag

SEQ ID NO: 2117709 - RNA, 19 nt, Artificial Sequence
  Description of Artificial Sequence: Synthetic oligonucleotide
gcagacggcucgguucccu

SEQ ID NO: 2117710 - RNA, 19 nt, Artificial Sequence
  Description of Artificial Sequence: Synthetic oligonucleotide
ccaauccaccccgaggauu

SEQ ID NO: 2117711 - RNA, 19 nt, Artificial Sequence
  Description of Artificial Sequence: Synthetic oligonucleotide
cccgaggauuccagguccu

SEQ ID NO: 2117712 - RNA, 19 nt, Artificial Sequence
  Description of Artificial Sequence: Synthetic oligonucleotide
cagacccaguggagugcau

SEQ ID NO: 2117713 - RNA, 19 nt, Artificial Sequence
  Description of Artificial Sequence: Synthetic oligonucleotide
gccggggcuugaccagcaa

SEQ ID NO: 2117714 - RNA, 19 nt, Artificial Sequence
  Description of Artificial Sequence: Synthetic oligonucleotide
ccaaacccuggcucagauu

SEQ ID NO: 2117715 - RNA, 19 nt, Artificial Sequence
  Description of Artificial Sequence: Synthetic oligonucleotide
ccagaggguagcccagguu

SEQ ID NO: 2117716 - RNA, 19 nt, Artificial Sequence
  Description of Artificial Sequence: Synthetic oligonucleotide
gcgacucccugcuggccuu

SEQ ID NO: 2117717 - RNA, 19 nt, Artificial Sequence
  Description of Artificial Sequence: Synthetic oligonucleotide
cucccggccuaggcagugu

SEQ ID NO: 2117718 - RNA, 19 nt, Artificial Sequence
  Description of Artificial Sequence: Synthetic oligonucleotide
gcugaacaguucagcuguu

SEQ ID NO: 2117719 - RNA, 19 nt, Artificial Sequence
  Description of Artificial Sequence: Synthetic oligonucleotide
cccugcuggccuugucauu

SEQ ID NO: 2117720 - RNA, 19 nt, Artificial Sequence
  Description of Artificial Sequence: Synthetic oligonucleotide
agaagcgaaagccagaugc

SEQ ID NO: 2117721 - RNA, 19 nt, Artificial Sequence
  Description of Artificial Sequence: Synthetic oligonucleotide
aaauucugcagccugcacc

SEQ ID NO: 2117722 - RNA, 19 nt, Artificial Sequence
  Description of Artificial Sequence: Synthetic oligonucleotide
uuuuauaucaucugggagc

SEQ ID NO: 2117723 - RNA, 19 nt, Artificial Sequence
  Description of Artificial Sequence: Synthetic oligonucleotide
acuuuauuaaucuuagaag

SEQ ID NO: 2117724 - RNA, 19 nt, Artificial Sequence
  Description of Artificial Sequence: Synthetic oligonucleotide
ugcaaauagccaaagagcc

SEQ ID NO: 2117725 - RNA, 19 nt, Artificial Sequence
  Description of Artificial Sequence: Synthetic oligonucleotide
auggcaaccaucuacugcc

SEQ ID NO: 2117726 - RNA, 19 nt, Artificial Sequence
  Description of Artificial Sequence: Synthetic oligonucleotide
uuauucauuguccauaaac

SEQ ID NO: 2117727 - RNA, 19 nt, Artificial Sequence
  Description of Artificial Sequence: Synthetic oligonucleotide
aaauaaacuuaauacuuca

SEQ ID NO: 2117728 - RNA, 19 nt, Artificial Sequence
  Description of Artificial Sequence: Synthetic oligonucleotide
uuagaagucaguaauucca

SEQ ID NO: 2117729 - RNA, 19 nt, Artificial Sequence
  Description of Artificial Sequence: Synthetic oligonucleotide
ugaaguuuguacaaaauaa

SEQ ID NO: 2117730 - RNA, 19 nt, Artificial Sequence
  Description of Artificial Sequence: Synthetic oligonucleotide
aagucaguaauuccaaaag

SEQ ID NO: 2117731 - RNA, 19 nt, Artificial Sequence
  Description of Artificial Sequence: Synthetic oligonucleotide
aaucuuagaagucaguaau

SEQ ID NO: 2117732 - RNA, 19 nt, Artificial Sequence
  Description of Artificial Sequence: Synthetic oligonucleotide
ucaaucuggaaaagaagcg

SEQ ID NO: 2117733 - RNA, 19 nt, Artificial Sequence
  Description of Artificial Sequence: Synthetic oligonucleotide
aacuuaauacuucaaucug

SEQ ID NO: 2117734 - RNA, 19 nt, Artificial Sequence
  Description of Artificial Sequence: Synthetic oligonucleotide
uaaacuuaauacuucaauc

SEQ ID NO: 2117735 - RNA, 19 nt, Artificial Sequence
  Description of Artificial Sequence: Synthetic oligonucleotide
aguaauuccaaaaggcgcc

SEQ ID NO: 2117736 - RNA, 19 nt, Artificial Sequence
  Description of Artificial Sequence: Synthetic oligonucleotide
uguguuuuggcuauuccug

SEQ ID NO: 2117737 - RNA, 19 nt, Artificial Sequence
  Description of Artificial Sequence: Synthetic oligonucleotide
uggaaaagaagcgaaagcc

SEQ ID NO: 2117738 - RNA, 19 nt, Artificial Sequence
  Description of Artificial Sequence: Synthetic oligonucleotide
aauacuauggggccaccag

SEQ ID NO: 2117739 - RNA, 19 nt, Artificial Sequence
  Description of Artificial Sequence: Synthetic oligonucleotide
uuauuaaucuuagaaguca

SEQ ID NO: 2117740 - RNA, 19 nt, Artificial Sequence
  Description of Artificial Sequence: Synthetic oligonucleotide
ucgacucugguccagaagc

SEQ ID NO: 2117741 - RNA, 19 nt, Artificial Sequence
  Description of Artificial Sequence: Synthetic oligonucleotide
gaaagccagaugcaaauag

SEQ ID NO: 2117742 - RNA, 19 nt, Artificial Sequence
  Description of Artificial Sequence: Synthetic oligonucleotide
uauuccugaaugaugcuug

SEQ ID NO: 2117743 - RNA, 19 nt, Artificial Sequence
  Description of Artificial Sequence: Synthetic oligonucleotide
aauucugcagccugcacca

SEQ ID NO: 2117744 - RNA, 19 nt, Artificial Sequence
  Description of Artificial Sequence: Synthetic oligonucleotide
aaagccagaugcaaauagc

SEQ ID NO: 2117745 - RNA, 19 nt, Artificial Sequence
  Description of Artificial Sequence: Synthetic oligonucleotide
cucuuuuauaucaucuggg

SEQ ID NO: 2117746 - RNA, 19 nt, Artificial Sequence
  Description of Artificial Sequence: Synthetic oligonucleotide
uuuaugacacugcuggcca

SEQ ID NO: 2117747 - RNA, 19 nt, Artificial Sequence
  Description of Artificial Sequence: Synthetic oligonucleotide
uaggacugaugacaggucg

SEQ ID NO: 2117748 - RNA, 19 nt, Artificial Sequence
  Description of Artificial Sequence: Synthetic oligonucleotide
caguaauuccaaaaggcgc

SEQ ID NO: 2117749 - RNA, 19 nt, Artificial Sequence
  Description of Artificial Sequence: Synthetic oligonucleotide
ugcaccauuauucauuguc

SEQ ID NO: 2117750 - RNA, 19 nt, Artificial Sequence
  Description of Artificial Sequence: Synthetic oligonucleotide
aaguggaguugguaacugc

SEQ ID NO: 2117751 - RNA, 19 nt, Artificial Sequence
  Description of Artificial Sequence: Synthetic oligonucleotide
uuuuggcuauuccugaaug

SEQ ID NO: 2117752 - RNA, 19 nt, Artificial Sequence
  Description of Artificial Sequence: Synthetic oligonucleotide
ucuggaaaagaagcgaaag

SEQ ID NO: 2117753 - RNA, 19 nt, Artificial Sequence
  Description of Artificial Sequence: Synthetic oligonucleotide
uuuauaucaucugggagca

SEQ ID NO: 2117754 - RNA, 19 nt, Artificial Sequence
  Description of Artificial Sequence: Synthetic oligonucleotide
cuuuuauaucaucugggag

SEQ ID NO: 2117755 - RNA, 19 nt, Artificial Sequence
  Description of Artificial Sequence: Synthetic oligonucleotide
aaaggcgccugucccaugg

SEQ ID NO: 2117756 - RNA, 19 nt, Artificial Sequence
  Description of Artificial Sequence: Synthetic oligonucleotide
acuuaauacuucaaucugg

SEQ ID NO: 2117757 - RNA, 19 nt, Artificial Sequence
  Description of Artificial Sequence: Synthetic oligonucleotide
agagacagaggaccuagcg

SEQ ID NO: 2117758 - RNA, 19 nt, Artificial Sequence
  Description of Artificial Sequence: Synthetic oligonucleotide
uauaucaucugggagcagc

SEQ ID NO: 2117759 - RNA, 19 nt, Artificial Sequence
  Description of Artificial Sequence: Synthetic oligonucleotide
uggaguugguaacugcccg

SEQ ID NO: 2117760 - RNA, 19 nt, Artificial Sequence
  Description of Artificial Sequence: Synthetic oligonucleotide
uggggaaccacuccuguag

SEQ ID NO: 2117761 - RNA, 19 nt, Artificial Sequence
  Description of Artificial Sequence: Synthetic oligonucleotide
agauugaugugacuggcug

SEQ ID NO: 2117762 - RNA, 19 nt, Artificial Sequence
  Description of Artificial Sequence: Synthetic oligonucleotide
aagccacccgucuggaggc

SEQ ID NO: 2117763 - RNA, 19 nt, Artificial Sequence
  Description of Artificial Sequence: Synthetic oligonucleotide
caaagauugccugaugccg

SEQ ID NO: 2117764 - RNA, 19 nt, Artificial Sequence
  Description of Artificial Sequence: Synthetic oligonucleotide
ugaaugaugcuugugggga

SEQ ID NO: 2117765 - RNA, 19 nt, Artificial Sequence
  Description of Artificial Sequence: Synthetic oligonucleotide
cuaggcaaagggaagauca

SEQ ID NO: 2117766 - RNA, 19 nt, Artificial Sequence
  Description of Artificial Sequence: Synthetic oligonucleotide
aguggaguugguaacugcc

SEQ ID NO: 2117767 - RNA, 19 nt, Artificial Sequence
  Description of Artificial Sequence: Synthetic oligonucleotide
gauggcaaccaucuacugc

SEQ ID NO: 2117768 - RNA, 19 nt, Artificial Sequence
  Description of Artificial Sequence: Synthetic oligonucleotide
gaccuagcgggguugaggg

SEQ ID NO: 2117769 - RNA, 19 nt, Artificial Sequence
  Description of Artificial Sequence: Synthetic oligonucleotide
uuuguguuuuggcuauucc

SEQ ID NO: 2117770 - RNA, 19 nt, Artificial Sequence
  Description of Artificial Sequence: Synthetic oligonucleotide
uccaaaaggcgccuguccc

SEQ ID NO: 2117771 - RNA, 19 nt, Artificial Sequence
  Description of Artificial Sequence: Synthetic oligonucleotide
aaagagccucuuuuauauc

SEQ ID NO: 2117772 - RNA, 19 nt, Artificial Sequence
  Description of Artificial Sequence: Synthetic oligonucleotide
aagauugccugaugccggg

SEQ ID NO: 2117773 - RNA, 19 nt, Artificial Sequence
  Description of Artificial Sequence: Synthetic oligonucleotide
uaaacuggaguuagguagu

SEQ ID NO: 2117774 - RNA, 19 nt, Artificial Sequence
  Description of Artificial Sequence: Synthetic oligonucleotide
guuguucucuaccucaccc

SEQ ID NO: 2117775 - RNA, 19 nt, Artificial Sequence
  Description of Artificial Sequence: Synthetic oligonucleotide
uuguguuuuggcuauuccu

SEQ ID NO: 2117776 - RNA, 19 nt, Artificial Sequence
  Description of Artificial Sequence: Synthetic oligonucleotide
uaugcguuguucucuaccu

SEQ ID NO: 2117777 - RNA, 19 nt, Artificial Sequence
  Description of Artificial Sequence: Synthetic oligonucleotide
auggcagucgccuaccuug

SEQ ID NO: 2117778 - RNA, 19 nt, Artificial Sequence
  Description of Artificial Sequence: Synthetic oligonucleotide
cuuaauacuucaaucugga

SEQ ID NO: 2117779 - RNA, 19 nt, Artificial Sequence
  Description of Artificial Sequence: Synthetic oligonucleotide
gaagucaguaauuccaaaa

SEQ ID NO: 2117780 - RNA, 19 nt, Artificial Sequence
  Description of Artificial Sequence: Synthetic oligonucleotide
cugaaugaugcuugugggg

SEQ ID NO: 2117781 - RNA, 19 nt, Artificial Sequence
  Description of Artificial Sequence: Synthetic oligonucleotide
ggauagaccagguugggcc

SEQ ID NO: 2117782 - RNA, 19 nt, Artificial Sequence
  Description of Artificial Sequence: Synthetic oligonucleotide
ucuguuucccuguuguccu

SEQ ID NO: 2117783 - RNA, 19 nt, Artificial Sequence
  Description of Artificial Sequence: Synthetic oligonucleotide
uuuggcuauuccugaauga

SEQ ID NO: 2117784 - RNA, 19 nt, Artificial Sequence
  Description of Artificial Sequence: Synthetic oligonucleotide
ucuaccucacccucccagg

SEQ ID NO: 2117785 - RNA, 19 nt, Artificial Sequence
  Description of Artificial Sequence: Synthetic oligonucleotide
guuuaugacacugcuggcc

SEQ ID NO: 2117786 - RNA, 19 nt, Artificial Sequence
  Description of Artificial Sequence: Synthetic oligonucleotide
ugcguuguucucuaccuca

SEQ ID NO: 2117787 - RNA, 19 nt, Artificial Sequence
  Description of Artificial Sequence: Synthetic oligonucleotide
gggaagaucaaguuuggug

SEQ ID NO: 2117788 - RNA, 19 nt, Artificial Sequence
  Description of Artificial Sequence: Synthetic oligonucleotide
ugggaucugaaguuuguac

SEQ ID NO: 2117789 - RNA, 19 nt, Artificial Sequence
  Description of Artificial Sequence: Synthetic oligonucleotide
acuaggacugaugacaggu

SEQ ID NO: 2117790 - RNA, 19 nt, Artificial Sequence
  Description of Artificial Sequence: Synthetic oligonucleotide
auuguccauaaacuggagu

SEQ ID NO: 2117791 - RNA, 19 nt, Artificial Sequence
  Description of Artificial Sequence: Synthetic oligonucleotide
uacuauggggccaccagcu

SEQ ID NO: 2117792 - RNA, 19 nt, Artificial Sequence
  Description of Artificial Sequence: Synthetic oligonucleotide
uuccauccaaacccagggg

SEQ ID NO: 2117793 - RNA, 19 nt, Artificial Sequence
  Description of Artificial Sequence: Synthetic oligonucleotide
uuccaaaaggcgccugucc

SEQ ID NO: 2117794 - RNA, 19 nt, Artificial Sequence
  Description of Artificial Sequence: Synthetic oligonucleotide
agguuugccaccugcuggg

SEQ ID NO: 2117795 - RNA, 19 nt, Artificial Sequence
  Description of Artificial Sequence: Synthetic oligonucleotide
cacuugaaauucugcagcc

SEQ ID NO: 2117796 - RNA, 19 nt, Artificial Sequence
  Description of Artificial Sequence: Synthetic oligonucleotide
ccugguaaaagucugguug

SEQ ID NO: 2117797 - RNA, 19 nt, Artificial Sequence
  Description of Artificial Sequence: Synthetic oligonucleotide
aaauucagguuugccaccu

SEQ ID NO: 2117798 - RNA, 19 nt, Artificial Sequence
  Description of Artificial Sequence: Synthetic oligonucleotide
uucaaguugcuggagggca

SEQ ID NO: 2117799 - RNA, 19 nt, Artificial Sequence
  Description of Artificial Sequence: Synthetic oligonucleotide
ugaugugacuggcugcucu

SEQ ID NO: 2117800 - RNA, 19 nt, Artificial Sequence
  Description of Artificial Sequence: Synthetic oligonucleotide
aaaauacuauggggccacc

SEQ ID NO: 2117801 - RNA, 19 nt, Artificial Sequence
  Description of Artificial Sequence: Synthetic oligonucleotide
aaaguggaguugguaacug

SEQ ID NO: 2117802 - RNA, 19 nt, Artificial Sequence
  Description of Artificial Sequence: Synthetic oligonucleotide
ucagguuugccaccugcug

SEQ ID NO: 2117803 - RNA, 19 nt, Artificial Sequence
  Description of Artificial Sequence: Synthetic oligonucleotide
guuugguggaugguguugg

SEQ ID NO: 2117804 - RNA, 19 nt, Artificial Sequence
  Description of Artificial Sequence: Synthetic oligonucleotide
uggcuauuccugaaugaug

SEQ ID NO: 2117805 - RNA, 19 nt, Artificial Sequence
  Description of Artificial Sequence: Synthetic oligonucleotide
uguugaagcacugcuucug

SEQ ID NO: 2117806 - RNA, 19 nt, Artificial Sequence
  Description of Artificial Sequence: Synthetic oligonucleotide
guaacugcccgcugugggg

SEQ ID NO: 2117807 - RNA, 19 nt, Artificial Sequence
  Description of Artificial Sequence: Synthetic oligonucleotide
cagguuugccaccugcugg

SEQ ID NO: 2117808 - RNA, 19 nt, Artificial Sequence
  Description of Artificial Sequence: Synthetic oligonucleotide
uggaguuagguagugucug

SEQ ID NO: 2117809 - RNA, 19 nt, Artificial Sequence
  Description of Artificial Sequence: Synthetic oligonucleotide
uguucucuaccucacccuc

SEQ ID NO: 2117810 - RNA, 19 nt, Artificial Sequence
  Description of Artificial Sequence: Synthetic oligonucleotide
ggcuggauagaccagguug

SEQ ID NO: 2117811 - RNA, 19 nt, Artificial Sequence
  Description of Artificial Sequence: Synthetic oligonucleotide
gacgcaucaggcgagaguc

SEQ ID NO: 2117812 - RNA, 19 nt, Artificial Sequence
  Description of Artificial Sequence: Synthetic oligonucleotide
guaugcguuguucucuacc

SEQ ID NO: 2117813 - RNA, 19 nt, Artificial Sequence
  Description of Artificial Sequence: Synthetic oligonucleotide
aaugaugcuuguggggaug

SEQ ID NO: 2117814 - RNA, 19 nt, Artificial Sequence
  Description of Artificial Sequence: Synthetic oligonucleotide
uguuuaugacacugcuggc

SEQ ID NO: 2117815 - RNA, 19 nt, Artificial Sequence
  Description of Artificial Sequence: Synthetic oligonucleotide
aaaagaagcgaaagccaga

SEQ ID NO: 2117816 - RNA, 19 nt, Artificial Sequence
  Description of Artificial Sequence: Synthetic oligonucleotide
auugaugugacuggcugcu

SEQ ID NO: 2117817 - RNA, 19 nt, Artificial Sequence
  Description of Artificial Sequence: Synthetic oligonucleotide
acacucgugcucugggugg

SEQ ID NO: 2117818 - RNA, 19 nt, Artificial Sequence
  Description of Artificial Sequence: Synthetic oligonucleotide
gaagaucaaguuuggugga

SEQ ID NO: 2117819 - RNA, 19 nt, Artificial Sequence
  Description of Artificial Sequence: Synthetic oligonucleotide
ggcuauuccugaaugaugc

SEQ ID NO: 2117820 - RNA, 19 nt, Artificial Sequence
  Description of Artificial Sequence: Synthetic oligonucleotide
aagggaagaucaaguuugg

SEQ ID NO: 2117821 - RNA, 19 nt, Artificial Sequence
  Description of Artificial Sequence: Synthetic oligonucleotide
uagccaaagagccucuuuu

SEQ ID NO: 2117822 - RNA, 19 nt, Artificial Sequence
  Description of Artificial Sequence: Synthetic oligonucleotide
gauacuugugcuggggaac

SEQ ID NO: 2117823 - RNA, 19 nt, Artificial Sequence
  Description of Artificial Sequence: Synthetic oligonucleotide
gcacuugaaauucugcagc

SEQ ID NO: 2117824 - RNA, 19 nt, Artificial Sequence
  Description of Artificial Sequence: Synthetic oligonucleotide
aguuagguagugucuggcu

SEQ ID NO: 2117825 - RNA, 19 nt, Artificial Sequence
  Description of Artificial Sequence: Synthetic oligonucleotide
cuggcugccaaagauugcc

SEQ ID NO: 2117826 - RNA, 19 nt, Artificial Sequence
  Description of Artificial Sequence: Synthetic oligonucleotide
guaaaagucugguugggcu

SEQ ID NO: 2117827 - RNA, 19 nt, Artificial Sequence
  Description of Artificial Sequence: Synthetic oligonucleotide
gacaggucgaaggguaggg

SEQ ID NO: 2117828 - RNA, 19 nt, Artificial Sequence
  Description of Artificial Sequence: Synthetic oligonucleotide
ugguaaaagucugguuggg

SEQ ID NO: 2117829 - RNA, 19 nt, Artificial Sequence
  Description of Artificial Sequence: Synthetic oligonucleotide
uacuucaaucuggaaaaga

SEQ ID NO: 2117830 - RNA, 19 nt, Artificial Sequence
  Description of Artificial Sequence: Synthetic oligonucleotide
uugguaacugcccgcugug

SEQ ID NO: 2117831 - RNA, 19 nt, Artificial Sequence
  Description of Artificial Sequence: Synthetic oligonucleotide
gccaaagauugccugaugc

SEQ ID NO: 2117832 - RNA, 19 nt, Artificial Sequence
  Description of Artificial Sequence: Synthetic oligonucleotide
aaauacuauggggccacca

SEQ ID NO: 2117833 - RNA, 19 nt, Artificial Sequence
  Description of Artificial Sequence: Synthetic oligonucleotide
gaaccagugcuguuggcuc

SEQ ID NO: 2117834 - RNA, 19 nt, Artificial Sequence
  Description of Artificial Sequence: Synthetic oligonucleotide
guccauaaacuggaguuag

SEQ ID NO: 2117835 - RNA, 19 nt, Artificial Sequence
  Description of Artificial Sequence: Synthetic oligonucleotide
uuguucucuaccucacccu

SEQ ID NO: 2117836 - RNA, 19 nt, Artificial Sequence
  Description of Artificial Sequence: Synthetic oligonucleotide
cauuauucauuguccauaa

SEQ ID NO: 2117837 - RNA, 19 nt, Artificial Sequence
  Description of Artificial Sequence: Synthetic oligonucleotide
ccugaaugaugcuuguggg

SEQ ID NO: 2117838 - RNA, 19 nt, Artificial Sequence
  Description of Artificial Sequence: Synthetic oligonucleotide
uuggcuauuccugaaugau

SEQ ID NO: 2117839 - RNA, 19 nt, Artificial Sequence
  Description of Artificial Sequence: Synthetic oligonucleotide
uguuuuggcuauuccugaa

SEQ ID NO: 2117840 - RNA, 19 nt, Artificial Sequence
  Description of Artificial Sequence: Synthetic oligonucleotide
cucuaccucacccucccag

SEQ ID NO: 2117841 - RNA, 19 nt, Artificial Sequence
  Description of Artificial Sequence: Synthetic oligonucleotide
agucgccuaccuugcuucc

SEQ ID NO: 2117842 - RNA, 19 nt, Artificial Sequence
  Description of Artificial Sequence: Synthetic oligonucleotide
ggcaaagccacccgucugg

SEQ ID NO: 2117843 - RNA, 19 nt, Artificial Sequence
  Description of Artificial Sequence: Synthetic oligonucleotide
ugucccauggcagucgccu

SEQ ID NO: 2117844 - RNA, 19 nt, Artificial Sequence
  Description of Artificial Sequence: Synthetic oligonucleotide
aucuacugccacuucugcu

SEQ ID NO: 2117845 - RNA, 19 nt, Artificial Sequence
  Description of Artificial Sequence: Synthetic oligonucleotide
accauuauucauuguccau

SEQ ID NO: 2117846 - RNA, 19 nt, Artificial Sequence
  Description of Artificial Sequence: Synthetic oligonucleotide
aguccccacugccaaguuc

SEQ ID NO: 2117847 - RNA, 19 nt, Artificial Sequence
  Description of Artificial Sequence: Synthetic oligonucleotide
gcuggauagaccagguugg

SEQ ID NO: 2117848 - RNA, 19 nt, Artificial Sequence
  Description of Artificial Sequence: Synthetic oligonucleotide
cacccucccaggcaaagcc

SEQ ID NO: 2117849 - RNA, 19 nt, Artificial Sequence
  Description of Artificial Sequence: Synthetic oligonucleotide
gccaaauucagguuugcca

SEQ ID NO: 2117850 - RNA, 19 nt, Artificial Sequence
  Description of Artificial Sequence: Synthetic oligonucleotide
gaguuagguagugucuggc

SEQ ID NO: 2117851 - RNA, 19 nt, Artificial Sequence
  Description of Artificial Sequence: Synthetic oligonucleotide
gggaucugaaguuuguaca

SEQ ID NO: 2117852 - RNA, 19 nt, Artificial Sequence
  Description of Artificial Sequence: Synthetic oligonucleotide
ucgccuaccuugcuucccc

SEQ ID NO: 2117853 - RNA, 19 nt, Artificial Sequence
  Description of Artificial Sequence: Synthetic oligonucleotide
caucuacugccacuucugc

SEQ ID NO: 2117854 - RNA, 19 nt, Artificial Sequence
  Description of Artificial Sequence: Synthetic oligonucleotide
agaucaaguuugguggaug

SEQ ID NO: 2117855 - RNA, 19 nt, Artificial Sequence
  Description of Artificial Sequence: Synthetic oligonucleotide
ucaaguugcuggagggcaa

SEQ ID NO: 2117856 - RNA, 19 nt, Artificial Sequence
  Description of Artificial Sequence: Synthetic oligonucleotide
gucuggcugccaaagauug

SEQ ID NO: 2117857 - RNA, 19 nt, Artificial Sequence
  Description of Artificial Sequence: Synthetic oligonucleotide
caaucuggaaaagaagcga

SEQ ID NO: 2117858 - RNA, 19 nt, Artificial Sequence
  Description of Artificial Sequence: Synthetic oligonucleotide
ucaggcgagaguccccacu

SEQ ID NO: 2117859 - RNA, 19 nt, Artificial Sequence
  Description of Artificial Sequence: Synthetic oligonucleotide
ugucuggcugccaaagauu

SEQ ID NO: 2117860 - RNA, 19 nt, Artificial Sequence
  Description of Artificial Sequence: Synthetic oligonucleotide
uaggcaaagggaagaucaa

SEQ ID NO: 2117861 - RNA, 19 nt, Artificial Sequence
  Description of Artificial Sequence: Synthetic oligonucleotide
gaagcacugcuucuguuua

SEQ ID NO: 2117862 - RNA, 19 nt, Artificial Sequence
  Description of Artificial Sequence: Synthetic oligonucleotide
ggaguuagguagugucugg

SEQ ID NO: 2117863 - RNA, 19 nt, Artificial Sequence
  Description of Artificial Sequence: Synthetic oligonucleotide
gaagcugccgggacugaag

SEQ ID NO: 2117864 - RNA, 19 nt, Artificial Sequence
  Description of Artificial Sequence: Synthetic oligonucleotide
uguccauaaacuggaguua

SEQ ID NO: 2117865 - RNA, 19 nt, Artificial Sequence
  Description of Artificial Sequence: Synthetic oligonucleotide
cucugguccagaagcugcc

SEQ ID NO: 2117866 - RNA, 19 nt, Artificial Sequence
  Description of Artificial Sequence: Synthetic oligonucleotide
ggggugauacuugugcugg

SEQ ID NO: 2117867 - RNA, 19 nt, Artificial Sequence
  Description of Artificial Sequence: Synthetic oligonucleotide
caccauuauucauugucca

SEQ ID NO: 2117868 - RNA, 19 nt, Artificial Sequence
  Description of Artificial Sequence: Synthetic oligonucleotide
aaguuugguggaugguguu

SEQ ID NO: 2117869 - RNA, 19 nt, Artificial Sequence
  Description of Artificial Sequence: Synthetic oligonucleotide
accuugcuuccccacuggg

SEQ ID NO: 2117870 - RNA, 19 nt, Artificial Sequence
  Description of Artificial Sequence: Synthetic oligonucleotide
agugguucucaggagugug

SEQ ID NO: 2117871 - RNA, 19 nt, Artificial Sequence
  Description of Artificial Sequence: Synthetic oligonucleotide
cauaaacuggaguuaggua

SEQ ID NO: 2117872 - RNA, 19 nt, Artificial Sequence
  Description of Artificial Sequence: Synthetic oligonucleotide
gaagcgaaagccagaugca

SEQ ID NO: 2117873 - RNA, 19 nt, Artificial Sequence
  Description of Artificial Sequence: Synthetic oligonucleotide
aagcgaaagccagaugcaa

SEQ ID NO: 2117874 - RNA, 19 nt, Artificial Sequence
  Description of Artificial Sequence: Synthetic oligonucleotide
cacugcuggccaaauucag

SEQ ID NO: 2117875 - RNA, 19 nt, Artificial Sequence
  Description of Artificial Sequence: Synthetic oligonucleotide
aagaucaaguuugguggau

SEQ ID NO: 2117876 - RNA, 19 nt, Artificial Sequence
  Description of Artificial Sequence: Synthetic oligonucleotide
gaagggcagggaaaggcac

SEQ ID NO: 2117877 - RNA, 19 nt, Artificial Sequence
  Description of Artificial Sequence: Synthetic oligonucleotide
ugcuuguggggaugguaug

SEQ ID NO: 2117878 - RNA, 19 nt, Artificial Sequence
  Description of Artificial Sequence: Synthetic oligonucleotide
cuaggacugaugacagguc

SEQ ID NO: 2117879 - RNA, 19 nt, Artificial Sequence
  Description of Artificial Sequence: Synthetic oligonucleotide
ggucuggcuggauagacca

SEQ ID NO: 2117880 - RNA, 19 nt, Artificial Sequence
  Description of Artificial Sequence: Synthetic oligonucleotide
aggucuggcuggauagacc

SEQ ID NO: 2117881 - RNA, 19 nt, Artificial Sequence
  Description of Artificial Sequence: Synthetic oligonucleotide
ugcuggggaaccacuccug

SEQ ID NO: 2117882 - RNA, 19 nt, Artificial Sequence
  Description of Artificial Sequence: Synthetic oligonucleotide
aggcgagaguccccacugc

SEQ ID NO: 2117883 - RNA, 19 nt, Artificial Sequence
  Description of Artificial Sequence: Synthetic oligonucleotide
cuaccucacccucccaggc

SEQ ID NO: 2117884 - RNA, 19 nt, Artificial Sequence
  Description of Artificial Sequence: Synthetic oligonucleotide
agcaggagagacagaggac

SEQ ID NO: 2117885 - RNA, 19 nt, Artificial Sequence
  Description of Artificial Sequence: Synthetic oligonucleotide
auacuucaaucuggaaaag

SEQ ID NO: 2117886 - RNA, 19 nt, Artificial Sequence
  Description of Artificial Sequence: Synthetic oligonucleotide
ggugaggagauugauguga

SEQ ID NO: 2117887 - RNA, 19 nt, Artificial Sequence
  Description of Artificial Sequence: Synthetic oligonucleotide
aaauagccaaagagccucu

SEQ ID NO: 2117888 - RNA, 19 nt, Artificial Sequence
  Description of Artificial Sequence: Synthetic oligonucleotide
caaguuccauccaaaccca

SEQ ID NO: 2117889 - RNA, 19 nt, Artificial Sequence
  Description of Artificial Sequence: Synthetic oligonucleotide
ugaggagauugaugugacu

SEQ ID NO: 2117890 - RNA, 19 nt, Artificial Sequence
  Description of Artificial Sequence: Synthetic oligonucleotide
cacuccuguagccuugcug

SEQ ID NO: 2117891 - RNA, 19 nt, Artificial Sequence
  Description of Artificial Sequence: Synthetic oligonucleotide
ggugauacuugugcugggg

SEQ ID NO: 2117892 - RNA, 19 nt, Artificial Sequence
  Description of Artificial Sequence: Synthetic oligonucleotide
ucuaggcaaagggaagauc

SEQ ID NO: 2117893 - RNA, 19 nt, Artificial Sequence
  Description of Artificial Sequence: Synthetic oligonucleotide
ucccauggcagucgccuac

SEQ ID NO: 2117894 - RNA, 19 nt, Artificial Sequence
  Description of Artificial Sequence: Synthetic oligonucleotide
uagccuugcuguaugcguu

SEQ ID NO: 2117895 - RNA, 19 nt, Artificial Sequence
  Description of Artificial Sequence: Synthetic oligonucleotide
gguugggccacuaggacug

SEQ ID NO: 2117896 - RNA, 19 nt, Artificial Sequence
  Description of Artificial Sequence: Synthetic oligonucleotide
gcaccauuauucauugucc

SEQ ID NO: 2117897 - RNA, 19 nt, Artificial Sequence
  Description of Artificial Sequence: Synthetic oligonucleotide
cagucgccuaccuugcuuc

SEQ ID NO: 2117898 - RNA, 19 nt, Artificial Sequence
  Description of Artificial Sequence: Synthetic oligonucleotide
auagccaaagagccucuuu

SEQ ID NO: 2117899 - RNA, 19 nt, Artificial Sequence
  Description of Artificial Sequence: Synthetic oligonucleotide
agugucuggcugccaaaga

SEQ ID NO: 2117900 - RNA, 19 nt, Artificial Sequence
  Description of Artificial Sequence: Synthetic oligonucleotide
acuauggggccaccagcug

SEQ ID NO: 2117901 - RNA, 19 nt, Artificial Sequence
  Description of Artificial Sequence: Synthetic oligonucleotide
ggaucugaaguuuguacaa

SEQ ID NO: 2117902 - RNA, 19 nt, Artificial Sequence
  Description of Artificial Sequence: Synthetic oligonucleotide
guggaguugguaacugccc

SEQ ID NO: 2117903 - RNA, 19 nt, Artificial Sequence
  Description of Artificial Sequence: Synthetic oligonucleotide
cacuaggacugaugacagg

SEQ ID NO: 2117904 - RNA, 19 nt, Artificial Sequence
  Description of Artificial Sequence: Synthetic oligonucleotide
aaguugcuggagggcaaag

SEQ ID NO: 2117905 - RNA, 19 nt, Artificial Sequence
  Description of Artificial Sequence: Synthetic oligonucleotide
uggcagucgccuaccuugc

SEQ ID NO: 2117906 - RNA, 19 nt, Artificial Sequence
  Description of Artificial Sequence: Synthetic oligonucleotide
ugugacuggcugcucuuuu

SEQ ID NO: 2117907 - RNA, 19 nt, Artificial Sequence
  Description of Artificial Sequence: Synthetic oligonucleotide
cucgacucugguccagaag

SEQ ID NO: 2117908 - RNA, 19 nt, Artificial Sequence
  Description of Artificial Sequence: Synthetic oligonucleotide
aaaaggcgccugucccaug

SEQ ID NO: 2117909 - RNA, 19 nt, Artificial Sequence
  Description of Artificial Sequence: Synthetic oligonucleotide
ggggaugguaugcaccugc

SEQ ID NO: 2117910 - RNA, 19 nt, Artificial Sequence
  Description of Artificial Sequence: Synthetic oligonucleotide
uuguggggaugguaugcac

SEQ ID NO: 2117911 - RNA, 19 nt, Artificial Sequence
  Description of Artificial Sequence: Synthetic oligonucleotide
agccuugcuguaugcguug

SEQ ID NO: 2117912 - RNA, 19 nt, Artificial Sequence
  Description of Artificial Sequence: Synthetic oligonucleotide
aagcacugcuucuguuuau

SEQ ID NO: 2117913 - RNA, 19 nt, Artificial Sequence
  Description of Artificial Sequence: Synthetic oligonucleotide
gacugaugacaggucgaag

SEQ ID NO: 2117914 - RNA, 19 nt, Artificial Sequence
  Description of Artificial Sequence: Synthetic oligonucleotide
cugaugccgggcucgacuc

SEQ ID NO: 2117915 - RNA, 19 nt, Artificial Sequence
  Description of Artificial Sequence: Synthetic oligonucleotide
uuaugacacugcuggccaa

SEQ ID NO: 2117916 - RNA, 19 nt, Artificial Sequence
  Description of Artificial Sequence: Synthetic oligonucleotide
caggcgagaguccccacug

SEQ ID NO: 2117917 - RNA, 19 nt, Artificial Sequence
  Description of Artificial Sequence: Synthetic oligonucleotide
uguaugcguuguucucuac

SEQ ID NO: 2117918 - RNA, 19 nt, Artificial Sequence
  Description of Artificial Sequence: Synthetic oligonucleotide
agauugccugaugccgggc

SEQ ID NO: 2117919 - RNA, 19 nt, Artificial Sequence
  Description of Artificial Sequence: Synthetic oligonucleotide
cuggauagaccagguuggg

SEQ ID NO: 2117920 - RNA, 19 nt, Artificial Sequence
  Description of Artificial Sequence: Synthetic oligonucleotide
ggaguugguaacugcccgc

SEQ ID NO: 2117921 - RNA, 19 nt, Artificial Sequence
  Description of Artificial Sequence: Synthetic oligonucleotide
aguugguaacugcccgcug

SEQ ID NO: 2117922 - RNA, 19 nt, Artificial Sequence
  Description of Artificial Sequence: Synthetic oligonucleotide
guugguaacugcccgcugu

SEQ ID NO: 2117923 - RNA, 19 nt, Artificial Sequence
  Description of Artificial Sequence: Synthetic oligonucleotide
ccgggcucgacucuggucc

SEQ ID NO: 2117924 - RNA, 19 nt, Artificial Sequence
  Description of Artificial Sequence: Synthetic oligonucleotide
cagguugggccacuaggac

SEQ ID NO: 2117925 - RNA, 19 nt, Artificial Sequence
  Description of Artificial Sequence: Synthetic oligonucleotide
uaacugcccgcuguggggu

SEQ ID NO: 2117926 - RNA, 19 nt, Artificial Sequence
  Description of Artificial Sequence: Synthetic oligonucleotide
gaggucuggcuggauagac

SEQ ID NO: 2117927 - RNA, 19 nt, Artificial Sequence
  Description of Artificial Sequence: Synthetic oligonucleotide
ggcacacucgugcucuggg

SEQ ID NO: 2117928 - RNA, 19 nt, Artificial Sequence
  Description of Artificial Sequence: Synthetic oligonucleotide
agccagaugcaaauagcca

SEQ ID NO: 2117929 - RNA, 19 nt, Artificial Sequence
  Description of Artificial Sequence: Synthetic oligonucleotide
gggaagggcagggaaaggc

SEQ ID NO: 2117930 - RNA, 19 nt, Artificial Sequence
  Description of Artificial Sequence: Synthetic oligonucleotide
guagccuugcuguaugcgu

SEQ ID NO: 2117931 - RNA, 19 nt, Artificial Sequence
  Description of Artificial Sequence: Synthetic oligonucleotide
gaugccgggcucgacucug

SEQ ID NO: 2117932 - RNA, 19 nt, Artificial Sequence
  Description of Artificial Sequence: Synthetic oligonucleotide
aaggcacacucgugcucug

SEQ ID NO: 2117933 - RNA, 19 nt, Artificial Sequence
  Description of Artificial Sequence: Synthetic oligonucleotide
uuauaucaucugggagcag

SEQ ID NO: 2117934 - RNA, 19 nt, Artificial Sequence
  Description of Artificial Sequence: Synthetic oligonucleotide
acuggggaaccagugcugu

SEQ ID NO: 2117935 - RNA, 19 nt, Artificial Sequence
  Description of Artificial Sequence: Synthetic oligonucleotide
augcuuguggggaugguau

SEQ ID NO: 2117936 - RNA, 19 nt, Artificial Sequence
  Description of Artificial Sequence: Synthetic oligonucleotide
guucucuaccucacccucc

SEQ ID NO: 2117937 - RNA, 19 nt, Artificial Sequence
  Description of Artificial Sequence: Synthetic oligonucleotide
gaccagguugggccacuag

SEQ ID NO: 2117938 - RNA, 19 nt, Artificial Sequence
  Description of Artificial Sequence: Synthetic oligonucleotide
ccuugcuuccccacugggg

SEQ ID NO: 2117939 - RNA, 19 nt, Artificial Sequence
  Description of Artificial Sequence: Synthetic oligonucleotide
aucaggcgagaguccccac

SEQ ID NO: 2117940 - RNA, 19 nt, Artificial Sequence
  Description of Artificial Sequence: Synthetic oligonucleotide
accuagcgggguugagggg

SEQ ID NO: 2117941 - RNA, 19 nt, Artificial Sequence
  Description of Artificial Sequence: Synthetic oligonucleotide
caaagccacccgucuggag

SEQ ID NO: 2117942 - RNA, 19 nt, Artificial Sequence
  Description of Artificial Sequence: Synthetic oligonucleotide
ggcgugacgcaucaggcga

SEQ ID NO: 2117943 - RNA, 19 nt, Artificial Sequence
  Description of Artificial Sequence: Synthetic oligonucleotide
ccaucuacugccacuucug

SEQ ID NO: 2117944 - RNA, 19 nt, Artificial Sequence
  Description of Artificial Sequence: Synthetic oligonucleotide
gaugcuuguggggauggua

SEQ ID NO: 2117945 - RNA, 19 nt, Artificial Sequence
  Description of Artificial Sequence: Synthetic oligonucleotide
uugggaucugaaguuugua

SEQ ID NO: 2117946 - RNA, 19 nt, Artificial Sequence
  Description of Artificial Sequence: Synthetic oligonucleotide
gauugccugaugccgggcu

SEQ ID NO: 2117947 - RNA, 19 nt, Artificial Sequence
  Description of Artificial Sequence: Synthetic oligonucleotide
gggcgugacgcaucaggcg

SEQ ID NO: 2117948 - RNA, 19 nt, Artificial Sequence
  Description of Artificial Sequence: Synthetic oligonucleotide
ggagugguucucaggagug

SEQ ID NO: 2117949 - RNA, 19 nt, Artificial Sequence
  Description of Artificial Sequence: Synthetic oligonucleotide
ggcgagaguccccacugcc

SEQ ID NO: 2117950 - RNA, 19 nt, Artificial Sequence
  Description of Artificial Sequence: Synthetic oligonucleotide
gggaaccacuccuguagcc

SEQ ID NO: 2117951 - RNA, 19 nt, Artificial Sequence
  Description of Artificial Sequence: Synthetic oligonucleotide
aggacugaugacaggucga

SEQ ID NO: 2117952 - RNA, 19 nt, Artificial Sequence
  Description of Artificial Sequence: Synthetic oligonucleotide
uggccaaauucagguuugc

SEQ ID NO: 2117953 - RNA, 19 nt, Artificial Sequence
  Description of Artificial Sequence: Synthetic oligonucleotide
ugaugccgggcucgacucu

SEQ ID NO: 2117954 - RNA, 19 nt, Artificial Sequence
  Description of Artificial Sequence: Synthetic oligonucleotide
gcugccaaagauugccuga

SEQ ID NO: 2117955 - RNA, 19 nt, Artificial Sequence
  Description of Artificial Sequence: Synthetic oligonucleotide
agcgaaagccagaugcaaa

SEQ ID NO: 2117956 - RNA, 19 nt, Artificial Sequence
  Description of Artificial Sequence: Synthetic oligonucleotide
acgcaucaggcgagagucc

SEQ ID NO: 2117957 - RNA, 19 nt, Artificial Sequence
  Description of Artificial Sequence: Synthetic oligonucleotide
ugguugggcugauggcaac

SEQ ID NO: 2117958 - RNA, 19 nt, Artificial Sequence
  Description of Artificial Sequence: Synthetic oligonucleotide
agggaagaucaaguuuggu

SEQ ID NO: 2117959 - RNA, 19 nt, Artificial Sequence
  Description of Artificial Sequence: Synthetic oligonucleotide
cuggaguuagguagugucu

SEQ ID NO: 2117960 - RNA, 19 nt, Artificial Sequence
  Description of Artificial Sequence: Synthetic oligonucleotide
acagaggaccuagcggggu

SEQ ID NO: 2117961 - RNA, 19 nt, Artificial Sequence
  Description of Artificial Sequence: Synthetic oligonucleotide
agggaaaggcacacucgug

SEQ ID NO: 2117962 - RNA, 19 nt, Artificial Sequence
  Description of Artificial Sequence: Synthetic oligonucleotide
gugucuggcugccaaagau

SEQ ID NO: 2117963 - RNA, 19 nt, Artificial Sequence
  Description of Artificial Sequence: Synthetic oligonucleotide
gaaugaugcuuguggggau

SEQ ID NO: 2117964 - RNA, 19 nt, Artificial Sequence
  Description of Artificial Sequence: Synthetic oligonucleotide
gguggaugguguugggauc

SEQ ID NO: 2117965 - RNA, 19 nt, Artificial Sequence
  Description of Artificial Sequence: Synthetic oligonucleotide
cuguggggugauacuugug

SEQ ID NO: 2117966 - RNA, 19 nt, Artificial Sequence
  Description of Artificial Sequence: Synthetic oligonucleotide
gggugauacuugugcuggg

SEQ ID NO: 2117967 - RNA, 19 nt, Artificial Sequence
  Description of Artificial Sequence: Synthetic oligonucleotide
aagucugguugggcugaug

SEQ ID NO: 2117968 - RNA, 19 nt, Artificial Sequence
  Description of Artificial Sequence: Synthetic oligonucleotide
cacucgugcucuggguggg

SEQ ID NO: 2117969 - RNA, 19 nt, Artificial Sequence
  Description of Artificial Sequence: Synthetic oligonucleotide
cagggaaaggcacacucgu

SEQ ID NO: 2117970 - RNA, 19 nt, Artificial Sequence
  Description of Artificial Sequence: Synthetic oligonucleotide
cuguuucccuguuguccug

SEQ ID NO: 2117971 - RNA, 19 nt, Artificial Sequence
  Description of Artificial Sequence: Synthetic oligonucleotide
uacuugugcuggggaacca

SEQ ID NO: 2117972 - RNA, 19 nt, Artificial Sequence
  Description of Artificial Sequence: Synthetic oligonucleotide
cugguugggcugauggcaa

SEQ ID NO: 2117973 - RNA, 19 nt, Artificial Sequence
  Description of Artificial Sequence: Synthetic oligonucleotide
guggggugauacuugugcu

SEQ ID NO: 2117974 - RNA, 19 nt, Artificial Sequence
  Description of Artificial Sequence: Synthetic oligonucleotide
uggcuggauagaccagguu

SEQ ID NO: 2117975 - RNA, 19 nt, Artificial Sequence
  Description of Artificial Sequence: Synthetic oligonucleotide
gagauugaugugacuggcu

SEQ ID NO: 2117976 - RNA, 19 nt, Artificial Sequence
  Description of Artificial Sequence: Synthetic oligonucleotide
gaguugguaacugcccgcu

SEQ ID NO: 2117977 - RNA, 19 nt, Artificial Sequence
  Description of Artificial Sequence: Synthetic oligonucleotide
gguguugggaucugaaguu

SEQ ID NO: 2117978 - RNA, 19 nt, Artificial Sequence
  Description of Artificial Sequence: Synthetic oligonucleotide
ccacucuaggcaaagggaa

SEQ ID NO: 2117979 - RNA, 19 nt, Artificial Sequence
  Description of Artificial Sequence: Synthetic oligonucleotide
cuguaugcguuguucucua

SEQ ID NO: 2117980 - RNA, 19 nt, Artificial Sequence
  Description of Artificial Sequence: Synthetic oligonucleotide
caucaggcgagagucccca

SEQ ID NO: 2117981 - RNA, 19 nt, Artificial Sequence
  Description of Artificial Sequence: Synthetic oligonucleotide
ggaagggcagggaaaggca

SEQ ID NO: 2117982 - RNA, 19 nt, Artificial Sequence
  Description of Artificial Sequence: Synthetic oligonucleotide
cugccaaguuccauccaaa

SEQ ID NO: 2117983 - RNA, 19 nt, Artificial Sequence
  Description of Artificial Sequence: Synthetic oligonucleotide
gguugggcugauggcaacc

SEQ ID NO: 2117984 - RNA, 19 nt, Artificial Sequence
  Description of Artificial Sequence: Synthetic oligonucleotide
guaauuccaaaaggcgccu

SEQ ID NO: 2117985 - RNA, 19 nt, Artificial Sequence
  Description of Artificial Sequence: Synthetic oligonucleotide
gaugugacuggcugcucuu

SEQ ID NO: 2117986 - RNA, 19 nt, Artificial Sequence
  Description of Artificial Sequence: Synthetic oligonucleotide
ugaugcuuguggggauggu

SEQ ID NO: 2117987 - RNA, 19 nt, Artificial Sequence
  Description of Artificial Sequence: Synthetic oligonucleotide
cugucccauggcagucgcc

SEQ ID NO: 2117988 - RNA, 19 nt, Artificial Sequence
  Description of Artificial Sequence: Synthetic oligonucleotide
cuugugcuggggaaccacu

SEQ ID NO: 2117989 - RNA, 19 nt, Artificial Sequence
  Description of Artificial Sequence: Synthetic oligonucleotide
gucgccuaccuugcuuccc

SEQ ID NO: 2117990 - RNA, 19 nt, Artificial Sequence
  Description of Artificial Sequence: Synthetic oligonucleotide
ggggcgugacgcaucaggc

SEQ ID NO: 2117991 - RNA, 19 nt, Artificial Sequence
  Description of Artificial Sequence: Synthetic oligonucleotide
gugacgcaucaggcgagag

SEQ ID NO: 2117992 - RNA, 19 nt, Artificial Sequence
  Description of Artificial Sequence: Synthetic oligonucleotide
uugaugugacuggcugcuc

SEQ ID NO: 2117993 - RNA, 19 nt, Artificial Sequence
  Description of Artificial Sequence: Synthetic oligonucleotide
ccagaugcaaauagccaaa

SEQ ID NO: 2117994 - RNA, 19 nt, Artificial Sequence
  Description of Artificial Sequence: Synthetic oligonucleotide
ggcgccugucccauggcag

SEQ ID NO: 2117995 - RNA, 19 nt, Artificial Sequence
  Description of Artificial Sequence: Synthetic oligonucleotide
gcaaccaucuacugccacu

SEQ ID NO: 2117996 - RNA, 19 nt, Artificial Sequence
  Description of Artificial Sequence: Synthetic oligonucleotide
ggaaccagugcuguuggcu

SEQ ID NO: 2117997 - RNA, 19 nt, Artificial Sequence
  Description of Artificial Sequence: Synthetic oligonucleotide
augacacugcuggccaaau

SEQ ID NO: 2117998 - RNA, 19 nt, Artificial Sequence
  Description of Artificial Sequence: Synthetic oligonucleotide
gcgaaagccagaugcaaau

SEQ ID NO: 2117999 - RNA, 19 nt, Artificial Sequence
  Description of Artificial Sequence: Synthetic oligonucleotide
gcuggccaaauucagguuu

SEQ ID NO: 2118000 - RNA, 19 nt, Artificial Sequence
  Description of Artificial Sequence: Synthetic oligonucleotide
ccaaaaggcgccuguccca

SEQ ID NO: 2118001 - RNA, 19 nt, Artificial Sequence
  Description of Artificial Sequence: Synthetic oligonucleotide
ccauaaacuggaguuaggu

SEQ ID NO: 2118002 - RNA, 19 nt, Artificial Sequence
  Description of Artificial Sequence: Synthetic oligonucleotide
ccugucccauggcagucgc

SEQ ID NO: 2118003 - RNA, 19 nt, Artificial Sequence
  Description of Artificial Sequence: Synthetic oligonucleotide
ggaaccacuccuguagccu

SEQ ID NO: 2118004 - RNA, 19 nt, Artificial Sequence
  Description of Artificial Sequence: Synthetic oligonucleotide
ggacugaugacaggucgaa

SEQ ID NO: 2118005 - RNA, 19 nt, Artificial Sequence
  Description of Artificial Sequence: Synthetic oligonucleotide
cuagcgggguugaggggaa

SEQ ID NO: 2118006 - RNA, 19 nt, Artificial Sequence
  Description of Artificial Sequence: Synthetic oligonucleotide
caaguugcuggagggcaaa

SEQ ID NO: 2118007 - RNA, 19 nt, Artificial Sequence
  Description of Artificial Sequence: Synthetic oligonucleotide
cuggcuggauagaccaggu

SEQ ID NO: 2118008 - RNA, 19 nt, Artificial Sequence
  Description of Artificial Sequence: Synthetic oligonucleotide
gcaaauagccaaagagccu

SEQ ID NO: 2118009 - RNA, 19 nt, Artificial Sequence
  Description of Artificial Sequence: Synthetic oligonucleotide
augugacuggcugcucuuu

SEQ ID NO: 2118010 - RNA, 19 nt, Artificial Sequence
  Description of Artificial Sequence: Synthetic oligonucleotide
ccuagcgggguugagggga

SEQ ID NO: 2118011 - RNA, 19 nt, Artificial Sequence
  Description of Artificial Sequence: Synthetic oligonucleotide
gccugucccauggcagucg

SEQ ID NO: 2118012 - RNA, 19 nt, Artificial Sequence
  Description of Artificial Sequence: Synthetic oligonucleotide
ugccugaugccgggcucga

SEQ ID NO: 2118013 - RNA, 19 nt, Artificial Sequence
  Description of Artificial Sequence: Synthetic oligonucleotide
cgcaucaggcgagaguccc

SEQ ID NO: 2118014 - RNA, 19 nt, Artificial Sequence
  Description of Artificial Sequence: Synthetic oligonucleotide
augccgggcucgacucugg

SEQ ID NO: 2118015 - RNA, 19 nt, Artificial Sequence
  Description of Artificial Sequence: Synthetic oligonucleotide
ccacccgucuggaggcucc

SEQ ID NO: 2118016 - RNA, 19 nt, Artificial Sequence
  Description of Artificial Sequence: Synthetic oligonucleotide
ccccacuggggaaccagug

SEQ ID NO: 2118017 - RNA, 19 nt, Artificial Sequence
  Description of Artificial Sequence: Synthetic oligonucleotide
acugcccgcugugggguga

SEQ ID NO: 2118018 - RNA, 19 nt, Artificial Sequence
  Description of Artificial Sequence: Synthetic oligonucleotide
caccagcuguggcacuuga

SEQ ID NO: 2118019 - RNA, 19 nt, Artificial Sequence
  Description of Artificial Sequence: Synthetic oligonucleotide
gcguuguucucuaccucac

SEQ ID NO: 2118020 - RNA, 19 nt, Artificial Sequence
  Description of Artificial Sequence: Synthetic oligonucleotide
cacugccaaguuccaucca

SEQ ID NO: 2118021 - RNA, 19 nt, Artificial Sequence
  Description of Artificial Sequence: Synthetic oligonucleotide
gcuauuccugaaugaugcu

SEQ ID NO: 2118022 - RNA, 19 nt, Artificial Sequence
  Description of Artificial Sequence: Synthetic oligonucleotide
gccuaccuugcuuccccac

SEQ ID NO: 2118023 - RNA, 19 nt, Artificial Sequence
  Description of Artificial Sequence: Synthetic oligonucleotide
gcaucaggcgagagucccc

SEQ ID NO: 2118024 - RNA, 19 nt, Artificial Sequence
  Description of Artificial Sequence: Synthetic oligonucleotide
caaaaggcgccugucccau

SEQ ID NO: 2118025 - RNA, 19 nt, Artificial Sequence
  Description of Artificial Sequence: Synthetic oligonucleotide
gcgugacgcaucaggcgag

SEQ ID NO: 2118026 - RNA, 19 nt, Artificial Sequence
  Description of Artificial Sequence: Synthetic oligonucleotide
gcgagaguccccacugcca

SEQ ID NO: 2118027 - RNA, 19 nt, Artificial Sequence
  Description of Artificial Sequence: Synthetic oligonucleotide
cugccaaagauugccugau

SEQ ID NO: 2118028 - RNA, 19 nt, Artificial Sequence
  Description of Artificial Sequence: Synthetic oligonucleotide
gucccauggcagucgccua

SEQ ID NO: 2118029 - RNA, 19 nt, Artificial Sequence
  Description of Artificial Sequence: Synthetic oligonucleotide
gcccgcuguggggugauac

SEQ ID NO: 2118030 - RNA, 19 nt, Artificial Sequence
  Description of Artificial Sequence: Synthetic oligonucleotide
ccugaugccgggcucgacu

SEQ ID NO: 2118031 - RNA, 19 nt, Artificial Sequence
  Description of Artificial Sequence: Synthetic oligonucleotide
agaccagguugggccacua

SEQ ID NO: 2118032 - RNA, 19 nt, Artificial Sequence
  Description of Artificial Sequence: Synthetic oligonucleotide
gccugcaccauuauucauu

SEQ ID NO: 2118033 - RNA, 19 nt, Artificial Sequence
  Description of Artificial Sequence: Synthetic oligonucleotide
acccgucuggaggcuccug

SEQ ID NO: 2118034 - RNA, 19 nt, Artificial Sequence
  Description of Artificial Sequence: Synthetic oligonucleotide
guugggccacuaggacuga

SEQ ID NO: 2118035 - RNA, 19 nt, Artificial Sequence
  Description of Artificial Sequence: Synthetic oligonucleotide
ccuaccuugcuuccccacu

SEQ ID NO: 2118036 - RNA, 19 nt, Artificial Sequence
  Description of Artificial Sequence: Synthetic oligonucleotide
cugcaccauuauucauugu

SEQ ID NO: 2118037 - RNA, 19 nt, Artificial Sequence
  Description of Artificial Sequence: Synthetic oligonucleotide
cugccgggacugaaguuuu

SEQ ID NO: 2118038 - RNA, 19 nt, Artificial Sequence
  Description of Artificial Sequence: Synthetic oligonucleotide
agccacccgucuggaggcu

SEQ ID NO: 2118039 - RNA, 19 nt, Artificial Sequence
  Description of Artificial Sequence: Synthetic oligonucleotide
cuuccccacuggggaacca

SEQ ID NO: 2118040 - RNA, 19 nt, Artificial Sequence
  Description of Artificial Sequence: Synthetic oligonucleotide
gcagucgccuaccuugcuu

SEQ ID NO: 2118041 - RNA, 19 nt, Artificial Sequence
  Description of Artificial Sequence: Synthetic oligonucleotide
cagaggaccuagcgggguu

SEQ ID NO: 2118042 - RNA, 19 nt, Artificial Sequence
  Description of Artificial Sequence: Synthetic oligonucleotide
gggaugguaugcaccugcu

SEQ ID NO: 2118043 - RNA, 19 nt, Artificial Sequence
  Description of Artificial Sequence: Synthetic oligonucleotide
gggcucgacucugguccag

SEQ ID NO: 2118044 - RNA, 19 nt, Artificial Sequence
  Description of Artificial Sequence: Synthetic oligonucleotide
gcgccugucccauggcagu

SEQ ID NO: 2118045 - RNA, 19 nt, Artificial Sequence
  Description of Artificial Sequence: Synthetic oligonucleotide
ggcagucgccuaccuugcu

SEQ ID NO: 2118046 - RNA, 19 nt, Artificial Sequence
  Description of Artificial Sequence: Synthetic oligonucleotide
ggggacucugaggcagcaa

SEQ ID NO: 2118047 - RNA, 19 nt, Artificial Sequence
  Description of Artificial Sequence: Synthetic oligonucleotide
gguuugccaccugcugggu

SEQ ID NO: 2118048 - RNA, 19 nt, Artificial Sequence
  Description of Artificial Sequence: Synthetic oligonucleotide
gccacccgucuggaggcuc

SEQ ID NO: 2118049 - RNA, 19 nt, Artificial Sequence
  Description of Artificial Sequence: Synthetic oligonucleotide
cgacucugguccagaagcu

SEQ ID NO: 2118050 - RNA, 19 nt, Artificial Sequence
  Description of Artificial Sequence: Synthetic oligonucleotide
ccgucuggaggcuccugcu

SEQ ID NO: 2118051 - RNA, 19 nt, Artificial Sequence
  Description of Artificial Sequence: Synthetic oligonucleotide
ugcccgcuguggggugaua

SEQ ID NO: 2118052 - RNA, 19 nt, Artificial Sequence
  Description of Artificial Sequence: Synthetic oligonucleotide
gccugaugccgggcucgac

SEQ ID NO: 2118053 - RNA, 19 nt, Artificial Sequence
  Description of Artificial Sequence: Synthetic oligonucleotide
cgccugucccauggcaguc

SEQ ID NO: 2118054 - RNA, 19 nt, Artificial Sequence
  Description of Artificial Sequence: Synthetic oligonucleotide
ccccaccacucuaggcaaa

SEQ ID NO: 2118055 - RNA, 19 nt, Artificial Sequence
  Description of Artificial Sequence: Synthetic oligonucleotide
cgccuaccuugcuucccca

SEQ ID NO: 2118056 - RNA, 19 nt, Artificial Sequence
  Description of Artificial Sequence: Synthetic oligonucleotide
cacccgucuggaggcuccu

SEQ ID NO: 2118057 - RNA, 19 nt, Artificial Sequence
  Description of Artificial Sequence: Synthetic oligonucleotide
ccgcuguggggugauacuu

SEQ ID NO: 2118058 - RNA, 19 nt, Artificial Sequence
  Description of Artificial Sequence: Synthetic oligonucleotide
cugcccgcuguggggugau

SEQ ID NO: 2118059 - RNA, 19 nt, Artificial Sequence
  Description of Artificial Sequence: Synthetic oligonucleotide
ccccacugccaaguuccau

SEQ ID NO: 2118060 - RNA, 19 nt, Artificial Sequence
  Description of Artificial Sequence: Synthetic oligonucleotide
aaaucaaacagguaugaac

SEQ ID NO: 2118061 - RNA, 19 nt, Artificial Sequence
  Description of Artificial Sequence: Synthetic oligonucleotide
auauagacuaacuuuaccc

SEQ ID NO: 2118062 - RNA, 19 nt, Artificial Sequence
  Description of Artificial Sequence: Synthetic oligonucleotide
aaagcuuaaauacacaaug

SEQ ID NO: 2118063 - RNA, 19 nt, Artificial Sequence
  Description of Artificial Sequence: Synthetic oligonucleotide
aaaucuauccuuuaggucu

SEQ ID NO: 2118064 - RNA, 19 nt, Artificial Sequence
  Description of Artificial Sequence: Synthetic oligonucleotide
cuuaaauacacaauggucc

SEQ ID NO: 2118065 - RNA, 19 nt, Artificial Sequence
  Description of Artificial Sequence: Synthetic oligonucleotide
agcaagaagacacaguucc

SEQ ID NO: 2118066 - RNA, 19 nt, Artificial Sequence
  Description of Artificial Sequence: Synthetic oligonucleotide
aacauuguccaucacuugg

SEQ ID NO: 2118067 - RNA, 19 nt, Artificial Sequence
  Description of Artificial Sequence: Synthetic oligonucleotide
uauugaaucuucaaguugu

SEQ ID NO: 2118068 - RNA, 19 nt, Artificial Sequence
  Description of Artificial Sequence: Synthetic oligonucleotide
  modified_base (17)..(17): a, c, u, g, unknown or other
aaauacacaaugguccncc

SEQ ID NO: 2118069 - RNA, 19 nt, Artificial Sequence
  Description of Artificial Sequence: Synthetic oligonucleotide
uaaauggaaguguuaaagg

SEQ ID NO: 2118070 - RNA, 19 nt, Artificial Sequence
  Description of Artificial Sequence: Synthetic oligonucleotide
uccuaaaucaaacagguau

SEQ ID NO: 2118071 - RNA, 19 nt, Artificial Sequence
  Description of Artificial Sequence: Synthetic oligonucleotide
acuaacuuuacccacaccu

SEQ ID NO: 2118072 - RNA, 19 nt, Artificial Sequence
  Description of Artificial Sequence: Synthetic oligonucleotide
aaaucaauaaauggaagug

SEQ ID NO: 2118073 - RNA, 19 nt, Artificial Sequence
  Description of Artificial Sequence: Synthetic oligonucleotide
ucuucuacauggcagauga

SEQ ID NO: 2118074 - RNA, 19 nt, Artificial Sequence
  Description of Artificial Sequence: Synthetic oligonucleotide
aagaauuggggucacauau

SEQ ID NO: 2118075 - RNA, 19 nt, Artificial Sequence
  Description of Artificial Sequence: Synthetic oligonucleotide
aaggggaugacauugcugu

SEQ ID NO: 2118076 - RNA, 19 nt, Artificial Sequence
  Description of Artificial Sequence: Synthetic oligonucleotide
ucaucaguaacauugucca

SEQ ID NO: 2118077 - RNA, 19 nt, Artificial Sequence
  Description of Artificial Sequence: Synthetic oligonucleotide
uguaccauggaccugucug

SEQ ID NO: 2118078 - RNA, 19 nt, Artificial Sequence
  Description of Artificial Sequence: Synthetic oligonucleotide
ugaaucuucaaguugucca

SEQ ID NO: 2118079 - RNA, 19 nt, Artificial Sequence
  Description of Artificial Sequence: Synthetic oligonucleotide
aguguuaaaggaaaacacc

SEQ ID NO: 2118080 - RNA, 19 nt, Artificial Sequence
  Description of Artificial Sequence: Synthetic oligonucleotide
auaaauggaaguguuaaag

SEQ ID NO: 2118081 - RNA, 19 nt, Artificial Sequence
  Description of Artificial Sequence: Synthetic oligonucleotide
cacaguuccaaauaucucc

SEQ ID NO: 2118082 - RNA, 19 nt, Artificial Sequence
  Description of Artificial Sequence: Synthetic oligonucleotide
uguguagucauuucugaag

SEQ ID NO: 2118083 - RNA, 19 nt, Artificial Sequence
  Description of Artificial Sequence: Synthetic oligonucleotide
ucaaccaucugccuugucc

SEQ ID NO: 2118084 - RNA, 19 nt, Artificial Sequence
  Description of Artificial Sequence: Synthetic oligonucleotide
uguuuuaagcuccuggaac

SEQ ID NO: 2118085 - RNA, 19 nt, Artificial Sequence
  Description of Artificial Sequence: Synthetic oligonucleotide
uauagacuaacuuuaccca

SEQ ID NO: 2118086 - RNA, 19 nt, Artificial Sequence
  Description of Artificial Sequence: Synthetic oligonucleotide
cugugugugacauuaauac

SEQ ID NO: 2118087 - RNA, 19 nt, Artificial Sequence
  Description of Artificial Sequence: Synthetic oligonucleotide
  modified_base (19)..(19): a, c, u, g, unknown or other
uuaaauacacaaugguccn

SEQ ID NO: 2118088 - RNA, 19 nt, Artificial Sequence
  Description of Artificial Sequence: Synthetic oligonucleotide
uauccuuuaggucuagggc

SEQ ID NO: 2118089 - RNA, 19 nt, Artificial Sequence
  Description of Artificial Sequence: Synthetic oligonucleotide
acuuuacccacaccuaccc

SEQ ID NO: 2118090 - RNA, 19 nt, Artificial Sequence
  Description of Artificial Sequence: Synthetic oligonucleotide
uuuacccacaccuacccag

SEQ ID NO: 2118091 - RNA, 19 nt, Artificial Sequence
  Description of Artificial Sequence: Synthetic oligonucleotide
ugcuguuuuaagcuccugg

SEQ ID NO: 2118092 - RNA, 19 nt, Artificial Sequence
  Description of Artificial Sequence: Synthetic oligonucleotide
gguauauugaaucuucaag

SEQ ID NO: 2118093 - RNA, 19 nt, Artificial Sequence
  Description of Artificial Sequence: Synthetic oligonucleotide
aucguuuguaccauggacc

SEQ ID NO: 2118094 - RNA, 19 nt, Artificial Sequence
  Description of Artificial Sequence: Synthetic oligonucleotide
uuaagcuacauguuuucug

SEQ ID NO: 2118095 - RNA, 19 nt, Artificial Sequence
  Description of Artificial Sequence: Synthetic oligonucleotide
aaucaauaaauggaagugu

SEQ ID NO: 2118096 - RNA, 19 nt, Artificial Sequence
  Description of Artificial Sequence: Synthetic oligonucleotide
  modified_base (9)..(9): a, c, u, g, unknown or other
aaugguccnccuuaccaag

SEQ ID NO: 2118097 - RNA, 19 nt, Artificial Sequence
  Description of Artificial Sequence: Synthetic oligonucleotide
cuuucgucaaccaucugcc

SEQ ID NO: 2118098 - RNA, 19 nt, Artificial Sequence
  Description of Artificial Sequence: Synthetic oligonucleotide
acuugguaucguuuguacc

SEQ ID NO: 2118099 - RNA, 19 nt, Artificial Sequence
  Description of Artificial Sequence: Synthetic oligonucleotide
aaauaucuccucuuggcaa

SEQ ID NO: 2118100 - RNA, 19 nt, Artificial Sequence
  Description of Artificial Sequence: Synthetic oligonucleotide
auggcaacugucuugagcu

SEQ ID NO: 2118101 - RNA, 19 nt, Artificial Sequence
  Description of Artificial Sequence: Synthetic oligonucleotide
ucuacauggcagaugaccu

SEQ ID NO: 2118102 - RNA, 19 nt, Artificial Sequence
  Description of Artificial Sequence: Synthetic oligonucleotide
gacuauaggagauguguag

SEQ ID NO: 2118103 - RNA, 19 nt, Artificial Sequence
  Description of Artificial Sequence: Synthetic oligonucleotide
auauugaaucuucaaguug

SEQ ID NO: 2118104 - RNA, 19 nt, Artificial Sequence
  Description of Artificial Sequence: Synthetic oligonucleotide
aagcuuaaauacacaaugg

SEQ ID NO: 2118105 - RNA, 19 nt, Artificial Sequence
  Description of Artificial Sequence: Synthetic oligonucleotide
  modified_base (14)..(14): a, c, u, g, unknown or other
uacacaaugguccnccuua

SEQ ID NO: 2118106 - RNA, 19 nt, Artificial Sequence
  Description of Artificial Sequence: Synthetic oligonucleotide
gaaucuucaaguuguccag

SEQ ID NO: 2118107 - RNA, 19 nt, Artificial Sequence
  Description of Artificial Sequence: Synthetic oligonucleotide
uaagcuacauguuuucugu

SEQ ID NO: 2118108 - RNA, 19 nt, Artificial Sequence
  Description of Artificial Sequence: Synthetic oligonucleotide
cuauccuuuaggucuaggg

SEQ ID NO: 2118109 - RNA, 19 nt, Artificial Sequence
  Description of Artificial Sequence: Synthetic oligonucleotide
cuucaaguuguccagcggg

SEQ ID NO: 2118110 - RNA, 19 nt, Artificial Sequence
  Description of Artificial Sequence: Synthetic oligonucleotide
aaucugaaaagccugccuu

SEQ ID NO: 2118111 - RNA, 19 nt, Artificial Sequence
  Description of Artificial Sequence: Synthetic oligonucleotide
uguuaaaggaaaacaccac

SEQ ID NO: 2118112 - RNA, 19 nt, Artificial Sequence
  Description of Artificial Sequence: Synthetic oligonucleotide
aauaaauggaaguguuaaa

SEQ ID NO: 2118113 - RNA, 19 nt, Artificial Sequence
  Description of Artificial Sequence: Synthetic oligonucleotide
aucaguaacauuguccauc

SEQ ID NO: 2118114 - RNA, 19 nt, Artificial Sequence
  Description of Artificial Sequence: Synthetic oligonucleotide
uaucguuuguaccauggac

SEQ ID NO: 2118115 - RNA, 19 nt, Artificial Sequence
  Description of Artificial Sequence: Synthetic oligonucleotide
ucuuuacgaguucuucugg

SEQ ID NO: 2118116 - RNA, 19 nt, Artificial Sequence
  Description of Artificial Sequence: Synthetic oligonucleotide
uucuuuacgaguucuucug

SEQ ID NO: 2118117 - RNA, 19 nt, Artificial Sequence
  Description of Artificial Sequence: Synthetic oligonucleotide
acaaagcuuaaauacacaa

SEQ ID NO: 2118118 - RNA, 19 nt, Artificial Sequence
  Description of Artificial Sequence: Synthetic oligonucleotide
agagcaagaagacacaguu

SEQ ID NO: 2118119 - RNA, 19 nt, Artificial Sequence
  Description of Artificial Sequence: Synthetic oligonucleotide
agcuuaaauacacaauggu

SEQ ID NO: 2118120 - RNA, 19 nt, Artificial Sequence
  Description of Artificial Sequence: Synthetic oligonucleotide
gaaguguuaaaggaaaaca

SEQ ID NO: 2118121 - RNA, 19 nt, Artificial Sequence
  Description of Artificial Sequence: Synthetic oligonucleotide
uucaaguuguccagcgggg

SEQ ID NO: 2118122 - RNA, 19 nt, Artificial Sequence
  Description of Artificial Sequence: Synthetic oligonucleotide
uauauugaaucuucaaguu

SEQ ID NO: 2118123 - RNA, 19 nt, Artificial Sequence
  Description of Artificial Sequence: Synthetic oligonucleotide
uucuacauggcagaugacc

SEQ ID NO: 2118124 - RNA, 19 nt, Artificial Sequence
  Description of Artificial Sequence: Synthetic oligonucleotide
aacuuuacccacaccuacc

SEQ ID NO: 2118125 - RNA, 19 nt, Artificial Sequence
  Description of Artificial Sequence: Synthetic oligonucleotide
ugagaaggggaugacauug

SEQ ID NO: 2118126 - RNA, 19 nt, Artificial Sequence
  Description of Artificial Sequence: Synthetic oligonucleotide
ucaguaacauuguccauca

SEQ ID NO: 2118127 - RNA, 19 nt, Artificial Sequence
  Description of Artificial Sequence: Synthetic oligonucleotide
auccuuuaggucuagggca

SEQ ID NO: 2118128 - RNA, 19 nt, Artificial Sequence
  Description of Artificial Sequence: Synthetic oligonucleotide
guauauugaaucuucaagu

SEQ ID NO: 2118129 - RNA, 19 nt, Artificial Sequence
  Description of Artificial Sequence: Synthetic oligonucleotide
uaacuuuacccacaccuac

SEQ ID NO: 2118130 - RNA, 19 nt, Artificial Sequence
  Description of Artificial Sequence: Synthetic oligonucleotide
aagacacaguuccaaauau

SEQ ID NO: 2118131 - RNA, 19 nt, Artificial Sequence
  Description of Artificial Sequence: Synthetic oligonucleotide
  modified_base (11)..(11): a, c, u, g, unknown or other
acaaugguccnccuuacca

SEQ ID NO: 2118132 - RNA, 19 nt, Artificial Sequence
  Description of Artificial Sequence: Synthetic oligonucleotide
aauaucuccucuuggcaau

SEQ ID NO: 2118133 - RNA, 19 nt, Artificial Sequence
  Description of Artificial Sequence: Synthetic oligonucleotide
ucugcuggcuucuuuacga

SEQ ID NO: 2118134 - RNA, 19 nt, Artificial Sequence
  Description of Artificial Sequence: Synthetic oligonucleotide
ugggaaauuuucauggcaa

SEQ ID NO: 2118135 - RNA, 19 nt, Artificial Sequence
  Description of Artificial Sequence: Synthetic oligonucleotide
cugcagagcaagaagacac

SEQ ID NO: 2118136 - RNA, 19 nt, Artificial Sequence
  Description of Artificial Sequence: Synthetic oligonucleotide
cuuuacgaguucuucuggg

SEQ ID NO: 2118137 - RNA, 19 nt, Artificial Sequence
  Description of Artificial Sequence: Synthetic oligonucleotide
cuugguaucguuuguacca

SEQ ID NO: 2118138 - RNA, 19 nt, Artificial Sequence
  Description of Artificial Sequence: Synthetic oligonucleotide
uaaaucuauccuuuagguc

SEQ ID NO: 2118139 - RNA, 19 nt, Artificial Sequence
  Description of Artificial Sequence: Synthetic oligonucleotide
cauugcuguuuuaagcucc

SEQ ID NO: 2118140 - RNA, 19 nt, Artificial Sequence
  Description of Artificial Sequence: Synthetic oligonucleotide
uuuucugugugugacauua

SEQ ID NO: 2118141 - RNA, 19 nt, Artificial Sequence
  Description of Artificial Sequence: Synthetic oligonucleotide
  modified_base (16)..(16): a, c, u, g, unknown or other
aauacacaaugguccnccu

SEQ ID NO: 2118142 - RNA, 19 nt, Artificial Sequence
  Description of Artificial Sequence: Synthetic oligonucleotide
agacuaacuuuacccacac

SEQ ID NO: 2118143 - RNA, 19 nt, Artificial Sequence
  Description of Artificial Sequence: Synthetic oligonucleotide
uuucauggcaacugucuug

SEQ ID NO: 2118144 - RNA, 19 nt, Artificial Sequence
  Description of Artificial Sequence: Synthetic oligonucleotide
ucauauagacuaacuuuac

SEQ ID NO: 2118145 - RNA, 19 nt, Artificial Sequence
  Description of Artificial Sequence: Synthetic oligonucleotide
uagacuaacuuuacccaca

SEQ ID NO: 2118146 - RNA, 19 nt, Artificial Sequence
  Description of Artificial Sequence: Synthetic oligonucleotide
accuaaaucuauccuuuag

SEQ ID NO: 2118147 - RNA, 19 nt, Artificial Sequence
  Description of Artificial Sequence: Synthetic oligonucleotide
agccuccuaaaucaaacag

SEQ ID NO: 2118148 - RNA, 19 nt, Artificial Sequence
  Description of Artificial Sequence: Synthetic oligonucleotide
augacauugcuguuuuaag

SEQ ID NO: 2118149 - RNA, 19 nt, Artificial Sequence
  Description of Artificial Sequence: Synthetic oligonucleotide
uuguccaucacuugguauc

SEQ ID NO: 2118150 - RNA, 19 nt, Artificial Sequence
  Description of Artificial Sequence: Synthetic oligonucleotide
guuuuaagcuccuggaaca

SEQ ID NO: 2118151 - RNA, 19 nt, Artificial Sequence
  Description of Artificial Sequence: Synthetic oligonucleotide
aauggaaguguuaaaggaa

SEQ ID NO: 2118152 - RNA, 19 nt, Artificial Sequence
  Description of Artificial Sequence: Synthetic oligonucleotide
uaggucuagggcaagaauu

SEQ ID NO: 2118153 - RNA, 19 nt, Artificial Sequence
  Description of Artificial Sequence: Synthetic oligonucleotide
aguuccaaauaucuccucu

SEQ ID NO: 2118154 - RNA, 19 nt, Artificial Sequence
  Description of Artificial Sequence: Synthetic oligonucleotide
acauugcuguuuuaagcuc

SEQ ID NO: 2118155 - RNA, 19 nt, Artificial Sequence
  Description of Artificial Sequence: Synthetic oligonucleotide
aaccaucugccuugucccc

SEQ ID NO: 2118156 - RNA, 19 nt, Artificial Sequence
  Description of Artificial Sequence: Synthetic oligonucleotide
uuuacgaguucuucuggga

SEQ ID NO: 2118157 - RNA, 19 nt, Artificial Sequence
  Description of Artificial Sequence: Synthetic oligonucleotide
caaccaucugccuuguccc

SEQ ID NO: 2118158 - RNA, 19 nt, Artificial Sequence
  Description of Artificial Sequence: Synthetic oligonucleotide
ucaauaaauggaaguguua

SEQ ID NO: 2118159 - RNA, 19 nt, Artificial Sequence
  Description of Artificial Sequence: Synthetic oligonucleotide
ugugugugacauuaauacu

SEQ ID NO: 2118160 - RNA, 19 nt, Artificial Sequence
  Description of Artificial Sequence: Synthetic oligonucleotide
uugguauauugaaucuuca

SEQ ID NO: 2118161 - RNA, 19 nt, Artificial Sequence
  Description of Artificial Sequence: Synthetic oligonucleotide
gacauugcuguuuuaagcu

SEQ ID NO: 2118162 - RNA, 19 nt, Artificial Sequence
  Description of Artificial Sequence: Synthetic oligonucleotide
ucugugugugacauuaaua

SEQ ID NO: 2118163 - RNA, 19 nt, Artificial Sequence
  Description of Artificial Sequence: Synthetic oligonucleotide
ucguuuguaccauggaccu

SEQ ID NO: 2118164 - RNA, 19 nt, Artificial Sequence
  Description of Artificial Sequence: Synthetic oligonucleotide
ccuaaaucuauccuuuagg

SEQ ID NO: 2118165 - RNA, 19 nt, Artificial Sequence
  Description of Artificial Sequence: Synthetic oligonucleotide
guguuaaaggaaaacacca

SEQ ID NO: 2118166 - RNA, 19 nt, Artificial Sequence
  Description of Artificial Sequence: Synthetic oligonucleotide
ucgucaaccaucugccuug

SEQ ID NO: 2118167 - RNA, 19 nt, Artificial Sequence
  Description of Artificial Sequence: Synthetic oligonucleotide
aagaagacacaguuccaaa

SEQ ID NO: 2118168 - RNA, 19 nt, Artificial Sequence
  Description of Artificial Sequence: Synthetic oligonucleotide
uuugaugcagccuccuaaa

SEQ ID NO: 2118169 - RNA, 19 nt, Artificial Sequence
  Description of Artificial Sequence: Synthetic oligonucleotide
uguccaucacuugguaucg

SEQ ID NO: 2118170 - RNA, 19 nt, Artificial Sequence
  Description of Artificial Sequence: Synthetic oligonucleotide
uucauggcaacugucuuga

SEQ ID NO: 2118171 - RNA, 19 nt, Artificial Sequence
  Description of Artificial Sequence: Synthetic oligonucleotide
uacauguuuucugugugug

SEQ ID NO: 2118172 - RNA, 19 nt, Artificial Sequence
  Description of Artificial Sequence: Synthetic oligonucleotide
uuacgaguucuucugggaa

SEQ ID NO: 2118173 - RNA, 19 nt, Artificial Sequence
  Description of Artificial Sequence: Synthetic oligonucleotide
aucauauagacuaacuuua

SEQ ID NO: 2118174 - RNA, 19 nt, Artificial Sequence
  Description of Artificial Sequence: Synthetic oligonucleotide
cauguuuucugugugugac

SEQ ID NO: 2118175 - RNA, 19 nt, Artificial Sequence
  Description of Artificial Sequence: Synthetic oligonucleotide
agaagacacaguuccaaau

SEQ ID NO: 2118176 - RNA, 19 nt, Artificial Sequence
  Description of Artificial Sequence: Synthetic oligonucleotide
cuauaggagauguguaguc

SEQ ID NO: 2118177 - RNA, 19 nt, Artificial Sequence
  Description of Artificial Sequence: Synthetic oligonucleotide
gcuuucgucaaccaucugc

SEQ ID NO: 2118178 - RNA, 19 nt, Artificial Sequence
  Description of Artificial Sequence: Synthetic oligonucleotide
aucugaaaagccugccuug

SEQ ID NO: 2118179 - RNA, 19 nt, Artificial Sequence
  Description of Artificial Sequence: Synthetic oligonucleotide
guuaaaggaaaacaccacu

SEQ ID NO: 2118180 - RNA, 19 nt, Artificial Sequence
  Description of Artificial Sequence: Synthetic oligonucleotide
ugguauauugaaucuucaa

SEQ ID NO: 2118181 - RNA, 19 nt, Artificial Sequence
  Description of Artificial Sequence: Synthetic oligonucleotide
agcuacauguuuucugugu

SEQ ID NO: 2118182 - RNA, 19 nt, Artificial Sequence
  Description of Artificial Sequence: Synthetic oligonucleotide
gaagacacaguuccaaaua

SEQ ID NO: 2118183 - RNA, 19 nt, Artificial Sequence
  Description of Artificial Sequence: Synthetic oligonucleotide
uuuucauggcaacugucuu

SEQ ID NO: 2118184 - RNA, 19 nt, Artificial Sequence
  Description of Artificial Sequence: Synthetic oligonucleotide
uagggcaagaauugggguc

SEQ ID NO: 2118185 - RNA, 19 nt, Artificial Sequence
  Description of Artificial Sequence: Synthetic oligonucleotide
ucugaaaagccugccuugc

SEQ ID NO: 2118186 - RNA, 19 nt, Artificial Sequence
  Description of Artificial Sequence: Synthetic oligonucleotide
cuaaaucuauccuuuaggu

SEQ ID NO: 2118187 - RNA, 19 nt, Artificial Sequence
  Description of Artificial Sequence: Synthetic oligonucleotide
ccaaauaucuccucuuggc

SEQ ID NO: 2118188 - RNA, 19 nt, Artificial Sequence
  Description of Artificial Sequence: Synthetic oligonucleotide
ugacuauaggagaugugua

SEQ ID NO: 2118189 - RNA, 19 nt, Artificial Sequence
  Description of Artificial Sequence: Synthetic oligonucleotide
aagcuacauguuuucugug

SEQ ID NO: 2118190 - RNA, 19 nt, Artificial Sequence
  Description of Artificial Sequence: Synthetic oligonucleotide
caauaaauggaaguguuaa

SEQ ID NO: 2118191 - RNA, 19 nt, Artificial Sequence
  Description of Artificial Sequence: Synthetic oligonucleotide
uguuuucugugugugacau

SEQ ID NO: 2118192 - RNA, 19 nt, Artificial Sequence
  Description of Artificial Sequence: Synthetic oligonucleotide
acuauaggagauguguagu

SEQ ID NO: 2118193 - RNA, 19 nt, Artificial Sequence
  Description of Artificial Sequence: Synthetic oligonucleotide
acggcuuucgucaaccauc

SEQ ID NO: 2118194 - RNA, 19 nt, Artificial Sequence
  Description of Artificial Sequence: Synthetic oligonucleotide
uucugugugugacauuaau

SEQ ID NO: 2118195 - RNA, 19 nt, Artificial Sequence
  Description of Artificial Sequence: Synthetic oligonucleotide
agauguguagucauuucug

SEQ ID NO: 2118196 - RNA, 19 nt, Artificial Sequence
  Description of Artificial Sequence: Synthetic oligonucleotide
uaacauuguccaucacuug

SEQ ID NO: 2118197 - RNA, 19 nt, Artificial Sequence
  Description of Artificial Sequence: Synthetic oligonucleotide
aaguuguccagcggggcag

SEQ ID NO: 2118198 - RNA, 19 nt, Artificial Sequence
  Description of Artificial Sequence: Synthetic oligonucleotide
  modified_base (4)..(4): a, c, u, g, unknown or other
uccnccuuaccaaguaaau

SEQ ID NO: 2118199 - RNA, 19 nt, Artificial Sequence
  Description of Artificial Sequence: Synthetic oligonucleotide
uuacccacaccuacccagc

SEQ ID NO: 2118200 - RNA, 19 nt, Artificial Sequence
  Description of Artificial Sequence: Synthetic oligonucleotide
uguccagcggggcagggac

SEQ ID NO: 2118201 - RNA, 19 nt, Artificial Sequence
  Description of Artificial Sequence: Synthetic oligonucleotide
ccuaaaucaaacagguaug

SEQ ID NO: 2118202 - RNA, 19 nt, Artificial Sequence
  Description of Artificial Sequence: Synthetic oligonucleotide
ugcagagcaagaagacaca

SEQ ID NO: 2118203 - RNA, 19 nt, Artificial Sequence
  Description of Artificial Sequence: Synthetic oligonucleotide
guaccauggaccugucugc

SEQ ID NO: 2118204 - RNA, 19 nt, Artificial Sequence
  Description of Artificial Sequence: Synthetic oligonucleotide
caaauaucuccucuuggca

SEQ ID NO: 2118205 - RNA, 19 nt, Artificial Sequence
  Description of Artificial Sequence: Synthetic oligonucleotide
uccuuuaggucuagggcaa

SEQ ID NO: 2118206 - RNA, 19 nt, Artificial Sequence
  Description of Artificial Sequence: Synthetic oligonucleotide
agggacuuccgguugagaa

SEQ ID NO: 2118207 - RNA, 19 nt, Artificial Sequence
  Description of Artificial Sequence: Synthetic oligonucleotide
uucgucaaccaucugccuu

SEQ ID NO: 2118208 - RNA, 19 nt, Artificial Sequence
  Description of Artificial Sequence: Synthetic oligonucleotide
gguaucguuuguaccaugg

SEQ ID NO: 2118209 - RNA, 19 nt, Artificial Sequence
  Description of Artificial Sequence: Synthetic oligonucleotide
uucacggcuuucgucaacc

SEQ ID NO: 2118210 - RNA, 19 nt, Artificial Sequence
  Description of Artificial Sequence: Synthetic oligonucleotide
uacgaguucuucugggaaa

SEQ ID NO: 2118211 - RNA, 19 nt, Artificial Sequence
  Description of Artificial Sequence: Synthetic oligonucleotide
uuuuaagcuccuggaacac

SEQ ID NO: 2118212 - RNA, 19 nt, Artificial Sequence
  Description of Artificial Sequence: Synthetic oligonucleotide
cacuugguaucguuuguac

SEQ ID NO: 2118213 - RNA, 19 nt, Artificial Sequence
  Description of Artificial Sequence: Synthetic oligonucleotide
gagauguguagucauuucu

SEQ ID NO: 2118214 - RNA, 19 nt, Artificial Sequence
  Description of Artificial Sequence: Synthetic oligonucleotide
aucaauaaauggaaguguu

SEQ ID NO: 2118215 - RNA, 19 nt, Artificial Sequence
  Description of Artificial Sequence: Synthetic oligonucleotide
  modified_base (18)..(18): a, c, u, g, unknown or other
uaaauacacaaugguccnc

SEQ ID NO: 2118216 - RNA, 19 nt, Artificial Sequence
  Description of Artificial Sequence: Synthetic oligonucleotide
auuaagcuacauguuuucu

SEQ ID NO: 2118217 - RNA, 19 nt, Artificial Sequence
  Description of Artificial Sequence: Synthetic oligonucleotide
caucauauagacuaacuuu

SEQ ID NO: 2118218 - RNA, 19 nt, Artificial Sequence
  Description of Artificial Sequence: Synthetic oligonucleotide
  modified_base (2)..(2): a, c, u, g, unknown or other
cnccuuaccaaguaaauau

SEQ ID NO: 2118219 - RNA, 19 nt, Artificial Sequence
  Description of Artificial Sequence: Synthetic oligonucleotide
uuuaggucuagggcaagaa

SEQ ID NO: 2118220 - RNA, 19 nt, Artificial Sequence
  Description of Artificial Sequence: Synthetic oligonucleotide
auuguccaucacuugguau

SEQ ID NO: 2118221 - RNA, 19 nt, Artificial Sequence
  Description of Artificial Sequence: Synthetic oligonucleotide
ggacuuccgguugagaagg

SEQ ID NO: 2118222 - RNA, 19 nt, Artificial Sequence
  Description of Artificial Sequence: Synthetic oligonucleotide
gcuuaaauacacaaugguc

SEQ ID NO: 2118223 - RNA, 19 nt, Artificial Sequence
  Description of Artificial Sequence: Synthetic oligonucleotide
agacacaguuccaaauauc

SEQ ID NO: 2118224 - RNA, 19 nt, Artificial Sequence
  Description of Artificial Sequence: Synthetic oligonucleotide
gaaggggaugacauugcug

SEQ ID NO: 2118225 - RNA, 19 nt, Artificial Sequence
  Description of Artificial Sequence: Synthetic oligonucleotide
agaaggggaugacauugcu

SEQ ID NO: 2118226 - RNA, 19 nt, Artificial Sequence
  Description of Artificial Sequence: Synthetic oligonucleotide
auugaaucuucaaguuguc

SEQ ID NO: 2118227 - RNA, 19 nt, Artificial Sequence
  Description of Artificial Sequence: Synthetic oligonucleotide
auggaaguguuaaaggaaa

SEQ ID NO: 2118228 - RNA, 19 nt, Artificial Sequence
  Description of Artificial Sequence: Synthetic oligonucleotide
ggacaaagcuuaaauacac

SEQ ID NO: 2118229 - RNA, 19 nt, Artificial Sequence
  Description of Artificial Sequence: Synthetic oligonucleotide
ucuauccuuuaggucuagg

SEQ ID NO: 2118230 - RNA, 19 nt, Artificial Sequence
  Description of Artificial Sequence: Synthetic oligonucleotide
ucaaguuguccagcggggc

SEQ ID NO: 2118231 - RNA, 19 nt, Artificial Sequence
  Description of Artificial Sequence: Synthetic oligonucleotide
  modified_base (10)..(10): a, c, u, g, unknown or other
caaugguccnccuuaccaa

SEQ ID NO: 2118232 - RNA, 19 nt, Artificial Sequence
  Description of Artificial Sequence: Synthetic oligonucleotide
acacaguuccaaauaucuc

SEQ ID NO: 2118233 - RNA, 19 nt, Artificial Sequence
  Description of Artificial Sequence: Synthetic oligonucleotide
acauguuuucuguguguga

SEQ ID NO: 2118234 - RNA, 19 nt, Artificial Sequence
  Description of Artificial Sequence: Synthetic oligonucleotide
auguguagucauuucugaa

SEQ ID NO: 2118235 - RNA, 19 nt, Artificial Sequence
  Description of Artificial Sequence: Synthetic oligonucleotide
uggugacuauaggagaugu

SEQ ID NO: 2118236 - RNA, 19 nt, Artificial Sequence
  Description of Artificial Sequence: Synthetic oligonucleotide
aggucuagggcaagaauug

SEQ ID NO: 2118237 - RNA, 19 nt, Artificial Sequence
  Description of Artificial Sequence: Synthetic oligonucleotide
gcuacauguuuucugugug

SEQ ID NO: 2118238 - RNA, 19 nt, Artificial Sequence
  Description of Artificial Sequence: Synthetic oligonucleotide
acaguuccaaauaucuccu

SEQ ID NO: 2118239 - RNA, 19 nt, Artificial Sequence
  Description of Artificial Sequence: Synthetic oligonucleotide
agcaucauauagacuaacu

SEQ ID NO: 2118240 - RNA, 19 nt, Artificial Sequence
  Description of Artificial Sequence: Synthetic oligonucleotide
gugacuauaggagaugugu

SEQ ID NO: 2118241 - RNA, 19 nt, Artificial Sequence
  Description of Artificial Sequence: Synthetic oligonucleotide
uuccgguugagaaggggau

SEQ ID NO: 2118242 - RNA, 19 nt, Artificial Sequence
  Description of Artificial Sequence: Synthetic oligonucleotide
agccuucacggcuuucguc

SEQ ID NO: 2118243 - RNA, 19 nt, Artificial Sequence
  Description of Artificial Sequence: Synthetic oligonucleotide
agggcaagaauugggguca

SEQ ID NO: 2118244 - RNA, 19 nt, Artificial Sequence
  Description of Artificial Sequence: Synthetic oligonucleotide
gacaaagcuuaaauacaca

SEQ ID NO: 2118245 - RNA, 19 nt, Artificial Sequence
  Description of Artificial Sequence: Synthetic oligonucleotide
uucuucuacauggcagaug

SEQ ID NO: 2118246 - RNA, 19 nt, Artificial Sequence
  Description of Artificial Sequence: Synthetic oligonucleotide
gccuccuaaaucaaacagg

SEQ ID NO: 2118247 - RNA, 19 nt, Artificial Sequence
  Description of Artificial Sequence: Synthetic oligonucleotide
  modified_base (7)..(7): a, c, u, g, unknown or other
ugguccnccuuaccaagua

SEQ ID NO: 2118248 - RNA, 19 nt, Artificial Sequence
  Description of Artificial Sequence: Synthetic oligonucleotide
ggaaguguuaaaggaaaac

SEQ ID NO: 2118249 - RNA, 19 nt, Artificial Sequence
  Description of Artificial Sequence: Synthetic oligonucleotide
cuuccgguugagaagggga

SEQ ID NO: 2118250 - RNA, 19 nt, Artificial Sequence
  Description of Artificial Sequence: Synthetic oligonucleotide
gcuguuuuaagcuccugga

SEQ ID NO: 2118251 - RNA, 19 nt, Artificial Sequence
  Description of Artificial Sequence: Synthetic oligonucleotide
auguuuucugugugugaca

SEQ ID NO: 2118252 - RNA, 19 nt, Artificial Sequence
  Description of Artificial Sequence: Synthetic oligonucleotide
ugacagcaucauauagacu

SEQ ID NO: 2118253 - RNA, 19 nt, Artificial Sequence
  Description of Artificial Sequence: Synthetic oligonucleotide
  modified_base (13)..(13): a, c, u, g, unknown or other
acacaaugguccnccuuac

SEQ ID NO: 2118254 - RNA, 19 nt, Artificial Sequence
  Description of Artificial Sequence: Synthetic oligonucleotide
gagaaggggaugacauugc

SEQ ID NO: 2118255 - RNA, 19 nt, Artificial Sequence
  Description of Artificial Sequence: Synthetic oligonucleotide
agccaaucugaaaagccug

SEQ ID NO: 2118256 - RNA, 19 nt, Artificial Sequence
  Description of Artificial Sequence: Synthetic oligonucleotide
gacuaacuuuacccacacc

SEQ ID NO: 2118257 - RNA, 19 nt, Artificial Sequence
  Description of Artificial Sequence: Synthetic oligonucleotide
acaccuacccagccugcag

SEQ ID NO: 2118258 - RNA, 19 nt, Artificial Sequence
  Description of Artificial Sequence: Synthetic oligonucleotide
accuacccagccugcagag

SEQ ID NO: 2118259 - RNA, 19 nt, Artificial Sequence
  Description of Artificial Sequence: Synthetic oligonucleotide
  modified_base (12)..(12): a, c, u, g, unknown or other
cacaaugguccnccuuacc

SEQ ID NO: 2118260 - RNA, 19 nt, Artificial Sequence
  Description of Artificial Sequence: Synthetic oligonucleotide
guuuguaccauggaccugu

SEQ ID NO: 2118261 - RNA, 19 nt, Artificial Sequence
  Description of Artificial Sequence: Synthetic oligonucleotide
cuaacuuuacccacaccua

SEQ ID NO: 2118262 - RNA, 19 nt, Artificial Sequence
  Description of Artificial Sequence: Synthetic oligonucleotide
ugcagccuccuaaaucaaa

SEQ ID NO: 2118263 - RNA, 19 nt, Artificial Sequence
  Description of Artificial Sequence: Synthetic oligonucleotide
guaacauuguccaucacuu

SEQ ID NO: 2118264 - RNA, 19 nt, Artificial Sequence
  Description of Artificial Sequence: Synthetic oligonucleotide
cagccugcagagcaagaag

SEQ ID NO: 2118265 - RNA, 19 nt, Artificial Sequence
  Description of Artificial Sequence: Synthetic oligonucleotide
uggaccugucugcccagcc

SEQ ID NO: 2118266 - RNA, 19 nt, Artificial Sequence
  Description of Artificial Sequence: Synthetic oligonucleotide
uuucgucaaccaucugccu

SEQ ID NO: 2118267 - RNA, 19 nt, Artificial Sequence
  Description of Artificial Sequence: Synthetic oligonucleotide
cuucuuuacgaguucuucu

SEQ ID NO: 2118268 - RNA, 19 nt, Artificial Sequence
  Description of Artificial Sequence: Synthetic oligonucleotide
uccaucacuugguaucguu

SEQ ID NO: 2118269 - RNA, 19 nt, Artificial Sequence
  Description of Artificial Sequence: Synthetic oligonucleotide
aaucuauccuuuaggucua

SEQ ID NO: 2118270 - RNA, 19 nt, Artificial Sequence
  Description of Artificial Sequence: Synthetic oligonucleotide
acauuguccaucacuuggu

SEQ ID NO: 2118271 - RNA, 19 nt, Artificial Sequence
  Description of Artificial Sequence: Synthetic oligonucleotide
uacccacaccuacccagcc

SEQ ID NO: 2118272 - RNA, 19 nt, Artificial Sequence
  Description of Artificial Sequence: Synthetic oligonucleotide
guaucguuuguaccaugga

SEQ ID NO: 2118273 - RNA, 19 nt, Artificial Sequence
  Description of Artificial Sequence: Synthetic oligonucleotide
uaccauggaccugucugcc

SEQ ID NO: 2118274 - RNA, 19 nt, Artificial Sequence
  Description of Artificial Sequence: Synthetic oligonucleotide
uuucugugugugacauuaa

SEQ ID NO: 2118275 - RNA, 19 nt, Artificial Sequence
  Description of Artificial Sequence: Synthetic oligonucleotide
ugguaucguuuguaccaug

SEQ ID NO: 2118276 - RNA, 19 nt, Artificial Sequence
  Description of Artificial Sequence: Synthetic oligonucleotide
guugagaaggggaugacau

SEQ ID NO: 2118277 - RNA, 19 nt, Artificial Sequence
  Description of Artificial Sequence: Synthetic oligonucleotide
ugcuggcuucuuuacgagu

SEQ ID NO: 2118278 - RNA, 19 nt, Artificial Sequence
  Description of Artificial Sequence: Synthetic oligonucleotide
uugagaaggggaugacauu

SEQ ID NO: 2118279 - RNA, 19 nt, Artificial Sequence
  Description of Artificial Sequence: Synthetic oligonucleotide
caaagcuuaaauacacaau

SEQ ID NO: 2118280 - RNA, 19 nt, Artificial Sequence
  Description of Artificial Sequence: Synthetic oligonucleotide
uuguaccauggaccugucu

SEQ ID NO: 2118281 - RNA, 19 nt, Artificial Sequence
  Description of Artificial Sequence: Synthetic oligonucleotide
cugcuggcuucuuuacgag

SEQ ID NO: 2118282 - RNA, 19 nt, Artificial Sequence
  Description of Artificial Sequence: Synthetic oligonucleotide
auggugacuauaggagaug

SEQ ID NO: 2118283 - RNA, 19 nt, Artificial Sequence
  Description of Artificial Sequence: Synthetic oligonucleotide
  modified_base (15)..(15): a, c, u, g, unknown or other
auacacaaugguccnccuu

SEQ ID NO: 2118284 - RNA, 19 nt, Artificial Sequence
  Description of Artificial Sequence: Synthetic oligonucleotide
gggacaaagcuuaaauaca

SEQ ID NO: 2118285 - RNA, 19 nt, Artificial Sequence
  Description of Artificial Sequence: Synthetic oligonucleotide
uugguaucguuuguaccau

SEQ ID NO: 2118286 - RNA, 19 nt, Artificial Sequence
  Description of Artificial Sequence: Synthetic oligonucleotide
aggagauguguagucauuu

SEQ ID NO: 2118287 - RNA, 19 nt, Artificial Sequence
  Description of Artificial Sequence: Synthetic oligonucleotide
uccgguugagaaggggaug

SEQ ID NO: 2118288 - RNA, 19 nt, Artificial Sequence
  Description of Artificial Sequence: Synthetic oligonucleotide
cuguuuuaagcuccuggaa

SEQ ID NO: 2118289 - RNA, 19 nt, Artificial Sequence
  Description of Artificial Sequence: Synthetic oligonucleotide
gagcaagaagacacaguuc

SEQ ID NO: 2118290 - RNA, 19 nt, Artificial Sequence
  Description of Artificial Sequence: Synthetic oligonucleotide
gagccaaucugaaaagccu

SEQ ID NO: 2118291 - RNA, 19 nt, Artificial Sequence
  Description of Artificial Sequence: Synthetic oligonucleotide
auugcuguuuuaagcuccu

SEQ ID NO: 2118292 - RNA, 19 nt, Artificial Sequence
  Description of Artificial Sequence: Synthetic oligonucleotide
uuuguaccauggaccuguc

SEQ ID NO: 2118293 - RNA, 19 nt, Artificial Sequence
  Description of Artificial Sequence: Synthetic oligonucleotide
ucauggcaacugucuugag

SEQ ID NO: 2118294 - RNA, 19 nt, Artificial Sequence
  Description of Artificial Sequence: Synthetic oligonucleotide
gcagagcaagaagacacag

SEQ ID NO: 2118295 - RNA, 19 nt, Artificial Sequence
  Description of Artificial Sequence: Synthetic oligonucleotide
caaguuguccagcggggca

SEQ ID NO: 2118296 - RNA, 19 nt, Artificial Sequence
  Description of Artificial Sequence: Synthetic oligonucleotide
acgaguucuucugggaaau

SEQ ID NO: 2118297 - RNA, 19 nt, Artificial Sequence
  Description of Artificial Sequence: Synthetic oligonucleotide
caagaauuggggucacaua

SEQ ID NO: 2118298 - RNA, 19 nt, Artificial Sequence
  Description of Artificial Sequence: Synthetic oligonucleotide
ucacggcuuucgucaacca

SEQ ID NO: 2118299 - RNA, 19 nt, Artificial Sequence
  Description of Artificial Sequence: Synthetic oligonucleotide
cuucuacauggcagaugac

SEQ ID NO: 2118300 - RNA, 19 nt, Artificial Sequence
  Description of Artificial Sequence: Synthetic oligonucleotide
caguuccaaauaucuccuc

SEQ ID NO: 2118301 - RNA, 19 nt, Artificial Sequence
  Description of Artificial Sequence: Synthetic oligonucleotide
aguuguccagcggggcagg

SEQ ID NO: 2118302 - RNA, 19 nt, Artificial Sequence
  Description of Artificial Sequence: Synthetic oligonucleotide
gcagccuccuaaaucaaac

SEQ ID NO: 2118303 - RNA, 19 nt, Artificial Sequence
  Description of Artificial Sequence: Synthetic oligonucleotide
cagccuccuaaaucaaaca

SEQ ID NO: 2118304 - RNA, 19 nt, Artificial Sequence
  Description of Artificial Sequence: Synthetic oligonucleotide
  modified_base (5)..(5): a, c, u, g, unknown or other
guccnccuuaccaaguaaa

SEQ ID NO: 2118305 - RNA, 19 nt, Artificial Sequence
  Description of Artificial Sequence: Synthetic oligonucleotide
ccuccuaaaucaaacaggu

SEQ ID NO: 2118306 - RNA, 19 nt, Artificial Sequence
  Description of Artificial Sequence: Synthetic oligonucleotide
ccuucuucuacauggcaga

SEQ ID NO: 2118307 - RNA, 19 nt, Artificial Sequence
  Description of Artificial Sequence: Synthetic oligonucleotide
guuccaaauaucuccucuu

SEQ ID NO: 2118308 - RNA, 19 nt, Artificial Sequence
  Description of Artificial Sequence: Synthetic oligonucleotide
gacuuccgguugagaaggg

SEQ ID NO: 2118309 - RNA, 19 nt, Artificial Sequence
  Description of Artificial Sequence: Synthetic oligonucleotide
ucacucugcuggcuucuuu

SEQ ID NO: 2118310 - RNA, 19 nt, Artificial Sequence
  Description of Artificial Sequence: Synthetic oligonucleotide
cuacauguuuucugugugu

SEQ ID NO: 2118311 - RNA, 19 nt, Artificial Sequence
  Description of Artificial Sequence: Synthetic oligonucleotide
cuagggcaagaauuggggu

SEQ ID NO: 2118312 - RNA, 19 nt, Artificial Sequence
  Description of Artificial Sequence: Synthetic oligonucleotide
gcaucauauagacuaacuu

SEQ ID NO: 2118313 - RNA, 19 nt, Artificial Sequence
  Description of Artificial Sequence: Synthetic oligonucleotide
cuuuaggucuagggcaaga

SEQ ID NO: 2118314 - RNA, 19 nt, Artificial Sequence
  Description of Artificial Sequence: Synthetic oligonucleotide
cuucacggcuuucgucaac

SEQ ID NO: 2118315 - RNA, 19 nt, Artificial Sequence
  Description of Artificial Sequence: Synthetic oligonucleotide
uggcaacugucuugagcuc

SEQ ID NO: 2118316 - RNA, 19 nt, Artificial Sequence
  Description of Artificial Sequence: Synthetic oligonucleotide
uacccagccugcagagcaa

SEQ ID NO: 2118317 - RNA, 19 nt, Artificial Sequence
  Description of Artificial Sequence: Synthetic oligonucleotide
accaucugccuuguccccu

SEQ ID NO: 2118318 - RNA, 19 nt, Artificial Sequence
  Description of Artificial Sequence: Synthetic oligonucleotide
uugcuguuuuaagcuccug

SEQ ID NO: 2118319 - RNA, 19 nt, Artificial Sequence
  Description of Artificial Sequence: Synthetic oligonucleotide
ggugacuauaggagaugug

SEQ ID NO: 2118320 - RNA, 19 nt, Artificial Sequence
  Description of Artificial Sequence: Synthetic oligonucleotide
caccuacccagccugcaga

SEQ ID NO: 2118321 - RNA, 19 nt, Artificial Sequence
  Description of Artificial Sequence: Synthetic oligonucleotide
aucuauccuuuaggucuag

SEQ ID NO: 2118322 - RNA, 19 nt, Artificial Sequence
  Description of Artificial Sequence: Synthetic oligonucleotide
cauuguccaucacuuggua

SEQ ID NO: 2118323 - RNA, 19 nt, Artificial Sequence
  Description of Artificial Sequence: Synthetic oligonucleotide
ggcaacugucuugagcuca

SEQ ID NO: 2118324 - RNA, 19 nt, Artificial Sequence
  Description of Artificial Sequence: Synthetic oligonucleotide
gcaacugucuugagcucag

SEQ ID NO: 2118325 - RNA, 19 nt, Artificial Sequence
  Description of Artificial Sequence: Synthetic oligonucleotide
cagagcaagaagacacagu

SEQ ID NO: 2118326 - RNA, 19 nt, Artificial Sequence
  Description of Artificial Sequence: Synthetic oligonucleotide
caguaacauuguccaucac

SEQ ID NO: 2118327 - RNA, 19 nt, Artificial Sequence
  Description of Artificial Sequence: Synthetic oligonucleotide
  modified_base (8)..(8): a, c, u, g, unknown or other
augguccnccuuaccaagu

SEQ ID NO: 2118328 - RNA, 19 nt, Artificial Sequence
  Description of Artificial Sequence: Synthetic oligonucleotide
guuguccagcggggcaggg

SEQ ID NO: 2118329 - RNA, 19 nt, Artificial Sequence
  Description of Artificial Sequence: Synthetic oligonucleotide
cuccuaaaucaaacaggua

SEQ ID NO: 2118330 - RNA, 19 nt, Artificial Sequence
  Description of Artificial Sequence: Synthetic oligonucleotide
cagcggggcagggacuucc

SEQ ID NO: 2118331 - RNA, 19 nt, Artificial Sequence
  Description of Artificial Sequence: Synthetic oligonucleotide
aggggaugacauugcuguu

SEQ ID NO: 2118332 - RNA, 19 nt, Artificial Sequence
  Description of Artificial Sequence: Synthetic oligonucleotide
uccagcggggcagggacuu

SEQ ID NO: 2118333 - RNA, 19 nt, Artificial Sequence
  Description of Artificial Sequence: Synthetic oligonucleotide
  modified_base (6)..(6): a, c, u, g, unknown or other
gguccnccuuaccaaguaa

SEQ ID NO: 2118334 - RNA, 19 nt, Artificial Sequence
  Description of Artificial Sequence: Synthetic oligonucleotide
ccucuuggcaaugcgcaug

SEQ ID NO: 2118335 - RNA, 19 nt, Artificial Sequence
  Description of Artificial Sequence: Synthetic oligonucleotide
gcaagaauuggggucacau

SEQ ID NO: 2118336 - RNA, 19 nt, Artificial Sequence
  Description of Artificial Sequence: Synthetic oligonucleotide
agcggggcagggacuuccg

SEQ ID NO: 2118337 - RNA, 19 nt, Artificial Sequence
  Description of Artificial Sequence: Synthetic oligonucleotide
gccugcagagcaagaagac

SEQ ID NO: 2118338 - RNA, 19 nt, Artificial Sequence
  Description of Artificial Sequence: Synthetic oligonucleotide
gcaagaagacacaguucca

SEQ ID NO: 2118339 - RNA, 19 nt, Artificial Sequence
  Description of Artificial Sequence: Synthetic oligonucleotide
gggcagggacuuccgguug

SEQ ID NO: 2118340 - RNA, 19 nt, Artificial Sequence
  Description of Artificial Sequence: Synthetic oligonucleotide
ggcagggacuuccgguuga

SEQ ID NO: 2118341 - RNA, 19 nt, Artificial Sequence
  Description of Artificial Sequence: Synthetic oligonucleotide
gggaugacauugcuguuuu

SEQ ID NO: 2118342 - RNA, 19 nt, Artificial Sequence
  Description of Artificial Sequence: Synthetic oligonucleotide
caucaguaacauuguccau

SEQ ID NO: 2118343 - RNA, 19 nt, Artificial Sequence
  Description of Artificial Sequence: Synthetic oligonucleotide
cacaccuacccagccugca

SEQ ID NO: 2118344 - RNA, 19 nt, Artificial Sequence
  Description of Artificial Sequence: Synthetic oligonucleotide
ccugcagagcaagaagaca

SEQ ID NO: 2118345 - RNA, 19 nt, Artificial Sequence
  Description of Artificial Sequence: Synthetic oligonucleotide
gucaaccaucugccuuguc

SEQ ID NO: 2118346 - RNA, 19 nt, Artificial Sequence
  Description of Artificial Sequence: Synthetic oligonucleotide
ccgguugagaaggggauga

SEQ ID NO: 2118347 - RNA, 19 nt, Artificial Sequence
  Description of Artificial Sequence: Synthetic oligonucleotide
ccacaccuacccagccugc

SEQ ID NO: 2118348 - RNA, 19 nt, Artificial Sequence
  Description of Artificial Sequence: Synthetic oligonucleotide
gcggggcagggacuuccgg

SEQ ID NO: 2118349 - RNA, 19 nt, Artificial Sequence
  Description of Artificial Sequence: Synthetic oligonucleotide
gcagggacuuccgguugag

SEQ ID NO: 2118350 - RNA, 19 nt, Artificial Sequence
  Description of Artificial Sequence: Synthetic oligonucleotide
gcuggcuucuuuacgaguu

SEQ ID NO: 2118351 - RNA, 19 nt, Artificial Sequence
  Description of Artificial Sequence: Synthetic oligonucleotide
  modified_base (3)..(3): a, c, u, g, unknown or other
ccnccuuaccaaguaaaua

SEQ ID NO: 2118352 - RNA, 19 nt, Artificial Sequence
  Description of Artificial Sequence: Synthetic oligonucleotide
cacggcuuucgucaaccau

SEQ ID NO: 2118353 - RNA, 19 nt, Artificial Sequence
  Description of Artificial Sequence: Synthetic oligonucleotide
ccuuuaggucuagggcaag

SEQ ID NO: 2118354 - RNA, 19 nt, Artificial Sequence
  Description of Artificial Sequence: Synthetic oligonucleotide
ggcuuucgucaaccaucug

SEQ ID NO: 2118355 - RNA, 19 nt, Artificial Sequence
  Description of Artificial Sequence: Synthetic oligonucleotide
cuucuucuacauggcagau

SEQ ID NO: 2118356 - RNA, 19 nt, Artificial Sequence
  Description of Artificial Sequence: Synthetic oligonucleotide
ccuacccagccugcagagc

SEQ ID NO: 2118357 - RNA, 19 nt, Artificial Sequence
  Description of Artificial Sequence: Synthetic oligonucleotide
ggggaugacauugcuguuu

SEQ ID NO: 2118358 - RNA, 19 nt, Artificial Sequence
  Description of Artificial Sequence: Synthetic oligonucleotide
ggaugacauugcuguuuua

SEQ ID NO: 2118359 - RNA, 19 nt, Artificial Sequence
  Description of Artificial Sequence: Synthetic oligonucleotide
cagggacuuccgguugaga

SEQ ID NO: 2118360 - RNA, 19 nt, Artificial Sequence
  Description of Artificial Sequence: Synthetic oligonucleotide
cagccuucacggcuuucgu

SEQ ID NO: 2118361 - RNA, 19 nt, Artificial Sequence
  Description of Artificial Sequence: Synthetic oligonucleotide
ggcaagaauuggggucaca

SEQ ID NO: 2118362 - RNA, 19 nt, Artificial Sequence
  Description of Artificial Sequence: Synthetic oligonucleotide
ggggcagggacuuccgguu

SEQ ID NO: 2118363 - RNA, 19 nt, Artificial Sequence
  Description of Artificial Sequence: Synthetic oligonucleotide
ccaucacuugguaucguuu

SEQ ID NO: 2118364 - RNA, 19 nt, Artificial Sequence
  Description of Artificial Sequence: Synthetic oligonucleotide
gggcaagaauuggggucac

SEQ ID NO: 2118365 - RNA, 19 nt, Artificial Sequence
  Description of Artificial Sequence: Synthetic oligonucleotide
ccuucacggcuuucgucaa

SEQ ID NO: 2118366 - RNA, 19 nt, Artificial Sequence
  Description of Artificial Sequence: Synthetic oligonucleotide
cguuuguaccauggaccug

SEQ ID NO: 2118367 - RNA, 19 nt, Artificial Sequence
  Description of Artificial Sequence: Synthetic oligonucleotide
guccaucacuugguaucgu

SEQ ID NO: 2118368 - RNA, 19 nt, Artificial Sequence
  Description of Artificial Sequence: Synthetic oligonucleotide
cggcuuucgucaaccaucu

SEQ ID NO: 2118369 - RNA, 19 nt, Artificial Sequence
  Description of Artificial Sequence: Synthetic oligonucleotide
cccagccugcagagcaaga

SEQ ID NO: 2118370 - RNA, 19 nt, Artificial Sequence
  Description of Artificial Sequence: Synthetic oligonucleotide
ccugucugcccagccugca

SEQ ID NO: 2118371 - RNA, 19 nt, Artificial Sequence
  Description of Artificial Sequence: Synthetic oligonucleotide
ccagcggggcagggacuuc

SEQ ID NO: 2118372 - RNA, 19 nt, Artificial Sequence
  Description of Artificial Sequence: Synthetic oligonucleotide
cgucaaccaucugccuugu

SEQ ID NO: 2118373 - RNA, 19 nt, Artificial Sequence
  Description of Artificial Sequence: Synthetic oligonucleotide
aaaggaaccgaagaaagcc

SEQ ID NO: 2118374 - RNA, 19 nt, Artificial Sequence
  Description of Artificial Sequence: Synthetic oligonucleotide
uugagguugacaaugagag

SEQ ID NO: 2118375 - RNA, 19 nt, Artificial Sequence
  Description of Artificial Sequence: Synthetic oligonucleotide
aaucacaagcugcugaagg

SEQ ID NO: 2118376 - RNA, 19 nt, Artificial Sequence
  Description of Artificial Sequence: Synthetic oligonucleotide
ugccaaauagagcugaggg

SEQ ID NO: 2118377 - RNA, 19 nt, Artificial Sequence
  Description of Artificial Sequence: Synthetic oligonucleotide
agaaagccaaaccugaggg

SEQ ID NO: 2118378 - RNA, 19 nt, Artificial Sequence
  Description of Artificial Sequence: Synthetic oligonucleotide
ugagcugugccaaauagag

SEQ ID NO: 2118379 - RNA, 19 nt, Artificial Sequence
  Description of Artificial Sequence: Synthetic oligonucleotide
uguuggaggccuuaaaggg

SEQ ID NO: 2118380 - RNA, 19 nt, Artificial Sequence
  Description of Artificial Sequence: Synthetic oligonucleotide
aaccgaagaaagccaaacc

SEQ ID NO: 2118381 - RNA, 19 nt, Artificial Sequence
  Description of Artificial Sequence: Synthetic oligonucleotide
aaagguagacaccagguaa

SEQ ID NO: 2118382 - RNA, 19 nt, Artificial Sequence
  Description of Artificial Sequence: Synthetic oligonucleotide
acaucguacacgucgaagg

SEQ ID NO: 2118383 - RNA, 19 nt, Artificial Sequence
  Description of Artificial Sequence: Synthetic oligonucleotide
agcugugccaaauagagcu

SEQ ID NO: 2118384 - RNA, 19 nt, Artificial Sequence
  Description of Artificial Sequence: Synthetic oligonucleotide
auagagaucauccccucgg

SEQ ID NO: 2118385 - RNA, 19 nt, Artificial Sequence
  Description of Artificial Sequence: Synthetic oligonucleotide
ucuauguugggcaccauca

SEQ ID NO: 2118386 - RNA, 19 nt, Artificial Sequence
  Description of Artificial Sequence: Synthetic oligonucleotide
aaucaguacaucguacacg

SEQ ID NO: 2118387 - RNA, 19 nt, Artificial Sequence
  Description of Artificial Sequence: Synthetic oligonucleotide
aagauugcuucuauguugg

SEQ ID NO: 2118388 - RNA, 19 nt, Artificial Sequence
  Description of Artificial Sequence: Synthetic oligonucleotide
augacugggaguugugucc

SEQ ID NO: 2118389 - RNA, 19 nt, Artificial Sequence
  Description of Artificial Sequence: Synthetic oligonucleotide
gaagaaaagugccagaucu

SEQ ID NO: 2118390 - RNA, 19 nt, Artificial Sequence
  Description of Artificial Sequence: Synthetic oligonucleotide
auguuggaggccuuaaagg

SEQ ID NO: 2118391 - RNA, 19 nt, Artificial Sequence
  Description of Artificial Sequence: Synthetic oligonucleotide
caguacaucguacacgucg

SEQ ID NO: 2118392 - RNA, 19 nt, Artificial Sequence
  Description of Artificial Sequence: Synthetic oligonucleotide
agaaggucuauccugcguc

SEQ ID NO: 2118393 - RNA, 19 nt, Artificial Sequence
  Description of Artificial Sequence: Synthetic oligonucleotide
uucucuaggacagggaggg

SEQ ID NO: 2118394 - RNA, 19 nt, Artificial Sequence
  Description of Artificial Sequence: Synthetic oligonucleotide
uacagauugcaccaggccu

SEQ ID NO: 2118395 - RNA, 19 nt, Artificial Sequence
  Description of Artificial Sequence: Synthetic oligonucleotide
ugaaucaguacaucguaca

SEQ ID NO: 2118396 - RNA, 19 nt, Artificial Sequence
  Description of Artificial Sequence: Synthetic oligonucleotide
ucucucaaggcgcagggag

SEQ ID NO: 2118397 - RNA, 19 nt, Artificial Sequence
  Description of Artificial Sequence: Synthetic oligonucleotide
aucaguacaucguacacgu

SEQ ID NO: 2118398 - RNA, 19 nt, Artificial Sequence
  Description of Artificial Sequence: Synthetic oligonucleotide
agucaggugaaucaguaca

SEQ ID NO: 2118399 - RNA, 19 nt, Artificial Sequence
  Description of Artificial Sequence: Synthetic oligonucleotide
ucauagaagaaaagugcca

SEQ ID NO: 2118400 - RNA, 19 nt, Artificial Sequence
  Description of Artificial Sequence: Synthetic oligonucleotide
caagauugcuucuauguug

SEQ ID NO: 2118401 - RNA, 19 nt, Artificial Sequence
  Description of Artificial Sequence: Synthetic oligonucleotide
uguccuaauguccccagcc

SEQ ID NO: 2118402 - RNA, 19 nt, Artificial Sequence
  Description of Artificial Sequence: Synthetic oligonucleotide
agucaguucacuguugagg

SEQ ID NO: 2118403 - RNA, 19 nt, Artificial Sequence
  Description of Artificial Sequence: Synthetic oligonucleotide
caggugaaucaguacaucg

SEQ ID NO: 2118404 - RNA, 19 nt, Artificial Sequence
  Description of Artificial Sequence: Synthetic oligonucleotide
gaggacaccgaucaccucc

SEQ ID NO: 2118405 - RNA, 19 nt, Artificial Sequence
  Description of Artificial Sequence: Synthetic oligonucleotide
ugccccuuuauguuggagg

SEQ ID NO: 2118406 - RNA, 19 nt, Artificial Sequence
  Description of Artificial Sequence: Synthetic oligonucleotide
aucauagccuaggacaggc

SEQ ID NO: 2118407 - RNA, 19 nt, Artificial Sequence
  Description of Artificial Sequence: Synthetic oligonucleotide
ucuacagauugcaccaggc

SEQ ID NO: 2118408 - RNA, 19 nt, Artificial Sequence
  Description of Artificial Sequence: Synthetic oligonucleotide
uccacacagagcuucugcg

SEQ ID NO: 2118409 - RNA, 19 nt, Artificial Sequence
  Description of Artificial Sequence: Synthetic oligonucleotide
agaagaaaagugccagauc

SEQ ID NO: 2118410 - RNA, 19 nt, Artificial Sequence
  Description of Artificial Sequence: Synthetic oligonucleotide
acuccgaauuucuaccugg

SEQ ID NO: 2118411 - RNA, 19 nt, Artificial Sequence
  Description of Artificial Sequence: Synthetic oligonucleotide
gagaucauccccucggggc

SEQ ID NO: 2118412 - RNA, 19 nt, Artificial Sequence
  Description of Artificial Sequence: Synthetic oligonucleotide
auugcaccaggccuucacc

SEQ ID NO: 2118413 - RNA, 19 nt, Artificial Sequence
  Description of Artificial Sequence: Synthetic oligonucleotide
cuauccugcguccacacag

SEQ ID NO: 2118414 - RNA, 19 nt, Artificial Sequence
  Description of Artificial Sequence: Synthetic oligonucleotide
accaucacaagcuccccac

SEQ ID NO: 2118415 - RNA, 19 nt, Artificial Sequence
  Description of Artificial Sequence: Synthetic oligonucleotide
aaucccucgcccaagagcu

SEQ ID NO: 2118416 - RNA, 19 nt, Artificial Sequence
  Description of Artificial Sequence: Synthetic oligonucleotide
aagugccagaucuccaaag

SEQ ID NO: 2118417 - RNA, 19 nt, Artificial Sequence
  Description of Artificial Sequence: Synthetic oligonucleotide
uauguugggcaccaucaca

SEQ ID NO: 2118418 - RNA, 19 nt, Artificial Sequence
  Description of Artificial Sequence: Synthetic oligonucleotide
ucguacacgucgaagggug

SEQ ID NO: 2118419 - RNA, 19 nt, Artificial Sequence
  Description of Artificial Sequence: Synthetic oligonucleotide
ucagagaugaaggcccugg

SEQ ID NO: 2118420 - RNA, 19 nt, Artificial Sequence
  Description of Artificial Sequence: Synthetic oligonucleotide
gaaucaguacaucguacac

SEQ ID NO: 2118421 - RNA, 19 nt, Artificial Sequence
  Description of Artificial Sequence: Synthetic oligonucleotide
gaaucccucgcccaagagc

SEQ ID NO: 2118422 - RNA, 19 nt, Artificial Sequence
  Description of Artificial Sequence: Synthetic oligonucleotide
uccuaauguccccagcccc

SEQ ID NO: 2118423 - RNA, 19 nt, Artificial Sequence
  Description of Artificial Sequence: Synthetic oligonucleotide
ugagguugacaaugagagg

SEQ ID NO: 2118424 - RNA, 19 nt, Artificial Sequence
  Description of Artificial Sequence: Synthetic oligonucleotide
uggcucacugagcagacca

SEQ ID NO: 2118425 - RNA, 19 nt, Artificial Sequence
  Description of Artificial Sequence: Synthetic oligonucleotide
aaggguucagagugcagga

SEQ ID NO: 2118426 - RNA, 19 nt, Artificial Sequence
  Description of Artificial Sequence: Synthetic oligonucleotide
gauugcuucuauguugggc

SEQ ID NO: 2118427 - RNA, 19 nt, Artificial Sequence
  Description of Artificial Sequence: Synthetic oligonucleotide
gcaaaguccuccaagauug

SEQ ID NO: 2118428 - RNA, 19 nt, Artificial Sequence
  Description of Artificial Sequence: Synthetic oligonucleotide
aggggugaaggguucagag

SEQ ID NO: 2118429 - RNA, 19 nt, Artificial Sequence
  Description of Artificial Sequence: Synthetic oligonucleotide
agccagaaucacaagcugc

SEQ ID NO: 2118430 - RNA, 19 nt, Artificial Sequence
  Description of Artificial Sequence: Synthetic oligonucleotide
agcagaccacggcagaagg

SEQ ID NO: 2118431 - RNA, 19 nt, Artificial Sequence
  Description of Artificial Sequence: Synthetic oligonucleotide
caucguacacgucgaaggg

SEQ ID NO: 2118432 - RNA, 19 nt, Artificial Sequence
  Description of Artificial Sequence: Synthetic oligonucleotide
aucacaagcugcugaagga

SEQ ID NO: 2118433 - RNA, 19 nt, Artificial Sequence
  Description of Artificial Sequence: Synthetic oligonucleotide
auagaagaaaagugccaga

SEQ ID NO: 2118434 - RNA, 19 nt, Artificial Sequence
  Description of Artificial Sequence: Synthetic oligonucleotide
gaacacuguccuaaugucc

SEQ ID NO: 2118435 - RNA, 19 nt, Artificial Sequence
  Description of Artificial Sequence: Synthetic oligonucleotide
cuacagauugcaccaggcc

SEQ ID NO: 2118436 - RNA, 19 nt, Artificial Sequence
  Description of Artificial Sequence: Synthetic oligonucleotide
gaaggucuauccugcgucc

SEQ ID NO: 2118437 - RNA, 19 nt, Artificial Sequence
  Description of Artificial Sequence: Synthetic oligonucleotide
uucuauguugggcaccauc

SEQ ID NO: 2118438 - RNA, 19 nt, Artificial Sequence
  Description of Artificial Sequence: Synthetic oligonucleotide
guuguguccgugcugccag

SEQ ID NO: 2118439 - RNA, 19 nt, Artificial Sequence
  Description of Artificial Sequence: Synthetic oligonucleotide
cauagagaucauccccucg

SEQ ID NO: 2118440 - RNA, 19 nt, Artificial Sequence
  Description of Artificial Sequence: Synthetic oligonucleotide
ucuaggacagggagggccu

SEQ ID NO: 2118441 - RNA, 19 nt, Artificial Sequence
  Description of Artificial Sequence: Synthetic oligonucleotide
gaagaaagccaaaccugag

SEQ ID NO: 2118442 - RNA, 19 nt, Artificial Sequence
  Description of Artificial Sequence: Synthetic oligonucleotide
ucacacaguccaccucucg

SEQ ID NO: 2118443 - RNA, 19 nt, Artificial Sequence
  Description of Artificial Sequence: Synthetic oligonucleotide
uacaucguacacgucgaag

SEQ ID NO: 2118444 - RNA, 19 nt, Artificial Sequence
  Description of Artificial Sequence: Synthetic oligonucleotide
ugugccaaauagagcugag

SEQ ID NO: 2118445 - RNA, 19 nt, Artificial Sequence
  Description of Artificial Sequence: Synthetic oligonucleotide
gaaccgaagaaagccaaac

SEQ ID NO: 2118446 - RNA, 19 nt, Artificial Sequence
  Description of Artificial Sequence: Synthetic oligonucleotide
ucagugaaucccucgccca

SEQ ID NO: 2118447 - RNA, 19 nt, Artificial Sequence
  Description of Artificial Sequence: Synthetic oligonucleotide
aauuucuaccugguccuca

SEQ ID NO: 2118448 - RNA, 19 nt, Artificial Sequence
  Description of Artificial Sequence: Synthetic oligonucleotide
uggaguccaugcaaggcac

SEQ ID NO: 2118449 - RNA, 19 nt, Artificial Sequence
  Description of Artificial Sequence: Synthetic oligonucleotide
agagaugaaggcccuggcu

SEQ ID NO: 2118450 - RNA, 19 nt, Artificial Sequence
  Description of Artificial Sequence: Synthetic oligonucleotide
ucacugagcagaccacggc

SEQ ID NO: 2118451 - RNA, 19 nt, Artificial Sequence
  Description of Artificial Sequence: Synthetic oligonucleotide
uacuccgaauuucuaccug

SEQ ID NO: 2118452 - RNA, 19 nt, Artificial Sequence
  Description of Artificial Sequence: Synthetic oligonucleotide
uuccaaucaaagguagaca

SEQ ID NO: 2118453 - RNA, 19 nt, Artificial Sequence
  Description of Artificial Sequence: Synthetic oligonucleotide
agcaaaguccuccaagauu

SEQ ID NO: 2118454 - RNA, 19 nt, Artificial Sequence
  Description of Artificial Sequence: Synthetic oligonucleotide
ccuggugucucucucaagg

SEQ ID NO: 2118455 - RNA, 19 nt, Artificial Sequence
  Description of Artificial Sequence: Synthetic oligonucleotide
aaagugccagaucuccaaa

SEQ ID NO: 2118456 - RNA, 19 nt, Artificial Sequence
  Description of Artificial Sequence: Synthetic oligonucleotide
uuauguuggaggccuuaaa

SEQ ID NO: 2118457 - RNA, 19 nt, Artificial Sequence
  Description of Artificial Sequence: Synthetic oligonucleotide
gaauguggcggggagucag

SEQ ID NO: 2118458 - RNA, 19 nt, Artificial Sequence
  Description of Artificial Sequence: Synthetic oligonucleotide
gcuucucuaggacagggag

SEQ ID NO: 2118459 - RNA, 19 nt, Artificial Sequence
  Description of Artificial Sequence: Synthetic oligonucleotide
caugugccccuuuauguug

SEQ ID NO: 2118460 - RNA, 19 nt, Artificial Sequence
  Description of Artificial Sequence: Synthetic oligonucleotide
uagccuaggacaggcauca

SEQ ID NO: 2118461 - RNA, 19 nt, Artificial Sequence
  Description of Artificial Sequence: Synthetic oligonucleotide
agaucauccccucggggcu

SEQ ID NO: 2118462 - RNA, 19 nt, Artificial Sequence
  Description of Artificial Sequence: Synthetic oligonucleotide
ugaaucccucgcccaagag

SEQ ID NO: 2118463 - RNA, 19 nt, Artificial Sequence
  Description of Artificial Sequence: Synthetic oligonucleotide
gauugcaccaggccuucac

SEQ ID NO: 2118464 - RNA, 19 nt, Artificial Sequence
  Description of Artificial Sequence: Synthetic oligonucleotide
cucucaaggcgcagggagg

SEQ ID NO: 2118465 - RNA, 19 nt, Artificial Sequence
  Description of Artificial Sequence: Synthetic oligonucleotide
cagguaaaggaaccgaaga

SEQ ID NO: 2118466 - RNA, 19 nt, Artificial Sequence
  Description of Artificial Sequence: Synthetic oligonucleotide
caucagugaaucccucgcc

SEQ ID NO: 2118467 - RNA, 19 nt, Artificial Sequence
  Description of Artificial Sequence: Synthetic oligonucleotide
aggucuauccugcguccac

SEQ ID NO: 2118468 - RNA, 19 nt, Artificial Sequence
  Description of Artificial Sequence: Synthetic oligonucleotide
aaaguccuccaagauugcu

SEQ ID NO: 2118469 - RNA, 19 nt, Artificial Sequence
  Description of Artificial Sequence: Synthetic oligonucleotide
ucgaaggguggccggaaca

SEQ ID NO: 2118470 - RNA, 19 nt, Artificial Sequence
  Description of Artificial Sequence: Synthetic oligonucleotide
aggaucugggcagaagguc

SEQ ID NO: 2118471 - RNA, 19 nt, Artificial Sequence
  Description of Artificial Sequence: Synthetic oligonucleotide
acacaguccaccucucgcu

SEQ ID NO: 2118472 - RNA, 19 nt, Artificial Sequence
  Description of Artificial Sequence: Synthetic oligonucleotide
agaggguugguucuuccaa

SEQ ID NO: 2118473 - RNA, 19 nt, Artificial Sequence
  Description of Artificial Sequence: Synthetic oligonucleotide
guugacaaugagaggguug

SEQ ID NO: 2118474 - RNA, 19 nt, Artificial Sequence
  Description of Artificial Sequence: Synthetic oligonucleotide
ugaaggguucagagugcag

SEQ ID NO: 2118475 - RNA, 19 nt, Artificial Sequence
  Description of Artificial Sequence: Synthetic oligonucleotide
aagguagacaccagguaaa

SEQ ID NO: 2118476 - RNA, 19 nt, Artificial Sequence
  Description of Artificial Sequence: Synthetic oligonucleotide
gugccagaucuccaaaggc

SEQ ID NO: 2118477 - RNA, 19 nt, Artificial Sequence
  Description of Artificial Sequence: Synthetic oligonucleotide
uauccugcguccacacaga

SEQ ID NO: 2118478 - RNA, 19 nt, Artificial Sequence
  Description of Artificial Sequence: Synthetic oligonucleotide
aggcucucaucagugaauc

SEQ ID NO: 2118479 - RNA, 19 nt, Artificial Sequence
  Description of Artificial Sequence: Synthetic oligonucleotide
gcaucagagaugaaggccc

SEQ ID NO: 2118480 - RNA, 19 nt, Artificial Sequence
  Description of Artificial Sequence: Synthetic oligonucleotide
uuuauguuggaggccuuaa

SEQ ID NO: 2118481 - RNA, 19 nt, Artificial Sequence
  Description of Artificial Sequence: Synthetic oligonucleotide
uguugggcaccaucacaag

SEQ ID NO: 2118482 - RNA, 19 nt, Artificial Sequence
  Description of Artificial Sequence: Synthetic oligonucleotide
acuguccuaauguccccag

SEQ ID NO: 2118483 - RNA, 19 nt, Artificial Sequence
  Description of Artificial Sequence: Synthetic oligonucleotide
ugggaguuguguccgugcu

SEQ ID NO: 2118484 - RNA, 19 nt, Artificial Sequence
  Description of Artificial Sequence: Synthetic oligonucleotide
ugccaggaaacuacuccga

SEQ ID NO: 2118485 - RNA, 19 nt, Artificial Sequence
  Description of Artificial Sequence: Synthetic oligonucleotide
auagccuaggacaggcauc

SEQ ID NO: 2118486 - RNA, 19 nt, Artificial Sequence
  Description of Artificial Sequence: Synthetic oligonucleotide
gucaguucacuguugaggu

SEQ ID NO: 2118487 - RNA, 19 nt, Artificial Sequence
  Description of Artificial Sequence: Synthetic oligonucleotide
ggaucauagccuaggacag

SEQ ID NO: 2118488 - RNA, 19 nt, Artificial Sequence
  Description of Artificial Sequence: Synthetic oligonucleotide
guccuaauguccccagccc

SEQ ID NO: 2118489 - RNA, 19 nt, Artificial Sequence
  Description of Artificial Sequence: Synthetic oligonucleotide
cagaaucacaagcugcuga

SEQ ID NO: 2118490 - RNA, 19 nt, Artificial Sequence
  Description of Artificial Sequence: Synthetic oligonucleotide
acaguccaccucucgcuuc

SEQ ID NO: 2118491 - RNA, 19 nt, Artificial Sequence
  Description of Artificial Sequence: Synthetic oligonucleotide
aaggguggccggaacacug

SEQ ID NO: 2118492 - RNA, 19 nt, Artificial Sequence
  Description of Artificial Sequence: Synthetic oligonucleotide
gagucaggugaaucaguac

SEQ ID NO: 2118493 - RNA, 19 nt, Artificial Sequence
  Description of Artificial Sequence: Synthetic oligonucleotide
cacccaacacagcaaaguc

SEQ ID NO: 2118494 - RNA, 19 nt, Artificial Sequence
  Description of Artificial Sequence: Synthetic oligonucleotide
ggccucuacagauugcacc

SEQ ID NO: 2118495 - RNA, 19 nt, Artificial Sequence
  Description of Artificial Sequence: Synthetic oligonucleotide
gaucaccuccccaccaugc

SEQ ID NO: 2118496 - RNA, 19 nt, Artificial Sequence
  Description of Artificial Sequence: Synthetic oligonucleotide
gaaucacacaguccaccuc

SEQ ID NO: 2118497 - RNA, 19 nt, Artificial Sequence
  Description of Artificial Sequence: Synthetic oligonucleotide
gaccacggcagaaggaagc

SEQ ID NO: 2118498 - RNA, 19 nt, Artificial Sequence
  Description of Artificial Sequence: Synthetic oligonucleotide
agauugcuucuauguuggg

SEQ ID NO: 2118499 - RNA, 19 nt, Artificial Sequence
  Description of Artificial Sequence: Synthetic oligonucleotide
guccacacagagcuucugc

SEQ ID NO: 2118500 - RNA, 19 nt, Artificial Sequence
  Description of Artificial Sequence: Synthetic oligonucleotide
ucuauccugcguccacaca

SEQ ID NO: 2118501 - RNA, 19 nt, Artificial Sequence
  Description of Artificial Sequence: Synthetic oligonucleotide
guggcggggagucagguga

SEQ ID NO: 2118502 - RNA, 19 nt, Artificial Sequence
  Description of Artificial Sequence: Synthetic oligonucleotide
ucgcccaagagcugggcac

SEQ ID NO: 2118503 - RNA, 19 nt, Artificial Sequence
  Description of Artificial Sequence: Synthetic oligonucleotide
aguacaucguacacgucga

SEQ ID NO: 2118504 - RNA, 19 nt, Artificial Sequence
  Description of Artificial Sequence: Synthetic oligonucleotide
aauguggcggggagucagg

SEQ ID NO: 2118505 - RNA, 19 nt, Artificial Sequence
  Description of Artificial Sequence: Synthetic oligonucleotide
aggacaccgaucaccuccc

SEQ ID NO: 2118506 - RNA, 19 nt, Artificial Sequence
  Description of Artificial Sequence: Synthetic oligonucleotide
ugugucucucauagagauc

SEQ ID NO: 2118507 - RNA, 19 nt, Artificial Sequence
  Description of Artificial Sequence: Synthetic oligonucleotide
cacaagcugcugaaggauc

SEQ ID NO: 2118508 - RNA, 19 nt, Artificial Sequence
  Description of Artificial Sequence: Synthetic oligonucleotide
caccugagaaggcugggug

SEQ ID NO: 2118509 - RNA, 19 nt, Artificial Sequence
  Description of Artificial Sequence: Synthetic oligonucleotide
aggugaaucaguacaucgu

SEQ ID NO: 2118510 - RNA, 19 nt, Artificial Sequence
  Description of Artificial Sequence: Synthetic oligonucleotide
aguccaugcaaggcacugg

SEQ ID NO: 2118511 - RNA, 19 nt, Artificial Sequence
  Description of Artificial Sequence: Synthetic oligonucleotide
cuggaguccaugcaaggca

SEQ ID NO: 2118512 - RNA, 19 nt, Artificial Sequence
  Description of Artificial Sequence: Synthetic oligonucleotide
ucauagccuaggacaggca

SEQ ID NO: 2118513 - RNA, 19 nt, Artificial Sequence
  Description of Artificial Sequence: Synthetic oligonucleotide
acguacccaccgcuuggcc

SEQ ID NO: 2118514 - RNA, 19 nt, Artificial Sequence
  Description of Artificial Sequence: Synthetic oligonucleotide
caguccaccucucgcuucg

SEQ ID NO: 2118515 - RNA, 19 nt, Artificial Sequence
  Description of Artificial Sequence: Synthetic oligonucleotide
uccugcguccacacagagc

SEQ ID NO: 2118516 - RNA, 19 nt, Artificial Sequence
  Description of Artificial Sequence: Synthetic oligonucleotide
cugggaguuguguccgugc

SEQ ID NO: 2118517 - RNA, 19 nt, Artificial Sequence
  Description of Artificial Sequence: Synthetic oligonucleotide
ccgaagaaagccaaaccug

SEQ ID NO: 2118518 - RNA, 19 nt, Artificial Sequence
  Description of Artificial Sequence: Synthetic oligonucleotide
acugagcagaccacggcag

SEQ ID NO: 2118519 - RNA, 19 nt, Artificial Sequence
  Description of Artificial Sequence: Synthetic oligonucleotide
accagauccaggcucucau

SEQ ID NO: 2118520 - RNA, 19 nt, Artificial Sequence
  Description of Artificial Sequence: Synthetic oligonucleotide
ggaacacuguccuaauguc

SEQ ID NO: 2118521 - RNA, 19 nt, Artificial Sequence
  Description of Artificial Sequence: Synthetic oligonucleotide
caaaguccuccaagauugc

SEQ ID NO: 2118522 - RNA, 19 nt, Artificial Sequence
  Description of Artificial Sequence: Synthetic oligonucleotide
auguugggcaccaucacaa

SEQ ID NO: 2118523 - RNA, 19 nt, Artificial Sequence
  Description of Artificial Sequence: Synthetic oligonucleotide
uacacgucgaaggguggcc

SEQ ID NO: 2118524 - RNA, 19 nt, Artificial Sequence
  Description of Artificial Sequence: Synthetic oligonucleotide
caccaugugccccuuuaug

SEQ ID NO: 2118525 - RNA, 19 nt, Artificial Sequence
  Description of Artificial Sequence: Synthetic oligonucleotide
augaugaccaugacuggga

SEQ ID NO: 2118526 - RNA, 19 nt, Artificial Sequence
  Description of Artificial Sequence: Synthetic oligonucleotide
ucgcuucgggccucuacag

SEQ ID NO: 2118527 - RNA, 19 nt, Artificial Sequence
  Description of Artificial Sequence: Synthetic oligonucleotide
acaagcugcugaaggaucu

SEQ ID NO: 2118528 - RNA, 19 nt, Artificial Sequence
  Description of Artificial Sequence: Synthetic oligonucleotide
agguagacaccagguaaag

SEQ ID NO: 2118529 - RNA, 19 nt, Artificial Sequence
  Description of Artificial Sequence: Synthetic oligonucleotide
cagaucuccaaaggccucc

SEQ ID NO: 2118530 - RNA, 19 nt, Artificial Sequence
  Description of Artificial Sequence: Synthetic oligonucleotide
cuccguaccucccucagga

SEQ ID NO: 2118531 - RNA, 19 nt, Artificial Sequence
  Description of Artificial Sequence: Synthetic oligonucleotide
gaguccaugcaaggcacug

SEQ ID NO: 2118532 - RNA, 19 nt, Artificial Sequence
  Description of Artificial Sequence: Synthetic oligonucleotide
ucaggugaaucaguacauc

SEQ ID NO: 2118533 - RNA, 19 nt, Artificial Sequence
  Description of Artificial Sequence: Synthetic oligonucleotide
cagagaugaaggcccuggc

SEQ ID NO: 2118534 - RNA, 19 nt, Artificial Sequence
  Description of Artificial Sequence: Synthetic oligonucleotide
uugcuucuauguugggcac

SEQ ID NO: 2118535 - RNA, 19 nt, Artificial Sequence
  Description of Artificial Sequence: Synthetic oligonucleotide
accaugcuggucauagaag

SEQ ID NO: 2118536 - RNA, 19 nt, Artificial Sequence
  Description of Artificial Sequence: Synthetic oligonucleotide
ugcguccacacagagcuuc

SEQ ID NO: 2118537 - RNA, 19 nt, Artificial Sequence
  Description of Artificial Sequence: Synthetic oligonucleotide
agugaaucccucgcccaag

SEQ ID NO: 2118538 - RNA, 19 nt, Artificial Sequence
  Description of Artificial Sequence: Synthetic oligonucleotide
aaugagaggguugguucuu

SEQ ID NO: 2118539 - RNA, 19 nt, Artificial Sequence
  Description of Artificial Sequence: Synthetic oligonucleotide
gugugucucucauagagau

SEQ ID NO: 2118540 - RNA, 19 nt, Artificial Sequence
  Description of Artificial Sequence: Synthetic oligonucleotide
cagccagaaucacaagcug

SEQ ID NO: 2118541 - RNA, 19 nt, Artificial Sequence
  Description of Artificial Sequence: Synthetic oligonucleotide
gccccuuuauguuggaggc

SEQ ID NO: 2118542 - RNA, 19 nt, Artificial Sequence
  Description of Artificial Sequence: Synthetic oligonucleotide
augugccccuuuauguugg

SEQ ID NO: 2118543 - RNA, 19 nt, Artificial Sequence
  Description of Artificial Sequence: Synthetic oligonucleotide
ccugagcugugccaaauag

SEQ ID NO: 2118544 - RNA, 19 nt, Artificial Sequence
  Description of Artificial Sequence: Synthetic oligonucleotide
gggcagaaggucuauccug

SEQ ID NO: 2118545 - RNA, 19 nt, Artificial Sequence
  Description of Artificial Sequence: Synthetic oligonucleotide
ugggcuuccagaggacacc

SEQ ID NO: 2118546 - RNA, 19 nt, Artificial Sequence
  Description of Artificial Sequence: Synthetic oligonucleotide
aggaaacuacuccgaauuu

SEQ ID NO: 2118547 - RNA, 19 nt, Artificial Sequence
  Description of Artificial Sequence: Synthetic oligonucleotide
cagucaguucacuguugag

SEQ ID NO: 2118548 - RNA, 19 nt, Artificial Sequence
  Description of Artificial Sequence: Synthetic oligonucleotide
ggaaacuacuccgaauuuc

SEQ ID NO: 2118549 - RNA, 19 nt, Artificial Sequence
  Description of Artificial Sequence: Synthetic oligonucleotide
ugcuucuauguugggcacc

SEQ ID NO: 2118550 - RNA, 19 nt, Artificial Sequence
  Description of Artificial Sequence: Synthetic oligonucleotide
ccagguaaaggaaccgaag

SEQ ID NO: 2118551 - RNA, 19 nt, Artificial Sequence
  Description of Artificial Sequence: Synthetic oligonucleotide
ucucgcuucgggccucuac

SEQ ID NO: 2118552 - RNA, 19 nt, Artificial Sequence
  Description of Artificial Sequence: Synthetic oligonucleotide
uaccugguccucagcaguc

SEQ ID NO: 2118553 - RNA, 19 nt, Artificial Sequence
  Description of Artificial Sequence: Synthetic oligonucleotide
ggugaaucaguacaucgua

SEQ ID NO: 2118554 - RNA, 19 nt, Artificial Sequence
  Description of Artificial Sequence: Synthetic oligonucleotide
auccugcguccacacagag

SEQ ID NO: 2118555 - RNA, 19 nt, Artificial Sequence
  Description of Artificial Sequence: Synthetic oligonucleotide
acacgucgaaggguggccg

SEQ ID NO: 2118556 - RNA, 19 nt, Artificial Sequence
  Description of Artificial Sequence: Synthetic oligonucleotide
cacagccugacggugccgg

SEQ ID NO: 2118557 - RNA, 19 nt, Artificial Sequence
  Description of Artificial Sequence: Synthetic oligonucleotide
ugggcaccaucacaagcuc

SEQ ID NO: 2118558 - RNA, 19 nt, Artificial Sequence
  Description of Artificial Sequence: Synthetic oligonucleotide
ggcaccaucacaagcuccc

SEQ ID NO: 2118559 - RNA, 19 nt, Artificial Sequence
  Description of Artificial Sequence: Synthetic oligonucleotide
aaggucuauccugcgucca

SEQ ID NO: 2118560 - RNA, 19 nt, Artificial Sequence
  Description of Artificial Sequence: Synthetic oligonucleotide
caccaugcuggucauagaa

SEQ ID NO: 2118561 - RNA, 19 nt, Artificial Sequence
  Description of Artificial Sequence: Synthetic oligonucleotide
agaggacaccgaucaccuc

SEQ ID NO: 2118562 - RNA, 19 nt, Artificial Sequence
  Description of Artificial Sequence: Synthetic oligonucleotide
uguggcggggagucaggug

SEQ ID NO: 2118563 - RNA, 19 nt, Artificial Sequence
  Description of Artificial Sequence: Synthetic oligonucleotide
ggcagaaggucuauccugc

SEQ ID NO: 2118564 - RNA, 19 nt, Artificial Sequence
  Description of Artificial Sequence: Synthetic oligonucleotide
uuguguccgugcugccagg

SEQ ID NO: 2118565 - RNA, 19 nt, Artificial Sequence
  Description of Artificial Sequence: Synthetic oligonucleotide
ugguccucagcagucaguu

SEQ ID NO: 2118566 - RNA, 19 nt, Artificial Sequence
  Description of Artificial Sequence: Synthetic oligonucleotide
gacaccgaucaccucccca

SEQ ID NO: 2118567 - RNA, 19 nt, Artificial Sequence
  Description of Artificial Sequence: Synthetic oligonucleotide
cucgagacaccaccaugug

SEQ ID NO: 2118568 - RNA, 19 nt, Artificial Sequence
  Description of Artificial Sequence: Synthetic oligonucleotide
cucggggcuccguaccucc

SEQ ID NO: 2118569 - RNA, 19 nt, Artificial Sequence
  Description of Artificial Sequence: Synthetic oligonucleotide
caaagguagacaccaggua

SEQ ID NO: 2118570 - RNA, 19 nt, Artificial Sequence
  Description of Artificial Sequence: Synthetic oligonucleotide
gagcugugccaaauagagc

SEQ ID NO: 2118571 - RNA, 19 nt, Artificial Sequence
  Description of Artificial Sequence: Synthetic oligonucleotide
aucguacacgucgaagggu

SEQ ID NO: 2118572 - RNA, 19 nt, Artificial Sequence
  Description of Artificial Sequence: Synthetic oligonucleotide
gauccaggcucucaucagu

SEQ ID NO: 2118573 - RNA, 19 nt, Artificial Sequence
  Description of Artificial Sequence: Synthetic oligonucleotide
cacgucgaaggguggccgg

SEQ ID NO: 2118574 - RNA, 19 nt, Artificial Sequence
  Description of Artificial Sequence: Synthetic oligonucleotide
gucuauccugcguccacac

SEQ ID NO: 2118575 - RNA, 19 nt, Artificial Sequence
  Description of Artificial Sequence: Synthetic oligonucleotide
caccgcuuggccaggcgag

SEQ ID NO: 2118576 - RNA, 19 nt, Artificial Sequence
  Description of Artificial Sequence: Synthetic oligonucleotide
ccacacagagcuucugcgg

SEQ ID NO: 2118577 - RNA, 19 nt, Artificial Sequence
  Description of Artificial Sequence: Synthetic oligonucleotide
accgaucaccuccccacca

SEQ ID NO: 2118578 - RNA, 19 nt, Artificial Sequence
  Description of Artificial Sequence: Synthetic oligonucleotide
aggaagcagccggaggguc

SEQ ID NO: 2118579 - RNA, 19 nt, Artificial Sequence
  Description of Artificial Sequence: Synthetic oligonucleotide
cucgcuucgggccucuaca

SEQ ID NO: 2118580 - RNA, 19 nt, Artificial Sequence
  Description of Artificial Sequence: Synthetic oligonucleotide
ggugccggggaauguggcg

SEQ ID NO: 2118581 - RNA, 19 nt, Artificial Sequence
  Description of Artificial Sequence: Synthetic oligonucleotide
aguuguguccgugcugcca

SEQ ID NO: 2118582 - RNA, 19 nt, Artificial Sequence
  Description of Artificial Sequence: Synthetic oligonucleotide
gacggugccggggaaugug

SEQ ID NO: 2118583 - RNA, 19 nt, Artificial Sequence
  Description of Artificial Sequence: Synthetic oligonucleotide
guacacgucgaaggguggc

SEQ ID NO: 2118584 - RNA, 19 nt, Artificial Sequence
  Description of Artificial Sequence: Synthetic oligonucleotide
ggacaggcaucagagauga

SEQ ID NO: 2118585 - RNA, 19 nt, Artificial Sequence
  Description of Artificial Sequence: Synthetic oligonucleotide
acuggugagcaggggcaac

SEQ ID NO: 2118586 - RNA, 19 nt, Artificial Sequence
  Description of Artificial Sequence: Synthetic oligonucleotide
cgugcugccaggaaacuac

SEQ ID NO: 2118587 - RNA, 19 nt, Artificial Sequence
  Description of Artificial Sequence: Synthetic oligonucleotide
accagguaaaggaaccgaa

SEQ ID NO: 2118588 - RNA, 19 nt, Artificial Sequence
  Description of Artificial Sequence: Synthetic oligonucleotide
accaccaugugccccuuua

SEQ ID NO: 2118589 - RNA, 19 nt, Artificial Sequence
  Description of Artificial Sequence: Synthetic oligonucleotide
aaacuacuccgaauuucua

SEQ ID NO: 2118590 - RNA, 19 nt, Artificial Sequence
  Description of Artificial Sequence: Synthetic oligonucleotide
gagcuucugcgguccuggg

SEQ ID NO: 2118591 - RNA, 19 nt, Artificial Sequence
  Description of Artificial Sequence: Synthetic oligonucleotide
aucauccccucggggcucc

SEQ ID NO: 2118592 - RNA, 19 nt, Artificial Sequence
  Description of Artificial Sequence: Synthetic oligonucleotide
aggaaccgaagaaagccaa

SEQ ID NO: 2118593 - RNA, 19 nt, Artificial Sequence
  Description of Artificial Sequence: Synthetic oligonucleotide
gcucacugagcagaccacg

SEQ ID NO: 2118594 - RNA, 19 nt, Artificial Sequence
  Description of Artificial Sequence: Synthetic oligonucleotide
ccugcguccacacagagcu

SEQ ID NO: 2118595 - RNA, 19 nt, Artificial Sequence
  Description of Artificial Sequence: Synthetic oligonucleotide
ggggaucauagccuaggac

SEQ ID NO: 2118596 - RNA, 19 nt, Artificial Sequence
  Description of Artificial Sequence: Synthetic oligonucleotide
accgcuuggccaggcgagc

SEQ ID NO: 2118597 - RNA, 19 nt, Artificial Sequence
  Description of Artificial Sequence: Synthetic oligonucleotide
gaugaccaugacugggagu

SEQ ID NO: 2118598 - RNA, 19 nt, Artificial Sequence
  Description of Artificial Sequence: Synthetic oligonucleotide
caaugagaggguugguucu

SEQ ID NO: 2118599 - RNA, 19 nt, Artificial Sequence
  Description of Artificial Sequence: Synthetic oligonucleotide
ucgggccucuacagauugc

SEQ ID NO: 2118600 - RNA, 19 nt, Artificial Sequence
  Description of Artificial Sequence: Synthetic oligonucleotide
ccaugcaaggcacugguga

SEQ ID NO: 2118601 - RNA, 19 nt, Artificial Sequence
  Description of Artificial Sequence: Synthetic oligonucleotide
agguugacaaugagagggu

SEQ ID NO: 2118602 - RNA, 19 nt, Artificial Sequence
  Description of Artificial Sequence: Synthetic oligonucleotide
uggaggccuuaaagggcug

SEQ ID NO: 2118603 - RNA, 19 nt, Artificial Sequence
  Description of Artificial Sequence: Synthetic oligonucleotide
uguguccgugcugccagga

SEQ ID NO: 2118604 - RNA, 19 nt, Artificial Sequence
  Description of Artificial Sequence: Synthetic oligonucleotide
gaguuguguccgugcugcc

SEQ ID NO: 2118605 - RNA, 19 nt, Artificial Sequence
  Description of Artificial Sequence: Synthetic oligonucleotide
cgaagaaagccaaaccuga

SEQ ID NO: 2118606 - RNA, 19 nt, Artificial Sequence
  Description of Artificial Sequence: Synthetic oligonucleotide
gugaaggguucagagugca

SEQ ID NO: 2118607 - RNA, 19 nt, Artificial Sequence
  Description of Artificial Sequence: Synthetic oligonucleotide
agagcugggcacguaccca

SEQ ID NO: 2118608 - RNA, 19 nt, Artificial Sequence
  Description of Artificial Sequence: Synthetic oligonucleotide
cugggcacguacccaccgc

SEQ ID NO: 2118609 - RNA, 19 nt, Artificial Sequence
  Description of Artificial Sequence: Synthetic oligonucleotide
cagaccacggcagaaggaa

SEQ ID NO: 2118610 - RNA, 19 nt, Artificial Sequence
  Description of Artificial Sequence: Synthetic oligonucleotide
accacggcagaaggaagca

SEQ ID NO: 2118611 - RNA, 19 nt, Artificial Sequence
  Description of Artificial Sequence: Synthetic oligonucleotide
agaccacggcagaaggaag

SEQ ID NO: 2118612 - RNA, 19 nt, Artificial Sequence
  Description of Artificial Sequence: Synthetic oligonucleotide
ggcacguacccaccgcuug

SEQ ID NO: 2118613 - RNA, 19 nt, Artificial Sequence
  Description of Artificial Sequence: Synthetic oligonucleotide
ggggagucaggugaaucag

SEQ ID NO: 2118614 - RNA, 19 nt, Artificial Sequence
  Description of Artificial Sequence: Synthetic oligonucleotide
guccgugcugccaggaaac

SEQ ID NO: 2118615 - RNA, 19 nt, Artificial Sequence
  Description of Artificial Sequence: Synthetic oligonucleotide
cugugccaaauagagcuga

SEQ ID NO: 2118616 - RNA, 19 nt, Artificial Sequence
  Description of Artificial Sequence: Synthetic oligonucleotide
ccaagagcugggcacguac

SEQ ID NO: 2118617 - RNA, 19 nt, Artificial Sequence
  Description of Artificial Sequence: Synthetic oligonucleotide
ugugccccuuuauguugga

SEQ ID NO: 2118618 - RNA, 19 nt, Artificial Sequence
  Description of Artificial Sequence: Synthetic oligonucleotide
cauagccuaggacaggcau

SEQ ID NO: 2118619 - RNA, 19 nt, Artificial Sequence
  Description of Artificial Sequence: Synthetic oligonucleotide
acggugccggggaaugugg

SEQ ID NO: 2118620 - RNA, 19 nt, Artificial Sequence
  Description of Artificial Sequence: Synthetic oligonucleotide
aggcaggugugucucucau

SEQ ID NO: 2118621 - RNA, 19 nt, Artificial Sequence
  Description of Artificial Sequence: Synthetic oligonucleotide
caagcuccccaccucgaga

SEQ ID NO: 2118622 - RNA, 19 nt, Artificial Sequence
  Description of Artificial Sequence: Synthetic oligonucleotide
aucagagaugaaggcccug

SEQ ID NO: 2118623 - RNA, 19 nt, Artificial Sequence
  Description of Artificial Sequence: Synthetic oligonucleotide
cacguacccaccgcuuggc

SEQ ID NO: 2118624 - RNA, 19 nt, Artificial Sequence
  Description of Artificial Sequence: Synthetic oligonucleotide
uggccaggcgagccacacc

SEQ ID NO: 2118625 - RNA, 19 nt, Artificial Sequence
  Description of Artificial Sequence: Synthetic oligonucleotide
gggaauguggcggggaguc

SEQ ID NO: 2118626 - RNA, 19 nt, Artificial Sequence
  Description of Artificial Sequence: Synthetic oligonucleotide
ggaggccuuaaagggcugg

SEQ ID NO: 2118627 - RNA, 19 nt, Artificial Sequence
  Description of Artificial Sequence: Synthetic oligonucleotide
cuacuccgaauuucuaccu

SEQ ID NO: 2118628 - RNA, 19 nt, Artificial Sequence
  Description of Artificial Sequence: Synthetic oligonucleotide
gggcuuccagaggacaccg

SEQ ID NO: 2118629 - RNA, 19 nt, Artificial Sequence
  Description of Artificial Sequence: Synthetic oligonucleotide
ccuuaaagggcuggggcug

SEQ ID NO: 2118630 - RNA, 19 nt, Artificial Sequence
  Description of Artificial Sequence: Synthetic oligonucleotide
uggaagcuggugggcuucc

SEQ ID NO: 2118631 - RNA, 19 nt, Artificial Sequence
  Description of Artificial Sequence: Synthetic oligonucleotide
caucacaagcuccccaccu

SEQ ID NO: 2118632 - RNA, 19 nt, Artificial Sequence
  Description of Artificial Sequence: Synthetic oligonucleotide
gucgaaggguggccggaac

SEQ ID NO: 2118633 - RNA, 19 nt, Artificial Sequence
  Description of Artificial Sequence: Synthetic oligonucleotide
ucggggcuccguaccuccc

SEQ ID NO: 2118634 - RNA, 19 nt, Artificial Sequence
  Description of Artificial Sequence: Synthetic oligonucleotide
gcuucuauguugggcacca

SEQ ID NO: 2118635 - RNA, 19 nt, Artificial Sequence
  Description of Artificial Sequence: Synthetic oligonucleotide
cuaccugguccucagcagu

SEQ ID NO: 2118636 - RNA, 19 nt, Artificial Sequence
  Description of Artificial Sequence: Synthetic oligonucleotide
ggugugucucucauagaga

SEQ ID NO: 2118637 - RNA, 19 nt, Artificial Sequence
  Description of Artificial Sequence: Synthetic oligonucleotide
gaucugggcagaaggucua

SEQ ID NO: 2118638 - RNA, 19 nt, Artificial Sequence
  Description of Artificial Sequence: Synthetic oligonucleotide
cugagcagaccacggcaga

SEQ ID NO: 2118639 - RNA, 19 nt, Artificial Sequence
  Description of Artificial Sequence: Synthetic oligonucleotide
cuuuauguuggaggccuua

SEQ ID NO: 2118640 - RNA, 19 nt, Artificial Sequence
  Description of Artificial Sequence: Synthetic oligonucleotide
gcuccguaccucccucagg

SEQ ID NO: 2118641 - RNA, 19 nt, Artificial Sequence
  Description of Artificial Sequence: Synthetic oligonucleotide
uccccucggggcuccguac

SEQ ID NO: 2118642 - RNA, 19 nt, Artificial Sequence
  Description of Artificial Sequence: Synthetic oligonucleotide
ggcuccguaccucccucag

SEQ ID NO: 2118643 - RNA, 19 nt, Artificial Sequence
  Description of Artificial Sequence: Synthetic oligonucleotide
cucgcccaagagcugggca

SEQ ID NO: 2118644 - RNA, 19 nt, Artificial Sequence
  Description of Artificial Sequence: Synthetic oligonucleotide
cagauugcaccaggccuuc

SEQ ID NO: 2118645 - RNA, 19 nt, Artificial Sequence
  Description of Artificial Sequence: Synthetic oligonucleotide
ucccugagcugugccaaau

SEQ ID NO: 2118646 - RNA, 19 nt, Artificial Sequence
  Description of Artificial Sequence: Synthetic oligonucleotide
uccgugcugccaggaaacu

SEQ ID NO: 2118647 - RNA, 19 nt, Artificial Sequence
  Description of Artificial Sequence: Synthetic oligonucleotide
uggcggggagucaggugaa

SEQ ID NO: 2118648 - RNA, 19 nt, Artificial Sequence
  Description of Artificial Sequence: Synthetic oligonucleotide
uccguaccucccucaggau

SEQ ID NO: 2118649 - RNA, 19 nt, Artificial Sequence
  Description of Artificial Sequence: Synthetic oligonucleotide
guacaucguacacgucgaa

SEQ ID NO: 2118650 - RNA, 19 nt, Artificial Sequence
  Description of Artificial Sequence: Synthetic oligonucleotide
cugccuggugucucucuca

SEQ ID NO: 2118651 - RNA, 19 nt, Artificial Sequence
  Description of Artificial Sequence: Synthetic oligonucleotide
cagugaaucccucgcccaa

SEQ ID NO: 2118652 - RNA, 19 nt, Artificial Sequence
  Description of Artificial Sequence: Synthetic oligonucleotide
ccaucacaagcuccccacc

SEQ ID NO: 2118653 - RNA, 19 nt, Artificial Sequence
  Description of Artificial Sequence: Synthetic oligonucleotide
cacaagcuccccaccucga

SEQ ID NO: 2118654 - RNA, 19 nt, Artificial Sequence
  Description of Artificial Sequence: Synthetic oligonucleotide
gugucucucucaaggcgca

SEQ ID NO: 2118655 - RNA, 19 nt, Artificial Sequence
  Description of Artificial Sequence: Synthetic oligonucleotide
cacuguccuaaugucccca

SEQ ID NO: 2118656 - RNA, 19 nt, Artificial Sequence
  Description of Artificial Sequence: Synthetic oligonucleotide
gccuuaaagggcuggggcu

SEQ ID NO: 2118657 - RNA, 19 nt, Artificial Sequence
  Description of Artificial Sequence: Synthetic oligonucleotide
ggcgcagggaggcaggugu

SEQ ID NO: 2118658 - RNA, 19 nt, Artificial Sequence
  Description of Artificial Sequence: Synthetic oligonucleotide
ggaggggugaaggguucag

SEQ ID NO: 2118659 - RNA, 19 nt, Artificial Sequence
  Description of Artificial Sequence: Synthetic oligonucleotide
caucagagaugaaggcccu

SEQ ID NO: 2118660 - RNA, 19 nt, Artificial Sequence
  Description of Artificial Sequence: Synthetic oligonucleotide
aguccaccucucgcuucgg

SEQ ID NO: 2118661 - RNA, 19 nt, Artificial Sequence
  Description of Artificial Sequence: Synthetic oligonucleotide
cuccgaauuucuaccuggu

SEQ ID NO: 2118662 - RNA, 19 nt, Artificial Sequence
  Description of Artificial Sequence: Synthetic oligonucleotide
cagaaggucuauccugcgu

SEQ ID NO: 2118663 - RNA, 19 nt, Artificial Sequence
  Description of Artificial Sequence: Synthetic oligonucleotide
ccguaccucccucaggauc

SEQ ID NO: 2118664 - RNA, 19 nt, Artificial Sequence
  Description of Artificial Sequence: Synthetic oligonucleotide
ugacggugccggggaaugu

SEQ ID NO: 2118665 - RNA, 19 nt, Artificial Sequence
  Description of Artificial Sequence: Synthetic oligonucleotide
uacccaccgcuuggccagg

SEQ ID NO: 2118666 - RNA, 19 nt, Artificial Sequence
  Description of Artificial Sequence: Synthetic oligonucleotide
gcuucgggccucuacagau

SEQ ID NO: 2118667 - RNA, 19 nt, Artificial Sequence
  Description of Artificial Sequence: Synthetic oligonucleotide
acgucgaaggguggccgga

SEQ ID NO: 2118668 - RNA, 19 nt, Artificial Sequence
  Description of Artificial Sequence: Synthetic oligonucleotide
gccaggaaacuacuccgaa

SEQ ID NO: 2118669 - RNA, 19 nt, Artificial Sequence
  Description of Artificial Sequence: Synthetic oligonucleotide
cguacacgucgaagggugg

SEQ ID NO: 2118670 - RNA, 19 nt, Artificial Sequence
  Description of Artificial Sequence: Synthetic oligonucleotide
ggucuauccugcguccaca

SEQ ID NO: 2118671 - RNA, 19 nt, Artificial Sequence
  Description of Artificial Sequence: Synthetic oligonucleotide
auccccucggggcuccgua

SEQ ID NO: 2118672 - RNA, 19 nt, Artificial Sequence
  Description of Artificial Sequence: Synthetic oligonucleotide
caggugugucucucauaga

SEQ ID NO: 2118673 - RNA, 19 nt, Artificial Sequence
  Description of Artificial Sequence: Synthetic oligonucleotide
acccaccgcuuggccaggc

SEQ ID NO: 2118674 - RNA, 19 nt, Artificial Sequence
  Description of Artificial Sequence: Synthetic oligonucleotide
gggcaccaucacaagcucc

SEQ ID NO: 2118675 - RNA, 19 nt, Artificial Sequence
  Description of Artificial Sequence: Synthetic oligonucleotide
aggguggccggaacacugu

SEQ ID NO: 2118676 - RNA, 19 nt, Artificial Sequence
  Description of Artificial Sequence: Synthetic oligonucleotide
accucucgcuucgggccuc

SEQ ID NO: 2118677 - RNA, 19 nt, Artificial Sequence
  Description of Artificial Sequence: Synthetic oligonucleotide
ggccggaacacuguccuaa

SEQ ID NO: 2118678 - RNA, 19 nt, Artificial Sequence
  Description of Artificial Sequence: Synthetic oligonucleotide
gcuuccagaggacaccgau

SEQ ID NO: 2118679 - RNA, 19 nt, Artificial Sequence
  Description of Artificial Sequence: Synthetic oligonucleotide
aucugggcagaaggucuau

SEQ ID NO: 2118680 - RNA, 19 nt, Artificial Sequence
  Description of Artificial Sequence: Synthetic oligonucleotide
agauugcaccaggccuuca

SEQ ID NO: 2118681 - RNA, 19 nt, Artificial Sequence
  Description of Artificial Sequence: Synthetic oligonucleotide
ccggaacacuguccuaaug

SEQ ID NO: 2118682 - RNA, 19 nt, Artificial Sequence
  Description of Artificial Sequence: Synthetic oligonucleotide
ggaaccgaagaaagccaaa

SEQ ID NO: 2118683 - RNA, 19 nt, Artificial Sequence
  Description of Artificial Sequence: Synthetic oligonucleotide
cuuggccaggcgagccaca

SEQ ID NO: 2118684 - RNA, 19 nt, Artificial Sequence
  Description of Artificial Sequence: Synthetic oligonucleotide
cggaacacuguccuaaugu

SEQ ID NO: 2118685 - RNA, 19 nt, Artificial Sequence
  Description of Artificial Sequence: Synthetic oligonucleotide
guaccucccucaggaucug

SEQ ID NO: 2118686 - RNA, 19 nt, Artificial Sequence
  Description of Artificial Sequence: Synthetic oligonucleotide
ucauccccucggggcuccg

SEQ ID NO: 2118687 - RNA, 19 nt, Artificial Sequence
  Description of Artificial Sequence: Synthetic oligonucleotide
guguccgugcugccaggaa

SEQ ID NO: 2118688 - RNA, 19 nt, Artificial Sequence
  Description of Artificial Sequence: Synthetic oligonucleotide
cggggagucaggugaauca

SEQ ID NO: 2118689 - RNA, 19 nt, Artificial Sequence
  Description of Artificial Sequence: Synthetic oligonucleotide
ggcaacugccuggugucuc

SEQ ID NO: 2118690 - RNA, 19 nt, Artificial Sequence
  Description of Artificial Sequence: Synthetic oligonucleotide
caccagauccaggcucuca

SEQ ID NO: 2118691 - RNA, 19 nt, Artificial Sequence
  Description of Artificial Sequence: Synthetic oligonucleotide
agccuaggacaggcaucag

SEQ ID NO: 2118692 - RNA, 19 nt, Artificial Sequence
  Description of Artificial Sequence: Synthetic oligonucleotide
cuggggaggggugaagggu

SEQ ID NO: 2118693 - RNA, 19 nt, Artificial Sequence
  Description of Artificial Sequence: Synthetic oligonucleotide
cguaccucccucaggaucu

SEQ ID NO: 2118694 - RNA, 19 nt, Artificial Sequence
  Description of Artificial Sequence: Synthetic oligonucleotide
ccccuuuauguuggaggcc

SEQ ID NO: 2118695 - RNA, 19 nt, Artificial Sequence
  Description of Artificial Sequence: Synthetic oligonucleotide
gcuuggccaggcgagccac

SEQ ID NO: 2118696 - RNA, 19 nt, Artificial Sequence
  Description of Artificial Sequence: Synthetic oligonucleotide
ggacaccgaucaccucccc

SEQ ID NO: 2118697 - RNA, 19 nt, Artificial Sequence
  Description of Artificial Sequence: Synthetic oligonucleotide
gccucccugagcugugcca

SEQ ID NO: 2118698 - RNA, 19 nt, Artificial Sequence
  Description of Artificial Sequence: Synthetic oligonucleotide
cccuuuauguuggaggccu

SEQ ID NO: 2118699 - RNA, 19 nt, Artificial Sequence
  Description of Artificial Sequence: Synthetic oligonucleotide
gcagaccacggcagaagga

SEQ ID NO: 2118700 - RNA, 19 nt, Artificial Sequence
  Description of Artificial Sequence: Synthetic oligonucleotide
gcaacugccuggugucucu

SEQ ID NO: 2118701 - RNA, 19 nt, Artificial Sequence
  Description of Artificial Sequence: Synthetic oligonucleotide
ccacggcagaaggaagcag

SEQ ID NO: 2118702 - RNA, 19 nt, Artificial Sequence
  Description of Artificial Sequence: Synthetic oligonucleotide
cccucgcccaagagcuggg

SEQ ID NO: 2118703 - RNA, 19 nt, Artificial Sequence
  Description of Artificial Sequence: Synthetic oligonucleotide
gcagggaggcagguguguc

SEQ ID NO: 2118704 - RNA, 19 nt, Artificial Sequence
  Description of Artificial Sequence: Synthetic oligonucleotide
ggcaggugugucucucaua

SEQ ID NO: 2118705 - RNA, 19 nt, Artificial Sequence
  Description of Artificial Sequence: Synthetic oligonucleotide
cucaaggcgcagggaggca

SEQ ID NO: 2118706 - RNA, 19 nt, Artificial Sequence
  Description of Artificial Sequence: Synthetic oligonucleotide
gcggggagucaggugaauc

SEQ ID NO: 2118707 - RNA, 19 nt, Artificial Sequence
  Description of Artificial Sequence: Synthetic oligonucleotide
ccccucggggcuccguacc

SEQ ID NO: 2118708 - RNA, 19 nt, Artificial Sequence
  Description of Artificial Sequence: Synthetic oligonucleotide
cacuggugagcaggggcaa

SEQ ID NO: 2118709 - RNA, 19 nt, Artificial Sequence
  Description of Artificial Sequence: Synthetic oligonucleotide
cucccugagcugugccaaa

SEQ ID NO: 2118710 - RNA, 19 nt, Artificial Sequence
  Description of Artificial Sequence: Synthetic oligonucleotide
ggaauguggcggggaguca

SEQ ID NO: 2118711 - RNA, 19 nt, Artificial Sequence
  Description of Artificial Sequence: Synthetic oligonucleotide
cacaguccaccucucgcuu

SEQ ID NO: 2118712 - RNA, 19 nt, Artificial Sequence
  Description of Artificial Sequence: Synthetic oligonucleotide
ccaggaaacuacuccgaau

SEQ ID NO: 2118713 - RNA, 19 nt, Artificial Sequence
  Description of Artificial Sequence: Synthetic oligonucleotide
cccaccgcuuggccaggcg

SEQ ID NO: 2118714 - RNA, 19 nt, Artificial Sequence
  Description of Artificial Sequence: Synthetic oligonucleotide
ccaccgcuuggccaggcga

SEQ ID NO: 2118715 - RNA, 19 nt, Artificial Sequence
  Description of Artificial Sequence: Synthetic oligonucleotide
cuucgggccucuacagauu

SEQ ID NO: 2118716 - RNA, 19 nt, Artificial Sequence
  Description of Artificial Sequence: Synthetic oligonucleotide
cggcagaaggaagcagccg

SEQ ID NO: 2118717 - RNA, 19 nt, Artificial Sequence
  Description of Artificial Sequence: Synthetic oligonucleotide
gguugacaaugagaggguu

SEQ ID NO: 2118718 - RNA, 19 nt, Artificial Sequence
  Description of Artificial Sequence: Synthetic oligonucleotide
caccucucgcuucgggccu

SEQ ID NO: 2118719 - RNA, 19 nt, Artificial Sequence
  Description of Artificial Sequence: Synthetic oligonucleotide
gggcuccguaccucccuca

SEQ ID NO: 2118720 - RNA, 19 nt, Artificial Sequence
  Description of Artificial Sequence: Synthetic oligonucleotide
ccgcuuggccaggcgagcc

SEQ ID NO: 2118721 - RNA, 19 nt, Artificial Sequence
  Description of Artificial Sequence: Synthetic oligonucleotide
cccggggauccaucagcug

SEQ ID NO: 2118722 - RNA, 19 nt, Artificial Sequence
  Description of Artificial Sequence: Synthetic oligonucleotide
caccucgagacaccaccau

SEQ ID NO: 2118723 - RNA, 19 nt, Artificial Sequence
  Description of Artificial Sequence: Synthetic oligonucleotide
gccaccagauccaggcucu

SEQ ID NO: 2118724 - RNA, 19 nt, Artificial Sequence
  Description of Artificial Sequence: Synthetic oligonucleotide
ggaagcuggugggcuucca

SEQ ID NO: 2118725 - RNA, 19 nt, Artificial Sequence
  Description of Artificial Sequence: Synthetic oligonucleotide
cgggccucuacagauugca

SEQ ID NO: 2118726 - RNA, 19 nt, Artificial Sequence
  Description of Artificial Sequence: Synthetic oligonucleotide
ccuccaagauugcuucuau

SEQ ID NO: 2118727 - RNA, 19 nt, Artificial Sequence
  Description of Artificial Sequence: Synthetic oligonucleotide
ccaugacugggaguugugu

SEQ ID NO: 2118728 - RNA, 19 nt, Artificial Sequence
  Description of Artificial Sequence: Synthetic oligonucleotide
ggggaauguggcggggagu

SEQ ID NO: 2118729 - RNA, 19 nt, Artificial Sequence
  Description of Artificial Sequence: Synthetic oligonucleotide
ccccggggauccaucagcu

SEQ ID NO: 2118730 - RNA, 19 nt, Artificial Sequence
  Description of Artificial Sequence: Synthetic oligonucleotide
cgcuucgggccucuacaga

SEQ ID NO: 2118731 - RNA, 19 nt, Artificial Sequence
  Description of Artificial Sequence: Synthetic oligonucleotide
cggggauccaucagcugcu

SEQ ID NO: 2118732 - RNA, 19 nt, Artificial Sequence
  Description of Artificial Sequence: Synthetic oligonucleotide
cuucuauguugggcaccau

SEQ ID NO: 2118733 - RNA, 19 nt, Artificial Sequence
  Description of Artificial Sequence: Synthetic oligonucleotide
ccggggaauguggcgggga

SEQ ID NO: 2118734 - RNA, 19 nt, Artificial Sequence
  Description of Artificial Sequence: Synthetic oligonucleotide
ccaccaugugccccuuuau

SEQ ID NO: 2118735 - RNA, 19 nt, Artificial Sequence
  Description of Artificial Sequence: Synthetic oligonucleotide
ccgugcugccaggaaacua

SEQ ID NO: 2118736 - RNA, 19 nt, Artificial Sequence
  Description of Artificial Sequence: Synthetic oligonucleotide
ccgaucaccuccccaccau

SEQ ID NO: 2118737 - RNA, 19 nt, Artificial Sequence
  Description of Artificial Sequence: Synthetic oligonucleotide
ccuuuauguuggaggccuu

SEQ ID NO: 2118738 - RNA, 19 nt, Artificial Sequence
  Description of Artificial Sequence: Synthetic oligonucleotide
cauccccucggggcuccgu

SEQ ID NO: 2118739 - RNA, 19 nt, Artificial Sequence
  Description of Artificial Sequence: Synthetic oligonucleotide
gggcacguacccaccgcuu

SEQ ID NO: 2118740 - RNA, 19 nt, Artificial Sequence
  Description of Artificial Sequence: Synthetic oligonucleotide
cucucgcuucgggccucua

SEQ ID NO: 2118741 - RNA, 19 nt, Artificial Sequence
  Description of Artificial Sequence: Synthetic oligonucleotide
cgucgaaggguggccggaa

SEQ ID NO: 2118742 - RNA, 19 nt, Artificial Sequence
  Description of Artificial Sequence: Synthetic oligonucleotide
caccaccaugugccccuuu

SEQ ID NO: 2118743 - RNA, 19 nt, Artificial Sequence
  Description of Artificial Sequence: Synthetic oligonucleotide
ggcggggagucaggugaau

SEQ ID NO: 2118744 - RNA, 19 nt, Artificial Sequence
  Description of Artificial Sequence: Synthetic oligonucleotide
cggggcuccguaccucccu

SEQ ID NO: 2118745 - RNA, 19 nt, Artificial Sequence
  Description of Artificial Sequence: Synthetic oligonucleotide
ccucucgcuucgggccucu

SEQ ID NO: 2118746 - RNA, 19 nt, Artificial Sequence
  Description of Artificial Sequence: Synthetic oligonucleotide
ccccaccaugcuggucaua

SEQ ID NO: 2118747 - RNA, 19 nt, Artificial Sequence
  Description of Artificial Sequence: Synthetic oligonucleotide
aauuuuaaaacauagguag

SEQ ID NO: 2118748 - RNA, 19 nt, Artificial Sequence
  Description of Artificial Sequence: Synthetic oligonucleotide
aaagauauuauuuugguca

SEQ ID NO: 2118749 - RNA, 19 nt, Artificial Sequence
  Description of Artificial Sequence: Synthetic oligonucleotide
auaagaagagacuaaacac

SEQ ID NO: 2118750 - RNA, 19 nt, Artificial Sequence
  Description of Artificial Sequence: Synthetic oligonucleotide
uauuaauuuuaaaacauag

SEQ ID NO: 2118751 - RNA, 19 nt, Artificial Sequence
  Description of Artificial Sequence: Synthetic oligonucleotide
uucaauagcggccagagag

SEQ ID NO: 2118752 - RNA, 19 nt, Artificial Sequence
  Description of Artificial Sequence: Synthetic oligonucleotide
uauaagaagagacuaaaca

SEQ ID NO: 2118753 - RNA, 19 nt, Artificial Sequence
  Description of Artificial Sequence: Synthetic oligonucleotide
ucuucaaauaucaaggggc

SEQ ID NO: 2118754 - RNA, 19 nt, Artificial Sequence
  Description of Artificial Sequence: Synthetic oligonucleotide
aauaucaaggggcacucgc

SEQ ID NO: 2118755 - RNA, 19 nt, Artificial Sequence
  Description of Artificial Sequence: Synthetic oligonucleotide
uauuauuuuggucaguacc

SEQ ID NO: 2118756 - RNA, 19 nt, Artificial Sequence
  Description of Artificial Sequence: Synthetic oligonucleotide
auuauaguuuaguucaggc

SEQ ID NO: 2118757 - RNA, 19 nt, Artificial Sequence
  Description of Artificial Sequence: Synthetic oligonucleotide
aaaagauauuauuuugguc

SEQ ID NO: 2118758 - RNA, 19 nt, Artificial Sequence
  Description of Artificial Sequence: Synthetic oligonucleotide
augauuauaguuuaguuca

SEQ ID NO: 2118759 - RNA, 19 nt, Artificial Sequence
  Description of Artificial Sequence: Synthetic oligonucleotide
agcauguucacauaaauug

SEQ ID NO: 2118760 - RNA, 19 nt, Artificial Sequence
  Description of Artificial Sequence: Synthetic oligonucleotide
uuuucguuuaguuagacaa

SEQ ID NO: 2118761 - RNA, 19 nt, Artificial Sequence
  Description of Artificial Sequence: Synthetic oligonucleotide
gaauucgagauucugaaag

SEQ ID NO: 2118762 - RNA, 19 nt, Artificial Sequence
  Description of Artificial Sequence: Synthetic oligonucleotide
uuuaguuccacaccaaagc

SEQ ID NO: 2118763 - RNA, 19 nt, Artificial Sequence
  Description of Artificial Sequence: Synthetic oligonucleotide
uaagaagagacuaaacacc

SEQ ID NO: 2118764 - RNA, 19 nt, Artificial Sequence
  Description of Artificial Sequence: Synthetic oligonucleotide
uuaauuucacauuagcaug

SEQ ID NO: 2118765 - RNA, 19 nt, Artificial Sequence
  Description of Artificial Sequence: Synthetic oligonucleotide
ucuuucuuagaaaacguag

SEQ ID NO: 2118766 - RNA, 19 nt, Artificial Sequence
  Description of Artificial Sequence: Synthetic oligonucleotide
ucuugagugaucaauguug

SEQ ID NO: 2118767 - RNA, 19 nt, Artificial Sequence
  Description of Artificial Sequence: Synthetic oligonucleotide
cauucuuauaagaagagac

SEQ ID NO: 2118768 - RNA, 19 nt, Artificial Sequence
  Description of Artificial Sequence: Synthetic oligonucleotide
aagaagagacuaaacaccc

SEQ ID NO: 2118769 - RNA, 19 nt, Artificial Sequence
  Description of Artificial Sequence: Synthetic oligonucleotide
uuucacauuagcauguuca

SEQ ID NO: 2118770 - RNA, 19 nt, Artificial Sequence
  Description of Artificial Sequence: Synthetic oligonucleotide
ucuuuauuagccuagaguu

SEQ ID NO: 2118771 - RNA, 19 nt, Artificial Sequence
  Description of Artificial Sequence: Synthetic oligonucleotide
aaauaugaucuucaaauau

SEQ ID NO: 2118772 - RNA, 19 nt, Artificial Sequence
  Description of Artificial Sequence: Synthetic oligonucleotide
aagcaugcaguucaauagc

SEQ ID NO: 2118773 - RNA, 19 nt, Artificial Sequence
  Description of Artificial Sequence: Synthetic oligonucleotide
uugaauaaucauuaguucu

SEQ ID NO: 2118774 - RNA, 19 nt, Artificial Sequence
  Description of Artificial Sequence: Synthetic oligonucleotide
auaaucauuaguucuuuag

SEQ ID NO: 2118775 - RNA, 19 nt, Artificial Sequence
  Description of Artificial Sequence: Synthetic oligonucleotide
gaugauuauaguuuaguuc

SEQ ID NO: 2118776 - RNA, 19 nt, Artificial Sequence
  Description of Artificial Sequence: Synthetic oligonucleotide
ucugaaagagauuuguucu

SEQ ID NO: 2118777 - RNA, 19 nt, Artificial Sequence
  Description of Artificial Sequence: Synthetic oligonucleotide
uuuaguuagacaauauuua

SEQ ID NO: 2118778 - RNA, 19 nt, Artificial Sequence
  Description of Artificial Sequence: Synthetic oligonucleotide
uuuaguucaggcaaucgca

SEQ ID NO: 2118779 - RNA, 19 nt, Artificial Sequence
  Description of Artificial Sequence: Synthetic oligonucleotide
ugauuuugaauaaucauua

SEQ ID NO: 2118780 - RNA, 19 nt, Artificial Sequence
  Description of Artificial Sequence: Synthetic oligonucleotide
agcauugguauccuguacc

SEQ ID NO: 2118781 - RNA, 19 nt, Artificial Sequence
  Description of Artificial Sequence: Synthetic oligonucleotide
cuuucuuagaaaacguagg

SEQ ID NO: 2118782 - RNA, 19 nt, Artificial Sequence
  Description of Artificial Sequence: Synthetic oligonucleotide
ucauuaguucuuuaguucc

SEQ ID NO: 2118783 - RNA, 19 nt, Artificial Sequence
  Description of Artificial Sequence: Synthetic oligonucleotide
aagauauuauuuuggucag

SEQ ID NO: 2118784 - RNA, 19 nt, Artificial Sequence
  Description of Artificial Sequence: Synthetic oligonucleotide
gaaauagucaaacugcaga

SEQ ID NO: 2118785 - RNA, 19 nt, Artificial Sequence
  Description of Artificial Sequence: Synthetic oligonucleotide
uaauuuuaaaacauaggua

SEQ ID NO: 2118786 - RNA, 19 nt, Artificial Sequence
  Description of Artificial Sequence: Synthetic oligonucleotide
acaggggugacccugcucc

SEQ ID NO: 2118787 - RNA, 19 nt, Artificial Sequence
  Description of Artificial Sequence: Synthetic oligonucleotide
aguuagacaauauuuauua

SEQ ID NO: 2118788 - RNA, 19 nt, Artificial Sequence
  Description of Artificial Sequence: Synthetic oligonucleotide
uaaaacauagguaggcaca

SEQ ID NO: 2118789 - RNA, 19 nt, Artificial Sequence
  Description of Artificial Sequence: Synthetic oligonucleotide
uccuguucagguuaagugg

SEQ ID NO: 2118790 - RNA, 19 nt, Artificial Sequence
  Description of Artificial Sequence: Synthetic oligonucleotide
gaucuucaaauaucaaggg

SEQ ID NO: 2118791 - RNA, 19 nt, Artificial Sequence
  Description of Artificial Sequence: Synthetic oligonucleotide
cucaaucuuccuuugacgg

SEQ ID NO: 2118792 - RNA, 19 nt, Artificial Sequence
  Description of Artificial Sequence: Synthetic oligonucleotide
aaucauuaguucuuuaguu

SEQ ID NO: 2118793 - RNA, 19 nt, Artificial Sequence
  Description of Artificial Sequence: Synthetic oligonucleotide
aaagauugugugugagugg

SEQ ID NO: 2118794 - RNA, 19 nt, Artificial Sequence
  Description of Artificial Sequence: Synthetic oligonucleotide
auagucaaacugcagaucu

SEQ ID NO: 2118795 - RNA, 19 nt, Artificial Sequence
  Description of Artificial Sequence: Synthetic oligonucleotide
agcuauuccuucuagagcu

SEQ ID NO: 2118796 - RNA, 19 nt, Artificial Sequence
  Description of Artificial Sequence: Synthetic oligonucleotide
uuagccuagaguuucgagc

SEQ ID NO: 2118797 - RNA, 19 nt, Artificial Sequence
  Description of Artificial Sequence: Synthetic oligonucleotide
uugcauucuuauaagaaga

SEQ ID NO: 2118798 - RNA, 19 nt, Artificial Sequence
  Description of Artificial Sequence: Synthetic oligonucleotide
agacuaaacacccacaaau

SEQ ID NO: 2118799 - RNA, 19 nt, Artificial Sequence
  Description of Artificial Sequence: Synthetic oligonucleotide
uaaucauuaguucuuuagu

SEQ ID NO: 2118800 - RNA, 19 nt, Artificial Sequence
  Description of Artificial Sequence: Synthetic oligonucleotide
gaaagauugugugugagug

SEQ ID NO: 2118801 - RNA, 19 nt, Artificial Sequence
  Description of Artificial Sequence: Synthetic oligonucleotide
aucuucaaauaucaagggg

SEQ ID NO: 2118802 - RNA, 19 nt, Artificial Sequence
  Description of Artificial Sequence: Synthetic oligonucleotide
aguacuuaauuucacauua

SEQ ID NO: 2118803 - RNA, 19 nt, Artificial Sequence
  Description of Artificial Sequence: Synthetic oligonucleotide
uugagaaggaaauagucaa

SEQ ID NO: 2118804 - RNA, 19 nt, Artificial Sequence
  Description of Artificial Sequence: Synthetic oligonucleotide
uuucuuagaaaacguaggu

SEQ ID NO: 2118805 - RNA, 19 nt, Artificial Sequence
  Description of Artificial Sequence: Synthetic oligonucleotide
uuugaauaaucauuaguuc

SEQ ID NO: 2118806 - RNA, 19 nt, Artificial Sequence
  Description of Artificial Sequence: Synthetic oligonucleotide
uuaaaacauagguaggcac

SEQ ID NO: 2118807 - RNA, 19 nt, Artificial Sequence
  Description of Artificial Sequence: Synthetic oligonucleotide
aaauugcauucuuauaaga

SEQ ID NO: 2118808 - RNA, 19 nt, Artificial Sequence
  Description of Artificial Sequence: Synthetic oligonucleotide
aaaauaugaucuucaaaua

SEQ ID NO: 2118809 - RNA, 19 nt, Artificial Sequence
  Description of Artificial Sequence: Synthetic oligonucleotide
ugcaauacuggaagcaugc

SEQ ID NO: 2118810 - RNA, 19 nt, Artificial Sequence
  Description of Artificial Sequence: Synthetic oligonucleotide
uuaagugggucucagugcu

SEQ ID NO: 2118811 - RNA, 19 nt, Artificial Sequence
  Description of Artificial Sequence: Synthetic oligonucleotide
agaguuucgagcuauuccu

SEQ ID NO: 2118812 - RNA, 19 nt, Artificial Sequence
  Description of Artificial Sequence: Synthetic oligonucleotide
ucgagauucugaaagagau

SEQ ID NO: 2118813 - RNA, 19 nt, Artificial Sequence
  Description of Artificial Sequence: Synthetic oligonucleotide
aaagcucuaauaaaauaug

SEQ ID NO: 2118814 - RNA, 19 nt, Artificial Sequence
  Description of Artificial Sequence: Synthetic oligonucleotide
aaacguagguaguugagaa

SEQ ID NO: 2118815 - RNA, 19 nt, Artificial Sequence
  Description of Artificial Sequence: Synthetic oligonucleotide
aaaacauagguaggcacag

SEQ ID NO: 2118816 - RNA, 19 nt, Artificial Sequence
  Description of Artificial Sequence: Synthetic oligonucleotide
ugagugaucaauguugaca

SEQ ID NO: 2118817 - RNA, 19 nt, Artificial Sequence
  Description of Artificial Sequence: Synthetic oligonucleotide
aauucgagauucugaaaga

SEQ ID NO: 2118818 - RNA, 19 nt, Artificial Sequence
  Description of Artificial Sequence: Synthetic oligonucleotide
guucacauaaauugcauuc

SEQ ID NO: 2118819 - RNA, 19 nt, Artificial Sequence
  Description of Artificial Sequence: Synthetic oligonucleotide
uccuuuuauuuuaagcuac

SEQ ID NO: 2118820 - RNA, 19 nt, Artificial Sequence
  Description of Artificial Sequence: Synthetic oligonucleotide
uuauaagaagagacuaaac

SEQ ID NO: 2118821 - RNA, 19 nt, Artificial Sequence
  Description of Artificial Sequence: Synthetic oligonucleotide
gaagagacuaaacacccac

SEQ ID NO: 2118822 - RNA, 19 nt, Artificial Sequence
  Description of Artificial Sequence: Synthetic oligonucleotide
aauagucaaacugcagauc

SEQ ID NO: 2118823 - RNA, 19 nt, Artificial Sequence
  Description of Artificial Sequence: Synthetic oligonucleotide
uuaguuagacaauauuuau

SEQ ID NO: 2118824 - RNA, 19 nt, Artificial Sequence
  Description of Artificial Sequence: Synthetic oligonucleotide
ucaauagcggccagagagg

SEQ ID NO: 2118825 - RNA, 19 nt, Artificial Sequence
  Description of Artificial Sequence: Synthetic oligonucleotide
uuuauuagccuagaguuuc

SEQ ID NO: 2118826 - RNA, 19 nt, Artificial Sequence
  Description of Artificial Sequence: Synthetic oligonucleotide
cucuaauaaaauaugaucu

SEQ ID NO: 2118827 - RNA, 19 nt, Artificial Sequence
  Description of Artificial Sequence: Synthetic oligonucleotide
ucuaauaaaauaugaucuu

SEQ ID NO: 2118828 - RNA, 19 nt, Artificial Sequence
  Description of Artificial Sequence: Synthetic oligonucleotide
uuaguuccacaccaaagcu

SEQ ID NO: 2118829 - RNA, 19 nt, Artificial Sequence
  Description of Artificial Sequence: Synthetic oligonucleotide
guuuaguucaggcaaucgc

SEQ ID NO: 2118830 - RNA, 19 nt, Artificial Sequence
  Description of Artificial Sequence: Synthetic oligonucleotide
cuuuaguuccacaccaaag

SEQ ID NO: 2118831 - RNA, 19 nt, Artificial Sequence
  Description of Artificial Sequence: Synthetic oligonucleotide
ucuuauaagaagagacuaa

SEQ ID NO: 2118832 - RNA, 19 nt, Artificial Sequence
  Description of Artificial Sequence: Synthetic oligonucleotide
caugcaguucaauagcggc

SEQ ID NO: 2118833 - RNA, 19 nt, Artificial Sequence
  Description of Artificial Sequence: Synthetic oligonucleotide
aguugagaaggaaauaguc

SEQ ID NO: 2118834 - RNA, 19 nt, Artificial Sequence
  Description of Artificial Sequence: Synthetic oligonucleotide
acacucagaaucaucagac

SEQ ID NO: 2118835 - RNA, 19 nt, Artificial Sequence
  Description of Artificial Sequence: Synthetic oligonucleotide
ugugaguggaggaaucgcc

SEQ ID NO: 2118836 - RNA, 19 nt, Artificial Sequence
  Description of Artificial Sequence: Synthetic oligonucleotide
aggcaaaucacacucagaa

SEQ ID NO: 2118837 - RNA, 19 nt, Artificial Sequence
  Description of Artificial Sequence: Synthetic oligonucleotide
auugguauccuguaccaca

SEQ ID NO: 2118838 - RNA, 19 nt, Artificial Sequence
  Description of Artificial Sequence: Synthetic oligonucleotide
aagccuuugauguggcuug

SEQ ID NO: 2118839 - RNA, 19 nt, Artificial Sequence
  Description of Artificial Sequence: Synthetic oligonucleotide
ucaaauaucaaggggcacu

SEQ ID NO: 2118840 - RNA, 19 nt, Artificial Sequence
  Description of Artificial Sequence: Synthetic oligonucleotide
aauugcauucuuauaagaa

SEQ ID NO: 2118841 - RNA, 19 nt, Artificial Sequence
  Description of Artificial Sequence: Synthetic oligonucleotide
uuaagcuacuuuagaauuc

SEQ ID NO: 2118842 - RNA, 19 nt, Artificial Sequence
  Description of Artificial Sequence: Synthetic oligonucleotide
acugcggaaagauugugug

SEQ ID NO: 2118843 - RNA, 19 nt, Artificial Sequence
  Description of Artificial Sequence: Synthetic oligonucleotide
aagauugugugugagugga

SEQ ID NO: 2118844 - RNA, 19 nt, Artificial Sequence
  Description of Artificial Sequence: Synthetic oligonucleotide
caggcaaucgcacaucugc

SEQ ID NO: 2118845 - RNA, 19 nt, Artificial Sequence
  Description of Artificial Sequence: Synthetic oligonucleotide
uucuuucuucaccuaaggc

SEQ ID NO: 2118846 - RNA, 19 nt, Artificial Sequence
  Description of Artificial Sequence: Synthetic oligonucleotide
aguggaggaaucgccaugc

SEQ ID NO: 2118847 - RNA, 19 nt, Artificial Sequence
  Description of Artificial Sequence: Synthetic oligonucleotide
uuauuagccuagaguuucg

SEQ ID NO: 2118848 - RNA, 19 nt, Artificial Sequence
  Description of Artificial Sequence: Synthetic oligonucleotide
auccuguucagguuaagug

SEQ ID NO: 2118849 - RNA, 19 nt, Artificial Sequence
  Description of Artificial Sequence: Synthetic oligonucleotide
gaggacaucgucucagugc

SEQ ID NO: 2118850 - RNA, 19 nt, Artificial Sequence
  Description of Artificial Sequence: Synthetic oligonucleotide
cuuaauuucacauuagcau

SEQ ID NO: 2118851 - RNA, 19 nt, Artificial Sequence
  Description of Artificial Sequence: Synthetic oligonucleotide
uauccuguaccacaagcgu

SEQ ID NO: 2118852 - RNA, 19 nt, Artificial Sequence
  Description of Artificial Sequence: Synthetic oligonucleotide
gcaaaucacacucagaauc

SEQ ID NO: 2118853 - RNA, 19 nt, Artificial Sequence
  Description of Artificial Sequence: Synthetic oligonucleotide
uucuuauaagaagagacua

SEQ ID NO: 2118854 - RNA, 19 nt, Artificial Sequence
  Description of Artificial Sequence: Synthetic oligonucleotide
ugauuauaguuuaguucag

SEQ ID NO: 2118855 - RNA, 19 nt, Artificial Sequence
  Description of Artificial Sequence: Synthetic oligonucleotide
agaaaacguagguaguuga

SEQ ID NO: 2118856 - RNA, 19 nt, Artificial Sequence
  Description of Artificial Sequence: Synthetic oligonucleotide
ugcucugguugcaagagga

SEQ ID NO: 2118857 - RNA, 19 nt, Artificial Sequence
  Description of Artificial Sequence: Synthetic oligonucleotide
aaguacuuaauuucacauu

SEQ ID NO: 2118858 - RNA, 19 nt, Artificial Sequence
  Description of Artificial Sequence: Synthetic oligonucleotide
uccuucuuuauuagccuag

SEQ ID NO: 2118859 - RNA, 19 nt, Artificial Sequence
  Description of Artificial Sequence: Synthetic oligonucleotide
uagccuagaguuucgagcu

SEQ ID NO: 2118860 - RNA, 19 nt, Artificial Sequence
  Description of Artificial Sequence: Synthetic oligonucleotide
gcuacuuuagaauuccuug

SEQ ID NO: 2118861 - RNA, 19 nt, Artificial Sequence
  Description of Artificial Sequence: Synthetic oligonucleotide
cuaaacacccacaaauuga

SEQ ID NO: 2118862 - RNA, 19 nt, Artificial Sequence
  Description of Artificial Sequence: Synthetic oligonucleotide
caaaaguacuuaauuucac

SEQ ID NO: 2118863 - RNA, 19 nt, Artificial Sequence
  Description of Artificial Sequence: Synthetic oligonucleotide
uucgagauucugaaagaga

SEQ ID NO: 2118864 - RNA, 19 nt, Artificial Sequence
  Description of Artificial Sequence: Synthetic oligonucleotide
ugcggaaagauugugugug

SEQ ID NO: 2118865 - RNA, 19 nt, Artificial Sequence
  Description of Artificial Sequence: Synthetic oligonucleotide
gagcucucaguucagggag

SEQ ID NO: 2118866 - RNA, 19 nt, Artificial Sequence
  Description of Artificial Sequence: Synthetic oligonucleotide
aguuucgagcuauuccuuc

SEQ ID NO: 2118867 - RNA, 19 nt, Artificial Sequence
  Description of Artificial Sequence: Synthetic oligonucleotide
uuaguucaggcaaucgcac

SEQ ID NO: 2118868 - RNA, 19 nt, Artificial Sequence
  Description of Artificial Sequence: Synthetic oligonucleotide
agcaacugcggaaagauug

SEQ ID NO: 2118869 - RNA, 19 nt, Artificial Sequence
  Description of Artificial Sequence: Synthetic oligonucleotide
uuguaaugcaauacuggaa

SEQ ID NO: 2118870 - RNA, 19 nt, Artificial Sequence
  Description of Artificial Sequence: Synthetic oligonucleotide
agagauuuguucuccuucu

SEQ ID NO: 2118871 - RNA, 19 nt, Artificial Sequence
  Description of Artificial Sequence: Synthetic oligonucleotide
uccuguaccacaagcgucu

SEQ ID NO: 2118872 - RNA, 19 nt, Artificial Sequence
  Description of Artificial Sequence: Synthetic oligonucleotide
uaguugagaaggaaauagu

SEQ ID NO: 2118873 - RNA, 19 nt, Artificial Sequence
  Description of Artificial Sequence: Synthetic oligonucleotide
aaugcaauacuggaagcau

SEQ ID NO: 2118874 - RNA, 19 nt, Artificial Sequence
  Description of Artificial Sequence: Synthetic oligonucleotide
uugacauugcugcagucuc

SEQ ID NO: 2118875 - RNA, 19 nt, Artificial Sequence
  Description of Artificial Sequence: Synthetic oligonucleotide
guauccuguaccacaagcg

SEQ ID NO: 2118876 - RNA, 19 nt, Artificial Sequence
  Description of Artificial Sequence: Synthetic oligonucleotide
cuguuguaaugcaauacug

SEQ ID NO: 2118877 - RNA, 19 nt, Artificial Sequence
  Description of Artificial Sequence: Synthetic oligonucleotide
gcucuaauaaaauaugauc

SEQ ID NO: 2118878 - RNA, 19 nt, Artificial Sequence
  Description of Artificial Sequence: Synthetic oligonucleotide
ucugguugcaagaggacau

SEQ ID NO: 2118879 - RNA, 19 nt, Artificial Sequence
  Description of Artificial Sequence: Synthetic oligonucleotide
agguaggcacagcaagucc

SEQ ID NO: 2118880 - RNA, 19 nt, Artificial Sequence
  Description of Artificial Sequence: Synthetic oligonucleotide
uucacauuagcauguucac

SEQ ID NO: 2118881 - RNA, 19 nt, Artificial Sequence
  Description of Artificial Sequence: Synthetic oligonucleotide
aguucaauagcggccagag

SEQ ID NO: 2118882 - RNA, 19 nt, Artificial Sequence
  Description of Artificial Sequence: Synthetic oligonucleotide
aggacaucgucucagugcu

SEQ ID NO: 2118883 - RNA, 19 nt, Artificial Sequence
  Description of Artificial Sequence: Synthetic oligonucleotide
aauaaucauuaguucuuua

SEQ ID NO: 2118884 - RNA, 19 nt, Artificial Sequence
  Description of Artificial Sequence: Synthetic oligonucleotide
uacuuuagaauuccuugau

SEQ ID NO: 2118885 - RNA, 19 nt, Artificial Sequence
  Description of Artificial Sequence: Synthetic oligonucleotide
uaguuagacaauauuuauu

SEQ ID NO: 2118886 - RNA, 19 nt, Artificial Sequence
  Description of Artificial Sequence: Synthetic oligonucleotide
agagacuaaacacccacaa

SEQ ID NO: 2118887 - RNA, 19 nt, Artificial Sequence
  Description of Artificial Sequence: Synthetic oligonucleotide
agaugauuauaguuuaguu

SEQ ID NO: 2118888 - RNA, 19 nt, Artificial Sequence
  Description of Artificial Sequence: Synthetic oligonucleotide
ucuuuaguuccacaccaaa

SEQ ID NO: 2118889 - RNA, 19 nt, Artificial Sequence
  Description of Artificial Sequence: Synthetic oligonucleotide
uguaccacaagcgucuuuc

SEQ ID NO: 2118890 - RNA, 19 nt, Artificial Sequence
  Description of Artificial Sequence: Synthetic oligonucleotide
uggcauuugaagcucuacu

SEQ ID NO: 2118891 - RNA, 19 nt, Artificial Sequence
  Description of Artificial Sequence: Synthetic oligonucleotide
aagcucuaauaaaauauga

SEQ ID NO: 2118892 - RNA, 19 nt, Artificial Sequence
  Description of Artificial Sequence: Synthetic oligonucleotide
uugcaagaggacaucgucu

SEQ ID NO: 2118893 - RNA, 19 nt, Artificial Sequence
  Description of Artificial Sequence: Synthetic oligonucleotide
uucacauaaauugcauucu

SEQ ID NO: 2118894 - RNA, 19 nt, Artificial Sequence
  Description of Artificial Sequence: Synthetic oligonucleotide
aguaccuacagacuugauu

SEQ ID NO: 2118895 - RNA, 19 nt, Artificial Sequence
  Description of Artificial Sequence: Synthetic oligonucleotide
ucaaacugcagaucucuuc

SEQ ID NO: 2118896 - RNA, 19 nt, Artificial Sequence
  Description of Artificial Sequence: Synthetic oligonucleotide
ugugugaguggaggaaucg

SEQ ID NO: 2118897 - RNA, 19 nt, Artificial Sequence
  Description of Artificial Sequence: Synthetic oligonucleotide
uauuuuggucaguaccuac

SEQ ID NO: 2118898 - RNA, 19 nt, Artificial Sequence
  Description of Artificial Sequence: Synthetic oligonucleotide
gagcuauuccuucuagagc

SEQ ID NO: 2118899 - RNA, 19 nt, Artificial Sequence
  Description of Artificial Sequence: Synthetic oligonucleotide
uagaaaacguagguaguug

SEQ ID NO: 2118900 - RNA, 19 nt, Artificial Sequence
  Description of Artificial Sequence: Synthetic oligonucleotide
ugcaagaggacaucgucuc

SEQ ID NO: 2118901 - RNA, 19 nt, Artificial Sequence
  Description of Artificial Sequence: Synthetic oligonucleotide
aaagagauuuguucuccuu

SEQ ID NO: 2118902 - RNA, 19 nt, Artificial Sequence
  Description of Artificial Sequence: Synthetic oligonucleotide
guaaugcaauacuggaagc

SEQ ID NO: 2118903 - RNA, 19 nt, Artificial Sequence
  Description of Artificial Sequence: Synthetic oligonucleotide
ugacggauuuggaagucug

SEQ ID NO: 2118904 - RNA, 19 nt, Artificial Sequence
  Description of Artificial Sequence: Synthetic oligonucleotide
gacaucgucucagugcuag

SEQ ID NO: 2118905 - RNA, 19 nt, Artificial Sequence
  Description of Artificial Sequence: Synthetic oligonucleotide
uucgagcuauuccuucuag

SEQ ID NO: 2118906 - RNA, 19 nt, Artificial Sequence
  Description of Artificial Sequence: Synthetic oligonucleotide
aaauaucaaggggcacucg

SEQ ID NO: 2118907 - RNA, 19 nt, Artificial Sequence
  Description of Artificial Sequence: Synthetic oligonucleotide
caugccuggauuucuugag

SEQ ID NO: 2118908 - RNA, 19 nt, Artificial Sequence
  Description of Artificial Sequence: Synthetic oligonucleotide
aaggcaagccuuugaugug

SEQ ID NO: 2118909 - RNA, 19 nt, Artificial Sequence
  Description of Artificial Sequence: Synthetic oligonucleotide
ucgcacaucugcaggagca

SEQ ID NO: 2118910 - RNA, 19 nt, Artificial Sequence
  Description of Artificial Sequence: Synthetic oligonucleotide
aguuuaguucaggcaaucg

SEQ ID NO: 2118911 - RNA, 19 nt, Artificial Sequence
  Description of Artificial Sequence: Synthetic oligonucleotide
agugcuagcagcauccugu

SEQ ID NO: 2118912 - RNA, 19 nt, Artificial Sequence
  Description of Artificial Sequence: Synthetic oligonucleotide
aucgcacaucugcaggagc

SEQ ID NO: 2118913 - RNA, 19 nt, Artificial Sequence
  Description of Artificial Sequence: Synthetic oligonucleotide
uuucguuuaguuagacaau

SEQ ID NO: 2118914 - RNA, 19 nt, Artificial Sequence
  Description of Artificial Sequence: Synthetic oligonucleotide
caucagacaggggugaccc

SEQ ID NO: 2118915 - RNA, 19 nt, Artificial Sequence
  Description of Artificial Sequence: Synthetic oligonucleotide
gaggaaucgccaugccugg

SEQ ID NO: 2118916 - RNA, 19 nt, Artificial Sequence
  Description of Artificial Sequence: Synthetic oligonucleotide
uucaggcaaucgcacaucu

SEQ ID NO: 2118917 - RNA, 19 nt, Artificial Sequence
  Description of Artificial Sequence: Synthetic oligonucleotide
ugcaguucaauagcggcca

SEQ ID NO: 2118918 - RNA, 19 nt, Artificial Sequence
  Description of Artificial Sequence: Synthetic oligonucleotide
guugcaagaggacaucguc

SEQ ID NO: 2118919 - RNA, 19 nt, Artificial Sequence
  Description of Artificial Sequence: Synthetic oligonucleotide
uuagaaaacguagguaguu

SEQ ID NO: 2118920 - RNA, 19 nt, Artificial Sequence
  Description of Artificial Sequence: Synthetic oligonucleotide
uuaguucuuuaguuccaca

SEQ ID NO: 2118921 - RNA, 19 nt, Artificial Sequence
  Description of Artificial Sequence: Synthetic oligonucleotide
uuuggucaguaccuacaga

SEQ ID NO: 2118922 - RNA, 19 nt, Artificial Sequence
  Description of Artificial Sequence: Synthetic oligonucleotide
cuugagugaucaauguuga

SEQ ID NO: 2118923 - RNA, 19 nt, Artificial Sequence
  Description of Artificial Sequence: Synthetic oligonucleotide
ucucccaaaaguacuuaau

SEQ ID NO: 2118924 - RNA, 19 nt, Artificial Sequence
  Description of Artificial Sequence: Synthetic oligonucleotide
uucguuuaguuagacaaua

SEQ ID NO: 2118925 - RNA, 19 nt, Artificial Sequence
  Description of Artificial Sequence: Synthetic oligonucleotide
aaguccauugucucccaaa

SEQ ID NO: 2118926 - RNA, 19 nt, Artificial Sequence
  Description of Artificial Sequence: Synthetic oligonucleotide
gagagggaauucgagauuc

SEQ ID NO: 2118927 - RNA, 19 nt, Artificial Sequence
  Description of Artificial Sequence: Synthetic oligonucleotide
aguucaggcaaucgcacau

SEQ ID NO: 2118928 - RNA, 19 nt, Artificial Sequence
  Description of Artificial Sequence: Synthetic oligonucleotide
agcaugcaguucaauagcg

SEQ ID NO: 2118929 - RNA, 19 nt, Artificial Sequence
  Description of Artificial Sequence: Synthetic oligonucleotide
uugguauccuguaccacaa

SEQ ID NO: 2118930 - RNA, 19 nt, Artificial Sequence
  Description of Artificial Sequence: Synthetic oligonucleotide
uggaaggcaagccuuugau

SEQ ID NO: 2118931 - RNA, 19 nt, Artificial Sequence
  Description of Artificial Sequence: Synthetic oligonucleotide
cccaaaaguacuuaauuuc

SEQ ID NO: 2118932 - RNA, 19 nt, Artificial Sequence
  Description of Artificial Sequence: Synthetic oligonucleotide
cuuauaagaagagacuaaa

SEQ ID NO: 2118933 - RNA, 19 nt, Artificial Sequence
  Description of Artificial Sequence: Synthetic oligonucleotide
uaucaaggggcacucgcuc

SEQ ID NO: 2118934 - RNA, 19 nt, Artificial Sequence
  Description of Artificial Sequence: Synthetic oligonucleotide
acggauuuggaagucuguc

SEQ ID NO: 2118935 - RNA, 19 nt, Artificial Sequence
  Description of Artificial Sequence: Synthetic oligonucleotide
aggcacagcaaguccauug

SEQ ID NO: 2118936 - RNA, 19 nt, Artificial Sequence
  Description of Artificial Sequence: Synthetic oligonucleotide
agucaaacugcagaucucu

SEQ ID NO: 2118937 - RNA, 19 nt, Artificial Sequence
  Description of Artificial Sequence: Synthetic oligonucleotide
ugguugcaagaggacaucg

SEQ ID NO: 2118938 - RNA, 19 nt, Artificial Sequence
  Description of Artificial Sequence: Synthetic oligonucleotide
aagcgucuuucuuucuuca

SEQ ID NO: 2118939 - RNA, 19 nt, Artificial Sequence
  Description of Artificial Sequence: Synthetic oligonucleotide
ucuagagcucucaguucag

SEQ ID NO: 2118940 - RNA, 19 nt, Artificial Sequence
  Description of Artificial Sequence: Synthetic oligonucleotide
uggaggaaucgccaugccu

SEQ ID NO: 2118941 - RNA, 19 nt, Artificial Sequence
  Description of Artificial Sequence: Synthetic oligonucleotide
gauucugaaagagauuugu

SEQ ID NO: 2118942 - RNA, 19 nt, Artificial Sequence
  Description of Artificial Sequence: Synthetic oligonucleotide
agcgucuuucuuucuucac

SEQ ID NO: 2118943 - RNA, 19 nt, Artificial Sequence
  Description of Artificial Sequence: Synthetic oligonucleotide
aucgucucagugcuagcag

SEQ ID NO: 2118944 - RNA, 19 nt, Artificial Sequence
  Description of Artificial Sequence: Synthetic oligonucleotide
ucgucucagugcuagcagc

SEQ ID NO: 2118945 - RNA, 19 nt, Artificial Sequence
  Description of Artificial Sequence: Synthetic oligonucleotide
ucaguaccuacagacuuga

SEQ ID NO: 2118946 - RNA, 19 nt, Artificial Sequence
  Description of Artificial Sequence: Synthetic oligonucleotide
aagaggacaucgucucagu

SEQ ID NO: 2118947 - RNA, 19 nt, Artificial Sequence
  Description of Artificial Sequence: Synthetic oligonucleotide
gcucaaucuuccuuugacg

SEQ ID NO: 2118948 - RNA, 19 nt, Artificial Sequence
  Description of Artificial Sequence: Synthetic oligonucleotide
uuccuucuagagcucucag

SEQ ID NO: 2118949 - RNA, 19 nt, Artificial Sequence
  Description of Artificial Sequence: Synthetic oligonucleotide
guuuaguuagacaauauuu

SEQ ID NO: 2118950 - RNA, 19 nt, Artificial Sequence
  Description of Artificial Sequence: Synthetic oligonucleotide
ucacauuagcauguucaca

SEQ ID NO: 2118951 - RNA, 19 nt, Artificial Sequence
  Description of Artificial Sequence: Synthetic oligonucleotide
ucagcauugguauccugua

SEQ ID NO: 2118952 - RNA, 19 nt, Artificial Sequence
  Description of Artificial Sequence: Synthetic oligonucleotide
caauagcggccagagaggg

SEQ ID NO: 2118953 - RNA, 19 nt, Artificial Sequence
  Description of Artificial Sequence: Synthetic oligonucleotide
ggaggaaucgccaugccug

SEQ ID NO: 2118954 - RNA, 19 nt, Artificial Sequence
  Description of Artificial Sequence: Synthetic oligonucleotide
ucguuuaguuagacaauau

SEQ ID NO: 2118955 - RNA, 19 nt, Artificial Sequence
  Description of Artificial Sequence: Synthetic oligonucleotide
ucuagggcaucagugcucu

SEQ ID NO: 2118956 - RNA, 19 nt, Artificial Sequence
  Description of Artificial Sequence: Synthetic oligonucleotide
aggcuuguggaaggcaagc

SEQ ID NO: 2118957 - RNA, 19 nt, Artificial Sequence
  Description of Artificial Sequence: Synthetic oligonucleotide
ucgagcuauuccuucuaga

SEQ ID NO: 2118958 - RNA, 19 nt, Artificial Sequence
  Description of Artificial Sequence: Synthetic oligonucleotide
gcaaucgcacaucugcagg

SEQ ID NO: 2118959 - RNA, 19 nt, Artificial Sequence
  Description of Artificial Sequence: Synthetic oligonucleotide
auuuuggucaguaccuaca

SEQ ID NO: 2118960 - RNA, 19 nt, Artificial Sequence
  Description of Artificial Sequence: Synthetic oligonucleotide
aagagacuaaacacccaca

SEQ ID NO: 2118961 - RNA, 19 nt, Artificial Sequence
  Description of Artificial Sequence: Synthetic oligonucleotide
agaggacaucgucucagug

SEQ ID NO: 2118962 - RNA, 19 nt, Artificial Sequence
  Description of Artificial Sequence: Synthetic oligonucleotide
agcucuaauaaaauaugau

SEQ ID NO: 2118963 - RNA, 19 nt, Artificial Sequence
  Description of Artificial Sequence: Synthetic oligonucleotide
aggcaagccuuugaugugg

SEQ ID NO: 2118964 - RNA, 19 nt, Artificial Sequence
  Description of Artificial Sequence: Synthetic oligonucleotide
uucuuuaguuccacaccaa

SEQ ID NO: 2118965 - RNA, 19 nt, Artificial Sequence
  Description of Artificial Sequence: Synthetic oligonucleotide
cacauuagcauguucacau

SEQ ID NO: 2118966 - RNA, 19 nt, Artificial Sequence
  Description of Artificial Sequence: Synthetic oligonucleotide
aacugcggaaagauugugu

SEQ ID NO: 2118967 - RNA, 19 nt, Artificial Sequence
  Description of Artificial Sequence: Synthetic oligonucleotide
aucagcauugguauccugu

SEQ ID NO: 2118968 - RNA, 19 nt, Artificial Sequence
  Description of Artificial Sequence: Synthetic oligonucleotide
agucuuucuuagaaaacgu

SEQ ID NO: 2118969 - RNA, 19 nt, Artificial Sequence
  Description of Artificial Sequence: Synthetic oligonucleotide
caaauaucaaggggcacuc

SEQ ID NO: 2118970 - RNA, 19 nt, Artificial Sequence
  Description of Artificial Sequence: Synthetic oligonucleotide
aaucgccaugccuggauuu

SEQ ID NO: 2118971 - RNA, 19 nt, Artificial Sequence
  Description of Artificial Sequence: Synthetic oligonucleotide
ucauggagacagcuggcau

SEQ ID NO: 2118972 - RNA, 19 nt, Artificial Sequence
  Description of Artificial Sequence: Synthetic oligonucleotide
cauaaauugcauucuuaua

SEQ ID NO: 2118973 - RNA, 19 nt, Artificial Sequence
  Description of Artificial Sequence: Synthetic oligonucleotide
aguucagggagaugauuau

SEQ ID NO: 2118974 - RNA, 19 nt, Artificial Sequence
  Description of Artificial Sequence: Synthetic oligonucleotide
acaucgucucagugcuagc

SEQ ID NO: 2118975 - RNA, 19 nt, Artificial Sequence
  Description of Artificial Sequence: Synthetic oligonucleotide
auagcggccagagagggaa

SEQ ID NO: 2118976 - RNA, 19 nt, Artificial Sequence
  Description of Artificial Sequence: Synthetic oligonucleotide
uugucucccaaaaguacuu

SEQ ID NO: 2118977 - RNA, 19 nt, Artificial Sequence
  Description of Artificial Sequence: Synthetic oligonucleotide
cauuagcauguucacauaa

SEQ ID NO: 2118978 - RNA, 19 nt, Artificial Sequence
  Description of Artificial Sequence: Synthetic oligonucleotide
uucagguuaagugggucuc

SEQ ID NO: 2118979 - RNA, 19 nt, Artificial Sequence
  Description of Artificial Sequence: Synthetic oligonucleotide
uucuagggcaucagugcuc

SEQ ID NO: 2118980 - RNA, 19 nt, Artificial Sequence
  Description of Artificial Sequence: Synthetic oligonucleotide
auccuguaccacaagcguc

SEQ ID NO: 2118981 - RNA, 19 nt, Artificial Sequence
  Description of Artificial Sequence: Synthetic oligonucleotide
uuccuuugacggauuugga

SEQ ID NO: 2118982 - RNA, 19 nt, Artificial Sequence
  Description of Artificial Sequence: Synthetic oligonucleotide
ucaaggggcacucgcucaa

SEQ ID NO: 2118983 - RNA, 19 nt, Artificial Sequence
  Description of Artificial Sequence: Synthetic oligonucleotide
gagaugauuauaguuuagu

SEQ ID NO: 2118984 - RNA, 19 nt, Artificial Sequence
  Description of Artificial Sequence: Synthetic oligonucleotide
ucaucagacaggggugacc

SEQ ID NO: 2118985 - RNA, 19 nt, Artificial Sequence
  Description of Artificial Sequence: Synthetic oligonucleotide
uagucaaacugcagaucuc

SEQ ID NO: 2118986 - RNA, 19 nt, Artificial Sequence
  Description of Artificial Sequence: Synthetic oligonucleotide
uauuagccuagaguuucga

SEQ ID NO: 2118987 - RNA, 19 nt, Artificial Sequence
  Description of Artificial Sequence: Synthetic oligonucleotide
gagacuaaacacccacaaa

SEQ ID NO: 2118988 - RNA, 19 nt, Artificial Sequence
  Description of Artificial Sequence: Synthetic oligonucleotide
uuauuuuggucaguaccua

SEQ ID NO: 2118989 - RNA, 19 nt, Artificial Sequence
  Description of Artificial Sequence: Synthetic oligonucleotide
cauuaguucuuuaguucca

SEQ ID NO: 2118990 - RNA, 19 nt, Artificial Sequence
  Description of Artificial Sequence: Synthetic oligonucleotide
uccauccgaggcaaaucac

SEQ ID NO: 2118991 - RNA, 19 nt, Artificial Sequence
  Description of Artificial Sequence: Synthetic oligonucleotide
uugagugaucaauguugac

SEQ ID NO: 2118992 - RNA, 19 nt, Artificial Sequence
  Description of Artificial Sequence: Synthetic oligonucleotide
acaagcgucuuucuuucuu

SEQ ID NO: 2118993 - RNA, 19 nt, Artificial Sequence
  Description of Artificial Sequence: Synthetic oligonucleotide
gggaauucgagauucugaa

SEQ ID NO: 2118994 - RNA, 19 nt, Artificial Sequence
  Description of Artificial Sequence: Synthetic oligonucleotide
gggaucagcauugguaucc

SEQ ID NO: 2118995 - RNA, 19 nt, Artificial Sequence
  Description of Artificial Sequence: Synthetic oligonucleotide
uagguaggcacagcaaguc

SEQ ID NO: 2118996 - RNA, 19 nt, Artificial Sequence
  Description of Artificial Sequence: Synthetic oligonucleotide
aaacugcagaucucuucua

SEQ ID NO: 2118997 - RNA, 19 nt, Artificial Sequence
  Description of Artificial Sequence: Synthetic oligonucleotide
cuagagcucucaguucagg

SEQ ID NO: 2118998 - RNA, 19 nt, Artificial Sequence
  Description of Artificial Sequence: Synthetic oligonucleotide
uguucagguuaaguggguc

SEQ ID NO: 2118999 - RNA, 19 nt, Artificial Sequence
  Description of Artificial Sequence: Synthetic oligonucleotide
auagguaggcacagcaagu

SEQ ID NO: 2119000 - RNA, 19 nt, Artificial Sequence
  Description of Artificial Sequence: Synthetic oligonucleotide
auuagcauguucacauaaa

SEQ ID NO: 2119001 - RNA, 19 nt, Artificial Sequence
  Description of Artificial Sequence: Synthetic oligonucleotide
uugauguggcuugucccgc

SEQ ID NO: 2119002 - RNA, 19 nt, Artificial Sequence
  Description of Artificial Sequence: Synthetic oligonucleotide
gucaguaccuacagacuug

SEQ ID NO: 2119003 - RNA, 19 nt, Artificial Sequence
  Description of Artificial Sequence: Synthetic oligonucleotide
uaagugggucucagugcug

SEQ ID NO: 2119004 - RNA, 19 nt, Artificial Sequence
  Description of Artificial Sequence: Synthetic oligonucleotide
auuccuucuagagcucuca

SEQ ID NO: 2119005 - RNA, 19 nt, Artificial Sequence
  Description of Artificial Sequence: Synthetic oligonucleotide
gcgucuuucuuucuucacc

SEQ ID NO: 2119006 - RNA, 19 nt, Artificial Sequence
  Description of Artificial Sequence: Synthetic oligonucleotide
ggaaggcaagccuuugaug

SEQ ID NO: 2119007 - RNA, 19 nt, Artificial Sequence
  Description of Artificial Sequence: Synthetic oligonucleotide
ggcaaucgcacaucugcag

SEQ ID NO: 2119008 - RNA, 19 nt, Artificial Sequence
  Description of Artificial Sequence: Synthetic oligonucleotide
uuugacggauuuggaaguc

SEQ ID NO: 2119009 - RNA, 19 nt, Artificial Sequence
  Description of Artificial Sequence: Synthetic oligonucleotide
augccuggauuucuugagu

SEQ ID NO: 2119010 - RNA, 19 nt, Artificial Sequence
  Description of Artificial Sequence: Synthetic oligonucleotide
uugacggauuuggaagucu

SEQ ID NO: 2119011 - RNA, 19 nt, Artificial Sequence
  Description of Artificial Sequence: Synthetic oligonucleotide
cagaaucaucagacagggg

SEQ ID NO: 2119012 - RNA, 19 nt, Artificial Sequence
  Description of Artificial Sequence: Synthetic oligonucleotide
ggaagcaugcaguucaaua

SEQ ID NO: 2119013 - RNA, 19 nt, Artificial Sequence
  Description of Artificial Sequence: Synthetic oligonucleotide
caaucgcacaucugcagga

SEQ ID NO: 2119014 - RNA, 19 nt, Artificial Sequence
  Description of Artificial Sequence: Synthetic oligonucleotide
augcaauacuggaagcaug

SEQ ID NO: 2119015 - RNA, 19 nt, Artificial Sequence
  Description of Artificial Sequence: Synthetic oligonucleotide
gaucaauguugacauugcu

SEQ ID NO: 2119016 - RNA, 19 nt, Artificial Sequence
  Description of Artificial Sequence: Synthetic oligonucleotide
auaucaaggggcacucgcu

SEQ ID NO: 2119017 - RNA, 19 nt, Artificial Sequence
  Description of Artificial Sequence: Synthetic oligonucleotide
aucgccaugccuggauuuc

SEQ ID NO: 2119018 - RNA, 19 nt, Artificial Sequence
  Description of Artificial Sequence: Synthetic oligonucleotide
gaucagcauugguauccug

SEQ ID NO: 2119019 - RNA, 19 nt, Artificial Sequence
  Description of Artificial Sequence: Synthetic oligonucleotide
ucagguuaagugggucuca

SEQ ID NO: 2119020 - RNA, 19 nt, Artificial Sequence
  Description of Artificial Sequence: Synthetic oligonucleotide
agauucugaaagagauuug

SEQ ID NO: 2119021 - RNA, 19 nt, Artificial Sequence
  Description of Artificial Sequence: Synthetic oligonucleotide
uaguuuaguucaggcaauc

SEQ ID NO: 2119022 - RNA, 19 nt, Artificial Sequence
  Description of Artificial Sequence: Synthetic oligonucleotide
agagagggaauucgagauu

SEQ ID NO: 2119023 - RNA, 19 nt, Artificial Sequence
  Description of Artificial Sequence: Synthetic oligonucleotide
aagucugucuugccuucuu

SEQ ID NO: 2119024 - RNA, 19 nt, Artificial Sequence
  Description of Artificial Sequence: Synthetic oligonucleotide
auccgaggcaaaucacacu

SEQ ID NO: 2119025 - RNA, 19 nt, Artificial Sequence
  Description of Artificial Sequence: Synthetic oligonucleotide
uaccacaagcgucuuucuu

SEQ ID NO: 2119026 - RNA, 19 nt, Artificial Sequence
  Description of Artificial Sequence: Synthetic oligonucleotide
uggcuugucccgcugucau

SEQ ID NO: 2119027 - RNA, 19 nt, Artificial Sequence
  Description of Artificial Sequence: Synthetic oligonucleotide
gaggcuuguggaaggcaag

SEQ ID NO: 2119028 - RNA, 19 nt, Artificial Sequence
  Description of Artificial Sequence: Synthetic oligonucleotide
gcaucagugcucugguugc

SEQ ID NO: 2119029 - RNA, 19 nt, Artificial Sequence
  Description of Artificial Sequence: Synthetic oligonucleotide
cuuugacggauuuggaagu

SEQ ID NO: 2119030 - RNA, 19 nt, Artificial Sequence
  Description of Artificial Sequence: Synthetic oligonucleotide
cucgcucaaucuuccuuug

SEQ ID NO: 2119031 - RNA, 19 nt, Artificial Sequence
  Description of Artificial Sequence: Synthetic oligonucleotide
agauauuauuuuggucagu

SEQ ID NO: 2119032 - RNA, 19 nt, Artificial Sequence
  Description of Artificial Sequence: Synthetic oligonucleotide
cagacaggggugacccugc

SEQ ID NO: 2119033 - RNA, 19 nt, Artificial Sequence
  Description of Artificial Sequence: Synthetic oligonucleotide
guucagguuaagugggucu

SEQ ID NO: 2119034 - RNA, 19 nt, Artificial Sequence
  Description of Artificial Sequence: Synthetic oligonucleotide
ugauguggcuugucccgcu

SEQ ID NO: 2119035 - RNA, 19 nt, Artificial Sequence
  Description of Artificial Sequence: Synthetic oligonucleotide
gugugaguggaggaaucgc

SEQ ID NO: 2119036 - RNA, 19 nt, Artificial Sequence
  Description of Artificial Sequence: Synthetic oligonucleotide
cagcauugguauccuguac

SEQ ID NO: 2119037 - RNA, 19 nt, Artificial Sequence
  Description of Artificial Sequence: Synthetic oligonucleotide
cagguuaagugggucucag

SEQ ID NO: 2119038 - RNA, 19 nt, Artificial Sequence
  Description of Artificial Sequence: Synthetic oligonucleotide
agguuaagugggucucagu

SEQ ID NO: 2119039 - RNA, 19 nt, Artificial Sequence
  Description of Artificial Sequence: Synthetic oligonucleotide
gucucccaaaaguacuuaa

SEQ ID NO: 2119040 - RNA, 19 nt, Artificial Sequence
  Description of Artificial Sequence: Synthetic oligonucleotide
guugacauugcugcagucu

SEQ ID NO: 2119041 - RNA, 19 nt, Artificial Sequence
  Description of Artificial Sequence: Synthetic oligonucleotide
agacuugauuuugaauaau

SEQ ID NO: 2119042 - RNA, 19 nt, Artificial Sequence
  Description of Artificial Sequence: Synthetic oligonucleotide
gggagaugauuauaguuua

SEQ ID NO: 2119043 - RNA, 19 nt, Artificial Sequence
  Description of Artificial Sequence: Synthetic oligonucleotide
gagacagcuggcauuugaa

SEQ ID NO: 2119044 - RNA, 19 nt, Artificial Sequence
  Description of Artificial Sequence: Synthetic oligonucleotide
uaccuacagacuugauuuu

SEQ ID NO: 2119045 - RNA, 19 nt, Artificial Sequence
  Description of Artificial Sequence: Synthetic oligonucleotide
ugggaucagcauugguauc

SEQ ID NO: 2119046 - RNA, 19 nt, Artificial Sequence
  Description of Artificial Sequence: Synthetic oligonucleotide
cacucagaaucaucagaca

SEQ ID NO: 2119047 - RNA, 19 nt, Artificial Sequence
  Description of Artificial Sequence: Synthetic oligonucleotide
gguaggcacagcaagucca

SEQ ID NO: 2119048 - RNA, 19 nt, Artificial Sequence
  Description of Artificial Sequence: Synthetic oligonucleotide
aagcuacuuuagaauuccu

SEQ ID NO: 2119049 - RNA, 19 nt, Artificial Sequence
  Description of Artificial Sequence: Synthetic oligonucleotide
aauagcggccagagaggga

SEQ ID NO: 2119050 - RNA, 19 nt, Artificial Sequence
  Description of Artificial Sequence: Synthetic oligonucleotide
agugaucaauguugacauu

SEQ ID NO: 2119051 - RNA, 19 nt, Artificial Sequence
  Description of Artificial Sequence: Synthetic oligonucleotide
caucgucucagugcuagca

SEQ ID NO: 2119052 - RNA, 19 nt, Artificial Sequence
  Description of Artificial Sequence: Synthetic oligonucleotide
ggagacagcuggcauuuga

SEQ ID NO: 2119053 - RNA, 19 nt, Artificial Sequence
  Description of Artificial Sequence: Synthetic oligonucleotide
cuuuauuagccuagaguuu

SEQ ID NO: 2119054 - RNA, 19 nt, Artificial Sequence
  Description of Artificial Sequence: Synthetic oligonucleotide
ugucucccaaaaguacuua

SEQ ID NO: 2119055 - RNA, 19 nt, Artificial Sequence
  Description of Artificial Sequence: Synthetic oligonucleotide
aggagcaacugcggaaaga

SEQ ID NO: 2119056 - RNA, 19 nt, Artificial Sequence
  Description of Artificial Sequence: Synthetic oligonucleotide
gucuuucuuagaaaacgua

SEQ ID NO: 2119057 - RNA, 19 nt, Artificial Sequence
  Description of Artificial Sequence: Synthetic oligonucleotide
gacuaaacacccacaaauu

SEQ ID NO: 2119058 - RNA, 19 nt, Artificial Sequence
  Description of Artificial Sequence: Synthetic oligonucleotide
gaggcaaaucacacucaga

SEQ ID NO: 2119059 - RNA, 19 nt, Artificial Sequence
  Description of Artificial Sequence: Synthetic oligonucleotide
acauagguaggcacagcaa

SEQ ID NO: 2119060 - RNA, 19 nt, Artificial Sequence
  Description of Artificial Sequence: Synthetic oligonucleotide
ugcuccauccgaggcaaau

SEQ ID NO: 2119061 - RNA, 19 nt, Artificial Sequence
  Description of Artificial Sequence: Synthetic oligonucleotide
agauugugugugaguggag

SEQ ID NO: 2119062 - RNA, 19 nt, Artificial Sequence
  Description of Artificial Sequence: Synthetic oligonucleotide
cagugcuagcagcauccug

SEQ ID NO: 2119063 - RNA, 19 nt, Artificial Sequence
  Description of Artificial Sequence: Synthetic oligonucleotide
caacugcggaaagauugug

SEQ ID NO: 2119064 - RNA, 19 nt, Artificial Sequence
  Description of Artificial Sequence: Synthetic oligonucleotide
cagggagaugauuauaguu

SEQ ID NO: 2119065 - RNA, 19 nt, Artificial Sequence
  Description of Artificial Sequence: Synthetic oligonucleotide
gugacccugcucccuguug

SEQ ID NO: 2119066 - RNA, 19 nt, Artificial Sequence
  Description of Artificial Sequence: Synthetic oligonucleotide
cucccaaaaguacuuaauu

SEQ ID NO: 2119067 - RNA, 19 nt, Artificial Sequence
  Description of Artificial Sequence: Synthetic oligonucleotide
ggaagucugucuugccuuc

SEQ ID NO: 2119068 - RNA, 19 nt, Artificial Sequence
  Description of Artificial Sequence: Synthetic oligonucleotide
ccaaagcucuaauaaaaua

SEQ ID NO: 2119069 - RNA, 19 nt, Artificial Sequence
  Description of Artificial Sequence: Synthetic oligonucleotide
ggaauucgagauucugaaa

SEQ ID NO: 2119070 - RNA, 19 nt, Artificial Sequence
  Description of Artificial Sequence: Synthetic oligonucleotide
ccacaagcgucuuucuuuc

SEQ ID NO: 2119071 - RNA, 19 nt, Artificial Sequence
  Description of Artificial Sequence: Synthetic oligonucleotide
caggagcaacugcggaaag

SEQ ID NO: 2119072 - RNA, 19 nt, Artificial Sequence
  Description of Artificial Sequence: Synthetic oligonucleotide
ggauuuggaagucugucuu

SEQ ID NO: 2119073 - RNA, 19 nt, Artificial Sequence
  Description of Artificial Sequence: Synthetic oligonucleotide
ggcauuugaagcucuacuu

SEQ ID NO: 2119074 - RNA, 19 nt, Artificial Sequence
  Description of Artificial Sequence: Synthetic oligonucleotide
ccuacagacuugauuuuga

SEQ ID NO: 2119075 - RNA, 19 nt, Artificial Sequence
  Description of Artificial Sequence: Synthetic oligonucleotide
gccagagagggaauucgag

SEQ ID NO: 2119076 - RNA, 19 nt, Artificial Sequence
  Description of Artificial Sequence: Synthetic oligonucleotide
cacaucugcaggagcaacu

SEQ ID NO: 2119077 - RNA, 19 nt, Artificial Sequence
  Description of Artificial Sequence: Synthetic oligonucleotide
ucgccaugccuggauuucu

SEQ ID NO: 2119078 - RNA, 19 nt, Artificial Sequence
  Description of Artificial Sequence: Synthetic oligonucleotide
cugguugcaagaggacauc

SEQ ID NO: 2119079 - RNA, 19 nt, Artificial Sequence
  Description of Artificial Sequence: Synthetic oligonucleotide
gugcuggugcuccauccga

SEQ ID NO: 2119080 - RNA, 19 nt, Artificial Sequence
  Description of Artificial Sequence: Synthetic oligonucleotide
ccuguuguaaugcaauacu

SEQ ID NO: 2119081 - RNA, 19 nt, Artificial Sequence
  Description of Artificial Sequence: Synthetic oligonucleotide
cgcucaaucuuccuuugac

SEQ ID NO: 2119082 - RNA, 19 nt, Artificial Sequence
  Description of Artificial Sequence: Synthetic oligonucleotide
cccuguuguaaugcaauac

SEQ ID NO: 2119083 - RNA, 19 nt, Artificial Sequence
  Description of Artificial Sequence: Synthetic oligonucleotide
caggggugacccugcuccc

SEQ ID NO: 2119084 - RNA, 19 nt, Artificial Sequence
  Description of Artificial Sequence: Synthetic oligonucleotide
cucccuguuguaaugcaau

SEQ ID NO: 2119085 - RNA, 19 nt, Artificial Sequence
  Description of Artificial Sequence: Synthetic oligonucleotide
agacaggggugacccugcu

SEQ ID NO: 2119086 - RNA, 19 nt, Artificial Sequence
  Description of Artificial Sequence: Synthetic oligonucleotide
cugcaggagcaacugcgga

SEQ ID NO: 2119087 - RNA, 19 nt, Artificial Sequence
  Description of Artificial Sequence: Synthetic oligonucleotide
gcuuguggaaggcaagccu

SEQ ID NO: 2119088 - RNA, 19 nt, Artificial Sequence
  Description of Artificial Sequence: Synthetic oligonucleotide
gccuggauuucuugaguga

SEQ ID NO: 2119089 - RNA, 19 nt, Artificial Sequence
  Description of Artificial Sequence: Synthetic oligonucleotide
cagcuggcauuugaagcuc

SEQ ID NO: 2119090 - RNA, 19 nt, Artificial Sequence
  Description of Artificial Sequence: Synthetic oligonucleotide
ggagcaacugcggaaagau

SEQ ID NO: 2119091 - RNA, 19 nt, Artificial Sequence
  Description of Artificial Sequence: Synthetic oligonucleotide
gacggauuuggaagucugu

SEQ ID NO: 2119092 - RNA, 19 nt, Artificial Sequence
  Description of Artificial Sequence: Synthetic oligonucleotide
ccuucuagagcucucaguu

SEQ ID NO: 2119093 - RNA, 19 nt, Artificial Sequence
  Description of Artificial Sequence: Synthetic oligonucleotide
cugcggaaagauugugugu

SEQ ID NO: 2119094 - RNA, 19 nt, Artificial Sequence
  Description of Artificial Sequence: Synthetic oligonucleotide
cuauuccuucuagagcucu

SEQ ID NO: 2119095 - RNA, 19 nt, Artificial Sequence
  Description of Artificial Sequence: Synthetic oligonucleotide
agccuagaguuucgagcua

SEQ ID NO: 2119096 - RNA, 19 nt, Artificial Sequence
  Description of Artificial Sequence: Synthetic oligonucleotide
agcauccuguucagguuaa

SEQ ID NO: 2119097 - RNA, 19 nt, Artificial Sequence
  Description of Artificial Sequence: Synthetic oligonucleotide
caagccuuugauguggcuu

SEQ ID NO: 2119098 - RNA, 19 nt, Artificial Sequence
  Description of Artificial Sequence: Synthetic oligonucleotide
cauccuguucagguuaagu

SEQ ID NO: 2119099 - RNA, 19 nt, Artificial Sequence
  Description of Artificial Sequence: Synthetic oligonucleotide
ggggugacccugcucccug

SEQ ID NO: 2119100 - RNA, 19 nt, Artificial Sequence
  Description of Artificial Sequence: Synthetic oligonucleotide
gcaagaggacaucgucuca

SEQ ID NO: 2119101 - RNA, 19 nt, Artificial Sequence
  Description of Artificial Sequence: Synthetic oligonucleotide
cucucaguucagggagaug

SEQ ID NO: 2119102 - RNA, 19 nt, Artificial Sequence
  Description of Artificial Sequence: Synthetic oligonucleotide
ggugcuccauccgaggcaa

SEQ ID NO: 2119103 - RNA, 19 nt, Artificial Sequence
  Description of Artificial Sequence: Synthetic oligonucleotide
gcggaaagauuguguguga

SEQ ID NO: 2119104 - RNA, 19 nt, Artificial Sequence
  Description of Artificial Sequence: Synthetic oligonucleotide
ggcaaaucacacucagaau

SEQ ID NO: 2119105 - RNA, 19 nt, Artificial Sequence
  Description of Artificial Sequence: Synthetic oligonucleotide
agccuuugauguggcuugu

SEQ ID NO: 2119106 - RNA, 19 nt, Artificial Sequence
  Description of Artificial Sequence: Synthetic oligonucleotide
ggcuugucccgcugucaug

SEQ ID NO: 2119107 - RNA, 19 nt, Artificial Sequence
  Description of Artificial Sequence: Synthetic oligonucleotide
aggaaucgccaugccugga

SEQ ID NO: 2119108 - RNA, 19 nt, Artificial Sequence
  Description of Artificial Sequence: Synthetic oligonucleotide
ggcaagccuuugauguggc

SEQ ID NO: 2119109 - RNA, 19 nt, Artificial Sequence
  Description of Artificial Sequence: Synthetic oligonucleotide
guggcuugucccgcuguca

SEQ ID NO: 2119110 - RNA, 19 nt, Artificial Sequence
  Description of Artificial Sequence: Synthetic oligonucleotide
cagaucucuucuagggcau

SEQ ID NO: 2119111 - RNA, 19 nt, Artificial Sequence
  Description of Artificial Sequence: Synthetic oligonucleotide
cuagggcaucagugcucug

SEQ ID NO: 2119112 - RNA, 19 nt, Artificial Sequence
  Description of Artificial Sequence: Synthetic oligonucleotide
gacccugcucccuguugua

SEQ ID NO: 2119113 - RNA, 19 nt, Artificial Sequence
  Description of Artificial Sequence: Synthetic oligonucleotide
uagcggccagagagggaau

SEQ ID NO: 2119114 - RNA, 19 nt, Artificial Sequence
  Description of Artificial Sequence: Synthetic oligonucleotide
gggcacucgcucaaucuuc

SEQ ID NO: 2119115 - RNA, 19 nt, Artificial Sequence
  Description of Artificial Sequence: Synthetic oligonucleotide
ggaaucgccaugccuggau

SEQ ID NO: 2119116 - RNA, 19 nt, Artificial Sequence
  Description of Artificial Sequence: Synthetic oligonucleotide
agcggccagagagggaauu

SEQ ID NO: 2119117 - RNA, 19 nt, Artificial Sequence
  Description of Artificial Sequence: Synthetic oligonucleotide
gaguuucgagcuauuccuu

SEQ ID NO: 2119118 - RNA, 19 nt, Artificial Sequence
  Description of Artificial Sequence: Synthetic oligonucleotide
gcuccauccgaggcaaauc

SEQ ID NO: 2119119 - RNA, 19 nt, Artificial Sequence
  Description of Artificial Sequence: Synthetic oligonucleotide
cgucuuucuuucuucaccu

SEQ ID NO: 2119120 - RNA, 19 nt, Artificial Sequence
  Description of Artificial Sequence: Synthetic oligonucleotide
cggccagagagggaauucg

SEQ ID NO: 2119121 - RNA, 19 nt, Artificial Sequence
  Description of Artificial Sequence: Synthetic oligonucleotide
ggccagagagggaauucga

SEQ ID NO: 2119122 - RNA, 19 nt, Artificial Sequence
  Description of Artificial Sequence: Synthetic oligonucleotide
cgucucagugcuagcagca

SEQ ID NO: 2119123 - RNA, 19 nt, Artificial Sequence
  Description of Artificial Sequence: Synthetic oligonucleotide
gguugcaagaggacaucgu

SEQ ID NO: 2119124 - RNA, 19 nt, Artificial Sequence
  Description of Artificial Sequence: Synthetic oligonucleotide
ccacaccaaagcucuaaua

SEQ ID NO: 2119125 - RNA, 19 nt, Artificial Sequence
  Description of Artificial Sequence: Synthetic oligonucleotide
gcagucucugaggcuugug

SEQ ID NO: 2119126 - RNA, 19 nt, Artificial Sequence
  Description of Artificial Sequence: Synthetic oligonucleotide
cacaagcgucuuucuuucu

SEQ ID NO: 2119127 - RNA, 19 nt, Artificial Sequence
  Description of Artificial Sequence: Synthetic oligonucleotide
cguuuaguuagacaauauu

SEQ ID NO: 2119128 - RNA, 19 nt, Artificial Sequence
  Description of Artificial Sequence: Synthetic oligonucleotide
gugcuagcagcauccuguu

SEQ ID NO: 2119129 - RNA, 19 nt, Artificial Sequence
  Description of Artificial Sequence: Synthetic oligonucleotide
gcucccuguuguaaugcaa

SEQ ID NO: 2119130 - RNA, 19 nt, Artificial Sequence
  Description of Artificial Sequence: Synthetic oligonucleotide
ggaucagcauugguauccu

SEQ ID NO: 2119131 - RNA, 19 nt, Artificial Sequence
  Description of Artificial Sequence: Synthetic oligonucleotide
gcagcauccuguucagguu

SEQ ID NO: 2119132 - RNA, 19 nt, Artificial Sequence
  Description of Artificial Sequence: Synthetic oligonucleotide
ggggcacucgcucaaucuu

SEQ ID NO: 2119133 - RNA, 19 nt, Artificial Sequence
  Description of Artificial Sequence: Synthetic oligonucleotide
gcggccagagagggaauuc

SEQ ID NO: 2119134 - RNA, 19 nt, Artificial Sequence
  Description of Artificial Sequence: Synthetic oligonucleotide
gucucagugcuagcagcau

SEQ ID NO: 2119135 - RNA, 19 nt, Artificial Sequence
  Description of Artificial Sequence: Synthetic oligonucleotide
gccuagaguuucgagcuau

SEQ ID NO: 2119136 - RNA, 19 nt, Artificial Sequence
  Description of Artificial Sequence: Synthetic oligonucleotide
gcaagccuuugauguggcu

SEQ ID NO: 2119137 - RNA, 19 nt, Artificial Sequence
  Description of Artificial Sequence: Synthetic oligonucleotide
gccuuugauguggcuuguc

SEQ ID NO: 2119138 - RNA, 19 nt, Artificial Sequence
  Description of Artificial Sequence: Synthetic oligonucleotide
caguaccuacagacuugau

SEQ ID NO: 2119139 - RNA, 19 nt, Artificial Sequence
  Description of Artificial Sequence: Synthetic oligonucleotide
cuguaccacaagcgucuuu

SEQ ID NO: 2119140 - RNA, 19 nt, Artificial Sequence
  Description of Artificial Sequence: Synthetic oligonucleotide
gcucucaguucagggagau

SEQ ID NO: 2119141 - RNA, 19 nt, Artificial Sequence
  Description of Artificial Sequence: Synthetic oligonucleotide
gcacucgcucaaucuuccu

SEQ ID NO: 2119142 - RNA, 19 nt, Artificial Sequence
  Description of Artificial Sequence: Synthetic oligonucleotide
cgagauucugaaagagauu

SEQ ID NO: 2119143 - RNA, 19 nt, Artificial Sequence
  Description of Artificial Sequence: Synthetic oligonucleotide
caaggggcacucgcucaau

SEQ ID NO: 2119144 - RNA, 19 nt, Artificial Sequence
  Description of Artificial Sequence: Synthetic oligonucleotide
ccuagaguuucgagcuauu

SEQ ID NO: 2119145 - RNA, 19 nt, Artificial Sequence
  Description of Artificial Sequence: Synthetic oligonucleotide
cccugcucccuguuguaau

SEQ ID NO: 2119146 - RNA, 19 nt, Artificial Sequence
  Description of Artificial Sequence: Synthetic oligonucleotide
ggacaucgucucagugcua

SEQ ID NO: 2119147 - RNA, 19 nt, Artificial Sequence
  Description of Artificial Sequence: Synthetic oligonucleotide
uaaauuauggaguuuaucg

SEQ ID NO: 2119148 - RNA, 19 nt, Artificial Sequence
  Description of Artificial Sequence: Synthetic oligonucleotide
aaggcuaccccacauaucc

SEQ ID NO: 2119149 - RNA, 19 nt, Artificial Sequence
  Description of Artificial Sequence: Synthetic oligonucleotide
aauguuagggugauaaacc

SEQ ID NO: 2119150 - RNA, 19 nt, Artificial Sequence
  Description of Artificial Sequence: Synthetic oligonucleotide
aauaacuagggacagguga

SEQ ID NO: 2119151 - RNA, 19 nt, Artificial Sequence
  Description of Artificial Sequence: Synthetic oligonucleotide
aaauauuugcaggggaugc

SEQ ID NO: 2119152 - RNA, 19 nt, Artificial Sequence
  Description of Artificial Sequence: Synthetic oligonucleotide
aauaaauauuugcagggga

SEQ ID NO: 2119153 - RNA, 19 nt, Artificial Sequence
  Description of Artificial Sequence: Synthetic oligonucleotide
uaacauuccccuuuaauag

SEQ ID NO: 2119154 - RNA, 19 nt, Artificial Sequence
  Description of Artificial Sequence: Synthetic oligonucleotide
aaaauaacuagggacaggu

SEQ ID NO: 2119155 - RNA, 19 nt, Artificial Sequence
  Description of Artificial Sequence: Synthetic oligonucleotide
aaauuauggaguuuaucgu

SEQ ID NO: 2119156 - RNA, 19 nt, Artificial Sequence
  Description of Artificial Sequence: Synthetic oligonucleotide
uguagaagcccucaucagg

SEQ ID NO: 2119157 - RNA, 19 nt, Artificial Sequence
  Description of Artificial Sequence: Synthetic oligonucleotide
uuaaaacugaacacaaacu

SEQ ID NO: 2119158 - RNA, 19 nt, Artificial Sequence
  Description of Artificial Sequence: Synthetic oligonucleotide
agcgagaacagcuugauca

SEQ ID NO: 2119159 - RNA, 19 nt, Artificial Sequence
  Description of Artificial Sequence: Synthetic oligonucleotide
uauuggacagcacccagcg

SEQ ID NO: 2119160 - RNA, 19 nt, Artificial Sequence
  Description of Artificial Sequence: Synthetic oligonucleotide
guuuuguucaaacagccgc

SEQ ID NO: 2119161 - RNA, 19 nt, Artificial Sequence
  Description of Artificial Sequence: Synthetic oligonucleotide
uuugucaguaacauucccc

SEQ ID NO: 2119162 - RNA, 19 nt, Artificial Sequence
  Description of Artificial Sequence: Synthetic oligonucleotide
aggauguugagacagacgu

SEQ ID NO: 2119163 - RNA, 19 nt, Artificial Sequence
  Description of Artificial Sequence: Synthetic oligonucleotide
caggccauaaauuauggag

SEQ ID NO: 2119164 - RNA, 19 nt, Artificial Sequence
  Description of Artificial Sequence: Synthetic oligonucleotide
aauauuugcaggggaugcc

SEQ ID NO: 2119165 - RNA, 19 nt, Artificial Sequence
  Description of Artificial Sequence: Synthetic oligonucleotide
agggugauaaaccauuguc

SEQ ID NO: 2119166 - RNA, 19 nt, Artificial Sequence
  Description of Artificial Sequence: Synthetic oligonucleotide
uuucccaucgcugagcagg

SEQ ID NO: 2119167 - RNA, 19 nt, Artificial Sequence
  Description of Artificial Sequence: Synthetic oligonucleotide
aauuauggaguuuaucgua

SEQ ID NO: 2119168 - RNA, 19 nt, Artificial Sequence
  Description of Artificial Sequence: Synthetic oligonucleotide
gauguaaccaccucucaug

SEQ ID NO: 2119169 - RNA, 19 nt, Artificial Sequence
  Description of Artificial Sequence: Synthetic oligonucleotide
uauggaguuuaucguaagg

SEQ ID NO: 2119170 - RNA, 19 nt, Artificial Sequence
  Description of Artificial Sequence: Synthetic oligonucleotide
uuuuguucaaacagccgcc

SEQ ID NO: 2119171 - RNA, 19 nt, Artificial Sequence
  Description of Artificial Sequence: Synthetic oligonucleotide
aaaccauugucucacacuu

SEQ ID NO: 2119172 - RNA, 19 nt, Artificial Sequence
  Description of Artificial Sequence: Synthetic oligonucleotide
aagagugggguauuggaca

SEQ ID NO: 2119173 - RNA, 19 nt, Artificial Sequence
  Description of Artificial Sequence: Synthetic oligonucleotide
ucugaggauguugagacag

SEQ ID NO: 2119174 - RNA, 19 nt, Artificial Sequence
  Description of Artificial Sequence: Synthetic oligonucleotide
guaaccaccucucauggag

SEQ ID NO: 2119175 - RNA, 19 nt, Artificial Sequence
  Description of Artificial Sequence: Synthetic oligonucleotide
ugggguauuggacagcacc

SEQ ID NO: 2119176 - RNA, 19 nt, Artificial Sequence
  Description of Artificial Sequence: Synthetic oligonucleotide
uuuaucguaaggacuggcu

SEQ ID NO: 2119177 - RNA, 19 nt, Artificial Sequence
  Description of Artificial Sequence: Synthetic oligonucleotide
ucucauggagcgcugcacg

SEQ ID NO: 2119178 - RNA, 19 nt, Artificial Sequence
  Description of Artificial Sequence: Synthetic oligonucleotide
uugucaguaacauuccccu

SEQ ID NO: 2119179 - RNA, 19 nt, Artificial Sequence
  Description of Artificial Sequence: Synthetic oligonucleotide
aucaggacagauaaccagc

SEQ ID NO: 2119180 - RNA, 19 nt, Artificial Sequence
  Description of Artificial Sequence: Synthetic oligonucleotide
auaaauuauggaguuuauc

SEQ ID NO: 2119181 - RNA, 19 nt, Artificial Sequence
  Description of Artificial Sequence: Synthetic oligonucleotide
acauauccuacccgggccc

SEQ ID NO: 2119182 - RNA, 19 nt, Artificial Sequence
  Description of Artificial Sequence: Synthetic oligonucleotide
auugucucacacuucaccu

SEQ ID NO: 2119183 - RNA, 19 nt, Artificial Sequence
  Description of Artificial Sequence: Synthetic oligonucleotide
cucgaggucaauguuaggg

SEQ ID NO: 2119184 - RNA, 19 nt, Artificial Sequence
  Description of Artificial Sequence: Synthetic oligonucleotide
cucguuaauguccuucugg

SEQ ID NO: 2119185 - RNA, 19 nt, Artificial Sequence
  Description of Artificial Sequence: Synthetic oligonucleotide
aauucauuucccaucgcug

SEQ ID NO: 2119186 - RNA, 19 nt, Artificial Sequence
  Description of Artificial Sequence: Synthetic oligonucleotide
auguaaccaccucucaugg

SEQ ID NO: 2119187 - RNA, 19 nt, Artificial Sequence
  Description of Artificial Sequence: Synthetic oligonucleotide
uugggcuccaagaagagau

SEQ ID NO: 2119188 - RNA, 19 nt, Artificial Sequence
  Description of Artificial Sequence: Synthetic oligonucleotide
acaagucuugggcagguuc

SEQ ID NO: 2119189 - RNA, 19 nt, Artificial Sequence
  Description of Artificial Sequence: Synthetic oligonucleotide
uauuugcuaacccuauuuc

SEQ ID NO: 2119190 - RNA, 19 nt, Artificial Sequence
  Description of Artificial Sequence: Synthetic oligonucleotide
agaagagauacugcaggcc

SEQ ID NO: 2119191 - RNA, 19 nt, Artificial Sequence
  Description of Artificial Sequence: Synthetic oligonucleotide
gaagagauacugcaggcca

SEQ ID NO: 2119192 - RNA, 19 nt, Artificial Sequence
  Description of Artificial Sequence: Synthetic oligonucleotide
aaccaccucucauggagcg

SEQ ID NO: 2119193 - RNA, 19 nt, Artificial Sequence
  Description of Artificial Sequence: Synthetic oligonucleotide
ugcaggccauaaauuaugg

SEQ ID NO: 2119194 - RNA, 19 nt, Artificial Sequence
  Description of Artificial Sequence: Synthetic oligonucleotide
auaacuagggacaggugac

SEQ ID NO: 2119195 - RNA, 19 nt, Artificial Sequence
  Description of Artificial Sequence: Synthetic oligonucleotide
acguuuuguucaaacagcc

SEQ ID NO: 2119196 - RNA, 19 nt, Artificial Sequence
  Description of Artificial Sequence: Synthetic oligonucleotide
ucaagagugggguauugga

SEQ ID NO: 2119197 - RNA, 19 nt, Artificial Sequence
  Description of Artificial Sequence: Synthetic oligonucleotide
uuuugucaguaacauuccc

SEQ ID NO: 2119198 - RNA, 19 nt, Artificial Sequence
  Description of Artificial Sequence: Synthetic oligonucleotide
uggaguuuaucguaaggac

SEQ ID NO: 2119199 - RNA, 19 nt, Artificial Sequence
  Description of Artificial Sequence: Synthetic oligonucleotide
uaaauauuugcaggggaug

SEQ ID NO: 2119200 - RNA, 19 nt, Artificial Sequence
  Description of Artificial Sequence: Synthetic oligonucleotide
accauaaucacgugguggu

SEQ ID NO: 2119201 - RNA, 19 nt, Artificial Sequence
  Description of Artificial Sequence: Synthetic oligonucleotide
ucaggcagcgcucaaagua

SEQ ID NO: 2119202 - RNA, 19 nt, Artificial Sequence
  Description of Artificial Sequence: Synthetic oligonucleotide
cauugucucacacuucacc

SEQ ID NO: 2119203 - RNA, 19 nt, Artificial Sequence
  Description of Artificial Sequence: Synthetic oligonucleotide
uaaacaggccaauucauuu

SEQ ID NO: 2119204 - RNA, 19 nt, Artificial Sequence
  Description of Artificial Sequence: Synthetic oligonucleotide
gaccauaaucacguggugg

SEQ ID NO: 2119205 - RNA, 19 nt, Artificial Sequence
  Description of Artificial Sequence: Synthetic oligonucleotide
caauguuagggugauaaac

SEQ ID NO: 2119206 - RNA, 19 nt, Artificial Sequence
  Description of Artificial Sequence: Synthetic oligonucleotide
cuaacccuauuucaggcag

SEQ ID NO: 2119207 - RNA, 19 nt, Artificial Sequence
  Description of Artificial Sequence: Synthetic oligonucleotide
caucaggacagauaaccag

SEQ ID NO: 2119208 - RNA, 19 nt, Artificial Sequence
  Description of Artificial Sequence: Synthetic oligonucleotide
ugucacaagucuugggcag

SEQ ID NO: 2119209 - RNA, 19 nt, Artificial Sequence
  Description of Artificial Sequence: Synthetic oligonucleotide
cccaauaaauauuugcagg

SEQ ID NO: 2119210 - RNA, 19 nt, Artificial Sequence
  Description of Artificial Sequence: Synthetic oligonucleotide
agaagcugaugucacaagu

SEQ ID NO: 2119211 - RNA, 19 nt, Artificial Sequence
  Description of Artificial Sequence: Synthetic oligonucleotide
aacccuauuucaggcagcg

SEQ ID NO: 2119212 - RNA, 19 nt, Artificial Sequence
  Description of Artificial Sequence: Synthetic oligonucleotide
cagauaaccagcuugaagu

SEQ ID NO: 2119213 - RNA, 19 nt, Artificial Sequence
  Description of Artificial Sequence: Synthetic oligonucleotide
ugucccaccuuaaaacuga

SEQ ID NO: 2119214 - RNA, 19 nt, Artificial Sequence
  Description of Artificial Sequence: Synthetic oligonucleotide
uguucaaacagccgccggu

SEQ ID NO: 2119215 - RNA, 19 nt, Artificial Sequence
  Description of Artificial Sequence: Synthetic oligonucleotide
uuaauagccuggugggacc

SEQ ID NO: 2119216 - RNA, 19 nt, Artificial Sequence
  Description of Artificial Sequence: Synthetic oligonucleotide
gauggguauuugcuaaccc

SEQ ID NO: 2119217 - RNA, 19 nt, Artificial Sequence
  Description of Artificial Sequence: Synthetic oligonucleotide
aucguaaggacuggcuucc

SEQ ID NO: 2119218 - RNA, 19 nt, Artificial Sequence
  Description of Artificial Sequence: Synthetic oligonucleotide
ugcuaacccuauuucaggc

SEQ ID NO: 2119219 - RNA, 19 nt, Artificial Sequence
  Description of Artificial Sequence: Synthetic oligonucleotide
accgaccauaaucacgugg

SEQ ID NO: 2119220 - RNA, 19 nt, Artificial Sequence
  Description of Artificial Sequence: Synthetic oligonucleotide
uucccacucuuguagaagc

SEQ ID NO: 2119221 - RNA, 19 nt, Artificial Sequence
  Description of Artificial Sequence: Synthetic oligonucleotide
uuauggaguuuaucguaag

SEQ ID NO: 2119222 - RNA, 19 nt, Artificial Sequence
  Description of Artificial Sequence: Synthetic oligonucleotide
uuaucguaaggacuggcuu

SEQ ID NO: 2119223 - RNA, 19 nt, Artificial Sequence
  Description of Artificial Sequence: Synthetic oligonucleotide
auguuagggugauaaacca

SEQ ID NO: 2119224 - RNA, 19 nt, Artificial Sequence
  Description of Artificial Sequence: Synthetic oligonucleotide
agguggacccgauguaacc

SEQ ID NO: 2119225 - RNA, 19 nt, Artificial Sequence
  Description of Artificial Sequence: Synthetic oligonucleotide
ugcacguuuuguucaaaca

SEQ ID NO: 2119226 - RNA, 19 nt, Artificial Sequence
  Description of Artificial Sequence: Synthetic oligonucleotide
auaaccuugucccaccuua

SEQ ID NO: 2119227 - RNA, 19 nt, Artificial Sequence
  Description of Artificial Sequence: Synthetic oligonucleotide
auuugcaggggaugccugg

SEQ ID NO: 2119228 - RNA, 19 nt, Artificial Sequence
  Description of Artificial Sequence: Synthetic oligonucleotide
uugucccaccuuaaaacug

SEQ ID NO: 2119229 - RNA, 19 nt, Artificial Sequence
  Description of Artificial Sequence: Synthetic oligonucleotide
uuguucaaacagccgccgg

SEQ ID NO: 2119230 - RNA, 19 nt, Artificial Sequence
  Description of Artificial Sequence: Synthetic oligonucleotide
uacugcaggccauaaauua

SEQ ID NO: 2119231 - RNA, 19 nt, Artificial Sequence
  Description of Artificial Sequence: Synthetic oligonucleotide
ucgucugggucugagaagc

SEQ ID NO: 2119232 - RNA, 19 nt, Artificial Sequence
  Description of Artificial Sequence: Synthetic oligonucleotide
aaaguagguggacccgaug

SEQ ID NO: 2119233 - RNA, 19 nt, Artificial Sequence
  Description of Artificial Sequence: Synthetic oligonucleotide
gccaauucauuucccaucg

SEQ ID NO: 2119234 - RNA, 19 nt, Artificial Sequence
  Description of Artificial Sequence: Synthetic oligonucleotide
gcacguuuuguucaaacag

SEQ ID NO: 2119235 - RNA, 19 nt, Artificial Sequence
  Description of Artificial Sequence: Synthetic oligonucleotide
agugacccaggcucauugc

SEQ ID NO: 2119236 - RNA, 19 nt, Artificial Sequence
  Description of Artificial Sequence: Synthetic oligonucleotide
ggugauaaaccauugucuc

SEQ ID NO: 2119237 - RNA, 19 nt, Artificial Sequence
  Description of Artificial Sequence: Synthetic oligonucleotide
agagugggguauuggacag

SEQ ID NO: 2119238 - RNA, 19 nt, Artificial Sequence
  Description of Artificial Sequence: Synthetic oligonucleotide
uugagacagacguugcccu

SEQ ID NO: 2119239 - RNA, 19 nt, Artificial Sequence
  Description of Artificial Sequence: Synthetic oligonucleotide
caagagugggguauuggac

SEQ ID NO: 2119240 - RNA, 19 nt, Artificial Sequence
  Description of Artificial Sequence: Synthetic oligonucleotide
ucgaggucaauguuagggu

SEQ ID NO: 2119241 - RNA, 19 nt, Artificial Sequence
  Description of Artificial Sequence: Synthetic oligonucleotide
aacuagggacaggugacag

SEQ ID NO: 2119242 - RNA, 19 nt, Artificial Sequence
  Description of Artificial Sequence: Synthetic oligonucleotide
uucagcgagaacagcuuga

SEQ ID NO: 2119243 - RNA, 19 nt, Artificial Sequence
  Description of Artificial Sequence: Synthetic oligonucleotide
acagcuugaucauccuguc

SEQ ID NO: 2119244 - RNA, 19 nt, Artificial Sequence
  Description of Artificial Sequence: Synthetic oligonucleotide
gauaaccagcuugaaguug

SEQ ID NO: 2119245 - RNA, 19 nt, Artificial Sequence
  Description of Artificial Sequence: Synthetic oligonucleotide
uguuagggugauaaaccau

SEQ ID NO: 2119246 - RNA, 19 nt, Artificial Sequence
  Description of Artificial Sequence: Synthetic oligonucleotide
augucacaagucuugggca

SEQ ID NO: 2119247 - RNA, 19 nt, Artificial Sequence
  Description of Artificial Sequence: Synthetic oligonucleotide
cacauauccuacccgggcc

SEQ ID NO: 2119248 - RNA, 19 nt, Artificial Sequence
  Description of Artificial Sequence: Synthetic oligonucleotide
gacgccuucuugcugcugc

SEQ ID NO: 2119249 - RNA, 19 nt, Artificial Sequence
  Description of Artificial Sequence: Synthetic oligonucleotide
ugagaagcugaugucacaa

SEQ ID NO: 2119250 - RNA, 19 nt, Artificial Sequence
  Description of Artificial Sequence: Synthetic oligonucleotide
auaaauauuugcaggggau

SEQ ID NO: 2119251 - RNA, 19 nt, Artificial Sequence
  Description of Artificial Sequence: Synthetic oligonucleotide
uguccuucuggauccggag

SEQ ID NO: 2119252 - RNA, 19 nt, Artificial Sequence
  Description of Artificial Sequence: Synthetic oligonucleotide
guaaggccaaggcaggggc

SEQ ID NO: 2119253 - RNA, 19 nt, Artificial Sequence
  Description of Artificial Sequence: Synthetic oligonucleotide
aaucacguggugguuaaaa

SEQ ID NO: 2119254 - RNA, 19 nt, Artificial Sequence
  Description of Artificial Sequence: Synthetic oligonucleotide
auaaccagcuugaaguuga

SEQ ID NO: 2119255 - RNA, 19 nt, Artificial Sequence
  Description of Artificial Sequence: Synthetic oligonucleotide
aacuucccacucuuguaga

SEQ ID NO: 2119256 - RNA, 19 nt, Artificial Sequence
  Description of Artificial Sequence: Synthetic oligonucleotide
uaaccaccucucauggagc

SEQ ID NO: 2119257 - RNA, 19 nt, Artificial Sequence
  Description of Artificial Sequence: Synthetic oligonucleotide
uggauaaccuugucccacc

SEQ ID NO: 2119258 - RNA, 19 nt, Artificial Sequence
  Description of Artificial Sequence: Synthetic oligonucleotide
uagggugauaaaccauugu

SEQ ID NO: 2119259 - RNA, 19 nt, Artificial Sequence
  Description of Artificial Sequence: Synthetic oligonucleotide
gagaagcugaugucacaag

SEQ ID NO: 2119260 - RNA, 19 nt, Artificial Sequence
  Description of Artificial Sequence: Synthetic oligonucleotide
aggacuggcuuccaguccu

SEQ ID NO: 2119261 - RNA, 19 nt, Artificial Sequence
  Description of Artificial Sequence: Synthetic oligonucleotide
gagacagacguugcccucg

SEQ ID NO: 2119262 - RNA, 19 nt, Artificial Sequence
  Description of Artificial Sequence: Synthetic oligonucleotide
caggcagcgcucaaaguag

SEQ ID NO: 2119263 - RNA, 19 nt, Artificial Sequence
  Description of Artificial Sequence: Synthetic oligonucleotide
ucaaaguagguggacccga

SEQ ID NO: 2119264 - RNA, 19 nt, Artificial Sequence
  Description of Artificial Sequence: Synthetic oligonucleotide
ucaguaacauuccccuuua

SEQ ID NO: 2119265 - RNA, 19 nt, Artificial Sequence
  Description of Artificial Sequence: Synthetic oligonucleotide
cugcaggccauaaauuaug

SEQ ID NO: 2119266 - RNA, 19 nt, Artificial Sequence
  Description of Artificial Sequence: Synthetic oligonucleotide
gaagcugaugucacaaguc

SEQ ID NO: 2119267 - RNA, 19 nt, Artificial Sequence
  Description of Artificial Sequence: Synthetic oligonucleotide
aaauaacuagggacaggug

SEQ ID NO: 2119268 - RNA, 19 nt, Artificial Sequence
  Description of Artificial Sequence: Synthetic oligonucleotide
uucaaacagccgccgguug

SEQ ID NO: 2119269 - RNA, 19 nt, Artificial Sequence
  Description of Artificial Sequence: Synthetic oligonucleotide
agcucguuaauguccuucu

SEQ ID NO: 2119270 - RNA, 19 nt, Artificial Sequence
  Description of Artificial Sequence: Synthetic oligonucleotide
aggccauaaauuauggagu

SEQ ID NO: 2119271 - RNA, 19 nt, Artificial Sequence
  Description of Artificial Sequence: Synthetic oligonucleotide
auaaucacguggugguuaa

SEQ ID NO: 2119272 - RNA, 19 nt, Artificial Sequence
  Description of Artificial Sequence: Synthetic oligonucleotide
uucaguggguccucggggu

SEQ ID NO: 2119273 - RNA, 19 nt, Artificial Sequence
  Description of Artificial Sequence: Synthetic oligonucleotide
auagccuggugggaccucc

SEQ ID NO: 2119274 - RNA, 19 nt, Artificial Sequence
  Description of Artificial Sequence: Synthetic oligonucleotide
agcaccgaccauaaucacg

SEQ ID NO: 2119275 - RNA, 19 nt, Artificial Sequence
  Description of Artificial Sequence: Synthetic oligonucleotide
gugauaaaccauugucuca

SEQ ID NO: 2119276 - RNA, 19 nt, Artificial Sequence
  Description of Artificial Sequence: Synthetic oligonucleotide
agggauggguauuugcuaa

SEQ ID NO: 2119277 - RNA, 19 nt, Artificial Sequence
  Description of Artificial Sequence: Synthetic oligonucleotide
acaggugacagggaggaga

SEQ ID NO: 2119278 - RNA, 19 nt, Artificial Sequence
  Description of Artificial Sequence: Synthetic oligonucleotide
ggucauguggauaaccuug

SEQ ID NO: 2119279 - RNA, 19 nt, Artificial Sequence
  Description of Artificial Sequence: Synthetic oligonucleotide
ggaccagugacccaggcuc

SEQ ID NO: 2119280 - RNA, 19 nt, Artificial Sequence
  Description of Artificial Sequence: Synthetic oligonucleotide
auuauggaguuuaucguaa

SEQ ID NO: 2119281 - RNA, 19 nt, Artificial Sequence
  Description of Artificial Sequence: Synthetic oligonucleotide
auauuugcaggggaugccu

SEQ ID NO: 2119282 - RNA, 19 nt, Artificial Sequence
  Description of Artificial Sequence: Synthetic oligonucleotide
agaagcccucaucaggaca

SEQ ID NO: 2119283 - RNA, 19 nt, Artificial Sequence
  Description of Artificial Sequence: Synthetic oligonucleotide
cuugaucauccugucgccg

SEQ ID NO: 2119284 - RNA, 19 nt, Artificial Sequence
  Description of Artificial Sequence: Synthetic oligonucleotide
ucggcggccuccuuguuca

SEQ ID NO: 2119285 - RNA, 19 nt, Artificial Sequence
  Description of Artificial Sequence: Synthetic oligonucleotide
ucgggguugggcuccaaga

SEQ ID NO: 2119286 - RNA, 19 nt, Artificial Sequence
  Description of Artificial Sequence: Synthetic oligonucleotide
uugcccucgaggucaaugu

SEQ ID NO: 2119287 - RNA, 19 nt, Artificial Sequence
  Description of Artificial Sequence: Synthetic oligonucleotide
ggagagguaaggccaaggc

SEQ ID NO: 2119288 - RNA, 19 nt, Artificial Sequence
  Description of Artificial Sequence: Synthetic oligonucleotide
cucaaaguagguggacccg

SEQ ID NO: 2119289 - RNA, 19 nt, Artificial Sequence
  Description of Artificial Sequence: Synthetic oligonucleotide
caccuuaaaacugaacaca

SEQ ID NO: 2119290 - RNA, 19 nt, Artificial Sequence
  Description of Artificial Sequence: Synthetic oligonucleotide
ggcagcaccgaccauaauc

SEQ ID NO: 2119291 - RNA, 19 nt, Artificial Sequence
  Description of Artificial Sequence: Synthetic oligonucleotide
acccgauguaaccaccucu

SEQ ID NO: 2119292 - RNA, 19 nt, Artificial Sequence
  Description of Artificial Sequence: Synthetic oligonucleotide
uagguggacccgauguaac

SEQ ID NO: 2119293 - RNA, 19 nt, Artificial Sequence
  Description of Artificial Sequence: Synthetic oligonucleotide
cccaccuuaaaacugaaca

SEQ ID NO: 2119294 - RNA, 19 nt, Artificial Sequence
  Description of Artificial Sequence: Synthetic oligonucleotide
gacguugcccucgagguca

SEQ ID NO: 2119295 - RNA, 19 nt, Artificial Sequence
  Description of Artificial Sequence: Synthetic oligonucleotide
ucccacucuuguagaagcc

SEQ ID NO: 2119296 - RNA, 19 nt, Artificial Sequence
  Description of Artificial Sequence: Synthetic oligonucleotide
accccacauauccuacccg

SEQ ID NO: 2119297 - RNA, 19 nt, Artificial Sequence
  Description of Artificial Sequence: Synthetic oligonucleotide
cuucagcgagaacagcuug

SEQ ID NO: 2119298 - RNA, 19 nt, Artificial Sequence
  Description of Artificial Sequence: Synthetic oligonucleotide
uguaaccaccucucaugga

SEQ ID NO: 2119299 - RNA, 19 nt, Artificial Sequence
  Description of Artificial Sequence: Synthetic oligonucleotide
gucaagagugggguauugg

SEQ ID NO: 2119300 - RNA, 19 nt, Artificial Sequence
  Description of Artificial Sequence: Synthetic oligonucleotide
uggugggaccuccaguggu

SEQ ID NO: 2119301 - RNA, 19 nt, Artificial Sequence
  Description of Artificial Sequence: Synthetic oligonucleotide
gugacccaggcucauugcc

SEQ ID NO: 2119302 - RNA, 19 nt, Artificial Sequence
  Description of Artificial Sequence: Synthetic oligonucleotide
accuugucccaccuuaaaa

SEQ ID NO: 2119303 - RNA, 19 nt, Artificial Sequence
  Description of Artificial Sequence: Synthetic oligonucleotide
uccaguggugguggggugg

SEQ ID NO: 2119304 - RNA, 19 nt, Artificial Sequence
  Description of Artificial Sequence: Synthetic oligonucleotide
ccccaauaaauauuugcag

SEQ ID NO: 2119305 - RNA, 19 nt, Artificial Sequence
  Description of Artificial Sequence: Synthetic oligonucleotide
cugcacguuuuguucaaac

SEQ ID NO: 2119306 - RNA, 19 nt, Artificial Sequence
  Description of Artificial Sequence: Synthetic oligonucleotide
aaccauugucucacacuuc

SEQ ID NO: 2119307 - RNA, 19 nt, Artificial Sequence
  Description of Artificial Sequence: Synthetic oligonucleotide
aagucuugggcagguucag

SEQ ID NO: 2119308 - RNA, 19 nt, Artificial Sequence
  Description of Artificial Sequence: Synthetic oligonucleotide
gguauuggacagcacccag

SEQ ID NO: 2119309 - RNA, 19 nt, Artificial Sequence
  Description of Artificial Sequence: Synthetic oligonucleotide
agugggguauuggacagca

SEQ ID NO: 2119310 - RNA, 19 nt, Artificial Sequence
  Description of Artificial Sequence: Synthetic oligonucleotide
gauaaaccauugucucaca

SEQ ID NO: 2119311 - RNA, 19 nt, Artificial Sequence
  Description of Artificial Sequence: Synthetic oligonucleotide
aaccuugucccaccuuaaa

SEQ ID NO: 2119312 - RNA, 19 nt, Artificial Sequence
  Description of Artificial Sequence: Synthetic oligonucleotide
ccaccuuaaaacugaacac

SEQ ID NO: 2119313 - RNA, 19 nt, Artificial Sequence
  Description of Artificial Sequence: Synthetic oligonucleotide
acagucaagagugggguau

SEQ ID NO: 2119314 - RNA, 19 nt, Artificial Sequence
  Description of Artificial Sequence: Synthetic oligonucleotide
accuuaaaacugaacacaa

SEQ ID NO: 2119315 - RNA, 19 nt, Artificial Sequence
  Description of Artificial Sequence: Synthetic oligonucleotide
uggacccgauguaaccacc

SEQ ID NO: 2119316 - RNA, 19 nt, Artificial Sequence
  Description of Artificial Sequence: Synthetic oligonucleotide
uggauccggagcugcgccg

SEQ ID NO: 2119317 - RNA, 19 nt, Artificial Sequence
  Description of Artificial Sequence: Synthetic oligonucleotide
ccaagaagagauacugcag

SEQ ID NO: 2119318 - RNA, 19 nt, Artificial Sequence
  Description of Artificial Sequence: Synthetic oligonucleotide
agacguugcccucgagguc

SEQ ID NO: 2119319 - RNA, 19 nt, Artificial Sequence
  Description of Artificial Sequence: Synthetic oligonucleotide
aggagagguaaggccaagg

SEQ ID NO: 2119320 - RNA, 19 nt, Artificial Sequence
  Description of Artificial Sequence: Synthetic oligonucleotide
guauuggacagcacccagc

SEQ ID NO: 2119321 - RNA, 19 nt, Artificial Sequence
  Description of Artificial Sequence: Synthetic oligonucleotide
cagugacccaggcucauug

SEQ ID NO: 2119322 - RNA, 19 nt, Artificial Sequence
  Description of Artificial Sequence: Synthetic oligonucleotide
uaaccuugucccaccuuaa

SEQ ID NO: 2119323 - RNA, 19 nt, Artificial Sequence
  Description of Artificial Sequence: Synthetic oligonucleotide
uaacuagggacaggugaca

SEQ ID NO: 2119324 - RNA, 19 nt, Artificial Sequence
  Description of Artificial Sequence: Synthetic oligonucleotide
acgccuucuugcugcugcc

SEQ ID NO: 2119325 - RNA, 19 nt, Artificial Sequence
  Description of Artificial Sequence: Synthetic oligonucleotide
cugccugccgcgcugcucc

SEQ ID NO: 2119326 - RNA, 19 nt, Artificial Sequence
  Description of Artificial Sequence: Synthetic oligonucleotide
agucuugggcagguucagc

SEQ ID NO: 2119327 - RNA, 19 nt, Artificial Sequence
  Description of Artificial Sequence: Synthetic oligonucleotide
uggacagcacccagcggga

SEQ ID NO: 2119328 - RNA, 19 nt, Artificial Sequence
  Description of Artificial Sequence: Synthetic oligonucleotide
gcugaugucacaagucuug

SEQ ID NO: 2119329 - RNA, 19 nt, Artificial Sequence
  Description of Artificial Sequence: Synthetic oligonucleotide
guauuugcuaacccuauuu

SEQ ID NO: 2119330 - RNA, 19 nt, Artificial Sequence
  Description of Artificial Sequence: Synthetic oligonucleotide
aaacagccgccgguuguuc

SEQ ID NO: 2119331 - RNA, 19 nt, Artificial Sequence
  Description of Artificial Sequence: Synthetic oligonucleotide
aauagccuggugggaccuc

SEQ ID NO: 2119332 - RNA, 19 nt, Artificial Sequence
  Description of Artificial Sequence: Synthetic oligonucleotide
guggauaaccuugucccac

SEQ ID NO: 2119333 - RNA, 19 nt, Artificial Sequence
  Description of Artificial Sequence: Synthetic oligonucleotide
gucacaagucuugggcagg

SEQ ID NO: 2119334 - RNA, 19 nt, Artificial Sequence
  Description of Artificial Sequence: Synthetic oligonucleotide
uggcuuccaguccucucug

SEQ ID NO: 2119335 - RNA, 19 nt, Artificial Sequence
  Description of Artificial Sequence: Synthetic oligonucleotide
caauucauuucccaucgcu

SEQ ID NO: 2119336 - RNA, 19 nt, Artificial Sequence
  Description of Artificial Sequence: Synthetic oligonucleotide
gucgucugggucugagaag

SEQ ID NO: 2119337 - RNA, 19 nt, Artificial Sequence
  Description of Artificial Sequence: Synthetic oligonucleotide
ucccaccuuaaaacugaac

SEQ ID NO: 2119338 - RNA, 19 nt, Artificial Sequence
  Description of Artificial Sequence: Synthetic oligonucleotide
gacccaggcucauugccca

SEQ ID NO: 2119339 - RNA, 19 nt, Artificial Sequence
  Description of Artificial Sequence: Synthetic oligonucleotide
aguagguggacccgaugua

SEQ ID NO: 2119340 - RNA, 19 nt, Artificial Sequence
  Description of Artificial Sequence: Synthetic oligonucleotide
ccccacauauccuacccgg

SEQ ID NO: 2119341 - RNA, 19 nt, Artificial Sequence
  Description of Artificial Sequence: Synthetic oligonucleotide
uaauguccuucuggauccg

SEQ ID NO: 2119342 - RNA, 19 nt, Artificial Sequence
  Description of Artificial Sequence: Synthetic oligonucleotide
uaauagccuggugggaccu

SEQ ID NO: 2119343 - RNA, 19 nt, Artificial Sequence
  Description of Artificial Sequence: Synthetic oligonucleotide
cuugucccaccuuaaaacu

SEQ ID NO: 2119344 - RNA, 19 nt, Artificial Sequence
  Description of Artificial Sequence: Synthetic oligonucleotide
agauacugcaggccauaaa

SEQ ID NO: 2119345 - RNA, 19 nt, Artificial Sequence
  Description of Artificial Sequence: Synthetic oligonucleotide
uggagcgcugcacguuuug

SEQ ID NO: 2119346 - RNA, 19 nt, Artificial Sequence
  Description of Artificial Sequence: Synthetic oligonucleotide
ugccugggaccagugaccc

SEQ ID NO: 2119347 - RNA, 19 nt, Artificial Sequence
  Description of Artificial Sequence: Synthetic oligonucleotide
uucccaucgcugagcaggu

SEQ ID NO: 2119348 - RNA, 19 nt, Artificial Sequence
  Description of Artificial Sequence: Synthetic oligonucleotide
auccugucgccgccgccgc

SEQ ID NO: 2119349 - RNA, 19 nt, Artificial Sequence
  Description of Artificial Sequence: Synthetic oligonucleotide
gguaaggccaaggcagggg

SEQ ID NO: 2119350 - RNA, 19 nt, Artificial Sequence
  Description of Artificial Sequence: Synthetic oligonucleotide
aagagauacugcaggccau

SEQ ID NO: 2119351 - RNA, 19 nt, Artificial Sequence
  Description of Artificial Sequence: Synthetic oligonucleotide
uucaggcagcgcucaaagu

SEQ ID NO: 2119352 - RNA, 19 nt, Artificial Sequence
  Description of Artificial Sequence: Synthetic oligonucleotide
gaggaggucgucugggucu

SEQ ID NO: 2119353 - RNA, 19 nt, Artificial Sequence
  Description of Artificial Sequence: Synthetic oligonucleotide
acucuuguagaagcccuca

SEQ ID NO: 2119354 - RNA, 19 nt, Artificial Sequence
  Description of Artificial Sequence: Synthetic oligonucleotide
uauuucaggcagcgcucaa

SEQ ID NO: 2119355 - RNA, 19 nt, Artificial Sequence
  Description of Artificial Sequence: Synthetic oligonucleotide
acagccgccgguuguucug

SEQ ID NO: 2119356 - RNA, 19 nt, Artificial Sequence
  Description of Artificial Sequence: Synthetic oligonucleotide
gguucagcucguuaauguc

SEQ ID NO: 2119357 - RNA, 19 nt, Artificial Sequence
  Description of Artificial Sequence: Synthetic oligonucleotide
ugggaccagugacccaggc

SEQ ID NO: 2119358 - RNA, 19 nt, Artificial Sequence
  Description of Artificial Sequence: Synthetic oligonucleotide
ggccaauucauuucccauc

SEQ ID NO: 2119359 - RNA, 19 nt, Artificial Sequence
  Description of Artificial Sequence: Synthetic oligonucleotide
guggacccgauguaaccac

SEQ ID NO: 2119360 - RNA, 19 nt, Artificial Sequence
  Description of Artificial Sequence: Synthetic oligonucleotide
cuggugggaccuccagugg

SEQ ID NO: 2119361 - RNA, 19 nt, Artificial Sequence
  Description of Artificial Sequence: Synthetic oligonucleotide
gggguauuggacagcaccc

SEQ ID NO: 2119362 - RNA, 19 nt, Artificial Sequence
  Description of Artificial Sequence: Synthetic oligonucleotide
cccaucgcugagcaggucg

SEQ ID NO: 2119363 - RNA, 19 nt, Artificial Sequence
  Description of Artificial Sequence: Synthetic oligonucleotide
gucaguaacauuccccuuu

SEQ ID NO: 2119364 - RNA, 19 nt, Artificial Sequence
  Description of Artificial Sequence: Synthetic oligonucleotide
cacucuuguagaagcccuc

SEQ ID NO: 2119365 - RNA, 19 nt, Artificial Sequence
  Description of Artificial Sequence: Synthetic oligonucleotide
ugucaguaacauuccccuu

SEQ ID NO: 2119366 - RNA, 19 nt, Artificial Sequence
  Description of Artificial Sequence: Synthetic oligonucleotide
aaggcagcaccgaccauaa

SEQ ID NO: 2119367 - RNA, 19 nt, Artificial Sequence
  Description of Artificial Sequence: Synthetic oligonucleotide
caggccaauucauuuccca

SEQ ID NO: 2119368 - RNA, 19 nt, Artificial Sequence
  Description of Artificial Sequence: Synthetic oligonucleotide
agcuugaaguugaggaggu

SEQ ID NO: 2119369 - RNA, 19 nt, Artificial Sequence
  Description of Artificial Sequence: Synthetic oligonucleotide
gaccucggcggccuccuug

SEQ ID NO: 2119370 - RNA, 19 nt, Artificial Sequence
  Description of Artificial Sequence: Synthetic oligonucleotide
caggggaugccugggcugg

SEQ ID NO: 2119371 - RNA, 19 nt, Artificial Sequence
  Description of Artificial Sequence: Synthetic oligonucleotide
guuagggugauaaaccauu

SEQ ID NO: 2119372 - RNA, 19 nt, Artificial Sequence
  Description of Artificial Sequence: Synthetic oligonucleotide
agucaagagugggguauug

SEQ ID NO: 2119373 - RNA, 19 nt, Artificial Sequence
  Description of Artificial Sequence: Synthetic oligonucleotide
ggauggguauuugcuaacc

SEQ ID NO: 2119374 - RNA, 19 nt, Artificial Sequence
  Description of Artificial Sequence: Synthetic oligonucleotide
ucauccugucgccgccgcc

SEQ ID NO: 2119375 - RNA, 19 nt, Artificial Sequence
  Description of Artificial Sequence: Synthetic oligonucleotide
ugcccacuuaccccacagu

SEQ ID NO: 2119376 - RNA, 19 nt, Artificial Sequence
  Description of Artificial Sequence: Synthetic oligonucleotide
ggucgucugggucugagaa

SEQ ID NO: 2119377 - RNA, 19 nt, Artificial Sequence
  Description of Artificial Sequence: Synthetic oligonucleotide
cguuuuguucaaacagccg

SEQ ID NO: 2119378 - RNA, 19 nt, Artificial Sequence
  Description of Artificial Sequence: Synthetic oligonucleotide
cccucgaggucaauguuag

SEQ ID NO: 2119379 - RNA, 19 nt, Artificial Sequence
  Description of Artificial Sequence: Synthetic oligonucleotide
ccacauauccuacccgggc

SEQ ID NO: 2119380 - RNA, 19 nt, Artificial Sequence
  Description of Artificial Sequence: Synthetic oligonucleotide
cauauccuacccgggcccc

SEQ ID NO: 2119381 - RNA, 19 nt, Artificial Sequence
  Description of Artificial Sequence: Synthetic oligonucleotide
cagacguugcccucgaggu

SEQ ID NO: 2119382 - RNA, 19 nt, Artificial Sequence
  Description of Artificial Sequence: Synthetic oligonucleotide
cuuuaauagccugguggga

SEQ ID NO: 2119383 - RNA, 19 nt, Artificial Sequence
  Description of Artificial Sequence: Synthetic oligonucleotide
acccuauuucaggcagcgc

SEQ ID NO: 2119384 - RNA, 19 nt, Artificial Sequence
  Description of Artificial Sequence: Synthetic oligonucleotide
cugcccuuggugccgccgg

SEQ ID NO: 2119385 - RNA, 19 nt, Artificial Sequence
  Description of Artificial Sequence: Synthetic oligonucleotide
cucucauggagcgcugcac

SEQ ID NO: 2119386 - RNA, 19 nt, Artificial Sequence
  Description of Artificial Sequence: Synthetic oligonucleotide
ugggcuccaagaagagaua

SEQ ID NO: 2119387 - RNA, 19 nt, Artificial Sequence
  Description of Artificial Sequence: Synthetic oligonucleotide
uagggacaggugacaggga

SEQ ID NO: 2119388 - RNA, 19 nt, Artificial Sequence
  Description of Artificial Sequence: Synthetic oligonucleotide
gucucacacuucaccuugg

SEQ ID NO: 2119389 - RNA, 19 nt, Artificial Sequence
  Description of Artificial Sequence: Synthetic oligonucleotide
guagguggacccgauguaa

SEQ ID NO: 2119390 - RNA, 19 nt, Artificial Sequence
  Description of Artificial Sequence: Synthetic oligonucleotide
cagcucguuaauguccuuc

SEQ ID NO: 2119391 - RNA, 19 nt, Artificial Sequence
  Description of Artificial Sequence: Synthetic oligonucleotide
gacccgauguaaccaccuc

SEQ ID NO: 2119392 - RNA, 19 nt, Artificial Sequence
  Description of Artificial Sequence: Synthetic oligonucleotide
cugagaagcugaugucaca

SEQ ID NO: 2119393 - RNA, 19 nt, Artificial Sequence
  Description of Artificial Sequence: Synthetic oligonucleotide
cauaaauuauggaguuuau

SEQ ID NO: 2119394 - RNA, 19 nt, Artificial Sequence
  Description of Artificial Sequence: Synthetic oligonucleotide
gcuaacccuauuucaggca

SEQ ID NO: 2119395 - RNA, 19 nt, Artificial Sequence
  Description of Artificial Sequence: Synthetic oligonucleotide
ccgguuguucugcaggacc

SEQ ID NO: 2119396 - RNA, 19 nt, Artificial Sequence
  Description of Artificial Sequence: Synthetic oligonucleotide
gcccacuuaccccacaguc

SEQ ID NO: 2119397 - RNA, 19 nt, Artificial Sequence
  Description of Artificial Sequence: Synthetic oligonucleotide
auugcccacuuaccccaca

SEQ ID NO: 2119398 - RNA, 19 nt, Artificial Sequence
  Description of Artificial Sequence: Synthetic oligonucleotide
agacagacguugcccucga

SEQ ID NO: 2119399 - RNA, 19 nt, Artificial Sequence
  Description of Artificial Sequence: Synthetic oligonucleotide
gcaggucgggaaaaggcag

SEQ ID NO: 2119400 - RNA, 19 nt, Artificial Sequence
  Description of Artificial Sequence: Synthetic oligonucleotide
cuauuucaggcagcgcuca

SEQ ID NO: 2119401 - RNA, 19 nt, Artificial Sequence
  Description of Artificial Sequence: Synthetic oligonucleotide
aggucaauguuagggugau

SEQ ID NO: 2119402 - RNA, 19 nt, Artificial Sequence
  Description of Artificial Sequence: Synthetic oligonucleotide
cugagcaggucgggaaaag

SEQ ID NO: 2119403 - RNA, 19 nt, Artificial Sequence
  Description of Artificial Sequence: Synthetic oligonucleotide
cccgauguaaccaccucuc

SEQ ID NO: 2119404 - RNA, 19 nt, Artificial Sequence
  Description of Artificial Sequence: Synthetic oligonucleotide
gcgcuaaacaggccaauuc

SEQ ID NO: 2119405 - RNA, 19 nt, Artificial Sequence
  Description of Artificial Sequence: Synthetic oligonucleotide
agagauacugcaggccaua

SEQ ID NO: 2119406 - RNA, 19 nt, Artificial Sequence
  Description of Artificial Sequence: Synthetic oligonucleotide
gggugauaaaccauugucu

SEQ ID NO: 2119407 - RNA, 19 nt, Artificial Sequence
  Description of Artificial Sequence: Synthetic oligonucleotide
gacagacguugcccucgag

SEQ ID NO: 2119408 - RNA, 19 nt, Artificial Sequence
  Description of Artificial Sequence: Synthetic oligonucleotide
gccgccgacgccuucuugc

SEQ ID NO: 2119409 - RNA, 19 nt, Artificial Sequence
  Description of Artificial Sequence: Synthetic oligonucleotide
cccacauauccuacccggg

SEQ ID NO: 2119410 - RNA, 19 nt, Artificial Sequence
  Description of Artificial Sequence: Synthetic oligonucleotide
gggacaggugacagggagg

SEQ ID NO: 2119411 - RNA, 19 nt, Artificial Sequence
  Description of Artificial Sequence: Synthetic oligonucleotide
agcgcucaaaguaggugga

SEQ ID NO: 2119412 - RNA, 19 nt, Artificial Sequence
  Description of Artificial Sequence: Synthetic oligonucleotide
ggguggguugccugggacc

SEQ ID NO: 2119413 - RNA, 19 nt, Artificial Sequence
  Description of Artificial Sequence: Synthetic oligonucleotide
ugcccucgaggucaauguu

SEQ ID NO: 2119414 - RNA, 19 nt, Artificial Sequence
  Description of Artificial Sequence: Synthetic oligonucleotide
cugggaccagugacccagg

SEQ ID NO: 2119415 - RNA, 19 nt, Artificial Sequence
  Description of Artificial Sequence: Synthetic oligonucleotide
cgaggucaauguuagggug

SEQ ID NO: 2119416 - RNA, 19 nt, Artificial Sequence
  Description of Artificial Sequence: Synthetic oligonucleotide
uggguugccugggaccagu

SEQ ID NO: 2119417 - RNA, 19 nt, Artificial Sequence
  Description of Artificial Sequence: Synthetic oligonucleotide
aggucgucugggucugaga

SEQ ID NO: 2119418 - RNA, 19 nt, Artificial Sequence
  Description of Artificial Sequence: Synthetic oligonucleotide
cagggauggguauuugcua

SEQ ID NO: 2119419 - RNA, 19 nt, Artificial Sequence
  Description of Artificial Sequence: Synthetic oligonucleotide
cuuggugccgccggccgac

SEQ ID NO: 2119420 - RNA, 19 nt, Artificial Sequence
  Description of Artificial Sequence: Synthetic oligonucleotide
gggauggguauuugcuaac

SEQ ID NO: 2119421 - RNA, 19 nt, Artificial Sequence
  Description of Artificial Sequence: Synthetic oligonucleotide
guugggcuccaagaagaga

SEQ ID NO: 2119422 - RNA, 19 nt, Artificial Sequence
  Description of Artificial Sequence: Synthetic oligonucleotide
cagcaccgaccauaaucac

SEQ ID NO: 2119423 - RNA, 19 nt, Artificial Sequence
  Description of Artificial Sequence: Synthetic oligonucleotide
agcugcgccgccgacgccu

SEQ ID NO: 2119424 - RNA, 19 nt, Artificial Sequence
  Description of Artificial Sequence: Synthetic oligonucleotide
ucauggagcgcugcacguu

SEQ ID NO: 2119425 - RNA, 19 nt, Artificial Sequence
  Description of Artificial Sequence: Synthetic oligonucleotide
gauccggagcugcgccgcc

SEQ ID NO: 2119426 - RNA, 19 nt, Artificial Sequence
  Description of Artificial Sequence: Synthetic oligonucleotide
gguggacccgauguaacca

SEQ ID NO: 2119427 - RNA, 19 nt, Artificial Sequence
  Description of Artificial Sequence: Synthetic oligonucleotide
gagauacugcaggccauaa

SEQ ID NO: 2119428 - RNA, 19 nt, Artificial Sequence
  Description of Artificial Sequence: Synthetic oligonucleotide
uggguccucgggguugggc

SEQ ID NO: 2119429 - RNA, 19 nt, Artificial Sequence
  Description of Artificial Sequence: Synthetic oligonucleotide
gguugggcuccaagaagag

SEQ ID NO: 2119430 - RNA, 19 nt, Artificial Sequence
  Description of Artificial Sequence: Synthetic oligonucleotide
gcucguuaauguccuucug

SEQ ID NO: 2119431 - RNA, 19 nt, Artificial Sequence
  Description of Artificial Sequence: Synthetic oligonucleotide
gucauguggauaaccuugu

SEQ ID NO: 2119432 - RNA, 19 nt, Artificial Sequence
  Description of Artificial Sequence: Synthetic oligonucleotide
gcaggccauaaauuaugga

SEQ ID NO: 2119433 - RNA, 19 nt, Artificial Sequence
  Description of Artificial Sequence: Synthetic oligonucleotide
cagcgagaacagcuugauc

SEQ ID NO: 2119434 - RNA, 19 nt, Artificial Sequence
  Description of Artificial Sequence: Synthetic oligonucleotide
gaccagugacccaggcuca

SEQ ID NO: 2119435 - RNA, 19 nt, Artificial Sequence
  Description of Artificial Sequence: Synthetic oligonucleotide
cccuauuucaggcagcgcu

SEQ ID NO: 2119436 - RNA, 19 nt, Artificial Sequence
  Description of Artificial Sequence: Synthetic oligonucleotide
gauaaccuugucccaccuu
